United States Patent Application Publication US 2006/0003322 A1 - sequence listing, part 4

SEQ ID NO: 102341 - RNA, 19 nt, Human
ccagaaguauagcucuucc

SEQ ID NO: 102342 - RNA, 18 nt, Human
ccagagccgcccucgggc

SEQ ID NO: 102343 - RNA, 24 nt, Human
ccagaggccaguuugucaugggau

SEQ ID NO: 102344 - RNA, 22 nt, Human
ccccgggcucuuccccggcccc

SEQ ID NO: 102345 - RNA, 21 nt, Human
ccgucccgccucagccgcugc

SEQ ID NO: 102346 - RNA, 28 nt, Human
ccgucccgccucagccgcugccccgggc

SEQ ID NO: 102347 - RNA, 20 nt, Human
ccucagccagagccgcccuc

SEQ ID NO: 102348 - RNA, 19 nt, Human
ccucgacucgccucgcgcc

SEQ ID NO: 102349 - RNA, 20 nt, Human
ccugaucugcgcugugaggc

SEQ ID NO: 102350 - RNA, 22 nt, Human
cgccgccgucccgccucagccg

SEQ ID NO: 102351 - RNA, 23 nt, Human
cgccucagccgcugccccgggcu

SEQ ID NO: 102352 - RNA, 20 nt, Human
cggaauaaacaaagaaggcg

SEQ ID NO: 102353 - RNA, 22 nt, Human
cgguaucgagggcaagcagcca

SEQ ID NO: 102354 - RNA, 20 nt, Human
cggugcgaacgccuggagcc

SEQ ID NO: 102355 - RNA, 24 nt, Human
cucgcgccuaccgacggccccaac

SEQ ID NO: 102356 - RNA, 23 nt, Human
cucucgaacauucuucguaauga

SEQ ID NO: 102357 - RNA, 18 nt, Human
cugcuggccgagcggcag

SEQ ID NO: 102358 - RNA, 18 nt, Human
cuggggagcuggcagagg

SEQ ID NO: 102359 - RNA, 25 nt, Human
gcaagugagaggauguuuccacagu

SEQ ID NO: 102360 - RNA, 18 nt, Human
gcagaacccuccccggcc

SEQ ID NO: 102361 - RNA, 19 nt, Human
gcagaacccuccccggccg

SEQ ID NO: 102362 - RNA, 23 nt, Human
gcagaggcgcgucuuaccccugu

SEQ ID NO: 102363 - RNA, 22 nt, Human
gcagcggcccccgccgccgucc

SEQ ID NO: 102364 - RNA, 19 nt, Human
gccuaccgacggccccaac

SEQ ID NO: 102365 - RNA, 22 nt, Human
gccucagccccguucccgccgg

SEQ ID NO: 102366 - RNA, 24 nt, Human
gccuggagccggagucucacgcag

SEQ ID NO: 102367 - RNA, 19 nt, Human
gcgggacgcgccgccgccc

SEQ ID NO: 102368 - RNA, 22 nt, Human
ggaaagagugaaggggugcggc

SEQ ID NO: 102369 - RNA, 24 nt, Human
ggaauaaacaaagaaggcggggaa

SEQ ID NO: 102370 - RNA, 20 nt, Human
ggcaagucagccagcucaga

SEQ ID NO: 102371 - RNA, 21 nt, Human
gggcucuuccccggccccucc

SEQ ID NO: 102372 - RNA, 25 nt, Human
gggcucuuccccggccccuccgccc

SEQ ID NO: 102373 - RNA, 20 nt, Human
ggggagcuuaaauggaagug

SEQ ID NO: 102374 - RNA, 21 nt, Human
ggguccggaauaaacaaagaa

SEQ ID NO: 102375 - RNA, 19 nt, Human
ggugcgaacgccuggagcc

SEQ ID NO: 102376 - RNA, 21 nt, Human
uaaauaagcaaagcaaugagg

SEQ ID NO: 102377 - RNA, 25 nt, Human
uaacaagcuaacuuauaucaaacaa

SEQ ID NO: 102378 - RNA, 23 nt, Human
uaacuccaggccuacuucuccag

SEQ ID NO: 102379 - RNA, 20 nt, Human
uaagcaaagcaaugaggcaa

SEQ ID NO: 102380 - RNA, 18 nt, Human
uaaguuaaaagaaugcaa

SEQ ID NO: 102381 - RNA, 22 nt, Human
uagcucuucccuccacuggucc

SEQ ID NO: 102382 - RNA, 24 nt, Human
uaucaaacaaaaauuugccaucuc

SEQ ID NO: 102383 - RNA, 24 nt, Human
uauucaguuggauuuggauauauu

SEQ ID NO: 102384 - RNA, 20 nt, Human
ucaggaacugaagucuaauc

SEQ ID NO: 102385 - RNA, 26 nt, Human
ucccgccucagccgcugccccgggcu

SEQ ID NO: 102386 - RNA, 22 nt, Human
uccucuaccagguuuuccgcca

SEQ ID NO: 102387 - RNA, 19 nt, Human
ucuacaaacacuugucuga

SEQ ID NO: 102388 - RNA, 21 nt, Human
ucucaauuugguauucaguug

SEQ ID NO: 102389 - RNA, 19 nt, Human
ucuccaaagaccggcggcu

SEQ ID NO: 102390 - RNA, 24 nt, Human
ucugcaacaagucaaaaccggggc

SEQ ID NO: 102391 - RNA, 25 nt, Human
ucuucacgccgccgccgggcccaac

SEQ ID NO: 102392 - RNA, 18 nt, Human
ugaggcuccuaggagggc

SEQ ID NO: 102393 - RNA, 22 nt, Human
ugcaagagcagcuuguggcugg

SEQ ID NO: 102394 - RNA, 21 nt, Human
ugccccgggcucuuccccggc

SEQ ID NO: 102395 - RNA, 23 nt, Human
ugccccgggcucuuccccggccc

SEQ ID NO: 102396 - RNA, 22 nt, Human
ugccuuagcuuuguucuaacuc

SEQ ID NO: 102397 - RNA, 18 nt, Human
ugcggccgaaagcccguc

SEQ ID NO: 102398 - RNA, 19 nt, Human
uggaucagagaacugauac

SEQ ID NO: 102399 - RNA, 22 nt, Human
uggcagaggcgcgucuuacccc

SEQ ID NO: 102400 - RNA, 18 nt, Human
ugggagagagaggcgaua

SEQ ID NO: 102401 - RNA, 24 nt, Human
uucccccauacuguaguaacuccc

SEQ ID NO: 102402 - RNA, 21 nt, Human
uuuaguuugaauuugagaaag

SEQ ID NO: 102403 - RNA, 22 nt, Human
uuucauagguagcuuuauuugg

SEQ ID NO: 102404 - RNA, 18 nt, Human
uuugacagccuucugacu

SEQ ID NO: 102405 - RNA, 24 nt, Human
uuugaucuuuccccuuuaguuuga

SEQ ID NO: 102406 - RNA, 19 nt, Human
uuuggcagaacccuccccg

SEQ ID NO: 102407 - RNA, 19 nt, Human
aaaauuaaaagcagcucca

SEQ ID NO: 102408 - RNA, 21 nt, Human
aagcagcuccaagugcaaaag

SEQ ID NO: 102409 - RNA, 22 nt, Human
aagcaggguucugcaggcgggg

SEQ ID NO: 102410 - RNA, 18 nt, Human
aaggcacacugccaggug

SEQ ID NO: 102411 - RNA, 23 nt, Human
acauaucuccaaaacuucaaccc

SEQ ID NO: 102412 - RNA, 22 nt, Human
agaaacauaucuccaaaacuuc

SEQ ID NO: 102413 - RNA, 19 nt, Human
agcgcggcucugggcuccc

SEQ ID NO: 102414 - RNA, 19 nt, Human
aggaggaggagaaggggcg

SEQ ID NO: 102415 - RNA, 23 nt, Human
aggggcggggagaaaaggaggac

SEQ ID NO: 102416 - RNA, 22 nt, Human
agguaggaggaggagaaggggc

SEQ ID NO: 102417 - RNA, 19 nt, Human
auagagcggccgccgcgcc

SEQ ID NO: 102418 - RNA, 23 nt, Human
caccucgcagccgcgcccuggag

SEQ ID NO: 102419 - RNA, 19 nt, Human
cacuucucccugcccgggc

SEQ ID NO: 102420 - RNA, 24 nt, Human
cagguaggaggaggagaaggggcg

SEQ ID NO: 102421 - RNA, 21 nt, Human
ccaggcgcgagcagagaaggc

SEQ ID NO: 102422 - RNA, 20 nt, Human
ccccgcacacuucucccugc

SEQ ID NO: 102423 - RNA, 18 nt, Human
ccccgccaccucgcagcc

SEQ ID NO: 102424 - RNA, 19 nt, Human
cccgccaccucgcagccgc

SEQ ID NO: 102425 - RNA, 22 nt, Human
cccgccgccgcgcaggccccuc

SEQ ID NO: 102426 - RNA, 24 nt, Human
ccgccgccgcgcaggccccucccg

SEQ ID NO: 102427 - RNA, 22 nt, Human
ccuucuugucaguccuucccuc

SEQ ID NO: 102428 - RNA, 19 nt, Human
cgcccuggagucccgcgga

SEQ ID NO: 102429 - RNA, 22 nt, Human
cgcucgaggccgccugcagcga

SEQ ID NO: 102430 - RNA, 18 nt, Human
cggcucugggcucccgcc

SEQ ID NO: 102431 - RNA, 22 nt, Human
cuccucaagcaccccgaaaccc

SEQ ID NO: 102432 - RNA, 18 nt, Human
cucggagccggcuugucc

SEQ ID NO: 102433 - RNA, 18 nt, Human
gagcagagaaggcggaga

SEQ ID NO: 102434 - RNA, 23 nt, Human
gcagaggcccagguaggaggagg

SEQ ID NO: 102435 - RNA, 18 nt, Human
gccccgccaccucgcagc

SEQ ID NO: 102436 - RNA, 23 nt, Human
gcgagcgcggcuccggcggaggu

SEQ ID NO: 102437 - RNA, 19 nt, Human
gcgcggcucugggcucccg

SEQ ID NO: 102438 - RNA, 19 nt, Human
ggaaggaaguucacaucag

SEQ ID NO: 102439 - RNA, 18 nt, Human
ggcggagacgcggccucc

SEQ ID NO: 102440 - RNA, 18 nt, Human
uaggaggaggagaagggg

SEQ ID NO: 102441 - RNA, 25 nt, Human
uaucuccaaaacuucaaccuauugc

SEQ ID NO: 102442 - RNA, 19 nt, Human
ucccgcggagccgcagcca

SEQ ID NO: 102443 - RNA, 20 nt, Human
uccuucccucucuggaucca

SEQ ID NO: 102444 - RNA, 20 nt, Human
ucgcagccgcgcccuggagu

SEQ ID NO: 102445 - RNA, 22 nt, Human
ucucccugcccgggccucccgc

SEQ ID NO: 102446 - RNA, 28 nt, Human
ucugaauaauuccuucuugucaguccuu

SEQ ID NO: 102447 - RNA, 19 nt, Human
ucugucaguguuuuucuga

SEQ ID NO: 102448 - RNA, 22 nt, Human
ucuugucaguccuucccucucu

SEQ ID NO: 102449 - RNA, 19 nt, Human
ugcaagcaggguucugcag

SEQ ID NO: 102450 - RNA, 21 nt, Human
ugccguggcggccuccucaag

SEQ ID NO: 102451 - RNA, 23 nt, Human
ugcuaaaauuaaaagcagcucca

SEQ ID NO: 102452 - RNA, 25 nt, Human
uuuguuaaauauucacaguaauuuc

SEQ ID NO: 102453 - RNA, 25 nt, Human
uuuuuuaaauccaacuaagcccuuu

SEQ ID NO: 102454 - RNA, 24 nt, Human
aaaaaaaaaaaaaaagacagugag

SEQ ID NO: 102455 - RNA, 23 nt, Human
aaaaaaaaaagacagugaguuga

SEQ ID NO: 102456 - RNA, 24 nt, Human
aaaaaaaaaagacagugaguugaa

SEQ ID NO: 102457 - RNA, 27 nt, Human
aaaacaaacacagacacacacacuccu

SEQ ID NO: 102458 - RNA, 22 nt, Human
aaaagaccagguguacaaaaca

SEQ ID NO: 102459 - RNA, 21 nt, Human
aaacaaacacagacacacaca

SEQ ID NO: 102460 - RNA, 26 nt, Human
aaacaaacacagacacacacacuccu

SEQ ID NO: 102461 - RNA, 26 nt, Human
aaagggcucaguuacaguacauucua

SEQ ID NO: 102462 - RNA, 24 nt, Human
acaaaacaucuaagcugugccucc

SEQ ID NO: 102463 - RNA, 22 nt, Human
acaaacacagacacacacacuc

SEQ ID NO: 102464 - RNA, 21 nt, Human
acaaauaaaaaauacccucca

SEQ ID NO: 102465 - RNA, 19 nt, Human
acacaacacagcagcuaca

SEQ ID NO: 102466 - RNA, 21 nt, Human
acagaaggcaacccuucugca

SEQ ID NO: 102467 - RNA, 21 nt, Human
acagcagcuacauggguguuc

SEQ ID NO: 102468 - RNA, 20 nt, Human
accaagaaaacacuccugac

SEQ ID NO: 102469 - RNA, 22 nt, Human
agaaaagaccagguguacaaaa

SEQ ID NO: 102470 - RNA, 23 nt, Human
agaaacaguucaauugauggggg

SEQ ID NO: 102471 - RNA, 19 nt, Human
agaaaggauucagcagcag

SEQ ID NO: 102472 - RNA, 18 nt, Human
agcagccagcccuggagc

SEQ ID NO: 102473 - RNA, 23 nt, Human
agccagcccuggagcucggcccc

SEQ ID NO: 102474 - RNA, 23 nt, Human
agccccgacccgagagcucccuc

SEQ ID NO: 102475 - RNA, 24 nt, Human
agcugggcuugccuuggagaccug

SEQ ID NO: 102476 - RNA, 22 nt, Human
agguguacaaaacaucuaagcu

SEQ ID NO: 102477 - RNA, 18 nt, Human
agugaagaagucauggug

SEQ ID NO: 102478 - RNA, 24 nt, Human
auaaaaaauacccuccaaaaaaaa

SEQ ID NO: 102479 - RNA, 21 nt, Human
augaaggugaacccaucuuau

SEQ ID NO: 102480 - RNA, 23 nt, Human
caaaaaaaaaaaaaaaagacagu

SEQ ID NO: 102481 - RNA, 24 nt, Human
caaaauagucaaggcucuaaucag

SEQ ID NO: 102482 - RNA, 21 nt, Human
cacaaauucuaaacacauaga

SEQ ID NO: 102483 - RNA, 20 nt, Human
cacaacacagcagcuacaug

SEQ ID NO: 102484 - RNA, 22 nt, Human
caccaagaaaacacuccugacu

SEQ ID NO: 102485 - RNA, 25 nt, Human
cacccagugccgucaccgcccuuuc

SEQ ID NO: 102486 - RNA, 19 nt, Human
cacuccugaccugggcaac

SEQ ID NO: 102487 - RNA, 23 nt, Human
cagcagcaagucuacagcacaaa

SEQ ID NO: 102488 - RNA, 25 nt, Human
cagcagcaagucuacagcacaaaca

SEQ ID NO: 102489 - RNA, 19 nt, Human
cagcagcagcaagucuaca

SEQ ID NO: 102490 - RNA, 22 nt, Human
cagccuucccuagccccgaccc

SEQ ID NO: 102491 - RNA, 22 nt, Human
cagcugggcuugccuuggagac

SEQ ID NO: 102492 - RNA, 22 nt, Human
caguguguuuuuucuccagacu

SEQ ID NO: 102493 - RNA, 22 nt, Human
caucuuauaaagcagagcuuac

SEQ ID NO: 102494 - RNA, 20 nt, Human
ccaagaaaacacuccugacc

SEQ ID NO: 102495 - RNA, 21 nt, Human
ccacggccggccccgccccgc

SEQ ID NO: 102496 - RNA, 20 nt, Human
ccccugcucaguucuguucc

SEQ ID NO: 102497 - RNA, 22 nt, Human
cccuccaaaaaaaaaaaaaaaa

SEQ ID NO: 102498 - RNA, 22 nt, Human
ccgagcggggucagccuucccu

SEQ ID NO: 102499 - RNA, 20 nt, Human
ccuagccccgacccgagagc

SEQ ID NO: 102500 - RNA, 20 nt, Human
ccuccaaaaaaaaaaaaaaa

SEQ ID NO: 102501 - RNA, 21 nt, Human
ccuguucuccuggcccugggu

SEQ ID NO: 102502 - RNA, 18 nt, Human
ccuuagcagcccagcagc

SEQ ID NO: 102503 - RNA, 24 nt, Human
ccuucugcagcuccaagcagggau

SEQ ID NO: 102504 - RNA, 20 nt, Human
cggcucugagcggcucacag

SEQ ID NO: 102505 - RNA, 24 nt, Human
cuagaaaagaccagguguacaaaa

SEQ ID NO: 102506 - RNA, 21 nt, Human
cucacaguucccuuagcagcc

SEQ ID NO: 102507 - RNA, 18 nt, Human
cuccaaaaaaaaaaaaaa

SEQ ID NO: 102508 - RNA, 20 nt, Human
cucugagcggcucacaguuc

SEQ ID NO: 102509 - RNA, 25 nt, Human
cugccccugcucaguucuguuccug

SEQ ID NO: 102510 - RNA, 19 nt, Human
cugugccucccaccacagg

SEQ ID NO: 102511 - RNA, 23 nt, Human
cuguucuccuggcccuggguggc

SEQ ID NO: 102512 - RNA, 28 nt, Human
gaacccacaaauaaaaaauacccuccaa

SEQ ID NO: 102513 - RNA, 21 nt, Human
gaagcccucugcucccugccc

SEQ ID NO: 102514 - RNA, 21 nt, Human
gaccuacagaaggcaacccuu

SEQ ID NO: 102515 - RNA, 23 nt, Human
gaugagaaaguccccagaaagga

SEQ ID NO: 102516 - RNA, 24 nt, Human
gcagcagcaagucuacagcacaaa

SEQ ID NO: 102517 - RNA, 20 nt, Human
gcugugccucccaccacagg

SEQ ID NO: 102518 - RNA, 20 nt, Human
ggacucccacggccggcccc

SEQ ID NO: 102519 - RNA, 18 nt, Human
ggagacauuggagccuag

SEQ ID NO: 102520 - RNA, 21 nt, Human
uaccugguuaguaagccucca

SEQ ID NO: 102521 - RNA, 25 nt, Human
uacuuuuguuuuaaaaaaauccaaa

SEQ ID NO: 102522 - RNA, 23 nt, Human
uagcagcccagcagccagcccug

SEQ ID NO: 102523 - RNA, 24 nt, Human
uagcagcgaagccgccggagcagg

SEQ ID NO: 102524 - RNA, 21 nt, Human
uaguaagccuccauuccuccg

SEQ ID NO: 102525 - RNA, 25 nt, Human
uaguaagccuccauuccuccgaccu

SEQ ID NO: 102526 - RNA, 26 nt, Human
uauauacacaacacagcagcuacaug

SEQ ID NO: 102527 - RNA, 21 nt, Human
ucagccuucccuagccccgac

SEQ ID NO: 102528 - RNA, 21 nt, Human
ucaggcaaagggugcaugaac

SEQ ID NO: 102529 - RNA, 21 nt, Human
uccagacuauuauaaauaauu

SEQ ID NO: 102530 - RNA, 18 nt, Human
ucccacggccggccccgc

SEQ ID NO: 102531 - RNA, 24 nt, Human
ucccuagccccgacccgagagcuc

SEQ ID NO: 102532 - RNA, 20 nt, Human
ucggccccacccagugccgu

SEQ ID NO: 102533 - RNA, 24 nt, Human
ucugugucugacugagcccagaaa

SEQ ID NO: 102534 - RNA, 24 nt, Human
ugaaaacacacaguuagguggacc

SEQ ID NO: 102535 - RNA, 22 nt, Human
ugaaauauuacaguguguuuuu

SEQ ID NO: 102536 - RNA, 22 nt, Human
ugacugagcccagaaacaguuc

SEQ ID NO: 102537 - RNA, 23 nt, Human
ugagaaaguccccagaaaggauu

SEQ ID NO: 102538 - RNA, 23 nt, Human
ugaugggggcuggaaccaccaag

SEQ ID NO: 102539 - RNA, 24 nt, Human
ugccgucaccgcccuuucacccgg

SEQ ID NO: 102540 - RNA, 21 nt, Human
ugcgaugaaggugaacccauc

SEQ ID NO: 102541 - RNA, 23 nt, Human
uggaaccaccaagaaaacacucc

SEQ ID NO: 102542 - RNA, 21 nt, Human
uggagcucggccccacccagg

SEQ ID NO: 102543 - RNA, 23 nt, Human
ugggaaagggcucaguuacagua

SEQ ID NO: 102544 - RNA, 21 nt, Human
uggugcaauugaaaucacugu

SEQ ID NO: 102545 - RNA, 21 nt, Human
ugguguggaugcauagaaggc

SEQ ID NO: 102546 - RNA, 23 nt, Human
ugguguggaugcauagaaggcuc

SEQ ID NO: 102547 - RNA, 21 nt, Human
ugguuuuacaacccgugacuu

SEQ ID NO: 102548 - RNA, 18 nt, Human
ugucccugaaaacacacu

SEQ ID NO: 102549 - RNA, 20 nt, Human
uuagugaagaagucauggug

SEQ ID NO: 102550 - RNA, 18 nt, Human
uucaaaauagucaaggcu

SEQ ID NO: 102551 - RNA, 18 nt, Human
uugaacccacaaauaaaa

SEQ ID NO: 102552 - RNA, 18 nt, Human
uuggagaccugccccugc

SEQ ID NO: 102553 - RNA, 19 nt, Human
uuucuagaaaagaccaggu

SEQ ID NO: 102554 - RNA, 23 nt, Human
uuuuuugaacccacaaauaaaaa

SEQ ID NO: 102555 - RNA, 23 nt, Human
acucuuuugggaaggagggaaac

SEQ ID NO: 102556 - RNA, 21 nt, Human
caugcacacacacaacaguug

SEQ ID NO: 102557 - RNA, 24 nt, Human
cccuaugccugggcacuggccuuc

SEQ ID NO: 102558 - RNA, 18 nt, Human
cuuguuugugcccaaggc

SEQ ID NO: 102559 - RNA, 19 nt, Human
ugggaaggagggaaacuga

SEQ ID NO: 102560 - RNA, 25 nt, Human
ugugcccaaggcaugcacacacaca

SEQ ID NO: 102561 - RNA, 25 nt, Human
aagagaagaaaaauuuauucuugaa

SEQ ID NO: 102562 - RNA, 18 nt, Human
acaggccuccagcugcac

SEQ ID NO: 102563 - RNA, 18 nt, Human
accagaccuccugggccc

SEQ ID NO: 102564 - RNA, 18 nt, Human
accugguagggaagacuc

SEQ ID NO: 102565 - RNA, 21 nt, Human
agagcccagugcuaugggcuu

SEQ ID NO: 102566 - RNA, 19 nt, Human
agccacacucccagcaccc

SEQ ID NO: 102567 - RNA, 21 nt, Human
aggagcuggaaggucuuuauc

SEQ ID NO: 102568 - RNA, 21 nt, Human
aggcaggugugaguugaccac

SEQ ID NO: 102569 - RNA, 23 nt, Human
aggcugcagaagaggcaggugug

SEQ ID NO: 102570 - RNA, 23 nt, Human
auggaggaggagguggggccugg

SEQ ID NO: 102571 - RNA, 20 nt, Human
caccaugucccagaagguca

SEQ ID NO: 102572 - RNA, 22 nt, Human
cagaaggucagggcugagacuc

SEQ ID NO: 102573 - RNA, 18 nt, Human
caggagccacacucccag

SEQ ID NO: 102574 - RNA, 22 nt, Human
cagggcugagacucggaccaga

SEQ ID NO: 102575 - RNA, 22 nt, Human
ccacacaggccuccagcugcac

SEQ ID NO: 102576 - RNA, 18 nt, Human
ccagaggucuagaacaca

SEQ ID NO: 102577 - RNA, 19 nt, Human
ccagcacccgaguccccag

SEQ ID NO: 102578 - RNA, 23 nt, Human
ccagcacccgaguccccaggucc

SEQ ID NO: 102579 - RNA, 25 nt, Human
cccacacaggccuccagcugcaccc

SEQ ID NO: 102580 - RNA, 23 nt, Human
cccacaggagccacacucccagc

SEQ ID NO: 102581 - RNA, 18 nt, Human
ccccacacaggccuccag

SEQ ID NO: 102582 - RNA, 25 nt, Human
ccccacacaggccuccagcugcacc

SEQ ID NO: 102583 - RNA, 22 nt, Human
cccucccccaaccauuuggggc

SEQ ID NO: 102584 - RNA, 18 nt, Human
ccgccgcugccggccgcc

SEQ ID NO: 102585 - RNA, 19 nt, Human
ccucccagggccucccucu

SEQ ID NO: 102586 - RNA, 22 nt, Human
cggcgcacaggcugggcauggg

SEQ ID NO: 102587 - RNA, 21 nt, Human
cucccagcacccgagucccca

SEQ ID NO: 102588 - RNA, 23 nt, Human
cucccugggcccugaugggcagc

SEQ ID NO: 102589 - RNA, 23 nt, Human
cuccugggcccacaggagccaca

SEQ ID NO: 102590 - RNA, 19 nt, Human
cucggaccagaccuccugg

SEQ ID NO: 102591 - RNA, 23 nt, Human
cugggcccacaggagccacacuc

SEQ ID NO: 102592 - RNA, 22 nt, Human
cugggggcucccugggcccuga

SEQ ID NO: 102593 - RNA, 25 nt, Human
cugggggcucccugggcccugaugg

SEQ ID NO: 102594 - RNA, 18 nt, Human
cuguaacccaguggagca

SEQ ID NO: 102595 - RNA, 24 nt, Human
gagcagccaucagagcccagugcu

SEQ ID NO: 102596 - RNA, 19 nt, Human
gagcccagugcuaugggcu

SEQ ID NO: 102597 - RNA, 19 nt, Human
gccacacucccagcacccg

SEQ ID NO: 102598 - RNA, 23 nt, Human
gcccacaggagccacacucccag

SEQ ID NO: 102599 - RNA, 19 nt, Human
gccuggcggggguguagaa

SEQ ID NO: 102600 - RNA, 23 nt, Human
gccuugucuaggccccuccccca

SEQ ID NO: 102601 - RNA, 20 nt, Human
ggagcagccaucagagcccu

SEQ ID NO: 102602 - RNA, 22 nt, Human
ggaggaggagguggggccugga

SEQ ID NO: 102603 - RNA, 22 nt, Human
ggcagguagaggugaggcugca

SEQ ID NO: 102604 - RNA, 21 nt, Human
ggcccugaugggcagccuggc

SEQ ID NO: 102605 - RNA, 19 nt, Human
gggaagggcucagugcccu

SEQ ID NO: 102606 - RNA, 19 nt, Human
ggggcagguagaggugagg

SEQ ID NO: 102607 - RNA, 19 nt, Human
guauccagccugggaaggg

SEQ ID NO: 102608 - RNA, 18 nt, Human
guccccacacaggccucc

SEQ ID NO: 102609 - RNA, 18 nt, Human
uauccagccugggaaggg

SEQ ID NO: 102610 - RNA, 18 nt, Human
uccacccuggacucccuu

SEQ ID NO: 102611 - RNA, 19 nt, Human
uccagccugggaagggcuc

SEQ ID NO: 102612 - RNA, 23 nt, Human
ucccagaaggucagggcugagac

SEQ ID NO: 102613 - RNA, 21 nt, Human
ucccagcacccgaguccccag

SEQ ID NO: 102614 - RNA, 18 nt, Human
ucccugggcccugauggg

SEQ ID NO: 102615 - RNA, 23 nt, Human
ucccugggcccugaugggcagcc

SEQ ID NO: 102616 - RNA, 24 nt, Human
ucccugggcccugaugggcagccu

SEQ ID NO: 102617 - RNA, 25 nt, Human
uccugggcccacaggagccacacuc

SEQ ID NO: 102618 - RNA, 21 nt, Human
ucggaccagaccuccugggcc

SEQ ID NO: 102619 - RNA, 19 nt, Human
ucugcccccuucucuccuc

SEQ ID NO: 102620 - RNA, 23 nt, Human
ucuguaacccaguggagcagcca

SEQ ID NO: 102621 - RNA, 23 nt, Human
ugaccacguuccucccuccucag

SEQ ID NO: 102622 - RNA, 23 nt, Human
ugaugggcagccuggcgggggug

SEQ ID NO: 102623 - RNA, 19 nt, Human
ugaugggggcagguagagg

SEQ ID NO: 102624 - RNA, 21 nt, Human
ugcagaagaggcaggugugag

SEQ ID NO: 102625 - RNA, 18 nt, Human
ugggcccugaugggcagc

SEQ ID NO: 102626 - RNA, 22 nt, Human
ugggcccugaugggcagccugg

SEQ ID NO: 102627 - RNA, 19 nt, Human
uggggccuggagccuuguc

SEQ ID NO: 102628 - RNA, 23 nt, Human
ugguccccacacaggccuccagc

SEQ ID NO: 102629 - RNA, 23 nt, Human
uugaaaagagaagaaaaauuuau

SEQ ID NO: 102630 - RNA, 23 nt, Human
uugugcuuaguauccagccuggg

SEQ ID NO: 102631 - RNA, 21 nt, Human
aauugcucugccgcugcagaa

SEQ ID NO: 102632 - RNA, 26 nt, Human
acaggcuggcgugcggagccccaggc

SEQ ID NO: 102633 - RNA, 19 nt, Human
agacccgcacaggcuggcg

SEQ ID NO: 102634 - RNA, 22 nt, Human
aggcuggcgugcggagccccag

SEQ ID NO: 102635 - RNA, 24 nt, Human
augcugccuggggaccgacgcugg

SEQ ID NO: 102636 - RNA, 20 nt, Human
ccgcuggcuccucgcggcuc

SEQ ID NO: 102637 - RNA, 21 nt, Human
ccucccaccuccuucccacua

SEQ ID NO: 102638 - RNA, 22 nt, Human
ccucccucccucccuuucuucc

SEQ ID NO: 102639 - RNA, 20 nt, Human
ccucccuuucuuccuucuuc

SEQ ID NO: 102640 - RNA, 22 nt, Human
ccuccgaggcggucccucccuc

SEQ ID NO: 102641 - RNA, 20 nt, Human
ccucuggccugccuccuccc

SEQ ID NO: 102642 - RNA, 28 nt, Human
ccugccuccucccucccucccuuucuuc

SEQ ID NO: 102643 - RNA, 22 nt, Human
cgaggggacucgaggagcggcg

SEQ ID NO: 102644 - RNA, 23 nt, Human
cggucccucccucuggccugccu

SEQ ID NO: 102645 - RNA, 20 nt, Human
cucccaccuccuucccacua

SEQ ID NO: 102646 - RNA, 24 nt, Human
cuccucccucccucccuuucuucc

SEQ ID NO: 102647 - RNA, 23 nt, Human
cugaggagucuagcagaguccac

SEQ ID NO: 102648 - RNA, 18 nt, Human
cugcgccccagcccgcgg

SEQ ID NO: 102649 - RNA, 25 nt, Human
cuuucuuccuucuuuccucccaccu

SEQ ID NO: 102650 - RNA, 23 nt, Human
gacgcuggaggcugccggggggc

SEQ ID NO: 102651 - RNA, 28 nt, Human
gcacaggcuggcgugcggagccccaggc

SEQ ID NO: 102652 - RNA, 21 nt, Human
gcacgaagggaaaggggcgag

SEQ ID NO: 102653 - RNA, 20 nt, Human
gcagaguccacgcuccucau

SEQ ID NO: 102654 - RNA, 21 nt, Human
gccccaggccggcggcuuccg

SEQ ID NO: 102655 - RNA, 18 nt, Human
gcuggcuccucgcggcuc

SEQ ID NO: 102656 - RNA, 19 nt, Human
ggaagacccgcacaggcug

SEQ ID NO: 102657 - RNA, 18 nt, Human
ggcgugcggagccccagg

SEQ ID NO: 102658 - RNA, 18 nt, Human
gggaaaggggcgagggga

SEQ ID NO: 102659 - RNA, 18 nt, Human
gggcacgaagggaaaggg

SEQ ID NO: 102660 - RNA, 23 nt, Human
gggcacgaagggaaaggggcgag

SEQ ID NO: 102661 - RNA, 22 nt, Human
uccucccaccuccuucccacua

SEQ ID NO: 102662 - RNA, 19 nt, Human
ucuuccuucuuuccuccca

SEQ ID NO: 102663 - RNA, 24 nt, Human
ugcagaggcggggaagacccgcac

SEQ ID NO: 102664 - RNA, 18 nt, Human
ugccuccucccucccucc

SEQ ID NO: 102665 - RNA, 23 nt, Human
aaaggaaaagaaaaucaagcgau

SEQ ID NO: 102666 - RNA, 20 nt, Human
acacuucuuucugccuccag

SEQ ID NO: 102667 - RNA, 24 nt, Human
acauagacacuucuuucugccucc

SEQ ID NO: 102668 - RNA, 19 nt, Human
accuuuguuucaguugcgu

SEQ ID NO: 102669 - RNA, 18 nt, Human
aguagccucaggugagag

SEQ ID NO: 102670 - RNA, 21 nt, Human
auaaaguuuucuuuuguuaac

SEQ ID NO: 102671 - RNA, 21 nt, Human
augugguguaacaaguuuuac

SEQ ID NO: 102672 - RNA, 19 nt, Human
cagcucuucaccagguucu

SEQ ID NO: 102673 - RNA, 23 nt, Human
ccaccaaaaucauuccauaauuc

SEQ ID NO: 102674 - RNA, 21 nt, Human
ccagaauuuuaacuuauuaac

SEQ ID NO: 102675 - RNA, 21 nt, Human
ccagcucuucaccagguucug

SEQ ID NO: 102676 - RNA, 20 nt, Human
ccucuccauacuuacugccu

SEQ ID NO: 102677 - RNA, 20 nt, Human
cuagaacauacacuaaagua

SEQ ID NO: 102678 - RNA, 23 nt, Human
cucauggugcaugacaacuugcu

SEQ ID NO: 102679 - RNA, 22 nt, Human
cuggugggacagcuugggcuuu

SEQ ID NO: 102680 - RNA, 21 nt, Human
cuuacugccuggugggacagc

SEQ ID NO: 102681 - RNA, 23 nt, Human
gguaagaacuagacauuuauaaa

SEQ ID NO: 102682 - RNA, 18 nt, Human
uauaaaggaaaagaaaau

SEQ ID NO: 102683 - RNA, 19 nt, Human
uauaaaggaaaagaaaauc

SEQ ID NO: 102684 - RNA, 22 nt, Human
ucaccaccaauucuagucaugu

SEQ ID NO: 102685 - RNA, 22 nt, Human
ucaguagccucaggugagagua

SEQ ID NO: 102686 - RNA, 21 nt, Human
uccacacauuagaaccuggau

SEQ ID NO: 102687 - RNA, 19 nt, Human
uccauacuuacugccuggu

SEQ ID NO: 102688 - RNA, 24 nt, Human
ucucauggugcaugacaacuugcu

SEQ ID NO: 102689 - RNA, 31 nt, Human
ugcgaaauagcagcuaugccaugugccugaa

SEQ ID NO: 102690 - RNA, 22 nt, Human
uggaacaguugcugugccaccu

SEQ ID NO: 102691 - RNA, 20 nt, Human
uuacugccuggugggacagc

SEQ ID NO: 102692 - RNA, 20 nt, Human
uuacugccuggugggacagc

SEQ ID NO: 102693 - RNA, 19 nt, Human
uuggaacaguugcugugcc

SEQ ID NO: 102694 - RNA, 24 nt, Human
aaauccacagccccaacccucugg

SEQ ID NO: 102695 - RNA, 20 nt, Human
acacuucuuucugccuccag

SEQ ID NO: 102696 - RNA, 24 nt, Human
acauagacacuucuuucugccucc

SEQ ID NO: 102697 - RNA, 19 nt, Human
accuuuguuucaguugcgu

SEQ ID NO: 102698 - RNA, 19 nt, Human
agcuaaauccacagcccca

SEQ ID NO: 102699 - RNA, 18 nt, Human
aguagccucaggugagag

SEQ ID NO: 102700 - RNA, 21 nt, Human
cagaaagcuuucuuccugccu

SEQ ID NO: 102701 - RNA, 19 nt, Human
cagcucuucaccagguucu

SEQ ID NO: 102702 - RNA, 21 nt, Human
ccagcucuucaccagguucug

SEQ ID NO: 102703 - RNA, 20 nt, Human
ccucuccacacuuacugccu

SEQ ID NO: 102704 - RNA, 23 nt, Human
cucauggugcaugacagcuugcu

SEQ ID NO: 102705 - RNA, 22 nt, Human
cuggugggacagcuugggcuuu

SEQ ID NO: 102706 - RNA, 20 nt, Human
guagcuaaauccacagcccc

SEQ ID NO: 102707 - RNA, 25 nt, Human
uaaauccacagccccaacccucugg

SEQ ID NO: 102708 - RNA, 22 nt, Human
ucaguagccucaggugagagua

SEQ ID NO: 102709 - RNA, 24 nt, Human
ucucauggugcaugacagcuugcu

SEQ ID NO: 102710 - RNA, 18 nt, Human
ucuccacacuuacugccu

SEQ ID NO: 102711 - RNA, 22 nt, Human
ucuccacacuuacugccuggug

SEQ ID NO: 102712 - RNA, 31 nt, Human; identical to SEQ ID NO: 102689

SEQ ID NO: 102713 - RNA, 22 nt, Human
uggaacaguugcugugccaccu

SEQ ID NO: 102714 - RNA, 20 nt, Human
uuacugccuggugggacagc

SEQ ID NO: 102715 - RNA, 20 nt, Human
uuacugccuggugggacagc

SEQ ID NO: 102716 - RNA, 19 nt, Human
uuggaacaguugcugugcc

SEQ ID NO: 102717 - RNA, 24 nt, Human
aaccaauaaaacacaauucuguuu

SEQ ID NO: 102718 - RNA, 21 nt, Human
aagugaaccuaaaaauuacac

SEQ ID NO: 102719 - RNA, 19 nt, Human
acagaaaaccaaaacuguc

SEQ ID NO: 102720 - RNA, 18 nt, Human
agaaaaccaaaacugucu

SEQ ID NO: 102721 - RNA, 24 nt, Human
agaaaaccaaaacugucuauaaag

SEQ ID NO: 102722 - RNA, 21 nt, Human
agaaggaagaaaugaggaaaa

SEQ ID NO: 102723 - RNA, 27 nt, Human
agcuaagucuuuugauuuugaguuucc

SEQ ID NO: 102724 - RNA, 19 nt, Human
agcuacgggugagcuuguu

SEQ ID NO: 102725 - RNA, 20 nt, Human
aucaggggaacuggagccgg

SEQ ID NO: 102726 - RNA, 22 nt, Human
auccaaaaccaauaaaacacaa

SEQ ID NO: 102727 - RNA, 18 nt, Human
caaaaccaauaaaacaca

SEQ ID NO: 102728 - RNA, 23 nt, Human
caggauauuguuugaaacccauu

SEQ ID NO: 102729 - RNA, 20 nt, Human
caguacuagccaaagaaaac

SEQ ID NO: 102730 - RNA, 25 nt, Human
caguacuagccaaagaaaacaaaaa

SEQ ID NO: 102731 - RNA, 23 nt, Human
ccaaaaccaauaaaacacaauuc

SEQ ID NO: 102732 - RNA, 23 nt, Human
ccccuuagauucuguguucuaga

SEQ ID NO: 102733 - RNA, 19 nt, Human
cccgagaugagucucuuca

SEQ ID NO: 102734 - RNA, 21 nt, Human
ccugcuuaguuccccgagaug

SEQ ID NO: 102735 - RNA, 24 nt, Human
cuaagucuuuugauuuugaguuuc

SEQ ID NO: 102736 - RNA, 25 nt, Human
cuaagucuuuugauuuugaguuucc

SEQ ID NO: 102737 - RNA, 20 nt, Human
cugcaaacagaaaaccaaaa

SEQ ID NO: 102738 - RNA, 21 nt, Human
gaaaaacuauuuaaaacccac

SEQ ID NO: 102739 - RNA, 19 nt, Human
gagcuucuaagagcagucu

SEQ ID NO: 102740 - RNA, 23 nt, Human
gaguuuuugcauuuaauagugug

SEQ ID NO: 102741 - RNA, 20 nt, Human
gaucccggugucaccagugg

SEQ ID NO: 102742 - RNA, 18 nt, Human
gcucagcccgaucccggu

SEQ ID NO: 102743 - RNA, 21 nt, Human
ggagaaaaagccaacgccuca

SEQ ID NO: 102744 - RNA, 27 nt, Human
ggaucaggggaacuggagccggugaug

SEQ ID NO: 102745 - RNA, 22 nt, Human
uaaaacccacuaaagacuaacu

SEQ ID NO: 102746 - RNA, 26 nt, Human
uacaguacuagccaaagaaaacaaaa

SEQ ID NO: 102747 - RNA, 19 nt, Human
uagaaauagguccucucuc

SEQ ID NO: 102748 - RNA, 23 nt, Human
uagagacagugguuucuucaugu

SEQ ID NO: 102749 - RNA, 24 nt, Human
uagagacagugguuucuucauguu

SEQ ID NO: 102750 - RNA, 24 nt, Human
uagccaaagaaaacaaaaauuaga

SEQ ID NO: 102751 - RNA, 21 nt, Human
uaguuauuuauuuuaaaguua

SEQ ID NO: 102752 - RNA, 20 nt, Human
uauacaguacuagccaaaga

SEQ ID NO: 102753 - RNA, 20 nt, Human
uaucucagcaugaauccuaa

SEQ ID NO: 102754 - RNA, 19 nt, Human
uauucagugauucacuaau

SEQ ID NO: 102755 - RNA, 23 nt, Human
ucuagaaggaagaaaugaggaaa

SEQ ID NO: 102756 - RNA, 19 nt, Human
ucugcaaacagaaaaccaa

SEQ ID NO: 102757 - RNA, 24 nt, Human
ucuucauguuaacuggguaagaac

SEQ ID NO: 102758 - RNA, 22 nt, Human
ugauucacuaauacugcaaaac

SEQ ID NO: 102759 - RNA, 23 nt, Human
ugcaaacagaaaaccaaaacugu

SEQ ID NO: 102760 - RNA, 22 nt, Human
uggacguauuuuaaaaagaagg

SEQ ID NO: 102761 - RNA, 23 nt, Human
uggagaaaaagccaacgccucac

SEQ ID NO: 102762 - RNA, 22 nt, Human
uggggcagggaggcgaggcugg

SEQ ID NO: 102763 - RNA, 21 nt, Human
uucccgaaucugagguaucug

SEQ ID NO: 102764 - RNA, 23 nt, Human
uucuaagugaaccuaaaaauuac

SEQ ID NO: 102765 - RNA, 22 nt, Human
uugaaaggaguuuuugcauuua

SEQ ID NO: 102766 - RNA, 22 nt, Human
uugcauuuaauagugugccaaa

SEQ ID NO: 102767 - RNA, 19 nt, Human
uuuacaccugcguguauau

SEQ ID NO: 102768 - RNA, 22 nt, Human
uuucagaagggucagaaaaacu

SEQ ID NO: 102769 - RNA, 19 nt, Human
aaaaggagaaaaaucccaa

SEQ ID NO: 102770 - RNA, 22 nt, Human
aaaguuguuucuguccccaccc

SEQ ID NO: 102771 - RNA, 22 nt, Human
aagcuauaaccccucccucuca

SEQ ID NO: 102772 - RNA, 24 nt, Human
aaguaugcacaguccgugucaggg

SEQ ID NO: 102773 - RNA, 26 nt, Human
aaguuguuucuguccccaccccucua

SEQ ID NO: 102774 - RNA, 23 nt, Human
acagcacagcauggaugagggaa

SEQ ID NO: 102775 - RNA, 19 nt, Human
acccugaaagagguaccug

SEQ ID NO: 102776 - RNA, 19 nt, Human
acugcagugagcaggacag

SEQ ID NO: 102777 - RNA, 19 nt, Human
acuuucucucucucgcugu

SEQ ID NO: 102778 - RNA, 25 nt, Human
agaaaacccugaaagagguaccuga

SEQ ID NO: 102779 - RNA, 19 nt, Human
aggcuuuggagaaauagga

SEQ ID NO: 102780 - RNA, 18 nt, Human
aggggaagggaggggaag

SEQ ID NO: 102781 - RNA, 18 nt, Human
agggugagagacuugaaa

SEQ ID NO: 102782 - RNA, 22 nt, Human
agugaaugggggcaaacagaaa

SEQ ID NO: 102783 - RNA, 26 nt, Human
auaaaaccuuucucuuagccccaaag

SEQ ID NO: 102784 - RNA, 20 nt, Human
augaucuuagccaggaaaaa

SEQ ID NO: 102785 - RNA, 19 nt, Human
auuguguuuaucagaagcu

SEQ ID NO: 102786 - RNA, 23 nt, Human
caaagagauuccaucuguguaga

SEQ ID NO: 102787 - RNA, 21 nt, Human
caaggggcauuagcaccagug

SEQ ID NO: 102788 - RNA, 21 nt, Human
cccaccccucuacccuagagg

SEQ ID NO: 102789 - RNA, 20 nt, Human
ccccaccccucuacccuaga

SEQ ID NO: 102790 - RNA, 23 nt, Human
ccugaagcuauaaccccucccuc

SEQ ID NO: 102791 - RNA, 21 nt, Human
ccugacaaagugaaugggggc

SEQ ID NO: 102792 - RNA, 18 nt, Human
ccugaguauagagaacuc

SEQ ID NO: 102793 - RNA, 22 nt, Human
cuacagguagacaacccugaca

SEQ ID NO: 102794 - RNA, 19 nt, Human
cuauaaccccucccucuca

SEQ ID NO: 102795 - RNA, 19 nt, Human
cucaaggaccaaauacacc

SEQ ID NO: 102796 - RNA, 21 nt, Human
cucagcacugccuugaacaga

SEQ ID NO: 102797 - RNA, 22 nt, Human
cuccugaagcuauaaccccucc

SEQ ID NO: 102798 - RNA, 23 nt, Human
cugagggauuucggugguuucuu

SEQ ID NO: 102799 - RNA, 25 nt, Human
cuuucuagcuguaaacaaugccacc

SEQ ID NO: 102800 - RNA, 22 nt, Human
gaagaaaaccuuuucuuauuuu

SEQ ID NO: 102801 - RNA, 20 nt, Human
gaaugucucagagaaaagga

SEQ ID NO: 102802 - RNA, 22 nt, Human
gacaacccugacaguggacaaa

SEQ ID NO: 102803 - RNA, 27 nt, Human
gacaggacugggggugggaaggaauga

SEQ ID NO: 102804 - RNA, 18 nt, Human
gacugggggugggaagga

SEQ ID NO: 102805 - RNA, 19 nt, Human
gagagcuugggcuccagga

SEQ ID NO: 102806 - RNA, 26 nt, Human
gauaggacaggacuggggguggagua

SEQ ID NO: 102807 - RNA, 19 nt, Human
gcaagugauuuuuccuagu

SEQ ID NO: 102808 - RNA, 19 nt, Human
gcacugccuugaacagagc

SEQ ID NO: 102809 - RNA, 22 nt, Human
gcagugaccaggcagccuggag

SEQ ID NO: 102810 - RNA, 20 nt, Human
ggcaaacagaaaaugcacag

SEQ ID NO: 102811 - RNA, 20 nt, Human
ggcauuagcaccagugcagc

SEQ ID NO: 102812 - RNA, 19 nt, Human
gggaaaguaugcacagucc

SEQ ID NO: 102813 - RNA, 22 nt, Human
gggaagggaggggaaguucugg

SEQ ID NO: 102814 - RNA, 23 nt, Human
ggggaagggaggggaaguucugg

SEQ ID NO: 102815 - RNA, 25 nt, Human
uaaaaccuuucucuuagccccaaag

SEQ ID NO: 102816 - RNA, 25 nt, Human
uaauucagacaugaucuuagccagg

SEQ ID NO: 102817 - RNA, 22 nt, Human
uagaagacugggugagaaguac

SEQ ID NO: 102818 - RNA, 23 nt, Human
uagaauaaaaccuuucucuuagc

SEQ ID NO: 102819 - RNA, 24 nt, Human
uaggccuaacaugagaucagguaa

SEQ ID NO: 102820 - RNA, 20 nt, Human
uauaaccccucccucucagc

SEQ ID NO: 102821 - RNA, 19 nt, Human
uauaauccuccuccucaca

SEQ ID NO: 102822 - RNA, 21 nt, Human
uauuuggagccucugacaaaa

SEQ ID NO: 102823 - RNA, 21 nt, Human
ucagcacugcagugagcagga

SEQ ID NO: 102824 - RNA, 23 nt, Human
uccagguugggaaaaggggaagg

SEQ ID NO: 102825 - RNA, 18 nt, Human
ucccaaagucagcuuugc

SEQ ID NO: 102826 - RNA, 21 nt, Human
uccgaauuagagugauaggac

SEQ ID NO: 102827 - RNA, 26 nt, Human
ucgaugucugauauauuauuuuuauu

SEQ ID NO: 102828 - RNA, 24 nt, Human
ucggugguuucuuucaccuaaggc

SEQ ID NO: 102829 - RNA, 21 nt, Human
ugaacagagcccauaaagaua

SEQ ID NO: 102830 - RNA, 19 nt, Human
ugaagggcagcucucugau

SEQ ID NO: 102831 - RNA, 23 nt, Human
ugaaugaagaaaaccuuuucuua

SEQ ID NO: 102832 - RNA, 19 nt, Human
ugacaagaagguuggguuu

SEQ ID NO: 102833 - RNA, 18 nt, Human
ugacaguggacaaaccug

SEQ ID NO: 102834 - RNA, 22 nt, Human
ugaccaggcagccuggagaugc

SEQ ID NO: 102835 - RNA, 21 nt, Human
ugagagacuugaaauacaucg

SEQ ID NO: 102836 - RNA, 22 nt, Human
ugagggauuucggugguuucuu

SEQ ID NO: 102837 - RNA, 24 nt, Human
ugccuuggauuuuggcaagugauu

SEQ ID NO: 102838 - RNA, 18 nt, Human
uggaaugucucagagaaa

SEQ ID NO: 102839 - RNA, 21 nt, Human
uggucugaggugccuagaaac

SEQ ID NO: 102840 - RNA, 20 nt, Human
uguuucuguccccaccccuc

SEQ ID NO: 102841 - RNA, 22 nt, Human
uuagaaaacccugaaagaggua

SEQ ID NO: 102842 - RNA, 22 nt, Human
uuggagccucugacaaaaaaaa

SEQ ID NO: 102843 - RNA, 23 nt, Human
uuuggagaaauaggagaagcauu

SEQ ID NO: 102844 - RNA, 23 nt, Human
uuuucacauaaauaagcaguuac

SEQ ID NO: 102845 - RNA, 19 nt, Human
aagaagcaaaacaacuggu

SEQ ID NO: 102846 - RNA, 19 nt, Human
aagaagcaaaacaacuguc

SEQ ID NO: 102847 - RNA, 22 nt, Human
aauaguuucccaagucuggagc

SEQ ID NO: 102848 - RNA, 19 nt, Human
acuacaggugcgcgccacc

SEQ ID NO: 102849 - RNA, 22 nt, Human
acuacaggugcgcgccaccaag

SEQ ID NO: 102850 - RNA, 18 nt, Human
acuauauuaccauacaau

SEQ ID NO: 102851 - RNA, 24 nt, Human
acuggagugcaguggugcgaucug

SEQ ID NO: 102852 - RNA, 24 nt, Human
agagucuuuucuguaaauauccuu

SEQ ID NO: 102853 - RNA, 18 nt, Human
agaguggauagcuuaaaa

SEQ ID NO: 102854 - RNA, 22 nt, Human
agugcagugguaucagaaacuu

SEQ ID NO: 102855 - RNA, 19 nt, Human
agugcaguggugcgaucug

SEQ ID NO: 102856 - RNA, 24 nt, Human
agugcaguggugcgaucugggcuc

SEQ ID NO: 102857 - RNA, 27 nt, Human
augaaauuaauuauuuucucugcuuga

SEQ ID NO: 102858 - RNA, 18 nt, Human
augggguuucacgauguu

SEQ ID NO: 102859 - RNA, 20 nt, Human
augggguuucacgauguugg

SEQ ID NO: 102860 - RNA, 22 nt, Human
auuuuuguauuuuuaguagaga

SEQ ID NO: 102861 - RNA, 24 nt, Human
auuuuuguauuuuuaguagagaug

SEQ ID NO: 102862 - RNA, 20 nt, Human
caagcgauucuccugccuca

SEQ ID NO: 102863 - RNA, 22 nt, Human
caagcgauucuccugccucagc

SEQ ID NO: 102864 - RNA, 24 nt, Human
caccaagcccagcucauuuuugua

SEQ ID NO: 102865 - RNA, 24 nt, Human
cacgauguuggcuaggauggucuc

SEQ ID NO: 102866 - RNA, 23 nt, Human
cacugcaaucuccaccucccggg

SEQ ID NO: 102867 - RNA, 24 nt, Human
ccaccucccggguucaagcgauuc

SEQ ID NO: 102868 - RNA, 18 nt, Human
ccagacuggagugcagug

SEQ ID NO: 102869 - RNA, 24 nt, Human
cccgaguaacugggacuacaggug

SEQ ID NO: 102870 - RNA, 23 nt, Human
cccggguucaagcgauucuccug

SEQ ID NO: 102871 - RNA, 24 nt, Human
ccucccggguucaagcgauucucc

SEQ ID NO: 102872 - RNA, 19 nt, Human
ccugaaaugaagaaacuac

SEQ ID NO: 102873 - RNA, 24 nt, Human
ccugccucagccucccgaguaacu

SEQ ID NO: 102874 - RNA, 24 nt, Human
cucacugcaaucuccaccucccgg

SEQ ID NO: 102875 - RNA, 24 nt, Human
cugcaaucuccaccucccggguuc

SEQ ID NO: 102876 - RNA, 20 nt, Human
cuugcucuguugccagacug

SEQ ID NO: 102877 - RNA, 20 nt, Human
gagaaaauguaaaugucuca

SEQ ID NO: 102878 - RNA, 24 nt, Human
gaguaacugggacuacaggugcgc

SEQ ID NO: 102879 - RNA, 21 nt, Human
gauucuccugccucagccucc

SEQ ID NO: 102880 - RNA, 24 nt, Human
gcgauucuccugccucagccuccc

SEQ ID NO: 102881 - RNA, 23 nt, Human
gggaaacaagacauuuaaagaau

SEQ ID NO: 102882 - RNA, 19 nt, Human
gggguuucacgauguuggc

SEQ ID NO: 102883 - RNA, 22 nt, Human
ggguuucacgauguuggcuagg

SEQ ID NO: 102884 - RNA, 22 nt, Human
gguaucagaaacuuguauucaa

SEQ ID NO: 102885 - RNA, 18 nt, Human
gucccaugaaauuaauua

SEQ ID NO: 102886 - RNA, 24 nt, Human
gucuugcucuguugccagacugga

SEQ ID NO: 102887 - RNA, 22 nt, Human
uaguagagaugggguuucacga

SEQ ID NO: 102888 - RNA, 24 nt, Human
uaguagagaugggguuucacgaug

SEQ ID NO: 102889 - RNA, 23 nt, Human
uauuuucucugcuugaucuuggu

SEQ ID NO: 102890 - RNA, 23 nt, Human
ucacugcaaucuccaccucccgg

SEQ ID NO: 102891 - RNA, 24 nt, Human
ucacugcaaucuccaccucccggg

SEQ ID NO: 102892 - RNA, 25 nt, Human
ucacugcaaucuccaccucccgggu

SEQ ID NO: 102893 - RNA, 22 nt, Human
ucagagucuucuuuucuuuucu

SEQ ID NO: 102894 - RNA, 24 nt, Human
ucauuuuuguauuuuuaguagaga

SEQ ID NO: 102895 - RNA, 24 nt, Human
ucccgaguaacugggacuacaggu

SEQ ID NO: 102896 - RNA, 21 nt, Human
ucccggguucaagcgauucuc

SEQ ID NO: 102897 - RNA, 24 nt, Human
ucccggguucaagcgauucuccug

SEQ ID NO: 102898 - RNA, 24 nt, Human
ucuccugccucagccucccgagua

SEQ ID NO: 102899 - RNA, 19 nt, Human
ucucugcugucugcucugu

SEQ ID NO: 102900 - RNA, 19 nt, Human
ucugcucuguccuccucug

SEQ ID NO: 102901 - RNA, 24 nt, Human
ucuggucagagucuuuucuguaaa

SEQ ID NO: 102902 - RNA, 23 nt, Human
ucuguugccagacuggagugcag

SEQ ID NO: 102903 - RNA, 21 nt, Human
ucuugcucuguugccagacug

SEQ ID NO: 102904 - RNA, 22 nt, Human
ucuugcucuguugccagacugg

SEQ ID NO: 102905 - RNA, 23 nt, Human
ucuugcucuguugccagacugga

SEQ ID NO: 102906 - RNA, 24 nt, Human
ucuuuucuuuucuuuuugagaugg

SEQ ID NO: 102907 - RNA, 22 nt, Human
ugagauggagucuugcucuguu

SEQ ID NO: 102908 - RNA, 23 nt, Human
ugccagacuggagugcaguggug

SEQ ID NO: 102909 - RNA, 24 nt, Human
ugccucagccucccgaguaacugg

SEQ ID NO: 102910 - RNA, 24 nt, Human
ugcuguaagaguggauagcuuaaa

SEQ ID NO: 102911 - RNA, 20 nt, Human
ugcuuuaaggaagaagcaaa

SEQ ID NO: 102912 - RNA, 23 nt, Human
uggagugcaguggugcgaucugg

SEQ ID NO: 102913 - RNA, 22 nt, Human
uggauagcuuaaaagaaaaaaa

SEQ ID NO: 102914 - RNA, 21 nt, Human
uggcuaggauggucucgaucu

SEQ ID NO: 102915 - RNA, 26 nt, Human
ugggaaacaagacauuuaaagaauca

SEQ ID NO: 102916 - RNA, 22 nt, Human
ugggacuacaggugcgcgccac

SEQ ID NO: 102917 - RNA, 24 nt, Human
ugggacuacaggugcgcgccacca

SEQ ID NO: 102918 - RNA, 24 nt, Human
ugggguuucacgauguuggcuagg

SEQ ID NO: 102919 - RNA, 21 nt, Human
uguauuuuuaguagagauggg

SEQ ID NO: 102920 - RNA, 21 nt, Human
ugucaguuaguucauuaaagu

SEQ ID NO: 102921 - RNA, 19 nt, Human
ugucugcucuguccuccuc

SEQ ID NO: 102922 - RNA, 21 nt, Human
uuaaaguuuuggaaauucuca

SEQ ID NO: 102923 - RNA, 18 nt, Human
uuaguagagaugggguuu

SEQ ID NO: 102924 - RNA, 21 nt, Human
uuaguagagaugggguuucac

SEQ ID NO: 102925 - RNA, 24 nt, Human
uuaguagagaugggguuucacgau

SEQ ID NO: 102926 - RNA, 21 nt, Human
uucaagcgauucuccugccuc

SEQ ID NO: 102927 - RNA, 23 nt, Human
uucaagcgauucuccugccucag

SEQ ID NO: 102928 - RNA, 24 nt, Human
uucaagcgauucuccugccucagc

SEQ ID NO: 102929 - RNA, 21 nt, Human
uugagauggagucuugcucug

SEQ ID NO: 102930 - RNA, 24 nt, Human
uugguggacaguuucaugaagcug

SEQ ID NO: 102931 - RNA, 23 nt, Human
uuguauuuuuaguagagaugggg

SEQ ID NO: 102932 - RNA, 19 nt, Human
uuucacgauguuggcuagg

SEQ ID NO: 102933 - RNA, 24 nt, Human
uuuuuaguagagaugggguuucac

SEQ ID NO: 102934 - RNA, 20 nt, Human
uuuuuguauuuuuaguagag

SEQ ID NO: 102935 - RNA, 24 nt, Human
aaauaucgaaaauacaccagggcu

SEQ ID NO: 102936 - RNA, 19 nt, Human
aagaggcaggcauaagcaa

SEQ ID NO: 102937 - RNA, 23 nt, Human
aagugucagaaacugcacagacu

SEQ ID NO: 102938 - RNA, 18 nt, Human
accaacuaaaauagaaua

SEQ ID NO: 102939 - RNA, 18 nt, Human
acugucucuaguuaggug

SEQ ID NO: 102940 - RNA, 19 nt, Human
agcagaccuuguuuuuagu

SEQ ID NO: 102941 - RNA, 23 nt, Human
agcauuuagcaccacuggcucaa

SEQ ID NO: 102942 - RNA, 19 nt, Human
aggccugaggguuuucccu

SEQ ID NO: 102943 - RNA, 18 nt, Human
aguaugacuauuaggagg

SEQ ID NO: 102944 - RNA, 18 nt, Human
aucuaucuucuuccuuaa

SEQ ID NO: 102945 - RNA, 21 nt, Human
cacuacaccagggaguaugac

SEQ ID NO: 102946 - RNA, 19 nt, Human
caucuugggaaaagcuguc

SEQ ID NO: 102947 - RNA, 20 nt, Human
gaaauaucgaaaauacaccg

SEQ ID NO: 102948 - RNA, 18 nt, Human
gacacauuucucugaguu

SEQ ID NO: 102949 - RNA, 22 nt, Human
gacuacgcaccuuaggcaagau

SEQ ID NO: 102950 - RNA, 20 nt, Human
gaggagcuagaagaauucag

SEQ ID NO: 102951 - RNA, 22 nt, Human
gaggagcuagaagaauucaggg

SEQ ID NO: 102952 - RNA, 26 nt, Human
gauacaaaccaacuaaaauagaauaa

SEQ ID NO: 102953 - RNA, 21 nt, Human
gaugacacauuucucugaguu

SEQ ID NO: 102954 - RNA, 20 nt, Human
gugguuccaugggauaaaau

SEQ ID NO: 102955 - RNA, 19 nt, Human
uaaaacagggagugagaac

SEQ ID NO: 102956 - RNA, 18 nt, Human
uaaaaggggguaagagcc

SEQ ID NO: 102957 - RNA, 18 nt, Human
uacgcaccuuaggcaaga

SEQ ID NO: 102958 - RNA, 19 nt, Human
ucaacaacaagugucagaa

SEQ ID NO: 102959 - RNA, 21 nt, Human
ucauugaguuguccaucucca

SEQ ID NO: 102960 - RNA, 19 nt, Human
uccaccucuuuguagagga

SEQ ID NO: 102961 - RNA, 27 nt, Human
ucucugaguggcacacaccucaggccu

SEQ ID NO: 102962 - RNA, 19 nt, Human
ucucugcugucuucucugu

SEQ ID NO: 102963 - RNA, 21 nt, Human
ugaagucucugaguggcacac

SEQ ID NO: 102964 - RNA, 19 nt, Human
ugaauuaaaacagggagug

SEQ ID NO: 102965 - RNA, 21 nt, Human
ugagagugugaccaaaucuua

SEQ ID NO: 102966 - RNA, 20 nt, Human
ugaguguagccauuuuaacc

SEQ ID NO: 102967 - RNA, 19 nt, Human
ugaugacacauuucucuga

SEQ ID NO: 102968 - RNA, 23 nt, Human
ugcaugcagacauuuaaagcuuu

SEQ ID NO: 102969 - RNA, 21 nt, Human
ugggaaaagcuguccauagug

SEQ ID NO: 102970 - RNA, 21 nt, Human
ugggaaaagcuguccauagug

SEQ ID NO: 102971 - RNA, 23 nt, Human
ugguuccaugggauaaaauggga

SEQ ID NO: 102972 - RNA, 22 nt, Human
ugucagaaacugcacagacucc

SEQ ID NO: 102973 - RNA, 19 nt, Human
ugugaccaaaucuuaaagc

SEQ ID NO: 102974 - RNA, 18 nt, Human
uguguuaaagaugcugcu

SEQ ID NO: 102975 - RNA, 18 nt, Human
uuccaugggauaaaaugg

SEQ ID NO: 102976 - RNA, 18 nt, Human
uuccugaaauaucgaaaa

SEQ ID NO: 102977 - RNA, 19 nt, Human
uuuggaucuaucuucuucc

SEQ ID NO: 102978 - RNA, 21 nt, Human
uuuuuuuuuuuuuuuuuggau

SEQ ID NO: 102979 - RNA, 20 nt, Human
uuuuuuuuuuuuuuuuuugg

SEQ ID NO: 102980 - RNA, 19 nt, Human
aaaacaaaaccaaauaaaa

SEQ ID NO: 102981 - RNA, 18 nt, Human
aaacaaaacaaaaccaaa

SEQ ID NO: 102982 - RNA, 26 nt, Human
aaaccaaacaaaacaaaaccaaauaa

SEQ ID NO: 102983 - RNA, 18 nt, Human
aaagccagccuauagcag

SEQ ID NO: 102984 - RNA, 21 nt, Human
aaauacuagaguugccgggcu

SEQ ID NO: 102985 - RNA, 18 nt, Human
aacuagagaccuccaccu

SEQ ID NO: 102986 - RNA, 22 nt, Human
aagccagccuauagcaggcugg

SEQ ID NO: 102987 - RNA, 22 nt, Human
aaggagaaccccccucaccuca

SEQ ID NO: 102988 - RNA, 20 nt, Human
acaaggcacugcugggcaca

SEQ ID NO: 102989 - RNA, 22 nt, Human
acagccagaucucuaggucucc

SEQ ID NO: 102990 - RNA, 22 nt, Human
accacucccuggguccccgccg

SEQ ID NO: 102991 - RNA, 25 nt, Human
accccccucaccucauugguccccc

SEQ ID NO: 102992 - RNA, 19 nt, Human
agaagccuugugggcagcc

SEQ ID NO: 102993 - RNA, 26 nt, Human
agaggaagggaggggacacgcggagc

SEQ ID NO: 102994 - RNA, 21 nt, Human
agcucccugagccccccuccu

SEQ ID NO: 102995 - RNA, 22 nt, Human
aggaaaccuccaaauaaaauga

SEQ ID NO: 102996 - RNA, 22 nt, Human
aggcaccucccuucccgaccag

SEQ ID NO: 102997 - RNA, 23 nt, Human
aggcaccucccuucccgaccagg

SEQ ID NO: 102998 - RNA, 23 nt, Human
agggaggggacacgcggagcagg

SEQ ID NO: 102999 - RNA, 22 nt, Human
agggcaaaggagaaccccccuc

SEQ ID NO: 103000 - RNA, 21 nt, Human
aguggcccuucaccccccaug

SEQ ID NO: 103001 - RNA, 20 nt, Human
auacauccucagagcugacc

SEQ ID NO: 103002 - RNA, 24 nt, Human
caaaaggaaagagagucucagacc

SEQ ID NO: 103003 - RNA, 23 nt, Human
caaaaguaaucccaaaaccaaaa

SEQ ID NO: 103004 - RNA, 22 nt, Human
caaaggagaaccccccucaccu

SEQ ID NO: 103005 - RNA, 21 nt, Human
caaccuuagguuccaagcccc

SEQ ID NO: 103006 - RNA, 23 nt, Human
caagucccuauguuuccaccccu

SEQ ID NO: 103007 - RNA, 23 nt, Human
cacaaggcacugcugggcacaga

SEQ ID NO: 103008 - RNA, 21 nt, Human
cacagccagaucucuaggucu

SEQ ID NO: 103009 - RNA, 23 nt, Human
cacagccagaucucuaggucucc

SEQ ID NO: 103010 - RNA, 29 nt, Human
cacagccagaucucuaggucucccucucc

SEQ ID NO: 103011 - RNA, 22 nt, Human
cacccggagacccugcucgccc

SEQ ID NO: 103012 - RNA, 22 nt, Human
caccucccuucccgaccaggag

SEQ ID NO: 103013 - RNA, 23 nt, Human
caccuccgggucgcgaauggccc

SEQ ID NO: 103014 - RNA, 22 nt, Human
caccuucauguagaacuaggga

SEQ ID NO: 103015 - RNA, 23 nt, Human
cagacccuucccccagcugccga

SEQ ID NO: 103016 - RNA, 24 nt, Human
cagcugccgacggagagucucauc

SEQ ID NO: 103017 - RNA, 21 nt, Human
caggcguggaggagcggcugg

SEQ ID NO: 103018 - RNA, 22 nt, Human
caucuuagacgcaccaaguccg

SEQ ID NO: 103019 - RNA, 21 nt, Human
ccacccggagacccugcucgc

SEQ ID NO: 103020 - RNA, 23 nt, Human
ccacccggagacccugcucgccc

SEQ ID NO: 103021 - RNA, 21 nt, Human
cccaagaauucuccccuccuc

SEQ ID NO: 103022 - RNA, 23 nt, Human
cccacccggagacccugcucgcc

SEQ ID NO: 103023 - RNA, 21 nt, Human
cccaguggcccuucacccccc

SEQ ID NO: 103024 - RNA, 21 nt, Human
cccaugcccgccccacagcca

SEQ ID NO: 103025 - RNA, 18 nt, Human
ccccaagaauucuccccu

SEQ ID NO: 103026 - RNA, 19 nt, Human
ccccaagaauucuccccuc

SEQ ID NO: 103027 - RNA, 20 nt, Human
ccccaagaauucuccccucc

SEQ ID NO: 103028 - RNA, 18 nt, Human
ccccacagccagaucucu

SEQ ID NO: 103029 - RNA, 18 nt, Human
ccccuuucuaaggacagg

SEQ ID NO: 103030 - RNA, 22 nt, Human
cccuauguuuccaccccuuucu

SEQ ID NO: 103031 - RNA, 23 nt, Human
ccgcgcccgcgcaccuccggguc

SEQ ID NO: 103032 - RNA, 21 nt, Human
ccuaguccuggcucgcacggu

SEQ ID NO: 103033 - RNA, 26 nt, Human
ccuccgggucgcgaauggcccggccc

SEQ ID NO: 103034 - RNA, 22 nt, Human
ccucugggggagaagccuugug

SEQ ID NO: 103035 - RNA, 24 nt, Human
ccucugggggagaagccuuguggg

SEQ ID NO: 103036 - RNA, 21 nt, Human
ccuucccgaccaggagccagg

SEQ ID NO: 103037 - RNA, 22 nt, Human
ccuucccugcucccagccccag

SEQ ID NO: 103038 - RNA, 25 nt, Human
cgagaaaaccaaacaaaacaaaacc

SEQ ID NO: 103039 - RNA, 24 nt, Human
cgucgcgccgcccacccggagacc

SEQ ID NO: 103040 - RNA, 20 nt, Human
cguggaacuagagaccucca

SEQ ID NO: 103041 - RNA, 19 nt, Human
cucaccucauugguccccc

SEQ ID NO: 103042 - RNA, 19 nt, Human
cuccacgggccugcucccc

SEQ ID NO: 103043 - RNA, 25 nt, Human
cuccagccugcgcggggcgucgcgc

SEQ ID NO: 103044 - RNA, 20 nt, Human
cuccuccacgggccugcucc

SEQ ID NO: 103045 - RNA, 21 nt, Human
cucgcagggagaagccaccgc

SEQ ID NO: 103046 - RNA, 20 nt, Human
cuggcccccucaucuuagac

SEQ ID NO: 103047 - RNA, 18 nt, Human
cuggggcuggcgggcuug

SEQ ID NO: 103048 - RNA, 20 nt, Human
gaccuagcuuucuggucuga

SEQ ID NO: 103049 - RNA, 21 nt, Human
gagaaaaccaaacaaaacaaa

SEQ ID NO: 103050 - RNA, 21 nt, Human
gagaagccuugugggcagccc

SEQ ID NO: 103051 - RNA, 19 nt, Human
gagccucggcggccuccag

SEQ ID NO: 103052 - RNA, 22 nt, Human
gcaaugcugaaggcauacagua

SEQ ID NO: 103053 - RNA, 18 nt, Human
gcaccggaaucuccuagu

SEQ ID NO: 103054 - RNA, 18 nt, Human
gcccgccccacagccaga

SEQ ID NO: 103055 - RNA, 23 nt, Human
ggccaggcuuucaggaggcaccg

SEQ ID NO: 103056 - RNA, 22 nt, Human
gggaaagccagccuauagcagg

SEQ ID NO: 103057 - RNA, 19 nt, Human
ggggagaagccuugugggc

SEQ ID NO: 103058 - RNA, 21 nt, Human
gggggucugcuguagccucgg

SEQ ID NO: 103059 - RNA, 19 nt, Human
gucaccuggugaccccauc

SEQ ID NO: 103060 - RNA, 22 nt, Human
gugcggagggaggugggagagg

SEQ ID NO: 103061 - RNA, 21 nt, Human
uagcagagacgguacauucac

SEQ ID NO: 103062 - RNA, 18 nt, Human
uagcuuucuggucugacu

SEQ ID NO: 103063 - RNA, 22 nt, Human
uagguuccaagccccaaguccc

SEQ ID NO: 103064 - RNA, 21 nt, Human
ucaaaaguaaucccaaaacca

SEQ ID NO: 103065 - RNA, 20 nt, Human
ucagcucccugagccccccu

SEQ ID NO: 103066 - RNA, 22 nt, Human
ucccagcucagccccaagaauu

SEQ ID NO: 103067 - RNA, 18 nt, Human
ucccccaggaucaaaagu

SEQ ID NO: 103068 - RNA, 22 nt, Human
uccccgccggaggcuggcccag

SEQ ID NO: 103069 - RNA, 19 nt, Human
ucucagacccuucccccag

SEQ ID NO: 103070 - RNA, 19 nt, Human
ucucccucucccaccaggg

SEQ ID NO: 103071 - RNA, 18 nt, Human
ucucuaggucucccucuc

SEQ ID NO: 103072 - RNA, 22 nt, Human
ugaaggcauacaguacaaacaa

SEQ ID NO: 103073 - RNA, 18 nt, Human
ugccgacggagagucuca

SEQ ID NO: 103074 - RNA, 18 nt, Human
ugccgggcucccagcuca

SEQ ID NO: 103075 - RNA, 23 nt, Human
uggcaaguauccgagaaaaccaa

SEQ ID NO: 103076 - RNA, 21 nt, Human
uggcccagggcggucccacag

SEQ ID NO: 103077 - RNA, 27 nt, Human
uggcccuucaccccccaugcccgcccc

SEQ ID NO: 103078 - RNA, 21 nt, Human
ugggaaagcugagggcaaagg

SEQ ID NO: 103079 - RNA, 25 nt, Human
ugugugcggagggaggugggagagg

SEQ ID NO: 103080 - RNA, 21 nt, Human
uucccuucccugcucccagcc

SEQ ID NO: 103081 - RNA, 27 nt, Human
uucuggucugacucggggaggaaaacc

SEQ ID NO: 103082 - RNA, 25 nt, Human
aaaauaaacacguuuagcuucucuc

SEQ ID NO: 103083 - RNA, 21 nt, Human
acugcagcgggcacccggcgg

SEQ ID NO: 103084 - RNA, 25 nt, Human
agaaaaagcuaccauuacaaaaaua

SEQ ID NO: 103085 - RNA, 19 nt, Human
agucucucccgccccggcc

SEQ ID NO: 103086 - RNA, 24 nt, Human
auaauuuaagggaaaauaaacacc

SEQ ID NO: 103087 - RNA, 19 nt, Human
caagaaacugcagcgggca

SEQ ID NO: 103088 - RNA, 21 nt, Human
caagaaacugcagcgggcacc

SEQ ID NO: 103089 - RNA, 20 nt, Human
caccucgcugggcccagccc

SEQ ID NO: 103090 - RNA, 24 nt, Human
cacguuuagcuucucucgcaguuu

SEQ ID NO: 103091 - RNA, 18 nt, Human
cccaagaaacugcagcgg

SEQ ID NO: 103092 - RNA, 24 nt, Human
cccggcggcucuggcugcgccagg

SEQ ID NO: 103093 - RNA, 27 nt, Human
cuccgggccgucgggucugagguaugg

SEQ ID NO: 103094 - RNA, 18 nt, Human
cucgcugggcccagcccc

SEQ ID NO: 103095 - RNA, 21 nt, Human
gcacccggcggcucuggcugc

SEQ ID NO: 103096 - RNA, 22 nt, Human
guccaggcuguagcuucuuugc

SEQ ID NO: 103097 - RNA, 18 nt, Human
uaaguccaggcuguagcu

SEQ ID NO: 103098 - RNA, 22 nt, Human
uacaauacaaaggguuugucug

SEQ ID NO: 103099 - RNA, 23 nt, Human
uagaaaaagcuaccauuacaaaa

SEQ ID NO: 103100 - RNA, 24 nt, Human
uagaaaaagcuaccauuacaaaaa

SEQ ID NO: 103101 - RNA, 18 nt, Human
uccuaugucccaagaaac

SEQ ID NO: 103102 - RNA, 19 nt, Human
uccuaugucccaagaaacu

SEQ ID NO: 103103 - RNA, 24 nt, Human
uguaaaaauuaauauaaaaaagug

SEQ ID NO: 103104 - RNA, 23 nt, Human
uuuaagggaaaauaaacacguuu

SEQ ID NO: 103105 - RNA, 24 nt, Human
agagcucaagaugggaggggagcc

SEQ ID NO: 103106 - RNA, 20 nt, Human
agcucaagaugggaggggag

SEQ ID NO: 103107 - RNA, 22 nt, Human
aggaagagcucaagaugggagg

SEQ ID NO: 103108 - RNA, 20 nt, Human
gacugcuguuccuuccaucu

SEQ ID NO: 103109 - RNA, 20 nt, Human
ggaugaauaaacucuuugca

SEQ ID NO: 103110 - RNA, 19 nt, Human
uaccaaggcucaugggacg

SEQ ID NO: 103111 - RNA, 20 nt, Human
ugaggcuuuauucaggaaga

SEQ ID NO: 103112 - RNA, 19 nt, Human
ugggaggggagccccuggg

SEQ ID NO: 103113 - RNA, 21 nt, Human
ugggaggggagccccuggggu

SEQ ID NO: 103114 - RNA, 21 nt, Human
ugggaggggagccccuggggu

SEQ ID NO: 103115 - RNA, 23 nt, Human
uuuuagggguaugaggcuuuauu

SEQ ID NO: 103116 - RNA, 20 nt, Human
uuuuuuuuuuagggguauga

SEQ ID NO: 103117 - RNA, 18 nt, Human
uuuuuuuuuuuuaggggu

SEQ ID NO: 103118 - RNA, 21 nt, Human
acaggggcagccucaguguca

SEQ ID NO: 103119 - RNA, 25 nt, Human
agacaucaaaggucgucuuggcgcc

SEQ ID NO: 103120 - RNA, 24 nt, Human
agagcucaagaugggaggggagcc

SEQ ID NO: 103121 - RNA, 19 nt, Human
agaugggaguggccucaga

SEQ ID NO: 103122 - RNA, 20 nt, Human
agcucaagaugggaggggag

SEQ ID NO: 103123 - RNA, 22 nt, Human
aggaagagcucaagaugggagg

SEQ ID NO: 103124 - RNA, 19 nt, Human
aggggcacaggggcauccu

SEQ ID NO: 103125 - RNA, 24 nt, Human
auggagcugcugcccaucuucuug

SEQ ID NO: 103126 - RNA, 20 nt, Human
caaaguccaccacagucuuc

SEQ ID NO: 103127 - RNA, 25 nt, Human
caaaguccaccacagucuucuucuu

SEQ ID NO: 103128 - RNA, 24 nt, Human
caccaggaagaggacaucggucuc

SEQ ID NO: 103129 - RNA, 25 nt, Human
caccaggaagaggacaucggucuca

SEQ ID NO: 103130 - RNA, 20 nt, Human
cacuagaaacuaaugacugc

SEQ ID NO: 103131 - RNA, 18 nt, Human
caggaagagcucaagaug

SEQ ID NO: 103132 - RNA, 20 nt, Human
caggcaugucgaugcuggcg

SEQ ID NO: 103133 - RNA, 21 nt, Human
cauggaacuggccuccugguc

SEQ ID NO: 103134 - RNA, 23 nt, Human
ccacagucuucuucuuauucucc

SEQ ID NO: 103135 - RNA, 18 nt, Human
cccauguugggguccccu

SEQ ID NO: 103136 - RNA, 18 nt, Human
ccccaaagauguacugga

SEQ ID NO: 103137 - RNA, 23 nt, Human
cccggagugggguggcaaagggc

SEQ ID NO: 103138 - RNA, 22 nt, Human
ccucagagucacccguagggua

SEQ ID NO: 103139 - RNA, 24 nt, Human
ccucagagucacuugugaggggca

SEQ ID NO: 103140 - RNA, 23 nt, Human
ccuccgugacuuucuuguugccc

SEQ ID NO: 103141 - RNA, 21 nt, Human
ccugucgggggagaugggagu

SEQ ID NO: 103142 - RNA, 22 nt, Human
cuccagguagccgcuguuuucc

SEQ ID NO: 103143 - RNA, 20 nt, Human
cuccuggucggucacugugg

SEQ ID NO: 103144 - RNA, 19 nt, Human
cucuauggucggcccccac

SEQ ID NO: 103145 - RNA, 23 nt, Human
cucugugcugggcuagggcaauc

SEQ ID NO: 103146 - RNA, 20 nt, Human
cugcagcaucugagcuuccc

SEQ ID NO: 103147 - RNA, 19 nt, Human
cugucuuggggccgguagc

SEQ ID NO: 103148 - RNA, 25 nt, Human
cuuggcauuggcucugugccgguuc

SEQ ID NO: 103149 - RNA, 18 nt, Human
cuuguagaaguccuccuc

SEQ ID NO: 103150 - RNA, 24 nt, Human
gacucggaguugccugucggggga

SEQ ID NO: 103151 - RNA, 25 nt, Human
gagcuuccucggagucaucuguggg

SEQ ID NO: 103152 - RNA, 21 nt, Human
gagugggguggcaaagggcuc

SEQ ID NO: 103153 - RNA, 19 nt, Human
ggagaugggaguggccuca

SEQ ID NO: 103154 - RNA, 21 nt, Human
ggaucucaucucuauggucgg

SEQ ID NO: 103155 - RNA, 23 nt, Human
gggcacgggccucagagucaccc

SEQ ID NO: 103156 - RNA, 20 nt, Human
ggggcauccugagagucacc

SEQ ID NO: 103157 - RNA, 23 nt, Human
gguagacgggcauccgagaggga

SEQ ID NO: 103158 - RNA, 24 nt, Human
gucacccguugcagggacgggggc

SEQ ID NO: 103159 - RNA, 21 nt, Human
gucuucuucuuauucuccucc

SEQ ID NO: 103160 - RNA, 21 nt, Human
uagcccggagugggguggcaa

SEQ ID NO: 103161 - RNA, 21 nt, Human
uagggcaaucucggugggcac

SEQ ID NO: 103162 - RNA, 23 nt, Human
ucacccguugcagggacgggggc

SEQ ID NO: 103163 - RNA, 23 nt, Human
ucacuugugaggggcacaggggc

SEQ ID NO: 103164 - RNA, 23 nt, Human
ucagagucacccguaggguacgg

SEQ ID NO: 103165 - RNA, 25 nt, Human
ucagagucacuugugaggggcacag

SEQ ID NO: 103166 - RNA, 19 nt, Human
uccucggagucaucugugg

SEQ ID NO: 103167 - RNA, 23 nt, Human
ucuauggucggcccccacccauu

SEQ ID NO: 103168 - RNA, 20 nt, Human
ucuccugggauggguccugg

SEQ ID NO: 103169 - RNA, 18 nt, Human
ugacugcagcaucugagc

SEQ ID NO: 103170 - RNA, 20 nt, Human
uggccguccauguuguuggu

SEQ ID NO: 103171 - RNA, 19 nt, Human
ugggaggggagccccuggg

SEQ ID NO: 103172 - RNA, 21 nt, Human
ugggaggggagccccuggggu

SEQ ID NO: 103173 - RNA, 21 nt, Human
ugggaggggagccccuggggu

SEQ ID NO: 103174 - RNA, 23 nt, Human
ugggaggggagccccugggguug

SEQ ID NO: 103175 - RNA, 24 nt, Human
ugggcccaggacucgggaccaaag

SEQ ID NO: 103176 - RNA, 23 nt, Human
ugggguggcaaagggcuccccaa

SEQ ID NO: 103177 - RNA, 20 nt, Human
uggucggcccccacccauuu

SEQ ID NO: 103178 - RNA, 18 nt, Human
ugucuuggggccgguagc

SEQ ID NO: 103179 - RNA, 26 nt, Human
ugucuuggggccgguagcccggagug

SEQ ID NO: 103180 - RNA, 25 nt, Human
uguggccguccauguuguuggugcc

SEQ ID NO: 103181 - RNA, 20 nt, Human
ugugggcagcgccagauagg

SEQ ID NO: 103182 - RNA, 18 nt, Human
ugugggggacacaggggc

SEQ ID NO: 103183 - RNA, 20 nt, Human
ugugggggacacaggggcag

SEQ ID NO: 103184 - RNA, 27 nt, Human
uuagagacuguccugucuuggggccgg

SEQ ID NO: 103185 - RNA, 18 nt, Human
uucuuguugcccuuguug

SEQ ID NO: 103186 - RNA, 20 nt, Human
uugagaccaaggcugauggg

SEQ ID NO: 103187 - RNA, 21 nt, Human
uuucuuguugcccuuguugau

SEQ ID NO: 103188 - RNA, 18 nt, Human
aaaagaaaacugaagaaa

SEQ ID NO: 103189 - RNA, 22 nt, Human
aaccagcaccgcagaaguacaa

SEQ ID NO: 103190 - RNA, 27 nt, Human
aacgccaggggcaaacguuuaaaggga

SEQ ID NO: 103191 - RNA, 21 nt, Human
aagaaaagaaaacugaagaaa

SEQ ID NO: 103192 - RNA, 21 nt, Human
aagaccuuugugucuggauga

SEQ ID NO: 103193 - RNA, 23 nt, Human
aauuuggugaaagacaaaaacug

SEQ ID NO: 103194 - RNA, 18 nt, Human
acaaacgcacacacagcg

SEQ ID NO: 103195 - RNA, 25 nt, Human
acagagccucagggaccagugggaa

SEQ ID NO: 103196 - RNA, 23 nt, Human
acggggagcaggagcaaaggaca

SEQ ID NO: 103197 - RNA, 20 nt, Human
acuccacuucaagggcagug

SEQ ID NO: 103198 - RNA, 19 nt, Human
agaaaaaccagcaccgcag

SEQ ID NO: 103199 - RNA, 18 nt, Human
agaaaagaaaacugaaga

SEQ ID NO: 103200 - RNA, 25 nt, Human
agccggggcagauggcagcagagga

SEQ ID NO: 103201 - RNA, 24 nt, Human
aggagaaagaucagugcaagaaaa

SEQ ID NO: 103202 - RNA, 22 nt, Human
agucacagaaggagaggagaaa

SEQ ID NO: 103203 - RNA, 21 nt, Human
agugcaagaaaagaaaacuga

SEQ ID NO: 103204 - RNA, 24 nt, Human
auagaacaaaaaaauuacaccucu

SEQ ID NO: 103205 - RNA, 21 nt, Human
auggcaaaaaaaaaaaguccu

SEQ ID NO: 103206 - RNA, 22 nt, Human
caaacgcacacacagcgaacac

SEQ ID NO: 103207 - RNA, 18 nt, Human
caaaggacaaagccaucc

SEQ ID NO: 103208 - RNA, 19 nt, Human
caagaaaagaaaacugaag

SEQ ID NO: 103209 - RNA, 19 nt, Human
caagaaaagaaaacugaag

SEQ ID NO: 103210 - RNA, 20 nt, Human
cacagugaccucagcagggc

SEQ ID NO: 103211 - RNA, 22 nt, Human
cacguccguaaaccgucccuuc

SEQ ID NO: 103212 - RNA, 25 nt, Human
cagaggacaaacgcacacacagcga

SEQ ID NO: 103213 - RNA, 22 nt, Human
cagcaagagaucauugcaugga

SEQ ID NO: 103214 - RNA, 22 nt, Human
cagccggggcagauggcagcag

SEQ ID NO: 103215 - RNA, 21 nt, Human
cagcucccgggccaccuggga

SEQ ID NO: 103216 - RNA, 25 nt, Human
cauccccaccugcagcucccgggcc

SEQ ID NO: 103217 - RNA, 21 nt, Human
ccacaccauccucacuuccug

SEQ ID NO: 103218 - RNA, 18 nt, Human
ccaccugcagcucccggg

SEQ ID NO: 103219 - RNA, 27 nt, Human
ccaccugggaggcggugaggggagggg

SEQ ID NO: 103220 - RNA, 19 nt, Human
ccacuccacuucaagggca

SEQ ID NO: 103221 - RNA, 20 nt, Human
ccagccucugggcccagucu

SEQ ID NO: 103222 - RNA, 20 nt, Human
cccacagugaccucagcagg

SEQ ID NO: 103223 - RNA, 19 nt, Human
cccacuccacuucaagggc

SEQ ID NO: 103224 - RNA, 18 nt, Human
cccagggggccggcgggg

SEQ ID NO: 103225 - RNA, 18 nt, Human
cccagucugggguccccu

SEQ ID NO: 103226 - RNA, 21 nt, Human
cccagugguccacgccucccu

SEQ ID NO: 103227 - RNA, 21 nt, Human
ccccacaccucuguccaaauc

SEQ ID NO: 103228 - RNA, 21 nt, Human
cccucugcacaauuggccauu

SEQ ID NO: 103229 - RNA, 20 nt, Human
ccgccacacucugggcccac

SEQ ID NO: 103230 - RNA, 18 nt, Human
ccucgugauguuggcugu

SEQ ID NO: 103231 - RNA, 18 nt, Human
ccugggcauggggagggg

SEQ ID NO: 103232 - RNA, 21 nt, Human
ccuuccacggccacccugggc

SEQ ID NO: 103233 - RNA, 19 nt, Human
cguccguaaaccgucccuu

SEQ ID NO: 103234 - RNA, 25 nt, Human
cucaugccuguggccuuuggcacuu

SEQ ID NO: 103235 - RNA, 18 nt, Human
cuccagaggggagaaccc

SEQ ID NO: 103236 - RNA, 22 nt, Human
cugcagugggcccgaccuuggu

SEQ ID NO: 103237 - RNA, 22 nt, Human
cuggcccagugguccacgccuc

SEQ ID NO: 103238 - RNA, 24 nt, Human
cugguaaggcacauguauaauuca

SEQ ID NO: 103239 - RNA, 19 nt, Human
gaagaguguggcuguggcu

SEQ ID NO: 103240 - RNA, 27 nt, Human
gaccuuggugugaauuuccaaaaacag

SEQ ID NO: 103241 - RNA, 18 nt, Human
gagcaggagcaaaggaca

SEQ ID NO: 103242 - RNA, 20 nt, Human
gaggcggugaggggaggggg

SEQ ID NO: 103243 - RNA, 23 nt, Human
gaggcggugaggggagggggugg

SEQ ID NO: 103244 - RNA, 20 nt, Human
gauaacaaagucagcacgaa

SEQ ID NO: 103245 - RNA, 22 nt, Human
gaucacuuauuugggcaccuga

SEQ ID NO: 103246 - RNA, 22 nt, Human
gcaccugauuugaagaacaaag

SEQ ID NO: 103247 - RNA, 23 nt, Human
gcuaaaaucaaacaugucugaca

SEQ ID NO: 103248 - RNA, 22 nt, Human
ggaaaaaaauagaacaaaaaaa

SEQ ID NO: 103249 - RNA, 22 nt, Human
ggaaggccccacaccucugucc

SEQ ID NO: 103250 - RNA, 19 nt, Human
ggacaaagccauccccacc

SEQ ID NO: 103251 - RNA, 19 nt, Human
ggacccagggggccggcgg

SEQ ID NO: 103252 - RNA, 24 nt, Human
ggaccgcggucuuuggucugugcc

SEQ ID NO: 103253 - RNA, 20 nt, Human
ggcauggggaggggcggggg

SEQ ID NO: 103254 - RNA, 21 nt, Human
ggccccacaccucuguccaaa

SEQ ID NO: 103255 - RNA, 18 nt, Human
gggcaguggccccuuggg

SEQ ID NO: 103256 - RNA, 18 nt, Human
gggcauggggaggggcgg

SEQ ID NO: 103257 - RNA, 19 nt, Human
gggcauggggaggggcggg

SEQ ID NO: 103258 - RNA, 22 nt, Human
gggcauggggaggggcgggggu

SEQ ID NO: 103259 - RNA, 18 nt, Human
gggcccagucuggggucc

SEQ ID NO: 103260 - RNA, 20 nt, Human
gggcccagucuggggucccc

SEQ ID NO: 103261 - RNA, 19 nt, Human
ggggagggcccacaccauc

SEQ ID NO: 103262 - RNA, 21 nt, Human
gggguccccucucaguucugg

SEQ ID NO: 103263 - RNA, 19 nt, Human
gggugccuuugcaaaggac

SEQ ID NO: 103264 - RNA, 21 nt, Human
gguccccucucaguucuggcu

SEQ ID NO: 103265 - RNA, 21 nt, Human
gguggucacagaaugaccagg

SEQ ID NO: 103266 - RNA, 21 nt, Human
gugaauuuccaaaaacaguuu

SEQ ID NO: 103267 - RNA, 18 nt, Human
gugguccacgccucccuc

SEQ ID NO: 103268 - RNA, 18 nt, Human
gugugaauuuccaaaaac

SEQ ID NO: 103269 - RNA, 21 nt, Human
uaacagugcucacauuuucau

SEQ ID NO: 103270 - RNA, 24 nt, Human
uaauaaauacacguucuguuaaaa

SEQ ID NO: 103271 - RNA, 19 nt, Human
uacacguucuguuaaaaac

SEQ ID NO: 103272 - RNA, 20 nt, Human
uacuugauuuucauccuauu

SEQ ID NO: 103273 - RNA, 23 nt, Human
uauacagguugcaccuccucaga

SEQ ID NO: 103274 - RNA, 18 nt, Human
ucacuggagucacagaag

SEQ ID NO: 103275 - RNA, 18 nt, Human
ucagacuccagaggggag

SEQ ID NO: 103276 - RNA, 19 nt, Human
ucauuucauccuccugucc

SEQ ID NO: 103277 - RNA, 23 nt, Human
uccccaccugcagcucccgggcc

SEQ ID NO: 103278 - RNA, 21 nt, Human
ucgggccacgcugugccagcu

SEQ ID NO: 103279 - RNA, 22 nt, Human
ucucauuucauccuccuguccu

SEQ ID NO: 103280 - RNA, 20 nt, Human
ucugggaucucauuucaucc

SEQ ID NO: 103281 - RNA, 18 nt, Human
ucugggcccacuccacuu

SEQ ID NO: 103282 - RNA, 18 nt, Human
ucuucgaaagaccacuca

SEQ ID NO: 103283 - RNA, 21 nt, Human
ugaagaaauaauggcaaaaaa

SEQ ID NO: 103284 - RNA, 23 nt, Human
ugaagaaauaauggcaaaaaaaa

SEQ ID NO: 103285 - RNA, 24 nt, Human
ugaggacucugggaucucauuuca

SEQ ID NO: 103286 - RNA, 18 nt, Human
ugaggggaggggguggug

SEQ ID NO: 103287 - RNA, 19 nt, Human
ugccgcagccugugugggg

SEQ ID NO: 103288 - RNA, 26 nt, Human
ugccuagugcugcacugcccugucuu

SEQ ID NO: 103289 - RNA, 21 nt, Human
ugcuggcccagugguccacgc

SEQ ID NO: 103290 - RNA, 19 nt, Human
uggaaggccccacaccucu

SEQ ID NO: 103291 - RNA, 21 nt, Human
uggcaaaaaaaaaaaguccuc

SEQ ID NO: 103292 - RNA, 18 nt, Human
uggcccagugguccacgc

SEQ ID NO: 103293 - RNA, 19 nt, Human
uggcugagggagcauggga

SEQ ID NO: 103294 - RNA, 20 nt, Human
ugggagaaccaagaccuuug

SEQ ID NO: 103295 - RNA, 19 nt, Human
ugggaggcggugaggggag

SEQ ID NO: 103296 - RNA, 19 nt, Human
ugggcccagucuggggucc

SEQ ID NO: 103297 - RNA, 25 nt, Human
ugguggucacagaaugaccaggugg

SEQ ID NO: 103298 - RNA, 23 nt, Human
uguauaauucauucaggugugag

SEQ ID NO: 103299 - RNA, 25 nt, Human
uguccuggaccauuuucagauacgc

SEQ ID NO: 103300 - RNA, 18 nt, Human
ugucugacaguuccggga

SEQ ID NO: 103301 - RNA, 21 nt, Human
ugucuggaugaucagucgggg

SEQ ID NO: 103302 - RNA, 24 nt, Human
uuaauuuauuguagacucuucuca

SEQ ID NO: 103303 - RNA, 23 nt, Human
uucuagccgcuugguuuuagccc

SEQ ID NO: 103304 - RNA, 22 nt, Human
uugaagaguguggcuguggcuu

SEQ ID NO: 103305 - RNA, 21 nt, Human
uugguuuuagccccacugcug

SEQ ID NO: 103306 - RNA, 26 nt, Human
uuuuagccccacugcugacguauuuc

SEQ ID NO: 103307 - RNA, 20 nt, Human
aaaaagcaaauaaauaaaac

SEQ ID NO: 103308 - RNA, 21 nt, Human
aaaacgcuaccauauuuacag

SEQ ID NO: 103309 - RNA, 24 nt, Human
aaacaacaacaacaaaacgcuacc

SEQ ID NO: 103310 - RNA, 23 nt, Human
aaaggagaggggcuggggcugcc

SEQ ID NO: 103311 - RNA, 23 nt, Human
aacaacaacaacaaaacgcuacc

SEQ ID NO: 103312 - RNA, 22 nt, Human
aagccagggcugcugggaacac

SEQ ID NO: 103313 - RNA, 23 nt, Human
aauugcugaggggagaagacagg

SEQ ID NO: 103314 - RNA, 24 nt, Human
accagaacccagacuugaaaccug

SEQ ID NO: 103315 - RNA, 21 nt, Human
accaguuaaauuuuuaacccu

SEQ ID NO: 103316 - RNA, 19 nt, Human
acccacaucacagcaaaga

SEQ ID NO: 103317 - RNA, 18 nt, Human
acggcagaaaagccagag

SEQ ID NO: 103318 - RNA, 18 nt, Human
agaggggaggagaggugg

SEQ ID NO: 103319 - RNA, 28 nt, Human
agauccuuuuuuaaauucuuuuuuuccu

SEQ ID NO: 103320 - RNA, 21 nt, Human
agcaacaaccaaacuguacaa

SEQ ID NO: 103321 - RNA, 23 nt, Human
agcguauaaaaaaaaugaauccc

SEQ ID NO: 103322 - RNA, 21 nt, Human
aguggacaccagaacccagac

SEQ ID NO: 103323 - RNA, 18 nt, Human
auaaagcacaagacagga

SEQ ID NO: 103324 - RNA, 18 nt, Human
auagaacaugucucagag

SEQ ID NO: 103325 - RNA, 23 nt, Human
augaaaaaacaacaacaacaaaa

SEQ ID NO: 103326 - RNA, 20 nt, Human
augacuggccugcccggggc

SEQ ID NO: 103327 - RNA, 23 nt, Human
caaaaagcaaauaaauaaaacaa

SEQ ID NO: 103328 - RNA, 18 nt, Human
caacaacaaaacgcuacc

SEQ ID NO: 103329 - RNA, 21 nt, Human
caacaacaacaaaacgcuacc

SEQ ID NO: 103330 - RNA, 22 nt, Human
cacaucacagcaaagaagcgca

SEQ ID NO: 103331 - RNA, 19 nt, Human
cacccuuugcccuggcccc

SEQ ID NO: 103332 - RNA, 21 nt, Human
caccggacagggcuuuuccag

SEQ ID NO: 103333 - RNA, 23 nt, Human
cagaacccagacuugaaaccugu

SEQ ID NO: 103334 - RNA, 25 nt, Human
cagcaaagaagcgcaacuuaacaca

SEQ ID NO: 103335 - RNA, 19 nt, Human
cagccgagccagcacugug

SEQ ID NO: 103336 - RNA, 28 nt, Human
caggagcagggcaugaguggcgaacacg

SEQ ID NO: 103337 - RNA, 19 nt, Human
caggccccccaggaguccc

SEQ ID NO: 103338 - RNA, 21 nt, Human
cagugaggggaaugguggggg

SEQ ID NO: 103339 - RNA, 22 nt, Human
cauccugggagguccuauccuc

SEQ ID NO: 103340 - RNA, 21 nt, Human
ccacccacaucacagcaaaga

SEQ ID NO: 103341 - RNA, 25 nt, Human
ccacccacaucacagcaaagaagcg

SEQ ID NO: 103342 - RNA, 26 nt, Human
ccagaacccagacuugaaaccugugc

SEQ ID NO: 103343 - RNA, 20 nt, Human
ccagaggcuggccucacaaa

SEQ ID NO: 103344 - RNA, 20 nt, Human
ccagaggcuggccucacaaa

SEQ ID NO: 103345 - RNA, 23 nt, Human
ccagcucccggccggcggccggg

SEQ ID NO: 103346 - RNA, 21 nt, Human
ccaggagucccucuccuccca

SEQ ID NO: 103347 - RNA, 22 nt, Human
cccaagccagggcugcugggaa

SEQ ID NO: 103348 - RNA, 24 nt, Human
cccacaucacagcaaagaagcgca

SEQ ID NO: 103349 - RNA, 18 nt, Human
ccccacccacaucacagc

SEQ ID NO: 103350 - RNA, 21 nt, Human
ccccacccacaucacagcaaa

SEQ ID NO: 103351 - RNA, 18 nt, Human
ccccaggagucccucucc

SEQ ID NO: 103352 - RNA, 21 nt, Human
cccccaagccagggcugcugg

SEQ ID NO: 103353 - RNA, 19 nt, Human
ccccccaggagucccucuc

SEQ ID NO: 103354 - RNA, 19 nt, Human
cccccgggacuggacacga

SEQ ID NO: 103355 - RNA, 21 nt, Human
cccccgggacuggacacgaag

SEQ ID NO: 103356 - RNA, 19 nt, Human
ccccgccugggggcacagg

SEQ ID NO: 103357 - RNA, 19 nt, Human
cccgcacagaacuaguuua

SEQ ID NO: 103358 - RNA, 19 nt, Human
ccucccccacccacaucac

SEQ ID NO: 103359 - RNA, 19 nt, Human
ccuggggcaaggggaaggg

SEQ ID NO: 103360 - RNA, 20 nt, Human
ccuucugcccccucaccgga

SEQ ID NO: 103361 - RNA, 19 nt, Human
cgccugggggcacaggcuc

SEQ ID NO: 103362 - RNA, 21 nt, Human
cggcagaaaagccagaggcug

SEQ ID NO: 103363 - RNA, 19 nt, Human
cggcuccuccuccggcucc

SEQ ID NO: 103364 - RNA, 22 nt, Human
cgggacuggacacgaacccauc

SEQ ID NO: 103365 - RNA, 23 nt, Human
cggggagaaagaggaacaggacc

SEQ ID NO: 103366 - RNA, 22 nt, Human
cuaccauauuuacagcaacaac

SEQ ID NO: 103367 - RNA, 23 nt, Human
cucacaaaugagaaacaggagcc

SEQ ID NO: 103368 - RNA, 21 nt, Human
cucccccacccacaucacagc

SEQ ID NO: 103369 - RNA, 23 nt, Human
cugauuuuggggggugggguggg

SEQ ID NO: 103370 - RNA, 20 nt, Human
cugcccggggcgcggggcgg

SEQ ID NO: 103371 - RNA, 18 nt, Human
cugcguguggcuuugucc

SEQ ID NO: 103372 - RNA, 24 nt, Human
cuggccucacaaaugagaaacagg

SEQ ID NO: 103373 - RNA, 26 nt, Human
cuuuugggucagcaacugagcaaaca

SEQ ID NO: 103374 - RNA, 21 nt, Human
gaaugguggggggggaguugg

SEQ ID NO: 103375 - RNA, 20 nt, Human
gacagggcuuuuccaguucc

SEQ ID NO: 103376 - RNA, 20 nt, Human
gacccccgggacuggacacg

SEQ ID NO: 103377 - RNA, 19 nt, Human
gacguuucgucgcugcugc

SEQ ID NO: 103378 - RNA, 20 nt, Human
gagcugggguggagucgggg

SEQ ID NO: 103379 - RNA, 22 nt, Human
gauuuugggggguggggugggu

SEQ ID NO: 103380 - RNA, 19 nt, Human
gcaugagugcggcugggga

SEQ ID NO: 103381 - RNA, 20 nt, Human
gccagaguccaggaaaagga

SEQ ID NO: 103382 - RNA, 18 nt, Human
gcccggggcgcggggcgg

SEQ ID NO: 103383 - RNA, 31 nt, Human
gccgggucaacggcggcggcggcuccuccuu

SEQ ID NO: 103384 - RNA, 19 nt, Human
gccugcccggggcgcgggg

SEQ ID NO: 103385 - RNA, 18 nt, Human
gcguguggcuuuguccuu

SEQ ID NO: 103386 - RNA, 19 nt, Human
gcugaggggagaagacagg

SEQ ID NO: 103387 - RNA, 20 nt, Human
gcugaguccuucugcccccu

SEQ ID NO: 103388 - RNA, 21 nt, Human
ggcaggacgagacacacccuu

SEQ ID NO: 103389 - RNA, 22 nt, Human
ggccuggggcaaggggaagggc

SEQ ID NO: 103390 - RNA, 19 nt, Human
ggcgauggggagcggggca

SEQ ID NO: 103391 - RNA, 21 nt, Human
ggcuggggcugcccgaccccc

SEQ ID NO: 103392 - RNA, 24 nt, Human
gggaaugguggggggggaguuggc

SEQ ID NO: 103393 - RNA, 21 nt, Human
gggcaggacgagacacacccu

SEQ ID NO: 103394 - RNA, 22 nt, Human
gggcaggacgagacacacccuu

SEQ ID NO: 103395 - RNA, 18 nt, Human
ggggaauggugggggggg

SEQ ID NO: 103396 - RNA, 23 nt, Human
gggggaguuggcacuagauggcc

SEQ ID NO: 103397 - RNA, 18 nt, Human
gugacucagaugaaaagc

SEQ ID NO: 103398 - RNA, 21 nt, Human
gugcagccugaagggugugaa

SEQ ID NO: 103399 - RNA, 25 nt, Human
uaaaaaaaaugaaucccugaaguca

SEQ ID NO: 103400 - RNA, 24 nt, Human
uagguggggugaguaccccucccg

SEQ ID NO: 103401 - RNA, 21 nt, Human
uauuaacucucucuucacagg

SEQ ID NO: 103402 - RNA, 27 nt, Human
ucaacggcggcggcggcuccuccuccg

SEQ ID NO: 103403 - RNA, 19 nt, Human
ucaagcccccaagccaggg

SEQ ID NO: 103404 - RNA, 18 nt, Human
ucacaaaugagaaacagg

SEQ ID NO: 103405 - RNA, 23 nt, Human
ucagacccccgggacuggacacg

SEQ ID NO: 103406 - RNA, 25 nt, Human
uccaaagugcagugaggggaauggu

SEQ ID NO: 103407 - RNA, 26 nt, Human
uccaggaaaaggagaggggcuggggc

SEQ ID NO: 103408 - RNA, 23 nt, Human
ucccccacccacaucacagcaaa

SEQ ID NO: 103409 - RNA, 21 nt, Human
ucuagccaccugcuccagaag

SEQ ID NO: 103410 - RNA, 19 nt, Human
ugaaaaaacaacaacaaca

SEQ ID NO: 103411 - RNA, 23 nt, Human
ugaaaagcagucggcaaaacuga

SEQ ID NO: 103412 - RNA, 19 nt, Human
ugacucagaugaaaagcag

SEQ ID NO: 103413 - RNA, 23 nt, Human
ugagcaaacaccugggcugcugu

SEQ ID NO: 103414 - RNA, 19 nt, Human
ugaggagaggggaggagag

SEQ ID NO: 103415 - RNA, 18 nt, Human
ugaggggaaugguggggg

SEQ ID NO: 103416 - RNA, 21 nt, Human
ugauggcguaugaggggcagg

SEQ ID NO: 103417 - RNA, 20 nt, Human
ugcagccugaagggugugaa

SEQ ID NO: 103418 - RNA, 24 nt, Human
ugcagugaggggaauggugggggg

SEQ ID NO: 103419 - RNA, 22 nt, Human
ugcccgacccccgccugggggc

SEQ ID NO: 103420 - RNA, 21 nt, Human
ugcccuggccccucaccguuc

SEQ ID NO: 103421 - RNA, 23 nt, Human
uggaguaaauggugacucagaug

SEQ ID NO: 103422 - RNA, 22 nt, Human
ugggaagggaaaggggagucaa

SEQ ID NO: 103423 - RNA, 19 nt, Human
ugggagaggcagugcgggc

SEQ ID NO: 103424 - RNA, 20 nt, Human
ugggggguggggugggugag

SEQ ID NO: 103425 - RNA, 18 nt, Human
ugggguggagucggggag

SEQ ID NO: 103426 - RNA, 25 nt, Human
ugggguggagucggggagaaagagg

SEQ ID NO: 103427 - RNA, 19 nt, Human
uggggugggugaguggaca

SEQ ID NO: 103428 - RNA, 18 nt, Human
ugguggggggggaguugg

SEQ ID NO: 103429 - RNA, 23 nt, Human
ugucucagaggccacagcagguu

SEQ ID NO: 103430 - RNA, 18 nt, Human
uguuggccccaggggucc

SEQ ID NO: 103431 - RNA, 20 nt, Human
uguuuacucuuccuccccca

SEQ ID NO: 103432 - RNA, 26 nt, Human
uuaacacaugacuggccugcccgggg

SEQ ID NO: 103433 - RNA, 20 nt, Human
uuuccugcccacagccucuu

SEQ ID NO: 103434 - RNA, 20 nt, Human
uuucuuuccugcccacagcc

SEQ ID NO: 103435 - RNA, 19 nt, Human
aaaauagcaaaaguaagag

SEQ ID NO: 103436 - RNA, 30 nt, Human
aaacaaaguaaaaacauuuuuugaaucugg

SEQ ID NO: 103437 - RNA, 18 nt, Human
aaagagggccgcugggcu

SEQ ID NO: 103438 - RNA, 22 nt, Human
aaagagggccgcugggcuggag

SEQ ID NO: 103439 - RNA, 22 nt, Human
aaccccagagaggggcaucuac

SEQ ID NO: 103440 - RNA, 21 nt, Human
aaccccccaggagacagaaaa

SEQ ID NO: 103441 - RNA, 21 nt, Human
aagaccaacccccagccccag

SEQ ID NO: 103442 - RNA, 24 nt, Human
aagcccccaugaggaagucagagg

SEQ ID NO: 103443 - RNA, 23 nt, Human
aaugaccccuccaccgacccucu

SEQ ID NO: 103444 - RNA, 21 nt, Human
acauaauaaacacacacaucc

SEQ ID NO: 103445 - RNA, 25 nt, Human
accagcaccccacagcaucaguccu

SEQ ID NO: 103446 - RNA, 25 nt, Human
acccccagccccagaaguuuggccu

SEQ ID NO: 103447 - RNA, 20 nt, Human
accuggggguuagaaaaccc

SEQ ID NO: 103448 - RNA, 18 nt, Human
acgcugcugccgccuccc

SEQ ID NO: 103449 - RNA, 24 nt, Human
agacacccucccacccccagcagg

SEQ ID NO: 103450 - RNA, 23 nt, Human
agacagaaaagcugaaaaauaac

SEQ ID NO: 103451 - RNA, 22 nt, Human
agacaggaaagagggccgcugg

SEQ ID NO: 103452 - RNA, 18 nt, Human
agaccaacccccagcccc

SEQ ID NO: 103453 - RNA, 18 nt, Human
agcaggaggcugccuugg

SEQ ID NO: 103454 - RNA, 22 nt, Human
aggaagucagaggaccccuguu

SEQ ID NO: 103455 - RNA, 22 nt, Human
agggacuccacauaauaaacac

SEQ ID NO: 103456 - RNA, 21 nt, Human
aguggcaccuacauucugggu

SEQ ID NO: 103457 - RNA, 22 nt, Human
auaggaggcaguggcaccuaca

SEQ ID NO: 103458 - RNA, 24 nt, Human
auggagccucagcccugccacacc

SEQ ID NO: 103459 - RNA, 23 nt, Human
caaaguguaaaacucaaaguuuu

SEQ ID NO: 103460 - RNA, 24 nt, Human
caacauggcucccggccgccccga

SEQ ID NO: 103461 - RNA, 19 nt, Human
caagaccaacccccagccc

SEQ ID NO: 103462 - RNA, 20 nt, Human
caagucccucucccacuuuc

SEQ ID NO: 103463 - RNA, 23 nt, Human
caccaggaggggcgguaugagca

SEQ ID NO: 103464 - RNA, 22 nt, Human
caccccccagcccugcacagcc

SEQ ID NO: 103465 - RNA, 23 nt, Human
caccccccagcccugcacagcca

SEQ ID NO: 103466 - RNA, 19 nt, Human
caccgccccccgccccggu

SEQ ID NO: 103467 - RNA, 21 nt, Human
caccgccccccgccccggucc

SEQ ID NO: 103468 - RNA, 20 nt, Human
cacggccuccaccgcccccc

SEQ ID NO: 103469 - RNA, 22 nt, Human
cacucucccccgugguuagagg

SEQ ID NO: 103470 - RNA, 19 nt, Human
cacuuggaaacaaaggaaa

SEQ ID NO: 103471 - RNA, 21 nt, Human
cagcccaggugccuagggcca

SEQ ID NO: 103472 - RNA, 23 nt, Human
cagccucaaaccccccaggagac

SEQ ID NO: 103473 - RNA, 25 nt, Human
cagccucaaaccccccaggagacag

SEQ ID NO: 103474 - RNA, 19 nt, Human
cagcugcuccaccagcacc

SEQ ID NO: 103475 - RNA, 20 nt, Human
cauaguaaagacacccuccc

SEQ ID NO: 103476 - RNA, 21 nt, Human
cauaguaaagacacccuccca

SEQ ID NO: 103477 - RNA, 18 nt, Human
ccaacccccagccccaga

SEQ ID NO: 103478 - RNA, 21 nt, Human
ccaccacuggggagcaggagg

SEQ ID NO: 103479 - RNA, 18 nt, Human
ccaccgccccccgccccg

SEQ ID NO: 103480 - RNA, 20 nt, Human
ccaccgccccccgccccggg

SEQ ID NO: 103481 - RNA, 20 nt, Human
ccacuccuggagucucuccu

SEQ ID NO: 103482 - RNA, 21 nt, Human
ccacuccuggagucucuccug

SEQ ID NO: 103483 - RNA, 18 nt, Human
ccagcccagccucaaacc

SEQ ID NO: 103484 - RNA, 19 nt, Human
cccaccacagcauccccga

SEQ ID NO: 103485 - RNA, 23 nt, Human
cccaccacuggggagcaggaggc

SEQ ID NO: 103486 - RNA, 22 nt, Human
cccacccaucugaguccacccc

SEQ ID NO: 103487 - RNA, 23 nt, Human
cccagcccagccucaaacccccc

SEQ ID NO: 103488 - RNA, 23 nt, Human
cccagccucaaaccccccaggag

SEQ ID NO: 103489 - RNA, 23 nt, Human
cccaugaggaagucagaggaccc

SEQ ID NO: 103490 - RNA, 23 nt, Human
ccccagagaggggcaucuacgaa

SEQ ID NO: 103491 - RNA, 19 nt, Human
ccccagcaggccacucagc

SEQ ID NO: 103492 - RNA, 21 nt, Human
ccccagcccugcacagccacu

SEQ ID NO: 103493 - RNA, 22 nt, Human
cccccagcaggccacucagccc

SEQ ID NO: 103494 - RNA, 22 nt, Human
cccccagccccagaaguuuggc

SEQ ID NO: 103495 - RNA, 23 nt, Human
cccccagccccagaaguuuggcc

SEQ ID NO: 103496 - RNA, 19 nt, Human
ccccccgccccgguccggg

SEQ ID NO: 103497 - RNA, 19 nt, Human
ccccgacgcugcugccgcc

SEQ ID NO: 103498 - RNA, 24 nt, Human
ccccgccccuccgccugucucucc

SEQ ID NO: 103499 - RNA, 26 nt, Human
ccccgccgcccucugggcaccaucua

SEQ ID NO: 103500 - RNA, 19 nt, Human
ccccgggcccccgccccuc

SEQ ID NO: 103501 - RNA, 20 nt, Human
cccucagcuguuccucgucc

SEQ ID NO: 103502 - RNA, 22 nt, Human
cccucccacccccagcaggcca

SEQ ID NO: 103503 - RNA, 21 nt, Human
cccuccggcgugcggcccugg

SEQ ID NO: 103504 - RNA, 23 nt, Human
cccucuaucucccucccccuccc

SEQ ID NO: 103505 - RNA, 25 nt, Human
cccugcacggccuccaccgcccccc

SEQ ID NO: 103506 - RNA, 24 nt, Human
ccgcccccaccacagcauccccga

SEQ ID NO: 103507 - RNA, 20 nt, Human
ccgccccgggcccccgcccc

SEQ ID NO: 103508 - RNA, 18 nt, Human
ccgccucccugcacggcc

SEQ ID NO: 103509 - RNA, 21 nt, Human
ccgccugucucuccgcacccc

SEQ ID NO: 103510 - RNA, 25 nt, Human
ccggcgugcggcccuggcuuuuucc

SEQ ID NO: 103511 - RNA, 20 nt, Human
ccgggccccugccgccgccc

SEQ ID NO: 103512 - RNA, 23 nt, Human
ccgggccccugccgccgccccgg

SEQ ID NO: 103513 - RNA, 18 nt, Human
ccuaccuuucacuuggaa

SEQ ID NO: 103514 - RNA, 22 nt, Human
ccuacucucaaggucuucugga

SEQ ID NO: 103515 - RNA, 21 nt, Human
ccuaggacauaguaaagacac

SEQ ID NO: 103516 - RNA, 20 nt, Human
ccucugggcaccaucuacuc

SEQ ID NO: 103517 - RNA, 24 nt, Human
ccucugggcaccaucuacuccgcg

SEQ ID NO: 103518 - RNA, 23 nt, Human
ccugcagcccaggugccuagggc

SEQ ID NO: 103519 - RNA, 24 nt, Human
ccugcagcccaggugccuagggcc

SEQ ID NO: 103520 - RNA, 21 nt, Human
cgacaucagcugcuccaccag

SEQ ID NO: 103521 - RNA, 24 nt, Human
cgccccgggcccccgccccuccgc

SEQ ID NO: 103522 - RNA, 23 nt, Human
cgccgcccucugggcaccaucua

SEQ ID NO: 103523 - RNA, 22 nt, Human
cgccuacucucaaggucuucug

SEQ ID NO: 103524 - RNA, 25 nt, Human
cgggcccccucccgggccccugccg

SEQ ID NO: 103525 - RNA, 23 nt, Human
cucagcccuucaagagcuggggu

SEQ ID NO: 103526 - RNA, 22 nt, Human
cuccagucccccgucucugcac

SEQ ID NO: 103527 - RNA, 21 nt, Human
cucccacccccagcaggccac

SEQ ID NO: 103528 - RNA, 25 nt, Human
cucccgccucccugcacggccucca

SEQ ID NO: 103529 - RNA, 23 nt, Human
cucccgggccccugccgccgccc

SEQ ID NO: 103530 - RNA, 24 nt, Human
cucccucuaucucccucccccucc

SEQ ID NO: 103531 - RNA, 19 nt, Human
cugcacagaccacccccca

SEQ ID NO: 103532 - RNA, 20 nt, Human
cugccgccucccgccgcucc

SEQ ID NO: 103533 - RNA, 19 nt, Human
cugcuccaccagcacccca

SEQ ID NO: 103534 - RNA, 19 nt, Human
cuggccccgccgcucgggc

SEQ ID NO: 103535 - RNA, 18 nt, Human
cuucaagagcuggggucc

SEQ ID NO: 103536 - RNA, 18 nt, Human
cuucccacccuacccuuc

SEQ ID NO: 103537 - RNA, 20 nt, Human
cuugggcuggccccgccgcu

SEQ ID NO: 103538 - RNA, 25 nt, Human
gaccccuguuuccaagaccaacccc

SEQ ID NO: 103539 - RNA, 19 nt, Human
gagcaggaggcugccuugg

SEQ ID NO: 103540 - RNA, 22 nt, Human
gaggaggggaaccccagagagg

SEQ ID NO: 103541 - RNA, 26 nt, Human
gaggcaguggcaccuacauucugggu

SEQ ID NO: 103542 - RNA, 24 nt, Human
gauccuguaaacauaggaggcagu

SEQ ID NO: 103543 - RNA, 18 nt, Human
gcaccuacauucuggguc

SEQ ID NO: 103544 - RNA, 21 nt, Human
gcaccugucacacgcaugcuc

SEQ ID NO: 103545 - RNA, 24 nt, Human
gccgccccgggcccccgccccucc

SEQ ID NO: 103546 - RNA, 18 nt, Human
gccgccucccgccgcucc

SEQ ID NO: 103547 - RNA, 18 nt, Human
gccugucucuccgcaccc

SEQ ID NO: 103548 - RNA, 20 nt, Human
gcucgggcccccucccgggc

SEQ ID NO: 103549 - RNA, 21 nt, Human
gcucgggcccccucccgggcc

SEQ ID NO: 103550 - RNA, 18 nt, Human
gcugaccuucggccuggg

SEQ ID NO: 103551 - RNA, 22 nt, Human
gcugaccuucggccugggagac

SEQ ID NO: 103552 - RNA, 19 nt, Human
ggagacagggaagccuugc

SEQ ID NO: 103553 - RNA, 19 nt, Human
ggaguggaacggagucacu

SEQ ID NO: 103554 - RNA, 19 nt, Human
gggaauaaaggaggagugg

SEQ ID NO: 103555 - RNA, 19 nt, Human
gggcccccgccccuccgcc

SEQ ID NO: 103556 - RNA, 18 nt, Human
ggggaaccccagagaggg

SEQ ID NO: 103557 - RNA, 24 nt, Human
gggggcagugucagggaaucaaau

SEQ ID NO: 103558 - RNA, 19 nt, Human
ggguggugggugaggaggu

SEQ ID NO: 103559 - RNA, 21 nt, Human
guccuucucgguaaggagagu

SEQ ID NO: 103560 - RNA, 20 nt, Human
gucugcacagaccacccccc

SEQ ID NO: 103561 - RNA, 21 nt, Human
guuacaaagguacaaaacgua

SEQ ID NO: 103562 - RNA, 24 nt, Human
uaaacaguaacaaaauuuuaaagu

SEQ ID NO: 103563 - RNA, 22 nt, Human
uaaacauaggaggcaguggcac

SEQ ID NO: 103564 - RNA, 18 nt, Human
uaaggagaguuugggucc

SEQ ID NO: 103565 - RNA, 18 nt, Human
uaagggaauaaaggagga

SEQ ID NO: 103566 - RNA, 25 nt, Human
uaauaaacacacacauccaccagga

SEQ ID NO: 103567 - RNA, 21 nt, Human
uagaggcccgagccccucccc

SEQ ID NO: 103568 - RNA, 22 nt, Human
uaucucccucccccucccagcc

SEQ ID NO: 103569 - RNA, 26 nt, Human
ucaaaccccccaggagaccggguguc

SEQ ID NO: 103570 - RNA, 19 nt, Human
ucagcccuucaagagcugg

SEQ ID NO: 103571 - RNA, 22 nt, Human
ucaguccuaggucauaaggcag

SEQ ID NO: 103572 - RNA, 21 nt, Human
uccaagaccaacccccagccc

SEQ ID NO: 103573 - RNA, 21 nt, Human
uccacauaauaaacacacaca

SEQ ID NO: 103574 - RNA, 24 nt, Human
uccacauaauaaacacacacaucc

SEQ ID NO: 103575 - RNA, 18 nt, Human
uccaccagcaccccacag

SEQ ID NO: 103576 - RNA, 20 nt, Human
uccagucagggaaguagaau

SEQ ID NO: 103577 - RNA, 18 nt, Human
ucccacccuacccuucgg

SEQ ID NO: 103578 - RNA, 20 nt, Human
ucccagcccagccucaaacc

SEQ ID NO: 103579 - RNA, 22 nt, Human
ucccagcccagccucaaacccc

SEQ ID NO: 103580 - RNA, 19 nt, Human
ucccccgucucugcaccug

SEQ ID NO: 103581 - RNA, 22 nt, Human
ucccccgucucugcaccuguca

SEQ ID NO: 103582 - RNA, 20 nt, Human
uccccgacgcugcugccgcc

SEQ ID NO: 103583 - RNA, 22 nt, Human
ucccgggccccugccgccgccc

SEQ ID NO: 103584 - RNA, 19 nt, Human
ucccucuaucucccucccc

SEQ ID NO: 103585 - RNA, 23 nt, Human
ucccugcacggccuccaccgccc

SEQ ID NO: 103586 - RNA, 21 nt, Human
uccucugucgcccucagcugu

SEQ ID NO: 103587 - RNA, 21 nt, Human
uccuguaaacauaggaggcag

SEQ ID NO: 103588 - RNA, 26 nt, Human
ucgggcccccucccgggccccugccg

SEQ ID NO: 103589 - RNA, 26 nt, Human
ucuacgaaaccuaggacauaguaaag

SEQ ID NO: 103590 - RNA, 20 nt, Human
ucuccgcacccccgccgccc

SEQ ID NO: 103591 - RNA, 22 nt, Human
ucucuccgcacccccgccgccc

SEQ ID NO: 103592 - RNA, 18 nt, Human
ucugaguccaccccagga

SEQ ID NO: 103593 - RNA, 25 nt, Human
ucuguaaacacgacaucagcugcuc

SEQ ID NO: 103594 - RNA, 20 nt, Human
ugaacagggucguaacaguc

SEQ ID NO: 103595 - RNA, 22 nt, Human
ugacgauacucagaucaacuug

SEQ ID NO: 103596 - RNA, 26 nt, Human
ugacgauacucagaucaacuuggggg

SEQ ID NO: 103597 - RNA, 20 nt, Human
ugacuagaggcccgagcccc

SEQ ID NO: 103598 - RNA, 24 nt, Human
ugagcaagcccccaugaggaaguc

SEQ ID NO: 103599 - RNA, 23 nt, Human
ugcacagaccaccccccagcccu

SEQ ID NO: 103600 - RNA, 18 nt, Human
ugccgccucccgccgcuc

SEQ ID NO: 103601 - RNA, 18 nt, Human
uggaauagggggaggaag

SEQ ID NO: 103602 - RNA, 20 nt, Human
uggacagcagacaaaauagc

SEQ ID NO: 103603 - RNA, 18 nt, Human
uggagccucagcccugcc

SEQ ID NO: 103604 - RNA, 18 nt, Human
uggcaccacagacaacuu

SEQ ID NO: 103605 - RNA, 18 nt, Human
uggcaccuacauucuggg

SEQ ID NO: 103606 - RNA, 21 nt, Human
uggcagggacuccacauaaua

SEQ ID NO: 103607 - RNA, 21 nt, Human
ugggccccugacgauacucag

SEQ ID NO: 103608 - RNA, 19 nt, Human
ugggcuggaggaggggaac

SEQ ID NO: 103609 - RNA, 20 nt, Human
uggggguggaauagggggag

SEQ ID NO: 103610 - RNA, 19 nt, Human
ugggguggugggugaggag

SEQ ID NO: 103611 - RNA, 19 nt, Human
ugggguggugggugaggag

SEQ ID NO: 103612 - RNA, 24 nt, Human
uguaaacaaaguguaaaacucaaa

SEQ ID NO: 103613 - RNA, 30 nt, Human
ugucacacgcaugcucacagaugcacaugg

SEQ ID NO: 103614 - RNA, 20 nt, Human
ugucccacccaucugagucc

SEQ ID NO: 103615 - RNA, 23 nt, Human
uguuaaacgggacucaaggcuga

SEQ ID NO: 103616 - RNA, 24 nt, Human
uuagaaaaccccucaagauggcca

SEQ ID NO: 103617 - RNA, 25 nt, Human
uucaagcagggggcagugucaggga

SEQ ID NO: 103618 - RNA, 18 nt, Human
uuccaagaccaaccccca

SEQ ID NO: 103619 - RNA, 21 nt, Human
uuggccuuuggagcauucaau

SEQ ID NO: 103620 - RNA, 23 nt, Human
uuuccaagaccaacccccagccc

SEQ ID NO: 103621 - RNA, 21 nt, Human
uuugcucaccuucccacccua

SEQ ID NO: 103622 - RNA, 22 nt, Human
aaauucuccaaguuagaauuuc

SEQ ID NO: 103623 - RNA, 21 nt, Human
aaguaaccagaacaucaaagc

SEQ ID NO: 103624 - RNA, 22 nt, Human
aaugcccagccuuccaggcaac

SEQ ID NO: 103625 - RNA, 20 nt, Human
acaaaaauacccauaaaagc

SEQ ID NO: 103626 - RNA, 19 nt, Human
acacauccguugacaagca

SEQ ID NO: 103627 - RNA, 21 nt, Human
acccauaaaagcaucgaaaau

SEQ ID NO: 103628 - RNA, 22 nt, Human
accucuguuacagaggaaaguc

SEQ ID NO: 103629 - RNA, 19 nt, Human
agaacaucaaagcuuacag

SEQ ID NO: 103630 - RNA, 22 nt, Human
agacagcaaaguccagacagca

SEQ ID NO: 103631 - RNA, 19 nt, Human
agacagcaucgcagaaucc

SEQ ID NO: 103632 - RNA, 20 nt, Human
agagacagcaaaguccagac

SEQ ID NO: 103633 - RNA, 25 nt, Human
agccggugcuuggcagaaguccgcg

SEQ ID NO: 103634 - RNA, 20 nt, Human
auuacagaaagagcuaaaau

SEQ ID NO: 103635 - RNA, 24 nt, Human
caaaaauacccauaaaagcaucga

SEQ ID NO: 103636 - RNA, 19 nt, Human
caaaauccucaaauaguca

SEQ ID NO: 103637 - RNA, 22 nt, Human
caggcaacugcucaaagugguc

SEQ ID NO: 103638 - RNA, 26 nt, Human
ccacagcaaaucugauguuguccgga

SEQ ID NO: 103639 - RNA, 21 nt, Human
cccauaccacagcaaaucuga

SEQ ID NO: 103640 - RNA, 21 nt, Human
cuaauggugaggcuacucuga

SEQ ID NO: 103641 - RNA, 20 nt, Human
gacaggaauuuacuagaagu

SEQ ID NO: 103642 - RNA, 19 nt, Human
gagaguccccgguaucauc

SEQ ID NO: 103643 - RNA, 20 nt, Human
gaguaacucacaaacuaaag

SEQ ID NO: 103644 - RNA, 19 nt, Human
gcagagggugcuggcgccc

SEQ ID NO: 103645 - RNA, 20 nt, Human
ggagaguccccgguaucauc

SEQ ID NO: 103646 - RNA, 22 nt, Human
uaaaaaauguaaauauuacaga

SEQ ID NO: 103647 - RNA, 22 nt, Human
uaaauauuacagaaagagcuaa

SEQ ID NO: 103648 - RNA, 21 nt, Human
uacccauaaaagcaucgaaaa

SEQ ID NO: 103649 - RNA, 18 nt, Human
uaccucuguuacagagga

SEQ ID NO: 103650 - RNA, 23 nt, Human
uaccucuguuacagaggaaaguc

SEQ ID NO: 103651 - RNA, 19 nt, Human
uacucugaagggcagaggu

SEQ ID NO: 103652 - RNA, 22 nt, Human
uauuaccucuguuacagaggaa

SEQ ID NO: 103653 - RNA, 23 nt, Human
uccagacagcaucgcagaaucca

SEQ ID NO: 103654 - RNA, 19 nt, Human
uccaggcaacugcucaaag

SEQ ID NO: 103655 - RNA, 20 nt, Human
ucccacggcuccugcucggg

SEQ ID NO: 103656 - RNA, 19 nt, Human
ucccauaccacagcaaauc

SEQ ID NO: 103657 - RNA, 23 nt, Human
ucccuuauguguaaaauaaaagu

SEQ ID NO: 103658 - RNA, 23 nt, Human
ucucauauauuaccucuguuaca

SEQ ID NO: 103659 - RNA, 18 nt, Human
ucucccauaccacagcaa

SEQ ID NO: 103660 - RNA, 24 nt, Human
ucuccuucucaaaaaaaagaaaaa

SEQ ID NO: 103661 - RNA, 20 nt, Human
ucucuacaaagaaacuacaa

SEQ ID NO: 103662 - RNA, 25 nt, Human
ucucucuacaaagaaacuacaaaaa

SEQ ID NO: 103663 - RNA, 23 nt, Human
ucuucuaugauuuacaagaguug

SEQ ID NO: 103664 - RNA, 20 nt, Human
ugaaaagcuacacauccguu

SEQ ID NO: 103665 - RNA, 23 nt, Human
ugccggguccgggagcgaaaggc

SEQ ID NO: 103666 - RNA, 24 nt, Human
uuacagguuuucuauucaucccca

SEQ ID NO: 103667 - RNA, 20 nt, Human
uucaaaauccucaaauaguc

SEQ ID NO: 103668 - RNA, 27 nt, Human
uuccaggcaacugcucaaaguggucuu

SEQ ID NO: 103669 - RNA, 18 nt, Human
aaaacguucacccccaca

SEQ ID NO: 103670 - RNA, 19 nt, Human
aaccaggcgaugagcaagc

SEQ ID NO: 103671 - RNA, 18 nt, Human
aagcaggcucaggagccc

SEQ ID NO: 103672 - RNA, 20 nt, Human
aagucacauggacagggcca

SEQ ID NO: 103673 - RNA, 20 nt, Human
accaggcgaugagcaagccc

SEQ ID NO: 103674 - RNA, 19 nt, Human
acccccacaaaaggggagu

SEQ ID NO: 103675 - RNA, 23 nt, Human
agagggaggagaggcauggggcc

SEQ ID NO: 103676 - RNA, 23 nt, Human
agcccagggccaaauggggagga

SEQ ID NO: 103677 - RNA, 19 nt, Human
aggcagaagcaggcucagg

SEQ ID NO: 103678 - RNA, 20 nt, Human
aggcagaagcaggcucagga

SEQ ID NO: 103679 - RNA, 20 nt, Human
aggcggccuggggggugggg

SEQ ID NO: 103680 - RNA, 22 nt, Human
agggagacagcuuguuggucuu

SEQ ID NO: 103681 - RNA, 18 nt, Human
agggaggagaggcauggg

SEQ ID NO: 103682 - RNA, 26 nt, Human
caaggcggccuggggggugggggugg

SEQ ID NO: 103683 - RNA, 22 nt, Human
cacccgccccaccugguccccu

SEQ ID NO: 103684 - RNA, 21 nt, Human
cagccccaggccccucugccc

SEQ ID NO: 103685 - RNA, 21 nt, Human
cagcgggugcccagagagucc

SEQ ID NO: 103686 - RNA, 19 nt, Human
caggaccaggggaagcauu

SEQ ID NO: 103687 - RNA, 27 nt, Human
caggagcccgcagugaguuaaacugug

SEQ ID NO: 103688 - RNA, 24 nt, Human
ccaaauggggaggaaagaggauuc

SEQ ID NO: 103689 - RNA, 18 nt, Human
ccaccaaagaccugacgu

SEQ ID NO: 103690 - RNA, 20 nt, Human
ccagggccaaauggggagga

SEQ ID NO: 103691 - RNA, 28 nt, Human
cccacccgccccaccugguccccugagc

SEQ ID NO: 103692 - RNA, 21 nt, Human
ccccaccugguccccugagcc

SEQ ID NO: 103693 - RNA, 21 nt, Human
cccccacaaaaggggagugga

SEQ ID NO: 103694 - RNA, 18 nt, Human
ccccugagcccagggcca

SEQ ID NO: 103695 - RNA, 24 nt, Human
ccccugagcccagggccaaauggg

SEQ ID NO: 103696 - RNA, 24 nt, Human
ccuccagggcccaucccuggcugc

SEQ ID NO: 103697 - RNA, 18 nt, Human
ccuucccagaauggcuuu

SEQ ID NO: 103698 - RNA, 23 nt, Human
ccuugcagggggccuaggcugga

SEQ ID NO: 103699 - RNA, 19 nt, Human
cgcagguccggauucuccu

SEQ ID NO: 103700 - RNA, 20 nt, Human
cuaugcgcagcgccuucucc

SEQ ID NO: 103701 - RNA, 26 nt, Human
cucagccccgggcccggccgagguga

SEQ ID NO: 103702 - RNA, 22 nt, Human
cuccucggcuaugcgcagcgcc

SEQ ID NO: 103703 - RNA, 22 nt, Human
cucugggcccagccccaggccc

SEQ ID NO: 103704 - RNA, 23 nt, Human
cugcacucuggcuccaugcacag

SEQ ID NO: 103705 - RNA, 23 nt, Human
cuggaugauccgugacuucuccc

SEQ ID NO: 103706 - RNA, 21 nt, Human
gacuggggagguggaaggucc

SEQ ID NO: 103707 - RNA, 19 nt, Human
gaggcugaccucagccccg

SEQ ID NO: 103708 - RNA, 18 nt, Human
gcauggggccugcagcug

SEQ ID NO: 103709 - RNA, 19 nt, Human
gcccagccccaggccccuc

SEQ ID NO: 103710 - RNA, 24 nt, Human
gccccgggcccggccgaggugacc

SEQ ID NO: 103711 - RNA, 19 nt, Human
gcgcccuugguuacuucca

SEQ ID NO: 103712 - RNA, 21 nt, Human
gcuccgacgccaggauggcgc

SEQ ID NO: 103713 - RNA, 24 nt, Human
gcugaccucagccccgggcccggc

SEQ ID NO: 103714 - RNA, 22 nt, Human
gcugcugugguuaguccacuga

SEQ ID NO: 103715 - RNA, 21 nt, Human
ggacagggccagagaaaggga

SEQ ID NO: 103716 - RNA, 20 nt, Human
ggacuggggagguggaaagc

SEQ ID NO: 103717 - RNA, 22 nt, Human
ggagcccuucccagaauggcuu

SEQ ID NO: 103718 - RNA, 21 nt, Human
ggauggcagaggggagaggca

SEQ ID NO: 103719 - RNA, 18 nt, Human
ggauggggcccugccaga

SEQ ID NO: 103720 - RNA, 20 nt, Human
ggcagguggaggccaccccg

SEQ ID NO: 103721 - RNA, 19 nt, Human
ggcccagccccaggccccu

SEQ ID NO: 103722 - RNA, 18 nt, Human
ggccgaggugaccgggcc

SEQ ID NO: 103723 - RNA, 23 nt, Human
ggccuaggcuggaccuucuucug

SEQ ID NO: 103724 - RNA, 19 nt, Human
ggggaggaaagaggauucu

SEQ ID NO: 103725 - RNA, 20 nt, Human
ggggggugggggugggggcu

SEQ ID NO: 103726 - RNA, 18 nt, Human
gggggugggggugggggc

SEQ ID NO: 103727 - RNA, 21 nt, Human
gggggugggggugggggcugc

SEQ ID NO: 103728 - RNA, 19 nt, Human
ggggugggggcugccagcc

SEQ ID NO: 103729 - RNA, 18 nt, Human
ggggugggggugggggcu

SEQ ID NO: 103730 - RNA, 23 nt, Human
gggugggggcugccagccuugca

SEQ ID NO: 103731 - RNA, 23 nt, Human
ggugcccagagaguccucugccc

SEQ ID NO: 103732 - RNA, 23 nt, Human
uagcaccggacagcuccccaccc

SEQ ID NO: 103733 - RNA, 21 nt, Human
ucaaggcggccuggggggugg

SEQ ID NO: 103734 - RNA, 21 nt, Human
ucagccccgggcccggccgag

SEQ ID NO: 103735 - RNA, 19 nt, Human
uccaugcacagcgggugcc

SEQ ID NO: 103736 - RNA, 25 nt, Human
uccaugcacagcgggugcccagaga

SEQ ID NO: 103737 - RNA, 22 nt, Human
ucccagaauggcuuuggggucc

SEQ ID NO: 103738 - RNA, 30 nt, Human
ucccagaauggcuuugggguccccccaccc

SEQ ID NO: 103739 - RNA, 26 nt, Human
uccccugagcccagggccaaaugggg

SEQ ID NO: 103740 - RNA, 20 nt, Human
ucccuggcugcugcuguggu

SEQ ID NO: 103741 - RNA, 22 nt, Human
ucucaaggcggccuggggggug

SEQ ID NO: 103742 - RNA, 24 nt, Human
ucuccggccgggaaccuccagggc

SEQ ID NO: 103743 - RNA, 25 nt, Human
ucuccggccgggaaccuccagggcc

SEQ ID NO: 103744 - RNA, 21 nt, Human
ucugcuggaaccaggcgauga

SEQ ID NO: 103745 - RNA, 24 nt, Human
ucuugcggcagguggaggccaccc

SEQ ID NO: 103746 - RNA, 22 nt, Human
ugccaaucuagguugggggcac

SEQ ID NO: 103747 - RNA, 25 nt, Human
ugcccagagaguccucugcccuggg

SEQ ID NO: 103748 - RNA, 19 nt, Human
ugcccugggguggugcugc

SEQ ID NO: 103749 - RNA, 21 nt, Human
ugcccuugaccggcaggccgg

SEQ ID NO: 103750 - RNA, 19 nt, Human
ugcugcugugguuagucca

SEQ ID NO: 103751 - RNA, 30 nt, Human
uggaaaccuccaaucuggaaagaaaaccaa

SEQ ID NO: 103752 - RNA, 24 nt, Human
uggaaagaaaaccaagggccaaag

SEQ ID NO: 103753 - RNA, 25 nt, Human
uggaaagcaggcagaagcaggcuca

SEQ ID NO: 103754 - RNA, 22 nt, Human
uggacagggccagagaaaggga

SEQ ID NO: 103755 - RNA, 20 nt, Human
uggacucugggcccagcccc

SEQ ID NO: 103756 - RNA, 21 nt, Human
uggauggcagaggggagaggc

SEQ ID NO: 103757 - RNA, 21 nt, Human
uggcagaggggagaggcacuc

SEQ ID NO: 103758 - RNA, 24 nt, Human
uggcagaggggagaggcacucucc

SEQ ID NO: 103759 - RNA, 18 nt, Human
uggggaggaaagaggauu

SEQ ID NO: 103760 - RNA, 20 nt, Human
ugggggcugccagccuugca

SEQ ID NO: 103761 - RNA, 19 nt, Human
ugggggguggggguggggg

SEQ ID NO: 103762 - RNA, 19 nt, Human
ugggggguggggguggggg

SEQ ID NO: 103763 - RNA, 19 nt, Human
ugugguuaguccacugagg

SEQ ID NO: 103764 - RNA, 28 nt, Human
uugcagggggccuaggcuggaccuucuu

SEQ ID NO: 103765 - RNA, 22 nt, Human
agcaagaaacgaaucgccggaa

SEQ ID NO: 103766 - RNA, 20 nt, Human
aggccgcggccaagcaauaa

SEQ ID NO: 103767 - RNA, 19 nt, Human
cacaaguaauuacaaagac

SEQ ID NO: 103768 - RNA, 22 nt, Human
cacacggaccacagcuccagga

SEQ ID NO: 103769 - RNA, 18 nt, Human
cacagcuccaggaagccg

SEQ ID NO: 103770 - RNA, 19 nt, Human
cauauauacauacauauau

SEQ ID NO: 103771 - RNA, 21 nt, Human
ccacacggaccacagcuccag

SEQ ID NO: 103772 - RNA, 22 nt, Human
ccacacggaccacagcuccagg

SEQ ID NO: 103773 - RNA, 27 nt, Human
ccacagcuccaggaagccgagcaagaa

SEQ ID NO: 103774 - RNA, 18 nt, Human
uacauauacauauauaca

SEQ ID NO: 103775 - RNA, 26 nt, Human
uacauauacauauauacauacauaua

SEQ ID NO: 103776 - RNA, 24 nt, Human
uacauauauacauacauauauuua

SEQ ID NO: 103777 - RNA, 19 nt, Human
uauacaaacuguuuuuaca

SEQ ID NO: 103778 - RNA, 24 nt, Human
uauacauauauacauacauauauu

SEQ ID NO: 103779 - RNA, 21 nt, Human
uauuccaacuauacaaacugu

SEQ ID NO: 103780 - RNA, 19 nt, Human
uuacacaaaacugaauaaa

SEQ ID NO: 103781 - RNA, 19 nt, Human
aacaaagucauuuccaaau

SEQ ID NO: 103782 - RNA, 20 nt, Human
aagcugcacuacaacaucau

SEQ ID NO: 103783 - RNA, 21 nt, Human
auaaacaaagucauuuccaaa

SEQ ID NO: 103784 - RNA, 19 nt, Human
auugaaauuaagcugcacu

SEQ ID NO: 103785 - RNA, 23 nt, Human
caaaauggccaggacccuccgcg

SEQ ID NO: 103786 - RNA, 21 nt, Human
caaaguaaagacugaauugaa

SEQ ID NO: 103787 - RNA, 19 nt, Human
caccaaaauggccaggacc

SEQ ID NO: 103788 - RNA, 23 nt, Human
caggcugaacuggucccaccaaa

SEQ ID NO: 103789 - RNA, 20 nt, Human
cccuccgcggccggcacuuc

SEQ ID NO: 103790 - RNA, 21 nt, Human
ccgcggccggcacuucagggc

SEQ ID NO: 103791 - RNA, 26 nt, Human
cugcacuacaacaucauuaccaggga

SEQ ID NO: 103792 - RNA, 24 nt, Human
uaaggaaugcuggaucuccagaga

SEQ ID NO: 103793 - RNA, 24 nt, Human
uacaacaucauuaccagggauaga

SEQ ID NO: 103794 - RNA, 19 nt, Human
uaccacaaugcauucauuu

SEQ ID NO: 103795 - RNA, 22 nt, Human
uaccagggauagacacauaaac

SEQ ID NO: 103796 - RNA, 25 nt, Human
ucccaccaaaauggccaggacccuc

SEQ ID NO: 103797 - RNA, 21 nt, Human
ucccuuaucuuucaacucuag

SEQ ID NO: 103798 - RNA, 28 nt, Human
ucccuuaucuuucaacucuaguggcaaa

SEQ ID NO: 103799 - RNA, 22 nt, Human
uccgcggccggcacuucagggc

SEQ ID NO: 103800 - RNA, 23 nt, Human
aaaaaagcacaacgacagacgca

SEQ ID NO: 103801 - RNA, 24 nt, Human
aaaaacagaaaaaagcacaacgac

SEQ ID NO: 103802 - RNA, 19 nt, Human
aaacacauacccacacaca

SEQ ID NO: 103803 - RNA, 21 nt, Human
aaacagaaaaaagcacaacga

SEQ ID NO: 103804 - RNA, 23 nt, Human
aaacagaaaaaagcacaacgaca

SEQ ID NO: 103805 - RNA, 19 nt, Human
aacacauacccacacacac

SEQ ID NO: 103806 - RNA, 23 nt, Human
aauucccgauacaaaacuauucc

SEQ ID NO: 103807 - RNA, 24 nt, Human
aauuggucuaaaaacagaaaaaag

SEQ ID NO: 103808 - RNA, 24 nt, Human
acaaaacuauuccaugccucauac

SEQ ID NO: 103809 - RNA, 24 nt, Human
acagaaaaaagcacaacgacagac

SEQ ID NO: 103810 - RNA, 18 nt, Human
acauacccacacacacau

SEQ ID NO: 103811 - RNA, 21 nt, Human
agaaaaaagcacaacgacaga

SEQ ID NO: 103812 - RNA, 18 nt, Human
agcacaacgacagacgca

SEQ ID NO: 103813 - RNA, 22 nt, Human
auaaagcaugcccugacuaaag

SEQ ID NO: 103814 - RNA, 23 nt, Human
auacccacacacacauauguaca

SEQ ID NO: 103815 - RNA, 20 nt, Human
auuagaagaauaaaaugugu

SEQ ID NO: 103816 - RNA, 23 nt, Human
auuuuauuagaaaacaaaggcua

SEQ ID NO: 103817 - RNA, 24 nt, Human
cacauacaaacagagauugugaua

SEQ ID NO: 103818 - RNA, 19 nt, Human
cagagauugugauauagug

SEQ ID NO: 103819 - RNA, 21 nt, Human
cagauagaauaucauaaagca

SEQ ID NO: 103820 - RNA, 18 nt, Human
caguagaggaauggcaau

SEQ ID NO: 103821 - RNA, 19 nt, Human
cccacauacaaacagagau

SEQ ID NO: 103822 - RNA, 18 nt, Human
gaagccugcagcccucac

SEQ ID NO: 103823 - RNA, 18 nt, Human
gcaguagaggaauggcaa

SEQ ID NO: 103824 - RNA, 19 nt, Human
guaagagaaagauaaacac

SEQ ID NO: 103825 - RNA, 28 nt, Human
uaaaaaauuggucuaaaaacagaaaaaa

SEQ ID NO: 103826 - RNA, 21 nt, Human
uaaaaacagaaaaaagcacaa

SEQ ID NO: 103827 - RNA, 20 nt, Human
uaaacacauacccacacaca

SEQ ID NO: 103828 - RNA, 22 nt, Human
uaaacacauacccacacacaca

SEQ ID NO: 103829 - RNA, 22 nt, Human
uaaacacuccuacauguauaug

SEQ ID NO: 103830 - RNA, 26 nt, Human
uaacaugcuuuuccuucauuuuacuc

SEQ ID NO: 103831 - RNA, 22 nt, Human
uaagcaaagaugucuaaaacag

SEQ ID NO: 103832 - RNA, 19 nt, Human
uacgacaaugcuuaccaag

SEQ ID NO: 103833 - RNA, 20 nt, Human
uagaauaucauaaagcaaaa

SEQ ID NO: 103834 - RNA, 26 nt, Human
ucaauaccuacacaugggagaucuaa

SEQ ID NO: 103835 - RNA, 26 nt, Human
ugacuaaagagaaguccuguaggcac

SEQ ID NO: 103836 - RNA, 23 nt, Human
ugcacauuuuccuuaaaaacaca

SEQ ID NO: 103837 - RNA, 21 nt, Human
ugccuucuuuauuacuccaac

SEQ ID NO: 103838 - RNA, 21 nt, Human
ugucuaaaacagauuguaaga

SEQ ID NO: 103839 - RNA, 24 nt, Human
uguucugccuucuuuauuacucca

SEQ ID NO: 103840 - RNA, 23 nt, Human
uucaaugacuggcaccucccagg

SEQ ID NO: 103841 - RNA, 19 nt, Human
uucuaaggaauuguuuucu

SEQ ID NO: 103842 - RNA, 20 nt, Human
uuggucuaaaaacagaaaaa

SEQ ID NO: 103843 - RNA, 22 nt, Human
uuuuuuuuuuuuuuuuuuacag

SEQ ID NO: 103844 - RNA, 20 nt, Human
aaaaaaagaaaaaaaaaccu

SEQ ID NO: 103845 - RNA, 22 nt, Human
aaaaaaagaaaaaaaaaccuag

SEQ ID NO: 103846 - RNA, 20 nt, Human
aaaaaagaaaugcuaaaaaa

SEQ ID NO: 103847 - RNA, 20 nt, Human
aaaacaacaggacccugugg

SEQ ID NO: 103848 - RNA, 24 nt, Human
aaaagaaaauauacaucuuaagga

SEQ ID NO: 103849 - RNA, 25 nt, Human
aaaauaaaaaagaaaugcuaaaaaa

SEQ ID NO: 103850 - RNA, 21 nt, Human
aaaauagggcuuuguccuuau

SEQ ID NO: 103851 - RNA, 19 nt, Human
aaacaaaacaacaggaccc

SEQ ID NO: 103852 - RNA, 20 nt, Human
aaagaaacugauggaaaaau

SEQ ID NO: 103853 - RNA, 22 nt, Human
aaagugcaaaauauguuacaga

SEQ ID NO: 103854 - RNA, 26 nt, Human
aacuccuugcuucuuuuaaaaacucc

SEQ ID NO: 103855 - RNA, 25 nt, Human
aacucggagaaaaacauuacaaccu

SEQ ID NO: 103856 - RNA, 22 nt, Human
aagacaaaaugcuugcauacaa

SEQ ID NO: 103857 - RNA, 23 nt, Human
aagauguacuucucuacuggcuu

SEQ ID NO: 103858 - RNA, 22 nt, Human
aauucauagcaucuaccaccac

SEQ ID NO: 103859 - RNA, 19 nt, Human
acaaugacagugcaaucag

SEQ ID NO: 103860 - RNA, 26 nt, Human
acagggaagagaccacaccuuuacuu

SEQ ID NO: 103861 - RNA, 18 nt, Human
acgaugagacacacacac

SEQ ID NO: 103862 - RNA, 23 nt, Human
acuacagcagcacauagagccug

SEQ ID NO: 103863 - RNA, 18 nt, Human
acuagccccuggcuccau

SEQ ID NO: 103864 - RNA, 20 nt, Human
agacaaaaugcuugcauaca

SEQ ID NO: 103865 - RNA, 22 nt, Human
agacaaaaugcuugcauacaau

SEQ ID NO: 103866 - RNA, 19 nt, Human
agacacacacacaagaaga

SEQ ID NO: 103867 - RNA, 22 nt, Human
agccaccaacaaugagcucaaa

SEQ ID NO: 103868 - RNA, 26 nt, Human
agcccccaaauguauaguaaaccacc

SEQ ID NO: 103869 - RNA, 18 nt, Human
aguaacccaaugucuucu

SEQ ID NO: 103870 - RNA, 23 nt, Human
aucaaacaaaacaacaggacccu

SEQ ID NO: 103871 - RNA, 21 nt, Human
auucauagcaucuaccaccac

SEQ ID NO: 103872 - RNA, 18 nt, Human
caaaacucaccagacaau

SEQ ID NO: 103873 - RNA, 21 nt, Human
caaaacucaccagacaaucca

SEQ ID NO: 103874 - RNA, 24 nt, Human
caaaaguauagucagaaauucuga

SEQ ID NO: 103875 - RNA, 20 nt, Human
caaacaaaacaacaggaccc

SEQ ID NO: 103876 - RNA, 22 nt, Human
caacuagccccuggcuccauaa

SEQ ID NO: 103877 - RNA, 22 nt, Human
caauaggcacaaaaggccuggu

SEQ ID NO: 103878 - RNA, 20 nt, Human
caaugagcucaaacguagug

SEQ ID NO: 103879 - RNA, 30 nt, Human
cacauaccucuuuauuucauaaaaauauaa

SEQ ID NO: 103880 - RNA, 20 nt, Human
caccaaauauuaauuuccac

SEQ ID NO: 103881 - RNA, 22 nt, Human
cagccaccaacaaugagcucag

SEQ ID NO: 103882 - RNA, 20 nt, Human
caggacauuuaacuccuugc

SEQ ID NO: 103883 - RNA, 20 nt, Human
caggacccuguggugaugaa

SEQ ID NO: 103884 - RNA, 19 nt, Human
cagguaaaaacucuagaua

SEQ ID NO: 103885 - RNA, 22 nt, Human
cauacaaugacagugcaaucag

SEQ ID NO: 103886 - RNA, 21 nt, Human
cauugucugucaggaaauuca

SEQ ID NO: 103887 - RNA, 20 nt, Human
ccaacuagccccuggcucca

SEQ ID NO: 103888 - RNA, 23 nt, Human
ccaagaccuccaggucucaauuc

SEQ ID NO: 103889 - RNA, 21 nt, Human
ccaauuuuaaagaaacugaug

SEQ ID NO: 103890 - RNA, 27 nt, Human
cccaaauguauaguaaaccaccaacua

SEQ ID NO: 103891 - RNA, 22 nt, Human
ccggaggcgccaggccuccucu

SEQ ID NO: 103892 - RNA, 18 nt, Human
ccggcgucucucccagcc

SEQ ID NO: 103893 - RNA, 18 nt, Human
ccggcgucucucccagcc

SEQ ID NO: 103894 - RNA, 19 nt, Human
ccggcgucucucccagccu

SEQ ID NO: 103895 - RNA, 18 nt, Human
ccuccucuuucccggucc

SEQ ID NO: 103896 - RNA, 25 nt, Human
ccuuuacuuaaaaaaagaaaaaaag

SEQ ID NO: 103897 - RNA, 21 nt, Human
cuaaguaacccaaugucuucu

SEQ ID NO: 103898 - RNA, 31 nt, Human
cuacaauaaauucuccccccuuuuucaauuu

SEQ ID NO: 103899 - RNA, 18 nt, Human
cuauuuuaucaccccaaa

SEQ ID NO: 103900 - RNA, 20 nt, Human
cucagcgccggcgucucucc

SEQ ID NO: 103901 - RNA, 24 nt, Human
cucccagccuugggcgcucggucc

SEQ ID NO: 103902 - RNA, 20 nt, Human
cuggucauuaaaagaaaaua

SEQ ID NO: 103903 - RNA, 24 nt, Human
cuguguacacaaccucuccaaugc

SEQ ID NO: 103904 - RNA, 21 nt, Human
cuuucuuuucccuaagguaga

SEQ ID NO: 103905 - RNA, 20 nt, Human
gaaaaaagacaaaaugcuug

SEQ ID NO: 103906 - RNA, 23 nt, Human
gcgccggcgucucucccagccuu

SEQ ID NO: 103907 - RNA, 22 nt, Human
ggaaaaaugcuuccccuaacau

SEQ ID NO: 103908 - RNA, 20 nt, Human
ggaaagaaaauaagauucuu

SEQ ID NO: 103909 - RNA, 24 nt, Human
gguagaacuucuguaaaccuaaaa

SEQ ID NO: 103910 - RNA, 19 nt, Human
guacagggaagagaccaca

SEQ ID NO: 103911 - RNA, 23 nt, Human
guagaacuucuguaaaccuaaaa

SEQ ID NO: 103912 - RNA, 18 nt, Human
guauaguaaaccaccaac

SEQ ID NO: 103913 - RNA, 24 nt, Human
guuguucagaauagaaagggaaac

SEQ ID NO: 103914 - RNA, 24 nt, Human
uaaaaaaaaaaaacuuagcuacau

SEQ ID NO: 103915 - RNA, 26 nt, Human
uaaaaaaaucuaaaaaucaaacaaaa

SEQ ID NO: 103916 - RNA, 25 nt, Human
uaaaagaaaauauacaucuuaagga

SEQ ID NO: 103917 - RNA, 20 nt, Human
uaacacuauaaauauuaaua

SEQ ID NO: 103918 - RNA, 19 nt, Human
uaacccaaugucuucuuac

SEQ ID NO: 103919 - RNA, 22 nt, Human
uaaguacagggaagagaccaca

SEQ ID NO: 103920 - RNA, 18 nt, Human
uacaagguuucucaaagu

SEQ ID NO: 103921 - RNA, 19 nt, Human
uacauucagucacauauau

SEQ ID NO: 103922 - RNA, 24 nt, Human
uacuuaaaaaaagaaaaaaaaacc

SEQ ID NO: 103923 - RNA, 18 nt, Human
uagauacuuuuccacugu

SEQ ID NO: 103924 - RNA, 21 nt, Human
uagccccuggcuccauaaugg

SEQ ID NO: 103925 - RNA, 20 nt, Human
uaggcacaaaaggccugguu

SEQ ID NO: 103926 - RNA, 20 nt, Human
uaguaaaccaccaacuagcc

SEQ ID NO: 103927 - RNA, 20 nt, Human
uagugccaccuauuucauaa

SEQ ID NO: 103928 - RNA, 19 nt, Human
uaucucauacccaugguga

SEQ ID NO: 103929 - RNA, 19 nt, Human
ucaaaauaaaugagauguc

SEQ ID NO: 103930 - RNA, 18 nt, Human
ucaaacguagugaaucug

SEQ ID NO: 103931 - RNA, 21 nt, Human
ucaauuuacuucccuuucuuu

SEQ ID NO: 103932 - RNA, 24 nt, Human
ucacuacagcagcacauagagccu

SEQ ID NO: 103933 - RNA, 24 nt, Human
ucaguagcugaucuuuauguggaa

SEQ ID NO: 103934 - RNA, 18 nt, Human
ucauaaacuguccugcag

SEQ ID NO: 103935 - RNA, 22 nt, Human
uccacauaccucuuuauuucaa

SEQ ID NO: 103936 - RNA, 26 nt, Human
uccacuguccaacaucaccaaauauu

SEQ ID NO: 103937 - RNA, 20 nt, Human
uccccuaacaugaacuaugg

SEQ ID NO: 103938 - RNA, 23 nt, Human
uccguauuuuacaaugaagaaaa

SEQ ID NO: 103939 - RNA, 24 nt, Human
ucucauacccauggugaacuauuu

SEQ ID NO: 103940 - RNA, 19 nt, Human
ugaaaaaagacaaaaugcu

SEQ ID NO: 103941 - RNA, 28 nt, Human
ugaaaaaagacaaaaugcuugcauacaa

SEQ ID NO: 103942 - RNA, 21 nt, Human
ugaaaaauaaaaaagaaaugc

SEQ ID NO: 103943 - RNA, 18 nt, Human
ugaccaccuaaguaaccc

SEQ ID NO: 103944 - RNA, 22 nt, Human
ugaccagguagcccccaaaugu

SEQ ID NO: 103945 - RNA, 20 nt, Human
ugcauacaaugacagugcag

SEQ ID NO: 103946 - RNA, 19 nt, Human
ugcuuuaccugcuuaagcc

SEQ ID NO: 103947 - RNA, 23 nt, Human
ugcuuuaccugcuuaagccuugc

SEQ ID NO: 103948 - RNA, 23 nt, Human
ugggaagcucagcgccggcgucu

SEQ ID NO: 103949 - RNA, 19 nt, Human
ugugcuuuuuaaaaauucu

SEQ ID NO: 103950 - RNA, 19 nt, Human
uguggcugguuuucuaaca

SEQ ID NO: 103951 - RNA, 22 nt, Human
uguucagaauagaaagggaaac

SEQ ID NO: 103952 - RNA, 18 nt, Human
uuaaaaugagugaaaguc

SEQ ID NO: 103953 - RNA, 20 nt, Human
uuaaaugccuaagcauagac

SEQ ID NO: 103954 - RNA, 21 nt, Human
uuagcagccaccaacaaugag

SEQ ID NO: 103955 - RNA, 23 nt, Human
uuauuucauaaaaauauaaauau

SEQ ID NO: 103956 - RNA, 21 nt, Human
uucccuaagguagaacuucug

SEQ ID NO: 103957 - RNA, 22 nt, Human
uucugacaacucggagaaaaac

SEQ ID NO: 103958 - RNA, 19 nt, Human
uuggaguuacacauaaaga

SEQ ID NO: 103959 - RNA, 19 nt, Human
uuucuuaacaagugguuuc

SEQ ID NO: 103960 - RNA, 21 nt, Human
uuuggaguuacacauaaagau

SEQ ID NO: 103961 - RNA, 25 nt, Human
aaaacagaaagauaaagggacagag

SEQ ID NO: 103962 - RNA, 24 nt, Human
aaacagaaagauaaagggacagag

SEQ ID NO: 103963 - RNA, 19 nt, Human
aaagggacagagaaaaaga

SEQ ID NO: 103964 - RNA, 19 nt, Human
aacuguggaucuguccagg

SEQ ID NO: 103965 - RNA, 19 nt, Human
aagaagugaaacagagaca

SEQ ID NO: 103966 - RNA, 22 nt, Human
aagaagugaaacagagacagac

SEQ ID NO: 103967 - RNA, 18 nt, Human
aagacagacagacacggg

SEQ ID NO: 103968 - RNA, 25 nt, Human
aagacagacagacacgggaacacaa

SEQ ID NO: 103969 - RNA, 19 nt, Human
aagagcucccuccccguga

SEQ ID NO: 103970 - RNA, 18 nt, Human
aagcucagccaagagcuc

SEQ ID NO: 103971 - RNA, 18 nt, Human
aaggacagagagagagag

SEQ ID NO: 103972 - RNA, 20 nt, Human
acacuccccucccccugcca

SEQ ID NO: 103973 - RNA, 21 nt, Human
acagacaaaaacagaaagaua

SEQ ID NO: 103974 - RNA, 18 nt, Human
accacacagagacccaga

SEQ ID NO: 103975 - RNA, 24 nt, Human
agacagacacuccgggacaggaca

SEQ ID NO: 103976 - RNA, 25 nt, Human
agacagacagacacgggaacacaag

SEQ ID NO: 103977 - RNA, 19 nt, Human
agacuggaaggaaggcuga

SEQ ID NO: 103978 - RNA, 19 nt, Human
agagagaaagacagaggga

SEQ ID NO: 103979 - RNA, 19 nt, Human
agagagagaaagacagagg

SEQ ID NO: 103980 - RNA, 20 nt, Human
agccagggccugggggagcc

SEQ ID NO: 103981 - RNA, 19 nt, Human
agggacaggagagccagug

SEQ ID NO: 103982 - RNA, 21 nt, Human
agggggcucccuuccggcagg

SEQ ID NO: 103983 - RNA, 20 nt, Human
agguauggcuuugcaccugu

SEQ ID NO: 103984 - RNA, 19 nt, Human
aguuucccaugcacccccc

SEQ ID NO: 103985 - RNA, 22 nt, Human
aguuuguugggaggagcagggg

SEQ ID NO: 103986 - RNA, 23 nt, Human
aguuuguugggaggagcaggggg

SEQ ID NO: 103987 - RNA, 21 nt, Human
auaaggggugucugaacagaa

SEQ ID NO: 103988 - RNA, 23 nt, Human
auacagccagggccugggggagc

SEQ ID NO: 103989 - RNA, 25 nt, Human
caaaaacagaaagauaaagggacag

SEQ ID NO: 103990 - RNA, 21 nt, Human
caaguuccugacuuaugccca

SEQ ID NO: 103991 - RNA, 18 nt, Human
caaugacuccuccuccuu

SEQ ID NO: 103992 - RNA, 19 nt, Human
cacacagccccgacccaca

SEQ ID NO: 103993 - RNA, 23 nt, Human
cacacagccccgacccacacagc

SEQ ID NO: 103994 - RNA, 19 nt, Human
cacagaucacacccacccg

SEQ ID NO: 103995 - RNA, 23 nt, Human
cacagccccgacccacacagccc

SEQ ID NO: 103996 - RNA, 19 nt, Human
caccagagccccgaccccu

SEQ ID NO: 103997 - RNA, 21 nt, Human
cacccggggcugccacgcccc

SEQ ID NO: 103998 - RNA, 19 nt, Human
caccuggacagaguuggga

SEQ ID NO: 103999 - RNA, 18 nt, Human
cacgcccccucuguccac

SEQ ID NO: 104000 - RNA, 24 nt, Human
cacgcccccucuguccacacagcc

SEQ ID NO: 104001 - RNA, 20 nt, Human
cacuccccucccccugccag

SEQ ID NO: 104002 - RNA, 22 nt, Human
cagaaaccgaccuaggacacag

SEQ ID NO: 104003 - RNA, 18 nt, Human
cagaaagauaaagggaca

SEQ ID NO: 104004 - RNA, 19 nt, Human
cagcacccgcuuucugcug

SEQ ID NO: 104005 - RNA, 20 nt, Human
cagcugggcacccccacaac

SEQ ID NO: 104006 - RNA, 19 nt, Human
caggacacgaguuccuaac

SEQ ID NO: 104007 - RNA, 18 nt, Human
caugcaccccccgcuggc

SEQ ID NO: 104008 - RNA, 21 nt, Human
ccacacagagacccagaucac

SEQ ID NO: 104009 - RNA, 19 nt, Human
ccacaccagagccccgacc

SEQ ID NO: 104010 - RNA, 18 nt, Human
ccacgcccccucugucca

SEQ ID NO: 104011 - RNA, 27 nt, Human
ccagcggagaccacacagagacccaga

SEQ ID NO: 104012 - RNA, 18 nt, Human
cccaaauuggggaagggg

SEQ ID NO: 104013 - RNA, 21 nt, Human
cccacaacacccugacaggca

SEQ ID NO: 104014 - RNA, 18 nt, Human
cccagacuggaaggaagg

SEQ ID NO: 104015 - RNA, 18 nt, Human
cccaugcugcagucagga

SEQ ID NO: 104016 - RNA, 19 nt, Human
cccaugcugcagucaggau

SEQ ID NO: 104017 - RNA, 22 nt, Human
ccccaaagcgcagcucucagcc

SEQ ID NO: 104018 - RNA, 21 nt, Human
ccccacucagcccagacugga

SEQ ID NO: 104019 - RNA, 20 nt, Human
ccccagggccucacgccucu

SEQ ID NO: 104020 - RNA, 22 nt, Human
ccccagggccucacgccucuga

SEQ ID NO: 104021 - RNA, 19 nt, Human
cccccaccuccugcagccg

SEQ ID NO: 104022 - RNA, 21 nt, Human
cccccaccuccugcagccgug

SEQ ID NO: 104023 - RNA, 18 nt, Human
cccccggccccuccucug

SEQ ID NO: 104024 - RNA, 27 nt, Human
cccccucuguccacacagccccgaccc

SEQ ID NO: 104025 - RNA, 19 nt, Human
ccccguauggcaagagagu

SEQ ID NO: 104026 - RNA, 19 nt, Human
ccccugcugccucccaccc

SEQ ID NO: 104027 - RNA, 22 nt, Human
cccgacccacacagcccagcac

SEQ ID NO: 104028 - RNA, 21 nt, Human
cccggccccuccucugggacc

SEQ ID NO: 104029 - RNA, 18 nt, Human
cccggggcugccacgccc

SEQ ID NO: 104030 - RNA, 19 nt, Human
cccugggugggucugaggc

SEQ ID NO: 104031 - RNA, 21 nt, Human
ccgaccccuggcccagagcgc

SEQ ID NO: 104032 - RNA, 19 nt, Human
ccucacacuccccuccccc

SEQ ID NO: 104033 - RNA, 21 nt, Human
ccucacacuccccucccccug

SEQ ID NO: 104034 - RNA, 19 nt, Human
ccucccaccccugccgggg

SEQ ID NO: 104035 - RNA, 18 nt, Human
ccuccuccuuagugggca

SEQ ID NO: 104036 - RNA, 19 nt, Human
ccucuguccacacagcccc

SEQ ID NO: 104037 - RNA, 21 nt, Human
ccugacccccguauggcaaga

SEQ ID NO: 104038 - RNA, 18 nt, Human
ccugcugggucuuggggc

SEQ ID NO: 104039 - RNA, 23 nt, Human
cgggaaauggcugcccacucucu

SEQ ID NO: 104040 - RNA, 21 nt, Human
cuacacgugacuccugacccc

SEQ ID NO: 104041 - RNA, 19 nt, Human
cucacacuccccucccccu

SEQ ID NO: 104042 - RNA, 22 nt, Human
cucacacuccccucccccugcc

SEQ ID NO: 104043 - RNA, 23 nt, Human
cucacacuccccucccccugcca

SEQ ID NO: 104044 - RNA, 21 nt, Human
cucagggucugacaggcagcu

SEQ ID NO: 104045 - RNA, 21 nt, Human
cucccacagcuccggccaggc

SEQ ID NO: 104046 - RNA, 18 nt, Human
cucccaccccugccgggg

SEQ ID NO: 104047 - RNA, 20 nt, Human
cucgcaaacagccuggcccc

SEQ ID NO: 104048 - RNA, 25 nt, Human
cugaccccugcugccucccaccccu

SEQ ID NO: 104049 - RNA, 24 nt, Human
cugcugccucccaccccugccggg

SEQ ID NO: 104050 - RNA, 18 nt, Human
cuggccccuggccccugg

SEQ ID NO: 104051 - RNA, 24 nt, Human
cugggcuggucucgcaaacagccu

SEQ ID NO: 104052 - RNA, 23 nt, Human
cugggggaggguggacaggggcu

SEQ ID NO: 104053 - RNA, 18 nt, Human
cugggucuuggggcugag

SEQ ID NO: 104054 - RNA, 21 nt, Human
cuuccagcggcggaauccuag

SEQ ID NO: 104055 - RNA, 19 nt, Human
gacagugaacccggugggg

SEQ ID NO: 104056 - RNA, 23 nt, Human
gacccagaucacagggacaggag

SEQ ID NO: 104057 - RNA, 20 nt, Human
gacucugugugucugugugu

SEQ ID NO: 104058 - RNA, 19 nt, Human
gagccacaccagagccccg

SEQ ID NO: 104059 - RNA, 21 nt, Human
gagccccgaccccuggcccag

SEQ ID NO: 104060 - RNA, 20 nt, Human
gagugugugugacucugugu

SEQ ID NO: 104061 - RNA, 22 nt, Human
gauaaagggacagagaaaaaga

SEQ ID NO: 104062 - RNA, 21 nt, Human
gccaggcgggcugcguaugcc

SEQ ID NO: 104063 - RNA, 23 nt, Human
gcccagguauggcuuugcaccug

SEQ ID NO: 104064 - RNA, 22 nt, Human
gcuuccagcggcggaauccuag

SEQ ID NO: 104065 - RNA, 18 nt, Human
ggacagugaacccggugg

SEQ ID NO: 104066 - RNA, 18 nt, Human
ggaccccccacucagccc

SEQ ID NO: 104067 - RNA, 20 nt, Human
ggaggagcagggggcucccu

SEQ ID NO: 104068 - RNA, 23 nt, Human
ggaggcuggggaggccccugggg

SEQ ID NO: 104069 - RNA, 18 nt, Human
ggaguuuguugggaggag

SEQ ID NO: 104070 - RNA, 21 nt, Human
gggaacacaagaagugaaaca

SEQ ID NO: 104071 - RNA, 25 nt, Human
gggacaggacacgaguuccuaacac

SEQ ID NO: 104072 - RNA, 21 nt, Human
gggaggccccugggggagggu

SEQ ID NO: 104073 - RNA, 23 nt, Human
gggcaggccucagacgccugcug

SEQ ID NO: 104074 - RNA, 21 nt, Human
ggggaaggggaagccucccgg

SEQ ID NO: 104075 - RNA, 20 nt, Human
gggggaggguggacaggggc

SEQ ID NO: 104076 - RNA, 18 nt, Human
gucuguguguaugugugu

SEQ ID NO: 104077 - RNA, 21 nt, Human
guggggugcaguuucccaugc

SEQ ID NO: 104078 - RNA, 20 nt, Human
gugugagugugugugacucu

SEQ ID NO: 104079 - RNA, 19 nt, Human
gugugugugagugugugug

SEQ ID NO: 104080 - RNA, 19 nt, Human
uagaagcucagccaagagc

SEQ ID NO: 104081 - RNA, 21 nt, Human
uagaagcucagccaagagcuc

SEQ ID NO: 104082 - RNA, 24 nt, Human
uaucaaaaaguccccaaauugggg

SEQ ID NO: 104083 - RNA, 20 nt, Human
uauguguguguguaugucug

SEQ ID NO: 104084 - RNA, 28 nt, Human
ucacacccacccggggcugccacgcccc

SEQ ID NO: 104085 - RNA, 19 nt, Human
ucccacagcuccggccagg

SEQ ID NO: 104086 - RNA, 24 nt, Human
uccccaaagcgcagcucucagccc

SEQ ID NO: 104087 - RNA, 19 nt, Human
uccccaaauuggggaaggg

SEQ ID NO: 104088 - RNA, 23 nt, Human
uccccgugagcugagugcuccuc

SEQ ID NO: 104089 - RNA, 20 nt, Human
uccggcagggccccagggcc

SEQ ID NO: 104090 - RNA, 27 nt, Human
ucucgcaaacagccuggccccuggccc

SEQ ID NO: 104091 - RNA, 18 nt, Human
ucugacaggcagcugggc

SEQ ID NO: 104092 - RNA, 18 nt, Human
ucuguguguaugugugug

SEQ ID NO: 104093 - RNA, 20 nt, Human
ucuguuuccucacacucccc

SEQ ID NO: 104094 - RNA, 20 nt, Human
ugaaaggguggugguccucc

SEQ ID NO: 104095 - RNA, 24 nt, Human
ugaaaggguggugguccucccaag

SEQ ID NO: 104096 - RNA, 24 nt, Human
ugaccccugcugccucccaccccu

SEQ ID NO: 104097 - RNA, 23 nt, Human
ugacucugugugucuguguguaa

SEQ ID NO: 104098 - RNA, 20 nt, Human
ugaggugggggaaggggaag

SEQ ID NO: 104099 - RNA, 22 nt, Human
ugagugugugugacucugugug

SEQ ID NO: 104100 - RNA, 22 nt, Human
ugcccaucucuccagccccaca

SEQ ID NO: 104101 - RNA, 23 nt, Human
ugcugggucuuggggcugaggac

SEQ ID NO: 104102 - RNA, 21 nt, Human
uggaccccccacucagcccag

SEQ ID NO: 104103 - RNA, 21 nt, Human
uggagagggaggcuggggagg

SEQ ID NO: 104104 - RNA, 24 nt, Human
uggagagggaggcuggggaggccc

SEQ ID NO: 104105 - RNA, 23 nt, Human
uggcaagagagugagguggggga

SEQ ID NO: 104106 - RNA, 18 nt, Human
uggccaacacacacacuu

SEQ ID NO: 104107 - RNA, 22 nt, Human
uggggaggccccugggggaggg

SEQ ID NO: 104108 - RNA, 23 nt, Human
uggggaggggaugauaaugaugg

SEQ ID NO: 104109 - RNA, 21 nt, Human
uggggcccccggccccuccuc

SEQ ID NO: 104110 - RNA, 22 nt, Human
ugggggaaggggaagccucccg

SEQ ID NO: 104111 - RNA, 23 nt, Human
ugggggaggguggacaggggcuc

SEQ ID NO: 104112 - RNA, 21 nt, Human
ugggucuuggggcugaggacu

SEQ ID NO: 104113 - RNA, 21 nt, Human
ugucuguguguaugugugugu

SEQ ID NO: 104114 - RNA, 19 nt, Human
ugugagugugugugacucu

SEQ ID NO: 104115 - RNA, 18 nt, Human
ugugucucccccaccucc

SEQ ID NO: 104116 - RNA, 21 nt, Human
ugugucucccccaccuccugc

SEQ ID NO: 104117 - RNA, 25 nt, Human
ugugugagugugugugacucugugu

SEQ ID NO: 104118 - RNA, 26 nt, Human
ugugugagugugugugacucugugug

SEQ ID NO: 104119 - RNA, 19 nt, Human
uguguguaugugugugugu

SEQ ID NO: 104120 - RNA, 20 nt, Human
uguguguaugugugugugua

SEQ ID NO: 104121 - RNA, 19 nt, Human
uguguguguguaugucugc

SEQ ID NO: 104122 - RNA, 18 nt, Human
uguucuggaguuuguugg

SEQ ID NO: 104123 - RNA, 19 nt, Human
uguucuggaguuuguuggg

SEQ ID NO: 104124 - RNA, 20 nt, Human
uguucuggaguuuguuggga

SEQ ID NO: 104125 - RNA, 20 nt, Human
uguugggaggagcagggggc

SEQ ID NO: 104126 - RNA, 21 nt, Human
uguugggaggagcagggggcu

SEQ ID NO: 104127 - RNA, 18 nt, Human
uucccaugcaccccccgc

SEQ ID NO: 104128 - RNA, 19 nt, Human
uuggagguuuuugagccca

SEQ ID NO: 104129 - RNA, 18 nt, Human
uuguugggaggagcaggg

SEQ ID NO: 104130 - RNA, 25 nt, Human
uuuuaguucuguuuccucacacucc

SEQ ID NO: 104131 - RNA, 21 nt, Human
aaaaaaaaaaaggcucagcca

SEQ ID NO: 104132 - RNA, 21 nt, Human
aaaaaaaugcagugcugaaac

SEQ ID NO: 104133 - RNA, 24 nt, Human
aaaaaugcagugcugaaacaucac

SEQ ID NO: 104134 - RNA, 19 nt, Human
aaacaucacaggauguuuc

SEQ ID NO: 104135 - RNA, 18 nt, Human
aagagguguuuugccugg

SEQ ID NO: 104136 - RNA, 20 nt, Human
agacaaauagaaccuuuaau

SEQ ID NO: 104137 - RNA, 18 nt, Human
agaccuaggcugaagaag

SEQ ID NO: 104138 - RNA, 24 nt, Human
agaggaagagguguuuugccuggg

SEQ ID NO: 104139 - RNA, 23 nt, Human
agagguguuuugccuggguuuug

SEQ ID NO: 104140 - RNA, 21 nt, Human
agauuuuaagcaaaauucaaa

SEQ ID NO: 104141 - RNA, 19 nt, Human
aggcugaagaaguaacaca

SEQ ID NO: 104142 - RNA, 23 nt, Human
augguacaggcaaaguaaacuac

SEQ ID NO: 104143 - RNA, 25 nt, Human
auuaacugugguuaaagugguauca

SEQ ID NO: 104144 - RNA, 21 nt, Human
caaaagcugaaauuaacugug

SEQ ID NO: 104145 - RNA, 23 nt, Human
cacugcaucuugauuaaaaaaac

SEQ ID NO: 104146 - RNA, 19 nt, Human
cagugcugaaacaucacag

SEQ ID NO: 104147 - RNA, 24 nt, Human
cauaugcaacuauucccauaugua

SEQ ID NO: 104148 - RNA, 19 nt, Human
cauauguacuauguacaag

SEQ ID NO: 104149 - RNA, 20 nt, Human
cccauaugcaacuauuccca

SEQ ID NO: 104150 - RNA, 21 nt, Human
cggaaggggaaagaccuaggc

SEQ ID NO: 104151 - RNA, 18 nt, Human
gguaucaauggcccaaaa

SEQ ID NO: 104152 - RNA, 23 nt, Human
uaaaaaaaaaaaggcucagccac

SEQ ID NO: 104153 - RNA, 18 nt, Human
uaaacuacaguggaguuu

SEQ ID NO: 104154 - RNA, 23 nt, Human
uaaauaaagagggccuuaaguac

SEQ ID NO: 104155 - RNA, 21 nt, Human
uacaguggaguuucagaaucu

SEQ ID NO: 104156 - RNA, 20 nt, Human
uaugcaguuaaaaucacugu

SEQ ID NO: 104157 - RNA, 24 nt, Human
ucaaacaguccaacuaugacugaa

SEQ ID NO: 104158 - RNA, 23 nt, Human
uccaaagaguucggggucuagca

SEQ ID NO: 104159 - RNA, 21 nt, Human
uccaacuaugacugagaaaca

SEQ ID NO: 104160 - RNA, 23 nt, Human
uccucucuuuccugccaaaagcu

SEQ ID NO: 104161 - RNA, 18 nt, Human
ucucaguucacugcaucu

SEQ ID NO: 104162 - RNA, 24 nt, Human
ugaaacaucacaggauguuuccuc

SEQ ID NO: 104163 - RNA, 19 nt, Human
ugaagaaguaacacaugca

SEQ ID NO: 104164 - RNA, 18 nt, Human
ugagaaggcugcucagag

SEQ ID NO: 104165 - RNA, 23 nt, Human
ugauuaaaaaaaccaugugacau

SEQ ID NO: 104166 - RNA, 24 nt, Human
uggauaaccucugccuccaaagag

SEQ ID NO: 104167 - RNA, 23 nt, Human
uggccacaugggagaaaaguucu

SEQ ID NO: 104168 - RNA, 24 nt, Human
ugguacaggcaaaguaaacuacag

SEQ ID NO: 104169 - RNA, 22 nt, Human
uguggauaaccucugccuccaa

SEQ ID NO: 104170 - RNA, 26 nt, Human
uuaaaaaaaaaaaggcucagccacau

SEQ ID NO: 104171 - RNA, 21 nt, Human
uucccauaugcaacuauuccc

SEQ ID NO: 104172 - RNA, 23 nt, Human
uuccugccaaaagcugaaauuaa

SEQ ID NO: 104173 - RNA, 21 nt, Human
uuugccaagccucuuguggau

SEQ ID NO: 104174 - RNA, 18 nt, Human
aaagcccucuggggcugg

SEQ ID NO: 104175 - RNA, 24 nt, Human
aacaaaaaucacguucuccccaaa

SEQ ID NO: 104176 - RNA, 24 nt, Human
aagacagcacccuuacuaaagacc

SEQ ID NO: 104177 - RNA, 22 nt, Human
aagcaaaugcaauuugccucau

SEQ ID NO: 104178 - RNA, 19 nt, Human
aaggucucaggagcuggac

SEQ ID NO: 104179 - RNA, 22 nt, Human
accacaccuccucuccaacccu

SEQ ID NO: 104180 - RNA, 28 nt, Human
accacaccuccucuccaacccucagcca

SEQ ID NO: 104181 - RNA, 18 nt, Human
acccucccagccugggau

SEQ ID NO: 104182 - RNA, 18 nt, Human
accuccucuccaacccuc

SEQ ID NO: 104183 - RNA, 21 nt, Human
accuccucuccaacccucagc

SEQ ID NO: 104184 - RNA, 19 nt, Human
acuccgccgccagggccgg

SEQ ID NO: 104185 - RNA, 23 nt, Human
agacggcagaccggcggacagca

SEQ ID NO: 104186 - RNA, 24 nt, Human
agccaccucuugccaaacaucuga

SEQ ID NO: 104187 - RNA, 24 nt, Human
agcgauacuucagcaggguccuga

SEQ ID NO: 104188 - RNA, 23 nt, Human
aggcccacaggucccuagguagc

SEQ ID NO: 104189 - RNA, 22 nt, Human
agggagaggggaaacacggcuc

SEQ ID NO: 104190 - RNA, 23 nt, Human
agggauuggagcuagggaugagg

SEQ ID NO: 104191 - RNA, 18 nt, Human
agggauuggccccaggcu

SEQ ID NO: 104192 - RNA, 22 nt, Human
aggggcgggggggcggcagagc

SEQ ID NO: 104193 - RNA, 21 nt, Human
aggggggucgguuucagcaaa

SEQ ID NO: 104194 - RNA, 25 nt, Human
aggugccagagcucgccaacgggcu

SEQ ID NO: 104195 - RNA, 22 nt, Human
agucagugggcugagauaacaa

SEQ ID NO: 104196 - RNA, 20 nt, Human
agugcucagccaccucuugc

SEQ ID NO: 104197 - RNA, 19 nt, Human
augaaggagguggugaagu

SEQ ID NO: 104198 - RNA, 25 nt, Human
augaggcaggacacaucuggucccu

SEQ ID NO: 104199 - RNA, 21 nt, Human
caaaaaccgagaagcgaaugc

SEQ ID NO: 104200 - RNA, 19 nt, Human
caaagccaaaggcccggaa

SEQ ID NO: 104201 - RNA, 19 nt, Human
caaccagaauccccgguca

SEQ ID NO: 104202 - RNA, 20 nt, Human
caaccagaauccccggucac

SEQ ID NO: 104203 - RNA, 19 nt, Human
caacccucagccagaggaa

SEQ ID NO: 104204 - RNA, 20 nt, Human
cacaccuccucuccaacccu

SEQ ID NO: 104205 - RNA, 30 nt, Human
caccagcagcagcauguuuuauugcaaccc

SEQ ID NO: 104206 - RNA, 22 nt, Human
cacccgccgaccuggggcuccu

SEQ ID NO: 104207 - RNA, 23 nt, Human
caccuccucuccaacccucagcc

SEQ ID NO: 104208 - RNA, 23 nt, Human
cacuuuggucuugucaccgaggg

SEQ ID NO: 104209 - RNA, 21 nt, Human
cagagcucgccaacgggcuuc

SEQ ID NO: 104210 - RNA, 21 nt, Human
cagaggcaagcccucagcucu

SEQ ID NO: 104211 - RNA, 18 nt, Human
cagcaagaagcugaggca

SEQ ID NO: 104212 - RNA, 19 nt, Human
cagcacccuuacuaaagac

SEQ ID NO: 104213 - RNA, 24 nt, Human
cagcacccuuacuaaagaccaaca

SEQ ID NO: 104214 - RNA, 22 nt, Human
cagcauguuuuauugcaaccag

SEQ ID NO: 104215 - RNA, 22 nt, Human
cagcugacugggcagggauugg

SEQ ID NO: 104216 - RNA, 22 nt, Human
cagcugcgccuggagaaggcgg

SEQ ID NO: 104217 - RNA, 23 nt, Human
caggacacaucuggucccugaca

SEQ ID NO: 104218 - RNA, 19 nt, Human
caggauuucugccaacaac

SEQ ID NO: 104219 - RNA, 22 nt, Human
caggucccuagguagccagagg

SEQ ID NO: 104220 - RNA, 19 nt, Human
cagucagggcauccaacgg

SEQ ID NO: 104221 - RNA, 22 nt, Human
caguggcugagcccuguggcca

SEQ ID NO: 104222 - RNA, 18 nt, Human
ccaaaggacggcaaacuc

SEQ ID NO: 104223 - RNA, 18 nt, Human
ccaagcccaccccagugc

SEQ ID NO: 104224 - RNA, 24 nt, Human
ccaccugggaccccagccuaggca

SEQ ID NO: 104225 - RNA, 21 nt, Human
ccaggacacagggagcgaggg

SEQ ID NO: 104226 - RNA, 23 nt, Human
ccaggaugcaaagccaaaggccc

SEQ ID NO: 104227 - RNA, 24 nt, Human
ccaugccacuucaaccuccucuug

SEQ ID NO: 104228 - RNA, 19 nt, Human
cccaaaggacggcaaacuc

SEQ ID NO: 104229 - RNA, 18 nt, Human
cccaggauuucugccaac

SEQ ID NO: 104230 - RNA, 23 nt, Human
ccccaaaggacggcaaacucuuc

SEQ ID NO: 104231 - RNA, 27 nt, Human
ccccaccagaccccagcugacugggca

SEQ ID NO: 104232 - RNA, 26 nt, Human
cccccagucagggcauccaacggggc

SEQ ID NO: 104233 - RNA, 22 nt, Human
ccccguccaggaugcaaagcca

SEQ ID NO: 104234 - RNA, 22 nt, Human
cccucuggggcuggggucucca

SEQ ID NO: 104235 - RNA, 23 nt, Human
cccucuggggcuggggucuccag

SEQ ID NO: 104236 - RNA, 19 nt, Human
ccgccgaccuggggcuccu

SEQ ID NO: 104237 - RNA, 21 nt, Human
ccucacccucccagccuggga

SEQ ID NO: 104238 - RNA, 22 nt, Human
ccucccagccugggauugcggc

SEQ ID NO: 104239 - RNA, 22 nt, Human
ccugcccugcccacguggagag

SEQ ID NO: 104240 - RNA, 27 nt, Human
ccugcugagaccacaccuccucuccaa

SEQ ID NO: 104241 - RNA, 18 nt, Human
ccugggaacacccgccga

SEQ ID NO: 104242 - RNA, 19 nt, Human
cgaacaaaguuggcccaag

SEQ ID NO: 104243 - RNA, 21 nt, Human
cgaccuggggcuccugggugc

SEQ ID NO: 104244 - RNA, 21 nt, Human
cgccaccagcagcagcauguu

SEQ ID NO: 104245 - RNA, 18 nt, Human
cgccaggacacagggagc

SEQ ID NO: 104246 - RNA, 18 nt, Human
cgccugggcugacuucag

SEQ ID NO: 104247 - RNA, 21 nt, Human
cgcgcagacggcagaccggcg

SEQ ID NO: 104248 - RNA, 19 nt, Human
cgcggcgccucacccuccc

SEQ ID NO: 104249 - RNA, 23 nt, Human
cggaggggccaugacccaugaca

SEQ ID NO: 104250 - RNA, 21 nt, Human
cggcagagcgcggcgccucac

SEQ ID NO: 104251 - RNA, 18 nt, Human
cuaccuuccuacuuuugc

SEQ ID NO: 104252 - RNA, 25 nt, Human
cucgccaacgggcuucuggcuacag

SEQ ID NO: 104253 - RNA, 18 nt, Human
cugaaucaaugucacagc

SEQ ID NO: 104254 - RNA, 19 nt, Human
cugagaccacaccuccucu

SEQ ID NO: 104255 - RNA, 20 nt, Human
cuggcugggccccaccuggg

SEQ ID NO: 104256 - RNA, 24 nt, Human
cugggaccccagccuaggcagccu

SEQ ID NO: 104257 - RNA, 24 nt, Human
cugggccccaccugggaccccagc

SEQ ID NO: 104258 - RNA, 19 nt, Human
cugggugccuaacagagcc

SEQ ID NO: 104259 - RNA, 20 nt, Human
cugucugugugcuccuggcu

SEQ ID NO: 104260 - RNA, 21 nt, Human
cugugcccugucucuuccccu

SEQ ID NO: 104261 - RNA, 20 nt, Human
cugugugcuccuggcugugg

SEQ ID NO: 104262 - RNA, 21 nt, Human
cuuggcacagugccaagccca

SEQ ID NO: 104263 - RNA, 20 nt, Human
gaagaaggaguauugugaug

SEQ ID NO: 104264 - RNA, 18 nt, Human
gcaaagccuucacccagg

SEQ ID NO: 104265 - RNA, 20 nt, Human
gcaaagccuucacccagggg

SEQ ID NO: 104266 - RNA, 20 nt, Human
gcaccccucugggugauucc

SEQ ID NO: 104267 - RNA, 22 nt, Human
gccacuucaaccuccucuugaa

SEQ ID NO: 104268 - RNA, 18 nt, Human
gccagcugugcccugucu

SEQ ID NO: 104269 - RNA, 20 nt, Human
gccccaccugggaccccagc

SEQ ID NO: 104270 - RNA, 21 nt, Human
gccuggagaaggcggcugaga

SEQ ID NO: 104271 - RNA, 18 nt, Human
gcgggugggacugggcuu

SEQ ID NO: 104272 - RNA, 21 nt, Human
gcgggugggacugggcuuucg

SEQ ID NO: 104273 - RNA, 22 nt, Human
gcucaguggcugagcccugugg

SEQ ID NO: 104274 - RNA, 24 nt, Human
gcugagcccuguggccagcugugc

SEQ ID NO: 104275 - RNA, 24 nt, Human
ggaccccagccuaggcagccucga

SEQ ID NO: 104276 - RNA, 19 nt, Human
ggcggcagagcgcggcgcc

SEQ ID NO: 104277 - RNA, 19 nt, Human
ggcugagcccuguggccag

SEQ ID NO: 104278 - RNA, 22 nt, Human
gggagcuccagagucggguggc

SEQ ID NO: 104279 - RNA, 21 nt, Human
gggcuccugggugccuaacag

SEQ ID NO: 104280 - RNA, 21 nt, Human
gggugccuaacagagccaggc

SEQ ID NO: 104281 - RNA, 19 nt, Human
ggguuuauuguugaaggag

SEQ ID NO: 104282 - RNA, 20 nt, Human
gguuggaggcacagaucuuc

SEQ ID NO: 104283 - RNA, 20 nt, Human
guccaggugccccaagaugc

SEQ ID NO: 104284 - RNA, 21 nt, Human
guccaggugccccaagaugcu

SEQ ID NO: 104285 - RNA, 20 nt, Human
gucugugugcuccuggcugu

SEQ ID NO: 104286 - RNA, 21 nt, Human
gugagcagcagugcacuuugg

SEQ ID NO: 104287 - RNA, 18 nt, Human
uaacucggugcacagcga

SEQ ID NO: 104288 - RNA, 19 nt, Human
uacagugugggggcacgaa

SEQ ID NO: 104289 - RNA, 21 nt, Human
uacgacauucuugagggcaag

SEQ ID NO: 104290 - RNA, 21 nt, Human
uagccagaggguguucacgcc

SEQ ID NO: 104291 - RNA, 25 nt, Human
ucacagcaacacuugguuugcuccu

SEQ ID NO: 104292 - RNA, 20 nt, Human
ucacguucuccccaaaggac

SEQ ID NO: 104293 - RNA, 21 nt, Human
ucagaggaaagcgauggggcc

SEQ ID NO: 104294 - RNA, 23 nt, Human
uccagggcugaggagcgugaggc

SEQ ID NO: 104295 - RNA, 24 nt, Human
ucccaggauuucugccaacaacuc

SEQ ID NO: 104296 - RNA, 21 nt, Human
ucccuagguagccagagggug

SEQ ID NO: 104297 - RNA, 19 nt, Human
uccgggaggaaaccugggg

SEQ ID NO: 104298 - RNA, 19 nt, Human
uccuccacaaagcccucug

SEQ ID NO: 104299 - RNA, 22 nt, Human
uccuggcugggccccaccuggg

SEQ ID NO: 104300 - RNA, 24 nt, Human
uccuggcugggccccaccugggac

SEQ ID NO: 104301 - RNA, 21 nt, Human
ucgccaacgggcuucuggcua

SEQ ID NO: 104302 - RNA, 24 nt, Human
ucuccagaggcaagcccucagcuc

SEQ ID NO: 104303 - RNA, 24 nt, Human
ucugaaucaaugucacagcaacac

SEQ ID NO: 104304 - RNA, 18 nt, Human
ucugccaacaacucuacc

SEQ ID NO: 104305 - RNA, 20 nt, Human
ugaagaaugggagcuccaga

SEQ ID NO: 104306 - RNA, 21 nt, Human
ugaaucaaugucacagcaacc

SEQ ID NO: 104307 - RNA, 23 nt, Human
ugacuucaggauguguccaugug

SEQ ID NO: 104308 - RNA, 19 nt, Human
ugaguucaaugaagcucaa

SEQ ID NO: 104309 - RNA, 18 nt, Human
ugaguugggguccucccc

SEQ ID NO: 104310 - RNA, 22 nt, Human
ugcaaagccaaaggcccggaac

SEQ ID NO: 104311 - RNA, 24 nt, Human
ugcaaagccaaaggcccggaacag

SEQ ID NO: 104312 - RNA, 28 nt, Human
ugcacuuuggucuugucaccgguucccc

SEQ ID NO: 104313 - RNA, 19 nt, Human
ugccagagcucgccaacgg

SEQ ID NO: 104314 - RNA, 20 nt, Human
ugccccaagaugcucagggc

SEQ ID NO: 104315 - RNA, 21 nt, Human
ugccuccgggaggaaaccugg

SEQ ID NO: 104316 - RNA, 19 nt, Human
ugcggcuacuggacacgag

SEQ ID NO: 104317 - RNA, 21 nt, Human
ugcucaguggcugagcccugu

SEQ ID NO: 104318 - RNA, 21 nt, Human
ugcugguuggaggcacagauc

SEQ ID NO: 104319 - RNA, 19 nt, Human
uggcaaaccuguaggugug

SEQ ID NO: 104320 - RNA, 23 nt, Human
uggcaaaccuguaggugugcgga

SEQ ID NO: 104321 - RNA, 23 nt, Human
uggcacagugccaagcccacccc

SEQ ID NO: 104322 - RNA, 21 nt, Human
uggcggcagcaagaagcugag

SEQ ID NO: 104323 - RNA, 24 nt, Human
uggcgggugggacugggcuuucgg

SEQ ID NO: 104324 - RNA, 18 nt, Human
uggcugggccccaccugg

SEQ ID NO: 104325 - RNA, 20 nt, Human
ugggaccccagccuaggcag

SEQ ID NO: 104326 - RNA, 23 nt, Human
ugggaccccagccuaggcagccu

SEQ ID NO: 104327 - RNA, 21 nt, Human
ugggcagggauuggccccagg

SEQ ID NO: 104328 - RNA, 21 nt, Human
uggggcaaagggacagggagc

SEQ ID NO: 104329 - RNA, 21 nt, Human
ugugagcagcagugcacuuug

SEQ ID NO: 104330 - RNA, 26 nt, Human
uugaaugcaaagaucucaggguuuau

SEQ ID NO: 104331 - RNA, 19 nt, Human
uugcuaaggaucagacagg

SEQ ID NO: 104332 - RNA, 20 nt, Human
uuuuuuuuuuuuuuuuuugg

SEQ ID NO: 104333 - RNA, 20 nt, Human
aaaacccccaggguggacaa

SEQ ID NO: 104334 - RNA, 18 nt, Human
aaaagaacguugcccaca

SEQ ID NO: 104335 - RNA, 19 nt, Human
aaacaucacagcacuucac

SEQ ID NO: 104336 - RNA, 21 nt, Human
aaagcccacccagaggaaucc

SEQ ID NO: 104337 - RNA, 19 nt, Human
aaaucacuggaugccucca

SEQ ID NO: 104338 - RNA, 23 nt, Human
aaauugcccucacccugaaccca

SEQ ID NO: 104339 - RNA, 19 nt, Human
aaccacgaaagagugggaa

SEQ ID NO: 104340 - RNA, 23 nt, Human
aagcagcccaaggcaaaaccuca

SEQ ID NO: 104341 - RNA, 20 nt, Human
aaggagcuggggaccugagg

SEQ ID NO: 104342 - RNA, 18 nt, Human
aaggguggcacacacacc

SEQ ID NO: 104343 - RNA, 20 nt, Human
aaugcugucaacacaaacaa

SEQ ID NO: 104344 - RNA, 21 nt, Human
accacugugggggucauuuuc

SEQ ID NO: 104345 - RNA, 21 nt, Human
accccagaaacccacaagcag

SEQ ID NO: 104346 - RNA, 21 nt, Human
accccgccucucuccagccac

SEQ ID NO: 104347 - RNA, 20 nt, Human
accgcaaccacaucacagug

SEQ ID NO: 104348 - RNA, 20 nt, Human
accuaccccgccucucucca

SEQ ID NO: 104349 - RNA, 21 nt, Human
accuaccccgccucucuccag

SEQ ID NO: 104350 - RNA, 26 nt, Human
accucccugccuuccaccccagaaac

SEQ ID NO: 104351 - RNA, 22 nt, Human
acgcauccucaacagagaaacc

SEQ ID NO: 104352 - RNA, 20 nt, Human
agaaccccaucaggacagga

SEQ ID NO: 104353 - RNA, 19 nt, Human
agaagagacacagaggggc

SEQ ID NO: 104354 - RNA, 21 nt, Human
agacaagcaagcauuuuggaa

SEQ ID NO: 104355 - RNA, 24 nt, Human
agaccauuacacacagcuucccaa

SEQ ID NO: 104356 - RNA, 19 nt, Human
agagaagccagggugggcc

SEQ ID NO: 104357 - RNA, 21 nt, Human
agagagguggggugguccugg

SEQ ID NO: 104358 - RNA, 22 nt, Human
agagcaaaaagggaaacccucu

SEQ ID NO: 104359 - RNA, 22 nt, Human
agagcgcgcucaagggcaggug

SEQ ID NO: 104360 - RNA, 21 nt, Human
agaggaaaaacccccagggug

SEQ ID NO: 104361 - RNA, 23 nt, Human
agagugagucccgggacaggagu

SEQ ID NO: 104362 - RNA, 24 nt, Human
agcauuccaugggauaucgagggg

SEQ ID NO: 104363 - RNA, 29 nt, Human
agccacuggaccagccuguccccaucagg

SEQ ID NO: 104364 - RNA, 18 nt, Human
agcuggggaccugagggc

SEQ ID NO: 104365 - RNA, 21 nt, Human
aggaaaaacccccagggugga

SEQ ID NO: 104366 - RNA, 23 nt, Human
aggaaggcgccugaugagaccgu

SEQ ID NO: 104367 - RNA, 20 nt, Human
aggagccaccugccaaagcc

SEQ ID NO: 104368 - RNA, 28 nt, Human
aggcaaugcggcguugggucgggccccc

SEQ ID NO: 104369 - RNA, 20 nt, Human
agguaaaagagacaagcaag

SEQ ID NO: 104370 - RNA, 21 nt, Human
aucauucuauauuuucaugcu

SEQ ID NO: 104371 - RNA, 19 nt, Human
augcggcguugggucccaa

SEQ ID NO: 104372 - RNA, 21 nt, Human
caaaagaacguugcccacagg

SEQ ID NO: 104373 - RNA, 21 nt, Human
caaguaggugaguggaccaaa

SEQ ID NO: 104374 - RNA, 23 nt, Human
caaucugccagcucucugggaau

SEQ ID NO: 104375 - RNA, 21 nt, Human
cacaccuucccccaagcccag

SEQ ID NO: 104376 - RNA, 22 nt, Human
cacagaacaagauacuaaccac

SEQ ID NO: 104377 - RNA, 22 nt, Human
cacagccucaaucuccaacacu

SEQ ID NO: 104378 - RNA, 20 nt, Human
cacauccccagaggacagag

SEQ ID NO: 104379 - RNA, 24 nt, Human
caccaaagccacuggaccagccug

SEQ ID NO: 104380 - RNA, 21 nt, Human
caccaguuuuaaugcugagga

SEQ ID NO: 104381 - RNA, 22 nt, Human
caccccuuccaccagcagggcc

SEQ ID NO: 104382 - RNA, 22 nt, Human
cacccugaacccacuuggcaac

SEQ ID NO: 104383 - RNA, 21 nt, Human
cacgcauccucaacagagaaa

SEQ ID NO: 104384 - RNA, 20 nt, Human
cacuggaccagccugucccu

SEQ ID NO: 104385 - RNA, 20 nt, Human
cacuggaccagccugucccu

SEQ ID NO: 104386 - RNA, 21 nt, Human
cacuggcugccugggggaagu

SEQ ID NO: 104387 - RNA, 20 nt, Human
cagaaacccacaagcagcuc

SEQ ID NO: 104388 - RNA, 18 nt, Human
cagaaccaucaugucccc

SEQ ID NO: 104389 - RNA, 24 nt, Human
cagaaccaucauguccccuuagga

SEQ ID NO: 104390 - RNA, 18 nt, Human
cagagaaaccuacauaua

SEQ ID NO: 104391 - RNA, 20 nt, Human
cagagaaauugagcuuacaa

SEQ ID NO: 104392 - RNA, 25 nt, Human
cagauacacaccuucccccaagccc

SEQ ID NO: 104393 - RNA, 23 nt, Human
cagcaagagaggugggguggucc

SEQ ID NO: 104394 - RNA, 24 nt, Human
cagcaaugagaagaagaaaaccaa

SEQ ID NO: 104395 - RNA, 20 nt, Human
cagcagugccagauacaggc

SEQ ID NO: 104396 - RNA, 21 nt, Human
cagccccuacaggaccuagag

SEQ ID NO: 104397 - RNA, 24 nt, Human
cagccucaaucuccaacacugaaa

SEQ ID NO: 104398 - RNA, 23 nt, Human
cagcgacaggucucccucccagg

SEQ ID NO: 104399 - RNA, 23 nt, Human
cagcuucccaaaucuguagcccu

SEQ ID NO: 104400 - RNA, 21 nt, Human
cagggaccuggucauccuucc

SEQ ID NO: 104401 - RNA, 24 nt, Human
ccaaucacagaacaagauacuaac

SEQ ID NO: 104402 - RNA, 23 nt, Human
ccaccccagaaacccacaagcag

SEQ ID NO: 104403 - RNA, 20 nt, Human
ccacuggaccagccuguccc

SEQ ID NO: 104404 - RNA, 18 nt, Human
ccagggaccuggucaucc

SEQ ID NO: 104405 - RNA, 19 nt, Human
ccagucccgcucucugcuu

SEQ ID NO: 104406 - RNA, 23 nt, Human
ccauccagggccccagaggagcc

SEQ ID NO: 104407 - RNA, 26 nt, Human
cccacaagcagcucuggggacacugg

SEQ ID NO: 104408 - RNA, 18 nt, Human
ccccacccccccaguccc

SEQ ID NO: 104409 - RNA, 19 nt, Human
cccccacccccccaguccc

SEQ ID NO: 104410 - RNA, 20 nt, Human
cccccagucccgcucucugc

SEQ ID NO: 104411 - RNA, 24 nt, Human
cccccuaagcaucugaccauucau

SEQ ID NO: 104412 - RNA, 18 nt, Human
cccgcucucugcuuucuc

SEQ ID NO: 104413 - RNA, 19 nt, Human
cccuuuccuggccagagga

SEQ ID NO: 104414 - RNA, 19 nt, Human
ccgccucucuccagccacc

SEQ ID NO: 104415 - RNA, 18 nt, Human
ccuacagagaccgcaacc

SEQ ID NO: 104416 - RNA, 19 nt, Human
ccuacagagaccgcaacca

SEQ ID NO: 104417 - RNA, 20 nt, Human
ccuacagagaccgcaaccac

SEQ ID NO: 104418 - RNA, 23 nt, Human
ccucccugccuuccaccccagaa

SEQ ID NO: 104419 - RNA, 19 nt, Human
ccugccuaccuaccccgcc

SEQ ID NO: 104420 - RNA, 21 nt, Human
ccugguggagccugugcaggc

SEQ ID NO: 104421 - RNA, 23 nt, Human
ccuuccaccccagaaacccacaa

SEQ ID NO: 104422 - RNA, 18 nt, Human
cgacaggucucccuccca

SEQ ID NO: 104423 - RNA, 22 nt, Human
cguggggcagcugaccuugcug

SEQ ID NO: 104424 - RNA, 21 nt, Human
cuauagcucugagccgacauc

SEQ ID NO: 104425 - RNA, 24 nt, Human
cucaacuagagggcauccaaggcc

SEQ ID NO: 104426 - RNA, 21 nt, Human
cucacagccaagccuuguguc

SEQ ID NO: 104427 - RNA, 21 nt, Human
cucgcacacagucgaugcccu

SEQ ID NO: 104428 - RNA, 18 nt, Human
cucugaugcuggguuuca

SEQ ID NO: 104429 - RNA, 18 nt, Human
cucuugggcucccagguu

SEQ ID NO: 104430 - RNA, 24 nt, Human
cugcccaacacacuccaggccagg

SEQ ID NO: 104431 - RNA, 18 nt, Human
cuggaccagccugucccu

SEQ ID NO: 104432 - RNA, 18 nt, Human
cuggguuucaucccugca

SEQ ID NO: 104433 - RNA, 23 nt, Human
cuuccaaucuguagguucuccug

SEQ ID NO: 104434 - RNA, 22 nt, Human
cuuccaccccagaaacccacaa

SEQ ID NO: 104435 - RNA, 21 nt, Human
cuuggcucaaaagaacguugc

SEQ ID NO: 104436 - RNA, 23 nt, Human
cuugggccaccccccacagagaa

SEQ ID NO: 104437 - RNA, 23 nt, Human
gaaaucacuggaugccuccaccu

SEQ ID NO: 104438 - RNA, 21 nt, Human
gaacccacuuggcaacgggga

SEQ ID NO: 104439 - RNA, 22 nt, Human
gacaagcaagcauuuuggaaug

SEQ ID NO: 104440 - RNA, 20 nt, Human
gacaucaauggaggcagcaa

SEQ ID NO: 104441 - RNA, 20 nt, Human
gaccccucagccuccacagg

SEQ ID NO: 104442 - RNA, 23 nt, Human
gagaagccagggugggccaaaug

SEQ ID NO: 104443 - RNA, 19 nt, Human
gagaagucuuggcucaaaa

SEQ ID NO: 104444 - RNA, 22 nt, Human
gagagguggggugguccuggca

SEQ ID NO: 104445 - RNA, 20 nt, Human
gagccagggacgcccugccu

SEQ ID NO: 104446 - RNA, 20 nt, Human
gagccugugcaggccugagc

SEQ ID NO: 104447 - RNA, 18 nt, Human
gaggaugcugucauccaa

SEQ ID NO: 104448 - RNA, 25 nt, Human
gagggcucagggcccaccacuggcu

SEQ ID NO: 104449 - RNA, 20 nt, Human
gaggggucccaaagaagaag

SEQ ID NO: 104450 - RNA, 21 nt, Human
gcacauccccagaggacagag

SEQ ID NO: 104451 - RNA, 22 nt, Human
gccagaggagcacaaaugcccc

SEQ ID NO: 104452 - RNA, 19 nt, Human
gcccccacccccccagucc

SEQ ID NO: 104453 - RNA, 18 nt, Human
gccucaccccuuccacca

SEQ ID NO: 104454 - RNA, 18 nt, Human
gcugucauccaagggcau

SEQ ID NO: 104455 - RNA, 18 nt, Human
ggaaaggguccaagucag

SEQ ID NO: 104456 - RNA, 20 nt, Human
ggaacacgcauccucaacag

SEQ ID NO: 104457 - RNA, 19 nt, Human
ggacagauacacaccuucc

SEQ ID NO: 104458 - RNA, 22 nt, Human
ggacagauacacaccuuccccc

SEQ ID NO: 104459 - RNA, 20 nt, Human
ggaccaaaccccugcaugcu

SEQ ID NO: 104460 - RNA, 20 nt, Human
ggagcuggggaccugagggc

SEQ ID NO: 104461 - RNA, 21 nt, Human
ggaugcugucauccaagggca

SEQ ID NO: 104462 - RNA, 23 nt, Human
ggcacagccucaaucuccaacac

SEQ ID NO: 104463 - RNA, 21 nt, Human
ggcagcuuggauggacucugu

SEQ ID NO: 104464 - RNA, 19 nt, Human
gggaccugagggcucaggg

SEQ ID NO: 104465 - RNA, 23 nt, Human
ggggcagcugaccuugcuggggu

SEQ ID NO: 104466 - RNA, 27 nt, Human
ggguaggggcuugugacucagucuuug

SEQ ID NO: 104467 - RNA, 20 nt, Human
gguaggggcuugugacucag

SEQ ID NO: 104468 - RNA, 26 nt, Human
ggucauuccuuuaugacugagagucg

SEQ ID NO: 104469 - RNA, 20 nt, Human
ggucucccucccagaacccc

SEQ ID NO: 104470 - RNA, 19 nt, Human
gguggagugugcccaaucu

SEQ ID NO: 104471 - RNA, 22 nt, Human
guacuugaagcccccacccccc

SEQ ID NO: 104472 - RNA, 21 nt, Human
guugcaccucccugccuucca

SEQ ID NO: 104473 - RNA, 20 nt, Human
uaaaauguugcaguggccuc

SEQ ID NO: 104474 - RNA, 22 nt, Human
uaaagcaacuaggcugagguca

SEQ ID NO: 104475 - RNA, 20 nt, Human
uaaccacagcaaggaagggg

SEQ ID NO: 104476 - RNA, 20 nt, Human
uaauuuagccaguaacagcc

SEQ ID NO: 104477 - RNA, 24 nt, Human
uacaaauugcccucacccugaacc

SEQ ID NO: 104478 - RNA, 20 nt, Human
uagagacaucaauggaggca

SEQ ID NO: 104479 - RNA, 23 nt, Human
uagagggcauccaaggccuggug

SEQ ID NO: 104480 - RNA, 19 nt, Human
uagcucugagccgacaucc

SEQ ID NO: 104481 - RNA, 19 nt, Human
uaggagccaccugccaaag

SEQ ID NO: 104482 - RNA, 24 nt, Human
uagucaacauugcuaaccaaucac

SEQ ID NO: 104483 - RNA, 18 nt, Human
ucacugggagucaugugc

SEQ ID NO: 104484 - RNA, 19 nt, Human
ucagcaaugagaagaagaa

SEQ ID NO: 104485 - RNA, 24 nt, Human
uccacaucaggugugggcugcuuc

SEQ ID NO: 104486 - RNA, 18 nt, Human
uccaugggauaucgaggg

SEQ ID NO: 104487 - RNA, 20 nt, Human
ucccaaggaucaguggggag

SEQ ID NO: 104488 - RNA, 26 nt, Human
ucccccgaccccucagccuccacagg

SEQ ID NO: 104489 - RNA, 19 nt, Human
ucuccagccaccugcuccc

SEQ ID NO: 104490 - RNA, 24 nt, Human
ucuccagccaccugcuccccaccu

SEQ ID NO: 104491 - RNA, 21 nt, Human
ucuguuuucuucccccgaccc

SEQ ID NO: 104492 - RNA, 19 nt, Human
ugaaaagcaacuugaaggc

SEQ ID NO: 104493 - RNA, 20 nt, Human
ugaaacaaacgguuuauucc

SEQ ID NO: 104494 - RNA, 26 nt, Human
ugaaacaaacgguuuauuccuaaugc

SEQ ID NO: 104495 - RNA, 22 nt, Human
ugacaagcaccuggccaaaggu

SEQ ID NO: 104496 - RNA, 21 nt, Human
ugaccauucauugcaaaagca

SEQ ID NO: 104497 - RNA, 24 nt, Human
ugacuaccuccacagagaucaccu

SEQ ID NO: 104498 - RNA, 22 nt, Human
ugagaagaagaaaaccaauuuc

SEQ ID NO: 104499 - RNA, 22 nt, Human
ugagagcgcgcucaagggcagg

SEQ ID NO: 104500 - RNA, 18 nt, Human
ugagguaaaagagacaag

SEQ ID NO: 104501 - RNA, 18 nt, Human
ugaguggaccaaaccccu

SEQ ID NO: 104502 - RNA, 21 nt, Human
ugauggggauaaaauguugca

SEQ ID NO: 104503 - RNA, 22 nt, Human
ugcccaacacacuccaggccag

SEQ ID NO: 104504 - RNA, 21 nt, Human
ugccucaccccuuccaccagc

SEQ ID NO: 104505 - RNA, 21 nt, Human
ugcuggggucugguggagugu

SEQ ID NO: 104506 - RNA, 21 nt, Human
uggaagguuugcugaaaaccu

SEQ ID NO: 104507 - RNA, 25 nt, Human
uggaaugauggggauaaaauguugc

SEQ ID NO: 104508 - RNA, 22 nt, Human
uggagccuucucagagcucagc

SEQ ID NO: 104509 - RNA, 24 nt, Human
uggcaacggggagaugaccugguu

SEQ ID NO: 104510 - RNA, 24 nt, Human
uggcucaaaagaacguugcccaca

SEQ ID NO: 104511 - RNA, 23 nt, Human
uggcugaaaagcaacuugaaggc

SEQ ID NO: 104512 - RNA, 29 nt, Human
uggcugaaaagcaacuugaaggcuagaac

SEQ ID NO: 104513 - RNA, 21 nt, Human
uggcugugacacguguggaga

SEQ ID NO: 104514 - RNA, 20 nt, Human
ugggcucccagguucauccc

SEQ ID NO: 104515 - RNA, 19 nt, Human
uggggauaaaauguugcag

SEQ ID NO: 104516 - RNA, 24 nt, Human
uggggauaaaauguugcaguggcc

SEQ ID NO: 104517 - RNA, 22 nt, Human
ugggggucauuuucugccucug

SEQ ID NO: 104518 - RNA, 21 nt, Human
uggguucauuuuccuucagag

SEQ ID NO: 104519 - RNA, 20 nt, Human
uguaaccucaugaaagcugu

SEQ ID NO: 104520 - RNA, 18 nt, Human
uguagcccuuuucuguaa

SEQ ID NO: 104521 - RNA, 25 nt, Human
ugucacgcacuuuaaaaccagacuc

SEQ ID NO: 104522 - RNA, 24 nt, Human
uuagcagagaugcuccaugucuug

SEQ ID NO: 104523 - RNA, 19 nt, Human
uucaaguaggugaguggac

SEQ ID NO: 104524 - RNA, 31 nt, Human
uucacaaauggaggcgcccucaccaaagccc

SEQ ID NO: 104525 - RNA, 24 nt, Human
uucaucaguucaccaguuuuaaug

SEQ ID NO: 104526 - RNA, 25 nt, Human
uucauggcaggcaaaagauggguuc

SEQ ID NO: 104527 - RNA, 22 nt, Human
uucccccgaccccucagccucc

SEQ ID NO: 104528 - RNA, 23 nt, Human
uuccuucagaggaaaaaccccca

SEQ ID NO: 104529 - RNA, 19 nt, Human
uugcuuuuuagagaagcca

SEQ ID NO: 104530 - RNA, 18 nt, Human
uuucauaggcauuucucu

SEQ ID NO: 104531 - RNA, 20 nt, Human
uuugcugaaaaccucucuga

SEQ ID NO: 104532 - RNA, 21 nt, Human
accaaagaagugacaaaggga

SEQ ID NO: 104533 - RNA, 21 nt, Human
acccagagagucacuuuagcu

SEQ ID NO: 104534 - RNA, 23 nt, Human
agagucacuuuagcuucugaacc

SEQ ID NO: 104535 - RNA, 19 nt, Human
aggcaacccagagagucac

SEQ ID NO: 104536 - RNA, 23 nt, Human
agugaauagucaaaauugcacaa

SEQ ID NO: 104537 - RNA, 19 nt, Human
aucuagacaaauuaugggg

SEQ ID NO: 104538 - RNA, 20 nt, Human
caaaauggaagcaggcaacc

SEQ ID NO: 104539 - RNA, 18 nt, Human
caccaaagaagugacaaa

SEQ ID NO: 104540 - RNA, 24 nt, Human
caccaaagaagugacaaagggaac

SEQ ID NO: 104541 - RNA, 21 nt, Human
cacccuguuuuccuucaaacu

SEQ ID NO: 104542 - RNA, 22 nt, Human
cagaucaacagaugaacagcaa

SEQ ID NO: 104543 - RNA, 22 nt, Human
cagccgcuguccucuaagguuu

SEQ ID NO: 104544 - RNA, 20 nt, Human
ccaaaacucacauuacaagc

SEQ ID NO: 104545 - RNA, 22 nt, Human
ccagaagcuguccugccuccag

SEQ ID NO: 104546 - RNA, 21 nt, Human
ccagaucaacagaugaacagc

SEQ ID NO: 104547 - RNA, 31 nt, Human
cccuagauaaacccaugguggacaauuuacc

SEQ ID NO: 104548 - RNA, 22 nt, Human
ccuccagaucaacagaugaaca

SEQ ID NO: 104549 - RNA, 23 nt, Human
ccucuaagguuucacaaaaugga

SEQ ID NO: 104550 - RNA, 19 nt, Human
cuguccugccuccagauca

SEQ ID NO: 104551 - RNA, 19 nt, Human
gcacaacguacuaccaccc

SEQ ID NO: 104552 - RNA, 23 nt, Human
ggcccuuuguuuaaccucaugug

SEQ ID NO: 104553 - RNA, 21 nt, Human
ggugagggggugaagaaggga

SEQ ID NO: 104554 - RNA, 25 nt, Human
gucccagaagcuguccugccuccag

SEQ ID NO: 104555 - RNA, 22 nt, Human
uagauaaacccaugguggacaa

SEQ ID NO: 104556 - RNA, 22 nt, Human
uauaagauuaucuguccugaga

SEQ ID NO: 104557 - RNA, 24 nt, Human
ucacaaaauggaagcaggcaaccc

SEQ ID NO: 104558 - RNA, 19 nt, Human
uccguaaguuuguaagugg

SEQ ID NO: 104559 - RNA, 24 nt, Human
ucuaagguuucacaaaauggaagc

SEQ ID NO: 104560 - RNA, 19 nt, Human
ucuguagcccagguauaca

SEQ ID NO: 104561 - RNA, 20 nt, Human
ugaacuagagauauggaaau

SEQ ID NO: 104562 - RNA, 23 nt, Human
ugaagcaagauaauuuaagacca

SEQ ID NO: 104563 - RNA, 19 nt, Human
ugcacaacguacuaccacc

SEQ ID NO: 104564 - RNA, 23 nt, Human
ugcacaacguacuaccacccaag

SEQ ID NO: 104565 - RNA, 20 nt, Human
uucacaaaauggaagcaggc

SEQ ID NO: 104566 - RNA, 22 nt, Human
uugcacaacguacuaccaccca

SEQ ID NO: 104567 - RNA, 19 nt, Human
aaucuccaucuccguacuc

SEQ ID NO: 104568 - RNA, 21 nt, Human
acccaacuuccaccacgcugg

SEQ ID NO: 104569 - RNA, 19 nt, Human
acuuccaccacgcuggagg

SEQ ID NO: 104570 - RNA, 18 nt, Human
aggauagggaggaguugg

SEQ ID NO: 104571 - RNA, 22 nt, Human
aggauagggaggaguugggagc

SEQ ID NO: 104572 - RNA, 20 nt, Human
aggcucuuccgggcagcagg

SEQ ID NO: 104573 - RNA, 24 nt, Human
ccaaucuccaucuccguacuccua

SEQ ID NO: 104574 - RNA, 24 nt, Human
cccagcccccacggaacaugaggc

SEQ ID NO: 104575 - RNA, 21 nt, Human
cccccacggaacaugaggcuc

SEQ ID NO: 104576 - RNA, 22 nt, Human
cccgagccguucagccuggagc

SEQ ID NO: 104577 - RNA, 19 nt, Human
ccuggccccagagauucac

SEQ ID NO: 104578 - RNA, 18 nt, Human
cuuccgggcagcaggguc

SEQ ID NO: 104579 - RNA, 18 nt, Human
gcagugguguguaagugg

SEQ ID NO: 104580 - RNA, 22 nt, Human
uaaguggcccgagccguucagc

SEQ ID NO: 104581 - RNA, 24 nt, Human
uaggauagggaggaguugggagcc

SEQ ID NO: 104582 - RNA, 22 nt, Human
ugaggcucuuccgggcagcagg

SEQ ID NO: 104583 - RNA, 23 nt, Human
ugccagugggccuuuaggauagg

SEQ ID NO: 104584 - RNA, 21 nt, Human
ugcuugccuucugcuacaagc

SEQ ID NO: 104585 - RNA, 21 nt, Human
uguguaaguggcccgagccgu

SEQ ID NO: 104586 - RNA, 23 nt, Human
aaaaauacaggcucccccacaac

SEQ ID NO: 104587 - RNA, 22 nt, Human
aaaagaucaaaagcaguuuggg

SEQ ID NO: 104588 - RNA, 22 nt, Human
aacauuccauuuauacacagaa

SEQ ID NO: 104589 - RNA, 22 nt, Human
aagaggaaucaaaagaucaaaa

SEQ ID NO: 104590 - RNA, 24 nt, Human
aaggaaaauccagggggugggggg

SEQ ID NO: 104591 - RNA, 21 nt, Human
aaggccagaaccgucaaggga

SEQ ID NO: 104592 - RNA, 19 nt, Human
aagggcagguguggggcug

SEQ ID NO: 104593 - RNA, 21 nt, Human
aaggucccuuacugguccugc

SEQ ID NO: 104594 - RNA, 24 nt, Human
aggaaaauccaggggguggggggu

SEQ ID NO: 104595 - RNA, 23 nt, Human
caagaggaaucaaaagaucaaaa

SEQ ID NO: 104596 - RNA, 23 nt, Human
cacagaacuaaacagacaagcac

SEQ ID NO: 104597 - RNA, 26 nt, Human
cacagaacuaaacagacaagcacaga

SEQ ID NO: 104598 - RNA, 23 nt, Human
cacagagucacuauugcgguuag

SEQ ID NO: 104599 - RNA, 22 nt, Human
cagacaagcacagagucacuau

SEQ ID NO: 104600 - RNA, 20 nt, Human
cagcaugggaagggggagga

SEQ ID NO: 104601 - RNA, 18 nt, Human
ccaggggguggggggucu

SEQ ID NO: 104602 - RNA, 20 nt, Human
cccccagccccuccggucug

SEQ ID NO: 104603 - RNA, 21 nt, Human
cccccugcugggaucccccca

SEQ ID NO: 104604 - RNA, 20 nt, Human
ccuccggucuggcaggaagg

SEQ ID NO: 104605 - RNA, 22 nt, Human
cgaaaaggagagggcaccgaga

SEQ ID NO: 104606 - RNA, 22 nt, Human
cuggggggaacuuggucugcuu

SEQ ID NO: 104607 - RNA, 18 nt, Human
gagaggaaccagccggca

SEQ ID NO: 104608 - RNA, 19 nt, Human
ggaagggggaggaccaggu

SEQ ID NO: 104609 - RNA, 19 nt, Human
ggcaacuggggugaaggga

SEQ ID NO: 104610 - RNA, 20 nt, Human
ggcaggaagggggcagccug

SEQ ID NO: 104611 - RNA, 18 nt, Human
gggaggaccaggugggga

SEQ ID NO: 104612 - RNA, 21 nt, Human
gggggaggaccagguggggaa

SEQ ID NO: 104613 - RNA, 22 nt, Human
ggggggucuguuuggcaacugg

SEQ ID NO: 104614 - RNA, 19 nt, Human
gggucuguuuggcaacugg

SEQ ID NO: 104615 - RNA, 23 nt, Human
ggucuggcaggaagggggcagcc

SEQ ID NO: 104616 - RNA, 19 nt, Human
uacacagaacuaaacagac

SEQ ID NO: 104617 - RNA, 23 nt, Human
uacaggcucccccacaacugggg

SEQ ID NO: 104618 - RNA, 18 nt, Human
uccaggcagggggccaga

SEQ ID NO: 104619 - RNA, 19 nt, Human
uccaggggguggggggucu

SEQ ID NO: 104620 - RNA, 21 nt, Human
uccccccagccccuccggucu

SEQ ID NO: 104621 - RNA, 21 nt, Human
uccugcuuccaugaguagccg

SEQ ID NO: 104622 - RNA, 18 nt, Human
ucuggcaggaagggggca

SEQ ID NO: 104623 - RNA, 20 nt, Human
ugaccaggggaaaagggaga

SEQ ID NO: 104624 - RNA, 23 nt, Human
uggagggagaaggaaaauccagg

SEQ ID NO: 104625 - RNA, 24 nt, Human
uggcaggaagggggcagccugcaa

SEQ ID NO: 104626 - RNA, 24 nt, Human
ugggaaggccagaaccgucaaggg

SEQ ID NO: 104627 - RNA, 18 nt, Human
ugggauccccccagcccc

SEQ ID NO: 104628 - RNA, 20 nt, Human
uggggugccuggggggaacu

SEQ ID NO: 104629 - RNA, 25 nt, Human
uggggugccuggggggaacuugguc

SEQ ID NO: 104630 - RNA, 22 nt, Human
uguuaaaaaaaauacaggcucc

SEQ ID NO: 104631 - RNA, 23 nt, Human
uguuuggcaacuggggugaaggg

SEQ ID NO: 104632 - RNA, 24 nt, Human
uguuuggcaacuggggugaaggga

SEQ ID NO: 104633 - RNA, 20 nt, Human
uuggcagcaugggaaggggg

SEQ ID NO: 104634 - RNA, 24 nt, Human
aaaaggaauacaagcuuauauaaa

SEQ ID NO: 104635 - RNA, 19 nt, Human
aaaauacagcauuguaaua

SEQ ID NO: 104636 - RNA, 24 nt, Human
aaauuaacgaguuucacuagacaa

SEQ ID NO: 104637 - RNA, 21 nt, Human
aacagucagacuggugguacc

SEQ ID NO: 104638 - RNA, 21 nt, Human
aagaagggcuguccugugaca

SEQ ID NO: 104639 - RNA, 20 nt, Human
aagcuccuaaugccaaagac

SEQ ID NO: 104640 - RNA, 23 nt, Human
acaguaauaaauauaaugcaguc

SEQ ID NO: 104641 - RNA, 22 nt, Human
auaaaacagaagcauauaaaac

SEQ ID NO: 104642 - RNA, 21 nt, Human
auauuucauaaaaauacuagu

SEQ ID NO: 104643 - RNA, 19 nt, Human
aucagccccaaggcuuccc

SEQ ID NO: 104644 - RNA, 22 nt, Human
auggaaacagucagacuggugg

SEQ ID NO: 104645 - RNA, 20 nt, Human
caaaauuauaaaacagaagc

SEQ ID NO: 104646 - RNA, 24 nt, Human
caaacaauauaguuguguuucuaa

SEQ ID NO: 104647 - RNA, 26 nt, Human
caaauguuucuuuuuuaaaaaaaaac

SEQ ID NO: 104648 - RNA, 25 nt, Human
cacaaaauuauaaaacagaagcaua

SEQ ID NO: 104649 - RNA, 18 nt, Human
cacuuucuggaguuggga

SEQ ID NO: 104650 - RNA, 23 nt, Human
cagaagcauauaaaacuaauuca

SEQ ID NO: 104651 - RNA, 22 nt, Human
cagcugugggcaacaacucgau

SEQ ID NO: 104652 - RNA, 25 nt, Human
caguaauaaauauaaugcagucuuc

SEQ ID NO: 104653 - RNA, 21 nt, Human
cagucuugugguuccuguggu

SEQ ID NO: 104654 - RNA, 20 nt, Human
cagugugucucucauucucu

SEQ ID NO: 104655 - RNA, 21 nt, Human
cccacagugcccauggccuau

SEQ ID NO: 104656 - RNA, 22 nt, Human
cccacagugcccauggccuauc

SEQ ID NO: 104657 - RNA, 19 nt, Human
cccauaucaguguccucaa

SEQ ID NO: 104658 - RNA, 24 nt, Human
ccccaaggcuucccuccagaccaa

SEQ ID NO: 104659 - RNA, 20 nt, Human
cccuccagaccaaaagguga

SEQ ID NO: 104660 - RNA, 19 nt, Human
ccgcugaaguuuccaguua

SEQ ID NO: 104661 - RNA, 22 nt, Human
ccugccgcucaacccuuuuucu

SEQ ID NO: 104662 - RNA, 18 nt, Human
cgcuggggucccugcuag

SEQ ID NO: 104663 - RNA, 24 nt, Human
cucugggugccugccgcucaaccc

SEQ ID NO: 104664 - RNA, 25 nt, Human
cugaaaacauaccaccaucaaccua

SEQ ID NO: 104665 - RNA, 18 nt, Human
cuuucccagguaagggau

SEQ ID NO: 104666 - RNA, 20 nt, Human
cuuucuggaguugggaaaag

SEQ ID NO: 104667 - RNA, 21 nt, Human
gcuccuaaugccaaagaccua

SEQ ID NO: 104668 - RNA, 25 nt, Human
guaauucauaaucauucuuuuaaaa

SEQ ID NO: 104669 - RNA, 21 nt, Human
gucaguuuggaguugagaagg

SEQ ID NO: 104670 - RNA, 25 nt, Human
uaaaaaaaaacuuaauucauccuug

SEQ ID NO: 104671 - RNA, 21 nt, Human
uaaaacagaagcauauaaaac

SEQ ID NO: 104672 - RNA, 21 nt, Human
uaaaccgcugaaguuuccagu

SEQ ID NO: 104673 - RNA, 18 nt, Human
uaacagcccuuucccagg

SEQ ID NO: 104674 - RNA, 24 nt, Human
uaacauacuuuuccagcuaaacuc

SEQ ID NO: 104675 - RNA, 25 nt, Human
uaagcugaucaacuaggcugauuga

SEQ ID NO: 104676 - RNA, 21 nt, Human
uaccaucuucuucagaacugc

SEQ ID NO: 104677 - RNA, 24 nt, Human
uaccaucuucuucagaacugcauc

SEQ ID NO: 104678 - RNA, 20 nt, Human
uacuugcuuggaaaugagau

SEQ ID NO: 104679 - RNA, 24 nt, Human
uagacaauaagcugaucaacuagg

SEQ ID NO: 104680 - RNA, 20 nt, Human
uauugugauuaucugaaaua

SEQ ID NO: 104681 - RNA, 21 nt, Human
ucaacuaggcugauugacauu

SEQ ID NO: 104682 - RNA, 21 nt, Human
ucaauuccccuuaccaaaugu

SEQ ID NO: 104683 - RNA, 18 nt, Human
uccacgagcuccaauucc

SEQ ID NO: 104684 - RNA, 20 nt, Human
uccaugaggugacuguccca

SEQ ID NO: 104685 - RNA, 24 nt, Human
ucccaugucaacauuuaugcugcu

SEQ ID NO: 104686 - RNA, 20 nt, Human
uccccugugaaagauuauaa

SEQ ID NO: 104687 - RNA, 23 nt, Human
uccuuguuuucugaggcagaggu

SEQ ID NO: 104688 - RNA, 18 nt, Human
ucuggaguugggaaaagg

SEQ ID NO: 104689 - RNA, 23 nt, Human
ucugugagcuugucacuuucugg

SEQ ID NO: 104690 - RNA, 25 nt, Human
ugaaguacauacaucuagccugaaa

SEQ ID NO: 104691 - RNA, 18 nt, Human
ugagaaggcaguguaccc

SEQ ID NO: 104692 - RNA, 24 nt, Human
ugagcaaaugucccaugucaacau

SEQ ID NO: 104693 - RNA, 18 nt, Human
ugaggugacugucccacg

SEQ ID NO: 104694 - RNA, 23 nt, Human
ugccauaaaaagucaauauuuca

SEQ ID NO: 104695 - RNA, 20 nt, Human
ugggaaucauacagcugugg

SEQ ID NO: 104696 - RNA, 24 nt, Human
uguauugugauuaucugaaauauu

SEQ ID NO: 104697 - RNA, 18 nt, Human
ugucacuuucuggaguug

SEQ ID NO: 104698 - RNA, 23 nt, Human
ugugcagucuugugguuccugug

SEQ ID NO: 104699 - RNA, 23 nt, Human
uucacaaaauuauaaaacagaag

SEQ ID NO: 104700 - RNA, 22 nt, Human
uuuccaggaucuggaaguucuc

SEQ ID NO: 104701 - RNA, 19 nt, Human
uuugaaguaccuuucacac

SEQ ID NO: 104702 - RNA, 21 nt, Human
uuugaugugcagucuuguggu

SEQ ID NO: 104703 - RNA, 22 nt, Human
uuuucaggaaaaucuggcuugc

SEQ ID NO: 104704 - RNA, 19 nt, Human
uuuuccagcuaaacucuag

SEQ ID NO: 104705 - RNA, 21 nt, Human
aaaaggagaguuuuaucucac

SEQ ID NO: 104706 - RNA, 19 nt, Human
aagccauaaacacuaaaca

SEQ ID NO: 104707 - RNA, 23 nt, Human
cauuccaaaugaaaagaacuaga

SEQ ID NO: 104708 - RNA, 18 nt, Human
cgcuccuuucucugggcu

SEQ ID NO: 104709 - RNA, 18 nt, Human
gcgcuccuuucucugggc

SEQ ID NO: 104710 - RNA, 20 nt, Human
uaaggaaaaggagaguuuua

SEQ ID NO: 104711 - RNA, 23 nt, Human
uaggauaaggaggaaggcaguaa

SEQ ID NO: 104712 - RNA, 22 nt, Human
aagagguagacaaggccagggg

SEQ ID NO: 104713 - RNA, 18 nt, Human
accucagagacucagucg

SEQ ID NO: 104714 - RNA, 24 nt, Human
agggaguaggguguaggaaggccu

SEQ ID NO: 104715 - RNA, 21 nt, Human
cacagggaguaggguguagga

SEQ ID NO: 104716 - RNA, 21 nt, Human
cagcggagcgccccagcccuc

SEQ ID NO: 104717 - RNA, 20 nt, Human
ccccagcccucuccucucac

SEQ ID NO: 104718 - RNA, 22 nt, Human
ccuauggugggguccugggagc

SEQ ID NO: 104719 - RNA, 22 nt, Human
ccucgggguugugggggcggca

SEQ ID NO: 104720 - RNA, 18 nt, Human
cgaggcuggaggcacagg

SEQ ID NO: 104721 - RNA, 19 nt, Human
cugccucguguaccuggcu

SEQ ID NO: 104722 - RNA, 23 nt, Human
gaggcggagaccacggugaagug

SEQ ID NO: 104723 - RNA, 23 nt, Human
gcggagcgccccagcccucuccu

SEQ ID NO: 104724 - RNA, 23 nt, Human
ggacuagucgaggcuggaggcac

SEQ ID NO: 104725 - RNA, 22 nt, Human
ggaggugauaggaugcuggggu

SEQ ID NO: 104726 - RNA, 25 nt, Human
gggcaagagguagacaaggccaggg

SEQ ID NO: 104727 - RNA, 23 nt, Human
ggguccugggagccaggaggagg

SEQ ID NO: 104728 - RNA, 19 nt, Human
uccugggagccaggaggag

SEQ ID NO: 104729 - RNA, 20 nt, Human
uccugggagccaggaggagg

SEQ ID NO: 104730 - RNA, 19 nt, Human
ucgaggcuggaggcacagg

SEQ ID NO: 104731 - RNA, 18 nt, Human
ucucacugguccagcgcc

SEQ ID NO: 104732 - RNA, 24 nt, Human
ugccuauggugggguccugggagc

SEQ ID NO: 104733 - RNA, 22 nt, Human
ugccucguguaccuggcuuuau

SEQ ID NO: 104734 - RNA, 21 nt, Human
uggcuuuauaccucgggguug

SEQ ID NO: 104735 - RNA, 21 nt, Human
ugggagccaggaggaggccgu

SEQ ID NO: 104736 - RNA, 21 nt, Human
ugggguccugggagccaggag

SEQ ID NO: 104737 - RNA, 22 nt, Human
uggugggguccugggagccagg

SEQ ID NO: 104738 - RNA, 22 nt, Human
aaggaugcggccucacccagag

SEQ ID NO: 104739 - RNA, 22 nt, Human
acaaguguuucugcacauucuu

SEQ ID NO: 104740 - RNA, 24 nt, Human
acacaaguguuucugcacauucuu

SEQ ID NO: 104741 - RNA, 20 nt, Human
acaccguccggaggaggugc

SEQ ID NO: 104742 - RNA, 21 nt, Human
acagagggcagcagccccaca

SEQ ID NO: 104743 - RNA, 19 nt, Human
accguccggaggaggugcu

SEQ ID NO: 104744 - RNA, 19 nt, Human
accugcgcaccccagcagc

SEQ ID NO: 104745 - RNA, 19 nt, Human
acuucacaaauggaaggcu

SEQ ID NO: 104746 - RNA, 23 nt, Human
agacagaggugcuggggaggggg

SEQ ID NO: 104747 - RNA, 21 nt, Human
agaggaggacggagccggagg

SEQ ID NO: 104748 - RNA, 18 nt, Human
agccaggaauccaagggg

SEQ ID NO: 104749 - RNA, 24 nt, Human
agcgcauggcagacagaggugcug

SEQ ID NO: 104750 - RNA, 18 nt, Human
agcugggggccugaguac

SEQ ID NO: 104751 - RNA, 21 nt, Human
agcuucgggcucccagguggc

SEQ ID NO: 104752 - RNA, 25 nt, Human
aggaacacagagggcagccgguacc

SEQ ID NO: 104753 - RNA, 24 nt, Human
aggugaucaacccaugucuggagc

SEQ ID NO: 104754 - RNA, 22 nt, Human
aucaacccaugucuggagcuag

SEQ ID NO: 104755 - RNA, 24 nt, Human
augagccuguuuguggcuucugug

SEQ ID NO: 104756 - RNA, 19 nt, Human
augccuccaccagcaagau

SEQ ID NO: 104757 - RNA, 21 nt, Human
cacagcggaaccaccaggggc

SEQ ID NO: 104758 - RNA, 20 nt, Human
caccccagcagccuuccgcc

SEQ ID NO: 104759 - RNA, 19 nt, Human
cagacugggggguccaagg

SEQ ID NO: 104760 - RNA, 23 nt, Human
cagagagacagggacaggccaca

SEQ ID NO: 104761 - RNA, 23 nt, Human
cagcagccccacagcggaaccac

SEQ ID NO: 104762 - RNA, 19 nt, Human
cagcggggcucugcaggcu

SEQ ID NO: 104763 - RNA, 25 nt, Human
caggaacgccgcauuugcuggcuuu

SEQ ID NO: 104764 - RNA, 19 nt, Human
caggaauccaaggggccuu

SEQ ID NO: 104765 - RNA, 22 nt, Human
caggcccucgugccccagaugg

SEQ ID NO: 104766 - RNA, 22 nt, Human
caggcgcaggcgcaggcagcgg

SEQ ID NO: 104767 - RNA, 24 nt, Human
caggguggccacagacuggggggu

SEQ ID NO: 104768 - RNA, 19 nt, Human
caggugcugccuugcugga

SEQ ID NO: 104769 - RNA, 22 nt, Human
caucauuguccccagccaggaa

SEQ ID NO: 104770 - RNA, 21 nt, Human
caugucuggagcuagcucuuc

SEQ ID NO: 104771 - RNA, 23 nt, Human
ccagaggaggacggagccggagg

SEQ ID NO: 104772 - RNA, 26 nt, Human
ccagcagccuuccgcccuccgccugg

SEQ ID NO: 104773 - RNA, 21 nt, Human
ccagcccaggcccucgugccc

SEQ ID NO: 104774 - RNA, 22 nt, Human
ccagcccaggcccucgugcccc

SEQ ID NO: 104775 - RNA, 18 nt, Human
ccaggcccgguguggaug

SEQ ID NO: 104776 - RNA, 22 nt, Human
ccaggcccucgugccccagaug

SEQ ID NO: 104777 - RNA, 23 nt, Human
cccacagcggaaccaccaggggc

SEQ ID NO: 104778 - RNA, 19 nt, Human
cccacaugggccuugaagg

SEQ ID NO: 104779 - RNA, 21 nt, Human
cccagcagccuuccgcccucc

SEQ ID NO: 104780 - RNA, 19 nt, Human
cccagccaggaauccaagg

SEQ ID NO: 104781 - RNA, 24 nt, Human
cccagguggcugggagggccaggg

SEQ ID NO: 104782 - RNA, 24 nt, Human
ccccagcagccuuccgcccuccgc

SEQ ID NO: 104783 - RNA, 18 nt, Human
cccccuccagcguggaga

SEQ ID NO: 104784 - RNA, 27 nt, Human
cccgcauccacccaaugccaggccuca

SEQ ID NO: 104785 - RNA, 19 nt, Human
cccgccguggggccggggc

SEQ ID NO: 104786 - RNA, 19 nt, Human
ccggggccgggggcggagg

SEQ ID NO: 104787 - RNA, 20 nt, Human
ccucagggccaagagggcuc

SEQ ID NO: 104788 - RNA, 21 nt, Human
ccuuccgcccuccgccugggc

SEQ ID NO: 104789 - RNA, 21 nt, Human
ccuugcuggagggccagggcu

SEQ ID NO: 104790 - RNA, 23 nt, Human
cgcagcccaagaguagggacugg

SEQ ID NO: 104791 - RNA, 18 nt, Human
cgcaggcgcaggcgcagg

SEQ ID NO: 104792 - RNA, 25 nt, Human
cgccccuggcugcugaugcggagcc

SEQ ID NO: 104793 - RNA, 25 nt, Human
cggagccggaggcggagggggccca

SEQ ID NO: 104794 - RNA, 20 nt, Human
cggcaaggacuggagggaag

SEQ ID NO: 104795 - RNA, 20 nt, Human
cucccagguggcugggaggg

SEQ ID NO: 104796 - RNA, 19 nt, Human
cugcugaugcggagccuca

SEQ ID NO: 104797 - RNA, 18 nt, Human
cuggagggccagggcucu

SEQ ID NO: 104798 - RNA, 19 nt, Human
cuggggagggggccacagg

SEQ ID NO: 104799 - RNA, 19 nt, Human
gacagcuggcugguugagg

SEQ ID NO: 104800 - RNA, 24 nt, Human
gacagcuggcugguugaggguauc

SEQ ID NO: 104801 - RNA, 21 nt, Human
gagccgaaagcccccgagggu

SEQ ID NO: 104802 - RNA, 18 nt, Human
gagggggccagaggagga

SEQ ID NO: 104803 - RNA, 20 nt, Human
gcacggggggagcccugggg

SEQ ID NO: 104804 - RNA, 20 nt, Human
gcccaccugcgcaccccagc

SEQ ID NO: 104805 - RNA, 19 nt, Human
gcgcggggccuucuggaag

SEQ ID NO: 104806 - RNA, 22 nt, Human
ggagccgaaagcccccgagggu

SEQ ID NO: 104807 - RNA, 21 nt, Human
ggccacagacuggggggucca

SEQ ID NO: 104808 - RNA, 23 nt, Human
ggccacagggcacuucacaaaug

SEQ ID NO: 104809 - RNA, 18 nt, Human
ggcccgguguggaugcug

SEQ ID NO: 104810 - RNA, 19 nt, Human
ggcggagggggccagagga

SEQ ID NO: 104811 - RNA, 25 nt, Human
ggcggccgggagaacggcgcaggcg

SEQ ID NO: 104812 - RNA, 22 nt, Human
gggcagcagccccacagcggaa

SEQ ID NO: 104813 - RNA, 25 nt, Human
gggccggggccgggggcggaggggg

SEQ ID NO: 104814 - RNA, 18 nt, Human
gguguagggacagaagga

SEQ ID NO: 104815 - RNA, 20 nt, Human
guccggaggaggugcuaagg

SEQ ID NO: 104816 - RNA, 21 nt, Human
gugcugccuugcuggagggcc

SEQ ID NO: 104817 - RNA, 21 nt, Human
gugcuggggagggggccacag

SEQ ID NO: 104818 - RNA, 24 nt, Human
gugcuggggagggggccacagggc

SEQ ID NO: 104819 - RNA, 18 nt, Human
uacuuuugacagcuggcu

SEQ ID NO: 104820 - RNA, 18 nt, Human
ucagagagacagggacag

SEQ ID NO: 104821 - RNA, 19 nt, Human
ucaggguagccugggagga

SEQ ID NO: 104822 - RNA, 18 nt, Human
uccuggcaggccccccuc

SEQ ID NO: 104823 - RNA, 22 nt, Human
ucugcacauucuucaggguggc

SEQ ID NO: 104824 - RNA, 19 nt, Human
ugacagcuggcugguugag

SEQ ID NO: 104825 - RNA, 26 nt, Human
ugacagcuggcugguugaggguaucc

SEQ ID NO: 104826 - RNA, 19 nt, Human
ugagaaacgcacagcccac

SEQ ID NO: 104827 - RNA, 21 nt, Human
ugaguacguagcgccaggccc

SEQ ID NO: 104828 - RNA, 22 nt, Human
ugcggcaaggacuggagggaag

SEQ ID NO: 104829 - RNA, 20 nt, Human
ugcuggggagggggccacag

SEQ ID NO: 104830 - RNA, 19 nt, Human
uggaagccaccgaguuccg

SEQ ID NO: 104831 - RNA, 22 nt, Human
uggaaggcugucagagagacag

SEQ ID NO: 104832 - RNA, 23 nt, Human
uggaugcuggggagaaucaucag

SEQ ID NO: 104833 - RNA, 19 nt, Human
uggcugggagggccagggg

SEQ ID NO: 104834 - RNA, 23 nt, Human
uggcugggagggccaggggugca

SEQ ID NO: 104835 - RNA, 18 nt, Human
uggcugguugaggguauc

SEQ ID NO: 104836 - RNA, 22 nt, Human
ugggaggaagaagcgcauggca

SEQ ID NO: 104837 - RNA, 24 nt, Human
ugggagggccaggggugcacaggu

SEQ ID NO: 104838 - RNA, 22 nt, Human
ugggccacggccagcccgcauc

SEQ ID NO: 104839 - RNA, 24 nt, Human
ugggccacggccagcccgcaucca

SEQ ID NO: 104840 - RNA, 21 nt, Human
uggggagggggccacagggca

SEQ ID NO: 104841 - RNA, 20 nt, Human
ugggggguccaaggagcagg

SEQ ID NO: 104842 - RNA, 21 nt, Human
ugggguggggagacgcgagcg

SEQ ID NO: 104843 - RNA, 25 nt, Human
uggucaggaccaggucacagcuugg

SEQ ID NO: 104844 - RNA, 21 nt, Human
ugguugaggguaucugcucac

SEQ ID NO: 104845 - RNA, 18 nt, Human
uguggugaggacugggcc

SEQ ID NO: 104846 - RNA, 18 nt, Human
uguuuguggcuucugugg

SEQ ID NO: 104847 - RNA, 18 nt, Human
uucuccagccuagcaggg

SEQ ID NO: 104848 - RNA, 18 nt, Human
aaacaguauguaaauuac

SEQ ID NO: 104849 - RNA, 20 nt, Human
acaaacaguauguaaauuac

SEQ ID NO: 104850 - RNA, 22 nt, Human
acuaagaauaccaagaacacaa

SEQ ID NO: 104851 - RNA, 20 nt, Human
agaacacuuugaaacauaga

SEQ ID NO: 104852 - RNA, 19 nt, Human
agagucagaagucaacacc

SEQ ID NO: 104853 - RNA, 18 nt, Human
augcaggauucaaggcua

SEQ ID NO: 104854 - RNA, 18 nt, Human
cuaagaauaccaagaaca

SEQ ID NO: 104855 - RNA, 26 nt, Human
gaaaauuccuuauucuacaaacaagu

SEQ ID NO: 104856 - RNA, 23 nt, Human
uaaaaaaauauauagcucaggug

SEQ ID NO: 104857 - RNA, 22 nt, Human
uaagaagguacuauaauucuug

SEQ ID NO: 104858 - RNA, 24 nt, Human
uacaaacaaguccuuuuagagaua

SEQ ID NO: 104859 - RNA, 20 nt, Human
uaugccagugaugaaugucu

SEQ ID NO: 104860 - RNA, 23 nt, Human
uaugguuuuuuuuccuuuuuaaa

SEQ ID NO: 104861 - RNA, 23 nt, Human
uccuuauucuacaaacaaguccu

SEQ ID NO: 104862 - RNA, 20 nt, Human
ucuuuuagccagguuuuaga

SEQ ID NO: 104863 - RNA, 21 nt, Human
ugagcuagacuaagaauacca

SEQ ID NO: 104864 - RNA, 18 nt, Human
uuaaagcacgaauaacau

SEQ ID NO: 104865 - RNA, 23 nt, Human
uuagagucagaagucaacaccau

SEQ ID NO: 104866 - RNA, 23 nt, Human
uuuuuaugguuuuuuuuccuuuu

SEQ ID NO: 104867 - RNA, 21 nt, Human
aaaaaaaggcauuuugcuaac

SEQ ID NO: 104868 - RNA, 19 nt, Human
aaacaugacuuggguaaac

SEQ ID NO: 104869 - RNA, 19 nt, Human
aaacauuuuaaaagaaaau

SEQ ID NO: 104870 - RNA, 23 nt, Human
aaacuacugagaauaaacaaugu

SEQ ID NO: 104871 - RNA, 19 nt, Human
aaagaaaaaagcauuuugg

SEQ ID NO: 104872 - RNA, 24 nt, Human
aaauaaaaccagugaacaucaaaa

SEQ ID NO: 104873 - RNA, 20 nt, Human
aaccaaguagaucucaugaa

SEQ ID NO: 104874 - RNA, 18 nt, Human
aagcauuuugggggaaac

SEQ ID NO: 104875 - RNA, 21 nt, Human
aagguuucuuaaggggaggcu

SEQ ID NO: 104876 - RNA, 23 nt, Human
acagagucuucaauuccaaaaga

SEQ ID NO: 104877 - RNA, 18 nt, Human
acuaugcaauacaaagcu

SEQ ID NO: 104878 - RNA, 23 nt, Human
agaaaaaagcauuuugggggaaa

SEQ ID NO: 104879 - RNA, 20 nt, Human
agcaagaaauacaauuacaa

SEQ ID NO: 104880 - RNA, 22 nt, Human
agccguggugggcacggcagcc

SEQ ID NO: 104881 - RNA, 18 nt, Human
aggaaaacauuuuaaaag

SEQ ID NO: 104882 - RNA, 23 nt, Human
aggcaauguuugauuucuuaccc

SEQ ID NO: 104883 - RNA, 23 nt, Human
aggcggagcgcggugcagaccug

SEQ ID NO: 104884 - RNA, 22 nt, Human
aggcuuuaaaaauucuccuuug

SEQ ID NO: 104885 - RNA, 20 nt, Human
auugcugugugucuucaggc

SEQ ID NO: 104886 - RNA, 21 nt, Human
caacgcgcagcccuagcgagc

SEQ ID NO: 104887 - RNA, 18 nt, Human
caagaaagaaaaccucau

SEQ ID NO: 104888 - RNA, 26 nt, Human
caauuuagaaaaccggguaauugcug

SEQ ID NO: 104889 - RNA, 21 nt, Human
cacaacuauugacuauacaga

SEQ ID NO: 104890 - RNA, 18 nt, Human
cacauacaacaugcauug

SEQ ID NO: 104891 - RNA, 20 nt, Human
cagaccugggcgcgcagccc

SEQ ID NO: 104892 - RNA, 19 nt, Human
cagagucuucaauuccaaa

SEQ ID NO: 104893 - RNA, 24 nt, Human
caguuaauaguaacuugguggcac

SEQ ID NO: 104894 - RNA, 22 nt, Human
ccagaaauucucaaucuauugg

SEQ ID NO: 104895 - RNA, 23 nt, Human
cccgccgccuuccccacgccccu

SEQ ID NO: 104896 - RNA, 19 nt, Human
ccgccgccuuccccacgcc

SEQ ID NO: 104897 - RNA, 20 nt, Human
ccgccgccuuccccacgccc

SEQ ID NO: 104898 - RNA, 23 nt, Human
ccucccgccgccuuccccacgcc

SEQ ID NO: 104899 - RNA, 21 nt, Human
cgcagcccuagcgagcccagc

SEQ ID NO: 104900 - RNA, 23 nt, Human
cgccccucccucgagguaauucg

SEQ ID NO: 104901 - RNA, 22 nt, Human
cgcgugcgcaagucugcgcgcg

SEQ ID NO: 104902 - RNA, 21 nt, Human
cggcuucagcugcggcgcccc

SEQ ID NO: 104903 - RNA, 22 nt, Human
cgguucaccggcuccggggcgg

SEQ ID NO: 104904 - RNA, 25 nt, Human
cugcaucauucucuucacaguucac

SEQ ID NO: 104905 - RNA, 21 nt, Human
cugcggcgcccccgcuggccc

SEQ ID NO: 104906 - RNA, 19 nt, Human
cuggcccaacgcgcagccc

SEQ ID NO: 104907 - RNA, 18 nt, Human
cuguaauaugcuucccaa

SEQ ID NO: 104908 - RNA, 24 nt, Human
cuucaugauucugaagaaaccacc

SEQ ID NO: 104909 - RNA, 18 nt, Human
gaaaauguguuuuaccuc

SEQ ID NO: 104910 - RNA, 23 nt, Human
gcagaccugggcgcgcagcccug

SEQ ID NO: 104911 - RNA, 21 nt, Human
gccccucccucgagguaauuc

SEQ ID NO: 104912 - RNA, 19 nt, Human
gcggagcgcggugcagacc

SEQ ID NO: 104913 - RNA, 19 nt, Human
gcggcgcccccgcuggccc

SEQ ID NO: 104914 - RNA, 23 nt, Human
ggcaauuuaaaauaaaaccagug

SEQ ID NO: 104915 - RNA, 18 nt, Human
ggcuuuaaaaauucuccu

SEQ ID NO: 104916 - RNA, 21 nt, Human
gguuuuguuuuuuuguuuuug

SEQ ID NO: 104917 - RNA, 19 nt, Human
gugcgcaagucugcgcgcg

SEQ ID NO: 104918 - RNA, 22 nt, Human
uaaaauaaaaccagugaacauc

SEQ ID NO: 104919 - RNA, 18 nt, Human
uaaaccaaguagaucuca

SEQ ID NO: 104920 - RNA, 22 nt, Human
uaauauguuggaugcccucccu

SEQ ID NO: 104921 - RNA, 21 nt, Human
uacaauucaaaccuauccuuu

SEQ ID NO: 104922 - RNA, 24 nt, Human
uacagagaaaaagauggagcaaau

SEQ ID NO: 104923 - RNA, 18 nt, Human
uacagagucuucaauucc

SEQ ID NO: 104924 - RNA, 19 nt, Human
uacaggguacuugaaauca

SEQ ID NO: 104925 - RNA, 19 nt, Human
uagcagucuauuaaaaaca

SEQ ID NO: 104926 - RNA, 22 nt, Human
uagcuguuuuaccugauucugg

SEQ ID NO: 104927 - RNA, 23 nt, Human
ucugaaacagacuuccuuuuuug

SEQ ID NO: 104928 - RNA, 22 nt, Human
ugaaauaagcaugacagaagua

SEQ ID NO: 104929 - RNA, 20 nt, Human
ugacuauacagagucuucaa

SEQ ID NO: 104930 - RNA, 20 nt, Human
ugauuucuuacccaucacuc

SEQ ID NO: 104931 - RNA, 25 nt, Human
uggacaaaaaccaagaaagaaaacc

SEQ ID NO: 104932 - RNA, 25 nt, Human
uggcaacgggacagguuauuggguu

SEQ ID NO: 104933 - RNA, 18 nt, Human
uggcacauacaacaugca

SEQ ID NO: 104934 - RNA, 22 nt, Human
ugggcauuaugguauaagucau

SEQ ID NO: 104935 - RNA, 25 nt, Human
uguuuuaccugauucugguuuuguu

SEQ ID NO: 104936 - RNA, 21 nt, Human
uucuguaauaugcuucccaaa

SEQ ID NO: 104937 - RNA, 22 nt, Human
uugcugaagaauuaaaauauuu

SEQ ID NO: 104938 - RNA, 20 nt, Human
uuggaagguagucuaggagc

SEQ ID NO: 104939 - RNA, 21 nt, Human
uuggaugcccucccuacuuug

SEQ ID NO: 104940 - RNA, 18 nt, Human
uuguuuuuuagcauccag

SEQ ID NO: 104941 - RNA, 19 nt, Human
uuuuguuuguuuuuguuuu

SEQ ID NO: 104942 - RNA, 21 nt, Human
uuuuguuuuuuuguuuguuuu

SEQ ID NO: 104943 - RNA, 22 nt, Human
uuuuuguuuguuuuuguuuuuu

SEQ ID NO: 104944 - RNA, 22 nt, Human
uuuuuguuuuuguuuuuuuguu

SEQ ID NO: 104945 - RNA, 20 nt, Human
uuuuuguuuuuuuguuuguu

SEQ ID NO: 104946 - RNA, 18 nt, Human
aagaggagcuggagggug

SEQ ID NO: 104947 - RNA, 19 nt, Human
aagcaagggguggggcaag

SEQ ID NO: 104948 - RNA, 23 nt, Human
aagcaccgaugaccugcuagaac

SEQ ID NO: 104949 - RNA, 22 nt, Human
agaggaaggaugauccugggag

SEQ ID NO: 104950 - RNA, 22 nt, Human
aggaagaaauugcagcauggga

SEQ ID NO: 104951 - RNA, 21 nt, Human
aggaaggaugauccugggagg

SEQ ID NO: 104952 - RNA, 21 nt, Human
aggaaggaugauccugggagg

SEQ ID NO: 104953 - RNA, 19 nt, Human
agggguggggcaaggaucu

SEQ ID NO: 104954 - RNA, 19 nt, Human
caccaggacuggcuggguc

SEQ ID NO: 104955 - RNA, 20 nt, Human
cacugcuggguggagcuggg

SEQ ID NO: 104956 - RNA, 23 nt, Human
cagaggccagucaccaggacugg

SEQ ID NO: 104957 - RNA, 25 nt, Human
caggaagaaauugcagcaugggaag

SEQ ID NO: 104958 - RNA, 18 nt, Human
caggacgugucuaggugu

SEQ ID NO: 104959 - RNA, 18 nt, Human
cauccugaugaccaaccu

SEQ ID NO: 104960 - RNA, 23 nt, Human
ccaggacacugcuggguggagcu

SEQ ID NO: 104961 - RNA, 21 nt, Human
cccccugccaggacgugucua

SEQ ID NO: 104962 - RNA, 21 nt, Human
ccuggggccggggcugggggc

SEQ ID NO: 104963 - RNA, 18 nt, Human
cgagccagcuccuacgug

SEQ ID NO: 104964 - RNA, 22 nt, Human
cgagccagcuccuacguggagc

SEQ ID NO: 104965 - RNA, 23 nt, Human
cgccuggggccggggcugggggc

SEQ ID NO: 104966 - RNA, 24 nt, Human
cgcgggcagcggcgaguccuaggc

SEQ ID NO: 104967 - RNA, 18 nt, Human
cuuggggggggggggggg

SEQ ID NO: 104968 - RNA, 21 nt, Human
gacacugcuggguggagcugg

SEQ ID NO: 104969 - RNA, 18 nt, Human
gaggagcuggaggguggg

SEQ ID NO: 104970 - RNA, 18 nt, Human
gauccugggaggguggcc

SEQ ID NO: 104971 - RNA, 23 nt, Human
gcagcggcggcggggcgcgggca

SEQ ID NO: 104972 - RNA, 20 nt, Human
gcccgaggcccccugccagg

SEQ ID NO: 104973 - RNA, 21 nt, Human
gcucagccuuccuucucccca

SEQ ID NO: 104974 - RNA, 25 nt, Human
ggagaggcucagccuuccuucuccc

SEQ ID NO: 104975 - RNA, 23 nt, Human
ggaggguggggaaggcaugaagg

SEQ ID NO: 104976 - RNA, 21 nt, Human
ggcggcggggcgcgggcagcg

SEQ ID NO: 104977 - RNA, 23 nt, Human
ggcuguggggagaagguaugggu

SEQ ID NO: 104978 - RNA, 19 nt, Human
gggcagcagcggcggcggg

SEQ ID NO: 104979 - RNA, 21 nt, Human
gggcagcagcggcggcggggc

SEQ ID NO: 104980 - RNA, 22 nt, Human
gggcagcagcggcggcggggcg

SEQ ID NO: 104981 - RNA, 18 nt, Human
gggccggggcugggggca

SEQ ID NO: 104982 - RNA, 18 nt, Human
ggggcuggcagaguuggg

SEQ ID NO: 104983 - RNA, 18 nt, Human
ggggcugggggcagcagc

SEQ ID NO: 104984 - RNA, 18 nt, Human
ggucaguagucucuccgg

SEQ ID NO: 104985 - RNA, 19 nt, Human
guggagugcccgaggcccc

SEQ ID NO: 104986 - RNA, 19 nt, Human
uaguggagugcccgaggcc

SEQ ID NO: 104987 - RNA, 24 nt, Human
ucaggaagaaauugcagcauggga

SEQ ID NO: 104988 - RNA, 18 nt, Human
uccccaggacacugcugg

SEQ ID NO: 104989 - RNA, 22 nt, Human
uccugggaggguggccauccug

SEQ ID NO: 104990 - RNA, 21 nt, Human
ucuccgguggaaggcagaggc

SEQ ID NO: 104991 - RNA, 18 nt, Human
ugauccugggaggguggc

SEQ ID NO: 104992 - RNA, 19 nt, Human
ugauccugggaggguggcc

SEQ ID NO: 104993 - RNA, 18 nt, Human
ugcaucagcagaggcugu

SEQ ID NO: 104994 - RNA, 19 nt, Human
ugcuggguggagcuggguu

SEQ ID NO: 104995 - RNA, 23 nt, Human
uggaagcaagggguggggcaagg

SEQ ID NO: 104996 - RNA, 18 nt, Human
uggaaggcagaggccagu

SEQ ID NO: 104997 - RNA, 23 nt, Human
uggaaggcagaggccagucacca

SEQ ID NO: 104998 - RNA, 24 nt, Human
uggcaggugggggcuggcagaguu

SEQ ID NO: 104999 - RNA, 21 nt, Human
ugggaggguggccauccugau

SEQ ID NO: 105000 - RNA, 19 nt, Human
uggggaaggcaugaaggcu

SEQ ID NO: 105001 - RNA, 22 nt, Human
ugggggcagcagcggcggcggg

SEQ ID NO: 105002 - RNA, 23 nt, Human
ugggggcagcagcggcggcgggg

SEQ ID NO: 105003 - RNA, 20 nt, Human
ugggggcuggcagaguuggg

SEQ ID NO: 105004 - RNA, 19 nt, Human
ugggggggggggggggguc

SEQ ID NO: 105005 - RNA, 18 nt, Human
uggguggagcuggguugg

SEQ ID NO: 105006 - RNA, 22 nt, Human
uggguggagcuggguugguagu

SEQ ID NO: 105007 - RNA, 20 nt, Human
ugguucugauugacuugggg

SEQ ID NO: 105008 - RNA, 25 nt, Human
ugugguucugauugacuuggggggg

SEQ ID NO: 105009 - RNA, 18 nt, Human
acccgaauuuccagaggu

SEQ ID NO: 105010 - RNA, 18 nt, Human
agaggcuggguuugggag

SEQ ID NO: 105011 - RNA, 20 nt, Human
agccggaagggguggggggc

SEQ ID NO: 105012 - RNA, 19 nt, Human
aggucggacucuaaaagau

SEQ ID NO: 105013 - RNA, 19 nt, Human
aggucggacucuaaaagau

SEQ ID NO: 105014 - RNA, 25 nt, Human
agguguggaccugcucuccccggag

SEQ ID NO: 105015 - RNA, 23 nt, Human
agguguggaccugcucuccucgg

SEQ ID NO: 105016 - RNA, 19 nt, Human
cacccgaauuuccagaggu

SEQ ID NO: 105017 - RNA, 23 nt, Human
cagccuggguucccggcagggcc

SEQ ID NO: 105018 - RNA, 22 nt, Human
caggagugugggcgggggugug

SEQ ID NO: 105019 - RNA, 19 nt, Human
cagggccuccgacgucgcc

SEQ ID NO: 105020 - RNA, 21 nt, Human
ccucugccggaaugcuaggcu

SEQ ID NO: 105021 - RNA, 21 nt, Human
ccucugccggaaugcuaggcu

SEQ ID NO: 105022 - RNA, 19 nt, Human
ccuggguucccggcagggc

SEQ ID NO: 105023 - RNA, 23 nt, Human
cgcccggguccccgcggccaccc

SEQ ID NO: 105024 - RNA, 21 nt, Human
cucggcucugcugccucggcc

SEQ ID NO: 105025 - RNA, 21 nt, Human
cucggcucugcugccucggcc

SEQ ID NO: 105026 - RNA, 24 nt, Human
cuggugcagggaugcagaggugug

SEQ ID NO: 105027 - RNA, 24 nt, Human
cuggugcagggaugcagaggugug

SEQ ID NO: 105028 - RNA, 23 nt, Human
gaggugaaaccuaguggcaggag

SEQ ID NO: 105029 - RNA, 20 nt, Human
gccggaaugcuaggcuccua

SEQ ID NO: 105030 - RNA, 21 nt, Human
gccguuuuucuuccucugccg

SEQ ID NO: 105031 - RNA, 21 nt, Human
gccguuuuucuuccucugccg

SEQ ID NO: 105032 - RNA, 22 nt, Human
gcgggggugugagccggaaggg

SEQ ID NO: 105033 - RNA, 22 nt, Human
gggcgugucgcagcgcgggggu

SEQ ID NO: 105034 - RNA, 20 nt, Human
ggggugggggcugcagccug

SEQ ID NO: 105035 - RNA, 19 nt, Human
guggacauuuccagagguc

SEQ ID NO: 105036 - RNA, 20 nt, Human
guucccggcagggccuccga

SEQ ID NO: 105037 - RNA, 25 nt, Human
uccuacuccuuucucaaagccucaa

SEQ ID NO: 105038 - RNA, 19 nt, Human
uccucggcucugcugccuc

SEQ ID NO: 105039 - RNA, 19 nt, Human
ucuccucggcucugcugcc

SEQ ID NO: 105040 - RNA, 20 nt, Human
ugggggcugcagccuggguu

SEQ ID NO: 105041 - RNA, 24 nt, Human
uggggggcgugucgcagcgcgggg

SEQ ID NO: 105042 - RNA, 23 nt, Human
uggugcagggaugcagaggugug

SEQ ID NO: 105043 - RNA, 23 nt, Human
uggugcagggaugcagaggugug

SEQ ID NO: 105044 - RNA, 20 nt, Human
aaaagaggaaaaggauucug

SEQ ID NO: 105045 - RNA, 24 nt, Human
aacacucugucccucccucaaucc

SEQ ID NO: 105046 - RNA, 24 nt, Human
aacccuccacccucucuccccacc

SEQ ID NO: 105047 - RNA, 27 nt, Human
aagccagggccaaccaggaccauggaa

SEQ ID NO: 105048 - RNA, 20 nt, Human
aaucacuuuuuucuugguca

SEQ ID NO: 105049 - RNA, 26 nt, Human
acaaaaccccaggggggagggaacgc

SEQ ID NO: 105050 - RNA, 24 nt, Human
acaggaaaggggcacaugacuaga

SEQ ID NO: 105051 - RNA, 19 nt, Human
acccucucuccccacccca

SEQ ID NO: 105052 - RNA, 23 nt, Human
agagugggcacaaaaccccaggg

SEQ ID NO: 105053 - RNA, 22 nt, Human
aggaaggaaaagaggaaaagga

SEQ ID NO: 105054 - RNA, 19 nt, Human
aggacuagucucuggcccu

SEQ ID NO: 105055 - RNA, 18 nt, Human
aggagaagaagcgaccac

SEQ ID NO: 105056 - RNA, 21 nt, Human
aggcaggaacugacacagugc

SEQ ID NO: 105057 - RNA, 24 nt, Human
aguugcuguuuccaucucaggacu

SEQ ID NO: 105058 - RNA, 27 nt, Human
caaauauuuggcuuauaguugcccaca

SEQ ID NO: 105059 - RNA, 21 nt, Human
caccccauacccugcucugcu

SEQ ID NO: 105060 - RNA, 20 nt, Human
cacccucucuccccacccca

SEQ ID NO: 105061 - RNA, 25 nt, Human
cacucugucccucccucaauccccc

SEQ ID NO: 105062 - RNA, 20 nt, Human
cagaagccaggcccucagag

SEQ ID NO: 105063 - RNA, 22 nt, Human
cagagagugggcacaaaacccc

SEQ ID NO: 105064 - RNA, 22 nt, Human
caucauggacuccucuuuugga

SEQ ID NO: 105065 - RNA, 21 nt, Human
ccaggaaaauuccaaagagga

SEQ ID NO: 105066 - RNA, 22 nt, Human
cccacagccauguagcucugcu

SEQ ID NO: 105067 - RNA, 26 nt, Human
cccauggacaccuguucugagccaaa

SEQ ID NO: 105068 - RNA, 23 nt, Human
ccccccuuuauucuguagguccc

SEQ ID NO: 105069 - RNA, 24 nt, Human
cccucaaucccccaccuccuuuca

SEQ ID NO: 105070 - RNA, 18 nt, Human
cccucucuccccacccca

SEQ ID NO: 105071 - RNA, 21 nt, Human
cccuguccaucccccccuuua

SEQ ID NO: 105072 - RNA, 22 nt, Human
ccuucuauauaaaggacccuaa

SEQ ID NO: 105073 - RNA, 18 nt, Human
cgcugccaucugcagcug

SEQ ID NO: 105074 - RNA, 20 nt, Human
cuccaacacucugucccucc

SEQ ID NO: 105075 - RNA, 20 nt, Human
cuccacccucucuccccacc

SEQ ID NO: 105076 - RNA, 19 nt, Human
cucuccccaccccauaccc

SEQ ID NO: 105077 - RNA, 21 nt, Human
cucuccccaccccauacccug

SEQ ID NO: 105078 - RNA, 18 nt, Human
cucucucucucucucucu

SEQ ID NO: 105079 - RNA, 26 nt, Human
cucugccuccaucauggacuccucuu

SEQ ID NO: 105080 - RNA, 24 nt, Human
cucugucccucccucaauccccca

SEQ ID NO: 105081 - RNA, 21 nt, Human
cugcacguuccucugggcgug

SEQ ID NO: 105082 - RNA, 22 nt, Human
cugcugucuuccuccaagaucu

SEQ ID NO: 105083 - RNA, 24 nt, Human
cuguacaaguugcuguuccgucgc

SEQ ID NO: 105084 - RNA, 21 nt, Human
gaaauuucuccaacuuuuaac

SEQ ID NO: 105085 - RNA, 19 nt, Human
gaaggaaaagaggaaaagg

SEQ ID NO: 105086 - RNA, 24 nt, Human
gacaggaaaggggcacaugacuag

SEQ ID NO: 105087 - RNA, 21 nt, Human
gagaggcccgcugccaucugc

SEQ ID NO: 105088 - RNA, 23 nt, Human
gaggaaggaaaagaggaaaagga

SEQ ID NO: 105089 - RNA, 18 nt, Human
gaggaggaaggaaaagag

SEQ ID NO: 105090 - RNA, 18 nt, Human
gcaaagccagggccaacc

SEQ ID NO: 105091 - RNA, 22 nt, Human
ggacagaagccaggcccucaga

SEQ ID NO: 105092 - RNA, 18 nt, Human
ggaugauguacugugaaa

SEQ ID NO: 105093 - RNA, 19 nt, Human
gggacaggaaaggggcaca

SEQ ID NO: 105094 - RNA, 19 nt, Human
uaaaaaaaucaaaacuaua

SEQ ID NO: 105095 - RNA, 19 nt, Human
uaaaacccuccacccucuc

SEQ ID NO: 105096 - RNA, 23 nt, Human
uaccucugccuccaucauggacu

SEQ ID NO: 105097 - RNA, 21 nt, Human
uaggucccaggaaaauuccaa

SEQ ID NO: 105098 - RNA, 22 nt, Human
uaguaggcaaagccagggccaa

SEQ ID NO: 105099 - RNA, 18 nt, Human
ucacugcuucccuguucu

SEQ ID NO: 105100 - RNA, 26 nt, Human
uccaacacucugucccucccucaauc

SEQ ID NO: 105101 - RNA, 22 nt, Human
ucccucaaucccccaccuccuu

SEQ ID NO: 105102 - RNA, 19 nt, Human
ucugcagcugucacugcuu

SEQ ID NO: 105103 - RNA, 19 nt, Human
ucugcucugcccagagugg

SEQ ID NO: 105104 - RNA, 24 nt, Human
ucugcugucuuccuccaagaucuu

SEQ ID NO: 105105 - RNA, 26 nt, Human
ucuuaugacuguaccauuuguuugcc

SEQ ID NO: 105106 - RNA, 20 nt, Human
ucuuugcgauuccaggccgg

SEQ ID NO: 105107 - RNA, 22 nt, Human
ugaaaacccccuguccaucccc

SEQ ID NO: 105108 - RNA, 20 nt, Human
ugacacagugcucagggcug

SEQ ID NO: 105109 - RNA, 20 nt, Human
ugcagaucgucuucucucca

SEQ ID NO: 105110 - RNA, 18 nt, Human
ugcagcugucacugcuuc

SEQ ID NO: 105111 - RNA, 24 nt, Human
ugcuuugugcuucugggagaauca

SEQ ID NO: 105112 - RNA, 25 nt, Human
uggaauccuuaacaaauccaaggag

SEQ ID NO: 105113 - RNA, 19 nt, Human
uggggagaggcccgcugcc

SEQ ID NO: 105114 - RNA, 21 nt, Human
uuaaaugucaaugccaaaaug

SEQ ID NO: 105115 - RNA, 19 nt, Human
uuccaaagaggaggaagga

SEQ ID NO: 105116 - RNA, 18 nt, Human
uuccuccaagaucuuaca

SEQ ID NO: 105117 - RNA, 21 nt, Human
uucuccaacuuuuaacccugg

SEQ ID NO: 105118 - RNA, 19 nt, Human
uuuauaaaacccuccaccc

SEQ ID NO: 105119 - RNA, 26 nt, Human
uuuauaaaacccuccacccucucucc

SEQ ID NO: 105120 - RNA, 22 nt, Human
uuugaaaacccccuguccaucc

SEQ ID NO: 105121 - RNA, 21 nt, Human
uuuuuugucccauggacaccu

SEQ ID NO: 105122 - RNA, 24 nt, Human
uuuuuuuuuuuuuuuuucuauuuu

SEQ ID NO: 105123 - RNA, 20 nt, Human
acauuugggccagaauagca

SEQ ID NO: 105124 - RNA, 22 nt, Human
agaaauuaaugaaugacuccaa

SEQ ID NO: 105125 - RNA, 21 nt, Human
agaagugauucaucucuggcu

SEQ ID NO: 105126 - RNA, 26 nt, Human
aggcacugugcugagugcugaaaaug

SEQ ID NO: 105127 - RNA, 18 nt, Human
aggcagaucagcccagga

SEQ ID NO: 105128 - RNA, 21 nt, Human
aguauucagucaucuuuaauc

SEQ ID NO: 105129 - RNA, 18 nt, Human
auagcauauacugagacc

SEQ ID NO: 105130 - RNA, 21 nt, Human
auuagcccuugggccuugacc

SEQ ID NO: 105131 - RNA, 24 nt, Human
auuucaguuucucuuuugcaauua

SEQ ID NO: 105132 - RNA, 20 nt, Human
cacaaagaaaagcaaaggac

SEQ ID NO: 105133 - RNA, 18 nt, Human
cagaucagcccaggaauu

SEQ ID NO: 105134 - RNA, 24 nt, Human
cagcuccacagaagaauauaugau

SEQ ID NO: 105135 - RNA, 18 nt, Human
caggggaaauggaaaggc

SEQ ID NO: 105136 - RNA, 21 nt, Human
caguuacaaguacucagccaa

SEQ ID NO: 105137 - RNA, 24 nt, Human
caucagaacaagaauucuaauucc

SEQ ID NO: 105138 - RNA, 21 nt, Human
caucucuggcuuuugcagggg

SEQ ID NO: 105139 - RNA, 18 nt, Human
caugacuaaagcuguucu

SEQ ID NO: 105140 - RNA, 23 nt, Human
cauucaaagauaauacuucauac

SEQ ID NO: 105141 - RNA, 20 nt, Human
ccuauuuuauagugagugac

SEQ ID NO: 105142 - RNA, 21 nt, Human
cuuuauaguuauacuggugcc

SEQ ID NO: 105143 - RNA, 22 nt, Human
gaaaagcacauugucauuuuca

SEQ ID NO: 105144 - RNA, 23 nt, Human
gacucaaaaagaggaaaugguag

SEQ ID NO: 105145 - RNA, 24 nt, Human
gagaagugauucaucucuggcuuu

SEQ ID NO: 105146 - RNA, 23 nt, Human
gggaaauggaaaggcucaaaaac

SEQ ID NO: 105147 - RNA, 24 nt, Human
uaauugccagggccuuuugucaau

SEQ ID NO: 105148 - RNA, 21 nt, Human
uaauuuguuuugaucuaaaaa

SEQ ID NO: 105149 - RNA, 22 nt, Human
uaccagaagaaugugaaccuca

SEQ ID NO: 105150 - RNA, 20 nt, Human
uagaagaaucugagacuaug

SEQ ID NO: 105151 - RNA, 23 nt, Human
uauagugagugacaugaaaguca

SEQ ID NO: 105152 - RNA, 22 nt, Human
uauuccuucucccaguauucca

SEQ ID NO: 105153 - RNA, 20 nt, Human
ucaaagauaauacuucauac

SEQ ID NO: 105154 - RNA, 21 nt, Human
ucagaacauucaaugcuuucu

SEQ ID NO: 105155 - RNA, 20 nt, Human
ucagccaaacauagcucauc

SEQ ID NO: 105156 - RNA, 18 nt, Human
ucaguuccuucucagcua

SEQ ID NO: 105157 - RNA, 21 nt, Human
ucaguuccuucucagcuagug

SEQ ID NO: 105158 - RNA, 21 nt, Human
uccaauuuaagugacucaaaa

SEQ ID NO: 105159 - RNA, 26 nt, Human
uccaugacuaaagcuguucucaggac

SEQ ID NO: 105160 - RNA, 25 nt, Human
ucuaaaaaguacaaauuuaucucau

SEQ ID NO: 105161 - RNA, 20 nt, Human
ugaaaguuauuccuucuccc

SEQ ID NO: 105162 - RNA, 19 nt, Human
ugaaugacuccaaguaaaa

SEQ ID NO: 105163 - RNA, 23 nt, Human
ugaaugacuccaaguaaaaagaa

SEQ ID NO: 105164 - RNA, 18 nt, Human
ugacaugaaagucaacua

SEQ ID NO: 105165 - RNA, 19 nt, Human
ugacauugugagauacaca

SEQ ID NO: 105166 - RNA, 20 nt, Human
ugagugcugaaaauguggua

SEQ ID NO: 105167 - RNA, 18 nt, Human
ugaucagaacauucaaug

SEQ ID NO: 105168 - RNA, 18 nt, Human
ugcaggggaaauggaaag

SEQ ID NO: 105169 - RNA, 21 nt, Human
ugcuuucuacauaaacucugg

SEQ ID NO: 105170 - RNA, 23 nt, Human
ugguaaggacagacagcacuccu

SEQ ID NO: 105171 - RNA, 19 nt, Human
uuaacacaaagaaaagcaa

SEQ ID NO: 105172 - RNA, 22 nt, Human
uucaaugcuuucuacauaaacu

SEQ ID NO: 105173 - RNA, 22 nt, Human
uucaucucuggcuuuugcaggg

SEQ ID NO: 105174 - RNA, 24 nt, Human
uucaucucuggcuuuugcagggga

SEQ ID NO: 105175 - RNA, 18 nt, Human
uuccaaaucacggggaag

SEQ ID NO: 105176 - RNA, 22 nt, Human
uuugcaggggaaauggaaaggc

SEQ ID NO: 105177 - RNA, 21 nt, Human
uuugucaacuuuucucuggga

SEQ ID NO: 105178 - RNA, 19 nt, Human
uuugugaaaguuauuccuu

SEQ ID NO: 105179 - RNA, 24 nt, Human
uuuuaaguuuauuuugugaaaguu

SEQ ID NO: 105180 - RNA, 18 nt, Human
aaaaaggcauaauagauc

SEQ ID NO: 105181 - RNA, 18 nt, Human
aaaaauucacagaugaau

SEQ ID NO: 105182 - RNA, 23 nt, Human
aagaaaacaaaaaaaaguacuac

SEQ ID NO: 105183 - RNA, 24 nt, Human
aagaaaacaaaaaaaaguacuaca

SEQ ID NO: 105184 - RNA, 19 nt, Human
aaggcauaauagaucacaa

SEQ ID NO: 105185 - RNA, 21 nt, Human
accuugcauccuggaaagaag

SEQ ID NO: 105186 - RNA, 22 nt, Human
auuuacagccauuuuuuuugua

SEQ ID NO: 105187 - RNA, 18 nt, Human
caccuuuugcucuaaaga

SEQ ID NO: 105188 - RNA, 26 nt, Human
cagcauaauccuuaaauauaaaaaua

SEQ ID NO: 105189 - RNA, 27 nt, Human
cagugcagcauaauccuuaaauauaaa

SEQ ID NO: 105190 - RNA, 23 nt, Human
gaaaugaacaaaguccuugagug

SEQ ID NO: 105191 - RNA, 22 nt, Human
gcauccuggaaagaaguaacaa

SEQ ID NO: 105192 - RNA, 24 nt, Human
uaaaguaaaauauaaaucuuccca

SEQ ID NO: 105193 - RNA, 19 nt, Human
uaguacagugcagcauaau

SEQ ID NO: 105194 - RNA, 20 nt, Human
ucacagaugaauuuucuuca

SEQ ID NO: 105195 - RNA, 20 nt, Human
uccagaaagacgaaguauca

SEQ ID NO: 105196 - RNA, 19 nt, Human
ucccuguaauaguaaacau

SEQ ID NO: 105197 - RNA, 21 nt, Human
uccuugaguguuuuucuuuau

SEQ ID NO: 105198 - RNA, 24 nt, Human
ucuucccaguuuaaaagaugaaua

SEQ ID NO: 105199 - RNA, 20 nt, Human
ugaacaaaguccuugagugu

SEQ ID NO: 105200 - RNA, 23 nt, Human
ugacuuaaaaacaguuuuaucca

SEQ ID NO: 105201 - RNA, 22 nt, Human
uuaaaguaaaauauaaaucuuc

SEQ ID NO: 105202 - RNA, 21 nt, Human
uuccugaaacaugaucacagg

SEQ ID NO: 105203 - RNA, 25 nt, Human
uuuaugauauauggcuaaaagaaaa

SEQ ID NO: 105204 - RNA, 25 nt, Human
uuucaagucauguaaggcaauuacu

SEQ ID NO: 105205 - RNA, 24 nt, Human
uuuccauuucuuuaaaaaagaaaa

SEQ ID NO: 105206 - RNA, 21 nt, Human
uuuuuuuuuuuuuuguaagga

SEQ ID NO: 105207 - RNA, 22 nt, Human
uuuuuuuuuuuuuuuuguaagg

SEQ ID NO: 105208 - RNA, 18 nt, Human
uuuuuuuuuuuuuuuuug

SEQ ID NO: 105209 - RNA, 19 nt, Human
uuuuuuuuuuuuuuuuugu

SEQ ID NO: 105210 - RNA, 22 nt, Human
aaaaaaaaaaaaaggagagaga

SEQ ID NO: 105211 - RNA, 22 nt, Human
aaaaaaaaaaaaggagagagag

SEQ ID NO: 105212 - RNA, 22 nt, Human
aaaaagacccaaaaacaacuuu

SEQ ID NO: 105213 - RNA, 19 nt, Human
aaaacaaaacauaaaaccu

SEQ ID NO: 105214 - RNA, 24 nt, Human
aaaacagacuaacgcaauugggua

SEQ ID NO: 105215 - RNA, 18 nt, Human
aaaagacccaaaaacaac

SEQ ID NO: 105216 - RNA, 24 nt, Human
aaaaggaacauuauguaaagagga

SEQ ID NO: 105217 - RNA, 21 nt, Human
aaacaacgaccugggcucuca

SEQ ID NO: 105218 - RNA, 22 nt, Human
aaacagguccgaaagaaaaaaa

SEQ ID NO: 105219 - RNA, 26 nt, Human
aaagaaaaaaaaccucauuaggagag

SEQ ID NO: 105220 - RNA, 22 nt, Human
aaagaagaagagagaguggggg

SEQ ID NO: 105221 - RNA, 20 nt, Human
aaauaaccugcaacucauaa

SEQ ID NO: 105222 - RNA, 23 nt, Human
aaauauccagcacccaacaaggu

SEQ ID NO: 105223 - RNA, 19 nt, Human
aaaugugcucccuaugacc

SEQ ID NO: 105224 - RNA, 19 nt, Human
aacaaggcacgaaaagaaa

SEQ ID NO: 105225 - RNA, 21 nt, Human
aacaauaaacccacagaucca

SEQ ID NO: 105226 - RNA, 18 nt, Human
aagaaagcuccuaaaagc

SEQ ID NO: 105227 - RNA, 18 nt, Human
aagaagaagagagagugg

SEQ ID NO: 105228 - RNA, 23 nt, Human
aagaugcccacuggguccagaca

SEQ ID NO: 105229 - RNA, 22 nt, Human
aagcaauaauuaauacuaaaac

SEQ ID NO: 105230 - RNA, 28 nt, Human
aagcacugaaagaaacuguaaagccaaa

SEQ ID NO: 105231 - RNA, 24 nt, Human
aagcuggaaaaaacaacgaccugg

SEQ ID NO: 105232 - RNA, 20 nt, Human
aagggugggagcgaggggca

SEQ ID NO: 105233 - RNA, 22 nt, Human
aaguacacuggaugggccucac

SEQ ID NO: 105234 - RNA, 25 nt, Human
aauacuaaaacagguccgaaagaaa

SEQ ID NO: 105235 - RNA, 19 nt, Human
acaaaaauggaggugcgcc

SEQ ID NO: 105236 - RNA, 19 nt, Human
acaaaaauuacuaggcaca

SEQ ID NO: 105237 - RNA, 25 nt, Human
acacagaacauauauaaaaagaccc

SEQ ID NO: 105238 - RNA, 19 nt, Human
acaccaaggcacaucauaa

SEQ ID NO: 105239 - RNA, 19 nt, Human
accaaggaaaaauacacca

SEQ ID NO: 105240 - RNA, 25 nt, Human
accccacaacucaggugauguacca

SEQ ID NO: 105241 - RNA, 23 nt, Human
accucuucacuagauuuccucaa

SEQ ID NO: 105242 - RNA, 20 nt, Human
acuaggcacagaaagcacca

SEQ ID NO: 105243 - RNA, 21 nt, Human
agaaaaaauauuugaagaaga

SEQ ID NO: 105244 - RNA, 18 nt, Human
agacaaggacaucaaaac

SEQ ID NO: 105245 - RNA, 20 nt, Human
agaccugaaaaaggaaacug

SEQ ID NO: 105246 - RNA, 21 nt, Human
agagaagggugggagcgaggg

SEQ ID NO: 105247 - RNA, 23 nt, Human
agauaaaaccucuuuagcucucc

SEQ ID NO: 105248 - RNA, 21 nt, Human
agcaagaccugaaaaaggaaa

SEQ ID NO: 105249 - RNA, 22 nt, Human
agcacaagaaaccaaggaaaaa

SEQ ID NO: 105250 - RNA, 21 nt, Human
agcaccaggggagcaagaccc

SEQ ID NO: 105251 - RNA, 23 nt, Human
agcacccaacaagguaaauguua

SEQ ID NO: 105252 - RNA, 22 nt, Human
agcagagcgcgcucucucuaag

SEQ ID NO: 105253 - RNA, 19 nt, Human
aggaauacagaaauaucca

SEQ ID NO: 105254 - RNA, 23 nt, Human
aggcaaaaggaaagugacaucaa

SEQ ID NO: 105255 - RNA, 22 nt, Human
aggcacgaaaagaaagcuccua

SEQ ID NO: 105256 - RNA, 20 nt, Human
aggcagggggcuacgggggc

SEQ ID NO: 105257 - RNA, 26 nt, Human
aucaucagcccagggaaaaccaaagc

SEQ ID NO: 105258 - RNA, 23 nt, Human
aucuccaaagaagaagagagagu

SEQ ID NO: 105259 - RNA, 18 nt, Human
caaaaaaaaaaaaaggag

SEQ ID NO: 105260 - RNA, 20 nt, Human
caaaaaaauaaagcaauaau

SEQ ID NO: 105261 - RNA, 22 nt, Human
caaaaacaaagcacgacuuuga

SEQ ID NO: 105262 - RNA, 23 nt, Human
caaaugacgcacaucaucagccc

SEQ ID NO: 105263 - RNA, 22 nt, Human
caacaaggcacgaaaagaaagc

SEQ ID NO: 105264 - RNA, 21 nt, Human
caacagaauacaagugagcug

SEQ ID NO: 105265 - RNA, 22 nt, Human
caagcacaagaaaccaaggaaa

SEQ ID NO: 105266 - RNA, 27 nt, Human
caagcacaagaaaccaaggaaaaauac

SEQ ID NO: 105267 - RNA, 26 nt, Human
caauaaacccacagauccaagaaguu

SEQ ID NO: 105268 - RNA, 18 nt, Human
cacagagcuuaauaauuu

SEQ ID NO: 105269 - RNA, 21 nt, Human
caccccuucaucuccaccaaa

SEQ ID NO: 105270 - RNA, 21 nt, Human
cacugaaagaguuuaucacca

SEQ ID NO: 105271 - RNA, 22 nt, Human
cagaaaaaauauuugaagaaga

SEQ ID NO: 105272 - RNA, 19 nt, Human
cagcacccaacaagguaaa

SEQ ID NO: 105273 - RNA, 24 nt, Human
cagcacccaacaagguaaauguua

SEQ ID NO: 105274 - RNA, 18 nt, Human
cagggaaaaccaaagcug

SEQ ID NO: 105275 - RNA, 24 nt, Human
caggugauguaccauagacccacc

SEQ ID NO: 105276 - RNA, 20 nt, Human
ccaaauaaccugcaacucau

SEQ ID NO: 105277 - RNA, 20 nt, Human
ccaacaaggcacgaaaagaa

SEQ ID NO: 105278 - RNA, 22 nt, Human
ccagaaaacaaaacauaaaacc

SEQ ID NO: 105279 - RNA, 23 nt, Human
ccagaauacuuacaggaauacag

SEQ ID NO: 105280 - RNA, 24 nt, Human
ccagcagaaaaaguccuucaggcc

SEQ ID NO: 105281 - RNA, 26 nt, Human
cccaaaaaaagguucgaaucgacccc

SEQ ID NO: 105282 - RNA, 19 nt, Human
cccacuguaaauucaaggu

SEQ ID NO: 105283 - RNA, 21 nt, Human
cccagaaaacaaaacauaaaa

SEQ ID NO: 105284 - RNA, 26 nt, Human
cccagggaaaaccaaagcugcuauga

SEQ ID NO: 105285 - RNA, 19 nt, Human
cccccugaggcugcccgaa

SEQ ID NO: 105286 - RNA, 21 nt, Human
ccuauaaccaagacaugggau

SEQ ID NO: 105287 - RNA, 20 nt, Human
ccucaaaagacggcagaaaa

SEQ ID NO: 105288 - RNA, 19 nt, Human
ccuccuucccagcucugag

SEQ ID NO: 105289 - RNA, 21 nt, Human
ccugcaaaacagacuaacgca

SEQ ID NO: 105290 - RNA, 26 nt, Human
cgaaaaauaaauaaaauaacccucaa

SEQ ID NO: 105291 - RNA, 21 nt, Human
cgagguggcagcuacucagcu

SEQ ID NO: 105292 - RNA, 21 nt, Human
cuacauuuaccccacaacuca

SEQ ID NO: 105293 - RNA, 23 nt, Human
cucagguauuccugcaaaacaga

SEQ ID NO: 105294 - RNA, 22 nt, Human
cuccaaagaagaagagagagug

SEQ ID NO: 105295 - RNA, 18 nt, Human
cuccaccaaaaaaaaaaa

SEQ ID NO: 105296 - RNA, 22 nt, Human
cuccaccaaaaaaaaaaaaagg

SEQ ID NO: 105297 - RNA, 19 nt, Human
cuccuaaaagcugcuuuuc

SEQ ID NO: 105298 - RNA, 24 nt, Human
cugcuuccaaauaaccugcaacuc

SEQ ID NO: 105299 - RNA, 19 nt, Human
cugcuucuuuccaacaagg

SEQ ID NO: 105300 - RNA, 19 nt, Human
gaaagaaaaaaaaccucau

SEQ ID NO: 105301 - RNA, 18 nt, Human
gaacuugaagagguagca

SEQ ID NO: 105302 - RNA, 19 nt, Human
gacaauagagaaggguggg

SEQ ID NO: 105303 - RNA, 22 nt, Human
gagacaacuucaagcaagcuaa

SEQ ID NO: 105304 - RNA, 19 nt, Human
gcagcuucagaagacuuug

SEQ ID NO: 105305 - RNA, 19 nt, Human
gccauggcuucuaagcugg

SEQ ID NO: 105306 - RNA, 19 nt, Human
gcgaccucuucacuagauu

SEQ ID NO: 105307 - RNA, 19 nt, Human
ggaaaaaacaacgaccugg

SEQ ID NO: 105308 - RNA, 27 nt, Human
ggaaaaccaaagcugcuaugagguuaa

SEQ ID NO: 105309 - RNA, 24 nt, Human
ggaauacagaaauauccagcaccc

SEQ ID NO: 105310 - RNA, 22 nt, Human
ggcaagaugcccacugggucca

SEQ ID NO: 105311 - RNA, 18 nt, Human
ggggaaucuguguuugcu

SEQ ID NO: 105312 - RNA, 23 nt, Human
gugaaaugugcucccuaugaccc

SEQ ID NO: 105313 - RNA, 23 nt, Human
uaaaaauaaaggcaaaauccucc

SEQ ID NO: 105314 - RNA, 27 nt, Human
uaaaacagguccgaaagaaaaaaaacc

SEQ ID NO: 105315 - RNA, 22 nt, Human
uaaaagcugcuuuucucccaaa

SEQ ID NO: 105316 - RNA, 25 nt, Human
uaaaaggaacauuauguaaagagga

SEQ ID NO: 105317 - RNA, 21 nt, Human
uaaacccacagauccaagaag

SEQ ID NO: 105318 - RNA, 24 nt, Human
uaaagccaaaaauguauacacuca

SEQ ID NO: 105319 - RNA, 19 nt, Human
uaaauacauucauguauac

SEQ ID NO: 105320 - RNA, 21 nt, Human
uaacagcaagaccugaaaaag

SEQ ID NO: 105321 - RNA, 19 nt, Human
uaacuggucaaaaaaauaa

SEQ ID NO: 105322 - RNA, 24 nt, Human
uacaaacacugaaagaguuuauca

SEQ ID NO: 105323 - RNA, 21 nt, Human
uaccagaucuuccaaaaacaa

SEQ ID NO: 105324 - RNA, 19 nt, Human
uacccagccucagguauuc

SEQ ID NO: 105325 - RNA, 19 nt, Human
uagaacuacaauguauaaa

SEQ ID NO: 105326 - RNA, 18 nt, Human
uagagccuccuucccagc

SEQ ID NO: 105327 - RNA, 28 nt, Human
uauaaaaagacccaaaaacaacuuuccg

SEQ ID NO: 105328 - RNA, 25 nt, Human
uauggaaacaauaaacccacagauc

SEQ ID NO: 105329 - RNA, 21 nt, Human
uauguuaacuggucaaaaaaa

SEQ ID NO: 105330 - RNA, 19 nt, Human
ucagaaaaaauauuugaag

SEQ ID NO: 105331 - RNA, 21 nt, Human
ucaggcaaaaggaaagugaca

SEQ ID NO: 105332 - RNA, 26 nt, Human
ucaucuccaccaaaaaaaaaaaaagg

SEQ ID NO: 105333 - RNA, 20 nt, Human
uccaagcacaagaaaccaag

SEQ ID NO: 105334 - RNA, 19 nt, Human
uccacagugaaacagaaag

SEQ ID NO: 105335 - RNA, 19 nt, Human
uccaccaaaaaaaaaaaaa

SEQ ID NO: 105336 - RNA, 21 nt, Human
ucccacuguaaauucaaggua

SEQ ID NO: 105337 - RNA, 21 nt, Human
uccuaaaagcugcuuuucucc

SEQ ID NO: 105338 - RNA, 19 nt, Human
ucucccuggacuugcuacu

SEQ ID NO: 105339 - RNA, 21 nt, Human
ucucuauaaauuacccagccu

SEQ ID NO: 105340 - RNA, 19 nt, Human
ucuuuccaacaaggcacga

SEQ ID NO: 105341 - RNA, 23 nt, Human
ugaaaaaggaaacugcuuccaaa

SEQ ID NO: 105342 - RNA, 26 nt, Human
ugaaaugugcucccuaugacccagaa

SEQ ID NO: 105343 - RNA, 27 nt, Human
ugacacguuuauaugaaauuuucccaa

SEQ ID NO: 105344 - RNA, 20 nt, Human
ugcaaaacagacuaacgcaa

SEQ ID NO: 105345 - RNA, 24 nt, Human
uggaaacaauaaacccacagaucc

SEQ ID NO: 105346 - RNA, 22 nt, Human
ugggcucucaguacggcugcuu

SEQ ID NO: 105347 - RNA, 22 nt, Human
ugggcugguacccaucucggga

SEQ ID NO: 105348 - RNA, 19 nt, Human
uggguagagugcaaugagg

SEQ ID NO: 105349 - RNA, 24 nt, Human
uggucaaaaaaauaaagcaauaau

SEQ ID NO: 105350 - RNA, 21 nt, Human
uguaccauagacccaccccuu

SEQ ID NO: 105351 - RNA, 20 nt, Human
uguggcugacacaugcaugg

SEQ ID NO: 105352 - RNA, 21 nt, Human
uuagggaaaguugcguaaagu

SEQ ID NO: 105353 - RNA, 23 nt, Human
uuccaaaaacaaagcacgacuuu

SEQ ID NO: 105354 - RNA, 18 nt, Human
uuccugcacaggugaaau

SEQ ID NO: 105355 - RNA, 24 nt, Human
uucgcagacaaggacaucaaaacc

SEQ ID NO: 105356 - RNA, 23 nt, Human
uucuaagcuggaaaaaacaacga

SEQ ID NO: 105357 - RNA, 25 nt, Human
uugaaauuaggaaauacagauaaaa

SEQ ID NO: 105358 - RNA, 23 nt, Human
uugacacucucuacauuuacccc

SEQ ID NO: 105359 - RNA, 24 nt, Human
uuuaaaagucaacagaauacaagu

SEQ ID NO: 105360 - RNA, 24 nt, Human
aagauaucauuuuagaacggaaug

SEQ ID NO: 105361 - RNA, 27 nt, Human
aaggagguuaauucacaguuuacagac

SEQ ID NO: 105362 - RNA, 22 nt, Human
aauauuccuccucccaaguagc

SEQ ID NO: 105363 - RNA, 22 nt, Human
acacaggagaaagucuccacaa

SEQ ID NO: 105364 - RNA, 27 nt, Human
acacaggagaaagucuccacaauuacc

SEQ ID NO: 105365 - RNA, 20 nt, Human
acccuuuguuucccgaucuc

SEQ ID NO: 105366 - RNA, 23 nt, Human
aggagguuaauucacaguuuaca

SEQ ID NO: 105367 - RNA, 19 nt, Human
aucuauacgcaguauggga

SEQ ID NO: 105368 - RNA, 19 nt, Human
aucucacccuucaccucca

SEQ ID NO: 105369 - RNA, 21 nt, Human
cacaggagaaagucuccacaa

SEQ ID NO: 105370 - RNA, 25 nt, Human
ccuaaauauuccuccucccaaguag

SEQ ID NO: 105371 - RNA, 22 nt, Human
ccucuuuuucuuuugaugaucc

SEQ ID NO: 105372 - RNA, 19 nt, Human
uaaguugaaagaauuuaua

SEQ ID NO: 105373 - RNA, 24 nt, Human
uaccuaaauauuccuccucccaag

SEQ ID NO: 105374 - RNA, 23 nt, Human
uauuccuccucccaaguagccua

SEQ ID NO: 105375 - RNA, 21 nt, Human
ucacaguuuacagacuuagca

SEQ ID NO: 105376 - RNA, 22 nt, Human
ucccaaguagccuaaaaccuac

SEQ ID NO: 105377 - RNA, 26 nt, Human
ucccugcucccuuugggaacuagggg

SEQ ID NO: 105378 - RNA, 23 nt, Human
uccucccaaguagccuaaaaccu

SEQ ID NO: 105379 - RNA, 25 nt, Human
ugcucccuuugggaacuagggggcc

SEQ ID NO: 105380 - RNA, 23 nt, Human
ugugguagauuugcaaaaauguc

SEQ ID NO: 105381 - RNA, 18 nt, Human
uuagaacggaauguggua

SEQ ID NO: 105382 - RNA, 23 nt, Human
uucccgaucucacccuucaccuc

SEQ ID NO: 105383 - RNA, 23 nt, Human
aaaacacaaaauaaaccaacaaa

SEQ ID NO: 105384 - RNA, 24 nt, Human
aaaaggagaaaagaaaacacaaaa

SEQ ID NO: 105385 - RNA, 21 nt, Human
acacaaaauaaaccaacaaaa

SEQ ID NO: 105386 - RNA, 25 nt, Human
acucugaauaccccccaaaaaggag

SEQ ID NO: 105387 - RNA, 27 nt, Human
acugccccucacucccuccccuccccc

SEQ ID NO: 105388 - RNA, 22 nt, Human
agaaaagaaaacacaaaauaaa

SEQ ID NO: 105389 - RNA, 23 nt, Human
agcccacucugaauaccccccaa

SEQ ID NO: 105390 - RNA, 20 nt, Human
agccuggcaggaacccacaa

SEQ ID NO: 105391 - RNA, 21 nt, Human
aggaggaaaaaauucagauca

SEQ ID NO: 105392 - RNA, 23 nt, Human
augccaacagagguagcuguguc

SEQ ID NO: 105393 - RNA, 20 nt, Human
ccaaaaaggagaaaagaaaa

SEQ ID NO: 105394 - RNA, 24 nt, Human
ccaaaaaggagaaaagaaaacaca

SEQ ID NO: 105395 - RNA, 21 nt, Human
ccacucugaauaccccccaaa

SEQ ID NO: 105396 - RNA, 18 nt, Human
ccagcccgccagcuccug

SEQ ID NO: 105397 - RNA, 22 nt, Human
cccacucugaauaccccccaaa

SEQ ID NO: 105398 - RNA, 24 nt, Human
cccaggggcccagcccacucugaa

SEQ ID NO: 105399 - RNA, 22 nt, Human
ccccaaaaaggagaaaagaaaa

SEQ ID NO: 105400 - RNA, 19 nt, Human
cccucacucccuccccucc

SEQ ID NO: 105401 - RNA, 23 nt, Human
cccucacucccuccccuccccca

SEQ ID NO: 105402 - RNA, 22 nt, Human
cccuuccgcucccggccaggga

SEQ ID NO: 105403 - RNA, 20 nt, Human
ccucacucccuccccucccc

SEQ ID NO: 105404 - RNA, 24 nt, Human
ccucacucccuccccucccccagg

SEQ ID NO: 105405 - RNA, 18 nt, Human
ccugguauuaaaaagaug

SEQ ID NO: 105406 - RNA, 22 nt, Human
cgcccaggggcccagcccacuc

SEQ ID NO: 105407 - RNA, 19 nt, Human
cucacucccuccccucccc

SEQ ID NO: 105408 - RNA, 18 nt, Human
cugcugcaugucucuucu

SEQ ID NO: 105409 - RNA, 19 nt, Human
cugcugcaugucucuucug

SEQ ID NO: 105410 - RNA, 19 nt, Human
cuuuugguuuuuuccuuuu

SEQ ID NO: 105411 - RNA, 20 nt, Human
gaaggccagcccgccagcuc

SEQ ID NO: 105412 - RNA, 20 nt, Human
gagaaagugaggaaggucac

SEQ ID NO: 105413 - RNA, 20 nt, Human
gaggaaggucacugcucagc

SEQ ID NO: 105414 - RNA, 24 nt, Human
gagggucucucaggcccccagggg

SEQ ID NO: 105415 - RNA, 18 nt, Human
ggacaagagaaagugagg

SEQ ID NO: 105416 - RNA, 23 nt, Human
ggcaccacugccccucacucccu

SEQ ID NO: 105417 - RNA, 18 nt, Human
ggggagaagcugggacaa

SEQ ID NO: 105418 - RNA, 22 nt, Human
uaaaaagaugccaacagaggua

SEQ ID NO: 105419 - RNA, 26 nt, Human
uaaaccaacaaaauaaaaccaaaagg

SEQ ID NO: 105420 - RNA, 22 nt, Human
ucaagccuggcaggaacccaca

SEQ ID NO: 105421 - RNA, 23 nt, Human
uccacuuuauuucauuuagccgc

SEQ ID NO: 105422 - RNA, 18 nt, Human
ucccccagugcacugggg

SEQ ID NO: 105423 - RNA, 20 nt, Human
ucucucaggcccccagggga

SEQ ID NO: 105424 - RNA, 20 nt, Human
ucugaauaccccccaaaaag

SEQ ID NO: 105425 - RNA, 23 nt, Human
ugaauaccccccaaaaaggagaa

SEQ ID NO: 105426 - RNA, 18 nt, Human
ugcaugucucuucugcag

SEQ ID NO: 105427 - RNA, 21 nt, Human
uggcgccagcgcuacugcugc

SEQ ID NO: 105428 - RNA, 22 nt, Human
ugggcagaaggaaggugagggu

SEQ ID NO: 105429 - RNA, 23 nt, Human
ugggcagaaggaaggugaggguc

SEQ ID NO: 105430 - RNA, 19 nt, Human
uggggagaagccagggucc

SEQ ID NO: 105431 - RNA, 21 nt, Human
uguaacaggcguuacaguggg

SEQ ID NO: 105432 - RNA, 19 nt, Human
uuacaguggggagaagcca

SEQ ID NO: 105433 - RNA, 22 nt, Human
uucaagccuggcaggaacccac

SEQ ID NO: 105434 - RNA, 22 nt, Human
uuccuuuacaacauggaagaug

SEQ ID NO: 105435 - RNA, 19 nt, Human
uuuuuccuuuuuuuuuuuu

SEQ ID NO: 105436 - RNA, 21 nt, Human
uuuuuuuuuuuuuuccacuuu

SEQ ID NO: 105437 - RNA, 24 nt, Human
aaaagcuggaaaacucaugucccc

SEQ ID NO: 105438 - RNA, 23 nt, Human
aauucugcccuccucaggcccca

SEQ ID NO: 105439 - RNA, 25 nt, Human
agaaauauguacuuuuugaauuaaa

SEQ ID NO: 105440 - RNA, 24 nt, Human
auaaaaaugagauacguguguaua

SEQ ID NO: 105441 - RNA, 20 nt, Human
auagguauuauuuguaugcc

SEQ ID NO: 105442 - RNA, 20 nt, Human
auucuauucauccuuucccc

SEQ ID NO: 105443 - RNA, 23 nt, Human
caacauggaagaaauauguacuu

SEQ ID NO: 105444 - RNA, 22 nt, Human
caaucgccacucccaagcacac

SEQ ID NO: 105445 - RNA, 18 nt, Human
cacuauauucaccaggau

SEQ ID NO: 105446 - RNA, 20 nt, Human
ccccugaaacuugguuucca

SEQ ID NO: 105447 - RNA, 21 nt, Human
cccuccucaggccccagagga

SEQ ID NO: 105448 - RNA, 25 nt, Human
gaacaaacaaaauaaauuggaagau

SEQ ID NO: 105449 - RNA, 23 nt, Human
gacuccaccgagcaccucggcau

SEQ ID NO: 105450 - RNA, 19 nt, Human
ucacaaucgccacucccaa

SEQ ID NO: 105451 - RNA, 20 nt, Human
ucugcccuccucaggcccca

SEQ ID NO: 105452 - RNA, 20 nt, Human
ugaaacuugguuuccaccag

SEQ ID NO: 105453 - RNA, 23 nt, Human
ugaugaggugggagacaaaugcu

SEQ ID NO: 105454 - RNA, 18 nt, Human
uggaaaacucaugucccc

SEQ ID NO: 105455 - RNA, 18 nt, Human
uggauaaacagggaagug

SEQ ID NO: 105456 - RNA, 22 nt, Human
ugggagacaaaugcuuuccggc

SEQ ID NO: 105457 - RNA, 21 nt, Human
uguaugccgaacaaacaaaau

SEQ ID NO: 105458 - RNA, 26 nt, Human
uucuauucauccuuuccccaaaguuu

SEQ ID NO: 105459 - RNA, 24 nt, Human
uugcaggacaggauaaucuucucu

SEQ ID NO: 105460 - RNA, 21 nt, Human
uuuuuuuuuuuuuuuuugcaa

SEQ ID NO: 105461 - RNA, 27 nt, Human
uuuuuuuuuuuuuuuuuuuuuuugggg

SEQ ID NO: 105462 - RNA, 19 nt, Human
aaaaaaacagacucaaaga

SEQ ID NO: 105463 - RNA, 22 nt, Human
aaaacagacucaaagaaaagaa

SEQ ID NO: 105464 - RNA, 19 nt, Human
auaaaaaaacagacucaaa

SEQ ID NO: 105465 - RNA, 24 nt, Human
auaaaaaaacagacucaaagaaaa

SEQ ID NO: 105466 - RNA, 21 nt, Human
cucaaagaaaagaaagaugac

SEQ ID NO: 105467 - RNA, 22 nt, Human
uaaaaaaacagacucaaagaaa

SEQ ID NO: 105468 - RNA, 25 nt, Human
uaaaauacaaacuauaaaaaaacag

SEQ ID NO: 105469 - RNA, 22 nt, Human
aaaccaaaccccaaacaagaaa

SEQ ID NO: 105470 - RNA, 25 nt, Human
aaagaaagaaaaccaaaccccaaac

SEQ ID NO: 105471 - RNA, 21 nt, Human
aaauggucguaaguucaaaac

SEQ ID NO: 105472 - RNA, 18 nt, Human
aacaagaaaaaagaaaaa

SEQ ID NO: 105473 - RNA, 21 nt, Human
aaccaaaccccaaacaagaaa

SEQ ID NO: 105474 - RNA, 18 nt, Human
aagaaaaccaaaccccaa

SEQ ID NO: 105475 - RNA, 26 nt, Human
aagaaaagaaagaaaaccaaacccca

SEQ ID NO: 105476 - RNA, 19 nt, Human
aagaaagaaaaccaaaccc

SEQ ID NO: 105477 - RNA, 21 nt, Human
aagcaucgaggacugguggcc

SEQ ID NO: 105478 - RNA, 22 nt, Human
acagaaaaagaucuguaccauu

SEQ ID NO: 105479 - RNA, 24 nt, Human
acaugcugaaaccaaauggucgua

SEQ ID NO: 105480 - RNA, 19 nt, Human
acccgaugcgcaugaacag

SEQ ID NO: 105481 - RNA, 22 nt, Human
acgcuggacucgcggguggccc

SEQ ID NO: 105482 - RNA, 19 nt, Human
acuuugcccacgugccuuc

SEQ ID NO: 105483 - RNA, 18 nt, Human
agaaaaccaaaccccaaa

SEQ ID NO: 105484 - RNA, 20 nt, Human
agaugccuggugccacaagc

SEQ ID NO: 105485 - RNA, 21 nt, Human
aggaaaagaaaagaaagaaaa

SEQ ID NO: 105486 - RNA, 22 nt, Human
aguuuuuuuuuuuuuuucacuu

SEQ ID NO: 105487 - RNA, 19 nt, Human
auaaaaggaaaagaaaaga

SEQ ID NO: 105488 - RNA, 19 nt, Human
caaacaagaaaaaagaaaa

SEQ ID NO: 105489 - RNA, 22 nt, Human
caaaccccaaacaagaaaaaag

SEQ ID NO: 105490 - RNA, 23 nt, Human
caaccugacuuuuuaaaccuaag

SEQ ID NO: 105491 - RNA, 20 nt, Human
cagaaaaagaucuguaccau

SEQ ID NO: 105492 - RNA, 24 nt, Human
cagaauucaaugauuagcaacauc

SEQ ID NO: 105493 - RNA, 25 nt, Human
caguuuucucucucucuccgggccc

SEQ ID NO: 105494 - RNA, 24 nt, Human
ccaaacaagaaaaaagaaaaaaaa

SEQ ID NO: 105495 - RNA, 25 nt, Human
cccaaacaagaaaaaagaaaaaaaa

SEQ ID NO: 105496 - RNA, 19 nt, Human
cccacgugccuucuaggug

SEQ ID NO: 105497 - RNA, 19 nt, Human
cccccccgcugcuucucgc

SEQ ID NO: 105498 - RNA, 22 nt, Human
ccccccgcugcuucucgcggcc

SEQ ID NO: 105499 - RNA, 19 nt, Human
ccccgccgccgcucgugcc

SEQ ID NO: 105500 - RNA, 22 nt, Human
ccccgccgccgcucgugccgaa

SEQ ID NO: 105501 - RNA, 23 nt, Human
cccgccgccgcucgugccgaauu

SEQ ID NO: 105502 - RNA, 18 nt, Human
cccggggucgacccaccc

SEQ ID NO: 105503 - RNA, 21 nt, Human
cgcggguggccccgccgccgc

SEQ ID NO: 105504 - RNA, 22 nt, Human
cgcucgugccgaauucccgggg

SEQ ID NO: 105505 - RNA, 20 nt, Human
cucugugcucgccgugugac

SEQ ID NO: 105506 - RNA, 19 nt, Human
cuucgaucgccugcccccc

SEQ ID NO: 105507 - RNA, 21 nt, Human
gaucuguaccauuauuuccuu

SEQ ID NO: 105508 - RNA, 24 nt, Human
gccuggugccacaagcuugggucu

SEQ ID NO: 105509 - RNA, 18 nt, Human
guccaaaacaaagaagag

SEQ ID NO: 105510 - RNA, 18 nt, Human
gugcgugcacagggccaa

SEQ ID NO: 105511 - RNA, 21 nt, Human
gugugugugugugugugugug

SEQ ID NO: 105512 - RNA, 21 nt, Human
gugugugugugugugugugug

SEQ ID NO: 105513 - RNA, 21 nt, Human
gugugugugugugugugugug

SEQ ID NO: 105514 - RNA, 21 nt, Human
gugugugugugugugugugug

SEQ ID NO: 105515 - RNA, 23 nt, Human
guuuuuuuuuuuuuuucacuugg

SEQ ID NO: 105516 - RNA, 24 nt, Human
guuuuuuuuuuuuuuucacuugga

SEQ ID NO: 105517 - RNA, 22 nt, Human
uaauagagaacagaauucaaug

SEQ ID NO: 105518 - RNA, 21 nt, Human
uagacagaaaaagaucuguac

SEQ ID NO: 105519 - RNA, 25 nt, Human
uagcaacaucacuaaaaauuuaccc

SEQ ID NO: 105520 - RNA, 21 nt, Human
uccaaaacaaagaagaggggg

SEQ ID NO: 105521 - RNA, 20 nt, Human
uccaguggcuuuccuggcac

SEQ ID NO: 105522 - RNA, 27 nt, Human
uccuucgugugugugugugugugugug

SEQ ID NO: 105523 - RNA, 18 nt, Human
ucgcggguggccccgccg

SEQ ID NO: 105524 - RNA, 24 nt, Human
ucgcggguggccccgccgccgcuc

SEQ ID NO: 105525 - RNA, 21 nt, Human
ugaguucuauggcuucaaucu

SEQ ID NO: 105526 - RNA, 22 nt, Human
ugccacaaaucauuagaaaucu

SEQ ID NO: 105527 - RNA, 25 nt, Human
uggcaccaucagaugccuggugcca

SEQ ID NO: 105528 - RNA, 18 nt, Human
ugugugcgugcgugcaca

SEQ ID NO: 105529 - RNA, 19 nt, Human
ugugugugugugcgugcgu

SEQ ID NO: 105530 - RNA, 20 nt, Human
ugugugugugugcgugcgug

SEQ ID NO: 105531 - RNA, 22 nt, Human
ugugugugugugcgugcgugca

SEQ ID NO: 105532 - RNA, 18 nt, Human
ugugugugugugugugug

SEQ ID NO: 105533 - RNA, 18 nt, Human
ugugugugugugugugug

SEQ ID NO: 105534 - RNA, 18 nt, Human
ugugugugugugugugug

SEQ ID NO: 105535 - RNA, 18 nt, Human
ugugugugugugugugug

SEQ ID NO: 105536 - RNA, 18 nt, Human
ugugugugugugugugug

SEQ ID NO: 105537 - RNA, 18 nt, Human
ugugugugugugugugug

SEQ ID NO: 105538 - RNA, 18 nt, Human
ugugugugugugugugug

SEQ ID NO: 105539 - RNA, 18 nt, Human
ugugugugugugugugug

SEQ ID NO: 105540 - RNA, 18 nt, Human
ugugugugugugugugug

SEQ ID NO: 105541 - RNA, 18 nt, Human
ugugugugugugugugug

SEQ ID NO: 105542 - RNA, 18 nt, Human
ugugugugugugugugug

SEQ ID NO: 105543 - RNA, 19 nt, Human
ugugugugugugugugugc

SEQ ID NO: 105544 - RNA, 21 nt, Human
ugugugugugugugugugugc

SEQ ID NO: 105545 - RNA, 24 nt, Human
ugugugugugugugugugugcgug

SEQ ID NO: 105546 - RNA, 21 nt, Human
ugugugugugugugugugugu

SEQ ID NO: 105547 - RNA, 21 nt, Human
ugugugugugugugugugugu

SEQ ID NO: 105548 - RNA, 21 nt, Human
ugugugugugugugugugugu

SEQ ID NO: 105549 - RNA, 21 nt, Human
ugugugugugugugugugugu

SEQ ID NO: 105550 - RNA, 21 nt, Human
ugugugugugugugugugugu

SEQ ID NO: 105551 - RNA, 21 nt, Human
ugugugugugugugugugugu

SEQ ID NO: 105552 - RNA, 21 nt, Human
ugugugugugugugugugugu

SEQ ID NO: 105553 - RNA, 21 nt, Human
ugugugugugugugugugugu

SEQ ID NO: 105554 - RNA, 21 nt, Human
ugugugugugugugugugugu

SEQ ID NO: 105555 - RNA, 21 nt, Human
ugugugugugugugugugugu

SEQ ID NO: 105556 - RNA, 21 nt, Human
ugugugugugugugugugugu

SEQ ID NO: 105557 - RNA, 21 nt, Human
ugugugugugugugugugugu

SEQ ID NO: 105558 - RNA, 21 nt, Human
ugugugugugugugugugugu

SEQ ID NO: 105559 - RNA, 21 nt, Human
ugugugugugugugugugugu

SEQ ID NO: 105560 - RNA, 21 nt, Human
ugugugugugugugugugugu

SEQ ID NO: 105561 - RNA, 21 nt, Human
ugugugugugugugugugugu

SEQ ID NO: 105562 - RNA, 21 nt, Human
ugugugugugugugugugugu

SEQ ID NO: 105563 - RNA, 21 nt, Human
ugugugugugugugugugugu

SEQ ID NO: 105564 - RNA, 21 nt, Human
ugugugugugugugugugugu

SEQ ID NO: 105565 - RNA, 21 nt, Human
ugugugugugugugugugugu

SEQ ID NO: 105566 - RNA, 22 nt, Human
ugugugugugugugugugugug

SEQ ID NO: 105567 - RNA, 22 nt, Human
ugugugugugugugugugugug

SEQ ID NO: 105568 - RNA, 22 nt, Human
ugugugugugugugugugugug

SEQ ID NO: 105569 - RNA, 22 nt, Human
ugugugugugugugugugugug

SEQ ID NO: 105570 - RNA, 22 nt, Human
ugugugugugugugugugugug

SEQ ID NO: 105571 - RNA, 22 nt, Human
ugugugugugugugugugugug

SEQ ID NO: 105572 - RNA, 23 nt, Human
uuagaaaucuccugacaugcuga

SEQ ID NO: 105573 - RNA, 19 nt, Human
uucaggcuuauggcuuuug

SEQ ID NO: 105574 - RNA, 21 nt, Human
uuccaguggcuuuccuggcac

SEQ ID NO: 105575 - RNA, 20 nt, Human
uuguuuuccccaucaguuuu

SEQ ID NO: 105576 - RNA, 18 nt, Human
uuuuuuuuuuuuucacuu

SEQ ID NO: 105577 - RNA, 19 nt, Human
uuuuuuuuuuuuucacuug

SEQ ID NO: 105578 - RNA, 19 nt, Human
aaaaggucagaaguuauug

SEQ ID NO: 105579 - RNA, 21 nt, Human
aagcuccccugcacggggcuc

SEQ ID NO: 105580 - RNA, 18 nt, Human
acugcaguggcaggagcg

SEQ ID NO: 105581 - RNA, 18 nt, Human
agcuccccugcacggggc

SEQ ID NO: 105582 - RNA, 19 nt, Human
aggaaagagcccagaacag

SEQ ID NO: 105583 - RNA, 21 nt, Human
aggaguucucagcuuucacca

SEQ ID NO: 105584 - RNA, 23 nt, Human
aguggauaggauggaggaaggga

SEQ ID NO: 105585 - RNA, 22 nt, Human
cagagccagggccacagggugc

SEQ ID NO: 105586 - RNA, 19 nt, Human
cagcagagccagggccaca

SEQ ID NO: 105587 - RNA, 18 nt, Human
cccuggggccagcccugc

SEQ ID NO: 105588 - RNA, 18 nt, Human
ccucccgcaagcuccccu

SEQ ID NO: 105589 - RNA, 22 nt, Human
cggcuggacuggcggccggggu

SEQ ID NO: 105590 - RNA, 20 nt, Human
cguccgggccaucuggccag

SEQ ID NO: 105591 - RNA, 21 nt, Human
cugccaaggggacagcagagc

SEQ ID NO: 105592 - RNA, 19 nt, Human
cuggccaggaccugccaag

SEQ ID NO: 105593 - RNA, 19 nt, Human
gacccgggcgccgagcagc

SEQ ID NO: 105594 - RNA, 18 nt, Human
gagucaggaguaggagac

SEQ ID NO: 105595 - RNA, 18 nt, Human
gauggaggaagggaaacu

SEQ ID NO: 105596 - RNA, 18 nt, Human
ggccggggucgggcugcg

SEQ ID NO: 105597 - RNA, 18 nt, Human
ggccugggcuugggcagg

SEQ ID NO: 105598 - RNA, 19 nt, Human
gucaggaguaggagacaag

SEQ ID NO: 105599 - RNA, 22 nt, Human
gugcccuggggccagcccugcc

SEQ ID NO: 105600 - RNA, 18 nt, Human
uagaaagcugccuguguu

SEQ ID NO: 105601 - RNA, 20 nt, Human
ucagagaaggaaucgucaau

SEQ ID NO: 105602 - RNA, 22 nt, Human
uccagggcagguaggagucagg

SEQ ID NO: 105603 - RNA, 21 nt, Human
ucugucggucgauccucccgc

SEQ ID NO: 105604 - RNA, 22 nt, Human
ugcaaaggauguuccagggcag

SEQ ID NO: 105605 - RNA, 22 nt, Human
uggcggccggggucgggcugcg

SEQ ID NO: 105606 - RNA, 23 nt, Human
uggcggccggggucgggcugcgg

SEQ ID NO: 105607 - RNA, 20 nt, Human
uggggccagcccugccagcc

SEQ ID NO: 105608 - RNA, 22 nt, Human
uggggccagcccugccagccgg

SEQ ID NO: 105609 - RNA, 22 nt, Human
uggggccgggcaccuaggcacc

SEQ ID NO: 105610 - RNA, 22 nt, Human
uuccagggcagguaggagucag

SEQ ID NO: 105611 - RNA, 22 nt, Human
aggcgcgauggagcggccccgg

SEQ ID NO: 105612 - RNA, 20 nt, Human
agugaaguggugaaaaacaa

SEQ ID NO: 105613 - RNA, 22 nt, Human
cagugcccaccgcuccaaugac

SEQ ID NO: 105614 - RNA, 18 nt, Human
ggaccggagaagcgaggc

SEQ ID NO: 105615 - RNA, 23 nt, Human
ggcugcuucuuaacagugcccac

SEQ ID NO: 105616 - RNA, 21 nt, Human
uaacagugcccaccgcuccaa

SEQ ID NO: 105617 - RNA, 19 nt, Human
uaguaaguucuacuuucug

SEQ ID NO: 105618 - RNA, 18 nt, Human
ucaugugauggcugcuuc

SEQ ID NO: 105619 - RNA, 21 nt, Human
ucuuaacagugcccaccgcuc

SEQ ID NO: 105620 - RNA, 21 nt, Human
ugaaaaacagaucaugugaug

SEQ ID NO: 105621 - RNA, 22 nt, Human
ugaaguggugaaaaacagauca

SEQ ID NO: 105622 - RNA, 22 nt, Human
ugaaguggugaaaaacagauca

SEQ ID NO: 105623 - RNA, 25 nt, Human
ugacagaaauuaaagacaauuccaa

SEQ ID NO: 105624 - RNA, 23 nt, Human
ugcagaaaagaauaugcuacaag

SEQ ID NO: 105625 - RNA, 22 nt, Human
uuaaagacaauuccaauugugu

SEQ ID NO: 105626 - RNA, 19 nt, Human
aacauggcggccuucaucu

SEQ ID NO: 105627 - RNA, 30 nt, Human
aacccagaagagaugggggaggugaguccc

SEQ ID NO: 105628 - RNA, 18 nt, Human
agacagggccucuucccc

SEQ ID NO: 105629 - RNA, 20 nt, Human
agaccaaagcaaagcgccaa

SEQ ID NO: 105630 - RNA, 23 nt, Human
agagaugggggaggugaguccag

SEQ ID NO: 105631 - RNA, 21 nt, Human
agaggaaggaacccagaagag

SEQ ID NO: 105632 - RNA, 19 nt, Human
agccagagggggacggggc

SEQ ID NO: 105633 - RNA, 21 nt, Human
agcgccaacacacuguuaaac

SEQ ID NO: 105634 - RNA, 23 nt, Human
aggagggcuagggggcagggagu

SEQ ID NO: 105635 - RNA, 21 nt, Human
agggcaggguguggccucuuc

SEQ ID NO: 105636 - RNA, 19 nt, Human
auauaccugucccacucca

SEQ ID NO: 105637 - RNA, 25 nt, Human
caaagcaaagcgccaacacacuguu

SEQ ID NO: 105638 - RNA, 22 nt, Human
cacagccccaucccuaccucuc

SEQ ID NO: 105639 - RNA, 18 nt, Human
cauaggccccaagggagg

SEQ ID NO: 105640 - RNA, 21 nt, Human
ccacagccccaucccuaccuc

SEQ ID NO: 105641 - RNA, 21 nt, Human
cccacagccccaucccuaccu

SEQ ID NO: 105642 - RNA, 22 nt, Human
cccacagccccaucccuaccuc

SEQ ID NO: 105643 - RNA, 18 nt, Human
cccaggcccuguacuucc

SEQ ID NO: 105644 - RNA, 21 nt, Human
ccggccagcuggagccagagg

SEQ ID NO: 105645 - RNA, 22 nt, Human
ccucacuauccccacagcccca

SEQ ID NO: 105646 - RNA, 21 nt, Human
ccuucaucucugcaagcucag

SEQ ID NO: 105647 - RNA, 19 nt, Human
ccuugcccacggcuccugg

SEQ ID NO: 105648 - RNA, 21 nt, Human
cucaaagauagaccaaagcaa

SEQ ID NO: 105649 - RNA, 23 nt, Human
cucagaggaaggaacccagaaga

SEQ ID NO: 105650 - RNA, 19 nt, Human
cucuuccccaggcccugua

SEQ ID NO: 105651 - RNA, 26 nt, Human
cugcaagcucaggggucccaaggcuc

SEQ ID NO: 105652 - RNA, 19 nt, Human
gaccaaagcaaagcgccaa

SEQ ID NO: 105653 - RNA, 23 nt, Human
gccagcuggagccagagggggac

SEQ ID NO: 105654 - RNA, 22 nt, Human
ggcaggguguggccucuucccu

SEQ ID NO: 105655 - RNA, 21 nt, Human
ggcuccuggugccagcuaccu

SEQ ID NO: 105656 - RNA, 21 nt, Human
gggaggugaguccaguggguc

SEQ ID NO: 105657 - RNA, 24 nt, Human
ggggacggggcauccuuggccccc

SEQ ID NO: 105658 - RNA, 21 nt, Human
gggggaggugaguccaguggg

SEQ ID NO: 105659 - RNA, 22 nt, Human
ggguguggccucuucccuugcc

SEQ ID NO: 105660 - RNA, 25 nt, Human
uaccuagacagggccucuuccccag

SEQ ID NO: 105661 - RNA, 19 nt, Human
uaggauguuuggcuccuug

SEQ ID NO: 105662 - RNA, 18 nt, Human
ucaaagauagaccaaagc

SEQ ID NO: 105663 - RNA, 18 nt, Human
ucaucucugcaagcucag

SEQ ID NO: 105664 - RNA, 26 nt, Human
ucccaaggcucagaggaaggaacccc

SEQ ID NO: 105665 - RNA, 19 nt, Human
uccccacagccccaucccu

SEQ ID NO: 105666 - RNA, 18 nt, Human
uccccaggcccuguacuu

SEQ ID NO: 105667 - RNA, 21 nt, Human
ucccuugccaggcuuggggau

SEQ ID NO: 105668 - RNA, 19 nt, Human
ucucugcaagcucaggggu

SEQ ID NO: 105669 - RNA, 21 nt, Human
ucuggcugcagcagagcaggg

SEQ ID NO: 105670 - RNA, 22 nt, Human
ucuuacauugcgaugccucacu

SEQ ID NO: 105671 - RNA, 22 nt, Human
ucuuguaggauguuuggcuccu

SEQ ID NO: 105672 - RNA, 22 nt, Human
ugccucacuauccccacagccc

SEQ ID NO: 105673 - RNA, 23 nt, Human
ugggggaggugaguccagugggu

SEQ ID NO: 105674 - RNA, 23 nt, Human
uuaaucaucaacaaguguguacu

SEQ ID NO: 105675 - RNA, 19 nt, Human
uucaagcuggcuuugcagg

SEQ ID NO: 105676 - RNA, 23 nt, Human
uuggcccccgugcugugugcaga

SEQ ID NO: 105677 - RNA, 24 nt, Human
uuggugauagagcuugccaaaaug

SEQ ID NO: 105678 - RNA, 22 nt, Human
aaaaaaaaaaaaaaaacaaaaa

SEQ ID NO: 105679 - RNA, 25 nt, Human
aaaaaaaaaaaaaaaacaaaaacaa

SEQ ID NO: 105680 - RNA, 26 nt, Human
aaaaaaaaaaaacaaaaacaaaaaag

SEQ ID NO: 105681 - RNA, 23 nt, Human
aaaaaaaaacaaaaacaaaaaaa

SEQ ID NO: 105682 - RNA, 26 nt, Human
aaaaaaaacaaaaacaaaaaaaacac

SEQ ID NO: 105683 - RNA, 24 nt, Human
aaaaaaacaaaaacaaaaaaaaca

SEQ ID NO: 105684 - RNA, 28 nt, Human
aaaaaaacaaaaacaaaaaaaacaccac

SEQ ID NO: 105685 - RNA, 19 nt, Human
aaaaugcacacuuagaaca

SEQ ID NO: 105686 - RNA, 19 nt, Human
aaacaaaaaaaacaccaca

SEQ ID NO: 105687 - RNA, 25 nt, Human
aaacaaaaacaaaaaaaacaccaca

SEQ ID NO: 105688 - RNA, 21 nt, Human
aaagauugacaaaaaugcaca

SEQ ID NO: 105689 - RNA, 22 nt, Human
aacaugcgguuauuuaaaaaaa

SEQ ID NO: 105690 - RNA, 24 nt, Human
aauacauaacagaaaagagcacaa

SEQ ID NO: 105691 - RNA, 18 nt, Human
acauaacagaaaagagca

SEQ ID NO: 105692 - RNA, 20 nt, Human
acauaacagaaaagagcaca

SEQ ID NO: 105693 - RNA, 19 nt, Human
agaaaagagcacaauaacu

SEQ ID NO: 105694 - RNA, 22 nt, Human
agaaaagagcacaauaacuuaa

SEQ ID NO: 105695 - RNA, 24 nt, Human
agaaaagagcacaauaacuuaagu

SEQ ID NO: 105696 - RNA, 22 nt, Human
caaaaacaaaaaaaacaccaca

SEQ ID NO: 105697 - RNA, 21 nt, Human
cacuuagaacaugcgguuauu

SEQ ID NO: 105698 - RNA, 22 nt, Human
caggagagcaccaagcaaggca

SEQ ID NO: 105699 - RNA, 18 nt, Human
caucuguaugaaauaacu

SEQ ID NO: 105700 - RNA, 18 nt, Human
ccgccaccgccgccgcca

SEQ ID NO: 105701 - RNA, 20 nt, Human
ccggcgggcgaggcggcgga

SEQ ID NO: 105702 - RNA, 24 nt, Human
gcaauaacaacaacacaaugucaa

SEQ ID NO: 105703 - RNA, 21 nt, Human
gccggcuccgaggccgcggag

SEQ ID NO: 105704 - RNA, 24 nt, Human
gcuacagaggggauggggucugga

SEQ ID NO: 105705 - RNA, 23 nt, Human
ggagagcaccaagcaaggcacca

SEQ ID NO: 105706 - RNA, 20 nt, Human
ggggauggggucuggaccgu

SEQ ID NO: 105707 - RNA, 25 nt, Human
ggguuggcgccgggguaccggcggg

SEQ ID NO: 105708 - RNA, 21 nt, Human
gguuauuuaaaaaaaaaaaaa

SEQ ID NO: 105709 - RNA, 22 nt, Human
uacauaacagaaaagagcacaa

SEQ ID NO: 105710 - RNA, 21 nt, Human
ucaccaccaggagagcaccaa

SEQ ID NO: 105711 - RNA, 28 nt, Human
ucagaauacauaacagaaaagagcacaa

SEQ ID NO: 105712 - RNA, 18 nt, Human
uccccugcccaaagggcc

SEQ ID NO: 105713 - RNA, 22 nt, Human
uccgagcuccccugcccaaagg

SEQ ID NO: 105714 - RNA, 18 nt, Human
ucgccgccaccgccgccg

SEQ ID NO: 105715 - RNA, 21 nt, Human
ucgccgccaccgccgccgcca

SEQ ID NO: 105716 - RNA, 21 nt, Human
ucgcugucggcugucucggcu

SEQ ID NO: 105717 - RNA, 19 nt, Human
ugagccuccgagcuccccu

SEQ ID NO: 105718 - RNA, 25 nt, Human
ugagccuccgagcuccccugcccaa

SEQ ID NO: 105719 - RNA, 18 nt, Human
uguagaaccaauguuaug

SEQ ID NO: 105720 - RNA, 19 nt, Human
uuggaaagacaacauacuu

SEQ ID NO: 105721 - RNA, 19 nt, Human
ccuuauaauugcugcugcu

SEQ ID NO: 105722 - RNA, 21 nt, Human
ucuaacauuucucaaacaguc

SEQ ID NO: 105723 - RNA, 21 nt, Human
ugagaccagucagaauuucca

SEQ ID NO: 105724 - RNA, 26 nt, Human
aagcacugaaguugcagguccuagcu

SEQ ID NO: 105725 - RNA, 24 nt, Human
cagaagcacugaaguugcaggucc

SEQ ID NO: 105726 - RNA, 18 nt, Human
gaaggagguccaaaacag

SEQ ID NO: 105727 - RNA, 24 nt, Human
gcauucaucauauauaaccacuuc

SEQ ID NO: 105728 - RNA, 27 nt, Human
uaucccagaagcacugaaagguccuuc

SEQ ID NO: 105729 - RNA, 18 nt, Human
uccaguuaucccagaagc

SEQ ID NO: 105730 - RNA, 21 nt, Human
ugaaggagguccaaaacagca

SEQ ID NO: 105731 - RNA, 22 nt, Human
ugaaguugcagguccuagcugu

SEQ ID NO: 105732 - RNA, 19 nt, Human
uggugacaacugcugauga

SEQ ID NO: 105733 - RNA, 21 nt, Human
aaacaacagaaaguuccuuca

SEQ ID NO: 105734 - RNA, 23 nt, Human
aaacacccaggauuacuagaacc

SEQ ID NO: 105735 - RNA, 20 nt, Human
aaaccaaugacauagacccc

SEQ ID NO: 105736 - RNA, 19 nt, Human
aacaacagaaaguuccuuc

SEQ ID NO: 105737 - RNA, 24 nt, Human
aagaaauaaugcagcuacaggagc

SEQ ID NO: 105738 - RNA, 19 nt, Human
acccaggacgcagaggcgg

SEQ ID NO: 105739 - RNA, 19 nt, Human
acuacccaggacgcagagg

SEQ ID NO: 105740 - RNA, 18 nt, Human
agcacagacuacccagga

SEQ ID NO: 105741 - RNA, 18 nt, Human
aggcggugcaggcgcagg

SEQ ID NO: 105742 - RNA, 19 nt, Human
aguccaggcgcuccuccca

SEQ ID NO: 105743 - RNA, 20 nt, Human
aucagcccgccgcacccaca

SEQ ID NO: 105744 - RNA, 24 nt, Human
caaaaacaacagaaaguuccuuca

SEQ ID NO: 105745 - RNA, 25 nt, Human
caacagaaaguuccuucacuuuaau

SEQ ID NO: 105746 - RNA, 19 nt, Human
caagaaauaaugcagcuac

SEQ ID NO: 105747 - RNA, 22 nt, Human
cacauuuugcuuuugcuggaaa

SEQ ID NO: 105748 - RNA, 22 nt, Human
caccucaucagcccgccgcacc

SEQ ID NO: 105749 - RNA, 23 nt, Human
ccaaaagcaaagucacaacaggc

SEQ ID NO: 105750 - RNA, 18 nt, Human
ccaaugacauagacccca

SEQ ID NO: 105751 - RNA, 19 nt, Human
ccaaugacauagaccccaa

SEQ ID NO: 105752 - RNA, 30 nt, Human
cccgcgaguccaggcgcuccucccaggcgg

SEQ ID NO: 105753 - RNA, 19 nt, Human
ccugcgaggcaggaggcuu

SEQ ID NO: 105754 - RNA, 18 nt, Human
cgcgcaccgggcccaggg

SEQ ID NO: 105755 - RNA, 19 nt, Human
cuacaaaaacaacagaaag

SEQ ID NO: 105756 - RNA, 22 nt, Human
gaagaacuaagagaaaccagaa

SEQ ID NO: 105757 - RNA, 19 nt, Human
gagcaaauuaaauuacuau

SEQ ID NO: 105758 - RNA, 20 nt, Human
gagcgugcgcgcgggaggag

SEQ ID NO: 105759 - RNA, 19 nt, Human
gcaccgggcccagggagcc

SEQ ID NO: 105760 - RNA, 23 nt, Human
gcaucagaaaccaaugacauaga

SEQ ID NO: 105761 - RNA, 18 nt, Human
gcgcggagcgugcgcgcg

SEQ ID NO: 105762 - RNA, 24 nt, Human
ggagcgugcgcgcgggaggaggua

SEQ ID NO: 105763 - RNA, 22 nt, Human
ggauuacaagcacagacuaccc

SEQ ID NO: 105764 - RNA, 19 nt, Human
ggcgccggcgcccggggag

SEQ ID NO: 105765 - RNA, 23 nt, Human
uaaucaagaaauaaugcagcuac

SEQ ID NO: 105766 - RNA, 24 nt, Human
uaaugcagcuacaggagcaaauua

SEQ ID NO: 105767 - RNA, 18 nt, Human
uagaaccagaaagcgugu

SEQ ID NO: 105768 - RNA, 28 nt, Human
uagaccccaaaagcaaagucacaacagg

SEQ ID NO: 105769 - RNA, 21 nt, Human
uagggggcuaaucaugcaaua

SEQ ID NO: 105770 - RNA, 25 nt, Human
uaugguaauguaacagccagaggug

SEQ ID NO: 105771 - RNA, 25 nt, Human
uauuaaaguaacaaaucugaaaacc

SEQ ID NO: 105772 - RNA, 19 nt, Human
ucaucuguaaaacauuucu

SEQ ID NO: 105773 - RNA, 22 nt, Human
uccuucaucuguaaaacauuuc

SEQ ID NO: 105774 - RNA, 21 nt, Human
ugaguuucucugaacgugaua

SEQ ID NO: 105775 - RNA, 20 nt, Human
ugcuggauuacaagcacaga

SEQ ID NO: 105776 - RNA, 20 nt, Human
uggggcgugcugggggcgcc

SEQ ID NO: 105777 - RNA, 24 nt, Human
ugggggcgccggcgcccggggagg

SEQ ID NO: 105778 - RNA, 25 nt, Human
uugccagauagggggcuaaucaugc

SEQ ID NO: 105779 - RNA, 21 nt, Human
uuugcuuuugcuggaaagaaa

SEQ ID NO: 105780 - RNA, 19 nt, Human
aaccugaggggcuucccuc

SEQ ID NO: 105781 - RNA, 18 nt, Human
acgccgccgccgcugccc

SEQ ID NO: 105782 - RNA, 24 nt, Human
agcccauggcaaaguccuggggac

SEQ ID NO: 105783 - RNA, 21 nt, Human
aggcacagcaaaagacccaac

SEQ ID NO: 105784 - RNA, 23 nt, Human
cacagcaaaagacccaaccugag

SEQ ID NO: 105785 - RNA, 22 nt, Human
cacccuuguucucacguggagg

SEQ ID NO: 105786 - RNA, 22 nt, Human
cagccuccgcggcccccagccc

SEQ ID NO: 105787 - RNA, 18 nt, Human
cagcgauccucugcaguc

SEQ ID NO: 105788 - RNA, 23 nt, Human
ccagacauacauaggaggcacag

SEQ ID NO: 105789 - RNA, 20 nt, Human
cccauggcaaaguccugggg

SEQ ID NO: 105790 - RNA, 20 nt, Human
ccccucgcgucgcugcucgc

SEQ ID NO: 105791 - RNA, 23 nt, Human
cccucaccuucacccuuguucuc

SEQ ID NO: 105792 - RNA, 18 nt, Human
ccgccgccgcugcccucg

SEQ ID NO: 105793 - RNA, 19 nt, Human
ccgccgcugcccucgcccc

SEQ ID NO: 105794 - RNA, 20 nt, Human
ccgccgcugcccucgcccgg

SEQ ID NO: 105795 - RNA, 25 nt, Human
ccgcgcgccccucgcgucgcugcuc

SEQ ID NO: 105796 - RNA, 18 nt, Human
ccgcugcccucgcccggc

SEQ ID NO: 105797 - RNA, 20 nt, Human
cgccgccgccgcugcccucg

SEQ ID NO: 105798 - RNA, 22 nt, Human
cuccaccagaugacgcgcugcc

SEQ ID NO: 105799 - RNA, 24 nt, Human
gauggugcugggccauucagcuca

SEQ ID NO: 105800 - RNA, 22 nt, Human
gcgcagaaagcaccagccuccg

SEQ ID NO: 105801 - RNA, 21 nt, Human
ggggacgcgcagaaagcacca

SEQ ID NO: 105802 - RNA, 18 nt, Human
ucaaugauaauacugcau

SEQ ID NO: 105803 - RNA, 19 nt, Human
ucagcgauccucugcaguc

SEQ ID NO: 105804 - RNA, 19 nt, Human
uggaaaacaaaucaagugg

SEQ ID NO: 105805 - RNA, 20 nt, Human
uggaaaacaaaucaaguggu

SEQ ID NO: 105806 - RNA, 21 nt, Human
uugauggugcugggccauuca

SEQ ID NO: 105807 - RNA, 18 nt, Human
uuuguggucagcuuuuuc

SEQ ID NO: 105808 - RNA, 20 nt, Human
agcuccuccgggagcagcgg

SEQ ID NO: 105809 - RNA, 25 nt, Human
aggagggaaggagggagggaaggaa

SEQ ID NO: 105810 - RNA, 22 nt, Human
ccuccgggagcagcggcgccag

SEQ ID NO: 105811 - RNA, 20 nt, Human
cgccgugccgggagcuccuc

SEQ ID NO: 105812 - RNA, 19 nt, Human
cgggagcagcggcgccaga

SEQ ID NO: 105813 - RNA, 22 nt, Human
gagcagcggcgccagaagagac

SEQ ID NO: 105814 - RNA, 20 nt, Human
gagggaaggagggagggaag

SEQ ID NO: 105815 - RNA, 21 nt, Human
ggagggaaggagggagggaag

SEQ ID NO: 105816 - RNA, 22 nt, Human
ggcgacaggagggaaggaggga

SEQ ID NO: 105817 - RNA, 23 nt, Human
aaacaaggaguccaaagcccgga

SEQ ID NO: 105818 - RNA, 22 nt, Human
aagaggggucuguaggguccuc

SEQ ID NO: 105819 - RNA, 20 nt, Human
acaggagagaaccugcuggc

SEQ ID NO: 105820 - RNA, 18 nt, Human
accagggcacccaauuug

SEQ ID NO: 105821 - RNA, 21 nt, Human
acccaggguccugggaagcca

SEQ ID NO: 105822 - RNA, 22 nt, Human
agaaaaaccaguuccccggggg

SEQ ID NO: 105823 - RNA, 24 nt, Human
agaaagggaaagagagggagggag

SEQ ID NO: 105824 - RNA, 21 nt, Human
agagagggagggaggaaaggg

SEQ ID NO: 105825 - RNA, 18 nt, Human
agagggagggaggaaagg

SEQ ID NO: 105826 - RNA, 22 nt, Human
agcagggcccuggggcugagga

SEQ ID NO: 105827 - RNA, 19 nt, Human
aggaagggaggggagcugg

SEQ ID NO: 105828 - RNA, 22 nt, Human
aggaagggaggggagcuggagg

SEQ ID NO: 105829 - RNA, 21 nt, Human
aggagggagggacugaggcuu

SEQ ID NO: 105830 - RNA, 19 nt, Human
aggcaggcagcaugcggga

SEQ ID NO: 105831 - RNA, 23 nt, Human
aggcugggccuggagauccgggu

SEQ ID NO: 105832 - RNA, 22 nt, Human
agggaggaaagggagaaaagga

SEQ ID NO: 105833 - RNA, 20 nt, Human
aggugguggcugugagccag

SEQ ID NO: 105834 - RNA, 24 nt, Human
aggugguggcugugagccaggagg

SEQ ID NO: 105835 - RNA, 19 nt, Human
aguaugccuagggcccagg

SEQ ID NO: 105836 - RNA, 22 nt, Human
agucaggacaccuggcuccugg

SEQ ID NO: 105837 - RNA, 21 nt, Human
auccggguggcugggaggcca

SEQ ID NO: 105838 - RNA, 20 nt, Human
cacacuugacucccacuccc

SEQ ID NO: 105839 - RNA, 22 nt, Human
cagccccacugccucccugggg

SEQ ID NO: 105840 - RNA, 22 nt, Human
cagccccugcccucuucccacc

SEQ ID NO: 105841 - RNA, 21 nt, Human
cagccuuagcggggagggaga

SEQ ID NO: 105842 - RNA, 22 nt, Human
caggacaccuggcuccuggucc

SEQ ID NO: 105843 - RNA, 19 nt, Human
cagggccggaggcaggcag

SEQ ID NO: 105844 - RNA, 22 nt, Human
caggggaaagucaucaccacgg

SEQ ID NO: 105845 - RNA, 21 nt, Human
cagggggcaccaucucacacc

SEQ ID NO: 105846 - RNA, 22 nt, Human
caucuggcuuuucucccagcgg

SEQ ID NO: 105847 - RNA, 18 nt, Human
ccagcagggaacagaaaa

SEQ ID NO: 105848 - RNA, 22 nt, Human
ccaguucaguuucuggcugugc

SEQ ID NO: 105849 - RNA, 24 nt, Human
cccacugccucccugggggccugc

SEQ ID NO: 105850 - RNA, 18 nt, Human
cccaggugggcgggcucu

SEQ ID NO: 105851 - RNA, 24 nt, Human
ccccacugccucccugggggccug

SEQ ID NO: 105852 - RNA, 21 nt, Human
ccccagcucccugucaucugg

SEQ ID NO: 105853 - RNA, 18 nt, Human
ccccagggggcaccaucu

SEQ ID NO: 105854 - RNA, 22 nt, Human
cccccuggcacgccagccuuag

SEQ ID NO: 105855 - RNA, 23 nt, Human
ccccuccuucaccagggcaccca

SEQ ID NO: 105856 - RNA, 22 nt, Human
cccuggggcugaggaugcagcc

SEQ ID NO: 105857 - RNA, 19 nt, Human
ccuggagauccggguggcu

SEQ ID NO: 105858 - RNA, 19 nt, Human
ccuggcacgccagccuuag

SEQ ID NO: 105859 - RNA, 24 nt, Human
ccuggcccgcccugcuggcuccug

SEQ ID NO: 105860 - RNA, 22 nt, Human
ccugugcuggcagcgggagagg

SEQ ID NO: 105861 - RNA, 26 nt, Human
ccuuccagugucauugucuugcugau

SEQ ID NO: 105862 - RNA, 21 nt, Human
cgcuacagggcuuccucaggg

SEQ ID NO: 105863 - RNA, 19 nt, Human
cggggacugggguggaggg

SEQ ID NO: 105864 - RNA, 24 nt, Human
cggggacugggguggagggaugca

SEQ ID NO: 105865 - RNA, 24 nt, Human
cuccugguccuguugcugccucgg

SEQ ID NO: 105866 - RNA, 19 nt, Human
cugccuaaaggcaaacaag

SEQ ID NO: 105867 - RNA, 24 nt, Human
cuggcugggccaggccuguguggg

SEQ ID NO: 105868 - RNA, 20 nt, Human
gacccaggguccugggaagc

SEQ ID NO: 105869 - RNA, 21 nt, Human
gagagggagggaggaaaggga

SEQ ID NO: 105870 - RNA, 22 nt, Human
gaggaugcagccccugcccucu

SEQ ID NO: 105871 - RNA, 19 nt, Human
gaggcaggcagcaugcggg

SEQ ID NO: 105872 - RNA, 20 nt, Human
gaggcaggcagcaugcggga

SEQ ID NO: 105873 - RNA, 19 nt, Human
gaggcuucucuggggcagg

SEQ ID NO: 105874 - RNA, 20 nt, Human
gagggagaaagggaaagaga

SEQ ID NO: 105875 - RNA, 21 nt, Human
gaguaugccuagggcccaggu

SEQ ID NO: 105876 - RNA, 20 nt, Human
gauagcaggcacacuugacu

SEQ ID NO: 105877 - RNA, 22 nt, Human
gcaaacaaggaguccaaagccc

SEQ ID NO: 105878 - RNA, 19 nt, Human
gcagggcccuggggcugag

SEQ ID NO: 105879 - RNA, 25 nt, Human
gcagggccggaggcaggcagcaugc

SEQ ID NO: 105880 - RNA, 20 nt, Human
gccucccugggggccugcgg

SEQ ID NO: 105881 - RNA, 18 nt, Human
gcugggccaggccugugu

SEQ ID NO: 105882 - RNA, 18 nt, Human
ggaaagggagaaaaggaa

SEQ ID NO: 105883 - RNA, 20 nt, Human
ggacugggguggagggaugc

SEQ ID NO: 105884 - RNA, 23 nt, Human
ggagaguaugccuagggcccagg

SEQ ID NO: 105885 - RNA, 25 nt, Human
ggagauccggguggcugggaggcca

SEQ ID NO: 105886 - RNA, 22 nt, Human
gggaagccaggugaggccugag

SEQ ID NO: 105887 - RNA, 27 nt, Human
gggagaaaaggaagggaggggagcugg

SEQ ID NO: 105888 - RNA, 18 nt, Human
gggagcugcgcccugugc

SEQ ID NO: 105889 - RNA, 26 nt, Human
gggccggaggcaggcagcaugcggga

SEQ ID NO: 105890 - RNA, 24 nt, Human
gggcugcccaggaaggugacccag

SEQ ID NO: 105891 - RNA, 18 nt, Human
ggguuggagagccccuuc

SEQ ID NO: 105892 - RNA, 22 nt, Human
guccugggaagccaggugaggc

SEQ ID NO: 105893 - RNA, 18 nt, Human
uaggguccucagccccac

SEQ ID NO: 105894 - RNA, 22 nt, Human
uagguucuggagugugcccccc

SEQ ID NO: 105895 - RNA, 23 nt, Human
ucccagcggccaguucaguuucu

SEQ ID NO: 105896 - RNA, 19 nt, Human
uccccggguuucccucccc

SEQ ID NO: 105897 - RNA, 18 nt, Human
ucccugggggccugcggc

SEQ ID NO: 105898 - RNA, 22 nt, Human
ucucacaccgcaaucugggccg

SEQ ID NO: 105899 - RNA, 20 nt, Human
ucuccagggacccaaacacc

SEQ ID NO: 105900 - RNA, 26 nt, Human
ucuccagggacccaaacaccuggcuc

SEQ ID NO: 105901 - RNA, 23 nt, Human
ucucccagcggccaguucaguuu

SEQ ID NO: 105902 - RNA, 22 nt, Human
ucucugggcugcccaggaaggu

SEQ ID NO: 105903 - RNA, 18 nt, Human
ucuggagugugccccccu

SEQ ID NO: 105904 - RNA, 19 nt, Human
ucuggagugugccccccuc

SEQ ID NO: 105905 - RNA, 22 nt, Human
ugaaaggaaagaacauuugggg

SEQ ID NO: 105906 - RNA, 20 nt, Human
ugaagagcgcauucccaccc

SEQ ID NO: 105907 - RNA, 26 nt, Human
ugaagaggggucuguaggguccucaa

SEQ ID NO: 105908 - RNA, 22 nt, Human
ugagccaggagggagggacuga

SEQ ID NO: 105909 - RNA, 19 nt, Human
ugaggcuucucuggggcag

SEQ ID NO: 105910 - RNA, 23 nt, Human
ugaggcuucucuggggcaggggg

SEQ ID NO: 105911 - RNA, 22 nt, Human
ugauuggcaugucccacccccu

SEQ ID NO: 105912 - RNA, 21 nt, Human
ugcagccccugcccucuuccc

SEQ ID NO: 105913 - RNA, 21 nt, Human
uggaaaguuggcagggucucu

SEQ ID NO: 105914 - RNA, 20 nt, Human
uggagugugccccccuccuu

SEQ ID NO: 105915 - RNA, 18 nt, Human
uggauagcaggcacacuu

SEQ ID NO: 105916 - RNA, 18 nt, Human
uggcuagguggggcuggg

SEQ ID NO: 105917 - RNA, 20 nt, Human
uggcuccugacuuccugccu

SEQ ID NO: 105918 - RNA, 22 nt, Human
uggcugugagccaggagggagg

SEQ ID NO: 105919 - RNA, 19 nt, Human
ugggaauagcgaagucugg

SEQ ID NO: 105920 - RNA, 19 nt, Human
ugggaggccaugcaugggu

SEQ ID NO: 105921 - RNA, 25 nt, Human
uggggcagggccggaggcaggcagc

SEQ ID NO: 105922 - RNA, 21 nt, Human
uggggccaggcugggccugga

SEQ ID NO: 105923 - RNA, 21 nt, Human
ugggguuggagagccccuucc

SEQ ID NO: 105924 - RNA, 24 nt, Human
ugggguuggagagccccuuccucc

SEQ ID NO: 105925 - RNA, 23 nt, Human
ugucauugucuugcugaugcuug

SEQ ID NO: 105926 - RNA, 28 nt, Human
ugucccacccccuggcacgccagccuua

SEQ ID NO: 105927 - RNA, 22 nt, Human
ugugacuagccaagccggaccc

SEQ ID NO: 105928 - RNA, 19 nt, Human
uucccggggacuggggugg

SEQ ID NO: 105929 - RNA, 24 nt, Human
uucccggggacugggguggaggga

SEQ ID NO: 105930 - RNA, 20 nt, Human
uuccuccaggcacgcuacag

SEQ ID NO: 105931 - RNA, 20 nt, Human
aagcucagcucauuuucugc

SEQ ID NO: 105932 - RNA, 18 nt, Human
aaucuuccucuccugccc

SEQ ID NO: 105933 - RNA, 18 nt, Human
agacaaaucuuccucucc

SEQ ID NO: 105934 - RNA, 26 nt, Human
agacagcagaacuaaagggagaagca

SEQ ID NO: 105935 - RNA, 21 nt, Human
agcaaguagacaaaucuuccu

SEQ ID NO: 105936 - RNA, 24 nt, Human
aggguucacucuucagggagacag

SEQ ID NO: 105937 - RNA, 20 nt, Human
augaaaacacuucaaggcca

SEQ ID NO: 105938 - RNA, 18 nt, Human
ccagggcagagugguggc

SEQ ID NO: 105939 - RNA, 19 nt, Human
ggaccagggcagaguggug

SEQ ID NO: 105940 - RNA, 20 nt, Human
gggagacagcagaacuaaag

SEQ ID NO: 105941 - RNA, 21 nt, Human
guucacucuucagggagacag

SEQ ID NO: 105942 - RNA, 20 nt, Human
uaaacuuacauaaagguaaa

SEQ ID NO: 105943 - RNA, 21 nt, Human
uauggaauauaacacguuuga

SEQ ID NO: 105944 - RNA, 21 nt, Human
aagcccugcaaagcagccacc

SEQ ID NO: 105945 - RNA, 20 nt, Human
agcaguggggagagacuggg

SEQ ID NO: 105946 - RNA, 23 nt, Human
aggagcaguggggagagacuggc

SEQ ID NO: 105947 - RNA, 19 nt, Human
aggucucuggaugugaggc

SEQ ID NO: 105948 - RNA, 23 nt, Human
caaacaauucugucccuccaaga

SEQ ID NO: 105949 - RNA, 23 nt, Human
caaagcagccaccuaggaaggaa

SEQ ID NO: 105950 - RNA, 25 nt, Human
caaagcagccaccuaggaaggaaga

SEQ ID NO: 105951 - RNA, 21 nt, Human
caauacccagcacaaacaauu

SEQ ID NO: 105952 - RNA, 20 nt, Human
cacaaacaauucugucccuc

SEQ ID NO: 105953 - RNA, 25 nt, Human
cacgcuuacuuuauugagucaggga

SEQ ID NO: 105954 - RNA, 23 nt, Human
cagcacaaacaauucugucccuc

SEQ ID NO: 105955 - RNA, 18 nt, Human
caggaaaugcagcaguac

SEQ ID NO: 105956 - RNA, 19 nt, Human
cccaaagaccagcaaccac

SEQ ID NO: 105957 - RNA, 23 nt, Human
cccacugagagcuccaauaccca

SEQ ID NO: 105958 - RNA, 19 nt, Human
cccugagccccucagcagg

SEQ ID NO: 105959 - RNA, 22 nt, Human
ccuuuaguuaggguguguagac

SEQ ID NO: 105960 - RNA, 20 nt, Human
cuaggaaggaagacaggaaa

SEQ ID NO: 105961 - RNA, 24 nt, Human
cuccaauacccagcacaaacaauu

SEQ ID NO: 105962 - RNA, 18 nt, Human
cuccccacugagagcucc

SEQ ID NO: 105963 - RNA, 23 nt, Human
cuggaggagcuguggcugcagca

SEQ ID NO: 105964 - RNA, 23 nt, Human
cuuguggauugugaagucaagug

SEQ ID NO: 105965 - RNA, 20 nt, Human
gacuguacucugugaucuug

SEQ ID NO: 105966 - RNA, 19 nt, Human
gagcaguggggagagacug

SEQ ID NO: 105967 - RNA, 20 nt, Human
gagcaguggggagagacugg

SEQ ID NO: 105968 - RNA, 25 nt, Human
gcccuggcacugcaagagcgggggc

SEQ ID NO: 105969 - RNA, 26 nt, Human
gcuagguacacgcuuacuucccaugg

SEQ ID NO: 105970 - RNA, 22 nt, Human
ggaagacaggaaaugcagcagu

SEQ ID NO: 105971 - RNA, 18 nt, Human
ggagcuguggcugcagca

SEQ ID NO: 105972 - RNA, 18 nt, Human
ggccguggcugucccuuu

SEQ ID NO: 105973 - RNA, 20 nt, Human
ggccuuuguagaguuccucu

SEQ ID NO: 105974 - RNA, 22 nt, Human
uacucugugaucuuggccuuug

SEQ ID NO: 105975 - RNA, 27 nt, Human
uaggaaggaagacaggaaaugcagcag

SEQ ID NO: 105976 - RNA, 19 nt, Human
ucccuuguggauugugaag

SEQ ID NO: 105977 - RNA, 18 nt, Human
uccuggccagaccuaggg

SEQ ID NO: 105978 - RNA, 23 nt, Human
ucuguagggccuccugcucugga

SEQ ID NO: 105979 - RNA, 28 nt, Human
ugagagcuccaauacccagcacaaacaa

SEQ ID NO: 105980 - RNA, 22 nt, Human
uggcacugcaagagcgggggca

SEQ ID NO: 105981 - RNA, 22 nt, Human
uggccagaccuagggcaaaauu

SEQ ID NO: 105982 - RNA, 18 nt, Human
uggcccaaagaccagcaa

SEQ ID NO: 105983 - RNA, 21 nt, Human
uuggccguggcugucccuuuc

SEQ ID NO: 105984 - RNA, 22 nt, Human
uuuuuuuuuuuuuuuugcuagg

SEQ ID NO: 105985 - RNA, 20 nt, Human
uuuuuuuuuuuuuuuuugcu

SEQ ID NO: 105986 - RNA, 20 nt, Human
uuuuuuuuuuuuuuuuuugg

SEQ ID NO: 105987 - RNA, 25 nt, Human
aaagcccuuccacauccaagaaccc

SEQ ID NO: 105988 - RNA, 22 nt, Human
aacauuguucaaagcccuucca

SEQ ID NO: 105989 - RNA, 18 nt, Human
aaccauccaucccucccc

SEQ ID NO: 105990 - RNA, 20 nt, Human
aaggaaggagaggaaugacg

SEQ ID NO: 105991 - RNA, 19 nt, Human
acagaggcugaagagugag

SEQ ID NO: 105992 - RNA, 24 nt, Human
acaucaggugcaggccugccuccc

SEQ ID NO: 105993 - RNA, 21 nt, Human
acccugcaaacucggacagac

SEQ ID NO: 105994 - RNA, 20 nt, Human
accucaccuggcucuccaac

SEQ ID NO: 105995 - RNA, 19 nt, Human
agagguggguuuuccuggg

SEQ ID NO: 105996 - RNA, 18 nt, Human
agauucugggcagcugac

SEQ ID NO: 105997 - RNA, 21 nt, Human
agcccagccaccuguauccaa

SEQ ID NO: 105998 - RNA, 20 nt, Human
agcccaggcagcccagcaca

SEQ ID NO: 105999 - RNA, 21 nt, Human
agccugacuuagagagaccuc

SEQ ID NO: 106000 - RNA, 21 nt, Human
auauggagccccugcaggcca

SEQ ID NO: 106001 - RNA, 22 nt, Human
augcagagaaccagccuggcuu

SEQ ID NO: 106002 - RNA, 25 nt, Human
caagcgauucugcaggugaaaccca

SEQ ID NO: 106003 - RNA, 18 nt, Human
cacugaggacagcccagg

SEQ ID NO: 106004 - RNA, 22 nt, Human
cagaagaaaacaggucauugaa

SEQ ID NO: 106005 - RNA, 21 nt, Human
cagacuccaaacuucaacccc

SEQ ID NO: 106006 - RNA, 26 nt, Human
cagcccagcacaagcgauucugcagg

SEQ ID NO: 106007 - RNA, 20 nt, Human
cagccugacuuagagagacc

SEQ ID NO: 106008 - RNA, 19 nt, Human
cagcucagcacccugcaaa

SEQ ID NO: 106009 - RNA, 26 nt, Human
caucuccaaaucuaaacauuguucaa

SEQ ID NO: 106010 - RNA, 20 nt, Human
cauggcucucagcucugcca

SEQ ID NO: 106011 - RNA, 19 nt, Human
cauggucaaacagaggcug

SEQ ID NO: 106012 - RNA, 21 nt, Human
ccacaucaggugcaggccugc

SEQ ID NO: 106013 - RNA, 19 nt, Human
ccaccuguauccaaccauc

SEQ ID NO: 106014 - RNA, 24 nt, Human
ccaucccuccccgguagggaagau

SEQ ID NO: 106015 - RNA, 20 nt, Human
cccagccugacuuagagaga

SEQ ID NO: 106016 - RNA, 19 nt, Human
ccccaggaggggaugaggg

SEQ ID NO: 106017 - RNA, 21 nt, Human
ccccaggaggggaugagggcu

SEQ ID NO: 106018 - RNA, 22 nt, Human
ccccugcuggaccauacagcuc

SEQ ID NO: 106019 - RNA, 18 nt, Human
cccgcuuccuccccuucc

SEQ ID NO: 106020 - RNA, 23 nt, Human
ccgaaccugugguuacagaagaa

SEQ ID NO: 106021 - RNA, 22 nt, Human
ccucaccuggcuguucucccug

SEQ ID NO: 106022 - RNA, 20 nt, Human
ccucccaccucaccuggcug

SEQ ID NO: 106023 - RNA, 21 nt, Human
ccuccccuuccggaagagccc

SEQ ID NO: 106024 - RNA, 24 nt, Human
ccucccgcuuccuccccuuccgga

SEQ ID NO: 106025 - RNA, 25 nt, Human
ccugcaaacucggacagacuccaaa

SEQ ID NO: 106026 - RNA, 20 nt, Human
ccuggaggcucaaaugugcu

SEQ ID NO: 106027 - RNA, 21 nt, Human
ccugugguuacagaagaaaac

SEQ ID NO: 106028 - RNA, 20 nt, Human
cuccaaccucccaccucacc

SEQ ID NO: 106029 - RNA, 19 nt, Human
cucccaccucaccuggcug

SEQ ID NO: 106030 - RNA, 19 nt, Human
cucucagcucugccagacc

SEQ ID NO: 106031 - RNA, 18 nt, Human
cugaagagugaggguuua

SEQ ID NO: 106032 - RNA, 22 nt, Human
cugcagagagguggguuuuccu

SEQ ID NO: 106033 - RNA, 22 nt, Human
cuggauucugugaggauucugc

SEQ ID NO: 106034 - RNA, 18 nt, Human
cuggccccaggaggggau

SEQ ID NO: 106035 - RNA, 19 nt, Human
cuguucucccuggcacuuu

SEQ ID NO: 106036 - RNA, 18 nt, Human
gacaaaagucaccccaga

SEQ ID NO: 106037 - RNA, 20 nt, Human
gaccauguccccagcagagc

SEQ ID NO: 106038 - RNA, 21 nt, Human
gagccauuuugcagcaaggaa

SEQ ID NO: 106039 - RNA, 19 nt, Human
gaggucaggucagggcuuu

SEQ ID NO: 106040 - RNA, 21 nt, Human
gaggucaggucagggcuuugc

SEQ ID NO: 106041 - RNA, 21 nt, Human
gcccuuccacauccaagaacc

SEQ ID NO: 106042 - RNA, 21 nt, Human
ggagaagccuggaggcucaaa

SEQ ID NO: 106043 - RNA, 19 nt, Human
ggagauucugggcagcuga

SEQ ID NO: 106044 - RNA, 23 nt, Human
gggcucaucuccaaaucuaaaca

SEQ ID NO: 106045 - RNA, 21 nt, Human
ggggacagcugggcaagcucu

SEQ ID NO: 106046 - RNA, 19 nt, Human
gucaccccagaaauagagu

SEQ ID NO: 106047 - RNA, 18 nt, Human
gucgagcagaagacuuac

SEQ ID NO: 106048 - RNA, 23 nt, Human
gugcaggccugccucccgcuucc

SEQ ID NO: 106049 - RNA, 23 nt, Human
uacagcucagcacccugcaaacu

SEQ ID NO: 106050 - RNA, 21 nt, Human
uccaagaacccuccccuuugc

SEQ ID NO: 106051 - RNA, 22 nt, Human
uccaagaacccuccccuuugcc

SEQ ID NO: 106052 - RNA, 19 nt, Human
uccacaucaggugcaggcc

SEQ ID NO: 106053 - RNA, 19 nt, Human
uccacauccaagaacccuc

SEQ ID NO: 106054 - RNA, 21 nt, Human
uccccgguagggaagaucugc

SEQ ID NO: 106055 - RNA, 21 nt, Human
uccccuuugcccugggagcca

SEQ ID NO: 106056 - RNA, 19 nt, Human
uccggaagagcccuuauua

SEQ ID NO: 106057 - RNA, 22 nt, Human
uccugggggccggcuggugcag

SEQ ID NO: 106058 - RNA, 22 nt, Human
ucuccaaccucccaccucaccu

SEQ ID NO: 106059 - RNA, 23 nt, Human
ucucccuggcacuuugggcucau

SEQ ID NO: 106060 - RNA, 19 nt, Human
ugaaacccaagccuggccc

SEQ ID NO: 106061 - RNA, 21 nt, Human
ugacuuagagagaccucaccu

SEQ ID NO: 106062 - RNA, 20 nt, Human
ugagaggcauuuggcuuccc

SEQ ID NO: 106063 - RNA, 22 nt, Human
ugagaggcauuuggcuucccgg

SEQ ID NO: 106064 - RNA, 24 nt, Human
ugcagcaaggaaggagaggaauga

SEQ ID NO: 106065 - RNA, 23 nt, Human
ugcaggugaaacccaagccuggc

SEQ ID NO: 106066 - RNA, 24 nt, Human
uggaccauacagcucagcacccug

SEQ ID NO: 106067 - RNA, 23 nt, Human
uggagccccugcaggccauggcu

SEQ ID NO: 106068 - RNA, 20 nt, Human
uggcagguacagaauagagc

SEQ ID NO: 106069 - RNA, 24 nt, Human
uggcuuggagauucugggcagcug

SEQ ID NO: 106070 - RNA, 20 nt, Human
uggggcuguccagcucuggc

SEQ ID NO: 106071 - RNA, 18 nt, Human
uucauggucaaacagagg

SEQ ID NO: 106072 - RNA, 22 nt, Human
uuccagauggauggaauagccc

SEQ ID NO: 106073 - RNA, 23 nt, Human
uuccuggggcuguccagcucugg

SEQ ID NO: 106074 - RNA, 21 nt, Human
uugcaccauggaccauguccc

SEQ ID NO: 106075 - RNA, 20 nt, Human
uugggcucaucuccaaaucu

SEQ ID NO: 106076 - RNA, 21 nt, Human
aaaaacuagugagacaagauu

SEQ ID NO: 106077 - RNA, 19 nt, Human
aaauacucuugacauuuuu

SEQ ID NO: 106078 - RNA, 24 nt, Human
aacaauggagacauucuugguuau

SEQ ID NO: 106079 - RNA, 22 nt, Human
aaccucgaaaugccaaaaacaa

SEQ ID NO: 106080 - RNA, 18 nt, Human
aagcagccuccuccugcc

SEQ ID NO: 106081 - RNA, 18 nt, Human
aaugcaugguaagaaaug

SEQ ID NO: 106082 - RNA, 22 nt, Human
acaaugcacaggauacccccau

SEQ ID NO: 106083 - RNA, 24 nt, Human
acccaguuuaugguguacuaagac

SEQ ID NO: 106084 - RNA, 26 nt, Human
acccucaccagacaccaaauuugcug

SEQ ID NO: 106085 - RNA, 19 nt, Human
accuuggaccucccaaccu

SEQ ID NO: 106086 - RNA, 19 nt, Human
agaccccacagagauagcu

SEQ ID NO: 106087 - RNA, 19 nt, Human
agauagaagguggggccuu

SEQ ID NO: 106088 - RNA, 27 nt, Human
agcuagaaggcacccuuucuccccugg

SEQ ID NO: 106089 - RNA, 23 nt, Human
aggaagcagccuccuccugcccu

SEQ ID NO: 106090 - RNA, 20 nt, Human
agguggggccuuggaaaggu

SEQ ID NO: 106091 - RNA, 18 nt, Human
aguaaaccucgaaaugcc

SEQ ID NO: 106092 - RNA, 23 nt, Human
auaaguaaaccucgaaaugccaa

SEQ ID NO: 106093 - RNA, 22 nt, Human
caaaauguccguagugcuaagg

SEQ ID NO: 106094 - RNA, 20 nt, Human
caaccuccaaaacugagaag

SEQ ID NO: 106095 - RNA, 21 nt, Human
cacagcuagaaggcacccuuu

SEQ ID NO: 106096 - RNA, 23 nt, Human
cacauauuuauccagcccaaaau

SEQ ID NO: 106097 - RNA, 18 nt, Human
cacccuuugaggaagagg

SEQ ID NO: 106098 - RNA, 23 nt, Human
cagacaccaaauuugcuggugcc

SEQ ID NO: 106099 - RNA, 18 nt, Human
caggaaaaacuagugaga

SEQ ID NO: 106100 - RNA, 23 nt, Human
caguaaagaacgagaaaugcaug

SEQ ID NO: 106101 - RNA, 24 nt, Human
caguuuuguuucaacaacuaaaag

SEQ ID NO: 106102 - RNA, 19 nt, Human
cauauuuauccagcccaaa

SEQ ID NO: 106103 - RNA, 20 nt, Human
caugggggcucugcucucau

SEQ ID NO: 106104 - RNA, 21 nt, Human
ccaaauuugcuggugccuuga

SEQ ID NO: 106105 - RNA, 19 nt, Human
ccccgcgcggcuccagcgc

SEQ ID NO: 106106 - RNA, 18 nt, Human
ccgcuucgccgccgcugg

SEQ ID NO: 106107 - RNA, 18 nt, Human
ccuccaaaacugagaagu

SEQ ID NO: 106108 - RNA, 21 nt, Human
ccuccuccugcccugacacaa

SEQ ID NO: 106109 - RNA, 21 nt, Human
ccucgaaaugccaaaaacaaa

SEQ ID NO: 106110 - RNA, 28 nt, Human
cgcggcggucgcagagacggccucuccc

SEQ ID NO: 106111 - RNA, 20 nt, Human
cggcggucgcagagacggcc

SEQ ID NO: 106112 - RNA, 22 nt, Human
cggucgggagcgggcgcggcgg

SEQ ID NO: 106113 - RNA, 22 nt, Human
cgugcgggcggagacgcgcggg

SEQ ID NO: 106114 - RNA, 19 nt, Human
cuccagcgcagaccccaga

SEQ ID NO: 106115 - RNA, 22 nt, Human
cugugguccaaauguguccucc

SEQ ID NO: 106116 - RNA, 21 nt, Human
cuugaccuuggaccucccaac

SEQ ID NO: 106117 - RNA, 21 nt, Human
cuuugaggaagaggacccuca

SEQ ID NO: 106118 - RNA, 21 nt, Human
gagaucuguagugauaacuga

SEQ ID NO: 106119 - RNA, 18 nt, Human
gaggacacagcuagaagg

SEQ ID NO: 106120 - RNA, 18 nt, Human
gcacaggaaaaacuagug

SEQ ID NO: 106121 - RNA, 20 nt, Human
gcggacccggacggucggga

SEQ ID NO: 106122 - RNA, 20 nt, Human
ggccgggcuggccgcggacc

SEQ ID NO: 106123 - RNA, 18 nt, Human
ggcggagacgcgcggggc

SEQ ID NO: 106124 - RNA, 19 nt, Human
ggcugguggccgggcuggc

SEQ ID NO: 106125 - RNA, 27 nt, Human
uaaagcaauguuucucaaccaggggcc

SEQ ID NO: 106126 - RNA, 19 nt, Human
uaaauguucauuuaucggu

SEQ ID NO: 106127 - RNA, 22 nt, Human
uaacagaaaguacguucuuacu

SEQ ID NO: 106128 - RNA, 22 nt, Human
uaagaaauggguaacgaugggg

SEQ ID NO: 106129 - RNA, 21 nt, Human
uacaaugcacaggauaccccc

SEQ ID NO: 106130 - RNA, 19 nt, Human
uagcuugauaacagaaagu

SEQ ID NO: 106131 - RNA, 25 nt, Human
uagcuugauaacagaaaguacguuc

SEQ ID NO: 106132 - RNA, 24 nt, Human
uaggaagcagccuccuccugcccu

SEQ ID NO: 106133 - RNA, 19 nt, Human
ucaccagacaccaaauuug

SEQ ID NO: 106134 - RNA, 22 nt, Human
ucaguggugaugaucacguuaa

SEQ ID NO: 106135 - RNA, 23 nt, Human
ucauauguugaaaccuauuccca

SEQ ID NO: 106136 - RNA, 18 nt, Human
ucuccgcuucgccgccgc

SEQ ID NO: 106137 - RNA, 24 nt, Human
ugaagaagcaagguaugucauugg

SEQ ID NO: 106138 - RNA, 18 nt, Human
ugaaugacuuuucauauu

SEQ ID NO: 106139 - RNA, 22 nt, Human
ugaccuuggaccucccaaccuc

SEQ ID NO: 106140 - RNA, 21 nt, Human
ugagacaagauucaaacaguc

SEQ ID NO: 106141 - RNA, 19 nt, Human
ugaggacacagcuagaagg

SEQ ID NO: 106142 - RNA, 24 nt, Human
ugccuugaccuuggaccucccaac

SEQ ID NO: 106143 - RNA, 24 nt, Human
ugguccaaauguguccucccccaa

SEQ ID NO: 106144 - RNA, 20 nt, Human
ugugaaucaucugucagugg

SEQ ID NO: 106145 - RNA, 18 nt, Human
uugaggaagaggacccuc

SEQ ID NO: 106146 - RNA, 20 nt, Human
uugcacaggaaaaacuagug

SEQ ID NO: 106147 - RNA, 18 nt, Human
uugcuggugccuugaccu

SEQ ID NO: 106148 - RNA, 18 nt, Human
uuguuucaacaacuaaaa

SEQ ID NO: 106149 - RNA, 26 nt, Human
uuuagacccaguaaagaacgagaaau

SEQ ID NO: 106150 - RNA, 26 nt, Human
uuugcaauucuguccauuuuauuuuu

SEQ ID NO: 106151 - RNA, 23 nt, Human
uuuuuuuuuuuuuuuuugcaauu

SEQ ID NO: 106152 - RNA, 20 nt, Human
uuuuuuuuuuuuuuuuuugg

SEQ ID NO: 106153 - RNA, 21 nt, Human
aaagccauccuggccccgccc

SEQ ID NO: 106154 - RNA, 19 nt, Human
aacacagaaguaccccagg

SEQ ID NO: 106155 - RNA, 25 nt, Human
aagcagcuccacacucggucucccc

SEQ ID NO: 106156 - RNA, 26 nt, Human
aagcagcuccacacucggucucccca

SEQ ID NO: 106157 - RNA, 24 nt, Human
acagaacaggaaggaaaauuuggc

SEQ ID NO: 106158 - RNA, 25 nt, Human
acagaacaggaaggaaaauuuggca

SEQ ID NO: 106159 - RNA, 25 nt, Human
accagcuccccacagcuacuguagc

SEQ ID NO: 106160 - RNA, 23 nt, Human
acgcagagcccaaccccaucccc

SEQ ID NO: 106161 - RNA, 19 nt, Human
acuccguggcgcggccccg

SEQ ID NO: 106162 - RNA, 24 nt, Human
agagcccaaccccauccccacccc

SEQ ID NO: 106163 - RNA, 21 nt, Human
agcaggaaguccuucuucccg

SEQ ID NO: 106164 - RNA, 21 nt, Human
agcuacuguagcaggaagucc

SEQ ID NO: 106165 - RNA, 21 nt, Human
aggagagcucggcucggggac

SEQ ID NO: 106166 - RNA, 21 nt, Human
aggaugcccccaccagcuccc

SEQ ID NO: 106167 - RNA, 21 nt, Human
aggccucccucaccucuggag

SEQ ID NO: 106168 - RNA, 21 nt, Human
agggagcgccgggcuguggac

SEQ ID NO: 106169 - RNA, 22 nt, Human
agguggagguccucaaggaugc

SEQ ID NO: 106170 - RNA, 22 nt, Human
aguccuucuucccgaacccaga

SEQ ID NO: 106171 - RNA, 19 nt, Human
caaacguguggccccacag

SEQ ID NO: 106172 - RNA, 20 nt, Human
caacuggaagcagcuccaca

SEQ ID NO: 106173 - RNA, 21 nt, Human
caacuggaagcagcuccacac

SEQ ID NO: 106174 - RNA, 20 nt, Human
caccucugcuccaagccacu

SEQ ID NO: 106175 - RNA, 23 nt, Human
cacggcagccccaggccacgcag

SEQ ID NO: 106176 - RNA, 25 nt, Human
cacuagccccccguggagcccuggc

SEQ ID NO: 106177 - RNA, 22 nt, Human
cacucagcaggaggcuuccuuc

SEQ ID NO: 106178 - RNA, 20 nt, Human
cagacacagaacaggaagga

SEQ ID NO: 106179 - RNA, 24 nt, Human
cagggagaagccagcccggcccca

SEQ ID NO: 106180 - RNA, 19 nt, Human
caggggcugaagccacuag

SEQ ID NO: 106181 - RNA, 18 nt, Human
caugggccuguguggaaa

SEQ ID NO: 106182 - RNA, 19 nt, Human
cauucgggaccuucccagc

SEQ ID NO: 106183 - RNA, 20 nt, Human
ccaaccccauccccaccccu

SEQ ID NO: 106184 - RNA, 24 nt, Human
cccaaccccauccccaccccuggc

SEQ ID NO: 106185 - RNA, 24 nt, Human
cccacagaguccagggagaagcca

SEQ ID NO: 106186 - RNA, 19 nt, Human
ccccacagaguccagggag

SEQ ID NO: 106187 - RNA, 24 nt, Human
ccccaccagcuccccacagcuacu

SEQ ID NO: 106188 - RNA, 19 nt, Human
ccccagaggccgugucccc

SEQ ID NO: 106189 - RNA, 19 nt, Human
ccccaggccacgcaggcuc

SEQ ID NO: 106190 - RNA, 24 nt, Human
ccccaggggcugaagccacuagcc

SEQ ID NO: 106191 - RNA, 23 nt, Human
ccccauccccaccccuggcugga

SEQ ID NO: 106192 - RNA, 23 nt, Human
cccccguggagcccuggccaccu

SEQ ID NO: 106193 - RNA, 19 nt, Human
ccccgccgcuucgaggccc

SEQ ID NO: 106194 - RNA, 19 nt, Human
ccccucuuggcccuuggaa

SEQ ID NO: 106195 - RNA, 19 nt, Human
ccccuggggacaauggggg

SEQ ID NO: 106196 - RNA, 18 nt, Human
cccgccucagccggcugg

SEQ ID NO: 106197 - RNA, 21 nt, Human
cccggcccugcccgccucagc

SEQ ID NO: 106198 - RNA, 22 nt, Human
cccgugcgcgcccaacuucaug

SEQ ID NO: 106199 - RNA, 23 nt, Human
cccuggcccuacgccuggaaggc

SEQ ID NO: 106200 - RNA, 19 nt, Human
ccuccugacgagacccugg

SEQ ID NO: 106201 - RNA, 20 nt, Human
ccugacgagacccuggccca

SEQ ID NO: 106202 - RNA, 23 nt, Human
ccugacgagacccuggcccagga

SEQ ID NO: 106203 - RNA, 19 nt, Human
ccugcaggggugaggcugu

SEQ ID NO: 106204 - RNA, 21 nt, Human
ccuggccaccugccagagccc

SEQ ID NO: 106205 - RNA, 22 nt, Human
ccuggccaccugccagagcccu

SEQ ID NO: 106206 - RNA, 18 nt, Human
ccuggccccgccccucuu

SEQ ID NO: 106207 - RNA, 21 nt, Human
ccuggccccgccccucuuggc

SEQ ID NO: 106208 - RNA, 19 nt, Human
ccuggcccuacgccuggaa

SEQ ID NO: 106209 - RNA, 21 nt, Human
cgcagagcccaaccccauccc

SEQ ID NO: 106210 - RNA, 18 nt, Human
cgcggccccgcccggccc

SEQ ID NO: 106211 - RNA, 18 nt, Human
cggcagggagcgccgggc

SEQ ID NO: 106212 - RNA, 21 nt, Human
cggcagggagcgccgggcugu

SEQ ID NO: 106213 - RNA, 24 nt, Human
cggcauuucuggggcacucggcau

SEQ ID NO: 106214 - RNA, 21 nt, Human
cggccccgcccggcccugccc

SEQ ID NO: 106215 - RNA, 18 nt, Human
cucaaggaugcccccacc

SEQ ID NO: 106216 - RNA, 22 nt, Human
cucccucaccucuggauaccgc

SEQ ID NO: 106217 - RNA, 19 nt, Human
cugaagccacuagcccccc

SEQ ID NO: 106218 - RNA, 21 nt, Human
cugcgcagggggagagcugga

SEQ ID NO: 106219 - RNA, 20 nt, Human
gaacccagagcccagggcgg

SEQ ID NO: 106220 - RNA, 19 nt, Human
gacucagugggacgcagag

SEQ ID NO: 106221 - RNA, 21 nt, Human
gagcccuggcccuacgccugg

SEQ ID NO: 106222 - RNA, 19 nt, Human
gaguccagggagaagccag

SEQ ID NO: 106223 - RNA, 22 nt, Human
gccauccuggccccgccccucu

SEQ ID NO: 106224 - RNA, 23 nt, Human
gccccaggccacgcaggcucccg

SEQ ID NO: 106225 - RNA, 19 nt, Human
gccuggaaacauuucaggc

SEQ ID NO: 106226 - RNA, 19 nt, Human
gcggcggcgcggcagggag

SEQ ID NO: 106227 - RNA, 21 nt, Human
gcuggccccgugcacggcagc

SEQ ID NO: 106228 - RNA, 22 nt, Human
gcugugcccaucccaaggggga

SEQ ID NO: 106229 - RNA, 21 nt, Human
ggagggcaugggccugugugg

SEQ ID NO: 106230 - RNA, 18 nt, Human
ggauggggucugggggca

SEQ ID NO: 106231 - RNA, 20 nt, Human
ggccccgccccucuuggccc

SEQ ID NO: 106232 - RNA, 22 nt, Human
ggccuguguggaaaccccaggg

SEQ ID NO: 106233 - RNA, 24 nt, Human
gggagaagccagcccggccccagg

SEQ ID NO: 106234 - RNA, 23 nt, Human
gggcacucggcaugccggguucc

SEQ ID NO: 106235 - RNA, 20 nt, Human
ggggcgcggugcggcggcgg

SEQ ID NO: 106236 - RNA, 21 nt, Human
gguagaaggcggcgaccccca

SEQ ID NO: 106237 - RNA, 24 nt, Human
gugaggcugugcugagcucugccu

SEQ ID NO: 106238 - RNA, 18 nt, Human
gugcggcggcggcgcggc

SEQ ID NO: 106239 - RNA, 24 nt, Human
guggggcgcggugcggcggcggcg

SEQ ID NO: 106240 - RNA, 21 nt, Human
ucaauuauucauucugcucuc

SEQ ID NO: 106241 - RNA, 23 nt, Human
ucacucacaggcaggggaaaagc

SEQ ID NO: 106242 - RNA, 18 nt, Human
uccacacucggucucccc

SEQ ID NO: 106243 - RNA, 23 nt, Human
uccacacucggucuccccagagg

SEQ ID NO: 106244 - RNA, 21 nt, Human
uccccagaggccguguccccg

SEQ ID NO: 106245 - RNA, 19 nt, Human
uccccgccgcuucgaggcc

SEQ ID NO: 106246 - RNA, 22 nt, Human
uccccgccgcuucgaggcccgu

SEQ ID NO: 106247 - RNA, 18 nt, Human
ucccgcgccucgcgggcc

SEQ ID NO: 106248 - RNA, 20 nt, Human
ucccugacucccaugaggcc

SEQ ID NO: 106249 - RNA, 21 nt, Human
uccugggggaaccagggccca

SEQ ID NO: 106250 - RNA, 22 nt, Human
ucuccagacucgcuggggcuuc

SEQ ID NO: 106251 - RNA, 24 nt, Human
ugcaggggugaggcugugcugagc

SEQ ID NO: 106252 - RNA, 21 nt, Human
ugccaggacggagggcauggg

SEQ ID NO: 106253 - RNA, 25 nt, Human
ugccaggacggagggcaugggccug

SEQ ID NO: 106254 - RNA, 19 nt, Human
ugcccccaccagcucccca

SEQ ID NO: 106255 - RNA, 21 nt, Human
uggaaggcagaguccuggucu

SEQ ID NO: 106256 - RNA, 22 nt, Human
uggagcccuggccaccugccag

SEQ ID NO: 106257 - RNA, 18 nt, Human
uggauggggucugggggc

SEQ ID NO: 106258 - RNA, 22 nt, Human
uggcaaacguguggccccacag

SEQ ID NO: 106259 - RNA, 23 nt, Human
uggccccgugcacggcagcccca

SEQ ID NO: 106260 - RNA, 22 nt, Human
uggcuggauggggucugggggc

SEQ ID NO: 106261 - RNA, 24 nt, Human
ugggccuguguggaaaccccaggg

SEQ ID NO: 106262 - RNA, 22 nt, Human
uggggcaggcugugcccauccc

SEQ ID NO: 106263 - RNA, 18 nt, Human
uuccugacugucuccucc

SEQ ID NO: 106264 - RNA, 20 nt, Human
uucgaggcccgugcgcgccc

SEQ ID NO: 106265 - RNA, 18 nt, Human
aaagugcugggauuacag

SEQ ID NO: 106266 - RNA, 19 nt, Human
aaagugcugggauuacagg

SEQ ID NO: 106267 - RNA, 19 nt, Human
aaagugcugggauuacagg

SEQ ID NO: 106268 - RNA, 21 nt, Human
aaagugcugggauuacaggug

SEQ ID NO: 106269 - RNA, 22 nt, Human
aaagugcugggauuacaggugu

SEQ ID NO: 106270 - RNA, 23 nt, Human
aaagugcugggauuacaggugug

SEQ ID NO: 106271 - RNA, 24 nt, Human
aaagugcugggauuacagguguga

SEQ ID NO: 106272 - RNA, 25 nt, Human
aaauacaacuggaauucuccagcac

SEQ ID NO: 106273 - RNA, 24 nt, Human
aaaucagucuucaaauacaacugg

SEQ ID NO: 106274 - RNA, 18 nt, Human
aagugcugggauuacagg

SEQ ID NO: 106275 - RNA, 19 nt, Human
aagugcugggauuacaggu

SEQ ID NO: 106276 - RNA, 26 nt, Human
aagugcugggauuacaggugugagcc

SEQ ID NO: 106277 - RNA, 18 nt, Human
agaaaaguuuuaaaauca

SEQ ID NO: 106278 - RNA, 23 nt, Human
agacaaaacgagggcagacgcag

SEQ ID NO: 106279 - RNA, 23 nt, Human
aggugugagccaccgugcccggc

SEQ ID NO: 106280 - RNA, 21 nt, Human
caaaacgagggcagacgcagc

SEQ ID NO: 106281 - RNA, 26 nt, Human
cagcagccucagccuagcagcuucug

SEQ ID NO: 106282 - RNA, 23 nt, Human
cccgcgcgggaccgcgggcagcc

SEQ ID NO: 106283 - RNA, 19 nt, Human
cgagggcagacgcagcaga

SEQ ID NO: 106284 - RNA, 20 nt, Human
cgccgggacagcagccucag

SEQ ID NO: 106285 - RNA, 18 nt, Human
gauuacaggugugagcca

SEQ ID NO: 106286 - RNA, 21 nt, Human
gauuacaggugugagccaccg

SEQ ID NO: 106287 - RNA, 24 nt, Human
gauuacaggugugagccaccgugc

SEQ ID NO: 106288 - RNA, 21 nt, Human
gcuccgcgccacagcucccgc

SEQ ID NO: 106289 - RNA, 23 nt, Human
uacaggugugagccaccgugccc

SEQ ID NO: 106290 - RNA, 23 nt, Human
uagauuuuucacuaguccaguuc

SEQ ID NO: 106291 - RNA, 20 nt, Human
uaucaaguagucagcuuuuu

SEQ ID NO: 106292 - RNA, 18 nt, Human
ucagucccuugggaggcu

SEQ ID NO: 106293 - RNA, 18 nt, Human
ucagugaguacaggaaag

SEQ ID NO: 106294 - RNA, 22 nt, Human
ugaguacaggaaaguuuacaua

SEQ ID NO: 106295 - RNA, 21 nt, Human
ugcagaaaaguuuuaaaauca

SEQ ID NO: 106296 - RNA, 19 nt, Human
ugccaggauacaaauacua

SEQ ID NO: 106297 - RNA, 24 nt, Human
ugcugggauuacaggugugagcca

SEQ ID NO: 106298 - RNA, 18 nt, Human
ugggauuacaggugugag

SEQ ID NO: 106299 - RNA, 21 nt, Human
ugggauuacaggugugagcca

SEQ ID NO: 106300 - RNA, 22 nt, Human
ugggauuacaggugugagccac

SEQ ID NO: 106301 - RNA, 23 nt, Human
ugggauuacaggugugagccacc

SEQ ID NO: 106302 - RNA, 23 nt, Human
ugggauuacaggugugagccacc

SEQ ID NO: 106303 - RNA, 24 nt, Human
ugggauuacaggugugagccaccg

SEQ ID NO: 106304 - RNA, 24 nt, Human
uguguguuaacuaaauguauacuu

SEQ ID NO: 106305 - RNA, 19 nt, Human
uuauauuaaagauuagcug

SEQ ID NO: 106306 - RNA, 21 nt, Human
uuucauaauuuuauaggugcc

SEQ ID NO: 106307 - RNA, 24 nt, Human
uuugccaggauacaaauacuagau

SEQ ID NO: 106308 - RNA, 23 nt, Human
aaaauaaaaaguugaauugcaga

SEQ ID NO: 106309 - RNA, 18 nt, Human
aaagugcugagauucuac

SEQ ID NO: 106310 - RNA, 20 nt, Human
aaagugcugagauucuacua

SEQ ID NO: 106311 - RNA, 24 nt, Human
aacacgacugacagccagaaggga

SEQ ID NO: 106312 - RNA, 26 nt, Human
aaccguaagcaacacgacugacagcc

SEQ ID NO: 106313 - RNA, 20 nt, Human
aagcaaaaagcaaauguuga

SEQ ID NO: 106314 - RNA, 29 nt, Human
aagcaaaaagcaaauguugaagggacccc

SEQ ID NO: 106315 - RNA, 21 nt, Human
agaaaccguaagcaacacgac

SEQ ID NO: 106316 - RNA, 18 nt, Human
caaagugcugagauucua

SEQ ID NO: 106317 - RNA, 21 nt, Human
caaaucucgccaagccaaagg

SEQ ID NO: 106318 - RNA, 19 nt, Human
cacaagcaaaaagcaaaug

SEQ ID NO: 106319 - RNA, 22 nt, Human
cacccccaaaucucgccaagcc

SEQ ID NO: 106320 - RNA, 18 nt, Human
caucaagcuguuucucuc

SEQ ID NO: 106321 - RNA, 22 nt, Human
ccaagccaaaggccuugcccau

SEQ ID NO: 106322 - RNA, 22 nt, Human
ccccaaaucucgccaagccaaa

SEQ ID NO: 106323 - RNA, 19 nt, Human
cccgggccugcgccugcgg

SEQ ID NO: 106324 - RNA, 22 nt, Human
ccgaugguacggaugugccaag

SEQ ID NO: 106325 - RNA, 23 nt, Human
ccuaaaguaacaaagaaaccgua

SEQ ID NO: 106326 - RNA, 20 nt, Human
cuacuaccuaaaguaacaaa

SEQ ID NO: 106327 - RNA, 18 nt, Human
cucggcugucgcccgggc

SEQ ID NO: 106328 - RNA, 20 nt, Human
cucggcugucgcccgggccu

SEQ ID NO: 106329 - RNA, 19 nt, Human
gcacccccaaaucucgcca

SEQ ID NO: 106330 - RNA, 22 nt, Human
gguggugaggagccauggggag

SEQ ID NO: 106331 - RNA, 25 nt, Human
uaaaguaacaaagaaaccguaagca

SEQ ID NO: 106332 - RNA, 24 nt, Human
uaagagguuuuuaguuuuuguuuu

SEQ ID NO: 106333 - RNA, 22 nt, Human
uaccuaaaguaacaaagaaacc

SEQ ID NO: 106334 - RNA, 21 nt, Human
uagcacccccaaaucucgcca

SEQ ID NO: 106335 - RNA, 18 nt, Human
uccaggcagugggcuaau

SEQ ID NO: 106336 - RNA, 19 nt, Human
ugacagccagaagggaaca

SEQ ID NO: 106337 - RNA, 23 nt, Human
ugagaauaugaaacaaagugcug

SEQ ID NO: 106338 - RNA, 22 nt, Human
ugaguuuuccacauguacagaa

SEQ ID NO: 106339 - RNA, 23 nt, Human
ugggcaaaaugacuacucagugg

SEQ ID NO: 106340 - RNA, 23 nt, Human
uguccuggauuagcacccccaaa

SEQ ID NO: 106341 - RNA, 18 nt, Human
uuccacauguacagaacc

SEQ ID NO: 106342 - RNA, 18 nt, Human
uugaauugcagaaaagcu

SEQ ID NO: 106343 - RNA, 24 nt, Human
aacucucacuucaacuggcagggg

SEQ ID NO: 106344 - RNA, 21 nt, Human
accauggccacaaacugccag

SEQ ID NO: 106345 - RNA, 22 nt, Human
acccaaaggggcauuugguggg

SEQ ID NO: 106346 - RNA, 19 nt, Human
accccagccacuuccugga

SEQ ID NO: 106347 - RNA, 24 nt, Human
caacccuccagucuucaaggaaag

SEQ ID NO: 106348 - RNA, 20 nt, Human
cacagcccgguuuggaccau

SEQ ID NO: 106349 - RNA, 24 nt, Human
cagaaacgaaauaagaggcccaga

SEQ ID NO: 106350 - RNA, 23 nt, Human
caucgauaaaucgccgcagauca

SEQ ID NO: 106351 - RNA, 20 nt, Human
ccacaggaagaggcggucca

SEQ ID NO: 106352 - RNA, 24 nt, Human
ccaccacacuaaggaugacugaga

SEQ ID NO: 106353 - RNA, 18 nt, Human
ccggaagcagggccacag

SEQ ID NO: 106354 - RNA, 19 nt, Human
ccucccguagcuccggaag

SEQ ID NO: 106355 - RNA, 22 nt, Human
cucccguagcuccggaagcagg

SEQ ID NO: 106356 - RNA, 19 nt, Human
cuggcagggggccuggguc

SEQ ID NO: 106357 - RNA, 24 nt, Human
gaagaacagugagggggcuccggc

SEQ ID NO: 106358 - RNA, 21 nt, Human
gaggcagagaaggauagggcu

SEQ ID NO: 106359 - RNA, 21 nt, Human
gcguccaggaagaugacuagg

SEQ ID NO: 106360 - RNA, 21 nt, Human
gggcauuuggugggugugggg

SEQ ID NO: 106361 - RNA, 18 nt, Human
ggggucuggagggggcaa

SEQ ID NO: 106362 - RNA, 18 nt, Human
ggguguggggugagcggu

SEQ ID NO: 106363 - RNA, 20 nt, Human
ggucuggagggggcaagugg

SEQ ID NO: 106364 - RNA, 23 nt, Human
uaaaucgccgcagaucaggggca

SEQ ID NO: 106365 - RNA, 19 nt, Human
uaccauggccacaaacugc

SEQ ID NO: 106366 - RNA, 19 nt, Human
ucaaggaaaggggucugga

SEQ ID NO: 106367 - RNA, 22 nt, Human
ucaaggaaaggggucuggaggg

SEQ ID NO: 106368 - RNA, 18 nt, Human
uccacuaccauggccaca

SEQ ID NO: 106369 - RNA, 22 nt, Human
uccaggaagaugacuagggucc

SEQ ID NO: 106370 - RNA, 18 nt, Human
ucgugguccuccuguucc

SEQ ID NO: 106371 - RNA, 21 nt, Human
ugaaauauucaucuguucccc

SEQ ID NO: 106372 - RNA, 22 nt, Human
ugaaauauucaucuguuccccg

SEQ ID NO: 106373 - RNA, 18 nt, Human
ugagggggcuccggcauc

SEQ ID NO: 106374 - RNA, 19 nt, Human
ugccaguccuccuucagcg

SEQ ID NO: 106375 - RNA, 25 nt, Human
ugccaguccuccuucagcgcaucgu

SEQ ID NO: 106376 - RNA, 21 nt, Human
uggggugagcgguggugcagg

SEQ ID NO: 106377 - RNA, 21 nt, Human
ugggucucaacccuccagucu

SEQ ID NO: 106378 - RNA, 19 nt, Human
ugguggguguggggugagc

SEQ ID NO: 106379 - RNA, 21 nt, Human
ugucgagcgauguagcugaua

SEQ ID NO: 106380 - RNA, 21 nt, Human
aagccgcgcccgccuggagcu

SEQ ID NO: 106381 - RNA, 19 nt, Human
acucguccauccuccaccc

SEQ ID NO: 106382 - RNA, 19 nt, Human
agagcagccaaaacaaagc

SEQ ID NO: 106383 - RNA, 23 nt, Human
agccuugcuccccuccucaacac

SEQ ID NO: 106384 - RNA, 20 nt, Human
agcuaccauugugucaggcc

SEQ ID NO: 106385 - RNA, 21 nt, Human
agcuccugcccuuccaccccu

SEQ ID NO: 106386 - RNA, 20 nt, Human
aggauggaucugugggggca

SEQ ID NO: 106387 - RNA, 18 nt, Human
auggagaugaggaagggc

SEQ ID NO: 106388 - RNA, 28 nt, Human
caaaacaaagcaguugguccagccucca

SEQ ID NO: 106389 - RNA, 21 nt, Human
caaggggcugugggacugagc

SEQ ID NO: 106390 - RNA, 24 nt, Human
cagcagacaauccuguccccuucc

SEQ ID NO: 106391 - RNA, 18 nt, Human
cagcgccccucuuccugg

SEQ ID NO: 106392 - RNA, 20 nt, Human
caggccucucucuuccccuc

SEQ ID NO: 106393 - RNA, 20 nt, Human
caggugucaggucacaccca

SEQ ID NO: 106394 - RNA, 21 nt, Human
ccccucuuccugguagcucac

SEQ ID NO: 106395 - RNA, 21 nt, Human
ccuccacccaacacuacugug

SEQ ID NO: 106396 - RNA, 18 nt, Human
ccuccagguuggagcugc

SEQ ID NO: 106397 - RNA, 19 nt, Human
ccuccucaacacuauugcc

SEQ ID NO: 106398 - RNA, 18 nt, Human
ccuguccccuuccuggcc

SEQ ID NO: 106399 - RNA, 18 nt, Human
ccuuguccuauaccccuc

SEQ ID NO: 106400 - RNA, 21 nt, Human
cgaggagaaaccagcuucuug

SEQ ID NO: 106401 - RNA, 22 nt, Human
cgccccucuuccugguagcuca

SEQ ID NO: 106402 - RNA, 19 nt, Human
cuacugugcagcagagggu

SEQ ID NO: 106403 - RNA, 20 nt, Human
cuauaccccucuucucccau

SEQ ID NO: 106404 - RNA, 18 nt, Human
cucguccauccuccaccc

SEQ ID NO: 106405 - RNA, 19 nt, Human
cucugccaucucugucuuc

SEQ ID NO: 106406 - RNA, 18 nt, Human
cugaagccgcgcccgccu

SEQ ID NO: 106407 - RNA, 18 nt, Human
cugaagccgcgcccgccu

SEQ ID NO: 106408 - RNA, 23 nt, Human
cuggagcaggucucuggaucccu

SEQ ID NO: 106409 - RNA, 25 nt, Human
cuggagcaggucucuggaucccuua

SEQ ID NO: 106410 - RNA, 22 nt, Human
cuuccuggccccuugcccguca

SEQ ID NO: 106411 - RNA, 20 nt, Human
cuucuugccuauccugguau

SEQ ID NO: 106412 - RNA, 22 nt, Human
cuugcuccccuccucaacacua

SEQ ID NO: 106413 - RNA, 18 nt, Human
cuuuuccggcugcucuuc

SEQ ID NO: 106414 - RNA, 21 nt, Human
gagcaggcggaggcuuuuccg

SEQ ID NO: 106415 - RNA, 25 nt, Human
gagcugcuguguguggauggaggcc

SEQ ID NO: 106416 - RNA, 23 nt, Human
gaggguggcagggugaaagagca

SEQ ID NO: 106417 - RNA, 19 nt, Human
gcccacccaguccagcugc

SEQ ID NO: 106418 - RNA, 19 nt, Human
gcuccugcccuuccacccc

SEQ ID NO: 106419 - RNA, 18 nt, Human
ggaggcuuuuccggcugc

SEQ ID NO: 106420 - RNA, 21 nt, Human
gggcagcgccccucuuccugg

SEQ ID NO: 106421 - RNA, 18 nt, Human
ggggaaagaggaucugga

SEQ ID NO: 106422 - RNA, 23 nt, Human
gggggaggagggacuccagauga

SEQ ID NO: 106423 - RNA, 21 nt, Human
gguggugccggccgccgcggu

SEQ ID NO: 106424 - RNA, 22 nt, Human
gucaggucacacccaggccucu

SEQ ID NO: 106425 - RNA, 19 nt, Human
guggugccggccgccgcgg

SEQ ID NO: 106426 - RNA, 20 nt, Human
gugguuccugggccucaggg

SEQ ID NO: 106427 - RNA, 27 nt, Human
ucccuuagaagcaaggggcugugggac

SEQ ID NO: 106428 - RNA, 19 nt, Human
uccggcugcucuuccaggg

SEQ ID NO: 106429 - RNA, 21 nt, Human
uccuauaccccucuucuccca

SEQ ID NO: 106430 - RNA, 19 nt, Human
uccugggccucagggagcc

SEQ ID NO: 106431 - RNA, 24 nt, Human
ucucucuuccccucccuucagagc

SEQ ID NO: 106432 - RNA, 18 nt, Human
ucugucuuccacuuagca

SEQ ID NO: 106433 - RNA, 23 nt, Human
ugagcuggaagccucccccaggg

SEQ ID NO: 106434 - RNA, 22 nt, Human
ugccggccgccgcggugguucc

SEQ ID NO: 106435 - RNA, 24 nt, Human
ugccucgccuacaccggcuggagc

SEQ ID NO: 106436 - RNA, 23 nt, Human
uggagagcagccaaaacaaagca

SEQ ID NO: 106437 - RNA, 23 nt, Human
uggagcaggucucuggaucccuu

SEQ ID NO: 106438 - RNA, 23 nt, Human
uggagcuggguccagguggugcc

SEQ ID NO: 106439 - RNA, 21 nt, Human
uggauggaggcgugggggagg

SEQ ID NO: 106440 - RNA, 22 nt, Human
uggccccuugcccgucacuccu

SEQ ID NO: 106441 - RNA, 20 nt, Human
uggggcccggcuaaacccua

SEQ ID NO: 106442 - RNA, 21 nt, Human
uggggcccggcuaaacccuac

SEQ ID NO: 106443 - RNA, 19 nt, Human
ugggggaggagggacucca

SEQ ID NO: 106444 - RNA, 20 nt, Human
uguguguggauggaggcgug

SEQ ID NO: 106445 - RNA, 21 nt, Human
uuagaagcaaggggcuguggg

SEQ ID NO: 106446 - RNA, 20 nt, Human
uuuuccggcugcucuuccag

SEQ ID NO: 106447 - RNA, 18 nt, Human
aacccaagaggacagcaa

SEQ ID NO: 106448 - RNA, 22 nt, Human
aagaaaauacagggguucaaaa

SEQ ID NO: 106449 - RNA, 22 nt, Human
uucaaaauccgaaguggaaccc

SEQ ID NO: 106450 - RNA, 19 nt, Human
aaaugccaagccucugagc

SEQ ID NO: 106451 - RNA, 24 nt, Human
aagaggaagaagguucagguagaa

SEQ ID NO: 106452 - RNA, 22 nt, Human
aagugcccacccggccacucac

SEQ ID NO: 106453 - RNA, 26 nt, Human
aagugcccacccggccacucacaucc

SEQ ID NO: 106454 - RNA, 18 nt, Human
acagcccaggcccccauc

SEQ ID NO: 106455 - RNA, 19 nt, Human
agaagauagggaaggccag

SEQ ID NO: 106456 - RNA, 18 nt, Human
agaaugauugggugguua

SEQ ID NO: 106457 - RNA, 23 nt, Human
agagauggugauggagaggcagg

SEQ ID NO: 106458 - RNA, 24 nt, Human
agcacuuugggaggccgaggcagg

SEQ ID NO: 106459 - RNA, 21 nt, Human
agccuggccaacaaaaauaca

SEQ ID NO: 106460 - RNA, 24 nt, Human
agccugggcgauauagcaagacuc

SEQ ID NO: 106461 - RNA, 19 nt, Human
agcugggcacgguggcggc

SEQ ID NO: 106462 - RNA, 22 nt, Human
aggcaggagaaucacuugagcc

SEQ ID NO: 106463 - RNA, 24 nt, Human
aggcaggagaaucacuugagccug

SEQ ID NO: 106464 - RNA, 24 nt, Human
aggcaggguaacgugacuguaggg

SEQ ID NO: 106465 - RNA, 26 nt, Human
aggcaggugggucaucugaggucagg

SEQ ID NO: 106466 - RNA, 22 nt, Human
aggcauaguggcucacaccugu

SEQ ID NO: 106467 - RNA, 24 nt, Human
aggcauaguggcucacaccuguaa

SEQ ID NO: 106468 - RNA, 21 nt, Human
aggccgaggcaggugggucau

SEQ ID NO: 106469 - RNA, 22 nt, Human
aggccgaggcaggugggucauc

SEQ ID NO: 106470 - RNA, 24 nt, Human
agguucaggcaggagaaucacuug

SEQ ID NO: 106471 - RNA, 24 nt, Human
aguggcucacaccuguaaucccag

SEQ ID NO: 106472 - RNA, 18 nt, Human
aucuagaagugugugagg

SEQ ID NO: 106473 - RNA, 18 nt, Human
auggcaaaugccaagccu

SEQ ID NO: 106474 - RNA, 26 nt, Human
auggugauggagaggcaggccggcac

SEQ ID NO: 106475 - RNA, 22 nt, Human
caaagugcccacccggccacuc

SEQ ID NO: 106476 - RNA, 21 nt, Human
caacccagaaagaagcagcaa

SEQ ID NO: 106477 - RNA, 19 nt, Human
caagccucugagcugggaa

SEQ ID NO: 106478 - RNA, 24 nt, Human
cacaccuguaaucccagcacuuug

SEQ ID NO: 106479 - RNA, 22 nt, Human
cacauccucucaccccacaacc

SEQ ID NO: 106480 - RNA, 28 nt, Human
cacccggccacucacauccucucacccc

SEQ ID NO: 106481 - RNA, 24 nt, Human
cacccgugagccgcgcggucgagu

SEQ ID NO: 106482 - RNA, 23 nt, Human
caccuguaaucccagcacuuugg

SEQ ID NO: 106483 - RNA, 24 nt, Human
caccuguaaucccagcacuuuggg

SEQ ID NO: 106484 - RNA, 24 nt, Human
cagcacuuugggaggccgaggcag

SEQ ID NO: 106485 - RNA, 26 nt, Human
cagcacuuugggaggccgaggcaggu

SEQ ID NO: 106486 - RNA, 19 nt, Human
cagccgccgcgacguccgc

SEQ ID NO: 106487 - RNA, 24 nt, Human
caggugggucaucugaggucagga

SEQ ID NO: 106488 - RNA, 21 nt, Human
cauccucucaccccacaaccc

SEQ ID NO: 106489 - RNA, 20 nt, Human
ccacucacauccucucaccc

SEQ ID NO: 106490 - RNA, 24 nt, Human
ccagaaagaagcagcaaagugccc

SEQ ID NO: 106491 - RNA, 19 nt, Human
ccccacaacccagggggcc

SEQ ID NO: 106492 - RNA, 23 nt, Human
ccucucaccccacaacccagggg

SEQ ID NO: 106493 - RNA, 21 nt, Human
cgaaaucagccuggccaacaa

SEQ ID NO: 106494 - RNA, 18 nt, Human
cgaggcaggugggucauc

SEQ ID NO: 106495 - RNA, 24 nt, Human
cgaggcaggugggucaucugaggu

SEQ ID NO: 106496 - RNA, 26 nt, Human
cgaggcaggugggucaucugagguca

SEQ ID NO: 106497 - RNA, 19 nt, Human
cggggccggguggcagccg

SEQ ID NO: 106498 - RNA, 22 nt, Human
cucacaccuguaaucccagcac

SEQ ID NO: 106499 - RNA, 24 nt, Human
cucacaccuguaaucccagcacuu

SEQ ID NO: 106500 - RNA, 21 nt, Human
cucaccccacaacccaggggg

SEQ ID NO: 106501 - RNA, 19 nt, Human
cugggggaagaggaagaag

SEQ ID NO: 106502 - RNA, 20 nt, Human
cuguaaucccagcuacuugg

SEQ ID NO: 106503 - RNA, 21 nt, Human
cuguaaucccagcuacuuggg

SEQ ID NO: 106504 - RNA, 23 nt, Human
cuguuccacggcuugggcugguu

SEQ ID NO: 106505 - RNA, 20 nt, Human
gaaagagcuugggaagcccu

SEQ ID NO: 106506 - RNA, 18 nt, Human
gaacuggacaaggggaag

SEQ ID NO: 106507 - RNA, 23 nt, Human
gaagcucccuccuacuggggcuu

SEQ ID NO: 106508 - RNA, 24 nt, Human
gaaggccaggcauaguggcucaca

SEQ ID NO: 106509 - RNA, 22 nt, Human
gacaaggggaaguggagagaga

SEQ ID NO: 106510 - RNA, 23 nt, Human
gacuccguuuaaaagaaaaaaaa

SEQ ID NO: 106511 - RNA, 22 nt, Human
gaggcugcuuuagaaugauugg

SEQ ID NO: 106512 - RNA, 19 nt, Human
gcccugacugauguggcug

SEQ ID NO: 106513 - RNA, 20 nt, Human
gccggguggcagccgccgcg

SEQ ID NO: 106514 - RNA, 20 nt, Human
gcggcuuucuguaaucccag

SEQ ID NO: 106515 - RNA, 22 nt, Human
gcugguuugaugggguugaugg

SEQ ID NO: 106516 - RNA, 21 nt, Human
gcuugggaagcccugggggaa

SEQ ID NO: 106517 - RNA, 21 nt, Human
ggccggguggcagccgccgcg

SEQ ID NO: 106518 - RNA, 21 nt, Human
ggcggcuuucuguaaucccag

SEQ ID NO: 106519 - RNA, 22 nt, Human
gggaagaggaagaagguucagg

SEQ ID NO: 106520 - RNA, 24 nt, Human
gggaagcccugggggaagaggaag

SEQ ID NO: 106521 - RNA, 22 nt, Human
gggaaggccucucagaggaggu

SEQ ID NO: 106522 - RNA, 18 nt, Human
gggaaguggagagagaug

SEQ ID NO: 106523 - RNA, 22 nt, Human
gggggaagaggaagaagguuca

SEQ ID NO: 106524 - RNA, 21 nt, Human
gguagaagauagggaaggcca

SEQ ID NO: 106525 - RNA, 24 nt, Human
ggucaucugaggucaggaguucga

SEQ ID NO: 106526 - RNA, 23 nt, Human
ggucgagugagcgccgguccugg

SEQ ID NO: 106527 - RNA, 18 nt, Human
ggugcagggaaggaagac

SEQ ID NO: 106528 - RNA, 24 nt, Human
gguggcggcuuucuguaaucccag

SEQ ID NO: 106529 - RNA, 19 nt, Human
gugggucaucugaggucag

SEQ ID NO: 106530 - RNA, 22 nt, Human
uaaaagaaaaaaaaaaagauga

SEQ ID NO: 106531 - RNA, 22 nt, Human
uaacgugacuguagggaggcug

SEQ ID NO: 106532 - RNA, 28 nt, Human
uagcaagacuccguuuaaaagaaaaaaa

SEQ ID NO: 106533 - RNA, 24 nt, Human
uaguggcucacaccuguaauccca

SEQ ID NO: 106534 - RNA, 23 nt, Human
ucacauccucucaccccacaacc

SEQ ID NO: 106535 - RNA, 19 nt, Human
ucacuugagccugggcgau

SEQ ID NO: 106536 - RNA, 20 nt, Human
ucaggcaggagaaucacuug

SEQ ID NO: 106537 - RNA, 24 nt, Human
ucaggcaggagaaucacuugagcc

SEQ ID NO: 106538 - RNA, 22 nt, Human
ucaucugaggucaggaguucga

SEQ ID NO: 106539 - RNA, 22 nt, Human
uccguuuaaaagaaaaaaaaaa

SEQ ID NO: 106540 - RNA, 23 nt, Human
uccguuuaaaagaaaaaaaaaaa

SEQ ID NO: 106541 - RNA, 22 nt, Human
ucggccacaacccagaaagaag

SEQ ID NO: 106542 - RNA, 19 nt, Human
ucucaccccacaacccagg

SEQ ID NO: 106543 - RNA, 20 nt, Human
ucucaccccacaacccaggg

SEQ ID NO: 106544 - RNA, 18 nt, Human
ucugaagcucccuccuac

SEQ ID NO: 106545 - RNA, 19 nt, Human
ugauauggcaaaugccaag

SEQ ID NO: 106546 - RNA, 23 nt, Human
uggaaagagcuugggaagcccug

SEQ ID NO: 106547 - RNA, 25 nt, Human
uggaaagagcuugggaagcccuggg

SEQ ID NO: 106548 - RNA, 21 nt, Human
uggcggcuuucuguaauccca

SEQ ID NO: 106549 - RNA, 21 nt, Human
uggcucacaccuguaauccca

SEQ ID NO: 106550 - RNA, 24 nt, Human
uggcucacaccuguaaucccagca

SEQ ID NO: 106551 - RNA, 19 nt, Human
ugggaagaaucuagaagug

SEQ ID NO: 106552 - RNA, 22 nt, Human
ugggaggccgaggcaggugggu

SEQ ID NO: 106553 - RNA, 24 nt, Human
ugggaggccgaggcagguggguca

SEQ ID NO: 106554 - RNA, 22 nt, Human
uggggucacagggcacccguga

SEQ ID NO: 106555 - RNA, 23 nt, Human
ugggucaucugaggucaggaguu

SEQ ID NO: 106556 - RNA, 24 nt, Human
ugggucaucugaggucaggaguuc

SEQ ID NO: 106557 - RNA, 25 nt, Human
ugucugaagcucccuccuacugggg

SEQ ID NO: 106558 - RNA, 18 nt, Human
uguggcuguggaaagagc

SEQ ID NO: 106559 - RNA, 18 nt, Human
uguggcuguggaaagagc

SEQ ID NO: 106560 - RNA, 18 nt, Human
uuagcugggcacgguggc

SEQ ID NO: 106561 - RNA, 23 nt, Human
uuuaaaagaaaaaaaaaaagaug

SEQ ID NO: 106562 - RNA, 24 nt, Human
uuucuguaaucccagcuacuuggg

SEQ ID NO: 106563 - RNA, 18 nt, Human
agccucagggcuaggagu

SEQ ID NO: 106564 - RNA, 19 nt, Human
ccucagggcuaggaguggg

SEQ ID NO: 106565 - RNA, 24 nt, Human
ucugaggggcacgagccucagggc

SEQ ID NO: 106566 - RNA, 23 nt, Human
uggccccugucuugauuucaggg

SEQ ID NO: 106567 - RNA, 19 nt, Human
uggcugcucccucccuucc

SEQ ID NO: 106568 - RNA, 23 nt, Human
uguggcuccucucucagacccug

SEQ ID NO: 106569 - RNA, 21 nt, Human
uuagggacuguggcuccucuc

SEQ ID NO: 106570 - RNA, 20 nt, Human
aacccuuuccuccugcugac

SEQ ID NO: 106571 - RNA, 24 nt, Human
aaccuagaagaaaugacucccgag

SEQ ID NO: 106572 - RNA, 19 nt, Human
aaguucacaaacugcagau

SEQ ID NO: 106573 - RNA, 22 nt, Human
accagggaagaagaggguuucc

SEQ ID NO: 106574 - RNA, 23 nt, Human
acccgcuccagcagagccagacc

SEQ ID NO: 106575 - RNA, 28 nt, Human
acccuucuccucccuccccccucccccc

SEQ ID NO: 106576 - RNA, 20 nt, Human
acgccagggaacgggcacac

SEQ ID NO: 106577 - RNA, 23 nt, Human
acugcagauugaucagcaggggg

SEQ ID NO: 106578 - RNA, 22 nt, Human
agcaaguaacccuucuccuccc

SEQ ID NO: 106579 - RNA, 21 nt, Human
agcccucacucuccacgcccc

SEQ ID NO: 106580 - RNA, 24 nt, Human
agccuaugugaacccuuuccuccu

SEQ ID NO: 106581 - RNA, 20 nt, Human
aggcagagagagccuccagg

SEQ ID NO: 106582 - RNA, 26 nt, Human
aggcagagagagccuccagggugggg

SEQ ID NO: 106583 - RNA, 27 nt, Human
aggcagagagagccuccagggugggga

SEQ ID NO: 106584 - RNA, 22 nt, Human
agggaagaagaggguuuccugg

SEQ ID NO: 106585 - RNA, 23 nt, Human
aggguggggaagaaaggggcagg

SEQ ID NO: 106586 - RNA, 18 nt, Human
augaagggcaguccuugc

SEQ ID NO: 106587 - RNA, 23 nt, Human
auucccgaccccccucuccucuu

SEQ ID NO: 106588 - RNA, 27 nt, Human
caaaacauuccccccauucccgacccc

SEQ ID NO: 106589 - RNA, 19 nt, Human
caaaaucaauuuccuacug

SEQ ID NO: 106590 - RNA, 25 nt, Human
caagaaaaccuagaagaaaugacug

SEQ ID NO: 106591 - RNA, 22 nt, Human
caaguccugcaaaggggucucc

SEQ ID NO: 106592 - RNA, 22 nt, Human
cagagucccguggggcugagcc

SEQ ID NO: 106593 - RNA, 22 nt, Human
cagcagagccagaccagggaag

SEQ ID NO: 106594 - RNA, 19 nt, Human
ccaggguggggaagaaagg

SEQ ID NO: 106595 - RNA, 20 nt, Human
cccacccgcuccagcagagc

SEQ ID NO: 106596 - RNA, 22 nt, Human
cccacccgcuccagcagagcca

SEQ ID NO: 106597 - RNA, 22 nt, Human
cccccaaacuccagggaaugga

SEQ ID NO: 106598 - RNA, 18 nt, Human
cccccauucccgaccccc

SEQ ID NO: 106599 - RNA, 19 nt, Human
cccgcagccaaaacauucc

SEQ ID NO: 106600 - RNA, 18 nt, Human
cccugugugcaaguccug

SEQ ID NO: 106601 - RNA, 28 nt, Human
cccuucuccucccuccccccuccccccu

SEQ ID NO: 106602 - RNA, 22 nt, Human
ccuaugugaacccuuuccuccu

SEQ ID NO: 106603 - RNA, 23 nt, Human
ccucccuccccccuccccccucc

SEQ ID NO: 106604 - RNA, 19 nt, Human
ccuccugcugaccccugga

SEQ ID NO: 106605 - RNA, 18 nt, Human
ccuggcuacagccucccu

SEQ ID NO: 106606 - RNA, 26 nt, Human
cgaccccccucuccucuucuagcccc

SEQ ID NO: 106607 - RNA, 25 nt, Human
cggccaggccuacacacgccaggga

SEQ ID NO: 106608 - RNA, 19 nt, Human
cucacaagcuggcagccac

SEQ ID NO: 106609 - RNA, 23 nt, Human
cucagccuuaaaccugugggccg

SEQ ID NO: 106610 - RNA, 21 nt, Human
cugagccuuagaaaggcuggg

SEQ ID NO: 106611 - RNA, 19 nt, Human
cugggaggucagcaaggcu

SEQ ID NO: 106612 - RNA, 21 nt, Human
cugugugcaaguccugcaaag

SEQ ID NO: 106613 - RNA, 28 nt, Human
gaaaaccuagaagaaaugacuguggaag

SEQ ID NO: 106614 - RNA, 21 nt, Human
gaacgggcacacaccauucuu

SEQ ID NO: 106615 - RNA, 19 nt, Human
gaagaaaggggcagggugg

SEQ ID NO: 106616 - RNA, 18 nt, Human
gaggucagcaaggcugaa

SEQ ID NO: 106617 - RNA, 21 nt, Human
ggaagacuggcaccugagagc

SEQ ID NO: 106618 - RNA, 24 nt, Human
ggccaggccuacacacgccaggga

SEQ ID NO: 106619 - RNA, 26 nt, Human
gggaagaaaggggcagggugggcugg

SEQ ID NO: 106620 - RNA, 21 nt, Human
gggaagaagaggguuuccugg

SEQ ID NO: 106621 - RNA, 19 nt, Human
gggaugggcagugcugggc

SEQ ID NO: 106622 - RNA, 21 nt, Human
gggugggaugggcagugcugg

SEQ ID NO: 106623 - RNA, 20 nt, Human
gguggggaagaaaggggcag

SEQ ID NO: 106624 - RNA, 19 nt, Human
gugcugggccaagaaaacc

SEQ ID NO: 106625 - RNA, 23 nt, Human
uaacccuucuccucccucccccc

SEQ ID NO: 106626 - RNA, 19 nt, Human
ucagccuuaaaccuguggg

SEQ ID NO: 106627 - RNA, 24 nt, Human
uccccccauucccgaccccccucu

SEQ ID NO: 106628 - RNA, 18 nt, Human
uccccccuccccccuccc

SEQ ID NO: 106629 - RNA, 18 nt, Human
ucccgaccccccucuccu

SEQ ID NO: 106630 - RNA, 21 nt, Human
ugaaugaagggcaguccuugc

SEQ ID NO: 106631 - RNA, 27 nt, Human
ugagcagcaaguaacccuucuccuccc

SEQ ID NO: 106632 - RNA, 18 nt, Human
ugagccuuagaaaggcug

SEQ ID NO: 106633 - RNA, 20 nt, Human
ugagggccaccagcacugaa

SEQ ID NO: 106634 - RNA, 21 nt, Human
ugagggccaccagcacugaag

SEQ ID NO: 106635 - RNA, 19 nt, Human
ugccgugguggcggcagcc

SEQ ID NO: 106636 - RNA, 20 nt, Human
ugccgugguggcggcagccu

SEQ ID NO: 106637 - RNA, 20 nt, Human
ugccgugguggcggcagccu

SEQ ID NO: 106638 - RNA, 22 nt, Human
ugcggccaggccuacacacgcc

SEQ ID NO: 106639 - RNA, 21 nt, Human
uggcaccugagagccuaugug

SEQ ID NO: 106640 - RNA, 19 nt, Human
ugggaugggcagugcuggg

SEQ ID NO: 106641 - RNA, 24 nt, Human
ugugaaguucacaaacugcagauu

SEQ ID NO: 106642 - RNA, 20 nt, Human
uuccccgguggagggaggga

SEQ ID NO: 106643 - RNA, 26 nt, Human
uuuaaugauuccccuucccccaaacu

SEQ ID NO: 106644 - RNA, 18 nt, Human
accugguuuguggcagcu

SEQ ID NO: 106645 - RNA, 20 nt, Human
acgccgcugccgccgccgcg

SEQ ID NO: 106646 - RNA, 18 nt, Human
ccgcugccgccgccgcgu

SEQ ID NO: 106647 - RNA, 20 nt, Human
cgagcagucuuucaccacug

SEQ ID NO: 106648 - RNA, 22 nt, Human
cgccgcgcacucccccucuccc

SEQ ID NO: 106649 - RNA, 18 nt, Human
cgccgcugccgccgccgc

SEQ ID NO: 106650 - RNA, 21 nt, Human
gagaaccccgagccgacgccg

SEQ ID NO: 106651 - RNA, 22 nt, Human
gccgacgccgcugccgccgccg

SEQ ID NO: 106652 - RNA, 20 nt, Human
guuuguggcagcugcggccg

SEQ ID NO: 106653 - RNA, 18 nt, Human
ucccggagaaccccgagc

SEQ ID NO: 106654 - RNA, 18 nt, Human
ucucccggagaaccccga

SEQ ID NO: 106655 - RNA, 22 nt, Human
ugaaacaaauauucuuagaaca

SEQ ID NO: 106656 - RNA, 18 nt, Human
uguggcagcugcggccgc

SEQ ID NO: 106657 - RNA, 19 nt, Human
aaacagaaacagguccacg

SEQ ID NO: 106658 - RNA, 22 nt, Human
aaacagguccacguucaccuca

SEQ ID NO: 106659 - RNA, 23 nt, Human
aaaccgacaccuugcgccucccg

SEQ ID NO: 106660 - RNA, 18 nt, Human
aaagucuucuuccaacca

SEQ ID NO: 106661 - RNA, 22 nt, Human
aagcuggggaguccacagccac

SEQ ID NO: 106662 - RNA, 24 nt, Human
aaggacacgaagaugaggugggag

SEQ ID NO: 106663 - RNA, 22 nt, Human
aagggcgggcaggagggggcag

SEQ ID NO: 106664 - RNA, 20 nt, Human
aaggggcagaagggaguggg

SEQ ID NO: 106665 - RNA, 21 nt, Human
aaggggcagaagggagugggg

SEQ ID NO: 106666 - RNA, 28 nt, Human
acagacagcaucaccacagacuggaaac

SEQ ID NO: 106667 - RNA, 19 nt, Human
acagacuggaaacagaaac

SEQ ID NO: 106668 - RNA, 23 nt, Human
accacagacuggaaacagaaaca

SEQ ID NO: 106669 - RNA, 21 nt, Human
accccgagaucaaucagaagc

SEQ ID NO: 106670 - RNA, 21 nt, Human
acucuuuuuuuuucuuuuugg

SEQ ID NO: 106671 - RNA, 22 nt, Human
acucuuuuuuuuucuuuuuggc

SEQ ID NO: 106672 - RNA, 25 nt, Human
acugauccacucuuuuuuuuucuuu

SEQ ID NO: 106673 - RNA, 22 nt, Human
acuggaaacagaaacaggucca

SEQ ID NO: 106674 - RNA, 19 nt, Human
agaagggaguggggugagc

SEQ ID NO: 106675 - RNA, 23 nt, Human
agacaaaaaaggggcagaaggga

SEQ ID NO: 106676 - RNA, 26 nt, Human
agacagacagacagcaucaccacaga

SEQ ID NO: 106677 - RNA, 22 nt, Human
agacagacagcaucaccacaga

SEQ ID NO: 106678 - RNA, 22 nt, Human
agacccggccuccaggucgaaa

SEQ ID NO: 106679 - RNA, 20 nt, Human
agacuggaaacagaaacagg

SEQ ID NO: 106680 - RNA, 23 nt, Human
agagacaaaaaaggggcagaagg

SEQ ID NO: 106681 - RNA, 21 nt, Human
agaugaggugggagagggagg

SEQ ID NO: 106682 - RNA, 25 nt, Human
agccagugcggcagcccuguggcca

SEQ ID NO: 106683 - RNA, 21 nt, Human
aggcaagggcgggcaggaggg

SEQ ID NO: 106684 - RNA, 19 nt, Human
aggcagggauggggaaagg

SEQ ID NO: 106685 - RNA, 23 nt, Human
agggaguggggugagcugggggc

SEQ ID NO: 106686 - RNA, 26 nt, Human
agggaguggggugagcugggggcagg

SEQ ID NO: 106687 - RNA, 18 nt, Human
aggugggagagggagggg

SEQ ID NO: 106688 - RNA, 19 nt, Human
aggugggagagggaggggu

SEQ ID NO: 106689 - RNA, 23 nt, Human
auggggcugcuucuccaaggggu

SEQ ID NO: 106690 - RNA, 21 nt, Human
caaccacaccgaagugacacc

SEQ ID NO: 106691 - RNA, 18 nt, Human
caagggcgggcaggaggg

SEQ ID NO: 106692 - RNA, 27 nt, Human
caagugguccucuuguuuguauccucu

SEQ ID NO: 106693 - RNA, 23 nt, Human
caccacagacuggaaacagaaac

SEQ ID NO: 106694 - RNA, 18 nt, Human
cacucuuuuauuuacaga

SEQ ID NO: 106695 - RNA, 22 nt, Human
cagaagggaguggggugagcug

SEQ ID NO: 106696 - RNA, 23 nt, Human
cagacagacagacagcaucacca

SEQ ID NO: 106697 - RNA, 19 nt, Human
caggaaggacacgaagaug

SEQ ID NO: 106698 - RNA, 20 nt, Human
caguuaaaaacgguccauuu

SEQ ID NO: 106699 - RNA, 22 nt, Human
ccaagcuggggaguccacagcc

SEQ ID NO: 106700 - RNA, 22 nt, Human
ccacagccaccagcgucuccag

SEQ ID NO: 106701 - RNA, 22 nt, Human
ccaccagcgucuccaggcccag

SEQ ID NO: 106702 - RNA, 23 nt, Human
ccaugugucugaauggggugggg

SEQ ID NO: 106703 - RNA, 20 nt, Human
ccccacccgcaccgcccggg

SEQ ID NO: 106704 - RNA, 18 nt, Human
cccgcccccacccgcacc

SEQ ID NO: 106705 - RNA, 25 nt, Human
cccgcggguggcggcggcggcagca

SEQ ID NO: 106706 - RNA, 26 nt, Human
ccgaccacucacccauucaaaagcuu

SEQ ID NO: 106707 - RNA, 22 nt, Human
ccgagaucaaucagaagcucau

SEQ ID NO: 106708 - RNA, 25 nt, Human
ccgcacagagacccaacaacgucac

SEQ ID NO: 106709 - RNA, 23 nt, Human
ccuccaggucgaaagggcgccuc

SEQ ID NO: 106710 - RNA, 18 nt, Human
ccucccgcccccacccgc

SEQ ID NO: 106711 - RNA, 21 nt, Human
ccucccgcccccacccgcacc

SEQ ID NO: 106712 - RNA, 20 nt, Human
cgagaucaaucagaagcuca

SEQ ID NO: 106713 - RNA, 21 nt, Human
cgcacagagacccaacaucca

SEQ ID NO: 106714 - RNA, 26 nt, Human
cgggucuggaguagggucgccgggga

SEQ ID NO: 106715 - RNA, 21 nt, Human
cuagauacccgaccacucacc

SEQ ID NO: 106716 - RNA, 26 nt, Human
cuccaaggggugaggucaaagaggga

SEQ ID NO: 106717 - RNA, 20 nt, Human
cuccgccucccgcgcccucc

SEQ ID NO: 106718 - RNA, 18 nt, Human
cugaaugggguggggggg

SEQ ID NO: 106719 - RNA, 19 nt, Human
cugaauggggugggggggg

SEQ ID NO: 106720 - RNA, 22 nt, Human
cugauccacucuuuuuuuuucu

SEQ ID NO: 106721 - RNA, 19 nt, Human
gaaacagaaacagguccac

SEQ ID NO: 106722 - RNA, 19 nt, Human
gagcugggggcaggaagga

SEQ ID NO: 106723 - RNA, 18 nt, Human
gaugaggugggagaggga

SEQ ID NO: 106724 - RNA, 21 nt, Human
gcgcccagcgccggcuccauc

SEQ ID NO: 106725 - RNA, 24 nt, Human
gcgccuccgggaaugcagcugggg

SEQ ID NO: 106726 - RNA, 21 nt, Human
gcggcagcagccgcggcggca

SEQ ID NO: 106727 - RNA, 20 nt, Human
gcucuaaggggggaaauggg

SEQ ID NO: 106728 - RNA, 20 nt, Human
gcugcuucuccaagggguga

SEQ ID NO: 106729 - RNA, 21 nt, Human
ggaguggggugagcugggggc

SEQ ID NO: 106730 - RNA, 22 nt, Human
ggcagaagggaguggggugagc

SEQ ID NO: 106731 - RNA, 19 nt, Human
ggcaggaggcagggauggg

SEQ ID NO: 106732 - RNA, 22 nt, Human
ggccacgagacucagacagaca

SEQ ID NO: 106733 - RNA, 18 nt, Human
ggcggcggcggcagcagc

SEQ ID NO: 106734 - RNA, 19 nt, Human
ggcggcggcggcagcagcc

SEQ ID NO: 106735 - RNA, 18 nt, Human
ggcgggcaggagggggca

SEQ ID NO: 106736 - RNA, 20 nt, Human
ggcugggcaccuucaugggg

SEQ ID NO: 106737 - RNA, 18 nt, Human
gggaaugcagcuggggag

SEQ ID NO: 106738 - RNA, 22 nt, Human
gggauggggaaaggauggacac

SEQ ID NO: 106739 - RNA, 27 nt, Human
gggcagaagggaguggggugagcuggg

SEQ ID NO: 106740 - RNA, 22 nt, Human
gggcaggaggcagggaugggga

SEQ ID NO: 106741 - RNA, 18 nt, Human
gggggggcgggacccuac

SEQ ID NO: 106742 - RNA, 19 nt, Human
uacuucaggcgcccucugc

SEQ ID NO: 106743 - RNA, 19 nt, Human
uaguaagacagugcaaaaa

SEQ ID NO: 106744 - RNA, 23 nt, Human
uaguaagacagugcaaaaacuag

SEQ ID NO: 106745 - RNA, 24 nt, Human
ucacaguaaaaaccugcuguccga

SEQ ID NO: 106746 - RNA, 20 nt, Human
ucaccucacaguaaaaaccu

SEQ ID NO: 106747 - RNA, 23 nt, Human
ucaggggcaggaggcagggaugg

SEQ ID NO: 106748 - RNA, 22 nt, Human
uccaaccacaccgaagugacac

SEQ ID NO: 106749 - RNA, 22 nt, Human
uccaggucgaaagggcgccucc

SEQ ID NO: 106750 - RNA, 19 nt, Human
ucccgcccccacccgcacc

SEQ ID NO: 106751 - RNA, 19 nt, Human
ugaauaguaagacagugca

SEQ ID NO: 106752 - RNA, 19 nt, Human
ugaggugggagagggaggg

SEQ ID NO: 106753 - RNA, 19 nt, Human
ugccccagugauucccguc

SEQ ID NO: 106754 - RNA, 22 nt, Human
ugcgccucccgcccccacccgc

SEQ ID NO: 106755 - RNA, 24 nt, Human
ugcgccucccgcccccacccgcac

SEQ ID NO: 106756 - RNA, 23 nt, Human
uggaccccgagaucaaucagaag

SEQ ID NO: 106757 - RNA, 26 nt, Human
uggaccccgagaucaaucagaagcuc

SEQ ID NO: 106758 - RNA, 22 nt, Human
uggcagucccagccagugcggc

SEQ ID NO: 106759 - RNA, 21 nt, Human
uggccagcagacccggccucc

SEQ ID NO: 106760 - RNA, 24 nt, Human
ugggcaccuucauggggcugcuuc

SEQ ID NO: 106761 - RNA, 20 nt, Human
ugucugaauggggugggggg

SEQ ID NO: 106762 - RNA, 19 nt, Human
ugugcguguguggaugugu

SEQ ID NO: 106763 - RNA, 18 nt, Human
uguguaaauguggugcuu

SEQ ID NO: 106764 - RNA, 22 nt, Human
uucaaaagcuugagaagucgcc

SEQ ID NO: 106765 - RNA, 26 nt, Human
uucaauuucaauguucauuuagcaaa

SEQ ID NO: 106766 - RNA, 20 nt, Human
uuuacagaaaacacagauaa

SEQ ID NO: 106767 - RNA, 28 nt, Human
uuuuuuucuuuuuggcacaaagaaauau

SEQ ID NO: 106768 - RNA, 20 nt, Human
aacguucaagucuugccuuu

SEQ ID NO: 106769 - RNA, 18 nt, Human
aagaagaagaggggcacc

SEQ ID NO: 106770 - RNA, 20 nt, Human
acagcaagugugugugugau

SEQ ID NO: 106771 - RNA, 19 nt, Human
acaggguaagaaauaggag

SEQ ID NO: 106772 - RNA, 28 nt, Human
agaaauaggagaaagaggaccgguaccc

SEQ ID NO: 106773 - RNA, 19 nt, Human
agaauaugugggcuuccuc

SEQ ID NO: 106774 - RNA, 23 nt, Human
aggacaagagaaggcaaagaaga

SEQ ID NO: 106775 - RNA, 21 nt, Human
aggagaaagaggacaagagaa

SEQ ID NO: 106776 - RNA, 23 nt, Human
aggcagcccugcagcccgggaag

SEQ ID NO: 106777 - RNA, 22 nt, Human
auggggcuuuuuguuucuggac

SEQ ID NO: 106778 - RNA, 23 nt, Human
caaaauggaaggcagguggagga

SEQ ID NO: 106779 - RNA, 20 nt, Human
caagagaaggcaaagaagaa

SEQ ID NO: 106780 - RNA, 24 nt, Human
cacauguaaccuuugcuuuuuaca

SEQ ID NO: 106781 - RNA, 20 nt, Human
caccacagggaaucaggucu

SEQ ID NO: 106782 - RNA, 22 nt, Human
cacccccacccccacauccaaa

SEQ ID NO: 106783 - RNA, 18 nt, Human
cacuuccccuuucuccac

SEQ ID NO: 106784 - RNA, 24 nt, Human
cagcccgggaaggggacgcagcgg

SEQ ID NO: 106785 - RNA, 23 nt, Human
ccacuuccccuuucuccaccccc

SEQ ID NO: 106786 - RNA, 22 nt, Human
cccacauccaaauuacucuuaa

SEQ ID NO: 106787 - RNA, 19 nt, Human
ccccagcgcccaaggcugg

SEQ ID NO: 106788 - RNA, 21 nt, Human
cccccacccccacauccaaau

SEQ ID NO: 106789 - RNA, 25 nt, Human
cccccacccccacauccaaauuacu

SEQ ID NO: 106790 - RNA, 24 nt, Human
ccccggaucaccgccccucgggag

SEQ ID NO: 106791 - RNA, 18 nt, Human
ccccuuucuccaccccca

SEQ ID NO: 106792 - RNA, 21 nt, Human
ccccuuucuccacccccaccc

SEQ ID NO: 106793 - RNA, 18 nt, Human
cccugcagcccgggaagg

SEQ ID NO: 106794 - RNA, 24 nt, Human
ccgcccggcggacuguccggcugu

SEQ ID NO: 106795 - RNA, 22 nt, Human
ccgcgacuccgaggcgggcgcg

SEQ ID NO: 106796 - RNA, 19 nt, Human
ccgggaaggggacgcagcg

SEQ ID NO: 106797 - RNA, 18 nt, Human
ccguuugagucuggacug

SEQ ID NO: 106798 - RNA, 21 nt, Human
ccugcagcccgggaaggggac

SEQ ID NO: 106799 - RNA, 25 nt, Human
ccuugaaaugcacugacucaaaaca

SEQ ID NO: 106800 - RNA, 24 nt, Human
cgcagcgggcuggcugcuggcgcc

SEQ ID NO: 106801 - RNA, 19 nt, Human
cggccccggaucaccgccc

SEQ ID NO: 106802 - RNA, 23 nt, Human
cggcggcgcggcggaggcagccc

SEQ ID NO: 106803 - RNA, 19 nt, Human
cucaaaacauugacagcaa

SEQ ID NO: 106804 - RNA, 19 nt, Human
cuguuccuugaaaugcacu

SEQ ID NO: 106805 - RNA, 18 nt, Human
cuuucuccacccccaccc

SEQ ID NO: 106806 - RNA, 22 nt, Human
gacaagagaaggcaaagaagaa

SEQ ID NO: 106807 - RNA, 20 nt, Human
gacaggguaagaaauaggag

SEQ ID NO: 106808 - RNA, 21 nt, Human
gaccacuuccccuuucuccac

SEQ ID NO: 106809 - RNA, 21 nt, Human
gaggacaagagaaggcaaaga

SEQ ID NO: 106810 - RNA, 23 nt, Human
gaggcgggcgcggcggcuggucc

SEQ ID NO: 106811 - RNA, 18 nt, Human
gcggcggaggcagcccug

SEQ ID NO: 106812 - RNA, 23 nt, Human
ggcuguuccuugaaaugcacuga

SEQ ID NO: 106813 - RNA, 21 nt, Human
ggguaagaaauaggagaaaga

SEQ ID NO: 106814 - RNA, 24 nt, Human
ggguaagaaauaggagaaagagga

SEQ ID NO: 106815 - RNA, 22 nt, Human
ggguaggaccuggagccgaggg

SEQ ID NO: 106816 - RNA, 22 nt, Human
guaaacaagauuuggguuacug

SEQ ID NO: 106817 - RNA, 21 nt, Human
uaacauguucacagauaccac

SEQ ID NO: 106818 - RNA, 25 nt, Human
uaagaaauaggagaaagaggacaaa

SEQ ID NO: 106819 - RNA, 24 nt, Human
uaccacgaauauuuuguaaacaag

SEQ ID NO: 106820 - RNA, 18 nt, Human
uaggaccuggagccgagg

SEQ ID NO: 106821 - RNA, 21 nt, Human
uagggguguguauuuuguggc

SEQ ID NO: 106822 - RNA, 26 nt, Human
uaugugggcuuccuccguuugagucu

SEQ ID NO: 106823 - RNA, 18 nt, Human
ucacauguaaccuuugcu

SEQ ID NO: 106824 - RNA, 22 nt, Human
uccacccccacccccacaucca

SEQ ID NO: 106825 - RNA, 21 nt, Human
ucccauggcagcggcuccggg

SEQ ID NO: 106826 - RNA, 23 nt, Human
ucuccacccccacccccacaucc

SEQ ID NO: 106827 - RNA, 20 nt, Human
ugaaaugcacugacucaaaa

SEQ ID NO: 106828 - RNA, 22 nt, Human
ugacucaaaacauugacagcaa

SEQ ID NO: 106829 - RNA, 21 nt, Human
ugugggcuuccuccguuugag

SEQ ID NO: 106830 - RNA, 19 nt, Human
uuaauacucacauguaacc

SEQ ID NO: 106831 - RNA, 25 nt, Human
uucaaaauggaaggcagguggagga

SEQ ID NO: 106832 - RNA, 20 nt, Human
uuccccuuucuccacccccc

SEQ ID NO: 106833 - RNA, 24 nt, Human
uugacagcaagugugugugugauu

SEQ ID NO: 106834 - RNA, 24 nt, Human
aaaaugcugggauuacaggcauga

SEQ ID NO: 106835 - RNA, 26 nt, Human
aaaugcugggauuacaggcaugagcc

SEQ ID NO: 106836 - RNA, 21 nt, Human
aacgcugaucacaaauccaug

SEQ ID NO: 106837 - RNA, 24 nt, Human
aaguagcugggauuacaggagugu

SEQ ID NO: 106838 - RNA, 26 nt, Human
aaguagcugggauuacaggagugugc

SEQ ID NO: 106839 - RNA, 25 nt, Human
aagugauucucccaccucagccucc

SEQ ID NO: 106840 - RNA, 18 nt, Human
acagagucuccagaagac

SEQ ID NO: 106841 - RNA, 20 nt, Human
accacagcucagcggcugcu

SEQ ID NO: 106842 - RNA, 24 nt, Human
acccaagcuagggugcaguggcau

SEQ ID NO: 106843 - RNA, 25 nt, Human
acccgccucagccucucaaaaugcu

SEQ ID NO: 106844 - RNA, 22 nt, Human
accugcuuccccaugcgcccca

SEQ ID NO: 106845 - RNA, 21 nt, Human
acgccggacuaauuuuugcau

SEQ ID NO: 106846 - RNA, 24 nt, Human
acuauguuggccaggcugguuuug

SEQ ID NO: 106847 - RNA, 20 nt, Human
acugcaaccuccaccuuugg

SEQ ID NO: 106848 - RNA, 21 nt, Human
acugcaaccuccaccuuugga

SEQ ID NO: 106849 - RNA, 24 nt, Human
agaaacgugcaguccuugccuacu

SEQ ID NO: 106850 - RNA, 25 nt, Human
agaagacucaaaggaaaaccgagaa

SEQ ID NO: 106851 - RNA, 18 nt, Human
agagaggggguuucacua

SEQ ID NO: 106852 - RNA, 19 nt, Human
agccaccgcacccggccug

SEQ ID NO: 106853 - RNA, 20 nt, Human
aggagagaaagaaacgugca

SEQ ID NO: 106854 - RNA, 21 nt, Human
aggagagaaagaaacgugcag

SEQ ID NO: 106855 - RNA, 24 nt, Human
aggcagcuccagaagacucaaagg

SEQ ID NO: 106856 - RNA, 24 nt, Human
aggcugguuuugaauccugaccuc

SEQ ID NO: 106857 - RNA, 18 nt, Human
aggggguuucacuauguu

SEQ ID NO: 106858 - RNA, 24 nt, Human
aggggguuucacuauguuggccag

SEQ ID NO: 106859 - RNA, 22 nt, Human
agguaggggcaagaguugcuuu

SEQ ID NO: 106860 - RNA, 24 nt, Human
aggugauccacccgccucagccuc

SEQ ID NO: 106861 - RNA, 24 nt, Human
agugauucucccaccucagccucc

SEQ ID NO: 106862 - RNA, 24 nt, Human
aguggcaugauuucagcuuacugc

SEQ ID NO: 106863 - RNA, 19 nt, Human
auuacaggagugugccacc

SEQ ID NO: 106864 - RNA, 23 nt, Human
caaaaugcugggauuacaggcau

SEQ ID NO: 106865 - RNA, 24 nt, Human
caaaaugcugggauuacaggcaug

SEQ ID NO: 106866 - RNA, 20 nt, Human
caagugauucucccaccuca

SEQ ID NO: 106867 - RNA, 22 nt, Human
caagugauucucccaccucagc

SEQ ID NO: 106868 - RNA, 23 nt, Human
cacaaauccaugggagaugucuc

SEQ ID NO: 106869 - RNA, 21 nt, Human
cacagagucuccagaagacca

SEQ ID NO: 106870 - RNA, 25 nt, Human
caccacagcucagcggcugcuucug

SEQ ID NO: 106871 - RNA, 23 nt, Human
cacccgccucagccucucaaaau

SEQ ID NO: 106872 - RNA, 18 nt, Human
caccgcacccggccuggc

SEQ ID NO: 106873 - RNA, 24 nt, Human
caccucagccuccuaaguagcugg

SEQ ID NO: 106874 - RNA, 21 nt, Human
cacuauguuggccaggcuggu

SEQ ID NO: 106875 - RNA, 24 nt, Human
cacuauguuggccaggcugguuuu

SEQ ID NO: 106876 - RNA, 22 nt, Human
cagaagacucaaaggaaaaccg

SEQ ID NO: 106877 - RNA, 20 nt, Human
ccaccacgccggacuaauuu

SEQ ID NO: 106878 - RNA, 19 nt, Human
ccacccgccucagccucuc

SEQ ID NO: 106879 - RNA, 19 nt, Human
ccagaggucuucuuaaggu

SEQ ID NO: 106880 - RNA, 23 nt, Human
cccaccucagccuccuaaguagc

SEQ ID NO: 106881 - RNA, 23 nt, Human
ccgccucagccucucaaaaugcu

SEQ ID NO: 106882 - RNA, 23 nt, Human
ccuaaguagcugggauuacagga

SEQ ID NO: 106883 - RNA, 22 nt, Human
ccugaccucaggugauccaccc

SEQ ID NO: 106884 - RNA, 23 nt, Human
ccugaccucaggugauccacccg

SEQ ID NO: 106885 - RNA, 23 nt, Human
cgagaaucaggagagaaagaaac

SEQ ID NO: 106886 - RNA, 24 nt, Human
cgccucagccucucaaaaugcugg

SEQ ID NO: 106887 - RNA, 24 nt, Human
cucaaaaugcugggauuacaggca

SEQ ID NO: 106888 - RNA, 23 nt, Human
cucagccuccuaaguagcuggga

SEQ ID NO: 106889 - RNA, 22 nt, Human
cucccaccucagccuccuaagu

SEQ ID NO: 106890 - RNA, 22 nt, Human
cucuaugccacacagagucucc

SEQ ID NO: 106891 - RNA, 23 nt, Human
cugcaaccuccaccuuuggaguc

SEQ ID NO: 106892 - RNA, 21 nt, Human
cugcaacgcugaucacaaauc

SEQ ID NO: 106893 - RNA, 18 nt, Human
cuucugcugcagccucag

SEQ ID NO: 106894 - RNA, 19 nt, Human
gaagaccaguuccucacug

SEQ ID NO: 106895 - RNA, 24 nt, Human
gaccucaggugauccacccgccuc

SEQ ID NO: 106896 - RNA, 20 nt, Human
gagaugucucgacaucugug

SEQ ID NO: 106897 - RNA, 22 nt, Human
gaggggguuucacuauguuggc

SEQ ID NO: 106898 - RNA, 18 nt, Human
gagucuccagaagaccag

SEQ ID NO: 106899 - RNA, 22 nt, Human
gaguuuugcuuugccacccaag

SEQ ID NO: 106900 - RNA, 21 nt, Human
gaugagaaggcagcuccagaa

SEQ ID NO: 106901 - RNA, 18 nt, Human
gauuacaggagugugcca

SEQ ID NO: 106902 - RNA, 18 nt, Human
gauuacaggcaugagcca

SEQ ID NO: 106903 - RNA, 22 nt, Human
gauuacaggcaugagccaccgc

SEQ ID NO: 106904 - RNA, 23 nt, Human
gauuacaggcaugagccaccgca

SEQ ID NO: 106905 - RNA, 21 nt, Human
gcaaccuccaccuuuggaguc

SEQ ID NO: 106906 - RNA, 21 nt, Human
gcccagaagagguaggggcaa

SEQ ID NO: 106907 - RNA, 20 nt, Human
gcuccagaagacucaaagga

SEQ ID NO: 106908 - RNA, 19 nt, Human
gcugcagccucaggucucc

SEQ ID NO: 106909 - RNA, 22 nt, Human
gcugguuuugaauccugaccuc

SEQ ID NO: 106910 - RNA, 19 nt, Human
ggaaagccagaggucuucu

SEQ ID NO: 106911 - RNA, 25 nt, Human
ggagcuuucguuccucuccugguag

SEQ ID NO: 106912 - RNA, 22 nt, Human
ggauuacaggcaugagccaccg

SEQ ID NO: 106913 - RNA, 21 nt, Human
ggcuggucccguugaucacgg

SEQ ID NO: 106914 - RNA, 24 nt, Human
ggggguuucacuauguuggccagg

SEQ ID NO: 106915 - RNA, 18 nt, Human
gggguuucacuauguugg

SEQ ID NO: 106916 - RNA, 22 nt, Human
gggguuucacuauguuggccag

SEQ ID NO: 106917 - RNA, 23 nt, Human
gggguuucacuauguuggccagg

SEQ ID NO: 106918 - RNA, 22 nt, Human
gggugcaguggcaugauuucag

SEQ ID NO: 106919 - RNA, 22 nt, Human
ggguuucacuauguuggccagg

SEQ ID NO: 106920 - RNA, 23 nt, Human
ggugcaguggcaugauuucagcu

SEQ ID NO: 106921 - RNA, 22 nt, Human
gugauccacccgccucagccuc

SEQ ID NO: 106922 - RNA, 24 nt, Human
gugauucucccaccucagccuccu

SEQ ID NO: 106923 - RNA, 20 nt, Human
gugcaguggcaugauuucag

SEQ ID NO: 106924 - RNA, 26 nt, Human
uaaggugguugaaucacucuaugcca

SEQ ID NO: 106925 - RNA, 24 nt, Human
uaauuuuugcauuuuuaguagaga

SEQ ID NO: 106926 - RNA, 23 nt, Human
uacaggcaugagccaccgcaccc

SEQ ID NO: 106927 - RNA, 22 nt, Human
uagagaggggguuucacuaugu

SEQ ID NO: 106928 - RNA, 23 nt, Human
uagggugcaguggcaugauuuca

SEQ ID NO: 106929 - RNA, 24 nt, Human
uagggugcaguggcaugauuucag

SEQ ID NO: 106930 - RNA, 24 nt, Human
uaguagagaggggguuucacuaug

SEQ ID NO: 106931 - RNA, 24 nt, Human
uauguuggccaggcugguuuugaa

SEQ ID NO: 106932 - RNA, 23 nt, Human
ucaaaaugcugggauuacaggca

SEQ ID NO: 106933 - RNA, 24 nt, Human
ucaaaaugcugggauuacaggcau

SEQ ID NO: 106934 - RNA, 22 nt, Human
ucacuauguuggccaggcuggu

SEQ ID NO: 106935 - RNA, 22 nt, Human
ucaggagagaaagaaacgugca

SEQ ID NO: 106936 - RNA, 23 nt, Human
uccaagugauucucccaccucag

SEQ ID NO: 106937 - RNA, 24 nt, Human
uccaagugauucucccaccucagc

SEQ ID NO: 106938 - RNA, 18 nt, Human
uccugguaggcagcaaca

SEQ ID NO: 106939 - RNA, 25 nt, Human
ucgacaucuguguuccaggaaagcc

SEQ ID NO: 106940 - RNA, 26 nt, Human
ucuaugccacacagagucuccagaag

SEQ ID NO: 106941 - RNA, 24 nt, Human
ucucaaaaugcugggauuacaggc

SEQ ID NO: 106942 - RNA, 21 nt, Human
ugaccucaggugauccacccg

SEQ ID NO: 106943 - RNA, 24 nt, Human
ugaccucaggugauccacccgccu

SEQ ID NO: 106944 - RNA, 21 nt, Human
ugagaaggcagcuccagaaga

SEQ ID NO: 106945 - RNA, 20 nt, Human
ugauucucccaccucagccu

SEQ ID NO: 106946 - RNA, 23 nt, Human
ugcagucgccuccugggccuggc

SEQ ID NO: 106947 - RNA, 21 nt, Human
ugcaguggcaugauuucagcu

SEQ ID NO: 106948 - RNA, 24 nt, Human
uggaguccaagugauucucccacc

SEQ ID NO: 106949 - RNA, 23 nt, Human
uggccaggcugguuuugaauccu

SEQ ID NO: 106950 - RNA, 22 nt, Human
ugggauuacaggagugugccac

SEQ ID NO: 106951 - RNA, 24 nt, Human
ugggauuacaggagugugccacca

SEQ ID NO: 106952 - RNA, 18 nt, Human
ugggauuacaggcaugag

SEQ ID NO: 106953 - RNA, 19 nt, Human
ugggauuacaggcaugagc

SEQ ID NO: 106954 - RNA, 21 nt, Human
ugggauuacaggcaugagcca

SEQ ID NO: 106955 - RNA, 22 nt, Human
ugggauuacaggcaugagccac

SEQ ID NO: 106956 - RNA, 23 nt, Human
ugggauuacaggcaugagccacc

SEQ ID NO: 106957 - RNA, 24 nt, Human
ugggauuacaggcaugagccaccg

SEQ ID NO: 106958 - RNA, 24 nt, Human
ugggauuacaggcaugagccaccg

SEQ ID NO: 106959 - RNA, 19 nt, Human
ugguaggcagcaacaauau

SEQ ID NO: 106960 - RNA, 18 nt, Human
uuacugcaaccuccaccu

SEQ ID NO: 106961 - RNA, 22 nt, Human
uuacugcaaccuccaccuuugg

SEQ ID NO: 106962 - RNA, 23 nt, Human
uuacugcaaccuccaccuuugga

SEQ ID NO: 106963 - RNA, 18 nt, Human
uuaguagagaggggguuu

SEQ ID NO: 106964 - RNA, 21 nt, Human
uuaguagagaggggguuucac

SEQ ID NO: 106965 - RNA, 24 nt, Human
uuaguagagaggggguuucacuau

SEQ ID NO: 106966 - RNA, 24 nt, Human
uugauaguagggaccugcuucccc

SEQ ID NO: 106967 - RNA, 22 nt, Human
uugcuuugccacccaagcuagg

SEQ ID NO: 106968 - RNA, 24 nt, Human
uuucacuauguuggccaggcuggu

SEQ ID NO: 106969 - RNA, 18 nt, Human
uuuugcuuugccacccaa

SEQ ID NO: 106970 - RNA, 24 nt, Human
uuuuuaguagagaggggguuucac

SEQ ID NO: 106971 - RNA, 20 nt, Human
uuuuugcauuuuuaguagag

SEQ ID NO: 106972 - RNA, 23 nt, Human
uuuuuuuuuuuuuuuuuuuucgg

SEQ ID NO: 106973 - RNA, 23 nt, Human
aaaccuggaaggaaccuaaaaug

SEQ ID NO: 106974 - RNA, 21 nt, Human
aacacaguucccagaccagcu

SEQ ID NO: 106975 - RNA, 21 nt, Human
aacgcugaucacaaauccaug

SEQ ID NO: 106976 - RNA, 21 nt, Human
aagagagaaagaaacgugcag

SEQ ID NO: 106977 - RNA, 20 nt, Human
aagcaaaggagcagcacgca

SEQ ID NO: 106978 - RNA, 25 nt, Human
aagcagaaaaugccagaucucccuu

SEQ ID NO: 106979 - RNA, 18 nt, Human
aagccugaugaguuccac

SEQ ID NO: 106980 - RNA, 23 nt, Human
aaggaccaagggaagacaguucc

SEQ ID NO: 106981 - RNA, 21 nt, Human
aauccagguucccccaaucug

SEQ ID NO: 106982 - RNA, 24 nt, Human
acaagaacaaagacauucucuaag

SEQ ID NO: 106983 - RNA, 23 nt, Human
acccagagcaaaagcucucuccu

SEQ ID NO: 106984 - RNA, 22 nt, Human
acccaggaugaggaucagaagc

SEQ ID NO: 106985 - RNA, 19 nt, Human
acccugugcccagaggagg

SEQ ID NO: 106986 - RNA, 18 nt, Human
accucuuggcaagccuga

SEQ ID NO: 106987 - RNA, 19 nt, Human
acucaguuuccccaccucu

SEQ ID NO: 106988 - RNA, 20 nt, Human
agaaacgugcaguccuugcc

SEQ ID NO: 106989 - RNA, 20 nt, Human
agacaguuccagcccagagc

SEQ ID NO: 106990 - RNA, 19 nt, Human
agaucucccuugcccugcu

SEQ ID NO: 106991 - RNA, 28 nt, Human
agcccagagccauuucccuuccaaccuc

SEQ ID NO: 106992 - RNA, 23 nt, Human
agccuucucuccuccuaccuuuc

SEQ ID NO: 106993 - RNA, 19 nt, Human
aggaucagaagcuagugac

SEQ ID NO: 106994 - RNA, 23 nt, Human
aggcaauuaagaagcagaaagug

SEQ ID NO: 106995 - RNA, 26 nt, Human
aggccuggaccagaaggaccaaggga

SEQ ID NO: 106996 - RNA, 26 nt, Human
aggcggagguccgaagcaaaggagca

SEQ ID NO: 106997 - RNA, 24 nt, Human
agguacaguggcucaugccuguaa

SEQ ID NO: 106998 - RNA, 24 nt, Human
agugccucuccacucccagccagu

SEQ ID NO: 106999 - RNA, 19 nt, Human
aguggcucaugccuguaau

SEQ ID NO: 107000 - RNA, 23 nt, Human
auaggaaaaucugacccuucuca

SEQ ID NO: 107001 - RNA, 24 nt, Human
auccugagugauguuggcugccug

SEQ ID NO: 107002 - RNA, 19 nt, Human
caacacaguucccagacca

SEQ ID NO: 107003 - RNA, 18 nt, Human
caacgcugaucacaaauc

SEQ ID NO: 107004 - RNA, 24 nt, Human
caagaacaaagacauucucuaagc

SEQ ID NO: 107005 - RNA, 23 nt, Human
caagaaucaagagagaaagaaac

SEQ ID NO: 107006 - RNA, 23 nt, Human
caagccugaugaguuccacuccc

SEQ ID NO: 107007 - RNA, 24 nt, Human
caaggccuggaccagaaggaccaa

SEQ ID NO: 107008 - RNA, 24 nt, Human
caaguccuuucacuuccgaguuuu

SEQ ID NO: 107009 - RNA, 19 nt, Human
caaucuguggccacaccca

SEQ ID NO: 107010 - RNA, 23 nt, Human
cacaauccagguucccccaaucu

SEQ ID NO: 107011 - RNA, 18 nt, Human
caccagaaggagagaguu

SEQ ID NO: 107012 - RNA, 21 nt, Human
caccugaacaagaacaaagac

SEQ ID NO: 107013 - RNA, 19 nt, Human
cacguaaagcagaaaaugc

SEQ ID NO: 107014 - RNA, 21 nt, Human
cacuuuguuacuuuucauuga

SEQ ID NO: 107015 - RNA, 23 nt, Human
cagagcaaaagcucucuccuccc

SEQ ID NO: 107016 - RNA, 25 nt, Human
cagagcaaaagcucucuccucccuu

SEQ ID NO: 107017 - RNA, 19 nt, Human
cagaggugguaccagaggc

SEQ ID NO: 107018 - RNA, 20 nt, Human
cagcaggcuggccugggcuu

SEQ ID NO: 107019 - RNA, 23 nt, Human
cagcaggcuggccugggcuuucu

SEQ ID NO: 107020 - RNA, 21 nt, Human
cagccaacacaguucccagac

SEQ ID NO: 107021 - RNA, 24 nt, Human
cagccuucucuccuccuaccuuuc

SEQ ID NO: 107022 - RNA, 23 nt, Human
cagguucucuucagguggaggaa

SEQ ID NO: 107023 - RNA, 19 nt, Human
ccaccugaacaagaacaaa

SEQ ID NO: 107024 - RNA, 20 nt, Human
ccagaaggaccaagggaaga

SEQ ID NO: 107025 - RNA, 21 nt, Human
ccagcccuccccagccuucuc

SEQ ID NO: 107026 - RNA, 22 nt, Human
cccaaucuguggccacacccag

SEQ ID NO: 107027 - RNA, 19 nt, Human
ccccagcccccucugcacc

SEQ ID NO: 107028 - RNA, 23 nt, Human
cccccaaucuguggccacaccca

SEQ ID NO: 107029 - RNA, 19 nt, Human
cccccucuugcucugccac

SEQ ID NO: 107030 - RNA, 21 nt, Human
ccccgcugacgggcacaccug

SEQ ID NO: 107031 - RNA, 18 nt, Human
cccgagcugcagcggcac

SEQ ID NO: 107032 - RNA, 21 nt, Human
cccuggacucagcaaaggcuc

SEQ ID NO: 107033 - RNA, 23 nt, Human
ccuauccacuggagacccagagc

SEQ ID NO: 107034 - RNA, 19 nt, Human
ccucccuucauccuccuuc

SEQ ID NO: 107035 - RNA, 20 nt, Human
ccuccuaccuuucccacuua

SEQ ID NO: 107036 - RNA, 21 nt, Human
ccuccuuccaggcuuguccag

SEQ ID NO: 107037 - RNA, 23 nt, Human
ccucuaucucucagcuguguccc

SEQ ID NO: 107038 - RNA, 23 nt, Human
ccucucucccuggacucagcaaa

SEQ ID NO: 107039 - RNA, 20 nt, Human
ccugugugcauauguaugug

SEQ ID NO: 107040 - RNA, 24 nt, Human
ccuucucuccuccuaccuuuccca

SEQ ID NO: 107041 - RNA, 24 nt, Human
ccuuuacuaagccccuuugccccc

SEQ ID NO: 107042 - RNA, 21 nt, Human
cgcacacccugugcccagagg

SEQ ID NO: 107043 - RNA, 19 nt, Human
cuaaacccucuacacaucc

SEQ ID NO: 107044 - RNA, 22 nt, Human
cucaugccuguaauccacucuu

SEQ ID NO: 107045 - RNA, 23 nt, Human
cuccccgcugacgggcacaccug

SEQ ID NO: 107046 - RNA, 26 nt, Human
cucccuggacucagcaaaggcuccca

SEQ ID NO: 107047 - RNA, 25 nt, Human
cuccucuaucucucagcuguguccc

SEQ ID NO: 107048 - RNA, 20 nt, Human
cucuccuccuaccuuuccca

SEQ ID NO: 107049 - RNA, 20 nt, Human
cucugcaccaugcacucucc

SEQ ID NO: 107050 - RNA, 19 nt, Human
cucuguguuccaaugugac

SEQ ID NO: 107051 - RNA, 21 nt, Human
cucuucccuaaagcaauuaaa

SEQ ID NO: 107052 - RNA, 19 nt, Human
cucuucuuuuaaacaugua

SEQ ID NO: 107053 - RNA, 24 nt, Human
cugauccugcuuucccccucuugc

SEQ ID NO: 107054 - RNA, 21 nt, Human
cugcaccaugcacucuccucc

SEQ ID NO: 107055 - RNA, 21 nt, Human
cuggccucgcucauaugucuu

SEQ ID NO: 107056 - RNA, 20 nt, Human
cugggugagcccugggacuc

SEQ ID NO: 107057 - RNA, 24 nt, Human
cuguccagggcugcugggagagcu

SEQ ID NO: 107058 - RNA, 20 nt, Human
cugugugcauauguauguga

SEQ ID NO: 107059 - RNA, 20 nt, Human
cuuccaggcuuguccagcau

SEQ ID NO: 107060 - RNA, 24 nt, Human
cuugaguaggagccaagucaucug

SEQ ID NO: 107061 - RNA, 21 nt, Human
cuugcugcccagcccucccca

SEQ ID NO: 107062 - RNA, 24 nt, Human
cuuggccgcagugcugggcucagc

SEQ ID NO: 107063 - RNA, 24 nt, Human
cuuguccagcaugauaaacucugg

SEQ ID NO: 107064 - RNA, 22 nt, Human
gaacaagaacaaagacauucuc

SEQ ID NO: 107065 - RNA, 18 nt, Human
gaccccugaacucuccuu

SEQ ID NO: 107066 - RNA, 22 nt, Human
gagaaggcagcuccagaggacu

SEQ ID NO: 107067 - RNA, 23 nt, Human
gaguaggagccaagucaucugaa

SEQ ID NO: 107068 - RNA, 23 nt, Human
gaguuccacuccccgcugacggg

SEQ ID NO: 107069 - RNA, 21 nt, Human
gaucagcuggagcuggcuggu

SEQ ID NO: 107070 - RNA, 18 nt, Human
gauccugcuuucccccuc

SEQ ID NO: 107071 - RNA, 22 nt, Human
gcagcuccagaggacucaaagg

SEQ ID NO: 107072 - RNA, 24 nt, Human
gcagguucucuucagguggaggaa

SEQ ID NO: 107073 - RNA, 20 nt, Human
gccagguacaguggcucaug

SEQ ID NO: 107074 - RNA, 20 nt, Human
gcccagcccuccccagccuu

SEQ ID NO: 107075 - RNA, 19 nt, Human
gccugggcuuucucccggg

SEQ ID NO: 107076 - RNA, 20 nt, Human
gccuguaauccacucuuaag

SEQ ID NO: 107077 - RNA, 18 nt, Human
gcuccagaggacucaaag

SEQ ID NO: 107078 - RNA, 22 nt, Human
ggaaagcagaggcgucagcuca

SEQ ID NO: 107079 - RNA, 18 nt, Human
ggaccccugaacucuccu

SEQ ID NO: 107080 - RNA, 23 nt, Human
ggagguguggcucacaggcaggg

SEQ ID NO: 107081 - RNA, 21 nt, Human
ggccugggcuuucucccgggc

SEQ ID NO: 107082 - RNA, 22 nt, Human
gggaagacaguuccagcccaga

SEQ ID NO: 107083 - RNA, 18 nt, Human
gggcagaggcggaggucc

SEQ ID NO: 107084 - RNA, 18 nt, Human
guccagcaggcuggccug

SEQ ID NO: 107085 - RNA, 19 nt, Human
guuccaagccaucacuuug

SEQ ID NO: 107086 - RNA, 18 nt, Human
uaaaggcacgauauaaac

SEQ ID NO: 107087 - RNA, 22 nt, Human
uaaagucuucgacuuggccgca

SEQ ID NO: 107088 - RNA, 22 nt, Human
uaacagggucagaaguucuguu

SEQ ID NO: 107089 - RNA, 18 nt, Human
uaagacaguguuccaagc

SEQ ID NO: 107090 - RNA, 20 nt, Human
uaccacaaacuccuugguca

SEQ ID NO: 107091 - RNA, 20 nt, Human
uagaagguagccgaaguggc

SEQ ID NO: 107092 - RNA, 27 nt, Human
uagagguuccucagcaccccaaagcuu

SEQ ID NO: 107093 - RNA, 18 nt, Human
uaggagccaagucaucug

SEQ ID NO: 107094 - RNA, 20 nt, Human
uaggagguguggcucacagg

SEQ ID NO: 107095 - RNA, 21 nt, Human
uauaaccaccugaacaagaac

SEQ ID NO: 107096 - RNA, 23 nt, Human
uauuuuguuauaaccaccugaac

SEQ ID NO: 107097 - RNA, 22 nt, Human
ucaagagagaaagaaacgugca

SEQ ID NO: 107098 - RNA, 23 nt, Human
ucacuggacacaacccuugacuc

SEQ ID NO: 107099 - RNA, 23 nt, Human
ucacugugccuggcuugcugccc

SEQ ID NO: 107100 - RNA, 23 nt, Human
ucacuuccgaguuuugccccguc

SEQ ID NO: 107101 - RNA, 21 nt, Human
ucagcuucaaggcuaaugugc

SEQ ID NO: 107102 - RNA, 21 nt, Human
uccaaggccuggaccagaagg

SEQ ID NO: 107103 - RNA, 21 nt, Human
uccaaugugacuuggguucau

SEQ ID NO: 107104 - RNA, 25 nt, Human
uccacaauccagguucccccaaucu

SEQ ID NO: 107105 - RNA, 18 nt, Human
uccagcaggcuggccugg

SEQ ID NO: 107106 - RNA, 22 nt, Human
ucccaaacgucguccucgugcc

SEQ ID NO: 107107 - RNA, 18 nt, Human
ucccacuuauugccuccu

SEQ ID NO: 107108 - RNA, 18 nt, Human
uccucagcaccccaaagc

SEQ ID NO: 107109 - RNA, 23 nt, Human
uccugagcucgggacuaaacccu

SEQ ID NO: 107110 - RNA, 24 nt, Human
uccuguugcaucagcuuccucucg

SEQ ID NO: 107111 - RNA, 22 nt, Human
ucucaagugguggacucaguuu

SEQ ID NO: 107112 - RNA, 22 nt, Human
ucucccuggacucagcaaaggc

SEQ ID NO: 107113 - RNA, 19 nt, Human
ucuccgugcgccccagccc

SEQ ID NO: 107114 - RNA, 20 nt, Human
ucucucagcugugucccugg

SEQ ID NO: 107115 - RNA, 22 nt, Human
ucugacccuucucacccaggag

SEQ ID NO: 107116 - RNA, 22 nt, Human
ucugcccgagcugcagcggcac

SEQ ID NO: 107117 - RNA, 19 nt, Human
ucugcuuuccuccaaggcc

SEQ ID NO: 107118 - RNA, 20 nt, Human
ucuugcucugccacucacug

SEQ ID NO: 107119 - RNA, 19 nt, Human
ugaacaagaacaaagacau

SEQ ID NO: 107120 - RNA, 21 nt, Human
ugaacaagaacaaagacauuc

SEQ ID NO: 107121 - RNA, 23 nt, Human
ugaacgcacacccugugcccaga

SEQ ID NO: 107122 - RNA, 22 nt, Human
ugacgggcacaccugccuucca

SEQ ID NO: 107123 - RNA, 22 nt, Human
ugacuuggguucauuuaugugg

SEQ ID NO: 107124 - RNA, 21 nt, Human
ugagaaggcagcuccagagga

SEQ ID NO: 107125 - RNA, 23 nt, Human
ugauuuucagcugaaggcaauua

SEQ ID NO: 107126 - RNA, 21 nt, Human
ugcaggaaaaguucagguuuc

SEQ ID NO: 107127 - RNA, 19 nt, Human
ugccagaucucccuugccc

SEQ ID NO: 107128 - RNA, 22 nt, Human
ugccagaucucccuugcccugc

SEQ ID NO: 107129 - RNA, 21 nt, Human
ugcccagaggaggaggggcaa

SEQ ID NO: 107130 - RNA, 22 nt, Human
ugcccccagagcuaggaggugu

SEQ ID NO: 107131 - RNA, 18 nt, Human
ugccuacuuggggagggg

SEQ ID NO: 107132 - RNA, 18 nt, Human
ugccuccuuccaggcuug

SEQ ID NO: 107133 - RNA, 19 nt, Human
ugccuccuuccaggcuugg

SEQ ID NO: 107134 - RNA, 19 nt, Human
uggcucaugccuguaaucc

SEQ ID NO: 107135 - RNA, 20 nt, Human
uggcucaugccuguaaucca

SEQ ID NO: 107136 - RNA, 22 nt, Human
uggcugcgugcggaucagcugg

SEQ ID NO: 107137 - RNA, 18 nt, Human
uggcuugcugcccagccc

SEQ ID NO: 107138 - RNA, 21 nt, Human
ugugcauauguaugugaugua

SEQ ID NO: 107139 - RNA, 18 nt, Human
ugugugcauauguaugug

SEQ ID NO: 107140 - RNA, 19 nt, Human
ugugugccugugugcauau

SEQ ID NO: 107141 - RNA, 24 nt, Human
ugugugccugugugcauauguaug

SEQ ID NO: 107142 - RNA, 23 nt, Human
uguuccaaugugacuuggguuca

SEQ ID NO: 107143 - RNA, 19 nt, Human
uuaaaggggaagaaagccc

SEQ ID NO: 107144 - RNA, 24 nt, Human
uuccugagcucgggacuaaacccu

SEQ ID NO: 107145 - RNA, 21 nt, Human
uugccaugugugccugugugc

SEQ ID NO: 107146 - RNA, 23 nt, Human
uuuacuaagccccuuugccccca

SEQ ID NO: 107147 - RNA, 24 nt, Human
uuugcccccagagcuaggaggugu

SEQ ID NO: 107148 - RNA, 18 nt, Human
uuuuuuuuuuuuuuucug

SEQ ID NO: 107149 - RNA, 19 nt, Human
aacuaaagcucuuccuauu

SEQ ID NO: 107150 - RNA, 20 nt, Human
acucugagagugugacagau

SEQ ID NO: 107151 - RNA, 21 nt, Human
auggcuccagcaguggcaggu

SEQ ID NO: 107152 - RNA, 19 nt, Human
auugauguuuucguccaga

SEQ ID NO: 107153 - RNA, 19 nt, Human
caagucccagacucugaga

SEQ ID NO: 107154 - RNA, 23 nt, Human
cagguuaaaaacaauacugccca

SEQ ID NO: 107155 - RNA, 22 nt, Human
caucucaaccaaugcguccguu

SEQ ID NO: 107156 - RNA, 20 nt, Human
cccacagcgcugcuucucca

SEQ ID NO: 107157 - RNA, 21 nt, Human
ccuuacuggaaacuucaucuc

SEQ ID NO: 107158 - RNA, 22 nt, Human
cgcugcuucuccagugcugggg

SEQ ID NO: 107159 - RNA, 22 nt, Human
cuggaaacuucaucucaaccaa

SEQ ID NO: 107160 - RNA, 21 nt, Human
cuuacuggaaacuucaucuca

SEQ ID NO: 107161 - RNA, 21 nt, Human
gagagugugacagauugcccc

SEQ ID NO: 107162 - RNA, 23 nt, Human
gcucagcagaauugcacagcagu

SEQ ID NO: 107163 - RNA, 20 nt, Human
gcuccagcaguggcagguuc

SEQ ID NO: 107164 - RNA, 20 nt, Human
gucagguuaaaaacaauacu

SEQ ID NO: 107165 - RNA, 25 nt, Human
guccagacaccugcuggugugaaag

SEQ ID NO: 107166 - RNA, 20 nt, Human
uaaauauccacauugcacug

SEQ ID NO: 107167 - RNA, 25 nt, Human
uauuuuacagccauaaauauccaca

SEQ ID NO: 107168 - RNA, 21 nt, Human
ucauuaggguuuucccagccc

SEQ ID NO: 107169 - RNA, 18 nt, Human
uccgugccggggacaggg

SEQ ID NO: 107170 - RNA, 22 nt, Human
ugauguuuucguccagacaccu

SEQ ID NO: 107171 - RNA, 19 nt, Human
ugauuacaaaaacgccaga

SEQ ID NO: 107172 - RNA, 23 nt, Human
ugccuuguugaaauggcuccagc

SEQ ID NO: 107173 - RNA, 21 nt, Human
ugugacagauugcccccacag

SEQ ID NO: 107174 - RNA, 27 nt, Human
uuaaaguaaaaguguguuucaguucau

SEQ ID NO: 107175 - RNA, 20 nt, Human
uucagccugggaacuaaagc

SEQ ID NO: 107176 - RNA, 18 nt, Human
uucccagcccagggagaa

SEQ ID NO: 107177 - RNA, 21 nt, Human
uuuuuuuuuuuuuuuuucauu

SEQ ID NO: 107178 - RNA, 21 nt, Human
acgcagggggaggugggggcg

SEQ ID NO: 107179 - RNA, 21 nt, Human
acgcagggggaggugggggcg

SEQ ID NO: 107180 - RNA, 18 nt, Human
acuccaggcuuccgcggc

SEQ ID NO: 107181 - RNA, 18 nt, Human
acuccaggcuuccgcggc

SEQ ID NO: 107182 - RNA, 21 nt, Human
agaggcuccccguuccgccgg

SEQ ID NO: 107183 - RNA, 18 nt, Human
cagggggaggugggggcg

SEQ ID NO: 107184 - RNA, 18 nt, Human
cagggggaggugggggcg

SEQ ID NO: 107185 - RNA, 19 nt, Human
ccgcccacuccaggcuucc

SEQ ID NO: 107186 - RNA, 20 nt, Human
ccgcgcgcgucugcguaccg

SEQ ID NO: 107187 - RNA, 20 nt, Human
ccgcgcgcgucugcguaccg

SEQ ID NO: 107188 - RNA, 22 nt, Human
ccucucaggggcugguaaaagu

SEQ ID NO: 107189 - RNA, 18 nt, Human
cuccaggcuuccgcggcc

SEQ ID NO: 107190 - RNA, 18 nt, Human
cuccaggcuuccgcggcc

SEQ ID NO: 107191 - RNA, 24 nt, Human
cuccuccugguccucucaggggcu

SEQ ID NO: 107192 - RNA, 24 nt, Human
cuccuccugguccucucaggggcu

SEQ ID NO: 107193 - RNA, 21 nt, Human
cucugcacuucuacccaaguc

SEQ ID NO: 107194 - RNA, 21 nt, Human
cucugcacuucuacccaaguc

SEQ ID NO: 107195 - RNA, 24 nt, Human
cugaaggccucaugucaaaggcgg

SEQ ID NO: 107196 - RNA, 24 nt, Human
cugaaggccucaugucaaaggcgg

SEQ ID NO: 107197 - RNA, 19 nt, Human
cuguccaaagucgagguag

SEQ ID NO: 107198 - RNA, 21 nt, Human
gaccugggucgccccggaaac

SEQ ID NO: 107199 - RNA, 21 nt, Human
gaccugggucgccccggaaac

SEQ ID NO: 107200 - RNA, 20 nt, Human
ggaggugggggcgggcagag

SEQ ID NO: 107201 - RNA, 20 nt, Human
ggaggugggggcgggcagag

SEQ ID NO: 107202 - RNA, 18 nt, Human
ggggaggugggggcgggc

SEQ ID NO: 107203 - RNA, 21 nt, Human
gugagccaaguuaaaugaagg

SEQ ID NO: 107204 - RNA, 21 nt, Human
gugagccaaguuaaaugaagg

SEQ ID NO: 107205 - RNA, 20 nt, Human
guggcucugcacuucuaccc

SEQ ID NO: 107206 - RNA, 20 nt, Human
guggcucugcacuucuaccc

SEQ ID NO: 107207 - RNA, 22 nt, Human
uaccgcccacuccaggcuuccg

SEQ ID NO: 107208 - RNA, 22 nt, Human
ucaaggaugcuccuccuggucc

SEQ ID NO: 107209 - RNA, 22 nt, Human
ucaaggaugcuccuccuggucc

SEQ ID NO: 107210 - RNA, 19 nt, Human
ucaugucaaaggcggggaa

SEQ ID NO: 107211 - RNA, 19 nt, Human
ucaugucaaaggcggggaa

SEQ ID NO: 107212 - RNA, 18 nt, Human
ugaaggucaaggaugcuc

SEQ ID NO: 107213 - RNA, 18 nt, Human
ugaaggucaaggaugcuc

SEQ ID NO: 107214 - RNA, 21 nt, Human
uuuuuuuuuuuuuuucauguu

SEQ ID NO: 107215 - RNA, 22 nt, Human
aaacagaaagaaaaaaagggac

SEQ ID NO: 107216 - RNA, 24 nt, Human
aaacagaaagaaaaaaaugucaca

SEQ ID NO: 107217 - RNA, 20 nt, Human
aacauggcaaaacugugucu

SEQ ID NO: 107218 - RNA, 20 nt, Human
aaguugagguaggagaauug

SEQ ID NO: 107219 - RNA, 24 nt, Human
aauugauugaacccgggaggugga

SEQ ID NO: 107220 - RNA, 19 nt, Human
acacagcaagacuccaucu

SEQ ID NO: 107221 - RNA, 20 nt, Human
acacagcaagacuccaucuc

SEQ ID NO: 107222 - RNA, 24 nt, Human
acacagcaagacuccaucucaaaa

SEQ ID NO: 107223 - RNA, 21 nt, Human
acauggcaaaacugugucucu

SEQ ID NO: 107224 - RNA, 24 nt, Human
acccgggagguggaggcugcagug

SEQ ID NO: 107225 - RNA, 23 nt, Human
accugagcugaggaauucaagac

SEQ ID NO: 107226 - RNA, 22 nt, Human
acgccacugcacuccagccuag

SEQ ID NO: 107227 - RNA, 24 nt, Human
acgccacugcacuccagccuaggc

SEQ ID NO: 107228 - RNA, 19 nt, Human
acugcacuccagccuaggc

SEQ ID NO: 107229 - RNA, 23 nt, Human
acugcacuccagccuaggcgaca

SEQ ID NO: 107230 - RNA, 26 nt, Human
acugcacuccagccuaggcgacacag

SEQ ID NO: 107231 - RNA, 22 nt, Human
agaauugauugaacccgggagg

SEQ ID NO: 107232 - RNA, 19 nt, Human
agaggccaaggcaggcagu

SEQ ID NO: 107233 - RNA, 24 nt, Human
agccuaggcgacacagcaagacuc

SEQ ID NO: 107234 - RNA, 18 nt, Human
agccuggccaacauggca

SEQ ID NO: 107235 - RNA, 19 nt, Human
agggaccggagaacacugg

SEQ ID NO: 107236 - RNA, 24 nt, Human
agguaggagaauugauugaacccg

SEQ ID NO: 107237 - RNA, 19 nt, Human
agguggaggcugcagugag

SEQ ID NO: 107238 - RNA, 24 nt, Human
agguggaggcugcagugagccaag

SEQ ID NO: 107239 - RNA, 24 nt, Human
aguggcucacgccuguaaucccag

SEQ ID NO: 107240 - RNA, 21 nt, Human
aucaccugagcugaggaauuc

SEQ ID NO: 107241 - RNA, 23 nt, Human
aucacgccacugcacuccagccu

SEQ ID NO: 107242 - RNA, 22 nt, Human
aucccagcacuuugagaggcca

SEQ ID NO: 107243 - RNA, 21 nt, Human
augcaaacaaauccauaaaca

SEQ ID NO: 107244 - RNA, 18 nt, Human
caacaacacccgaugcug

SEQ ID NO: 107245 - RNA, 24 nt, Human
caacauggcaaaacugugucucua

SEQ ID NO: 107246 - RNA, 21 nt, Human
caagacuccaucucaaaaaaa

SEQ ID NO: 107247 - RNA, 24 nt, Human
caagaucacgccacugcacuccag

SEQ ID NO: 107248 - RNA, 22 nt, Human
caagcucucuucuccgacacuc

SEQ ID NO: 107249 - RNA, 23 nt, Human
caagcucucuucuccgacacucc

SEQ ID NO: 107250 - RNA, 24 nt, Human
caaggccgggcacaguggcucacg

SEQ ID NO: 107251 - RNA, 21 nt, Human
caccaaacagaaagaaaaaaa

SEQ ID NO: 107252 - RNA, 24 nt, Human
cacgccuguaaucccagcacuuug

SEQ ID NO: 107253 - RNA, 19 nt, Human
cacugcacuccagccuagg

SEQ ID NO: 107254 - RNA, 21 nt, Human
cacugcacuccagccuaggcg

SEQ ID NO: 107255 - RNA, 22 nt, Human
cacugcacuccagccuaggcga

SEQ ID NO: 107256 - RNA, 23 nt, Human
cacugcacuccagccuaggcgac

SEQ ID NO: 107257 - RNA, 25 nt, Human
cacugcacuccagccuaggcgacac

SEQ ID NO: 107258 - RNA, 20 nt, Human
cagaaagaaaaaaaugucac

SEQ ID NO: 107259 - RNA, 22 nt, Human
cagaaaguucuccuguuggcuc

SEQ ID NO: 107260 - RNA, 24 nt, Human
cagcacuuugagaggccaaggcag

SEQ ID NO: 107261 - RNA, 25 nt, Human
cagcacuuugagaggccaaggcagg

SEQ ID NO: 107262 - RNA, 26 nt, Human
ccaaacagaaagaaaaaaaugucaca

SEQ ID NO: 107263 - RNA, 19 nt, Human
ccacugcacuccagccuag

SEQ ID NO: 107264 - RNA, 20 nt, Human
ccacugcacuccagccuagg

SEQ ID NO: 107265 - RNA, 20 nt, Human
ccacugcacuccagccuagg

SEQ ID NO: 107266 - RNA, 21 nt, Human
ccacugcacuccagccuaggc

SEQ ID NO: 107267 - RNA, 23 nt, Human
ccacugcacuccagccuaggcga

SEQ ID NO: 107268 - RNA, 24 nt, Human
ccacugcacuccagccuaggcgac

SEQ ID NO: 107269 - RNA, 18 nt, Human
ccaggcagugaacacggc

SEQ ID NO: 107270 - RNA, 22 nt, Human
ccugagcugaggaauucaagac

SEQ ID NO: 107271 - RNA, 19 nt, Human
ccuguaaucccagcuacuc

SEQ ID NO: 107272 - RNA, 21 nt, Human
ccuguaaucccagcuacucag

SEQ ID NO: 107273 - RNA, 23 nt, Human
cgccuguaaucccagcacuuuga

SEQ ID NO: 107274 - RNA, 24 nt, Human
cgccuguaaucccagcuacucagg

SEQ ID NO: 107275 - RNA, 19 nt, Human
cggaaggaucacagagcug

SEQ ID NO: 107276 - RNA, 24 nt, Human
cgggagguggaggcugcagugagc

SEQ ID NO: 107277 - RNA, 22 nt, Human
cucacgccuguaaucccagcac

SEQ ID NO: 107278 - RNA, 24 nt, Human
cucacgccuguaaucccagcacuu

SEQ ID NO: 107279 - RNA, 19 nt, Human
cuccaucucaaaaaaaaaa

SEQ ID NO: 107280 - RNA, 24 nt, Human
cucuucacuauuccucaacuucag

SEQ ID NO: 107281 - RNA, 23 nt, Human
gaggaacauccucuaacugaggc

SEQ ID NO: 107282 - RNA, 18 nt, Human
gaggcugcagugagccaa

SEQ ID NO: 107283 - RNA, 19 nt, Human
gaggcugcagugagccaag

SEQ ID NO: 107284 - RNA, 19 nt, Human
gaucacagagcuguggucu

SEQ ID NO: 107285 - RNA, 21 nt, Human
gaucacagagcuguggucuug

SEQ ID NO: 107286 - RNA, 20 nt, Human
gccaagaucacgccacugca

SEQ ID NO: 107287 - RNA, 20 nt, Human
gcgggcgccuguaaucccag

SEQ ID NO: 107288 - RNA, 20 nt, Human
ggaggcugcagugagccaag

SEQ ID NO: 107289 - RNA, 24 nt, Human
ggaggcugcagugagccaagauca

SEQ ID NO: 107290 - RNA, 23 nt, Human
ggcacaguggcucacgccuguaa

SEQ ID NO: 107291 - RNA, 18 nt, Human
gggcacaguggcucacgc

SEQ ID NO: 107292 - RNA, 24 nt, Human
gguggcgggcgccuguaaucccag

SEQ ID NO: 107293 - RNA, 18 nt, Human
ggugugguggcgggcgcc

SEQ ID NO: 107294 - RNA, 23 nt, Human
ggugugguggcgggcgccuguaa

SEQ ID NO: 107295 - RNA, 19 nt, Human
gucucuacuaaaaguacaa

SEQ ID NO: 107296 - RNA, 19 nt, Human
uccacacuaagauaccagg

SEQ ID NO: 107297 - RNA, 23 nt, Human
uccucaacuucaguuuccucauc

SEQ ID NO: 107298 - RNA, 25 nt, Human
ucucaaaaaaaaaaaaguuagccaa

SEQ ID NO: 107299 - RNA, 21 nt, Human
ucucuacuaaaaguacaaaaa

SEQ ID NO: 107300 - RNA, 18 nt, Human
ugaacacggcacacagau

SEQ ID NO: 107301 - RNA, 24 nt, Human
ugagaggccaaggcaggcauauca

SEQ ID NO: 107302 - RNA, 26 nt, Human
ugagggcccccagcuggagggaccgg

SEQ ID NO: 107303 - RNA, 24 nt, Human
ugagguaggagaauugauugaacc

SEQ ID NO: 107304 - RNA, 18 nt, Human
ugagucuuuuuuaaaguc

SEQ ID NO: 107305 - RNA, 18 nt, Human
ugcaaacaaauccauaaa

SEQ ID NO: 107306 - RNA, 22 nt, Human
uggauggaucgcagcucucucc

SEQ ID NO: 107307 - RNA, 20 nt, Human
uggccuggauggaucgcagc

SEQ ID NO: 107308 - RNA, 24 nt, Human
uggcucacgccuguaaucccagca

SEQ ID NO: 107309 - RNA, 24 nt, Human
ugguggcgggcgccuguaauccca

SEQ ID NO: 107310 - RNA, 24 nt, Human
uguaaucccagcuacucaggaagu

SEQ ID NO: 107311 - RNA, 19 nt, Human
ugugguggcgggcgccugu

SEQ ID NO: 107312 - RNA, 24 nt, Human
uuagccaaaugcuuaccagaaagu

SEQ ID NO: 107313 - RNA, 18 nt, Human
uuaucaaaaacucaccaa

SEQ ID NO: 107314 - RNA, 21 nt, Human
uugaaaaguuagccaaggccg

SEQ ID NO: 107315 - RNA, 24 nt, Human
uugauugaacccgggagguggagg

SEQ ID NO: 107316 - RNA, 24 nt, Human
uuggacaaacucuucacuauuccu

SEQ ID NO: 107317 - RNA, 21 nt, Human
uuucaggguccuuaggcuucg

SEQ ID NO: 107318 - RNA, 18 nt, Human
aaacccaagacaccuugc

SEQ ID NO: 107319 - RNA, 23 nt, Human
aaacuagaagaugaaaacgaagg

SEQ ID NO: 107320 - RNA, 26 nt, Human
aaacuagaagaugaaaacgaaggcaa

SEQ ID NO: 107321 - RNA, 22 nt, Human
aaagaaccaaaauaaacccaag

SEQ ID NO: 107322 - RNA, 24 nt, Human
aacccaagacaccuugcugacacu

SEQ ID NO: 107323 - RNA, 23 nt, Human
aagaaccaaaauaaacccaagac

SEQ ID NO: 107324 - RNA, 22 nt, Human
aagacaccuugcugacacuucc

SEQ ID NO: 107325 - RNA, 25 nt, Human
acaaccaaaagaauuagcacaaccu

SEQ ID NO: 107326 - RNA, 22 nt, Human
acauugugauuauucugcacau

SEQ ID NO: 107327 - RNA, 22 nt, Human
acuuccccaccccuaaacaaac

SEQ ID NO: 107328 - RNA, 25 nt, Human
agaaaaauucaacuuuucacaacca

SEQ ID NO: 107329 - RNA, 20 nt, Human
cacaccucuaaaaccucaag

SEQ ID NO: 107330 - RNA, 23 nt, Human
caccuugcugacacuuccccacc

SEQ ID NO: 107331 - RNA, 24 nt, Human
cauucuguuaaguuucauucaacu

SEQ ID NO: 107332 - RNA, 21 nt, Human
ccaaaauaaacccaagacacu

SEQ ID NO: 107333 - RNA, 25 nt, Human
ccaccccuaaacaaacugaugacuc

SEQ ID NO: 107334 - RNA, 21 nt, Human
cccuaaacaaacugaugacuc

SEQ ID NO: 107335 - RNA, 20 nt, Human
ccucaagacuucccuuuuuu

SEQ ID NO: 107336 - RNA, 18 nt, Human
ccuugcugacacuucccc

SEQ ID NO: 107337 - RNA, 20 nt, Human
ccuugcugacacuuccccac

SEQ ID NO: 107338 - RNA, 21 nt, Human
ccuugcugacacuuccccacc

SEQ ID NO: 107339 - RNA, 18 nt, Human
cuugcugacacuucccca

SEQ ID NO: 107340 - RNA, 22 nt, Human
gaaaacgaaggcaacagaaaaa

SEQ ID NO: 107341 - RNA, 21 nt, Human
gacacuuccccaccccuaaac

SEQ ID NO: 107342 - RNA, 18 nt, Human
gacuaguuaccuaaucca

SEQ ID NO: 107343 - RNA, 21 nt, Human
gaguuuaauuacagaaaaggc

SEQ ID NO: 107344 - RNA, 18 nt, Human
ggacugggcggggggggc

SEQ ID NO: 107345 - RNA, 26 nt, Human
ggaggcggcccggcuccgcuuccucg

SEQ ID NO: 107346 - RNA, 20 nt, Human
ggcccggcuccgcuuccucg

SEQ ID NO: 107347 - RNA, 21 nt, Human
ggggggcauugaggagaauuu

SEQ ID NO: 107348 - RNA, 24 nt, Human
uaaagaaccaaaauaaacccaaga

SEQ ID NO: 107349 - RNA, 25 nt, Human
uaaagaaccaaaauaaacccaagac

SEQ ID NO: 107350 - RNA, 19 nt, Human
uagaagaugaaaacgaagg

SEQ ID NO: 107351 - RNA, 26 nt, Human
uaucacacagguauguuuauucaaca

SEQ ID NO: 107352 - RNA, 20 nt, Human
uaugacuaguuaccuaaucc

SEQ ID NO: 107353 - RNA, 21 nt, Human
uccccaccccuaaacaaacug

SEQ ID NO: 107354 - RNA, 23 nt, Human
ugaaacauaauucacaccucuaa

SEQ ID NO: 107355 - RNA, 24 nt, Human
ugaaacauaauucacaccucuaaa

SEQ ID NO: 107356 - RNA, 22 nt, Human
ugaaaguuuguaaacuguauuu

SEQ ID NO: 107357 - RNA, 23 nt, Human
ugaugaaacauaauucacaccuc

SEQ ID NO: 107358 - RNA, 24 nt, Human
uuaaaauagacaaacuagaagaug

SEQ ID NO: 107359 - RNA, 25 nt, Human
uuaaaguaagagauuaaaaacucau

SEQ ID NO: 107360 - RNA, 24 nt, Human
uuagcacaaccuuagaaauaauuu

SEQ ID NO: 107361 - RNA, 27 nt, Human
uucaacacugucuuuugaaaauggacc

SEQ ID NO: 107362 - RNA, 25 nt, Human
uucacaaccaaaagaauuagcacaa

SEQ ID NO: 107363 - RNA, 21 nt, Human
uucuaaauaaaucuuuuuaaa

SEQ ID NO: 107364 - RNA, 23 nt, Human
uuuuuccugcuucauuuaaccuu

SEQ ID NO: 107365 - RNA, 20 nt, Human
aaaaaccagggcugagagug

SEQ ID NO: 107366 - RNA, 24 nt, Human
aaaaaucaguggaagagaaaagac

SEQ ID NO: 107367 - RNA, 18 nt, Human
aaccagcacccccucuuc

SEQ ID NO: 107368 - RNA, 25 nt, Human
aagaaccagagaagccagggcagag

SEQ ID NO: 107369 - RNA, 23 nt, Human
aaugaagccacaugcggccuggg

SEQ ID NO: 107370 - RNA, 24 nt, Human
acagcacaggcacuccccccgggg

SEQ ID NO: 107371 - RNA, 22 nt, Human
acaggcacuccccccggggccu

SEQ ID NO: 107372 - RNA, 25 nt, Human
accaaccccaaggagaagggaacgc

SEQ ID NO: 107373 - RNA, 20 nt, Human
accagagaagccagggcaga

SEQ ID NO: 107374 - RNA, 21 nt, Human
agaauaaauaaauaaauagug

SEQ ID NO: 107375 - RNA, 20 nt, Human
agacacaggcucugcugggg

SEQ ID NO: 107376 - RNA, 22 nt, Human
agcagucuaaaacuuuguuccc

SEQ ID NO: 107377 - RNA, 19 nt, Human
agccagggcagaguugggg

SEQ ID NO: 107378 - RNA, 23 nt, Human
agcgaguggaggucugggcccag

SEQ ID NO: 107379 - RNA, 18 nt, Human
agcgcagcagucuaaaac

SEQ ID NO: 107380 - RNA, 19 nt, Human
aggcuccggcugcauuuuc

SEQ ID NO: 107381 - RNA, 21 nt, Human
agguaauaaagguauaauguc

SEQ ID NO: 107382 - RNA, 23 nt, Human
agugcccauacaguucagguggc

SEQ ID NO: 107383 - RNA, 23 nt, Human
caaguugugugacaccuccccuc

SEQ ID NO: 107384 - RNA, 18 nt, Human
cacaugcggccugggggc

SEQ ID NO: 107385 - RNA, 18 nt, Human
caccaaacuguucuuugc

SEQ ID NO: 107386 - RNA, 22 nt, Human
cacccccucuuccugacagcac

SEQ ID NO: 107387 - RNA, 23 nt, Human
cagaaacagaggcuggcugccag

SEQ ID NO: 107388 - RNA, 20 nt, Human
caggacauccaggauugccu

SEQ ID NO: 107389 - RNA, 20 nt, Human
caguggaagagaaaagacca

SEQ ID NO: 107390 - RNA, 22 nt, Human
cagugguggcccucaaaccagc

SEQ ID NO: 107391 - RNA, 19 nt, Human
ccacaugcggccugggggc

SEQ ID NO: 107392 - RNA, 18 nt, Human
ccagggcagaguuggggu

SEQ ID NO: 107393 - RNA, 23 nt, Human
ccaguagggguccuacccgaccc

SEQ ID NO: 107394 - RNA, 21 nt, Human
cccauacaguucagguggcca

SEQ ID NO: 107395 - RNA, 22 nt, Human
ccccauccucugacacauggcu

SEQ ID NO: 107396 - RNA, 22 nt, Human
ccccugacaccaaccccaagga

SEQ ID NO: 107397 - RNA, 25 nt, Human
cccugacaccaaccccaaggagaau

SEQ ID NO: 107398 - RNA, 19 nt, Human
ccuacccgacccuggggau

SEQ ID NO: 107399 - RNA, 22 nt, Human
ccuagccuggcuuaccccucaa

SEQ ID NO: 107400 - RNA, 21 nt, Human
ccuccaaguugugugacaccu

SEQ ID NO: 107401 - RNA, 18 nt, Human
ccucccagaaacagaggc

SEQ ID NO: 107402 - RNA, 21 nt, Human
ccucccagaaacagaggcugg

SEQ ID NO: 107403 - RNA, 22 nt, Human
ccucccagaaacagaggcuggc

SEQ ID NO: 107404 - RNA, 25 nt, Human
ccucccagaaacagaggcuggcugc

SEQ ID NO: 107405 - RNA, 21 nt, Human
ccugcgccacagugagaccag

SEQ ID NO: 107406 - RNA, 18 nt, Human
ccugggccagcugccaga

SEQ ID NO: 107407 - RNA, 24 nt, Human
ccuugcucuugcuggcucuuccug

SEQ ID NO: 107408 - RNA, 22 nt, Human
cucgccccugacaccaacccca

SEQ ID NO: 107409 - RNA, 23 nt, Human
cucgccccugacaccaaccccaa

SEQ ID NO: 107410 - RNA, 24 nt, Human
cuuuccacagggaagaaccagaga

SEQ ID NO: 107411 - RNA, 20 nt, Human
gaagccacaugcggccuggg

SEQ ID NO: 107412 - RNA, 23 nt, Human
gacacauucacagacgggugggu

SEQ ID NO: 107413 - RNA, 21 nt, Human
gacagugggggcccaagucca

SEQ ID NO: 107414 - RNA, 22 nt, Human
gagaauaaauaaauaaauagug

SEQ ID NO: 107415 - RNA, 21 nt, Human
gcaggaagcagaccuagcaga

SEQ ID NO: 107416 - RNA, 20 nt, Human
gccacaugcggccugggggc

SEQ ID NO: 107417 - RNA, 21 nt, Human
gcggcagcggcgacuccggag

SEQ ID NO: 107418 - RNA, 24 nt, Human
gcugggggcagaagagaguggaca

SEQ ID NO: 107419 - RNA, 19 nt, Human
ggagcgcgugcuggguagg

SEQ ID NO: 107420 - RNA, 23 nt, Human
ggcaggaagcagaccuagcagaa

SEQ ID NO: 107421 - RNA, 22 nt, Human
ggcaggcaagcgaguggagguc

SEQ ID NO: 107422 - RNA, 23 nt, Human
gggcaggaagcagaccuagcaga

SEQ ID NO: 107423 - RNA, 24 nt, Human
gggcaggaagcagaccuagcagaa

SEQ ID NO: 107424 - RNA, 22 nt, Human
gggcaggcaagcgaguggaggu

SEQ ID NO: 107425 - RNA, 19 nt, Human
gggcugauguccccuccag

SEQ ID NO: 107426 - RNA, 18 nt, Human
ggggacugaggcuccggc

SEQ ID NO: 107427 - RNA, 22 nt, Human
gggugagggugggcagauugcc

SEQ ID NO: 107428 - RNA, 19 nt, Human
gguaauaaagguauaaugu

SEQ ID NO: 107429 - RNA, 22 nt, Human
gugagacaagguccugccuguc

SEQ ID NO: 107430 - RNA, 24 nt, Human
gugcgacugggugagggugggcag

SEQ ID NO: 107431 - RNA, 26 nt, Human
guggacacauucacagacgggugggu

SEQ ID NO: 107432 - RNA, 24 nt, Human
uaaaauaaagagguaauaaaggua

SEQ ID NO: 107433 - RNA, 18 nt, Human
uacagaaaaaucagugga

SEQ ID NO: 107434 - RNA, 21 nt, Human
uaccccucaacaaggggucac

SEQ ID NO: 107435 - RNA, 19 nt, Human
uagguacaugugugugccc

SEQ ID NO: 107436 - RNA, 19 nt, Human
uaugcagauacagcucugu

SEQ ID NO: 107437 - RNA, 21 nt, Human
uccccgcggcagcggcgacuc

SEQ ID NO: 107438 - RNA, 18 nt, Human
ucccggggcgcgcgggcg

SEQ ID NO: 107439 - RNA, 20 nt, Human
uccuacccgacccuggggag

SEQ ID NO: 107440 - RNA, 21 nt, Human
ucuagguacaugugugugccc

SEQ ID NO: 107441 - RNA, 20 nt, Human
ucucuggacuaccagggcuc

SEQ ID NO: 107442 - RNA, 21 nt, Human
ugagacaagguccugccuguc

SEQ ID NO: 107443 - RNA, 19 nt, Human
ugagggggugagacacagg

SEQ ID NO: 107444 - RNA, 18 nt, Human
ugccuggaggagggacag

SEQ ID NO: 107445 - RNA, 21 nt, Human
ugccuggaggagggacagugg

SEQ ID NO: 107446 - RNA, 23 nt, Human
ugccuggaggagggacagugggg

SEQ ID NO: 107447 - RNA, 24 nt, Human
ugccuggaggagggacaguggggg

SEQ ID NO: 107448 - RNA, 21 nt, Human
uggcucgccccugacaccaac

SEQ ID NO: 107449 - RNA, 21 nt, Human
uggggcugauguccccuccag

SEQ ID NO: 107450 - RNA, 22 nt, Human
ugggggcagaagagaguggaca

SEQ ID NO: 107451 - RNA, 23 nt, Human
ugggggcagaagagaguggacac

SEQ ID NO: 107452 - RNA, 19 nt, Human
ugggguuggcucgccccug

SEQ ID NO: 107453 - RNA, 22 nt, Human
ugggucaguaccaggacauccc

SEQ ID NO: 107454 - RNA, 25 nt, Human
ugguguguucuagguacaugugugu

SEQ ID NO: 107455 - RNA, 22 nt, Human
ugguuccagcaagaugucucag

SEQ ID NO: 107456 - RNA, 23 nt, Human
uguguucuagguacaugugugug

SEQ ID NO: 107457 - RNA, 19 nt, Human
uugguuccagcaagauguc

SEQ ID NO: 107458 - RNA, 24 nt, Human
uugguuccagcaagaugucucagg

SEQ ID NO: 107459 - RNA, 23 nt, Human
uugugugacaccuccccucuccc

SEQ ID NO: 107460 - RNA, 23 nt, Human
uuuccacagggaagaaccagaga

SEQ ID NO: 107461 - RNA, 20 nt, Human
uuuuacaugaaaaagguauc

SEQ ID NO: 107462 - RNA, 22 nt, Human
uuuuuuacaugaaaaagguauc

SEQ ID NO: 107463 - RNA, 27 nt, Human
aaaaaaaaaaaaaaaaaaaggaaagaa

SEQ ID NO: 107464 - RNA, 28 nt, Human
aaaaaaaaaaaggaaagaaacaaagagg

SEQ ID NO: 107465 - RNA, 26 nt, Human
aaaaaaaaaaggaaagaaacaaagag

SEQ ID NO: 107466 - RNA, 22 nt, Human
aaaaaaaggaaagaaacaaaga

SEQ ID NO: 107467 - RNA, 20 nt, Human
aaaaaagaaaaaccaaccaa

SEQ ID NO: 107468 - RNA, 20 nt, Human
aaaaaagguaaugaagaaaa

SEQ ID NO: 107469 - RNA, 23 nt, Human
aaaaggaaagaaacaaagagaaa

SEQ ID NO: 107470 - RNA, 20 nt, Human
aaaaguuugugaaugcuuug

SEQ ID NO: 107471 - RNA, 24 nt, Human
aaagucacaguuucgugggguaga

SEQ ID NO: 107472 - RNA, 23 nt, Human
aacaaagugcaaagagaugacug

SEQ ID NO: 107473 - RNA, 22 nt, Human
aacaacaaaguucauuccucuc

SEQ ID NO: 107474 - RNA, 23 nt, Human
aacaacaaaguucauuccucuca

SEQ ID NO: 107475 - RNA, 18 nt, Human
aacaacacgccgucacag

SEQ ID NO: 107476 - RNA, 22 nt, Human
aacaggaacaaggaugaaccua

SEQ ID NO: 107477 - RNA, 23 nt, Human
aagagucguggaggacccaaagc

SEQ ID NO: 107478 - RNA, 19 nt, Human
aaguguugaaaaaugcacc

SEQ ID NO: 107479 - RNA, 18 nt, Human
aauuugcgcuggauuuca

SEQ ID NO: 107480 - RNA, 21 nt, Human
acagaugagacacacaauaua

SEQ ID NO: 107481 - RNA, 19 nt, Human
accccgagacccaggagug

SEQ ID NO: 107482 - RNA, 22 nt, Human
accccgagacccaggagugcug

SEQ ID NO: 107483 - RNA, 20 nt, Human
acuguggaccaagagacaaa

SEQ ID NO: 107484 - RNA, 22 nt, Human
agaaaaaccaaccaauccuagg

SEQ ID NO: 107485 - RNA, 22 nt, Human
agaaagcaguucacagaugaga

SEQ ID NO: 107486 - RNA, 22 nt, Human
agcaaacauucaaucaaaucug

SEQ ID NO: 107487 - RNA, 20 nt, Human
agcaggaaggagcugggaug

SEQ ID NO: 107488 - RNA, 26 nt, Human
agcuggaagaguugagcugcggcugc

SEQ ID NO: 107489 - RNA, 24 nt, Human
aggaaagaaacaaagagaaaaaaa

SEQ ID NO: 107490 - RNA, 20 nt, Human
aggccagguugcaaucugga

SEQ ID NO: 107491 - RNA, 21 nt, Human
agggaaaggcucauuuggaaa

SEQ ID NO: 107492 - RNA, 19 nt, Human
auaaaaggcaaugaaaaca

SEQ ID NO: 107493 - RNA, 19 nt, Human
auaaaguuucuuguaaaua

SEQ ID NO: 107494 - RNA, 18 nt, Human
caaaaguaaguguugaaa

SEQ ID NO: 107495 - RNA, 18 nt, Human
caagacugaaagacccau

SEQ ID NO: 107496 - RNA, 21 nt, Human
caagcaacacauaaaacgcca

SEQ ID NO: 107497 - RNA, 19 nt, Human
caagucacugccuccgagc

SEQ ID NO: 107498 - RNA, 22 nt, Human
cacacggagcuccccacccucc

SEQ ID NO: 107499 - RNA, 30 nt, Human
cacagcaggacauuugccaaaggagcuacc

SEQ ID NO: 107500 - RNA, 25 nt, Human
cacccuggggaaagcagggccaacu

SEQ ID NO: 107501 - RNA, 20 nt, Human
caccuaaggacuucccaacc

SEQ ID NO: 107502 - RNA, 25 nt, Human
cacugagugggagguggugguuugc

SEQ ID NO: 107503 - RNA, 24 nt, Human
cacuuagguuaagacacgagcagg

SEQ ID NO: 107504 - RNA, 23 nt, Human
cagaacucccgacgggccucuuc

SEQ ID NO: 107505 - RNA, 21 nt, Human
cagacccagugggagccgcac

SEQ ID NO: 107506 - RNA, 20 nt, Human
cagccaccugccccuccugg

SEQ ID NO: 107507 - RNA, 18 nt, Human
cauguucaccugcugcgg

SEQ ID NO: 107508 - RNA, 24 nt, Human
cauuuggaaagucacaguuucgug

SEQ ID NO: 107509 - RNA, 20 nt, Human
cccacagacuccaagcaaca

SEQ ID NO: 107510 - RNA, 24 nt, Human
ccccacccuccagugaagauggcu

SEQ ID NO: 107511 - RNA, 27 nt, Human
ccccgagacccaggagugcugggcucc

SEQ ID NO: 107512 - RNA, 20 nt, Human
cccgaccccgagacccagga

SEQ ID NO: 107513 - RNA, 21 nt, Human
cccgaccccgagacccaggag

SEQ ID NO: 107514 - RNA, 24 nt, Human
cccgagacccaggagugcugggcu

SEQ ID NO: 107515 - RNA, 18 nt, Human
cccggcggagauggucca

SEQ ID NO: 107516 - RNA, 19 nt, Human
cccgugcagccugcagggc

SEQ ID NO: 107517 - RNA, 22 nt, Human
cccgugcagccugcagggcugu

SEQ ID NO: 107518 - RNA, 21 nt, Human
cccuccccgaccccgagaccc

SEQ ID NO: 107519 - RNA, 21 nt, Human
ccgagcugaggccccgaugac

SEQ ID NO: 107520 - RNA, 21 nt, Human
ccggcggagaugguccacuuc

SEQ ID NO: 107521 - RNA, 21 nt, Human
ccuaagagucguggaggaccc

SEQ ID NO: 107522 - RNA, 22 nt, Human
ccucagccaccugccccuccug

SEQ ID NO: 107523 - RNA, 24 nt, Human
ccuccagugaagauggcuguccac

SEQ ID NO: 107524 - RNA, 19 nt, Human
ccucuuuuuuuuuuuacga

SEQ ID NO: 107525 - RNA, 22 nt, Human
cgaccccacagacuccaagcaa

SEQ ID NO: 107526 - RNA, 23 nt, Human
cgcagacccagugggagccgcac

SEQ ID NO: 107527 - RNA, 23 nt, Human
cgcuugagcuccaguuucugcuc

SEQ ID NO: 107528 - RNA, 19 nt, Human
cgugcagccugcagggcug

SEQ ID NO: 107529 - RNA, 24 nt, Human
cucaagaagcccauuucucaugga

SEQ ID NO: 107530 - RNA, 18 nt, Human
cucagccaccugccccuc

SEQ ID NO: 107531 - RNA, 23 nt, Human
cucagccaccugccccuccugga

SEQ ID NO: 107532 - RNA, 21 nt, Human
cuccccgaccccgagacccag

SEQ ID NO: 107533 - RNA, 18 nt, Human
cucugugagcuggcgcuu

SEQ ID NO: 107534 - RNA, 21 nt, Human
cugaaauccuucucuggucgu

SEQ ID NO: 107535 - RNA, 22 nt, Human
cugcaccuaaggacuucccaac

SEQ ID NO: 107536 - RNA, 21 nt, Human
cugccuccgagcugaggcccc

SEQ ID NO: 107537 - RNA, 22 nt, Human
cugcuguggucucuuccagcuc

SEQ ID NO: 107538 - RNA, 19 nt, Human
cugggcuccgagcaagucu

SEQ ID NO: 107539 - RNA, 19 nt, Human
cuuagguuaagacacgagc

SEQ ID NO: 107540 - RNA, 20 nt, Human
cuuugaaagaguaacaaagu

SEQ ID NO: 107541 - RNA, 22 nt, Human
gaacaggaacaaggaugaaccu

SEQ ID NO: 107542 - RNA, 19 nt, Human
gaagauggcuguccacaac

SEQ ID NO: 107543 - RNA, 21 nt, Human
gaagauggcuguccacaacua

SEQ ID NO: 107544 - RNA, 20 nt, Human
gaaguuuggaggggacacug

SEQ ID NO: 107545 - RNA, 19 nt, Human
gacugcagggaggugccca

SEQ ID NO: 107546 - RNA, 20 nt, Human
gagacccaggagugcugggc

SEQ ID NO: 107547 - RNA, 22 nt, Human
gagacccaggagugcugggcuc

SEQ ID NO: 107548 - RNA, 21 nt, Human
gagcuccaguuucugcuccuc

SEQ ID NO: 107549 - RNA, 21 nt, Human
gagcugcggcugcuuucucaa

SEQ ID NO: 107550 - RNA, 23 nt, Human
gcaccuaaggacuucccaacccu

SEQ ID NO: 107551 - RNA, 18 nt, Human
gcccagggcaggcaccgg

SEQ ID NO: 107552 - RNA, 24 nt, Human
gcgcuggauuucaucucuaugugc

SEQ ID NO: 107553 - RNA, 21 nt, Human
gcguuguccucggucagcugg

SEQ ID NO: 107554 - RNA, 20 nt, Human
gcugcuuucucaaacuuccu

SEQ ID NO: 107555 - RNA, 18 nt, Human
gcuuggguccccaucagc

SEQ ID NO: 107556 - RNA, 22 nt, Human
ggaaagggaucugaacugugga

SEQ ID NO: 107557 - RNA, 22 nt, Human
ggagagcuguagcucugugagc

SEQ ID NO: 107558 - RNA, 18 nt, Human
gggaaaggcucauuugga

SEQ ID NO: 107559 - RNA, 18 nt, Human
gggaagugugaaguuugg

SEQ ID NO: 107560 - RNA, 23 nt, Human
gggagagcuguagcucugugagc

SEQ ID NO: 107561 - RNA, 19 nt, Human
gggagaugacgcugggggg

SEQ ID NO: 107562 - RNA, 22 nt, Human
ggucagcugguuuagcugcucc

SEQ ID NO: 107563 - RNA, 18 nt, Human
guccacuucacuucgcag

SEQ ID NO: 107564 - RNA, 19 nt, Human
gugaagauggcuguccaca

SEQ ID NO: 107565 - RNA, 18 nt, Human
guggaccaagagacaaaa

SEQ ID NO: 107566 - RNA, 18 nt, Human
guggucucuuccagcucu

SEQ ID NO: 107567 - RNA, 19 nt, Human
guggucucuuccagcucug

SEQ ID NO: 107568 - RNA, 22 nt, Human
gugguggccaguuagucggcaa

SEQ ID NO: 107569 - RNA, 21 nt, Human
guugaguucagcguuguccuc

SEQ ID NO: 107570 - RNA, 24 nt, Human
uaaccauguuguaguuagcauccc

SEQ ID NO: 107571 - RNA, 24 nt, Human
uacacuaugccucgguggcaaaga

SEQ ID NO: 107572 - RNA, 18 nt, Human
uacaguacagcuguuacg

SEQ ID NO: 107573 - RNA, 21 nt, Human
uaccacauggagguuuguagg

SEQ ID NO: 107574 - RNA, 21 nt, Human
uacgaugucacccuggggaaa

SEQ ID NO: 107575 - RNA, 20 nt, Human
uacuguggaccaagagacaa

SEQ ID NO: 107576 - RNA, 18 nt, Human
uagaaaccaauucaauuu

SEQ ID NO: 107577 - RNA, 25 nt, Human
uagcuaauuaggauucuaaccaugu

SEQ ID NO: 107578 - RNA, 22 nt, Human
uaguguguuugguguuuuccug

SEQ ID NO: 107579 - RNA, 18 nt, Human
uauauccugcuggcaucu

SEQ ID NO: 107580 - RNA, 24 nt, Human
uauccugcuggcaucuuggugguc

SEQ ID NO: 107581 - RNA, 25 nt, Human
ucaacaacaaaguucauuccucuca

SEQ ID NO: 107582 - RNA, 22 nt, Human
ucacccuggggaaagcagggcc

SEQ ID NO: 107583 - RNA, 21 nt, Human
ucacugccuccgagcugaggc

SEQ ID NO: 107584 - RNA, 20 nt, Human
ucagcugguuuagcugcucc

SEQ ID NO: 107585 - RNA, 22 nt, Human
ucagugaccuuuccaaauacug

SEQ ID NO: 107586 - RNA, 24 nt, Human
ucagugaccuuuccaaauacugug

SEQ ID NO: 107587 - RNA, 23 nt, Human
uccccuccccgaccccgagaccc

SEQ ID NO: 107588 - RNA, 21 nt, Human
uccgcagacccagugggagcc

SEQ ID NO: 107589 - RNA, 21 nt, Human
ucugucuucgccuggcgaagc

SEQ ID NO: 107590 - RNA, 30 nt, Human
ucuguugucuuaaaaaaaaaaaaaaaaaaa

SEQ ID NO: 107591 - RNA, 22 nt, Human
ucuuccagcucugucuucgccu

SEQ ID NO: 107592 - RNA, 19 nt, Human
ugaaaugccaagacugaaa

SEQ ID NO: 107593 - RNA, 19 nt, Human
ugaaguuuggaggggacac

SEQ ID NO: 107594 - RNA, 18 nt, Human
ugaccgggacuguucuac

SEQ ID NO: 107595 - RNA, 19 nt, Human
ugaccgggacuguucuaca

SEQ ID NO: 107596 - RNA, 22 nt, Human
ugacugcagggaggugcccagg

SEQ ID NO: 107597 - RNA, 23 nt, Human
ugacugcagggaggugcccaggg

SEQ ID NO: 107598 - RNA, 23 nt, Human
ugagacacacaauauacauuuuc

SEQ ID NO: 107599 - RNA, 22 nt, Human
ugcaaagagaugacugcaggga

SEQ ID NO: 107600 - RNA, 20 nt, Human
ugcaggcagggaagugugaa

SEQ ID NO: 107601 - RNA, 21 nt, Human
ugcccagggcaggcaccgggc

SEQ ID NO: 107602 - RNA, 24 nt, Human
ugcccagggcaggcaccgggcgcu

SEQ ID NO: 107603 - RNA, 21 nt, Human
uggaaacgggucuaccuuuga

SEQ ID NO: 107604 - RNA, 21 nt, Human
uggaaagcgggaacagcaggc

SEQ ID NO: 107605 - RNA, 18 nt, Human
uggaggggacacugagug

SEQ ID NO: 107606 - RNA, 21 nt, Human
uggaggggacacugaguggga

SEQ ID NO: 107607 - RNA, 19 nt, Human
uggccccaagucacugccu

SEQ ID NO: 107608 - RNA, 19 nt, Human
uggcugagcacgugggcgc

SEQ ID NO: 107609 - RNA, 24 nt, Human
ugggaggggaagucgucaaggcca

SEQ ID NO: 107610 - RNA, 21 nt, Human
ugggccccgcugagccagagg

SEQ ID NO: 107611 - RNA, 21 nt, Human
uggggagaugacgcugggggg

SEQ ID NO: 107612 - RNA, 20 nt, Human
uggguccccaucagcagagu

SEQ ID NO: 107613 - RNA, 23 nt, Human
uggugggaggggaagucgucaag

SEQ ID NO: 107614 - RNA, 18 nt, Human
ugugaacagagucauccu

SEQ ID NO: 107615 - RNA, 21 nt, Human
uguguuugguguuuuccugca

SEQ ID NO: 107616 - RNA, 22 nt, Human
uguguuugguguuuuccugcag

SEQ ID NO: 107617 - RNA, 19 nt, Human
uucacagaugagacacacc

SEQ ID NO: 107618 - RNA, 21 nt, Human
uucaucucuaugugccgugag

SEQ ID NO: 107619 - RNA, 20 nt, Human
uucugcuguggucucuucca

SEQ ID NO: 107620 - RNA, 23 nt, Human
uugaaagaguaacaaagugcaaa

SEQ ID NO: 107621 - RNA, 23 nt, Human
uuucugcuccucgugcucuagac

SEQ ID NO: 107622 - RNA, 25 nt, Human
uuugcugaaauccuucucuggucgu

SEQ ID NO: 107623 - RNA, 22 nt, Human
aaaauuggaagcaauuacucua

SEQ ID NO: 107624 - RNA, 23 nt, Human
aaacugaggcggcgaugcccaaa

SEQ ID NO: 107625 - RNA, 20 nt, Human
aagauugaagcaagccauga

SEQ ID NO: 107626 - RNA, 21 nt, Human
aagcaggggaauuccuuaggu

SEQ ID NO: 107627 - RNA, 23 nt, Human
aagcgcggaaggcugggagggcu

SEQ ID NO: 107628 - RNA, 25 nt, Human
acaguaacaacaugcuguaccccaa

SEQ ID NO: 107629 - RNA, 23 nt, Human
acaugcuguaccccaaggaagac

SEQ ID NO: 107630 - RNA, 18 nt, Human
accccaaggaagacaagg

SEQ ID NO: 107631 - RNA, 21 nt, Human
accgcauucugcucuacgcgg

SEQ ID NO: 107632 - RNA, 20 nt, Human
acgcggugagcgccgggguc

SEQ ID NO: 107633 - RNA, 22 nt, Human
agauaucaaaagauugaagcaa

SEQ ID NO: 107634 - RNA, 25 nt, Human
agauaucaaaagauugaagcaagcc

SEQ ID NO: 107635 - RNA, 23 nt, Human
agccaugaaaccucugcgcggag

SEQ ID NO: 107636 - RNA, 19 nt, Human
aggaggggcagucaguggc

SEQ ID NO: 107637 - RNA, 19 nt, Human
aggcggcgaagacugaagc

SEQ ID NO: 107638 - RNA, 19 nt, Human
aggcgggcgaggaauggcu

SEQ ID NO: 107639 - RNA, 26 nt, Human
aucaaaagauugaagcaagccaugaa

SEQ ID NO: 107640 - RNA, 18 nt, Human
augcucaguguuuugcgg

SEQ ID NO: 107641 - RNA, 18 nt, Human
cagcguggccccgcccug

SEQ ID NO: 107642 - RNA, 26 nt, Human
caguaacaacaugcuguaccccaagg

SEQ ID NO: 107643 - RNA, 22 nt, Human
caugcgcacuggccuucaacca

SEQ ID NO: 107644 - RNA, 20 nt, Human
ccaauccgcgcucuccugcc

SEQ ID NO: 107645 - RNA, 19 nt, Human
ccagaacaggcggcgaaga

SEQ ID NO: 107646 - RNA, 19 nt, Human
ccccaaggaagacaaggag

SEQ ID NO: 107647 - RNA, 24 nt, Human
ccccaaggaagacaaggagaaccc

SEQ ID NO: 107648 - RNA, 20 nt, Human
ccccgcccugcccccugccu

SEQ ID NO: 107649 - RNA, 23 nt, Human
ccccgccuccugcuccgugccug

SEQ ID NO: 107650 - RNA, 22 nt, Human
ccccuggcaccucccccucccc

SEQ ID NO: 107651 - RNA, 23 nt, Human
cccuccgcugcaccucaagugau

SEQ ID NO: 107652 - RNA, 20 nt, Human
cccuggcaccucccccuccc

SEQ ID NO: 107653 - RNA, 24 nt, Human
ccgagcccgaggcggcggggagcc

SEQ ID NO: 107654 - RNA, 19 nt, Human
ccgcagccgccgccgccgc

SEQ ID NO: 107655 - RNA, 19 nt, Human
ccgcagccgccgccgccgc

SEQ ID NO: 107656 - RNA, 25 nt, Human
ccgcagccgccgccgccgcugcugc

SEQ ID NO: 107657 - RNA, 19 nt, Human
ccgcauucugcucuacgcg

SEQ ID NO: 107658 - RNA, 19 nt, Human
ccgccaaucgccgccgucc

SEQ ID NO: 107659 - RNA, 22 nt, Human
ccgccgccgccgcugcugcugc

SEQ ID NO: 107660 - RNA, 18 nt, Human
ccgcgcucuccugccagg

SEQ ID NO: 107661 - RNA, 19 nt, Human
ccucaagugauccugacuc

SEQ ID NO: 107662 - RNA, 21 nt, Human
ccugacucucauguccugccc

SEQ ID NO: 107663 - RNA, 23 nt, Human
ccugcuccgugccugaccaaucc

SEQ ID NO: 107664 - RNA, 18 nt, Human
ccuggcaccucccccucc

SEQ ID NO: 107665 - RNA, 21 nt, Human
ccuggcaccucccccucccca

SEQ ID NO: 107666 - RNA, 22 nt, Human
cgaggcggcggggagccagcac

SEQ ID NO: 107667 - RNA, 20 nt, Human
cgccaggaagagggcucucc

SEQ ID NO: 107668 - RNA, 19 nt, Human
cgccauggagcccgacggg

SEQ ID NO: 107669 - RNA, 18 nt, Human
cggcccgggaaaggacca

SEQ ID NO: 107670 - RNA, 25 nt, Human
cgggaaaggaccagaacaggcggcg

SEQ ID NO: 107671 - RNA, 19 nt, Human
cggggagccagcacgugug

SEQ ID NO: 107672 - RNA, 21 nt, Human
cggugagcgccggggucuucc

SEQ ID NO: 107673 - RNA, 21 nt, Human
cguggccccgcccugcccccu

SEQ ID NO: 107674 - RNA, 23 nt, Human
cucccuguucgcccuccgcugca

SEQ ID NO: 107675 - RNA, 29 nt, Human
cuccgugccugaccaauccgcgcucuccc

SEQ ID NO: 107676 - RNA, 23 nt, Human
cugacucucauguccugcccauc

SEQ ID NO: 107677 - RNA, 22 nt, Human
cugcugcugcugggcuaucagc

SEQ ID NO: 107678 - RNA, 24 nt, Human
gagccgagcccgaggcggcgggga

SEQ ID NO: 107679 - RNA, 24 nt, Human
gccaagcgccuuggcuucuguccu

SEQ ID NO: 107680 - RNA, 24 nt, Human
gcccaaaaauuggaagcaauuacu

SEQ ID NO: 107681 - RNA, 21 nt, Human
gcccaguccgcgaaggguaaa

SEQ ID NO: 107682 - RNA, 23 nt, Human
gcgaagcaccuaggccuggcccc

SEQ ID NO: 107683 - RNA, 25 nt, Human
ggaccagaacaggcggcgaagacug

SEQ ID NO: 107684 - RNA, 21 nt, Human
ggagagagccgagcccgaggg

SEQ ID NO: 107685 - RNA, 19 nt, Human
ggcgaagacugaagcccgg

SEQ ID NO: 107686 - RNA, 21 nt, Human
ggucaggagaaaagggccaug

SEQ ID NO: 107687 - RNA, 23 nt, Human
uaaaauggggucaggagaaaagg

SEQ ID NO: 107688 - RNA, 20 nt, Human
uaaccccuggcaccuccccc

SEQ ID NO: 107689 - RNA, 20 nt, Human
uaggaguggcaagagcucgc

SEQ ID NO: 107690 - RNA, 19 nt, Human
ucaauggcaaaggaaaaaa

SEQ ID NO: 107691 - RNA, 20 nt, Human
uccgccaaucgccgccgucc

SEQ ID NO: 107692 - RNA, 23 nt, Human
ugaagcaagccaugaaaccucug

SEQ ID NO: 107693 - RNA, 22 nt, Human
ugaccaauccgcgcucuccugc

SEQ ID NO: 107694 - RNA, 21 nt, Human
ugccugcagcgcgguccagcc

SEQ ID NO: 107695 - RNA, 25 nt, Human
ugcggaugccugcagcgcgguccag

SEQ ID NO: 107696 - RNA, 18 nt, Human
uguccugcccauccccaa

SEQ ID NO: 107697 - RNA, 23 nt, Human
ugugaucggacucccuguucgcc

SEQ ID NO: 107698 - RNA, 21 nt, Human
uguuagaaggcgggcgaggaa

SEQ ID NO: 107699 - RNA, 22 nt, Human
uucccggcucuggcaccagauc

SEQ ID NO: 107700 - RNA, 19 nt, Human
uugaagcaagccaugaaac

SEQ ID NO: 107701 - RNA, 19 nt, Human
aagcagcagggcugguguc

SEQ ID NO: 107702 - RNA, 21 nt, Human
agcaaggcuaagggcucgcca

SEQ ID NO: 107703 - RNA, 21 nt, Human
caaaaaaauaaacucuaccaa

SEQ ID NO: 107704 - RNA, 21 nt, Human
caaggcuaagggcucgccaga

SEQ ID NO: 107705 - RNA, 21 nt, Human
ccaagggugacggaagucucu

SEQ ID NO: 107706 - RNA, 21 nt, Human
ccaggcaauaaguuaggaagc

SEQ ID NO: 107707 - RNA, 19 nt, Human
gcagggcuggugucgggug

SEQ ID NO: 107708 - RNA, 22 nt, Human
gccgggcgggggcgggggcgcu

SEQ ID NO: 107709 - RNA, 26 nt, Human
ggcagcucccggagcgacgcaggccg

SEQ ID NO: 107710 - RNA, 19 nt, Human
ggccgggcgggggcggggg

SEQ ID NO: 107711 - RNA, 18 nt, Human
ggcggccgggcgggggcg

SEQ ID NO: 107712 - RNA, 18 nt, Human
ggcggcggcgggcgggcg

SEQ ID NO: 107713 - RNA, 18 nt, Human
ggcgggggcgcuccgucc

SEQ ID NO: 107714 - RNA, 20 nt, Human
ggcuggugucgggugugggc

SEQ ID NO: 107715 - RNA, 19 nt, Human
uaaacucuaccaaggguga

SEQ ID NO: 107716 - RNA, 24 nt, Human
ucccggagcgacgcaggccgaaca

SEQ ID NO: 107717 - RNA, 19 nt, Human
ucuacagcaaggcuaaggg

SEQ ID NO: 107718 - RNA, 24 nt, Human
ucucuacagcaaggcuaagggcuc

SEQ ID NO: 107719 - RNA, 25 nt, Human
aaaagaagaggacccugccagggag

SEQ ID NO: 107720 - RNA, 21 nt, Human
acucugagaaggguggagaga

SEQ ID NO: 107721 - RNA, 19 nt, Human
agaccuggcugggcugggc

SEQ ID NO: 107722 - RNA, 24 nt, Human
agaccuggcugggcugggcugaag

SEQ ID NO: 107723 - RNA, 18 nt, Human
agcccccaggugggacuc

SEQ ID NO: 107724 - RNA, 19 nt, Human
aggagaccuggcugggcug

SEQ ID NO: 107725 - RNA, 22 nt, Human
aggagaccuggcugggcugggc

SEQ ID NO: 107726 - RNA, 21 nt, Human
agugagggagcaggacucugg

SEQ ID NO: 107727 - RNA, 21 nt, Human
cagucgguggcaggugggcag

SEQ ID NO: 107728 - RNA, 19 nt, Human
ccgagugugcugggagcuc

SEQ ID NO: 107729 - RNA, 19 nt, Human
ccuggcugggcugggcuga

SEQ ID NO: 107730 - RNA, 22 nt, Human
cugggagcucuccauuaacuag

SEQ ID NO: 107731 - RNA, 25 nt, Human
gaaaagaagaggacccugccaggga

SEQ ID NO: 107732 - RNA, 20 nt, Human
gagcaggacucuggugggcc

SEQ ID NO: 107733 - RNA, 23 nt, Human
gcugggcugggcugaaggggggc

SEQ ID NO: 107734 - RNA, 22 nt, Human
gcugucuguauccuggagguga

SEQ ID NO: 107735 - RNA, 22 nt, Human
ggacucugggacagggggcggg

SEQ ID NO: 107736 - RNA, 24 nt, Human
ggcugggcugggcugaaggggggc

SEQ ID NO: 107737 - RNA, 18 nt, Human
ggggcugucuguauccug

SEQ ID NO: 107738 - RNA, 18 nt, Human
uaacuagagcuccugguu

SEQ ID NO: 107739 - RNA, 21 nt, Human
uaggagaccuggcugggcugg

SEQ ID NO: 107740 - RNA, 23 nt, Human
uaggagaccuggcugggcugggc

SEQ ID NO: 107741 - RNA, 18 nt, Human
uccagaggauggagccca

SEQ ID NO: 107742 - RNA, 19 nt, Human
ucccacuggcuggguucca

SEQ ID NO: 107743 - RNA, 21 nt, Human
ucugggaaaagaagaggaccc

SEQ ID NO: 107744 - RNA, 19 nt, Human
uggaacucugguugaaacu

SEQ ID NO: 107745 - RNA, 22 nt, Human
uggagacaaagcacaagcuccc

SEQ ID NO: 107746 - RNA, 20 nt, Human
uggcugggcugggcugaagg

SEQ ID NO: 107747 - RNA, 21 nt, Human
uggcugggcugggcugaaggg

SEQ ID NO: 107748 - RNA, 25 nt, Human
uggcugggcugggcugaaggggggc

SEQ ID NO: 107749 - RNA, 20 nt, Human
ugggcugggcugaagggggg

SEQ ID NO: 107750 - RNA, 21 nt, Human
ugggcugggcugaaggggggc

SEQ ID NO: 107751 - RNA, 23 nt, Human
ugggcugggcugaaggggggcug

SEQ ID NO: 107752 - RNA, 24 nt, Human
uggugggccaggcccucccacugg

SEQ ID NO: 107753 - RNA, 20 nt, Human
ugguugggguggagcucugg

SEQ ID NO: 107754 - RNA, 18 nt, Human
ugugcugggagcucucca

SEQ ID NO: 107755 - RNA, 19 nt, Human
ugugcugggagcucuccau

SEQ ID NO: 107756 - RNA, 24 nt, Human
uucauuggccagaauccagaggau

SEQ ID NO: 107757 - RNA, 22 nt, Human
uuuuuuuuuaaggccaccaaug

SEQ ID NO: 107758 - RNA, 18 nt, Human
uuuuuuuuuuuuaaggcc

SEQ ID NO: 107759 - RNA, 23 nt, Human
uuuuuuuuuuuuuuuuuuuaagg

SEQ ID NO: 107760 - RNA, 22 nt, Human
aacagggagggaggaugcaacc

SEQ ID NO: 107761 - RNA, 24 nt, Human
aagauccggaacagggagggagga

SEQ ID NO: 107762 - RNA, 18 nt, Human
aggcaggggaugcggggg

SEQ ID NO: 107763 - RNA, 19 nt, Human
aggcaggggaugcgggggc

SEQ ID NO: 107764 - RNA, 25 nt, Human
aggcugcagccgaaaugggggucgg

SEQ ID NO: 107765 - RNA, 20 nt, Human
aggcuggagccggaauggga

SEQ ID NO: 107766 - RNA, 23 nt, Human
ccggaacagggagggaggaugca

SEQ ID NO: 107767 - RNA, 22 nt, Human
cgcaagauaagauccggaacag

SEQ ID NO: 107768 - RNA, 18 nt, Human
cugcagccgaaauggggg

SEQ ID NO: 107769 - RNA, 22 nt, Human
cuugagucaucagcuggcgaug

SEQ ID NO: 107770 - RNA, 20 nt, Human
gagcaaguagaaugggccau

SEQ ID NO: 107771 - RNA, 18 nt, Human
gcgcuggcgcaagauaag

SEQ ID NO: 107772 - RNA, 21 nt, Human
ggaggcaggggaugcgggggc

SEQ ID NO: 107773 - RNA, 23 nt, Human
ugaggucuggcuacgggauccug

SEQ ID NO: 107774 - RNA, 23 nt, Human
ugggaaucuugagucaucagcug

SEQ ID NO: 107775 - RNA, 23 nt, Human
ugggccaucauuagaaugagcaa

SEQ ID NO: 107776 - RNA, 20 nt, Human
acuuggcuugugacuucugu

SEQ ID NO: 107777 - RNA, 22 nt, Human
aucuccccugguuccuccccaa

SEQ ID NO: 107778 - RNA, 19 nt, Human
cagaaaacuucccagucac

SEQ ID NO: 107779 - RNA, 21 nt, Human
cugguuccuccccaacccguu

SEQ ID NO: 107780 - RNA, 20 nt, Human
gaaaacuucccagucaccgg

SEQ ID NO: 107781 - RNA, 19 nt, Human
gacgguugacaucuccccu

SEQ ID NO: 107782 - RNA, 19 nt, Human
uaaagauaggcaggaucua

SEQ ID NO: 107783 - RNA, 24 nt, Human
ucucacuuggcuugugacuucugu

SEQ ID NO: 107784 - RNA, 20 nt, Human
ucuccccugguuccucccca

SEQ ID NO: 107785 - RNA, 22 nt, Human
ucuccccugguuccuccccaac

SEQ ID NO: 107786 - RNA, 24 nt, Human
ugaaaaguggccugcuggcuaugc

SEQ ID NO: 107787 - RNA, 20 nt, Human
aaaaaguuucagcagagaca

SEQ ID NO: 107788 - RNA, 20 nt, Human
aaaauaaagcaaacauggga

SEQ ID NO: 107789 - RNA, 19 nt, Human
aagcaaacaugggauuuuc

SEQ ID NO: 107790 - RNA, 21 nt, Human
aagcaaacaugggauuuucac

SEQ ID NO: 107791 - RNA, 21 nt, Human
acagaaaaagaguucaagcau

SEQ ID NO: 107792 - RNA, 20 nt, Human
accauacaguugaaaaaaac

SEQ ID NO: 107793 - RNA, 21 nt, Human
acuugcugauccucugagacu

SEQ ID NO: 107794 - RNA, 19 nt, Human
agcaaguaagagaaaguca

SEQ ID NO: 107795 - RNA, 21 nt, Human
aggccacaacaucugggauca

SEQ ID NO: 107796 - RNA, 21 nt, Human
agucaauacugauggccucca

SEQ ID NO: 107797 - RNA, 22 nt, Human
caaaaagguacuaaagaugaua

SEQ ID NO: 107798 - RNA, 23 nt, Human
caacaucugggaucaaggaacac

SEQ ID NO: 107799 - RNA, 19 nt, Human
cacaacaucugggaucaag

SEQ ID NO: 107800 - RNA, 21 nt, Human
cccaggccacaacaucuggga

SEQ ID NO: 107801 - RNA, 22 nt, Human
ccucugagacugcaucuuauag

SEQ ID NO: 107802 - RNA, 25 nt, Human
cuuauaguucauaaaaucugcuuug

SEQ ID NO: 107803 - RNA, 18 nt, Human
gaacacauuuugacuaaa

SEQ ID NO: 107804 - RNA, 19 nt, Human
gaguuucacagaaaaagag

SEQ ID NO: 107805 - RNA, 24 nt, Human
gggauuuucacaaaguuaagagcc

SEQ ID NO: 107806 - RNA, 22 nt, Human
gucacaacugagguacaacgac

SEQ ID NO: 107807 - RNA, 23 nt, Human
gucacaacugagguacaacgacu

SEQ ID NO: 107808 - RNA, 26 nt, Human
uaacauagaaauuuuauuacagcauu

SEQ ID NO: 107809 - RNA, 22 nt, Human
uacagcaaguaagagaaaguca

SEQ ID NO: 107810 - RNA, 21 nt, Human
uagaccauacaguugaaaaaa

SEQ ID NO: 107811 - RNA, 22 nt, Human
ucaagcauuagcgcaaacugcc

SEQ ID NO: 107812 - RNA, 18 nt, Human
ucacagaaaaagaguuca

SEQ ID NO: 107813 - RNA, 23 nt, Human
ucuuauaguucauaaaaucugcu

SEQ ID NO: 107814 - RNA, 20 nt, Human
ugaaaaaaacacagucucau

SEQ ID NO: 107815 - RNA, 18 nt, Human
ugaaaaaugugaauacau

SEQ ID NO: 107816 - RNA, 25 nt, Human
ugaaaccacugaaaaaugugaauac

SEQ ID NO: 107817 - RNA, 20 nt, Human
ugagccccaaaauguuuaac

SEQ ID NO: 107818 - RNA, 24 nt, Human
ugagguacaacgacuuguguuacu

SEQ ID NO: 107819 - RNA, 22 nt, Human
uggucauaccuuaaugaguuuc

SEQ ID NO: 107820 - RNA, 21 nt, Human
uugcugauccucugagacugc

SEQ ID NO: 107821 - RNA, 20 nt, Human
aaaacacccacaggcaccca

SEQ ID NO: 107822 - RNA, 19 nt, Human
aaaagacucuaacaacaua

SEQ ID NO: 107823 - RNA, 23 nt, Human
aaacacccacaggcacccaucca

SEQ ID NO: 107824 - RNA, 18 nt, Human
aaacagguuaaccaaauc

SEQ ID NO: 107825 - RNA, 19 nt, Human
aacaaaaaacaacuuacag

SEQ ID NO: 107826 - RNA, 18 nt, Human
aaccuuuaaggaacauuc

SEQ ID NO: 107827 - RNA, 20 nt, Human
aacgaaauaaaaacagcuuc

SEQ ID NO: 107828 - RNA, 20 nt, Human
aacgaaauugcauucuugug

SEQ ID NO: 107829 - RNA, 22 nt, Human
aagaagaacagauauuucccuc

SEQ ID NO: 107830 - RNA, 22 nt, Human
aagaagagauggauugugagga

SEQ ID NO: 107831 - RNA, 18 nt, Human
aagacacaccacauuugu

SEQ ID NO: 107832 - RNA, 21 nt, Human
aagaccacaaauaucuugcca

SEQ ID NO: 107833 - RNA, 21 nt, Human
aagcagauauguuuacaaaau

SEQ ID NO: 107834 - RNA, 18 nt, Human
aagcaggcuccugccagg

SEQ ID NO: 107835 - RNA, 18 nt, Human
aagccaaguaagaaucug

SEQ ID NO: 107836 - RNA, 23 nt, Human
aaucacagugaccaaaggauuug

SEQ ID NO: 107837 - RNA, 27 nt, Human
acaaagucagaaccagaccacggcccc

SEQ ID NO: 107838 - RNA, 18 nt, Human
acaagcaggcuccugcca

SEQ ID NO: 107839 - RNA, 24 nt, Human
acacagcaagguaccucauagucu

SEQ ID NO: 107840 - RNA, 24 nt, Human
accacaaauaucuugccauaaaaa

SEQ ID NO: 107841 - RNA, 20 nt, Human
agaccacaaauaucuugcca

SEQ ID NO: 107842 - RNA, 20 nt, Human
agaguucuaaacuaccucuc

SEQ ID NO: 107843 - RNA, 20 nt, Human
agcuucuuucccuuuucuuc

SEQ ID NO: 107844 - RNA, 21 nt, Human
aggcaaaaagaguauucaggg

SEQ ID NO: 107845 - RNA, 22 nt, Human
aguaaauacugaauaguuacaa

SEQ ID NO: 107846 - RNA, 21 nt, Human
augagacuaucaacuccccuu

SEQ ID NO: 107847 - RNA, 29 nt, Human
auggauugugaggaggaggaggaaaggag

SEQ ID NO: 107848 - RNA, 18 nt, Human
auuuucuccuuaaaagga

SEQ ID NO: 107849 - RNA, 24 nt, Human
caaaaaacaacuuacagacuucca

SEQ ID NO: 107850 - RNA, 21 nt, Human
caaauccaaaguacaauaaag

SEQ ID NO: 107851 - RNA, 26 nt, Human
caagaccacaaauaucuugccauaaa

SEQ ID NO: 107852 - RNA, 20 nt, Human
cacaagcaggcuccugccag

SEQ ID NO: 107853 - RNA, 21 nt, Human
cacacucaugcacacgaacua

SEQ ID NO: 107854 - RNA, 22 nt, Human
cacccacccugcacuuuggccc

SEQ ID NO: 107855 - RNA, 20 nt, Human
cacggccccgccccuuuaga

SEQ ID NO: 107856 - RNA, 19 nt, Human
cacuccacuauccugcuug

SEQ ID NO: 107857 - RNA, 23 nt, Human
cacuccacuauccugcuuguccu

SEQ ID NO: 107858 - RNA, 19 nt, Human
cagaaccagaccacggccc

SEQ ID NO: 107859 - RNA, 19 nt, Human
cagauaaaagacucuaaca

SEQ ID NO: 107860 - RNA, 27 nt, Human
cauuucuccucuguucacuuggguuuc

SEQ ID NO: 107861 - RNA, 22 nt, Human
ccaagcacaaaguguacaucau

SEQ ID NO: 107862 - RNA, 20 nt, Human
ccagagccuugaucggcaac

SEQ ID NO: 107863 - RNA, 24 nt, Human
ccagguauuaacaccuaacuuacu

SEQ ID NO: 107864 - RNA, 23 nt, Human
ccauccacacucaugcacacgaa

SEQ ID NO: 107865 - RNA, 21 nt, Human
cccaggagggcacaaaaacac

SEQ ID NO: 107866 - RNA, 19 nt, Human
cccucccuuucucacucca

SEQ ID NO: 107867 - RNA, 21 nt, Human
cccugaccagauaaaagacuc

SEQ ID NO: 107868 - RNA, 22 nt, Human
cgaaauaaaaacagcuucucga

SEQ ID NO: 107869 - RNA, 20 nt, Human
cuaaaaacacccacaggcac

SEQ ID NO: 107870 - RNA, 21 nt, Human
cuaaaaacacccacaggcacc

SEQ ID NO: 107871 - RNA, 26 nt, Human
cugccaggaggcagcuggggguucuu

SEQ ID NO: 107872 - RNA, 18 nt, Human
cuggaucaaaacaaaaac

SEQ ID NO: 107873 - RNA, 20 nt, Human
cuguguuuucucuggugucu

SEQ ID NO: 107874 - RNA, 23 nt, Human
cuugcccacaccagccucuccca

SEQ ID NO: 107875 - RNA, 27 nt, Human
cuuuugcuggaccugauuuggccuccu

SEQ ID NO: 107876 - RNA, 21 nt, Human
gaaaacagguuaaccaaaucc

SEQ ID NO: 107877 - RNA, 23 nt, Human
gaaucaucaguagugaguuuaaa

SEQ ID NO: 107878 - RNA, 21 nt, Human
gaccacggccccgccccuuua

SEQ ID NO: 107879 - RNA, 20 nt, Human
gacuauaaccacgauaaagg

SEQ ID NO: 107880 - RNA, 19 nt, Human
gagccggggugaggugggu

SEQ ID NO: 107881 - RNA, 21 nt, Human
gagccggggugagguggguuu

SEQ ID NO: 107882 - RNA, 18 nt, Human
gagggacaaagcagagga

SEQ ID NO: 107883 - RNA, 22 nt, Human
gcagcuggggguucuucuggcc

SEQ ID NO: 107884 - RNA, 24 nt, Human
gugguuuuacauuuucagcuucuu

SEQ ID NO: 107885 - RNA, 20 nt, Human
uaaaaacacccacaggcacc

SEQ ID NO: 107886 - RNA, 22 nt, Human
uaaaauaucucccgccuugaaa

SEQ ID NO: 107887 - RNA, 22 nt, Human
uaacuugcuuggguccgaacau

SEQ ID NO: 107888 - RNA, 23 nt, Human
uaagaagagauggauugugagga

SEQ ID NO: 107889 - RNA, 23 nt, Human
uaagcagacauaauacauaaugc

SEQ ID NO: 107890 - RNA, 18 nt, Human
uaauuuaggaaccuuggc

SEQ ID NO: 107891 - RNA, 24 nt, Human
uacaguaacaaaaaacaacuuaca

SEQ ID NO: 107892 - RNA, 19 nt, Human
uacauccccauuaaagcag

SEQ ID NO: 107893 - RNA, 19 nt, Human
uaccagguauuaacaccua

SEQ ID NO: 107894 - RNA, 21 nt, Human
uagaacauuauuggggugaaa

SEQ ID NO: 107895 - RNA, 22 nt, Human
uaggaaaagacuuucucagaag

SEQ ID NO: 107896 - RNA, 21 nt, Human
uaggcauuaacugaucacuua

SEQ ID NO: 107897 - RNA, 19 nt, Human
uagguuugagcagauugca

SEQ ID NO: 107898 - RNA, 20 nt, Human
uagucaucauuaucugcuau

SEQ ID NO: 107899 - RNA, 22 nt, Human
uauaaaggagaaaaagaaaaca

SEQ ID NO: 107900 - RNA, 22 nt, Human
ucaauccuaaguagccauugcc

SEQ ID NO: 107901 - RNA, 22 nt, Human
ucagcuucuuucccuuuucuuc

SEQ ID NO: 107902 - RNA, 19 nt, Human
uccacacaguggaaauuau

SEQ ID NO: 107903 - RNA, 20 nt, Human
uccccuuucauccuccuaca

SEQ ID NO: 107904 - RNA, 18 nt, Human
ucccuuacauuucuacca

SEQ ID NO: 107905 - RNA, 19 nt, Human
ucccuuuucuucucuccca

SEQ ID NO: 107906 - RNA, 24 nt, Human
uccuaaguagccauugccaguagg

SEQ ID NO: 107907 - RNA, 24 nt, Human
ucgaaugcagcacuaaaacagguc

SEQ ID NO: 107908 - RNA, 21 nt, Human
ucuaaaaacacccacaggcac

SEQ ID NO: 107909 - RNA, 19 nt, Human
ucucauuucuccucuguuc

SEQ ID NO: 107910 - RNA, 19 nt, Human
ucucugaaugccagagccu

SEQ ID NO: 107911 - RNA, 22 nt, Human
ugaaaucacagugaccaaagga

SEQ ID NO: 107912 - RNA, 18 nt, Human
ugaacagcuaauacauca

SEQ ID NO: 107913 - RNA, 18 nt, Human
ugagccaaaucugcacuu

SEQ ID NO: 107914 - RNA, 19 nt, Human
ugagcugacuauaaccacg

SEQ ID NO: 107915 - RNA, 18 nt, Human
ugaggaggaggaggaaag

SEQ ID NO: 107916 - RNA, 21 nt, Human
ugaggaggaggaggaaaggag

SEQ ID NO: 107917 - RNA, 21 nt, Human
ugccuuagcauuugugugcuu

SEQ ID NO: 107918 - RNA, 21 nt, Human
uggaagacacaccacauuugu

SEQ ID NO: 107919 - RNA, 19 nt, Human
uggaauggaaaugagcuga

SEQ ID NO: 107920 - RNA, 23 nt, Human
uggauugugaggaggaggaggaa

SEQ ID NO: 107921 - RNA, 25 nt, Human
uggcaaucucauuucuccucuguca

SEQ ID NO: 107922 - RNA, 21 nt, Human
uggccucuagguuuaagccuc

SEQ ID NO: 107923 - RNA, 20 nt, Human
uggcuaggaggcugagaaga

SEQ ID NO: 107924 - RNA, 26 nt, Human
uguauacaaaacacacacacuaugug

SEQ ID NO: 107925 - RNA, 22 nt, Human
uguuuuaggucugggacuuccu

SEQ ID NO: 107926 - RNA, 18 nt, Human
uuaagccaaguaagaauc

SEQ ID NO: 107927 - RNA, 24 nt, Human
uuaaggaacauucaauuuaaaaaa

SEQ ID NO: 107928 - RNA, 18 nt, Human
uuaauucccaccccuaug

SEQ ID NO: 107929 - RNA, 19 nt, Human
uuaguggcucucagaagca

SEQ ID NO: 107930 - RNA, 21 nt, Human
uucuccuuaaaaggacuuuau

SEQ ID NO: 107931 - RNA, 20 nt, Human
uuuacaaaauagggagugcu

SEQ ID NO: 107932 - RNA, 26 nt, Human
uuuccauauuacauaggacuuggcua

SEQ ID NO: 107933 - RNA, 21 nt, Human
uuucucagaagcaucagccug

SEQ ID NO: 107934 - RNA, 23 nt, Human
uuuggcauuauuuuaauagguau

SEQ ID NO: 107935 - RNA, 22 nt, Human
uuuggccucacccuccacccuc

SEQ ID NO: 107936 - RNA, 26 nt, Human
aaaagcaaaucuaaaaauucaaaaca

SEQ ID NO: 107937 - RNA, 23 nt, Human
aaacauccgagugaagaucucac

SEQ ID NO: 107938 - RNA, 24 nt, Human
aacacacacaacaccacacacaca

SEQ ID NO: 107939 - RNA, 19 nt, Human
aacagcaaagcaucagcaa

SEQ ID NO: 107940 - RNA, 21 nt, Human
aacauuuucuggcuucuauuc

SEQ ID NO: 107941 - RNA, 27 nt, Human
aaccacuucccaacaauuuuccugggg

SEQ ID NO: 107942 - RNA, 22 nt, Human
aaccagacuccaaaccucuagu

SEQ ID NO: 107943 - RNA, 19 nt, Human
aagaaacucauggauaacc

SEQ ID NO: 107944 - RNA, 19 nt, Human
aagaacacaaaguaacacc

SEQ ID NO: 107945 - RNA, 18 nt, Human
aagaauuuccauuuggcu

SEQ ID NO: 107946 - RNA, 25 nt, Human
aagaugccauuuaccagauuaacug

SEQ ID NO: 107947 - RNA, 20 nt, Human
aagcaucagcaacagcagcu

SEQ ID NO: 107948 - RNA, 19 nt, Human
aagggaccaaaauacugau

SEQ ID NO: 107949 - RNA, 18 nt, Human
aauaaagaaacucaugga

SEQ ID NO: 107950 - RNA, 20 nt, Human
aauccuguuuuucugcaauc

SEQ ID NO: 107951 - RNA, 24 nt, Human
aaucugaaucaccguguagcccag

SEQ ID NO: 107952 - RNA, 23 nt, Human
acacacacacacacacacacaca

SEQ ID NO: 107953 - RNA, 23 nt, Human
acacacacacacacacacacaca

SEQ ID NO: 107954 - RNA, 23 nt, Human
acacacacacacacacacacaca

SEQ ID NO: 107955 - RNA, 18 nt, Human
acaccccaccccaccccc

SEQ ID NO: 107956 - RNA, 20 nt, Human
acaggguuucgccaucucag

SEQ ID NO: 107957 - RNA, 22 nt, Human
acaggguuucgccaucucagca

SEQ ID NO: 107958 - RNA, 24 nt, Human
accacacacacacacacacacaca

SEQ ID NO: 107959 - RNA, 23 nt, Human
accacuucccaacaauuuuccug

SEQ ID NO: 107960 - RNA, 20 nt, Human
accauaaccacuucccaaca

SEQ ID NO: 107961 - RNA, 25 nt, Human
accguguagcccagagaugaggguc

SEQ ID NO: 107962 - RNA, 24 nt, Human
acugcagggcuuucugguaggagg

SEQ ID NO: 107963 - RNA, 21 nt, Human
agaaaaggcaggcccguggca

SEQ ID NO: 107964 - RNA, 19 nt, Human
agagcugaaaggcgucgug

SEQ ID NO: 107965 - RNA, 18 nt, Human
agagcuggaagaugagcg

SEQ ID NO: 107966 - RNA, 18 nt, Human
agaucgcuggagggaccc

SEQ ID NO: 107967 - RNA, 20 nt, Human
agcacccuggcuuuacuguu

SEQ ID NO: 107968 - RNA, 18 nt, Human
aggaccggcugcacccug

SEQ ID NO: 107969 - RNA, 19 nt, Human
aggaggaagagagacucua

SEQ ID NO: 107970 - RNA, 21 nt, Human
aggcaaggcagcugcagcugu

SEQ ID NO: 107971 - RNA, 19 nt, Human
aggcagagacaggcuuagg

SEQ ID NO: 107972 - RNA, 24 nt, Human
aggcagcugcagcugucagggucu

SEQ ID NO: 107973 - RNA, 21 nt, Human
agggggcgacggugggcucgg

SEQ ID NO: 107974 - RNA, 27 nt, Human
aggggguggggaaaggucucugagagg

SEQ ID NO: 107975 - RNA, 22 nt, Human
aggggucuguggaaaugauguu

SEQ ID NO: 107976 - RNA, 18 nt, Human
agggucagggcagagggg

SEQ ID NO: 107977 - RNA, 23 nt, Human
aguaggucucagaacacaacuua

SEQ ID NO: 107978 - RNA, 24 nt, Human
aucaccuuucguggugucagcugu

SEQ ID NO: 107979 - RNA, 18 nt, Human
caaacacacacaacacca

SEQ ID NO: 107980 - RNA, 22 nt, Human
caaacacacacaacaccacaca

SEQ ID NO: 107981 - RNA, 20 nt, Human
caagaucuguacuugugcuc

SEQ ID NO: 107982 - RNA, 19 nt, Human
caaggcaaggcagcugcag

SEQ ID NO: 107983 - RNA, 19 nt, Human
cacaaaguaacaccccacc

SEQ ID NO: 107984 - RNA, 26 nt, Human
cacaacaccacacacacacacacaca

SEQ ID NO: 107985 - RNA, 24 nt, Human
cacacacaacaccacacacacaca

SEQ ID NO: 107986 - RNA, 20 nt, Human
cacacacacacacacacaca

SEQ ID NO: 107987 - RNA, 20 nt, Human
cacacacacacacacacaca

SEQ ID NO: 107988 - RNA, 20 nt, Human
cacacacacacacacacaca

SEQ ID NO: 107989 - RNA, 20 nt, Human
cacacacacacacacacaca

SEQ ID NO: 107990 - RNA, 20 nt, Human
cacacacacacacacacaca

SEQ ID NO: 107991 - RNA, 20 nt, Human
cacacacacacacacacaca

SEQ ID NO: 107992 - RNA, 20 nt, Human
cacacacacacacacacaca

SEQ ID NO: 107993 - RNA, 20 nt, Human
cacacacacacacacacaca

SEQ ID NO: 107994 - RNA, 20 nt, Human
cacacacacacacacacaca

SEQ ID NO: 107995 - RNA, 22 nt, Human
cacacacacacacacacacaca

SEQ ID NO: 107996 - RNA, 22 nt, Human
cacacacacacacacacacaca

SEQ ID NO: 107997 - RNA, 22 nt, Human
cacacacacacacacacacaca

SEQ ID NO: 107998 - RNA, 22 nt, Human
cacacacacacacacacacaca

SEQ ID NO: 107999 - RNA, 22 nt, Human
cacacacacacacacacacaca

SEQ ID NO: 108000 - RNA, 18 nt, Human
cacacagaccauacgcac

SEQ ID NO: 108001 - RNA, 18 nt, Human
cacaggguuucgccaucu

SEQ ID NO: 108002 - RNA, 21 nt, Human
caccacacacacacacacaca

SEQ ID NO: 108003 - RNA, 23 nt, Human
caccacacacacacacacacaca

SEQ ID NO: 108004 - RNA, 23 nt, Human
caccccaccccacccccaaauau

SEQ ID NO: 108005 - RNA, 22 nt, Human
caccccacccccaaauauguua

SEQ ID NO: 108006 - RNA, 20 nt, Human
cagcagcuuggaggaagcag

SEQ ID NO: 108007 - RNA, 23 nt, Human
cagcagugagguaccacacaugu

SEQ ID NO: 108008 - RNA, 21 nt, Human
cagcaucauguauucccuucu

SEQ ID NO: 108009 - RNA, 23 nt, Human
caggggcccugcagggaggcggc

SEQ ID NO: 108010 - RNA, 21 nt, Human
caguauggcucuuuucuguuc

SEQ ID NO: 108011 - RNA, 21 nt, Human
ccacacacacacacacacaca

SEQ ID NO: 108012 - RNA, 21 nt, Human
ccacacagaccauacgcacaa

SEQ ID NO: 108013 - RNA, 19 nt, Human
ccagacccuggcugcaggg

SEQ ID NO: 108014 - RNA, 18 nt, Human
ccaucuucagacuguucu

SEQ ID NO: 108015 - RNA, 18 nt, Human
cccaccccacccccaaau

SEQ ID NO: 108016 - RNA, 22 nt, Human
cccaccccacccccaaauaugu

SEQ ID NO: 108017 - RNA, 23 nt, Human
cccacccccaaauauguuauuaa

SEQ ID NO: 108018 - RNA, 23 nt, Human
cccaugacaacaguguucccaag

SEQ ID NO: 108019 - RNA, 18 nt, Human
ccccaccccacccccaaa

SEQ ID NO: 108020 - RNA, 20 nt, Human
ccccaccccacccccaaaua

SEQ ID NO: 108021 - RNA, 24 nt, Human
ccccaugacaacaguguucccaag

SEQ ID NO: 108022 - RNA, 22 nt, Human
cccccaugacaacaguguuccc

SEQ ID NO: 108023 - RNA, 28 nt, Human
ccccgaggaccggcugcacccugcccag

SEQ ID NO: 108024 - RNA, 26 nt, Human
cccgcccagccccgcaguggagcagc

SEQ ID NO: 108025 - RNA, 23 nt, Human
cccguggcaucgccgcagguccg

SEQ ID NO: 108026 - RNA, 23 nt, Human
cccuggccaguccgguagacagg

SEQ ID NO: 108027 - RNA, 20 nt, Human
cccuucuuuccuuucugacc

SEQ ID NO: 108028 - RNA, 22 nt, Human
cccuucuuuccuuucugaccag

SEQ ID NO: 108029 - RNA, 23 nt, Human
cgacggugggcucggcgcccucc

SEQ ID NO: 108030 - RNA, 21 nt, Human
cgcacaaacacacacaacacc

SEQ ID NO: 108031 - RNA, 23 nt, Human
cgcacaaacacacacaacaccac

SEQ ID NO: 108032 - RNA, 26 nt, Human
cggcugcacccugcccagacccuggc

SEQ ID NO: 108033 - RNA, 18 nt, Human
cgucagaauacaucccau

SEQ ID NO: 108034 - RNA, 23 nt, Human
cguugguggcacucccagagcuu

SEQ ID NO: 108035 - RNA, 20 nt, Human
cuaagaugguaaagaugcca

SEQ ID NO: 108036 - RNA, 21 nt, Human
cucagaacacaacuuaaagau

SEQ ID NO: 108037 - RNA, 18 nt, Human
cucucuugagagcuggaa

SEQ ID NO: 108038 - RNA, 21 nt, Human
cucuggcacccagccucugcc

SEQ ID NO: 108039 - RNA, 23 nt, Human
cucuuaaucccacauuaaacuga

SEQ ID NO: 108040 - RNA, 18 nt, Human
cugcaccccacacacagg

SEQ ID NO: 108041 - RNA, 22 nt, Human
cugcagggcuuucugguaggag

SEQ ID NO: 108042 - RNA, 18 nt, Human
cugccaggcugggacugu

SEQ ID NO: 108043 - RNA, 18 nt, Human
cugcugaagugacugugg

SEQ ID NO: 108044 - RNA, 19 nt, Human
cugggcagccgaugaaggg

SEQ ID NO: 108045 - RNA, 22 nt, Human
cuuccaguaggacuucuuuugg

SEQ ID NO: 108046 - RNA, 20 nt, Human
cuucccaacaauuuuccugg

SEQ ID NO: 108047 - RNA, 24 nt, Human
cuuugaggggaggaaacaaguugg

SEQ ID NO: 108048 - RNA, 18 nt, Human
gaaagaaaaagacugaug

SEQ ID NO: 108049 - RNA, 24 nt, Human
gaacugccaucucaggcaucccua

SEQ ID NO: 108050 - RNA, 24 nt, Human
gacuugauucccauuuuuaguagg

SEQ ID NO: 108051 - RNA, 20 nt, Human
gagcugaaaggcgucgugcc

SEQ ID NO: 108052 - RNA, 19 nt, Human
gaggcaaagcugcugcaga

SEQ ID NO: 108053 - RNA, 18 nt, Human
gaggcagcagcuuggagg

SEQ ID NO: 108054 - RNA, 21 nt, Human
gagugaagaucucacacaacc

SEQ ID NO: 108055 - RNA, 21 nt, Human
gauugcauuaagaauuuccau

SEQ ID NO: 108056 - RNA, 26 nt, Human
gcacgcacaaacacacacaacaccac

SEQ ID NO: 108057 - RNA, 22 nt, Human
gcccagaagcccuucuuuccuu

SEQ ID NO: 108058 - RNA, 19 nt, Human
gccccgaggaccggcugca

SEQ ID NO: 108059 - RNA, 18 nt, Human
gccccgcaguggagcagc

SEQ ID NO: 108060 - RNA, 20 nt, Human
gcccuggccaguccgguaga

SEQ ID NO: 108061 - RNA, 19 nt, Human
gcucaaggagaaaggucuu

SEQ ID NO: 108062 - RNA, 21 nt, Human
ggaggaagaacacaaaguaac

SEQ ID NO: 108063 - RNA, 18 nt, Human
ggcagccgaugaaggggg

SEQ ID NO: 108064 - RNA, 19 nt, Human
ggcuuaggugcucugcucu

SEQ ID NO: 108065 - RNA, 20 nt, Human
ggcuuaggugcucugcucuu

SEQ ID NO: 108066 - RNA, 21 nt, Human
gggagucagcccgcccagccc

SEQ ID NO: 108067 - RNA, 21 nt, Human
gggcagccgaugaagggggug

SEQ ID NO: 108068 - RNA, 19 nt, Human
gggccuucauuuucagccc

SEQ ID NO: 108069 - RNA, 22 nt, Human
ggguggcagggaaagaaaaaga

SEQ ID NO: 108070 - RNA, 19 nt, Human
gguagacagggaggcagag

SEQ ID NO: 108071 - RNA, 21 nt, Human
ggugguggcggcaugcgaguc

SEQ ID NO: 108072 - RNA, 20 nt, Human
guauucuuccuggcuggcca

SEQ ID NO: 108073 - RNA, 19 nt, Human
gucucugagaggcaccacc

SEQ ID NO: 108074 - RNA, 21 nt, Human
gugaagaucucacacaaccuu

SEQ ID NO: 108075 - RNA, 23 nt, Human
uaacaccccaccccacccccaaa

SEQ ID NO: 108076 - RNA, 25 nt, Human
uaacugagaccauguuagaacugaa

SEQ ID NO: 108077 - RNA, 26 nt, Human
uacaaaguucuuauuugcuguccuuu

SEQ ID NO: 108078 - RNA, 23 nt, Human
uacagaaaagcuggaagggacca

SEQ ID NO: 108079 - RNA, 19 nt, Human
uacgcacaagaaaauaggc

SEQ ID NO: 108080 - RNA, 22 nt, Human
uagcacagugguugagaacuuc

SEQ ID NO: 108081 - RNA, 23 nt, Human
uaggaggacuccaagguguggua

SEQ ID NO: 108082 - RNA, 18 nt, Human
uaucuccuccucacaggc

SEQ ID NO: 108083 - RNA, 30 nt, Human
uaugacccuggaggcaaagcugcugcagag

SEQ ID NO: 108084 - RNA, 18 nt, Human
uauggaaaaaucaguuca

SEQ ID NO: 108085 - RNA, 25 nt, Human
ucaauaccaguaagauucuacagaa

SEQ ID NO: 108086 - RNA, 19 nt, Human
ucagaauacaucccauacg

SEQ ID NO: 108087 - RNA, 23 nt, Human
ucagagcaaacacuugaggcauc

SEQ ID NO: 108088 - RNA, 19 nt, Human
ucaggugggacugcagggc

SEQ ID NO: 108089 - RNA, 21 nt, Human
ucauguauucccuucuuuauu

SEQ ID NO: 108090 - RNA, 22 nt, Human
ucgccgcagguccgggaagcac

SEQ ID NO: 108091 - RNA, 21 nt, Human
ucgcugaggaggaagagagac

SEQ ID NO: 108092 - RNA, 21 nt, Human
ucgcuggagggacccagucgu

SEQ ID NO: 108093 - RNA, 23 nt, Human
ucuaacugcgacagacuuagagg

SEQ ID NO: 108094 - RNA, 19 nt, Human
ucuccuaacagcaaagcau

SEQ ID NO: 108095 - RNA, 18 nt, Human
ucucuaagucaggagacu

SEQ ID NO: 108096 - RNA, 24 nt, Human
ucucugagaggcaccaccgauugc

SEQ ID NO: 108097 - RNA, 19 nt, Human
ucugcacugcaauagcaaa

SEQ ID NO: 108098 - RNA, 21 nt, Human
ucugcaggcccagaagcccuu

SEQ ID NO: 108099 - RNA, 20 nt, Human
ucugcucuuuuguguucugu

SEQ ID NO: 108100 - RNA, 24 nt, Human
ucugcucuuuuguguucuguuuuu

SEQ ID NO: 108101 - RNA, 21 nt, Human
ucuugagagcuggaagaugag

SEQ ID NO: 108102 - RNA, 23 nt, Human
ucuuuggcucuucaguaaguucu

SEQ ID NO: 108103 - RNA, 18 nt, Human
ugaaggggguggggaaag

SEQ ID NO: 108104 - RNA, 18 nt, Human
ugacaagcaaaauuccca

SEQ ID NO: 108105 - RNA, 24 nt, Human
ugacuauuucaucaacagacauuc

SEQ ID NO: 108106 - RNA, 20 nt, Human
ugacugggcagccgaugaag

SEQ ID NO: 108107 - RNA, 22 nt, Human
ugacuguggaaaccccaguaac

SEQ ID NO: 108108 - RNA, 20 nt, Human
ugagaagucagaacuaagau

SEQ ID NO: 108109 - RNA, 25 nt, Human
ugaggcagagacacuaugcugucug

SEQ ID NO: 108110 - RNA, 20 nt, Human
ugaggggaggaaacaaguug

SEQ ID NO: 108111 - RNA, 24 nt, Human
ugagguaccacacauguguagggu

SEQ ID NO: 108112 - RNA, 18 nt, Human
ugauaaauaaaggguggc

SEQ ID NO: 108113 - RNA, 19 nt, Human
ugauguuaagaaucacgug

SEQ ID NO: 108114 - RNA, 22 nt, Human
ugcaauacaggccuugcuuccu

SEQ ID NO: 108115 - RNA, 18 nt, Human
ugcaggcccagaagcccu

SEQ ID NO: 108116 - RNA, 21 nt, Human
ugccccgaggaccggcugcac

SEQ ID NO: 108117 - RNA, 20 nt, Human
ugcuccuggagucuccuaac

SEQ ID NO: 108118 - RNA, 21 nt, Human
uggaagcucugggguagggac

SEQ ID NO: 108119 - RNA, 18 nt, Human
uggcagacagcggacgau

SEQ ID NO: 108120 - RNA, 19 nt, Human
uggcagacagcggacgauu

SEQ ID NO: 108121 - RNA, 21 nt, Human
uggcagagcccccaugacaac

SEQ ID NO: 108122 - RNA, 24 nt, Human
uggccaagcccaaaccgaucuaau

SEQ ID NO: 108123 - RNA, 20 nt, Human
ugggacugcagggcuuucug

SEQ ID NO: 108124 - RNA, 21 nt, Human
ugggccucgugaggagccccc

SEQ ID NO: 108125 - RNA, 21 nt, Human
ugguaggaggacuccaaggug

SEQ ID NO: 108126 - RNA, 21 nt, Human
ugguggcacucccagagcuuu

SEQ ID NO: 108127 - RNA, 20 nt, Human
uggugucagcugugaaaggg

SEQ ID NO: 108128 - RNA, 20 nt, Human
uguacaagacauguuucagu

SEQ ID NO: 108129 - RNA, 19 nt, Human
uguuucccggcuacauccc

SEQ ID NO: 108130 - RNA, 24 nt, Human
uuaccagauuaacugagaccaugu

SEQ ID NO: 108131 - RNA, 23 nt, Human
uuaggugcucugcucuuuugugu

SEQ ID NO: 108132 - RNA, 23 nt, Human
uucacaucaauaucacuucgaga

SEQ ID NO: 108133 - RNA, 20 nt, Human
uucagauugaggccaagaga

SEQ ID NO: 108134 - RNA, 19 nt, Human
uucccaacaauuuuccugg

SEQ ID NO: 108135 - RNA, 19 nt, Human
uuccuggagccauaugagc

SEQ ID NO: 108136 - RNA, 23 nt, Human
uucuggcuucuauucuugcuucg

SEQ ID NO: 108137 - RNA, 20 nt, Human
uugagagcuggaagaugagc

SEQ ID NO: 108138 - RNA, 18 nt, Human
uugcuccuggagucuccu

SEQ ID NO: 108139 - RNA, 21 nt, Human
uuguguucuguuuuucauugg

SEQ ID NO: 108140 - RNA, 20 nt, Human
uuucccggcuacaucccugg

SEQ ID NO: 108141 - RNA, 21 nt, Human
uuuucagauugaggccaagag

SEQ ID NO: 108142 - RNA, 23 nt, Human
uuuuccuggggaacuugaccggc

SEQ ID NO: 108143 - RNA, 21 nt, Human
aaaaaacaggcagaugauuug

SEQ ID NO: 108144 - RNA, 18 nt, Human
aaaaaagcaucauucaca

SEQ ID NO: 108145 - RNA, 21 nt, Human
aaaacgaaacgaaacaaaaaa

SEQ ID NO: 108146 - RNA, 22 nt, Human
aaaaugcuacugagaagaguug

SEQ ID NO: 108147 - RNA, 21 nt, Human
aaacaaaccaaaauaaacccu

SEQ ID NO: 108148 - RNA, 18 nt, Human
aaacagaagacggucaag

SEQ ID NO: 108149 - RNA, 21 nt, Human
aaacaguagcuuuuugugacc

SEQ ID NO: 108150 - RNA, 21 nt, Human
aaacauauccaaaggucauaa

SEQ ID NO: 108151 - RNA, 25 nt, Human
aaacgaaacgaaacaaaaaacuaaa

SEQ ID NO: 108152 - RNA, 19 nt, Human
aaacuaaaacugggaaaca

SEQ ID NO: 108153 - RNA, 21 nt, Human
aacaauggcaaacugcuuccc

SEQ ID NO: 108154 - RNA, 24 nt, Human
aacuaucauaaaaguuacaugcag

SEQ ID NO: 108155 - RNA, 21 nt, Human
aacugcuucccuaauagcuau

SEQ ID NO: 108156 - RNA, 22 nt, Human
aagaucaauaaccaauagacaa

SEQ ID NO: 108157 - RNA, 21 nt, Human
aagcaucauucacaacaaaga

SEQ ID NO: 108158 - RNA, 20 nt, Human
aagggaucauagaagggaca

SEQ ID NO: 108159 - RNA, 18 nt, Human
aaguaacagaaaaucacc

SEQ ID NO: 108160 - RNA, 21 nt, Human
aaguuacaugcagacugagga

SEQ ID NO: 108161 - RNA, 22 nt, Human
acaaaacgaaacgaaacaaaaa

SEQ ID NO: 108162 - RNA, 21 nt, Human
acaaaauucaagagaccacca

SEQ ID NO: 108163 - RNA, 18 nt, Human
acaaaguacaaacaugug

SEQ ID NO: 108164 - RNA, 21 nt, Human
acaacaaagauauaaacaaac

SEQ ID NO: 108165 - RNA, 24 nt, Human
acaacaguaagcauagaacuauaa

SEQ ID NO: 108166 - RNA, 24 nt, Human
acaauuucaugguaaaaggaaacc

SEQ ID NO: 108167 - RNA, 20 nt, Human
acagaagacggucaaggaca

SEQ ID NO: 108168 - RNA, 20 nt, Human
agacaaaguacaaacaugug

SEQ ID NO: 108169 - RNA, 22 nt, Human
agacaaaguacaaacaugugaa

SEQ ID NO: 108170 - RNA, 23 nt, Human
agacaaaguacaaacaugugaaa

SEQ ID NO: 108171 - RNA, 21 nt, Human
agagguagagaauuugagccc

SEQ ID NO: 108172 - RNA, 20 nt, Human
agauauaaacaaaccaaaau

SEQ ID NO: 108173 - RNA, 20 nt, Human
aguaauguuauguacaguuu

SEQ ID NO: 108174 - RNA, 23 nt, Human
aguagaaaacaaaauuguuacag

SEQ ID NO: 108175 - RNA, 25 nt, Human
auagacaauaucaguuuuacagaac

SEQ ID NO: 108176 - RNA, 22 nt, Human
caaaacgaaacgaaacaaaaaa

SEQ ID NO: 108177 - RNA, 20 nt, Human
caaaagacacuauaggcagc

SEQ ID NO: 108178 - RNA, 18 nt, Human
caaacggaguccagcugu

SEQ ID NO: 108179 - RNA, 20 nt, Human
caaaguacaaacaugugaaa

SEQ ID NO: 108180 - RNA, 24 nt, Human
caacaauggcaaacugcuucccua

SEQ ID NO: 108181 - RNA, 27 nt, Human
caccacugauacaagaccgucuaaagu

SEQ ID NO: 108182 - RNA, 26 nt, Human
caguaguuaaagcaguaucuuaaacc

SEQ ID NO: 108183 - RNA, 19 nt, Human
ccugccauuagaugccagg

SEQ ID NO: 108184 - RNA, 22 nt, Human
ccuuucuuuugagagaccuggu

SEQ ID NO: 108185 - RNA, 22 nt, Human
cuaaaaaguaacagaaaaucac

SEQ ID NO: 108186 - RNA, 23 nt, Human
cuaaaaaguaacagaaaaucacc

SEQ ID NO: 108187 - RNA, 24 nt, Human
cucugcaacaauggcaaacugcuu

SEQ ID NO: 108188 - RNA, 21 nt, Human
cugauacaagaccgucuaaag

SEQ ID NO: 108189 - RNA, 19 nt, Human
cugcaacaauggcaaacug

SEQ ID NO: 108190 - RNA, 22 nt, Human
cuguaauauauacaugcguaug

SEQ ID NO: 108191 - RNA, 19 nt, Human
gacaaaguacaaacaugug

SEQ ID NO: 108192 - RNA, 22 nt, Human
gagaggauauagagaaacuuuu

SEQ ID NO: 108193 - RNA, 20 nt, Human
ggaagacaaaguacaaacau

SEQ ID NO: 108194 - RNA, 22 nt, Human
ggaguccagcuguaguucaaau

SEQ ID NO: 108195 - RNA, 19 nt, Human
gugcagcuuucuuaaggga

SEQ ID NO: 108196 - RNA, 20 nt, Human
guuuuccaaaagacacuaua

SEQ ID NO: 108197 - RNA, 25 nt, Human
uaaaaaaaaguaaagaugagaaaac

SEQ ID NO: 108198 - RNA, 23 nt, Human
uaaaaaguaacagaaaaucaccc

SEQ ID NO: 108199 - RNA, 22 nt, Human
uaaaauaaaacugagugacuug

SEQ ID NO: 108200 - RNA, 24 nt, Human
uaaacaaaccaaaauaaacccugc

SEQ ID NO: 108201 - RNA, 18 nt, Human
uaaagcaguaucuuaaac

SEQ ID NO: 108202 - RNA, 20 nt, Human
uacaaaacgaaacgaaacaa

SEQ ID NO: 108203 - RNA, 18 nt, Human
uacaaacauauccaaagg

SEQ ID NO: 108204 - RNA, 23 nt, Human
uagaacagaaagaaaggggaaag

SEQ ID NO: 108205 - RNA, 26 nt, Human
uagagaauuugagcccauuauacaaa

SEQ ID NO: 108206 - RNA, 21 nt, Human
uagcuauauaccuuugauugu

SEQ ID NO: 108207 - RNA, 21 nt, Human
uauauacaugcguauguagcu

SEQ ID NO: 108208 - RNA, 22 nt, Human
uauaugcacaacaguaagcaua

SEQ ID NO: 108209 - RNA, 24 nt, Human
uauaugcacaacaguaagcauagu

SEQ ID NO: 108210 - RNA, 18 nt, Human
uaucaagaaaaaacaggc

SEQ ID NO: 108211 - RNA, 25 nt, Human
uaucaagaaaaaacaggcagaugau

SEQ ID NO: 108212 - RNA, 21 nt, Human
uaucaccaucacacaaacgga

SEQ ID NO: 108213 - RNA, 20 nt, Human
ucaacaguaguuaaagcagu

SEQ ID NO: 108214 - RNA, 22 nt, Human
ucuacuagcuuucauuuggaca

SEQ ID NO: 108215 - RNA, 18 nt, Human
ucuacuugguugucaaca

SEQ ID NO: 108216 - RNA, 22 nt, Human
ucugcaacaauggcaaacugcu

SEQ ID NO: 108217 - RNA, 21 nt, Human
ugacauguaucaccaucacac

SEQ ID NO: 108218 - RNA, 23 nt, Human
ugaggauaguccucuguuacaga

SEQ ID NO: 108219 - RNA, 23 nt, Human
ugauacgaaacaaaacucaaagu

SEQ ID NO: 108220 - RNA, 21 nt, Human
ugaugaggguggucuaucugu

SEQ ID NO: 108221 - RNA, 22 nt, Human
ugcuaaaaaguaacagaaaauc

SEQ ID NO: 108222 - RNA, 21 nt, Human
uggaaugaacaaauuaagggu

SEQ ID NO: 108223 - RNA, 22 nt, Human
uggaaugaacaaauuaagggug

SEQ ID NO: 108224 - RNA, 21 nt, Human
ugggaaacaauaguaaguucc

SEQ ID NO: 108225 - RNA, 21 nt, Human
ugggagagaauagcaggagga

SEQ ID NO: 108226 - RNA, 24 nt, Human
uguacaguuuuauugccaguauau

SEQ ID NO: 108227 - RNA, 22 nt, Human
ugugaaaugaugaauuaaauua

SEQ ID NO: 108228 - RNA, 25 nt, Human
uuaaaaaaaaguaaagaugagaaau

SEQ ID NO: 108229 - RNA, 23 nt, Human
uuaaagcuuuaagcauuccuguu

SEQ ID NO: 108230 - RNA, 22 nt, Human
uuaaggguguauuguauauagu

SEQ ID NO: 108231 - RNA, 22 nt, Human
uucaugguaaaaggaaaccagg

SEQ ID NO: 108232 - RNA, 21 nt, Human
aaaaaaaaaaaaaaaaggaaa

SEQ ID NO: 108233 - RNA, 25 nt, Human
aaaaaaaaaaaaaaggaaaccucac

SEQ ID NO: 108234 - RNA, 21 nt, Human
aaaaaaaaaaaggaaaccuca

SEQ ID NO: 108235 - RNA, 24 nt, Human
aaagagauguccagagcugugcag

SEQ ID NO: 108236 - RNA, 24 nt, Human
aggaaaagagauguccagagcugu

SEQ ID NO: 108237 - RNA, 22 nt, Human
aggaaggaucauuggcuggagu

SEQ ID NO: 108238 - RNA, 19 nt, Human
agggaauaauacuaggaaa

SEQ ID NO: 108239 - RNA, 24 nt, Human
cagugcuagaaacuucucaaagca

SEQ ID NO: 108240 - RNA, 19 nt, Human
cccaaguauuccaugaguu

SEQ ID NO: 108241 - RNA, 26 nt, Human
cugucucugauucccucagccggaga

SEQ ID NO: 108242 - RNA, 23 nt, Human
gacuucugccuccccugcgcucc

SEQ ID NO: 108243 - RNA, 19 nt, Human
gauuaugaaagaaggaagg

SEQ ID NO: 108244 - RNA, 22 nt, Human
gugcuagaaacuucucaaagca

SEQ ID NO: 108245 - RNA, 22 nt, Human
uaggaaaagagauguccagaga

SEQ ID NO: 108246 - RNA, 22 nt, Human
ugaaaucaguggccaauucagg

SEQ ID NO: 108247 - RNA, 21 nt, Human
ugauuaugaaagaaggaagga

SEQ ID NO: 108248 - RNA, 18 nt, Human
ugcaguagaaaucacugg

SEQ ID NO: 108249 - RNA, 21 nt, Human
uggccaauucagggaauaaua

SEQ ID NO: 108250 - RNA, 24 nt, Human
aacccacagauacccugggaaagg

SEQ ID NO: 108251 - RNA, 18 nt, Human
aagaggagaaggucagaa

SEQ ID NO: 108252 - RNA, 20 nt, Human
aaugcagaccccaacccugc

SEQ ID NO: 108253 - RNA, 18 nt, Human
accaaccugaaccacuuc

SEQ ID NO: 108254 - RNA, 18 nt, Human
agaagaggcaccguaaua

SEQ ID NO: 108255 - RNA, 27 nt, Human
agagaagaggcaccguaauacuggaag

SEQ ID NO: 108256 - RNA, 22 nt, Human
agcaggaggccaugagcgccuc

SEQ ID NO: 108257 - RNA, 21 nt, Human
agguguuggcauacagggcug

SEQ ID NO: 108258 - RNA, 19 nt, Human
aucaugcuguuagcuggcu

SEQ ID NO: 108259 - RNA, 18 nt, Human
augagcaggaguaaggau

SEQ ID NO: 108260 - RNA, 22 nt, Human
cacagauacccugggaaagggg

SEQ ID NO: 108261 - RNA, 22 nt, Human
caccccagaaaggcaugugugg

SEQ ID NO: 108262 - RNA, 23 nt, Human
cacccuacaccccaaaaugcuac

SEQ ID NO: 108263 - RNA, 23 nt, Human
caccguaauacuggaagacaauu

SEQ ID NO: 108264 - RNA, 25 nt, Human
caccuccaaugcagaccccaacccu

SEQ ID NO: 108265 - RNA, 19 nt, Human
cacuucacacucccucgag

SEQ ID NO: 108266 - RNA, 19 nt, Human
cagccuggcaacccacaga

SEQ ID NO: 108267 - RNA, 18 nt, Human
caguauuuucucuucugg

SEQ ID NO: 108268 - RNA, 23 nt, Human
ccaagugguaggcaagaagcagg

SEQ ID NO: 108269 - RNA, 21 nt, Human
ccaaugcagaccccaacccug

SEQ ID NO: 108270 - RNA, 20 nt, Human
ccagaaaggcauguguggug

SEQ ID NO: 108271 - RNA, 18 nt, Human
ccccaaaaugcuacugca

SEQ ID NO: 108272 - RNA, 18 nt, Human
ccccucaaccccugcccu

SEQ ID NO: 108273 - RNA, 20 nt, Human
ccccucaaccccugcccucc

SEQ ID NO: 108274 - RNA, 18 nt, Human
cccuacaccccaaaaugc

SEQ ID NO: 108275 - RNA, 22 nt, Human
ccggccgggugcggcuccucuc

SEQ ID NO: 108276 - RNA, 19 nt, Human
ccuacaccccaaaaugcua

SEQ ID NO: 108277 - RNA, 23 nt, Human
ccuccaaugcagaccccaacccu

SEQ ID NO: 108278 - RNA, 22 nt, Human
ccuccuccccagcucgguagac

SEQ ID NO: 108279 - RNA, 24 nt, Human
ccucugcaccaaccugaaccacuu

SEQ ID NO: 108280 - RNA, 22 nt, Human
ccuggcaacccacagauacccu

SEQ ID NO: 108281 - RNA, 19 nt, Human
cgaggcaagguccugaugc

SEQ ID NO: 108282 - RNA, 23 nt, Human
cgggugcggcuccucucccggag

SEQ ID NO: 108283 - RNA, 19 nt, Human
cucacaaagugggagcagg

SEQ ID NO: 108284 - RNA, 23 nt, Human
cucacagcuucugucuccuggcu

SEQ ID NO: 108285 - RNA, 19 nt, Human
cuccccagccuggcaaccc

SEQ ID NO: 108286 - RNA, 24 nt, Human
cucugcaccaaccugaaccacuuc

SEQ ID NO: 108287 - RNA, 19 nt, Human
cugaaccacuucacacucc

SEQ ID NO: 108288 - RNA, 20 nt, Human
cuggggggcagggccuuggg

SEQ ID NO: 108289 - RNA, 22 nt, Human
cuguaccuccuccccagcucgg

SEQ ID NO: 108290 - RNA, 18 nt, Human
gaaucucugagcugcaga

SEQ ID NO: 108291 - RNA, 18 nt, Human
gacuucugugugaaucuc

SEQ ID NO: 108292 - RNA, 22 nt, Human
gcaagaagcaggaggccaugag

SEQ ID NO: 108293 - RNA, 20 nt, Human
gcagggccuuggggagcugc

SEQ ID NO: 108294 - RNA, 21 nt, Human
gccgguccaggaaagggccag

SEQ ID NO: 108295 - RNA, 21 nt, Human
gccuacuguaccuccucccca

SEQ ID NO: 108296 - RNA, 24 nt, Human
ggagcgaagaggagaaggucagaa

SEQ ID NO: 108297 - RNA, 18 nt, Human
ggaggagacagggcugau

SEQ ID NO: 108298 - RNA, 20 nt, Human
ggagguggggaggagacagg

SEQ ID NO: 108299 - RNA, 19 nt, Human
ggcacuggccaagugguag

SEQ ID NO: 108300 - RNA, 22 nt, Human
ggcagggccuuggggagcugcc

SEQ ID NO: 108301 - RNA, 22 nt, Human
ggccccucaaccccugcccucc

SEQ ID NO: 108302 - RNA, 20 nt, Human
ggcugggugggcacuggcca

SEQ ID NO: 108303 - RNA, 22 nt, Human
gggcagggccuuggggagcugc

SEQ ID NO: 108304 - RNA, 19 nt, Human
gguggggaggagacagggc

SEQ ID NO: 108305 - RNA, 21 nt, Human
gugaaucucugagcugcagaa

SEQ ID NO: 108306 - RNA, 25 nt, Human
uaaauaaauauuaauacaacacacu

SEQ ID NO: 108307 - RNA, 19 nt, Human
uaagggagcaacacccauc

SEQ ID NO: 108308 - RNA, 19 nt, Human
uauuuucucuucugguuua

SEQ ID NO: 108309 - RNA, 23 nt, Human
uccaggaaagggccagaggcuca

SEQ ID NO: 108310 - RNA, 24 nt, Human
uccaggaaagggccagaggcucac

SEQ ID NO: 108311 - RNA, 18 nt, Human
ucuggucuggucuguccc

SEQ ID NO: 108312 - RNA, 20 nt, Human
ugaagugagaaaagaucaac

SEQ ID NO: 108313 - RNA, 19 nt, Human
ugaauuggauguauagagu

SEQ ID NO: 108314 - RNA, 21 nt, Human
ugagcgccucugcaccaaccu

SEQ ID NO: 108315 - RNA, 21 nt, Human
ugccaccauguuuguuuccug

SEQ ID NO: 108316 - RNA, 23 nt, Human
ugccaccauguuuguuuccugag

SEQ ID NO: 108317 - RNA, 23 nt, Human
ugccacccuacaccccaaaaugc

SEQ ID NO: 108318 - RNA, 19 nt, Human
uggccccucaaccccugcc

SEQ ID NO: 108319 - RNA, 21 nt, Human
uggccccucaaccccugcccu

SEQ ID NO: 108320 - RNA, 19 nt, Human
ugggagcaggguuugaagg

SEQ ID NO: 108321 - RNA, 20 nt, Human
ugggagguggggaggagaca

SEQ ID NO: 108322 - RNA, 18 nt, Human
uggggcaagcauuuuauu

SEQ ID NO: 108323 - RNA, 19 nt, Human
uggggccgggccggccggg

SEQ ID NO: 108324 - RNA, 21 nt, Human
uggggcuggggggcagggccu

SEQ ID NO: 108325 - RNA, 18 nt, Human
uggguggggcuggggggc

SEQ ID NO: 108326 - RNA, 20 nt, Human
uggguggggcuggggggcag

SEQ ID NO: 108327 - RNA, 18 nt, Human
ugguaggcaagaagcagg

SEQ ID NO: 108328 - RNA, 19 nt, Human
ugguugcccuccccagccu

SEQ ID NO: 108329 - RNA, 21 nt, Human
ugugaaucucugagcugcaga

SEQ ID NO: 108330 - RNA, 20 nt, Human
ugugcuuuggagacuccugg

SEQ ID NO: 108331 - RNA, 23 nt, Human
uuccuuggcaacaugaagucugg

SEQ ID NO: 108332 - RNA, 22 nt, Human
uugaagggggagcgaagaggag

SEQ ID NO: 108333 - RNA, 24 nt, Human
uuuuguuugccacucugugcuuug

SEQ ID NO: 108334 - RNA, 20 nt, Human
acccaguuguuuagcauuuu

SEQ ID NO: 108335 - RNA, 20 nt, Human
auucaauuauauuccacauc

SEQ ID NO: 108336 - RNA, 18 nt, Human
caaaaaaaggaugaauga

SEQ ID NO: 108337 - RNA, 28 nt, Human
ccagaugcuugacauaaccucaacaccc

SEQ ID NO: 108338 - RNA, 21 nt, Human
cccccuacaggaagucuaaaa

SEQ ID NO: 108339 - RNA, 21 nt, Human
cccccuacaggaagucuaaaa

SEQ ID NO: 108340 - RNA, 20 nt, Human
ccccuacaggaagucuaaaa

SEQ ID NO: 108341 - RNA, 27 nt, Human
ccucaacaccucuucaugcuccccuua

SEQ ID NO: 108342 - RNA, 23 nt, Human
cuuuaccauuauauauauacaga

SEQ ID NO: 108343 - RNA, 24 nt, Human
uaacccccugaccugauguguuuu

SEQ ID NO: 108344 - RNA, 23 nt, Human
uaaucaaaaaaaggaugaaugau

SEQ ID NO: 108345 - RNA, 21 nt, Human
uaucgcccccuacaggaaguc

SEQ ID NO: 108346 - RNA, 21 nt, Human
uaucgcccccuacaggaaguc

SEQ ID NO: 108347 - RNA, 24 nt, Human
uauuccacauccauuuguaccaaa

SEQ ID NO: 108348 - RNA, 25 nt, Human
ucaacaccucuucaugcuccccuua

SEQ ID NO: 108349 - RNA, 19 nt, Human
uccccuuaaacaagaaaau

SEQ ID NO: 108350 - RNA, 24 nt, Human
ugaaaauauagacacacguuucca

SEQ ID NO: 108351 - RNA, 24 nt, Human
ugauaacaauaucuuagucucaaa

SEQ ID NO: 108352 - RNA, 23 nt, Human
ugugccagaugcuugacauaacc

SEQ ID NO: 108353 - RNA, 27 nt, Human
uguuuuacuauugcucuugucuucaau

SEQ ID NO: 108354 - RNA, 19 nt, Human
uuccacauccauuuguacc

SEQ ID NO: 108355 - RNA, 21 nt, Human
aaaauagcaagagguaaagag

SEQ ID NO: 108356 - RNA, 22 nt, Human
aaacaagcaaccuguucugcac

SEQ ID NO: 108357 - RNA, 23 nt, Human
aagaaggaagacacuuuggauau

SEQ ID NO: 108358 - RNA, 21 nt, Human
acaaaauagcaagagguaaag

SEQ ID NO: 108359 - RNA, 20 nt, Human
acucacacugagccugcugc

SEQ ID NO: 108360 - RNA, 21 nt, Human
acugagccugcugcauacauu

SEQ ID NO: 108361 - RNA, 20 nt, Human
agcagugagauuucaucugu

SEQ ID NO: 108362 - RNA, 19 nt, Human
aguucacucacacugagcc

SEQ ID NO: 108363 - RNA, 24 nt, Human
caagcaaccuguucugcacagaua

SEQ ID NO: 108364 - RNA, 21 nt, Human
cacugguccgacuuuacccuu

SEQ ID NO: 108365 - RNA, 21 nt, Human
caguucacucacacugagccu

SEQ ID NO: 108366 - RNA, 21 nt, Human
cauugugucagguuuucaaua

SEQ ID NO: 108367 - RNA, 22 nt, Human
cauugugucagguuuucaauau

SEQ ID NO: 108368 - RNA, 24 nt, Human
cccaaaaagaauuguugaucuacc

SEQ ID NO: 108369 - RNA, 22 nt, Human
cuuagaaagcugcuuugauggg

SEQ ID NO: 108370 - RNA, 18 nt, Human
gaaaaaagaucucugagc

SEQ ID NO: 108371 - RNA, 21 nt, Human
gaagccuccaguucacucaca

SEQ ID NO: 108372 - RNA, 22 nt, Human
gccaaaguguaaggguuuucua

SEQ ID NO: 108373 - RNA, 22 nt, Human
guaaacaagcaaccuguucugc

SEQ ID NO: 108374 - RNA, 20 nt, Human
gucuuauaucuaagaaggaa

SEQ ID NO: 108375 - RNA, 22 nt, Human
uaaagagcuuugcauuaggggc

SEQ ID NO: 108376 - RNA, 23 nt, Human
uaacaaaauagcaagagguaaag

SEQ ID NO: 108377 - RNA, 23 nt, Human
uaacuaucauccauaauaaccaa

SEQ ID NO: 108378 - RNA, 24 nt, Human
uauaacaaaauagcaagagguaaa

SEQ ID NO: 108379 - RNA, 23 nt, Human
uaugaagagacaaagguaauacc

SEQ ID NO: 108380 - RNA, 21 nt, Human
uggaugcagaugguuucuucc

SEQ ID NO: 108381 - RNA, 19 nt, Human
uguacaaaaacucaaugca

SEQ ID NO: 108382 - RNA, 20 nt, Human
ugucagguuuucaauaugga

SEQ ID NO: 108383 - RNA, 23 nt, Human
uuguucauagccaaaguguaagg

SEQ ID NO: 108384 - RNA, 24 nt, Human
uuuguucauagccaaaguguaagg

SEQ ID NO: 108385 - RNA, 23 nt, Human
aaaauaccuugaguagaugccau

SEQ ID NO: 108386 - RNA, 23 nt, Human
aaaugcugaaaaucuucagagcu

SEQ ID NO: 108387 - RNA, 25 nt, Human
aagcagcuuuaucaaaaucuucuug

SEQ ID NO: 108388 - RNA, 21 nt, Human
aagguucugguuuaaauucaa

SEQ ID NO: 108389 - RNA, 22 nt, Human
aauagacaauaaguauaguaaa

SEQ ID NO: 108390 - RNA, 22 nt, Human
aaucaaugacaaaaaacaaaua

SEQ ID NO: 108391 - RNA, 27 nt, Human
aauguuuacuuauucuuauaauguagc

SEQ ID NO: 108392 - RNA, 24 nt, Human
acagagcuuuauucuguuguugac

SEQ ID NO: 108393 - RNA, 20 nt, Human
acaguaaacgacccuccaga

SEQ ID NO: 108394 - RNA, 22 nt, Human
acucauuuugauuaacauuuaa

SEQ ID NO: 108395 - RNA, 21 nt, Human
agaacaggaagaaacccuuga

SEQ ID NO: 108396 - RNA, 18 nt, Human
agcaaaacugucaaaugu

SEQ ID NO: 108397 - RNA, 18 nt, Human
aggggcaguccaugaaag

SEQ ID NO: 108398 - RNA, 19 nt, Human
auauuuuuuuccuuuugga

SEQ ID NO: 108399 - RNA, 22 nt, Human
augccaucauucuugacagaau

SEQ ID NO: 108400 - RNA, 22 nt, Human
caaaacuuucuacugaaccagg

SEQ ID NO: 108401 - RNA, 25 nt, Human
cagaccagaaguauuuauuaaagca

SEQ ID NO: 108402 - RNA, 22 nt, Human
cagaccgaauauuuaguucacc

SEQ ID NO: 108403 - RNA, 21 nt, Human
caugauuacaucccaugugcu

SEQ ID NO: 108404 - RNA, 19 nt, Human
cauuaggaggcacuccuga

SEQ ID NO: 108405 - RNA, 23 nt, Human
cauuucuaacuguacuauccacu

SEQ ID NO: 108406 - RNA, 22 nt, Human
ccaacccaaccaaggaucccuu

SEQ ID NO: 108407 - RNA, 18 nt, Human
ccagaacaggaagaaacc

SEQ ID NO: 108408 - RNA, 21 nt, Human
ccagaacaggaagaaacccuu

SEQ ID NO: 108409 - RNA, 22 nt, Human
ccaugugacaacaaaggaagua

SEQ ID NO: 108410 - RNA, 24 nt, Human
cccagaacaggaagaaacccuuga

SEQ ID NO: 108411 - RNA, 22 nt, Human
ccgaaaguacucugauuacucc

SEQ ID NO: 108412 - RNA, 19 nt, Human
ccucaaaagaugaacuucc

SEQ ID NO: 108413 - RNA, 21 nt, Human
ccucugaggugacauuggcuu

SEQ ID NO: 108414 - RNA, 21 nt, Human
ccugauacaguaaacgacccu

SEQ ID NO: 108415 - RNA, 21 nt, Human
ccugcgccauugucgcagagc

SEQ ID NO: 108416 - RNA, 23 nt, Human
ccuugaguagaugccaucauucu

SEQ ID NO: 108417 - RNA, 21 nt, Human
cuccagaggugagucugcuga

SEQ ID NO: 108418 - RNA, 24 nt, Human
cuccuuccacaucaucugugacuu

SEQ ID NO: 108419 - RNA, 25 nt, Human
cucuauuuuagaagguucugguuua

SEQ ID NO: 108420 - RNA, 21 nt, Human
cugagaaugauuaccauuagg

SEQ ID NO: 108421 - RNA, 19 nt, Human
cuguuguugacuuagccua

SEQ ID NO: 108422 - RNA, 18 nt, Human
cuucauuuucuauaaugg

SEQ ID NO: 108423 - RNA, 21 nt, Human
cuuucuacugaaccaggcucc

SEQ ID NO: 108424 - RNA, 20 nt, Human
gaaagagacggucuucugca

SEQ ID NO: 108425 - RNA, 20 nt, Human
gaaugcuggguuccugugga

SEQ ID NO: 108426 - RNA, 18 nt, Human
gagcaaugaaaauguagg

SEQ ID NO: 108427 - RNA, 19 nt, Human
gagcucaugauuacauccc

SEQ ID NO: 108428 - RNA, 21 nt, Human
gaggaccuugccaggggcagu

SEQ ID NO: 108429 - RNA, 19 nt, Human
gcaccugcgccauugucgc

SEQ ID NO: 108430 - RNA, 24 nt, Human
gguaagcacuuuuaaacuguaucu

SEQ ID NO: 108431 - RNA, 19 nt, Human
uaauuugaaucaaguacaa

SEQ ID NO: 108432 - RNA, 24 nt, Human
uagcaucagcacagaaauaauuuu

SEQ ID NO: 108433 - RNA, 18 nt, Human
ucaaguacaauucugcug

SEQ ID NO: 108434 - RNA, 25 nt, Human
ucaaguaccaaacagacuacacgcu

SEQ ID NO: 108435 - RNA, 19 nt, Human
ucaaugauaaaaaaacaaa

SEQ ID NO: 108436 - RNA, 18 nt, Human
uccaagugccugucucug

SEQ ID NO: 108437 - RNA, 20 nt, Human
uccaugaaaguugaauauga

SEQ ID NO: 108438 - RNA, 20 nt, Human
uccuguggaggaauaaaguu

SEQ ID NO: 108439 - RNA, 26 nt, Human
uccuuccacaucaucugugacuucag

SEQ ID NO: 108440 - RNA, 19 nt, Human
ucugcauucaugcuuccag

SEQ ID NO: 108441 - RNA, 20 nt, Human
ugaaaccucugaggugacau

SEQ ID NO: 108442 - RNA, 22 nt, Human
ugaaagcaucaauaaggccagu

SEQ ID NO: 108443 - RNA, 22 nt, Human
ugaaauccugcuuugagucccc

SEQ ID NO: 108444 - RNA, 22 nt, Human
ugaaauucugcugaaagcauca

SEQ ID NO: 108445 - RNA, 27 nt, Human
ugacaaaaaacaaauauaccacuuaua

SEQ ID NO: 108446 - RNA, 20 nt, Human
ugagguaguauauuuuuuuc

SEQ ID NO: 108447 - RNA, 20 nt, Human
ugauacaguaaacgacccuc

SEQ ID NO: 108448 - RNA, 19 nt, Human
ugcgccauugucgcagagc

SEQ ID NO: 108449 - RNA, 21 nt, Human
uggcuucauggauggcuugaa

SEQ ID NO: 108450 - RNA, 19 nt, Human
ugggagauaaaugcugaaa

SEQ ID NO: 108451 - RNA, 20 nt, Human
ugggcauaaaaacgaugucc

SEQ ID NO: 108452 - RNA, 19 nt, Human
uguaauaaaaaaugcgaua

SEQ ID NO: 108453 - RNA, 22 nt, Human
uuaaagcagcuuuaucaaaauc

SEQ ID NO: 108454 - RNA, 18 nt, Human
uuacagcuaauccaaaaa

SEQ ID NO: 108455 - RNA, 22 nt, Human
uuacugggagugugguagggcu

SEQ ID NO: 108456 - RNA, 22 nt, Human
uuacugggagugugguagggcu

SEQ ID NO: 108457 - RNA, 19 nt, Human
uucccagaacaggaagaaa

SEQ ID NO: 108458 - RNA, 22 nt, Human
uucgcugggauauucaaaguuu

SEQ ID NO: 108459 - RNA, 24 nt, Human
uugaaacuuagccucgaggucuac

SEQ ID NO: 108460 - RNA, 24 nt, Human
uugaagaauuauugcuggcuuuug

SEQ ID NO: 108461 - RNA, 24 nt, Human
uugccaaacugauugcagaaauau

SEQ ID NO: 108462 - RNA, 23 nt, Human
uugcuugugcaauguuugaaacc

SEQ ID NO: 108463 - RNA, 20 nt, Human
uuugaaaccucugaggugac

SEQ ID NO: 108464 - RNA, 22 nt, Human
uuugauuaacauuuaauaacuc

SEQ ID NO: 108465 - RNA, 19 nt, Human
cccccgagccccggccagg

SEQ ID NO: 108466 - RNA, 19 nt, Human
ccccggccaggccuuggcc

SEQ ID NO: 108467 - RNA, 24 nt, Human
cccgagccccggccaggccuuggc

SEQ ID NO: 108468 - RNA, 24 nt, Human
ccugcuugccccuguccuuccccc

SEQ ID NO: 108469 - RNA, 20 nt, Human
cggccaggccuuggccugcu

SEQ ID NO: 108470 - RNA, 22 nt, Human
gccuuggccugcuugccccugu

SEQ ID NO: 108471 - RNA, 25 nt, Human
gccuuggccugcuugccccuguccu

SEQ ID NO: 108472 - RNA, 22 nt, Human
guagcuccuuaagccucugcuc

SEQ ID NO: 108473 - RNA, 23 nt, Human
uaugaggaggucgugggaggggg

SEQ ID NO: 108474 - RNA, 21 nt, Human
uccuuaagccucugcucuugc

SEQ ID NO: 108475 - RNA, 19 nt, Human
uggccugcuugccccuguc

SEQ ID NO: 108476 - RNA, 18 nt, Human
uucccccaguguagcucc

SEQ ID NO: 108477 - RNA, 20 nt, Human
aaacugaauccaugcucuaa

SEQ ID NO: 108478 - RNA, 21 nt, Human
aacaacuccuccauuccacca

SEQ ID NO: 108479 - RNA, 22 nt, Human
aacagcacuuguauaucauagu

SEQ ID NO: 108480 - RNA, 22 nt, Human
aaccucaguaaaaucacaguac

SEQ ID NO: 108481 - RNA, 19 nt, Human
aagccugcacuaucaggca

SEQ ID NO: 108482 - RNA, 24 nt, Human
acacagcgaaaacuaucgcgauuu

SEQ ID NO: 108483 - RNA, 21 nt, Human
acccggucacauuauccauaa

SEQ ID NO: 108484 - RNA, 23 nt, Human
accucacuccuuuccuucucucu

SEQ ID NO: 108485 - RNA, 21 nt, Human
accuguuugaugagccuuugu

SEQ ID NO: 108486 - RNA, 22 nt, Human
agaaaggacugcuucaaaagga

SEQ ID NO: 108487 - RNA, 20 nt, Human
agagagagagaaauaaaggc

SEQ ID NO: 108488 - RNA, 21 nt, Human
agaggaaaacaaaaaagaaaa

SEQ ID NO: 108489 - RNA, 21 nt, Human
agccugacacagcgaaaacua

SEQ ID NO: 108490 - RNA, 18 nt, Human
agcucagagacauagcaa

SEQ ID NO: 108491 - RNA, 23 nt, Human
agcuccaccgaagaaagccugac

SEQ ID NO: 108492 - RNA, 18 nt, Human
aggugcucgaggacucug

SEQ ID NO: 108493 - RNA, 21 nt, Human
auuugcauaagacccggucac

SEQ ID NO: 108494 - RNA, 18 nt, Human
caacccaccacacccucc

SEQ ID NO: 108495 - RNA, 24 nt, Human
cacacccuccuugcucauuauucc

SEQ ID NO: 108496 - RNA, 20 nt, Human
caccacacccuccuugcuca

SEQ ID NO: 108497 - RNA, 24 nt, Human
cauccucagcugaaugcauccagu

SEQ ID NO: 108498 - RNA, 23 nt, Human
cccaaacaacuccuccauuccac

SEQ ID NO: 108499 - RNA, 19 nt, Human
ccccuuucccaguguucua

SEQ ID NO: 108500 - RNA, 23 nt, Human
cccuagagucaaccugcuucugc

SEQ ID NO: 108501 - RNA, 19 nt, Human
ccgggucagggccgguccg

SEQ ID NO: 108502 - RNA, 23 nt, Human
ccuagaaccuagcuacccucgga

SEQ ID NO: 108503 - RNA, 24 nt, Human
ccuccccaaacaacuccuccauuc

SEQ ID NO: 108504 - RNA, 19 nt, Human
ccuccuucaaacacgggag

SEQ ID NO: 108505 - RNA, 18 nt, Human
ccucuagaauagggcugu

SEQ ID NO: 108506 - RNA, 19 nt, Human
ccugcagccccuuucccaa

SEQ ID NO: 108507 - RNA, 22 nt, Human
ccuucucucuccuuucccuccc

SEQ ID NO: 108508 - RNA, 22 nt, Human
ccuucuugugaugaaaccucag

SEQ ID NO: 108509 - RNA, 21 nt, Human
cgaagaaagccugacacagcg

SEQ ID NO: 108510 - RNA, 21 nt, Human
cggaaccugcagccccuuucc

SEQ ID NO: 108511 - RNA, 20 nt, Human
cggagcuccaccgaagaaag

SEQ ID NO: 108512 - RNA, 21 nt, Human
cuagagucaaccugcuucugc

SEQ ID NO: 108513 - RNA, 23 nt, Human
cuguuuuuugcgcugccuuugga

SEQ ID NO: 108514 - RNA, 19 nt, Human
gagagagaaauaaaggcuc

SEQ ID NO: 108515 - RNA, 23 nt, Human
gagaggaaaacaaaaaagaaaac

SEQ ID NO: 108516 - RNA, 23 nt, Human
gcugccuuuggauucugcaucug

SEQ ID NO: 108517 - RNA, 21 nt, Human
ggcuguaugugucuugcaugu

SEQ ID NO: 108518 - RNA, 26 nt, Human
ggugcucgaggacucugcuccagagg

SEQ ID NO: 108519 - RNA, 25 nt, Human
guuucuucucucuccucaucuguga

SEQ ID NO: 108520 - RNA, 23 nt, Human
uaaaaauaaaaaucuccaaucuc

SEQ ID NO: 108521 - RNA, 22 nt, Human
uaaaagauaccugacguuuucu

SEQ ID NO: 108522 - RNA, 20 nt, Human
uaccucacuccuuuccuucu

SEQ ID NO: 108523 - RNA, 21 nt, Human
uauuguccuccuucaaacacg

SEQ ID NO: 108524 - RNA, 22 nt, Human
ucaacccaccacacccuccuug

SEQ ID NO: 108525 - RNA, 24 nt, Human
uccauaaagucugagaggaaaaca

SEQ ID NO: 108526 - RNA, 18 nt, Human
uccguuucuucucucucc

SEQ ID NO: 108527 - RNA, 20 nt, Human
uccuucaaacacgggagcaa

SEQ ID NO: 108528 - RNA, 24 nt, Human
ucugagaggaaaacaaaaaagaaa

SEQ ID NO: 108529 - RNA, 24 nt, Human
ugagagauuucguucucgcuuccu

SEQ ID NO: 108530 - RNA, 24 nt, Human
ugagaggaaaacaaaaaagaaaac

SEQ ID NO: 108531 - RNA, 23 nt, Human
ugcccaaaauuaaaaauaaaaau

SEQ ID NO: 108532 - RNA, 18 nt, Human
uggagaucccuagaguca

SEQ ID NO: 108533 - RNA, 23 nt, Human
uggagaucccuagagucaaccug

SEQ ID NO: 108534 - RNA, 20 nt, Human
ugugagcaaacaggccaggu

SEQ ID NO: 108535 - RNA, 23 nt, Human
uguuugaugagccuuuguuguga

SEQ ID NO: 108536 - RNA, 22 nt, Human
uuaaaaaaaggcaagaaccuug

SEQ ID NO: 108537 - RNA, 19 nt, Human
uucucuuuacugucaaagc

SEQ ID NO: 108538 - RNA, 23 nt, Human
uuuuguaaaggaggaaaaaaaag

SEQ ID NO: 108539 - RNA, 23 nt, Human
aaaaacggugaaaaagaaauagc

SEQ ID NO: 108540 - RNA, 19 nt, Human
aaagacuaaagagaaaggg

SEQ ID NO: 108541 - RNA, 20 nt, Human
aacacagcuugaaacucaua

SEQ ID NO: 108542 - RNA, 26 nt, Human
aacauagcagcaaaacuucaagaacc

SEQ ID NO: 108543 - RNA, 23 nt, Human
aagaaacaggacggucgugagcg

SEQ ID NO: 108544 - RNA, 20 nt, Human
aagcagacaugauaccugac

SEQ ID NO: 108545 - RNA, 20 nt, Human
aagcuuuuguuucugcuguc

SEQ ID NO: 108546 - RNA, 19 nt, Human
aaggaguaaaaguuucuug

SEQ ID NO: 108547 - RNA, 24 nt, Human
acagcacuauccagugacaaugag

SEQ ID NO: 108548 - RNA, 18 nt, Human
acaggagcaagaaacagg

SEQ ID NO: 108549 - RNA, 23 nt, Human
acauagcagcaaaacuucaagaa

SEQ ID NO: 108550 - RNA, 23 nt, Human
acccacaugcccccacagcagua

SEQ ID NO: 108551 - RNA, 18 nt, Human
agaaaagaccgaaauccu

SEQ ID NO: 108552 - RNA, 25 nt, Human
agaaacugauggauaagccagauaa

SEQ ID NO: 108553 - RNA, 22 nt, Human
agaaagcagacaugauaccuga

SEQ ID NO: 108554 - RNA, 18 nt, Human
agcaaaacuucaagaacc

SEQ ID NO: 108555 - RNA, 19 nt, Human
agcacgcuuauggcaggcu

SEQ ID NO: 108556 - RNA, 25 nt, Human
aggaagggacaaagacuaaagagaa

SEQ ID NO: 108557 - RNA, 18 nt, Human
aggagcaagaaacaggac

SEQ ID NO: 108558 - RNA, 18 nt, Human
aggcagaaacugacaagc

SEQ ID NO: 108559 - RNA, 22 nt, Human
aggcagggaggugugcgcgggg

SEQ ID NO: 108560 - RNA, 27 nt, Human
aggcagggaggugugcgcggggaggac

SEQ ID NO: 108561 - RNA, 21 nt, Human
agguaaaaacggugaaaaaga

SEQ ID NO: 108562 - RNA, 22 nt, Human
auuacaacuggauguuuugcau

SEQ ID NO: 108563 - RNA, 19 nt, Human
caaaguaagcgcaaauguc

SEQ ID NO: 108564 - RNA, 20 nt, Human
caacgcauaugccucauccu

SEQ ID NO: 108565 - RNA, 23 nt, Human
caacucugaggcaauaagccaga

SEQ ID NO: 108566 - RNA, 18 nt, Human
caccgcaguacuguaugc

SEQ ID NO: 108567 - RNA, 22 nt, Human
cacuguguucaaauuuaauuuc

SEQ ID NO: 108568 - RNA, 23 nt, Human
cacuguguucaaauuuaauuucu

SEQ ID NO: 108569 - RNA, 21 nt, Human
cagcaaaacuucaagaaccaa

SEQ ID NO: 108570 - RNA, 22 nt, Human
caggagcaagaaacaggacggu

SEQ ID NO: 108571 - RNA, 18 nt, Human
caguaacauagcagcaaa

SEQ ID NO: 108572 - RNA, 23 nt, Human
cauagcuuaauuccuucccgcag

SEQ ID NO: 108573 - RNA, 27 nt, Human
ccacagcaguagcaaacucauuaggaa

SEQ ID NO: 108574 - RNA, 22 nt, Human
cccccacagcaguagcaaacuc

SEQ ID NO: 108575 - RNA, 22 nt, Human
ccccuuugucuuuuggacucaa

SEQ ID NO: 108576 - RNA, 19 nt, Human
cccuggaagucccgggagg

SEQ ID NO: 108577 - RNA, 23 nt, Human
cccuuccucuucccacuuagaaa

SEQ ID NO: 108578 - RNA, 18 nt, Human
ccgaaaucuccugcuccu

SEQ ID NO: 108579 - RNA, 20 nt, Human
ccucucccuuccucuuccca

SEQ ID NO: 108580 - RNA, 19 nt, Human
ccuucuuccccgccuuucc

SEQ ID NO: 108581 - RNA, 20 nt, Human
cgccgugacaucaccaggag

SEQ ID NO: 108582 - RNA, 22 nt, Human
cgggguggggggaagacccugg

SEQ ID NO: 108583 - RNA, 22 nt, Human
cuauggcccauggaagugcuga

SEQ ID NO: 108584 - RNA, 23 nt, Human
cucaggguucuuauccccuaagg

SEQ ID NO: 108585 - RNA, 25 nt, Human
cuccacagccguaucugauaagacc

SEQ ID NO: 108586 - RNA, 23 nt, Human
cugagauaaaguuaaaacgcuac

SEQ ID NO: 108587 - RNA, 19 nt, Human
gacaaaagguaaaaacggu

SEQ ID NO: 108588 - RNA, 21 nt, Human
gacaaugagauugaaaaggau

SEQ ID NO: 108589 - RNA, 18 nt, Human
gacaguucaggaaccauc

SEQ ID NO: 108590 - RNA, 21 nt, Human
gacuaaagagaaagggcaagu

SEQ ID NO: 108591 - RNA, 20 nt, Human
gagaaaugauuucuucacac

SEQ ID NO: 108592 - RNA, 22 nt, Human
gagaagauaauggaacagauuu

SEQ ID NO: 108593 - RNA, 18 nt, Human
gagcagaaggaguaaaag

SEQ ID NO: 108594 - RNA, 18 nt, Human
gagcagaaggaguaaaag

SEQ ID NO: 108595 - RNA, 23 nt, Human
gaggcagaaacugacaagcucau

SEQ ID NO: 108596 - RNA, 27 nt, Human
gaggggcacuuagugaaaaggaaggga

SEQ ID NO: 108597 - RNA, 18 nt, Human
gagucagcauucaugcuc

SEQ ID NO: 108598 - RNA, 21 nt, Human
gauaauggaacagauuuagaa

SEQ ID NO: 108599 - RNA, 30 nt, Human
gcaaaacuucaagaaccaauaaauaaggag

SEQ ID NO: 108600 - RNA, 18 nt, Human
gcagaaaagaccgaaauc

SEQ ID NO: 108601 - RNA, 19 nt, Human
gcauacuugcagcuuucac

SEQ ID NO: 108602 - RNA, 23 nt, Human
gcauaugccucauccucuccaca

SEQ ID NO: 108603 - RNA, 18 nt, Human
ggcagggaggugugcgcg

SEQ ID NO: 108604 - RNA, 20 nt, Human
ggcauaccggcuauggccca

SEQ ID NO: 108605 - RNA, 22 nt, Human
ggccagaaacccucgcgcuggc

SEQ ID NO: 108606 - RNA, 20 nt, Human
gggacaaagacuaaagagaa

SEQ ID NO: 108607 - RNA, 20 nt, Human
gugacaucaccaggaggcgg

SEQ ID NO: 108608 - RNA, 21 nt, Human
gugcagcuugccuggccuucc

SEQ ID NO: 108609 - RNA, 25 nt, Human
uaacauagcagcaaaacuucaagaa

SEQ ID NO: 108610 - RNA, 23 nt, Human
uaagccagaggacaaaagguaaa

SEQ ID NO: 108611 - RNA, 21 nt, Human
uaaguuacaaacaucagccuu

SEQ ID NO: 108612 - RNA, 24 nt, Human
uacaaagaugcccagugcccaaau

SEQ ID NO: 108613 - RNA, 22 nt, Human
uacacagaucguaugguggacc

SEQ ID NO: 108614 - RNA, 22 nt, Human
uagaaagcagacaugauaccug

SEQ ID NO: 108615 - RNA, 19 nt, Human
uaggaaacacagcuugaaa

SEQ ID NO: 108616 - RNA, 19 nt, Human
uagggggagccacgugaca

SEQ ID NO: 108617 - RNA, 18 nt, Human
uaugccucauccucucca

SEQ ID NO: 108618 - RNA, 20 nt, Human
ucaauggauacaagcugagc

SEQ ID NO: 108619 - RNA, 23 nt, Human
ucacuguguucaaauuuaauuuc

SEQ ID NO: 108620 - RNA, 19 nt, Human
ucagaaacugauggauaag

SEQ ID NO: 108621 - RNA, 18 nt, Human
ucagcgcgacggcugcga

SEQ ID NO: 108622 - RNA, 21 nt, Human
ucaucauggcaggugccccug

SEQ ID NO: 108623 - RNA, 23 nt, Human
uccucgagcauccuuucuucagc

SEQ ID NO: 108624 - RNA, 19 nt, Human
uccugcuccuuuggguuga

SEQ ID NO: 108625 - RNA, 22 nt, Human
ugaaaaagaaauagcaacggga

SEQ ID NO: 108626 - RNA, 18 nt, Human
ugaaagcacgcuuauggc

SEQ ID NO: 108627 - RNA, 19 nt, Human
ugacaagcucauuugccuc

SEQ ID NO: 108628 - RNA, 23 nt, Human
ugacaugccgaugccccuuuguc

SEQ ID NO: 108629 - RNA, 20 nt, Human
ugagcagaaggaguaaaagu

SEQ ID NO: 108630 - RNA, 21 nt, Human
ugagcagaaggaguaaaaguu

SEQ ID NO: 108631 - RNA, 22 nt, Human
ugagcagaaggaguaaaaguuu

SEQ ID NO: 108632 - RNA, 18 nt, Human
ugagcggacccacuggca

SEQ ID NO: 108633 - RNA, 22 nt, Human
ugagcgucucuggggaagcuuu

SEQ ID NO: 108634 - RNA, 23 nt, Human
ugauacagcacuauccagugaca

SEQ ID NO: 108635 - RNA, 18 nt, Human
ugcagccgaaugcacacc

SEQ ID NO: 108636 - RNA, 19 nt, Human
ugcaugaucuuucauuggg

SEQ ID NO: 108637 - RNA, 23 nt, Human
ugcccagugcccaaauuggcuau

SEQ ID NO: 108638 - RNA, 19 nt, Human
ugcuacuugaaaaugaaag

SEQ ID NO: 108639 - RNA, 21 nt, Human
uggaagugcugagcugaucaa

SEQ ID NO: 108640 - RNA, 21 nt, Human
uggccgccccucaggcguuuc

SEQ ID NO: 108641 - RNA, 22 nt, Human
ugggaggagacacaccgcagua

SEQ ID NO: 108642 - RNA, 21 nt, Human
uggguagccuguuuggacucu

SEQ ID NO: 108643 - RNA, 18 nt, Human
uguccccaaugcaugauc

SEQ ID NO: 108644 - RNA, 20 nt, Human
uucuuccccgccuuuccaaa

SEQ ID NO: 108645 - RNA, 26 nt, Human
uugcuggguuuucuguuauuugcagc

SEQ ID NO: 108646 - RNA, 25 nt, Human
uuuacccacccacaugcccccacag

SEQ ID NO: 108647 - RNA, 20 nt, Human
uuuuuguuuuuaaagguuuc

SEQ ID NO: 108648 - RNA, 20 nt, Human
aaagagagacaggaguugau

SEQ ID NO: 108649 - RNA, 20 nt, Human
aaccauagcaaucuuauuua

SEQ ID NO: 108650 - RNA, 21 nt, Human
aagcaaauauaauuaaaccau

SEQ ID NO: 108651 - RNA, 22 nt, Human
aaggagguuggagcagcuuagg

SEQ ID NO: 108652 - RNA, 23 nt, Human
aaggauaacauuugaacugaauc

SEQ ID NO: 108653 - RNA, 25 nt, Human
acaacacacuaaugugacuucacca

SEQ ID NO: 108654 - RNA, 18 nt, Human
acaaggauaacauuugaa

SEQ ID NO: 108655 - RNA, 23 nt, Human
agacaaaaaggagguuggagcag

SEQ ID NO: 108656 - RNA, 19 nt, Human
agcagcauugucuuauaau

SEQ ID NO: 108657 - RNA, 20 nt, Human
aggaacauccauuacauuca

SEQ ID NO: 108658 - RNA, 19 nt, Human
agugacaguacaaagagag

SEQ ID NO: 108659 - RNA, 18 nt, Human
caaaaaggagguuggagc

SEQ ID NO: 108660 - RNA, 27 nt, Human
caaaagacaaaaaggagguuggagcag

SEQ ID NO: 108661 - RNA, 21 nt, Human
cacaaaaugaugaguggcuaa

SEQ ID NO: 108662 - RNA, 27 nt, Human
cagaaauuaaaauuaacauaaacauac

SEQ ID NO: 108663 - RNA, 23 nt, Human
cagucuagaaaauaccauuacuc

SEQ ID NO: 108664 - RNA, 22 nt, Human
cagugugaauggaaagcaacag

SEQ ID NO: 108665 - RNA, 20 nt, Human
cauccauuacauucagaggu

SEQ ID NO: 108666 - RNA, 25 nt, Human
ccaguaacaacaguuagaucccaaa

SEQ ID NO: 108667 - RNA, 19 nt, Human
ccguuaaacaacauaucca

SEQ ID NO: 108668 - RNA, 23 nt, Human
cuguaauguccuucccgcuuuac

SEQ ID NO: 108669 - RNA, 24 nt, Human
cuuucucugguuugaaaagcaaag

SEQ ID NO: 108670 - RNA, 23 nt, Human
gaaagagacaacacacuaaugug

SEQ ID NO: 108671 - RNA, 22 nt, Human
gaacugaaucuucacagucuag

SEQ ID NO: 108672 - RNA, 21 nt, Human
gaagaaccuauuccuccacca

SEQ ID NO: 108673 - RNA, 22 nt, Human
gagacaaaagggucaaaggcac

SEQ ID NO: 108674 - RNA, 19 nt, Human
gagcagcuuagguauuuca

SEQ ID NO: 108675 - RNA, 24 nt, Human
uaaaaagcaaauauaauuaaacca

SEQ ID NO: 108676 - RNA, 22 nt, Human
uaacaggaacaaggauaacauu

SEQ ID NO: 108677 - RNA, 22 nt, Human
uaacuuguaggaaagagacaac

SEQ ID NO: 108678 - RNA, 18 nt, Human
uacaaagagagacaggag

SEQ ID NO: 108679 - RNA, 20 nt, Human
uaccuucgucuuccaguaac

SEQ ID NO: 108680 - RNA, 18 nt, Human
uacucuuuuccuucuggc

SEQ ID NO: 108681 - RNA, 24 nt, Human
uagaagagauuaaccaaagcagca

SEQ ID NO: 108682 - RNA, 21 nt, Human
uauuguaacaggaacaaggau

SEQ ID NO: 108683 - RNA, 23 nt, Human
ucaggacgguuggaauuucucuu

SEQ ID NO: 108684 - RNA, 24 nt, Human
ucuggcuuuccuuucucugguuug

SEQ ID NO: 108685 - RNA, 19 nt, Human
ucugguaggaacauccauu

SEQ ID NO: 108686 - RNA, 19 nt, Human
ugagagugacaguacaaag

SEQ ID NO: 108687 - RNA, 23 nt, Human
uggaagccuaacuauaauuucuc

SEQ ID NO: 108688 - RNA, 23 nt, Human
uggagcagcuuagguauuucagu

SEQ ID NO: 108689 - RNA, 19 nt, Human
uguaacaggaacaaggaua

SEQ ID NO: 108690 - RNA, 18 nt, Human
ugugacuucaccauccaa

SEQ ID NO: 108691 - RNA, 19 nt, Human
ugugcaaugggaaaggauu

SEQ ID NO: 108692 - RNA, 23 nt, Human
uucaccauccaaauauggaaaau

SEQ ID NO: 108693 - RNA, 19 nt, Human
uuccuaauguaacaucaug

SEQ ID NO: 108694 - RNA, 19 nt, Human
aaaagaccuugaagcagcc

SEQ ID NO: 108695 - RNA, 23 nt, Human
aaacacaaaacaccacuucuuac

SEQ ID NO: 108696 - RNA, 19 nt, Human
aaacacaacaggaugugca

SEQ ID NO: 108697 - RNA, 20 nt, Human
aaacagaaaaaaggaagcug

SEQ ID NO: 108698 - RNA, 21 nt, Human
aaacagaaaaaaggaagcugc

SEQ ID NO: 108699 - RNA, 21 nt, Human
aagauccucugagcucugccu

SEQ ID NO: 108700 - RNA, 22 nt, Human
aagaucuggaccagcagagcca

SEQ ID NO: 108701 - RNA, 22 nt, Human
aagcacgucugccccagggaug

SEQ ID NO: 108702 - RNA, 22 nt, Human
aagcagaaacauuuagaaguca

SEQ ID NO: 108703 - RNA, 24 nt, Human
aagcagaaacauuuagaagucaaa

SEQ ID NO: 108704 - RNA, 21 nt, Human
aagcaucuuccccacgcaccc

SEQ ID NO: 108705 - RNA, 20 nt, Human
aagccagggccgggggccca

SEQ ID NO: 108706 - RNA, 18 nt, Human
aagcugcaauguuaagaa

SEQ ID NO: 108707 - RNA, 22 nt, Human
aagcuggagaugaaacacaaaa

SEQ ID NO: 108708 - RNA, 18 nt, Human
aaggacucucugaaauau

SEQ ID NO: 108709 - RNA, 20 nt, Human
aagggccucuguauguaagc

SEQ ID NO: 108710 - RNA, 25 nt, Human
aauggaggggccacaaucagcuaga

SEQ ID NO: 108711 - RNA, 24 nt, Human
acaaaauaucuggugacuuaaaca

SEQ ID NO: 108712 - RNA, 20 nt, Human
acacccucuuccucaaauag

SEQ ID NO: 108713 - RNA, 21 nt, Human
acagggagcaggaagugggaa

SEQ ID NO: 108714 - RNA, 21 nt, Human
accagagccucugcucacacc

SEQ ID NO: 108715 - RNA, 23 nt, Human
accagagccucugcucacaccca

SEQ ID NO: 108716 - RNA, 21 nt, Human
acugaggcgacugaucacugg

SEQ ID NO: 108717 - RNA, 18 nt, Human
agagagguguuugugaag

SEQ ID NO: 108718 - RNA, 20 nt, Human
agagcugugcugccagggcc

SEQ ID NO: 108719 - RNA, 21 nt, Human
agcacgucugccccagggaug

SEQ ID NO: 108720 - RNA, 20 nt, Human
agccccagccagcugugccc

SEQ ID NO: 108721 - RNA, 18 nt, Human
agccucagggcaggcggc

SEQ ID NO: 108722 - RNA, 22 nt, Human
agcuaacuuuggugggugaugc

SEQ ID NO: 108723 - RNA, 23 nt, Human
agcuggagaugaaacacaaaaca

SEQ ID NO: 108724 - RNA, 25 nt, Human
aggaagcaucuuccccacgcacccu

SEQ ID NO: 108725 - RNA, 22 nt, Human
aggacugaugcucaccccaggg

SEQ ID NO: 108726 - RNA, 21 nt, Human
aggagaaaaggaaaccacgug

SEQ ID NO: 108727 - RNA, 20 nt, Human
agggugggaacacagggagc

SEQ ID NO: 108728 - RNA, 25 nt, Human
auaagcaugaaugcccaaugcccag

SEQ ID NO: 108729 - RNA, 24 nt, Human
auaauucugcaucacaaaugccau

SEQ ID NO: 108730 - RNA, 21 nt, Human
aucacaaaugccauacagugg

SEQ ID NO: 108731 - RNA, 19 nt, Human
auggccaggaacacugcuc

SEQ ID NO: 108732 - RNA, 24 nt, Human
caaaaccacccccagggccucuga

SEQ ID NO: 108733 - RNA, 26 nt, Human
caaacaaacagugcaaacagaaaaaa

SEQ ID NO: 108734 - RNA, 22 nt, Human
caacacuggagggugggaacac

SEQ ID NO: 108735 - RNA, 19 nt, Human
caagcucugaacacugcca

SEQ ID NO: 108736 - RNA, 25 nt, Human
caagcuggagaugaaacacaaaaca

SEQ ID NO: 108737 - RNA, 26 nt, Human
caaggucccaaagccagggccggggg

SEQ ID NO: 108738 - RNA, 23 nt, Human
cacccucuuccucaaauaggcca

SEQ ID NO: 108739 - RNA, 24 nt, Human
cacccucuuccucaaauaggccaa

SEQ ID NO: 108740 - RNA, 18 nt, Human
caccggggcagccucagg

SEQ ID NO: 108741 - RNA, 23 nt, Human
cacgguuuuaaaaaaaacuaaac

SEQ ID NO: 108742 - RNA, 21 nt, Human
cacugccauaaaacacagcag

SEQ ID NO: 108743 - RNA, 25 nt, Human
cacugccauaaaacacagcagcagc

SEQ ID NO: 108744 - RNA, 18 nt, Human
cagaaaaguccaagcucu

SEQ ID NO: 108745 - RNA, 20 nt, Human
caggagagggugggcugggc

SEQ ID NO: 108746 - RNA, 24 nt, Human
cagggcaagaccagagccucugcu

SEQ ID NO: 108747 - RNA, 22 nt, Human
cagggccucugaccagcaaggu

SEQ ID NO: 108748 - RNA, 25 nt, Human
cauuccccagaguugagugaagcug

SEQ ID NO: 108749 - RNA, 23 nt, Human
ccaaagccagggccgggggccca

SEQ ID NO: 108750 - RNA, 24 nt, Human
ccaauaacauucaccggggcagcc

SEQ ID NO: 108751 - RNA, 25 nt, Human
ccacuucuuaccacccguaggcucc

SEQ ID NO: 108752 - RNA, 20 nt, Human
ccagagccucugcucacacc

SEQ ID NO: 108753 - RNA, 22 nt, Human
ccagagccucugcucacaccca

SEQ ID NO: 108754 - RNA, 24 nt, Human
ccagcccucgagaggccggggucc

SEQ ID NO: 108755 - RNA, 18 nt, Human
ccagggccaggugccgag

SEQ ID NO: 108756 - RNA, 28 nt, Human
ccagggccgggggcccauuggccccacu

SEQ ID NO: 108757 - RNA, 21 nt, Human
cccaaagccagggccgggggc

SEQ ID NO: 108758 - RNA, 18 nt, Human
cccagccagcugugcccg

SEQ ID NO: 108759 - RNA, 19 nt, Human
cccagggcugggccugaga

SEQ ID NO: 108760 - RNA, 19 nt, Human
ccccagccagcugugcccg

SEQ ID NO: 108761 - RNA, 19 nt, Human
ccccagggccucugaccag

SEQ ID NO: 108762 - RNA, 20 nt, Human
ccccagggccucugaccagc

SEQ ID NO: 108763 - RNA, 22 nt, Human
ccccagggccucugaccagcaa

SEQ ID NO: 108764 - RNA, 21 nt, Human
cccccagggccucugaccagc

SEQ ID NO: 108765 - RNA, 21 nt, Human
ccccggaacagccccagccag

SEQ ID NO: 108766 - RNA, 23 nt, Human
cccgugggcaaccuccacgguuu

SEQ ID NO: 108767 - RNA, 23 nt, Human
cccugcuuucagcuaacuuuggg

SEQ ID NO: 108768 - RNA, 22 nt, Human
ccgaugacucccggcuuucuga

SEQ ID NO: 108769 - RNA, 22 nt, Human
ccugcagggcguuagcucugcc

SEQ ID NO: 108770 - RNA, 19 nt, Human
ccugcgcuauuuccuggga

SEQ ID NO: 108771 - RNA, 20 nt, Human
ccuuuacugccacucuggac

SEQ ID NO: 108772 - RNA, 20 nt, Human
ccuuugcauggggccugggu

SEQ ID NO: 108773 - RNA, 21 nt, Human
cguaaaugaaggccaucuuga

SEQ ID NO: 108774 - RNA, 24 nt, Human
cgugaucaagcucugaacacugcc

SEQ ID NO: 108775 - RNA, 19 nt, Human
cuaaacguaaaugaaggcc

SEQ ID NO: 108776 - RNA, 20 nt, Human
cuaaacguaaaugaaggccc

SEQ ID NO: 108777 - RNA, 21 nt, Human
cuccugacuuggacaauuggc

SEQ ID NO: 108778 - RNA, 18 nt, Human
cugagcgcaagaucugga

SEQ ID NO: 108779 - RNA, 23 nt, Human
cugccauaaaacacagcagcagc

SEQ ID NO: 108780 - RNA, 18 nt, Human
cugcugggacugauacca

SEQ ID NO: 108781 - RNA, 21 nt, Human
cugcugggacugauaccaugu

SEQ ID NO: 108782 - RNA, 22 nt, Human
cuggcucugguggagccagggg

SEQ ID NO: 108783 - RNA, 22 nt, Human
cugugcugccagggccaggugc

SEQ ID NO: 108784 - RNA, 18 nt, Human
cuuggccaaggaggucgc

SEQ ID NO: 108785 - RNA, 24 nt, Human
cuuugcauggggccuggguuuggg

SEQ ID NO: 108786 - RNA, 21 nt, Human
gagagcugugcugccagggcc

SEQ ID NO: 108787 - RNA, 24 nt, Human
gagaggagaaaaggaaaccacgug

SEQ ID NO: 108788 - RNA, 20 nt, Human
gagccucugcucacacccag

SEQ ID NO: 108789 - RNA, 19 nt, Human
gagggugggaacacaggga

SEQ ID NO: 108790 - RNA, 18 nt, Human
gaugaaacacaaaacacc

SEQ ID NO: 108791 - RNA, 25 nt, Human
gaugacucccggcuuucugagugag

SEQ ID NO: 108792 - RNA, 18 nt, Human
gcaaagauggccaggaac

SEQ ID NO: 108793 - RNA, 22 nt, Human
gcaaaucaucccucagcacaag

SEQ ID NO: 108794 - RNA, 20 nt, Human
gcaccaggagagggugggcu

SEQ ID NO: 108795 - RNA, 21 nt, Human
gcaccaggagagggugggcug

SEQ ID NO: 108796 - RNA, 19 nt, Human
gccaagauccucugagcuc

SEQ ID NO: 108797 - RNA, 25 nt, Human
gccagcuccaggaaggggggaacgc

SEQ ID NO: 108798 - RNA, 21 nt, Human
gcccagaugcucacuuugggu

SEQ ID NO: 108799 - RNA, 19 nt, Human
gccccacucccugaucacc

SEQ ID NO: 108800 - RNA, 18 nt, Human
gccccagggaugccugcu

SEQ ID NO: 108801 - RNA, 19 nt, Human
gccccagggaugccugcug

SEQ ID NO: 108802 - RNA, 18 nt, Human
gcugccagggccaggugc

SEQ ID NO: 108803 - RNA, 18 nt, Human
gcuggcaggaagcaucuu

SEQ ID NO: 108804 - RNA, 22 nt, Human
gcuggcgaggccaccuugggcc

SEQ ID NO: 108805 - RNA, 20 nt, Human
gcugguuucuaauggacaga

SEQ ID NO: 108806 - RNA, 20 nt, Human
ggaagucagaaaaguccaag

SEQ ID NO: 108807 - RNA, 21 nt, Human
ggacagaaauggaaggagcga

SEQ ID NO: 108808 - RNA, 23 nt, Human
ggaguauuauccccauuucauaa

SEQ ID NO: 108809 - RNA, 19 nt, Human
ggccauggaacaccaagcu

SEQ ID NO: 108810 - RNA, 20 nt, Human
gggaagcagaaacauuuaga

SEQ ID NO: 108811 - RNA, 20 nt, Human
gggcagacacccucuuccuc

SEQ ID NO: 108812 - RNA, 19 nt, Human
gggcagccucagggcaggc

SEQ ID NO: 108813 - RNA, 21 nt, Human
gggcccauuggccccacuccc

SEQ ID NO: 108814 - RNA, 19 nt, Human
ggggagaggggacaaagga

SEQ ID NO: 108815 - RNA, 22 nt, Human
ggggcggggagaggggacaaag

SEQ ID NO: 108816 - RNA, 20 nt, Human
ggggugggccugugccaaca

SEQ ID NO: 108817 - RNA, 22 nt, Human
ggggugggccugugccaacacu

SEQ ID NO: 108818 - RNA, 18 nt, Human
guaaaugaaggccaucuu

SEQ ID NO: 108819 - RNA, 23 nt, Human
guauguaagcuugggacagcuag

SEQ ID NO: 108820 - RNA, 22 nt, Human
gucccaaauaagggaaggacuc

SEQ ID NO: 108821 - RNA, 19 nt, Human
gugaaaggcagacuuggcc

SEQ ID NO: 108822 - RNA, 23 nt, Human
gugaucaagcucugaacacugcc

SEQ ID NO: 108823 - RNA, 20 nt, Human
gugggugaugccaagauccu

SEQ ID NO: 108824 - RNA, 22 nt, Human
guuuuaaaaaaaacuaaacgua

SEQ ID NO: 108825 - RNA, 18 nt, Human
uaaaacacagcagcagcu

SEQ ID NO: 108826 - RNA, 21 nt, Human
uaagcaugaaugcccaaugcc

SEQ ID NO: 108827 - RNA, 23 nt, Human
uaauucugcaucacaaaugccau

SEQ ID NO: 108828 - RNA, 22 nt, Human
uagcuaacaucauacaaacaaa

SEQ ID NO: 108829 - RNA, 23 nt, Human
uaggaaaguagcaaagauggcca

SEQ ID NO: 108830 - RNA, 23 nt, Human
ucaaagcaauuuuggucagggag

SEQ ID NO: 108831 - RNA, 23 nt, Human
ucacaccauucuccugacuugga

SEQ ID NO: 108832 - RNA, 19 nt, Human
ucacacccaggagcagagu

SEQ ID NO: 108833 - RNA, 24 nt, Human
ucacaguugauuugucaugagugg

SEQ ID NO: 108834 - RNA, 19 nt, Human
ucagaaaaguccaagcucu

SEQ ID NO: 108835 - RNA, 24 nt, Human
ucagcuaacuuuggugggugaugc

SEQ ID NO: 108836 - RNA, 22 nt, Human
ucagcuagaaaagaccuugaag

SEQ ID NO: 108837 - RNA, 20 nt, Human
ucagggagauaagaaaaugg

SEQ ID NO: 108838 - RNA, 22 nt, Human
ucagugcauaauucugcaucac

SEQ ID NO: 108839 - RNA, 23 nt, Human
ucauacaaacaaacagugcaaac

SEQ ID NO: 108840 - RNA, 20 nt, Human
uccccacgcacccucccugc

SEQ ID NO: 108841 - RNA, 23 nt, Human
ucugaccagcaagguguccgaug

SEQ ID NO: 108842 - RNA, 21 nt, Human
ucugcagauggagagaaagcu

SEQ ID NO: 108843 - RNA, 18 nt, Human
ucugcucacacccaggag

SEQ ID NO: 108844 - RNA, 22 nt, Human
ucugguggagccaggggugggc

SEQ ID NO: 108845 - RNA, 22 nt, Human
ugaacacugccauaaaacacag

SEQ ID NO: 108846 - RNA, 18 nt, Human
ugaaugcccaaugcccag

SEQ ID NO: 108847 - RNA, 21 nt, Human
ugacaggugaucacaccauuc

SEQ ID NO: 108848 - RNA, 19 nt, Human
ugacgucacugaacgacag

SEQ ID NO: 108849 - RNA, 18 nt, Human
ugagcaugauuugccucc

SEQ ID NO: 108850 - RNA, 23 nt, Human
ugaucaagcucugaacacugcca

SEQ ID NO: 108851 - RNA, 20 nt, Human
ugauguccugcgcuauuucc

SEQ ID NO: 108852 - RNA, 20 nt, Human
ugauuugccuccccaggcag

SEQ ID NO: 108853 - RNA, 19 nt, Human
ugcaaacagaaaaaaggaa

SEQ ID NO: 108854 - RNA, 20 nt, Human
ugcaucacaaaugccauaca

SEQ ID NO: 108855 - RNA, 21 nt, Human
ugcccagaugcucacuuuggg

SEQ ID NO: 108856 - RNA, 19 nt, Human
ugccccggaacagccccag

SEQ ID NO: 108857 - RNA, 22 nt, Human
ugccuuggccaagucccucuca

SEQ ID NO: 108858 - RNA, 24 nt, Human
ugccuuggccaagucccucucaca

SEQ ID NO: 108859 - RNA, 20 nt, Human
ugcugggacugauaccaugu

SEQ ID NO: 108860 - RNA, 19 nt, Human
uggacaauuggcuuccuuc

SEQ ID NO: 108861 - RNA, 22 nt, Human
uggagggugggaacacagggag

SEQ ID NO: 108862 - RNA, 23 nt, Human
uggggaagucagaaaaguccaag

SEQ ID NO: 108863 - RNA, 18 nt, Human
ugggugauggggcugcua

SEQ ID NO: 108864 - RNA, 22 nt, Human
ugucccuuccagcugggaacug

SEQ ID NO: 108865 - RNA, 21 nt, Human
ugugaaaccuucaggcacgug

SEQ ID NO: 108866 - RNA, 23 nt, Human
ugugauguccugcgcuauuuccu

SEQ ID NO: 108867 - RNA, 21 nt, Human
uguuaggagucccaaauaagg

SEQ ID NO: 108868 - RNA, 23 nt, Human
uuagcuaacaucauacaaacaaa

SEQ ID NO: 108869 - RNA, 19 nt, Human
uugaagcagccccaucucu

SEQ ID NO: 108870 - RNA, 23 nt, Human
uugaagcagccccaucucuggag

SEQ ID NO: 108871 - RNA, 20 nt, Human
uugagaauuuucucagugcc

SEQ ID NO: 108872 - RNA, 23 nt, Human
uugcauggggccuggguuugggg

SEQ ID NO: 108873 - RNA, 23 nt, Human
uuggccccacucccugaucaccu

SEQ ID NO: 108874 - RNA, 20 nt, Human
uugggccucucgaaaggcuu

SEQ ID NO: 108875 - RNA, 20 nt, Human
aaaccuagacgaggagagug

SEQ ID NO: 108876 - RNA, 23 nt, Human
aagaaaccuagacgaggagagug

SEQ ID NO: 108877 - RNA, 19 nt, Human
acgcaggugccggcccugc

SEQ ID NO: 108878 - RNA, 20 nt, Human
agacccaacacacucggaca

SEQ ID NO: 108879 - RNA, 24 nt, Human
agcucccggggaggccccacuccc

SEQ ID NO: 108880 - RNA, 22 nt, Human
aggcagaggggcccuuccaggg

SEQ ID NO: 108881 - RNA, 22 nt, Human
aggcagggcugggcauggggcu

SEQ ID NO: 108882 - RNA, 22 nt, Human
aggcagggcuggguguggggcc

SEQ ID NO: 108883 - RNA, 20 nt, Human
aggcucagggaccaaggcag

SEQ ID NO: 108884 - RNA, 24 nt, Human
agggcagcaauuccacgcucugag

SEQ ID NO: 108885 - RNA, 20 nt, Human
agggugcucgccauugccac

SEQ ID NO: 108886 - RNA, 24 nt, Human
aguggaggcugggccugcgcaagg

SEQ ID NO: 108887 - RNA, 18 nt, Human
aguguccacagggcagca

SEQ ID NO: 108888 - RNA, 21 nt, Human
augaggccaagcagcucccaa

SEQ ID NO: 108889 - RNA, 21 nt, Human
caagcagcucccaagucucga

SEQ ID NO: 108890 - RNA, 22 nt, Human
cacacucggacaccuuggggcc

SEQ ID NO: 108891 - RNA, 20 nt, Human
cacagggcccgugagucacc

SEQ ID NO: 108892 - RNA, 21 nt, Human
caccugcgcuugguggcuggc

SEQ ID NO: 108893 - RNA, 22 nt, Human
cacgcacacgggcacaggcacg

SEQ ID NO: 108894 - RNA, 18 nt, Human
cacugaaguugccucugc

SEQ ID NO: 108895 - RNA, 18 nt, Human
cacugaaguugccucugc

SEQ ID NO: 108896 - RNA, 18 nt, Human
cacugcccacaacagggu

SEQ ID NO: 108897 - RNA, 18 nt, Human
cacugcuggggagcaugg

SEQ ID NO: 108898 - RNA, 19 nt, Human
cacugcuggggagcauggu

SEQ ID NO: 108899 - RNA, 26 nt, Human
cagacccaacacacucggacaccuug

SEQ ID NO: 108900 - RNA, 21 nt, Human
cagcucccaagucucgaagac

SEQ ID NO: 108901 - RNA, 20 nt, Human
caggcacgcaggugccggcc

SEQ ID NO: 108902 - RNA, 18 nt, Human
ccaagccggaugcaggcc

SEQ ID NO: 108903 - RNA, 19 nt, Human
ccaccggcccuucuagcug

SEQ ID NO: 108904 - RNA, 19 nt, Human
ccaccggcccuucuagcug

SEQ ID NO: 108905 - RNA, 19 nt, Human
ccacugcuggggagcaugg

SEQ ID NO: 108906 - RNA, 19 nt, Human
ccagacccagcccagccag

SEQ ID NO: 108907 - RNA, 20 nt, Human
cccagacuccaagcucuggg

SEQ ID NO: 108908 - RNA, 19 nt, Human
cccagccaguguccacagg

SEQ ID NO: 108909 - RNA, 28 nt, Human
cccaugugcuaggggaagaccggggucc

SEQ ID NO: 108910 - RNA, 21 nt, Human
cccauuaugggcagggcuggg

SEQ ID NO: 108911 - RNA, 24 nt, Human
ccccagacccagcccagccaggcc

SEQ ID NO: 108912 - RNA, 19 nt, Human
ccccccacggagggacccg

SEQ ID NO: 108913 - RNA, 19 nt, Human
ccccggugcccaccggccc

SEQ ID NO: 108914 - RNA, 18 nt, Human
cccggccccggugcccac

SEQ ID NO: 108915 - RNA, 20 nt, Human
cccggggaggccccacuccc

SEQ ID NO: 108916 - RNA, 21 nt, Human
cccucgaggccggggucccca

SEQ ID NO: 108917 - RNA, 20 nt, Human
ccgcacccagccccccacgg

SEQ ID NO: 108918 - RNA, 22 nt, Human
ccgugccucaggcccagggacc

SEQ ID NO: 108919 - RNA, 19 nt, Human
ccucaggcccagggaccac

SEQ ID NO: 108920 - RNA, 24 nt, Human
ccucaggcccagggaccacaggcc

SEQ ID NO: 108921 - RNA, 21 nt, Human
ccuccaaacccuggugcuacg

SEQ ID NO: 108922 - RNA, 20 nt, Human
ccucugccgccccgugaggg

SEQ ID NO: 108923 - RNA, 23 nt, Human
ccugugcugggccagguguccuc

SEQ ID NO: 108924 - RNA, 20 nt, Human
ccuguggcggccccagaccc

SEQ ID NO: 108925 - RNA, 23 nt, Human
ccuguggcggccccagacccagc

SEQ ID NO: 108926 - RNA, 18 nt, Human
cggggcagcagcaggggc

SEQ ID NO: 108927 - RNA, 21 nt, Human
cuagacgaggagaguggaggc

SEQ ID NO: 108928 - RNA, 20 nt, Human
cucauggcugaaaaugaggc

SEQ ID NO: 108929 - RNA, 18 nt, Human
cugaucccuggagguaaa

SEQ ID NO: 108930 - RNA, 19 nt, Human
cuguggcggccccagaccc

SEQ ID NO: 108931 - RNA, 22 nt, Human
gacccaacacacucggacaccu

SEQ ID NO: 108932 - RNA, 22 nt, Human
gaggucacacacacacagcuga

SEQ ID NO: 108933 - RNA, 20 nt, Human
gcagcaggggcaagggcucu

SEQ ID NO: 108934 - RNA, 20 nt, Human
gccccagacccagcccagcc

SEQ ID NO: 108935 - RNA, 24 nt, Human
gcccguguacccaagccggaugca

SEQ ID NO: 108936 - RNA, 20 nt, Human
gccgcacccagccccccacg

SEQ ID NO: 108937 - RNA, 18 nt, Human
gccuguggcggccccaga

SEQ ID NO: 108938 - RNA, 19 nt, Human
gcggccccagacccagccc

SEQ ID NO: 108939 - RNA, 24 nt, Human
gcucccaagucucgaagacuccac

SEQ ID NO: 108940 - RNA, 22 nt, Human
ggaaaugcagaagggccggggu

SEQ ID NO: 108941 - RNA, 19 nt, Human
gggaggccccacucccugg

SEQ ID NO: 108942 - RNA, 23 nt, Human
gggcagcagcaggggcaagggcu

SEQ ID NO: 108943 - RNA, 23 nt, Human
gggcauggggcucagggccuugg

SEQ ID NO: 108944 - RNA, 18 nt, Human
gggccuguggcggcccca

SEQ ID NO: 108945 - RNA, 19 nt, Human
uaacagggacacugaaguu

SEQ ID NO: 108946 - RNA, 19 nt, Human
uacccaagccggaugcagg

SEQ ID NO: 108947 - RNA, 21 nt, Human
uccacagggcagcaauuccac

SEQ ID NO: 108948 - RNA, 19 nt, Human
ucccaagucucgaagacuc

SEQ ID NO: 108949 - RNA, 21 nt, Human
ucccggggaggccccacuccc

SEQ ID NO: 108950 - RNA, 22 nt, Human
ucccggggaggccccacucccu

SEQ ID NO: 108951 - RNA, 21 nt, Human
uccgugccucaggcccaggga

SEQ ID NO: 108952 - RNA, 21 nt, Human
ucgcagccuccaaacccuggu

SEQ ID NO: 108953 - RNA, 26 nt, Human
ugaaaaugaggccaagcagcucccaa

SEQ ID NO: 108954 - RNA, 21 nt, Human
ugaggccggcaggagucuggc

SEQ ID NO: 108955 - RNA, 24 nt, Human
ugcccauuaugggcagggcugggc

SEQ ID NO: 108956 - RNA, 22 nt, Human
uggcccccgcugcaccugcgcu

SEQ ID NO: 108957 - RNA, 22 nt, Human
uggcggccccagacccagccca

SEQ ID NO: 108958 - RNA, 22 nt, Human
ugggggaccaaggcagggcugg

SEQ ID NO: 108959 - RNA, 20 nt, Human
ugggggcuucccggccccgg

SEQ ID NO: 108960 - RNA, 24 nt, Human
ugguggcgucagcucccggggagg

SEQ ID NO: 108961 - RNA, 22 nt, Human
uucagacccaacacacucggac

SEQ ID NO: 108962 - RNA, 23 nt, Human
uucucagcucucaacaucacagc

SEQ ID NO: 108963 - RNA, 19 nt, Human
uuuuucucagcucucaaca

SEQ ID NO: 108964 - RNA, 21 nt, Human
uuuuuuuuuuuuuugagagga

SEQ ID NO: 108965 - RNA, 22 nt, Human
uuuuuuuuuuuuuuuugagagg

SEQ ID NO: 108966 - RNA, 20 nt, Human
uuuuuuuuuuuuuuuuuugg

SEQ ID NO: 108967 - RNA, 22 nt, Human
cacacugugacgagcaaaccua

SEQ ID NO: 108968 - RNA, 19 nt, Human
ccacacugugacgagcaaa

SEQ ID NO: 108969 - RNA, 19 nt, Human
ccuagggcccugggcccag

SEQ ID NO: 108970 - RNA, 20 nt, Human
ccucugugggcagccgggcu

SEQ ID NO: 108971 - RNA, 23 nt, Human
cuacagcaccucugugggcagcc

SEQ ID NO: 108972 - RNA, 20 nt, Human
gaccuuuggcuuuagagccu

SEQ ID NO: 108973 - RNA, 24 nt, Human
gcaucuacagcaccucugugggca

SEQ ID NO: 108974 - RNA, 22 nt, Human
uagaccuuuggcuuuagagccu

SEQ ID NO: 108975 - RNA, 22 nt, Human
ucugugggcagccgggcagccc

SEQ ID NO: 108976 - RNA, 19 nt, Human
aaaccaaccccacugacca

SEQ ID NO: 108977 - RNA, 21 nt, Human
aaccccacugaccaaacuccc

SEQ ID NO: 108978 - RNA, 20 nt, Human
aagaccaaccagaaauguca

SEQ ID NO: 108979 - RNA, 22 nt, Human
aaucucaguuuuuguuucuuuc

SEQ ID NO: 108980 - RNA, 21 nt, Human
acaaaccaaccccacugacca

SEQ ID NO: 108981 - RNA, 22 nt, Human
acccuccugccuucccucuucu

SEQ ID NO: 108982 - RNA, 18 nt, Human
acgcugccacccuccugc

SEQ ID NO: 108983 - RNA, 28 nt, Human
acuaaaaauccacagcucauucccuccu

SEQ ID NO: 108984 - RNA, 18 nt, Human
agacauucaagaccaacc

SEQ ID NO: 108985 - RNA, 25 nt, Human
agacauucaagaccaaccagaaaug

SEQ ID NO: 108986 - RNA, 22 nt, Human
aggacggaguauuugagagaaa

SEQ ID NO: 108987 - RNA, 20 nt, Human
caaaccaaccccacugacca

SEQ ID NO: 108988 - RNA, 23 nt, Human
caaaccaaccccacugaccaaac

SEQ ID NO: 108989 - RNA, 25 nt, Human
caaccagaaaugucauuucugcacu

SEQ ID NO: 108990 - RNA, 24 nt, Human
caaccccacugaccaaacucccaa

SEQ ID NO: 108991 - RNA, 19 nt, Human
cagcagcccaggggagaag

SEQ ID NO: 108992 - RNA, 19 nt, Human
cagcccaggggagaagcag

SEQ ID NO: 108993 - RNA, 25 nt, Human
cagccgggcagcucccugggcccuc

SEQ ID NO: 108994 - RNA, 25 nt, Human
cagccgggcagcucccugggcccuc

SEQ ID NO: 108995 - RNA, 20 nt, Human
caggaucaagccuccccuuc

SEQ ID NO: 108996 - RNA, 24 nt, Human
caggaucaagccuccccuucccag

SEQ ID NO: 108997 - RNA, 21 nt, Human
caggcaugcagaaaaccucga

SEQ ID NO: 108998 - RNA, 23 nt, Human
cauucccuccugcgcccugaccc

SEQ ID NO: 108999 - RNA, 24 nt, Human
ccacagcucauucccuccugcgcc

SEQ ID NO: 109000 - RNA, 20 nt, Human
ccagaaaugucauuucugca

SEQ ID NO: 109001 - RNA, 18 nt, Human
ccagagcagacauucaag

SEQ ID NO: 109002 - RNA, 23 nt, Human
ccagagcagacauucaagaccaa

SEQ ID NO: 109003 - RNA, 18 nt, Human
ccagccggagcccuucau

SEQ ID NO: 109004 - RNA, 23 nt, Human
cccacagcagcccaggggagaag

SEQ ID NO: 109005 - RNA, 27 nt, Human
ccccacugaccaaacucccaagucacu

SEQ ID NO: 109006 - RNA, 20 nt, Human
cccgccggggacccagccca

SEQ ID NO: 109007 - RNA, 23 nt, Human
ccuccauugacagucccgccggg

SEQ ID NO: 109008 - RNA, 18 nt, Human
ccuccucugagccaccac

SEQ ID NO: 109009 - RNA, 25 nt, Human
ccuccugccuucccucuucugccaa

SEQ ID NO: 109010 - RNA, 20 nt, Human
ccucggggucacgccgcucc

SEQ ID NO: 109011 - RNA, 22 nt, Human
ccucggggucacgccgcuccuc

SEQ ID NO: 109012 - RNA, 23 nt, Human
ccucuuauuucccccucuguccc

SEQ ID NO: 109013 - RNA, 18 nt, Human
ccuggaucacaaaccaac

SEQ ID NO: 109014 - RNA, 25 nt, Human
cgaauaucugccauggaagagccuu

SEQ ID NO: 109015 - RNA, 22 nt, Human
cgcccugaccaccugcccacag

SEQ ID NO: 109016 - RNA, 24 nt, Human
cgccggggacccagcccacagcag

SEQ ID NO: 109017 - RNA, 27 nt, Human
cggagcccuucauuuaaguguagcccu

SEQ ID NO: 109018 - RNA, 21 nt, Human
cucccaugugcaagaggacuc

SEQ ID NO: 109019 - RNA, 24 nt, Human
cuccggguccauuggcuguucaca

SEQ ID NO: 109020 - RNA, 20 nt, Human
cucucggcuccggguccauu

SEQ ID NO: 109021 - RNA, 18 nt, Human
cugaccaccugcccacag

SEQ ID NO: 109022 - RNA, 19 nt, Human
cuggaaccccugccuccaa

SEQ ID NO: 109023 - RNA, 19 nt, Human
cuggagccuggcuggacuc

SEQ ID NO: 109024 - RNA, 24 nt, Human
gagcagacauucaagaccaaccag

SEQ ID NO: 109025 - RNA, 21 nt, Human
gagccaguuccgcaggacugg

SEQ ID NO: 109026 - RNA, 21 nt, Human
gagguggcuuggccagagcag

SEQ ID NO: 109027 - RNA, 22 nt, Human
gggacccagcccacagcagccc

SEQ ID NO: 109028 - RNA, 25 nt, Human
uaaaaacaaagcucuugcuggucuc

SEQ ID NO: 109029 - RNA, 24 nt, Human
uaaaaauccacagcucauucccuc

SEQ ID NO: 109030 - RNA, 21 nt, Human
uagcuagcaugagaggaggug

SEQ ID NO: 109031 - RNA, 23 nt, Human
uauaauaaauacaaaaacagaca

SEQ ID NO: 109032 - RNA, 22 nt, Human
ucaagaccaaccagaaauguca

SEQ ID NO: 109033 - RNA, 20 nt, Human
ucacacucacuucccugugu

SEQ ID NO: 109034 - RNA, 18 nt, Human
ucacauuauuuccuugga

SEQ ID NO: 109035 - RNA, 21 nt, Human
uccaggacggaguauuugaga

SEQ ID NO: 109036 - RNA, 20 nt, Human
ucccuguguccuggaacugc

SEQ ID NO: 109037 - RNA, 22 nt, Human
uccgcaagguuuauuccuggau

SEQ ID NO: 109038 - RNA, 21 nt, Human
uccuggaucacaaaccaaccc

SEQ ID NO: 109039 - RNA, 19 nt, Human
ucuccuccucuuauuuccc

SEQ ID NO: 109040 - RNA, 18 nt, Human
ugagagaaaauuguguag

SEQ ID NO: 109041 - RNA, 22 nt, Human
ugagaggagguggcuuggccag

SEQ ID NO: 109042 - RNA, 20 nt, Human
ugcacuuccaggcaugcaga

SEQ ID NO: 109043 - RNA, 18 nt, Human
ugccuaggccagccgggc

SEQ ID NO: 109044 - RNA, 18 nt, Human
ugccuaggccagccgggc

SEQ ID NO: 109045 - RNA, 21 nt, Human
uggaucacaaaccaaccccac

SEQ ID NO: 109046 - RNA, 23 nt, Human
uggaucacaaaccaaccccacug

SEQ ID NO: 109047 - RNA, 22 nt, Human
ugggcaucuccuuccuaacacg

SEQ ID NO: 109048 - RNA, 22 nt, Human
ugugcuggaaccccugccucca

SEQ ID NO: 109049 - RNA, 21 nt, Human
uguuucuuucuucuuccaaga

SEQ ID NO: 109050 - RNA, 19 nt, Human
uucacauuauuuccuugga

SEQ ID NO: 109051 - RNA, 20 nt, Human
uucacauuauuuccuuggau

SEQ ID NO: 109052 - RNA, 21 nt, Human
uugguauagagagcuuucucc

SEQ ID NO: 109053 - RNA, 20 nt, Human
aggcaggucagugcaagggc

SEQ ID NO: 109054 - RNA, 22 nt, Human
agggcugaguguguuucgggug

SEQ ID NO: 109055 - RNA, 24 nt, Human
caggucagugcaagggcugagugu

SEQ ID NO: 109056 - RNA, 31 nt, Human
cauaugcaaacacacccugaaacgugcagug

SEQ ID NO: 109057 - RNA, 23 nt, Human
gaagcaaccagccuccaaucaga

SEQ ID NO: 109058 - RNA, 23 nt, Human
gggcugaguguguuucggguggg

SEQ ID NO: 109059 - RNA, 18 nt, Human
uauccgaagcaaccagcc

SEQ ID NO: 109060 - RNA, 21 nt, Human
ucagugcaagggcugagugug

SEQ ID NO: 109061 - RNA, 23 nt, Human
aaguauuggcggucacccaggcc

SEQ ID NO: 109062 - RNA, 23 nt, Human
acugacucaccgacggcgcgcgc

SEQ ID NO: 109063 - RNA, 18 nt, Human
caaggcccgcuccaccgg

SEQ ID NO: 109064 - RNA, 19 nt, Human
caggccccgugcuccagaa

SEQ ID NO: 109065 - RNA, 19 nt, Human
cagguuggucccugggccc

SEQ ID NO: 109066 - RNA, 22 nt, Human
cccaggccccgugcuccagaag

SEQ ID NO: 109067 - RNA, 23 nt, Human
ccccgaagucgacugcccggccc

SEQ ID NO: 109068 - RNA, 22 nt, Human
cccgcaaagccguggcugcugg

SEQ ID NO: 109069 - RNA, 25 nt, Human
cccugggccccgaagucgacugccc

SEQ ID NO: 109070 - RNA, 19 nt, Human
ccggggccgcugggccugg

SEQ ID NO: 109071 - RNA, 18 nt, Human
ccuggcuucugggggugg

SEQ ID NO: 109072 - RNA, 19 nt, Human
ccuggcuucuggggguggg

SEQ ID NO: 109073 - RNA, 20 nt, Human
cgcgggggcuuccuggcuuc

SEQ ID NO: 109074 - RNA, 21 nt, Human
cggcccgauggggcucgacgg

SEQ ID NO: 109075 - RNA, 24 nt, Human
cucgcgguggugguggugguguuu

SEQ ID NO: 109076 - RNA, 22 nt, Human
cugcaccugccuguggcuuuga

SEQ ID NO: 109077 - RNA, 20 nt, Human
cuuccagggcugccgguccc

SEQ ID NO: 109078 - RNA, 20 nt, Human
cuucugggggugggcuggcc

SEQ ID NO: 109079 - RNA, 21 nt, Human
gagcaugggggcagcggcccg

SEQ ID NO: 109080 - RNA, 19 nt, Human
gaggggccggggccgcugg

SEQ ID NO: 109081 - RNA, 18 nt, Human
gcccgcaaagccguggcu

SEQ ID NO: 109082 - RNA, 18 nt, Human
gccgcggcaaggcccgcu

SEQ ID NO: 109083 - RNA, 20 nt, Human
gccuggugcgcgcuccagcu

SEQ ID NO: 109084 - RNA, 18 nt, Human
gcgcgggggcuuccuggc

SEQ ID NO: 109085 - RNA, 23 nt, Human
gcggucacccaggccccgugcuc

SEQ ID NO: 109086 - RNA, 24 nt, Human
ggcccgcaaagccguggcugcugg

SEQ ID NO: 109087 - RNA, 18 nt, Human
ggccuggcgggagcugcg

SEQ ID NO: 109088 - RNA, 20 nt, Human
ggcgggagcugcggcgcccc

SEQ ID NO: 109089 - RNA, 23 nt, Human
gggggcagcggcccgauggggcu

SEQ ID NO: 109090 - RNA, 20 nt, Human
gggggugggcuggccuccga

SEQ ID NO: 109091 - RNA, 22 nt, Human
gggugcggggagacgaggggcc

SEQ ID NO: 109092 - RNA, 22 nt, Human
ggguggcuccgggugcggggag

SEQ ID NO: 109093 - RNA, 19 nt, Human
gguggcuccgggugcgggg

SEQ ID NO: 109094 - RNA, 19 nt, Human
guggugguggugguggugg

SEQ ID NO: 109095 - RNA, 19 nt, Human
uccauacgcucucgccgcg

SEQ ID NO: 109096 - RNA, 20 nt, Human
uccauacgcucucgccgcgg

SEQ ID NO: 109097 - RNA, 24 nt, Human
uccuggcuucugggggugggcugg

SEQ ID NO: 109098 - RNA, 18 nt, Human
ucgcgguggugguggugg

SEQ ID NO: 109099 - RNA, 18 nt, Human
ugaaaaauaucaagugcc

SEQ ID NO: 109100 - RNA, 20 nt, Human
ugaaaaauaucaagugcccc

SEQ ID NO: 109101 - RNA, 21 nt, Human
ugagguuucacaguccaugca

SEQ ID NO: 109102 - RNA, 20 nt, Human
ugcaaaacgaaaggcuuuua

SEQ ID NO: 109103 - RNA, 20 nt, Human
ugcccagcgcgagcaugggg

SEQ ID NO: 109104 - RNA, 22 nt, Human
ugcccggcccgcaaagccgugg

SEQ ID NO: 109105 - RNA, 19 nt, Human
ugccggucccugcccagcg

SEQ ID NO: 109106 - RNA, 21 nt, Human
ugcgccugcaccugccugugg

SEQ ID NO: 109107 - RNA, 19 nt, Human
ugcuggggaagcugcccca

SEQ ID NO: 109108 - RNA, 18 nt, Human
uggcuccgggugcgggga

SEQ ID NO: 109109 - RNA, 19 nt, Human
uggcuccgggugcggggag

SEQ ID NO: 109110 - RNA, 21 nt, Human
ugggccccgaagucgacugcc

SEQ ID NO: 109111 - RNA, 22 nt, Human
ugggggcagcggcccgaugggg

SEQ ID NO: 109112 - RNA, 20 nt, Human
uggggucucccugcgucugu

SEQ ID NO: 109113 - RNA, 22 nt, Human
uggugguggugguggggucucc

SEQ ID NO: 109114 - RNA, 20 nt, Human
uggugguggugguggugguc

SEQ ID NO: 109115 - RNA, 19 nt, Human
uuggugguggugguggugg

SEQ ID NO: 109116 - RNA, 26 nt, Human
uuuuuuuuuuugcaaaacgaaaggcu

SEQ ID NO: 109117 - RNA, 18 nt, Human
uuuuuuuuuuuuuuuuug

SEQ ID NO: 109118 - RNA, 21 nt, Human
uuuuuuuuuuuuuuuuugcaa

SEQ ID NO: 109119 - RNA, 19 nt, Human
aacagcgccgcgcacagaa

SEQ ID NO: 109120 - RNA, 20 nt, Human
accauuuacuaagcagauuc

SEQ ID NO: 109121 - RNA, 20 nt, Human
acuaagcagauucuuagccu

SEQ ID NO: 109122 - RNA, 23 nt, Human
agccggacguuccgaggagccug

SEQ ID NO: 109123 - RNA, 18 nt, Human
aggaggggcccggccgug

SEQ ID NO: 109124 - RNA, 19 nt, Human
aggcaggagcggauccagg

SEQ ID NO: 109125 - RNA, 28 nt, Human
agggcagggccgggcuaguggcaggaga

SEQ ID NO: 109126 - RNA, 21 nt, Human
aguggcaggagaaggucagcu

SEQ ID NO: 109127 - RNA, 18 nt, Human
cagcagccaagaccccca

SEQ ID NO: 109128 - RNA, 20 nt, Human
cagcagccaagacccccagc

SEQ ID NO: 109129 - RNA, 18 nt, Human
cagccaagacccccagcg

SEQ ID NO: 109130 - RNA, 20 nt, Human
cauccgccccuccgaaguca

SEQ ID NO: 109131 - RNA, 23 nt, Human
ccaggagccgcgucggggcgcag

SEQ ID NO: 109132 - RNA, 24 nt, Human
cccccagcgucuuggaggggaagc

SEQ ID NO: 109133 - RNA, 18 nt, Human
cccgcagaacccccaagg

SEQ ID NO: 109134 - RNA, 21 nt, Human
cccgggcucugcauccgcccc

SEQ ID NO: 109135 - RNA, 18 nt, Human
ccgauggaguaaagacca

SEQ ID NO: 109136 - RNA, 20 nt, Human
ccuccgaagucagcaggagc

SEQ ID NO: 109137 - RNA, 19 nt, Human
ccucgcaggcguggcuggc

SEQ ID NO: 109138 - RNA, 18 nt, Human
ccugccgauggaguaaag

SEQ ID NO: 109139 - RNA, 18 nt, Human
cgaaggcccgcagaaccc

SEQ ID NO: 109140 - RNA, 23 nt, Human
cgaaggcccgcagaacccccaag

SEQ ID NO: 109141 - RNA, 23 nt, Human
cuggugccuuugcgcccgcgcuc

SEQ ID NO: 109142 - RNA, 24 nt, Human
gagccugcgcgccgcgcuacccgg

SEQ ID NO: 109143 - RNA, 24 nt, Human
gcacagaaaaggaaacuucauucc

SEQ ID NO: 109144 - RNA, 22 nt, Human
gccaagacccccagcgucuugg

SEQ ID NO: 109145 - RNA, 18 nt, Human
gcccugggcgggcccugg

SEQ ID NO: 109146 - RNA, 19 nt, Human
gcgcaggcaggagcggauc

SEQ ID NO: 109147 - RNA, 22 nt, Human
ggcaggaggggcccggccgugc

SEQ ID NO: 109148 - RNA, 20 nt, Human
gggcagggccgggcuagugg

SEQ ID NO: 109149 - RNA, 28 nt, Human
gggggccccgggcucugcauccgccccu

SEQ ID NO: 109150 - RNA, 18 nt, Human
uaaggcagcagccaagac

SEQ ID NO: 109151 - RNA, 22 nt, Human
ucaagcuccggugcccacaagc

SEQ ID NO: 109152 - RNA, 18 nt, Human
uccaggagccgcgucggg

SEQ ID NO: 109153 - RNA, 22 nt, Human
uccaggagccgcgucggggcgc

SEQ ID NO: 109154 - RNA, 21 nt, Human
ucccacucccgcccucucuca

SEQ ID NO: 109155 - RNA, 20 nt, Human
ucucucaagcuccggugccc

SEQ ID NO: 109156 - RNA, 24 nt, Human
uggagugagaccgggagguccagg

SEQ ID NO: 109157 - RNA, 18 nt, Human
uggcaggagaaggucagc

SEQ ID NO: 109158 - RNA, 19 nt, Human
uggcaggaggggcccggcc

SEQ ID NO: 109159 - RNA, 23 nt, Human
uggcaggaggggcccggccgugc

SEQ ID NO: 109160 - RNA, 20 nt, Human
uggucccugggcucgggccu

SEQ ID NO: 109161 - RNA, 20 nt, Human
uuacuaagcagauucuuagc

SEQ ID NO: 109162 - RNA, 20 nt, Human
uugcgcccgcgcucccggcu

SEQ ID NO: 109163 - RNA, 23 nt, Human
uuuuugagaguucaaaccauuua

SEQ ID NO: 109164 - RNA, 20 nt, Human
aaaaauccaaaaaauuagcc

SEQ ID NO: 109165 - RNA, 22 nt, Human
aaacauuuuaggggcauuccuu

SEQ ID NO: 109166 - RNA, 18 nt, Human
aacaagagggugaggugg

SEQ ID NO: 109167 - RNA, 19 nt, Human
aacauagugaaaccccauc

SEQ ID NO: 109168 - RNA, 20 nt, Human
aacauagugaaaccccaucu

SEQ ID NO: 109169 - RNA, 21 nt, Human
aacauagugaaaccccaucuc

SEQ ID NO: 109170 - RNA, 21 nt, Human
aacauagugaaaccccaucuc

SEQ ID NO: 109171 - RNA, 18 nt, Human
aauuagccaagcauggug

SEQ ID NO: 109172 - RNA, 18 nt, Human
accccaucucuacuaaaa

SEQ ID NO: 109173 - RNA, 24 nt, Human
accccaucucuacuaaaaauccaa

SEQ ID NO: 109174 - RNA, 18 nt, Human
agacagagguugcacuug

SEQ ID NO: 109175 - RNA, 24 nt, Human
agcacuuugggaggcugagguggg

SEQ ID NO: 109176 - RNA, 21 nt, Human
agccaagcaugguggcacacg

SEQ ID NO: 109177 - RNA, 22 nt, Human
agccuggccaacauagugaaac

SEQ ID NO: 109178 - RNA, 24 nt, Human
agccuggccaacauagugaaaccc

SEQ ID NO: 109179 - RNA, 23 nt, Human
aggaggcugaggcacgagaauca

SEQ ID NO: 109180 - RNA, 23 nt, Human
aggaguucaagacuagccuggcc

SEQ ID NO: 109181 - RNA, 26 nt, Human
aggccaggaguucaagacuagccugg

SEQ ID NO: 109182 - RNA, 20 nt, Human
aggcugaggugggcggauug

SEQ ID NO: 109183 - RNA, 24 nt, Human
agggaggaugggauuggcuucuuu

SEQ ID NO: 109184 - RNA, 24 nt, Human
agguguaguggcucgugccuauaa

SEQ ID NO: 109185 - RNA, 24 nt, Human
aguggcucgugccuauaaucucag

SEQ ID NO: 109186 - RNA, 24 nt, Human
caagacuagccuggccaacauagu

SEQ ID NO: 109187 - RNA, 20 nt, Human
caccgcacaccaugcagggu

SEQ ID NO: 109188 - RNA, 24 nt, Human
cacuugggagcagggugacugugg

SEQ ID NO: 109189 - RNA, 21 nt, Human
cagacagagguugcacuuggg

SEQ ID NO: 109190 - RNA, 24 nt, Human
cagcacuuugggaggcugaggugg

SEQ ID NO: 109191 - RNA, 20 nt, Human
cagggugacugugggaggca

SEQ ID NO: 109192 - RNA, 23 nt, Human
ccaugcagggucagacagagguu

SEQ ID NO: 109193 - RNA, 21 nt, Human
cccaucucuacuaaaaaucca

SEQ ID NO: 109194 - RNA, 23 nt, Human
ccuggccaacauagugaaacccc

SEQ ID NO: 109195 - RNA, 24 nt, Human
ccuggccaacauagugaaacccca

SEQ ID NO: 109196 - RNA, 24 nt, Human
cgucuguaauuucggcuacucagg

SEQ ID NO: 109197 - RNA, 20 nt, Human
cgugccuauaaucucagcac

SEQ ID NO: 109198 - RNA, 24 nt, Human
cgugccuauaaucucagcacuuug

SEQ ID NO: 109199 - RNA, 24 nt, Human
cucgugccuauaaucucagcacuu

SEQ ID NO: 109200 - RNA, 23 nt, Human
cuggccaacauagugaaacccca

SEQ ID NO: 109201 - RNA, 21 nt, Human
cuguaauuucggcuacucagg

SEQ ID NO: 109202 - RNA, 18 nt, Human
gacugugggaggcaggau

SEQ ID NO: 109203 - RNA, 24 nt, Human
gauugcuucaggccaggaguucaa

SEQ ID NO: 109204 - RNA, 24 nt, Human
gccaacauagugaaaccccaucuc

SEQ ID NO: 109205 - RNA, 19 nt, Human
ggagcagggugacuguggg

SEQ ID NO: 109206 - RNA, 19 nt, Human
ggaggcaggaucugcugua

SEQ ID NO: 109207 - RNA, 18 nt, Human
ggccagguguaguggcuc

SEQ ID NO: 109208 - RNA, 22 nt, Human
ggccugaggcaggagggcaccg

SEQ ID NO: 109209 - RNA, 20 nt, Human
gggaggcugaggugggcgga

SEQ ID NO: 109210 - RNA, 24 nt, Human
ggggugugguucuuucaaacaagc

SEQ ID NO: 109211 - RNA, 19 nt, Human
gugccuauaaucucagcac

SEQ ID NO: 109212 - RNA, 18 nt, Human
uaauaggugacagccugc

SEQ ID NO: 109213 - RNA, 24 nt, Human
uagccuggccaacauagugaaacc

SEQ ID NO: 109214 - RNA, 25 nt, Human
uaggggcauuccuuguacaaaacuu

SEQ ID NO: 109215 - RNA, 24 nt, Human
uaguggcucgugccuauaaucuca

SEQ ID NO: 109216 - RNA, 23 nt, Human
ucaggugggugcagaagcucuug

SEQ ID NO: 109217 - RNA, 19 nt, Human
uccaaaaaauuagccaagc

SEQ ID NO: 109218 - RNA, 21 nt, Human
ucucuacuaaaaauccaaaaa

SEQ ID NO: 109219 - RNA, 22 nt, Human
ucucuacuaaaaauccaaaaaa

SEQ ID NO: 109220 - RNA, 19 nt, Human
ugaaaccccaucucuacua

SEQ ID NO: 109221 - RNA, 18 nt, Human
ugacagccugcugaaaca

SEQ ID NO: 109222 - RNA, 19 nt, Human
ugaggcacgagaaucacug

SEQ ID NO: 109223 - RNA, 18 nt, Human
ugaggcaggagggcaccg

SEQ ID NO: 109224 - RNA, 22 nt, Human
ugagguggccccuuggcucuug

SEQ ID NO: 109225 - RNA, 24 nt, Human
ugaggugggcggauugcuucaggc

SEQ ID NO: 109226 - RNA, 26 nt, Human
ugaggugggcggauugcuucaggcca

SEQ ID NO: 109227 - RNA, 24 nt, Human
ugccuauaaucucagcacuuuggg

SEQ ID NO: 109228 - RNA, 24 nt, Human
uggccagguguaguggcucgugcc

SEQ ID NO: 109229 - RNA, 19 nt, Human
uggccccuuggcucuugag

SEQ ID NO: 109230 - RNA, 21 nt, Human
uggcucgugccuauaaucuca

SEQ ID NO: 109231 - RNA, 22 nt, Human
uggcucgugccuauaaucucag

SEQ ID NO: 109232 - RNA, 24 nt, Human
uggcucgugccuauaaucucagca

SEQ ID NO: 109233 - RNA, 19 nt, Human
ugggagcagggugacugug

SEQ ID NO: 109234 - RNA, 21 nt, Human
ugggaggcaggaucugcugua

SEQ ID NO: 109235 - RNA, 22 nt, Human
ugggaggcugaggugggcggau

SEQ ID NO: 109236 - RNA, 24 nt, Human
ugggaggcugaggugggcggauug

SEQ ID NO: 109237 - RNA, 19 nt, Human
uguaacaagagggugaggu

SEQ ID NO: 109238 - RNA, 21 nt, Human
uguaauaggugacagccugcu

SEQ ID NO: 109239 - RNA, 22 nt, Human
ugugggaggcaggaucugcugu

SEQ ID NO: 109240 - RNA, 21 nt, Human
uucaggccaggaguucaagac

SEQ ID NO: 109241 - RNA, 23 nt, Human
uugcuucaggccaggaguucaag

SEQ ID NO: 109242 - RNA, 18 nt, Human
uuuuuuuuuuuuuuuuug

SEQ ID NO: 109243 - RNA, 18 nt, Human
uuuuuuuuuuuuuuuuug

SEQ ID NO: 109244 - RNA, 23 nt, Human
aaaaaacaccaaaaauuagccug

SEQ ID NO: 109245 - RNA, 22 nt, Human
aaacccugucucuacuaaaaaa

SEQ ID NO: 109246 - RNA, 20 nt, Human
aacauggcaaaacccagucu

SEQ ID NO: 109247 - RNA, 23 nt, Human
aagagcgaaacucugucucaaaa

SEQ ID NO: 109248 - RNA, 24 nt, Human
aauugcuugaacccagggggcgga

SEQ ID NO: 109249 - RNA, 19 nt, Human
acaaaagagaaucucugag

SEQ ID NO: 109250 - RNA, 24 nt, Human
acaaagugagacccuaucucaaaa

SEQ ID NO: 109251 - RNA, 20 nt, Human
acaagagcgaaacucugucu

SEQ ID NO: 109252 - RNA, 21 nt, Human
acaagagcgaaacucugucuc

SEQ ID NO: 109253 - RNA, 18 nt, Human
acccugucucuacuaaaa

SEQ ID NO: 109254 - RNA, 24 nt, Human
accgacauggagaaacccugucuc

SEQ ID NO: 109255 - RNA, 24 nt, Human
accucagcuguuacucuuuucugu

SEQ ID NO: 109256 - RNA, 24 nt, Human
acgccuguaaucccagcacuuggg

SEQ ID NO: 109257 - RNA, 28 nt, Human
acucugucucaaaaaaaaaaaaaaaaaa

SEQ ID NO: 109258 - RNA, 18 nt, Human
acugcacuccagccuggg

SEQ ID NO: 109259 - RNA, 23 nt, Human
acugcacuccagccuggguaaca

SEQ ID NO: 109260 - RNA, 24 nt, Human
acuugaggucaggaguucgggacu

SEQ ID NO: 109261 - RNA, 20 nt, Human
agaaaacuuuccuaugagag

SEQ ID NO: 109262 - RNA, 21 nt, Human
agaauugcuugaacccagggg

SEQ ID NO: 109263 - RNA, 20 nt, Human
agauagcugcagugagucga

SEQ ID NO: 109264 - RNA, 23 nt, Human
agaucacuugaggucaggaguuc

SEQ ID NO: 109265 - RNA, 22 nt, Human
agccuggguaacaaagugagac

SEQ ID NO: 109266 - RNA, 19 nt, Human
agcugcagugagucgagau

SEQ ID NO: 109267 - RNA, 21 nt, Human
agcugcagugagucgagauug

SEQ ID NO: 109268 - RNA, 24 nt, Human
agcuuggucaacauggcaaaaccc

SEQ ID NO: 109269 - RNA, 26 nt, Human
aggcagaucacuugaggucaggaguu

SEQ ID NO: 109270 - RNA, 23 nt, Human
aggcaggagaauugcuugaaccc

SEQ ID NO: 109271 - RNA, 24 nt, Human
aggcaggagaauugcuugaaccca

SEQ ID NO: 109272 - RNA, 22 nt, Human
aggcaggcagaucacuugaggu

SEQ ID NO: 109273 - RNA, 26 nt, Human
aggcaggcagaucacuugaggucagg

SEQ ID NO: 109274 - RNA, 21 nt, Human
aggcugaggcaggagaauugc

SEQ ID NO: 109275 - RNA, 24 nt, Human
aggcugaggcaggagaauugcuug

SEQ ID NO: 109276 - RNA, 19 nt, Human
aggcugggugcaguggcuc

SEQ ID NO: 109277 - RNA, 20 nt, Human
aggcugggugcaguggcuca

SEQ ID NO: 109278 - RNA, 24 nt, Human
aggugugguggcucacaucuguaa

SEQ ID NO: 109279 - RNA, 24 nt, Human
aguggcucacgccuguaaucccag

SEQ ID NO: 109280 - RNA, 21 nt, Human
aucacuugaggucaggaguuc

SEQ ID NO: 109281 - RNA, 24 nt, Human
aucacuugaggucaggaguucggg

SEQ ID NO: 109282 - RNA, 22 nt, Human
aucccagcacuuugggaggcca

SEQ ID NO: 109283 - RNA, 24 nt, Human
aucgugccguugcacuccagccug

SEQ ID NO: 109284 - RNA, 24 nt, Human
auugugccacugcacuccagccug

SEQ ID NO: 109285 - RNA, 18 nt, Human
caaaagagaaucucugag

SEQ ID NO: 109286 - RNA, 23 nt, Human
caacaagagcgaaacucugucuc

SEQ ID NO: 109287 - RNA, 18 nt, Human
caacauggcaaaacccag

SEQ ID NO: 109288 - RNA, 25 nt, Human
caaggcgggcagaucacuuaagccc

SEQ ID NO: 109289 - RNA, 18 nt, Human
caagguaaaugccaaguc

SEQ ID NO: 109290 - RNA, 24 nt, Human
cacaucuguaaucccagcacuuug

SEQ ID NO: 109291 - RNA, 22 nt, Human
cacaugaggaaauauaguuuca

SEQ ID NO: 109292 - RNA, 20 nt, Human
caccuguagucccagcuacu

SEQ ID NO: 109293 - RNA, 22 nt, Human
caccuguagucccagcuacuug

SEQ ID NO: 109294 - RNA, 23 nt, Human
cacgccuguaaucccagcacuug

SEQ ID NO: 109295 - RNA, 24 nt, Human
cacuccagccugggcaacaagagc

SEQ ID NO: 109296 - RNA, 25 nt, Human
cacuccagccugggcaacaagagcg

SEQ ID NO: 109297 - RNA, 22 nt, Human
cacuccagccuggguaacaaag

SEQ ID NO: 109298 - RNA, 23 nt, Human
cacuccagccuggguaacaaagu

SEQ ID NO: 109299 - RNA, 24 nt, Human
cacuccagccuggguaacaaagug

SEQ ID NO: 109300 - RNA, 18 nt, Human
cacugcacuccagccugg

SEQ ID NO: 109301 - RNA, 19 nt, Human
cacugcacuccagccuggg

SEQ ID NO: 109302 - RNA, 19 nt, Human
cacugcacuccagccuggg

SEQ ID NO: 109303 - RNA, 22 nt, Human
cacugcacuccagccuggguaa

SEQ ID NO: 109304 - RNA, 23 nt, Human
cacugcacuccagccuggguaac

SEQ ID NO: 109305 - RNA, 24 nt, Human
cacugcacuccagccuggguaaca

SEQ ID NO: 109306 - RNA, 27 nt, Human
cagaucacuuaagcccaggaguuagag

SEQ ID NO: 109307 - RNA, 24 nt, Human
cagaucacuugaggucaggaguuc

SEQ ID NO: 109308 - RNA, 27 nt, Human
cagaucacuugaggucaggaguucggg

SEQ ID NO: 109309 - RNA, 23 nt, Human
cagcacuugggaggccgaggcag

SEQ ID NO: 109310 - RNA, 23 nt, Human
cagcacuugggaggccgaggcag

SEQ ID NO: 109311 - RNA, 24 nt, Human
cagcacuuugggaggccaaggcgg

SEQ ID NO: 109312 - RNA, 24 nt, Human
cagcuacuugggaggcugaggcag

SEQ ID NO: 109313 - RNA, 24 nt, Human
cagcuuggucaacauggcaaaacc

SEQ ID NO: 109314 - RNA, 25 nt, Human
caucacaaaacuaauaaaacauauu

SEQ ID NO: 109315 - RNA, 24 nt, Human
caucuguaaucccagcacuuuggg

SEQ ID NO: 109316 - RNA, 21 nt, Human
ccaagcucucuaaacauuuuc

SEQ ID NO: 109317 - RNA, 20 nt, Human
ccacugcacuccagccuggg

SEQ ID NO: 109318 - RNA, 20 nt, Human
ccacugcacuccagccuggg

SEQ ID NO: 109319 - RNA, 20 nt, Human
ccacugcacuccagccuggg

SEQ ID NO: 109320 - RNA, 22 nt, Human
ccacugcacuccagccugggua

SEQ ID NO: 109321 - RNA, 24 nt, Human
ccacugcacuccagccuggguaac

SEQ ID NO: 109322 - RNA, 20 nt, Human
ccguugcacuccagccuggg

SEQ ID NO: 109323 - RNA, 21 nt, Human
ccguugcacuccagccugggc

SEQ ID NO: 109324 - RNA, 22 nt, Human
ccguugcacuccagccugggca

SEQ ID NO: 109325 - RNA, 23 nt, Human
ccguugcacuccagccugggcaa

SEQ ID NO: 109326 - RNA, 24 nt, Human
ccguugcacuccagccugggcaac

SEQ ID NO: 109327 - RNA, 19 nt, Human
ccuaucucaaaaaaauaaa

SEQ ID NO: 109328 - RNA, 22 nt, Human
ccugauuccaugucuagggauc

SEQ ID NO: 109329 - RNA, 22 nt, Human
ccuguagucccagcuacuugag

SEQ ID NO: 109330 - RNA, 22 nt, Human
cgacauggagaaacccugucuc

SEQ ID NO: 109331 - RNA, 26 nt, Human
cgagaucgugccguugcacuccagcc

SEQ ID NO: 109332 - RNA, 20 nt, Human
cgaggcaggcagaucacuug

SEQ ID NO: 109333 - RNA, 26 nt, Human
cgaggcaggcagaucacuugagguca

SEQ ID NO: 109334 - RNA, 21 nt, Human
cguugcacuccagccugggca

SEQ ID NO: 109335 - RNA, 22 nt, Human
cguugcacuccagccugggcaa

SEQ ID NO: 109336 - RNA, 24 nt, Human
cguugcacuccagccugggcaaca

SEQ ID NO: 109337 - RNA, 24 nt, Human
cuaggcugggugcaguggcucacg

SEQ ID NO: 109338 - RNA, 18 nt, Human
cucaaaaaaaaaaaaaaa

SEQ ID NO: 109339 - RNA, 24 nt, Human
cucacaucuguaaucccagcacuu

SEQ ID NO: 109340 - RNA, 22 nt, Human
cucacgccuguaaucccagcac

SEQ ID NO: 109341 - RNA, 24 nt, Human
cucacgccuguaaucccagcacuu

SEQ ID NO: 109342 - RNA, 19 nt, Human
cucugucucaaaaaaaaaa

SEQ ID NO: 109343 - RNA, 22 nt, Human
cugcagugagucgagauugugc

SEQ ID NO: 109344 - RNA, 21 nt, Human
cuguaaucccagcuacuuggg

SEQ ID NO: 109345 - RNA, 23 nt, Human
cuugaccucagcuguuacucucc

SEQ ID NO: 109346 - RNA, 19 nt, Human
cuuuucuuucugcuccuga

SEQ ID NO: 109347 - RNA, 19 nt, Human
gaaacaacucugauagagc

SEQ ID NO: 109348 - RNA, 22 nt, Human
gaaacaacucugauagagccag

SEQ ID NO: 109349 - RNA, 23 nt, Human
gaaaucacagccucucccuucaa

SEQ ID NO: 109350 - RNA, 21 nt, Human
gacauggagaaacccugucuc

SEQ ID NO: 109351 - RNA, 21 nt, Human
gagaaacccugucucuacuaa

SEQ ID NO: 109352 - RNA, 23 nt, Human
gagaucgugccguugcacuccag

SEQ ID NO: 109353 - RNA, 23 nt, Human
gagauugugccacugcacuccag

SEQ ID NO: 109354 - RNA, 23 nt, Human
gagguugcggugagccgagaucg

SEQ ID NO: 109355 - RNA, 23 nt, Human
gaucacuugaggucaggaguucg

SEQ ID NO: 109356 - RNA, 24 nt, Human
gaucacuugaggucaggaguucgg

SEQ ID NO: 109357 - RNA, 30 nt, Human
gcaaaacccagucucuacaaaaaacaccag

SEQ ID NO: 109358 - RNA, 21 nt, Human
gcagaucacuugaggucagga

SEQ ID NO: 109359 - RNA, 22 nt, Human
gcaggagaauugcuugaaccca

SEQ ID NO: 109360 - RNA, 19 nt, Human
gccacugcacuccagccug

SEQ ID NO: 109361 - RNA, 24 nt, Human
gccacugcacuccagccuggguaa

SEQ ID NO: 109362 - RNA, 22 nt, Human
gccguugcacuccagccugggc

SEQ ID NO: 109363 - RNA, 24 nt, Human
gccguugcacuccagccugggcaa

SEQ ID NO: 109364 - RNA, 18 nt, Human
gccugacuguaaucccag

SEQ ID NO: 109365 - RNA, 22 nt, Human
gcucuuuucuuucugcuccuga

SEQ ID NO: 109366 - RNA, 21 nt, Human
ggagcucuuuucuuucugcuc

SEQ ID NO: 109367 - RNA, 20 nt, Human
ggagguugcggugagccgag

SEQ ID NO: 109368 - RNA, 22 nt, Human
ggagguugcggugagccgagau

SEQ ID NO: 109369 - RNA, 24 nt, Human
ggagguugcggugagccgagaucg

SEQ ID NO: 109370 - RNA, 19 nt, Human
ggccaggugugguggcuca

SEQ ID NO: 109371 - RNA, 21 nt, Human
ggccaggugugguggcucaca

SEQ ID NO: 109372 - RNA, 23 nt, Human
ggccaggugugguggcucacauc

SEQ ID NO: 109373 - RNA, 19 nt, Human
ggcggagguugcggugagc

SEQ ID NO: 109374 - RNA, 20 nt, Human
ggcggagguugcggugagcc

SEQ ID NO: 109375 - RNA, 23 nt, Human
ggcggagguugcggugagccgag

SEQ ID NO: 109376 - RNA, 21 nt, Human
ggcucacaucuguaaucccag

SEQ ID NO: 109377 - RNA, 24 nt, Human
gggcggagguugcggugagccgag

SEQ ID NO: 109378 - RNA, 27 nt, Human
ggggccaggugugguggcucacaucug

SEQ ID NO: 109379 - RNA, 24 nt, Human
gggugcaguggcucacgccuguaa

SEQ ID NO: 109380 - RNA, 24 nt, Human
gguggcaugcaccuguagucccag

SEQ ID NO: 109381 - RNA, 24 nt, Human
gguggcucacaucuguaaucccag

SEQ ID NO: 109382 - RNA, 24 nt, Human
gguggugccugacuguaaucccag

SEQ ID NO: 109383 - RNA, 21 nt, Human
guucuguuuucuguccuccuu

SEQ ID NO: 109384 - RNA, 24 nt, Human
guugcggugagccgagaucgugcc

SEQ ID NO: 109385 - RNA, 21 nt, Human
uaaaaacucaagcuuggcugc

SEQ ID NO: 109386 - RNA, 22 nt, Human
uaaaaagcagaaaacuuuccua

SEQ ID NO: 109387 - RNA, 19 nt, Human
uaaaauugcucugacugug

SEQ ID NO: 109388 - RNA, 23 nt, Human
uaacaaauuaagcuuaaguaguu

SEQ ID NO: 109389 - RNA, 23 nt, Human
uaagcccaggaguuagagaccag

SEQ ID NO: 109390 - RNA, 25 nt, Human
uacaaaaaacaccaaaaauuagccc

SEQ ID NO: 109391 - RNA, 26 nt, Human
uacaaaaaacaccaaaaauuagccug

SEQ ID NO: 109392 - RNA, 24 nt, Human
uacccugaccgacauggagaaacc

SEQ ID NO: 109393 - RNA, 18 nt, Human
uacugcuagaaguugagg

SEQ ID NO: 109394 - RNA, 23 nt, Human
uagcaccagugggaaaguaugaa

SEQ ID NO: 109395 - RNA, 20 nt, Human
uagccgggugugguggugcc

SEQ ID NO: 109396 - RNA, 22 nt, Human
ucaaaaaaaaaaaaaaaaaaaa

SEQ ID NO: 109397 - RNA, 23 nt, Human
ucaaaaaaaaaaaaaaaaaaaaa

SEQ ID NO: 109398 - RNA, 24 nt, Human
uccagccuggguaacaaagugaga

SEQ ID NO: 109399 - RNA, 18 nt, Human
uccuucuccacccuuccu

SEQ ID NO: 109400 - RNA, 23 nt, Human
ucgugccguugcacuccagccug

SEQ ID NO: 109401 - RNA, 24 nt, Human
ucucuacuaaaaaaauacaaaauu

SEQ ID NO: 109402 - RNA, 24 nt, Human
ucucucuccuucuccacccuuccc

SEQ ID NO: 109403 - RNA, 23 nt, Human
ucugucucaaaaaaaaaaaaaaa

SEQ ID NO: 109404 - RNA, 22 nt, Human
ucuguucuguuuucuguccucc

SEQ ID NO: 109405 - RNA, 24 nt, Human
ugaccgacauggagaaacccuguc

SEQ ID NO: 109406 - RNA, 23 nt, Human
ugacuguaaucccagcuacuugg

SEQ ID NO: 109407 - RNA, 24 nt, Human
ugacuguaaucccagcuacuuggg

SEQ ID NO: 109408 - RNA, 18 nt, Human
ugagagccccugaauaga

SEQ ID NO: 109409 - RNA, 22 nt, Human
ugagccgagaucgugccguugc

SEQ ID NO: 109410 - RNA, 24 nt, Human
ugaggcaggagaauugcuugaacc

SEQ ID NO: 109411 - RNA, 25 nt, Human
ugaggcaggagaauugcuugaaccc

SEQ ID NO: 109412 - RNA, 22 nt, Human
ugagucgagauugugccacugc

SEQ ID NO: 109413 - RNA, 18 nt, Human
ugauaaagaaaaaguagg

SEQ ID NO: 109414 - RNA, 24 nt, Human
ugcaccuguagucccagcuacuug

SEQ ID NO: 109415 - RNA, 19 nt, Human
ugcacuccagccugggcaa

SEQ ID NO: 109416 - RNA, 22 nt, Human
ugcacuccagccugggcaacaa

SEQ ID NO: 109417 - RNA, 18 nt, Human
uggaaauaaaaauagcac

SEQ ID NO: 109418 - RNA, 24 nt, Human
uggcaacacaccgugcacuucaau

SEQ ID NO: 109419 - RNA, 24 nt, Human
uggcaugguggcaugcaccuguag

SEQ ID NO: 109420 - RNA, 21 nt, Human
uggcucacaucuguaauccca

SEQ ID NO: 109421 - RNA, 22 nt, Human
uggcucacaucuguaaucccag

SEQ ID NO: 109422 - RNA, 24 nt, Human
uggcucacaucuguaaucccagca

SEQ ID NO: 109423 - RNA, 24 nt, Human
uggcucacgccuguaaucccagca

SEQ ID NO: 109424 - RNA, 22 nt, Human
ugggagcucuuuucuuucugcu

SEQ ID NO: 109425 - RNA, 24 nt, Human
ugggaggccaaggcgggcagauca

SEQ ID NO: 109426 - RNA, 20 nt, Human
ugggaggccgaggcaggcag

SEQ ID NO: 109427 - RNA, 24 nt, Human
ugggaggccgaggcaggcagauca

SEQ ID NO: 109428 - RNA, 19 nt, Human
ugggaggcugaggcaggag

SEQ ID NO: 109429 - RNA, 22 nt, Human
ugggaggcugaggcaggagaau

SEQ ID NO: 109430 - RNA, 22 nt, Human
uggggccaggugugguggcuca

SEQ ID NO: 109431 - RNA, 23 nt, Human
uggugaagauuuuuucccauuuu

SEQ ID NO: 109432 - RNA, 24 nt, Human
ugguggcaugcaccuguaguccca

SEQ ID NO: 109433 - RNA, 24 nt, Human
ugguggcucacaucuguaauccca

SEQ ID NO: 109434 - RNA, 24 nt, Human
ugguggugccugacuguaauccca

SEQ ID NO: 109435 - RNA, 22 nt, Human
uguaaaacaguacaucacaaaa

SEQ ID NO: 109436 - RNA, 24 nt, Human
uguggacaaaagagaaucucugag

SEQ ID NO: 109437 - RNA, 23 nt, Human
uuaauacuuguuccaaugagguu

SEQ ID NO: 109438 - RNA, 21 nt, Human
uuaauugauaaagaaaaagua

SEQ ID NO: 109439 - RNA, 23 nt, Human
uuagagaccagcuuggucaacau

SEQ ID NO: 109440 - RNA, 19 nt, Human
uuagccgggugugguggug

SEQ ID NO: 109441 - RNA, 20 nt, Human
uuagccgggugugguggugc

SEQ ID NO: 109442 - RNA, 19 nt, Human
uucacauauuaaucaacau

SEQ ID NO: 109443 - RNA, 24 nt, Human
uugaacccagggggcggagguugc

SEQ ID NO: 109444 - RNA, 23 nt, Human
uugcacuccagccugggcaacaa

SEQ ID NO: 109445 - RNA, 18 nt, Human
uugcggugagccgagauc

SEQ ID NO: 109446 - RNA, 21 nt, Human
uugcggugagccgagaucgug

SEQ ID NO: 109447 - RNA, 22 nt, Human
uugcggugagccgagaucgugc

SEQ ID NO: 109448 - RNA, 18 nt, Human
uugcuugaacccaggggg

SEQ ID NO: 109449 - RNA, 24 nt, Human
uugcuugaacccagggggcggagg

SEQ ID NO: 109450 - RNA, 21 nt, Human
uuggccaagcucucuaaacau

SEQ ID NO: 109451 - RNA, 19 nt, Human
uugggagcucuuuucuuuc

SEQ ID NO: 109452 - RNA, 25 nt, Human
uugggaggccgaggcaggcagauca

SEQ ID NO: 109453 - RNA, 23 nt, Human
uugggaggcugaggcaggagaau

SEQ ID NO: 109454 - RNA, 23 nt, Human
uugugccacugcacuccagccug

SEQ ID NO: 109455 - RNA, 23 nt, Human
agacagguacaaaacucgaacuu

SEQ ID NO: 109456 - RNA, 22 nt, Human
agcagcuuugugucaugucuug

SEQ ID NO: 109457 - RNA, 19 nt, Human
gauuuucugcuagcagcuu

SEQ ID NO: 109458 - RNA, 24 nt, Human
gcguuuugauuuucugcuagcagc

SEQ ID NO: 109459 - RNA, 18 nt, Human
uuugaaguggcuuuuaug

SEQ ID NO: 109460 - RNA, 18 nt, Human
uuuuuuuuuuuuuuuuug

SEQ ID NO: 109461 - RNA, 22 nt, Human
uuuuuuuuuuuuuuuuugccaa

SEQ ID NO: 109462 - RNA, 23 nt, Human
uuuuuuuuuuuuuuuuugccaau

SEQ ID NO: 109463 - RNA, 21 nt, Human
aaaaauacucaacaaauacag

SEQ ID NO: 109464 - RNA, 21 nt, Human
aaacuccagugguauacaguu

SEQ ID NO: 109465 - RNA, 21 nt, Human
aaagaagcucaguuucccaaa

SEQ ID NO: 109466 - RNA, 23 nt, Human
aaauccuccacaaaaugcuucuc

SEQ ID NO: 109467 - RNA, 21 nt, Human
aacacagucagagaacuugua

SEQ ID NO: 109468 - RNA, 18 nt, Human
aagcaacguucuuccuuc

SEQ ID NO: 109469 - RNA, 21 nt, Human
aaucauuggccagacgaccug

SEQ ID NO: 109470 - RNA, 19 nt, Human
aaucuugggggaaauuaaa

SEQ ID NO: 109471 - RNA, 21 nt, Human
aauuaagaccaagaaagggua

SEQ ID NO: 109472 - RNA, 18 nt, Human
accaagcagaguauauag

SEQ ID NO: 109473 - RNA, 22 nt, Human
accccaucucaaacacaaauua

SEQ ID NO: 109474 - RNA, 21 nt, Human
acuccccacucccaccccagg

SEQ ID NO: 109475 - RNA, 23 nt, Human
agaaagaagcucaguuucccaaa

SEQ ID NO: 109476 - RNA, 21 nt, Human
agccaauguuucccugagcag

SEQ ID NO: 109477 - RNA, 22 nt, Human
agcugaucuaggguggcucugc

SEQ ID NO: 109478 - RNA, 18 nt, Human
aucaguuagauuuugcua

SEQ ID NO: 109479 - RNA, 18 nt, Human
caaaacacaaaaggcauc

SEQ ID NO: 109480 - RNA, 20 nt, Human
caaacccugucaacagacua

SEQ ID NO: 109481 - RNA, 19 nt, Human
caaugugaugccaaucagu

SEQ ID NO: 109482 - RNA, 20 nt, Human
cagcacuaggagcccucccc

SEQ ID NO: 109483 - RNA, 21 nt, Human
caggcaggggccccgucuccu

SEQ ID NO: 109484 - RNA, 18 nt, Human
caggggccucuuucuccu

SEQ ID NO: 109485 - RNA, 22 nt, Human
ccaagcucagcacuaggagccc

SEQ ID NO: 109486 - RNA, 20 nt, Human
ccaauuuccaccccaucuca

SEQ ID NO: 109487 - RNA, 18 nt, Human
ccagugcagaagaaagaa

SEQ ID NO: 109488 - RNA, 18 nt, Human
cccacauauucccuaucu

SEQ ID NO: 109489 - RNA, 19 nt, Human
cccacucccaccccaggcc

SEQ ID NO: 109490 - RNA, 19 nt, Human
cccagaccucucuccauuc

SEQ ID NO: 109491 - RNA, 19 nt, Human
ccccaagaaauaccucuuc

SEQ ID NO: 109492 - RNA, 23 nt, Human
ccccaagacuugucuuccucuuu

SEQ ID NO: 109493 - RNA, 22 nt, Human
cccucuuccaccaugguaaucc

SEQ ID NO: 109494 - RNA, 18 nt, Human
ccgugcccccagccaaug

SEQ ID NO: 109495 - RNA, 19 nt, Human
ccuccacaaaaugcuucuc

SEQ ID NO: 109496 - RNA, 21 nt, Human
ccugucucaggugauuuccau

SEQ ID NO: 109497 - RNA, 21 nt, Human
ccuucucuuuuccuacucuuc

SEQ ID NO: 109498 - RNA, 19 nt, Human
ccuuggggucaguaggcug

SEQ ID NO: 109499 - RNA, 23 nt, Human
cgguagcacuuauccuuucccaa

SEQ ID NO: 109500 - RNA, 19 nt, Human
cuaagcuugcaaggaucca

SEQ ID NO: 109501 - RNA, 22 nt, Human
cuacuaauauaauuccaauuuc

SEQ ID NO: 109502 - RNA, 22 nt, Human
cuaugugcuuauuccgugcccc

SEQ ID NO: 109503 - RNA, 20 nt, Human
cucagcacuaggagcccucc

SEQ ID NO: 109504 - RNA, 23 nt, Human
cucccaaugaugaacuuaaacca

SEQ ID NO: 109505 - RNA, 20 nt, Human
cugagcagcccuucucuuuu

SEQ ID NO: 109506 - RNA, 21 nt, Human
cugagcagcccuucucuuuuc

SEQ ID NO: 109507 - RNA, 19 nt, Human
cuucaaaggggucuccaag

SEQ ID NO: 109508 - RNA, 18 nt, Human
cuuuuagaaccugcacag

SEQ ID NO: 109509 - RNA, 23 nt, Human
cuuuuuuuuuuuaaaagcaugcc

SEQ ID NO: 109510 - RNA, 19 nt, Human
gaacagagacgaagucaca

SEQ ID NO: 109511 - RNA, 19 nt, Human
gaagggaugaauauauugu

SEQ ID NO: 109512 - RNA, 21 nt, Human
gaucacauuuaucuaagcuug

SEQ ID NO: 109513 - RNA, 20 nt, Human
gaugaacuuaaaccaaaucc

SEQ ID NO: 109514 - RNA, 18 nt, Human
gcaucucuuuucucucuc

SEQ ID NO: 109515 - RNA, 21 nt, Human
gccauugggcuccuuuuagaa

SEQ ID NO: 109516 - RNA, 19 nt, Human
gguggccuaaugcuuggug

SEQ ID NO: 109517 - RNA, 24 nt, Human
gguuggauggggguuggcugaccu

SEQ ID NO: 109518 - RNA, 22 nt, Human
guaugugcuguacuuuggugac

SEQ ID NO: 109519 - RNA, 19 nt, Human
gugcuuagaguuucagcug

SEQ ID NO: 109520 - RNA, 23 nt, Human
uaaaacaaacccugucaacagac

SEQ ID NO: 109521 - RNA, 27 nt, Human
uaaaauaaaacaaacccugucaacaga

SEQ ID NO: 109522 - RNA, 25 nt, Human
uaaacaaugcugcuguccgugcugc

SEQ ID NO: 109523 - RNA, 21 nt, Human
uaaccagaaaacuccaguggu

SEQ ID NO: 109524 - RNA, 19 nt, Human
uaaggaaauuaagaccaag

SEQ ID NO: 109525 - RNA, 21 nt, Human
uaaguaaaagaaucauuggcc

SEQ ID NO: 109526 - RNA, 22 nt, Human
uacucaaaaccuucagagcaaa

SEQ ID NO: 109527 - RNA, 22 nt, Human
uaggagcccuccccaaggccaa

SEQ ID NO: 109528 - RNA, 22 nt, Human
uaguucagacugaggagagccu

SEQ ID NO: 109529 - RNA, 20 nt, Human
uauacagugauaaguuuuua

SEQ ID NO: 109530 - RNA, 19 nt, Human
uauccaaaauuuuaaaaau

SEQ ID NO: 109531 - RNA, 26 nt, Human
uaucuacuccccacucccaccccagg

SEQ ID NO: 109532 - RNA, 19 nt, Human
ucagagcaaaggaagccug

SEQ ID NO: 109533 - RNA, 21 nt, Human
ucagcacuaggagcccucccc

SEQ ID NO: 109534 - RNA, 22 nt, Human
ucagcacuaggagcccucccca

SEQ ID NO: 109535 - RNA, 21 nt, Human
ucagccuuucuucccuucuca

SEQ ID NO: 109536 - RNA, 24 nt, Human
ucaguaaggaaauuaagaccaaga

SEQ ID NO: 109537 - RNA, 23 nt, Human
uccaagaagguuccuauccugcc

SEQ ID NO: 109538 - RNA, 18 nt, Human
uccaccccaucucaaacc

SEQ ID NO: 109539 - RNA, 19 nt, Human
uccauuugacccugauguu

SEQ ID NO: 109540 - RNA, 25 nt, Human
ucccaaugaugaacuuaagguaccc

SEQ ID NO: 109541 - RNA, 22 nt, Human
uccccacucccaccccaggccc

SEQ ID NO: 109542 - RNA, 21 nt, Human
uccugcccagaccucucucca

SEQ ID NO: 109543 - RNA, 18 nt, Human
uccuuggggucaguaggc

SEQ ID NO: 109544 - RNA, 21 nt, Human
ucucugccuugguagcauccc

SEQ ID NO: 109545 - RNA, 26 nt, Human
ucugaggcuaaaauaaaacaaacccu

SEQ ID NO: 109546 - RNA, 21 nt, Human
ucuguugucugaguucugggg

SEQ ID NO: 109547 - RNA, 23 nt, Human
ucuuucucccuggaaggcuaggc

SEQ ID NO: 109548 - RNA, 19 nt, Human
ugacauguacagucauuac

SEQ ID NO: 109549 - RNA, 20 nt, Human
ugagcagcccuucucuuuuc

SEQ ID NO: 109550 - RNA, 21 nt, Human
ugagcagcccuucucuuuucc

SEQ ID NO: 109551 - RNA, 21 nt, Human
ugaguucuggggcuugccuuu

SEQ ID NO: 109552 - RNA, 20 nt, Human
ugcaaggauccaggaacucu

SEQ ID NO: 109553 - RNA, 19 nt, Human
ugccauugagauacauaga

SEQ ID NO: 109554 - RNA, 18 nt, Human
ugcugcuguccgugcugc

SEQ ID NO: 109555 - RNA, 24 nt, Human
ugcuuagaguuucagcugaucuag

SEQ ID NO: 109556 - RNA, 23 nt, Human
ugcuugguguggcaggcaggggc

SEQ ID NO: 109557 - RNA, 22 nt, Human
uggcuagcauccagucccccag

SEQ ID NO: 109558 - RNA, 20 nt, Human
ugguauacucugaggcuaaa

SEQ ID NO: 109559 - RNA, 27 nt, Human
ugguggccuaaugcuugguguggcagg

SEQ ID NO: 109560 - RNA, 19 nt, Human
ugugaaugggguucccuug

SEQ ID NO: 109561 - RNA, 23 nt, Human
uguggaguuaggaggggcaugug

SEQ ID NO: 109562 - RNA, 18 nt, Human
uguggccaaaugaacucc

SEQ ID NO: 109563 - RNA, 22 nt, Human
uguuuuaacaagaucauccugg

SEQ ID NO: 109564 - RNA, 20 nt, Human
uuauacauggucuuccuuau

SEQ ID NO: 109565 - RNA, 21 nt, Human
uucaguggcuugcuaaauuuu

SEQ ID NO: 109566 - RNA, 20 nt, Human
uucccugagcagcccuucuc

SEQ ID NO: 109567 - RNA, 20 nt, Human
uucccuucaagcaaguucug

SEQ ID NO: 109568 - RNA, 21 nt, Human
uugugcuuagaguuucagcug

SEQ ID NO: 109569 - RNA, 22 nt, Human
uuuccugucucaggugauuucc

SEQ ID NO: 109570 - RNA, 20 nt, Human
uuugacccugauguucccuu

SEQ ID NO: 109571 - RNA, 19 nt, Human
aaaaacuaaaaaccgcagu

SEQ ID NO: 109572 - RNA, 20 nt, Human
aaaaacuaaaaaccgcaguu

SEQ ID NO: 109573 - RNA, 21 nt, Human
aaacaggaaccaaacauggug

SEQ ID NO: 109574 - RNA, 22 nt, Human
aaaucuguuucagaucuuucuu

SEQ ID NO: 109575 - RNA, 23 nt, Human
aaccacaauaaaaacuaaaaacc

SEQ ID NO: 109576 - RNA, 19 nt, Human
accgcaguucacagaagcc

SEQ ID NO: 109577 - RNA, 23 nt, Human
aggcucuggcacaugaaaaaaug

SEQ ID NO: 109578 - RNA, 22 nt, Human
auggugguaaauuaccuccuuc

SEQ ID NO: 109579 - RNA, 25 nt, Human
cacuuuaugaaaaagugaaucaguc

SEQ ID NO: 109580 - RNA, 25 nt, Human
cagaccaccuaaauucuauggaccu

SEQ ID NO: 109581 - RNA, 19 nt, Human
cagaggcaccagauaggca

SEQ ID NO: 109582 - RNA, 20 nt, Human
cagauaggcacauauccuca

SEQ ID NO: 109583 - RNA, 23 nt, Human
caucuuauaaacaggaaccaaac

SEQ ID NO: 109584 - RNA, 20 nt, Human
cauggugguaaauuaccucc

SEQ ID NO: 109585 - RNA, 25 nt, Human
ccacaauaaaaacuaaaaaccgcag

SEQ ID NO: 109586 - RNA, 22 nt, Human
ccuccuuccuuucacucaacua

SEQ ID NO: 109587 - RNA, 21 nt, Human
cuaaaaaccgcaguucacaga

SEQ ID NO: 109588 - RNA, 21 nt, Human
gaaaaaaugcucaauaaaugc

SEQ ID NO: 109589 - RNA, 19 nt, Human
gggccuccaguacaggcuc

SEQ ID NO: 109590 - RNA, 21 nt, Human
gguaaauaauucuuuagcaac

SEQ ID NO: 109591 - RNA, 26 nt, Human
uaaaugcucacuuuaugaaaaaguga

SEQ ID NO: 109592 - RNA, 22 nt, Human
uaagaaccacaauaaaaacuaa

SEQ ID NO: 109593 - RNA, 24 nt, Human
uaagagagacucauguucucucca

SEQ ID NO: 109594 - RNA, 24 nt, Human
ucaauguacagaccaauucucuca

SEQ ID NO: 109595 - RNA, 20 nt, Human
ucucucauaaguagaauagu

SEQ ID NO: 109596 - RNA, 20 nt, Human
ugaaucagucaauguacaga

SEQ ID NO: 109597 - RNA, 21 nt, Human
ugacagaccaccuaaauucua

SEQ ID NO: 109598 - RNA, 20 nt, Human
ugacagauaccaauccaacc

SEQ ID NO: 109599 - RNA, 19 nt, Human
ugggggccuccaguacagg

SEQ ID NO: 109600 - RNA, 24 nt, Human
uuaaaacaucuuauaaacaggaac

SEQ ID NO: 109601 - RNA, 27 nt, Human
uuaaaacaucuuauaaacaggaaccaa

SEQ ID NO: 109602 - RNA, 21 nt, Human
cccguccucacucgccuugac

SEQ ID NO: 109603 - RNA, 24 nt, Human
cuccccguccucacucgccuugac

SEQ ID NO: 109604 - RNA, 18 nt, Human
gcagugacccacgcucuc

SEQ ID NO: 109605 - RNA, 18 nt, Human
gugacccacgcucucccc

SEQ ID NO: 109606 - RNA, 20 nt, Human
uggcaggaggggcagugacc

SEQ ID NO: 109607 - RNA, 21 nt, Human
uuuuuuuuuuuuuuuucccga

SEQ ID NO: 109608 - RNA, 23 nt, Human
uuuuuuuuuuuuuuuuuuucccg

SEQ ID NO: 109609 - RNA, 23 nt, Human
uuuuuuuuuuuuuuuuuuuuccc

SEQ ID NO: 109610 - RNA, 24 nt, Human
uuuuuuuuuuuuuuuuuuuuuccu

SEQ ID NO: 109611 - RNA, 24 nt, Human
aaauaaacauggcaauauaaaaau

SEQ ID NO: 109612 - RNA, 23 nt, Human
aaauguuaagaauuuacaaagcu

SEQ ID NO: 109613 - RNA, 21 nt, Human
agcuauguacuuaaugaacca

SEQ ID NO: 109614 - RNA, 24 nt, Human
aucacuuuacaauuacugaaaaag

SEQ ID NO: 109615 - RNA, 19 nt, Human
augaaccaaauuacccaaa

SEQ ID NO: 109616 - RNA, 24 nt, Human
uaaugaaccaaauuacccaaacaa

SEQ ID NO: 109617 - RNA, 18 nt, Human
uacagucuguaagaucuc

SEQ ID NO: 109618 - RNA, 24 nt, Human
ugaaccaaauuacccaaacaaaau

SEQ ID NO: 109619 - RNA, 24 nt, Human
uguaagaucucuucgagagagcug

SEQ ID NO: 109620 - RNA, 21 nt, Human
uguuaagaauuuacaaagcug

SEQ ID NO: 109621 - RNA, 18 nt, Human
aaaaagcaccaguguccu

SEQ ID NO: 109622 - RNA, 18 nt, Human
aaaaagcaccaguguccu

SEQ ID NO: 109623 - RNA, 21 nt, Human
aaagaugcaggggggcccagg

SEQ ID NO: 109624 - RNA, 21 nt, Human
aaagaugcaggggggcccagg

SEQ ID NO: 109625 - RNA, 20 nt, Human
aaggcugugaccagcccaac

SEQ ID NO: 109626 - RNA, 23 nt, Human
acaaagacuguacaaaauuccuu

SEQ ID NO: 109627 - RNA, 23 nt, Human
acaaagacuguacaaaauuccuu

SEQ ID NO: 109628 - RNA, 22 nt, Human
acagaauauuuucaggcuugag

SEQ ID NO: 109629 - RNA, 22 nt, Human
acaucacaaggcugugaccagc

SEQ ID NO: 109630 - RNA, 24 nt, Human
accccugcgauggucaacacauug

SEQ ID NO: 109631 - RNA, 19 nt, Human
acgaaaugcugcuccaccc

SEQ ID NO: 109632 - RNA, 24 nt, Human
acuccacacaucacaaggcuguga

SEQ ID NO: 109633 - RNA, 21 nt, Human
acugccaaagucuaccacccg

SEQ ID NO: 109634 - RNA, 21 nt, Human
agcccgaaggcgggcgaagaa

SEQ ID NO: 109635 - RNA, 19 nt, Human
agcugcuuccuuguacuuc

SEQ ID NO: 109636 - RNA, 18 nt, Human
aggaaaucgaaggugcua

SEQ ID NO: 109637 - RNA, 18 nt, Human
aggaaggagugaacucug

SEQ ID NO: 109638 - RNA, 18 nt, Human
aggaaggagugaacucug

SEQ ID NO: 109639 - RNA, 25 nt, Human
aggaggaaggagugaacucuggccg

SEQ ID NO: 109640 - RNA, 25 nt, Human
aggaggaaggagugaacucuggccg

SEQ ID NO: 109641 - RNA, 22 nt, Human
aggcccagaagcucaaaggaga

SEQ ID NO: 109642 - RNA, 22 nt, Human
aggcugugaccagcccaacuca

SEQ ID NO: 109643 - RNA, 26 nt, Human
agggauaggacccaagauccuuucca

SEQ ID NO: 109644 - RNA, 21 nt, Human
aggugcuaaggcccagaagcu

SEQ ID NO: 109645 - RNA, 23 nt, Human
augcagccuauacuccacacauc

SEQ ID NO: 109646 - RNA, 21 nt, Human
augcugcuccacccccccaac

SEQ ID NO: 109647 - RNA, 23 nt, Human
augcugcuccacccccccaaccc

SEQ ID NO: 109648 - RNA, 20 nt, Human
auuuucaggcuugaggucug

SEQ ID NO: 109649 - RNA, 18 nt, Human
cacaaggcugugaccagc

SEQ ID NO: 109650 - RNA, 21 nt, Human
cacauaguauucaaagaugau

SEQ ID NO: 109651 - RNA, 21 nt, Human
cacccccccaacccgggaccc

SEQ ID NO: 109652 - RNA, 19 nt, Human
cacguugaucucaagucga

SEQ ID NO: 109653 - RNA, 23 nt, Human
cacugcuauaaaagaugcagggg

SEQ ID NO: 109654 - RNA, 23 nt, Human
cacugcuauaaaagaugcagggg

SEQ ID NO: 109655 - RNA, 20 nt, Human
cacuugguggaugggguagg

SEQ ID NO: 109656 - RNA, 19 nt, Human
cagcccaacucaaggauga

SEQ ID NO: 109657 - RNA, 22 nt, Human
cagggcaacucgagccccaccc

SEQ ID NO: 109658 - RNA, 21 nt, Human
caggugaggguggaaacugug

SEQ ID NO: 109659 - RNA, 21 nt, Human
caggugaggguggaaacugug

SEQ ID NO: 109660 - RNA, 19 nt, Human
caucacaaggcugugacca

SEQ ID NO: 109661 - RNA, 21 nt, Human
caucccaauccaggcgacccc

SEQ ID NO: 109662 - RNA, 18 nt, Human
cauuguacaacucggccg

SEQ ID NO: 109663 - RNA, 22 nt, Human
ccacccccccaacccgggaccc

SEQ ID NO: 109664 - RNA, 19 nt, Human
ccccccaacccgggacccu

SEQ ID NO: 109665 - RNA, 25 nt, Human
cccccgcggcgacgaaaugcugcuc

SEQ ID NO: 109666 - RNA, 19 nt, Human
cccgugcgcuugucccaca

SEQ ID NO: 109667 - RNA, 20 nt, Human
cccgugcgcuugucccacag

SEQ ID NO: 109668 - RNA, 18 nt, Human
cgaaaugcugcuccaccc

SEQ ID NO: 109669 - RNA, 19 nt, Human
cgaaaugcugcuccacccc

SEQ ID NO: 109670 - RNA, 22 nt, Human
cgaaaugcugcuccaccccccc

SEQ ID NO: 109671 - RNA, 19 nt, Human
cgaagaaaggaugcugaag

SEQ ID NO: 109672 - RNA, 19 nt, Human
cgaaggugcuaaggcccag

SEQ ID NO: 109673 - RNA, 20 nt, Human
cgacuggagucccacaacuu

SEQ ID NO: 109674 - RNA, 20 nt, Human
cgcucaucucgcuucuucuc

SEQ ID NO: 109675 - RNA, 18 nt, Human
cggcccccauccaacucc

SEQ ID NO: 109676 - RNA, 18 nt, Human
cggcccccauccaacucc

SEQ ID NO: 109677 - RNA, 23 nt, Human
cuagaugcucucuguugucaugg

SEQ ID NO: 109678 - RNA, 19 nt, Human
cucaagucgagcugcuucc

SEQ ID NO: 109679 - RNA, 22 nt, Human
cucuucacacugcgcucaucuc

SEQ ID NO: 109680 - RNA, 20 nt, Human
cugauaucccgacuggaguc

SEQ ID NO: 109681 - RNA, 22 nt, Human
cugcggccggagucccggcacc

SEQ ID NO: 109682 - RNA, 18 nt, Human
cugcuccacccccccaac

SEQ ID NO: 109683 - RNA, 23 nt, Human
cuucacacugcgcucaucucgcu

SEQ ID NO: 109684 - RNA, 19 nt, Human
gaaaugcugcuccaccccc

SEQ ID NO: 109685 - RNA, 20 nt, Human
gagccccaccccugcgaugg

SEQ ID NO: 109686 - RNA, 23 nt, Human
gcacugccaaagucuaccacccg

SEQ ID NO: 109687 - RNA, 22 nt, Human
gcaggugaggguggaaacugug

SEQ ID NO: 109688 - RNA, 22 nt, Human
gcaggugaggguggaaacugug

SEQ ID NO: 109689 - RNA, 19 nt, Human
gcgcucaucucgcuucuuc

SEQ ID NO: 109690 - RNA, 19 nt, Human
gcggcgacgaaaugcugcu

SEQ ID NO: 109691 - RNA, 23 nt, Human
gcuggugguguuccucugccucu

SEQ ID NO: 109692 - RNA, 24 nt, Human
gcuggugguguuccucugccucug

SEQ ID NO: 109693 - RNA, 22 nt, Human
ggauaggacccaagauccuuuc

SEQ ID NO: 109694 - RNA, 21 nt, Human
ggcaacucgagccccaccccu

SEQ ID NO: 109695 - RNA, 22 nt, Human
ggccaugguagucaaaccaguc

SEQ ID NO: 109696 - RNA, 23 nt, Human
gucaaagguggcacugccaaagu

SEQ ID NO: 109697 - RNA, 18 nt, Human
gugcuauggugcucaugg

SEQ ID NO: 109698 - RNA, 21 nt, Human
uaaaaaagcaccaguguccug

SEQ ID NO: 109699 - RNA, 21 nt, Human
uaaaaaagcaccaguguccug

SEQ ID NO: 109700 - RNA, 23 nt, Human
uacaacucggccgaagguccccu

SEQ ID NO: 109701 - RNA, 24 nt, Human
uaccucacucggcccccauccaac

SEQ ID NO: 109702 - RNA, 24 nt, Human
uaccucacucggcccccauccaac

SEQ ID NO: 109703 - RNA, 27 nt, Human
uaccucacucggcccccauccaacucc

SEQ ID NO: 109704 - RNA, 27 nt, Human
uaccucacucggcccccauccaacucc

SEQ ID NO: 109705 - RNA, 22 nt, Human
uaggacccaagauccuuuccau

SEQ ID NO: 109706 - RNA, 25 nt, Human
ucagggucuuucucauugauuuucu

SEQ ID NO: 109707 - RNA, 22 nt, Human
uccacccccccaacccgggacc

SEQ ID NO: 109708 - RNA, 20 nt, Human
uccguaugagggggcaggug

SEQ ID NO: 109709 - RNA, 20 nt, Human
uccguaugagggggcaggug

SEQ ID NO: 109710 - RNA, 19 nt, Human
ucuaccacccgcacagcug

SEQ ID NO: 109711 - RNA, 21 nt, Human
ucuuugaggaaaucgaagguc

SEQ ID NO: 109712 - RNA, 22 nt, Human
ugaagugauagguacaaguucu

SEQ ID NO: 109713 - RNA, 22 nt, Human
ugaagugauagguacaaguucu

SEQ ID NO: 109714 - RNA, 21 nt, Human
ugaggguggaaacugugugga

SEQ ID NO: 109715 - RNA, 21 nt, Human
ugaggguggaaacugugugga

SEQ ID NO: 109716 - RNA, 27 nt, Human
ugaggucagauaccgccgcagcgguuu

SEQ ID NO: 109717 - RNA, 20 nt, Human
ugcaggggggcccagggccu

SEQ ID NO: 109718 - RNA, 20 nt, Human
ugcaggggggcccagggccu

SEQ ID NO: 109719 - RNA, 21 nt, Human
ugcggccggagucccggcacc

SEQ ID NO: 109720 - RNA, 19 nt, Human
ugcuauggugcucaugguc

SEQ ID NO: 109721 - RNA, 20 nt, Human
ugcuccacccccccaacccc

SEQ ID NO: 109722 - RNA, 20 nt, Human
uggaagagggugaaucccac

SEQ ID NO: 109723 - RNA, 27 nt, Human
uggaagagggugaaucccacauaguag

SEQ ID NO: 109724 - RNA, 24 nt, Human
uggaauaguauuauguacaaggca

SEQ ID NO: 109725 - RNA, 24 nt, Human
uggaauaguauuauguacaaggca

SEQ ID NO: 109726 - RNA, 20 nt, Human
uggagacaauggugcuaugg

SEQ ID NO: 109727 - RNA, 20 nt, Human
uggugcucauggucaaaggu

SEQ ID NO: 109728 - RNA, 28 nt, Human
uguacaaaauuccuuauaaaacaugggg

SEQ ID NO: 109729 - RNA, 28 nt, Human
uguacaaaauuccuuauaaaacaugggg

SEQ ID NO: 109730 - RNA, 19 nt, Human
ugucaugggucuggaagag

SEQ ID NO: 109731 - RNA, 21 nt, Human
uguugucuuugaggaaaucga

SEQ ID NO: 109732 - RNA, 25 nt, Human
uuccuuguacuucuccacauucuua

SEQ ID NO: 109733 - RNA, 23 nt, Human
uuucggaucauccgggaagggau

SEQ ID NO: 109734 - RNA, 22 nt, Human
aaagcauagcaucauuuaccaa

SEQ ID NO: 109735 - RNA, 19 nt, Human
aacagggcagaauaaggga

SEQ ID NO: 109736 - RNA, 25 nt, Human
aacuggccauuucaauacuaugugg

SEQ ID NO: 109737 - RNA, 19 nt, Human
aagaacaaauagcaaggaa

SEQ ID NO: 109738 - RNA, 19 nt, Human
aagaagaaacgagauggaa

SEQ ID NO: 109739 - RNA, 21 nt, Human
aaggcaggaguagggagaccu

SEQ ID NO: 109740 - RNA, 19 nt, Human
aagguaguagcagugggga

SEQ ID NO: 109741 - RNA, 23 nt, Human
aaguaaacuggccauuucaauac

SEQ ID NO: 109742 - RNA, 20 nt, Human
acaaugcuagagguaggcac

SEQ ID NO: 109743 - RNA, 21 nt, Human
acagagucuguauacaacccu

SEQ ID NO: 109744 - RNA, 25 nt, Human
agaaauugaugagagaggaagacaa

SEQ ID NO: 109745 - RNA, 23 nt, Human
agaacaaauagcaaggaagguuu

SEQ ID NO: 109746 - RNA, 21 nt, Human
agaagagcaaaaaucuacaaa

SEQ ID NO: 109747 - RNA, 19 nt, Human
agaaggugacuucugaacu

SEQ ID NO: 109748 - RNA, 18 nt, Human
agaccuggaagcuaagua

SEQ ID NO: 109749 - RNA, 18 nt, Human
agagaaguuaagaccugg

SEQ ID NO: 109750 - RNA, 18 nt, Human
agaguagucagagaaguu

SEQ ID NO: 109751 - RNA, 20 nt, Human
agaguuccuugggguuuggg

SEQ ID NO: 109752 - RNA, 26 nt, Human
agaguuccuugggguuuggggaggga

SEQ ID NO: 109753 - RNA, 18 nt, Human
aggaaucuaaggcaggag

SEQ ID NO: 109754 - RNA, 23 nt, Human
aggaaucuaaggcaggaguaggg

SEQ ID NO: 109755 - RNA, 19 nt, Human
aggaguagggagaccugag

SEQ ID NO: 109756 - RNA, 21 nt, Human
aggcaggaguagggagaccug

SEQ ID NO: 109757 - RNA, 21 nt, Human
agggagaggcauucaaaaaau

SEQ ID NO: 109758 - RNA, 21 nt, Human
aggguaggaaagaguaaacgg

SEQ ID NO: 109759 - RNA, 19 nt, Human
aggguuuucauccaagugg

SEQ ID NO: 109760 - RNA, 20 nt, Human
aggguuuucauccaaguggc

SEQ ID NO: 109761 - RNA, 26 nt, Human
agguaguagcaguggggauauaagug

SEQ ID NO: 109762 - RNA, 19 nt, Human
aguuacagcaucuuauuga

SEQ ID NO: 109763 - RNA, 21 nt, Human
auaaagcaaagauugagaagu

SEQ ID NO: 109764 - RNA, 23 nt, Human
augaagaagcagaaauugaugag

SEQ ID NO: 109765 - RNA, 20 nt, Human
caaaacauucacgaaagaag

SEQ ID NO: 109766 - RNA, 21 nt, Human
caacggucuuggaaaggaagg

SEQ ID NO: 109767 - RNA, 20 nt, Human
caacuccugagcuaggaccu

SEQ ID NO: 109768 - RNA, 22 nt, Human
cacgaaagaaggugacuucuga

SEQ ID NO: 109769 - RNA, 18 nt, Human
cagggcaggggacaagcc

SEQ ID NO: 109770 - RNA, 22 nt, Human
caucauuuaccaagaagaaacg

SEQ ID NO: 109771 - RNA, 20 nt, Human
ccaacuccugagcuaggacc

SEQ ID NO: 109772 - RNA, 21 nt, Human
ccaacuccugagcuaggaccu

SEQ ID NO: 109773 - RNA, 18 nt, Human
ccauaaagcaaagauuga

SEQ ID NO: 109774 - RNA, 19 nt, Human
cccuaaacuaagguaguag

SEQ ID NO: 109775 - RNA, 19 nt, Human
cccuuuggaaaagccugau

SEQ ID NO: 109776 - RNA, 19 nt, Human
ccuaaacuaagguaguagc

SEQ ID NO: 109777 - RNA, 20 nt, Human
ccuaaacuaagguaguagca

SEQ ID NO: 109778 - RNA, 19 nt, Human
ccucuaggcaccaacgguc

SEQ ID NO: 109779 - RNA, 19 nt, Human
ccugagcuaggaccuggga

SEQ ID NO: 109780 - RNA, 21 nt, Human
cgagauggaauuguuuggggu

SEQ ID NO: 109781 - RNA, 21 nt, Human
cuagagguaggcacagggggc

SEQ ID NO: 109782 - RNA, 23 nt, Human
cuccugagcuaggaccugggaac

SEQ ID NO: 109783 - RNA, 21 nt, Human
cuccuugcagugaauugggga

SEQ ID NO: 109784 - RNA, 20 nt, Human
gaacacaaaguuaaauagga

SEQ ID NO: 109785 - RNA, 18 nt, Human
gaagagcaaaaaucuaca

SEQ ID NO: 109786 - RNA, 22 nt, Human
gaaggucagcauuccaugaaga

SEQ ID NO: 109787 - RNA, 22 nt, Human
gacgaggaaacagccucaggga

SEQ ID NO: 109788 - RNA, 18 nt, Human
gaugucaggguaggaaag

SEQ ID NO: 109789 - RNA, 19 nt, Human
gcaagagugagaguuccuu

SEQ ID NO: 109790 - RNA, 24 nt, Human
ggaggaagggcguuaacaucugcc

SEQ ID NO: 109791 - RNA, 24 nt, Human
ggagucaagucaagcucaccgcau

SEQ ID NO: 109792 - RNA, 20 nt, Human
gggagggaggaggaaaaaug

SEQ ID NO: 109793 - RNA, 18 nt, Human
ggguuuggggagggagga

SEQ ID NO: 109794 - RNA, 23 nt, Human
guuggaaaaagcauagcaucauu

SEQ ID NO: 109795 - RNA, 23 nt, Human
uaaggagagggagugggcaacua

SEQ ID NO: 109796 - RNA, 19 nt, Human
uaccaagaagaaacgagau

SEQ ID NO: 109797 - RNA, 22 nt, Human
uacuuccaggugccaagcacug

SEQ ID NO: 109798 - RNA, 20 nt, Human
uaggaaagaguaaacgguga

SEQ ID NO: 109799 - RNA, 18 nt, Human
uaguccucuaggcaccaa

SEQ ID NO: 109800 - RNA, 21 nt, Human
uauagcccuaaacuaagguag

SEQ ID NO: 109801 - RNA, 20 nt, Human
uauuccacuuuauucccugg

SEQ ID NO: 109802 - RNA, 19 nt, Human
ucagccauaccaaaauaaa

SEQ ID NO: 109803 - RNA, 22 nt, Human
ugaacugccagcuucagggcag

SEQ ID NO: 109804 - RNA, 18 nt, Human
ugaagaagcagaaauuga

SEQ ID NO: 109805 - RNA, 21 nt, Human
ugagaagagcaaaaaucuaca

SEQ ID NO: 109806 - RNA, 23 nt, Human
ugagaagagcaaaaaucuacaaa

SEQ ID NO: 109807 - RNA, 28 nt, Human
ugccaagcacuguuaucaacauuauucc

SEQ ID NO: 109808 - RNA, 18 nt, Human
uggaaaggccauaaagca

SEQ ID NO: 109809 - RNA, 18 nt, Human
uggaagaugacuugggga

SEQ ID NO: 109810 - RNA, 18 nt, Human
uggagcaaugaaggucag

SEQ ID NO: 109811 - RNA, 21 nt, Human
uggccugaugggauuugcauu

SEQ ID NO: 109812 - RNA, 21 nt, Human
uggcuugguuggaaaaagcau

SEQ ID NO: 109813 - RNA, 25 nt, Human
ugggaacacaaaguuaaauaggaca

SEQ ID NO: 109814 - RNA, 20 nt, Human
ugggguugggaagguggacg

SEQ ID NO: 109815 - RNA, 21 nt, Human
uuaacagacgaggaaacagcc

SEQ ID NO: 109816 - RNA, 20 nt, Human
uuauugaggaaucuaaggca

SEQ ID NO: 109817 - RNA, 24 nt, Human
uucacacuuaacagacgaggaaac

SEQ ID NO: 109818 - RNA, 19 nt, Human
uucuggaugucaggguagg

SEQ ID NO: 109819 - RNA, 22 nt, Human
uuguggacugauaaagauauau

SEQ ID NO: 109820 - RNA, 22 nt, Human
uuugccaacuccugagcuagga

SEQ ID NO: 109821 - RNA, 21 nt, Human
agcccuucccuacucccagac

SEQ ID NO: 109822 - RNA, 21 nt, Human
cagggucauagaguguccaaa

SEQ ID NO: 109823 - RNA, 21 nt, Human
cagggucauagaguguccaaa

SEQ ID NO: 109824 - RNA, 21 nt, Human
caguucauggagggucucugg

SEQ ID NO: 109825 - RNA, 22 nt, Human
caugaugccaggaagaaacucc

SEQ ID NO: 109826 - RNA, 22 nt, Human
caugaugccaggaagaaacucc

SEQ ID NO: 109827 - RNA, 19 nt, Human
cccagaccugccgggaagg

SEQ ID NO: 109828 - RNA, 21 nt, Human
cccccugcaagggaaacaagg

SEQ ID NO: 109829 - RNA, 19 nt, Human
cccugcaaggaaacaaggc

SEQ ID NO: 109830 - RNA, 19 nt, Human
cggcauuuauucagaaggc

SEQ ID NO: 109831 - RNA, 24 nt, Human
cgggagggaugagggucugcgaca

SEQ ID NO: 109832 - RNA, 24 nt, Human
cgggagggaugagggucugcgaca

SEQ ID NO: 109833 - RNA, 19 nt, Human
gaccugucccucugcccac

SEQ ID NO: 109834 - RNA, 23 nt, Human
gcucccacgggagggaugagggu

SEQ ID NO: 109835 - RNA, 23 nt, Human
gcucccacgggagggaugagggu

SEQ ID NO: 109836 - RNA, 19 nt, Human
ggagacaauggcuggcccc

SEQ ID NO: 109837 - RNA, 19 nt, Human
ggagacaauggcuggcccc

SEQ ID NO: 109838 - RNA, 18 nt, Human
ggcauuuauucagaaggc

SEQ ID NO: 109839 - RNA, 21 nt, Human
ugccaggaagaaacuccccaa

SEQ ID NO: 109840 - RNA, 21 nt, Human
ugccaggaagaaacuccccaa

SEQ ID NO: 109841 - RNA, 19 nt, Human
uggagggucucuggggugg

SEQ ID NO: 109842 - RNA, 19 nt, Human
uggccccccugcaagggaa

SEQ ID NO: 109843 - RNA, 22 nt, Human
ugugaccugcguccugaggauc

SEQ ID NO: 109844 - RNA, 19 nt, Human
uucauggagggucucuggg

SEQ ID NO: 109845 - RNA, 21 nt, Human
aaaaagcaaucagcaggaaca

SEQ ID NO: 109846 - RNA, 24 nt, Human
aaaagccaccaccaaaaccaaaaa

SEQ ID NO: 109847 - RNA, 19 nt, Human
aaacacacacuccuuugcc

SEQ ID NO: 109848 - RNA, 24 nt, Human
aaagaacacaagccaguuacuagc

SEQ ID NO: 109849 - RNA, 20 nt, Human
aaagccaccaccaaaaccaa

SEQ ID NO: 109850 - RNA, 22 nt, Human
aaagccaccaccaaaaccaaaa

SEQ ID NO: 109851 - RNA, 23 nt, Human
aaagccaccaccaaaaccaaaaa

SEQ ID NO: 109852 - RNA, 19 nt, Human
aacaaugaagaagucagaa

SEQ ID NO: 109853 - RNA, 22 nt, Human
aacagaaacaaaaacacuccaa

SEQ ID NO: 109854 - RNA, 24 nt, Human
aacagaaacaaaaacacuccaaua

SEQ ID NO: 109855 - RNA, 20 nt, Human
aaccaagaucaccuaacucg

SEQ ID NO: 109856 - RNA, 19 nt, Human
aacugaaucacauaauugg

SEQ ID NO: 109857 - RNA, 20 nt, Human
aacuggcuucuucaaagacc

SEQ ID NO: 109858 - RNA, 22 nt, Human
aacuggcuucuucaaagaccug

SEQ ID NO: 109859 - RNA, 19 nt, Human
aagcaaucagcaggaacag

SEQ ID NO: 109860 - RNA, 19 nt, Human
aagccaccaccaaaaccaa

SEQ ID NO: 109861 - RNA, 21 nt, Human
aaguuagucuaaacuaaagca

SEQ ID NO: 109862 - RNA, 22 nt, Human
aauguaaucagacuauacuaaa

SEQ ID NO: 109863 - RNA, 19 nt, Human
aauucagucagcagaaccg

SEQ ID NO: 109864 - RNA, 23 nt, Human
acacuggauuugccacaucuaga

SEQ ID NO: 109865 - RNA, 23 nt, Human
acagcuguaaaaaaaaaaaaaaa

SEQ ID NO: 109866 - RNA, 19 nt, Human
acccugccccaaacacaca

SEQ ID NO: 109867 - RNA, 19 nt, Human
accuugaaagcuugucugg

SEQ ID NO: 109868 - RNA, 19 nt, Human
acuggucugaggaccacac

SEQ ID NO: 109869 - RNA, 19 nt, Human
agaaccgggguucaagacc

SEQ ID NO: 109870 - RNA, 19 nt, Human
agaagaaccgcugaagcac

SEQ ID NO: 109871 - RNA, 20 nt, Human
agaagugcaaccucuuccac

SEQ ID NO: 109872 - RNA, 19 nt, Human
agcugagggugcagggcug

SEQ ID NO: 109873 - RNA, 23 nt, Human
aggauauguagcuugugggggug

SEQ ID NO: 109874 - RNA, 24 nt, Human
aggcacaaauacugacuuaagucu

SEQ ID NO: 109875 - RNA, 22 nt, Human
agggugcagggcugggggugca

SEQ ID NO: 109876 - RNA, 19 nt, Human
aggugacuacaaaacccug

SEQ ID NO: 109877 - RNA, 22 nt, Human
aucaccuucucuucuuugacuc

SEQ ID NO: 109878 - RNA, 23 nt, Human
aucuguacuuauuuccucacaga

SEQ ID NO: 109879 - RNA, 23 nt, Human
caaaaccaaaaaucugucaccgg

SEQ ID NO: 109880 - RNA, 22 nt, Human
caaaagccaccaccaaaaccaa

SEQ ID NO: 109881 - RNA, 24 nt, Human
caaaagccaccaccaaaaccaaaa

SEQ ID NO: 109882 - RNA, 22 nt, Human
caaaauuaccaaggcuaaacug

SEQ ID NO: 109883 - RNA, 21 nt, Human
caacagaaacaaaaacacucc

SEQ ID NO: 109884 - RNA, 22 nt, Human
caacagaaacaaaaacacucca

SEQ ID NO: 109885 - RNA, 23 nt, Human
caacagaaacaaaaacacuccaa

SEQ ID NO: 109886 - RNA, 20 nt, Human
caaccucuuccacugcgcug

SEQ ID NO: 109887 - RNA, 20 nt, Human
cacaccauaucuaucuguag

SEQ ID NO: 109888 - RNA, 18 nt, Human
cacagaccaguaacaucu

SEQ ID NO: 109889 - RNA, 18 nt, Human
caccuccccgcgcccggc

SEQ ID NO: 109890 - RNA, 24 nt, Human
cacuccuuugcccacuugcugcuc

SEQ ID NO: 109891 - RNA, 21 nt, Human
cacuggaaagaaguuucugca

SEQ ID NO: 109892 - RNA, 24 nt, Human
cacuugcugcuccagguuuggggg

SEQ ID NO: 109893 - RNA, 22 nt, Human
caggaaacaaugaagaagucag

SEQ ID NO: 109894 - RNA, 21 nt, Human
caguaucuguacuuauuuccu

SEQ ID NO: 109895 - RNA, 21 nt, Human
cauaacagugguuaacacuga

SEQ ID NO: 109896 - RNA, 21 nt, Human
caucuagaagcacaaucacuc

SEQ ID NO: 109897 - RNA, 18 nt, Human
ccaaaaccaaaaaucugu

SEQ ID NO: 109898 - RNA, 21 nt, Human
ccaaacacacacuccuuugcc

SEQ ID NO: 109899 - RNA, 21 nt, Human
ccaaagguccuacauaacuga

SEQ ID NO: 109900 - RNA, 25 nt, Human
ccacaucuagaagcacaaucacucc

SEQ ID NO: 109901 - RNA, 21 nt, Human
ccaccaaaaccaaaaaucugu

SEQ ID NO: 109902 - RNA, 22 nt, Human
ccaccaccaaaaccaaaaaucu

SEQ ID NO: 109903 - RNA, 20 nt, Human
ccagagaaagaucacuuagc

SEQ ID NO: 109904 - RNA, 21 nt, Human
ccauaucagaaagaagagcuc

SEQ ID NO: 109905 - RNA, 24 nt, Human
cccaaacacacacuccuuugccca

SEQ ID NO: 109906 - RNA, 20 nt, Human
cccaaacgugucugcagcca

SEQ ID NO: 109907 - RNA, 22 nt, Human
cccaaacgugucugcagccaug

SEQ ID NO: 109908 - RNA, 22 nt, Human
cccaacaccgaacuuuuacccc

SEQ ID NO: 109909 - RNA, 19 nt, Human
cccaacagaaacaaaaaca

SEQ ID NO: 109910 - RNA, 20 nt, Human
cccaagauaagagggggaag

SEQ ID NO: 109911 - RNA, 18 nt, Human
ccccacacuugagccuag

SEQ ID NO: 109912 - RNA, 20 nt, Human
ccccacacuugagccuagcc

SEQ ID NO: 109913 - RNA, 25 nt, Human
ccccgguuagaagaaccgcugaagc

SEQ ID NO: 109914 - RNA, 18 nt, Human
ccccuaccgcuccccuca

SEQ ID NO: 109915 - RNA, 25 nt, Human
ccccucacaggcagguguuccuugc

SEQ ID NO: 109916 - RNA, 23 nt, Human
cccuaccgcuccccucacaggca

SEQ ID NO: 109917 - RNA, 22 nt, Human
cccugccccaaacacacacucc

SEQ ID NO: 109918 - RNA, 24 nt, Human
ccgaacuuuuaccccaucccacag

SEQ ID NO: 109919 - RNA, 21 nt, Human
ccuacauaacugauaugaacc

SEQ ID NO: 109920 - RNA, 21 nt, Human
ccuccccuaccgcuccccuca

SEQ ID NO: 109921 - RNA, 24 nt, Human
ccuguacuauagugcauccaauuc

SEQ ID NO: 109922 - RNA, 20 nt, Human
cgaccugggccagucauaac

SEQ ID NO: 109923 - RNA, 24 nt, Human
cgagugcugccgaaucuacccccu

SEQ ID NO: 109924 - RNA, 26 nt, Human
cgcgcccggcccgcggcggcuuccac

SEQ ID NO: 109925 - RNA, 25 nt, Human
cucaggaaguacuugaaaguugaaa

SEQ ID NO: 109926 - RNA, 23 nt, Human
cucccaacaccgaacuuuuaccc

SEQ ID NO: 109927 - RNA, 20 nt, Human
cuccccuaccgcuccccuca

SEQ ID NO: 109928 - RNA, 20 nt, Human
cugagagcugaaauguaaug

SEQ ID NO: 109929 - RNA, 18 nt, Human
cugggggugcagugagga

SEQ ID NO: 109930 - RNA, 21 nt, Human
cuuccacacuuugcaguccag

SEQ ID NO: 109931 - RNA, 21 nt, Human
cuucuucaaagaccugcccaa

SEQ ID NO: 109932 - RNA, 19 nt, Human
cuugcccaaaagccaccac

SEQ ID NO: 109933 - RNA, 18 nt, Human
cuuugcccacuugcugcu

SEQ ID NO: 109934 - RNA, 24 nt, Human
gaaaggcuaaggaauucacaaaag

SEQ ID NO: 109935 - RNA, 21 nt, Human
gaagugcaaccucuuccacug

SEQ ID NO: 109936 - RNA, 22 nt, Human
gaccaguaacaucugguuggca

SEQ ID NO: 109937 - RNA, 21 nt, Human
gagaagugcaaccucuuccac

SEQ ID NO: 109938 - RNA, 18 nt, Human
gcagugaggaagaaggga

SEQ ID NO: 109939 - RNA, 21 nt, Human
gggcugcauuuuaccauacgu

SEQ ID NO: 109940 - RNA, 23 nt, Human
guaaaaucacccccugaaaaaca

SEQ ID NO: 109941 - RNA, 23 nt, Human
guggccccacacuugagccuagc

SEQ ID NO: 109942 - RNA, 19 nt, Human
uacaggaaacaaugaagaa

SEQ ID NO: 109943 - RNA, 24 nt, Human
uaccuagcucuccuccguauacua

SEQ ID NO: 109944 - RNA, 23 nt, Human
uacuaaacuugguuccaaaaguu

SEQ ID NO: 109945 - RNA, 21 nt, Human
uagaagcacaaucacuccagu

SEQ ID NO: 109946 - RNA, 23 nt, Human
uagccagagaaagaucacuuagc

SEQ ID NO: 109947 - RNA, 25 nt, Human
uaggucaagaaaacaauggcaucaa

SEQ ID NO: 109948 - RNA, 25 nt, Human
uaggugacuacaaaacccccugaag

SEQ ID NO: 109949 - RNA, 21 nt, Human
ucaccuucucuucuuugacuc

SEQ ID NO: 109950 - RNA, 20 nt, Human
ucacugacuuccuugggccc

SEQ ID NO: 109951 - RNA, 20 nt, Human
ucacuggaaagaaguuucug

SEQ ID NO: 109952 - RNA, 19 nt, Human
ucacuucacuggaaagaag

SEQ ID NO: 109953 - RNA, 20 nt, Human
ucacuucacuggaaagaagu

SEQ ID NO: 109954 - RNA, 24 nt, Human
ucagcagaaccgggguucaagacc

SEQ ID NO: 109955 - RNA, 30 nt, Human
ucagcaggaacagcuguaaaaaaaaaaaaa

SEQ ID NO: 109956 - RNA, 23 nt, Human
ucagggccuugccauagucacuu

SEQ ID NO: 109957 - RNA, 24 nt, Human
uccaauuuuuuuaauuagacccaa

SEQ ID NO: 109958 - RNA, 18 nt, Human
uccccaagugcuuagugg

SEQ ID NO: 109959 - RNA, 19 nt, Human
uccucucucggagaagugc

SEQ ID NO: 109960 - RNA, 19 nt, Human
uccuugcccaaaagccacc

SEQ ID NO: 109961 - RNA, 20 nt, Human
ucuccauauuaacaaaggcu

SEQ ID NO: 109962 - RNA, 20 nt, Human
ucuccauauuaacaaaggcu

SEQ ID NO: 109963 - RNA, 22 nt, Human
ucucucggagaagugcaaccuc

SEQ ID NO: 109964 - RNA, 19 nt, Human
ucugguuggcaggcacugg

SEQ ID NO: 109965 - RNA, 20 nt, Human
ucuguaggacccugggucca

SEQ ID NO: 109966 - RNA, 22 nt, Human
ucuguaggacccuggguccaaa

SEQ ID NO: 109967 - RNA, 27 nt, Human
ugaagcacuaugcuaucagcuuaaaaa

SEQ ID NO: 109968 - RNA, 18 nt, Human
ugacuacaaaacccugga

SEQ ID NO: 109969 - RNA, 19 nt, Human
ugauuggagaaaaaagagc

SEQ ID NO: 109970 - RNA, 23 nt, Human
ugcccaaaagccaccaccaaaac

SEQ ID NO: 109971 - RNA, 20 nt, Human
ugcccaagauaagaggggga

SEQ ID NO: 109972 - RNA, 21 nt, Human
ugcccacuugcugcuccaggu

SEQ ID NO: 109973 - RNA, 18 nt, Human
uggagcugagggugcagg

SEQ ID NO: 109974 - RNA, 21 nt, Human
ugggggugcagugaggaagaa

SEQ ID NO: 109975 - RNA, 18 nt, Human
ugggggugucacugacuu

SEQ ID NO: 109976 - RNA, 24 nt, Human
uggugaucuuaacagaaaccuguc

SEQ ID NO: 109977 - RNA, 23 nt, Human
uuaaaaagcaaucagcaggaaca

SEQ ID NO: 109978 - RNA, 24 nt, Human
uuaaagcacagcuacuuggugauc

SEQ ID NO: 109979 - RNA, 22 nt, Human
uuaggugaauggaauguaauca

SEQ ID NO: 109980 - RNA, 20 nt, Human
uucacaaaaguaaaaucacc

SEQ ID NO: 109981 - RNA, 19 nt, Human
uucauuacuacuagcugga

SEQ ID NO: 109982 - RNA, 22 nt, Human
uuccaaaaucucagccagaaau

SEQ ID NO: 109983 - RNA, 23 nt, Human
uuccucacagaccaguaacaucu

SEQ ID NO: 109984 - RNA, 24 nt, Human
uuccuugggcccuccaggucucuu

SEQ ID NO: 109985 - RNA, 19 nt, Human
uugaaagcuugucuggcuc

SEQ ID NO: 109986 - RNA, 20 nt, Human
uugcugcuccagguuugggg

SEQ ID NO: 109987 - RNA, 24 nt, Human
uuggccaauauaguacgaauuuca

SEQ ID NO: 109988 - RNA, 27 nt, Human
uugugggaagagggagaacuacaggaa

SEQ ID NO: 109989 - RNA, 24 nt, Human
uuugccacaucuagaagcacaauc

SEQ ID NO: 109990 - RNA, 22 nt, Human
uuuuuuuuuuuuuuuuuacaag

SEQ ID NO: 109991 - RNA, 26 nt, Human
aaacacucuaaaacagaauccgaucc

SEQ ID NO: 109992 - RNA, 24 nt, Human
aaacagaaacuugacggaaauagu

SEQ ID NO: 109993 - RNA, 21 nt, Human
aagccucugggcccaguaccu

SEQ ID NO: 109994 - RNA, 21 nt, Human
aauaguagagucugaaaauga

SEQ ID NO: 109995 - RNA, 23 nt, Human
acacacacacacacacgaaucca

SEQ ID NO: 109996 - RNA, 25 nt, Human
acacacacacacacacgaauccacg

SEQ ID NO: 109997 - RNA, 27 nt, Human
acacacacacacacacgaauccacgca

SEQ ID NO: 109998 - RNA, 21 nt, Human
acacauauacaagacacacac

SEQ ID NO: 109999 - RNA, 24 nt, Human
acacauauacaagacacacacaca

SEQ ID NO: 110000 - RNA, 19 nt, Human
acaccagguccccuccugg

SEQ ID NO: 110001 - RNA, 22 nt, Human
accacugugacuuccugugggu

SEQ ID NO: 110002 - RNA, 18 nt, Human
accccaaccuacugaccu

SEQ ID NO: 110003 - RNA, 21 nt, Human
accccaaccuacugaccuacu

SEQ ID NO: 110004 - RNA, 20 nt, Human
acccucccacccagcagagc

SEQ ID NO: 110005 - RNA, 21 nt, Human
acgcacacgaggcacaccccc

SEQ ID NO: 110006 - RNA, 22 nt, Human
acucugcgcacacauauacaag

SEQ ID NO: 110007 - RNA, 21 nt, Human
agaacagacuagcccugagua

SEQ ID NO: 110008 - RNA, 21 nt, Human
agaggagggcaggggcccgga

SEQ ID NO: 110009 - RNA, 24 nt, Human
agaggagggcaggggcccggaucc

SEQ ID NO: 110010 - RNA, 20 nt, Human
agagggcagugacaggacag

SEQ ID NO: 110011 - RNA, 20 nt, Human
agcagggggacagagcuuug

SEQ ID NO: 110012 - RNA, 18 nt, Human
aggaagagaccgguucag

SEQ ID NO: 110013 - RNA, 22 nt, Human
aggacagagccacucaucuguc

SEQ ID NO: 110014 - RNA, 19 nt, Human
aggcaaagccucugggccc

SEQ ID NO: 110015 - RNA, 20 nt, Human
aggcagggagagggcaguga

SEQ ID NO: 110016 - RNA, 23 nt, Human
aggccccucggcccugccuuucc

SEQ ID NO: 110017 - RNA, 23 nt, Human
agguccccuccuggccucugccc

SEQ ID NO: 110018 - RNA, 21 nt, Human
aggugcagaggagggcagggg

SEQ ID NO: 110019 - RNA, 27 nt, Human
auauacaagacacacacacacacacgg

SEQ ID NO: 110020 - RNA, 24 nt, Human
auauacaagacacacacacacagg

SEQ ID NO: 110021 - RNA, 18 nt, Human
augcaggcgcucaaagcc

SEQ ID NO: 110022 - RNA, 23 nt, Human
augggccugagccugggcagggg

SEQ ID NO: 110023 - RNA, 23 nt, Human
caaagccucugggcccaguaccu

SEQ ID NO: 110024 - RNA, 18 nt, Human
caaaugaggcccagaaag

SEQ ID NO: 110025 - RNA, 24 nt, Human
caaauucccagcgcggggcgguuc

SEQ ID NO: 110026 - RNA, 19 nt, Human
caacagccacaguaggcug

SEQ ID NO: 110027 - RNA, 21 nt, Human
caaccccaaccuacugaccua

SEQ ID NO: 110028 - RNA, 20 nt, Human
caagacacacacacacacac

SEQ ID NO: 110029 - RNA, 20 nt, Human
caaggcaaagccucugggcc

SEQ ID NO: 110030 - RNA, 30 nt, Human
cacacauauacaagacacacacacacacag

SEQ ID NO: 110031 - RNA, 18 nt, Human
cacaguaggcugacguaa

SEQ ID NO: 110032 - RNA, 21 nt, Human
caccagguccccuccuggccu

SEQ ID NO: 110033 - RNA, 21 nt, Human
cacccaaggggugucagcaac

SEQ ID NO: 110034 - RNA, 22 nt, Human
caccccacccuccagcccccag

SEQ ID NO: 110035 - RNA, 23 nt, Human
cacccccccuacuccuguauuca

SEQ ID NO: 110036 - RNA, 19 nt, Human
cacucaucugucccaaagc

SEQ ID NO: 110037 - RNA, 19 nt, Human
cacucugucaaggcaaagc

SEQ ID NO: 110038 - RNA, 20 nt, Human
cagaaacacucuaaaacaga

SEQ ID NO: 110039 - RNA, 24 nt, Human
cagaaacacucuaaaacagaaucc

SEQ ID NO: 110040 - RNA, 26 nt, Human
cagaaacacucuaaaacagaauccga

SEQ ID NO: 110041 - RNA, 20 nt, Human
cagagccacucaucuguccc

SEQ ID NO: 110042 - RNA, 20 nt, Human
cagagccuggugccagggac

SEQ ID NO: 110043 - RNA, 23 nt, Human
cagaugcccuccauggcccaccc

SEQ ID NO: 110044 - RNA, 26 nt, Human
cagaugcccuccauggcccacccucc

SEQ ID NO: 110045 - RNA, 24 nt, Human
cagccacaguaggcugacguaacc

SEQ ID NO: 110046 - RNA, 19 nt, Human
cagcuccugggggccaggg

SEQ ID NO: 110047 - RNA, 20 nt, Human
cagcucggcugccccggcgg

SEQ ID NO: 110048 - RNA, 24 nt, Human
ccaaagcugcacccaagggguggu

SEQ ID NO: 110049 - RNA, 23 nt, Human
ccacccagcccucuccugcacgg

SEQ ID NO: 110050 - RNA, 22 nt, Human
ccauaccucaugggccugagcc

SEQ ID NO: 110051 - RNA, 19 nt, Human
cccacacccccccuacucc

SEQ ID NO: 110052 - RNA, 25 nt, Human
cccacacccccccuacuccuguauu

SEQ ID NO: 110053 - RNA, 27 nt, Human
cccacacccccccuacuccuguauuca

SEQ ID NO: 110054 - RNA, 22 nt, Human
cccacccuccagcccccaggaa

SEQ ID NO: 110055 - RNA, 24 nt, Human
ccccccacaggaaggguccuaggu

SEQ ID NO: 110056 - RNA, 22 nt, Human
ccccucggcccugccuuuccga

SEQ ID NO: 110057 - RNA, 19 nt, Human
cccgcaggccccucggccc

SEQ ID NO: 110058 - RNA, 19 nt, Human
cccggauccuggcccagaa

SEQ ID NO: 110059 - RNA, 22 nt, Human
cccuccuggccucugccccacc

SEQ ID NO: 110060 - RNA, 19 nt, Human
cccugaguagggagugugg

SEQ ID NO: 110061 - RNA, 18 nt, Human
ccgcaggccccucggccc

SEQ ID NO: 110062 - RNA, 23 nt, Human
ccgcaggccccucggcccugccu

SEQ ID NO: 110063 - RNA, 19 nt, Human
ccuacuccuguauucagau

SEQ ID NO: 110064 - RNA, 21 nt, Human
ccucaugggccugagccuggg

SEQ ID NO: 110065 - RNA, 19 nt, Human
ccucccuugaaacccuggg

SEQ ID NO: 110066 - RNA, 23 nt, Human
ccuccucccuugaaacccugggc

SEQ ID NO: 110067 - RNA, 23 nt, Human
ccucugggcccaguaccuuguaa

SEQ ID NO: 110068 - RNA, 21 nt, Human
ccugcaaagcuggaaugccag

SEQ ID NO: 110069 - RNA, 22 nt, Human
ccuggccucugccccacccagc

SEQ ID NO: 110070 - RNA, 23 nt, Human
ccuguggcuaggcugcccgaagc

SEQ ID NO: 110071 - RNA, 20 nt, Human
ccuuuggcaccccacccucc

SEQ ID NO: 110072 - RNA, 27 nt, Human
cgcacacauauacaagacacacacaca

SEQ ID NO: 110073 - RNA, 24 nt, Human
cuccauaccucaugggccugagcc

SEQ ID NO: 110074 - RNA, 24 nt, Human
cucccuugaaacccugggccacuc

SEQ ID NO: 110075 - RNA, 22 nt, Human
cuccuggccucugccccaccuu

SEQ ID NO: 110076 - RNA, 23 nt, Human
cugccccacccagcccucuccug

SEQ ID NO: 110077 - RNA, 22 nt, Human
cugccccgcaggccccucggcc

SEQ ID NO: 110078 - RNA, 22 nt, Human
cugcccgaagcacgugccgcag

SEQ ID NO: 110079 - RNA, 21 nt, Human
cugugacuuccuguggguccc

SEQ ID NO: 110080 - RNA, 25 nt, Human
cuugaaacccugggccacucuguca

SEQ ID NO: 110081 - RNA, 24 nt, Human
gaaacacucuaaaacagaauccga

SEQ ID NO: 110082 - RNA, 24 nt, Human
gaauccacgcacacgaggcacacc

SEQ ID NO: 110083 - RNA, 23 nt, Human
gcagaggagggcaggggcccgga

SEQ ID NO: 110084 - RNA, 20 nt, Human
gcccacccucccacccagcu

SEQ ID NO: 110085 - RNA, 21 nt, Human
gccuuuggcaccccacccucc

SEQ ID NO: 110086 - RNA, 26 nt, Human
ggaagaacagacuagcccugaguagg

SEQ ID NO: 110087 - RNA, 19 nt, Human
ggagcagggggacagagcu

SEQ ID NO: 110088 - RNA, 20 nt, Human
ggcaggggcccggauccugg

SEQ ID NO: 110089 - RNA, 18 nt, Human
ggccucugccccacccag

SEQ ID NO: 110090 - RNA, 24 nt, Human
gggacagagcuuuggguagaggag

SEQ ID NO: 110091 - RNA, 18 nt, Human
gggagagggcagugacag

SEQ ID NO: 110092 - RNA, 20 nt, Human
gggcaggggcccggauccug

SEQ ID NO: 110093 - RNA, 25 nt, Human
gggcaggggucuggagugcacauag

SEQ ID NO: 110094 - RNA, 23 nt, Human
gggccugagggaugagccaggug

SEQ ID NO: 110095 - RNA, 18 nt, Human
gggccuuuggcaccccac

SEQ ID NO: 110096 - RNA, 21 nt, Human
ggugcagaggagggcaggggc

SEQ ID NO: 110097 - RNA, 22 nt, Human
gugggucccuucccuucugucc

SEQ ID NO: 110098 - RNA, 23 nt, Human
guguggucaggugcagaggaggg

SEQ ID NO: 110099 - RNA, 20 nt, Human
uaauguagggucaggguggg

SEQ ID NO: 110100 - RNA, 24 nt, Human
uacacacccacacccccccuacuc

SEQ ID NO: 110101 - RNA, 19 nt, Human
uacuuugggaccacaggcc

SEQ ID NO: 110102 - RNA, 18 nt, Human
uagguagggggagguucc

SEQ ID NO: 110103 - RNA, 22 nt, Human
uccagcccccaggaaugcaggc

SEQ ID NO: 110104 - RNA, 19 nt, Human
ucccaaagcugcacccaag

SEQ ID NO: 110105 - RNA, 21 nt, Human
ucccacccagcagagcgccag

SEQ ID NO: 110106 - RNA, 22 nt, Human
ucccugacucuguagacccccc

SEQ ID NO: 110107 - RNA, 22 nt, Human
ucccugggcaccacugugacuu

SEQ ID NO: 110108 - RNA, 26 nt, Human
ucccugggcaccacugugacuuccug

SEQ ID NO: 110109 - RNA, 18 nt, Human
ucccuucccuucuguccc

SEQ ID NO: 110110 - RNA, 19 nt, Human
ucccuugaaacccugggcc

SEQ ID NO: 110111 - RNA, 20 nt, Human
ugacuuccugugggucccuu

SEQ ID NO: 110112 - RNA, 23 nt, Human
ugagccugggcaggggucuggag

SEQ ID NO: 110113 - RNA, 18 nt, Human
ugaugagaggagcucugg

SEQ ID NO: 110114 - RNA, 22 nt, Human
ugaugcacucugcgcacacaua

SEQ ID NO: 110115 - RNA, 24 nt, Human
ugccccacccagcccucuccugca

SEQ ID NO: 110116 - RNA, 24 nt, Human
ugcccgaagcacgugccgcaguuc

SEQ ID NO: 110117 - RNA, 19 nt, Human
uggaaugccaggggagugg

SEQ ID NO: 110118 - RNA, 19 nt, Human
uggagugggagcaggggga

SEQ ID NO: 110119 - RNA, 23 nt, Human
uggcaccccacccuccagccccc

SEQ ID NO: 110120 - RNA, 22 nt, Human
uggcccacccucccacccagca

SEQ ID NO: 110121 - RNA, 24 nt, Human
uggcccagaaacacucuaaaacag

SEQ ID NO: 110122 - RNA, 19 nt, Human
uggcuuuugcucagggccu

SEQ ID NO: 110123 - RNA, 22 nt, Human
ugggcaggugacacaccagguc

SEQ ID NO: 110124 - RNA, 20 nt, Human
uguaaaggcuuugaugagag

SEQ ID NO: 110125 - RNA, 21 nt, Human
ugucccugacucuguagaccc

SEQ ID NO: 110126 - RNA, 21 nt, Human
uuuuuuuuuuuggggcuguga

SEQ ID NO: 110127 - RNA, 23 nt, Human
uuuuuuuuuuuuuuuuuggggcu

SEQ ID NO: 110128 - RNA, 21 nt, Human
aaaagacuuucauuaacuuca

SEQ ID NO: 110129 - RNA, 21 nt, Human
aaacauggcgaaaggagcucu

SEQ ID NO: 110130 - RNA, 21 nt, Human
aacauggcgaaaggagcucuc

SEQ ID NO: 110131 - RNA, 19 nt, Human
agguaggaauuauaggccu

SEQ ID NO: 110132 - RNA, 19 nt, Human
caccacaccgcccgcccug

SEQ ID NO: 110133 - RNA, 20 nt, Human
cagcagacugguaaaacaug

SEQ ID NO: 110134 - RNA, 19 nt, Human
cagcagagugcggcaacac

SEQ ID NO: 110135 - RNA, 18 nt, Human
ccacauagaucugcuagc

SEQ ID NO: 110136 - RNA, 24 nt, Human
cccagacacagaaaguuuuagggu

SEQ ID NO: 110137 - RNA, 23 nt, Human
ccccgcagucuaccaagcuccug

SEQ ID NO: 110138 - RNA, 27 nt, Human
ccgcagucuaccaagcuccugugcauu

SEQ ID NO: 110139 - RNA, 24 nt, Human
ccuaagagguuauaacagcagacu

SEQ ID NO: 110140 - RNA, 23 nt, Human
cugguaaaacauggcgaaaggag

SEQ ID NO: 110141 - RNA, 25 nt, Human
gagcacagcaaugcgugcaccacac

SEQ ID NO: 110142 - RNA, 20 nt, Human
gaggguacccagacacagaa

SEQ ID NO: 110143 - RNA, 23 nt, Human
gcagcagagugcggcaacacagg

SEQ ID NO: 110144 - RNA, 23 nt, Human
gcuggaaauuaaaggauacaacc

SEQ ID NO: 110145 - RNA, 19 nt, Human
guaaaacauggcgaaagga

SEQ ID NO: 110146 - RNA, 20 nt, Human
uaaaggauacaaccuaagag

SEQ ID NO: 110147 - RNA, 24 nt, Human
uaaaggauacaaccuaagagguua

SEQ ID NO: 110148 - RNA, 24 nt, Human
ucaagguaggaauuauaggccuac

SEQ ID NO: 110149 - RNA, 21 nt, Human
ucaucaaguuaauaaagguca

SEQ ID NO: 110150 - RNA, 20 nt, Human
ugcggcaacacaggcccuga

SEQ ID NO: 110151 - RNA, 21 nt, Human
uggagcacagcaaugcgugca

SEQ ID NO: 110152 - RNA, 23 nt, Human
aaaaaaacuugugccccggaaaa

SEQ ID NO: 110153 - RNA, 20 nt, Human
aaaaauccauucccagcagc

SEQ ID NO: 110154 - RNA, 18 nt, Human
aaaacaaagcagcaaaga

SEQ ID NO: 110155 - RNA, 25 nt, Human
aaaagguacuaagguuucaaaacug

SEQ ID NO: 110156 - RNA, 18 nt, Human
aaacaaaaggaaaaacag

SEQ ID NO: 110157 - RNA, 19 nt, Human
aaacaaaaggaaaaacagg

SEQ ID NO: 110158 - RNA, 25 nt, Human
aaauaaaugaggcacaacucagaua

SEQ ID NO: 110159 - RNA, 22 nt, Human
aaauaacccugaaucauuucug

SEQ ID NO: 110160 - RNA, 25 nt, Human
aacagcaaagcagaggacagagaag

SEQ ID NO: 110161 - RNA, 26 nt, Human
aacuggcuuagcauuccccugaccuc

SEQ ID NO: 110162 - RNA, 21 nt, Human
aagcagcaaagaggcagcugg

SEQ ID NO: 110163 - RNA, 27 nt, Human
aaugacuucaagauggucgggaguuuc

SEQ ID NO: 110164 - RNA, 18 nt, Human
acaaagcagcaaagaggc

SEQ ID NO: 110165 - RNA, 20 nt, Human
acacauuuucuuuugagguc

SEQ ID NO: 110166 - RNA, 18 nt, Human
acacuacuguguuguaaa

SEQ ID NO: 110167 - RNA, 26 nt, Human
acagaacacuacuguguuguaaacaa

SEQ ID NO: 110168 - RNA, 19 nt, Human
acauuuguacuucuccuuu

SEQ ID NO: 110169 - RNA, 20 nt, Human
accaagucuacuggacuguc

SEQ ID NO: 110170 - RNA, 20 nt, Human
accuaaaauaaagcagugca

SEQ ID NO: 110171 - RNA, 20 nt, Human
acucaauacugcaucucaug

SEQ ID NO: 110172 - RNA, 20 nt, Human
agaagucuuaagaacuggcu

SEQ ID NO: 110173 - RNA, 18 nt, Human
agacauuuguacuucucc

SEQ ID NO: 110174 - RNA, 22 nt, Human
agcaaugguuaauucuaagcag

SEQ ID NO: 110175 - RNA, 19 nt, Human
agccaccuaaaauaaagca

SEQ ID NO: 110176 - RNA, 20 nt, Human
aggaaaacaaagcagcaaag

SEQ ID NO: 110177 - RNA, 23 nt, Human
aggaaaagaugagcugcgaagaa

SEQ ID NO: 110178 - RNA, 24 nt, Human
aggcacagaaccacuaaaaguuac

SEQ ID NO: 110179 - RNA, 21 nt, Human
agguacuaagguuucaaaacu

SEQ ID NO: 110180 - RNA, 21 nt, Human
agguguuucuauuugguaucu

SEQ ID NO: 110181 - RNA, 20 nt, Human
auaaaaucuguaaaauguuu

SEQ ID NO: 110182 - RNA, 26 nt, Human
auagauuugggauuuuaacuaacagc

SEQ ID NO: 110183 - RNA, 19 nt, Human
aucacagccaaaguaugaa

SEQ ID NO: 110184 - RNA, 22 nt, Human
augaaaugagggauauuucuga

SEQ ID NO: 110185 - RNA, 20 nt, Human
augacacugacacccacaug

SEQ ID NO: 110186 - RNA, 21 nt, Human
auucuuuuuccaucaaaaaau

SEQ ID NO: 110187 - RNA, 19 nt, Human
caaaucccaaaaguuaaaa

SEQ ID NO: 110188 - RNA, 21 nt, Human
caauaaauaaaugaggcacaa

SEQ ID NO: 110189 - RNA, 21 nt, Human
cagaauucuuugagcucaaaa

SEQ ID NO: 110190 - RNA, 21 nt, Human
caggaaacuauagguucaagg

SEQ ID NO: 110191 - RNA, 20 nt, Human
caggguggggggcgggauag

SEQ ID NO: 110192 - RNA, 20 nt, Human
cauagccaaaucccuacccc

SEQ ID NO: 110193 - RNA, 23 nt, Human
cauagccaaaucccuaccccuuc

SEQ ID NO: 110194 - RNA, 23 nt, Human
cauggcagugguauguccucugu

SEQ ID NO: 110195 - RNA, 19 nt, Human
ccacaugcuguuaaaaagg

SEQ ID NO: 110196 - RNA, 21 nt, Human
ccaguccaagagacugauagc

SEQ ID NO: 110197 - RNA, 24 nt, Human
cccacacaacauucugaaaguugg

SEQ ID NO: 110198 - RNA, 21 nt, Human
cccacaugcuguuaaaaaggu

SEQ ID NO: 110199 - RNA, 23 nt, Human
ccccugaccucuuuaccuagcaa

SEQ ID NO: 110200 - RNA, 21 nt, Human
ccuaugaucaccuccugcuuu

SEQ ID NO: 110201 - RNA, 19 nt, Human
ccucuccucccuuuccuca

SEQ ID NO: 110202 - RNA, 24 nt, Human
cggaaaagugaacagaacacuacu

SEQ ID NO: 110203 - RNA, 20 nt, Human
cuacuggacugucuucaugg

SEQ ID NO: 110204 - RNA, 18 nt, Human
cuagaacacucaauacug

SEQ ID NO: 110205 - RNA, 23 nt, Human
cucaauacugcaucucaugaaac

SEQ ID NO: 110206 - RNA, 22 nt, Human
cucuuccacuacuacgcuucag

SEQ ID NO: 110207 - RNA, 21 nt, Human
cugccaacuaauuccaggaac

SEQ ID NO: 110208 - RNA, 28 nt, Human
cuggaagguguuucuauuucccaauugg

SEQ ID NO: 110209 - RNA, 19 nt, Human
gaaauaauugaaggggcug

SEQ ID NO: 110210 - RNA, 19 nt, Human
gaauggcauaaggucaaga

SEQ ID NO: 110211 - RNA, 22 nt, Human
gagaaucaggaggaaaacaaag

SEQ ID NO: 110212 - RNA, 21 nt, Human
gaggcacagaaccacuaaaag

SEQ ID NO: 110213 - RNA, 21 nt, Human
gccauauuccacaacaucccc

SEQ ID NO: 110214 - RNA, 20 nt, Human
ggagagggguugggggaggg

SEQ ID NO: 110215 - RNA, 21 nt, Human
ggagagggguugggggagggg

SEQ ID NO: 110216 - RNA, 18 nt, Human
gggagagggguuggggga

SEQ ID NO: 110217 - RNA, 19 nt, Human
ggguugggggagggggucg

SEQ ID NO: 110218 - RNA, 18 nt, Human
gguugggggagggggucg

SEQ ID NO: 110219 - RNA, 25 nt, Human
guaaauucuuaaaugacuaaagaaa

SEQ ID NO: 110220 - RNA, 18 nt, Human
guacucacaguucaccau

SEQ ID NO: 110221 - RNA, 26 nt, Human
guagaauuuucugcagaaagacaaag

SEQ ID NO: 110222 - RNA, 22 nt, Human
guccucuccucccuuuccucag

SEQ ID NO: 110223 - RNA, 20 nt, Human
gugcucacaccuguaaggaa

SEQ ID NO: 110224 - RNA, 22 nt, Human
uaaauccguaucacuagguauu

SEQ ID NO: 110225 - RNA, 21 nt, Human
uaacagcaaagcagaggacag

SEQ ID NO: 110226 - RNA, 23 nt, Human
uaacagcaaagcagaggacagag

SEQ ID NO: 110227 - RNA, 21 nt, Human
uacacuuguccucuccucccu

SEQ ID NO: 110228 - RNA, 23 nt, Human
uacugauugauaucuagucacac

SEQ ID NO: 110229 - RNA, 23 nt, Human
uagaaaugaagaacagacacugc

SEQ ID NO: 110230 - RNA, 21 nt, Human
uagaacacucaauacugcauc

SEQ ID NO: 110231 - RNA, 23 nt, Human
uagaacacucaauacugcaucuc

SEQ ID NO: 110232 - RNA, 19 nt, Human
uagcuagaagagcuccuug

SEQ ID NO: 110233 - RNA, 21 nt, Human
uaggacaaugugaguaaacag

SEQ ID NO: 110234 - RNA, 22 nt, Human
uauagaaaugaagaacagacac

SEQ ID NO: 110235 - RNA, 22 nt, Human
uauauggaauggcauaagguca

SEQ ID NO: 110236 - RNA, 18 nt, Human
uauccaggcaccuaaaac

SEQ ID NO: 110237 - RNA, 21 nt, Human
uaugaacaaaaaaacuugugc

SEQ ID NO: 110238 - RNA, 22 nt, Human
ucagaauucuuugagcucaaaa

SEQ ID NO: 110239 - RNA, 22 nt, Human
ucaggaaaggugcucacaccug

SEQ ID NO: 110240 - RNA, 21 nt, Human
ucauggggcaggguggggggc

SEQ ID NO: 110241 - RNA, 24 nt, Human
ucauggggcaggguggggggcggg

SEQ ID NO: 110242 - RNA, 26 nt, Human
uccaagagacugauagcagucuucag

SEQ ID NO: 110243 - RNA, 23 nt, Human
uccucuguaacacuugauaagag

SEQ ID NO: 110244 - RNA, 20 nt, Human
ucugauucccuggaggucau

SEQ ID NO: 110245 - RNA, 19 nt, Human
ucuuuuucaacauuaaugu

SEQ ID NO: 110246 - RNA, 21 nt, Human
ugagacuugccaaguucuaaa

SEQ ID NO: 110247 - RNA, 23 nt, Human
ugcaaucaaaacucccagccacc

SEQ ID NO: 110248 - RNA, 18 nt, Human
ugccaaaggaaaucuuag

SEQ ID NO: 110249 - RNA, 21 nt, Human
ugccaacuaauuccaggaacu

SEQ ID NO: 110250 - RNA, 20 nt, Human
uggcuuagcauuccccugac

SEQ ID NO: 110251 - RNA, 18 nt, Human
uggggcaggguggggggc

SEQ ID NO: 110252 - RNA, 18 nt, Human
ugggggagggggucgcua

SEQ ID NO: 110253 - RNA, 21 nt, Human
ugguauguagaggacaggccu

SEQ ID NO: 110254 - RNA, 18 nt, Human
uguaaacaaaaggaaaaa

SEQ ID NO: 110255 - RNA, 22 nt, Human
uguacauaugcucagguacaua

SEQ ID NO: 110256 - RNA, 24 nt, Human
uguagugaaggcauagccaaaucc

SEQ ID NO: 110257 - RNA, 18 nt, Human
ugucaagagaggaagcac

SEQ ID NO: 110258 - RNA, 20 nt, Human
ugucagaauuucaggaaagg

SEQ ID NO: 110259 - RNA, 24 nt, Human
uguguacauaugcucagguacaua

SEQ ID NO: 110260 - RNA, 23 nt, Human
uuaauuacugauugauaucuagu

SEQ ID NO: 110261 - RNA, 24 nt, Human
uuacugauugauaucuagucacac

SEQ ID NO: 110262 - RNA, 21 nt, Human
uuagugccuuucugauucccu

SEQ ID NO: 110263 - RNA, 18 nt, Human
uucagacugacagaaaag

SEQ ID NO: 110264 - RNA, 21 nt, Human
uucauggggcagggugggggg

SEQ ID NO: 110265 - RNA, 25 nt, Human
uucauuauucagaaccuuuucuguu

SEQ ID NO: 110266 - RNA, 21 nt, Human
uuccaacuaugaacuauaaca

SEQ ID NO: 110267 - RNA, 21 nt, Human
uuccccucaaauaacccugaa

SEQ ID NO: 110268 - RNA, 21 nt, Human
uucucugccaacuaauuccag

SEQ ID NO: 110269 - RNA, 19 nt, Human
uucuucaggaaacuauagg

SEQ ID NO: 110270 - RNA, 21 nt, Human
uugaaugcucaaguuucaugg

SEQ ID NO: 110271 - RNA, 24 nt, Human
uuggcuauagaaaugaagaacaga

SEQ ID NO: 110272 - RNA, 24 nt, Human
uugggauuuuaacuaacagcuuug

SEQ ID NO: 110273 - RNA, 19 nt, Human
uuuguacuccuuggaucuu

SEQ ID NO: 110274 - RNA, 18 nt, Human
aagccucuggccccucca

SEQ ID NO: 110275 - RNA, 24 nt, Human
agaggccccuccaagcccagcaac

SEQ ID NO: 110276 - RNA, 19 nt, Human
agcagggcccagcuggggg

SEQ ID NO: 110277 - RNA, 25 nt, Human
agccucuggccccuccacaugauuc

SEQ ID NO: 110278 - RNA, 18 nt, Human
aggccccuccaagcccag

SEQ ID NO: 110279 - RNA, 18 nt, Human
caagaggccccuccaagc

SEQ ID NO: 110280 - RNA, 27 nt, Human
cagcaacaaggggugagcagggcccag

SEQ ID NO: 110281 - RNA, 22 nt, Human
ccaagcccagcaacaaggggug

SEQ ID NO: 110282 - RNA, 19 nt, Human
ccccuccacaugauucugg

SEQ ID NO: 110283 - RNA, 27 nt, Human
ccccugcaaauuaaaaguuccucaaga

SEQ ID NO: 110284 - RNA, 27 nt, Human
cgggcaccccugcaaauuaaaaguucc

SEQ ID NO: 110285 - RNA, 22 nt, Human
gcaagccucuggccccuccaca

SEQ ID NO: 110286 - RNA, 21 nt, Human
gggugagcagggcccagcugg

SEQ ID NO: 110287 - RNA, 21 nt, Human
uaaaaguuccucaagaggccc

SEQ ID NO: 110288 - RNA, 20 nt, Human
uaaaaucacagugucucagc

SEQ ID NO: 110289 - RNA, 25 nt, Human
uccaagcccagcaacaaggggugag

SEQ ID NO: 110290 - RNA, 22 nt, Human
uggcaagccucuggccccucca

SEQ ID NO: 110291 - RNA, 24 nt, Human
ugucucagcuggaaugccccgucc

SEQ ID NO: 110292 - RNA, 23 nt, Human
agaaaacagauaugcuggucaag

SEQ ID NO: 110293 - RNA, 19 nt, Human
aggaggccuuuaauuguga

SEQ ID NO: 110294 - RNA, 20 nt, Human
cagcccgggagaugcgcugg

SEQ ID NO: 110295 - RNA, 18 nt, Human
ccuacagcauucugggcu

SEQ ID NO: 110296 - RNA, 18 nt, Human
gagcgcaaucagaaaaca

SEQ ID NO: 110297 - RNA, 21 nt, Human
ggaggccuuuaauugugaaga

SEQ ID NO: 110298 - RNA, 24 nt, Human
gggcuaggugugggaguggguggg

SEQ ID NO: 110299 - RNA, 18 nt, Human
ggucaaggagguggccag

SEQ ID NO: 110300 - RNA, 19 nt, Human
gucaaggagguggccagcc

SEQ ID NO: 110301 - RNA, 23 nt, Human
gugagugggacagcugguguggg

SEQ ID NO: 110302 - RNA, 23 nt, Human
uaggugugggagugggugggcag

SEQ ID NO: 110303 - RNA, 18 nt, Human
ucugggcuagguguggga

SEQ ID NO: 110304 - RNA, 19 nt, Human
ugagugggacagcuggugu

SEQ ID NO: 110305 - RNA, 23 nt, Human
ugagugggacagcuggugugggu

SEQ ID NO: 110306 - RNA, 22 nt, Human
uggagcaggggagagaugcccc

SEQ ID NO: 110307 - RNA, 22 nt, Human
aaccaaccgacccaccgacacc

SEQ ID NO: 110308 - RNA, 22 nt, Human
aaccaaccgacccaccgacacc

SEQ ID NO: 110309 - RNA, 21 nt, Human
accgacccaccgacaccacgc

SEQ ID NO: 110310 - RNA, 18 nt, Human
acucuaaagacaaaaagg

SEQ ID NO: 110311 - RNA, 23 nt, Human
agacaaaaagguuugguccaaaa

SEQ ID NO: 110312 - RNA, 21 nt, Human
aggaaggaaacaugcaaucac

SEQ ID NO: 110313 - RNA, 22 nt, Human
aggaaggaaacaugcaaucaca

SEQ ID NO: 110314 - RNA, 23 nt, Human
aggaaggaaacaugcaaucacaa

SEQ ID NO: 110315 - RNA, 24 nt, Human
augacugugaagagcuucacugag

SEQ ID NO: 110316 - RNA, 19 nt, Human
caaccgacccaccgacacc

SEQ ID NO: 110317 - RNA, 19 nt, Human
caaccgacccaccgacacc

SEQ ID NO: 110318 - RNA, 24 nt, Human
cacaguugaaggaaggaaacaugc

SEQ ID NO: 110319 - RNA, 19 nt, Human
caccgacaccacagcggug

SEQ ID NO: 110320 - RNA, 21 nt, Human
caccgacaccacagcgguggc

SEQ ID NO: 110321 - RNA, 25 nt, Human
cacggacaccaacggugagacaaaa

SEQ ID NO: 110322 - RNA, 25 nt, Human
cacggacaccaacggugagacaaaa

SEQ ID NO: 110323 - RNA, 25 nt, Human
cacugaguaggauuaagauauugca

SEQ ID NO: 110324 - RNA, 21 nt, Human
cagggagaacacaguugaagg

SEQ ID NO: 110325 - RNA, 25 nt, Human
ccaaccgacccaccgacaccacagc

SEQ ID NO: 110326 - RNA, 19 nt, Human
ccacgcccggcagccaccg

SEQ ID NO: 110327 - RNA, 18 nt, Human
cccuuccucuuccuccuc

SEQ ID NO: 110328 - RNA, 20 nt, Human
ccuccccuuccucuuccucc

SEQ ID NO: 110329 - RNA, 18 nt, Human
ccuccucucccuccucuc

SEQ ID NO: 110330 - RNA, 18 nt, Human
ccucucugaaugccaggg

SEQ ID NO: 110331 - RNA, 21 nt, Human
cgacaccacgcccggcagcca

SEQ ID NO: 110332 - RNA, 21 nt, Human
cgacccaccgacaccacgccc

SEQ ID NO: 110333 - RNA, 27 nt, Human
cuccucucccuccucucugaaugccag

SEQ ID NO: 110334 - RNA, 25 nt, Human
cucuuccuccucucccuccucucug

SEQ ID NO: 110335 - RNA, 23 nt, Human
gacaccaacggugagacaaaaac

SEQ ID NO: 110336 - RNA, 23 nt, Human
gacaccaacggugagacaaaaac

SEQ ID NO: 110337 - RNA, 20 nt, Human
ggaagcuucccuccccuucc

SEQ ID NO: 110338 - RNA, 21 nt, Human
ucagaauaaugcacagaagca

SEQ ID NO: 110339 - RNA, 24 nt, Human
ucagaauaaugcacagaagcacag

SEQ ID NO: 110340 - RNA, 21 nt, Human
uccccuuccucuuccuccucu

SEQ ID NO: 110341 - RNA, 19 nt, Human
ucccuccccuuccucuucc

SEQ ID NO: 110342 - RNA, 26 nt, Human
uccucucccuccucucugaaugccag

SEQ ID NO: 110343 - RNA, 23 nt, Human
ugacugugaagagcuucacugag

SEQ ID NO: 110344 - RNA, 19 nt, Human
ugagacaaaaaccaaccga

SEQ ID NO: 110345 - RNA, 19 nt, Human
ugagacaaaaaccaaccga

SEQ ID NO: 110346 - RNA, 25 nt, Human
ugagacaaaaaccaaccgacccacc

SEQ ID NO: 110347 - RNA, 25 nt, Human
ugagacaaaaaccaaccgacccacc

SEQ ID NO: 110348 - RNA, 22 nt, Human
ugggaagcuucccuccccuucc

SEQ ID NO: 110349 - RNA, 20 nt, Human
uucccuccccuuccucuucc

SEQ ID NO: 110350 - RNA, 22 nt, Human
uuccuccucucccuccucuccc

SEQ ID NO: 110351 - RNA, 21 nt, Human
aagaaaaaaaauacaucagga

SEQ ID NO: 110352 - RNA, 18 nt, Human
aagaaaaaaaauacaucg

SEQ ID NO: 110353 - RNA, 18 nt, Human
aagcagcugcuccuccug

SEQ ID NO: 110354 - RNA, 20 nt, Human
agaaaaaaaauacaucagga

SEQ ID NO: 110355 - RNA, 23 nt, Human
agaaaaaaaauacaucaggaggg

SEQ ID NO: 110356 - RNA, 20 nt, Human
agccggcgucggcggggacg

SEQ ID NO: 110357 - RNA, 21 nt, Human
aggcgugauggggugagggcc

SEQ ID NO: 110358 - RNA, 20 nt, Human
agggagcgaggcgugauggg

SEQ ID NO: 110359 - RNA, 19 nt, Human
aucaggagggacagucaca

SEQ ID NO: 110360 - RNA, 21 nt, Human
caaagcagcugcuccuccugu

SEQ ID NO: 110361 - RNA, 23 nt, Human
caaagcagcugcuccuccugugc

SEQ ID NO: 110362 - RNA, 22 nt, Human
caagcccguccccgccgacgcc

SEQ ID NO: 110363 - RNA, 18 nt, Human
cacccgagccgcggggag

SEQ ID NO: 110364 - RNA, 22 nt, Human
caggagggagcgaggcgugaug

SEQ ID NO: 110365 - RNA, 21 nt, Human
caggcccagcccaugcucugu

SEQ ID NO: 110366 - RNA, 26 nt, Human
ccagcccaugcucuguggccaugcac

SEQ ID NO: 110367 - RNA, 27 nt, Human
cccagcccaugcucuguggccaugcac

SEQ ID NO: 110368 - RNA, 18 nt, Human
ccccgaccaaagcagcug

SEQ ID NO: 110369 - RNA, 22 nt, Human
cccgcgcugcguccggcggccg

SEQ ID NO: 110370 - RNA, 22 nt, Human
cccgcgcugcguccggcggccg

SEQ ID NO: 110371 - RNA, 24 nt, Human
cccgcgcugcguccggcggccgcg

SEQ ID NO: 110372 - RNA, 24 nt, Human
cccgcgcugcguccggcggccgcg

SEQ ID NO: 110373 - RNA, 20 nt, Human
ccgcgccugccccgcgcugc

SEQ ID NO: 110374 - RNA, 20 nt, Human
ccgcgccugccccgcgcugc

SEQ ID NO: 110375 - RNA, 22 nt, Human
ccucccagcgccuggagauggg

SEQ ID NO: 110376 - RNA, 18 nt, Human
cgaccaaagcagcugcuc

SEQ ID NO: 110377 - RNA, 19 nt, Human
cggcggccgcgacgcuguc

SEQ ID NO: 110378 - RNA, 19 nt, Human
cggcggccgcgacgcuguc

SEQ ID NO: 110379 - RNA, 18 nt, Human
cucggcucugcccgcgcc

SEQ ID NO: 110380 - RNA, 18 nt, Human
cucggcucugcccgcgcc

SEQ ID NO: 110381 - RNA, 22 nt, Human
gaccaaagcagcugcuccuccu

SEQ ID NO: 110382 - RNA, 19 nt, Human
gagccgcggggagccggcg

SEQ ID NO: 110383 - RNA, 22 nt, Human
gagccgggcccgguggcggaga

SEQ ID NO: 110384 - RNA, 22 nt, Human
gagucaacaacacacccuuuaa

SEQ ID NO: 110385 - RNA, 19 nt, Human
gaguggaauaggcuguggg

SEQ ID NO: 110386 - RNA, 21 nt, Human
gcagcugcuccuccugugccc

SEQ ID NO: 110387 - RNA, 24 nt, Human
ggaagugcgguccgcgccaagccc

SEQ ID NO: 110388 - RNA, 18 nt, Human
ggaggaguggaauaggcu

SEQ ID NO: 110389 - RNA, 24 nt, Human
ggcccagcccaugcucuguggcca

SEQ ID NO: 110390 - RNA, 21 nt, Human
gguagcagcugcugcgagucu

SEQ ID NO: 110391 - RNA, 21 nt, Human
guccgcgccaagcccgucccc

SEQ ID NO: 110392 - RNA, 22 nt, Human
uaagccaagaaaaaaaauacau

SEQ ID NO: 110393 - RNA, 23 nt, Human
uaagccaagaaaaaaaauacauc

SEQ ID NO: 110394 - RNA, 18 nt, Human
ucaggagggacagucaca

SEQ ID NO: 110395 - RNA, 20 nt, Human
ucaggagggacagucacaau

SEQ ID NO: 110396 - RNA, 22 nt, Human
ucaggagggacagucacaauug

SEQ ID NO: 110397 - RNA, 18 nt, Human
ugagaggaggcgugaggg

SEQ ID NO: 110398 - RNA, 24 nt, Human
ugagaggaggcgugaggggcugga

SEQ ID NO: 110399 - RNA, 20 nt, Human
ugaggggcuggaccagaggg

SEQ ID NO: 110400 - RNA, 21 nt, Human
ugaggggcuggaccagagggc

SEQ ID NO: 110401 - RNA, 23 nt, Human
ugaggggcuggaccagagggcca

SEQ ID NO: 110402 - RNA, 22 nt, Human
ugaguagacugagaggaggcgu

SEQ ID NO: 110403 - RNA, 18 nt, Human
ugcccaggcccagcccau

SEQ ID NO: 110404 - RNA, 21 nt, Human
ugcccaggcccagcccaugcu

SEQ ID NO: 110405 - RNA, 24 nt, Human
ugcccaggcccagcccaugcucug

SEQ ID NO: 110406 - RNA, 23 nt, Human
ugcgcucggcucugcccgcgccu

SEQ ID NO: 110407 - RNA, 23 nt, Human
ugcgcucggcucugcccgcgccu

SEQ ID NO: 110408 - RNA, 21 nt, Human
uggaauaggcuguggguagca

SEQ ID NO: 110409 - RNA, 23 nt, Human
uggguagcagcugcugcgagucu

SEQ ID NO: 110410 - RNA, 24 nt, Human
uguggccaugcaccuagcaggcac

SEQ ID NO: 110411 - RNA, 23 nt, Human
aaaaagcccaagugaauaaaaca

SEQ ID NO: 110412 - RNA, 22 nt, Human
aaacacacacaagauuggaauc

SEQ ID NO: 110413 - RNA, 20 nt, Human
aaacugaagaacagcaauau

SEQ ID NO: 110414 - RNA, 19 nt, Human
aaagagcucgggucggggg

SEQ ID NO: 110415 - RNA, 19 nt, Human
aacacguugccuguuuucc

SEQ ID NO: 110416 - RNA, 19 nt, Human
aacauuuuucaauaaucug

SEQ ID NO: 110417 - RNA, 22 nt, Human
acaaacaaaacugaagaacagc

SEQ ID NO: 110418 - RNA, 18 nt, Human
acugaagaacagcaauau

SEQ ID NO: 110419 - RNA, 20 nt, Human
agagggggaagaaaaaaagc

SEQ ID NO: 110420 - RNA, 24 nt, Human
agauuggaaucauggugcucuuug

SEQ ID NO: 110421 - RNA, 21 nt, Human
aggaaacuggcaggcagacga

SEQ ID NO: 110422 - RNA, 19 nt, Human
agggagaggaggagaaggg

SEQ ID NO: 110423 - RNA, 20 nt, Human
aguaauuucaaauuccacaa

SEQ ID NO: 110424 - RNA, 22 nt, Human
caaaaagaaguccuucaugaaa

SEQ ID NO: 110425 - RNA, 22 nt, Human
caaaacugaagaacagcaauau

SEQ ID NO: 110426 - RNA, 28 nt, Human
caagggagaggaggagaaggggaggggg

SEQ ID NO: 110427 - RNA, 22 nt, Human
cacaaacaaaacugaagaacag

SEQ ID NO: 110428 - RNA, 19 nt, Human
cacaacauaagggcaccug

SEQ ID NO: 110429 - RNA, 20 nt, Human
caggaaacuggcaggcagac

SEQ ID NO: 110430 - RNA, 22 nt, Human
cauugaaacuauuccccuucga

SEQ ID NO: 110431 - RNA, 28 nt, Human
ccacagaaaaagcacaggauacagcaca

SEQ ID NO: 110432 - RNA, 21 nt, Human
cccuucgaaaauaaauucuaa

SEQ ID NO: 110433 - RNA, 19 nt, Human
ccugcauagguuagagggc

SEQ ID NO: 110434 - RNA, 22 nt, Human
ccugucacuggggcugcggggc

SEQ ID NO: 110435 - RNA, 23 nt, Human
ccuuuuacgcucauuuaaaaauc

SEQ ID NO: 110436 - RNA, 23 nt, Human
cggggcaguggcugcccgggcuc

SEQ ID NO: 110437 - RNA, 24 nt, Human
cuccaagggagaggaggagaaggg

SEQ ID NO: 110438 - RNA, 18 nt, Human
cuccuccugucacugggg

SEQ ID NO: 110439 - RNA, 25 nt, Human
cugaagaacagcaauauuuuguuug

SEQ ID NO: 110440 - RNA, 22 nt, Human
gaaggggaggggggaggcugga

SEQ ID NO: 110441 - RNA, 23 nt, Human
gagcaguucuuuaaagaaagagg

SEQ ID NO: 110442 - RNA, 20 nt, Human
gauugaauauugagcaguuc

SEQ ID NO: 110443 - RNA, 19 nt, Human
ggaagaaaaaaagcccaag

SEQ ID NO: 110444 - RNA, 18 nt, Human
ggagaaggggagggggga

SEQ ID NO: 110445 - RNA, 21 nt, Human
ggagaggaggagaaggggagg

SEQ ID NO: 110446 - RNA, 22 nt, Human
ggagaggaggagaaggggaggg

SEQ ID NO: 110447 - RNA, 24 nt, Human
ggagaggaggagaaggggaggggg

SEQ ID NO: 110448 - RNA, 24 nt, Human
ggcaguggcugcccgggcucucca

SEQ ID NO: 110449 - RNA, 20 nt, Human
gggagaggaggagaagggga

SEQ ID NO: 110450 - RNA, 19 nt, Human
gggaggggggaggcugggc

SEQ ID NO: 110451 - RNA, 21 nt, Human
gggaggggggaggcugggcuc

SEQ ID NO: 110452 - RNA, 18 nt, Human
ggggaggggggaggcugg

SEQ ID NO: 110453 - RNA, 24 nt, Human
ggggaggggggaggcugggcucag

SEQ ID NO: 110454 - RNA, 20 nt, Human
ggggcaguggcugcccgggc

SEQ ID NO: 110455 - RNA, 19 nt, Human
uaaaacaccacaauaucca

SEQ ID NO: 110456 - RNA, 22 nt, Human
uaaaacaccacaauauccaaca

SEQ ID NO: 110457 - RNA, 19 nt, Human
uaacauaggugauccaagu

SEQ ID NO: 110458 - RNA, 22 nt, Human
uagaaacaaaaagaaguccuuc

SEQ ID NO: 110459 - RNA, 22 nt, Human
uauaguuagaaacaaaaagaag

SEQ ID NO: 110460 - RNA, 21 nt, Human
uccacaaacaaaacugaagaa

SEQ ID NO: 110461 - RNA, 20 nt, Human
uccuccugucacuggggcug

SEQ ID NO: 110462 - RNA, 21 nt, Human
ucggggguuauggucuccucc

SEQ ID NO: 110463 - RNA, 20 nt, Human
ugagaaguggguaaagacga

SEQ ID NO: 110464 - RNA, 23 nt, Human
ugcauaauggggaaaccugcaua

SEQ ID NO: 110465 - RNA, 22 nt, Human
uuuaaacacuacagagugcaaa

SEQ ID NO: 110466 - RNA, 23 nt, Human
uuugaauaaaacagauuuaaaug

SEQ ID NO: 110467 - RNA, 20 nt, Human
aaaagaaacugacuguccag

SEQ ID NO: 110468 - RNA, 24 nt, Human
aaucaaacacgagaggggcaggcc

SEQ ID NO: 110469 - RNA, 22 nt, Human
accuugcucagguacucccuca

SEQ ID NO: 110470 - RNA, 19 nt, Human
acgagaggggcaggcucug

SEQ ID NO: 110471 - RNA, 22 nt, Human
agcagcaggucauugaugagca

SEQ ID NO: 110472 - RNA, 23 nt, Human
agcagcaggucauugaugagcag

SEQ ID NO: 110473 - RNA, 23 nt, Human
agcugaugcuucuccagcugcug

SEQ ID NO: 110474 - RNA, 25 nt, Human
aggcaucgauagaugcccuuaagcc

SEQ ID NO: 110475 - RNA, 18 nt, Human
agggggcagcuccagcca

SEQ ID NO: 110476 - RNA, 20 nt, Human
aggugugccugcucugcagc

SEQ ID NO: 110477 - RNA, 24 nt, Human
auagaggaacaccagcucagccca

SEQ ID NO: 110478 - RNA, 23 nt, Human
aucaaacacgagaggggcaggcc

SEQ ID NO: 110479 - RNA, 18 nt, Human
augagguccgguaccucc

SEQ ID NO: 110480 - RNA, 19 nt, Human
auugcguccccugugcugc

SEQ ID NO: 110481 - RNA, 18 nt, Human
caacuucugggccagcuc

SEQ ID NO: 110482 - RNA, 26 nt, Human
caagcaccaugucugggcgaagcagg

SEQ ID NO: 110483 - RNA, 22 nt, Human
caccaggggcagcugaccugcc

SEQ ID NO: 110484 - RNA, 19 nt, Human
cagacucuccaaggcaucc

SEQ ID NO: 110485 - RNA, 18 nt, Human
cagcaagaucagcuccuc

SEQ ID NO: 110486 - RNA, 19 nt, Human
cagccucuacccuggccuc

SEQ ID NO: 110487 - RNA, 18 nt, Human
cagcuccagccagucgga

SEQ ID NO: 110488 - RNA, 21 nt, Human
caggaaccacugcagcaacuu

SEQ ID NO: 110489 - RNA, 22 nt, Human
caggcucugucacaugcuccuc

SEQ ID NO: 110490 - RNA, 19 nt, Human
ccacugcagcaacuucugg

SEQ ID NO: 110491 - RNA, 28 nt, Human
ccacugcagcaacuucuggggggcccuc

SEQ ID NO: 110492 - RNA, 24 nt, Human
ccccaggcucugggauggcucaga

SEQ ID NO: 110493 - RNA, 21 nt, Human
cccucagcaccuuugggaugu

SEQ ID NO: 110494 - RNA, 20 nt, Human
ccucaaaguagccacgaucc

SEQ ID NO: 110495 - RNA, 22 nt, Human
ccuccaaacaagacguguucau

SEQ ID NO: 110496 - RNA, 23 nt, Human
ccuccaggaaccacugcagcaac

SEQ ID NO: 110497 - RNA, 26 nt, Human
ccuccuuccaggccucaguggggugg

SEQ ID NO: 110498 - RNA, 23 nt, Human
ccucuacccuggccuccccaggc

SEQ ID NO: 110499 - RNA, 21 nt, Human
ccuuccaggccucaguggggu

SEQ ID NO: 110500 - RNA, 20 nt, Human
ccuugcucagguacucccuc

SEQ ID NO: 110501 - RNA, 24 nt, Human
cgccgucagccucuacccuggccu

SEQ ID NO: 110502 - RNA, 19 nt, Human
cggcggcggcagcggcagg

SEQ ID NO: 110503 - RNA, 21 nt, Human
cuaaagcuggucuugcgccgu

SEQ ID NO: 110504 - RNA, 23 nt, Human
cucaagcaccaugucugggcgaa

SEQ ID NO: 110505 - RNA, 19 nt, Human
cuccagcaucuucuguggc

SEQ ID NO: 110506 - RNA, 24 nt, Human
cuccaggaaccacugcagcaacuu

SEQ ID NO: 110507 - RNA, 25 nt, Human
cuccaggaaccacugcagcaacuuc

SEQ ID NO: 110508 - RNA, 19 nt, Human
cuccaggccagcucaagca

SEQ ID NO: 110509 - RNA, 18 nt, Human
cucuacccuggccucccc

SEQ ID NO: 110510 - RNA, 21 nt, Human
cucugcagcaugcugcauggc

SEQ ID NO: 110511 - RNA, 22 nt, Human
cugcagcaacuucugggccagc

SEQ ID NO: 110512 - RNA, 20 nt, Human
cuugccuuccuccaggaacc

SEQ ID NO: 110513 - RNA, 21 nt, Human
cuugccuuccuccaggaacca

SEQ ID NO: 110514 - RNA, 19 nt, Human
gaccucggcggcggcggcg

SEQ ID NO: 110515 - RNA, 18 nt, Human
gagcacagcauugucaua

SEQ ID NO: 110516 - RNA, 21 nt, Human
gaggaacaccagcucagccca

SEQ ID NO: 110517 - RNA, 19 nt, Human
gcagcaggucauugaugag

SEQ ID NO: 110518 - RNA, 19 nt, Human
gcauggccaaguccacgag

SEQ ID NO: 110519 - RNA, 29 nt, Human
gcgggaccucggcggcggcggcggcagcg

SEQ ID NO: 110520 - RNA, 18 nt, Human
ggagggggcagcuccagc

SEQ ID NO: 110521 - RNA, 25 nt, Human
ggcagggcuuagugcaaucagcugg

SEQ ID NO: 110522 - RNA, 19 nt, Human
ggccuggagggggcagcuc

SEQ ID NO: 110523 - RNA, 19 nt, Human
ggcucagagguugccguca

SEQ ID NO: 110524 - RNA, 22 nt, Human
gggaccucggcggcggcggcgg

SEQ ID NO: 110525 - RNA, 19 nt, Human
gggugaaagcaccagcagc

SEQ ID NO: 110526 - RNA, 26 nt, Human
ggucauagcaggugaagagacaagcu

SEQ ID NO: 110527 - RNA, 24 nt, Human
guccaggugugguccagccggggu

SEQ ID NO: 110528 - RNA, 18 nt, Human
guuguuguggcucuggac

SEQ ID NO: 110529 - RNA, 24 nt, Human
uaaugauguccuugaacugacccu

SEQ ID NO: 110530 - RNA, 21 nt, Human
uacccuggccuccccaggcuc

SEQ ID NO: 110531 - RNA, 24 nt, Human
uagaggaacaccagcucagcccac

SEQ ID NO: 110532 - RNA, 20 nt, Human
uauugcccuuguacagauaa

SEQ ID NO: 110533 - RNA, 24 nt, Human
ucacaugcuccucuugcuugcgca

SEQ ID NO: 110534 - RNA, 19 nt, Human
ucaccaggggcagcugacc

SEQ ID NO: 110535 - RNA, 21 nt, Human
ucagagguugccgucauuggg

SEQ ID NO: 110536 - RNA, 23 nt, Human
ucagcugaugcuucuccagcugc

SEQ ID NO: 110537 - RNA, 20 nt, Human
ucauacuccucguacuuguc

SEQ ID NO: 110538 - RNA, 19 nt, Human
uccaggccagcucaagcac

SEQ ID NO: 110539 - RNA, 23 nt, Human
ucccugccucccauugcgucccc

SEQ ID NO: 110540 - RNA, 23 nt, Human
uccuccucugucagcaggugguu

SEQ ID NO: 110541 - RNA, 24 nt, Human
uccuuggagaaguuaguaacucug

SEQ ID NO: 110542 - RNA, 20 nt, Human
ugaaaagaaacugacugucc

SEQ ID NO: 110543 - RNA, 21 nt, Human
ugaaagcaccagcagcagguc

SEQ ID NO: 110544 - RNA, 23 nt, Human
ugacacgggaccagaaaagcucc

SEQ ID NO: 110545 - RNA, 20 nt, Human
ugacuguccagguguggucc

SEQ ID NO: 110546 - RNA, 19 nt, Human
ugacuguccaggugugguu

SEQ ID NO: 110547 - RNA, 25 nt, Human
ugcaccugaacuccaucagcugaug

SEQ ID NO: 110548 - RNA, 21 nt, Human
ugcagcaacuucugggccagc

SEQ ID NO: 110549 - RNA, 18 nt, Human
ugcagguagggugggugg

SEQ ID NO: 110550 - RNA, 23 nt, Human
ugccaagaggcugagaguccuuu

SEQ ID NO: 110551 - RNA, 19 nt, Human
ugcuggagugacaugcucc

SEQ ID NO: 110552 - RNA, 19 nt, Human
uggagggggcagcuccagc

SEQ ID NO: 110553 - RNA, 18 nt, Human
uggaugaaguagggcaug

SEQ ID NO: 110554 - RNA, 21 nt, Human
uggcaaccuugguaaugaugu

SEQ ID NO: 110555 - RNA, 23 nt, Human
uggcaaccuugguaaugaugucc

SEQ ID NO: 110556 - RNA, 23 nt, Human
uggcaggggcugggcccacggca

SEQ ID NO: 110557 - RNA, 23 nt, Human
uggccuccccaggcucugggaug

SEQ ID NO: 110558 - RNA, 19 nt, Human
uggccuggagggggcagcu

SEQ ID NO: 110559 - RNA, 19 nt, Human
uggguggugacaacgccca

SEQ ID NO: 110560 - RNA, 21 nt, Human
uguacagauaggccgcaaugc

SEQ ID NO: 110561 - RNA, 19 nt, Human
ugucagcaggugguugagu

SEQ ID NO: 110562 - RNA, 19 nt, Human
ugucauaggcaucgauaga

SEQ ID NO: 110563 - RNA, 21 nt, Human
ugucauaggcaucgauagaug

SEQ ID NO: 110564 - RNA, 23 nt, Human
uuagugcaaucagcugggucuca

SEQ ID NO: 110565 - RNA, 24 nt, Human
uucagcaaaaauaaauauugucca

SEQ ID NO: 110566 - RNA, 23 nt, Human
uugcguccccugugcugcuggag

SEQ ID NO: 110567 - RNA, 19 nt, Human
uugcucagguacucccuca

SEQ ID NO: 110568 - RNA, 25 nt, Human
uuggagaaguuaguaacucugcagg

SEQ ID NO: 110569 - RNA, 23 nt, Human
agcucaucuuggggggagcugga

SEQ ID NO: 110570 - RNA, 20 nt, Human
cacgccucggucagcggcgg

SEQ ID NO: 110571 - RNA, 20 nt, Human
cccccguaaggugcaaaagc

SEQ ID NO: 110572 - RNA, 18 nt, Human
cgccucggucagcggcgg

SEQ ID NO: 110573 - RNA, 20 nt, Human
cuggggccugguuacuuggu

SEQ ID NO: 110574 - RNA, 24 nt, Human
gaauuccuuuuuuuuuuuuuuuuu

SEQ ID NO: 110575 - RNA, 18 nt, Human
gcagagcucucucugggg

SEQ ID NO: 110576 - RNA, 18 nt, Human
gcucaucuuggggggagc

SEQ ID NO: 110577 - RNA, 18 nt, Human
ggccuggaggcuggggcc

SEQ ID NO: 110578 - RNA, 19 nt, Human
ggccugguuacuuggugac

SEQ ID NO: 110579 - RNA, 21 nt, Human
ggcugcagcucaucuuggggg

SEQ ID NO: 110580 - RNA, 21 nt, Human
gggagcuggacucaagaugcc

SEQ ID NO: 110581 - RNA, 23 nt, Human
ggggggcugcagcucaucuuggg

SEQ ID NO: 110582 - RNA, 19 nt, Human
guucuucccaugagcagca

SEQ ID NO: 110583 - RNA, 18 nt, Human
uacuuggugacgugcaga

SEQ ID NO: 110584 - RNA, 18 nt, Human
ucccaugagcagcagagu

SEQ ID NO: 110585 - RNA, 18 nt, Human
uccuuuuuuuuuuuuuuu

SEQ ID NO: 110586 - RNA, 18 nt, Human
uccuuuuuuuuuuuuuuu

SEQ ID NO: 110587 - RNA, 23 nt, Human
ucucuggggggcugcagcucauc

SEQ ID NO: 110588 - RNA, 22 nt, Human
ucuguucuucccaugagcagca

SEQ ID NO: 110589 - RNA, 19 nt, Human
ugcagcucaucuugggggg

SEQ ID NO: 110590 - RNA, 18 nt, Human
ugggggccuggaggcugg

SEQ ID NO: 110591 - RNA, 23 nt, Human
uucuggagucuuugcacgccucg

SEQ ID NO: 110592 - RNA, 24 nt, Human
uuggugacgugcagagcucucucu

SEQ ID NO: 110593 - RNA, 24 nt, Human
uuuuuuuuuuuuuuuuuuuuucag

SEQ ID NO: 110594 - RNA, 20 nt, Human
ccagagaggcugccugagca

SEQ ID NO: 110595 - RNA, 18 nt, Human
aaaaaucuucccgccucu

SEQ ID NO: 110596 - RNA, 18 nt, Human
aaaaucuucccgccucuc

SEQ ID NO: 110597 - RNA, 26 nt, Human
aaacgacucacaaacacaggacuccg

SEQ ID NO: 110598 - RNA, 22 nt, Human
acacagcgagacucuguuaaaa

SEQ ID NO: 110599 - RNA, 23 nt, Human
accucccaacuacuugggccaag

SEQ ID NO: 110600 - RNA, 18 nt, Human
acugcacuccagccuggg

SEQ ID NO: 110601 - RNA, 21 nt, Human
acugcacuccagccuggguga

SEQ ID NO: 110602 - RNA, 24 nt, Human
acugcacuccagccugggugacag

SEQ ID NO: 110603 - RNA, 24 nt, Human
acugcaugcgugacuagaccagca

SEQ ID NO: 110604 - RNA, 20 nt, Human
agagcaccguccaaaauguc

SEQ ID NO: 110605 - RNA, 21 nt, Human
agauggugguugcagugagcc

SEQ ID NO: 110606 - RNA, 25 nt, Human
agcaguaaaaaccaaggcaucccca

SEQ ID NO: 110607 - RNA, 19 nt, Human
agccaacaccucccaacua

SEQ ID NO: 110608 - RNA, 23 nt, Human
agccaacaccucccaacuacuug

SEQ ID NO: 110609 - RNA, 24 nt, Human
agccuuggcaacacagcgagacuc

SEQ ID NO: 110610 - RNA, 22 nt, Human
auaguaguccuagcuccucagc

SEQ ID NO: 110611 - RNA, 24 nt, Human
aucgcagcacugcacuccagccug

SEQ ID NO: 110612 - RNA, 19 nt, Human
caacacagcgagacucugu

SEQ ID NO: 110613 - RNA, 25 nt, Human
caacacugcaugcgugacuagacca

SEQ ID NO: 110614 - RNA, 22 nt, Human
caccauggaguaggcgaugggg

SEQ ID NO: 110615 - RNA, 19 nt, Human
caccguccaaaaugucagc

SEQ ID NO: 110616 - RNA, 20 nt, Human
cacuccagccugggugacag

SEQ ID NO: 110617 - RNA, 20 nt, Human
cacuccagccugggugacag

SEQ ID NO: 110618 - RNA, 20 nt, Human
cacuccagccugggugacag

SEQ ID NO: 110619 - RNA, 19 nt, Human
cacugcacuccagccuggg

SEQ ID NO: 110620 - RNA, 19 nt, Human
cacugcacuccagccuggg

SEQ ID NO: 110621 - RNA, 19 nt, Human
cacugcacuccagccuggg

SEQ ID NO: 110622 - RNA, 20 nt, Human
cacugcacuccagccugggu

SEQ ID NO: 110623 - RNA, 21 nt, Human
cacugcacuccagccugggug

SEQ ID NO: 110624 - RNA, 22 nt, Human
cacugcacuccagccuggguga

SEQ ID NO: 110625 - RNA, 23 nt, Human
cacugcacuccagccugggugac

SEQ ID NO: 110626 - RNA, 24 nt, Human
cacugcacuccagccugggugaca

SEQ ID NO: 110627 - RNA, 25 nt, Human
cacugcacuccagccugggugacag

SEQ ID NO: 110628 - RNA, 19 nt, Human
cagccaacaccucccaacu

SEQ ID NO: 110629 - RNA, 18 nt, Human
cagccacacugggaacga

SEQ ID NO: 110630 - RNA, 22 nt, Human
cagcgagacucuguuaaaaauu

SEQ ID NO: 110631 - RNA, 23 nt, Human
caggugccaucccaaccugcuuc

SEQ ID NO: 110632 - RNA, 18 nt, Human
caucaucugcugcaggcc

SEQ ID NO: 110633 - RNA, 21 nt, Human
cauccccaacacugcaugcgu

SEQ ID NO: 110634 - RNA, 23 nt, Human
ccagcgccugcaacuuguccagg

SEQ ID NO: 110635 - RNA, 22 nt, Human
cccaacacugcaugcgugacua

SEQ ID NO: 110636 - RNA, 26 nt, Human
cccauaguaguccuagcuccucagcu

SEQ ID NO: 110637 - RNA, 23 nt, Human
ccccaacacugcaugcgugacua

SEQ ID NO: 110638 - RNA, 21 nt, Human
ccggagcccagugccugggcc

SEQ ID NO: 110639 - RNA, 22 nt, Human
ccucaacuugcaccaguccaca

SEQ ID NO: 110640 - RNA, 21 nt, Human
ccuccucgcccaaguccuguu

SEQ ID NO: 110641 - RNA, 19 nt, Human
ccucuggguggccucagcc

SEQ ID NO: 110642 - RNA, 22 nt, Human
ccugcaacuuguccagguuguc

SEQ ID NO: 110643 - RNA, 23 nt, Human
ccugcacuccagccuuggcaaca

SEQ ID NO: 110644 - RNA, 19 nt, Human
ccugcacuccagccuuggg

SEQ ID NO: 110645 - RNA, 18 nt, Human
ccugcagcaccuucucgg

SEQ ID NO: 110646 - RNA, 23 nt, Human
cgacugucuauaacccugggaac

SEQ ID NO: 110647 - RNA, 21 nt, Human
cgccaggacgaugacaugguc

SEQ ID NO: 110648 - RNA, 24 nt, Human
cgcccaaguccuguuucuccuccu

SEQ ID NO: 110649 - RNA, 24 nt, Human
cgcggccugcacuccagccuuggc

SEQ ID NO: 110650 - RNA, 20 nt, Human
cguugggaguaaaaggugcu

SEQ ID NO: 110651 - RNA, 23 nt, Human
cucaaaaaucuucccgccucucc

SEQ ID NO: 110652 - RNA, 20 nt, Human
cucagagcaguaaaaaccaa

SEQ ID NO: 110653 - RNA, 21 nt, Human
cuccggagcccagugccuggg

SEQ ID NO: 110654 - RNA, 19 nt, Human
cugggucagcuucaggcuc

SEQ ID NO: 110655 - RNA, 25 nt, Human
cugggugacagcgcaacacccuuuc

SEQ ID NO: 110656 - RNA, 21 nt, Human
cuucaugguccaucaucugcu

SEQ ID NO: 110657 - RNA, 19 nt, Human
cuucccgccucuccuggga

SEQ ID NO: 110658 - RNA, 20 nt, Human
gaaaagcaacucaggguggc

SEQ ID NO: 110659 - RNA, 21 nt, Human
gacuagaccagcaagaagucc

SEQ ID NO: 110660 - RNA, 22 nt, Human
gagaucgcggccugcacuccag

SEQ ID NO: 110661 - RNA, 20 nt, Human
gagccacaggaacuggggcg

SEQ ID NO: 110662 - RNA, 18 nt, Human
gauaaccuuccccauagg

SEQ ID NO: 110663 - RNA, 28 nt, Human
gcacugauaaccuuccccaaccggaggg

SEQ ID NO: 110664 - RNA, 18 nt, Human
gcacugcacuccagccug

SEQ ID NO: 110665 - RNA, 21 nt, Human
gcacugcacuccagccugggu

SEQ ID NO: 110666 - RNA, 24 nt, Human
gcacugcacuccagccugggugac

SEQ ID NO: 110667 - RNA, 19 nt, Human
gcagggacuacugagggcc

SEQ ID NO: 110668 - RNA, 22 nt, Human
gccacacugggaacgacugucu

SEQ ID NO: 110669 - RNA, 21 nt, Human
gccaggugccaucccaaccug

SEQ ID NO: 110670 - RNA, 23 nt, Human
gccgguccagucggccuggccuc

SEQ ID NO: 110671 - RNA, 24 nt, Human
gccuugggccaccagcagucuugc

SEQ ID NO: 110672 - RNA, 27 nt, Human
gcggccugcacuccagccuuggcaaca

SEQ ID NO: 110673 - RNA, 20 nt, Human
gcuucaggcucuucaggugc

SEQ ID NO: 110674 - RNA, 19 nt, Human
ggagcccagugccugggcc

SEQ ID NO: 110675 - RNA, 22 nt, Human
ggguccuuucauguccgauccc

SEQ ID NO: 110676 - RNA, 18 nt, Human
gguccagucggccuggcc

SEQ ID NO: 110677 - RNA, 24 nt, Human
ggugaucgcagcacugcacuccag

SEQ ID NO: 110678 - RNA, 23 nt, Human
ggugcugcucaaaaaucuucccg

SEQ ID NO: 110679 - RNA, 20 nt, Human
ggugguugcagugagccgag

SEQ ID NO: 110680 - RNA, 24 nt, Human
ggugguugcagugagccgagaucg

SEQ ID NO: 110681 - RNA, 21 nt, Human
gguugcagugagccgagaucg

SEQ ID NO: 110682 - RNA, 19 nt, Human
guugcagugagccgagauc

SEQ ID NO: 110683 - RNA, 25 nt, Human
uaaaguaucucaacaauucucagag

SEQ ID NO: 110684 - RNA, 23 nt, Human
uagauuuuccaacuacacaguuu

SEQ ID NO: 110685 - RNA, 21 nt, Human
uagcuccucagcuugagcccu

SEQ ID NO: 110686 - RNA, 24 nt, Human
uaggccuugggccaccagcagucu

SEQ ID NO: 110687 - RNA, 25 nt, Human
ucaaaaaucuucccgccucuccugg

SEQ ID NO: 110688 - RNA, 18 nt, Human
ucacaaacacaggacucc

SEQ ID NO: 110689 - RNA, 23 nt, Human
ucagcugaaaagcaacucagggu

SEQ ID NO: 110690 - RNA, 21 nt, Human
ucauuuucuucggcccauggg

SEQ ID NO: 110691 - RNA, 20 nt, Human
uccacauggcagcagggggc

SEQ ID NO: 110692 - RNA, 24 nt, Human
uccagaagggcguuugccagcgcc

SEQ ID NO: 110693 - RNA, 19 nt, Human
uccagccugggugacagcg

SEQ ID NO: 110694 - RNA, 19 nt, Human
ucccaacuacuugggccaa

SEQ ID NO: 110695 - RNA, 21 nt, Human
ucccaacuacuugggccaagu

SEQ ID NO: 110696 - RNA, 23 nt, Human
uccucauaguuuaucacuuccuu

SEQ ID NO: 110697 - RNA, 21 nt, Human
uccugggcgucgauccaccuc

SEQ ID NO: 110698 - RNA, 18 nt, Human
uccuuuuccagaagggcg

SEQ ID NO: 110699 - RNA, 20 nt, Human
ucgcagcacugcacuccagc

SEQ ID NO: 110700 - RNA, 18 nt, Human
ucggcccauggggcggcg

SEQ ID NO: 110701 - RNA, 19 nt, Human
ucucagagcaguaaaaacc

SEQ ID NO: 110702 - RNA, 18 nt, Human
ucugaaugcucugcugcc

SEQ ID NO: 110703 - RNA, 22 nt, Human
ucuguaggccuugggccaccag

SEQ ID NO: 110704 - RNA, 23 nt, Human
ucugugguacccauuccaagugg

SEQ ID NO: 110705 - RNA, 21 nt, Human
ugaaaagcaacucaggguggc

SEQ ID NO: 110706 - RNA, 21 nt, Human
ugacuagaccagcaagaaguc

SEQ ID NO: 110707 - RNA, 21 nt, Human
ugagccgagaucgcggccugc

SEQ ID NO: 110708 - RNA, 20 nt, Human
ugagcuggaugacagggccg

SEQ ID NO: 110709 - RNA, 19 nt, Human
ugaucgcagcacugcacuc

SEQ ID NO: 110710 - RNA, 20 nt, Human
ugcagagaaacuuaaaauca

SEQ ID NO: 110711 - RNA, 18 nt, Human
ugcagggacuacugaggg

SEQ ID NO: 110712 - RNA, 18 nt, Human
ugcccaugaggcccuccu

SEQ ID NO: 110713 - RNA, 18 nt, Human
ugcgccucagggaaggag

SEQ ID NO: 110714 - RNA, 21 nt, Human
ugcgugacuagaccagcaaga

SEQ ID NO: 110715 - RNA, 26 nt, Human
ugcucugcugccucuggguggccuca

SEQ ID NO: 110716 - RNA, 23 nt, Human
ugcugcucaaaaaucuucccggu

SEQ ID NO: 110717 - RNA, 20 nt, Human
uggaugacagggccgcugga

SEQ ID NO: 110718 - RNA, 21 nt, Human
uggaugacagggccgcuggag

SEQ ID NO: 110719 - RNA, 24 nt, Human
uggcaacacagcgagacucuguua

SEQ ID NO: 110720 - RNA, 20 nt, Human
uggcagcagggggcaguggu

SEQ ID NO: 110721 - RNA, 25 nt, Human
uggcagcagggggcaguggugaguc

SEQ ID NO: 110722 - RNA, 21 nt, Human
ugggaacgacugucuauaacc

SEQ ID NO: 110723 - RNA, 24 nt, Human
ugggagauggugguugcagugagc

SEQ ID NO: 110724 - RNA, 18 nt, Human
ugggcccgaugccaggug

SEQ ID NO: 110725 - RNA, 21 nt, Human
ugggucucuucggucuccucc

SEQ ID NO: 110726 - RNA, 19 nt, Human
uggugaguccuccggagcc

SEQ ID NO: 110727 - RNA, 19 nt, Human
uguccagguuguccugcag

SEQ ID NO: 110728 - RNA, 18 nt, Human
uguccgauccccuuagca

SEQ ID NO: 110729 - RNA, 23 nt, Human
ugugucuguaggccuugggccac

SEQ ID NO: 110730 - RNA, 19 nt, Human
uugcagugagccgagaucg

SEQ ID NO: 110731 - RNA, 20 nt, Human
uugcagugagccgagaucgc

SEQ ID NO: 110732 - RNA, 25 nt, Human
uugcagugagccgagaucgcggccu

SEQ ID NO: 110733 - RNA, 21 nt, Human
uuuuccaacuacacaguuuau

SEQ ID NO: 110734 - RNA, 20 nt, Human
aagcaguucugcuggagaga

SEQ ID NO: 110735 - RNA, 19 nt, Human
aaggucuuccugaggguuc

SEQ ID NO: 110736 - RNA, 19 nt, Human
acucuauuucuccuccccu

SEQ ID NO: 110737 - RNA, 24 nt, Human
agaaaaauccaagcaguucugcug

SEQ ID NO: 110738 - RNA, 19 nt, Human
agaagaaagggguuccagg

SEQ ID NO: 110739 - RNA, 22 nt, Human
aucaagaaguggacucuauuuc

SEQ ID NO: 110740 - RNA, 20 nt, Human
aucagcuucugcuaucauug

SEQ ID NO: 110741 - RNA, 23 nt, Human
auucaagaucccccucugaaccc

SEQ ID NO: 110742 - RNA, 22 nt, Human
caagaucccccucugaaccccc

SEQ ID NO: 110743 - RNA, 21 nt, Human
caccccuaucacccggaggcu

SEQ ID NO: 110744 - RNA, 20 nt, Human
cagaaagugguagaagugau

SEQ ID NO: 110745 - RNA, 19 nt, Human
cagcauaaaacacuguuca

SEQ ID NO: 110746 - RNA, 23 nt, Human
cagcauaaaacacuguucauccc

SEQ ID NO: 110747 - RNA, 19 nt, Human
cagcuggaacaccccuauc

SEQ ID NO: 110748 - RNA, 18 nt, Human
cccugacucgugccgaau

SEQ ID NO: 110749 - RNA, 22 nt, Human
cccugagccuccugguagaaaa

SEQ ID NO: 110750 - RNA, 19 nt, Human
cccugcuggccgccggggc

SEQ ID NO: 110751 - RNA, 22 nt, Human
ccggaaggucuuccugaggguu

SEQ ID NO: 110752 - RNA, 19 nt, Human
ccucccaucaagaagugga

SEQ ID NO: 110753 - RNA, 23 nt, Human
ccucugaacccccagagcgccgc

SEQ ID NO: 110754 - RNA, 19 nt, Human
ccugcucuguccugagcuc

SEQ ID NO: 110755 - RNA, 25 nt, Human
ccugugacugcaggccacucgaggc

SEQ ID NO: 110756 - RNA, 18 nt, Human
cggaaggucuuccugagg

SEQ ID NO: 110757 - RNA, 21 nt, Human
cucuggucucugcccggaagg

SEQ ID NO: 110758 - RNA, 21 nt, Human
cugaggguucccugugacugc

SEQ ID NO: 110759 - RNA, 22 nt, Human
cuguucaucccaugcaaaaugc

SEQ ID NO: 110760 - RNA, 23 nt, Human
gagguucuugccuugaucuucag

SEQ ID NO: 110761 - RNA, 24 nt, Human
gaugcuaaagagguucuugccuug

SEQ ID NO: 110762 - RNA, 20 nt, Human
gcagcuggaacaccccuauc

SEQ ID NO: 110763 - RNA, 18 nt, Human
gcuaguccaaggcuguau

SEQ ID NO: 110764 - RNA, 20 nt, Human
gcuucugcuaucauuguugc

SEQ ID NO: 110765 - RNA, 22 nt, Human
ggcugcuucccugacucgugcc

SEQ ID NO: 110766 - RNA, 22 nt, Human
guuccaggcccuagauucccag

SEQ ID NO: 110767 - RNA, 24 nt, Human
uagaucucuagaugccaucagcuu

SEQ ID NO: 110768 - RNA, 26 nt, Human
uagauucccagcauaaaacacuguuc

SEQ ID NO: 110769 - RNA, 23 nt, Human
ucacgccucccaucaagaagugg

SEQ ID NO: 110770 - RNA, 20 nt, Human
ucagucaaggcuggccuccc

SEQ ID NO: 110771 - RNA, 21 nt, Human
ucauucaagaucccccucuga

SEQ ID NO: 110772 - RNA, 23 nt, Human
uccacuagaagaaagggguucca

SEQ ID NO: 110773 - RNA, 24 nt, Human
ucccaugcaaaaugcagugaaaau

SEQ ID NO: 110774 - RNA, 18 nt, Human
ucccucuggucucugccc

SEQ ID NO: 110775 - RNA, 22 nt, Human
ucccugugacugcaggccacuc

SEQ ID NO: 110776 - RNA, 23 nt, Human
uccucuggcuguggcuguuugcc

SEQ ID NO: 110777 - RNA, 21 nt, Human
uccuugggugucccuggguug

SEQ ID NO: 110778 - RNA, 20 nt, Human
ucucuagaugccaucagcuu

SEQ ID NO: 110779 - RNA, 23 nt, Human
ugacugcaggccacucgaggcug

SEQ ID NO: 110780 - RNA, 19 nt, Human
ugagagaguccauugaggg

SEQ ID NO: 110781 - RNA, 21 nt, Human
ugcuggagagaugggcuuccc

SEQ ID NO: 110782 - RNA, 19 nt, Human
uggaacaccccuaucaccc

SEQ ID NO: 110783 - RNA, 20 nt, Human
uggcuguuugcccagaaagc

SEQ ID NO: 110784 - RNA, 22 nt, Human
uucaagaucccccucugaaccc

SEQ ID NO: 110785 - RNA, 22 nt, Human
uucugcuaucauuguugcagag

SEQ ID NO: 110786 - RNA, 20 nt, Human
aacucuguuacccagaggcc

SEQ ID NO: 110787 - RNA, 22 nt, Human
aacucuguuacccagaggcccu

SEQ ID NO: 110788 - RNA, 22 nt, Human
acagcuuuacagaaucauaauc

SEQ ID NO: 110789 - RNA, 18 nt, Human
accaggaggcggcccgcg

SEQ ID NO: 110790 - RNA, 23 nt, Human
acucuguuacccagaggcccuag

SEQ ID NO: 110791 - RNA, 24 nt, Human
auuaaaaaauaaaaaaucauacaa

SEQ ID NO: 110792 - RNA, 21 nt, Human
cacgccucgcacagagacugg

SEQ ID NO: 110793 - RNA, 25 nt, Human
cacucuuuuuuuuuuucagaagcca

SEQ ID NO: 110794 - RNA, 22 nt, Human
cagaaaacacugcggugcgaac

SEQ ID NO: 110795 - RNA, 19 nt, Human
caggaggcggcccgcgcug

SEQ ID NO: 110796 - RNA, 20 nt, Human
caggguggcgagaccccgcc

SEQ ID NO: 110797 - RNA, 26 nt, Human
caguacaaagaggccaauauguuaga

SEQ ID NO: 110798 - RNA, 20 nt, Human
ccagaggcccuagcaaccag

SEQ ID NO: 110799 - RNA, 25 nt, Human
ccuccagguaccacugaauacuuuu

SEQ ID NO: 110800 - RNA, 18 nt, Human
cugugugcuuaggugccc

SEQ ID NO: 110801 - RNA, 23 nt, Human
gcaaccaggaggcggcccgcgcu

SEQ ID NO: 110802 - RNA, 22 nt, Human
ggaaaugcguguucuagcuuuc

SEQ ID NO: 110803 - RNA, 22 nt, Human
ggaaauguaguguccgugaaaa

SEQ ID NO: 110804 - RNA, 22 nt, Human
uaaaaaauaaaaaaucauacaa

SEQ ID NO: 110805 - RNA, 19 nt, Human
uaagagguuacaguauaac

SEQ ID NO: 110806 - RNA, 20 nt, Human
uacaaagaggccaauauguu

SEQ ID NO: 110807 - RNA, 20 nt, Human
uccagggccgcagcgugaga

SEQ ID NO: 110808 - RNA, 22 nt, Human
ucugaacucuguuacccagagg

SEQ ID NO: 110809 - RNA, 20 nt, Human
ugguacuuaacgcgcgcgcg

SEQ ID NO: 110810 - RNA, 24 nt, Human
uguugcaugcugggcuauguaguu

SEQ ID NO: 110811 - RNA, 18 nt, Human
uuuuccaguacaaagagg

SEQ ID NO: 110812 - RNA, 23 nt, Human
uuuuuuuuucagaagccaauguu

SEQ ID NO: 110813 - RNA, 20 nt, Human
aaaguccagggucccuuggg

SEQ ID NO: 110814 - RNA, 24 nt, Human
aagaccccaggaggggacaaaaug

SEQ ID NO: 110815 - RNA, 19 nt, Human
acuccuggacccagggagu

SEQ ID NO: 110816 - RNA, 19 nt, Human
agaaggcagagccaagcug

SEQ ID NO: 110817 - RNA, 21 nt, Human
agagagcagcccgggagggag

SEQ ID NO: 110818 - RNA, 25 nt, Human
agagguauugcugacggcccgaggc

SEQ ID NO: 110819 - RNA, 19 nt, Human
agcagugccaggcuccugg

SEQ ID NO: 110820 - RNA, 18 nt, Human
aggcagagccaagcuggg

SEQ ID NO: 110821 - RNA, 21 nt, Human
agggagagagccgccugggcu

SEQ ID NO: 110822 - RNA, 18 nt, Human
agggucccuuggguggcg

SEQ ID NO: 110823 - RNA, 18 nt, Human
aucgacacacucagcaaa

SEQ ID NO: 110824 - RNA, 24 nt, Human
auggaagcagccgcauauucuaca

SEQ ID NO: 110825 - RNA, 22 nt, Human
auuaugguggcaaaggugcagg

SEQ ID NO: 110826 - RNA, 23 nt, Human
caaauggaagcagccgcauauuc

SEQ ID NO: 110827 - RNA, 21 nt, Human
caagaccccaggaggggacaa

SEQ ID NO: 110828 - RNA, 23 nt, Human
cacacugcagaaggcagagccaa

SEQ ID NO: 110829 - RNA, 19 nt, Human
cacaugugacacaugagga

SEQ ID NO: 110830 - RNA, 20 nt, Human
cacaugugacacaugaggau

SEQ ID NO: 110831 - RNA, 18 nt, Human
cacugcagaaggcagagc

SEQ ID NO: 110832 - RNA, 19 nt, Human
cagcacagggccuugaugg

SEQ ID NO: 110833 - RNA, 20 nt, Human
cagcacagggccuugaugga

SEQ ID NO: 110834 - RNA, 19 nt, Human
cagggagggcauccgggca

SEQ ID NO: 110835 - RNA, 19 nt, Human
cauccgggcacucagaggu

SEQ ID NO: 110836 - RNA, 19 nt, Human
ccagucccccagaggggcu

SEQ ID NO: 110837 - RNA, 22 nt, Human
ccagucccccagaggggcucug

SEQ ID NO: 110838 - RNA, 20 nt, Human
cccugucucaggucugaggc

SEQ ID NO: 110839 - RNA, 19 nt, Human
ccuguaacacgaaugucac

SEQ ID NO: 110840 - RNA, 21 nt, Human
ccuguaacacgaaugucaccu

SEQ ID NO: 110841 - RNA, 22 nt, Human
cgccugggcugaggccggugcu

SEQ ID NO: 110842 - RNA, 21 nt, Human
cgggcacagggaaaaggcuga

SEQ ID NO: 110843 - RNA, 21 nt, Human
cuaguggcuccucucaacccu

SEQ ID NO: 110844 - RNA, 20 nt, Human
cucaacccugacgucuggcc

SEQ ID NO: 110845 - RNA, 18 nt, Human
cucagagguauugcugac

SEQ ID NO: 110846 - RNA, 24 nt, Human
cugcuuccuuguccagcccugucu

SEQ ID NO: 110847 - RNA, 23 nt, Human
cuggagaaauggaagggugcagg

SEQ ID NO: 110848 - RNA, 26 nt, Human
cugggauggugcuaguggcuccucuc

SEQ ID NO: 110849 - RNA, 21 nt, Human
gcgaugcagccacuuccccac

SEQ ID NO: 110850 - RNA, 21 nt, Human
ggcaaaguccagggucccuug

SEQ ID NO: 110851 - RNA, 21 nt, Human
ggccggugcugacagcucugg

SEQ ID NO: 110852 - RNA, 18 nt, Human
gggaaaaggcugaaggag

SEQ ID NO: 110853 - RNA, 21 nt, Human
gggugcagggagggcauccgg

SEQ ID NO: 110854 - RNA, 23 nt, Human
gguacaggaagcucagggagaga

SEQ ID NO: 110855 - RNA, 21 nt, Human
gguggcgaugcagccacuucc

SEQ ID NO: 110856 - RNA, 21 nt, Human
guccagggucccuuggguggc

SEQ ID NO: 110857 - RNA, 20 nt, Human
uaguggcuccucucaacccu

SEQ ID NO: 110858 - RNA, 20 nt, Human
ucacaaaggauuccaggaga

SEQ ID NO: 110859 - RNA, 18 nt, Human
ucagcaaauggaagcagc

SEQ ID NO: 110860 - RNA, 19 nt, Human
uccagggucccuugggugg

SEQ ID NO: 110861 - RNA, 22 nt, Human
uccccacagcccacagcuucug

SEQ ID NO: 110862 - RNA, 21 nt, Human
ucccuuggguggcgaugcagc

SEQ ID NO: 110863 - RNA, 24 nt, Human
uccuggacccagggagugugggcc

SEQ ID NO: 110864 - RNA, 22 nt, Human
ucgggcacagggaaaaggcuga

SEQ ID NO: 110865 - RNA, 22 nt, Human
ucuacacuccuggacccaggga

SEQ ID NO: 110866 - RNA, 26 nt, Human
ucucccugugaaaacgguggaggaag

SEQ ID NO: 110867 - RNA, 23 nt, Human
ucugaggcuggagagggucaggg

SEQ ID NO: 110868 - RNA, 24 nt, Human
ucugaggcuggagagggucagggu

SEQ ID NO: 110869 - RNA, 20 nt, Human
ucugcuuuucuucugcucuc

SEQ ID NO: 110870 - RNA, 20 nt, Human
ucuggcaaaguccagggucc

SEQ ID NO: 110871 - RNA, 21 nt, Human
ugcagggagggcauccgggca

SEQ ID NO: 110872 - RNA, 24 nt, Human
uggagaaauggaagggugcaggga

SEQ ID NO: 110873 - RNA, 25 nt, Human
uggagagagcagcccgggagggagu

SEQ ID NO: 110874 - RNA, 21 nt, Human
uggcuucaguguguuacucac

SEQ ID NO: 110875 - RNA, 21 nt, Human
ugggauggugcuaguggcucc

SEQ ID NO: 110876 - RNA, 30 nt, Human
ugggccauuaugguggcaaaggugcagggg

SEQ ID NO: 110877 - RNA, 19 nt, Human
ugucucaggucugaggcug

SEQ ID NO: 110878 - RNA, 22 nt, Human
ugucucaggucugaggcuggag

SEQ ID NO: 110879 - RNA, 24 nt, Human
uuuuuggccuacacauugucauuu

SEQ ID NO: 110880 - RNA, 18 nt, Human
uuuuuuuuuuuuuuuuug

SEQ ID NO: 110881 - RNA, 22 nt, Human
uuuuuuuuuuuuuuuuuuuggc

SEQ ID NO: 110882 - RNA, 28 nt, Human
uuuuuuuuuuuuuuuuuuuuuuuggggg

SEQ ID NO: 110883 - RNA, 19 nt, Human
aaaaauaauaaacaugcug

SEQ ID NO: 110884 - RNA, 18 nt, Human
aaacaaacagggauauac

SEQ ID NO: 110885 - RNA, 19 nt, Human
aaauacaaaaauuagcugg

SEQ ID NO: 110886 - RNA, 20 nt, Human
aacauggugaaaucccaucu

SEQ ID NO: 110887 - RNA, 21 nt, Human
aacauggugaaaucccaucuc

SEQ ID NO: 110888 - RNA, 18 nt, Human
aaucgcuugaaucuggga

SEQ ID NO: 110889 - RNA, 18 nt, Human
acugcacuccagccuggg

SEQ ID NO: 110890 - RNA, 19 nt, Human
acugcacuccagccugggc

SEQ ID NO: 110891 - RNA, 25 nt, Human
acugcacuccagccugggcgaagag

SEQ ID NO: 110892 - RNA, 21 nt, Human
acugcagugagccgagaucgc

SEQ ID NO: 110893 - RNA, 24 nt, Human
acuuugggaggcugaggugggcag

SEQ ID NO: 110894 - RNA, 19 nt, Human
agaucaggaguucaagucc

SEQ ID NO: 110895 - RNA, 24 nt, Human
agcacuuugggaggcugagguggg

SEQ ID NO: 110896 - RNA, 23 nt, Human
agccugggcgaagagcgagacuc

SEQ ID NO: 110897 - RNA, 22 nt, Human
agcuggaaaucgcuugaaucug

SEQ ID NO: 110898 - RNA, 24 nt, Human
agcuuggccaacauggugaaaucc

SEQ ID NO: 110899 - RNA, 21 nt, Human
aggcugaggugggcagaucac

SEQ ID NO: 110900 - RNA, 24 nt, Human
aggcugaggugggcagaucacuug

SEQ ID NO: 110901 - RNA, 21 nt, Human
aggugaagacugcagugagcc

SEQ ID NO: 110902 - RNA, 24 nt, Human
aggugaagacugcagugagccgag

SEQ ID NO: 110903 - RNA, 22 nt, Human
aggugggcagaucacuugagau

SEQ ID NO: 110904 - RNA, 26 nt, Human
aggugggcagaucacuugagaucagg

SEQ ID NO: 110905 - RNA, 24 nt, Human
aucgcgccacugcacuccagccug

SEQ ID NO: 110906 - RNA, 24 nt, Human
caacauggugaaaucccaucucua

SEQ ID NO: 110907 - RNA, 20 nt, Human
caccaaagcacauuuuccuc

SEQ ID NO: 110908 - RNA, 23 nt, Human
cacuccagccugggcgaagagcg

SEQ ID NO: 110909 - RNA, 19 nt, Human
cacugcacuccagccuggg

SEQ ID NO: 110910 - RNA, 20 nt, Human
cacugcacuccagccugggc

SEQ ID NO: 110911 - RNA, 22 nt, Human
cacugcacuccagccugggcga

SEQ ID NO: 110912 - RNA, 23 nt, Human
cacugcacuccagccugggcgaa

SEQ ID NO: 110913 - RNA, 27 nt, Human
cacugcacuccagccugggcgaagagc

SEQ ID NO: 110914 - RNA, 27 nt, Human
cagaucacuugagaucaggaguucaag

SEQ ID NO: 110915 - RNA, 24 nt, Human
cagcacuuugggaggcugaggugg

SEQ ID NO: 110916 - RNA, 24 nt, Human
cagcuuggccaacauggugaaauc

SEQ ID NO: 110917 - RNA, 24 nt, Human
cauaucuguaauaccagcacuuug

SEQ ID NO: 110918 - RNA, 21 nt, Human
cauggaaaaauuucccaacug

SEQ ID NO: 110919 - RNA, 20 nt, Human
ccacugcacuccagccuggg

SEQ ID NO: 110920 - RNA, 21 nt, Human
ccacugcacuccagccugggc

SEQ ID NO: 110921 - RNA, 21 nt, Human
ccacugcacuccagccugggc

SEQ ID NO: 110922 - RNA, 22 nt, Human
ccacugcacuccagccugggcg

SEQ ID NO: 110923 - RNA, 23 nt, Human
ccacugcacuccagccugggcga

SEQ ID NO: 110924 - RNA, 22 nt, Human
cccaucucuacuaaaaauacaa

SEQ ID NO: 110925 - RNA, 21 nt, Human
ccugggcgaagagcgagacuc

SEQ ID NO: 110926 - RNA, 22 nt, Human
cugcagugagccgagaucgcgc

SEQ ID NO: 110927 - RNA, 23 nt, Human
cuuggccaacauggugaaauccc

SEQ ID NO: 110928 - RNA, 20 nt, Human
cuuugucuucuagaagugga

SEQ ID NO: 110929 - RNA, 21 nt, Human
gaaaauacagacacugacaag

SEQ ID NO: 110930 - RNA, 24 nt, Human
gaagacugcagugagccgagaucg

SEQ ID NO: 110931 - RNA, 23 nt, Human
gagaucgcgccacugcacuccag

SEQ ID NO: 110932 - RNA, 23 nt, Human
gaucacuugagaucaggaguuca

SEQ ID NO: 110933 - RNA, 24 nt, Human
gaucacuugagaucaggaguucaa

SEQ ID NO: 110934 - RNA, 24 nt, Human
gccaacauggugaaaucccaucuc

SEQ ID NO: 110935 - RNA, 22 nt, Human
gccacugcacuccagccugggc

SEQ ID NO: 110936 - RNA, 24 nt, Human
gccacugcacuccagccugggcga

SEQ ID NO: 110937 - RNA, 20 nt, Human
gccgagaucgcgccacugca

SEQ ID NO: 110938 - RNA, 18 nt, Human
gggaggugaagacugcag

SEQ ID NO: 110939 - RNA, 26 nt, Human
gggcagaucacuugagaucaggaguu

SEQ ID NO: 110940 - RNA, 20 nt, Human
ucacugguguauccaaacaa

SEQ ID NO: 110941 - RNA, 23 nt, Human
ucacuugagaucaggaguucaag

SEQ ID NO: 110942 - RNA, 21 nt, Human
ucaguugugaaaaaucccaag

SEQ ID NO: 110943 - RNA, 23 nt, Human
ucauaucuguaauaccagcacuu

SEQ ID NO: 110944 - RNA, 22 nt, Human
uccagccugggcgaagagcgag

SEQ ID NO: 110945 - RNA, 23 nt, Human
uccagccugggcgaagagcgaga

SEQ ID NO: 110946 - RNA, 23 nt, Human
ucgcgccacugcacuccagccug

SEQ ID NO: 110947 - RNA, 18 nt, Human
ucgcuugaaucugggagg

SEQ ID NO: 110948 - RNA, 19 nt, Human
ucucaguuacuucaaauac

SEQ ID NO: 110949 - RNA, 23 nt, Human
ucucuacuaaaaauacaaaaauu

SEQ ID NO: 110950 - RNA, 22 nt, Human
ugaaaaaucccaagauauaaag

SEQ ID NO: 110951 - RNA, 23 nt, Human
ugacaaguuaaucaguuuauauc

SEQ ID NO: 110952 - RNA, 22 nt, Human
ugagccgagaucgcgccacugc

SEQ ID NO: 110953 - RNA, 24 nt, Human
ugagcguaugugaaaaaaucagaa

SEQ ID NO: 110954 - RNA, 18 nt, Human
ugaggugggcagaucacu

SEQ ID NO: 110955 - RNA, 26 nt, Human
ugaggugggcagaucacuugagauca

SEQ ID NO: 110956 - RNA, 22 nt, Human
uggccaacauggugaaauccca

SEQ ID NO: 110957 - RNA, 24 nt, Human
uggccaacauggugaaaucccauc

SEQ ID NO: 110958 - RNA, 20 nt, Human
ugggaggcugaggugggcag

SEQ ID NO: 110959 - RNA, 24 nt, Human
ugggaggcugaggugggcagauca

SEQ ID NO: 110960 - RNA, 29 nt, Human
ugggaggugaagacugcagugacaacggu

SEQ ID NO: 110961 - RNA, 24 nt, Human
ugggaggugaagacugcagugagc

SEQ ID NO: 110962 - RNA, 24 nt, Human
ugggcagaucacuugagaucagga

SEQ ID NO: 110963 - RNA, 24 nt, Human
uugaaucugggaggugaagacugc

SEQ ID NO: 110964 - RNA, 23 nt, Human
uuggccaacauggugaaauccca

SEQ ID NO: 110965 - RNA, 25 nt, Human
uugggaggcugaggugggcagauca

SEQ ID NO: 110966 - RNA, 22 nt, Human
aaaaagccuaaaaacaccuugc

SEQ ID NO: 110967 - RNA, 25 nt, Human
aaaaagccuaaaaacaccuugcaga

SEQ ID NO: 110968 - RNA, 23 nt, Human
aaaacucucaguugucagcuuuu

SEQ ID NO: 110969 - RNA, 22 nt, Human
aaaagaggagagagaaaaagga

SEQ ID NO: 110970 - RNA, 25 nt, Human
aaaccuggcacuucacugggacuga

SEQ ID NO: 110971 - RNA, 22 nt, Human
aaagcuuugccuugggaugcaa

SEQ ID NO: 110972 - RNA, 18 nt, Human
aaaugaccucaaaugggg

SEQ ID NO: 110973 - RNA, 20 nt, Human
aagaaagaaaaaaggaaagg

SEQ ID NO: 110974 - RNA, 21 nt, Human
aagaaagaaaaaaggaaagga

SEQ ID NO: 110975 - RNA, 24 nt, Human
aagaaggaagaagaaagaaaaaag

SEQ ID NO: 110976 - RNA, 20 nt, Human
aagaggagagagaaaaagga

SEQ ID NO: 110977 - RNA, 21 nt, Human
aaggaaaggaagaagaaagga

SEQ ID NO: 110978 - RNA, 23 nt, Human
aaggaagaagaaagaaaaaagga

SEQ ID NO: 110979 - RNA, 23 nt, Human
aaggaagaagaaaggaaaaagga

SEQ ID NO: 110980 - RNA, 18 nt, Human
aaguuggacaggagaaag

SEQ ID NO: 110981 - RNA, 18 nt, Human
aauaggucaccuagggcc

SEQ ID NO: 110982 - RNA, 22 nt, Human
agaaaaaaggaaaggaagaaga

SEQ ID NO: 110983 - RNA, 19 nt, Human
agaaagaagaaagacucau

SEQ ID NO: 110984 - RNA, 20 nt, Human
agaaaggaaaaaggaaagaa

SEQ ID NO: 110985 - RNA, 21 nt, Human
agaagaaaggaaaaaggaaag

SEQ ID NO: 110986 - RNA, 18 nt, Human
agaaggaagaagaaagaa

SEQ ID NO: 110987 - RNA, 23 nt, Human
agcccugccuggugcaguguuuc

SEQ ID NO: 110988 - RNA, 22 nt, Human
aggaaaaaggaaagaaagaaga

SEQ ID NO: 110989 - RNA, 18 nt, Human
aggaaagaaagaagaaag

SEQ ID NO: 110990 - RNA, 21 nt, Human
aggaagaaagaaggaagaaga

SEQ ID NO: 110991 - RNA, 22 nt, Human
aggaagaagaaagaaaaaagga

SEQ ID NO: 110992 - RNA, 18 nt, Human
aggaagaagaaaggaaaa

SEQ ID NO: 110993 - RNA, 22 nt, Human
aggaagaagaaaggaaaaagga

SEQ ID NO: 110994 - RNA, 19 nt, Human
aggaggaaaagaggagaga

SEQ ID NO: 110995 - RNA, 20 nt, Human
agugaaggauggaauuugag

SEQ ID NO: 110996 - RNA, 22 nt, Human
caaucacggaacucaaaaauau

SEQ ID NO: 110997 - RNA, 18 nt, Human
caccuagggcccugacuc

SEQ ID NO: 110998 - RNA, 21 nt, Human
cacuucacugggacugagaca

SEQ ID NO: 110999 - RNA, 19 nt, Human
cagauuaagaaauaugccu

SEQ ID NO: 111000 - RNA, 19 nt, Human
ccauagcacucccaaaagc

SEQ ID NO: 111001 - RNA, 22 nt, Human
ccaugccacacagcugcggcca

SEQ ID NO: 111002 - RNA, 23 nt, Human
ccaugccacacagcugcggccac

SEQ ID NO: 111003 - RNA, 24 nt, Human
ccaugccacacagcugcggccaca

SEQ ID NO: 111004 - RNA, 21 nt, Human
cucucaggcagucacacagcu

SEQ ID NO: 111005 - RNA, 21 nt, Human
cugacucaagaauggaggaua

SEQ ID NO: 111006 - RNA, 19 nt, Human
cuguacauagcucuccucc

SEQ ID NO: 111007 - RNA, 19 nt, Human
gaaaaaggaagaaagaagg

SEQ ID NO: 111008 - RNA, 18 nt, Human
gaaaggaagaagaaagga

SEQ ID NO: 111009 - RNA, 18 nt, Human
gaagaagaaaggaaaaag

SEQ ID NO: 111010 - RNA, 23 nt, Human
gaaggaagaagaaagaaaaaagg

SEQ ID NO: 111011 - RNA, 20 nt, Human
gauaccuugcacuuugcaaa

SEQ ID NO: 111012 - RNA, 20 nt, Human
ggauuugcuucacagauuuu

SEQ ID NO: 111013 - RNA, 21 nt, Human
ggugaaguuggacaggagaaa

SEQ ID NO: 111014 - RNA, 22 nt, Human
uaaaaaaguaaugagaguccug

SEQ ID NO: 111015 - RNA, 24 nt, Human
uaaauaaucuuucauuuauaagaa

SEQ ID NO: 111016 - RNA, 27 nt, Human
uaagaaauaugccucaaaccggggccc

SEQ ID NO: 111017 - RNA, 21 nt, Human
uacaccauuccaaccuucaau

SEQ ID NO: 111018 - RNA, 23 nt, Human
uacaccauuccaaccuucaaucu

SEQ ID NO: 111019 - RNA, 24 nt, Human
uauguuguaccuucagcuuccugu

SEQ ID NO: 111020 - RNA, 24 nt, Human
ucaacccugaccaaguuccaugcc

SEQ ID NO: 111021 - RNA, 18 nt, Human
ucaagaauggaggauagg

SEQ ID NO: 111022 - RNA, 22 nt, Human
ucaaucuaaaaugcucucccug

SEQ ID NO: 111023 - RNA, 24 nt, Human
ucacaaucaaaccuggcacuucac

SEQ ID NO: 111024 - RNA, 21 nt, Human
ucacacagcuuucaaagggug

SEQ ID NO: 111025 - RNA, 18 nt, Human
uccaugccacacagcugc

SEQ ID NO: 111026 - RNA, 21 nt, Human
ucccaaaagccaggguuucua

SEQ ID NO: 111027 - RNA, 22 nt, Human
ucuaaaaugcucucccuguaca

SEQ ID NO: 111028 - RNA, 21 nt, Human
ucuucuaaaacucucaguugu

SEQ ID NO: 111029 - RNA, 19 nt, Human
ugaagcaggagacagaugc

SEQ ID NO: 111030 - RNA, 21 nt, Human
ugaaugggcaguuugcaaaga

SEQ ID NO: 111031 - RNA, 23 nt, Human
ugaaugggcaguuugcaaagaua

SEQ ID NO: 111032 - RNA, 20 nt, Human
ugacagucgacccugugaag

SEQ ID NO: 111033 - RNA, 21 nt, Human
ugacuaaauaaucuuucauuu

SEQ ID NO: 111034 - RNA, 18 nt, Human
ugagaaggaggggauguc

SEQ ID NO: 111035 - RNA, 20 nt, Human
ugagaaggaggggaugucuc

SEQ ID NO: 111036 - RNA, 22 nt, Human
ugagaaggaggggaugucucuu

SEQ ID NO: 111037 - RNA, 23 nt, Human
ugagccaaaagcuuugccuuggg

SEQ ID NO: 111038 - RNA, 21 nt, Human
ugccacacagcugcggccaca

SEQ ID NO: 111039 - RNA, 26 nt, Human
ugccauagcacucccaaaagccaggg

SEQ ID NO: 111040 - RNA, 22 nt, Human
ugggugaaugggcaguuugcaa

SEQ ID NO: 111041 - RNA, 19 nt, Human
uuaaaaagccuaaaaacac

SEQ ID NO: 111042 - RNA, 21 nt, Human
uucaaagggugaguagagcug

SEQ ID NO: 111043 - RNA, 18 nt, Human
uuccauaaaaaaguaaug

SEQ ID NO: 111044 - RNA, 18 nt, Human
uucuccuaacugagaugc

SEQ ID NO: 111045 - RNA, 23 nt, Human
uuuuuuuuuuuuuuuuuauuuuu

SEQ ID NO: 111046 - RNA, 24 nt, Human
aaagcacugggauuauaggcauga

SEQ ID NO: 111047 - RNA, 24 nt, Human
aaagcuucccauguauuggagccu

SEQ ID NO: 111048 - RNA, 21 nt, Human
acaaauuccugaggggaaacc

SEQ ID NO: 111049 - RNA, 25 nt, Human
aggaacagucaggaaaagguagggc

SEQ ID NO: 111050 - RNA, 20 nt, Human
aggcaugagccaccaugccc

SEQ ID NO: 111051 - RNA, 21 nt, Human
aggcaugagccaccaugcccg

SEQ ID NO: 111052 - RNA, 19 nt, Human
aggggcgcagcgggcgcug

SEQ ID NO: 111053 - RNA, 24 nt, Human
agguggggcgcuggggcgaggggc

SEQ ID NO: 111054 - RNA, 20 nt, Human
agugauccuccugcuucggc

SEQ ID NO: 111055 - RNA, 21 nt, Human
augaacuuuaaaaguggaaaa

SEQ ID NO: 111056 - RNA, 25 nt, Human
auuuuguucuuaaaaagaggaacag

SEQ ID NO: 111057 - RNA, 24 nt, Human
caaagcacugggauuauaggcaug

SEQ ID NO: 111058 - RNA, 24 nt, Human
cacacauucaauaacacuuuacuu

SEQ ID NO: 111059 - RNA, 18 nt, Human
cagccaggaauugcaggu

SEQ ID NO: 111060 - RNA, 19 nt, Human
cagccaggaauugcaggug

SEQ ID NO: 111061 - RNA, 23 nt, Human
cagugauccuccugcuucggcuu

SEQ ID NO: 111062 - RNA, 24 nt, Human
ccaaagcacugggauuauaggcau

SEQ ID NO: 111063 - RNA, 18 nt, Human
ccagccaggaauugcagg

SEQ ID NO: 111064 - RNA, 20 nt, Human
ccagugauccuccugcuucg

SEQ ID NO: 111065 - RNA, 22 nt, Human
cccaaagcacugggauuauagg

SEQ ID NO: 111066 - RNA, 21 nt, Human
cccaugaacuuuaaaagugga

SEQ ID NO: 111067 - RNA, 19 nt, Human
ccggcagugaaguauuuuc

SEQ ID NO: 111068 - RNA, 21 nt, Human
cgcgcgggauccgccucaccc

SEQ ID NO: 111069 - RNA, 22 nt, Human
cgcuauguugcccagucugcuc

SEQ ID NO: 111070 - RNA, 18 nt, Human
cuccagugauccuccugc

SEQ ID NO: 111071 - RNA, 23 nt, Human
gaaaccccacacauucaauaaca

SEQ ID NO: 111072 - RNA, 21 nt, Human
gauuauaggcaugagccacca

SEQ ID NO: 111073 - RNA, 24 nt, Human
gauuauaggcaugagccaccaugc

SEQ ID NO: 111074 - RNA, 19 nt, Human
gccgugggggaaggugggg

SEQ ID NO: 111075 - RNA, 24 nt, Human
gccugcuuagaugccaaccgccag

SEQ ID NO: 111076 - RNA, 18 nt, Human
gcucuccaacucuuggcc

SEQ ID NO: 111077 - RNA, 24 nt, Human
gcuucggcuucccaaagcacuggg

SEQ ID NO: 111078 - RNA, 24 nt, Human
ggauuauaggcaugagccaccaug

SEQ ID NO: 111079 - RNA, 19 nt, Human
ggccuccagugauccuccu

SEQ ID NO: 111080 - RNA, 19 nt, Human
gggcgcuggggacacaccu

SEQ ID NO: 111081 - RNA, 23 nt, Human
gggcgcuggggacacaccugcug

SEQ ID NO: 111082 - RNA, 24 nt, Human
uagaugccaaccgccagccaggaa

SEQ ID NO: 111083 - RNA, 21 nt, Human
ucacccaugaacuuuaaaagu

SEQ ID NO: 111084 - RNA, 19 nt, Human
ucagagcugcagccacuga

SEQ ID NO: 111085 - RNA, 24 nt, Human
ucccaaagcacugggauuauaggc

SEQ ID NO: 111086 - RNA, 23 nt, Human
ucgaacacuugaugcaacuuguc

SEQ ID NO: 111087 - RNA, 18 nt, Human
ucucgcuauguugcccag

SEQ ID NO: 111088 - RNA, 18 nt, Human
ucucgcuauguugcccag

SEQ ID NO: 111089 - RNA, 19 nt, Human
ucucgcuauguugcccagu

SEQ ID NO: 111090 - RNA, 22 nt, Human
ucucgcuauguugcccagucug

SEQ ID NO: 111091 - RNA, 23 nt, Human
ugaggucucgcuauguugcccag

SEQ ID NO: 111092 - RNA, 18 nt, Human
ugcuggaacugcgcgcgg

SEQ ID NO: 111093 - RNA, 20 nt, Human
uggccuccagugauccuccu

SEQ ID NO: 111094 - RNA, 24 nt, Human
uggccuccagugauccuccugcuu

SEQ ID NO: 111095 - RNA, 23 nt, Human
uggcgugcuggcgggacggucag

SEQ ID NO: 111096 - RNA, 18 nt, Human
ugggauuauaggcaugag

SEQ ID NO: 111097 - RNA, 22 nt, Human
ugggauuauaggcaugagccac

SEQ ID NO: 111098 - RNA, 23 nt, Human
ugggauuauaggcaugagccacc

SEQ ID NO: 111099 - RNA, 24 nt, Human
ugggauuauaggcaugagccacca

SEQ ID NO: 111100 - RNA, 25 nt, Human
ugggauuauaggcaugagccaccau

SEQ ID NO: 111101 - RNA, 23 nt, Human
uggggcgcuggggcgaggggcgc

SEQ ID NO: 111102 - RNA, 20 nt, Human
uguuagacaaauuccugagg

SEQ ID NO: 111103 - RNA, 22 nt, Human
uucccauguauuggagccucau

SEQ ID NO: 111104 - RNA, 23 nt, Human
aaaagaaaaagaauuugguggca

SEQ ID NO: 111105 - RNA, 21 nt, Human
aaacaagaaguuccaaucuga

SEQ ID NO: 111106 - RNA, 18 nt, Human
aaacaggauagcuugggg

SEQ ID NO: 111107 - RNA, 22 nt, Human
aaagaagaaauuaaacacaaua

SEQ ID NO: 111108 - RNA, 21 nt, Human
aaauagccucauuacacagac

SEQ ID NO: 111109 - RNA, 18 nt, Human
aaauccugaaaaaaccaa

SEQ ID NO: 111110 - RNA, 20 nt, Human
aauccugaaaaaaccaacca

SEQ ID NO: 111111 - RNA, 19 nt, Human
accacugcaugaaaucaca

SEQ ID NO: 111112 - RNA, 18 nt, Human
acuacaugcaaaaacggu

SEQ ID NO: 111113 - RNA, 23 nt, Human
aggaaagaaccaaaggaaaagga

SEQ ID NO: 111114 - RNA, 24 nt, Human
auaagugucacuuuagccuguauc

SEQ ID NO: 111115 - RNA, 22 nt, Human
aucuauguuguaggcuuuuugg

SEQ ID NO: 111116 - RNA, 19 nt, Human
auuacaggguguaaaggga

SEQ ID NO: 111117 - RNA, 18 nt, Human
caaugugauuuugccagu

SEQ ID NO: 111118 - RNA, 22 nt, Human
cacaauaaaaauuaagagaaaa

SEQ ID NO: 111119 - RNA, 21 nt, Human
cacuacaugcaaaaacgguga

SEQ ID NO: 111120 - RNA, 25 nt, Human
cacuacaugcaaaaacggugacucu

SEQ ID NO: 111121 - RNA, 22 nt, Human
caggggacuguuccaaaaauca

SEQ ID NO: 111122 - RNA, 21 nt, Human
cauauucccuuaaauccugaa

SEQ ID NO: 111123 - RNA, 20 nt, Human
ccuucagucccagcugcugg

SEQ ID NO: 111124 - RNA, 23 nt, Human
cggagaauagggauggcuuuuaa

SEQ ID NO: 111125 - RNA, 22 nt, Human
cggugacucuaucaaaugaugc

SEQ ID NO: 111126 - RNA, 18 nt, Human
cuaacacuacaugcaaaa

SEQ ID NO: 111127 - RNA, 23 nt, Human
cucauuacacagaacuugauguu

SEQ ID NO: 111128 - RNA, 24 nt, Human
cuuaaauccugaaaaaaccaacca

SEQ ID NO: 111129 - RNA, 22 nt, Human
cuucucauucagaaagcuucau

SEQ ID NO: 111130 - RNA, 19 nt, Human
cuugaauuuucuuagauuu

SEQ ID NO: 111131 - RNA, 19 nt, Human
gaaaagcauaaauugcaau

SEQ ID NO: 111132 - RNA, 24 nt, Human
gaaaauaacugccaggcgaaaagc

SEQ ID NO: 111133 - RNA, 19 nt, Human
gagcaagcuaauaaaacug

SEQ ID NO: 111134 - RNA, 19 nt, Human
gccuuuguagccuccucac

SEQ ID NO: 111135 - RNA, 20 nt, Human
gcuaauaaaacuggaaggaa

SEQ ID NO: 111136 - RNA, 22 nt, Human
uaaaccuagaacaauuagccag

SEQ ID NO: 111137 - RNA, 22 nt, Human
uaaauccugaaaaaaccaacca

SEQ ID NO: 111138 - RNA, 18 nt, Human
uagaaacuaagcuaggga

SEQ ID NO: 111139 - RNA, 24 nt, Human
uagaaagauuuaaaaagaaaaaga

SEQ ID NO: 111140 - RNA, 18 nt, Human
uagugaaucacaucacag

SEQ ID NO: 111141 - RNA, 19 nt, Human
uaucaaaugaugcaguuua

SEQ ID NO: 111142 - RNA, 24 nt, Human
uaucaaaugaugcaguuuauuaua

SEQ ID NO: 111143 - RNA, 24 nt, Human
uaucagaugcuucagcccuauucu

SEQ ID NO: 111144 - RNA, 24 nt, Human
uaugucaaucugacauguguagag

SEQ ID NO: 111145 - RNA, 21 nt, Human
uauuaucagaugcuucagccc

SEQ ID NO: 111146 - RNA, 21 nt, Human
uccaaaaaucagacuucucau

SEQ ID NO: 111147 - RNA, 22 nt, Human
uccucauuugaaugaaaauaau

SEQ ID NO: 111148 - RNA, 23 nt, Human
ucucaagggucccagcaugucgu

SEQ ID NO: 111149 - RNA, 22 nt, Human
ucuucaggggacuguuccaaaa

SEQ ID NO: 111150 - RNA, 19 nt, Human
ucuuugggggacuuggaaa

SEQ ID NO: 111151 - RNA, 20 nt, Human
ucuuugggggacuuggaaau

SEQ ID NO: 111152 - RNA, 22 nt, Human
ugaauaaauuacaggguguaaa

SEQ ID NO: 111153 - RNA, 20 nt, Human
ugaauguuuauuugcauuga

SEQ ID NO: 111154 - RNA, 23 nt, Human
ugcaaugugauuuugccaguuug

SEQ ID NO: 111155 - RNA, 25 nt, Human
ugccaaagaagaaauuaaacacaau

SEQ ID NO: 111156 - RNA, 26 nt, Human
ugccaaagaagaaauuaaacacaaua

SEQ ID NO: 111157 - RNA, 18 nt, Human
ugccgaccaacauugguc

SEQ ID NO: 111158 - RNA, 19 nt, Human
uggaaggaagagacaucau

SEQ ID NO: 111159 - RNA, 23 nt, Human
uggaaggaagagacaucaucagg

SEQ ID NO: 111160 - RNA, 20 nt, Human
ugggggacuuggaaauagcc

SEQ ID NO: 111161 - RNA, 22 nt, Human
uguaacagugaccaucuuuggg

SEQ ID NO: 111162 - RNA, 20 nt, Human
uuaaacaagaaguuccaauc

SEQ ID NO: 111163 - RNA, 19 nt, Human
uuaaauccugaaaaaacca

SEQ ID NO: 111164 - RNA, 23 nt, Human
uuaauaaucuucuuauuaccacu

SEQ ID NO: 111165 - RNA, 20 nt, Human
uuacaggguguaaagggaaa

SEQ ID NO: 111166 - RNA, 25 nt, Human
uuagugaaucacaucacagccaaga

SEQ ID NO: 111167 - RNA, 24 nt, Human
uucacucuuucugcauacaaacuc

SEQ ID NO: 111168 - RNA, 25 nt, Human
uugggggggaaaauaacugccaggc

SEQ ID NO: 111169 - RNA, 21 nt, Human
uuguagccuccucacagcaug

SEQ ID NO: 111170 - RNA, 20 nt, Human
uuugccaguuugcuaauucu

SEQ ID NO: 111171 - RNA, 22 nt, Human
uuuguccauauucccuuaaauc

SEQ ID NO: 111172 - RNA, 23 nt, Human
uuuguccuuuucuuuuccuauua

SEQ ID NO: 111173 - RNA, 21 nt, Human
uuuguuaaaacccucucagca

SEQ ID NO: 111174 - RNA, 21 nt, Human
uuuuuuuuagguaaaaaguga

SEQ ID NO: 111175 - RNA, 21 nt, Human
aagcccccagugaggcaccaa

SEQ ID NO: 111176 - RNA, 18 nt, Human
aaggaagggggaaggcca

SEQ ID NO: 111177 - RNA, 22 nt, Human
aagggccagagccugacaggca

SEQ ID NO: 111178 - RNA, 23 nt, Human
aagggccagagccugacaggcac

SEQ ID NO: 111179 - RNA, 19 nt, Human
aggagccagcgaagacaag

SEQ ID NO: 111180 - RNA, 20 nt, Human
aggagccagcgaagacaagc

SEQ ID NO: 111181 - RNA, 21 nt, Human
ccagagccugacaggcacagg

SEQ ID NO: 111182 - RNA, 22 nt, Human
cccaaagcccccagugaggcac

SEQ ID NO: 111183 - RNA, 27 nt, Human
ccccuggggcucacaucccaauaaaua

SEQ ID NO: 111184 - RNA, 18 nt, Human
cccugauucccuggggga

SEQ ID NO: 111185 - RNA, 21 nt, Human
ccucaggccuucagggcuugg

SEQ ID NO: 111186 - RNA, 27 nt, Human
cgcccccaacuccaguaaagcuggucc

SEQ ID NO: 111187 - RNA, 18 nt, Human
cuccaguaaagcuggucc

SEQ ID NO: 111188 - RNA, 19 nt, Human
cuggucccugauucccugg

SEQ ID NO: 111189 - RNA, 24 nt, Human
gcaccaaaggaagggggaaggcca

SEQ ID NO: 111190 - RNA, 21 nt, Human
gccagagccugacaggcacag

SEQ ID NO: 111191 - RNA, 23 nt, Human
gcccaaagcccccagugaggcac

SEQ ID NO: 111192 - RNA, 25 nt, Human
gccucaggccuucagggcuuggguc

SEQ ID NO: 111193 - RNA, 20 nt, Human
gggccagagccugacaggca

SEQ ID NO: 111194 - RNA, 21 nt, Human
gggggaaggccacaaaggcaa

SEQ ID NO: 111195 - RNA, 23 nt, Human
ggguaggagccagcgaagacaag

SEQ ID NO: 111196 - RNA, 22 nt, Human
ucaggccuucagggcuuggguc

SEQ ID NO: 111197 - RNA, 23 nt, Human
ugaggcaccaaaggaagggggag

SEQ ID NO: 111198 - RNA, 19 nt, Human
aaaaagaaagugcucucau

SEQ ID NO: 111199 - RNA, 24 nt, Human
acugcgggaaugggguggggggca

SEQ ID NO: 111200 - RNA, 22 nt, Human
aggguccccuuccccccaaugg

SEQ ID NO: 111201 - RNA, 21 nt, Human
augggccccccgccagucugc

SEQ ID NO: 111202 - RNA, 22 nt, Human
augggguggggggcaggccgag

SEQ ID NO: 111203 - RNA, 21 nt, Human
caaugggccccccgccagucu

SEQ ID NO: 111204 - RNA, 25 nt, Human
cacucuucccuccucacauguuuuu

SEQ ID NO: 111205 - RNA, 26 nt, Human
cagagcggaggguccccuucccccca

SEQ ID NO: 111206 - RNA, 19 nt, Human
cagccaagagcagcagcag

SEQ ID NO: 111207 - RNA, 27 nt, Human
cagccaagagcagcagcagccucccuu

SEQ ID NO: 111208 - RNA, 21 nt, Human
cauuacaaacgccacugucac

SEQ ID NO: 111209 - RNA, 21 nt, Human
ccagccaagagcagcagcagc

SEQ ID NO: 111210 - RNA, 24 nt, Human
ccagccaagagcagcagcagccuc

SEQ ID NO: 111211 - RNA, 23 nt, Human
ccagugaaauagaaaaaaaagaa

SEQ ID NO: 111212 - RNA, 19 nt, Human
cccacugcgggaauggggu

SEQ ID NO: 111213 - RNA, 23 nt, Human
ccccccgccagucugcucucucc

SEQ ID NO: 111214 - RNA, 24 nt, Human
cccccgccagucugcucucuccaa

SEQ ID NO: 111215 - RNA, 21 nt, Human
ccccgccagucugcucucucc

SEQ ID NO: 111216 - RNA, 20 nt, Human
cccuuggggggaaaacaggg

SEQ ID NO: 111217 - RNA, 24 nt, Human
ccggaggcgacccgggucucuucc

SEQ ID NO: 111218 - RNA, 18 nt, Human
cggcugggccuggcuggg

SEQ ID NO: 111219 - RNA, 23 nt, Human
cugacgcugagaacagaggcagc

SEQ ID NO: 111220 - RNA, 24 nt, Human
cuucugguccuggggguacccacu

SEQ ID NO: 111221 - RNA, 18 nt, Human
gagaacagaggcagcggc

SEQ ID NO: 111222 - RNA, 22 nt, Human
gagcagcagcagccucccuugg

SEQ ID NO: 111223 - RNA, 18 nt, Human
gaggaugccaugcaggga

SEQ ID NO: 111224 - RNA, 19 nt, Human
gagggaguggggggacagc

SEQ ID NO: 111225 - RNA, 18 nt, Human
gcucccacugcgggaaug

SEQ ID NO: 111226 - RNA, 20 nt, Human
ggacacccggcucuauguug

SEQ ID NO: 111227 - RNA, 21 nt, Human
ggccgagccugggcucugggg

SEQ ID NO: 111228 - RNA, 25 nt, Human
gggaaaacagggaaggccuuguggc

SEQ ID NO: 111229 - RNA, 20 nt, Human
gggaaugggguggggggcag

SEQ ID NO: 111230 - RNA, 19 nt, Human
gggcaggccgagccugggc

SEQ ID NO: 111231 - RNA, 19 nt, Human
gggccccccgccagucugc

SEQ ID NO: 111232 - RNA, 19 nt, Human
uagcacuacagagcggagg

SEQ ID NO: 111233 - RNA, 24 nt, Human
uccaaacucuaacccuguagaggu

SEQ ID NO: 111234 - RNA, 18 nt, Human
uccccccaaugggccccc

SEQ ID NO: 111235 - RNA, 19 nt, Human
uccuuugggcgcuguuggg

SEQ ID NO: 111236 - RNA, 18 nt, Human
ucggcugggccuggcugg

SEQ ID NO: 111237 - RNA, 22 nt, Human
ugagggaguggggggacagcug

SEQ ID NO: 111238 - RNA, 22 nt, Human
ugagggaguggggggacagcug

SEQ ID NO: 111239 - RNA, 22 nt, Human
ugcacacucuucccuccucaca

SEQ ID NO: 111240 - RNA, 20 nt, Human
ugcagggagagggggucggc

SEQ ID NO: 111241 - RNA, 18 nt, Human
ugcgggaauggggugggg

SEQ ID NO: 111242 - RNA, 19 nt, Human
ugcuccagugaaauagaaa

SEQ ID NO: 111243 - RNA, 24 nt, Human
ugcuccagugaaauagaaaaaaaa

SEQ ID NO: 111244 - RNA, 26 nt, Human
uggcggcacugacgcugagaacagag

SEQ ID NO: 111245 - RNA, 18 nt, Human
uggcuggguccagccaag

SEQ ID NO: 111246 - RNA, 19 nt, Human
uggcuggguccagccaaga

SEQ ID NO: 111247 - RNA, 20 nt, Human
ugggcucugggggcuuugcu

SEQ ID NO: 111248 - RNA, 21 nt, Human
uggggggcaggccgagccugg

SEQ ID NO: 111249 - RNA, 26 nt, Human
ugggucucugggcaugcaguuugcuc

SEQ ID NO: 111250 - RNA, 21 nt, Human
uuggggggaaaacagggaagg

SEQ ID NO: 111251 - RNA, 26 nt, Human
uuuacagccauuuauugugcuccagu

SEQ ID NO: 111252 - RNA, 22 nt, Human
uuuuacagccauuuauugugcu

SEQ ID NO: 111253 - RNA, 23 nt, Human
aaaaaaaaaaaaaaagaugaaaa

SEQ ID NO: 111254 - RNA, 25 nt, Human
aaaaaaaaaagaugaaaacacagaa

SEQ ID NO: 111255 - RNA, 23 nt, Human
aaaaaaaagaugaaaacacagaa

SEQ ID NO: 111256 - RNA, 18 nt, Human
aaaaacccaaaaacccag

SEQ ID NO: 111257 - RNA, 22 nt, Human
aaacccaaaaacccagauggga

SEQ ID NO: 111258 - RNA, 21 nt, Human
aaagaugaaaacacagaaaaa

SEQ ID NO: 111259 - RNA, 23 nt, Human
aacacagaaaaacccaaaaaccc

SEQ ID NO: 111260 - RNA, 19 nt, Human
aacauggggaaaccccauc

SEQ ID NO: 111261 - RNA, 20 nt, Human
aacauggggaaaccccaucu

SEQ ID NO: 111262 - RNA, 21 nt, Human
aacauggggaaaccccaucuc

SEQ ID NO: 111263 - RNA, 23 nt, Human
aaccacaacugaaaaaaaaaucu

SEQ ID NO: 111264 - RNA, 24 nt, Human
aaucgcuugagcccggaaggugga

SEQ ID NO: 111265 - RNA, 22 nt, Human
acacagaaaaacccaaaaaccc

SEQ ID NO: 111266 - RNA, 25 nt, Human
acacagaaaaacccaaaaacccaga

SEQ ID NO: 111267 - RNA, 20 nt, Human
acagaaaaacccaaaaaccc

SEQ ID NO: 111268 - RNA, 21 nt, Human
acagaaaaacccaaaaaccca

SEQ ID NO: 111269 - RNA, 24 nt, Human
accccaucucuacuaaaaauacaa

SEQ ID NO: 111270 - RNA, 18 nt, Human
accccuucccccacagcc

SEQ ID NO: 111271 - RNA, 21 nt, Human
acggcccucacuuucuccacc

SEQ ID NO: 111272 - RNA, 18 nt, Human
acugcacuccagccuggg

SEQ ID NO: 111273 - RNA, 23 nt, Human
acugcacuccagccugggcaaca

SEQ ID NO: 111274 - RNA, 19 nt, Human
acuuggcggggcauguggc

SEQ ID NO: 111275 - RNA, 21 nt, Human
agaaaaaaaaaaaaaaagaug

SEQ ID NO: 111276 - RNA, 21 nt, Human
agaaaaacccaaaaacccaga

SEQ ID NO: 111277 - RNA, 22 nt, Human
agauggcgccacugcacuccag

SEQ ID NO: 111278 - RNA, 24 nt, Human
agccuggccaacauggggaaaccc

SEQ ID NO: 111279 - RNA, 19 nt, Human
aggaggcugaggcuggaga

SEQ ID NO: 111280 - RNA, 22 nt, Human
aggcaaaggggaaaaaagcucu

SEQ ID NO: 111281 - RNA, 23 nt, Human
aggcaaccagaaaccgucgggga

SEQ ID NO: 111282 - RNA, 20 nt, Human
aggcgaggcaaccagaaacc

SEQ ID NO: 111283 - RNA, 21 nt, Human
aggcggaggcgggcggaucac

SEQ ID NO: 111284 - RNA, 28 nt, Human
aggcgggcggaucacaccugaggccagg

SEQ ID NO: 111285 - RNA, 24 nt, Human
aggcugaggcuggagaaucgcuug

SEQ ID NO: 111286 - RNA, 24 nt, Human
aggcuggagaaucgcuugagcccg

SEQ ID NO: 111287 - RNA, 23 nt, Human
agggggucaggcuuagccccaac

SEQ ID NO: 111288 - RNA, 18 nt, Human
agguggaggugcagugag

SEQ ID NO: 111289 - RNA, 23 nt, Human
agguggaggugcagugagccaag

SEQ ID NO: 111290 - RNA, 20 nt, Human
auggagcaguauaagcuggu

SEQ ID NO: 111291 - RNA, 24 nt, Human
auggcgccacugcacuccagccug

SEQ ID NO: 111292 - RNA, 21 nt, Human
auguggggagagagcgugcug

SEQ ID NO: 111293 - RNA, 22 nt, Human
caaaaacccagaugggaagacg

SEQ ID NO: 111294 - RNA, 23 nt, Human
cacaccuguaaucucagcgcuug

SEQ ID NO: 111295 - RNA, 21 nt, Human
cacagaaaaacccaaaaaccc

SEQ ID NO: 111296 - RNA, 24 nt, Human
cacagaaaaacccaaaaacccaga

SEQ ID NO: 111297 - RNA, 24 nt, Human
caccugcaguccuagcuacucagg

SEQ ID NO: 111298 - RNA, 22 nt, Human
caccuguaaucucagcgcuugg

SEQ ID NO: 111299 - RNA, 23 nt, Human
caccuguaaucucagcgcuuggg

SEQ ID NO: 111300 - RNA, 20 nt, Human
cacucacagacccuugguug

SEQ ID NO: 111301 - RNA, 18 nt, Human
cacugcacuccagccugg

SEQ ID NO: 111302 - RNA, 19 nt, Human
cacugcacuccagccuggg

SEQ ID NO: 111303 - RNA, 21 nt, Human
cacugcacuccagccugggca

SEQ ID NO: 111304 - RNA, 23 nt, Human
cacugcacuccagccugggcaac

SEQ ID NO: 111305 - RNA, 24 nt, Human
cacugcacuccagccugggcaaca

SEQ ID NO: 111306 - RNA, 26 nt, Human
cacugcacuccagccugggcaacaac

SEQ ID NO: 111307 - RNA, 18 nt, Human
cagaaaaacccaaaaacc

SEQ ID NO: 111308 - RNA, 18 nt, Human
cagaauuucacuuccuug

SEQ ID NO: 111309 - RNA, 24 nt, Human
cagcacugaacgggucaagaaaaa

SEQ ID NO: 111310 - RNA, 20 nt, Human
cagcagggacccucgcccua

SEQ ID NO: 111311 - RNA, 24 nt, Human
cagccuggccaacauggggaaacc

SEQ ID NO: 111312 - RNA, 20 nt, Human
cagggccccugggugggggg

SEQ ID NO: 111313 - RNA, 20 nt, Human
ccacugcacuccagccuggg

SEQ ID NO: 111314 - RNA, 20 nt, Human
ccacugcacuccagccuggg

SEQ ID NO: 111315 - RNA, 21 nt, Human
ccacugcacuccagccugggc

SEQ ID NO: 111316 - RNA, 23 nt, Human
ccacugcacuccagccugggcaa

SEQ ID NO: 111317 - RNA, 24 nt, Human
ccacugcacuccagccugggcaac

SEQ ID NO: 111318 - RNA, 20 nt, Human
ccaggaguucgagaccagcc

SEQ ID NO: 111319 - RNA, 18 nt, Human
cccacgcugacacucaca

SEQ ID NO: 111320 - RNA, 21 nt, Human
ccccuggguggggggucccug

SEQ ID NO: 111321 - RNA, 22 nt, Human
cccgguccccuuucccagggga

SEQ ID NO: 111322 - RNA, 19 nt, Human
cccucacuuucuccaccug

SEQ ID NO: 111323 - RNA, 22 nt, Human
ccugaggccaggaguucgagac

SEQ ID NO: 111324 - RNA, 24 nt, Human
ccuggccaacauggggaaacccca

SEQ ID NO: 111325 - RNA, 21 nt, Human
cgagaccagccuggccaacau

SEQ ID NO: 111326 - RNA, 24 nt, Human
cgccacugcacuccagccugggca

SEQ ID NO: 111327 - RNA, 20 nt, Human
cgcccuacacguauugggau

SEQ ID NO: 111328 - RNA, 22 nt, Human
cgcuuggggaggcggaggcggg

SEQ ID NO: 111329 - RNA, 27 nt, Human
cggaagguggaggugcagugacaacgg

SEQ ID NO: 111330 - RNA, 24 nt, Human
cggagcagggccccuggguggggg

SEQ ID NO: 111331 - RNA, 30 nt, Human
cggaggcgggcggaucacaccugaggccaa

SEQ ID NO: 111332 - RNA, 26 nt, Human
cggaucacaccugaggccaggaguuc

SEQ ID NO: 111333 - RNA, 21 nt, Human
cggcccgguccccuuucccag

SEQ ID NO: 111334 - RNA, 26 nt, Human
cgggcggaucacaccugaggccagga

SEQ ID NO: 111335 - RNA, 22 nt, Human
cggggagcauggagaggggguc

SEQ ID NO: 111336 - RNA, 22 nt, Human
cgggucaagaaaaaaaaaaaaa

SEQ ID NO: 111337 - RNA, 22 nt, Human
cuagcacucucuccacuguccu

SEQ ID NO: 111338 - RNA, 20 nt, Human
cucacaccuguaaucucagc

SEQ ID NO: 111339 - RNA, 24 nt, Human
cucacaccuguaaucucagcgcuu

SEQ ID NO: 111340 - RNA, 24 nt, Human
cugaacgggucaagaaaaaaaaaa

SEQ ID NO: 111341 - RNA, 21 nt, Human
cugcaguccuagcuacucagg

SEQ ID NO: 111342 - RNA, 23 nt, Human
cuuccuacaaacaaagguuuuau

SEQ ID NO: 111343 - RNA, 23 nt, Human
gaaaacacagaaaaacccaaaaa

SEQ ID NO: 111344 - RNA, 23 nt, Human
gaaaccacaaacugcucagcuga

SEQ ID NO: 111345 - RNA, 22 nt, Human
gagaccagccuggccaacaugg

SEQ ID NO: 111346 - RNA, 18 nt, Human
gaggcugaggcuggagaa

SEQ ID NO: 111347 - RNA, 18 nt, Human
gaggugcagugagccaag

SEQ ID NO: 111348 - RNA, 27 nt, Human
gaucacaccugaggccaggaguucgag

SEQ ID NO: 111349 - RNA, 20 nt, Human
gcauagaaaccacaaacugc

SEQ ID NO: 111350 - RNA, 24 nt, Human
gccaacauggggaaaccccaucuc

SEQ ID NO: 111351 - RNA, 22 nt, Human
gccacugcacuccagccugggc

SEQ ID NO: 111352 - RNA, 24 nt, Human
gccacugcacuccagccugggcaa

SEQ ID NO: 111353 - RNA, 21 nt, Human
gccugggcacgguggcucaca

SEQ ID NO: 111354 - RNA, 20 nt, Human
gcgaggcaaccagaaaccgg

SEQ ID NO: 111355 - RNA, 22 nt, Human
gcuuggggaggcggaggcgggc

SEQ ID NO: 111356 - RNA, 21 nt, Human
ggaagauggagcaguauaagc

SEQ ID NO: 111357 - RNA, 25 nt, Human
ggagcagggccccuggguggggggu

SEQ ID NO: 111358 - RNA, 19 nt, Human
ggaggugcagugagccaag

SEQ ID NO: 111359 - RNA, 23 nt, Human
ggaggugcagugagccaagaugg

SEQ ID NO: 111360 - RNA, 23 nt, Human
ggcacgguggcucacaccuguaa

SEQ ID NO: 111361 - RNA, 21 nt, Human
ggcucacaccuguaaucucag

SEQ ID NO: 111362 - RNA, 21 nt, Human
gggaaaccccaucucuacuaa

SEQ ID NO: 111363 - RNA, 23 nt, Human
gggcggggagcauggagaggggg

SEQ ID NO: 111364 - RNA, 21 nt, Human
gggcgugguggagcaccugca

SEQ ID NO: 111365 - RNA, 23 nt, Human
gggcuggggacuccuuaaaaccu

SEQ ID NO: 111366 - RNA, 18 nt, Human
ggggaggcggaggcgggc

SEQ ID NO: 111367 - RNA, 23 nt, Human
gguggcucacaccuguaaucuca

SEQ ID NO: 111368 - RNA, 24 nt, Human
gguggcucacaccuguaaucucag

SEQ ID NO: 111369 - RNA, 21 nt, Human
guccuugccccaccccugggg

SEQ ID NO: 111370 - RNA, 19 nt, Human
uagaaaccacaaacugcuc

SEQ ID NO: 111371 - RNA, 22 nt, Human
uagccgggcgugguggagcacc

SEQ ID NO: 111372 - RNA, 22 nt, Human
uaggcaaauccagucacuuggg

SEQ ID NO: 111373 - RNA, 18 nt, Human
ucaaggcaaaggggaaaa

SEQ ID NO: 111374 - RNA, 22 nt, Human
ucaaggcaaaggggaaaaaagc

SEQ ID NO: 111375 - RNA, 24 nt, Human
ucacaccugaggccaggaguucga

SEQ ID NO: 111376 - RNA, 19 nt, Human
ucacggagcagggccccug

SEQ ID NO: 111377 - RNA, 18 nt, Human
ucacggcccgguccccuu

SEQ ID NO: 111378 - RNA, 18 nt, Human
ucagaauuucacuuccuu

SEQ ID NO: 111379 - RNA, 19 nt, Human
ucagcugacaaaaggggga

SEQ ID NO: 111380 - RNA, 23 nt, Human
ucccacgcugacacucacagacc

SEQ ID NO: 111381 - RNA, 19 nt, Human
ucccccacagcccaguggc

SEQ ID NO: 111382 - RNA, 23 nt, Human
ucccugugcaguacuuggcgggg

SEQ ID NO: 111383 - RNA, 18 nt, Human
uccuaggcaaauccaguc

SEQ ID NO: 111384 - RNA, 24 nt, Human
ucgcuugagcccggaagguggagg

SEQ ID NO: 111385 - RNA, 23 nt, Human
ucucuacuaaaaauacaaaaauu

SEQ ID NO: 111386 - RNA, 21 nt, Human
ucuucccagcacagccugaau

SEQ ID NO: 111387 - RNA, 22 nt, Human
ugaaaacacagaaaaacccaaa

SEQ ID NO: 111388 - RNA, 24 nt, Human
ugaaaacacagaaaaacccaaaaa

SEQ ID NO: 111389 - RNA, 24 nt, Human
ugaaaacacagaaaaacccaaaaa

SEQ ID NO: 111390 - RNA, 25 nt, Human
ugaaaacacagaaaaacccaaaaac

SEQ ID NO: 111391 - RNA, 21 nt, Human
ugaccccuucccccacagccc

SEQ ID NO: 111392 - RNA, 23 nt, Human
ugaggccagagugaguuggggcg

SEQ ID NO: 111393 - RNA, 20 nt, Human
ugagggccugggcacggugg

SEQ ID NO: 111394 - RNA, 21 nt, Human
ugagggccugggcacgguggc

SEQ ID NO: 111395 - RNA, 22 nt, Human
ugagggccugggcacgguggcu

SEQ ID NO: 111396 - RNA, 20 nt, Human
ugcucagcugacaaaagggg

SEQ ID NO: 111397 - RNA, 21 nt, Human
uggcucacaccuguaaucuca

SEQ ID NO: 111398 - RNA, 24 nt, Human
uggcucacaccuguaaucucagcg

SEQ ID NO: 111399 - RNA, 24 nt, Human
uggggagagagcgugcugggagcc

SEQ ID NO: 111400 - RNA, 23 nt, Human
uggggcggggagcauggagaggg

SEQ ID NO: 111401 - RNA, 23 nt, Human
ugugccagcagggacccucgccc

SEQ ID NO: 111402 - RNA, 21 nt, Human
uguggccggggaagauggagc

SEQ ID NO: 111403 - RNA, 19 nt, Human
uguggggagagagcgugcu

SEQ ID NO: 111404 - RNA, 20 nt, Human
uuagccgggcgugguggagc

SEQ ID NO: 111405 - RNA, 23 nt, Human
uuagccgggcgugguggagcacc

SEQ ID NO: 111406 - RNA, 21 nt, Human
uucccagcacagccugaaugu

SEQ ID NO: 111407 - RNA, 22 nt, Human
uugugaauacuuccugaaacuu

SEQ ID NO: 111408 - RNA, 19 nt, Human
uuuccuagcacucucucca

SEQ ID NO: 111409 - RNA, 25 nt, Human
aaaauuagcaaacaauacuguagaa

SEQ ID NO: 111410 - RNA, 23 nt, Human
accacauuuagcaauaagcauga

SEQ ID NO: 111411 - RNA, 27 nt, Human
acuauugagggaagaggcagaaaaagg

SEQ ID NO: 111412 - RNA, 21 nt, Human
agaaaccagauacacuaaacu

SEQ ID NO: 111413 - RNA, 18 nt, Human
agauacacuaaacuguaa

SEQ ID NO: 111414 - RNA, 20 nt, Human
aggcagaaaaaggaaaaagg

SEQ ID NO: 111415 - RNA, 21 nt, Human
aggcagaaaaaggaaaaagga

SEQ ID NO: 111416 - RNA, 27 nt, Human
agggaagaggcagaaaaagggggaccc

SEQ ID NO: 111417 - RNA, 28 nt, Human
augcugcaucuuaaauuuaguuggcaaa

SEQ ID NO: 111418 - RNA, 21 nt, Human
caaacaauacuguagaaacau

SEQ ID NO: 111419 - RNA, 22 nt, Human
cagcgcugggguccggggucuc

SEQ ID NO: 111420 - RNA, 18 nt, Human
cgggcggcgggaagagac

SEQ ID NO: 111421 - RNA, 24 nt, Human
cuaaacuguaaaaaaaaaaaaaaa

SEQ ID NO: 111422 - RNA, 27 nt, Human
cuaaacuguaaaaaaaaaaaaaaaaaa

SEQ ID NO: 111423 - RNA, 23 nt, Human
cuuccauguagaaaccagauaca

SEQ ID NO: 111424 - RNA, 21 nt, Human
gagggaagaggcagaaaaagg

SEQ ID NO: 111425 - RNA, 20 nt, Human
gcgcugggguccggggucuc

SEQ ID NO: 111426 - RNA, 19 nt, Human
ggaagaggcagaaaaagga

SEQ ID NO: 111427 - RNA, 19 nt, Human
gggaagaggcagaaaaagg

SEQ ID NO: 111428 - RNA, 20 nt, Human
guauuccuuuuuacuucaua

SEQ ID NO: 111429 - RNA, 25 nt, Human
uaaaaacaaaggacuaaauacugag

SEQ ID NO: 111430 - RNA, 18 nt, Human
uaaacuguaaaaaaaaaa

SEQ ID NO: 111431 - RNA, 21 nt, Human
uaaauuucuaaaaugcugcau

SEQ ID NO: 111432 - RNA, 23 nt, Human
uaaauuucuaaaaugcugcaucu

SEQ ID NO: 111433 - RNA, 18 nt, Human
uccggggucucucgcacu

SEQ ID NO: 111434 - RNA, 19 nt, Human
ucgggcggcgggaagagac

SEQ ID NO: 111435 - RNA, 24 nt, Human
ugaauaaaaacaaaggacuaaaua

SEQ ID NO: 111436 - RNA, 22 nt, Human
uuaaaaauuagcaaacaauacu

SEQ ID NO: 111437 - RNA, 23 nt, Human
uuauugauuaugcuguaggauuu

SEQ ID NO: 111438 - RNA, 24 nt, Human
aaaaaaaaaaaaaaugucacaaaa

SEQ ID NO: 111439 - RNA, 27 nt, Human
aaaaaagacaaggagauggaaucaaag

SEQ ID NO: 111440 - RNA, 22 nt, Human
aaccuggaaguagggcucgggg

SEQ ID NO: 111441 - RNA, 21 nt, Human
aagcaaccggugggacuuggc

SEQ ID NO: 111442 - RNA, 24 nt, Human
aagcacuuuuguugagugacaacc

SEQ ID NO: 111443 - RNA, 24 nt, Human
aauagcaggacccugucucuaaaa

SEQ ID NO: 111444 - RNA, 22 nt, Human
aaucaaagcccagagguccucc

SEQ ID NO: 111445 - RNA, 25 nt, Human
acaaaacaaggaucaaacagagggc

SEQ ID NO: 111446 - RNA, 21 nt, Human
acacagacuaguguuagaaac

SEQ ID NO: 111447 - RNA, 27 nt, Human
acccgauuagcaaggcccuguuacuga

SEQ ID NO: 111448 - RNA, 18 nt, Human
acccugucucuaaaaaca

SEQ ID NO: 111449 - RNA, 18 nt, Human
acugcacuccagcuuggg

SEQ ID NO: 111450 - RNA, 18 nt, Human
acugcacuccagcuuggg

SEQ ID NO: 111451 - RNA, 24 nt, Human
acugcacuccagcuugggaaauag

SEQ ID NO: 111452 - RNA, 18 nt, Human
agaaaaaagacaaggaga

SEQ ID NO: 111453 - RNA, 24 nt, Human
agaaaccccuucccagaagcaacc

SEQ ID NO: 111454 - RNA, 30 nt, Human
agacaaggagauggaaucaaagcccagagg

SEQ ID NO: 111455 - RNA, 19 nt, Human
agagagcaggacuggagcu

SEQ ID NO: 111456 - RNA, 24 nt, Human
agagggcaguggagggcaccccag

SEQ ID NO: 111457 - RNA, 20 nt, Human
agcagcugggcugggcuggg

SEQ ID NO: 111458 - RNA, 23 nt, Human
agccccacugccuuuugccuccg

SEQ ID NO: 111459 - RNA, 21 nt, Human
agcuccuuuuucuacccuggu

SEQ ID NO: 111460 - RNA, 24 nt, Human
aggauugcuugagcccaggaguuc

SEQ ID NO: 111461 - RNA, 18 nt, Human
aggcccagaggccuccag

SEQ ID NO: 111462 - RNA, 18 nt, Human
agggggcagggacuuagg

SEQ ID NO: 111463 - RNA, 22 nt, Human
aguaaaaaaaaaaaaaaaaaaa

SEQ ID NO: 111464 - RNA, 19 nt, Human
aguccagccccuuccugga

SEQ ID NO: 111465 - RNA, 24 nt, Human
aucgcaccacugcacuccagcuug

SEQ ID NO: 111466 - RNA, 24 nt, Human
auugcuugagcccaggaguucgag

SEQ ID NO: 111467 - RNA, 24 nt, Human
caaagccaggauaguaacuuaaau

SEQ ID NO: 111468 - RNA, 23 nt, Human
caaagcccagagguccuccccuu

SEQ ID NO: 111469 - RNA, 20 nt, Human
cacaacccgagccucgugcc

SEQ ID NO: 111470 - RNA, 21 nt, Human
cacagcacacagacuaguguu

SEQ ID NO: 111471 - RNA, 22 nt, Human
caccauggaggcaagaugggcu

SEQ ID NO: 111472 - RNA, 18 nt, Human
cacccagcucugggcaga

SEQ ID NO: 111473 - RNA, 18 nt, Human
caccgucgccgccucugc

SEQ ID NO: 111474 - RNA, 21 nt, Human
cacuccagcuugggaaauagc

SEQ ID NO: 111475 - RNA, 18 nt, Human
cacugcacuccagcuugg

SEQ ID NO: 111476 - RNA, 19 nt, Human
cacugcacuccagcuuggg

SEQ ID NO: 111477 - RNA, 19 nt, Human
cacugcacuccagcuuggg

SEQ ID NO: 111478 - RNA, 26 nt, Human
cacugcacuccagcuugggaaauagc

SEQ ID NO: 111479 - RNA, 27 nt, Human
cacugcacuccagcuugggaaauagca

SEQ ID NO: 111480 - RNA, 18 nt, Human
cagaaccuggaaguaggg

SEQ ID NO: 111481 - RNA, 19 nt, Human
cagagcagcugggcugggc

SEQ ID NO: 111482 - RNA, 19 nt, Human
cagagguccuccccuucuc

SEQ ID NO: 111483 - RNA, 20 nt, Human
cagcugggcugggcuggggc

SEQ ID NO: 111484 - RNA, 26 nt, Human
caggaaccacagcacacaaccuucag

SEQ ID NO: 111485 - RNA, 24 nt, Human
caggacccugucucuaaaaacaaa

SEQ ID NO: 111486 - RNA, 20 nt, Human
cauggaggcaagaugggcug

SEQ ID NO: 111487 - RNA, 22 nt, Human
cauggaggcaagaugggcuggg

SEQ ID NO: 111488 - RNA, 18 nt, Human
ccaccgucgccgccucug

SEQ ID NO: 111489 - RNA, 22 nt, Human
ccaccgucgccgccucugccgg

SEQ ID NO: 111490 - RNA, 19 nt, Human
ccacugcacuccagcuugg

SEQ ID NO: 111491 - RNA, 20 nt, Human
ccacugcacuccagcuuggg

SEQ ID NO: 111492 - RNA, 23 nt, Human
ccacugcacuccagcuugggaaa

SEQ ID NO: 111493 - RNA, 26 nt, Human
ccacugcacuccagcuugggaaauag

SEQ ID NO: 111494 - RNA, 20 nt, Human
ccagaaccuggaaguagggc

SEQ ID NO: 111495 - RNA, 22 nt, Human
ccagagguccuccccuucucag

SEQ ID NO: 111496 - RNA, 19 nt, Human
ccagccucgucagcuuugg

SEQ ID NO: 111497 - RNA, 20 nt, Human
ccagccucgucagcuuugga

SEQ ID NO: 111498 - RNA, 21 nt, Human
ccagcgguggcacaacccgag

SEQ ID NO: 111499 - RNA, 22 nt, Human
ccaggaguucgaggcugcagug

SEQ ID NO: 111500 - RNA, 18 nt, Human
ccauggaggcaagauggg

SEQ ID NO: 111501 - RNA, 24 nt, Human
cccaccagccccuguuagaggagg

SEQ ID NO: 111502 - RNA, 22 nt, Human
cccacucacccagcucugggca

SEQ ID NO: 111503 - RNA, 21 nt, Human
cccagaggccuccagaggcac

SEQ ID NO: 111504 - RNA, 20 nt, Human
ccccaggaaccacagcacac

SEQ ID NO: 111505 - RNA, 24 nt, Human
ccccaggaaccacagcacacagac

SEQ ID NO: 111506 - RNA, 19 nt, Human
cccuggcuuggcccagccu

SEQ ID NO: 111507 - RNA, 25 nt, Human
cccugucucuaaaaacaaagaaaaa

SEQ ID NO: 111508 - RNA, 21 nt, Human
ccuccggucaguggguuuugc

SEQ ID NO: 111509 - RNA, 23 nt, Human
ccucuggccccgaucuccccauc

SEQ ID NO: 111510 - RNA, 22 nt, Human
ccugcccaccuuguguugggag

SEQ ID NO: 111511 - RNA, 22 nt, Human
cgcaccacugcacuccagcuug

SEQ ID NO: 111512 - RNA, 21 nt, Human
cgccucugccggcaccagcgc

SEQ ID NO: 111513 - RNA, 22 nt, Human
cgucgccgccucugccggcacc

SEQ ID NO: 111514 - RNA, 20 nt, Human
cguuucccucuccccuuccc

SEQ ID NO: 111515 - RNA, 18 nt, Human
cuccccauccacacagcg

SEQ ID NO: 111516 - RNA, 21 nt, Human
cucgggguucuggcuguggcc

SEQ ID NO: 111517 - RNA, 22 nt, Human
cucugggcagagcagcugggcu

SEQ ID NO: 111518 - RNA, 21 nt, Human
cucugugaccauggaaaacua

SEQ ID NO: 111519 - RNA, 22 nt, Human
cugcagugagccaugaucgcac

SEQ ID NO: 111520 - RNA, 20 nt, Human
cugccggcaccagcgcuccg

SEQ ID NO: 111521 - RNA, 20 nt, Human
cuggaaguagggcucggggu

SEQ ID NO: 111522 - RNA, 23 nt, Human
cuggccccgaucuccccauccac

SEQ ID NO: 111523 - RNA, 22 nt, Human
cuggcuguggccccaucccugg

SEQ ID NO: 111524 - RNA, 24 nt, Human
cugggcagagcagcugggcugggc

SEQ ID NO: 111525 - RNA, 26 nt, Human
cuucccagaagcaaccggugggacuu

SEQ ID NO: 111526 - RNA, 22 nt, Human
cuugagcccaggaguucgaggc

SEQ ID NO: 111527 - RNA, 19 nt, Human
cuuggcccagccucgucag

SEQ ID NO: 111528 - RNA, 19 nt, Human
gacccugucucuaaaaaca

SEQ ID NO: 111529 - RNA, 18 nt, Human
gagcccaggaguucgagg

SEQ ID NO: 111530 - RNA, 18 nt, Human
gaggcccagaggccucca

SEQ ID NO: 111531 - RNA, 21 nt, Human
gcaguggagggcaccccagga

SEQ ID NO: 111532 - RNA, 19 nt, Human
gccaugaucgcaccacugc

SEQ ID NO: 111533 - RNA, 22 nt, Human
ggaaaacuacccccagccccac

SEQ ID NO: 111534 - RNA, 24 nt, Human
ggaaaacuacccccagccccacug

SEQ ID NO: 111535 - RNA, 22 nt, Human
ggagauggaaucaaagcccaga

SEQ ID NO: 111536 - RNA, 23 nt, Human
ggaucacucaggaggauugcuug

SEQ ID NO: 111537 - RNA, 23 nt, Human
ggauugcuugagcccaggaguuc

SEQ ID NO: 111538 - RNA, 21 nt, Human
ggcaguggagggcaccccagg

SEQ ID NO: 111539 - RNA, 25 nt, Human
ggcccagaggccuccagaggcacca

SEQ ID NO: 111540 - RNA, 23 nt, Human
ggcucgggguucuggcuguggcc

SEQ ID NO: 111541 - RNA, 22 nt, Human
ggcuggggcugagcuaaccaga

SEQ ID NO: 111542 - RNA, 20 nt, Human
gggagggggcagggacuuag

SEQ ID NO: 111543 - RNA, 21 nt, Human
gggcacguuucccucuccccu

SEQ ID NO: 111544 - RNA, 25 nt, Human
gggcagggacuuaggaccaaaggug

SEQ ID NO: 111545 - RNA, 22 nt, Human
gggcuggggcugagcuaaccag

SEQ ID NO: 111546 - RNA, 18 nt, Human
ggggaagagggcggacag

SEQ ID NO: 111547 - RNA, 21 nt, Human
gguaaauagccccagccuucu

SEQ ID NO: 111548 - RNA, 21 nt, Human
gguagagagcaggacuggagc

SEQ ID NO: 111549 - RNA, 20 nt, Human
gguggcacaacccgagccuc

SEQ ID NO: 111550 - RNA, 24 nt, Human
guggagggcaccccaggaaccaca

SEQ ID NO: 111551 - RNA, 23 nt, Human
guggguuuugcggggcucugagg

SEQ ID NO: 111552 - RNA, 22 nt, Human
uacccugguaaauagccccagc

SEQ ID NO: 111553 - RNA, 19 nt, Human
uagaggaggcccagaggcc

SEQ ID NO: 111554 - RNA, 24 nt, Human
uagcaaggcccuguuacugaacag

SEQ ID NO: 111555 - RNA, 23 nt, Human
uaguguuagaaaccccuucccag

SEQ ID NO: 111556 - RNA, 24 nt, Human
ucaccaggguucugccucuggccc

SEQ ID NO: 111557 - RNA, 19 nt, Human
ucacucaggaggauugcuu

SEQ ID NO: 111558 - RNA, 22 nt, Human
ucaguggguuuugcggggcucu

SEQ ID NO: 111559 - RNA, 20 nt, Human
uccacacagcggagccaggc

SEQ ID NO: 111560 - RNA, 21 nt, Human
uccagaggcaccauggaggca

SEQ ID NO: 111561 - RNA, 20 nt, Human
ucccuggcuuggcccagccu

SEQ ID NO: 111562 - RNA, 22 nt, Human
uccuggagugaggcccccagcc

SEQ ID NO: 111563 - RNA, 23 nt, Human
ucgcaccacugcacuccagcuug

SEQ ID NO: 111564 - RNA, 24 nt, Human
ucgucagcuuugguccagguuccu

SEQ ID NO: 111565 - RNA, 19 nt, Human
ucuccccuucccuucuagg

SEQ ID NO: 111566 - RNA, 25 nt, Human
ucucugugaccauggaaaacuaccc

SEQ ID NO: 111567 - RNA, 19 nt, Human
ugaccauggaaaacuaccc

SEQ ID NO: 111568 - RNA, 20 nt, Human
ugagcauuagaggggaagag

SEQ ID NO: 111569 - RNA, 20 nt, Human
ugaguaaaaaaaaaaaaaaa

SEQ ID NO: 111570 - RNA, 22 nt, Human
ugcagugagccaugaucgcacc

SEQ ID NO: 111571 - RNA, 21 nt, Human
ugcccaccuuguguugggagc

SEQ ID NO: 111572 - RNA, 18 nt, Human
ugccucuggccccgaucu

SEQ ID NO: 111573 - RNA, 19 nt, Human
ugccuuuugccuccgguca

SEQ ID NO: 111574 - RNA, 19 nt, Human
ugcgcggagggacacggga

SEQ ID NO: 111575 - RNA, 22 nt, Human
ugcgcggagggacacgggaguc

SEQ ID NO: 111576 - RNA, 24 nt, Human
ugcgcggagggacacgggagucca

SEQ ID NO: 111577 - RNA, 21 nt, Human
uggaaucaaagcccagagguc

SEQ ID NO: 111578 - RNA, 19 nt, Human
uggaggcaagaugggcugg

SEQ ID NO: 111579 - RNA, 31 nt, Human
ugggaucacucaggaggauugcuugagcccc

SEQ ID NO: 111580 - RNA, 18 nt, Human
ugggcagagcagcugggc

SEQ ID NO: 111581 - RNA, 20 nt, Human
ugggcagagcagcugggcug

SEQ ID NO: 111582 - RNA, 23 nt, Human
ugggcagagcagcugggcugggc

SEQ ID NO: 111583 - RNA, 22 nt, Human
ugguaaauagccccagccuucu

SEQ ID NO: 111584 - RNA, 24 nt, Human
ugucucuaaaaacaaagaaaaaag

SEQ ID NO: 111585 - RNA, 19 nt, Human
uguuagaaaccccuuccca

SEQ ID NO: 111586 - RNA, 23 nt, Human
uguucugcuuucuucccuaguua

SEQ ID NO: 111587 - RNA, 20 nt, Human
uuccuggagugaggccccca

SEQ ID NO: 111588 - RNA, 22 nt, Human
uugcggggcucugaggugucuc

SEQ ID NO: 111589 - RNA, 24 nt, Human
uugcuugagcccaggaguucgagg

SEQ ID NO: 111590 - RNA, 21 nt, Human
uuggcccuuaccagccagggg

SEQ ID NO: 111591 - RNA, 18 nt, Human
uugguccagguuccugaa

SEQ ID NO: 111592 - RNA, 20 nt, Human
uugguccagguuccugaaug

SEQ ID NO: 111593 - RNA, 25 nt, Human
uuuuuuuuuuuuuuuuuuuuuuagg

SEQ ID NO: 111594 - RNA, 18 nt, Human
aaaaguaauaauguuaga

SEQ ID NO: 111595 - RNA, 22 nt, Human
aaacuaagcaaauaagugacau

SEQ ID NO: 111596 - RNA, 20 nt, Human
aacaagcacccauggcgcca

SEQ ID NO: 111597 - RNA, 22 nt, Human
aaccccggaagauuagcccaaa

SEQ ID NO: 111598 - RNA, 21 nt, Human
aaccuggaauauaggaacaca

SEQ ID NO: 111599 - RNA, 24 nt, Human
aagaaacucucccacccgaaaauu

SEQ ID NO: 111600 - RNA, 24 nt, Human
aagcaaauaagugacauguggcaa

SEQ ID NO: 111601 - RNA, 20 nt, Human
aagcacagauacagcauagc

SEQ ID NO: 111602 - RNA, 25 nt, Human
aaguuaaaaaaauauaaccaaggag

SEQ ID NO: 111603 - RNA, 25 nt, Human
acacucacacacaguauaauuuuac

SEQ ID NO: 111604 - RNA, 21 nt, Human
acccugagccuucaucugcac

SEQ ID NO: 111605 - RNA, 19 nt, Human
acgucaaugccaaguguau

SEQ ID NO: 111606 - RNA, 25 nt, Human
acuauaaaaucuacacugcauacgc

SEQ ID NO: 111607 - RNA, 24 nt, Human
agaauggaguuugaguaccuaaac

SEQ ID NO: 111608 - RNA, 24 nt, Human
agcagcuguguuuaucuucaugcu

SEQ ID NO: 111609 - RNA, 19 nt, Human
agcgcuacucauccagggc

SEQ ID NO: 111610 - RNA, 22 nt, Human
aggcaugaaaucuacuuaaacc

SEQ ID NO: 111611 - RNA, 19 nt, Human
agggagccagcaggcagau

SEQ ID NO: 111612 - RNA, 24 nt, Human
agguuccucuuggaggcagcccua

SEQ ID NO: 111613 - RNA, 18 nt, Human
auaaaauauacugugggc

SEQ ID NO: 111614 - RNA, 19 nt, Human
auagcuaaagacuaaagaa

SEQ ID NO: 111615 - RNA, 19 nt, Human
aucaccuuuucauugagca

SEQ ID NO: 111616 - RNA, 20 nt, Human
aucagagguuccucuuggag

SEQ ID NO: 111617 - RNA, 18 nt, Human
auggacaugaaauggcag

SEQ ID NO: 111618 - RNA, 25 nt, Human
auggcauuuuuccauggguucuucc

SEQ ID NO: 111619 - RNA, 18 nt, Human
augggguuaauuaaugag

SEQ ID NO: 111620 - RNA, 26 nt, Human
caacaaacaucuaacaauacaauauu

SEQ ID NO: 111621 - RNA, 23 nt, Human
caauuuaguaauacuugauccaa

SEQ ID NO: 111622 - RNA, 20 nt, Human
cagaaaccaaaguacucucc

SEQ ID NO: 111623 - RNA, 20 nt, Human
cagagcucuccguagucccc

SEQ ID NO: 111624 - RNA, 21 nt, Human
cagauagacuuaacucaaagu

SEQ ID NO: 111625 - RNA, 19 nt, Human
caggacaaaagacuggcaa

SEQ ID NO: 111626 - RNA, 21 nt, Human
caggcagauucaaggugugca

SEQ ID NO: 111627 - RNA, 23 nt, Human
caggcagauucaaggugugcaga

SEQ ID NO: 111628 - RNA, 19 nt, Human
cagggccuaauucucaucu

SEQ ID NO: 111629 - RNA, 21 nt, Human
cauagcugugaaaagagcauu

SEQ ID NO: 111630 - RNA, 19 nt, Human
ccacugcucaaacaucuga

SEQ ID NO: 111631 - RNA, 19 nt, Human
ccucuagcacccugagccu

SEQ ID NO: 111632 - RNA, 22 nt, Human
cgaaccccggaagauuagccca

SEQ ID NO: 111633 - RNA, 21 nt, Human
cggcucccugcagagcucucc

SEQ ID NO: 111634 - RNA, 22 nt, Human
cuaaacuauggaaacauuagca

SEQ ID NO: 111635 - RNA, 25 nt, Human
cucaaaaugacugagaaagugaccc

SEQ ID NO: 111636 - RNA, 25 nt, Human
cucaaaaugacugagaaagugaccc

SEQ ID NO: 111637 - RNA, 20 nt, Human
cucgagagcuagaaaucacc

SEQ ID NO: 111638 - RNA, 21 nt, Human
cugaagcuacauuuaauaaca

SEQ ID NO: 111639 - RNA, 25 nt, Human
cuggcaauaacacuacaaauacauc

SEQ ID NO: 111640 - RNA, 22 nt, Human
cugugcugccagggaggcauca

SEQ ID NO: 111641 - RNA, 24 nt, Human
cuucauagcugugaaaagagcauu

SEQ ID NO: 111642 - RNA, 24 nt, Human
cuuggcccgggcgggggccucggc

SEQ ID NO: 111643 - RNA, 22 nt, Human
gaaacucucccacccgaggcac

SEQ ID NO: 111644 - RNA, 22 nt, Human
gaaccccggaagauuagcccaa

SEQ ID NO: 111645 - RNA, 21 nt, Human
gaacugccccaucaggcugcu

SEQ ID NO: 111646 - RNA, 19 nt, Human
gauacuacggacaguuaca

SEQ ID NO: 111647 - RNA, 20 nt, Human
gaucuugaaagcacaacaca

SEQ ID NO: 111648 - RNA, 24 nt, Human
gccauugcccagcauuuaggagau

SEQ ID NO: 111649 - RNA, 18 nt, Human
ggcaaguacaucauccuc

SEQ ID NO: 111650 - RNA, 19 nt, Human
gggcaaguacaucauccuc

SEQ ID NO: 111651 - RNA, 24 nt, Human
ggugguugggccuauuuccugcag

SEQ ID NO: 111652 - RNA, 23 nt, Human
guaauagcuaaagacuaaagaaa

SEQ ID NO: 111653 - RNA, 19 nt, Human
gucacaguuuucucacuuu

SEQ ID NO: 111654 - RNA, 20 nt, Human
guguaggacagaugucuaca

SEQ ID NO: 111655 - RNA, 23 nt, Human
uaaacaaauauuaauagcacaua

SEQ ID NO: 111656 - RNA, 19 nt, Human
uaaaugcaaacuaaacccu

SEQ ID NO: 111657 - RNA, 22 nt, Human
uaaauuuuuaaguaugaaugaa

SEQ ID NO: 111658 - RNA, 24 nt, Human
uaacaguuacggacagaaacacac

SEQ ID NO: 111659 - RNA, 19 nt, Human
uaacucaaagugccagaga

SEQ ID NO: 111660 - RNA, 24 nt, Human
uaacuuguaaaaauggacaucucu

SEQ ID NO: 111661 - RNA, 19 nt, Human
uaagaugccacggcaaugu

SEQ ID NO: 111662 - RNA, 20 nt, Human
uaagcaccaaguuuagugcu

SEQ ID NO: 111663 - RNA, 20 nt, Human
uaaguuaacaguuuaauuac

SEQ ID NO: 111664 - RNA, 21 nt, Human
uaauagcacauaaacacugau

SEQ ID NO: 111665 - RNA, 24 nt, Human
uacgaaccccggaagauuagccca

SEQ ID NO: 111666 - RNA, 22 nt, Human
uacgguuauuucagugucaaaa

SEQ ID NO: 111667 - RNA, 22 nt, Human
uacuacggacaguuacauuuca

SEQ ID NO: 111668 - RNA, 23 nt, Human
uacuacggacaguuacauuucac

SEQ ID NO: 111669 - RNA, 23 nt, Human
uagaacagcuauaguccagaaga

SEQ ID NO: 111670 - RNA, 21 nt, Human
uagaauaucaauaagcaccaa

SEQ ID NO: 111671 - RNA, 22 nt, Human
uagaucuugaaagcacaacaca

SEQ ID NO: 111672 - RNA, 23 nt, Human
uagaucuugaaagcacaacacac

SEQ ID NO: 111673 - RNA, 22 nt, Human
uagcccaaaccuaccaagacag

SEQ ID NO: 111674 - RNA, 25 nt, Human
uaggccacugcucaaacaucugacu

SEQ ID NO: 111675 - RNA, 19 nt, Human
uagugacugacauauugcu

SEQ ID NO: 111676 - RNA, 22 nt, Human
uauaugauuuagaucuugaaag

SEQ ID NO: 111677 - RNA, 22 nt, Human
ucaccagauagaugccagcucu

SEQ ID NO: 111678 - RNA, 24 nt, Human
uccccugguccucgggacagaagc

SEQ ID NO: 111679 - RNA, 21 nt, Human
ucccuuggcccgggcgggggc

SEQ ID NO: 111680 - RNA, 24 nt, Human
uccuacgaaccccggaagauuagc

SEQ ID NO: 111681 - RNA, 20 nt, Human
uccucuagcacccugagccu

SEQ ID NO: 111682 - RNA, 21 nt, Human
uccuuagcccaaaccuaccaa

SEQ ID NO: 111683 - RNA, 21 nt, Human
ucuacacugcauacgcacaaa

SEQ ID NO: 111684 - RNA, 22 nt, Human
ucuuacuaauccucuagcaccc

SEQ ID NO: 111685 - RNA, 21 nt, Human
ugaaauggcagaaauuaauca

SEQ ID NO: 111686 - RNA, 22 nt, Human
ugacccacagggggcaaucccu

SEQ ID NO: 111687 - RNA, 24 nt, Human
ugacuuuuuagaaaccuauuuaca

SEQ ID NO: 111688 - RNA, 23 nt, Human
ugagaaagugacccacagggggc

SEQ ID NO: 111689 - RNA, 23 nt, Human
ugagaaagugacccacagggggc

SEQ ID NO: 111690 - RNA, 19 nt, Human
ugagauguuuucucuuuga

SEQ ID NO: 111691 - RNA, 22 nt, Human
ugauaaaaaaaaaaaugagcag

SEQ ID NO: 111692 - RNA, 18 nt, Human
ugauauggguggucucuu

SEQ ID NO: 111693 - RNA, 22 nt, Human
ugauccccaguaggccuaguac

SEQ ID NO: 111694 - RNA, 18 nt, Human
ugcaaacuaaacccuggu

SEQ ID NO: 111695 - RNA, 20 nt, Human
ugcaagagugcagcaagugg

SEQ ID NO: 111696 - RNA, 21 nt, Human
ugcaguuucaaaaaugaaccg

SEQ ID NO: 111697 - RNA, 19 nt, Human
ugugcaagagugcagcaag

SEQ ID NO: 111698 - RNA, 22 nt, Human
uuaaaccuggaauauaggaaca

SEQ ID NO: 111699 - RNA, 23 nt, Human
uuaaguagauucuucagcaauau

SEQ ID NO: 111700 - RNA, 20 nt, Human
uuaaucaacaggacaguaac

SEQ ID NO: 111701 - RNA, 24 nt, Human
uuaaugacugaagcuacauuuaau

SEQ ID NO: 111702 - RNA, 21 nt, Human
uuagacuuccaauuguguagc

SEQ ID NO: 111703 - RNA, 18 nt, Human
uuagccacaugggcuggg

SEQ ID NO: 111704 - RNA, 22 nt, Human
uucacuguaaaccccuggagaa

SEQ ID NO: 111705 - RNA, 30 nt, Human
uuggaugccugucauuauuuuuugcuaagg

SEQ ID NO: 111706 - RNA, 20 nt, Human
uuuccuacgaaccccggaag

SEQ ID NO: 111707 - RNA, 20 nt, Human
uuucuauauuacaauaggca

SEQ ID NO: 111708 - RNA, 21 nt, Human
uuugaagucuucaaauucuuc

SEQ ID NO: 111709 - RNA, 22 nt, Human
uuuuauggacaugaaauggcag

SEQ ID NO: 111710 - RNA, 24 nt, Human
uuuuuaucaacaagauuacaggaa

SEQ ID NO: 111711 - RNA, 23 nt, Human
agaaccgcccacuccccccaccc

SEQ ID NO: 111712 - RNA, 24 nt, Human
agaaccgcccacuccccccacccu

SEQ ID NO: 111713 - RNA, 21 nt, Human
agacaggaggcuggggcagga

SEQ ID NO: 111714 - RNA, 22 nt, Human
agacaggaggcuggggcaggag

SEQ ID NO: 111715 - RNA, 19 nt, Human
agacuagaagggacugaca

SEQ ID NO: 111716 - RNA, 25 nt, Human
aggcuccccucacgucccccaaggg

SEQ ID NO: 111717 - RNA, 20 nt, Human
agggguauacaaaacagggc

SEQ ID NO: 111718 - RNA, 19 nt, Human
cacccgggcuucgcgccgc

SEQ ID NO: 111719 - RNA, 21 nt, Human
cacgucccccaagggcuccug

SEQ ID NO: 111720 - RNA, 21 nt, Human
cagcccaaggggccaggguga

SEQ ID NO: 111721 - RNA, 19 nt, Human
cagcgagcgaggcagggag

SEQ ID NO: 111722 - RNA, 20 nt, Human
cccaagggcuccugggaguc

SEQ ID NO: 111723 - RNA, 24 nt, Human
ccccccacccuguauauacaucua

SEQ ID NO: 111724 - RNA, 24 nt, Human
ccgcccccggcagcgagcgaggca

SEQ ID NO: 111725 - RNA, 21 nt, Human
ccgcgccuuccgaccgccccc

SEQ ID NO: 111726 - RNA, 24 nt, Human
ccugcccgugugcaaaauagaaac

SEQ ID NO: 111727 - RNA, 18 nt, Human
cgcccacuccccccaccc

SEQ ID NO: 111728 - RNA, 19 nt, Human
cgcccucgggccacccggg

SEQ ID NO: 111729 - RNA, 19 nt, Human
cgcccucgggccacccggg

SEQ ID NO: 111730 - RNA, 21 nt, Human
cgccgcgccuuccgaccgccc

SEQ ID NO: 111731 - RNA, 19 nt, Human
cgccggaucccaccgccga

SEQ ID NO: 111732 - RNA, 22 nt, Human
cgccggggucuccacaaauugu

SEQ ID NO: 111733 - RNA, 20 nt, Human
cggcagcgagcgaggcaggg

SEQ ID NO: 111734 - RNA, 19 nt, Human
cuccggccuccugcuccuc

SEQ ID NO: 111735 - RNA, 19 nt, Human
cugaugguggcaacagaga

SEQ ID NO: 111736 - RNA, 24 nt, Human
cugcauggcccaccuccccugagg

SEQ ID NO: 111737 - RNA, 21 nt, Human
cugggcccccccagcaucagg

SEQ ID NO: 111738 - RNA, 23 nt, Human
cuuggugcggcagggcugggggg

SEQ ID NO: 111739 - RNA, 18 nt, Human
gaaggagggccagcuugg

SEQ ID NO: 111740 - RNA, 21 nt, Human
gacaggaggcuggggcaggag

SEQ ID NO: 111741 - RNA, 20 nt, Human
gaggcuggggcaggaggagg

SEQ ID NO: 111742 - RNA, 22 nt, Human
gcaccgcccgccggaucccacc

SEQ ID NO: 111743 - RNA, 24 nt, Human
gcccucgggccacccgggcuucgc

SEQ ID NO: 111744 - RNA, 22 nt, Human
gcgccgcgccuuccgaccgccc

SEQ ID NO: 111745 - RNA, 21 nt, Human
gcuccggccuccugcuccucu

SEQ ID NO: 111746 - RNA, 20 nt, Human
ggagcagggucaggggaggg

SEQ ID NO: 111747 - RNA, 21 nt, Human
ggagcagggucaggggagggg

SEQ ID NO: 111748 - RNA, 24 nt, Human
ggagggccagcuuggugcggcagg

SEQ ID NO: 111749 - RNA, 21 nt, Human
ggaggggacugaaaauugugg

SEQ ID NO: 111750 - RNA, 23 nt, Human
ggccagcuuggugcggcagggcu

SEQ ID NO: 111751 - RNA, 22 nt, Human
ggcccgggcccgccggggucuc

SEQ ID NO: 111752 - RNA, 19 nt, Human
ggcggcaggcccgggcccg

SEQ ID NO: 111753 - RNA, 19 nt, Human
gggagggggauggcugggc

SEQ ID NO: 111754 - RNA, 20 nt, Human
ggggagggggauggcugggc

SEQ ID NO: 111755 - RNA, 21 nt, Human
ggggggcggcaggcccgggcc

SEQ ID NO: 111756 - RNA, 20 nt, Human
ggugcucugcauguccucau

SEQ ID NO: 111757 - RNA, 23 nt, Human
uaaucugaugguggcaacagaga

SEQ ID NO: 111758 - RNA, 21 nt, Human
uacaaaacagggcagagggga

SEQ ID NO: 111759 - RNA, 20 nt, Human
uacugugggauaggagcagg

SEQ ID NO: 111760 - RNA, 19 nt, Human
uagaagggacugacagggc

SEQ ID NO: 111761 - RNA, 20 nt, Human
uagaagggacugacagggca

SEQ ID NO: 111762 - RNA, 20 nt, Human
uagacaggaggcuggggcag

SEQ ID NO: 111763 - RNA, 19 nt, Human
ucagacuagaagggacuga

SEQ ID NO: 111764 - RNA, 20 nt, Human
ucaggagcuuauaaucugau

SEQ ID NO: 111765 - RNA, 22 nt, Human
ucccccaagggcuccugggagu

SEQ ID NO: 111766 - RNA, 20 nt, Human
ucugaagagaaugcaaaagg

SEQ ID NO: 111767 - RNA, 23 nt, Human
ucugcaggugcucugcauguccc

SEQ ID NO: 111768 - RNA, 27 nt, Human
ugaaaauugugggugcuggggggaggg

SEQ ID NO: 111769 - RNA, 22 nt, Human
ugaaauggugacguuuaaugag

SEQ ID NO: 111770 - RNA, 25 nt, Human
ugacagggcauuaaauacuguggga

SEQ ID NO: 111771 - RNA, 19 nt, Human
ugagggaggaaggagggcc

SEQ ID NO: 111772 - RNA, 19 nt, Human
ugagggggucuuugguggg

SEQ ID NO: 111773 - RNA, 23 nt, Human
ugagucagacuagaagggacuga

SEQ ID NO: 111774 - RNA, 21 nt, Human
ugggugcuggggggaggggga

SEQ ID NO: 111775 - RNA, 18 nt, Human
uggugcggcagggcuggg

SEQ ID NO: 111776 - RNA, 21 nt, Human
uggugcggcagggcugggggg

SEQ ID NO: 111777 - RNA, 25 nt, Human
ugguggguggguuagcugcauggcc

SEQ ID NO: 111778 - RNA, 20 nt, Human
ugucugaagagaaugcaaaa

SEQ ID NO: 111779 - RNA, 23 nt, Human
ugucugaagagaaugcaaaaggu

SEQ ID NO: 111780 - RNA, 21 nt, Human
ugugcaaaauagaaaccgggg

SEQ ID NO: 111781 - RNA, 20 nt, Human
uucaaauacagcaaguuacc

SEQ ID NO: 111782 - RNA, 21 nt, Human
uugguggguggguuagcugca

SEQ ID NO: 111783 - RNA, 22 nt, Human
uugguggguggguuagcugcau

SEQ ID NO: 111784 - RNA, 21 nt, Human
uugugggugcuggggggaggg

SEQ ID NO: 111785 - RNA, 22 nt, Human
agccgcagaaauuggaaggaau

SEQ ID NO: 111786 - RNA, 19 nt, Human
caccuguucccugcuccug

SEQ ID NO: 111787 - RNA, 23 nt, Human
cucgccucggugcggcacagccg

SEQ ID NO: 111788 - RNA, 18 nt, Human
cugcuccugcucgccucg

SEQ ID NO: 111789 - RNA, 23 nt, Human
uagcucuauggcaguuggauaau

SEQ ID NO: 111790 - RNA, 21 nt, Human
uaggauggagccgcagaaauu

SEQ ID NO: 111791 - RNA, 26 nt, Human
uauggcaguuggauaauuuuaaacac

SEQ ID NO: 111792 - RNA, 19 nt, Human
ugggaugggaacagcagcu

SEQ ID NO: 111793 - RNA, 22 nt, Human
uguaaaucaguugaauaguuug

SEQ ID NO: 111794 - RNA, 26 nt, Human
uuccaaaaaagaauuuagcucuaugg

SEQ ID NO: 111795 - RNA, 18 nt, Human
aaugggucuuggaggggu

SEQ ID NO: 111796 - RNA, 20 nt, Human
accuccuacaaaaagggcac

SEQ ID NO: 111797 - RNA, 22 nt, Human
agcucuuggucccagggcuugc

SEQ ID NO: 111798 - RNA, 18 nt, Human
aggaccuggggcgagaga

SEQ ID NO: 111799 - RNA, 19 nt, Human
aggcgggagagcucuuggu

SEQ ID NO: 111800 - RNA, 26 nt, Human
aggcgggagagcucuuggucccaggg

SEQ ID NO: 111801 - RNA, 21 nt, Human
agggacugugcagaauggguc

SEQ ID NO: 111802 - RNA, 23 nt, Human
aguuaucggggacagcgucaggg

SEQ ID NO: 111803 - RNA, 23 nt, Human
aucaccccccucaaagcugaagg

SEQ ID NO: 111804 - RNA, 22 nt, Human
auguccgggcagagguggggau

SEQ ID NO: 111805 - RNA, 25 nt, Human
auuggccaucuccugcccaaacccu

SEQ ID NO: 111806 - RNA, 22 nt, Human
caagacaagcccuuuagucacc

SEQ ID NO: 111807 - RNA, 23 nt, Human
caagacaagcccuuuagucaccc

SEQ ID NO: 111808 - RNA, 25 nt, Human
caauaccaggacacaccagcaugaa

SEQ ID NO: 111809 - RNA, 21 nt, Human
caccccccucaaagcugaagg

SEQ ID NO: 111810 - RNA, 19 nt, Human
cacuucgcuccaguucuuc

SEQ ID NO: 111811 - RNA, 20 nt, Human
cagcaggaaggggcuggcug

SEQ ID NO: 111812 - RNA, 21 nt, Human
cagccuggaguaucacccccc

SEQ ID NO: 111813 - RNA, 23 nt, Human
caggaaggggcuggcuguguccg

SEQ ID NO: 111814 - RNA, 21 nt, Human
caggcucccagccucaggcau

SEQ ID NO: 111815 - RNA, 21 nt, Human
caucuccugcccaaacccugg

SEQ ID NO: 111816 - RNA, 23 nt, Human
ccaauaccaggacacaccagcau

SEQ ID NO: 111817 - RNA, 20 nt, Human
ccaccaagggcccuggccuc

SEQ ID NO: 111818 - RNA, 20 nt, Human
ccccaccaagacaagcccuu

SEQ ID NO: 111819 - RNA, 25 nt, Human
ccccucccaggcaggagugagucag

SEQ ID NO: 111820 - RNA, 24 nt, Human
cccuucuucccaugggccuguucc

SEQ ID NO: 111821 - RNA, 19 nt, Human
ccucccaggcaggagugag

SEQ ID NO: 111822 - RNA, 26 nt, Human
ccuccuacaaaaagggcacuguuuaa

SEQ ID NO: 111823 - RNA, 18 nt, Human
ccuggagggacugugcag

SEQ ID NO: 111824 - RNA, 19 nt, Human
ccugggagcaggcagggcc

SEQ ID NO: 111825 - RNA, 18 nt, Human
ccuucccagaaaccuccc

SEQ ID NO: 111826 - RNA, 22 nt, Human
cggaucuggccaggugguccua

SEQ ID NO: 111827 - RNA, 23 nt, Human
cgucaggguccuugcugcugcuc

SEQ ID NO: 111828 - RNA, 20 nt, Human
cugcauuccccucccaggca

SEQ ID NO: 111829 - RNA, 19 nt, Human
cuucaaccuguucaugucu

SEQ ID NO: 111830 - RNA, 23 nt, Human
gaagacauguuuuuaaaaccccc

SEQ ID NO: 111831 - RNA, 18 nt, Human
gaagagccucagcucagc

SEQ ID NO: 111832 - RNA, 21 nt, Human
gaccuggggcgagagaagggu

SEQ ID NO: 111833 - RNA, 23 nt, Human
gaggcugagaaaggaccuggggc

SEQ ID NO: 111834 - RNA, 18 nt, Human
gcagaaugggucuuggag

SEQ ID NO: 111835 - RNA, 21 nt, Human
gccccuuuccaccaagggccc

SEQ ID NO: 111836 - RNA, 18 nt, Human
gcccuggccucucaacuc

SEQ ID NO: 111837 - RNA, 24 nt, Human
gcccuggccucucaacucuuuuug

SEQ ID NO: 111838 - RNA, 21 nt, Human
ggaaaugcaagcaguccaagg

SEQ ID NO: 111839 - RNA, 18 nt, Human
ggagaaggcgggagagcu

SEQ ID NO: 111840 - RNA, 18 nt, Human
ggagcggaucuggccagg

SEQ ID NO: 111841 - RNA, 21 nt, Human
ggauguccgggcagagguggg

SEQ ID NO: 111842 - RNA, 21 nt, Human
ggcgcagagggagggguucca

SEQ ID NO: 111843 - RNA, 24 nt, Human
gggagaccccaccaagacaagccc

SEQ ID NO: 111844 - RNA, 24 nt, Human
gggcgcugguucucagccgcuugg

SEQ ID NO: 111845 - RNA, 24 nt, Human
gggguuuuuuuuuucaggaaagga

SEQ ID NO: 111846 - RNA, 22 nt, Human
gucugguguuccugccgggccu

SEQ ID NO: 111847 - RNA, 21 nt, Human
gugcagaaugggucuuggagg

SEQ ID NO: 111848 - RNA, 22 nt, Human
gugcagaaugggucuuggaggg

SEQ ID NO: 111849 - RNA, 24 nt, Human
uaaaacccccuucuucccaugggc

SEQ ID NO: 111850 - RNA, 18 nt, Human
uaucucagaccaaggcug

SEQ ID NO: 111851 - RNA, 20 nt, Human
ucaacucuuuuuggcuccca

SEQ ID NO: 111852 - RNA, 22 nt, Human
ucaggcucccagccucaggcau

SEQ ID NO: 111853 - RNA, 21 nt, Human
uccagcugcggcgcagaggga

SEQ ID NO: 111854 - RNA, 24 nt, Human
ucccaauaccaggacacaccagca

SEQ ID NO: 111855 - RNA, 19 nt, Human
ucccagagggccaucucug

SEQ ID NO: 111856 - RNA, 18 nt, Human
ucccagggcuugcccuuc

SEQ ID NO: 111857 - RNA, 19 nt, Human
ucccagggcuugcccuucu

SEQ ID NO: 111858 - RNA, 24 nt, Human
ucccaugggccuguuccuucccuc

SEQ ID NO: 111859 - RNA, 20 nt, Human
uccccucccaggcaggaguu

SEQ ID NO: 111860 - RNA, 20 nt, Human
uccgggcagagguggggauc

SEQ ID NO: 111861 - RNA, 18 nt, Human
ucggggacagcgucaggg

SEQ ID NO: 111862 - RNA, 22 nt, Human
ucuggcacagugucaggccacc

SEQ ID NO: 111863 - RNA, 25 nt, Human
ucuuccuuagacugaaggaugguga

SEQ ID NO: 111864 - RNA, 19 nt, Human
ugacagggucagguuggca

SEQ ID NO: 111865 - RNA, 21 nt, Human
ugacugcaggcagcacuggag

SEQ ID NO: 111866 - RNA, 22 nt, Human
ugcaagcaguccaaggccgucu

SEQ ID NO: 111867 - RNA, 22 nt, Human
ugcccuucuuccuuagacugaa

SEQ ID NO: 111868 - RNA, 24 nt, Human
uggagaggugggcgcaugauuggc

SEQ ID NO: 111869 - RNA, 20 nt, Human
uggaugcugcccgagucggu

SEQ ID NO: 111870 - RNA, 22 nt, Human
uggcacagugucaggccaccuu

SEQ ID NO: 111871 - RNA, 18 nt, Human
uggcagcaggaaggggcu

SEQ ID NO: 111872 - RNA, 20 nt, Human
uggcagcaggaaggggcugg

SEQ ID NO: 111873 - RNA, 21 nt, Human
uggccaggugguccuagguau

SEQ ID NO: 111874 - RNA, 22 nt, Human
uggcguccagcugcggcgcaga

SEQ ID NO: 111875 - RNA, 18 nt, Human
uggcuggggcagguggau

SEQ ID NO: 111876 - RNA, 27 nt, Human
ugggagagcagagucuggggcugguca

SEQ ID NO: 111877 - RNA, 22 nt, Human
ugggccuguuccuucccuccag

SEQ ID NO: 111878 - RNA, 21 nt, Human
uggggcugcaggucggggagg

SEQ ID NO: 111879 - RNA, 22 nt, Human
ugggucuuggaggggugggaga

SEQ ID NO: 111880 - RNA, 23 nt, Human
ugugcagaaugggucuuggaggg

SEQ ID NO: 111881 - RNA, 23 nt, Human
ugugcagaaugggucuuggaggg

SEQ ID NO: 111882 - RNA, 25 nt, Human
ugugcagaaugggucuuggaggggu

SEQ ID NO: 111883 - RNA, 24 nt, Human
uguuccuucccuccaggcagccua

SEQ ID NO: 111884 - RNA, 24 nt, Human
uuggggacagcccagcuggaggcu

SEQ ID NO: 111885 - RNA, 25 nt, Human
uuuaaagaaaauccuugcguggguu

SEQ ID NO: 111886 - RNA, 28 nt, Human
uuuuaaaacccccuucuucccaugggcc

SEQ ID NO: 111887 - RNA, 18 nt, Human
uuuuuuuuuuuuuggggg

SEQ ID NO: 111888 - RNA, 19 nt, Human
uuuuuuuuuuuuuuggggg

SEQ ID NO: 111889 - RNA, 20 nt, Human
uuuuuuuuuuuuuuuggggg

SEQ ID NO: 111890 - RNA, 22 nt, Human
uuuuuuuuuuuuuuuuuggggg

SEQ ID NO: 111891 - RNA, 18 nt, Human
aaaaaaacaugcauaauc

SEQ ID NO: 111892 - RNA, 20 nt, Human
aaaaagagagggucccuuaa

SEQ ID NO: 111893 - RNA, 25 nt, Human
aaacagaaugaagcuugaaaaucug

SEQ ID NO: 111894 - RNA, 24 nt, Human
aaacaucauucuucuaagccccac

SEQ ID NO: 111895 - RNA, 23 nt, Human
aacaucauucuucuaagccccac

SEQ ID NO: 111896 - RNA, 22 nt, Human
aacuaauucauggggcaaaguc

SEQ ID NO: 111897 - RNA, 20 nt, Human
aacucaggaacuaaaaagcc

SEQ ID NO: 111898 - RNA, 20 nt, Human
aagcacuuuuuuugguaacc

SEQ ID NO: 111899 - RNA, 21 nt, Human
aauaacaauggucauaugaaa

SEQ ID NO: 111900 - RNA, 18 nt, Human
aauugguaggaaagaggu

SEQ ID NO: 111901 - RNA, 25 nt, Human
acaugccacuccucuccaacaaaau

SEQ ID NO: 111902 - RNA, 19 nt, Human
agaaacaacaugaaacaau

SEQ ID NO: 111903 - RNA, 24 nt, Human
agauauauugcuagaaacaacaug

SEQ ID NO: 111904 - RNA, 20 nt, Human
agcauuugaauuaaaugaaa

SEQ ID NO: 111905 - RNA, 29 nt, Human
aggaaagagguaaaaaacugagggacccc

SEQ ID NO: 111906 - RNA, 26 nt, Human
aggaauaauugagagguacagauggc

SEQ ID NO: 111907 - RNA, 21 nt, Human
aggaauugaaagauaaauuuu

SEQ ID NO: 111908 - RNA, 21 nt, Human
agggucccuuaauggaauugg

SEQ ID NO: 111909 - RNA, 20 nt, Human
aguauaggaacauauaggaa

SEQ ID NO: 111910 - RNA, 20 nt, Human
agucugaaguauguaauaug

SEQ ID NO: 111911 - RNA, 21 nt, Human
aucucauggagauauauugcu

SEQ ID NO: 111912 - RNA, 18 nt, Human
augaaacaaagugcauau

SEQ ID NO: 111913 - RNA, 19 nt, Human
augaagcuugaaaaucugg

SEQ ID NO: 111914 - RNA, 20 nt, Human
cacacacaggaauugaaaga

SEQ ID NO: 111915 - RNA, 20 nt, Human
cacuccucuccaacaaaaua

SEQ ID NO: 111916 - RNA, 20 nt, Human
cacugcauuucaugaaagca

SEQ ID NO: 111917 - RNA, 20 nt, Human
cagcagcauugccuugguuc

SEQ ID NO: 111918 - RNA, 20 nt, Human
cauaggauacacacacagga

SEQ ID NO: 111919 - RNA, 21 nt, Human
cauccaaaaagagaggguccc

SEQ ID NO: 111920 - RNA, 23 nt, Human
ccaaaccaaacaucauucuucua

SEQ ID NO: 111921 - RNA, 20 nt, Human
cugaacuguuuucuaauucu

SEQ ID NO: 111922 - RNA, 23 nt, Human
cuucuaagccccacaguagcauu

SEQ ID NO: 111923 - RNA, 21 nt, Human
gaaaaguauaggaacauauag

SEQ ID NO: 111924 - RNA, 19 nt, Human
gaaagagguaaaaaacuga

SEQ ID NO: 111925 - RNA, 24 nt, Human
gaaugaaacagaaugaagcuugaa

SEQ ID NO: 111926 - RNA, 19 nt, Human
gagcaaucaucuugaaaau

SEQ ID NO: 111927 - RNA, 20 nt, Human
gagggauuauguggauuuug

SEQ ID NO: 111928 - RNA, 22 nt, Human
gcaauguugaaaacucaaucug

SEQ ID NO: 111929 - RNA, 21 nt, Human
ggaaagagguaaaaaacugau

SEQ ID NO: 111930 - RNA, 25 nt, Human
guugagauucaggucauuccugauu

SEQ ID NO: 111931 - RNA, 23 nt, Human
uaaaaaacugauuuugcaauguu

SEQ ID NO: 111932 - RNA, 18 nt, Human
uaaaaagccugccagacu

SEQ ID NO: 111933 - RNA, 18 nt, Human
uaaaaggauuuacuguuu

SEQ ID NO: 111934 - RNA, 21 nt, Human
uaagaguugaaaaaaacaugc

SEQ ID NO: 111935 - RNA, 21 nt, Human
uaagccccacaguagcauuuu

SEQ ID NO: 111936 - RNA, 19 nt, Human
uaauaaaaaggaguuaaua

SEQ ID NO: 111937 - RNA, 23 nt, Human
uaaucacugcauuucaugaaagc

SEQ ID NO: 111938 - RNA, 22 nt, Human
uacaacuaguuagcagcauacc

SEQ ID NO: 111939 - RNA, 28 nt, Human
uagaaaauaauacauacagauaaccauu

SEQ ID NO: 111940 - RNA, 19 nt, Human
uauacaguauaugcggacc

SEQ ID NO: 111941 - RNA, 20 nt, Human
uauacaguauaugcggaccu

SEQ ID NO: 111942 - RNA, 21 nt, Human
uaucugaacuguuuucuaauu

SEQ ID NO: 111943 - RNA, 22 nt, Human
uauugcuagaaacaacaugaag

SEQ ID NO: 111944 - RNA, 22 nt, Human
ucacugcauuucaugaaagcac

SEQ ID NO: 111945 - RNA, 19 nt, Human
ucuaagccccacaguagca

SEQ ID NO: 111946 - RNA, 22 nt, Human
ucuccugggagacaaaucuccg

SEQ ID NO: 111947 - RNA, 20 nt, Human
ucugaacuguuuucuaauuc

SEQ ID NO: 111948 - RNA, 20 nt, Human
ugaaaacucaaucugcugau

SEQ ID NO: 111949 - RNA, 18 nt, Human
ugaaauugguaggaaaga

SEQ ID NO: 111950 - RNA, 21 nt, Human
ugcccugucuccugggagaca

SEQ ID NO: 111951 - RNA, 19 nt, Human
uggaaauaugaacaaguuu

SEQ ID NO: 111952 - RNA, 20 nt, Human
uggaauauaacugaaugaaa

SEQ ID NO: 111953 - RNA, 21 nt, Human
uguaaaaagaaauucucaugc

SEQ ID NO: 111954 - RNA, 21 nt, Human
uguguacaugugagagugugu

SEQ ID NO: 111955 - RNA, 25 nt, Human
uguguguguacaugugagagugugu

SEQ ID NO: 111956 - RNA, 22 nt, Human
uguuuaauauuuggguugagau

SEQ ID NO: 111957 - RNA, 22 nt, Human
uuagcagcauaccaaaccaaac

SEQ ID NO: 111958 - RNA, 22 nt, Human
uucccacaucagacggcuccac

SEQ ID NO: 111959 - RNA, 24 nt, Human
uuugaaucacaugccacuccucuc

SEQ ID NO: 111960 - RNA, 20 nt, Human
aaaacagccuuugcuuucaa

SEQ ID NO: 111961 - RNA, 23 nt, Human
aaaggaagagaauguugggggcc

SEQ ID NO: 111962 - RNA, 19 nt, Human
aaauaauaaauuuccaucu

SEQ ID NO: 111963 - RNA, 19 nt, Human
aacaucgacauuugcuuca

SEQ ID NO: 111964 - RNA, 22 nt, Human
aaccagcaaugguaaaagggca

SEQ ID NO: 111965 - RNA, 22 nt, Human
aacuauaaaagaaaaagagcaa

SEQ ID NO: 111966 - RNA, 24 nt, Human
aagcaacagguaccagguuuguga

SEQ ID NO: 111967 - RNA, 19 nt, Human
aaguauaagaggcuugaaa

SEQ ID NO: 111968 - RNA, 23 nt, Human
aauaaaacagccuuugcuuucaa

SEQ ID NO: 111969 - RNA, 24 nt, Human
aauaagacagauaguaccuacaaa

SEQ ID NO: 111970 - RNA, 26 nt, Human
accaggugccaugcacucucccaugg

SEQ ID NO: 111971 - RNA, 21 nt, Human
accgccucuuaaccucuccca

SEQ ID NO: 111972 - RNA, 18 nt, Human
acugcguaagagcagggu

SEQ ID NO: 111973 - RNA, 24 nt, Human
agaaaaaaaauacccacguucuaa

SEQ ID NO: 111974 - RNA, 22 nt, Human
agaacaauagcaucuauaccuu

SEQ ID NO: 111975 - RNA, 25 nt, Human
agaacaauagcaucuauaccuucga

SEQ ID NO: 111976 - RNA, 19 nt, Human
agaacagauuccaucauag

SEQ ID NO: 111977 - RNA, 18 nt, Human
agagagaaaaaaguagga

SEQ ID NO: 111978 - RNA, 24 nt, Human
agaggaagagagaaaaaaguagga

SEQ ID NO: 111979 - RNA, 19 nt, Human
agaguuggaagaaagacuu

SEQ ID NO: 111980 - RNA, 27 nt, Human
aggguggugaaaagaaaaaaugggggg

SEQ ID NO: 111981 - RNA, 30 nt, Human
agucaccacgcucacugaaaaaauuuaaaa

SEQ ID NO: 111982 - RNA, 27 nt, Human
auagguucucuuugccccuuucuuuuc

SEQ ID NO: 111983 - RNA, 24 nt, Human
caacaaaauagcuuuuucaaccuc

SEQ ID NO: 111984 - RNA, 21 nt, Human
caaugguaaaagggcaucagg

SEQ ID NO: 111985 - RNA, 18 nt, Human
cacagaagauguuuccug

SEQ ID NO: 111986 - RNA, 22 nt, Human
cacagcacuaaccucugcaguc

SEQ ID NO: 111987 - RNA, 18 nt, Human
cacugagagcuugggcgg

SEQ ID NO: 111988 - RNA, 19 nt, Human
cagccaccaacuuucccug

SEQ ID NO: 111989 - RNA, 18 nt, Human
cauaaacgggccauuaaa

SEQ ID NO: 111990 - RNA, 25 nt, Human
cauuuuuuguauuauuuuguuuuga

SEQ ID NO: 111991 - RNA, 22 nt, Human
cccaagaaacugaugugcucca

SEQ ID NO: 111992 - RNA, 18 nt, Human
ccccagaugccagagagc

SEQ ID NO: 111993 - RNA, 19 nt, Human
ccccauuuguuuacaggaa

SEQ ID NO: 111994 - RNA, 23 nt, Human
ccucuuaaccucucccaggcaaa

SEQ ID NO: 111995 - RNA, 23 nt, Human
ccugugcccagcucucagccugc

SEQ ID NO: 111996 - RNA, 21 nt, Human
cguuugguuuccugucugaug

SEQ ID NO: 111997 - RNA, 23 nt, Human
cuccaagagcucgcugcggagau

SEQ ID NO: 111998 - RNA, 20 nt, Human
cucccgcuuccucuucuucc

SEQ ID NO: 111999 - RNA, 20 nt, Human
cucuuugccccuuucuuuuc

SEQ ID NO: 112000 - RNA, 18 nt, Human
cugaaacuuuaaaacagg

SEQ ID NO: 112001 - RNA, 18 nt, Human
cugaacacuugcauguuc

SEQ ID NO: 112002 - RNA, 26 nt, Human
cuucgaaaccgccucuuaaccucucc

SEQ ID NO: 112003 - RNA, 18 nt, Human
cuuguagaauucaaugaa

SEQ ID NO: 112004 - RNA, 24 nt, Human
cuuugccccuuucuuuuccgacuu

SEQ ID NO: 112005 - RNA, 23 nt, Human
gaaaaaaucuuuuguaacagcug

SEQ ID NO: 112006 - RNA, 22 nt, Human
gaaugugcucuguacuggugua

SEQ ID NO: 112007 - RNA, 18 nt, Human
gcgcuccaagagcucgcu

SEQ ID NO: 112008 - RNA, 23 nt, Human
gcucgcugcggagaugcaguccg

SEQ ID NO: 112009 - RNA, 18 nt, Human
ggccggcggcgcuccaag

SEQ ID NO: 112010 - RNA, 19 nt, Human
gguucaaauguguccguuu

SEQ ID NO: 112011 - RNA, 20 nt, Human
guaauucccuccucccuauc

SEQ ID NO: 112012 - RNA, 24 nt, Human
gucccuuucucuccucccuaguaa

SEQ ID NO: 112013 - RNA, 24 nt, Human
guccuauaugucuuaauugauggu

SEQ ID NO: 112014 - RNA, 18 nt, Human
gucucaagaauauuccau

SEQ ID NO: 112015 - RNA, 22 nt, Human
uaaaguaacuccuaaugguaau

SEQ ID NO: 112016 - RNA, 18 nt, Human
uaaccucugcagucaccu

SEQ ID NO: 112017 - RNA, 20 nt, Human
uagaaaagaacagauuccau

SEQ ID NO: 112018 - RNA, 24 nt, Human
uaggcuauccaaggagagaguugg

SEQ ID NO: 112019 - RNA, 18 nt, Human
uaggguucuugaagggag

SEQ ID NO: 112020 - RNA, 23 nt, Human
uaggugcauuagcuuuucucaag

SEQ ID NO: 112021 - RNA, 24 nt, Human
uauaaagaaauauuaaaaagguuu

SEQ ID NO: 112022 - RNA, 18 nt, Human
uauuucacaggggaugga

SEQ ID NO: 112023 - RNA, 19 nt, Human
ucaaucugguuucuaauau

SEQ ID NO: 112024 - RNA, 20 nt, Human
ucaaucugguuucuaauaua

SEQ ID NO: 112025 - RNA, 21 nt, Human
ucagucaggaaccccagaugc

SEQ ID NO: 112026 - RNA, 20 nt, Human
ucagucucaagaauauucca

SEQ ID NO: 112027 - RNA, 20 nt, Human
ucauagaaggaaagaaaagc

SEQ ID NO: 112028 - RNA, 18 nt, Human
ucccauagccaaguagcc

SEQ ID NO: 112029 - RNA, 22 nt, Human
ucccuaguaauucccuccuccc

SEQ ID NO: 112030 - RNA, 21 nt, Human
uccuggaccagcuuucuugag

SEQ ID NO: 112031 - RNA, 19 nt, Human
ucuauaccuucgaaaccgc

SEQ ID NO: 112032 - RNA, 22 nt, Human
ucuccuagcuuuucaaaacauc

SEQ ID NO: 112033 - RNA, 26 nt, Human
ucucuacucauuuugggaaaaaaggg

SEQ ID NO: 112034 - RNA, 18 nt, Human
ugacacaaccugaacacu

SEQ ID NO: 112035 - RNA, 21 nt, Human
ugagcaggugguugaaagcca

SEQ ID NO: 112036 - RNA, 18 nt, Human
ugaugauaaaugguagcc

SEQ ID NO: 112037 - RNA, 25 nt, Human
ugaugauaaaugguagccuuucugg

SEQ ID NO: 112038 - RNA, 19 nt, Human
ugccagagagcuggcauag

SEQ ID NO: 112039 - RNA, 19 nt, Human
ugcccuguuaccacggguc

SEQ ID NO: 112040 - RNA, 23 nt, Human
ugcuuuuucuugugccucugaau

SEQ ID NO: 112041 - RNA, 18 nt, Human
uggaaaaacacguggagu

SEQ ID NO: 112042 - RNA, 23 nt, Human
uggaaugugcucuguacuggugu

SEQ ID NO: 112043 - RNA, 18 nt, Human
uggcaggaaaaggagagg

SEQ ID NO: 112044 - RNA, 20 nt, Human
ugggaaaauugcucaacagg

SEQ ID NO: 112045 - RNA, 21 nt, Human
ugggggguuucaaauucagug

SEQ ID NO: 112046 - RNA, 19 nt, Human
ugucaaaugcagggcagua

SEQ ID NO: 112047 - RNA, 21 nt, Human
uuaaagcaaaauaagaaacgc

SEQ ID NO: 112048 - RNA, 21 nt, Human
uuagaaagugcuuauuaagua

SEQ ID NO: 112049 - RNA, 23 nt, Human
uuagcuuguagaauucaaugaaa

SEQ ID NO: 112050 - RNA, 25 nt, Human
uuaguuacuuaauacuuuauccacc

SEQ ID NO: 112051 - RNA, 23 nt, Human
uucaguguuguuuggaggcauga

SEQ ID NO: 112052 - RNA, 27 nt, Human
uucauguaacaagucucuuuuuuugag

SEQ ID NO: 112053 - RNA, 23 nt, Human
uuccucagaauggugggaucuca

SEQ ID NO: 112054 - RNA, 21 nt, Human
uuccugucugauggccacauu

SEQ ID NO: 112055 - RNA, 21 nt, Human
uugccccuuucuuuuccgacu

SEQ ID NO: 112056 - RNA, 19 nt, Human
uugcuucauacacagaaga

SEQ ID NO: 112057 - RNA, 21 nt, Human
uuguguuauuucacaggggau

SEQ ID NO: 112058 - RNA, 19 nt, Human
uuguucuguuaccuugacu

SEQ ID NO: 112059 - RNA, 24 nt, Human
uuuauccaccguuugguuuccugu

SEQ ID NO: 112060 - RNA, 23 nt, Human
uuuccugucugauggccacauug

SEQ ID NO: 112061 - RNA, 24 nt, Human
uuucuggaaauaauuuuuguguaa

SEQ ID NO: 112062 - RNA, 21 nt, Human
uuuuucuugugccucugaauu

SEQ ID NO: 112063 - RNA, 20 nt, Human
aaauauccacuugggucaaa

SEQ ID NO: 112064 - RNA, 19 nt, Human
acacuguaaauuguaacca

SEQ ID NO: 112065 - RNA, 22 nt, Human
agaaggcagcggcuuuaaagga

SEQ ID NO: 112066 - RNA, 20 nt, Human
agccaugauuaugaagccuc

SEQ ID NO: 112067 - RNA, 22 nt, Human
agugcuuauuugccuaaauggc

SEQ ID NO: 112068 - RNA, 19 nt, Human
auauaucuauauacauaua

SEQ ID NO: 112069 - RNA, 19 nt, Human
auucagugugauauuuuua

SEQ ID NO: 112070 - RNA, 20 nt, Human
cacacuggauccccuuguac

SEQ ID NO: 112071 - RNA, 18 nt, Human
cacuggauccccuuguac

SEQ ID NO: 112072 - RNA, 22 nt, Human
cagaaugguuagagaacgaaug

SEQ ID NO: 112073 - RNA, 24 nt, Human
cucacuagcaguuuuauugcuuaa

SEQ ID NO: 112074 - RNA, 19 nt, Human
cucuuuucauuuugcuuau

SEQ ID NO: 112075 - RNA, 22 nt, Human
cugcucacaccugcucgagauc

SEQ ID NO: 112076 - RNA, 20 nt, Human
uaaauggcuguugacauacu

SEQ ID NO: 112077 - RNA, 22 nt, Human
uaaguuucucuuuucauuuugc

SEQ ID NO: 112078 - RNA, 21 nt, Human
uacacuguaaauuguaaccag

SEQ ID NO: 112079 - RNA, 28 nt, Human
uacaggucuccuuucuauauccagauuu

SEQ ID NO: 112080 - RNA, 22 nt, Human
uaccugaaccauguuaaagagc

SEQ ID NO: 112081 - RNA, 18 nt, Human
uauaaaauuaaggagaga

SEQ ID NO: 112082 - RNA, 24 nt, Human
ucacaccugcucgagauccacccg

SEQ ID NO: 112083 - RNA, 18 nt, Human
ucgagauccacccggcug

SEQ ID NO: 112084 - RNA, 24 nt, Human
ucuaaguaucagauucuuuuauug

SEQ ID NO: 112085 - RNA, 21 nt, Human
ucugcaguuauuugaaauguc

SEQ ID NO: 112086 - RNA, 24 nt, Human
ucuuucaguugucaaaauguuacc

SEQ ID NO: 112087 - RNA, 19 nt, Human
ugaaaacacacuacaaaag

SEQ ID NO: 112088 - RNA, 20 nt, Human
ugaaaacacacuacaaaagc

SEQ ID NO: 112089 - RNA, 21 nt, Human
ugaaaacacacuacaaaagca

SEQ ID NO: 112090 - RNA, 23 nt, Human
ugagaauacaauuuacacacugg

SEQ ID NO: 112091 - RNA, 23 nt, Human
uucagugugauauuuuuagucau

SEQ ID NO: 112092 - RNA, 20 nt, Human
uuuccugaguuucuaagagc

SEQ ID NO: 112093 - RNA, 19 nt, Human
uagaagaaauaauguggua

SEQ ID NO: 112094 - RNA, 19 nt, Human
aagaagacccaaauacgcu

SEQ ID NO: 112095 - RNA, 18 nt, Human
aaucuaaccucgggaucu

SEQ ID NO: 112096 - RNA, 23 nt, Human
acgcugagagaagacgcaugggc

SEQ ID NO: 112097 - RNA, 23 nt, Human
agaagacccaaauacgcugagag

SEQ ID NO: 112098 - RNA, 20 nt, Human
aggaguucucuuuauuucag

SEQ ID NO: 112099 - RNA, 23 nt, Human
agugccaagauccaagcgagaaa

SEQ ID NO: 112100 - RNA, 19 nt, Human
caggcucagggagacgacu

SEQ ID NO: 112101 - RNA, 27 nt, Human
cauuccauuacagucgucacuuccaac

SEQ ID NO: 112102 - RNA, 27 nt, Human
cgagaaaacgcaggaggaugcgcagac

SEQ ID NO: 112103 - RNA, 20 nt, Human
cgcagccucuuuagaaagcc

SEQ ID NO: 112104 - RNA, 19 nt, Human
cuggaaguccaacucuucu

SEQ ID NO: 112105 - RNA, 24 nt, Human
gaaaacgcaggaggaugcgcagac

SEQ ID NO: 112106 - RNA, 22 nt, Human
gagaacagagucacuuucuccc

SEQ ID NO: 112107 - RNA, 18 nt, Human
gcgccggcuccugccaga

SEQ ID NO: 112108 - RNA, 24 nt, Human
ggcggccgcggccaccgccaguuu

SEQ ID NO: 112109 - RNA, 24 nt, Human
gggugacagcaggaucagaagcac

SEQ ID NO: 112110 - RNA, 22 nt, Human
gugacagcaggaucagaagcac

SEQ ID NO: 112111 - RNA, 20 nt, Human
uacuuuaaucauauuuuaga

SEQ ID NO: 112112 - RNA, 26 nt, Human
uauacaagacaucauuccauuacagu

SEQ ID NO: 112113 - RNA, 24 nt, Human
uccaagcgagaaaacgcaggagga

SEQ ID NO: 112114 - RNA, 19 nt, Human
ucuuaaaaacuaucuucca

SEQ ID NO: 112115 - RNA, 20 nt, Human
ugagagaagacgcaugggcg

SEQ ID NO: 112116 - RNA, 22 nt, Human
ugcucucacacacagugggagu

SEQ ID NO: 112117 - RNA, 18 nt, Human
uggaagcacuucuuugcu

SEQ ID NO: 112118 - RNA, 18 nt, Human
ugggcaaagaagacccaa

SEQ ID NO: 112119 - RNA, 18 nt, Human
uuccaacuacaggcucag

SEQ ID NO: 112120 - RNA, 25 nt, Human
aaaaaugacaggagaaaccgguacc

SEQ ID NO: 112121 - RNA, 22 nt, Human
aaaacuguacagauuuaaacaa

SEQ ID NO: 112122 - RNA, 21 nt, Human
aaaagaucaaaagacaagaac

SEQ ID NO: 112123 - RNA, 19 nt, Human
aaacacacacuaucauacc

SEQ ID NO: 112124 - RNA, 22 nt, Human
aaacacacacuaucauaccaug

SEQ ID NO: 112125 - RNA, 18 nt, Human
aaaguucuuugcacuacu

SEQ ID NO: 112126 - RNA, 22 nt, Human
aacaaauaaucauuuagcaaac

SEQ ID NO: 112127 - RNA, 23 nt, Human
aagaaaacacugauccuguaaca

SEQ ID NO: 112128 - RNA, 19 nt, Human
aauaaaagaucaaaagaca

SEQ ID NO: 112129 - RNA, 22 nt, Human
aauaaaagaucaaaagacaaga

SEQ ID NO: 112130 - RNA, 22 nt, Human
acaaucaggguaugcacccugc

SEQ ID NO: 112131 - RNA, 18 nt, Human
acaccccgacuucccagg

SEQ ID NO: 112132 - RNA, 23 nt, Human
acucaacuucaaaaaugacagga

SEQ ID NO: 112133 - RNA, 19 nt, Human
acugcuaaaaccaaaggca

SEQ ID NO: 112134 - RNA, 22 nt, Human
aggcaguguacagaaggcuggu

SEQ ID NO: 112135 - RNA, 21 nt, Human
aggggcacagaugcuggagcu

SEQ ID NO: 112136 - RNA, 19 nt, Human
augaagauacucauuaaag

SEQ ID NO: 112137 - RNA, 26 nt, Human
caaacacacacuaucauaccaugaag

SEQ ID NO: 112138 - RNA, 24 nt, Human
caaagaacugcuaaaaccaaaggc

SEQ ID NO: 112139 - RNA, 21 nt, Human
caaggggcacagaugcuggag

SEQ ID NO: 112140 - RNA, 23 nt, Human
caaucuacuccaaacucaacuuc

SEQ ID NO: 112141 - RNA, 20 nt, Human
cacagcacagccagcugaau

SEQ ID NO: 112142 - RNA, 24 nt, Human
cacuauuaccuacucagcacuuug

SEQ ID NO: 112143 - RNA, 23 nt, Human
cacucacaaacacacacuaucau

SEQ ID NO: 112144 - RNA, 22 nt, Human
caggcacccacugcaccaaaag

SEQ ID NO: 112145 - RNA, 22 nt, Human
ccagaaccccugacaaugucca

SEQ ID NO: 112146 - RNA, 22 nt, Human
ccccugacaauguccaccucua

SEQ ID NO: 112147 - RNA, 23 nt, Human
ccccugacaauguccaccucuag

SEQ ID NO: 112148 - RNA, 26 nt, Human
cccucuuaccuucuaccuucucaaaa

SEQ ID NO: 112149 - RNA, 20 nt, Human
ccggagcuuccaacacugcc

SEQ ID NO: 112150 - RNA, 24 nt, Human
ccucuuaccuucuaccuucucaaa

SEQ ID NO: 112151 - RNA, 18 nt, Human
ccugggccacuuccggga

SEQ ID NO: 112152 - RNA, 22 nt, Human
cgcccucgcggccuucagcagc

SEQ ID NO: 112153 - RNA, 24 nt, Human
cucaaucaagcaacguccaucacc

SEQ ID NO: 112154 - RNA, 22 nt, Human
cuccucuaugcgccaaauuuaa

SEQ ID NO: 112155 - RNA, 21 nt, Human
cuuccgggagaaccggagcuu

SEQ ID NO: 112156 - RNA, 21 nt, Human
cuuccuaauucauucauuuca

SEQ ID NO: 112157 - RNA, 20 nt, Human
gaagcaaccaaucuacucca

SEQ ID NO: 112158 - RNA, 22 nt, Human
gagaaccggagcuuccaacacu

SEQ ID NO: 112159 - RNA, 19 nt, Human
gaggaacacuacuccucag

SEQ ID NO: 112160 - RNA, 22 nt, Human
gauaguguuugucauccuuagg

SEQ ID NO: 112161 - RNA, 21 nt, Human
ggcaaaaccaauccaaucagg

SEQ ID NO: 112162 - RNA, 19 nt, Human
ggucccauuccagaacccc

SEQ ID NO: 112163 - RNA, 24 nt, Human
guaaauacaaucuuccuaauucau

SEQ ID NO: 112164 - RNA, 22 nt, Human
gugaacacuuaaaacuguacag

SEQ ID NO: 112165 - RNA, 21 nt, Human
guuugcugguaaaauguauuc

SEQ ID NO: 112166 - RNA, 24 nt, Human
uaaaagaucaaaagacaagaacca

SEQ ID NO: 112167 - RNA, 27 nt, Human
uaaaagaucaaaagacaagaaccaaug

SEQ ID NO: 112168 - RNA, 21 nt, Human
uaacaucagcggcaaaaccaa

SEQ ID NO: 112169 - RNA, 19 nt, Human
uaagaacacacuccgcucu

SEQ ID NO: 112170 - RNA, 22 nt, Human
uacaggcacccacugcaccaaa

SEQ ID NO: 112171 - RNA, 21 nt, Human
uaccuucuaccuucucaaaau

SEQ ID NO: 112172 - RNA, 20 nt, Human
uaucaccaaucacagauuaa

SEQ ID NO: 112173 - RNA, 19 nt, Human
ucacaaacacacacuauca

SEQ ID NO: 112174 - RNA, 18 nt, Human
uccacagcacagcacagc

SEQ ID NO: 112175 - RNA, 21 nt, Human
uccacagcacagcacagccag

SEQ ID NO: 112176 - RNA, 30 nt, Human
ucccagacagacauuuaggugcacagcccc

SEQ ID NO: 112177 - RNA, 19 nt, Human
ucuaccuucucaaaauaga

SEQ ID NO: 112178 - RNA, 18 nt, Human
ucucagccugcuccuccc

SEQ ID NO: 112179 - RNA, 18 nt, Human
ucugcagucagcacugag

SEQ ID NO: 112180 - RNA, 24 nt, Human
ugaaaaggaagugaccuguuacaa

SEQ ID NO: 112181 - RNA, 24 nt, Human
ugaaaguauauacacucuuuguau

SEQ ID NO: 112182 - RNA, 25 nt, Human
ugacaacaaucaggguaugcacccu

SEQ ID NO: 112183 - RNA, 25 nt, Human
ugaguuacaggcacccacugcacca

SEQ ID NO: 112184 - RNA, 22 nt, Human
ugauauggugugguaguuuuca

SEQ ID NO: 112185 - RNA, 20 nt, Human
ugcaagacuucucagccugc

SEQ ID NO: 112186 - RNA, 20 nt, Human
uggaaaauucauagauaugc

SEQ ID NO: 112187 - RNA, 21 nt, Human
uggaaaggcuauuaaaaauca

SEQ ID NO: 112188 - RNA, 21 nt, Human
uggaaugcucagugguuaaaa

SEQ ID NO: 112189 - RNA, 19 nt, Human
uguacagauuuaaacaaau

SEQ ID NO: 112190 - RNA, 19 nt, Human
ugugguucucggggacguu

SEQ ID NO: 112191 - RNA, 19 nt, Human
uguuugcuuuucaaagaac

SEQ ID NO: 112192 - RNA, 22 nt, Human
uuaaaaacagcaauuucuagcc

SEQ ID NO: 112193 - RNA, 19 nt, Human
uuaaagauacugcacguau

SEQ ID NO: 112194 - RNA, 21 nt, Human
uuaagacaccuuaauugguac

SEQ ID NO: 112195 - RNA, 21 nt, Human
uuaauugguacuucgcacuca

SEQ ID NO: 112196 - RNA, 25 nt, Human
uucacauuuauuaaaaacagcaauu

SEQ ID NO: 112197 - RNA, 23 nt, Human
uuggaaaggcuauuaaaaaucaa

SEQ ID NO: 112198 - RNA, 22 nt, Human
uuugaaaguauauacacucuuu

SEQ ID NO: 112199 - RNA, 19 nt, Human
uuuuugaacuaagaagcug

SEQ ID NO: 112200 - RNA, 22 nt, Human
uuuuuuuuuuuuuuuuuuuagg

SEQ ID NO: 112201 - RNA, 19 nt, Human
agaaagcuggccugggcug

SEQ ID NO: 112202 - RNA, 19 nt, Human
agggguagcuuguuugcug

SEQ ID NO: 112203 - RNA, 19 nt, Human
cagcuccuuggcuggggcc

SEQ ID NO: 112204 - RNA, 19 nt, Human
caugcagaaagcuggccug

SEQ ID NO: 112205 - RNA, 19 nt, Human
ccagagcaucaccuggcca

SEQ ID NO: 112206 - RNA, 21 nt, Human
ccccaagccagacagccucgc

SEQ ID NO: 112207 - RNA, 19 nt, Human
cccuuagggaacaggccug

SEQ ID NO: 112208 - RNA, 22 nt, Human
ccuaacugcuagguccccagau

SEQ ID NO: 112209 - RNA, 21 nt, Human
cucgcugccugccguggcuuu

SEQ ID NO: 112210 - RNA, 18 nt, Human
gguccagacuuuguuucu

SEQ ID NO: 112211 - RNA, 19 nt, Human
uaacugcuagguccccaga

SEQ ID NO: 112212 - RNA, 22 nt, Human
uagcuuguuugcuguaguguuu

SEQ ID NO: 112213 - RNA, 20 nt, Human
ucagggaucauaaacaucac

SEQ ID NO: 112214 - RNA, 21 nt, Human
ucccccaagccagacagccuc

SEQ ID NO: 112215 - RNA, 21 nt, Human
uccuuggcuggggccccuuag

SEQ ID NO: 112216 - RNA, 18 nt, Human
ucgcucagcuccuuggcu

SEQ ID NO: 112217 - RNA, 18 nt, Human
ugcugccagccguagaaa

SEQ ID NO: 112218 - RNA, 22 nt, Human
uggaguggguccagacuuuguu

SEQ ID NO: 112219 - RNA, 21 nt, Human
uggccugggcugcucgcugcc

SEQ ID NO: 112220 - RNA, 21 nt, Human
ugucuaggacuggcaggggua

SEQ ID NO: 112221 - RNA, 20 nt, Human
aggcaggguugggggaagca

SEQ ID NO: 112222 - RNA, 24 nt, Human
aggcaggguugggggaagcagggu

SEQ ID NO: 112223 - RNA, 19 nt, Human
agguggugauaacucaaca

SEQ ID NO: 112224 - RNA, 25 nt, Human
auaacuugaucauaucccuuuaaaa

SEQ ID NO: 112225 - RNA, 21 nt, Human
caaaguggagaugaacaaaga

SEQ ID NO: 112226 - RNA, 21 nt, Human
ccaggcccaccuggcgaacug

SEQ ID NO: 112227 - RNA, 26 nt, Human
cuggcgaacugacucucagcccgcgc

SEQ ID NO: 112228 - RNA, 21 nt, Human
gcaggguacauguuauaacuu

SEQ ID NO: 112229 - RNA, 23 nt, Human
gcagucuuuuggaguauguguuu

SEQ ID NO: 112230 - RNA, 18 nt, Human
ggaauugaaaggugguga

SEQ ID NO: 112231 - RNA, 22 nt, Human
ggaguauguguuuaacugccaa

SEQ ID NO: 112232 - RNA, 19 nt, Human
gggcaucaggauuuuaaaa

SEQ ID NO: 112233 - RNA, 23 nt, Human
guggagaugaacaaagauuucau

SEQ ID NO: 112234 - RNA, 19 nt, Human
uagauaguagcagucuuuu

SEQ ID NO: 112235 - RNA, 21 nt, Human
uaggaaauaccgaacaaucaa

SEQ ID NO: 112236 - RNA, 20 nt, Human
ucccuuuaaaagaagugggg

SEQ ID NO: 112237 - RNA, 22 nt, Human
ugggaaagacauuuuagccuug

SEQ ID NO: 112238 - RNA, 18 nt, Human
ugggcaucaggauuuuaa

SEQ ID NO: 112239 - RNA, 18 nt, Human
uuuggaaaccacugagcu

SEQ ID NO: 112240 - RNA, 23 nt, Human
aaauaacaaccaugagaaacuua

SEQ ID NO: 112241 - RNA, 24 nt, Human
aauguacacagucaaauauauaua

SEQ ID NO: 112242 - RNA, 22 nt, Human
acagaguggaauccacccuguu

SEQ ID NO: 112243 - RNA, 25 nt, Human
accacuuccccgcugcccucugcca

SEQ ID NO: 112244 - RNA, 20 nt, Human
agggcagcuauuuuggggac

SEQ ID NO: 112245 - RNA, 21 nt, Human
agggcagcuauuuuggggaca

SEQ ID NO: 112246 - RNA, 25 nt, Human
agguaaggagacauuuauuagguca

SEQ ID NO: 112247 - RNA, 26 nt, Human
agucagaguccaguuacaacauggug

SEQ ID NO: 112248 - RNA, 24 nt, Human
caaauaacaaccaugagaaacuua

SEQ ID NO: 112249 - RNA, 21 nt, Human
cacugccauauacaccaggag

SEQ ID NO: 112250 - RNA, 19 nt, Human
cacugcgaccacuuccccg

SEQ ID NO: 112251 - RNA, 20 nt, Human
caggaucuuaugcagcuugc

SEQ ID NO: 112252 - RNA, 21 nt, Human
ccaauguuugaguagaucauu

SEQ ID NO: 112253 - RNA, 18 nt, Human
ccagccgcgucuccagga

SEQ ID NO: 112254 - RNA, 20 nt, Human
ccgcugcccucugccauagc

SEQ ID NO: 112255 - RNA, 19 nt, Human
ccguuggcagccccggucg

SEQ ID NO: 112256 - RNA, 20 nt, Human
cgccgaggucccgccugccc

SEQ ID NO: 112257 - RNA, 21 nt, Human
cgucccgcccccugcugccac

SEQ ID NO: 112258 - RNA, 25 nt, Human
cgucccgcccccugcugccaccuca

SEQ ID NO: 112259 - RNA, 23 nt, Human
cuaaaguagaacagaaaggagau

SEQ ID NO: 112260 - RNA, 24 nt, Human
cucauuuguaauuuagggacuuac

SEQ ID NO: 112261 - RNA, 21 nt, Human
cugagaccaaaaaaaaaaaaa

SEQ ID NO: 112262 - RNA, 23 nt, Human
cuuccccgcugcccucugccaua

SEQ ID NO: 112263 - RNA, 21 nt, Human
cuugucguuguccagccgcgu

SEQ ID NO: 112264 - RNA, 20 nt, Human
gaguagaucauuguuucuuu

SEQ ID NO: 112265 - RNA, 18 nt, Human
gcagcuauuuuggggaca

SEQ ID NO: 112266 - RNA, 20 nt, Human
ggaaaaaacuaaaaauacag

SEQ ID NO: 112267 - RNA, 22 nt, Human
ggaggucauauuuugcuaacac

SEQ ID NO: 112268 - RNA, 19 nt, Human
ggucgcagacacugcgacc

SEQ ID NO: 112269 - RNA, 23 nt, Human
gucuaaagucagaguccaguuac

SEQ ID NO: 112270 - RNA, 23 nt, Human
uaaacaccaggcuuagacacagc

SEQ ID NO: 112271 - RNA, 18 nt, Human
uacacagucaaauauaua

SEQ ID NO: 112272 - RNA, 20 nt, Human
uacccaaauggauaacgauu

SEQ ID NO: 112273 - RNA, 21 nt, Human
uagaguagauacacagcaaua

SEQ ID NO: 112274 - RNA, 25 nt, Human
uaugacaaauacccaucuuuaaaca

SEQ ID NO: 112275 - RNA, 26 nt, Human
uaugacaaauacccaucuuuaaacac

SEQ ID NO: 112276 - RNA, 22 nt, Human
uauguaacacauacuaaucaaa

SEQ ID NO: 112277 - RNA, 21 nt, Human
ucaaagggaaaaaacuaaaaa

SEQ ID NO: 112278 - RNA, 24 nt, Human
ucaaagggaaaaaacuaaaaauac

SEQ ID NO: 112279 - RNA, 21 nt, Human
ucuuugguuugaacaccagau

SEQ ID NO: 112280 - RNA, 21 nt, Human
ugacaaauacccaucuuuaaa

SEQ ID NO: 112281 - RNA, 20 nt, Human
ugagaccaaaaaaaaaaaaa

SEQ ID NO: 112282 - RNA, 25 nt, Human
ugagaccaaaaaaaaaaaaauuauc

SEQ ID NO: 112283 - RNA, 20 nt, Human
ugaguagaucauuguuucuu

SEQ ID NO: 112284 - RNA, 20 nt, Human
ugauuuauacuuuauuuucu

SEQ ID NO: 112285 - RNA, 21 nt, Human
uggagucucucacugaguccu

SEQ ID NO: 112286 - RNA, 18 nt, Human
uggcaacuccuccucugg

SEQ ID NO: 112287 - RNA, 23 nt, Human
uguuacugagaccaaaaaaaaaa

SEQ ID NO: 112288 - RNA, 20 nt, Human
uuaaguuuuuuuuugcugac

SEQ ID NO: 112289 - RNA, 21 nt, Human
uuagguauaaacaauuauaaa

SEQ ID NO: 112290 - RNA, 21 nt, Human
uucaaagaauaaaaaauaacc

SEQ ID NO: 112291 - RNA, 20 nt, Human
uuccccgcugcccucugcca

SEQ ID NO: 112292 - RNA, 21 nt, Human
uuccuaauuccuugucguugu

SEQ ID NO: 112293 - RNA, 19 nt, Human
uuccugaauacagugaaaa

SEQ ID NO: 112294 - RNA, 22 nt, Human
uuccugaauacagugaaaacug

SEQ ID NO: 112295 - RNA, 19 nt, Human
uuccuugucguuguccagc

SEQ ID NO: 112296 - RNA, 21 nt, Human
uuuaaucuuccuaauagguaa

SEQ ID NO: 112297 - RNA, 18 nt, Human
uuuuauagauuuacuaga

SEQ ID NO: 112298 - RNA, 23 nt, Human
uuuuauagauuuacuagaaauua

SEQ ID NO: 112299 - RNA, 25 nt, Human
uuuucucucuccuuuuuuucuaauu

SEQ ID NO: 112300 - RNA, 24 nt, Human
aaagugcugggauuacaggcguga

SEQ ID NO: 112301 - RNA, 21 nt, Human
aaauggcucaagauucagggg

SEQ ID NO: 112302 - RNA, 20 nt, Human
aagucuuuuuuuuuuuuuuu

SEQ ID NO: 112303 - RNA, 19 nt, Human
aagugcugggauuacaggc

SEQ ID NO: 112304 - RNA, 19 nt, Human
aagugcugggauuacaggc

SEQ ID NO: 112305 - RNA, 26 nt, Human
aagugcugggauuacaggcgugagcc

SEQ ID NO: 112306 - RNA, 19 nt, Human
aaugccaacucuaaggcag

SEQ ID NO: 112307 - RNA, 18 nt, Human
acaugauguacugcccga

SEQ ID NO: 112308 - RNA, 24 nt, Human
accauguuggucaggcuggucucg

SEQ ID NO: 112309 - RNA, 22 nt, Human
accccagaaacgccaggacggg

SEQ ID NO: 112310 - RNA, 23 nt, Human
agaagcgagcgagccugcgagag

SEQ ID NO: 112311 - RNA, 23 nt, Human
aggaggaaauggcagcuuuccag

SEQ ID NO: 112312 - RNA, 23 nt, Human
aggccuggcguccagaacuuaag

SEQ ID NO: 112313 - RNA, 22 nt, Human
aggcuggucucgaacuccuggc

SEQ ID NO: 112314 - RNA, 18 nt, Human
agugcugggauuacaggc

SEQ ID NO: 112315 - RNA, 24 nt, Human
augauccaucuggcuuggccuccc

SEQ ID NO: 112316 - RNA, 21 nt, Human
augggguuucaccauguuggu

SEQ ID NO: 112317 - RNA, 24 nt, Human
augggguuucaccauguuggucag

SEQ ID NO: 112318 - RNA, 24 nt, Human
auuuuuguauuuuuaguagagaug

SEQ ID NO: 112319 - RNA, 24 nt, Human
caaagugcugggauuacaggcgug

SEQ ID NO: 112320 - RNA, 22 nt, Human
caagucuuuuuuuuuuuuuuuu

SEQ ID NO: 112321 - RNA, 21 nt, Human
caccauguuggucaggcuggu

SEQ ID NO: 112322 - RNA, 24 nt, Human
caccauguuggucaggcuggucuc

SEQ ID NO: 112323 - RNA, 22 nt, Human
cagcucgggcaauucauccccc

SEQ ID NO: 112324 - RNA, 22 nt, Human
caggacggguaacuugccccuu

SEQ ID NO: 112325 - RNA, 22 nt, Human
ccaaagugcugggauuacaggc

SEQ ID NO: 112326 - RNA, 22 nt, Human
ccaaagugcugggauuacaggc

SEQ ID NO: 112327 - RNA, 24 nt, Human
ccaaagugcugggauuacaggcgu

SEQ ID NO: 112328 - RNA, 19 nt, Human
ccacggugguggccaggcg

SEQ ID NO: 112329 - RNA, 21 nt, Human
ccccagaaacgccaggacggg

SEQ ID NO: 112330 - RNA, 19 nt, Human
ccccgcucagcgcacucag

SEQ ID NO: 112331 - RNA, 21 nt, Human
ccuggcuucaugauccaucug

SEQ ID NO: 112332 - RNA, 19 nt, Human
cgaaccccagaaacgccag

SEQ ID NO: 112333 - RNA, 20 nt, Human
cgaaccccagaaacgccagg

SEQ ID NO: 112334 - RNA, 22 nt, Human
cgagagcaccgaggcuagccuc

SEQ ID NO: 112335 - RNA, 20 nt, Human
cgaugugcuggagggugcgg

SEQ ID NO: 112336 - RNA, 24 nt, Human
cgggcggcaacggggaugcagaag

SEQ ID NO: 112337 - RNA, 18 nt, Human
cuccuggcuucaugaucc

SEQ ID NO: 112338 - RNA, 21 nt, Human
cuccuggcuucaugauccauc

SEQ ID NO: 112339 - RNA, 20 nt, Human
cugagcaaaucugugcuggu

SEQ ID NO: 112340 - RNA, 22 nt, Human
cuuggcagagugugggcucagc

SEQ ID NO: 112341 - RNA, 24 nt, Human
gacggggcaggccuuugcugaccu

SEQ ID NO: 112342 - RNA, 24 nt, Human
gagaugggguuucaccauguuggu

SEQ ID NO: 112343 - RNA, 18 nt, Human
gaggcgaaccccagaaac

SEQ ID NO: 112344 - RNA, 18 nt, Human
gauuacaggcgugagcca

SEQ ID NO: 112345 - RNA, 21 nt, Human
gauuacaggcgugagccaccg

SEQ ID NO: 112346 - RNA, 22 nt, Human
gauuacaggcgugagccaccgu

SEQ ID NO: 112347 - RNA, 19 nt, Human
gcagaagcgagcgagccug

SEQ ID NO: 112348 - RNA, 23 nt, Human
gcagaguccuccugagucacaaa

SEQ ID NO: 112349 - RNA, 22 nt, Human
gcccuggcucucuugguggucc

SEQ ID NO: 112350 - RNA, 23 nt, Human
gcccuggcucucuuggugguccg

SEQ ID NO: 112351 - RNA, 22 nt, Human
gcgaaccccagaaacgccagga

SEQ ID NO: 112352 - RNA, 23 nt, Human
gcgaaccccagaaacgccaggac

SEQ ID NO: 112353 - RNA, 18 nt, Human
gcugcaggcccagggcau

SEQ ID NO: 112354 - RNA, 18 nt, Human
gcuuggccucccaaagug

SEQ ID NO: 112355 - RNA, 19 nt, Human
ggcuggucucgaacuccug

SEQ ID NO: 112356 - RNA, 22 nt, Human
gggcggcaacggggaugcagaa

SEQ ID NO: 112357 - RNA, 22 nt, Human
gggguuucaccauguuggucag

SEQ ID NO: 112358 - RNA, 23 nt, Human
guagagaugggguuucaccaugu

SEQ ID NO: 112359 - RNA, 21 nt, Human
guggcucuggcgaucgagccc

SEQ ID NO: 112360 - RNA, 21 nt, Human
gugggcucagcucagggaucu

SEQ ID NO: 112361 - RNA, 20 nt, Human
uaagaguuggcuccgggcgg

SEQ ID NO: 112362 - RNA, 24 nt, Human
uaauuuuuguauuuuuaguagaga

SEQ ID NO: 112363 - RNA, 23 nt, Human
uacaggcgugagccaccgugacc

SEQ ID NO: 112364 - RNA, 22 nt, Human
uagagaugggguuucaccaugu

SEQ ID NO: 112365 - RNA, 20 nt, Human
uagccuccgaggcgaacccc

SEQ ID NO: 112366 - RNA, 24 nt, Human
uaguagagaugggguuucaccaug

SEQ ID NO: 112367 - RNA, 25 nt, Human
uaguagagaugggguuucaccaugu

SEQ ID NO: 112368 - RNA, 18 nt, Human
uagucgaugucaguggcc

SEQ ID NO: 112369 - RNA, 18 nt, Human
ucagcgcacucaguuugc

SEQ ID NO: 112370 - RNA, 24 nt, Human
ucccaaagugcugggauuacaggc

SEQ ID NO: 112371 - RNA, 24 nt, Human
uccucaggccuggucuucaguagc

SEQ ID NO: 112372 - RNA, 20 nt, Human
uccugagucacaaauggcuc

SEQ ID NO: 112373 - RNA, 19 nt, Human
ucucgaacuccuggcuuca

SEQ ID NO: 112374 - RNA, 18 nt, Human
ugagacagagucucgcuc

SEQ ID NO: 112375 - RNA, 22 nt, Human
ugagacagagucucgcucugcu

SEQ ID NO: 112376 - RNA, 19 nt, Human
ugagucgcgaaacagcagc

SEQ ID NO: 112377 - RNA, 22 nt, Human
ugccucaggccuggcguccaga

SEQ ID NO: 112378 - RNA, 24 nt, Human
ugcugggauuacaggcgugagcca

SEQ ID NO: 112379 - RNA, 20 nt, Human
ugcuuggcagagugugggcu

SEQ ID NO: 112380 - RNA, 23 nt, Human
uggcgaucgagcccagccaguug

SEQ ID NO: 112381 - RNA, 20 nt, Human
uggcuucaugauccaucugg

SEQ ID NO: 112382 - RNA, 23 nt, Human
uggcuuggccucccaaagugcug

SEQ ID NO: 112383 - RNA, 18 nt, Human
ugggauuacaggcgugag

SEQ ID NO: 112384 - RNA, 21 nt, Human
ugggauuacaggcgugagcca

SEQ ID NO: 112385 - RNA, 22 nt, Human
ugggauuacaggcgugagccac

SEQ ID NO: 112386 - RNA, 23 nt, Human
ugggauuacaggcgugagccacc

SEQ ID NO: 112387 - RNA, 23 nt, Human
ugggauuacaggcgugagccacc

SEQ ID NO: 112388 - RNA, 24 nt, Human
ugggauuacaggcgugagccaccg

SEQ ID NO: 112389 - RNA, 24 nt, Human
ugggcucagcucagggaucuguug

SEQ ID NO: 112390 - RNA, 24 nt, Human
ugggguuucaccauguuggucagg

SEQ ID NO: 112391 - RNA, 24 nt, Human
uggucaggcuggucucgaacuccu

SEQ ID NO: 112392 - RNA, 21 nt, Human
uguauuuuuaguagagauggg

SEQ ID NO: 112393 - RNA, 19 nt, Human
ugugcuggagggugcggga

SEQ ID NO: 112394 - RNA, 21 nt, Human
ugugugguggggucaguaauu

SEQ ID NO: 112395 - RNA, 18 nt, Human
uuaguagagaugggguuu

SEQ ID NO: 112396 - RNA, 22 nt, Human
uuaguagagaugggguuucacc

SEQ ID NO: 112397 - RNA, 24 nt, Human
uuaguagagaugggguuucaccau

SEQ ID NO: 112398 - RNA, 18 nt, Human
uugccccuuugcgcuucc

SEQ ID NO: 112399 - RNA, 23 nt, Human
uuguauuuuuaguagagaugggg

SEQ ID NO: 112400 - RNA, 24 nt, Human
uuucaccauguuggucaggcuggu

SEQ ID NO: 112401 - RNA, 24 nt, Human
uuuuuaguagagaugggguuucac

SEQ ID NO: 112402 - RNA, 20 nt, Human
uuuuuguauuuuuaguagag

SEQ ID NO: 112403 - RNA, 20 nt, Human
uuuuuuuuuuugagacagag

SEQ ID NO: 112404 - RNA, 25 nt, Human
uuuuuuuuuuuugagacagagucuc

SEQ ID NO: 112405 - RNA, 18 nt, Human
uuuuuuuuuuuuuuuuug

SEQ ID NO: 112406 - RNA, 23 nt, Human
aaacauuucugacaucuuccucc

SEQ ID NO: 112407 - RNA, 24 nt, Human
aacgucacuucccuuccggaccac

SEQ ID NO: 112408 - RNA, 24 nt, Human
accacaaggggcgcugacuccgaa

SEQ ID NO: 112409 - RNA, 19 nt, Human
accccaccuuccuccauac

SEQ ID NO: 112410 - RNA, 23 nt, Human
acccgcucgccugccacaccacc

SEQ ID NO: 112411 - RNA, 24 nt, Human
agccccaguagcaaagcuuuaguc

SEQ ID NO: 112412 - RNA, 24 nt, Human
aucuuccuccagcucagucugcca

SEQ ID NO: 112413 - RNA, 18 nt, Human
auuucugacaucuuccuc

SEQ ID NO: 112414 - RNA, 19 nt, Human
cacaccaccuguucuccau

SEQ ID NO: 112415 - RNA, 19 nt, Human
caccuguucuccauugggg

SEQ ID NO: 112416 - RNA, 24 nt, Human
ccaauagacguuugugaacguccu

SEQ ID NO: 112417 - RNA, 20 nt, Human
ccagcccgcguucuggaggc

SEQ ID NO: 112418 - RNA, 19 nt, Human
ccauccaaguugaugccaa

SEQ ID NO: 112419 - RNA, 24 nt, Human
cccacccgcucgccugccacacca

SEQ ID NO: 112420 - RNA, 21 nt, Human
cccaccuuccuccauacagaa

SEQ ID NO: 112421 - RNA, 25 nt, Human
cccaccuuccuccauacagaauuga

SEQ ID NO: 112422 - RNA, 19 nt, Human
cccgcguucuggaggcagg

SEQ ID NO: 112423 - RNA, 22 nt, Human
ccuccagcucagucugccaugc

SEQ ID NO: 112424 - RNA, 22 nt, Human
cggaauccucagccccaguagc

SEQ ID NO: 112425 - RNA, 23 nt, Human
gcuuugggagauuauacaggucc

SEQ ID NO: 112426 - RNA, 18 nt, Human
ggaaauguccacuccuuu

SEQ ID NO: 112427 - RNA, 27 nt, Human
uaaacaggcagcccugcagguggucca

SEQ ID NO: 112428 - RNA, 24 nt, Human
uaccugcauuuuuaaagacagcuu

SEQ ID NO: 112429 - RNA, 24 nt, Human
ucacaugcuuaccugcauuuuuaa

SEQ ID NO: 112430 - RNA, 19 nt, Human
uccuccagcucagucugcc

SEQ ID NO: 112431 - RNA, 25 nt, Human
uccuuugggggugauuuuucuccuc

SEQ ID NO: 112432 - RNA, 18 nt, Human
ugccacaccaccuguucu

SEQ ID NO: 112433 - RNA, 24 nt, Human
uguccauuuugucaauaaacaggc

SEQ ID NO: 112434 - RNA, 22 nt, Human
aaaaaaaaaaaaguuuggguua

SEQ ID NO: 112435 - RNA, 23 nt, Human
aaaaaaaaaguuuggguuauagu

SEQ ID NO: 112436 - RNA, 22 nt, Human
aaaaaaaccaaagaucuacaaa

SEQ ID NO: 112437 - RNA, 24 nt, Human
aaaaacgugaaaggauuccuuaac

SEQ ID NO: 112438 - RNA, 21 nt, Human
aaacaagacauucauaaacua

SEQ ID NO: 112439 - RNA, 23 nt, Human
aaaccgacacccaugucauuuua

SEQ ID NO: 112440 - RNA, 23 nt, Human
aaaugcuaaaaaauuaggucaaa

SEQ ID NO: 112441 - RNA, 24 nt, Human
aaccugacaaaaaaaccaaagauc

SEQ ID NO: 112442 - RNA, 20 nt, Human
aagacauucauaaacuauaa

SEQ ID NO: 112443 - RNA, 22 nt, Human
aagaucuacaaaaccgacaccc

SEQ ID NO: 112444 - RNA, 24 nt, Human
acacacauacgcacaucuuauuuu

SEQ ID NO: 112445 - RNA, 21 nt, Human
acacucagccaggugccuggc

SEQ ID NO: 112446 - RNA, 24 nt, Human
agacaagauacgcagcacauucuu

SEQ ID NO: 112447 - RNA, 23 nt, Human
agggaaugucauguuuuacauuu

SEQ ID NO: 112448 - RNA, 22 nt, Human
agugaagauaacaaaaaaaucc

SEQ ID NO: 112449 - RNA, 23 nt, Human
auacacacacauacgcacaucuu

SEQ ID NO: 112450 - RNA, 22 nt, Human
caaaaacauuuaaagaaagaga

SEQ ID NO: 112451 - RNA, 19 nt, Human
caaaaccgacacccauguc

SEQ ID NO: 112452 - RNA, 28 nt, Human
caagaugcuccauuuaauggaacaacuc

SEQ ID NO: 112453 - RNA, 20 nt, Human
cacaaacaagacauucauaa

SEQ ID NO: 112454 - RNA, 20 nt, Human
cacuccagcacacucagcca

SEQ ID NO: 112455 - RNA, 20 nt, Human
cauacaacuuccaaauccuc

SEQ ID NO: 112456 - RNA, 23 nt, Human
cauacacacacauacgcacaucu

SEQ ID NO: 112457 - RNA, 23 nt, Human
ccaacuaccuguuaacucuuaac

SEQ ID NO: 112458 - RNA, 25 nt, Human
ccaauucuccaggcauacacacacu

SEQ ID NO: 112459 - RNA, 21 nt, Human
ccucuuuaaaaaaaaaaaaaa

SEQ ID NO: 112460 - RNA, 21 nt, Human
cuacugacgacugcuacuuga

SEQ ID NO: 112461 - RNA, 28 nt, Human
cucauugucugcgacaaauccaacuacc

SEQ ID NO: 112462 - RNA, 24 nt, Human
cugacaaaaaaaccaaagaucuac

SEQ ID NO: 112463 - RNA, 20 nt, Human
gagaagaaaccauacuggua

SEQ ID NO: 112464 - RNA, 19 nt, Human
gaugacacauuuccugguc

SEQ ID NO: 112465 - RNA, 22 nt, Human
ggcauacacacacauacgcaca

SEQ ID NO: 112466 - RNA, 24 nt, Human
gucacuuucacaaacaagacauuc

SEQ ID NO: 112467 - RNA, 25 nt, Human
uaaaccugacaaaaaaaccaaagau

SEQ ID NO: 112468 - RNA, 18 nt, Human
uaaagugaagauaacaaa

SEQ ID NO: 112469 - RNA, 23 nt, Human
uaacaaaaaaauccauacaacuu

SEQ ID NO: 112470 - RNA, 21 nt, Human
uacacagggaccugagaaucc

SEQ ID NO: 112471 - RNA, 21 nt, Human
uauaagguggagaggucauac

SEQ ID NO: 112472 - RNA, 30 nt, Human
uccaaauccucuuuaaaaaaaaaaaaaagg

SEQ ID NO: 112473 - RNA, 20 nt, Human
ucuuuaaaaaaaaaaaaaaa

SEQ ID NO: 112474 - RNA, 19 nt, Human
ugaaacaccaauucuccag

SEQ ID NO: 112475 - RNA, 20 nt, Human
ugaaacaccaauucuccagg

SEQ ID NO: 112476 - RNA, 18 nt, Human
ugagguagauuguuuccu

SEQ ID NO: 112477 - RNA, 19 nt, Human
ugcgacaaauccaacuacc

SEQ ID NO: 112478 - RNA, 23 nt, Human
ugcuaaaaaauuaggucaaauaa

SEQ ID NO: 112479 - RNA, 22 nt, Human
uggaacaacucaaaugcuaaaa

SEQ ID NO: 112480 - RNA, 23 nt, Human
uggaacaacucaaaugcuaaaaa

SEQ ID NO: 112481 - RNA, 23 nt, Human
uggcaagaugacacauuuccugg

SEQ ID NO: 112482 - RNA, 25 nt, Human
uggcaagaugacacauuuccugguc

SEQ ID NO: 112483 - RNA, 21 nt, Human
ugucugcgacaaauccaacua

SEQ ID NO: 112484 - RNA, 22 nt, Human
uuaaaccugacaaaaaaaccaa

SEQ ID NO: 112485 - RNA, 26 nt, Human
uuaaaccugacaaaaaaaccaaagau

SEQ ID NO: 112486 - RNA, 24 nt, Human
uuauaaacuccuacugacgacugc

SEQ ID NO: 112487 - RNA, 25 nt, Human
uuuaaaaaaaaaaaaaaguuugggu

SEQ ID NO: 112488 - RNA, 21 nt, Human
uuucacgguauauauuuggcc

SEQ ID NO: 112489 - RNA, 24 nt, Human
uuuccuaugcaguaaagugaagau

SEQ ID NO: 112490 - RNA, 20 nt, Human
aagagccuuaagauugcuaa

SEQ ID NO: 112491 - RNA, 23 nt, Human
acaagguacaugugcuaauguuc

SEQ ID NO: 112492 - RNA, 19 nt, Human
acauucuuuucagccuacc

SEQ ID NO: 112493 - RNA, 26 nt, Human
agccuugaaagaaugguugagaacag

SEQ ID NO: 112494 - RNA, 18 nt, Human
aggcacaagguacaugug

SEQ ID NO: 112495 - RNA, 27 nt, Human
auaaaaauacaguacagugcauaaaua

SEQ ID NO: 112496 - RNA, 21 nt, Human
auaaaaauuacauucuuuuca

SEQ ID NO: 112497 - RNA, 22 nt, Human
auagaaaaguuuugaaaagguu

SEQ ID NO: 112498 - RNA, 19 nt, Human
cauacaggccucagaguag

SEQ ID NO: 112499 - RNA, 21 nt, Human
cccagaugagcagugcagaag

SEQ ID NO: 112500 - RNA, 19 nt, Human
ccuuggcagcuuucugaag

SEQ ID NO: 112501 - RNA, 19 nt, Human
cuagaaguucucauauuca

SEQ ID NO: 112502 - RNA, 21 nt, Human
cugcaaucauagaaaaguuuu

SEQ ID NO: 112503 - RNA, 26 nt, Human
cuuggcagcuuucugaagcuuccucu

SEQ ID NO: 112504 - RNA, 20 nt, Human
gagauggugccuuggcagcu

SEQ ID NO: 112505 - RNA, 19 nt, Human
gguaaaacauuuugugcuu

SEQ ID NO: 112506 - RNA, 22 nt, Human
guuccuggagauggugccuugg

SEQ ID NO: 112507 - RNA, 22 nt, Human
uacaaaguuauaugauaccucc

SEQ ID NO: 112508 - RNA, 19 nt, Human
uaccuccuggauguuuccu

SEQ ID NO: 112509 - RNA, 19 nt, Human
uagcaggacuucuuuggug

SEQ ID NO: 112510 - RNA, 21 nt, Human
uauaugcaccuguauauuuga

SEQ ID NO: 112511 - RNA, 24 nt, Human
ucaaauuaauucagccuaaaaauc

SEQ ID NO: 112512 - RNA, 18 nt, Human
ucagaguagugcaccauc

SEQ ID NO: 112513 - RNA, 23 nt, Human
ucuauuucuguuuuuuuuuuuaa

SEQ ID NO: 112514 - RNA, 19 nt, Human
ucugaagcuuccucugccc

SEQ ID NO: 112515 - RNA, 20 nt, Human
ucugcaaucauagaaaaguu

SEQ ID NO: 112516 - RNA, 21 nt, Human
ugaaaggggccauacaggccu

SEQ ID NO: 112517 - RNA, 22 nt, Human
ugcccagaugagcagugcagaa

SEQ ID NO: 112518 - RNA, 19 nt, Human
ugcgugcugggaguuccug

SEQ ID NO: 112519 - RNA, 20 nt, Human
uggagauggugccuuggcag

SEQ ID NO: 112520 - RNA, 21 nt, Human
uggauguuuccuagaaguucu

SEQ ID NO: 112521 - RNA, 18 nt, Human
uggcagcuuucugaagcu

SEQ ID NO: 112522 - RNA, 18 nt, Human
ugggguagaguuagagaa

SEQ ID NO: 112523 - RNA, 20 nt, Human
uguugcuuuguuuuuuguug

SEQ ID NO: 112524 - RNA, 27 nt, Human
uuagagcucuauuucugucguccggga

SEQ ID NO: 112525 - RNA, 19 nt, Human
uucucugcaaucauagaaa

SEQ ID NO: 112526 - RNA, 22 nt, Human
uuguguuaacuaaauaagaaua

SEQ ID NO: 112527 - RNA, 21 nt, Human
uuuaauaagugaggcacagcu

SEQ ID NO: 112528 - RNA, 23 nt, Human
uuuacguugcugcucacuuuuca

SEQ ID NO: 112529 - RNA, 23 nt, Human
uuucacauaacuuagagcucuau

SEQ ID NO: 112530 - RNA, 24 nt, Human
aaauggguugguggcaccaaggua

SEQ ID NO: 112531 - RNA, 18 nt, Human
aagcuuuugccaugugau

SEQ ID NO: 112532 - RNA, 23 nt, Human
agccauuggggagggagaggggg

SEQ ID NO: 112533 - RNA, 18 nt, Human
agcccuuuccucucccuc

SEQ ID NO: 112534 - RNA, 19 nt, Human
aggaaaaggagaguugaga

SEQ ID NO: 112535 - RNA, 20 nt, Human
aggaaaaggagaguugagaa

SEQ ID NO: 112536 - RNA, 22 nt, Human
agggagagggggaaaaagucaa

SEQ ID NO: 112537 - RNA, 24 nt, Human
agggagagggggaaaaagucaaag

SEQ ID NO: 112538 - RNA, 25 nt, Human
auuacaauuuauuaaacacacuguu

SEQ ID NO: 112539 - RNA, 24 nt, Human
caaagggcuuuuucuucuaaauuu

SEQ ID NO: 112540 - RNA, 18 nt, Human
cagaguucugcaauucuc

SEQ ID NO: 112541 - RNA, 20 nt, Human
ccccaccggccgggacccuc

SEQ ID NO: 112542 - RNA, 22 nt, Human
ccccgcacucacaacugugaac

SEQ ID NO: 112543 - RNA, 21 nt, Human
ccgcgacccucugauccuucc

SEQ ID NO: 112544 - RNA, 26 nt, Human
ccggccgcgacccucugauccuuccu

SEQ ID NO: 112545 - RNA, 19 nt, Human
cgcacucacaacugugaac

SEQ ID NO: 112546 - RNA, 23 nt, Human
cucuagcccuuuccucucccucu

SEQ ID NO: 112547 - RNA, 20 nt, Human
cucugccgggcccugccuuc

SEQ ID NO: 112548 - RNA, 20 nt, Human
cugcccccacaaaggcaucg

SEQ ID NO: 112549 - RNA, 22 nt, Human
gagggagagggggaaaaaguca

SEQ ID NO: 112550 - RNA, 19 nt, Human
gauggaugagaaugagcac

SEQ ID NO: 112551 - RNA, 19 nt, Human
gcgacccucugauccuucc

SEQ ID NO: 112552 - RNA, 23 nt, Human
ggagagggggaaaaagucaaagg

SEQ ID NO: 112553 - RNA, 19 nt, Human
ggagggagagggggaaaaa

SEQ ID NO: 112554 - RNA, 19 nt, Human
ggguugguggcaccaaggu

SEQ ID NO: 112555 - RNA, 23 nt, Human
uacaauuuauuaaacacacuguu

SEQ ID NO: 112556 - RNA, 26 nt, Human
uacagcaccaaagaaauucaaauagg

SEQ ID NO: 112557 - RNA, 22 nt, Human
uauagaacuguacacaaaauaa

SEQ ID NO: 112558 - RNA, 18 nt, Human
uauguucuuugucuuaau

SEQ ID NO: 112559 - RNA, 18 nt, Human
ucccucugaguuggcccc

SEQ ID NO: 112560 - RNA, 19 nt, Human
ugauauguucuuugucuua

SEQ ID NO: 112561 - RNA, 24 nt, Human
ugauucugcccccacaaaggcauc

SEQ ID NO: 112562 - RNA, 23 nt, Human
ugccaugugauucugcccccaca

SEQ ID NO: 112563 - RNA, 18 nt, Human
ugcuacacagccauuggg

SEQ ID NO: 112564 - RNA, 20 nt, Human
ugcuacacagccauuggggg

SEQ ID NO: 112565 - RNA, 20 nt, Human
uggguugguggcaccaaggu

SEQ ID NO: 112566 - RNA, 27 nt, Human
uucaaauaggaaaaggagaguugagaa

SEQ ID NO: 112567 - RNA, 20 nt, Human
uucagaaugaaggcagauga

SEQ ID NO: 112568 - RNA, 25 nt, Human
uuucauaauacauauauuuauugcc

SEQ ID NO: 112569 - RNA, 21 nt, Human
aaacccagaccaaguggaaga

SEQ ID NO: 112570 - RNA, 22 nt, Human
acaaaauacgccauguccuuuc

SEQ ID NO: 112571 - RNA, 19 nt, Human
accacuucaccccuccccu

SEQ ID NO: 112572 - RNA, 20 nt, Human
agaccccugucuucaacauc

SEQ ID NO: 112573 - RNA, 20 nt, Human
agagacagugggcacauggg

SEQ ID NO: 112574 - RNA, 18 nt, Human
agagcccagaugccacuc

SEQ ID NO: 112575 - RNA, 20 nt, Human
agaugccacuccucccgugg

SEQ ID NO: 112576 - RNA, 22 nt, Human
agcauccuggcccucaaguagc

SEQ ID NO: 112577 - RNA, 18 nt, Human
aggaucagggaaagugag

SEQ ID NO: 112578 - RNA, 25 nt, Human
aggugggaggaaggugggagggagg

SEQ ID NO: 112579 - RNA, 23 nt, Human
augcagcccugcacacaccccac

SEQ ID NO: 112580 - RNA, 20 nt, Human
cacacaccccacacuauucc

SEQ ID NO: 112581 - RNA, 21 nt, Human
cacauuauuuaaccaucaguc

SEQ ID NO: 112582 - RNA, 22 nt, Human
cacccccgagaccccugucuuc

SEQ ID NO: 112583 - RNA, 22 nt, Human
cacgacagcugucagcggccca

SEQ ID NO: 112584 - RNA, 22 nt, Human
cacuucaccccuccccuggccu

SEQ ID NO: 112585 - RNA, 23 nt, Human
cagagucagagcccugaggccag

SEQ ID NO: 112586 - RNA, 21 nt, Human
cagggcucccuagauagugag

SEQ ID NO: 112587 - RNA, 21 nt, Human
cagugggcacaugggccaggc

SEQ ID NO: 112588 - RNA, 22 nt, Human
caugggccaggcagccaacacc

SEQ ID NO: 112589 - RNA, 23 nt, Human
ccacuucaccccuccccuggccu

SEQ ID NO: 112590 - RNA, 20 nt, Human
ccagaccaaguggaagagac

SEQ ID NO: 112591 - RNA, 22 nt, Human
cccccuacacacagucacugag

SEQ ID NO: 112592 - RNA, 19 nt, Human
ccccgacugagggcucucc

SEQ ID NO: 112593 - RNA, 23 nt, Human
ccccuccccuggccugccccgac

SEQ ID NO: 112594 - RNA, 18 nt, Human
ccggagcccacccccgag

SEQ ID NO: 112595 - RNA, 20 nt, Human
ccguuucuucccugggggag

SEQ ID NO: 112596 - RNA, 24 nt, Human
cggaugcagcccugcacacacccc

SEQ ID NO: 112597 - RNA, 21 nt, Human
cggcccagcuccaugcagcaa

SEQ ID NO: 112598 - RNA, 25 nt, Human
cuauuccguuucuucccugggggag

SEQ ID NO: 112599 - RNA, 21 nt, Human
cucagggccauggcaauuuac

SEQ ID NO: 112600 - RNA, 18 nt, Human
cugaggccagggagacca

SEQ ID NO: 112601 - RNA, 21 nt, Human
cugagggcucuccagcccugg

SEQ ID NO: 112602 - RNA, 19 nt, Human
cugcucccuccucgguggc

SEQ ID NO: 112603 - RNA, 19 nt, Human
gaagacagggagcagacua

SEQ ID NO: 112604 - RNA, 20 nt, Human
gaccacauauuccaacuuuc

SEQ ID NO: 112605 - RNA, 19 nt, Human
gagacagugggcacauggg

SEQ ID NO: 112606 - RNA, 22 nt, Human
gagacagugggcacaugggccg

SEQ ID NO: 112607 - RNA, 20 nt, Human
gagggcucuccagcccuggc

SEQ ID NO: 112608 - RNA, 23 nt, Human
gaggggugcccaggggaggacag

SEQ ID NO: 112609 - RNA, 22 nt, Human
gaugcagcccugcacacacccc

SEQ ID NO: 112610 - RNA, 21 nt, Human
gcacacaccccacacuauucc

SEQ ID NO: 112611 - RNA, 21 nt, Human
gccaucugcggaugcagcccu

SEQ ID NO: 112612 - RNA, 25 nt, Human
gccauguccuuucucuucucuucca

SEQ ID NO: 112613 - RNA, 21 nt, Human
ggaaagugaggggugcccagg

SEQ ID NO: 112614 - RNA, 20 nt, Human
ggaaggugggagggaggugg

SEQ ID NO: 112615 - RNA, 25 nt, Human
ggagucccuuccauaugccacacua

SEQ ID NO: 112616 - RNA, 20 nt, Human
ggcagccaacaccugugggu

SEQ ID NO: 112617 - RNA, 19 nt, Human
ggcagccaacaccuguggu

SEQ ID NO: 112618 - RNA, 22 nt, Human
gggaaagugaggggugcccagg

SEQ ID NO: 112619 - RNA, 21 nt, Human
gggaggucagaggcugcgggc

SEQ ID NO: 112620 - RNA, 19 nt, Human
ggguuagagagccccaccc

SEQ ID NO: 112621 - RNA, 20 nt, Human
gucacugaggaaaguccuga

SEQ ID NO: 112622 - RNA, 19 nt, Human
gugggcacaugggccaggc

SEQ ID NO: 112623 - RNA, 18 nt, Human
uaacaggcuccagguggg

SEQ ID NO: 112624 - RNA, 23 nt, Human
ucccugggggagcauccuggccc

SEQ ID NO: 112625 - RNA, 19 nt, Human
ucgguggcugccgcuucug

SEQ ID NO: 112626 - RNA, 18 nt, Human
ucuccagcccuggcccag

SEQ ID NO: 112627 - RNA, 21 nt, Human
ucuccagcccuggcccagggc

SEQ ID NO: 112628 - RNA, 18 nt, Human
ugaggagcccucuuggga

SEQ ID NO: 112629 - RNA, 20 nt, Human
ugaggggugcccaggggagg

SEQ ID NO: 112630 - RNA, 22 nt, Human
ugcacacaccccacacuauucc

SEQ ID NO: 112631 - RNA, 23 nt, Human
ugcaggaucagggaaagugaggg

SEQ ID NO: 112632 - RNA, 19 nt, Human
ugcccaggggaggacaggg

SEQ ID NO: 112633 - RNA, 19 nt, Human
uggaagagacagugggcac

SEQ ID NO: 112634 - RNA, 22 nt, Human
uggaagagacagugggcacaug

SEQ ID NO: 112635 - RNA, 20 nt, Human
uggaagcugggcacaggguc

SEQ ID NO: 112636 - RNA, 21 nt, Human
uggaagcugggcacagggucc

SEQ ID NO: 112637 - RNA, 24 nt, Human
uggaagcugggcacaggguccugg

SEQ ID NO: 112638 - RNA, 19 nt, Human
uggcucagggccauggcaa

SEQ ID NO: 112639 - RNA, 24 nt, Human
uggcucagggccauggcaauuuac

SEQ ID NO: 112640 - RNA, 22 nt, Human
ugggauuccaggugggccuggu

SEQ ID NO: 112641 - RNA, 20 nt, Human
ugggccaggcagccaacacc

SEQ ID NO: 112642 - RNA, 19 nt, Human
uggguucagcccugaaccc

SEQ ID NO: 112643 - RNA, 21 nt, Human
uguccaggcaaccacuucacc

SEQ ID NO: 112644 - RNA, 18 nt, Human
uucccugggggagcaucc

SEQ ID NO: 112645 - RNA, 27 nt, Human
uucccugggggagcauccuggcccuca

SEQ ID NO: 112646 - RNA, 18 nt, Human
uuguuuggggugauuggg

SEQ ID NO: 112647 - RNA, 23 nt, Human
uuuuuuguuauuuugcuuuccac

SEQ ID NO: 112648 - RNA, 20 nt, Human
aaaaaguuauuucgaagaac

SEQ ID NO: 112649 - RNA, 19 nt, Human
aaaaguuauuucgaagaac

SEQ ID NO: 112650 - RNA, 22 nt, Human
aacuugacacacucccugcggc

SEQ ID NO: 112651 - RNA, 27 nt, Human
aagcacaaccagcgguaauugggguac

SEQ ID NO: 112652 - RNA, 19 nt, Human
aaucugaccggcucuccuu

SEQ ID NO: 112653 - RNA, 21 nt, Human
agaaaaaaguuauuucgaaga

SEQ ID NO: 112654 - RNA, 24 nt, Human
agaggugggucguggcggcuggcg

SEQ ID NO: 112655 - RNA, 20 nt, Human
agcaaauaucauggaccucu

SEQ ID NO: 112656 - RNA, 20 nt, Human
agccagcaccucaguucugg

SEQ ID NO: 112657 - RNA, 19 nt, Human
aggaaaguuaggggaaucu

SEQ ID NO: 112658 - RNA, 22 nt, Human
auguacaaacacacacacaggc

SEQ ID NO: 112659 - RNA, 21 nt, Human
cacacaugagcuagccagcac

SEQ ID NO: 112660 - RNA, 18 nt, Human
cagucuuucccuucaagu

SEQ ID NO: 112661 - RNA, 26 nt, Human
caucuuguaaacaaaagggaagaggu

SEQ ID NO: 112662 - RNA, 22 nt, Human
cccggcaaagaggacggaaaaa

SEQ ID NO: 112663 - RNA, 18 nt, Human
ccgcccagucuuucccuu

SEQ ID NO: 112664 - RNA, 22 nt, Human
ccgcugcucccggcaaagagga

SEQ ID NO: 112665 - RNA, 18 nt, Human
ccggcaaagaggacggaa

SEQ ID NO: 112666 - RNA, 19 nt, Human
ccgggcgaaggggcgcaca

SEQ ID NO: 112667 - RNA, 22 nt, Human
cgaaaaagcacaaccagcggua

SEQ ID NO: 112668 - RNA, 25 nt, Human
cgaagaacguuccaaguccaggaaa

SEQ ID NO: 112669 - RNA, 33 nt, Human
cgccucgugucucccgggccagucaguuucaau

SEQ ID NO: 112670 - RNA, 20 nt, Human
cggcaaagaggacggaaaaa

SEQ ID NO: 112671 - RNA, 18 nt, Human
cguggcggcuggcgagga

SEQ ID NO: 112672 - RNA, 21 nt, Human
cuauguacaaacacacacaca

SEQ ID NO: 112673 - RNA, 22 nt, Human
cucccgggccagucaguuucag

SEQ ID NO: 112674 - RNA, 21 nt, Human
gaaaaagcacaaccagcggua

SEQ ID NO: 112675 - RNA, 24 nt, Human
gaagaacguuccaaguccaggaaa

SEQ ID NO: 112676 - RNA, 23 nt, Human
gcaguaggagaggaagugccgaa

SEQ ID NO: 112677 - RNA, 18 nt, Human
gcuggcgaggagcgcagg

SEQ ID NO: 112678 - RNA, 18 nt, Human
ggaugagcaauccgugcu

SEQ ID NO: 112679 - RNA, 18 nt, Human
gggcagggggaaagggcu

SEQ ID NO: 112680 - RNA, 20 nt, Human
guacaaacacacacacaggc

SEQ ID NO: 112681 - RNA, 22 nt, Human
uacaaacacacacacaggccaa

SEQ ID NO: 112682 - RNA, 23 nt, Human
uagcaguaggagaggaagugccg

SEQ ID NO: 112683 - RNA, 22 nt, Human
uagccagcaccucaguucuggc

SEQ ID NO: 112684 - RNA, 21 nt, Human
uaggagaggaagugccgaaaa

SEQ ID NO: 112685 - RNA, 20 nt, Human
uauguacaaacacacacaca

SEQ ID NO: 112686 - RNA, 24 nt, Human
uauguacaaacacacacacaggcc

SEQ ID NO: 112687 - RNA, 25 nt, Human
uauguacaaacacacacacaggcca

SEQ ID NO: 112688 - RNA, 19 nt, Human
uccaaacugcggggcaggg

SEQ ID NO: 112689 - RNA, 20 nt, Human
ucggaugagcaauccgugcu

SEQ ID NO: 112690 - RNA, 24 nt, Human
ucuuguaaacaaaagggaagaggu

SEQ ID NO: 112691 - RNA, 21 nt, Human
uguaaacaaaagggaagaggu

SEQ ID NO: 112692 - RNA, 23 nt, Human
uguacaaacacacacacaggcca

SEQ ID NO: 112693 - RNA, 25 nt, Human
uguacaaacacacacacaggccaau

SEQ ID NO: 112694 - RNA, 19 nt, Human
ugucugcagagcaguuggu

SEQ ID NO: 112695 - RNA, 28 nt, Human
uguuucauuuccuuuaauaaugaaaauc

SEQ ID NO: 112696 - RNA, 22 nt, Human
uuagcaaauaucauggaccucu

SEQ ID NO: 112697 - RNA, 22 nt, Human
uuguaaacaaaagggaagaggu

SEQ ID NO: 112698 - RNA, 21 nt, Human
uuuaaaauacucuuagacaca

SEQ ID NO: 112699 - RNA, 19 nt, Human
aaaccaacacaaauccuaa

SEQ ID NO: 112700 - RNA, 19 nt, Human
aacacaaauccuaaaccua

SEQ ID NO: 112701 - RNA, 21 nt, Human
aaccaacacaaauccuaaacc

SEQ ID NO: 112702 - RNA, 22 nt, Human
aaugaacaggcaaacaaaacca

SEQ ID NO: 112703 - RNA, 21 nt, Human
acaggcaaacaaaaccaacac

SEQ ID NO: 112704 - RNA, 22 nt, Human
acaggcaaacaaaaccaacaca

SEQ ID NO: 112705 - RNA, 19 nt, Human
acuccaugaaccaucgacc

SEQ ID NO: 112706 - RNA, 21 nt, Human
agaaaugccgaaccagucuga

SEQ ID NO: 112707 - RNA, 20 nt, Human
aggcaaacaaaaccaacaca

SEQ ID NO: 112708 - RNA, 22 nt, Human
aggcaaacaaaaccaacacaaa

SEQ ID NO: 112709 - RNA, 24 nt, Human
augaacaggcaaacaaaaccaaca

SEQ ID NO: 112710 - RNA, 23 nt, Human
caaaaccaacacaaauccuaaac

SEQ ID NO: 112711 - RNA, 24 nt, Human
caaacaaaaccaacacaaauccua

SEQ ID NO: 112712 - RNA, 24 nt, Human
caaauccuaaaccuagaaucagau

SEQ ID NO: 112713 - RNA, 20 nt, Human
caggcaaacaaaaccaacac

SEQ ID NO: 112714 - RNA, 19 nt, Human
ccaugaaccaucgaccagg

SEQ ID NO: 112715 - RNA, 19 nt, Human
ccugcagcucauucacauc

SEQ ID NO: 112716 - RNA, 23 nt, Human
gaaaugaacaggcaaacaaaacc

SEQ ID NO: 112717 - RNA, 19 nt, Human
gcaacauuguacacaugag

SEQ ID NO: 112718 - RNA, 23 nt, Human
uacaaugucagcaauugcuggag

SEQ ID NO: 112719 - RNA, 20 nt, Human
uccaagaaaugccgaaccag

SEQ ID NO: 112720 - RNA, 25 nt, Human
ugaaaugaacaggcaaacaaaacca

SEQ ID NO: 112721 - RNA, 26 nt, Human
ugaaaugaacaggcaaacaaaaccaa

SEQ ID NO: 112722 - RNA, 26 nt, Human
uguaaccagguuuuccaagaaaugcc

SEQ ID NO: 112723 - RNA, 24 nt, Human
uuuccaagaaaugccgaaccaguc

SEQ ID NO: 112724 - RNA, 27 nt, Human
aaaaaaaaaaaacuguaauauuuacaa

SEQ ID NO: 112725 - RNA, 23 nt, Human
aaugauggauguacgugaaagaa

SEQ ID NO: 112726 - RNA, 19 nt, Human
aggcgcuggcugagcgcug

SEQ ID NO: 112727 - RNA, 21 nt, Human
auaaacagacaccauacuaaa

SEQ ID NO: 112728 - RNA, 19 nt, Human
aucagauuuugucuuugau

SEQ ID NO: 112729 - RNA, 19 nt, Human
aucauuugagcaguccugu

SEQ ID NO: 112730 - RNA, 19 nt, Human
caacaaugguuuaaaagga

SEQ ID NO: 112731 - RNA, 19 nt, Human
caccaauauauggaucaga

SEQ ID NO: 112732 - RNA, 24 nt, Human
cccgcgcgcucgcccuuccugcag

SEQ ID NO: 112733 - RNA, 20 nt, Human
cggcagcggcggcggcgggc

SEQ ID NO: 112734 - RNA, 20 nt, Human
cugaaggaugcaguggcaga

SEQ ID NO: 112735 - RNA, 21 nt, Human
cugcagggaacaaaggcggcg

SEQ ID NO: 112736 - RNA, 23 nt, Human
cugggguuuccugcagaaucuag

SEQ ID NO: 112737 - RNA, 21 nt, Human
gaagucauaaaauuguggggu

SEQ ID NO: 112738 - RNA, 19 nt, Human
gcagcggcggcggcgggca

SEQ ID NO: 112739 - RNA, 20 nt, Human
gcaguggcagaaucuggccu

SEQ ID NO: 112740 - RNA, 20 nt, Human
gccaaauggaagucauaaaa

SEQ ID NO: 112741 - RNA, 19 nt, Human
gcccgcgcgcucgcccuuc

SEQ ID NO: 112742 - RNA, 18 nt, Human
gcuggcccgcgcgcucgc

SEQ ID NO: 112743 - RNA, 19 nt, Human
gggguggggguugggggag

SEQ ID NO: 112744 - RNA, 21 nt, Human
guggggguugggggaggagag

SEQ ID NO: 112745 - RNA, 21 nt, Human
uaaaaauuccuaaagcaugau

SEQ ID NO: 112746 - RNA, 18 nt, Human
uaaaauuguggggugggg

SEQ ID NO: 112747 - RNA, 22 nt, Human
uaaacagacaccauacuaaaau

SEQ ID NO: 112748 - RNA, 22 nt, Human
uacaacaauuaaacauuuuaga

SEQ ID NO: 112749 - RNA, 21 nt, Human
uacacucaacaacaaugguuu

SEQ ID NO: 112750 - RNA, 18 nt, Human
uacgugaaagaaaaaagc

SEQ ID NO: 112751 - RNA, 23 nt, Human
uaguaaaaaaaaaaaaacuguaa

SEQ ID NO: 112752 - RNA, 23 nt, Human
uauguaguaaaaaaaaaaaaacu

SEQ ID NO: 112753 - RNA, 23 nt, Human
uauguuuucuuugguugcuguug

SEQ ID NO: 112754 - RNA, 19 nt, Human
uccugcagggaacaaaggc

SEQ ID NO: 112755 - RNA, 19 nt, Human
ucggcagcggcggcggcgg

SEQ ID NO: 112756 - RNA, 23 nt, Human
ucuuugguugcuguuguaaagaa

SEQ ID NO: 112757 - RNA, 23 nt, Human
ugcagggaacaaaggcggcgcuc

SEQ ID NO: 112758 - RNA, 22 nt, Human
ugugcuauuucuuuucuaguuu

SEQ ID NO: 112759 - RNA, 21 nt, Human
ugugggguggggguuggggga

SEQ ID NO: 112760 - RNA, 20 nt, Human
uuaugugcuauuucuuuucu

SEQ ID NO: 112761 - RNA, 23 nt, Human
uucaacaauugccaaauggaagu

SEQ ID NO: 112762 - RNA, 21 nt, Human
uucaacuuuuccagcaaguca

SEQ ID NO: 112763 - RNA, 23 nt, Human
uucacauaagaaaaaauugaaaa

SEQ ID NO: 112764 - RNA, 20 nt, Human
uuccugcagaaucuagcacc

SEQ ID NO: 112765 - RNA, 18 nt, Human
uugugggguggggguugg

SEQ ID NO: 112766 - RNA, 19 nt, Human
uuuuagggaaaaaaacauu

SEQ ID NO: 112767 - RNA, 23 nt, Human
aacaaaaaaaaaaaacauucaca

SEQ ID NO: 112768 - RNA, 24 nt, Human
aacaacaacaacaaaaaaaaaaaa

SEQ ID NO: 112769 - RNA, 25 nt, Human
aacagcaauuaaaaacaacaacaac

SEQ ID NO: 112770 - RNA, 22 nt, Human
aacauucacaaccugucacaga

SEQ ID NO: 112771 - RNA, 20 nt, Human
aagcagagcccagguuccuc

SEQ ID NO: 112772 - RNA, 19 nt, Human
acaacaacaaaaaaaaaaa

SEQ ID NO: 112773 - RNA, 20 nt, Human
acaacaacaaaaaaaaaaaa

SEQ ID NO: 112774 - RNA, 22 nt, Human
acccaaaugcccuuuuuguucc

SEQ ID NO: 112775 - RNA, 23 nt, Human
accucagccccuugaauagcuag

SEQ ID NO: 112776 - RNA, 19 nt, Human
agagcccagguuccucagg

SEQ ID NO: 112777 - RNA, 22 nt, Human
agcaauuaaaaacaacaacaac

SEQ ID NO: 112778 - RNA, 25 nt, Human
caaacuccugggcucaggcgauccu

SEQ ID NO: 112779 - RNA, 24 nt, Human
caacaaaaaaaaaaaacauucaca

SEQ ID NO: 112780 - RNA, 20 nt, Human
caccgguggccggggauccc

SEQ ID NO: 112781 - RNA, 21 nt, Human
caccgguggccggggaucccc

SEQ ID NO: 112782 - RNA, 21 nt, Human
caccucagccccuugaauagc

SEQ ID NO: 112783 - RNA, 20 nt, Human
cagagcccagguuccucagg

SEQ ID NO: 112784 - RNA, 22 nt, Human
cagcaccagaggaacccacugg

SEQ ID NO: 112785 - RNA, 24 nt, Human
cauuauguugcuuagacuggucuc

SEQ ID NO: 112786 - RNA, 23 nt, Human
ccccuguacccaaaugcccuuuu

SEQ ID NO: 112787 - RNA, 26 nt, Human
ccucccaccucagccccuugaauagc

SEQ ID NO: 112788 - RNA, 23 nt, Human
ccuugaauagcuaggauuacagg

SEQ ID NO: 112789 - RNA, 20 nt, Human
cggcgcacgccugccgggga

SEQ ID NO: 112790 - RNA, 24 nt, Human
cucaggcgauccucccaccucagc

SEQ ID NO: 112791 - RNA, 24 nt, Human
cucccaccucagccccuugaauag

SEQ ID NO: 112792 - RNA, 23 nt, Human
cuuuauuuuuuaauuuuuauuuu

SEQ ID NO: 112793 - RNA, 26 nt, Human
gaauagcuaggauuacagguauaugc

SEQ ID NO: 112794 - RNA, 21 nt, Human
gauuacagguauaugccccug

SEQ ID NO: 112795 - RNA, 23 nt, Human
gauuacagguauaugccccugua

SEQ ID NO: 112796 - RNA, 20 nt, Human
gcagcaccagaggaacccac

SEQ ID NO: 112797 - RNA, 22 nt, Human
gcagcaggcggaggaagcagag

SEQ ID NO: 112798 - RNA, 18 nt, Human
gccugccggggacugccg

SEQ ID NO: 112799 - RNA, 19 nt, Human
gcggaggaagcagagccca

SEQ ID NO: 112800 - RNA, 19 nt, Human
gcugcagcaccagaggaac

SEQ ID NO: 112801 - RNA, 18 nt, Human
ggaggaagcagagcccag

SEQ ID NO: 112802 - RNA, 20 nt, Human
ggaggaagcagagcccaggu

SEQ ID NO: 112803 - RNA, 24 nt, Human
ggaggaagcagagcccagguuccu

SEQ ID NO: 112804 - RNA, 18 nt, Human
ggagucuuucauccaaag

SEQ ID NO: 112805 - RNA, 20 nt, Human
gggguucucuaucucuccgu

SEQ ID NO: 112806 - RNA, 22 nt, Human
uacagguauaugccccuguacc

SEQ ID NO: 112807 - RNA, 24 nt, Human
uacagguauaugccccuguaccca

SEQ ID NO: 112808 - RNA, 23 nt, Human
uacccaaaugcccuuuuuguucc

SEQ ID NO: 112809 - RNA, 19 nt, Human
uaugccccuguacccaaau

SEQ ID NO: 112810 - RNA, 24 nt, Human
uauguugcuuagacuggucucaaa

SEQ ID NO: 112811 - RNA, 18 nt, Human
ucagccccuugaauagcu

SEQ ID NO: 112812 - RNA, 24 nt, Human
uccaaagaggucagcuacagccac

SEQ ID NO: 112813 - RNA, 20 nt, Human
uccccagcuuccuggcgcuc

SEQ ID NO: 112814 - RNA, 19 nt, Human
ucccggcugucugcugccc

SEQ ID NO: 112815 - RNA, 23 nt, Human
uccgugacggucacgggucccca

SEQ ID NO: 112816 - RNA, 18 nt, Human
uccucccaccucagcccc

SEQ ID NO: 112817 - RNA, 24 nt, Human
uccugggacuaaacgggaaaagga

SEQ ID NO: 112818 - RNA, 21 nt, Human
uccugggcucaggcgauccuc

SEQ ID NO: 112819 - RNA, 22 nt, Human
uccugggcucaggcgauccucc

SEQ ID NO: 112820 - RNA, 24 nt, Human
uccugggcucaggcgauccuccca

SEQ ID NO: 112821 - RNA, 19 nt, Human
ucucaaacuccugggcuca

SEQ ID NO: 112822 - RNA, 21 nt, Human
ucucccggcugucugcugccc

SEQ ID NO: 112823 - RNA, 22 nt, Human
ucucccggcugucugcugcccg

SEQ ID NO: 112824 - RNA, 24 nt, Human
ugcccggcgcacgccugccgggga

SEQ ID NO: 112825 - RNA, 24 nt, Human
ugccggggacugccggccacuccg

SEQ ID NO: 112826 - RNA, 22 nt, Human
uuaaaaacaacaacaacaaaaa

SEQ ID NO: 112827 - RNA, 25 nt, Human
uuuuaauuuuuauuuuucggagacu

SEQ ID NO: 112828 - RNA, 24 nt, Human
uuuuuuuuuuuuuuuuaaggaggg

SEQ ID NO: 112829 - RNA, 23 nt, Human
uuuuuuuuuuuuuuuuuuuaagg

SEQ ID NO: 112830 - RNA, 26 nt, Human
aaacaaauguuuuuagacauugaaaa

SEQ ID NO: 112831 - RNA, 24 nt, Human
aaagaccaacugcgcccagucccc

SEQ ID NO: 112832 - RNA, 24 nt, Human
aaagaccaacugcgcccagucccc

SEQ ID NO: 112833 - RNA, 25 nt, Human
aacaaauguuuuuagacauugaaaa

SEQ ID NO: 112834 - RNA, 23 nt, Human
aacaguaaccagaacacaccccc

SEQ ID NO: 112835 - RNA, 24 nt, Human
aaggcgccccacccccauccuccg

SEQ ID NO: 112836 - RNA, 21 nt, Human
acauugaaaagugguuaaaga

SEQ ID NO: 112837 - RNA, 21 nt, Human
acauugaaaagugguuaaaga

SEQ ID NO: 112838 - RNA, 23 nt, Human
accaacugcgcccagucccccaa

SEQ ID NO: 112839 - RNA, 23 nt, Human
accaacugcgcccagucccccaa

SEQ ID NO: 112840 - RNA, 19 nt, Human
accauagccaccugguuug

SEQ ID NO: 112841 - RNA, 21 nt, Human
acccccaucaagugucaccuc

SEQ ID NO: 112842 - RNA, 21 nt, Human
agaacacacccccaucaagug

SEQ ID NO: 112843 - RNA, 24 nt, Human
agcugauggcacagccuuagaaca

SEQ ID NO: 112844 - RNA, 19 nt, Human
aggaaggcgccccaccccc

SEQ ID NO: 112845 - RNA, 24 nt, Human
augaacaggggaggaaggagcuga

SEQ ID NO: 112846 - RNA, 25 nt, Human
cacccucuggagaccuuggaccuaa

SEQ ID NO: 112847 - RNA, 19 nt, Human
cagcaucagguuuucuguu

SEQ ID NO: 112848 - RNA, 19 nt, Human
cagcaucagguuuucuguu

SEQ ID NO: 112849 - RNA, 21 nt, Human
cagccuuagaacaguaaccag

SEQ ID NO: 112850 - RNA, 24 nt, Human
caugaacucuaguaugggccuacg

SEQ ID NO: 112851 - RNA, 27 nt, Human
ccaacuuuuauguaacuggcuuuccua

SEQ ID NO: 112852 - RNA, 24 nt, Human
ccaagguguguuaaagcugaguga

SEQ ID NO: 112853 - RNA, 30 nt, Human
ccagaacacacccccaucaagugucaccuu

SEQ ID NO: 112854 - RNA, 23 nt, Human
ccauugcccucaaccuucuuuuu

SEQ ID NO: 112855 - RNA, 21 nt, Human
ccccaucaagugucaccucca

SEQ ID NO: 112856 - RNA, 20 nt, Human
ccccaugaagcuguuucaga

SEQ ID NO: 112857 - RNA, 24 nt, Human
cccccauccuccguuuucugggcu

SEQ ID NO: 112858 - RNA, 18 nt, Human
cccccucucucuuucuuc

SEQ ID NO: 112859 - RNA, 24 nt, Human
cccccucucucuuucuucuccuga

SEQ ID NO: 112860 - RNA, 20 nt, Human
ccccucucucuuucuucucc

SEQ ID NO: 112861 - RNA, 20 nt, Human
cccucuucucccuuuauucc

SEQ ID NO: 112862 - RNA, 20 nt, Human
cccucuucucccuuuauucc

SEQ ID NO: 112863 - RNA, 19 nt, Human
ccuccguuuucugggcuca

SEQ ID NO: 112864 - RNA, 20 nt, Human
ccuccuagaggggaagugaa

SEQ ID NO: 112865 - RNA, 19 nt, Human
cgccccacccccauccucc

SEQ ID NO: 112866 - RNA, 22 nt, Human
cuccaggaaggcgccccacccc

SEQ ID NO: 112867 - RNA, 21 nt, Human
cuccugagccaacuuuuaugu

SEQ ID NO: 112868 - RNA, 21 nt, Human
cugagugcagaauggagggug

SEQ ID NO: 112869 - RNA, 21 nt, Human
cugagugcagaauggagggug

SEQ ID NO: 112870 - RNA, 21 nt, Human
cugcgcccagucccccaagug

SEQ ID NO: 112871 - RNA, 21 nt, Human
cugcgcccagucccccaagug

SEQ ID NO: 112872 - RNA, 21 nt, Human
cuggagaccuuggaccuaagu

SEQ ID NO: 112873 - RNA, 24 nt, Human
gaaaaaaaaacuucuuuaauggga

SEQ ID NO: 112874 - RNA, 24 nt, Human
gaaaaaaaaacuucuuuaauggga

SEQ ID NO: 112875 - RNA, 24 nt, Human
gaacaguaaccagaacacaccccc

SEQ ID NO: 112876 - RNA, 22 nt, Human
gagccaacuuuuauguaacugg

SEQ ID NO: 112877 - RNA, 18 nt, Human
gagcugaugcuguguccc

SEQ ID NO: 112878 - RNA, 18 nt, Human
gagcugaugcuguguccc

SEQ ID NO: 112879 - RNA, 27 nt, Human
gaggaaggagcugauggcacagccuua

SEQ ID NO: 112880 - RNA, 20 nt, Human
gcagugcucacuuuuuuuuu

SEQ ID NO: 112881 - RNA, 21 nt, Human
gcuacaaucagacuuucuaag

SEQ ID NO: 112882 - RNA, 27 nt, Human
gcugugcugucucaguaggacauugaa

SEQ ID NO: 112883 - RNA, 18 nt, Human
gcuuuccuaggcuggggc

SEQ ID NO: 112884 - RNA, 24 nt, Human
gggaggaaggagcugauggcacag

SEQ ID NO: 112885 - RNA, 22 nt, Human
guaugggccuacggacaaucau

SEQ ID NO: 112886 - RNA, 20 nt, Human
guccccagcaucagguuuuc

SEQ ID NO: 112887 - RNA, 24 nt, Human
uaaagcucuaagacuccugagcca

SEQ ID NO: 112888 - RNA, 22 nt, Human
uaacauauccaugaacucuagu

SEQ ID NO: 112889 - RNA, 22 nt, Human
uaacauauccaugaacucuagu

SEQ ID NO: 112890 - RNA, 21 nt, Human
uaagcaaaugggaaugugaua

SEQ ID NO: 112891 - RNA, 25 nt, Human
uagaacaguaaccagaacacacccc

SEQ ID NO: 112892 - RNA, 27 nt, Human
uagcuacaaucagacuuucuaagcaac

SEQ ID NO: 112893 - RNA, 28 nt, Human
ucaccuccaggaaggcgccccacccccu

SEQ ID NO: 112894 - RNA, 23 nt, Human
uccagcuuucacccucuggagac

SEQ ID NO: 112895 - RNA, 20 nt, Human
uccaugaacucuaguauggg

SEQ ID NO: 112896 - RNA, 20 nt, Human
uccaugaacucuaguauggg

SEQ ID NO: 112897 - RNA, 19 nt, Human
uccccagcaucagguuuuc

SEQ ID NO: 112898 - RNA, 19 nt, Human
uccguuuucugggcucaua

SEQ ID NO: 112899 - RNA, 25 nt, Human
uccuuccuuguccauugcccucaac

SEQ ID NO: 112900 - RNA, 25 nt, Human
uccuuccuuguccauugcccucaac

SEQ ID NO: 112901 - RNA, 19 nt, Human
ucuaagacuccugagccaa

SEQ ID NO: 112902 - RNA, 22 nt, Human
ucuuucuucuccugauguuuuc

SEQ ID NO: 112903 - RNA, 23 nt, Human
ucuuucuucuccugauguuuucu

SEQ ID NO: 112904 - RNA, 23 nt, Human
ucuuucuucuccugauguuuucu

SEQ ID NO: 112905 - RNA, 19 nt, Human
ugaacuaaguaaagaagcc

SEQ ID NO: 112906 - RNA, 19 nt, Human
ugagaccugguccaggagc

SEQ ID NO: 112907 - RNA, 20 nt, Human
ugauauacauauaaccauua

SEQ ID NO: 112908 - RNA, 21 nt, Human
ugcagugcucacuuuuuuuuu

SEQ ID NO: 112909 - RNA, 20 nt, Human
ugcuguguccccagcaucag

SEQ ID NO: 112910 - RNA, 18 nt, Human
ugggccugguccaggagc

SEQ ID NO: 112911 - RNA, 18 nt, Human
uuaguugcaagagucacu

SEQ ID NO: 112912 - RNA, 19 nt, Human
uucccucuucucccuuuau

SEQ ID NO: 112913 - RNA, 19 nt, Human
uucccucuucucccuuuau

SEQ ID NO: 112914 - RNA, 20 nt, Human
uucccucuucucccuuuauu

SEQ ID NO: 112915 - RNA, 22 nt, Human
uucccucuucucccuuuauucc

SEQ ID NO: 112916 - RNA, 21 nt, Human
acacaauuacagaaccagccc

SEQ ID NO: 112917 - RNA, 26 nt, Human
acaucacacacaauuacagaaccagc

SEQ ID NO: 112918 - RNA, 21 nt, Human
accugagccucccucccaucu

SEQ ID NO: 112919 - RNA, 31 nt, Human
accuuguugcaccucguggcugcuuuguucc

SEQ ID NO: 112920 - RNA, 19 nt, Human
agagguugcacagggcaug

SEQ ID NO: 112921 - RNA, 20 nt, Human
agagguugcacagggcaugg

SEQ ID NO: 112922 - RNA, 23 nt, Human
agauggccuugugcugagugugg

SEQ ID NO: 112923 - RNA, 18 nt, Human
aggcaggugcguguuggc

SEQ ID NO: 112924 - RNA, 22 nt, Human
augaaacgugaacuauacagga

SEQ ID NO: 112925 - RNA, 27 nt, Human
caacucaugggucccuugaaucucccu

SEQ ID NO: 112926 - RNA, 22 nt, Human
caaggaggguaaggauaugggu

SEQ ID NO: 112927 - RNA, 25 nt, Human
caaggaggguaaggauauggguuuc

SEQ ID NO: 112928 - RNA, 22 nt, Human
cacacaauuacagaaccagccc

SEQ ID NO: 112929 - RNA, 21 nt, Human
cacccugccugacccagcugg

SEQ ID NO: 112930 - RNA, 18 nt, Human
cacccuggaggagcccag

SEQ ID NO: 112931 - RNA, 20 nt, Human
cagccccaggcugcugugcu

SEQ ID NO: 112932 - RNA, 22 nt, Human
cagcugggcucacaggucaggg

SEQ ID NO: 112933 - RNA, 20 nt, Human
cagggaccugagccucccuu

SEQ ID NO: 112934 - RNA, 21 nt, Human
caggggcuggccggccgcucc

SEQ ID NO: 112935 - RNA, 18 nt, Human
caggguggagcugucugc

SEQ ID NO: 112936 - RNA, 20 nt, Human
caucuggagccagccugucc

SEQ ID NO: 112937 - RNA, 23 nt, Human
caugaaacgugaacuauacagga

SEQ ID NO: 112938 - RNA, 19 nt, Human
ccacgucccagccaggggc

SEQ ID NO: 112939 - RNA, 20 nt, Human
ccacuugucccuccacagaa

SEQ ID NO: 112940 - RNA, 18 nt, Human
ccagcugggcucacaggu

SEQ ID NO: 112941 - RNA, 20 nt, Human
ccagcugggcucacagguca

SEQ ID NO: 112942 - RNA, 22 nt, Human
ccccagggaccugagccucccu

SEQ ID NO: 112943 - RNA, 24 nt, Human
cccccuagccccagggaccugagc

SEQ ID NO: 112944 - RNA, 18 nt, Human
ccccuagccccagggacc

SEQ ID NO: 112945 - RNA, 19 nt, Human
ccccuagccccagggaccu

SEQ ID NO: 112946 - RNA, 24 nt, Human
ccccuagccccagggaccugagcc

SEQ ID NO: 112947 - RNA, 21 nt, Human
ccgccgguccucuccggccau

SEQ ID NO: 112948 - RNA, 20 nt, Human
ccggagcugggggucacagu

SEQ ID NO: 112949 - RNA, 24 nt, Human
ccuaggagacagccaaugacugcc

SEQ ID NO: 112950 - RNA, 23 nt, Human
ccuugugcugaguguggccuccu

SEQ ID NO: 112951 - RNA, 24 nt, Human
ccuugugcugaguguggccuccuu

SEQ ID NO: 112952 - RNA, 22 nt, Human
cgcagggcggccugugggcacc

SEQ ID NO: 112953 - RNA, 21 nt, Human
cgccucugagcuugggaaccu

SEQ ID NO: 112954 - RNA, 22 nt, Human
cuagccccagggaccugagccu

SEQ ID NO: 112955 - RNA, 19 nt, Human
cucccagcuuggacucggc

SEQ ID NO: 112956 - RNA, 18 nt, Human
cucggccaggguggagcu

SEQ ID NO: 112957 - RNA, 22 nt, Human
cugaauuggcuucacaucacac

SEQ ID NO: 112958 - RNA, 25 nt, Human
cugaauuggcuucacaucacaccgu

SEQ ID NO: 112959 - RNA, 19 nt, Human
cugcacccugccugaccca

SEQ ID NO: 112960 - RNA, 23 nt, Human
cugggggucacagugcgccucug

SEQ ID NO: 112961 - RNA, 18 nt, Human
cuucacaucacacacaau

SEQ ID NO: 112962 - RNA, 20 nt, Human
cuucccaaagcaggaaaucc

SEQ ID NO: 112963 - RNA, 23 nt, Human
cuucccaaagcaggaaauccugg

SEQ ID NO: 112964 - RNA, 21 nt, Human
gagaugaagucagcaccugcu

SEQ ID NO: 112965 - RNA, 22 nt, Human
gagcacacacccuggaggagcc

SEQ ID NO: 112966 - RNA, 19 nt, Human
gagccgccgguccucuccg

SEQ ID NO: 112967 - RNA, 18 nt, Human
gagcugagcagaaggggc

SEQ ID NO: 112968 - RNA, 21 nt, Human
gagcugucugcuuuggaugua

SEQ ID NO: 112969 - RNA, 21 nt, Human
gcacccugccugacccagcug

SEQ ID NO: 112970 - RNA, 18 nt, Human
gcuggggcgagcacggcu

SEQ ID NO: 112971 - RNA, 20 nt, Human
gcuguggagaauggcccaga

SEQ ID NO: 112972 - RNA, 20 nt, Human
gcuugguguuggaggacagg

SEQ ID NO: 112973 - RNA, 22 nt, Human
ggagaugaagucagcaccugcu

SEQ ID NO: 112974 - RNA, 20 nt, Human
ggaggccagccccaggcugc

SEQ ID NO: 112975 - RNA, 18 nt, Human
ggaggcugccagacccca

SEQ ID NO: 112976 - RNA, 20 nt, Human
ggccaggggcuggccggccg

SEQ ID NO: 112977 - RNA, 25 nt, Human
ggucacuuuuauuugccugucugaa

SEQ ID NO: 112978 - RNA, 25 nt, Human
gguccuggggccaggggcuggccgg

SEQ ID NO: 112979 - RNA, 20 nt, Human
gugcuugguguuggaggaca

SEQ ID NO: 112980 - RNA, 19 nt, Human
uaaaaaaauacacucuuug

SEQ ID NO: 112981 - RNA, 23 nt, Human
uaccgcauguccugugccagccu

SEQ ID NO: 112982 - RNA, 18 nt, Human
ucacaggucaggggagag

SEQ ID NO: 112983 - RNA, 19 nt, Human
ucacaggucaggggagagu

SEQ ID NO: 112984 - RNA, 20 nt, Human
ucagcaccugcuggggcgag

SEQ ID NO: 112985 - RNA, 20 nt, Human
ucagcgccgcgggaugcugc

SEQ ID NO: 112986 - RNA, 22 nt, Human
ucagcuggacaagugcuggcug

SEQ ID NO: 112987 - RNA, 18 nt, Human
ucaggggagaguuggggc

SEQ ID NO: 112988 - RNA, 18 nt, Human
uccauccuggcgcucagc

SEQ ID NO: 112989 - RNA, 18 nt, Human
ucccaaagcaggaaaucc

SEQ ID NO: 112990 - RNA, 21 nt, Human
ucccaaagcaggaaauccugg

SEQ ID NO: 112991 - RNA, 23 nt, Human
ucccagccaggggcaugagaugg

SEQ ID NO: 112992 - RNA, 21 nt, Human
ucccccuagccccagggaccu

SEQ ID NO: 112993 - RNA, 22 nt, Human
ucccuugaaucucccagcuugg

SEQ ID NO: 112994 - RNA, 24 nt, Human
ugagaugggggcccuggaugggag

SEQ ID NO: 112995 - RNA, 22 nt, Human
ugagcuugggaaccugcuucag

SEQ ID NO: 112996 - RNA, 24 nt, Human
ugaguccacuugucccuccacaga

SEQ ID NO: 112997 - RNA, 19 nt, Human
ugaguguggccucagcucc

SEQ ID NO: 112998 - RNA, 23 nt, Human
ugaguguggccucagcucccauu

SEQ ID NO: 112999 - RNA, 24 nt, Human
ugcacccugccugacccagcuggg

SEQ ID NO: 113000 - RNA, 21 nt, Human
ugccucacggggccugucugc

SEQ ID NO: 113001 - RNA, 23 nt, Human
ugcuguggucagccuggcgcugc

SEQ ID NO: 113002 - RNA, 19 nt, Human
ugcuugguguuggaggaca

SEQ ID NO: 113003 - RNA, 19 nt, Human
uggagcugucugcuuugga

SEQ ID NO: 113004 - RNA, 21 nt, Human
uggaggacaggccggagcugg

SEQ ID NO: 113005 - RNA, 23 nt, Human
uggaggagcccagauggccuugu

SEQ ID NO: 113006 - RNA, 22 nt, Human
uggaugggaggcugccagaccc

SEQ ID NO: 113007 - RNA, 20 nt, Human
uggcccagagcugagcagaa

SEQ ID NO: 113008 - RNA, 21 nt, Human
uggcugagccacgucccagcc

SEQ ID NO: 113009 - RNA, 25 nt, Human
ugggggcuuccuccgagccgccggu

SEQ ID NO: 113010 - RNA, 22 nt, Human
uguggccguguuccauccuggc

SEQ ID NO: 113011 - RNA, 23 nt, Human
uguggccguguuccauccuggcg

SEQ ID NO: 113012 - RNA, 25 nt, Human
uguggccguguuccauccuggcgcu

SEQ ID NO: 113013 - RNA, 23 nt, Human
uguuccauccuggcgcucagcug

SEQ ID NO: 113014 - RNA, 18 nt, Human
uucagccugggguugcug

SEQ ID NO: 113015 - RNA, 25 nt, Human
uugcaccucguggcugcuuuguucc

SEQ ID NO: 113016 - RNA, 18 nt, Human
uuggaggacaggccggag

SEQ ID NO: 113017 - RNA, 26 nt, Human
aaaaaaaaaaaaaaaagcaacccaca

SEQ ID NO: 113018 - RNA, 18 nt, Human
aaaaaaaaaaagcaaccc

SEQ ID NO: 113019 - RNA, 18 nt, Human
aaaaaaaaagcaacccac

SEQ ID NO: 113020 - RNA, 19 nt, Human
aaaaaaaagugcaaaggca

SEQ ID NO: 113021 - RNA, 19 nt, Human
aaaaaugcugauuugcaau

SEQ ID NO: 113022 - RNA, 23 nt, Human
aaaacagucaacaaaccaaaggg

SEQ ID NO: 113023 - RNA, 20 nt, Human
aaaacaguuuccugcauuuu

SEQ ID NO: 113024 - RNA, 19 nt, Human
aaaaugaugacacucaucu

SEQ ID NO: 113025 - RNA, 21 nt, Human
aaacaggcaaaaagauaaaca

SEQ ID NO: 113026 - RNA, 20 nt, Human
aaacccugccuuaaauuagg

SEQ ID NO: 113027 - RNA, 22 nt, Human
aaaugauaauuuucacagacaa

SEQ ID NO: 113028 - RNA, 19 nt, Human
aacacgcaauuuuuuuucc

SEQ ID NO: 113029 - RNA, 20 nt, Human
aacaguuccucaaugaaugu

SEQ ID NO: 113030 - RNA, 20 nt, Human
aacauccucaugcccagugu

SEQ ID NO: 113031 - RNA, 21 nt, Human
aaccuauuaauaugaaaaaau

SEQ ID NO: 113032 - RNA, 25 nt, Human
aagaaauaaaaucaaaacagucaac

SEQ ID NO: 113033 - RNA, 20 nt, Human
aagauagagaacaaacaaaa

SEQ ID NO: 113034 - RNA, 18 nt, Human
aauuaggcacauuccuca

SEQ ID NO: 113035 - RNA, 23 nt, Human
aauuguuuuaaacaccaucuugu

SEQ ID NO: 113036 - RNA, 21 nt, Human
acaagaaagaaaacgaaaaaa

SEQ ID NO: 113037 - RNA, 26 nt, Human
acaggcaaaaagauaaacaaccuauu

SEQ ID NO: 113038 - RNA, 18 nt, Human
accauguggauacagccu

SEQ ID NO: 113039 - RNA, 18 nt, Human
accgccgaggagugagcu

SEQ ID NO: 113040 - RNA, 21 nt, Human
accucuugcugcagcuucugg

SEQ ID NO: 113041 - RNA, 27 nt, Human
acuuuaaaauucagaaaucaaaggcca

SEQ ID NO: 113042 - RNA, 20 nt, Human
agacauuaaugugcugaaaa

SEQ ID NO: 113043 - RNA, 25 nt, Human
agcaaacaggcaaaaagauaaacaa

SEQ ID NO: 113044 - RNA, 23 nt, Human
agccauuguagacaguaccugac

SEQ ID NO: 113045 - RNA, 20 nt, Human
agccuuaaugguauuuagaa

SEQ ID NO: 113046 - RNA, 18 nt, Human
aggcauuugaugaucacu

SEQ ID NO: 113047 - RNA, 24 nt, Human
aguaaacagacaaaagcaaucauc

SEQ ID NO: 113048 - RNA, 18 nt, Human
aguccugauugcuguggc

SEQ ID NO: 113049 - RNA, 18 nt, Human
auaucacagguucccaac

SEQ ID NO: 113050 - RNA, 24 nt, Human
aucaaauuaccugaauaaauccaa

SEQ ID NO: 113051 - RNA, 19 nt, Human
aucaaugucaaaaugcuua

SEQ ID NO: 113052 - RNA, 19 nt, Human
augcuuacaauaaauaaaa

SEQ ID NO: 113053 - RNA, 20 nt, Human
augguacaaaagggggaugg

SEQ ID NO: 113054 - RNA, 22 nt, Human
auugcugagauaggugacaagc

SEQ ID NO: 113055 - RNA, 24 nt, Human
auuuaaccaaauugaucaguuacu

SEQ ID NO: 113056 - RNA, 22 nt, Human
caaaaaacauucaacaggagca

SEQ ID NO: 113057 - RNA, 18 nt, Human
caaaaaccaaaaaacaaa

SEQ ID NO: 113058 - RNA, 19 nt, Human
caaaaaccaaaaaacaaaa

SEQ ID NO: 113059 - RNA, 28 nt, Human
caaacaggcaaaaagauaaacaaccuau

SEQ ID NO: 113060 - RNA, 18 nt, Human
caacagaaagacuguuua

SEQ ID NO: 113061 - RNA, 18 nt, Human
caacagaugagacagacu

SEQ ID NO: 113062 - RNA, 23 nt, Human
caagaacaacucaaaaaccaaaa

SEQ ID NO: 113063 - RNA, 22 nt, Human
caagccuuaaugguauuuagaa

SEQ ID NO: 113064 - RNA, 21 nt, Human
caccaaagaaauaaaaucaaa

SEQ ID NO: 113065 - RNA, 19 nt, Human
cagacugcagaaaggcuaa

SEQ ID NO: 113066 - RNA, 18 nt, Human
cagcaaaaaaguccauga

SEQ ID NO: 113067 - RNA, 19 nt, Human
cagcaaaacacuuaacaga

SEQ ID NO: 113068 - RNA, 18 nt, Human
cagcauaauucaauauga

SEQ ID NO: 113069 - RNA, 26 nt, Human
cagugggcuagccuuucucccccugg

SEQ ID NO: 113070 - RNA, 25 nt, Human
cauacaagauacaaauucaauuauc

SEQ ID NO: 113071 - RNA, 18 nt, Human
caucagcaaaaaagucca

SEQ ID NO: 113072 - RNA, 18 nt, Human
caugccaguggugauugc

SEQ ID NO: 113073 - RNA, 20 nt, Human
cauugcacuuaacaugagua

SEQ ID NO: 113074 - RNA, 18 nt, Human
ccugauugcuguggcugg

SEQ ID NO: 113075 - RNA, 23 nt, Human
ccugccaaucaacaguuccucaa

SEQ ID NO: 113076 - RNA, 21 nt, Human
cucaugcccaguguucuagag

SEQ ID NO: 113077 - RNA, 21 nt, Human
cuccccaaaaaaaaaaaaaaa

SEQ ID NO: 113078 - RNA, 24 nt, Human
cugagcacuaguugcauauccagu

SEQ ID NO: 113079 - RNA, 22 nt, Human
cugcaacauccucaugcccagu

SEQ ID NO: 113080 - RNA, 18 nt, Human
cugcagcuucuggagaaa

SEQ ID NO: 113081 - RNA, 19 nt, Human
cuuaaguucuuuaagugac

SEQ ID NO: 113082 - RNA, 24 nt, Human
cuuguagggaaaacagcuuucugu

SEQ ID NO: 113083 - RNA, 23 nt, Human
gaaaacgaaaaaaaaaaaaucaa

SEQ ID NO: 113084 - RNA, 20 nt, Human
gaacaagagcaauggacaaa

SEQ ID NO: 113085 - RNA, 21 nt, Human
gaagagcugugaguccugauu

SEQ ID NO: 113086 - RNA, 19 nt, Human
gaaugaauuugggaaaaau

SEQ ID NO: 113087 - RNA, 23 nt, Human
gacugagugaggggaccacagaa

SEQ ID NO: 113088 - RNA, 19 nt, Human
gagagacugagugagggga

SEQ ID NO: 113089 - RNA, 19 nt, Human
gcaaacaggcaaaaagaua

SEQ ID NO: 113090 - RNA, 19 nt, Human
gcaauuuuuuuuccauuua

SEQ ID NO: 113091 - RNA, 19 nt, Human
gcaggcucuugcagcaugu

SEQ ID NO: 113092 - RNA, 20 nt, Human
gguauaaaaauucuuaaguu

SEQ ID NO: 113093 - RNA, 18 nt, Human
guaaauuuaaacaccaag

SEQ ID NO: 113094 - RNA, 18 nt, Human
guacagcuaaccaacaga

SEQ ID NO: 113095 - RNA, 23 nt, Human
guauguuguuuucuggagugcaa

SEQ ID NO: 113096 - RNA, 23 nt, Human
gugcaagggauuuggcaaccauc

SEQ ID NO: 113097 - RNA, 25 nt, Human
uaaaaaguagucaaaaaacauucaa

SEQ ID NO: 113098 - RNA, 21 nt, Human
uaaaauggugcaagggauuug

SEQ ID NO: 113099 - RNA, 22 nt, Human
uaaacaaccuauuaauaugaaa

SEQ ID NO: 113100 - RNA, 23 nt, Human
uaaauuaccauuuuacuaagaaa

SEQ ID NO: 113101 - RNA, 20 nt, Human
uaagaguaccaaagacagcu

SEQ ID NO: 113102 - RNA, 21 nt, Human
uaagauagagaacaaacaaaa

SEQ ID NO: 113103 - RNA, 24 nt, Human
uaauaugcaucacacaauauuaua

SEQ ID NO: 113104 - RNA, 22 nt, Human
uaaugaaaaccgguucaaauca

SEQ ID NO: 113105 - RNA, 23 nt, Human
uacagaauuaacaaaaucauuuc

SEQ ID NO: 113106 - RNA, 21 nt, Human
uacagacaaguaugaaaaaua

SEQ ID NO: 113107 - RNA, 23 nt, Human
uacuuuauaagccaaauaucaaa

SEQ ID NO: 113108 - RNA, 20 nt, Human
uagaaguaaugguuacugcc

SEQ ID NO: 113109 - RNA, 21 nt, Human
uauaaucuuugugagcagaga

SEQ ID NO: 113110 - RNA, 22 nt, Human
uauccaccaaagaaauaaaauc

SEQ ID NO: 113111 - RNA, 23 nt, Human
uaugaauugaagucauacuuuaa

SEQ ID NO: 113112 - RNA, 21 nt, Human
uaugcacagccauuguagaca

SEQ ID NO: 113113 - RNA, 20 nt, Human
ucagaaccuuuauugcugag

SEQ ID NO: 113114 - RNA, 26 nt, Human
ucagacacaacucuguucacagcuuu

SEQ ID NO: 113115 - RNA, 20 nt, Human
ucagugccugccaaucaaca

SEQ ID NO: 113116 - RNA, 18 nt, Human
uccaccaaagaaauaaaa

SEQ ID NO: 113117 - RNA, 25 nt, Human
ucccaacagaugagacaggguaccc

SEQ ID NO: 113118 - RNA, 21 nt, Human
uccccaaaaaaaaaaaaaaaa

SEQ ID NO: 113119 - RNA, 26 nt, Human
ucuguccuauugccugagacuuuuag

SEQ ID NO: 113120 - RNA, 22 nt, Human
ucugugggacccaccaucuaga

SEQ ID NO: 113121 - RNA, 19 nt, Human
ugaaaguguuuugaacuug

SEQ ID NO: 113122 - RNA, 19 nt, Human
ugaaauaccuaaaauguua

SEQ ID NO: 113123 - RNA, 23 nt, Human
ugaaauaccuaaaauguuauagg

SEQ ID NO: 113124 - RNA, 18 nt, Human
ugaacaaauccaugaauu

SEQ ID NO: 113125 - RNA, 21 nt, Human
ugacaagaacaacucaaaaac

SEQ ID NO: 113126 - RNA, 24 nt, Human
ugacaagaacaacucaaaaaccaa

SEQ ID NO: 113127 - RNA, 24 nt, Human
ugagagacugagugaggggaccac

SEQ ID NO: 113128 - RNA, 21 nt, Human
ugaggcaggaaaaaguaucug

SEQ ID NO: 113129 - RNA, 18 nt, Human
ugaguuugugucauugug

SEQ ID NO: 113130 - RNA, 18 nt, Human
ugauaguaaauuuaaaca

SEQ ID NO: 113131 - RNA, 24 nt, Human
ugauaguaaauuuaaacaccaagg

SEQ ID NO: 113132 - RNA, 20 nt, Human
uggaaugaauuugggaaaaa

SEQ ID NO: 113133 - RNA, 20 nt, Human
uggcuaugcuggguguuugg

SEQ ID NO: 113134 - RNA, 19 nt, Human
ugggugugaacucuuuggu

SEQ ID NO: 113135 - RNA, 21 nt, Human
ugguacaaaagggggaugguu

SEQ ID NO: 113136 - RNA, 18 nt, Human
uguaggaaucaaggccuc

SEQ ID NO: 113137 - RNA, 20 nt, Human
ugugccuguuucauaaagau

SEQ ID NO: 113138 - RNA, 24 nt, Human
uguugagcuguaccucuugcugca

SEQ ID NO: 113139 - RNA, 21 nt, Human
uguugaguaaaacguuuggau

SEQ ID NO: 113140 - RNA, 23 nt, Human
uguuucuuuucagaggacauggu

SEQ ID NO: 113141 - RNA, 23 nt, Human
uuaaaucuuauuuacccccucau

SEQ ID NO: 113142 - RNA, 22 nt, Human
uuaagaguaccaaagacagcuu

SEQ ID NO: 113143 - RNA, 19 nt, Human
uucccaguuacaaaaaaug

SEQ ID NO: 113144 - RNA, 22 nt, Human
uucguagccuuguauuucuguu

SEQ ID NO: 113145 - RNA, 22 nt, Human
uugaguauucauuaaaacaacg

SEQ ID NO: 113146 - RNA, 23 nt, Human
uugcauagaaagacuucuaucug

SEQ ID NO: 113147 - RNA, 19 nt, Human
uuuagcaaugauaguaaau

SEQ ID NO: 113148 - RNA, 19 nt, Human
uuuggauuccaaaggccau

SEQ ID NO: 113149 - RNA, 22 nt, Human
aaaaaaaaaaaaaaagaaagaa

SEQ ID NO: 113150 - RNA, 24 nt, Human
aaaaaagaaagaaaaaauaucaag

SEQ ID NO: 113151 - RNA, 21 nt, Human
aaaaauagacuuugaacaaaa

SEQ ID NO: 113152 - RNA, 26 nt, Human
aaaacaucucaaauuauuauacacau

SEQ ID NO: 113153 - RNA, 22 nt, Human
aaaagaaagaaaaaauaucaag

SEQ ID NO: 113154 - RNA, 22 nt, Human
aagccagaggcagguggagaga

SEQ ID NO: 113155 - RNA, 19 nt, Human
aaggaaaaaaauauuuucc

SEQ ID NO: 113156 - RNA, 20 nt, Human
aagugagcagcgggcugggc

SEQ ID NO: 113157 - RNA, 22 nt, Human
acaaggaacagaacagaacagu

SEQ ID NO: 113158 - RNA, 20 nt, Human
acagacuaggagggagccgg

SEQ ID NO: 113159 - RNA, 23 nt, Human
acccagugaggggcugguggcuc

SEQ ID NO: 113160 - RNA, 20 nt, Human
accccgaggagaaacucccg

SEQ ID NO: 113161 - RNA, 21 nt, Human
agaaagaaaaaauaucaagga

SEQ ID NO: 113162 - RNA, 20 nt, Human
agaacagaacagucucuccc

SEQ ID NO: 113163 - RNA, 19 nt, Human
aggcagguggagagagggu

SEQ ID NO: 113164 - RNA, 19 nt, Human
agggaaaaacugcuuugug

SEQ ID NO: 113165 - RNA, 26 nt, Human
agggggguguggagaaaggagcagaa

SEQ ID NO: 113166 - RNA, 18 nt, Human
agguccccagggccuggg

SEQ ID NO: 113167 - RNA, 24 nt, Human
aguggaggggaggccaaggggggg

SEQ ID NO: 113168 - RNA, 19 nt, Human
augcacuuuugguuuuugg

SEQ ID NO: 113169 - RNA, 28 nt, Human
auucuuuuuuuuuuuuuuuuuuuuuugg

SEQ ID NO: 113170 - RNA, 23 nt, Human
auugucucccauuuuuuggcuuu

SEQ ID NO: 113171 - RNA, 23 nt, Human
caacacaguuacacaaggaacag

SEQ ID NO: 113172 - RNA, 23 nt, Human
caagcaaguggaccaagcuuccu

SEQ ID NO: 113173 - RNA, 21 nt, Human
caaggcuucuuuggcagucug

SEQ ID NO: 113174 - RNA, 21 nt, Human
caaguggaccaagcuuccuuu

SEQ ID NO: 113175 - RNA, 19 nt, Human
cagaaagggacuuaccccc

SEQ ID NO: 113176 - RNA, 24 nt, Human
ccacccaucacauagauguagcac

SEQ ID NO: 113177 - RNA, 21 nt, Human
cccaccccacccaucacauag

SEQ ID NO: 113178 - RNA, 23 nt, Human
ccccagggccugggggugcuggg

SEQ ID NO: 113179 - RNA, 18 nt, Human
ccccagguccccagggcc

SEQ ID NO: 113180 - RNA, 25 nt, Human
ccccauccacaaaaaaaaaaaaaaa

SEQ ID NO: 113181 - RNA, 18 nt, Human
cccccauccccgccccca

SEQ ID NO: 113182 - RNA, 21 nt, Human
cccccauccccgcccccaggc

SEQ ID NO: 113183 - RNA, 18 nt, Human
cccuccccaccccaccca

SEQ ID NO: 113184 - RNA, 22 nt, Human
cccuccccaccccacccaucac

SEQ ID NO: 113185 - RNA, 23 nt, Human
cccuccccaccccacccaucaca

SEQ ID NO: 113186 - RNA, 21 nt, Human
ccgcccccaggcaguugcccc

SEQ ID NO: 113187 - RNA, 21 nt, Human
ccuccugcuccgaccccgagg

SEQ ID NO: 113188 - RNA, 20 nt, Human
cgaacccagugaggggcugg

SEQ ID NO: 113189 - RNA, 24 nt, Human
cggguuggggggaaaguugguugg

SEQ ID NO: 113190 - RNA, 21 nt, Human
cgguuggucaaagauaaaaac

SEQ ID NO: 113191 - RNA, 18 nt, Human
cucacacuccgcgugccu

SEQ ID NO: 113192 - RNA, 18 nt, Human
cucccccggcaugacccc

SEQ ID NO: 113193 - RNA, 24 nt, Human
cucccccggcaugacccccucaaa

SEQ ID NO: 113194 - RNA, 20 nt, Human
cucugaaacccggggacaga

SEQ ID NO: 113195 - RNA, 22 nt, Human
cugagaaccccagguccccagg

SEQ ID NO: 113196 - RNA, 18 nt, Human
gaaacccggggacagagg

SEQ ID NO: 113197 - RNA, 18 nt, Human
gaacccagugaggggcug

SEQ ID NO: 113198 - RNA, 20 nt, Human
gacgcaggacagacuaggag

SEQ ID NO: 113199 - RNA, 22 nt, Human
gagcagaggccugagaagccag

SEQ ID NO: 113200 - RNA, 22 nt, Human
gaguggaggggaggccaagggg

SEQ ID NO: 113201 - RNA, 22 nt, Human
gcccccauccccgcccccaggc

SEQ ID NO: 113202 - RNA, 24 nt, Human
gcggcacaagggaugacacgcguu

SEQ ID NO: 113203 - RNA, 19 nt, Human
gcuuccacccugcccccau

SEQ ID NO: 113204 - RNA, 22 nt, Human
ggaaaguugguugggugggagg

SEQ ID NO: 113205 - RNA, 19 nt, Human
ggaaggaguggaggggagg

SEQ ID NO: 113206 - RNA, 22 nt, Human
ggaggggaggccaaggggggug

SEQ ID NO: 113207 - RNA, 18 nt, Human
ggcaggagcgggcugagg

SEQ ID NO: 113208 - RNA, 20 nt, Human
ggcucccccggcaugacccc

SEQ ID NO: 113209 - RNA, 24 nt, Human
gggaaaaacugcuuugugcuuugg

SEQ ID NO: 113210 - RNA, 21 nt, Human
gggaaaguugguuggguggga

SEQ ID NO: 113211 - RNA, 24 nt, Human
gggaaguugucucugaaacccggg

SEQ ID NO: 113212 - RNA, 19 nt, Human
gggacagaggacgcaggaa

SEQ ID NO: 113213 - RNA, 18 nt, Human
gggcaggagcgggcugag

SEQ ID NO: 113214 - RNA, 23 nt, Human
gggcugagggugggggccacuug

SEQ ID NO: 113215 - RNA, 22 nt, Human
gggcugcagcuguggaggaggg

SEQ ID NO: 113216 - RNA, 21 nt, Human
gggcuggagcgcacacgcucu

SEQ ID NO: 113217 - RNA, 18 nt, Human
ggggaggccaaggggggu

SEQ ID NO: 113218 - RNA, 18 nt, Human
gggggugcugggcgggca

SEQ ID NO: 113219 - RNA, 19 nt, Human
ggugcugggcgggcaggag

SEQ ID NO: 113220 - RNA, 19 nt, Human
gguggagagaggguggaaa

SEQ ID NO: 113221 - RNA, 18 nt, Human
uaaaaauagacuuugaac

SEQ ID NO: 113222 - RNA, 23 nt, Human
uacacaaggaacagaacagaaca

SEQ ID NO: 113223 - RNA, 22 nt, Human
uagacccuagacauguagacuc

SEQ ID NO: 113224 - RNA, 21 nt, Human
uaggagggagccgggaggaug

SEQ ID NO: 113225 - RNA, 18 nt, Human
ucacauagauguagcacc

SEQ ID NO: 113226 - RNA, 23 nt, Human
uccacaaaaaaaaaaaaaaagaa

SEQ ID NO: 113227 - RNA, 24 nt, Human
uccacaaaaaaaaaaaaaaagaaa

SEQ ID NO: 113228 - RNA, 25 nt, Human
uccacaaaaaaaaaaaaaaagaaag

SEQ ID NO: 113229 - RNA, 18 nt, Human
uccaugugaaauugucuc

SEQ ID NO: 113230 - RNA, 22 nt, Human
ucccaccccuagggaaaaacug

SEQ ID NO: 113231 - RNA, 22 nt, Human
ucccgcccagccugcggcacaa

SEQ ID NO: 113232 - RNA, 22 nt, Human
ucguggcccuuccugacucucc

SEQ ID NO: 113233 - RNA, 28 nt, Human
ucucccauuuuuuggcuuuuggggggga

SEQ ID NO: 113234 - RNA, 18 nt, Human
ucuuuuuuuuuuuuuuuu

SEQ ID NO: 113235 - RNA, 21 nt, Human
ugaacaaaaaggaacauuugc

SEQ ID NO: 113236 - RNA, 21 nt, Human
ugacacgcguuccccaaaucc

SEQ ID NO: 113237 - RNA, 18 nt, Human
ugagaaccccaggucccc

SEQ ID NO: 113238 - RNA, 22 nt, Human
ugagaagccagaggcaggugga

SEQ ID NO: 113239 - RNA, 19 nt, Human
ugagcagcgggcugggcug

SEQ ID NO: 113240 - RNA, 19 nt, Human
ugagggugggggccacuug

SEQ ID NO: 113241 - RNA, 19 nt, Human
ugauucccuccccacccca

SEQ ID NO: 113242 - RNA, 24 nt, Human
ugccccggugacacaucaagacaa

SEQ ID NO: 113243 - RNA, 24 nt, Human
ugcuccgaccccgaggagaaacuc

SEQ ID NO: 113244 - RNA, 22 nt, Human
ugcuuugucguggcccuuccug

SEQ ID NO: 113245 - RNA, 21 nt, Human
ugcuuugugcuuugggaaguu

SEQ ID NO: 113246 - RNA, 21 nt, Human
uggaggaggguuucagaggag

SEQ ID NO: 113247 - RNA, 21 nt, Human
uggaggggaggccaagggggg

SEQ ID NO: 113248 - RNA, 24 nt, Human
uggcaaggcuucuuuggcagucug

SEQ ID NO: 113249 - RNA, 18 nt, Human
ugggagggagccagguug

SEQ ID NO: 113250 - RNA, 25 nt, Human
ugggagggagccagguugggaugga

SEQ ID NO: 113251 - RNA, 21 nt, Human
ugggcugcagcuguggaggag

SEQ ID NO: 113252 - RNA, 20 nt, Human
uggggaggggguuagcgucc

SEQ ID NO: 113253 - RNA, 19 nt, Human
ugggugggagggagccagg

SEQ ID NO: 113254 - RNA, 20 nt, Human
ugggugggagggagccaggu

SEQ ID NO: 113255 - RNA, 21 nt, Human
ugggugggagggagccagguu

SEQ ID NO: 113256 - RNA, 23 nt, Human
ugggugggagggagccagguugg

SEQ ID NO: 113257 - RNA, 21 nt, Human
uggguugcuugucuguuuccg

SEQ ID NO: 113258 - RNA, 21 nt, Human
ugguaagguugaaugcacuuu

SEQ ID NO: 113259 - RNA, 23 nt, Human
ugguaagguugaaugcacuuuug

SEQ ID NO: 113260 - RNA, 19 nt, Human
ugucucugaaacccgggga

SEQ ID NO: 113261 - RNA, 18 nt, Human
uguggcuggggagggggu

SEQ ID NO: 113262 - RNA, 20 nt, Human
uuccggguuggggggaaagu

SEQ ID NO: 113263 - RNA, 25 nt, Human
uucuuuggcagucugagaaccccag

SEQ ID NO: 113264 - RNA, 20 nt, Human
uuguuuccugugucuucugg

SEQ ID NO: 113265 - RNA, 21 nt, Human
uuucugcuuugucguggcccu

SEQ ID NO: 113266 - RNA, 22 nt, Human
uuuggggggguucaguuugggu

SEQ ID NO: 113267 - RNA, 22 nt, Human
uuuggucauguucgguugguca

SEQ ID NO: 113268 - RNA, 18 nt, Human
uuuuuuuuuuuuuuuuug

SEQ ID NO: 113269 - RNA, 20 nt, Human
uuuuuuuuuuuuuuuuuggu

SEQ ID NO: 113270 - RNA, 24 nt, Human
uuuuuuuuuuuuuuuuugguaagg

SEQ ID NO: 113271 - RNA, 25 nt, Human
aaaaauacaccacacgauacaacuc

SEQ ID NO: 113272 - RNA, 18 nt, Human
aaaagccacaaguggugc

SEQ ID NO: 113273 - RNA, 18 nt, Human
aaacaaaacaaggaccuc

SEQ ID NO: 113274 - RNA, 24 nt, Human
aagaagaagaaauggcaaagagaa

SEQ ID NO: 113275 - RNA, 21 nt, Human
aagaagaagaagaaauggcaa

SEQ ID NO: 113276 - RNA, 25 nt, Human
aagaagaagaagaaauggcaaagaa

SEQ ID NO: 113277 - RNA, 27 nt, Human
aagaagaagaagaaauggcaaagagaa

SEQ ID NO: 113278 - RNA, 22 nt, Human
aaugagacuggcaaagaacaaa

SEQ ID NO: 113279 - RNA, 21 nt, Human
acaaaacaaaacaaggaccuc

SEQ ID NO: 113280 - RNA, 23 nt, Human
accacacgauacaacucaauaca

SEQ ID NO: 113281 - RNA, 25 nt, Human
agaagaagaagaaauggcaaagaga

SEQ ID NO: 113282 - RNA, 25 nt, Human
agaagaagaagaaauggcaaagagg

SEQ ID NO: 113283 - RNA, 28 nt, Human
agaagaugaaaaugagacuggcaaagaa

SEQ ID NO: 113284 - RNA, 22 nt, Human
agcaccaucaacauucuucaag

SEQ ID NO: 113285 - RNA, 18 nt, Human
agccacaaguggugcaaa

SEQ ID NO: 113286 - RNA, 29 nt, Human
aguagaugugcagaagaaauggaaggauu

SEQ ID NO: 113287 - RNA, 31 nt, Human
aguagaugugcagaagaaauggaaggauucc

SEQ ID NO: 113288 - RNA, 30 nt, Human
aguagaugugcagaagaaauggaaggauuu

SEQ ID NO: 113289 - RNA, 26 nt, Human
aguuuuuucaaauuucuuucuuuuuu

SEQ ID NO: 113290 - RNA, 21 nt, Human
auauguucuuuuggaaaacca

SEQ ID NO: 113291 - RNA, 21 nt, Human
caaaacaaaacaaggaccuca

SEQ ID NO: 113292 - RNA, 19 nt, Human
caacuuagccgaaaccucc

SEQ ID NO: 113293 - RNA, 19 nt, Human
caacuuugggcaaauaauc

SEQ ID NO: 113294 - RNA, 20 nt, Human
cagagccccugggucaccgg

SEQ ID NO: 113295 - RNA, 22 nt, Human
cagcaccuaacaauguggauca

SEQ ID NO: 113296 - RNA, 31 nt, Human
cagcuuucaguuaaaaaagaagaagaagaaa

SEQ ID NO: 113297 - RNA, 18 nt, Human
caguucaucucugucuag

SEQ ID NO: 113298 - RNA, 19 nt, Human
ccauggaagaagaugaaaa

SEQ ID NO: 113299 - RNA, 26 nt, Human
cccucuguggaagauauucaaaagcc

SEQ ID NO: 113300 - RNA, 19 nt, Human
ccuccugcugccguggugc

SEQ ID NO: 113301 - RNA, 21 nt, Human
ccuucuuuuucucuuuugccc

SEQ ID NO: 113302 - RNA, 23 nt, Human
ccuuuggaaguuuggguuuuaaa

SEQ ID NO: 113303 - RNA, 21 nt, Human
cugcuugcccaagaaacaaag

SEQ ID NO: 113304 - RNA, 18 nt, Human
cugggucaccggcggagg

SEQ ID NO: 113305 - RNA, 18 nt, Human
gaagaagaagaaauggca

SEQ ID NO: 113306 - RNA, 24 nt, Human
gaucaauccuucuuuuucucuuuu

SEQ ID NO: 113307 - RNA, 20 nt, Human
ggaaaaccaaacaugcuuua

SEQ ID NO: 113308 - RNA, 25 nt, Human
guaagaguguugaaaaaaaaauuca

SEQ ID NO: 113309 - RNA, 26 nt, Human
uaaaaaagaagaagaagaaauggcaa

SEQ ID NO: 113310 - RNA, 31 nt, Human
uaaaaaagaagaagaagaaauggcaaagagg

SEQ ID NO: 113311 - RNA, 24 nt, Human
uaacagguguaagaguguugaaaa

SEQ ID NO: 113312 - RNA, 23 nt, Human
uaccuccaacuuagccgaaaccu

SEQ ID NO: 113313 - RNA, 31 nt, Human
uaugguuuuuauuuuucaauuuuuauuuugg

SEQ ID NO: 113314 - RNA, 18 nt, Human
uauuaugaacaaaacaaa

SEQ ID NO: 113315 - RNA, 23 nt, Human
uauuuugguuuucuuacaaaggu

SEQ ID NO: 113316 - RNA, 26 nt, Human
uauuuugguuuucuuacaaagguuga

SEQ ID NO: 113317 - RNA, 25 nt, Human
uauuuugguuuucuuacaaagguuu

SEQ ID NO: 113318 - RNA, 31 nt, Human
uauuuuucaauuuuuauuuugguuuucuuaa

SEQ ID NO: 113319 - RNA, 24 nt, Human
ucaauuuuuauuuugguuuucuua

SEQ ID NO: 113320 - RNA, 25 nt, Human
ucaauuuuuauuuugguuuucuuaa

SEQ ID NO: 113321 - RNA, 25 nt, Human
ucaauuuuuauuuugguuuucuuac

SEQ ID NO: 113322 - RNA, 24 nt, Human
ucaccggcggagguaucaccuggc

SEQ ID NO: 113323 - RNA, 22 nt, Human
ucaguuaaaaaagaagaagaaa

SEQ ID NO: 113324 - RNA, 25 nt, Human
ucaguuaaaaaagaagaagaagaaa

SEQ ID NO: 113325 - RNA, 18 nt, Human
uccauaacagguguaaga

SEQ ID NO: 113326 - RNA, 22 nt, Human
uccuucuuuuucucuuuugccc

SEQ ID NO: 113327 - RNA, 22 nt, Human
ucugaaauacuauuaauuagca

SEQ ID NO: 113328 - RNA, 24 nt, Human
ucugaucaauccuucuuuuucucu

SEQ ID NO: 113329 - RNA, 21 nt, Human
ugaacaaaacaaaacaaggac

SEQ ID NO: 113330 - RNA, 27 nt, Human
ugcucugaucaauccuucuuuuucucu

SEQ ID NO: 113331 - RNA, 20 nt, Human
uggaaccauggaagaagaug

SEQ ID NO: 113332 - RNA, 18 nt, Human
uggaagaagaugaaaaug

SEQ ID NO: 113333 - RNA, 21 nt, Human
uggcaaagaacaaaugcugaa

SEQ ID NO: 113334 - RNA, 21 nt, Human
uguaagaguguugaaaaaaaa

SEQ ID NO: 113335 - RNA, 23 nt, Human
uguauuaugaacaaaacaaaaca

SEQ ID NO: 113336 - RNA, 22 nt, Human
ugugcagaagaaauggaaggau

SEQ ID NO: 113337 - RNA, 23 nt, Human
ugugcagaagaaauggaaggauu

SEQ ID NO: 113338 - RNA, 23 nt, Human
ugugcagaagaaauggaaggauu

SEQ ID NO: 113339 - RNA, 25 nt, Human
ugugcagaagaaauggaaggauuca

SEQ ID NO: 113340 - RNA, 26 nt, Human
ugugcagaagaaauggaaggauucag

SEQ ID NO: 113341 - RNA, 25 nt, Human
ugugcagaagaaauggaaggauucc

SEQ ID NO: 113342 - RNA, 24 nt, Human
ugugcagaagaaauggaaggauuu

SEQ ID NO: 113343 - RNA, 22 nt, Human
uguggaagauauucaaaagcca

SEQ ID NO: 113344 - RNA, 21 nt, Human
uuaauugggaauaagauggaa

SEQ ID NO: 113345 - RNA, 24 nt, Human
uucaaauuucuuucuuuuuuaauu

SEQ ID NO: 113346 - RNA, 26 nt, Human
uucaaauuucuuucuuuuuuaauuua

SEQ ID NO: 113347 - RNA, 18 nt, Human
uucaaguaucugaaauac

SEQ ID NO: 113348 - RNA, 20 nt, Human
uucaguuaaaaaagaagaag

SEQ ID NO: 113349 - RNA, 19 nt, Human
uucucuuuugcccacaauu

SEQ ID NO: 113350 - RNA, 29 nt, Human
uugaaaaaaaaauucaaauuuuuggggga

SEQ ID NO: 113351 - RNA, 24 nt, Human
uuucaaauuucuuucuuuuuuaau

SEQ ID NO: 113352 - RNA, 21 nt, Human
uuugggggagcgggggaagga

SEQ ID NO: 113353 - RNA, 19 nt, Human
uuuggguuuuaaacuuccc

SEQ ID NO: 113354 - RNA, 18 nt, Human
uuuguauuaugaacaaaa

SEQ ID NO: 113355 - RNA, 24 nt, Human
uuuugcccacaauuuaagcaagua

SEQ ID NO: 113356 - RNA, 28 nt, Human
uuuuuucaaauuucuuucuuuuuuaauu

SEQ ID NO: 113357 - RNA, 21 nt, Human
aaauaaauagaacaccgagau

SEQ ID NO: 113358 - RNA, 19 nt, Human
aaggucuuacaggaagaca

SEQ ID NO: 113359 - RNA, 24 nt, Human
agaauagcaccauuguguaggaca

SEQ ID NO: 113360 - RNA, 24 nt, Human
agaguccuagagugacugagauug

SEQ ID NO: 113361 - RNA, 22 nt, Human
aggaggaagcgggagacccggc

SEQ ID NO: 113362 - RNA, 23 nt, Human
aggaggaggaagcgggagacccg

SEQ ID NO: 113363 - RNA, 21 nt, Human
agucacucagggggcauuuga

SEQ ID NO: 113364 - RNA, 21 nt, Human
augaauggacaucaggucagg

SEQ ID NO: 113365 - RNA, 24 nt, Human
caacggauuguguuguuucugggu

SEQ ID NO: 113366 - RNA, 22 nt, Human
ccugcgcccggcaccugaaggg

SEQ ID NO: 113367 - RNA, 21 nt, Human
gaaaaguccgaacugugagag

SEQ ID NO: 113368 - RNA, 18 nt, Human
gagccgggcccgggcgga

SEQ ID NO: 113369 - RNA, 22 nt, Human
gaggcccuuggagcaggaggag

SEQ ID NO: 113370 - RNA, 18 nt, Human
gcacggcgcggguccggg

SEQ ID NO: 113371 - RNA, 18 nt, Human
gcggagcgcagcgaaacg

SEQ ID NO: 113372 - RNA, 20 nt, Human
gcggagcgcagcgaaacggc

SEQ ID NO: 113373 - RNA, 23 nt, Human
gcggggccuggcugagccgggcc

SEQ ID NO: 113374 - RNA, 23 nt, Human
ggcaggagcacggcgcggguccg

SEQ ID NO: 113375 - RNA, 19 nt, Human
ggcccgggcggagcgcagc

SEQ ID NO: 113376 - RNA, 20 nt, Human
ggccuggcugagccgggccc

SEQ ID NO: 113377 - RNA, 23 nt, Human
gggccuggcugagccgggcccgg

SEQ ID NO: 113378 - RNA, 22 nt, Human
gggcggagcgcagcgaaacggc

SEQ ID NO: 113379 - RNA, 25 nt, Human
ggggcagucacucagggggcauuug

SEQ ID NO: 113380 - RNA, 21 nt, Human
ggggccuggcugagccgggcc

SEQ ID NO: 113381 - RNA, 22 nt, Human
ggggccuggcugagccgggccc

SEQ ID NO: 113382 - RNA, 20 nt, Human
gucuucuggccugggcuggg

SEQ ID NO: 113383 - RNA, 19 nt, Human
ucacucagggggcauuuga

SEQ ID NO: 113384 - RNA, 18 nt, Human
ucucuuagaaagagaggg

SEQ ID NO: 113385 - RNA, 19 nt, Human
ucuggccugggcugggggc

SEQ ID NO: 113386 - RNA, 18 nt, Human
ucuucuggccugggcugg

SEQ ID NO: 113387 - RNA, 23 nt, Human
ugggaugaauggacaucagguca

SEQ ID NO: 113388 - RNA, 25 nt, Human
ugggggcagucacucagggggcauu

SEQ ID NO: 113389 - RNA, 18 nt, Human
uguuuuaaaaaauacaga

SEQ ID NO: 113390 - RNA, 20 nt, Human
uucuggccugggcugggggc

SEQ ID NO: 113391 - RNA, 20 nt, Human
aaaaaaauaaaacaaaaagc

SEQ ID NO: 113392 - RNA, 20 nt, Human
aaaagaucaacaaccacaua

SEQ ID NO: 113393 - RNA, 21 nt, Human
aagaaaaaagaggagcaccuu

SEQ ID NO: 113394 - RNA, 18 nt, Human
aaguuguucccugcccuu

SEQ ID NO: 113395 - RNA, 18 nt, Human
aaugacaagaaaaaagag

SEQ ID NO: 113396 - RNA, 23 nt, Human
accagcaaugacaagaaaaaaga

SEQ ID NO: 113397 - RNA, 22 nt, Human
agaaaagaaaagcaguucaaag

SEQ ID NO: 113398 - RNA, 21 nt, Human
aggaggagaaucccuguggca

SEQ ID NO: 113399 - RNA, 22 nt, Human
cagcaaaaaaagagaaguauca

SEQ ID NO: 113400 - RNA, 24 nt, Human
cagcaaugacaagaaaaaagagga

SEQ ID NO: 113401 - RNA, 18 nt, Human
cauguacagauuuugugc

SEQ ID NO: 113402 - RNA, 22 nt, Human
ccaaauauuaguaaucuugacc

SEQ ID NO: 113403 - RNA, 20 nt, Human
ccgggcccgucauaaaacuc

SEQ ID NO: 113404 - RNA, 23 nt, Human
gaacaagaggaacacauauggag

SEQ ID NO: 113405 - RNA, 25 nt, Human
ggaaaaaaaagaucaacaaccacau

SEQ ID NO: 113406 - RNA, 19 nt, Human
gucggucacuugcacuggu

SEQ ID NO: 113407 - RNA, 19 nt, Human
guggaacagcaaaaaaaga

SEQ ID NO: 113408 - RNA, 24 nt, Human
gugucuguaaggaaaaaaaagauc

SEQ ID NO: 113409 - RNA, 20 nt, Human
uacaaucuguguuucugacc

SEQ ID NO: 113410 - RNA, 20 nt, Human
uagaacaagaggaacacaua

SEQ ID NO: 113411 - RNA, 21 nt, Human
uagaacaagaggaacacauau

SEQ ID NO: 113412 - RNA, 21 nt, Human
ucaaaguagcaccaucaaguu

SEQ ID NO: 113413 - RNA, 24 nt, Human
ucaacaaccacauacaagcuuaca

SEQ ID NO: 113414 - RNA, 20 nt, Human
ucagaaagaaagguuaucuc

SEQ ID NO: 113415 - RNA, 21 nt, Human
uccaggagauuaaucaaugaa

SEQ ID NO: 113416 - RNA, 19 nt, Human
ucugcagaugggcuaggau

SEQ ID NO: 113417 - RNA, 21 nt, Human
ucuguguuucugaccaguuga

SEQ ID NO: 113418 - RNA, 21 nt, Human
ucuucugggacucauagaaua

SEQ ID NO: 113419 - RNA, 19 nt, Human
ucuuuaaagccuucccaaa

SEQ ID NO: 113420 - RNA, 21 nt, Human
ugacaaaagcagccccauaau

SEQ ID NO: 113421 - RNA, 19 nt, Human
ugagcacagucauugcucu

SEQ ID NO: 113422 - RNA, 21 nt, Human
uggaacagcaaaaaaagagaa

SEQ ID NO: 113423 - RNA, 24 nt, Human
ugguggaacagcaaaaaaagagaa

SEQ ID NO: 113424 - RNA, 19 nt, Human
uguaaggaaaaaaaagauc

SEQ ID NO: 113425 - RNA, 26 nt, Human
uguaaggaaaaaaaagaucaacaacu

SEQ ID NO: 113426 - RNA, 21 nt, Human
uguggcuuuaaaaauauuucu

SEQ ID NO: 113427 - RNA, 25 nt, Human
uguggcuuuaaaaauauuucuuuaa

SEQ ID NO: 113428 - RNA, 19 nt, Human
uuagaacaagaggaacaca

SEQ ID NO: 113429 - RNA, 20 nt, Human
uugguggaacagcaaaaaaa

SEQ ID NO: 113430 - RNA, 21 nt, Human
uugguggaacagcaaaaaaag

SEQ ID NO: 113431 - RNA, 23 nt, Human
uuuaaaccaaucuuccaggagau

SEQ ID NO: 113432 - RNA, 26 nt, Human
uuuguugggauuucagauagaguuug

SEQ ID NO: 113433 - RNA, 18 nt, Human
uuuuaaaccaaucuucca

SEQ ID NO: 113434 - RNA, 24 nt, Human
uuuuucaucuucugggacucauag

SEQ ID NO: 113435 - RNA, 22 nt, Human
aaaagaagaagaaguagcacca

SEQ ID NO: 113436 - RNA, 22 nt, Human
aaaagcagcugcaaaguaccac

SEQ ID NO: 113437 - RNA, 24 nt, Human
aaacuaaaccuugaucugccuaau

SEQ ID NO: 113438 - RNA, 26 nt, Human
aaaugucauuucaggccuaguggucc

SEQ ID NO: 113439 - RNA, 21 nt, Human
aacuaaaccuugaucugccua

SEQ ID NO: 113440 - RNA, 21 nt, Human
aagcuuuauuuuaacagugga

SEQ ID NO: 113441 - RNA, 20 nt, Human
aauacaagaaugaaaauggg

SEQ ID NO: 113442 - RNA, 18 nt, Human
acaagaaugaaaaugggc

SEQ ID NO: 113443 - RNA, 18 nt, Human
acggcugcccggcgugcg

SEQ ID NO: 113444 - RNA, 23 nt, Human
agaaagacagaaauuuauacugg

SEQ ID NO: 113445 - RNA, 21 nt, Human
agcucucggaaggccggacuu

SEQ ID NO: 113446 - RNA, 23 nt, Human
aggccuuaguagucuuagaaaug

SEQ ID NO: 113447 - RNA, 24 nt, Human
agggaccuaaauuuugaaacagcu

SEQ ID NO: 113448 - RNA, 22 nt, Human
auccuagucuuuaaaaaccuau

SEQ ID NO: 113449 - RNA, 18 nt, Human
cacccacaccuccuagca

SEQ ID NO: 113450 - RNA, 23 nt, Human
cacccacaccuccuagcacccuu

SEQ ID NO: 113451 - RNA, 20 nt, Human
cccacaccuccuagcacccu

SEQ ID NO: 113452 - RNA, 24 nt, Human
ccuagugguccgaaucugcccucc

SEQ ID NO: 113453 - RNA, 21 nt, Human
cgcccgaggcgcgagggacgg

SEQ ID NO: 113454 - RNA, 18 nt, Human
cggaaggccggacuucca

SEQ ID NO: 113455 - RNA, 19 nt, Human
cggcgugcgggggccgcgg

SEQ ID NO: 113456 - RNA, 20 nt, Human
cuagcacccuuugguuuucu

SEQ ID NO: 113457 - RNA, 20 nt, Human
cucacuucacacaucagugc

SEQ ID NO: 113458 - RNA, 18 nt, Human
cuccuagcacccuuuggu

SEQ ID NO: 113459 - RNA, 19 nt, Human
cugcaaaagcagcugcaaa

SEQ ID NO: 113460 - RNA, 19 nt, Human
cuguuaacaaaaagaagaa

SEQ ID NO: 113461 - RNA, 19 nt, Human
gaucugccuaauugcugac

SEQ ID NO: 113462 - RNA, 24 nt, Human
gcaaacaguauggaaggcacccac

SEQ ID NO: 113463 - RNA, 18 nt, Human
gcgugcgggggccgcggc

SEQ ID NO: 113464 - RNA, 22 nt, Human
ggauugcagaaaauauugauau

SEQ ID NO: 113465 - RNA, 20 nt, Human
ggcaacacauaauuuuuggu

SEQ ID NO: 113466 - RNA, 26 nt, Human
ggccggacuuccagcgauacgcaccg

SEQ ID NO: 113467 - RNA, 25 nt, Human
ggguuggaagauauggcuacugagu

SEQ ID NO: 113468 - RNA, 18 nt, Human
gguggcgcgcccgaggcg

SEQ ID NO: 113469 - RNA, 18 nt, Human
gucaagucauucaguuug

SEQ ID NO: 113470 - RNA, 19 nt, Human
uaaaaggccuuaguagucu

SEQ ID NO: 113471 - RNA, 26 nt, Human
uacaagaaugaaaaugggcaaacagu

SEQ ID NO: 113472 - RNA, 21 nt, Human
uacagaccaagggaccuaaau

SEQ ID NO: 113473 - RNA, 18 nt, Human
uacuaauauauauauaua

SEQ ID NO: 113474 - RNA, 19 nt, Human
uacugugauucaacagagc

SEQ ID NO: 113475 - RNA, 23 nt, Human
uagcagaaagacagaaauuuaua

SEQ ID NO: 113476 - RNA, 19 nt, Human
uauaauacaagaaugaaaa

SEQ ID NO: 113477 - RNA, 18 nt, Human
uaucgcugucuuuuucuc

SEQ ID NO: 113478 - RNA, 23 nt, Human
uaucgcugucuuuuucuccuuca

SEQ ID NO: 113479 - RNA, 22 nt, Human
ucaacagagcuguuuuucaagc

SEQ ID NO: 113480 - RNA, 18 nt, Human
ucccgggugcggcggcuc

SEQ ID NO: 113481 - RNA, 21 nt, Human
ucuccuucagcaaguagaggu

SEQ ID NO: 113482 - RNA, 19 nt, Human
ugauauaaacaaacauuua

SEQ ID NO: 113483 - RNA, 18 nt, Human
ugcagaaaauauugauau

SEQ ID NO: 113484 - RNA, 20 nt, Human
uggaaggcacccacaccucc

SEQ ID NO: 113485 - RNA, 21 nt, Human
uggaaguuaaacuaaaccuug

SEQ ID NO: 113486 - RNA, 21 nt, Human
uggcaacacauaauuuuuggu

SEQ ID NO: 113487 - RNA, 25 nt, Human
ugggcaaacaguauggaaggcaccc

SEQ ID NO: 113488 - RNA, 19 nt, Human
ugggggguuggaagauaug

SEQ ID NO: 113489 - RNA, 18 nt, Human
uguuaacaaaaagaagaa

SEQ ID NO: 113490 - RNA, 24 nt, Human
uuaaaggacagcacagucuuucaa

SEQ ID NO: 113491 - RNA, 22 nt, Human
uuaacaaaaagaagaagaagua

SEQ ID NO: 113492 - RNA, 20 nt, Human
uuacuaauauauauauauau

SEQ ID NO: 113493 - RNA, 18 nt, Human
uucacacaucagugcauu

SEQ ID NO: 113494 - RNA, 23 nt, Human
uucacauucaauauccuagucuu

SEQ ID NO: 113495 - RNA, 20 nt, Human
uuugacuauuuuuggaccau

SEQ ID NO: 113496 - RNA, 22 nt, Human
aaaauaauucacaucaacggua

SEQ ID NO: 113497 - RNA, 19 nt, Human
aagaaaaaaauaaagccaa

SEQ ID NO: 113498 - RNA, 24 nt, Human
acgguauuugggagaacauggagc

SEQ ID NO: 113499 - RNA, 18 nt, Human
agaaagcagggccaggcc

SEQ ID NO: 113500 - RNA, 22 nt, Human
agccaauuuuuggguuggcacc

SEQ ID NO: 113501 - RNA, 18 nt, Human
agcuggcauaacauuggc

SEQ ID NO: 113502 - RNA, 20 nt, Human
caccaaaauggcccuuccug

SEQ ID NO: 113503 - RNA, 18 nt, Human
cacccccagcaguggagg

SEQ ID NO: 113504 - RNA, 19 nt, Human
cagggacaacguggggcag

SEQ ID NO: 113505 - RNA, 23 nt, Human
cagggccaggcccacccacgggg

SEQ ID NO: 113506 - RNA, 20 nt, Human
cauuggaaagugcagugguu

SEQ ID NO: 113507 - RNA, 20 nt, Human
ccacggggcccucguguggg

SEQ ID NO: 113508 - RNA, 21 nt, Human
ccacggggcccucgugugggg

SEQ ID NO: 113509 - RNA, 18 nt, Human
ccccugagccccucgagc

SEQ ID NO: 113510 - RNA, 20 nt, Human
ccccugagccccucgagccu

SEQ ID NO: 113511 - RNA, 23 nt, Human
ccccugagccccucgagccucug

SEQ ID NO: 113512 - RNA, 19 nt, Human
cccugagccccucgagccu

SEQ ID NO: 113513 - RNA, 20 nt, Human
cccuuccagaagcacccgcc

SEQ ID NO: 113514 - RNA, 20 nt, Human
ccggcagggcggccggccuu

SEQ ID NO: 113515 - RNA, 24 nt, Human
ccgggggcucgggcggccccuuuc

SEQ ID NO: 113516 - RNA, 24 nt, Human
ccucuggccacggcuggcugccug

SEQ ID NO: 113517 - RNA, 21 nt, Human
cgagaagggaguugaacaaug

SEQ ID NO: 113518 - RNA, 26 nt, Human
cugagguaauaaguuaagaauaagca

SEQ ID NO: 113519 - RNA, 26 nt, Human
cuuagccucgggcucggcuucagggc

SEQ ID NO: 113520 - RNA, 18 nt, Human
cuuccuggcacgcgccgg

SEQ ID NO: 113521 - RNA, 19 nt, Human
gaagaguacagcucacccc

SEQ ID NO: 113522 - RNA, 21 nt, Human
gacaacguggggcagugggga

SEQ ID NO: 113523 - RNA, 22 nt, Human
gagaacauggagcuggcauaac

SEQ ID NO: 113524 - RNA, 21 nt, Human
gcacaccggcagggcggccgg

SEQ ID NO: 113525 - RNA, 22 nt, Human
gccccugagccccucgagccuc

SEQ ID NO: 113526 - RNA, 18 nt, Human
gccugagccccugagccc

SEQ ID NO: 113527 - RNA, 23 nt, Human
gcgagggguugggacgcgggagc

SEQ ID NO: 113528 - RNA, 18 nt, Human
gcggagcccugguguccc

SEQ ID NO: 113529 - RNA, 23 nt, Human
gcggcacaccggcagggcggccg

SEQ ID NO: 113530 - RNA, 22 nt, Human
gcuuucugugggcagggcuugc

SEQ ID NO: 113531 - RNA, 21 nt, Human
ggcauuggaaagugcaguggu

SEQ ID NO: 113532 - RNA, 18 nt, Human
ggccagggcugcuccugg

SEQ ID NO: 113533 - RNA, 18 nt, Human
ggcugaugggggccaggg

SEQ ID NO: 113534 - RNA, 21 nt, Human
guuagcugugccuucaggcgg

SEQ ID NO: 113535 - RNA, 19 nt, Human
uaagaaaaaaauaaagcca

SEQ ID NO: 113536 - RNA, 25 nt, Human
uaaguuaagaauaagcaccaaaaug

SEQ ID NO: 113537 - RNA, 21 nt, Human
uagaaagcagggccaggccca

SEQ ID NO: 113538 - RNA, 24 nt, Human
ucagggacaacguggggcaguggg

SEQ ID NO: 113539 - RNA, 24 nt, Human
uccagaagcacccgccggcggcac

SEQ ID NO: 113540 - RNA, 18 nt, Human
ucucugggcgccggcccc

SEQ ID NO: 113541 - RNA, 21 nt, Human
ucugggcgccggccccggggg

SEQ ID NO: 113542 - RNA, 24 nt, Human
ugagccccugagccccucgagccu

SEQ ID NO: 113543 - RNA, 26 nt, Human
ugagguaauaaguuaagaauaagcac

SEQ ID NO: 113544 - RNA, 20 nt, Human
ugaguugucuguggcauugg

SEQ ID NO: 113545 - RNA, 21 nt, Human
ugccugaguuuugccaaaccc

SEQ ID NO: 113546 - RNA, 18 nt, Human
ugcgaagugguuagcugu

SEQ ID NO: 113547 - RNA, 19 nt, Human
uggcauuggaaagugcagu

SEQ ID NO: 113548 - RNA, 22 nt, Human
uggcguagaaagcagggccagg

SEQ ID NO: 113549 - RNA, 19 nt, Human
ugggagaacauggagcugg

SEQ ID NO: 113550 - RNA, 21 nt, Human
ugggcucucugggcgccggcc

SEQ ID NO: 113551 - RNA, 22 nt, Human
uggggacgggugccugagcccc

SEQ ID NO: 113552 - RNA, 20 nt, Human
uggggcaguggggacagcac

SEQ ID NO: 113553 - RNA, 22 nt, Human
ugggggccagggcugcuccugg

SEQ ID NO: 113554 - RNA, 18 nt, Human
ugguagacuuuuuuuuuu

SEQ ID NO: 113555 - RNA, 19 nt, Human
uggucuauagggauguggc

SEQ ID NO: 113556 - RNA, 21 nt, Human
uguggggacgggugccugagc

SEQ ID NO: 113557 - RNA, 19 nt, Human
uugguagacuuuuuuuuuu

SEQ ID NO: 113558 - RNA, 22 nt, Human
uugucuguggcauuggaaagug

SEQ ID NO: 113559 - RNA, 23 nt, Human
aaaaaccaacaaaacaaaacaaa

SEQ ID NO: 113560 - RNA, 23 nt, Human
aaaaaccaacaaaacaaaacaaa

SEQ ID NO: 113561 - RNA, 22 nt, Human
aaaaccauacaguauuuccaag

SEQ ID NO: 113562 - RNA, 23 nt, Human
aaaauccaugaaccucaguucag

SEQ ID NO: 113563 - RNA, 23 nt, Human
aaaauccaugaaccucaguucag

SEQ ID NO: 113564 - RNA, 23 nt, Human
aaaauccaugaaccucaguucag

SEQ ID NO: 113565 - RNA, 19 nt, Human
aaacagcacagauuagaga

SEQ ID NO: 113566 - RNA, 19 nt, Human
aaacagcacagauuagaga

SEQ ID NO: 113567 - RNA, 19 nt, Human
aaacagcacagauuagaga

SEQ ID NO: 113568 - RNA, 19 nt, Human
aaacaguccuggaaaaucc

SEQ ID NO: 113569 - RNA, 19 nt, Human
aaacaguccuggaaaaucc

SEQ ID NO: 113570 - RNA, 19 nt, Human
aaacaguccuggaaaaucc

SEQ ID NO: 113571 - RNA, 21 nt, Human
aaaccaacaaaacaaaacaaa

SEQ ID NO: 113572 - RNA, 21 nt, Human
aaaccaacaaaacaaaacaaa

SEQ ID NO: 113573 - RNA, 21 nt, Human
aaaccaacaaaacaaaacaaa

SEQ ID NO: 113574 - RNA, 21 nt, Human
aaagcaauugagauugaagca

SEQ ID NO: 113575 - RNA, 24 nt, Human
aaaucuuuaaaaaccaacaaaaca

SEQ ID NO: 113576 - RNA, 24 nt, Human
aaaucuuuaaaaaccaacaaaaca

SEQ ID NO: 113577 - RNA, 24 nt, Human
aacaaaaccauacaguauuuccaa

SEQ ID NO: 113578 - RNA, 24 nt, Human
aacaaaaccauacaguauuuccaa

SEQ ID NO: 113579 - RNA, 25 nt, Human
aacaaaaccauacaguauuuccaag

SEQ ID NO: 113580 - RNA, 20 nt, Human
aaccaugugagccauggcca

SEQ ID NO: 113581 - RNA, 20 nt, Human
aaccaugugagccauggcca

SEQ ID NO: 113582 - RNA, 20 nt, Human
aaccaugugagccauggcca

SEQ ID NO: 113583 - RNA, 26 nt, Human
aagaagacaaaugugggaauccagcc

SEQ ID NO: 113584 - RNA, 26 nt, Human
aagaagacaaaugugggaauccagcc

SEQ ID NO: 113585 - RNA, 26 nt, Human
aagaagacaaaugugggaauccagcc

SEQ ID NO: 113586 - RNA, 21 nt, Human
aagagaaacuagaagccugag

SEQ ID NO: 113587 - RNA, 21 nt, Human
aagagaaacuagaagccugag

SEQ ID NO: 113588 - RNA, 23 nt, Human
aaucuuuaaaaaccaacaaaaca

SEQ ID NO: 113589 - RNA, 18 nt, Human
acaaaacaaaacaaaacc

SEQ ID NO: 113590 - RNA, 18 nt, Human
acaaaacaaaacaaaacc

SEQ ID NO: 113591 - RNA, 18 nt, Human
acaaaacaaaacaaaacc

SEQ ID NO: 113592 - RNA, 22 nt, Human
accaccaacuccaccuagguag

SEQ ID NO: 113593 - RNA, 22 nt, Human
accaccaacuccaccuagguag

SEQ ID NO: 113594 - RNA, 22 nt, Human
accaccaacuccaccuagguag

SEQ ID NO: 113595 - RNA, 21 nt, Human
agaaagaagacaaauguggga

SEQ ID NO: 113596 - RNA, 21 nt, Human
agaaagaagacaaauguggga

SEQ ID NO: 113597 - RNA, 22 nt, Human
agaaagaagacaaaugugggaa

SEQ ID NO: 113598 - RNA, 22 nt, Human
agaaagaagacaaaugugggaa

SEQ ID NO: 113599 - RNA, 22 nt, Human
agaaagaagacaaaugugggaa

SEQ ID NO: 113600 - RNA, 23 nt, Human
agacagaaagaagacaaaugugg

SEQ ID NO: 113601 - RNA, 23 nt, Human
agacagaaagaagacaaaugugg

SEQ ID NO: 113602 - RNA, 20 nt, Human
agagaaacuagaagccugag

SEQ ID NO: 113603 - RNA, 19 nt, Human
agcaccaccaacuccaccu

SEQ ID NO: 113604 - RNA, 19 nt, Human
agcaccaccaacuccaccu

SEQ ID NO: 113605 - RNA, 19 nt, Human
agcaccaccaacuccaccu

SEQ ID NO: 113606 - RNA, 21 nt, Human
agccagccagaaacuguagga

SEQ ID NO: 113607 - RNA, 23 nt, Human
agccguacugguaacugccugcg

SEQ ID NO: 113608 - RNA, 23 nt, Human
agccguacugguaacugccugcg

SEQ ID NO: 113609 - RNA, 23 nt, Human
agccguacugguaacugccugcg

SEQ ID NO: 113610 - RNA, 20 nt, Human
aggaagaaaaaacuagaggg

SEQ ID NO: 113611 - RNA, 20 nt, Human
aggaagaaaaaacuagaggg

SEQ ID NO: 113612 - RNA, 19 nt, Human
aggaagcuacuguauaugu

SEQ ID NO: 113613 - RNA, 19 nt, Human
aggaagcuacuguauaugu

SEQ ID NO: 113614 - RNA, 19 nt, Human
aggaagcuacuguauaugu

SEQ ID NO: 113615 - RNA, 21 nt, Human
auaacagcagugacaaggaag

SEQ ID NO: 113616 - RNA, 21 nt, Human
auaacagcagugacaaggaag

SEQ ID NO: 113617 - RNA, 20 nt, Human
auacacaaugcuccagauac

SEQ ID NO: 113618 - RNA, 20 nt, Human
auacacaaugcuccagauac

SEQ ID NO: 113619 - RNA, 20 nt, Human
auacacaaugcuccagauac

SEQ ID NO: 113620 - RNA, 18 nt, Human
aucugugacaaguuccca

SEQ ID NO: 113621 - RNA, 18 nt, Human
aucugugacaaguuccca

SEQ ID NO: 113622 - RNA, 20 nt, Human
auggagcaauauuguuuggu

SEQ ID NO: 113623 - RNA, 20 nt, Human
auggagcaauauuguuuggu

SEQ ID NO: 113624 - RNA, 20 nt, Human
auggagcaauauuguuuggu

SEQ ID NO: 113625 - RNA, 23 nt, Human
caaaacaaaacaaaaccauacag

SEQ ID NO: 113626 - RNA, 23 nt, Human
caaaacaaaacaaaaccauacag

SEQ ID NO: 113627 - RNA, 23 nt, Human
caaaacaaaacaaaaccauacag

SEQ ID NO: 113628 - RNA, 23 nt, Human
caaaaccauacaguauuuccaag

SEQ ID NO: 113629 - RNA, 23 nt, Human
caaaaccauacaguauuuccaag

SEQ ID NO: 113630 - RNA, 21 nt, Human
caacaaaacaaaacaaaacca

SEQ ID NO: 113631 - RNA, 21 nt, Human
caacaaaacaaaacaaaacca

SEQ ID NO: 113632 - RNA, 21 nt, Human
caacaaaacaaaacaaaacca

SEQ ID NO: 113633 - RNA, 25 nt, Human
caacaaaacaaaacaaaaccauaca

SEQ ID NO: 113634 - RNA, 25 nt, Human
caacaaaacaaaacaaaaccauaca

SEQ ID NO: 113635 - RNA, 25 nt, Human
caacaaaacaaaacaaaaccauaca

SEQ ID NO: 113636 - RNA, 19 nt, Human
caacaaaugccuuaaguuc

SEQ ID NO: 113637 - RNA, 18 nt, Human
cacagauuagagacccag

SEQ ID NO: 113638 - RNA, 18 nt, Human
cacagauuagagacccag

SEQ ID NO: 113639 - RNA, 18 nt, Human
cacagauuagagacccag

SEQ ID NO: 113640 - RNA, 19 nt, Human
cacuugaaagaauugcuuu

SEQ ID NO: 113641 - RNA, 19 nt, Human
cacuugaaagaauugcuuu

SEQ ID NO: 113642 - RNA, 19 nt, Human
cacuugaaagaauugcuuu

SEQ ID NO: 113643 - RNA, 22 nt, Human
cagagaacuuugaaacagcaca

SEQ ID NO: 113644 - RNA, 22 nt, Human
cagagaacuuugaaacagcaca

SEQ ID NO: 113645 - RNA, 22 nt, Human
cagagaacuuugaaacagcaca

SEQ ID NO: 113646 - RNA, 20 nt, Human
cagagccugggcgaguccgg

SEQ ID NO: 113647 - RNA, 21 nt, Human
cagagccugggcgaguccggg

SEQ ID NO: 113648 - RNA, 24 nt, Human
caggagccaggggaggccagugcu

SEQ ID NO: 113649 - RNA, 23 nt, Human
caguucaguucuguguuccauca

SEQ ID NO: 113650 - RNA, 23 nt, Human
caguucaguucuguguuccauca

SEQ ID NO: 113651 - RNA, 23 nt, Human
caguucaguucuguguuccauca

SEQ ID NO: 113652 - RNA, 19 nt, Human
caucugugacaaguuccca

SEQ ID NO: 113653 - RNA, 23 nt, Human
ccagauaccacaugccccuucuc

SEQ ID NO: 113654 - RNA, 23 nt, Human
ccagauaccacaugccccuucuc

SEQ ID NO: 113655 - RNA, 23 nt, Human
ccagauaccacaugccccuucuc

SEQ ID NO: 113656 - RNA, 25 nt, Human
ccaucaggccuuacgguccucagca

SEQ ID NO: 113657 - RNA, 25 nt, Human
ccaucaggccuuacgguccucagca

SEQ ID NO: 113658 - RNA, 25 nt, Human
ccaucaggccuuacgguccucagca

SEQ ID NO: 113659 - RNA, 23 nt, Human
ccggggacccucaggcucucagg

SEQ ID NO: 113660 - RNA, 22 nt, Human
ccguuaguaaugggcauguuug

SEQ ID NO: 113661 - RNA, 22 nt, Human
ccguuaguaaugggcauguuug

SEQ ID NO: 113662 - RNA, 22 nt, Human
ccguuaguaaugggcauguuug

SEQ ID NO: 113663 - RNA, 24 nt, Human
ccugaauuuaaauaucagcaccac

SEQ ID NO: 113664 - RNA, 24 nt, Human
ccugaauuuaaauaucagcaccac

SEQ ID NO: 113665 - RNA, 24 nt, Human
ccugaauuuaaauaucagcaccac

SEQ ID NO: 113666 - RNA, 18 nt, Human
ccuuaaguucuuucaugg

SEQ ID NO: 113667 - RNA, 18 nt, Human
ccuuaaguucuuucaugg

SEQ ID NO: 113668 - RNA, 18 nt, Human
ccuuaaguucuuucaugg

SEQ ID NO: 113669 - RNA, 23 nt, Human
ccuuagagucaccugugaguuug

SEQ ID NO: 113670 - RNA, 23 nt, Human
ccuuagagucaccugugaguuug

SEQ ID NO: 113671 - RNA, 23 nt, Human
ccuuagagucaccugugaguuug

SEQ ID NO: 113672 - RNA, 19 nt, Human
cuccagauaccacaugccc

SEQ ID NO: 113673 - RNA, 19 nt, Human
cuccagauaccacaugccc

SEQ ID NO: 113674 - RNA, 19 nt, Human
cuccagauaccacaugccc

SEQ ID NO: 113675 - RNA, 20 nt, Human
cugaagacuucucacaaucu

SEQ ID NO: 113676 - RNA, 20 nt, Human
cugaagacuucucacaaucu

SEQ ID NO: 113677 - RNA, 20 nt, Human
cugaagacuucucacaaucu

SEQ ID NO: 113678 - RNA, 24 nt, Human
cugagucuuaaagacagaaagaag

SEQ ID NO: 113679 - RNA, 23 nt, Human
cuucagugucuuuucuucaugca

SEQ ID NO: 113680 - RNA, 23 nt, Human
cuucagugucuuuucuucaugca

SEQ ID NO: 113681 - RNA, 19 nt, Human
cuucucuucccuacccagg

SEQ ID NO: 113682 - RNA, 19 nt, Human
cuucucuucccuacccagg

SEQ ID NO: 113683 - RNA, 19 nt, Human
cuuggauugauagaacagg

SEQ ID NO: 113684 - RNA, 19 nt, Human
cuuggauugauagaacagg

SEQ ID NO: 113685 - RNA, 19 nt, Human
cuuggauugauagaacagg

SEQ ID NO: 113686 - RNA, 18 nt, Human
cuuucuggguuuaaugaa

SEQ ID NO: 113687 - RNA, 22 nt, Human
gaauaaaucuguaaaaccuaga

SEQ ID NO: 113688 - RNA, 22 nt, Human
gaauaaaucuguaaaaccuaga

SEQ ID NO: 113689 - RNA, 22 nt, Human
gaauaaaucuguaaaaccuaga

SEQ ID NO: 113690 - RNA, 20 nt, Human
gagaaacuagaagccugagu

SEQ ID NO: 113691 - RNA, 20 nt, Human
gagaaacuagaagccugagu

SEQ ID NO: 113692 - RNA, 20 nt, Human
gagaaacuagaagccugagu

SEQ ID NO: 113693 - RNA, 19 nt, Human
gagcucagagccugggcga

SEQ ID NO: 113694 - RNA, 20 nt, Human
gaguacaucagaaucaugug

SEQ ID NO: 113695 - RNA, 20 nt, Human
gaguacaucagaaucaugug

SEQ ID NO: 113696 - RNA, 20 nt, Human
gaguacaucagaaucaugug

SEQ ID NO: 113697 - RNA, 22 nt, Human
gagucuuaaagacagaaagaag

SEQ ID NO: 113698 - RNA, 23 nt, Human
gauacugcucuuccagagaccac

SEQ ID NO: 113699 - RNA, 23 nt, Human
gauacugcucuuccagagaccac

SEQ ID NO: 113700 - RNA, 23 nt, Human
gauacugcucuuccagagaccac

SEQ ID NO: 113701 - RNA, 24 nt, Human
gccugaauuuaaauaucagcacug

SEQ ID NO: 113702 - RNA, 24 nt, Human
gccugaauuuaaauaucagcacug

SEQ ID NO: 113703 - RNA, 24 nt, Human
gccugaauuuaaauaucagcacug

SEQ ID NO: 113704 - RNA, 25 nt, Human
gcucucaggccaccgcgucuccugc

SEQ ID NO: 113705 - RNA, 21 nt, Human
ggagagagcucagagccuggg

SEQ ID NO: 113706 - RNA, 21 nt, Human
gggccaaauauuucauaacgu

SEQ ID NO: 113707 - RNA, 21 nt, Human
gggccaaauauuucauaacgu

SEQ ID NO: 113708 - RNA, 21 nt, Human
gggccaaauauuucauaacgu

SEQ ID NO: 113709 - RNA, 25 nt, Human
guaaaacauagauauuucgggcccu

SEQ ID NO: 113710 - RNA, 25 nt, Human
guaaaacauagauauuucgggcccu

SEQ ID NO: 113711 - RNA, 25 nt, Human
guaaaacauagauauuucgggcccu

SEQ ID NO: 113712 - RNA, 19 nt, Human
gucaucauggagcaauauu

SEQ ID NO: 113713 - RNA, 19 nt, Human
gucaucauggagcaauauu

SEQ ID NO: 113714 - RNA, 19 nt, Human
gucaucauggagcaauauu

SEQ ID NO: 113715 - RNA, 18 nt, Human
uaacagcagugacaagga

SEQ ID NO: 113716 - RNA, 22 nt, Human
uaacagcagugacaaggaagaa

SEQ ID NO: 113717 - RNA, 22 nt, Human
uaacagcagugacaaggaagaa

SEQ ID NO: 113718 - RNA, 22 nt, Human
uaacagcagugacaaggaagaa

SEQ ID NO: 113719 - RNA, 24 nt, Human
uaacagcauguucugucauuacuu

SEQ ID NO: 113720 - RNA, 24 nt, Human
uaacagcauguucugucauuacuu

SEQ ID NO: 113721 - RNA, 24 nt, Human
uaacagcauguucugucauuacuu

SEQ ID NO: 113722 - RNA, 21 nt, Human
uaagacucaucaauaguguua

SEQ ID NO: 113723 - RNA, 21 nt, Human
uaagacucaucaauaguguua

SEQ ID NO: 113724 - RNA, 21 nt, Human
uaagacucaucaauaguguua

SEQ ID NO: 113725 - RNA, 24 nt, Human
uaagucaucauggagcaauauugu

SEQ ID NO: 113726 - RNA, 24 nt, Human
uaagucaucauggagcaauauugu

SEQ ID NO: 113727 - RNA, 24 nt, Human
uaagucaucauggagcaauauugu

SEQ ID NO: 113728 - RNA, 22 nt, Human
uaaguugaauuaaguaaccuug

SEQ ID NO: 113729 - RNA, 22 nt, Human
uaaguugaauuaaguaaccuug

SEQ ID NO: 113730 - RNA, 22 nt, Human
uaaguugaauuaaguaaccuug

SEQ ID NO: 113731 - RNA, 24 nt, Human
uacaaagcaauugagauugaagca

SEQ ID NO: 113732 - RNA, 24 nt, Human
uacaaagcaauugagauugaagca

SEQ ID NO: 113733 - RNA, 22 nt, Human
uacaaaggaagaauuagagaag

SEQ ID NO: 113734 - RNA, 22 nt, Human
uacaaaggaagaauuagagaag

SEQ ID NO: 113735 - RNA, 22 nt, Human
uacaaaggaagaauuagagaag

SEQ ID NO: 113736 - RNA, 18 nt, Human
uacagugccuggacaugc

SEQ ID NO: 113737 - RNA, 22 nt, Human
uagaagccugaguuucccuagg

SEQ ID NO: 113738 - RNA, 22 nt, Human
uagaagccugaguuucccuagg

SEQ ID NO: 113739 - RNA, 22 nt, Human
uagaagccugaguuucccuagg

SEQ ID NO: 113740 - RNA, 22 nt, Human
uagccagccguacugguaacug

SEQ ID NO: 113741 - RNA, 22 nt, Human
uagccagccguacugguaacug

SEQ ID NO: 113742 - RNA, 22 nt, Human
uagccagccguacugguaacug

SEQ ID NO: 113743 - RNA, 21 nt, Human
uaucugaaauaaugcacauga

SEQ ID NO: 113744 - RNA, 21 nt, Human
uaucugaaauaaugcacauga

SEQ ID NO: 113745 - RNA, 21 nt, Human
uaucugaaauaaugcacauga

SEQ ID NO: 113746 - RNA, 19 nt, Human
uauuagaucagaaacaagu

SEQ ID NO: 113747 - RNA, 19 nt, Human
uauuagaucagaaacaagu

SEQ ID NO: 113748 - RNA, 19 nt, Human
uauuagaucagaaacaagu

SEQ ID NO: 113749 - RNA, 18 nt, Human
uauuaugguuccaucagg

SEQ ID NO: 113750 - RNA, 18 nt, Human
uauuaugguuccaucagg

SEQ ID NO: 113751 - RNA, 18 nt, Human
uauuaugguuccaucagg

SEQ ID NO: 113752 - RNA, 21 nt, Human
uauuucauaguauguauauaa

SEQ ID NO: 113753 - RNA, 21 nt, Human
uauuucauaguauguauauaa

SEQ ID NO: 113754 - RNA, 21 nt, Human
uauuucauaguauguauauaa

SEQ ID NO: 113755 - RNA, 20 nt, Human
ucaauaguguuaucaucaag

SEQ ID NO: 113756 - RNA, 20 nt, Human
ucaauaguguuaucaucaag

SEQ ID NO: 113757 - RNA, 20 nt, Human
ucaauaguguuaucaucaag

SEQ ID NO: 113758 - RNA, 20 nt, Human
ucagcaccaccaacuccacc

SEQ ID NO: 113759 - RNA, 20 nt, Human
ucagcaccaccaacuccacc

SEQ ID NO: 113760 - RNA, 20 nt, Human
ucagcaccaccaacuccacc

SEQ ID NO: 113761 - RNA, 19 nt, Human
ucauguuuucacuuacaaa

SEQ ID NO: 113762 - RNA, 19 nt, Human
ucauguuuucacuuacaaa

SEQ ID NO: 113763 - RNA, 19 nt, Human
ucauguuuucacuuacaaa

SEQ ID NO: 113764 - RNA, 22 nt, Human
ucccccaagaguuucugauucu

SEQ ID NO: 113765 - RNA, 24 nt, Human
ucccccaagaguuucugauucugu

SEQ ID NO: 113766 - RNA, 24 nt, Human
ucccccaagaguuucugauucugu

SEQ ID NO: 113767 - RNA, 21 nt, Human
uccgagucugauaaaccaaca

SEQ ID NO: 113768 - RNA, 21 nt, Human
uccgagucugauaaaccaaca

SEQ ID NO: 113769 - RNA, 21 nt, Human
uccgagucugauaaaccaaca

SEQ ID NO: 113770 - RNA, 18 nt, Human
ucgcgcgguucgucccuc

SEQ ID NO: 113771 - RNA, 19 nt, Human
ucuauacacaaugcuccag

SEQ ID NO: 113772 - RNA, 19 nt, Human
ucuauacacaaugcuccag

SEQ ID NO: 113773 - RNA, 19 nt, Human
ucuauacacaaugcuccag

SEQ ID NO: 113774 - RNA, 26 nt, Human
ucuccugcgcagcgcgcucugggagc

SEQ ID NO: 113775 - RNA, 19 nt, Human
ucugaacauucuuucuggg

SEQ ID NO: 113776 - RNA, 20 nt, Human
ugaaacagcacagauuagag

SEQ ID NO: 113777 - RNA, 20 nt, Human
ugaaacagcacagauuagag

SEQ ID NO: 113778 - RNA, 20 nt, Human
ugaaacagcacagauuagag

SEQ ID NO: 113779 - RNA, 21 nt, Human
ugaaauaaugcacaugagcua

SEQ ID NO: 113780 - RNA, 21 nt, Human
ugaaauaaugcacaugagcua

SEQ ID NO: 113781 - RNA, 21 nt, Human
ugaaauaaugcacaugagcua

SEQ ID NO: 113782 - RNA, 22 nt, Human
ugaaaugcugcacaucuuaguu

SEQ ID NO: 113783 - RNA, 22 nt, Human
ugaaaugcugcacaucuuaguu

SEQ ID NO: 113784 - RNA, 22 nt, Human
ugaaaugcugcacaucuuaguu

SEQ ID NO: 113785 - RNA, 21 nt, Human
ugacaaggaagaaaaaacuag

SEQ ID NO: 113786 - RNA, 21 nt, Human
ugacaaggaagaaaaaacuag

SEQ ID NO: 113787 - RNA, 21 nt, Human
ugacaaggaagaaaaaacuag

SEQ ID NO: 113788 - RNA, 20 nt, Human
ugagaaaaauagauuccgag

SEQ ID NO: 113789 - RNA, 20 nt, Human
ugagaaaaauagauuccgag

SEQ ID NO: 113790 - RNA, 20 nt, Human
ugagaaaaauagauuccgag

SEQ ID NO: 113791 - RNA, 21 nt, Human
ugagaagauggaggccugagu

SEQ ID NO: 113792 - RNA, 21 nt, Human
ugagaagauggaggccugagu

SEQ ID NO: 113793 - RNA, 21 nt, Human
ugagaagauggaggccugagu

SEQ ID NO: 113794 - RNA, 25 nt, Human
ugagcuauaauuuacugcuaaguaa

SEQ ID NO: 113795 - RNA, 25 nt, Human
ugagcuauaauuuacugcuaaguaa

SEQ ID NO: 113796 - RNA, 25 nt, Human
ugagcuauaauuuacugcuaaguaa

SEQ ID NO: 113797 - RNA, 23 nt, Human
ugaguaaaaguagauaaccuuag

SEQ ID NO: 113798 - RNA, 23 nt, Human
ugaguaaaaguagauaaccuuag

SEQ ID NO: 113799 - RNA, 23 nt, Human
ugaguaaaaguagauaaccuuag

SEQ ID NO: 113800 - RNA, 22 nt, Human
ugaguggaggccagugguuuga

SEQ ID NO: 113801 - RNA, 22 nt, Human
ugaguggaggccagugguuuga

SEQ ID NO: 113802 - RNA, 22 nt, Human
ugaguggaggccagugguuuga

SEQ ID NO: 113803 - RNA, 22 nt, Human
ugcaccaacauuuauggaauga

SEQ ID NO: 113804 - RNA, 22 nt, Human
ugcaccaacauuuauggaauga

SEQ ID NO: 113805 - RNA, 22 nt, Human
ugcaccaacauuuauggaauga

SEQ ID NO: 113806 - RNA, 19 nt, Human
ugccacagagaacuuugaa

SEQ ID NO: 113807 - RNA, 19 nt, Human
ugccacagagaacuuugaa

SEQ ID NO: 113808 - RNA, 19 nt, Human
ugccacagagaacuuugaa

SEQ ID NO: 113809 - RNA, 23 nt, Human
ugccacagagaacuuugaaacag

SEQ ID NO: 113810 - RNA, 23 nt, Human
ugccacagagaacuuugaaacag

SEQ ID NO: 113811 - RNA, 23 nt, Human
ugccacagagaacuuugaaacag

SEQ ID NO: 113812 - RNA, 24 nt, Human
ugccacagagaacuuugaaacagc

SEQ ID NO: 113813 - RNA, 24 nt, Human
ugccacagagaacuuugaaacagc

SEQ ID NO: 113814 - RNA, 24 nt, Human
ugccacagagaacuuugaaacagc

SEQ ID NO: 113815 - RNA, 22 nt, Human
ugccuggacaugcuuggugcug

SEQ ID NO: 113816 - RNA, 22 nt, Human
ugccuggacaugcuuggugcug

SEQ ID NO: 113817 - RNA, 22 nt, Human
ugccuggacaugcuuggugcug

SEQ ID NO: 113818 - RNA, 22 nt, Human
ugcugauacugcucuuccagag

SEQ ID NO: 113819 - RNA, 22 nt, Human
ugcugauacugcucuuccagag

SEQ ID NO: 113820 - RNA, 22 nt, Human
ugcugauacugcucuuccagag

SEQ ID NO: 113821 - RNA, 19 nt, Human
ugcugcacaucuuaguuuc

SEQ ID NO: 113822 - RNA, 19 nt, Human
ugcugcacaucuuaguuuc

SEQ ID NO: 113823 - RNA, 19 nt, Human
ugcugcacaucuuaguuuc

SEQ ID NO: 113824 - RNA, 18 nt, Human
ugcuuggugcugaauaac

SEQ ID NO: 113825 - RNA, 18 nt, Human
ugcuuggugcugaauaac

SEQ ID NO: 113826 - RNA, 18 nt, Human
ugcuuggugcugaauaac

SEQ ID NO: 113827 - RNA, 21 nt, Human
ugcuuggugcugaauaacaug

SEQ ID NO: 113828 - RNA, 21 nt, Human
ugcuuggugcugaauaacaug

SEQ ID NO: 113829 - RNA, 21 nt, Human
ugcuuggugcugaauaacaug

SEQ ID NO: 113830 - RNA, 18 nt, Human
ugcuuugccacagagaac

SEQ ID NO: 113831 - RNA, 18 nt, Human
ugcuuugccacagagaac

SEQ ID NO: 113832 - RNA, 18 nt, Human
ugcuuugccacagagaac

SEQ ID NO: 113833 - RNA, 19 nt, Human
uggaaagcucgccucgcca

SEQ ID NO: 113834 - RNA, 20 nt, Human
uggaaagcucgccucgccac

SEQ ID NO: 113835 - RNA, 22 nt, Human
uggauugauagaacagguuuuc

SEQ ID NO: 113836 - RNA, 22 nt, Human
uggauugauagaacagguuuuc

SEQ ID NO: 113837 - RNA, 22 nt, Human
uggauugauagaacagguuuuc

SEQ ID NO: 113838 - RNA, 25 nt, Human
uuaaaaaccaacaaaacaaaacaaa

SEQ ID NO: 113839 - RNA, 19 nt, Human
uuaaaauauuaacaaucuu

SEQ ID NO: 113840 - RNA, 19 nt, Human
uuaaaauauuaacaaucuu

SEQ ID NO: 113841 - RNA, 19 nt, Human
uuaaaauauuaacaaucuu

SEQ ID NO: 113842 - RNA, 18 nt, Human
uuaaauaucagcaccacc

SEQ ID NO: 113843 - RNA, 18 nt, Human
uuaaauaucagcaccacc

SEQ ID NO: 113844 - RNA, 18 nt, Human
uuaaauaucagcaccacc

SEQ ID NO: 113845 - RNA, 23 nt, Human
uuacugcuaaguaaagucuuaga

SEQ ID NO: 113846 - RNA, 23 nt, Human
uucuguguuccaucaggccuuac

SEQ ID NO: 113847 - RNA, 23 nt, Human
uucuguguuccaucaggccuuac

SEQ ID NO: 113848 - RNA, 23 nt, Human
uucuguguuccaucaggccuuac

SEQ ID NO: 113849 - RNA, 20 nt, Human
uugcacguuccucuuccaug

SEQ ID NO: 113850 - RNA, 22 nt, Human
uugcacguuccucuuccaugac

SEQ ID NO: 113851 - RNA, 22 nt, Human
uuggauguaaguggaauagguu

SEQ ID NO: 113852 - RNA, 22 nt, Human
uuggauguaaguggaauagguu

SEQ ID NO: 113853 - RNA, 22 nt, Human
uuggauguaaguggaauagguu

SEQ ID NO: 113854 - RNA, 23 nt, Human
uuguaagacaacauauaacauaa

SEQ ID NO: 113855 - RNA, 23 nt, Human
uuguaagacaacauauaacauaa

SEQ ID NO: 113856 - RNA, 23 nt, Human
uuguaagacaacauauaacauaa

SEQ ID NO: 113857 - RNA, 21 nt, Human
uuuaaugaagccagccagaaa

SEQ ID NO: 113858 - RNA, 24 nt, Human
uuuacugcuaaguaaagucuuaga

SEQ ID NO: 113859 - RNA, 24 nt, Human
uuuacugcuaaguaaagucuuaga

SEQ ID NO: 113860 - RNA, 23 nt, Human
uuucugaacauucuuucuggguu

SEQ ID NO: 113861 - RNA, 21 nt, Human
uuuucacuuacaaagcaauug

SEQ ID NO: 113862 - RNA, 21 nt, Human
uuuucacuuacaaagcaauug

SEQ ID NO: 113863 - RNA, 21 nt, Human
uuuucacuuacaaagcaauug

SEQ ID NO: 113864 - RNA, 24 nt, Human
uuuuuuagcuucagugucuuuucu

SEQ ID NO: 113865 - RNA, 22 nt, Human
aaaaauauucaaacugccagag

SEQ ID NO: 113866 - RNA, 23 nt, Human
aaaaauauucaaacugccagagc

SEQ ID NO: 113867 - RNA, 23 nt, Human
aaaaugagcaccaugacaucucu

SEQ ID NO: 113868 - RNA, 24 nt, Human
aaacuguugccuugguacaagacu

SEQ ID NO: 113869 - RNA, 19 nt, Human
aaaggaacuguuaacgcug

SEQ ID NO: 113870 - RNA, 20 nt, Human
aaaggaacuguuaacgcugg

SEQ ID NO: 113871 - RNA, 18 nt, Human
aaauaaauugccaccugg

SEQ ID NO: 113872 - RNA, 22 nt, Human
aaauaagauugaaauuggcuua

SEQ ID NO: 113873 - RNA, 18 nt, Human
aaaucggcccuuaauuuu

SEQ ID NO: 113874 - RNA, 20 nt, Human
aaauguugaaaaucucugcu

SEQ ID NO: 113875 - RNA, 22 nt, Human
aaccacgacaaaacagaaggaa

SEQ ID NO: 113876 - RNA, 21 nt, Human
aagaaugucuuuaaaauuggc

SEQ ID NO: 113877 - RNA, 18 nt, Human
aaggaacagaggacucug

SEQ ID NO: 113878 - RNA, 18 nt, Human
aaggaacagaggacucug

SEQ ID NO: 113879 - RNA, 25 nt, Human
aauagauaaagcuuuuugggaagga

SEQ ID NO: 113880 - RNA, 25 nt, Human
aauuccuagcaaaacagaaaaaggg

SEQ ID NO: 113881 - RNA, 24 nt, Human
acaaaacagaaggaaccacugaaa

SEQ ID NO: 113882 - RNA, 25 nt, Human
acccccaaacgccccaccuccgacc

SEQ ID NO: 113883 - RNA, 18 nt, Human
accuccagccccaaucca

SEQ ID NO: 113884 - RNA, 20 nt, Human
acgcccgcagcgccaggagu

SEQ ID NO: 113885 - RNA, 24 nt, Human
agauacuguuaacccaagaaugaa

SEQ ID NO: 113886 - RNA, 18 nt, Human
agccacaaccaaaaagcc

SEQ ID NO: 113887 - RNA, 18 nt, Human
agcugugcaggcucccug

SEQ ID NO: 113888 - RNA, 22 nt, Human
aggaagucuuagcccccuagga

SEQ ID NO: 113889 - RNA, 19 nt, Human
aguuuuuuuuuuucucuuu

SEQ ID NO: 113890 - RNA, 20 nt, Human
auaaauugucuuuguuucgu

SEQ ID NO: 113891 - RNA, 22 nt, Human
auaccaacauuaaaguguuuaa

SEQ ID NO: 113892 - RNA, 20 nt, Human
auagaacaaaacucauuuga

SEQ ID NO: 113893 - RNA, 21 nt, Human
auccgcgcccaccugccccuc

SEQ ID NO: 113894 - RNA, 18 nt, Human
augaagcgcgugccugcc

SEQ ID NO: 113895 - RNA, 21 nt, Human
auugccaccugggggcagccc

SEQ ID NO: 113896 - RNA, 20 nt, Human
caaaaauauucaaacugcca

SEQ ID NO: 113897 - RNA, 20 nt, Human
caaaacagaaggaaccacug

SEQ ID NO: 113898 - RNA, 21 nt, Human
caaaacagaaggaaccacuga

SEQ ID NO: 113899 - RNA, 22 nt, Human
caaaaugagcaccaugacaucu

SEQ ID NO: 113900 - RNA, 21 nt, Human
caaagcacuaaaaugaguguc

SEQ ID NO: 113901 - RNA, 26 nt, Human
cacccgcgccccgcugccucuucgcc

SEQ ID NO: 113902 - RNA, 25 nt, Human
cacccugcgcagccaccuccccacc

SEQ ID NO: 113903 - RNA, 20 nt, Human
caccgcacacccccaaacgc

SEQ ID NO: 113904 - RNA, 23 nt, Human
caccgcacacccccaaacgcccc

SEQ ID NO: 113905 - RNA, 19 nt, Human
caccuccccaccgcacacc

SEQ ID NO: 113906 - RNA, 20 nt, Human
caccuccccaccgcgcagcc

SEQ ID NO: 113907 - RNA, 20 nt, Human
caccugccccucaggcgccc

SEQ ID NO: 113908 - RNA, 21 nt, Human
cagacgcccggcgcgccuccc

SEQ ID NO: 113909 - RNA, 20 nt, Human
caggagugccgccuugccac

SEQ ID NO: 113910 - RNA, 20 nt, Human
cagucuucucuuccagaagg

SEQ ID NO: 113911 - RNA, 26 nt, Human
cauauaagagcucauuacaaaucaag

SEQ ID NO: 113912 - RNA, 20 nt, Human
cauccucaguaaaauaagag

SEQ ID NO: 113913 - RNA, 23 nt, Human
ccacccugcgcagccaccucccc

SEQ ID NO: 113914 - RNA, 24 nt, Human
ccaccgcacacccccaaagggccc

SEQ ID NO: 113915 - RNA, 19 nt, Human
ccauuugucacccuuaccu

SEQ ID NO: 113916 - RNA, 22 nt, Human
cccaagucgauaaugauagcuc

SEQ ID NO: 113917 - RNA, 23 nt, Human
cccaccgcgcagccaccucccca

SEQ ID NO: 113918 - RNA, 20 nt, Human
cccagcccuuucucgccucc

SEQ ID NO: 113919 - RNA, 22 nt, Human
ccccaaacgccccaccuccgac

SEQ ID NO: 113920 - RNA, 23 nt, Human
ccccaccgcgcagccaccucccc

SEQ ID NO: 113921 - RNA, 21 nt, Human
ccccauguagcgucaguccca

SEQ ID NO: 113922 - RNA, 22 nt, Human
cccccaaacgccccaccuccga

SEQ ID NO: 113923 - RNA, 19 nt, Human
ccccucaggcgcccagccc

SEQ ID NO: 113924 - RNA, 20 nt, Human
cccugcgcagccaccucccc

SEQ ID NO: 113925 - RNA, 20 nt, Human
cccugcgcagccaccucccc

SEQ ID NO: 113926 - RNA, 23 nt, Human
cccuuucucgccuccugggcacg

SEQ ID NO: 113927 - RNA, 23 nt, Human
ccgcugccucuucgcggcgcucu

SEQ ID NO: 113928 - RNA, 21 nt, Human
ccgcuggccacucccuccacc

SEQ ID NO: 113929 - RNA, 20 nt, Human
ccucaguaaaauaagaguau

SEQ ID NO: 113930 - RNA, 25 nt, Human
ccuccagccccaauccacccgcgcc

SEQ ID NO: 113931 - RNA, 20 nt, Human
ccuccagccccaauccaccu

SEQ ID NO: 113932 - RNA, 18 nt, Human
ccucccgcuuaaucuggg

SEQ ID NO: 113933 - RNA, 23 nt, Human
ccucccuugaagccacaaccaaa

SEQ ID NO: 113934 - RNA, 18 nt, Human
ccuccuuaaccccuuacc

SEQ ID NO: 113935 - RNA, 26 nt, Human
ccuggauccgcgcccaccugccccuc

SEQ ID NO: 113936 - RNA, 19 nt, Human
ccugggcacgaugcccggg

SEQ ID NO: 113937 - RNA, 20 nt, Human
cgacaaaacagaaggaaccc

SEQ ID NO: 113938 - RNA, 19 nt, Human
cgcaccuccagccccaauc

SEQ ID NO: 113939 - RNA, 19 nt, Human
cgccggaccgacuggggaa

SEQ ID NO: 113940 - RNA, 19 nt, Human
cgcugccucuucgcggcgc

SEQ ID NO: 113941 - RNA, 21 nt, Human
cgcugccucuucgcggcgcuc

SEQ ID NO: 113942 - RNA, 26 nt, Human
cuccagccccaauccacccgcgcccc

SEQ ID NO: 113943 - RNA, 27 nt, Human
cuccagccccaauccacccgcgccccg

SEQ ID NO: 113944 - RNA, 19 nt, Human
cugccugguaaguugggag

SEQ ID NO: 113945 - RNA, 19 nt, Human
cugcgcagccaccucccca

SEQ ID NO: 113946 - RNA, 22 nt, Human
cuggccacucccuccacccugc

SEQ ID NO: 113947 - RNA, 21 nt, Human
gaccugagccacgucuucccu

SEQ ID NO: 113948 - RNA, 18 nt, Human
gagcaucaccuccuuaac

SEQ ID NO: 113949 - RNA, 19 nt, Human
gagcugccauuaugugugu

SEQ ID NO: 113950 - RNA, 18 nt, Human
gcaagaagcugugcaggc

SEQ ID NO: 113951 - RNA, 21 nt, Human
gccaccuccccaccgcacacc

SEQ ID NO: 113952 - RNA, 22 nt, Human
gccaccuccccaccgcacaccc

SEQ ID NO: 113953 - RNA, 25 nt, Human
gccaccuccccaccgcgcagccacc

SEQ ID NO: 113954 - RNA, 23 nt, Human
gccccauguagcgucagucccau

SEQ ID NO: 113955 - RNA, 20 nt, Human
gccgcuggccacucccucca

SEQ ID NO: 113956 - RNA, 20 nt, Human
gccuccugggcacgaugccc

SEQ ID NO: 113957 - RNA, 25 nt, Human
gccugggcccccggaccuugggagc

SEQ ID NO: 113958 - RNA, 23 nt, Human
gcgggcgcggggaacaagcgggg

SEQ ID NO: 113959 - RNA, 19 nt, Human
ggaaaagcagucugucugg

SEQ ID NO: 113960 - RNA, 18 nt, Human
ggaggggagugagaugcu

SEQ ID NO: 113961 - RNA, 21 nt, Human
gggagggaggggguaugaggg

SEQ ID NO: 113962 - RNA, 19 nt, Human
gggagucaauuuuugugaa

SEQ ID NO: 113963 - RNA, 23 nt, Human
ggggaaaagcagucugucuggaa

SEQ ID NO: 113964 - RNA, 19 nt, Human
guccaaaaugagcaccaug

SEQ ID NO: 113965 - RNA, 21 nt, Human
gugaaguuuuuuuuuuucucu

SEQ ID NO: 113966 - RNA, 18 nt, Human
gugugagcugccauuaug

SEQ ID NO: 113967 - RNA, 23 nt, Human
guuccuguggggacgcccgcagc

SEQ ID NO: 113968 - RNA, 21 nt, Human
guugugagugcaagaagcugu

SEQ ID NO: 113969 - RNA, 22 nt, Human
uaaaaaaaaaucucucuuugcg

SEQ ID NO: 113970 - RNA, 22 nt, Human
uaaaauacacauuuuucuuuuu

SEQ ID NO: 113971 - RNA, 22 nt, Human
uaaagauagagccauguccucc

SEQ ID NO: 113972 - RNA, 24 nt, Human
uaaauugccaccugggggcagccc

SEQ ID NO: 113973 - RNA, 19 nt, Human
uaacuaccuuaauauucac

SEQ ID NO: 113974 - RNA, 22 nt, Human
uaacuuaugaagauaauauucu

SEQ ID NO: 113975 - RNA, 18 nt, Human
uaaggaacagaggacucu

SEQ ID NO: 113976 - RNA, 18 nt, Human
uagaaaauacuaaugcca

SEQ ID NO: 113977 - RNA, 18 nt, Human
uagaaaauacuaaugcca

SEQ ID NO: 113978 - RNA, 21 nt, Human
uagaagggacacugccuggua

SEQ ID NO: 113979 - RNA, 21 nt, Human
uagcacgcacgcaccugugac

SEQ ID NO: 113980 - RNA, 23 nt, Human
uauucugccagucuucucuucca

SEQ ID NO: 113981 - RNA, 19 nt, Human
ucaggccaaguucaagaug

SEQ ID NO: 113982 - RNA, 20 nt, Human
uccacccgcgccccgcugcc

SEQ ID NO: 113983 - RNA, 24 nt, Human
ucccagaaaauguucucaggccaa

SEQ ID NO: 113984 - RNA, 23 nt, Human
ucccauuagcacgcacgcaccug

SEQ ID NO: 113985 - RNA, 22 nt, Human
uccccaccgcacacccccaaac

SEQ ID NO: 113986 - RNA, 22 nt, Human
uccccgccugggcccccggacc

SEQ ID NO: 113987 - RNA, 23 nt, Human
ucgcagccaagcccggcggccgc

SEQ ID NO: 113988 - RNA, 18 nt, Human
ucucugaaaaaugcagaa

SEQ ID NO: 113989 - RNA, 25 nt, Human
ugaaguuuuuuuuuuucucuuuaaa

SEQ ID NO: 113990 - RNA, 23 nt, Human
ugaauaacuaccuuaauauucac

SEQ ID NO: 113991 - RNA, 23 nt, Human
ugaugggguaacccugacuuaaa

SEQ ID NO: 113992 - RNA, 22 nt, Human
ugcaagaagcugugcaggcucc

SEQ ID NO: 113993 - RNA, 21 nt, Human
ugccugguaaguugggaggga

SEQ ID NO: 113994 - RNA, 22 nt, Human
uggggaaaagcagucugucugg

SEQ ID NO: 113995 - RNA, 22 nt, Human
ugguuuuaccauuauuuaaagu

SEQ ID NO: 113996 - RNA, 26 nt, Human
ugucuggaaguucacugcaaugggga

SEQ ID NO: 113997 - RNA, 18 nt, Human
ugugaauaacuaccuuaa

SEQ ID NO: 113998 - RNA, 20 nt, Human
ugugauguguuuaugcuaac

SEQ ID NO: 113999 - RNA, 23 nt, Human
uguuugagauacuguuaacccaa

SEQ ID NO: 114000 - RNA, 22 nt, Human
uuaaaugaaucuucuuaccuaa

SEQ ID NO: 114001 - RNA, 24 nt, Human
uuaauauucacuaauagcuuuuag

SEQ ID NO: 114002 - RNA, 21 nt, Human
uuaguacuuaaaaaauauucu

SEQ ID NO: 114003 - RNA, 21 nt, Human
uuccuguggggacgcccgcag

SEQ ID NO: 114004 - RNA, 23 nt, Human
uucugggucaaagucuguuccug

SEQ ID NO: 114005 - RNA, 22 nt, Human
uugguacaagacugauaugaaa

SEQ ID NO: 114006 - RNA, 20 nt, Human
uuuccuauaaaauccaucca

SEQ ID NO: 114007 - RNA, 23 nt, Human
uuuccuauaaaauccauccagaa

SEQ ID NO: 114008 - RNA, 20 nt, Human
uuucucuuggccacguguug

SEQ ID NO: 114009 - RNA, 23 nt, Human
uuuuccauaauugcuacuuuuca

SEQ ID NO: 114010 - RNA, 21 nt, Human
aaaaaaaaaagaagaagaaga

SEQ ID NO: 114011 - RNA, 23 nt, Human
aaaaaaaaaagaagaagaagaag

SEQ ID NO: 114012 - RNA, 19 nt, Human
aaaaaaaagaagaagaaga

SEQ ID NO: 114013 - RNA, 19 nt, Human
aaaaaaaagaagaagaaga

SEQ ID NO: 114014 - RNA, 18 nt, Human
aaaaaagaagaagaagaa

SEQ ID NO: 114015 - RNA, 19 nt, Human
aaaaacaagauguaagaaa

SEQ ID NO: 114016 - RNA, 20 nt, Human
aaaagaauaagaaacaucaa

SEQ ID NO: 114017 - RNA, 22 nt, Human
aaaagacaaauugcuccauuag

SEQ ID NO: 114018 - RNA, 18 nt, Human
aaacccgggauacagcag

SEQ ID NO: 114019 - RNA, 21 nt, Human
aagaaaaaaaaaagaagaaga

SEQ ID NO: 114020 - RNA, 22 nt, Human
aagaaaaaaaaaagaagaagaa

SEQ ID NO: 114021 - RNA, 21 nt, Human
aagagaaagaagcuuuuuaaa

SEQ ID NO: 114022 - RNA, 26 nt, Human
aauuuucaucuuauaauucuuggaga

SEQ ID NO: 114023 - RNA, 24 nt, Human
accaaguguuguuucccaguucug

SEQ ID NO: 114024 - RNA, 21 nt, Human
agaaaaaaaaaagaagaagaa

SEQ ID NO: 114025 - RNA, 19 nt, Human
agaacuuacgggauaaaac

SEQ ID NO: 114026 - RNA, 18 nt, Human
agagggacagugaggcuu

SEQ ID NO: 114027 - RNA, 20 nt, Human
agaguggaagaaaaaaaaaa

SEQ ID NO: 114028 - RNA, 22 nt, Human
agccggagagggacagugaggc

SEQ ID NO: 114029 - RNA, 18 nt, Human
aggccacaggaggauucu

SEQ ID NO: 114030 - RNA, 18 nt, Human
auauauauauauaucaca

SEQ ID NO: 114031 - RNA, 18 nt, Human
augaauauaaaauauugc

SEQ ID NO: 114032 - RNA, 23 nt, Human
auuguuuggaagaacuuugucca

SEQ ID NO: 114033 - RNA, 19 nt, Human
auuuuauauauauauauau

SEQ ID NO: 114034 - RNA, 25 nt, Human
auuuucaucuuauaauucuuggaga

SEQ ID NO: 114035 - RNA, 18 nt, Human
caaaagacaaauugcucc

SEQ ID NO: 114036 - RNA, 23 nt, Human
caaaagacaaauugcuccauuag

SEQ ID NO: 114037 - RNA, 18 nt, Human
caagcagaggccacagga

SEQ ID NO: 114038 - RNA, 24 nt, Human
caccuuuauauuaaaaacccggga

SEQ ID NO: 114039 - RNA, 20 nt, Human
cagaacuuacgggauaaaac

SEQ ID NO: 114040 - RNA, 23 nt, Human
cgggauacagcaggauuaguagc

SEQ ID NO: 114041 - RNA, 23 nt, Human
cucccgcagcuccuucagcaccc

SEQ ID NO: 114042 - RNA, 18 nt, Human
cuucccacaaacugcagu

SEQ ID NO: 114043 - RNA, 23 nt, Human
gaaaaaaaaaagaagaagaagaa

SEQ ID NO: 114044 - RNA, 22 nt, Human
gaacuuuguccagucagaaaug

SEQ ID NO: 114045 - RNA, 18 nt, Human
gaagaaaaaaaaaagaag

SEQ ID NO: 114046 - RNA, 22 nt, Human
gaagagaaagaagcuuuuuaag

SEQ ID NO: 114047 - RNA, 19 nt, Human
gaggccacaggaggauucu

SEQ ID NO: 114048 - RNA, 20 nt, Human
gcaaaagacaaauugcucca

SEQ ID NO: 114049 - RNA, 23 nt, Human
ggagagggacagugaggcuuggg

SEQ ID NO: 114050 - RNA, 19 nt, Human
ggguuuauauggagagagc

SEQ ID NO: 114051 - RNA, 22 nt, Human
gguacaucugaaucuucauggu

SEQ ID NO: 114052 - RNA, 21 nt, Human
gguauguaacaugaacauuua

SEQ ID NO: 114053 - RNA, 20 nt, Human
gucagaaaugaguaaaaaca

SEQ ID NO: 114054 - RNA, 24 nt, Human
gugaagagaaagaagcuuuuuaag

SEQ ID NO: 114055 - RNA, 18 nt, Human
guuguuucccaguucugu

SEQ ID NO: 114056 - RNA, 24 nt, Human
guuuggaagaacuuuguccaguca

SEQ ID NO: 114057 - RNA, 22 nt, Human
uaaaaagaauaagaaacaucaa

SEQ ID NO: 114058 - RNA, 19 nt, Human
uaaaagagacuaaccaagu

SEQ ID NO: 114059 - RNA, 20 nt, Human
uaaaagagacuaaccaagug

SEQ ID NO: 114060 - RNA, 22 nt, Human
uaaaaggcuguucacaauauac

SEQ ID NO: 114061 - RNA, 20 nt, Human
uaacuuaaaagagacuaacc

SEQ ID NO: 114062 - RNA, 22 nt, Human
uaagaaacaucaauuggcuuuu

SEQ ID NO: 114063 - RNA, 24 nt, Human
uaagaaacauuaaaacagggggca

SEQ ID NO: 114064 - RNA, 21 nt, Human
uaauagagacuuugcucuggc

SEQ ID NO: 114065 - RNA, 18 nt, Human
uacaaagcaaaauaagcu

SEQ ID NO: 114066 - RNA, 21 nt, Human
uacaaagcaaaauaagcuuaa

SEQ ID NO: 114067 - RNA, 21 nt, Human
uacuagucagcauguuaucuu

SEQ ID NO: 114068 - RNA, 18 nt, Human
uauagcaaaagacaaauu

SEQ ID NO: 114069 - RNA, 24 nt, Human
ucagcacccgcacgaaauucccgg

SEQ ID NO: 114070 - RNA, 22 nt, Human
ucccgcagcuccuucagcaccc

SEQ ID NO: 114071 - RNA, 23 nt, Human
ucccgcagcuccuucagcacccg

SEQ ID NO: 114072 - RNA, 18 nt, Human
ugaucauauauaguagca

SEQ ID NO: 114073 - RNA, 23 nt, Human
ugcugucuguauucuaggguuuc

SEQ ID NO: 114074 - RNA, 22 nt, Human
uggagagagcuagagccggaga

SEQ ID NO: 114075 - RNA, 19 nt, Human
ugggugaagagaaagaagc

SEQ ID NO: 114076 - RNA, 25 nt, Human
ugggugaagagaaagaagcuuuuua

SEQ ID NO: 114077 - RNA, 22 nt, Human
ugugaguauuuauaacaaaaua

SEQ ID NO: 114078 - RNA, 18 nt, Human
uguguguuuuuguuucuc

SEQ ID NO: 114079 - RNA, 19 nt, Human
uguuguuucccaguucugu

SEQ ID NO: 114080 - RNA, 20 nt, Human
uuacaaagcaaaauaagcuu

SEQ ID NO: 114081 - RNA, 20 nt, Human
uuauauauauauauaucaca

SEQ ID NO: 114082 - RNA, 18 nt, Human
uucaugcuaugucauaug

SEQ ID NO: 114083 - RNA, 23 nt, Human
uugacauaaucuugaggguuuau

SEQ ID NO: 114084 - RNA, 21 nt, Human
uuuauauauauauauaucaca

SEQ ID NO: 114085 - RNA, 24 nt, Human
uuuauuuuacucaaugugacucuu

SEQ ID NO: 114086 - RNA, 20 nt, Human
aaaacugguaauuaaagaaa

SEQ ID NO: 114087 - RNA, 26 nt, Human
aaacaggacagcagaucucagcaggg

SEQ ID NO: 114088 - RNA, 21 nt, Human
aaagaagaccagcagcccagg

SEQ ID NO: 114089 - RNA, 22 nt, Human
aaauucccccaaacagaauacc

SEQ ID NO: 114090 - RNA, 22 nt, Human
aaauucccccaaacagaauacc

SEQ ID NO: 114091 - RNA, 21 nt, Human
aacaaauucccccaaacagaa

SEQ ID NO: 114092 - RNA, 21 nt, Human
aagcaaaacucacacauccua

SEQ ID NO: 114093 - RNA, 21 nt, Human
aagcaaaacucacacauccuu

SEQ ID NO: 114094 - RNA, 21 nt, Human
aagcggcuccgcggcccgugc

SEQ ID NO: 114095 - RNA, 20 nt, Human
aaggggcucaggccuuccuu

SEQ ID NO: 114096 - RNA, 18 nt, Human
aaucauccaaaucaaaca

SEQ ID NO: 114097 - RNA, 21 nt, Human
aaucauccaaaucaaacagua

SEQ ID NO: 114098 - RNA, 20 nt, Human
acaaauucccccaaacagaa

SEQ ID NO: 114099 - RNA, 20 nt, Human
accaccacccccaacccagc

SEQ ID NO: 114100 - RNA, 20 nt, Human
accaccacccccaacccagc

SEQ ID NO: 114101 - RNA, 24 nt, Human
accaccacccccaacccagcugcu

SEQ ID NO: 114102 - RNA, 24 nt, Human
accaccacccccaacccagcugcu

SEQ ID NO: 114103 - RNA, 22 nt, Human
acccgagggcuggggugacgag

SEQ ID NO: 114104 - RNA, 23 nt, Human
acucugggcuacuggguggcacc

SEQ ID NO: 114105 - RNA, 23 nt, Human
acuggguucugguuuaaaccaaa

SEQ ID NO: 114106 - RNA, 19 nt, Human
agauaagaagugcuccaaa

SEQ ID NO: 114107 - RNA, 24 nt, Human
agccaaauaaugugugcugaccuc

SEQ ID NO: 114108 - RNA, 21 nt, Human
agccaauucaggcuugcuuua

SEQ ID NO: 114109 - RNA, 21 nt, Human
agccaauucaggcuugcuuua

SEQ ID NO: 114110 - RNA, 21 nt, Human
aggggagggcaaggggcagag

SEQ ID NO: 114111 - RNA, 20 nt, Human
auacaauguacugcauagcc

SEQ ID NO: 114112 - RNA, 20 nt, Human
auacaauguacugcauagcc

SEQ ID NO: 114113 - RNA, 24 nt, Human
caaaagcaaaacucacacauccua

SEQ ID NO: 114114 - RNA, 20 nt, Human
caagacgguaaggagaaagc

SEQ ID NO: 114115 - RNA, 20 nt, Human
cacacaaucauccaaaucaa

SEQ ID NO: 114116 - RNA, 21 nt, Human
cacacauccuacgcacccacc

SEQ ID NO: 114117 - RNA, 24 nt, Human
caccagcuugacagaaacaggaca

SEQ ID NO: 114118 - RNA, 23 nt, Human
cacccaccccucuacuucuggcc

SEQ ID NO: 114119 - RNA, 24 nt, Human
cacccaccccucuacuucuggccc

SEQ ID NO: 114120 - RNA, 24 nt, Human
cacccccaacccagcugcuggccu

SEQ ID NO: 114121 - RNA, 24 nt, Human
cacccccaacccagcugcuggccu

SEQ ID NO: 114122 - RNA, 22 nt, Human
cacccccucuacuucuggccca

SEQ ID NO: 114123 - RNA, 20 nt, Human
caccccucuacuucuggcca

SEQ ID NO: 114124 - RNA, 21 nt, Human
caccccucuacuucuggccca

SEQ ID NO: 114125 - RNA, 24 nt, Human
cacuggguucugguuuaagccaaa

SEQ ID NO: 114126 - RNA, 18 nt, Human
cagaacagaguaggugga

SEQ ID NO: 114127 - RNA, 23 nt, Human
cagaccauucagguuugugagga

SEQ ID NO: 114128 - RNA, 19 nt, Human
cagaguagguggacgaagu

SEQ ID NO: 114129 - RNA, 22 nt, Human
cagcagggugggcucaucucua

SEQ ID NO: 114130 - RNA, 18 nt, Human
cagcccagggagcaccga

SEQ ID NO: 114131 - RNA, 21 nt, Human
caggggagggcaaggggcaga

SEQ ID NO: 114132 - RNA, 23 nt, Human
cauccucugucucuggcuggagg

SEQ ID NO: 114133 - RNA, 18 nt, Human
caugcuuauuacucagga

SEQ ID NO: 114134 - RNA, 18 nt, Human
caugcuuauuacucagga

SEQ ID NO: 114135 - RNA, 22 nt, Human
cauguggggcccagucuugcuc

SEQ ID NO: 114136 - RNA, 22 nt, Human
cauguggggcccagucuugcuc

SEQ ID NO: 114137 - RNA, 23 nt, Human
cauuaaugaccaccacccccaac

SEQ ID NO: 114138 - RNA, 23 nt, Human
cauuaaugaccaccacccccaac

SEQ ID NO: 114139 - RNA, 26 nt, Human
ccaaacagaauacaauguacugcaua

SEQ ID NO: 114140 - RNA, 26 nt, Human
ccaaacagaauacaauguacugcaua

SEQ ID NO: 114141 - RNA, 18 nt, Human
ccacauugcacacaucug

SEQ ID NO: 114142 - RNA, 18 nt, Human
ccacauugcacacaucug

SEQ ID NO: 114143 - RNA, 20 nt, Human
ccacauugcacacaucugau

SEQ ID NO: 114144 - RNA, 21 nt, Human
ccaccacccccaacccagcug

SEQ ID NO: 114145 - RNA, 21 nt, Human
ccaccacccccaacccagcug

SEQ ID NO: 114146 - RNA, 18 nt, Human
ccaggaaaaaaggcuguc

SEQ ID NO: 114147 - RNA, 18 nt, Human
ccaggaaaaaaggcuguc

SEQ ID NO: 114148 - RNA, 19 nt, Human
ccaggccacauccucuguc

SEQ ID NO: 114149 - RNA, 20 nt, Human
ccaggccacauccucugucu

SEQ ID NO: 114150 - RNA, 21 nt, Human
cccaaacagaauacaauguac

SEQ ID NO: 114151 - RNA, 21 nt, Human
cccaaacagaauacaauguac

SEQ ID NO: 114152 - RNA, 22 nt, Human
ccucagaauacaaggaaaccaa

SEQ ID NO: 114153 - RNA, 18 nt, Human
ccuccuugaagagugagg

SEQ ID NO: 114154 - RNA, 20 nt, Human
ccucugucucuggcuggagg

SEQ ID NO: 114155 - RNA, 19 nt, Human
ccuuacgcacccaccccuc

SEQ ID NO: 114156 - RNA, 24 nt, Human
ccuuuuuguuccuggagucaaaag

SEQ ID NO: 114157 - RNA, 24 nt, Human
ccuuuuuguuccuggagucaaaag

SEQ ID NO: 114158 - RNA, 21 nt, Human
cgugcucaucugggcucugcu

SEQ ID NO: 114159 - RNA, 19 nt, Human
cuaaagcucacucugggcu

SEQ ID NO: 114160 - RNA, 19 nt, Human
cuaaagcucacucugggcu

SEQ ID NO: 114161 - RNA, 18 nt, Human
cuagagagagcuaaagcu

SEQ ID NO: 114162 - RNA, 19 nt, Human
cuauggacccgagggcugg

SEQ ID NO: 114163 - RNA, 21 nt, Human
cucacacauccuacgcaccca

SEQ ID NO: 114164 - RNA, 25 nt, Human
cucacacauccuacgcacccacccc

SEQ ID NO: 114165 - RNA, 26 nt, Human
cucacacauccuuacgcacccacccc

SEQ ID NO: 114166 - RNA, 22 nt, Human
cucagaauacaaggaaaccaac

SEQ ID NO: 114167 - RNA, 22 nt, Human
cucagaauacaaggaaaccaac

SEQ ID NO: 114168 - RNA, 20 nt, Human
cucaggccuuccuucuucag

SEQ ID NO: 114169 - RNA, 21 nt, Human
cucuauggacccgagggcugg

SEQ ID NO: 114170 - RNA, 26 nt, Human
cucucuguucugugagcagcuggaag

SEQ ID NO: 114171 - RNA, 21 nt, Human
cuggaagguaaagaagaccag

SEQ ID NO: 114172 - RNA, 18 nt, Human
cuggccuucaagccucuc

SEQ ID NO: 114173 - RNA, 18 nt, Human
cuggccuucaagccucuc

SEQ ID NO: 114174 - RNA, 20 nt, Human
cuggccuucaagccucucua

SEQ ID NO: 114175 - RNA, 20 nt, Human
cuggccuucaagccucucua

SEQ ID NO: 114176 - RNA, 22 nt, Human
cuuugaaccaggccacauccuc

SEQ ID NO: 114177 - RNA, 22 nt, Human
cuuugaaccaggccacauccuc

SEQ ID NO: 114178 - RNA, 19 nt, Human
gaaacugggaugugggauu

SEQ ID NO: 114179 - RNA, 19 nt, Human
gaaacugggaugugggauu

SEQ ID NO: 114180 - RNA, 22 nt, Human
gcaaaacucacacauccuacgc

SEQ ID NO: 114181 - RNA, 23 nt, Human
gcaaaacucacacauccuuacgc

SEQ ID NO: 114182 - RNA, 22 nt, Human
gcuccuccggagcugggucccg

SEQ ID NO: 114183 - RNA, 21 nt, Human
ggagccggcaaggaggagaug

SEQ ID NO: 114184 - RNA, 21 nt, Human
ggagccggcaaggaggagaug

SEQ ID NO: 114185 - RNA, 21 nt, Human
ggagggcaaggggcagagugg

SEQ ID NO: 114186 - RNA, 20 nt, Human
ggcaggggagggcaaggggc

SEQ ID NO: 114187 - RNA, 23 nt, Human
gggcucaggccuuccuucuucag

SEQ ID NO: 114188 - RNA, 22 nt, Human
ggggcaggggagggcaaggggc

SEQ ID NO: 114189 - RNA, 20 nt, Human
uaaaacaaauucccccaaac

SEQ ID NO: 114190 - RNA, 20 nt, Human
uaaaacaaauucccccaaac

SEQ ID NO: 114191 - RNA, 20 nt, Human
uaaggaaacagaaucaccug

SEQ ID NO: 114192 - RNA, 20 nt, Human
uaaggaaacagaaucaccug

SEQ ID NO: 114193 - RNA, 21 nt, Human
uacugcauagccaauucaggc

SEQ ID NO: 114194 - RNA, 21 nt, Human
uacugcauagccaauucaggc

SEQ ID NO: 114195 - RNA, 22 nt, Human
uacuucuggcccaggaaaaaag

SEQ ID NO: 114196 - RNA, 22 nt, Human
uacuucuggcccaggaaaaaag

SEQ ID NO: 114197 - RNA, 19 nt, Human
uagcccaaaugagacucca

SEQ ID NO: 114198 - RNA, 19 nt, Human
uauuuuauuugcuauguac

SEQ ID NO: 114199 - RNA, 19 nt, Human
uauuuuauuugcuauguac

SEQ ID NO: 114200 - RNA, 18 nt, Human
ucagaccauucagguuug

SEQ ID NO: 114201 - RNA, 18 nt, Human
ucauucuagagcuaaagc

SEQ ID NO: 114202 - RNA, 23 nt, Human
uccucagaauacaaggaaaccaa

SEQ ID NO: 114203 - RNA, 21 nt, Human
uccucugucucuggcuggagg

SEQ ID NO: 114204 - RNA, 21 nt, Human
uccucugucucuggcuggagg

SEQ ID NO: 114205 - RNA, 18 nt, Human
ucuaagacaguuguggcc

SEQ ID NO: 114206 - RNA, 26 nt, Human
ucucuaagccauguggggcccagucu

SEQ ID NO: 114207 - RNA, 26 nt, Human
ucucuaagccauguggggcccagucu

SEQ ID NO: 114208 - RNA, 18 nt, Human
ucucuauggacccgaggg

SEQ ID NO: 114209 - RNA, 24 nt, Human
ucuggcccaggaaaaaaggcuguc

SEQ ID NO: 114210 - RNA, 24 nt, Human
ucuggcccaggaaaaaaggcuguc

SEQ ID NO: 114211 - RNA, 19 nt, Human
ucugugagcagcuggaagg

SEQ ID NO: 114212 - RNA, 18 nt, Human
ucuucugcuuguauguag

SEQ ID NO: 114213 - RNA, 23 nt, Human
ucuuuaacauccucagaauacaa

SEQ ID NO: 114214 - RNA, 23 nt, Human
ucuuuaacauccucagaauacaa

SEQ ID NO: 114215 - RNA, 20 nt, Human
ugaaagagcaauuggauaac

SEQ ID NO: 114216 - RNA, 20 nt, Human
ugaaagagcaauuggauaac

SEQ ID NO: 114217 - RNA, 22 nt, Human
ugaauagucacacaaucaucca

SEQ ID NO: 114218 - RNA, 19 nt, Human
ugacagaaacaggacagca

SEQ ID NO: 114219 - RNA, 21 nt, Human
ugacagaaacaggacagcaga

SEQ ID NO: 114220 - RNA, 19 nt, Human
ugaccaccacccccaaccc

SEQ ID NO: 114221 - RNA, 19 nt, Human
ugaccaccacccccaaccc

SEQ ID NO: 114222 - RNA, 18 nt, Human
ugagaaacugggaugugg

SEQ ID NO: 114223 - RNA, 18 nt, Human
ugagaaacugggaugugg

SEQ ID NO: 114224 - RNA, 19 nt, Human
ugaggugacuguugugagg

SEQ ID NO: 114225 - RNA, 18 nt, Human
ugccacauugcacacauc

SEQ ID NO: 114226 - RNA, 18 nt, Human
ugccacauugcacacauc

SEQ ID NO: 114227 - RNA, 21 nt, Human
ugccauuaaugaccaccaccc

SEQ ID NO: 114228 - RNA, 21 nt, Human
ugccauuaaugaccaccaccc

SEQ ID NO: 114229 - RNA, 18 nt, Human
ugccuagacacagugggc

SEQ ID NO: 114230 - RNA, 18 nt, Human
ugcucauucuagagagag

SEQ ID NO: 114231 - RNA, 23 nt, Human
uggaaaacugguaauuaaagaaa

SEQ ID NO: 114232 - RNA, 20 nt, Human
uggaagaaacuaaacacugc

SEQ ID NO: 114233 - RNA, 23 nt, Human
uggaagaaacuaaacacugcuuc

SEQ ID NO: 114234 - RNA, 19 nt, Human
uggaaggaacugccucaug

SEQ ID NO: 114235 - RNA, 19 nt, Human
uggaaggaacugccucaug

SEQ ID NO: 114236 - RNA, 22 nt, Human
uggagucaaaagcaaaacucac

SEQ ID NO: 114237 - RNA, 22 nt, Human
uggagucaaaagcaaaacucac

SEQ ID NO: 114238 - RNA, 19 nt, Human
uggcaauuggaauaaacag

SEQ ID NO: 114239 - RNA, 21 nt, Human
uggcauuuggaauaaacaggg

SEQ ID NO: 114240 - RNA, 21 nt, Human
uggcuaaaacaaauuccccca

SEQ ID NO: 114241 - RNA, 21 nt, Human
uggcuaaaacaaauuccccca

SEQ ID NO: 114242 - RNA, 22 nt, Human
uggcuaaaacaaauucccccaa

SEQ ID NO: 114243 - RNA, 22 nt, Human
uggcuaaaacaaauucccccaa

SEQ ID NO: 114244 - RNA, 23 nt, Human
uggcuaaaacaaauucccccaaa

SEQ ID NO: 114245 - RNA, 23 nt, Human
uggcuaaaacaaauucccccaaa

SEQ ID NO: 114246 - RNA, 18 nt, Human
ugggaugugggauuuacc

SEQ ID NO: 114247 - RNA, 18 nt, Human
ugggaugugggauuuacc

SEQ ID NO: 114248 - RNA, 18 nt, Human
uguacaaaacugacacca

SEQ ID NO: 114249 - RNA, 18 nt, Human
uguacaaaacugacacca

SEQ ID NO: 114250 - RNA, 22 nt, Human
uguugugaggggcaggggaggg

SEQ ID NO: 114251 - RNA, 27 nt, Human
uuaaaccaaauaaugugugcugaccuc

SEQ ID NO: 114252 - RNA, 19 nt, Human
uuaaggaaacagaaucacc

SEQ ID NO: 114253 - RNA, 19 nt, Human
uuaaggaaacagaaucacc

SEQ ID NO: 114254 - RNA, 22 nt, Human
uucuucagaccauucagguuug

SEQ ID NO: 114255 - RNA, 26 nt, Human
uuguugcauccucugcuuugggcccu

SEQ ID NO: 114256 - RNA, 26 nt, Human
uuguugcauccucugcuuugggcccu

SEQ ID NO: 114257 - RNA, 26 nt, Human
aacuccuucucgccuccuccucgccg

SEQ ID NO: 114258 - RNA, 22 nt, Human
accccugagaccuauucacgaa

SEQ ID NO: 114259 - RNA, 24 nt, Human
aggggagggagaagccuucacugu

SEQ ID NO: 114260 - RNA, 18 nt, Human
aggggcggcuggcgcgcu

SEQ ID NO: 114261 - RNA, 25 nt, Human
aggugggggcgcggcuccucgcgcg

SEQ ID NO: 114262 - RNA, 18 nt, Human
cagccgcggggacggaga

SEQ ID NO: 114263 - RNA, 20 nt, Human
cauggccccgcucccggggc

SEQ ID NO: 114264 - RNA, 20 nt, Human
ccacaccccguggugccgag

SEQ ID NO: 114265 - RNA, 24 nt, Human
ccaggugggggcgcggcuccuucc

SEQ ID NO: 114266 - RNA, 24 nt, Human
cccacgggcgggagggcucgacuu

SEQ ID NO: 114267 - RNA, 21 nt, Human
cccccaaccccugagaccuau

SEQ ID NO: 114268 - RNA, 19 nt, Human
ccccgcgacccgcuccccg

SEQ ID NO: 114269 - RNA, 25 nt, Human
ccccugagaccuauucacgaacagg

SEQ ID NO: 114270 - RNA, 20 nt, Human
ccgccccgcgacccgcuccc

SEQ ID NO: 114271 - RNA, 21 nt, Human
ccgccccgcgacccgcucccc

SEQ ID NO: 114272 - RNA, 22 nt, Human
ccgccgccccgcgacccgcucc

SEQ ID NO: 114273 - RNA, 22 nt, Human
ccgccgccgccccgcgacccgc

SEQ ID NO: 114274 - RNA, 24 nt, Human
ccgccgccgccccgcgacccgcuc

SEQ ID NO: 114275 - RNA, 20 nt, Human
ccuccuccuccuccaacucc

SEQ ID NO: 114276 - RNA, 21 nt, Human
ccuccuccuccuccuccucca

SEQ ID NO: 114277 - RNA, 20 nt, Human
ccuccucgccgccgccgccc

SEQ ID NO: 114278 - RNA, 20 nt, Human
ccucgccgccgccgccccgc

SEQ ID NO: 114279 - RNA, 22 nt, Human
ccucgccgccgccgccccgcga

SEQ ID NO: 114280 - RNA, 18 nt, Human
ccucgccuccuccuccuc

SEQ ID NO: 114281 - RNA, 20 nt, Human
ccucgccuccuccuccuccu

SEQ ID NO: 114282 - RNA, 18 nt, Human
cgcggggacgcacagggg

SEQ ID NO: 114283 - RNA, 22 nt, Human
cggccgggaccccgcugggcuc

SEQ ID NO: 114284 - RNA, 21 nt, Human
cucccccaaccccugagaccu

SEQ ID NO: 114285 - RNA, 23 nt, Human
cuccuccuccuccuccaacuccu

SEQ ID NO: 114286 - RNA, 23 nt, Human
cuccuccuccuccuccuccaacu

SEQ ID NO: 114287 - RNA, 25 nt, Human
cuccucgccgccgccgccccgcgac

SEQ ID NO: 114288 - RNA, 24 nt, Human
cucgcucgcccucgccuccuccuc

SEQ ID NO: 114289 - RNA, 23 nt, Human
cuggcagucccucccccaacccc

SEQ ID NO: 114290 - RNA, 22 nt, Human
gagggagaagccuucacugucc

SEQ ID NO: 114291 - RNA, 19 nt, Human
gcagcuaggucaugugauu

SEQ ID NO: 114292 - RNA, 21 nt, Human
gcgcuccgcucgagugagguc

SEQ ID NO: 114293 - RNA, 21 nt, Human
gcgggcccaggcgcuggggug

SEQ ID NO: 114294 - RNA, 18 nt, Human
gcggggcgcgggccgggg

SEQ ID NO: 114295 - RNA, 18 nt, Human
gcucggaggcgcgcgggg

SEQ ID NO: 114296 - RNA, 20 nt, Human
ggaugggucgggcgagcugg

SEQ ID NO: 114297 - RNA, 21 nt, Human
ggcagucccucccccaacccc

SEQ ID NO: 114298 - RNA, 20 nt, Human
ggggggcuggaggcauggcc

SEQ ID NO: 114299 - RNA, 21 nt, Human
gggucgggcgagcuggggggc

SEQ ID NO: 114300 - RNA, 19 nt, Human
gucgggcgagcuggggggc

SEQ ID NO: 114301 - RNA, 22 nt, Human
gugggaggggagggagaagccu

SEQ ID NO: 114302 - RNA, 23 nt, Human
uagaaaaaaauauaguguccaaa

SEQ ID NO: 114303 - RNA, 24 nt, Human
ucagcuccaggugggggcgcggcu

SEQ ID NO: 114304 - RNA, 18 nt, Human
uccaggaucaggacgugc

SEQ ID NO: 114305 - RNA, 25 nt, Human
uccaggaucaggacgugcacgggac

SEQ ID NO: 114306 - RNA, 21 nt, Human
ucccacaccccguggugccga

SEQ ID NO: 114307 - RNA, 18 nt, Human
uccccgugggcgcuccgc

SEQ ID NO: 114308 - RNA, 20 nt, Human
uccccgugggcgcuccgcuc

SEQ ID NO: 114309 - RNA, 21 nt, Human
ucccucuguucucuccgggcu

SEQ ID NO: 114310 - RNA, 18 nt, Human
uccuucucgccuccuccu

SEQ ID NO: 114311 - RNA, 20 nt, Human
ucgcccacgggcgggagggc

SEQ ID NO: 114312 - RNA, 22 nt, Human
ucgccgccgccgccccgcgacc

SEQ ID NO: 114313 - RNA, 27 nt, Human
ucgccuccuccuccuccuccuccaacu

SEQ ID NO: 114314 - RNA, 23 nt, Human
ucgccuccuccucgccgccgccg

SEQ ID NO: 114315 - RNA, 21 nt, Human
ugaagucaggugggaggggag

SEQ ID NO: 114316 - RNA, 20 nt, Human
ugagguacgagguugcugaa

SEQ ID NO: 114317 - RNA, 19 nt, Human
ugauucagcuccagguggg

SEQ ID NO: 114318 - RNA, 24 nt, Human
ugcagaaugacauuuggccucuaa

SEQ ID NO: 114319 - RNA, 18 nt, Human
uggaaggggcggcuggcg

SEQ ID NO: 114320 - RNA, 20 nt, Human
ugggaggggagggagaagcc

SEQ ID NO: 114321 - RNA, 19 nt, Human
uggggcgggcccaggcgcu

SEQ ID NO: 114322 - RNA, 20 nt, Human
uguggacagagcguggggcg

SEQ ID NO: 114323 - RNA, 20 nt, Human
uguggcggcggcuguucugg

SEQ ID NO: 114324 - RNA, 25 nt, Human
uuacgaggcuuaccuuggaacauuu

SEQ ID NO: 114325 - RNA, 19 nt, Human
uucaaguugaauuuagaaa

SEQ ID NO: 114326 - RNA, 20 nt, Human
uucggcucgggagcccgggc

SEQ ID NO: 114327 - RNA, 23 nt, Human
uuggugauggugggaugaccuuu

SEQ ID NO: 114328 - RNA, 20 nt, Human
uuuguggcggcggcuguucu

SEQ ID NO: 114329 - RNA, 20 nt, Human
aaggaucaaagggggugggg

SEQ ID NO: 114330 - RNA, 26 nt, Human
aaguagaaaggaucaaaggggguggg

SEQ ID NO: 114331 - RNA, 25 nt, Human
acacaacccagucaaggggggaacc

SEQ ID NO: 114332 - RNA, 18 nt, Human
acccuggaaaggagaagg

SEQ ID NO: 114333 - RNA, 24 nt, Human
acccuugggccagggaaccccagc

SEQ ID NO: 114334 - RNA, 20 nt, Human
agaaacacaacccagucaag

SEQ ID NO: 114335 - RNA, 21 nt, Human
agaaagagccagacugcagua

SEQ ID NO: 114336 - RNA, 18 nt, Human
agccagacugcaguaugc

SEQ ID NO: 114337 - RNA, 19 nt, Human
agcgacggaggagugagga

SEQ ID NO: 114338 - RNA, 21 nt, Human
agcucugaguuagaagcucau

SEQ ID NO: 114339 - RNA, 25 nt, Human
aggcaggaaaagaaacacaacccag

SEQ ID NO: 114340 - RNA, 25 nt, Human
aggcaggaaaagaaacacaagggac

SEQ ID NO: 114341 - RNA, 23 nt, Human
aggggguggggguagggguccca

SEQ ID NO: 114342 - RNA, 21 nt, Human
agggguggggaggugaggcuu

SEQ ID NO: 114343 - RNA, 18 nt, Human
agucggggcggcugcggg

SEQ ID NO: 114344 - RNA, 18 nt, Human
auacgguggcuucaaagc

SEQ ID NO: 114345 - RNA, 24 nt, Human
auggggguucaagggguggggagg

SEQ ID NO: 114346 - RNA, 22 nt, Human
caaaggggguggggguaggggu

SEQ ID NO: 114347 - RNA, 18 nt, Human
caagggaagucccucuuc

SEQ ID NO: 114348 - RNA, 21 nt, Human
cacccuggaaaggagaaggaa

SEQ ID NO: 114349 - RNA, 18 nt, Human
caccuggcauggcaaggu

SEQ ID NO: 114350 - RNA, 21 nt, Human
cagcaccauuaggauccugau

SEQ ID NO: 114351 - RNA, 21 nt, Human
cagcacccuggaaaggagaag

SEQ ID NO: 114352 - RNA, 28 nt, Human
cagcacccuggaaaggagaaggaaugac

SEQ ID NO: 114353 - RNA, 19 nt, Human
caguccuuucaccguggaa

SEQ ID NO: 114354 - RNA, 18 nt, Human
cagucggggcggcugcgg

SEQ ID NO: 114355 - RNA, 23 nt, Human
cauggcaaggugagccuggggag

SEQ ID NO: 114356 - RNA, 24 nt, Human
cauggcaaggugagccuggggagg

SEQ ID NO: 114357 - RNA, 20 nt, Human
ccagccuucccuaaggagga

SEQ ID NO: 114358 - RNA, 18 nt, Human
ccccagcccccagcaccc

SEQ ID NO: 114359 - RNA, 18 nt, Human
ccccauucuggggcuccc

SEQ ID NO: 114360 - RNA, 18 nt, Human
cccccagcacccuggaaa

SEQ ID NO: 114361 - RNA, 22 nt, Human
ccccccaacaucuuggucccca

SEQ ID NO: 114362 - RNA, 20 nt, Human
cccucuucccucuguagucc

SEQ ID NO: 114363 - RNA, 24 nt, Human
cccuugggccagggaaccccagcc

SEQ ID NO: 114364 - RNA, 21 nt, Human
ccuggggaggugaggggcagg

SEQ ID NO: 114365 - RNA, 19 nt, Human
cuggggcucccucacgguc

SEQ ID NO: 114366 - RNA, 18 nt, Human
cuuaacucuggggagggg

SEQ ID NO: 114367 - RNA, 21 nt, Human
cuucucgggcucggugcaguc

SEQ ID NO: 114368 - RNA, 18 nt, Human
gagccuggggaggugagg

SEQ ID NO: 114369 - RNA, 21 nt, Human
gaggaggcuggacccuugggc

SEQ ID NO: 114370 - RNA, 26 nt, Human
gagugaggaggcaggcauugggggug

SEQ ID NO: 114371 - RNA, 22 nt, Human
gaucaaaggggguggggguagg

SEQ ID NO: 114372 - RNA, 21 nt, Human
gcaggcauugggggugggggg

SEQ ID NO: 114373 - RNA, 20 nt, Human
gcggggaaccagucggggcg

SEQ ID NO: 114374 - RNA, 26 nt, Human
ggaggcaggcauuggggguggggggg

SEQ ID NO: 114375 - RNA, 24 nt, Human
ggaucaaaggggguggggguaggg

SEQ ID NO: 114376 - RNA, 19 nt, Human
ggccgggcuugggcuggaa

SEQ ID NO: 114377 - RNA, 24 nt, Human
ggcuuggguggggagggaggggag

SEQ ID NO: 114378 - RNA, 19 nt, Human
gggcagggggaggggauuu

SEQ ID NO: 114379 - RNA, 21 nt, Human
gggcagggggaggggauuugc

SEQ ID NO: 114380 - RNA, 26 nt, Human
gggcucccucacggucccucccaccc

SEQ ID NO: 114381 - RNA, 22 nt, Human
ggggagggaggggagaaagagc

SEQ ID NO: 114382 - RNA, 20 nt, Human
gggguggggguagggguccc

SEQ ID NO: 114383 - RNA, 20 nt, Human
ggugaggggcagggggaggg

SEQ ID NO: 114384 - RNA, 23 nt, Human
gguggggguaggggucccagccu

SEQ ID NO: 114385 - RNA, 21 nt, Human
uagaaaggaucaaagggggug

SEQ ID NO: 114386 - RNA, 19 nt, Human
uaggauccugauucacccc

SEQ ID NO: 114387 - RNA, 21 nt, Human
uaggauccugauucacccccc

SEQ ID NO: 114388 - RNA, 19 nt, Human
uaugcccuauggccuggcg

SEQ ID NO: 114389 - RNA, 23 nt, Human
ucaagggaagucccucuucccuc

SEQ ID NO: 114390 - RNA, 20 nt, Human
ucacccccccaacaucuugg

SEQ ID NO: 114391 - RNA, 21 nt, Human
ucccuaaggaggaagcagaug

SEQ ID NO: 114392 - RNA, 18 nt, Human
ucccucccaccccggaca

SEQ ID NO: 114393 - RNA, 21 nt, Human
ucccucuucccucuguagucc

SEQ ID NO: 114394 - RNA, 19 nt, Human
ugaagggcagcgacggagg

SEQ ID NO: 114395 - RNA, 20 nt, Human
ugagaggaggcuggacccuu

SEQ ID NO: 114396 - RNA, 22 nt, Human
ugagaggaggcuggacccuugg

SEQ ID NO: 114397 - RNA, 22 nt, Human
ugagccuggggaggugaggggc

SEQ ID NO: 114398 - RNA, 23 nt, Human
ugagccuggggaggugaggggca

SEQ ID NO: 114399 - RNA, 28 nt, Human
ugagccuggggaggugaggggcaggggg

SEQ ID NO: 114400 - RNA, 20 nt, Human
ugaggaggcaggcauugggg

SEQ ID NO: 114401 - RNA, 22 nt, Human
ugaggcaggaaaagaaacacaa

SEQ ID NO: 114402 - RNA, 24 nt, Human
ugcaaauuaugcccuauggccugg

SEQ ID NO: 114403 - RNA, 21 nt, Human
ugcagagcugggcugaggcag

SEQ ID NO: 114404 - RNA, 22 nt, Human
ugcagagcugggcugaggcagg

SEQ ID NO: 114405 - RNA, 19 nt, Human
uggaauggggugagaggag

SEQ ID NO: 114406 - RNA, 18 nt, Human
uggcaaggugagccuggg

SEQ ID NO: 114407 - RNA, 22 nt, Human
uggcaaggugagccuggggagg

SEQ ID NO: 114408 - RNA, 18 nt, Human
uggccuggcggugggggg

SEQ ID NO: 114409 - RNA, 19 nt, Human
uggcgguggggggccgggc

SEQ ID NO: 114410 - RNA, 19 nt, Human
uggcgguggggggccgggc

SEQ ID NO: 114411 - RNA, 23 nt, Human
ugggccagggaaccccagccccc

SEQ ID NO: 114412 - RNA, 18 nt, Human
uggggagggaggggagaa

SEQ ID NO: 114413 - RNA, 19 nt, Human
uggggagggaggggagaaa

SEQ ID NO: 114414 - RNA, 24 nt, Human
uggggagggaggggagaaagagcc

SEQ ID NO: 114415 - RNA, 25 nt, Human
uggggaggugaggggcagggggagg

SEQ ID NO: 114416 - RNA, 26 nt, Human
uggggaggugaggggcagggggaggg

SEQ ID NO: 114417 - RNA, 20 nt, Human
uggggggccgggcuugggcu

SEQ ID NO: 114418 - RNA, 18 nt, Human
uggggguucaaggggugg

SEQ ID NO: 114419 - RNA, 19 nt, Human
uucucagauuugagaugca

SEQ ID NO: 114420 - RNA, 22 nt, Human
uucuggggcucccucacggucc

SEQ ID NO: 114421 - RNA, 21 nt, Human
uuggguggggagggaggggag

SEQ ID NO: 114422 - RNA, 18 nt, Human
uuuuaauacagacccagg

SEQ ID NO: 114423 - RNA, 24 nt, Human
uuuuuuuuuuuuuuuuucacaguu

SEQ ID NO: 114424 - RNA, 24 nt, Human
uuuuuuuuuuuuuuuuuuucacag

SEQ ID NO: 114425 - RNA, 20 nt, Human
aaaaaaacacagaaggagca

SEQ ID NO: 114426 - RNA, 22 nt, Human
aaaaacacagaaggagcaaaac

SEQ ID NO: 114427 - RNA, 25 nt, Human
aaacacagaaggagcaaaacuaaca

SEQ ID NO: 114428 - RNA, 18 nt, Human
aacucagggcugagcccc

SEQ ID NO: 114429 - RNA, 20 nt, Human
acaggguuuggugccggcgu

SEQ ID NO: 114430 - RNA, 21 nt, Human
agaaaaaaacacagaaggagc

SEQ ID NO: 114431 - RNA, 24 nt, Human
agcacagaggugccuagggaagga

SEQ ID NO: 114432 - RNA, 24 nt, Human
agcuauggggacagaggagaggga

SEQ ID NO: 114433 - RNA, 21 nt, Human
aggacccugcacaaagcaggc

SEQ ID NO: 114434 - RNA, 22 nt, Human
aggagcugcgcaggcaggaggg

SEQ ID NO: 114435 - RNA, 18 nt, Human
aggagggagggcgggcag

SEQ ID NO: 114436 - RNA, 18 nt, Human
aggagggagggcgggcag

SEQ ID NO: 114437 - RNA, 24 nt, Human
aggagggagggcgggcaggagggc

SEQ ID NO: 114438 - RNA, 21 nt, Human
aggagggcagggcaggagagc

SEQ ID NO: 114439 - RNA, 19 nt, Human
aggcagcagcguugugucc

SEQ ID NO: 114440 - RNA, 24 nt, Human
aggcaggagggagggcgggcagga

SEQ ID NO: 114441 - RNA, 24 nt, Human
agggagggcgggcaggagggcagg

SEQ ID NO: 114442 - RNA, 19 nt, Human
agggcaggagagcccgggg

SEQ ID NO: 114443 - RNA, 19 nt, Human
aguggggaggggugggagg

SEQ ID NO: 114444 - RNA, 18 nt, Human
caaagcaggcagcagcgu

SEQ ID NO: 114445 - RNA, 25 nt, Human
caaagcaggcagcagcguugugucc

SEQ ID NO: 114446 - RNA, 21 nt, Human
caacucagggcugagccccgg

SEQ ID NO: 114447 - RNA, 21 nt, Human
cacacagcgcggccagggcag

SEQ ID NO: 114448 - RNA, 22 nt, Human
caccacacagcgcggccagggc

SEQ ID NO: 114449 - RNA, 23 nt, Human
cagagggcccugcgcaggugaug

SEQ ID NO: 114450 - RNA, 19 nt, Human
cagcacagaggugccuagg

SEQ ID NO: 114451 - RNA, 22 nt, Human
cagcacagaggugccuagggaa

SEQ ID NO: 114452 - RNA, 20 nt, Human
cagcagcguuguguccuggc

SEQ ID NO: 114453 - RNA, 21 nt, Human
cagcucagggcugagccccag

SEQ ID NO: 114454 - RNA, 21 nt, Human
cagcucagggcugagccucag

SEQ ID NO: 114455 - RNA, 23 nt, Human
caggcaggagggagggcgggcag

SEQ ID NO: 114456 - RNA, 19 nt, Human
cauagaaagggggccuuug

SEQ ID NO: 114457 - RNA, 23 nt, Human
caugaacauagaaagggggccuu

SEQ ID NO: 114458 - RNA, 21 nt, Human
ccacacagcgcggccagggca

SEQ ID NO: 114459 - RNA, 19 nt, Human
cccaagcugaggagaagag

SEQ ID NO: 114460 - RNA, 18 nt, Human
cccgagaggcgucuugcu

SEQ ID NO: 114461 - RNA, 21 nt, Human
ccgcccagagaccgaggcugc

SEQ ID NO: 114462 - RNA, 22 nt, Human
ccucuguggcaccaaggggcuc

SEQ ID NO: 114463 - RNA, 23 nt, Human
cgagacagaggccaauggcugcc

SEQ ID NO: 114464 - RNA, 20 nt, Human
cgcggccagggcagagaggg

SEQ ID NO: 114465 - RNA, 23 nt, Human
cuugagugcagccagcgccccug

SEQ ID NO: 114466 - RNA, 23 nt, Human
cuuuccaagcuugggcucuguuu

SEQ ID NO: 114467 - RNA, 24 nt, Human
gaaaaaaacacagaaggagcaaaa

SEQ ID NO: 114468 - RNA, 23 nt, Human
gagacggggccgagucgccgaga

SEQ ID NO: 114469 - RNA, 23 nt, Human
gagcugcgcaggcaggagggagg

SEQ ID NO: 114470 - RNA, 18 nt, Human
gagugaaaaccuuuauuu

SEQ ID NO: 114471 - RNA, 23 nt, Human
gaugaguggggaggggugggagg

SEQ ID NO: 114472 - RNA, 20 nt, Human
gccgcccagagaccgaggcu

SEQ ID NO: 114473 - RNA, 20 nt, Human
gccuccugaccuugguuucc

SEQ ID NO: 114474 - RNA, 22 nt, Human
gcugagccccggaggacccugc

SEQ ID NO: 114475 - RNA, 20 nt, Human
gcuguagggccaagguccag

SEQ ID NO: 114476 - RNA, 18 nt, Human
ggaaaaaccagcuauggg

SEQ ID NO: 114477 - RNA, 22 nt, Human
ggagagggaggcuagugcggca

SEQ ID NO: 114478 - RNA, 20 nt, Human
ggaggacaggguuuggugcc

SEQ ID NO: 114479 - RNA, 19 nt, Human
ggaggacccugcacaaagc

SEQ ID NO: 114480 - RNA, 18 nt, Human
ggaggggugggaggacag

SEQ ID NO: 114481 - RNA, 22 nt, Human
ggcagggcaggagagcccgggg

SEQ ID NO: 114482 - RNA, 20 nt, Human
ggcgggcaggagggcagggc

SEQ ID NO: 114483 - RNA, 24 nt, Human
ggcucuguuuagugaugagugggg

SEQ ID NO: 114484 - RNA, 20 nt, Human
gggaaggagcugcgcaggca

SEQ ID NO: 114485 - RNA, 18 nt, Human
gggcaggagagcccgggg

SEQ ID NO: 114486 - RNA, 21 nt, Human
gggucuugagugcagccagcg

SEQ ID NO: 114487 - RNA, 18 nt, Human
gugggaugcagcacagag

SEQ ID NO: 114488 - RNA, 25 nt, Human
uaacaugaacauagaaagggggccu

SEQ ID NO: 114489 - RNA, 20 nt, Human
uaagacacagcccucugugg

SEQ ID NO: 114490 - RNA, 21 nt, Human
uagcucagagcugagccccag

SEQ ID NO: 114491 - RNA, 24 nt, Human
ucagaaaaaaacacagaaggagca

SEQ ID NO: 114492 - RNA, 19 nt, Human
ucagagcugagccccagag

SEQ ID NO: 114493 - RNA, 22 nt, Human
ucugaggaaggagagguuugcg

SEQ ID NO: 114494 - RNA, 19 nt, Human
ugcacaaagcaggcagcag

SEQ ID NO: 114495 - RNA, 24 nt, Human
ugcagccagcgccccugcgaguac

SEQ ID NO: 114496 - RNA, 23 nt, Human
ugccccaagcugaggagaagagc

SEQ ID NO: 114497 - RNA, 18 nt, Human
ugggaaaaaccagcuaug

SEQ ID NO: 114498 - RNA, 18 nt, Human
ugggaggacaggguuugg

SEQ ID NO: 114499 - RNA, 23 nt, Human
uggggaggggugggaggacaggg

SEQ ID NO: 114500 - RNA, 20 nt, Human
uguggcaccaaggggcucuc

SEQ ID NO: 114501 - RNA, 21 nt, Human
aagccuuuauugggucagggc

SEQ ID NO: 114502 - RNA, 21 nt, Human
aagggacacgguggccaccag

SEQ ID NO: 114503 - RNA, 25 nt, Human
accuguggcccugaaguccuggucc

SEQ ID NO: 114504 - RNA, 21 nt, Human
acuguagccccgcugaccccg

SEQ ID NO: 114505 - RNA, 25 nt, Human
agagcuccuccucgggcagccgcuc

SEQ ID NO: 114506 - RNA, 22 nt, Human
agaggcugggagcugccccaga

SEQ ID NO: 114507 - RNA, 18 nt, Human
agccugucgggggcagcc

SEQ ID NO: 114508 - RNA, 24 nt, Human
agccuuuauugggucagggcuugc

SEQ ID NO: 114509 - RNA, 19 nt, Human
agcuccuccucgggcagcc

SEQ ID NO: 114510 - RNA, 18 nt, Human
aggaagcuggcagggagc

SEQ ID NO: 114511 - RNA, 20 nt, Human
aggcccagggcgucguccga

SEQ ID NO: 114512 - RNA, 21 nt, Human
aggccgggcagccugcggagg

SEQ ID NO: 114513 - RNA, 18 nt, Human
agggacacgguggccacc

SEQ ID NO: 114514 - RNA, 22 nt, Human
agguggagcggguguguggcuc

SEQ ID NO: 114515 - RNA, 20 nt, Human
augucccugugcaccagcuu

SEQ ID NO: 114516 - RNA, 18 nt, Human
caaugaacagcuccaucc

SEQ ID NO: 114517 - RNA, 20 nt, Human
caccuguggcccugaagucc

SEQ ID NO: 114518 - RNA, 26 nt, Human
caccuguggcccugaaguccuggucc

SEQ ID NO: 114519 - RNA, 18 nt, Human
cacgguggcaccuuuggg

SEQ ID NO: 114520 - RNA, 23 nt, Human
cagcacggccaccagcugggagu

SEQ ID NO: 114521 - RNA, 23 nt, Human
cagccugucgggggcagcccugg

SEQ ID NO: 114522 - RNA, 22 nt, Human
cagcgcggucucgggguccccc

SEQ ID NO: 114523 - RNA, 23 nt, Human
cagcgcggucucgggguccccca

SEQ ID NO: 114524 - RNA, 23 nt, Human
cagcggugcuggccgugugggac

SEQ ID NO: 114525 - RNA, 22 nt, Human
caggagccuugggauggcugca

SEQ ID NO: 114526 - RNA, 20 nt, Human
caggaggcgugggggcagug

SEQ ID NO: 114527 - RNA, 19 nt, Human
cagggagggcccagcccgg

SEQ ID NO: 114528 - RNA, 20 nt, Human
ccacggaccccgagaaaacc

SEQ ID NO: 114529 - RNA, 23 nt, Human
ccacggugcaucugcaagggagc

SEQ ID NO: 114530 - RNA, 19 nt, Human
ccagcaugggaagaggcug

SEQ ID NO: 114531 - RNA, 19 nt, Human
ccagcugggaguaggcggc

SEQ ID NO: 114532 - RNA, 22 nt, Human
ccccuggaaggacuguagcccc

SEQ ID NO: 114533 - RNA, 26 nt, Human
cccugaaguccuggucccgaggaggc

SEQ ID NO: 114534 - RNA, 20 nt, Human
cccugggaagcuaguguggc

SEQ ID NO: 114535 - RNA, 22 nt, Human
ccgcucccgacggcccgaggcg

SEQ ID NO: 114536 - RNA, 18 nt, Human
ccugcggagggccugggg

SEQ ID NO: 114537 - RNA, 25 nt, Human
ccugcggugggcgucggccuagagc

SEQ ID NO: 114538 - RNA, 22 nt, Human
cgcucccgacggcccgaggcgc

SEQ ID NO: 114539 - RNA, 19 nt, Human
cugcagggggagggaggcc

SEQ ID NO: 114540 - RNA, 24 nt, Human
cuggccgugugggacccgggcccg

SEQ ID NO: 114541 - RNA, 21 nt, Human
cuuggcagcaccuguggcccu

SEQ ID NO: 114542 - RNA, 20 nt, Human
gaagacggaggagagacugg

SEQ ID NO: 114543 - RNA, 23 nt, Human
gagagccagccugucgggggcag

SEQ ID NO: 114544 - RNA, 20 nt, Human
gagcagcggugcuggccgug

SEQ ID NO: 114545 - RNA, 19 nt, Human
gaggagagacuggaagaug

SEQ ID NO: 114546 - RNA, 19 nt, Human
gaggucauucuggacuugg

SEQ ID NO: 114547 - RNA, 20 nt, Human
gcacggccaccagcugggag

SEQ ID NO: 114548 - RNA, 19 nt, Human
gcccugaaguccugguccc

SEQ ID NO: 114549 - RNA, 20 nt, Human
gcccugaaguccuggucccu

SEQ ID NO: 114550 - RNA, 19 nt, Human
gcccugggaagcuagugug

SEQ ID NO: 114551 - RNA, 18 nt, Human
gccgugugggacccgggc

SEQ ID NO: 114552 - RNA, 22 nt, Human
gccuggggagaccuggggcugg

SEQ ID NO: 114553 - RNA, 20 nt, Human
gcggagggccuggggagacc

SEQ ID NO: 114554 - RNA, 21 nt, Human
gcucccgacggcccgaggcgc

SEQ ID NO: 114555 - RNA, 19 nt, Human
gcugggcgggugcccgggc

SEQ ID NO: 114556 - RNA, 23 nt, Human
gcuuagcaccauggacggggugg

SEQ ID NO: 114557 - RNA, 20 nt, Human
ggaagguggcguccggcccc

SEQ ID NO: 114558 - RNA, 23 nt, Human
ggagaccuggggcugggcggggg

SEQ ID NO: 114559 - RNA, 20 nt, Human
ggagaggugcaggcccaggg

SEQ ID NO: 114560 - RNA, 18 nt, Human
ggagcggguguguggcuc

SEQ ID NO: 114561 - RNA, 21 nt, Human
ggccagguaggucaggagccu

SEQ ID NO: 114562 - RNA, 22 nt, Human
ggcgucguccgagugagcagcg

SEQ ID NO: 114563 - RNA, 20 nt, Human
ggcugggcgggugcccgggc

SEQ ID NO: 114564 - RNA, 21 nt, Human
gggaagguggcguccggcccc

SEQ ID NO: 114565 - RNA, 18 nt, Human
gggaaugguccuggggaa

SEQ ID NO: 114566 - RNA, 22 nt, Human
gggcccagcccggcugggcggg

SEQ ID NO: 114567 - RNA, 24 nt, Human
gggcgggggccggggcuacgggga

SEQ ID NO: 114568 - RNA, 20 nt, Human
gggcgucggccuagagcucc

SEQ ID NO: 114569 - RNA, 20 nt, Human
gggcgucggccuagagcucc

SEQ ID NO: 114570 - RNA, 21 nt, Human
gggcgucggccuagagcuccu

SEQ ID NO: 114571 - RNA, 21 nt, Human
ggggcugggcgggggccgggg

SEQ ID NO: 114572 - RNA, 20 nt, Human
gggggagggaggccgggcag

SEQ ID NO: 114573 - RNA, 22 nt, Human
ggucaggagccuugggauggcu

SEQ ID NO: 114574 - RNA, 21 nt, Human
ggugggccuuaaauucaauga

SEQ ID NO: 114575 - RNA, 20 nt, Human
guccagagacgacuguaagg

SEQ ID NO: 114576 - RNA, 19 nt, Human
gucccgaggaggcuccgcu

SEQ ID NO: 114577 - RNA, 18 nt, Human
guccgagugagcagcggu

SEQ ID NO: 114578 - RNA, 21 nt, Human
gugggggcagugagcacaggg

SEQ ID NO: 114579 - RNA, 22 nt, Human
uaaagagagcggccacuggaag

SEQ ID NO: 114580 - RNA, 18 nt, Human
uagcaccauggacggggu

SEQ ID NO: 114581 - RNA, 22 nt, Human
uaggagacccgcacgguggcac

SEQ ID NO: 114582 - RNA, 24 nt, Human
uaggucaggagccuugggauggcu

SEQ ID NO: 114583 - RNA, 20 nt, Human
ucagcgaggccagagugaag

SEQ ID NO: 114584 - RNA, 21 nt, Human
uccagagcucaggggccaggu

SEQ ID NO: 114585 - RNA, 23 nt, Human
uccgcucccgacggcccgaggcg

SEQ ID NO: 114586 - RNA, 20 nt, Human
uccuggucccgaggaggcuc

SEQ ID NO: 114587 - RNA, 20 nt, Human
ugaacagcuccauccagucc

SEQ ID NO: 114588 - RNA, 21 nt, Human
ugaagagcggcauuugggcug

SEQ ID NO: 114589 - RNA, 21 nt, Human
ugcagggggagggaggccggg

SEQ ID NO: 114590 - RNA, 19 nt, Human
ugcggaggaaggugaccgg

SEQ ID NO: 114591 - RNA, 18 nt, Human
uggcugcagggggaggga

SEQ ID NO: 114592 - RNA, 22 nt, Human
uggcugcagggggagggaggcc

SEQ ID NO: 114593 - RNA, 23 nt, Human
ugggaagaggcugggagcugccc

SEQ ID NO: 114594 - RNA, 19 nt, Human
ugggaagcuaguguggcag

SEQ ID NO: 114595 - RNA, 20 nt, Human
ugggaggagcuggagaggug

SEQ ID NO: 114596 - RNA, 27 nt, Human
ugggaggagcuggagaggugcaggccc

SEQ ID NO: 114597 - RNA, 21 nt, Human
uggggcugggcgggggccggg

SEQ ID NO: 114598 - RNA, 19 nt, Human
uguggcagggagggcccag

SEQ ID NO: 114599 - RNA, 28 nt, Human
aaaaaaaaaaaacacacaacauugagag

SEQ ID NO: 114600 - RNA, 30 nt, Human
aaaaaaaaaaacacacaacauugagaggag

SEQ ID NO: 114601 - RNA, 28 nt, Human
aaaaaaaaaacacacaacauugagagga

SEQ ID NO: 114602 - RNA, 21 nt, Human
aaaaaugaaccaagcaaaagu

SEQ ID NO: 114603 - RNA, 18 nt, Human
aaagggaaaaaaaaugaa

SEQ ID NO: 114604 - RNA, 18 nt, Human
aagaaaauuagcuugaaa

SEQ ID NO: 114605 - RNA, 21 nt, Human
acacaaaaaaaaaaaacacac

SEQ ID NO: 114606 - RNA, 20 nt, Human
acagagagcgaggguccaca

SEQ ID NO: 114607 - RNA, 18 nt, Human
agcacacaaaaaaaaaaa

SEQ ID NO: 114608 - RNA, 24 nt, Human
aggagaacugaacggccuuuggug

SEQ ID NO: 114609 - RNA, 19 nt, Human
aggaugcauacuuuuccca

SEQ ID NO: 114610 - RNA, 18 nt, Human
aggcgugugucccugggc

SEQ ID NO: 114611 - RNA, 22 nt, Human
aguucgaguguaaaucaaagca

SEQ ID NO: 114612 - RNA, 19 nt, Human
auaaacaccagcaguggcu

SEQ ID NO: 114613 - RNA, 21 nt, Human
auaacaugaaacuccagaggg

SEQ ID NO: 114614 - RNA, 21 nt, Human
auaggaugcauacuuuuccca

SEQ ID NO: 114615 - RNA, 21 nt, Human
caaaaaaaaaaaacacacaac

SEQ ID NO: 114616 - RNA, 24 nt, Human
caaauaugaaccccugagcaaacc

SEQ ID NO: 114617 - RNA, 27 nt, Human
caacauugagaggaaugccaaaaauau

SEQ ID NO: 114618 - RNA, 22 nt, Human
caagggaaucuacacccggagc

SEQ ID NO: 114619 - RNA, 23 nt, Human
caccagcaguggcuaacuguuac

SEQ ID NO: 114620 - RNA, 20 nt, Human
cacccggagcuucuacagag

SEQ ID NO: 114621 - RNA, 25 nt, Human
caggagaacugaacggccuuuggug

SEQ ID NO: 114622 - RNA, 24 nt, Human
ccaccaaaaaaguggagacucaga

SEQ ID NO: 114623 - RNA, 21 nt, Human
ccagcacacaaaaaaaaaaaa

SEQ ID NO: 114624 - RNA, 23 nt, Human
cccacucacugcgucucuuuuuc

SEQ ID NO: 114625 - RNA, 19 nt, Human
ccccucccuccagcacaca

SEQ ID NO: 114626 - RNA, 19 nt, Human
cuggagcccaggagaacug

SEQ ID NO: 114627 - RNA, 18 nt, Human
cugggaaauugggggcag

SEQ ID NO: 114628 - RNA, 23 nt, Human
cuucccaucuaaagucaugcuua

SEQ ID NO: 114629 - RNA, 26 nt, Human
cuuuucccacucacugcgucucuuuu

SEQ ID NO: 114630 - RNA, 22 nt, Human
cuuuuugcagccuuucuccacc

SEQ ID NO: 114631 - RNA, 22 nt, Human
gagacagagagcgaggguccac

SEQ ID NO: 114632 - RNA, 21 nt, Human
gcaagggaaucuacacccgga

SEQ ID NO: 114633 - RNA, 23 nt, Human
gcaguggcuaacuguuacacaac

SEQ ID NO: 114634 - RNA, 18 nt, Human
gcggaggaaaacucuugc

SEQ ID NO: 114635 - RNA, 19 nt, Human
gcuggagcccaggagaacu

SEQ ID NO: 114636 - RNA, 20 nt, Human
ggaauguucacauaaacacc

SEQ ID NO: 114637 - RNA, 22 nt, Human
ucaagagguauaugauguuggc

SEQ ID NO: 114638 - RNA, 22 nt, Human
uccacagacacauuagcaccau

SEQ ID NO: 114639 - RNA, 19 nt, Human
ucugggaaauugggggcag

SEQ ID NO: 114640 - RNA, 20 nt, Human
ugagaggaaugccaaaaaua

SEQ ID NO: 114641 - RNA, 24 nt, Human
ugauacagugcaagggaaucuaca

SEQ ID NO: 114642 - RNA, 19 nt, Human
ugcuggagacagagagcga

SEQ ID NO: 114643 - RNA, 18 nt, Human
ugggggcagggaaugaaa

SEQ ID NO: 114644 - RNA, 25 nt, Human
ugggggcagggaaugaaaaaguugg

SEQ ID NO: 114645 - RNA, 24 nt, Human
uucagaaaaagaaaauuagcuuga

SEQ ID NO: 114646 - RNA, 23 nt, Human
uucucuauuacaacuuuuuuaaa

SEQ ID NO: 114647 - RNA, 23 nt, Human
uugcagccuuucuccaccaaaaa

SEQ ID NO: 114648 - RNA, 24 nt, Human
uuucccacucacugcgucucuuuu

SEQ ID NO: 114649 - RNA, 19 nt, Human
aaggggagggacagugggg

SEQ ID NO: 114650 - RNA, 21 nt, Human
acugaaauaacggacgugcac

SEQ ID NO: 114651 - RNA, 21 nt, Human
aggcaguaaaagccgucagcu

SEQ ID NO: 114652 - RNA, 21 nt, Human
augccccccagaaucagcacc

SEQ ID NO: 114653 - RNA, 20 nt, Human
cacccccccacagugaguca

SEQ ID NO: 114654 - RNA, 24 nt, Human
cacccccccacagugagucaucug

SEQ ID NO: 114655 - RNA, 21 nt, Human
cacugcccacagccacccccc

SEQ ID NO: 114656 - RNA, 21 nt, Human
cagcaccaugucaucacaggc

SEQ ID NO: 114657 - RNA, 19 nt, Human
cagcagcuuuaaugccccc

SEQ ID NO: 114658 - RNA, 24 nt, Human
caggggaugcugaaucucagcuca

SEQ ID NO: 114659 - RNA, 22 nt, Human
cagugggguucugcugagaccc

SEQ ID NO: 114660 - RNA, 20 nt, Human
ccacagccacccccccacag

SEQ ID NO: 114661 - RNA, 18 nt, Human
cccacagccaccccccca

SEQ ID NO: 114662 - RNA, 20 nt, Human
cccacagccacccccccaca

SEQ ID NO: 114663 - RNA, 19 nt, Human
ccccagaaucagcaccaug

SEQ ID NO: 114664 - RNA, 23 nt, Human
ccccccagaaucagcaccauguc

SEQ ID NO: 114665 - RNA, 21 nt, Human
ccccugcgguggccuuggcag

SEQ ID NO: 114666 - RNA, 18 nt, Human
ccucugucccuugcuccc

SEQ ID NO: 114667 - RNA, 21 nt, Human
ccuuggcagguccgagcccag

SEQ ID NO: 114668 - RNA, 22 nt, Human
cgugcacucgcacgcucacgug

SEQ ID NO: 114669 - RNA, 19 nt, Human
cucacugcccacagccacc

SEQ ID NO: 114670 - RNA, 21 nt, Human
cugcgguggccuuggcagguc

SEQ ID NO: 114671 - RNA, 19 nt, Human
cugcugagaccccgacucc

SEQ ID NO: 114672 - RNA, 20 nt, Human
cuugggucaaggggcggguc

SEQ ID NO: 114673 - RNA, 18 nt, Human
gacccccgccucuguccc

SEQ ID NO: 114674 - RNA, 18 nt, Human
gagucaucugccagggug

SEQ ID NO: 114675 - RNA, 23 nt, Human
gcacacaagccucuagcaccaag

SEQ ID NO: 114676 - RNA, 22 nt, Human
gcuaggacccccgccucugucc

SEQ ID NO: 114677 - RNA, 18 nt, Human
ggagggacagugggguuc

SEQ ID NO: 114678 - RNA, 19 nt, Human
gguccgagcccagcgcccc

SEQ ID NO: 114679 - RNA, 24 nt, Human
gugcacucgcacgcucacgugcac

SEQ ID NO: 114680 - RNA, 19 nt, Human
uaaaacagcagcuuuaaug

SEQ ID NO: 114681 - RNA, 21 nt, Human
uccgcucacugcccacagcca

SEQ ID NO: 114682 - RNA, 23 nt, Human
ucugcugagaccccgacuccucc

SEQ ID NO: 114683 - RNA, 20 nt, Human
ucugucccuugcuccccccu

SEQ ID NO: 114684 - RNA, 23 nt, Human
ugccuuuuaaaacagcagcuuua

SEQ ID NO: 114685 - RNA, 18 nt, Human
uuaaaacagcagcuuuaa

SEQ ID NO: 114686 - RNA, 26 nt, Human
uuaaaacagcagcuuuaaugcccccc

SEQ ID NO: 114687 - RNA, 22 nt, Human
agaggcucgcuggcucccacgg

SEQ ID NO: 114688 - RNA, 22 nt, Human
agggugaguuggugaacgugug

SEQ ID NO: 114689 - RNA, 18 nt, Human
caggacugcugaaucaaa

SEQ ID NO: 114690 - RNA, 24 nt, Human
ccaauguccuugcuggugccuucc

SEQ ID NO: 114691 - RNA, 23 nt, Human
ccuugcuggugccuuccucccgg

SEQ ID NO: 114692 - RNA, 23 nt, Human
cugguuucugucucuucagcaga

SEQ ID NO: 114693 - RNA, 19 nt, Human
gucucuucagcagaugcug

SEQ ID NO: 114694 - RNA, 18 nt, Human
guugucuuuuguucuuga

SEQ ID NO: 114695 - RNA, 22 nt, Human
ucccuugagcacguaagaucag

SEQ ID NO: 114696 - RNA, 18 nt, Human
uccuugcuggugccuucc

SEQ ID NO: 114697 - RNA, 19 nt, Human
uccuugcuggugccuuccu

SEQ ID NO: 114698 - RNA, 21 nt, Human
ucucuucagcagaugcugcuc

SEQ ID NO: 114699 - RNA, 20 nt, Human
uguccuugcuggugccuucc

SEQ ID NO: 114700 - RNA, 24 nt, Human
uuuuuuucuuuguuuuuuguuuuu

SEQ ID NO: 114701 - RNA, 21 nt, Human
uuuuuuuuuuucuuuguuuuu

SEQ ID NO: 114702 - RNA, 21 nt, Human
agccaugcagcaguaagccuu

SEQ ID NO: 114703 - RNA, 23 nt, Human
caacagucccuaugaagaagggg

SEQ ID NO: 114704 - RNA, 27 nt, Human
cacacuaaagcucaagauccugggaac

SEQ ID NO: 114705 - RNA, 20 nt, Human
cagaaaaagcacccccggga

SEQ ID NO: 114706 - RNA, 23 nt, Human
cagaaaaagcacccccgggagua

SEQ ID NO: 114707 - RNA, 19 nt, Human
cauagguauagcacacuaa

SEQ ID NO: 114708 - RNA, 21 nt, Human
caucuuugccccagcuuugga

SEQ ID NO: 114709 - RNA, 18 nt, Human
caugcagacagccaugcg

SEQ ID NO: 114710 - RNA, 19 nt, Human
ccaggcuccuucaccaggc

SEQ ID NO: 114711 - RNA, 19 nt, Human
cccaggcuccuucaccagg

SEQ ID NO: 114712 - RNA, 21 nt, Human
cccuccugcccccggugaggg

SEQ ID NO: 114713 - RNA, 23 nt, Human
ccgccgcccgccgcuaaucccuc

SEQ ID NO: 114714 - RNA, 21 nt, Human
ccucuaggcuuccagacccgc

SEQ ID NO: 114715 - RNA, 22 nt, Human
ccugguuccccucuaggcuucc

SEQ ID NO: 114716 - RNA, 20 nt, Human
cucaagauccugggaacagg

SEQ ID NO: 114717 - RNA, 18 nt, Human
cucacccaggcuccuuca

SEQ ID NO: 114718 - RNA, 24 nt, Human
cucacgaccccuucacuguuaccc

SEQ ID NO: 114719 - RNA, 21 nt, Human
cuccaagggaaaggaaagaga

SEQ ID NO: 114720 - RNA, 24 nt, Human
cuuggcccggcucugcagccuggu

SEQ ID NO: 114721 - RNA, 24 nt, Human
gagucacuguccccucacgacccc

SEQ ID NO: 114722 - RNA, 22 nt, Human
gccuuggucccuccugcccccg

SEQ ID NO: 114723 - RNA, 20 nt, Human
ggaugguguuucucacccag

SEQ ID NO: 114724 - RNA, 29 nt, Human
gguguuugguuuucuuuuuuuuuuuuuuu

SEQ ID NO: 114725 - RNA, 22 nt, Human
guucugggcccagccuuggucc

SEQ ID NO: 114726 - RNA, 19 nt, Human
guuugguuuucuuuuuuuu

SEQ ID NO: 114727 - RNA, 23 nt, Human
uaagacacauagguauagcacac

SEQ ID NO: 114728 - RNA, 22 nt, Human
uaaucccuuggcccggcucugc

SEQ ID NO: 114729 - RNA, 21 nt, Human
uacccuaggacuauguguucu

SEQ ID NO: 114730 - RNA, 18 nt, Human
uagcauagguggcacuuc

SEQ ID NO: 114731 - RNA, 22 nt, Human
uccccucacgaccccuucacug

SEQ ID NO: 114732 - RNA, 21 nt, Human
ucccugcagaaaaagcacccc

SEQ ID NO: 114733 - RNA, 24 nt, Human
ugaagguaauacauuguaaucaug

SEQ ID NO: 114734 - RNA, 19 nt, Human
ugacucugcugucuucccu

SEQ ID NO: 114735 - RNA, 22 nt, Human
ugcagccugguuccccucuagg

SEQ ID NO: 114736 - RNA, 21 nt, Human
ugccccagcuuuggauggugu

SEQ ID NO: 114737 - RNA, 23 nt, Human
ugguuuucuuuuuuuuuuuuuuu

SEQ ID NO: 114738 - RNA, 18 nt, Human
ugucuucccuccaaggga

SEQ ID NO: 114739 - RNA, 19 nt, Human
uucuuuuuuuuuuuuuuua

SEQ ID NO: 114740 - RNA, 23 nt, Human
uucuuuuuuuuuuuuuuuaacug

SEQ ID NO: 114741 - RNA, 18 nt, Human
acagccgaaugaugcucg

SEQ ID NO: 114742 - RNA, 23 nt, Human
agauggccaguggaggaaggugc

SEQ ID NO: 114743 - RNA, 24 nt, Human
agcugggaggcagggaaggaagua

SEQ ID NO: 114744 - RNA, 21 nt, Human
agcugggcagggcccgggccu

SEQ ID NO: 114745 - RNA, 18 nt, Human
agggaaggaaguaguggg

SEQ ID NO: 114746 - RNA, 25 nt, Human
agggaaggaaguaguggggcugggg

SEQ ID NO: 114747 - RNA, 20 nt, Human
agggggacgggugcgugucc

SEQ ID NO: 114748 - RNA, 18 nt, Human
augauguuuaaauacuga

SEQ ID NO: 114749 - RNA, 24 nt, Human
cacccaucagugcucuaccucccc

SEQ ID NO: 114750 - RNA, 33 nt, Human
cacccaucagugcucuaccuccccuucccccuc

SEQ ID NO: 114751 - RNA, 19 nt, Human
cacgcaccgacggcagagu

SEQ ID NO: 114752 - RNA, 20 nt, Human
cacugacccaaggacaagau

SEQ ID NO: 114753 - RNA, 19 nt, Human
cccgaggugcccauguccc

SEQ ID NO: 114754 - RNA, 24 nt, Human
cccgaggugcccaugucccacuga

SEQ ID NO: 114755 - RNA, 20 nt, Human
ccgacggcagagucucccgg

SEQ ID NO: 114756 - RNA, 19 nt, Human
ccucaagcugaggggugga

SEQ ID NO: 114757 - RNA, 21 nt, Human
ccuccaggcucugucugggcc

SEQ ID NO: 114758 - RNA, 21 nt, Human
ccuuuuccuuaggacuccuga

SEQ ID NO: 114759 - RNA, 26 nt, Human
cgcccuauuccuucagcgcuucgacu

SEQ ID NO: 114760 - RNA, 23 nt, Human
cgcgcacgcaccgacggcagagu

SEQ ID NO: 114761 - RNA, 19 nt, Human
cucugucugggccugaugc

SEQ ID NO: 114762 - RNA, 19 nt, Human
gaaggaaguaguggggcug

SEQ ID NO: 114763 - RNA, 19 nt, Human
gaagguccugggggagaug

SEQ ID NO: 114764 - RNA, 19 nt, Human
gaagguccugggggagaug

SEQ ID NO: 114765 - RNA, 25 nt, Human
gaccugguccuucccgccaggaugc

SEQ ID NO: 114766 - RNA, 20 nt, Human
gaguuaugcgagaaagagaa

SEQ ID NO: 114767 - RNA, 25 nt, Human
gcagggcccgggccucccgaggugg

SEQ ID NO: 114768 - RNA, 25 nt, Human
gccucaggggagucaccccagcagc

SEQ ID NO: 114769 - RNA, 22 nt, Human
gcgcacgcaccgacggcagagu

SEQ ID NO: 114770 - RNA, 20 nt, Human
gcucuaccuccccuuccccc

SEQ ID NO: 114771 - RNA, 22 nt, Human
gcuuuuauuuacagaaaggccu

SEQ ID NO: 114772 - RNA, 21 nt, Human
ggaaggaaguaguggggcugg

SEQ ID NO: 114773 - RNA, 22 nt, Human
ggaaggaaguaguggggcuggc

SEQ ID NO: 114774 - RNA, 19 nt, Human
ggacuccugagucccagac

SEQ ID NO: 114775 - RNA, 19 nt, Human
gggggagaugguuuccugg

SEQ ID NO: 114776 - RNA, 23 nt, Human
ggguggaucggggagaaaggggu

SEQ ID NO: 114777 - RNA, 22 nt, Human
ucacccaucagugcucuaccuc

SEQ ID NO: 114778 - RNA, 22 nt, Human
ucagugcucuaccuccccuucc

SEQ ID NO: 114779 - RNA, 18 nt, Human
uccgcgcacgcaccgacg

SEQ ID NO: 114780 - RNA, 23 nt, Human
uccugagucccagacagaagguc

SEQ ID NO: 114781 - RNA, 23 nt, Human
ugacccaaggacaagauggccag

SEQ ID NO: 114782 - RNA, 19 nt, Human
ugagaugggaucaggaacu

SEQ ID NO: 114783 - RNA, 21 nt, Human
ugagucccagacagaaggucc

SEQ ID NO: 114784 - RNA, 24 nt, Human
ugccuccaggcucugucugggccu

SEQ ID NO: 114785 - RNA, 21 nt, Human
ugcucuaccuccccuuccccc

SEQ ID NO: 114786 - RNA, 18 nt, Human
uggaacuguagcugggcc

SEQ ID NO: 114787 - RNA, 20 nt, Human
uggaaggaaagccgcccuau

SEQ ID NO: 114788 - RNA, 22 nt, Human
ugggaggcagggaaggaaguag

SEQ ID NO: 114789 - RNA, 23 nt, Human
uggggcuggcuuaaggguauagc

SEQ ID NO: 114790 - RNA, 25 nt, Human
uggguggaucggggagaaaggggug

SEQ ID NO: 114791 - RNA, 19 nt, Human
ugguaacagccgaaugaug

SEQ ID NO: 114792 - RNA, 20 nt, Human
uguagcugggcagggcccgg

SEQ ID NO: 114793 - RNA, 23 nt, Human
uucacccaucagugcucuaccuc

SEQ ID NO: 114794 - RNA, 23 nt, Human
caggcgacagcccgaugagggug

SEQ ID NO: 114795 - RNA, 23 nt, Human
ccccgcuccuucaugaccgucca

SEQ ID NO: 114796 - RNA, 24 nt, Human
cccgccugccacacccccgcuccu

SEQ ID NO: 114797 - RNA, 22 nt, Human
ccucuccuggacgucacccgcc

SEQ ID NO: 114798 - RNA, 22 nt, Human
cuucaugaccguccacugugcu

SEQ ID NO: 114799 - RNA, 18 nt, Human
gaugagggugcucgcugg

SEQ ID NO: 114800 - RNA, 23 nt, Human
gccacacccccgcuccuucauga

SEQ ID NO: 114801 - RNA, 19 nt, Human
gcucccucuccuggacguc

SEQ ID NO: 114802 - RNA, 24 nt, Human
ggcugagcggagucugagcugcgg

SEQ ID NO: 114803 - RNA, 18 nt, Human
uacacacccuaccuucuc

SEQ ID NO: 114804 - RNA, 18 nt, Human
ucacccgccugccacacc

SEQ ID NO: 114805 - RNA, 23 nt, Human
ucucaaaugcugggcuuacaggu

SEQ ID NO: 114806 - RNA, 22 nt, Human
ugcuauguaaacaaguuacuga

SEQ ID NO: 114807 - RNA, 21 nt, Human
uggcaaggcccgcgcguccag

SEQ ID NO: 114808 - RNA, 24 nt, Human
uggcaaggcccgcgcguccagucg

SEQ ID NO: 114809 - RNA, 21 nt, Human
uuguacacaaccuuuuauaua

SEQ ID NO: 114810 - RNA, 20 nt, Human
uuuauugggaugagaucaua

SEQ ID NO: 114811 - RNA, 21 nt, Human
aaaacaacaucuccccaggcc

SEQ ID NO: 114812 - RNA, 21 nt, Human
aaaacaacaucuccccaggcc

SEQ ID NO: 114813 - RNA, 21 nt, Human
aaacaacaucuccccaggccu

SEQ ID NO: 114814 - RNA, 21 nt, Human
aaacaacaucuccccaggccu

SEQ ID NO: 114815 - RNA, 22 nt, Human
aaacccaagggugucccuccag

SEQ ID NO: 114816 - RNA, 21 nt, Human
aaacccaagggugucccuccg

SEQ ID NO: 114817 - RNA, 21 nt, Human
aaagacaucuuccuggaggcc

SEQ ID NO: 114818 - RNA, 20 nt, Human
aaauagcuucguacaaaaac

SEQ ID NO: 114819 - RNA, 20 nt, Human
aaauagcuucguacaaaaac

SEQ ID NO: 114820 - RNA, 18 nt, Human
aacagagcugcccaugug

SEQ ID NO: 114821 - RNA, 18 nt, Human
aacagccugcccaggugu

SEQ ID NO: 114822 - RNA, 18 nt, Human
aacagccugcccaggugu

SEQ ID NO: 114823 - RNA, 20 nt, Human
aaccacaagagccgccccuu

SEQ ID NO: 114824 - RNA, 20 nt, Human
aaccacaagagccgccccuu

SEQ ID NO: 114825 - RNA, 23 nt, Human
aaggaccaaggagacaccaacag

SEQ ID NO: 114826 - RNA, 23 nt, Human
aaggaccaaggagacaccaacag

SEQ ID NO: 114827 - RNA, 22 nt, Human
aagugcagagagagccaagagg

SEQ ID NO: 114828 - RNA, 22 nt, Human
aagugcagagagagccaagagg

SEQ ID NO: 114829 - RNA, 19 nt, Human
acaacaucuccccaggccu

SEQ ID NO: 114830 - RNA, 21 nt, Human
acaagagccgccccuuuggga

SEQ ID NO: 114831 - RNA, 21 nt, Human
acaagagccgccccuuuggga

SEQ ID NO: 114832 - RNA, 18 nt, Human
acaguggagaagcugcug

SEQ ID NO: 114833 - RNA, 18 nt, Human
acaguggagaagcugcug

SEQ ID NO: 114834 - RNA, 20 nt, Human
accaggccccaagcuccagc

SEQ ID NO: 114835 - RNA, 20 nt, Human
accaggccccaagcuccagc

SEQ ID NO: 114836 - RNA, 19 nt, Human
agaauaaaacuaagcccua

SEQ ID NO: 114837 - RNA, 19 nt, Human
agacaccaacagccugccc

SEQ ID NO: 114838 - RNA, 19 nt, Human
agacaccaacagccugccc

SEQ ID NO: 114839 - RNA, 22 nt, Human
agacaccaggugaugguccacc

SEQ ID NO: 114840 - RNA, 22 nt, Human
agacaccaggugaugguccacc

SEQ ID NO: 114841 - RNA, 18 nt, Human
agagccaagaggucaaga

SEQ ID NO: 114842 - RNA, 18 nt, Human
agagccaagaggucaaga

SEQ ID NO: 114843 - RNA, 18 nt, Human
agagcucuggccaggaac

SEQ ID NO: 114844 - RNA, 21 nt, Human
agcuccagccugcugaguccc

SEQ ID NO: 114845 - RNA, 21 nt, Human
agcuccagccugcugaguccc

SEQ ID NO: 114846 - RNA, 20 nt, Human
agcucuggccaggaacgcuc

SEQ ID NO: 114847 - RNA, 20 nt, Human
agcucuggccaggaacgcuc

SEQ ID NO: 114848 - RNA, 22 nt, Human
aggaauuuguccuuguuuuugu

SEQ ID NO: 114849 - RNA, 22 nt, Human
aggaauuuguccuuguuuuugu

SEQ ID NO: 114850 - RNA, 22 nt, Human
aggaggacaaggcuaugcaaua

SEQ ID NO: 114851 - RNA, 22 nt, Human
aggaggcugcugcggagccuug

SEQ ID NO: 114852 - RNA, 20 nt, Human
aggcagcucacagacaugca

SEQ ID NO: 114853 - RNA, 20 nt, Human
aggcagcucacagacaugca

SEQ ID NO: 114854 - RNA, 18 nt, Human
agggugucccuccagcug

SEQ ID NO: 114855 - RNA, 18 nt, Human
agggugucccuccagcug

SEQ ID NO: 114856 - RNA, 21 nt, Human
aggugaugguccaccaggccc

SEQ ID NO: 114857 - RNA, 20 nt, Human
aguagcaggaauuuguccuu

SEQ ID NO: 114858 - RNA, 23 nt, Human
auccucuuuccccuuuggguccc

SEQ ID NO: 114859 - RNA, 21 nt, Human
augaaaggcagcucacagaca

SEQ ID NO: 114860 - RNA, 21 nt, Human
augaaaggcagcucacagaca

SEQ ID NO: 114861 - RNA, 23 nt, Human
auggugccagagauuuugaaacc

SEQ ID NO: 114862 - RNA, 23 nt, Human
auggugccagagauuuugaaacc

SEQ ID NO: 114863 - RNA, 21 nt, Human
augucaccugugggagaccgg

SEQ ID NO: 114864 - RNA, 21 nt, Human
augucaccugugggagaccgg

SEQ ID NO: 114865 - RNA, 18 nt, Human
augucuuuccagaauaaa

SEQ ID NO: 114866 - RNA, 18 nt, Human
augucuuuccagaauaaa

SEQ ID NO: 114867 - RNA, 22 nt, Human
caaagagguagagcucuggcca

SEQ ID NO: 114868 - RNA, 22 nt, Human
caaagagguagagcucuggcca

SEQ ID NO: 114869 - RNA, 21 nt, Human
caacagccugcccaggugugg

SEQ ID NO: 114870 - RNA, 21 nt, Human
caacagccugcccaggugugg

SEQ ID NO: 114871 - RNA, 18 nt, Human
caagagccgccccuuugg

SEQ ID NO: 114872 - RNA, 18 nt, Human
caagagccgccccuuugg

SEQ ID NO: 114873 - RNA, 21 nt, Human
caagauggugccagagauuuu

SEQ ID NO: 114874 - RNA, 21 nt, Human
caagauggugccagagauuuu

SEQ ID NO: 114875 - RNA, 20 nt, Human
caaguccacggccuggguca

SEQ ID NO: 114876 - RNA, 20 nt, Human
caaguccacggccuggguca

SEQ ID NO: 114877 - RNA, 22 nt, Human
cacaaaaaucacaggaacucgc

SEQ ID NO: 114878 - RNA, 21 nt, Human
cacacuccuccccaggcugca

SEQ ID NO: 114879 - RNA, 22 nt, Human
cacacuccuccccaggcugcag

SEQ ID NO: 114880 - RNA, 23 nt, Human
cacaggguagaaaggggucagcu

SEQ ID NO: 114881 - RNA, 19 nt, Human
cacaguccuccacacccuc

SEQ ID NO: 114882 - RNA, 19 nt, Human
caccaacagccugcccagg

SEQ ID NO: 114883 - RNA, 18 nt, Human
caccugugggagaccggg

SEQ ID NO: 114884 - RNA, 18 nt, Human
caccugugggagaccggg

SEQ ID NO: 114885 - RNA, 28 nt, Human
cacggcccucaggugaaguagcggcagg

SEQ ID NO: 114886 - RNA, 22 nt, Human
cacugcuguuugcgugcgcgug

SEQ ID NO: 114887 - RNA, 21 nt, Human
cacuucccugcuuugugguuc

SEQ ID NO: 114888 - RNA, 21 nt, Human
cacuucccugcuuugugguuc

SEQ ID NO: 114889 - RNA, 22 nt, Human
cagaaaccccagugugauggug

SEQ ID NO: 114890 - RNA, 22 nt, Human
cagaaaccccagugugauggug

SEQ ID NO: 114891 - RNA, 22 nt, Human
cagaauaaaacuaagcccuacu

SEQ ID NO: 114892 - RNA, 22 nt, Human
cagaauaaaacuaagcccuacu

SEQ ID NO: 114893 - RNA, 22 nt, Human
cagcaugaaaacaacaucuccc

SEQ ID NO: 114894 - RNA, 22 nt, Human
cagcaugaaaacaacaucuccc

SEQ ID NO: 114895 - RNA, 18 nt, Human
cagcugguaaaaauuggg

SEQ ID NO: 114896 - RNA, 23 nt, Human
caggaggacaaggcuaugcaaua

SEQ ID NO: 114897 - RNA, 20 nt, Human
caggaggcaaagagguagag

SEQ ID NO: 114898 - RNA, 20 nt, Human
caggccccaagcuccagccu

SEQ ID NO: 114899 - RNA, 22 nt, Human
caggcugggcugggcuguggcc

SEQ ID NO: 114900 - RNA, 22 nt, Human
caggcugggcugggcuguggcc

SEQ ID NO: 114901 - RNA, 18 nt, Human
caugucuuaguagcagga

SEQ ID NO: 114902 - RNA, 18 nt, Human
caugucuuaguagcagga

SEQ ID NO: 114903 - RNA, 26 nt, Human
ccaaagagaucaaaacauacuaaaac

SEQ ID NO: 114904 - RNA, 26 nt, Human
ccaaagagaucaaaacauacuaaaac

SEQ ID NO: 114905 - RNA, 23 nt, Human
ccacaagagccgccccuuuggga

SEQ ID NO: 114906 - RNA, 22 nt, Human
ccaccaggccccaagcuccagc

SEQ ID NO: 114907 - RNA, 22 nt, Human
ccaccaggccccaagcuccagc

SEQ ID NO: 114908 - RNA, 21 nt, Human
ccagaauaaaacuaagcccua

SEQ ID NO: 114909 - RNA, 23 nt, Human
ccaggugaugguccaccaggccc

SEQ ID NO: 114910 - RNA, 18 nt, Human
cccacaggugccgugcug

SEQ ID NO: 114911 - RNA, 22 nt, Human
cccucaugccggugaccaucuc

SEQ ID NO: 114912 - RNA, 19 nt, Human
ccgggaaauccucuuuccc

SEQ ID NO: 114913 - RNA, 24 nt, Human
ccuacagacaccaggugauggucc

SEQ ID NO: 114914 - RNA, 24 nt, Human
ccuacagacaccaggugauggucc

SEQ ID NO: 114915 - RNA, 22 nt, Human
ccucaugccggugaccaucucc

SEQ ID NO: 114916 - RNA, 21 nt, Human
ccuccacacccucaugccggu

SEQ ID NO: 114917 - RNA, 21 nt, Human
ccucuuuccccuuuggguccc

SEQ ID NO: 114918 - RNA, 24 nt, Human
ccuguacuccagauuccccaaaga

SEQ ID NO: 114919 - RNA, 24 nt, Human
ccuguacuccagauuccccaaaga

SEQ ID NO: 114920 - RNA, 25 nt, Human
ccuugcuuaucucugcuuuucucuu

SEQ ID NO: 114921 - RNA, 18 nt, Human
cgucaggcugggcugggc

SEQ ID NO: 114922 - RNA, 18 nt, Human
cgucaggcugggcugggc

SEQ ID NO: 114923 - RNA, 24 nt, Human
cgugcgcguguguuugugugugug

SEQ ID NO: 114924 - RNA, 28 nt, Human
cguguguuugugugugugugugugcgug

SEQ ID NO: 114925 - RNA, 19 nt, Human
cuccauaugacccagggag

SEQ ID NO: 114926 - RNA, 19 nt, Human
cucugccuagagagagccc

SEQ ID NO: 114927 - RNA, 19 nt, Human
cucugccuagagagagccc

SEQ ID NO: 114928 - RNA, 18 nt, Human
cucugcuuggggcaagcc

SEQ ID NO: 114929 - RNA, 18 nt, Human
cucugcuuggggcaagcc

SEQ ID NO: 114930 - RNA, 22 nt, Human
cucugcuuggggcaagccuggg

SEQ ID NO: 114931 - RNA, 22 nt, Human
cucugcuuggggcaagccuggg

SEQ ID NO: 114932 - RNA, 19 nt, Human
cucuuccucacugcuguuu

SEQ ID NO: 114933 - RNA, 21 nt, Human
cucuuccucacugcuguuugc

SEQ ID NO: 114934 - RNA, 19 nt, Human
cugcaggucuauguguguc

SEQ ID NO: 114935 - RNA, 19 nt, Human
cugcaggucuauguguguc

SEQ ID NO: 114936 - RNA, 23 nt, Human
cugguaaaaauugggcaauuucu

SEQ ID NO: 114937 - RNA, 23 nt, Human
cugguaaaaauugggcaauuucu

SEQ ID NO: 114938 - RNA, 18 nt, Human
cuggucucugcggaaggc

SEQ ID NO: 114939 - RNA, 20 nt, Human
cuguggggcgcagcccaccu

SEQ ID NO: 114940 - RNA, 23 nt, Human
cuugaaguacagagaucucuggu

SEQ ID NO: 114941 - RNA, 19 nt, Human
cuuggagaugucuuuccag

SEQ ID NO: 114942 - RNA, 19 nt, Human
cuuggagaugucuuuccag

SEQ ID NO: 114943 - RNA, 18 nt, Human
gaaagaaaugccacggga

SEQ ID NO: 114944 - RNA, 18 nt, Human
gaaagaaaugccacggga

SEQ ID NO: 114945 - RNA, 19 nt, Human
gaacagagcugcccaugug

SEQ ID NO: 114946 - RNA, 19 nt, Human
gaacagagcugcccaugug

SEQ ID NO: 114947 - RNA, 21 nt, Human
gacaggaaauggacaugaggg

SEQ ID NO: 114948 - RNA, 24 nt, Human
gacgcugucaggggucagcaggag

SEQ ID NO: 114949 - RNA, 21 nt, Human
gagaucaaaacauacuaaaac

SEQ ID NO: 114950 - RNA, 18 nt, Human
gagguagagcucuggcca

SEQ ID NO: 114951 - RNA, 18 nt, Human
gaggucaagauggugcca

SEQ ID NO: 114952 - RNA, 18 nt, Human
gaggucaagauggugcca

SEQ ID NO: 114953 - RNA, 21 nt, Human
gaugguggaagcagcaugaaa

SEQ ID NO: 114954 - RNA, 21 nt, Human
gaugguggaagcagcaugaaa

SEQ ID NO: 114955 - RNA, 19 nt, Human
gcaaagugcagagagagcc

SEQ ID NO: 114956 - RNA, 19 nt, Human
gcaaagugcagagagagcc

SEQ ID NO: 114957 - RNA, 19 nt, Human
gcagcaugaaaacaacauc

SEQ ID NO: 114958 - RNA, 19 nt, Human
gcagcaugaaaacaacauc

SEQ ID NO: 114959 - RNA, 23 nt, Human
gcagcaugaaaacaacaucuccc

SEQ ID NO: 114960 - RNA, 21 nt, Human
gcaggaggcaaagagguagag

SEQ ID NO: 114961 - RNA, 21 nt, Human
gcaggaggcaaagagguagag

SEQ ID NO: 114962 - RNA, 22 nt, Human
gcagggcguggagucgauguag

SEQ ID NO: 114963 - RNA, 18 nt, Human
gcaggucacacaguccuc

SEQ ID NO: 114964 - RNA, 18 nt, Human
gcaggucacacaguccuc

SEQ ID NO: 114965 - RNA, 22 nt, Human
gcccacuucccugcuuuguggu

SEQ ID NO: 114966 - RNA, 22 nt, Human
gcccacuucccugcuuuguggu

SEQ ID NO: 114967 - RNA, 19 nt, Human
gcgcagcccaccuucuccu

SEQ ID NO: 114968 - RNA, 19 nt, Human
gcgcagcccaccuucuccu

SEQ ID NO: 114969 - RNA, 21 nt, Human
gcugucaggggucagcaggag

SEQ ID NO: 114970 - RNA, 21 nt, Human
gcugucaggggucagcaggag

SEQ ID NO: 114971 - RNA, 18 nt, Human
ggaaauggacaugaggga

SEQ ID NO: 114972 - RNA, 18 nt, Human
ggaaauggacaugaggga

SEQ ID NO: 114973 - RNA, 22 nt, Human
ggacaggaaauggacaugaggg

SEQ ID NO: 114974 - RNA, 22 nt, Human
ggacaggaaauggacaugaggg

SEQ ID NO: 114975 - RNA, 19 nt, Human
ggacaugagggacauuuuu

SEQ ID NO: 114976 - RNA, 19 nt, Human
ggacaugagggacauuuuu

SEQ ID NO: 114977 - RNA, 18 nt, Human
ggaggcccgggaaauccu

SEQ ID NO: 114978 - RNA, 23 nt, Human
ggcaaagugcagagagagccagu

SEQ ID NO: 114979 - RNA, 26 nt, Human
ggcaagccugggucagguggguucuc

SEQ ID NO: 114980 - RNA, 26 nt, Human
ggcaagccugggucagguggguucuc

SEQ ID NO: 114981 - RNA, 20 nt, Human
ggccagggucuggcgagggg

SEQ ID NO: 114982 - RNA, 18 nt, Human
ggccccaagcuccagccu

SEQ ID NO: 114983 - RNA, 22 nt, Human
ggcgcagcccaccuucuccuca

SEQ ID NO: 114984 - RNA, 22 nt, Human
ggcgcagcccaccuucuccuca

SEQ ID NO: 114985 - RNA, 20 nt, Human
gggcugggcuguggccaguc

SEQ ID NO: 114986 - RNA, 20 nt, Human
gggcugggcuguggccaguc

SEQ ID NO: 114987 - RNA, 19 nt, Human
ggguucucaguacuuuuuc

SEQ ID NO: 114988 - RNA, 19 nt, Human
ggguucucaguacuuuuuc

SEQ ID NO: 114989 - RNA, 21 nt, Human
ggugccagagauuuugaaacc

SEQ ID NO: 114990 - RNA, 23 nt, Human
gugcgcguguguuugugugugug

SEQ ID NO: 114991 - RNA, 28 nt, Human
gugcgcguguguuugugugugugugugu

SEQ ID NO: 114992 - RNA, 22 nt, Human
guguguuugugugugugugugu

SEQ ID NO: 114993 - RNA, 23 nt, Human
guuuuugucacacaaagguuggu

SEQ ID NO: 114994 - RNA, 23 nt, Human
guuuuugucacacaaagguuggu

SEQ ID NO: 114995 - RNA, 24 nt, Human
uaaauagcuucguacaaaaaccca

SEQ ID NO: 114996 - RNA, 24 nt, Human
uaaauagcuucguacaaaaaccca

SEQ ID NO: 114997 - RNA, 23 nt, Human
uaaauucuuccagucagacugag

SEQ ID NO: 114998 - RNA, 23 nt, Human
uaaauucuuccagucagacugag

SEQ ID NO: 114999 - RNA, 23 nt, Human
uaaucuuauugaaaagggaggag

SEQ ID NO: 115000 - RNA, 19 nt, Human
uacucaggaaaaaugguga

SEQ ID NO: 115001 - RNA, 19 nt, Human
uacucaggaaaaaugguga

SEQ ID NO: 115002 - RNA, 27 nt, Human
uagaaaggaggcugcugcggagccuug

SEQ ID NO: 115003 - RNA, 19 nt, Human
uagagcucuggccaggaac

SEQ ID NO: 115004 - RNA, 19 nt, Human
uagagcucuggccaggaac

SEQ ID NO: 115005 - RNA, 22 nt, Human
uagaucggggacucaggggagu

SEQ ID NO: 115006 - RNA, 22 nt, Human
uagaucggggacucaggggagu

SEQ ID NO: 115007 - RNA, 18 nt, Human
uagcggcagggcguggag

SEQ ID NO: 115008 - RNA, 24 nt, Human
uagcuucguacaaaaacccaaggg

SEQ ID NO: 115009 - RNA, 24 nt, Human
uagcuucguacaaaaacccaaggg

SEQ ID NO: 115010 - RNA, 23 nt, Human
uaguagcaggaauuuguccuugu

SEQ ID NO: 115011 - RNA, 23 nt, Human
uaguagcaggaauuuguccuugu

SEQ ID NO: 115012 - RNA, 18 nt, Human
ucaaaacauacuaaaaca

SEQ ID NO: 115013 - RNA, 18 nt, Human
ucaaaacauacuaaaaca

SEQ ID NO: 115014 - RNA, 24 nt, Human
ucaugccggugaccaucuccacag

SEQ ID NO: 115015 - RNA, 20 nt, Human
uccacaguaggcacggugac

SEQ ID NO: 115016 - RNA, 19 nt, Human
uccagaauaaaacuaagcc

SEQ ID NO: 115017 - RNA, 19 nt, Human
uccagaauaaaacuaagcc

SEQ ID NO: 115018 - RNA, 19 nt, Human
uccccaagacacaggcuca

SEQ ID NO: 115019 - RNA, 19 nt, Human
uccccaagacacaggcuca

SEQ ID NO: 115020 - RNA, 23 nt, Human
uccccaagacacaggcucauuaa

SEQ ID NO: 115021 - RNA, 23 nt, Human
uccccaagacacaggcucauuaa

SEQ ID NO: 115022 - RNA, 21 nt, Human
uccccaggcugcaggagccca

SEQ ID NO: 115023 - RNA, 22 nt, Human
uccccaggcugcaggagcccau

SEQ ID NO: 115024 - RNA, 19 nt, Human
ucccuccagcugguaaaaa

SEQ ID NO: 115025 - RNA, 19 nt, Human
ucgcaguagaggcgaaggg

SEQ ID NO: 115026 - RNA, 23 nt, Human
ucgguggucaggggcggagaggc

SEQ ID NO: 115027 - RNA, 23 nt, Human
ucgguggucaggggcggagaggc

SEQ ID NO: 115028 - RNA, 19 nt, Human
ucucagguugggcaugugg

SEQ ID NO: 115029 - RNA, 19 nt, Human
ucucagguugggcaugugg

SEQ ID NO: 115030 - RNA, 18 nt, Human
ucugcuuuucucuuccuc

SEQ ID NO: 115031 - RNA, 21 nt, Human
ucuguggggcgcagcccaccu

SEQ ID NO: 115032 - RNA, 21 nt, Human
ucuguggggcgcagcccaccu

SEQ ID NO: 115033 - RNA, 18 nt, Human
ugaaaacaacaucucccc

SEQ ID NO: 115034 - RNA, 18 nt, Human
ugaaaacaacaucucccc

SEQ ID NO: 115035 - RNA, 24 nt, Human
ugaaaacaacaucuccccaggccu

SEQ ID NO: 115036 - RNA, 25 nt, Human
ugaaaacaacaucuccccaggccuc

SEQ ID NO: 115037 - RNA, 25 nt, Human
ugaaaacaacaucuccccaggccuc

SEQ ID NO: 115038 - RNA, 21 nt, Human
ugaaguacagagaucucuggu

SEQ ID NO: 115039 - RNA, 20 nt, Human
ugacaguggagaagcugcug

SEQ ID NO: 115040 - RNA, 20 nt, Human
ugacaguggagaagcugcug

SEQ ID NO: 115041 - RNA, 18 nt, Human
ugagaagaggagccucuu

SEQ ID NO: 115042 - RNA, 18 nt, Human
ugagaagaggagccucuu

SEQ ID NO: 115043 - RNA, 21 nt, Human
ugagggacauuuuugagacag

SEQ ID NO: 115044 - RNA, 21 nt, Human
ugagggacauuuuugagacag

SEQ ID NO: 115045 - RNA, 25 nt, Human
ugagggacauuuuugagacaggggg

SEQ ID NO: 115046 - RNA, 25 nt, Human
ugagggacauuuuugagacaggggg

SEQ ID NO: 115047 - RNA, 20 nt, Human
ugaggucugcugugggggug

SEQ ID NO: 115048 - RNA, 20 nt, Human
ugaggucugcugugggggug

SEQ ID NO: 115049 - RNA, 22 nt, Human
ugaguccccaagacacaggcuc

SEQ ID NO: 115050 - RNA, 23 nt, Human
ugaguuaacagcaugucuuagua

SEQ ID NO: 115051 - RNA, 23 nt, Human
ugaguuaacagcaugucuuagua

SEQ ID NO: 115052 - RNA, 19 nt, Human
ugcuguuugcgugcgcgug

SEQ ID NO: 115053 - RNA, 21 nt, Human
uggcguuuuggguguucagcc

SEQ ID NO: 115054 - RNA, 24 nt, Human
ugggcuguggccagucgagggguc

SEQ ID NO: 115055 - RNA, 24 nt, Human
ugggcuguggccagucgagggguc

SEQ ID NO: 115056 - RNA, 20 nt, Human
uggggguggaccucaccuug

SEQ ID NO: 115057 - RNA, 20 nt, Human
uggggguggaccucaccuug

SEQ ID NO: 115058 - RNA, 21 nt, Human
ugguaaaaauugggcaauuuc

SEQ ID NO: 115059 - RNA, 22 nt, Human
ugguagcgauggggaacagguc

SEQ ID NO: 115060 - RNA, 22 nt, Human
ugguagcgauggggaacagguc

SEQ ID NO: 115061 - RNA, 19 nt, Human
uggugccagagauuuugaa

SEQ ID NO: 115062 - RNA, 19 nt, Human
uggugccagagauuuugaa

SEQ ID NO: 115063 - RNA, 20 nt, Human
uguggccagucgaggggucc

SEQ ID NO: 115064 - RNA, 20 nt, Human
uguggccagucgaggggucc

SEQ ID NO: 115065 - RNA, 19 nt, Human
ugugggagaccggguccac

SEQ ID NO: 115066 - RNA, 19 nt, Human
ugugggagaccggguccac

SEQ ID NO: 115067 - RNA, 23 nt, Human
ugugugucuaacagugcucagcc

SEQ ID NO: 115068 - RNA, 23 nt, Human
ugugugucuaacagugcucagcc

SEQ ID NO: 115069 - RNA, 21 nt, Human
ugugugugugugugugcgugu

SEQ ID NO: 115070 - RNA, 21 nt, Human
ugugugugugugugugcgugu

SEQ ID NO: 115071 - RNA, 21 nt, Human
uguguuugugugugugugugu

SEQ ID NO: 115072 - RNA, 22 nt, Human
uguuugcgugcgcguguguuug

SEQ ID NO: 115073 - RNA, 24 nt, Human
uguuugugugugugugugugcgug

SEQ ID NO: 115074 - RNA, 22 nt, Human
uuaaauagcuucguacaaaaac

SEQ ID NO: 115075 - RNA, 20 nt, Human
uuccucacugcuguuugcgu

SEQ ID NO: 115076 - RNA, 20 nt, Human
uugaaaccacaagagccgcc

SEQ ID NO: 115077 - RNA, 20 nt, Human
uugaaaccacaagagccgcc

SEQ ID NO: 115078 - RNA, 21 nt, Human
uugaaaccacaagagccgccc

SEQ ID NO: 115079 - RNA, 21 nt, Human
uugaaaccacaagagccgccc

SEQ ID NO: 115080 - RNA, 22 nt, Human
uuuggccaaaugguagcgaugg

SEQ ID NO: 115081 - RNA, 22 nt, Human
uuuggccaaaugguagcgaugg

SEQ ID NO: 115082 - RNA, 23 nt, Human
uuugugugugugugugugcgugu

SEQ ID NO: 115083 - RNA, 20 nt, Human
ccccucaggacggccacccc

SEQ ID NO: 115084 - RNA, 22 nt, Human
cccuugggcugggugcagagcc

SEQ ID NO: 115085 - RNA, 18 nt, Human
ccucucugagcccuucuc

SEQ ID NO: 115086 - RNA, 18 nt, Human
cgguggcggggagcuggg

SEQ ID NO: 115087 - RNA, 19 nt, Human
cugcacacacacuuuauuu

SEQ ID NO: 115088 - RNA, 19 nt, Human
gcccuucucacuucccccu

SEQ ID NO: 115089 - RNA, 18 nt, Human
gcgguggcggggagcugg

SEQ ID NO: 115090 - RNA, 19 nt, Human
gcugggugcagagccccca

SEQ ID NO: 115091 - RNA, 18 nt, Human
ggcggggagcugggugcu

SEQ ID NO: 115092 - RNA, 25 nt, Human
uauuuuguccucucugagcccuucu

SEQ ID NO: 115093 - RNA, 24 nt, Human
aagaagucaugauugagucuuaaa

SEQ ID NO: 115094 - RNA, 19 nt, Human
agaagcagcagcagcacca

SEQ ID NO: 115095 - RNA, 20 nt, Human
agagagcccgagaggggggc

SEQ ID NO: 115096 - RNA, 18 nt, Human
agagcccgagaggggggc

SEQ ID NO: 115097 - RNA, 21 nt, Human
agagcccgagaggggggccgg

SEQ ID NO: 115098 - RNA, 19 nt, Human
agcacgucuggcaccuuca

SEQ ID NO: 115099 - RNA, 21 nt, Human
agcagcaccaggcccagcaac

SEQ ID NO: 115100 - RNA, 19 nt, Human
agcccggagccgcagaagg

SEQ ID NO: 115101 - RNA, 21 nt, Human
agcccggagccgcagaagguc

SEQ ID NO: 115102 - RNA, 24 nt, Human
agcccucuggcugcgggagggguc

SEQ ID NO: 115103 - RNA, 19 nt, Human
aggcagcgcggcgggcagc

SEQ ID NO: 115104 - RNA, 23 nt, Human
aggccccagccccagugccucag

SEQ ID NO: 115105 - RNA, 18 nt, Human
aggcuccagcccucuggc

SEQ ID NO: 115106 - RNA, 18 nt, Human
aggggucuggggucuccu

SEQ ID NO: 115107 - RNA, 19 nt, Human
cagaaggucagcaggagca

SEQ ID NO: 115108 - RNA, 19 nt, Human
cagcagcaccaggcccagc

SEQ ID NO: 115109 - RNA, 24 nt, Human
cagggcgcaggccucggccgaggu

SEQ ID NO: 115110 - RNA, 20 nt, Human
ccagccccagugccucagaa

SEQ ID NO: 115111 - RNA, 21 nt, Human
ccaggcccagcaacacagcug

SEQ ID NO: 115112 - RNA, 23 nt, Human
ccaggcccagcaacacagcugcc

SEQ ID NO: 115113 - RNA, 18 nt, Human
ccccagccccagugccca

SEQ ID NO: 115114 - RNA, 19 nt, Human
ccccagccccagugccucu

SEQ ID NO: 115115 - RNA, 22 nt, Human
cccgcgacggcccgcccgggac

SEQ ID NO: 115116 - RNA, 18 nt, Human
cccuagcugccccagaag

SEQ ID NO: 115117 - RNA, 21 nt, Human
ccucugagcaggcuccagccc

SEQ ID NO: 115118 - RNA, 23 nt, Human
cgggaggggucuggggucuccuc

SEQ ID NO: 115119 - RNA, 19 nt, Human
gagagcccgagaggggggc

SEQ ID NO: 115120 - RNA, 18 nt, Human
gagcaggcuccagcccuc

SEQ ID NO: 115121 - RNA, 22 nt, Human
gcagcaccaccagcagcaccag

SEQ ID NO: 115122 - RNA, 25 nt, Human
gcgacggcccgcccgggacuggacc

SEQ ID NO: 115123 - RNA, 22 nt, Human
gcgggaggggucuggggucucc

SEQ ID NO: 115124 - RNA, 18 nt, Human
gcucggcagcaaagcaga

SEQ ID NO: 115125 - RNA, 24 nt, Human
ggcccagcaacacagcugccaaca

SEQ ID NO: 115126 - RNA, 25 nt, Human
gguuguggaugggcugcaggaugaa

SEQ ID NO: 115127 - RNA, 30 nt, Human
ucggcagcaaagcagauguuauuucucucu

SEQ ID NO: 115128 - RNA, 20 nt, Human
ugagagagcccgagaggggg

SEQ ID NO: 115129 - RNA, 22 nt, Human
ugagucuuaaaaaagaacaauc

SEQ ID NO: 115130 - RNA, 20 nt, Human
ugccucagaagcagcagcag

SEQ ID NO: 115131 - RNA, 19 nt, Human
uggcucggcagcaaagcag

SEQ ID NO: 115132 - RNA, 18 nt, Human
uguggaugggcugcagga

SEQ ID NO: 115133 - RNA, 18 nt, Human
uguugcaguucagagagg

SEQ ID NO: 115134 - RNA, 24 nt, Human
uucaaagcaccucugagcaggcuc

SEQ ID NO: 115135 - RNA, 24 nt, Human
aaagugcugggauuacagguauga

SEQ ID NO: 115136 - RNA, 18 nt, Human
aaccaaauaacuucuuca

SEQ ID NO: 115137 - RNA, 21 nt, Human
aaggaggauauagacacauuc

SEQ ID NO: 115138 - RNA, 21 nt, Human
aagucaaguuuagaccuucgg

SEQ ID NO: 115139 - RNA, 18 nt, Human
aagugcugggauuacagg

SEQ ID NO: 115140 - RNA, 19 nt, Human
aagugcugggauuacaggu

SEQ ID NO: 115141 - RNA, 26 nt, Human
aagugcugggauuacagguaugagcc

SEQ ID NO: 115142 - RNA, 24 nt, Human
acccaggcuggaaugaagugguau

SEQ ID NO: 115143 - RNA, 20 nt, Human
acgggguguugccauguugg

SEQ ID NO: 115144 - RNA, 24 nt, Human
acgggguguugccauguuggccag

SEQ ID NO: 115145 - RNA, 21 nt, Human
acuauaggcgcaugcuaccau

SEQ ID NO: 115146 - RNA, 19 nt, Human
agacaggagccgaacgggg

SEQ ID NO: 115147 - RNA, 21 nt, Human
agacaggagccgaacgggggc

SEQ ID NO: 115148 - RNA, 27 nt, Human
agaguuuuccuuuuuuuuuuuuuuuuu

SEQ ID NO: 115149 - RNA, 19 nt, Human
agcagcugggacuauaggc

SEQ ID NO: 115150 - RNA, 24 nt, Human
agccccgacacacccugcugcccu

SEQ ID NO: 115151 - RNA, 24 nt, Human
agcgauucucaugccucagccucc

SEQ ID NO: 115152 - RNA, 23 nt, Human
aggcaggucucgaacuccuggcc

SEQ ID NO: 115153 - RNA, 18 nt, Human
aggguaccugccuugaaa

SEQ ID NO: 115154 - RNA, 19 nt, Human
aggucuccgacuccgaugu

SEQ ID NO: 115155 - RNA, 19 nt, Human
aguagcugcagggggaagg

SEQ ID NO: 115156 - RNA, 24 nt, Human
agugguaugaucucaguugaaugc

SEQ ID NO: 115157 - RNA, 22 nt, Human
aucacagaguuuuccuuuuuuu

SEQ ID NO: 115158 - RNA, 24 nt, Human
augaucugcccaccguagccuccc

SEQ ID NO: 115159 - RNA, 24 nt, Human
augcaaccuccaccuccuagguuc

SEQ ID NO: 115160 - RNA, 21 nt, Human
augccaggcuaauuuuuauau

SEQ ID NO: 115161 - RNA, 22 nt, Human
augccucagccuccugagcagc

SEQ ID NO: 115162 - RNA, 24 nt, Human
caaagugcugggauuacagguaug

SEQ ID NO: 115163 - RNA, 23 nt, Human
caaaucaauaacccgcagugugc

SEQ ID NO: 115164 - RNA, 22 nt, Human
caaauguccaucacagaguuuu

SEQ ID NO: 115165 - RNA, 18 nt, Human
caaccuccaccuccuagg

SEQ ID NO: 115166 - RNA, 23 nt, Human
caaccuccaccuccuagguucaa

SEQ ID NO: 115167 - RNA, 28 nt, Human
caagcgauucucaugccucagccuccug

SEQ ID NO: 115168 - RNA, 22 nt, Human
cacaacuguagucaaguugaga

SEQ ID NO: 115169 - RNA, 20 nt, Human
caccguagccucccaaagug

SEQ ID NO: 115170 - RNA, 22 nt, Human
cagaguuuuccuuuuuuuuuuu

SEQ ID NO: 115171 - RNA, 22 nt, Human
cagcgacccucucccgcgguuu

SEQ ID NO: 115172 - RNA, 22 nt, Human
cagggggucuccuucgccuucu

SEQ ID NO: 115173 - RNA, 24 nt, Human
cagugguagccuagagaggccgcu

SEQ ID NO: 115174 - RNA, 21 nt, Human
ccaaagugcugggauuacagg

SEQ ID NO: 115175 - RNA, 21 nt, Human
ccaaagugcugggauuacagg

SEQ ID NO: 115176 - RNA, 22 nt, Human
ccaaagugcugggauuacaggu

SEQ ID NO: 115177 - RNA, 24 nt, Human
ccaaagugcugggauuacagguau

SEQ ID NO: 115178 - RNA, 24 nt, Human
ccaccuccuagguucaagcgauuc

SEQ ID NO: 115179 - RNA, 19 nt, Human
ccauguuggccaggcaggu

SEQ ID NO: 115180 - RNA, 22 nt, Human
ccauguuggccaggcaggucuc

SEQ ID NO: 115181 - RNA, 23 nt, Human
ccauguuggccaggcaggucucg

SEQ ID NO: 115182 - RNA, 24 nt, Human
ccccacccuguaaauccucuuucu

SEQ ID NO: 115183 - RNA, 19 nt, Human
ccccccacccuguaaaucc

SEQ ID NO: 115184 - RNA, 21 nt, Human
ccccgacacacccugcugccc

SEQ ID NO: 115185 - RNA, 18 nt, Human
ccccucuguccccccacc

SEQ ID NO: 115186 - RNA, 25 nt, Human
ccccucuguccccccacccuguaaa

SEQ ID NO: 115187 - RNA, 21 nt, Human
ccgacuccgaugucuuaaucc

SEQ ID NO: 115188 - RNA, 19 nt, Human
ccgccacugucucccuucu

SEQ ID NO: 115189 - RNA, 21 nt, Human
ccgcuaacagacaggagccga

SEQ ID NO: 115190 - RNA, 20 nt, Human
ccguagccucccaaagugcu

SEQ ID NO: 115191 - RNA, 23 nt, Human
ccuagguucaagcgauucucaug

SEQ ID NO: 115192 - RNA, 22 nt, Human
ccuccuagguucaagcgauucu

SEQ ID NO: 115193 - RNA, 22 nt, Human
ccucucccgcgguuuccggaag

SEQ ID NO: 115194 - RNA, 19 nt, Human
ccucuuucuuuuucguucc

SEQ ID NO: 115195 - RNA, 18 nt, Human
ccugaagguccccuucuc

SEQ ID NO: 115196 - RNA, 24 nt, Human
ccugagcagcugggacuauaggcg

SEQ ID NO: 115197 - RNA, 24 nt, Human
ccuggccucagaugaucugcccac

SEQ ID NO: 115198 - RNA, 20 nt, Human
ccuucugucuuucugcgucc

SEQ ID NO: 115199 - RNA, 22 nt, Human
cgccuggaaacacgaacuuccg

SEQ ID NO: 115200 - RNA, 21 nt, Human
cuacggcagggggucuccuuc

SEQ ID NO: 115201 - RNA, 18 nt, Human
cuccgggccacagagacg

SEQ ID NO: 115202 - RNA, 21 nt, Human
cugcccuucggacgccuccac

SEQ ID NO: 115203 - RNA, 18 nt, Human
cugcuguggggaaaggag

SEQ ID NO: 115204 - RNA, 19 nt, Human
cugguuccugcugccccuc

SEQ ID NO: 115205 - RNA, 26 nt, Human
cuguaaauccucuuucuuuuucguuc

SEQ ID NO: 115206 - RNA, 19 nt, Human
cuguagucaaguugagaag

SEQ ID NO: 115207 - RNA, 21 nt, Human
cuugcucugucacccaggcug

SEQ ID NO: 115208 - RNA, 28 nt, Human
cuuugccuggaccugaagguccccuucc

SEQ ID NO: 115209 - RNA, 22 nt, Human
cuuuuuuuuuuuuuuuuucaag

SEQ ID NO: 115210 - RNA, 18 nt, Human
gaaagaaagcugcugugg

SEQ ID NO: 115211 - RNA, 20 nt, Human
gaagaccucaaaaaagucaa

SEQ ID NO: 115212 - RNA, 21 nt, Human
gaagcucucauagagauuuau

SEQ ID NO: 115213 - RNA, 20 nt, Human
gaaggugcuguuagaaggag

SEQ ID NO: 115214 - RNA, 26 nt, Human
gagcagcugggacuauaggcgcaugc

SEQ ID NO: 115215 - RNA, 24 nt, Human
gagccccgacacacccugcugccc

SEQ ID NO: 115216 - RNA, 18 nt, Human
gauuacagguaugagcca

SEQ ID NO: 115217 - RNA, 23 nt, Human
gauuacagguaugagccacucca

SEQ ID NO: 115218 - RNA, 24 nt, Human
gauuacagguaugagccacuccac

SEQ ID NO: 115219 - RNA, 22 nt, Human
gcaaccuccaccuccuagguuc

SEQ ID NO: 115220 - RNA, 23 nt, Human
gcagugugcauuuuggaaaacca

SEQ ID NO: 115221 - RNA, 24 nt, Human
gcccuucggacgccuccacgucag

SEQ ID NO: 115222 - RNA, 21 nt, Human
gccuccugagcagcugggacu

SEQ ID NO: 115223 - RNA, 24 nt, Human
gcgauucucaugccucagccuccu

SEQ ID NO: 115224 - RNA, 24 nt, Human
gcucugucacccaggcuggaauga

SEQ ID NO: 115225 - RNA, 21 nt, Human
gcugccccucuguccccccac

SEQ ID NO: 115226 - RNA, 23 nt, Human
gggguguugccauguuggccagg

SEQ ID NO: 115227 - RNA, 22 nt, Human
ggguguugccauguuggccagg

SEQ ID NO: 115228 - RNA, 20 nt, Human
ggucucgaacuccuggccuc

SEQ ID NO: 115229 - RNA, 24 nt, Human
uaauuuuuauauuuuuauuagaga

SEQ ID NO: 115230 - RNA, 24 nt, Human
uacagguaugagccacuccaccca

SEQ ID NO: 115231 - RNA, 21 nt, Human
uagagacgggguguugccaug

SEQ ID NO: 115232 - RNA, 22 nt, Human
uagagacgggguguugccaugu

SEQ ID NO: 115233 - RNA, 18 nt, Human
uagcaggugaggccuccc

SEQ ID NO: 115234 - RNA, 22 nt, Human
uagcugcagggggaaggugcug

SEQ ID NO: 115235 - RNA, 24 nt, Human
uagucacaccaaaauguauuuauu

SEQ ID NO: 115236 - RNA, 24 nt, Human
uauuagagacgggguguugccaug

SEQ ID NO: 115237 - RNA, 22 nt, Human
ucaaauuucugaguacacagag

SEQ ID NO: 115238 - RNA, 24 nt, Human
ucacaccaaaauguauuuauuaca

SEQ ID NO: 115239 - RNA, 26 nt, Human
ucacccaggcuggaaugaagugguau

SEQ ID NO: 115240 - RNA, 25 nt, Human
ucagcgacccucucccgcgguuucc

SEQ ID NO: 115241 - RNA, 23 nt, Human
ucccaaagugcugggauuacagg

SEQ ID NO: 115242 - RNA, 19 nt, Human
uccgagccccgacacaccc

SEQ ID NO: 115243 - RNA, 21 nt, Human
uccuagguucaagcgauucuc

SEQ ID NO: 115244 - RNA, 24 nt, Human
uccuagguucaagcgauucucaug

SEQ ID NO: 115245 - RNA, 24 nt, Human
uccucuuucuuuuucguucccacg

SEQ ID NO: 115246 - RNA, 24 nt, Human
uccugagcagcugggacuauaggc

SEQ ID NO: 115247 - RNA, 18 nt, Human
uccuuuuuuuuuuuuuuu

SEQ ID NO: 115248 - RNA, 18 nt, Human
uccuuuuuuuuuuuuuuu

SEQ ID NO: 115249 - RNA, 21 nt, Human
ucucccgcgguuuccggaagc

SEQ ID NO: 115250 - RNA, 21 nt, Human
ucucccuucugguuccugcug

SEQ ID NO: 115251 - RNA, 19 nt, Human
ucucgaacuccuggccuca

SEQ ID NO: 115252 - RNA, 20 nt, Human
ucucuggggggaacauaugg

SEQ ID NO: 115253 - RNA, 21 nt, Human
ucugaagaguagcugcagggg

SEQ ID NO: 115254 - RNA, 18 nt, Human
ucugucacccaggcugga

SEQ ID NO: 115255 - RNA, 23 nt, Human
ucuugcucugucacccaggcugg

SEQ ID NO: 115256 - RNA, 24 nt, Human
ucuugcucugucacccaggcugga

SEQ ID NO: 115257 - RNA, 22 nt, Human
ugaaugcaaccuccaccuccua

SEQ ID NO: 115258 - RNA, 20 nt, Human
ugacaggaaagaaagcugcu

SEQ ID NO: 115259 - RNA, 18 nt, Human
ugagacagagucuugcuc

SEQ ID NO: 115260 - RNA, 22 nt, Human
ugagacagagucuugcucuguc

SEQ ID NO: 115261 - RNA, 21 nt, Human
ugagccacuccacccagccca

SEQ ID NO: 115262 - RNA, 24 nt, Human
ugaucugcccaccguagccuccca

SEQ ID NO: 115263 - RNA, 27 nt, Human
ugccauguuggccaggcaggucucgaa

SEQ ID NO: 115264 - RNA, 22 nt, Human
ugccucagccuccugagcagcu

SEQ ID NO: 115265 - RNA, 24 nt, Human
ugccucagccuccugagcagcugg

SEQ ID NO: 115266 - RNA, 24 nt, Human
ugcucugucacccaggcuggaaug

SEQ ID NO: 115267 - RNA, 24 nt, Human
ugcugggauuacagguaugagcca

SEQ ID NO: 115268 - RNA, 23 nt, Human
uggaaugaagugguaugaucuca

SEQ ID NO: 115269 - RNA, 24 nt, Human
uggaaugaagugguaugaucucag

SEQ ID NO: 115270 - RNA, 24 nt, Human
uggccaggcaggucucgaacuccu

SEQ ID NO: 115271 - RNA, 20 nt, Human
uggccucagaugaucugccc

SEQ ID NO: 115272 - RNA, 22 nt, Human
ugggacuauaggcgcaugcuac

SEQ ID NO: 115273 - RNA, 24 nt, Human
ugggacuauaggcgcaugcuacca

SEQ ID NO: 115274 - RNA, 25 nt, Human
ugggacuauaggcgcaugcuaccau

SEQ ID NO: 115275 - RNA, 18 nt, Human
ugggauuacagguaugag

SEQ ID NO: 115276 - RNA, 19 nt, Human
ugggauuacagguaugagc

SEQ ID NO: 115277 - RNA, 22 nt, Human
ugggauuacagguaugagccac

SEQ ID NO: 115278 - RNA, 22 nt, Human
ugggauuacagguaugagccac

SEQ ID NO: 115279 - RNA, 23 nt, Human
ugggauuacagguaugagccacu

SEQ ID NO: 115280 - RNA, 24 nt, Human
ugggauuacagguaugagccacuc

SEQ ID NO: 115281 - RNA, 25 nt, Human
ugggauuacagguaugagccacucc

SEQ ID NO: 115282 - RNA, 26 nt, Human
ugggauuacagguaugagccacucca

SEQ ID NO: 115283 - RNA, 18 nt, Human
uggggggaacauauggug

SEQ ID NO: 115284 - RNA, 21 nt, Human
ugucacccaggcuggaaugaa

SEQ ID NO: 115285 - RNA, 19 nt, Human
ugucagugguagccuagag

SEQ ID NO: 115286 - RNA, 22 nt, Human
uguuccuuaaaauaauuaagcu

SEQ ID NO: 115287 - RNA, 24 nt, Human
uuauuagagacgggguguugccau

SEQ ID NO: 115288 - RNA, 23 nt, Human
uucaagcgauucucaugccucag

SEQ ID NO: 115289 - RNA, 20 nt, Human
uuccauagaagagaaaaaga

SEQ ID NO: 115290 - RNA, 22 nt, Human
uucuucaaauuucugaguacac

SEQ ID NO: 115291 - RNA, 19 nt, Human
uugacaggaaagaaagcug

SEQ ID NO: 115292 - RNA, 24 nt, Human
uugccauguuggccaggcaggucu

SEQ ID NO: 115293 - RNA, 24 nt, Human
uuuuucguucccacgacagaaguu

SEQ ID NO: 115294 - RNA, 24 nt, Human
uuuuuuuuuuucaagaagcucuca

SEQ ID NO: 115295 - RNA, 24 nt, Human
uuuuuuuuuuuugagacagagucu

SEQ ID NO: 115296 - RNA, 18 nt, Human
uuuuuuuuuuuuuuuuug

SEQ ID NO: 115297 - RNA, 24 nt, Human
caccagcuccucuuccagccugcg

SEQ ID NO: 115298 - RNA, 24 nt, Human
ccagcuccucuuccagccugcgcc

SEQ ID NO: 115299 - RNA, 22 nt, Human
ccuggccucuguccuggcuuca

SEQ ID NO: 115300 - RNA, 19 nt, Human
cucaccagcuccucuucca

SEQ ID NO: 115301 - RNA, 20 nt, Human
gcuccuggccucuguccugg

SEQ ID NO: 115302 - RNA, 24 nt, Human
ggguggggagggcugcagggcugg

SEQ ID NO: 115303 - RNA, 20 nt, Human
ugcagguggaugccgggugg

SEQ ID NO: 115304 - RNA, 19 nt, Human
ugccggguggggagggcug

SEQ ID NO: 115305 - RNA, 20 nt, Human
uggcuccuggccucuguccu

SEQ ID NO: 115306 - RNA, 22 nt, Human
uggcuucaugguccugacagcu

SEQ ID NO: 115307 - RNA, 20 nt, Human
ugggggugcugggggugggc

SEQ ID NO: 115308 - RNA, 20 nt, Human
aaagucuccccggagcgcag

SEQ ID NO: 115309 - RNA, 19 nt, Human
acacacaaaacauucaaac

SEQ ID NO: 115310 - RNA, 24 nt, Human
agacacccccuccccccaaggaaa

SEQ ID NO: 115311 - RNA, 21 nt, Human
aggaaaaaaaguuggccucau

SEQ ID NO: 115312 - RNA, 21 nt, Human
caaggaaaaaaaguuggccuc

SEQ ID NO: 115313 - RNA, 21 nt, Human
caaucaacccaaccauuagca

SEQ ID NO: 115314 - RNA, 21 nt, Human
caugcucacggcaaaggcuua

SEQ ID NO: 115315 - RNA, 24 nt, Human
ccaguggcgaguccagggucaccc

SEQ ID NO: 115316 - RNA, 20 nt, Human
ccccuccccccaaggaaaug

SEQ ID NO: 115317 - RNA, 25 nt, Human
cccgcggucgcgagggcggcgaggc

SEQ ID NO: 115318 - RNA, 21 nt, Human
ccucaaaagaccuuccaagga

SEQ ID NO: 115319 - RNA, 22 nt, Human
gaacacgcaucccuccuuccac

SEQ ID NO: 115320 - RNA, 19 nt, Human
gcagacacccccucccccc

SEQ ID NO: 115321 - RNA, 23 nt, Human
ggccggcucucagccuggaagcc

SEQ ID NO: 115322 - RNA, 24 nt, Human
ggcgccgcucggaagggcggguac

SEQ ID NO: 115323 - RNA, 19 nt, Human
uacacacaaaacauucaaa

SEQ ID NO: 115324 - RNA, 21 nt, Human
uagauccucaacauacaauca

SEQ ID NO: 115325 - RNA, 22 nt, Human
uagccuacaggauccaccucuc

SEQ ID NO: 115326 - RNA, 24 nt, Human
ucaaacuacuuuuuuuccaucucu

SEQ ID NO: 115327 - RNA, 24 nt, Human
ucuccccggagcgcaggugaaagu

SEQ ID NO: 115328 - RNA, 24 nt, Human
ucuugcuaaccacaaggaaaaaaa

SEQ ID NO: 115329 - RNA, 22 nt, Human
ugaaaguuucaugcaaacucca

SEQ ID NO: 115330 - RNA, 21 nt, Human
ugcagacacccccucccccca

SEQ ID NO: 115331 - RNA, 21 nt, Human
ugccgcuucuuacaggaccuu

SEQ ID NO: 115332 - RNA, 22 nt, Human
uggaacacgcaucccuccuucc

SEQ ID NO: 115333 - RNA, 18 nt, Human
uggaagccuuuuagccua

SEQ ID NO: 115334 - RNA, 24 nt, Human
ugguauacuccuuacacacaaaac

SEQ ID NO: 115335 - RNA, 22 nt, Human
ugugcaugcucacggcaaaggc

SEQ ID NO: 115336 - RNA, 23 nt, Human
ugugcaugcucacggcaaaggcu

SEQ ID NO: 115337 - RNA, 23 nt, Human
uuuuccaucucuugcagucuugc

SEQ ID NO: 115338 - RNA, 21 nt, Human
aaacaacccaugcgcaaagau

SEQ ID NO: 115339 - RNA, 20 nt, Human
aauuugcuucuccaaaguca

SEQ ID NO: 115340 - RNA, 22 nt, Human
accaaguagaauaaaaagaaaa

SEQ ID NO: 115341 - RNA, 26 nt, Human
accaaguagaauaaaaagaaaaaaaa

SEQ ID NO: 115342 - RNA, 19 nt, Human
acucuggcuuccccucccc

SEQ ID NO: 115343 - RNA, 23 nt, Human
agaaaaaaaaaaaaaaacaaccc

SEQ ID NO: 115344 - RNA, 22 nt, Human
agaauaaaaugaaguuaagcag

SEQ ID NO: 115345 - RNA, 22 nt, Human
caaaaguggacucuggcuuccc

SEQ ID NO: 115346 - RNA, 21 nt, Human
caaagcugcacuaucguccca

SEQ ID NO: 115347 - RNA, 22 nt, Human
ccaaagcugcacuaucguccca

SEQ ID NO: 115348 - RNA, 28 nt, Human
ccaaguagaauaaaaagaaaaaaaaaaa

SEQ ID NO: 115349 - RNA, 21 nt, Human
cccaaagcugcacuaucgucc

SEQ ID NO: 115350 - RNA, 25 nt, Human
ccccccaccccucugggauaaaaau

SEQ ID NO: 115351 - RNA, 19 nt, Human
ccccccucccccccacccc

SEQ ID NO: 115352 - RNA, 19 nt, Human
ccccucccccccaccccuc

SEQ ID NO: 115353 - RNA, 20 nt, Human
ccccucugggauaaaaauuu

SEQ ID NO: 115354 - RNA, 21 nt, Human
cccuccccccucccccccacc

SEQ ID NO: 115355 - RNA, 23 nt, Human
cuuccccuccccccuccccccca

SEQ ID NO: 115356 - RNA, 18 nt, Human
gaugccacuagccuaaaa

SEQ ID NO: 115357 - RNA, 24 nt, Human
gcuuccccuccccccuccccccca

SEQ ID NO: 115358 - RNA, 23 nt, Human
guacacauuaaagaauaaaauga

SEQ ID NO: 115359 - RNA, 19 nt, Human
uaauuugcuucuccaaagu

SEQ ID NO: 115360 - RNA, 23 nt, Human
ucagguacacauuaaagaauaaa

SEQ ID NO: 115361 - RNA, 20 nt, Human
uccccccucccccccacccc

SEQ ID NO: 115362 - RNA, 18 nt, Human
uccccuccccccuccccc

SEQ ID NO: 115363 - RNA, 23 nt, Human
ucuggcuuccccuccccccuccc

SEQ ID NO: 115364 - RNA, 20 nt, Human
ugacaaaaguggacucuggc

SEQ ID NO: 115365 - RNA, 19 nt, Human
ugaucugcuggcucagggc

SEQ ID NO: 115366 - RNA, 19 nt, Human
ugccacuagccuaaaagcc

SEQ ID NO: 115367 - RNA, 24 nt, Human
uggcuuccccuccccccucccccc

SEQ ID NO: 115368 - RNA, 22 nt, Human
uuccccuccccccuccccccca

SEQ ID NO: 115369 - RNA, 19 nt, Human
uugcuucuccaaagucauu

SEQ ID NO: 115370 - RNA, 18 nt, Human
agagcugucggacacugu

SEQ ID NO: 115371 - RNA, 24 nt, Human
aggcagacgccauguuuucccucg

SEQ ID NO: 115372 - RNA, 23 nt, Human
caaaacaaaacuuaauuuuuuag

SEQ ID NO: 115373 - RNA, 21 nt, Human
cacuguucacgaacugcucca

SEQ ID NO: 115374 - RNA, 22 nt, Human
cucuuguuuagcucaggaugga

SEQ ID NO: 115375 - RNA, 21 nt, Human
cugcugcccuccgaacacuug

SEQ ID NO: 115376 - RNA, 24 nt, Human
cuggccaagaugguaguuucucuu

SEQ ID NO: 115377 - RNA, 22 nt, Human
gcagagaaaaugguuuucugaa

SEQ ID NO: 115378 - RNA, 23 nt, Human
gcagagaaaaugguuuucugaaa

SEQ ID NO: 115379 - RNA, 19 nt, Human
uccacgacagacuuuaaag

SEQ ID NO: 115380 - RNA, 25 nt, Human
ucuccaggugacacaggcuuggucc

SEQ ID NO: 115381 - RNA, 21 nt, Human
ugguccucucugcugcccucc

SEQ ID NO: 115382 - RNA, 22 nt, Human
ugucacuggccaagaugguagu

SEQ ID NO: 115383 - RNA, 21 nt, Human
aaaaaaccacacacacaaaua

SEQ ID NO: 115384 - RNA, 25 nt, Human
aaaaaaccacacacacaaauacugc

SEQ ID NO: 115385 - RNA, 25 nt, Human
aaaaaaccacacacacaaauacugc

SEQ ID NO: 115386 - RNA, 23 nt, Human
aaaaaagaaagaaauauaaaaag

SEQ ID NO: 115387 - RNA, 23 nt, Human
aaaaccacacacacaaauacugc

SEQ ID NO: 115388 - RNA, 23 nt, Human
aaaagagaaaggaaaagaagaaa

SEQ ID NO: 115389 - RNA, 25 nt, Human
aaaaggguacuugggcacgacacaa

SEQ ID NO: 115390 - RNA, 20 nt, Human
aaaaguagcacuuuuuaaaa

SEQ ID NO: 115391 - RNA, 22 nt, Human
aaacauacacagugcugucccu

SEQ ID NO: 115392 - RNA, 20 nt, Human
aaagaaagaaauauaaaaaa

SEQ ID NO: 115393 - RNA, 21 nt, Human
aaaguagcaaaauacaaagga

SEQ ID NO: 115394 - RNA, 19 nt, Human
aagaaagaaauauaaaaag

SEQ ID NO: 115395 - RNA, 22 nt, Human
aagaaagaaauauaaaaagcaa

SEQ ID NO: 115396 - RNA, 20 nt, Human
aaggaaaagaagaaauacga

SEQ ID NO: 115397 - RNA, 26 nt, Human
aaucaucugaagcacaggauaaccga

SEQ ID NO: 115398 - RNA, 22 nt, Human
acagugcugucccuuucaaauu

SEQ ID NO: 115399 - RNA, 22 nt, Human
acuuaaaacaucaaaaaagcuu

SEQ ID NO: 115400 - RNA, 19 nt, Human
agaaaagagaaaggaaaag

SEQ ID NO: 115401 - RNA, 21 nt, Human
agaaaagagaaaggaaaagaa

SEQ ID NO: 115402 - RNA, 24 nt, Human
agaaagaaauauaaaaagcaaugu

SEQ ID NO: 115403 - RNA, 23 nt, Human
agaaauauaaaaagcaauguggc

SEQ ID NO: 115404 - RNA, 22 nt, Human
agaagacuccaugaaaugagag

SEQ ID NO: 115405 - RNA, 25 nt, Human
aggaaaagaagaaauacgacgugag

SEQ ID NO: 115406 - RNA, 24 nt, Human
caaaaaagcuuucugauaaaaagc

SEQ ID NO: 115407 - RNA, 24 nt, Human
caacauuaaaaaagaaagaaauau

SEQ ID NO: 115408 - RNA, 20 nt, Human
cacaaauacugcaaaguagc

SEQ ID NO: 115409 - RNA, 22 nt, Human
cacacacaaauacugcaaagua

SEQ ID NO: 115410 - RNA, 19 nt, Human
caccaauaaccagcuccca

SEQ ID NO: 115411 - RNA, 24 nt, Human
caccaauaaccagcucccaagcac

SEQ ID NO: 115412 - RNA, 23 nt, Human
cacgacacaaucagaauuaguuu

SEQ ID NO: 115413 - RNA, 18 nt, Human
cagucaucaaaaugacca

SEQ ID NO: 115414 - RNA, 20 nt, Human
cagucaucaaaaugaccagg

SEQ ID NO: 115415 - RNA, 25 nt, Human
caucugaagcacaggauaaccuuga

SEQ ID NO: 115416 - RNA, 27 nt, Human
ccuccaaccgcugccgccuccagccug

SEQ ID NO: 115417 - RNA, 21 nt, Human
ccucccuuuccgcccucccua

SEQ ID NO: 115418 - RNA, 18 nt, Human
ccugaggcgccgccgccg

SEQ ID NO: 115419 - RNA, 22 nt, Human
cuccaaauggcagugccucccu

SEQ ID NO: 115420 - RNA, 18 nt, Human
cucccuuuccgcccuccc

SEQ ID NO: 115421 - RNA, 20 nt, Human
cuugcucccauuuuuucugu

SEQ ID NO: 115422 - RNA, 20 nt, Human
cuuuugguuuuggcaacauu

SEQ ID NO: 115423 - RNA, 20 nt, Human
gaagacuccaugaaaugaga

SEQ ID NO: 115424 - RNA, 20 nt, Human
gauuauaaucaucugaagca

SEQ ID NO: 115425 - RNA, 21 nt, Human
gcaacauuaaaaaagaaagaa

SEQ ID NO: 115426 - RNA, 20 nt, Human
gccgccgaaguccccgcugc

SEQ ID NO: 115427 - RNA, 21 nt, Human
gccgccuccagccuggcacug

SEQ ID NO: 115428 - RNA, 24 nt, Human
ggaccacaccaauaaccagcuccc

SEQ ID NO: 115429 - RNA, 18 nt, Human
ggcgaagccuccaaccgc

SEQ ID NO: 115430 - RNA, 24 nt, Human
gugagcuuuuuugaucagaagacu

SEQ ID NO: 115431 - RNA, 22 nt, Human
uaaaaaagaaagaaauauaaaa

SEQ ID NO: 115432 - RNA, 23 nt, Human
uaaaaagcucagcuuuuaaauca

SEQ ID NO: 115433 - RNA, 19 nt, Human
uaaccagcucccaagcaca

SEQ ID NO: 115434 - RNA, 23 nt, Human
uaaccagcucccaagcacaaguu

SEQ ID NO: 115435 - RNA, 19 nt, Human
uaaggaaaaaaaaccacac

SEQ ID NO: 115436 - RNA, 20 nt, Human
uacaaaggaaaacaaagcua

SEQ ID NO: 115437 - RNA, 19 nt, Human
uacugcaaaguagcaaaau

SEQ ID NO: 115438 - RNA, 22 nt, Human
uagaaaagagaaaggaaaagaa

SEQ ID NO: 115439 - RNA, 20 nt, Human
uaggaccacaccaauaacca

SEQ ID NO: 115440 - RNA, 23 nt, Human
uccccgcugcaaagccgggcgaa

SEQ ID NO: 115441 - RNA, 20 nt, Human
uccgggccgaggugccugag

SEQ ID NO: 115442 - RNA, 21 nt, Human
uccgggccgaggugccugagg

SEQ ID NO: 115443 - RNA, 22 nt, Human
uccgggccgaggugccugaggc

SEQ ID NO: 115444 - RNA, 19 nt, Human
ucuccaaauggcagugccu

SEQ ID NO: 115445 - RNA, 22 nt, Human
ugaaauggaaugucuccaaaug

SEQ ID NO: 115446 - RNA, 18 nt, Human
ugaggcgccgccgccgaa

SEQ ID NO: 115447 - RNA, 22 nt, Human
ugauaaaaagcucagcuuuuaa

SEQ ID NO: 115448 - RNA, 20 nt, Human
ugcuuugauuguucucagau

SEQ ID NO: 115449 - RNA, 24 nt, Human
uggcaacauuaaaaaagaaagaaa

SEQ ID NO: 115450 - RNA, 24 nt, Human
uguccgggccgaggugccugaggc

SEQ ID NO: 115451 - RNA, 21 nt, Human
uugguuuuggcaacauuaaaa

SEQ ID NO: 115452 - RNA, 22 nt, Human
uuucaagucuuccuguuguaca

SEQ ID NO: 115453 - RNA, 19 nt, Human
uuucugcaaauuugggaga

SEQ ID NO: 115454 - RNA, 23 nt, Human
uuuucuguagggguggggguggg

SEQ ID NO: 115455 - RNA, 19 nt, Human
aaacagaaaaacggcacca

SEQ ID NO: 115456 - RNA, 23 nt, Human
aaacucccgaccucaagcaaucc

SEQ ID NO: 115457 - RNA, 20 nt, Human
aaaugccucugcucacccuu

SEQ ID NO: 115458 - RNA, 21 nt, Human
aacagcuggcaggagaggaug

SEQ ID NO: 115459 - RNA, 18 nt, Human
aauuacaggcgugagcca

SEQ ID NO: 115460 - RNA, 22 nt, Human
aauuacaggcgugagccacugc

SEQ ID NO: 115461 - RNA, 22 nt, Human
aauuacaggcgugagccacugc

SEQ ID NO: 115462 - RNA, 24 nt, Human
accauguuggucaggcuggucucg

SEQ ID NO: 115463 - RNA, 18 nt, Human
accucgugauccaccagc

SEQ ID NO: 115464 - RNA, 23 nt, Human
acugguuucaaacucccgaccuc

SEQ ID NO: 115465 - RNA, 20 nt, Human
agaaggcaaacagaaaaacg

SEQ ID NO: 115466 - RNA, 24 nt, Human
agagugcugggauuacaggcauga

SEQ ID NO: 115467 - RNA, 21 nt, Human
agcaauccgcccaccucagcc

SEQ ID NO: 115468 - RNA, 28 nt, Human
aggcaggaggccagacugaaggucgacc

SEQ ID NO: 115469 - RNA, 19 nt, Human
aggcugggccugcaggcca

SEQ ID NO: 115470 - RNA, 20 nt, Human
agggugaggagggcagaggu

SEQ ID NO: 115471 - RNA, 21 nt, Human
agguggcgguggcggcggcgg

SEQ ID NO: 115472 - RNA, 22 nt, Human
aguagagaugggguuucaccau

SEQ ID NO: 115473 - RNA, 18 nt, Human
agugcugggauuacaggc

SEQ ID NO: 115474 - RNA, 20 nt, Human
agugcugggauuacaggcau

SEQ ID NO: 115475 - RNA, 22 nt, Human
agugcugggauuacaggcauga

SEQ ID NO: 115476 - RNA, 21 nt, Human
augggguuucaccauguuggu

SEQ ID NO: 115477 - RNA, 23 nt, Human
augggguuucaccauguugguca

SEQ ID NO: 115478 - RNA, 24 nt, Human
augggguuucaccauguuggucag

SEQ ID NO: 115479 - RNA, 23 nt, Human
caaauuucaagugccagcagccu

SEQ ID NO: 115480 - RNA, 21 nt, Human
caacagaaggcaucaucugaa

SEQ ID NO: 115481 - RNA, 24 nt, Human
caacaugcuggaauuacaggcgug

SEQ ID NO: 115482 - RNA, 19 nt, Human
caaccuagauccuuccagc

SEQ ID NO: 115483 - RNA, 20 nt, Human
caagaaggcaaacagaaaaa

SEQ ID NO: 115484 - RNA, 18 nt, Human
cacagacaggucaaccua

SEQ ID NO: 115485 - RNA, 18 nt, Human
caccagccucggccuccc

SEQ ID NO: 115486 - RNA, 21 nt, Human
caccauguuggucaggcuggu

SEQ ID NO: 115487 - RNA, 24 nt, Human
caccauguuggucaggcuggucuc

SEQ ID NO: 115488 - RNA, 24 nt, Human
caccucagccucccagagugcugg

SEQ ID NO: 115489 - RNA, 21 nt, Human
cagacugauugcccuucucaa

SEQ ID NO: 115490 - RNA, 24 nt, Human
cagagugcugggauuacaggcaug

SEQ ID NO: 115491 - RNA, 20 nt, Human
cagguggcgguggcggcggc

SEQ ID NO: 115492 - RNA, 22 nt, Human
ccaacaugcuggaauuacaggc

SEQ ID NO: 115493 - RNA, 24 nt, Human
ccaacaugcuggaauuacaggcgu

SEQ ID NO: 115494 - RNA, 21 nt, Human
ccagaaaggcaggaggccaga

SEQ ID NO: 115495 - RNA, 23 nt, Human
ccagagugcugggauuacaggca

SEQ ID NO: 115496 - RNA, 24 nt, Human
ccagagugcugggauuacaggcau

SEQ ID NO: 115497 - RNA, 20 nt, Human
ccaggcugggccugcaggcc

SEQ ID NO: 115498 - RNA, 24 nt, Human
cccagagugcugggauuacaggca

SEQ ID NO: 115499 - RNA, 24 nt, Human
cccgaccucaagcaauccgcccac

SEQ ID NO: 115500 - RNA, 22 nt, Human
cccugagggugaggagggcaga

SEQ ID NO: 115501 - RNA, 21 nt, Human
ccgcccaccucagccucccag

SEQ ID NO: 115502 - RNA, 25 nt, Human
ccgcccaccucagccucccagagug

SEQ ID NO: 115503 - RNA, 18 nt, Human
ccgcgcuccucgccgccc

SEQ ID NO: 115504 - RNA, 23 nt, Human
ccgcgcuccucgccgcccgccga

SEQ ID NO: 115505 - RNA, 25 nt, Human
ccucucugcuuccagccuccaggag

SEQ ID NO: 115506 - RNA, 25 nt, Human
cgaccucaagcaauccgcccaccuc

SEQ ID NO: 115507 - RNA, 21 nt, Human
cggcggcguccagcuccggcu

SEQ ID NO: 115508 - RNA, 24 nt, Human
cgugauccaccagccucggccucc

SEQ ID NO: 115509 - RNA, 21 nt, Human
cucaagcaauccgcccaccuc

SEQ ID NO: 115510 - RNA, 24 nt, Human
cucaagcaauccgcccaccucagc

SEQ ID NO: 115511 - RNA, 22 nt, Human
cucacccuuaaucaguucccca

SEQ ID NO: 115512 - RNA, 23 nt, Human
cucccgaccucaagcaauccgcc

SEQ ID NO: 115513 - RNA, 20 nt, Human
cuccgcgcuccucgccgccc

SEQ ID NO: 115514 - RNA, 19 nt, Human
cucugcuuccagccuccag

SEQ ID NO: 115515 - RNA, 18 nt, Human
cugcugaccucgugaucc

SEQ ID NO: 115516 - RNA, 24 nt, Human
cuuccccuauucucuggaccacag

SEQ ID NO: 115517 - RNA, 24 nt, Human
gaccucaagcaauccgcccaccuc

SEQ ID NO: 115518 - RNA, 22 nt, Human
gaccucgugauccaccagccuc

SEQ ID NO: 115519 - RNA, 22 nt, Human
gaccucgugauccaccagccuc

SEQ ID NO: 115520 - RNA, 24 nt, Human
gaccucgugauccaccagccucgg

SEQ ID NO: 115521 - RNA, 24 nt, Human
gagaugggguuucaccauguuggu

SEQ ID NO: 115522 - RNA, 18 nt, Human
gagggugaggagggcaga

SEQ ID NO: 115523 - RNA, 19 nt, Human
gagugcugggauuacaggc

SEQ ID NO: 115524 - RNA, 18 nt, Human
gauuacaggcaugagcca

SEQ ID NO: 115525 - RNA, 22 nt, Human
gauuacaggcaugagccacugc

SEQ ID NO: 115526 - RNA, 22 nt, Human
gauuacaggcaugagccacugc

SEQ ID NO: 115527 - RNA, 21 nt, Human
gcaaacagaaaaacggcacca

SEQ ID NO: 115528 - RNA, 26 nt, Human
gcgguggcggcggcggcguccagcuc

SEQ ID NO: 115529 - RNA, 22 nt, Human
gcuccggcuccgcgcuccucgc

SEQ ID NO: 115530 - RNA, 24 nt, Human
gcuuccagccuccaggagcuccac

SEQ ID NO: 115531 - RNA, 18 nt, Human
ggacuugugguuugguuc

SEQ ID NO: 115532 - RNA, 22 nt, Human
ggauuacaggcaugagccacug

SEQ ID NO: 115533 - RNA, 18 nt, Human
ggcccuuaauaacagaau

SEQ ID NO: 115534 - RNA, 22 nt, Human
gggguuucaccauguuggucag

SEQ ID NO: 115535 - RNA, 19 nt, Human
ggucucgaacugcugaccu

SEQ ID NO: 115536 - RNA, 23 nt, Human
guagagaugggguuucaccaugu

SEQ ID NO: 115537 - RNA, 24 nt, Human
gugauccaccagccucggccuccc

SEQ ID NO: 115538 - RNA, 20 nt, Human
guggcgguggcggcggcggc

SEQ ID NO: 115539 - RNA, 20 nt, Human
guggcgguggcggcggcggc

SEQ ID NO: 115540 - RNA, 25 nt, Human
gugucccugagggugaggagggcag

SEQ ID NO: 115541 - RNA, 22 nt, Human
guuugguucuaaaccuccccau

SEQ ID NO: 115542 - RNA, 20 nt, Human
uaaauuguuuguccaggcug

SEQ ID NO: 115543 - RNA, 22 nt, Human
uacaggcgugagccacugcgcc

SEQ ID NO: 115544 - RNA, 23 nt, Human
uacaggcgugagccacugcgccu

SEQ ID NO: 115545 - RNA, 19 nt, Human
uaccuccucucugcuucca

SEQ ID NO: 115546 - RNA, 22 nt, Human
uaccuccucucugcuuccagcc

SEQ ID NO: 115547 - RNA, 22 nt, Human
uagagaugggguuucaccaugu

SEQ ID NO: 115548 - RNA, 24 nt, Human
uaguagagaugggguuucaccaug

SEQ ID NO: 115549 - RNA, 25 nt, Human
uaguagagaugggguuucaccaugu

SEQ ID NO: 115550 - RNA, 26 nt, Human
uaguagagaugggguuucaccauguu

SEQ ID NO: 115551 - RNA, 24 nt, Human
uccaccagccucggccucccaaca

SEQ ID NO: 115552 - RNA, 24 nt, Human
ucccagagugcugggauuacaggc

SEQ ID NO: 115553 - RNA, 23 nt, Human
uccccaggcagagucugcaacag

SEQ ID NO: 115554 - RNA, 20 nt, Human
ucccugagggugaggagggc

SEQ ID NO: 115555 - RNA, 24 nt, Human
ucccugagggugaggagggcagag

SEQ ID NO: 115556 - RNA, 21 nt, Human
uccgcccaccucagccuccca

SEQ ID NO: 115557 - RNA, 22 nt, Human
uccgcccaccucagccucccag

SEQ ID NO: 115558 - RNA, 19 nt, Human
uccuugaggggacuugugg

SEQ ID NO: 115559 - RNA, 20 nt, Human
ucgccgcccgccgacucccg

SEQ ID NO: 115560 - RNA, 18 nt, Human
ugaaaacaaagucaauuc

SEQ ID NO: 115561 - RNA, 19 nt, Human
ugcaacagcuggcaggaga

SEQ ID NO: 115562 - RNA, 24 nt, Human
ugcaagaaggcaaacagaaaaacg

SEQ ID NO: 115563 - RNA, 26 nt, Human
ugcaagaaggcaaacagaaaaacggc

SEQ ID NO: 115564 - RNA, 21 nt, Human
ugccagcagccuggguuuaug

SEQ ID NO: 115565 - RNA, 24 nt, Human
ugcuggaauuacaggcgugagcca

SEQ ID NO: 115566 - RNA, 19 nt, Human
uggaauuacaggcgugagc

SEQ ID NO: 115567 - RNA, 21 nt, Human
uggaauuacaggcgugagcca

SEQ ID NO: 115568 - RNA, 22 nt, Human
uggaauuacaggcgugagccac

SEQ ID NO: 115569 - RNA, 22 nt, Human
uggaauuacaggcgugagccac

SEQ ID NO: 115570 - RNA, 24 nt, Human
uggaauuacaggcgugagccacug

SEQ ID NO: 115571 - RNA, 24 nt, Human
uggaauuacaggcgugagccacug

SEQ ID NO: 115572 - RNA, 18 nt, Human
uggcgguggcggcggcgg

SEQ ID NO: 115573 - RNA, 18 nt, Human
ugggauuacaggcaugag

SEQ ID NO: 115574 - RNA, 19 nt, Human
ugggauuacaggcaugagc

SEQ ID NO: 115575 - RNA, 21 nt, Human
ugggauuacaggcaugagcca

SEQ ID NO: 115576 - RNA, 22 nt, Human
ugggauuacaggcaugagccac

SEQ ID NO: 115577 - RNA, 22 nt, Human
ugggauuacaggcaugagccac

SEQ ID NO: 115578 - RNA, 23 nt, Human
ugggauuacaggcaugagccacu

SEQ ID NO: 115579 - RNA, 24 nt, Human
ugggauuacaggcaugagccacug

SEQ ID NO: 115580 - RNA, 24 nt, Human
ugggauuacaggcaugagccacug

SEQ ID NO: 115581 - RNA, 19 nt, Human
ugggccugcaggccagaaa

SEQ ID NO: 115582 - RNA, 24 nt, Human
ugggguuucaccauguuggucagg

SEQ ID NO: 115583 - RNA, 24 nt, Human
uggucaggcuggucucgaacugcu

SEQ ID NO: 115584 - RNA, 22 nt, Human
ugucccacuggaaucucuuuca

SEQ ID NO: 115585 - RNA, 23 nt, Human
uguucuuuccucuugagaaguua

SEQ ID NO: 115586 - RNA, 18 nt, Human
uuaguagagaugggguuu

SEQ ID NO: 115587 - RNA, 22 nt, Human
uuaguagagaugggguuucacc

SEQ ID NO: 115588 - RNA, 24 nt, Human
uuaguagagaugggguuucaccau

SEQ ID NO: 115589 - RNA, 24 nt, Human
uuucaccauguuggucaggcuggu

SEQ ID NO: 115590 - RNA, 24 nt, Human
uuuuuaguagagaugggguuucac

SEQ ID NO: 115591 - RNA, 23 nt, Human
uuuuuuaguagagaugggguuuc

SEQ ID NO: 115592 - RNA, 24 nt, Human
uuuuuuuuuuuuuuaguagagaug

SEQ ID NO: 115593 - RNA, 26 nt, Human
uuuuuuuuuuuuuuuuaguagagaug

SEQ ID NO: 115594 - RNA, 18 nt, Human
aagcaggagaauugcuug

SEQ ID NO: 115595 - RNA, 24 nt, Human
aagcaggagaauugcuugaaccca

SEQ ID NO: 115596 - RNA, 21 nt, Human
aagcuucagaggaaacaaacu

SEQ ID NO: 115597 - RNA, 20 nt, Human
aauugcuugaacccagacgg

SEQ ID NO: 115598 - RNA, 25 nt, Human
acaagcuucagaggaaagggaacgc

SEQ ID NO: 115599 - RNA, 20 nt, Human
accccgcugcagcagucaag

SEQ ID NO: 115600 - RNA, 24 nt, Human
acugcacuccagcuugggcaacag

SEQ ID NO: 115601 - RNA, 24 nt, Human
agacggcagagguugcagugagcc

SEQ ID NO: 115602 - RNA, 20 nt, Human
agaggccugggagccugggg

SEQ ID NO: 115603 - RNA, 24 nt, Human
agagguugcagugagccgagaucg

SEQ ID NO: 115604 - RNA, 24 nt, Human
agcuugggcaacagaaugagacuc

SEQ ID NO: 115605 - RNA, 24 nt, Human
aggcugaagcaggagaauugcuug

SEQ ID NO: 115606 - RNA, 21 nt, Human
agggcugccagcuaagaccau

SEQ ID NO: 115607 - RNA, 24 nt, Human
aucgcgccacugcacuccagcuug

SEQ ID NO: 115608 - RNA, 18 nt, Human
cacccucuagcccugccu

SEQ ID NO: 115609 - RNA, 18 nt, Human
cacugcacuccagcuugg

SEQ ID NO: 115610 - RNA, 19 nt, Human
cacugcacuccagcuuggg

SEQ ID NO: 115611 - RNA, 21 nt, Human
cacugcacuccagcuugggca

SEQ ID NO: 115612 - RNA, 23 nt, Human
cacugcacuccagcuugggcaac

SEQ ID NO: 115613 - RNA, 24 nt, Human
cacugcacuccagcuugggcaaca

SEQ ID NO: 115614 - RNA, 20 nt, Human
ccacugcacuccagcuuggg

SEQ ID NO: 115615 - RNA, 21 nt, Human
ccacugcacuccagcuugggc

SEQ ID NO: 115616 - RNA, 23 nt, Human
ccacugcacuccagcuugggcaa

SEQ ID NO: 115617 - RNA, 24 nt, Human
ccacugcacuccagcuugggcaac

SEQ ID NO: 115618 - RNA, 24 nt, Human
ccagcuaagaccaugaaggcugua

SEQ ID NO: 115619 - RNA, 18 nt, Human
cccucuagcccugccucc

SEQ ID NO: 115620 - RNA, 21 nt, Human
ccucuagcccugccucccuca

SEQ ID NO: 115621 - RNA, 22 nt, Human
ccuucuagcuccgaaauuccag

SEQ ID NO: 115622 - RNA, 24 nt, Human
cgccacugcacuccagcuugggca

SEQ ID NO: 115623 - RNA, 22 nt, Human
cgcgccacugcacuccagcuug

SEQ ID NO: 115624 - RNA, 26 nt, Human
cuagucacccucuagcccugccuccc

SEQ ID NO: 115625 - RNA, 22 nt, Human
cucuagcccugccucccucauu

SEQ ID NO: 115626 - RNA, 26 nt, Human
cuucuagcuccgaaauuccaggcauc

SEQ ID NO: 115627 - RNA, 23 nt, Human
gagaucgcgccacugcacuccag

SEQ ID NO: 115628 - RNA, 22 nt, Human
gccacugcacuccagcuugggc

SEQ ID NO: 115629 - RNA, 24 nt, Human
gccacugcacuccagcuugggcaa

SEQ ID NO: 115630 - RNA, 20 nt, Human
gccgagaucgcgccacugca

SEQ ID NO: 115631 - RNA, 23 nt, Human
gcuccgaaauuccaggcaucuga

SEQ ID NO: 115632 - RNA, 18 nt, Human
ggcagagguugcagugag

SEQ ID NO: 115633 - RNA, 20 nt, Human
ggcagagguugcagugagcc

SEQ ID NO: 115634 - RNA, 23 nt, Human
ggcagagguugcagugagccgag

SEQ ID NO: 115635 - RNA, 19 nt, Human
guugcagugagccgagauc

SEQ ID NO: 115636 - RNA, 21 nt, Human
guugcagugagccgagaucgc

SEQ ID NO: 115637 - RNA, 21 nt, Human
uaacgggaaucugacuaccuu

SEQ ID NO: 115638 - RNA, 21 nt, Human
uaugccacaugggggccacgg

SEQ ID NO: 115639 - RNA, 22 nt, Human
uaugccacaugggggccacggg

SEQ ID NO: 115640 - RNA, 21 nt, Human
ucaagauaacgggaaucugac

SEQ ID NO: 115641 - RNA, 24 nt, Human
uccagcuugggcaacagaaugaga

SEQ ID NO: 115642 - RNA, 20 nt, Human
ucccagagaccccgcugcag

SEQ ID NO: 115643 - RNA, 23 nt, Human
ucgggaggcugaagcaggagaau

SEQ ID NO: 115644 - RNA, 24 nt, Human
ugaacccagacggcagagguugca

SEQ ID NO: 115645 - RNA, 24 nt, Human
ugaagcaggagaauugcuugaacc

SEQ ID NO: 115646 - RNA, 25 nt, Human
ugaagcaggagaauugcuugaaccc

SEQ ID NO: 115647 - RNA, 22 nt, Human
ugagccgagaucgcgccacugc

SEQ ID NO: 115648 - RNA, 21 nt, Human
ugcacagaugggccgugugga

SEQ ID NO: 115649 - RNA, 19 nt, Human
ugggaggccuggcugcuag

SEQ ID NO: 115650 - RNA, 22 nt, Human
uuaugccacaugggggccacgg

SEQ ID NO: 115651 - RNA, 23 nt, Human
uuaugccacaugggggccacggg

SEQ ID NO: 115652 - RNA, 20 nt, Human
uucagaggaaacaaacuugu

SEQ ID NO: 115653 - RNA, 18 nt, Human
uugcagugagccgagauc

SEQ ID NO: 115654 - RNA, 19 nt, Human
uugcagugagccgagaucg

SEQ ID NO: 115655 - RNA, 22 nt, Human
uugcagugagccgagaucgcgc

SEQ ID NO: 115656 - RNA, 23 nt, Human
aaccacaaaaaaaaucuuuauca

SEQ ID NO: 115657 - RNA, 18 nt, Human
aagaaaagcccagugccc

SEQ ID NO: 115658 - RNA, 19 nt, Human
cacccugcugcugcucuuc

SEQ ID NO: 115659 - RNA, 24 nt, Human
cagucgaaccacaaaaaaaaucuu

SEQ ID NO: 115660 - RNA, 21 nt, Human
cauaaugaacaucagaagaaa

SEQ ID NO: 115661 - RNA, 20 nt, Human
ccagcaccauaaugaacauc

SEQ ID NO: 115662 - RNA, 23 nt, Human
ccagcaccauaaugaacaucaga

SEQ ID NO: 115663 - RNA, 21 nt, Human
ccagucgaaccacaaaaaaaa

SEQ ID NO: 115664 - RNA, 21 nt, Human
cccgcacucagcacaguccag

SEQ ID NO: 115665 - RNA, 21 nt, Human
cccugcugcugcucuuccuuc

SEQ ID NO: 115666 - RNA, 20 nt, Human
ccugcugcugcucuuccuuc

SEQ ID NO: 115667 - RNA, 20 nt, Human
cucccacccugcugcugcuc

SEQ ID NO: 115668 - RNA, 18 nt, Human
gaaccacaaaaaaaaucu

SEQ ID NO: 115669 - RNA, 24 nt, Human
gggaaggaggagaggaaagaucac

SEQ ID NO: 115670 - RNA, 19 nt, Human
ucaaagacagagcuuccca

SEQ ID NO: 115671 - RNA, 24 nt, Human
ucgaaccacaaaaaaaaucuuuau

SEQ ID NO: 115672 - RNA, 21 nt, Human
ugacuggagcuucucucccac

SEQ ID NO: 115673 - RNA, 21 nt, Human
ugacuugggaaggaggagagg

SEQ ID NO: 115674 - RNA, 23 nt, Human
uggcagcccugaaaucaauguuu

SEQ ID NO: 115675 - RNA, 18 nt, Human
uuacucaagacacgucag

SEQ ID NO: 115676 - RNA, 21 nt, Human
aaaaaugcaggcccuggcuca

SEQ ID NO: 115677 - RNA, 21 nt, Human
aaaauucccagaacccugcuu

SEQ ID NO: 115678 - RNA, 18 nt, Human
aaacagaauagagggugg

SEQ ID NO: 115679 - RNA, 24 nt, Human
aaacagaauagagggugggguugg

SEQ ID NO: 115680 - RNA, 22 nt, Human
aacugcuuccaacagugucuau

SEQ ID NO: 115681 - RNA, 19 nt, Human
aagaaacagaauagagggu

SEQ ID NO: 115682 - RNA, 21 nt, Human
aagaaacagaauagagggugg

SEQ ID NO: 115683 - RNA, 20 nt, Human
aauaccugggggcagccaag

SEQ ID NO: 115684 - RNA, 22 nt, Human
accccgaccaaugaaucccuac

SEQ ID NO: 115685 - RNA, 20 nt, Human
acucugcugggcauguggag

SEQ ID NO: 115686 - RNA, 19 nt, Human
agaacccugcuucuggcuc

SEQ ID NO: 115687 - RNA, 20 nt, Human
agaauagagggugggguugg

SEQ ID NO: 115688 - RNA, 24 nt, Human
agacagcagaucaugaggcucaca

SEQ ID NO: 115689 - RNA, 19 nt, Human
agagauguauaaagacccu

SEQ ID NO: 115690 - RNA, 18 nt, Human
agaggaagcuguguaugu

SEQ ID NO: 115691 - RNA, 22 nt, Human
agagggugggguuggaggagag

SEQ ID NO: 115692 - RNA, 21 nt, Human
agagguacaguaauggggugg

SEQ ID NO: 115693 - RNA, 18 nt, Human
agaugggacucugcagac

SEQ ID NO: 115694 - RNA, 20 nt, Human
agcacacccuucuuccuaac

SEQ ID NO: 115695 - RNA, 19 nt, Human
aggaaaagagaaucaauga

SEQ ID NO: 115696 - RNA, 21 nt, Human
aggaagaaacagaauagaggg

SEQ ID NO: 115697 - RNA, 26 nt, Human
aggaagaaacagaauagaggggaccc

SEQ ID NO: 115698 - RNA, 21 nt, Human
aggaagcuguguauguguacc

SEQ ID NO: 115699 - RNA, 21 nt, Human
aggauggaaccaaaagaggaa

SEQ ID NO: 115700 - RNA, 23 nt, Human
aggauggacauguauuuuucacc

SEQ ID NO: 115701 - RNA, 18 nt, Human
aggccuuugagggaccug

SEQ ID NO: 115702 - RNA, 24 nt, Human
auaccugggggcagccaagaggga

SEQ ID NO: 115703 - RNA, 23 nt, Human
caaaauucccagaacccugcuuc

SEQ ID NO: 115704 - RNA, 20 nt, Human
caacagugucuauauguuaa

SEQ ID NO: 115705 - RNA, 21 nt, Human
caaggcaaacauguggaaucc

SEQ ID NO: 115706 - RNA, 22 nt, Human
cacaaaggacuaaaaagcugca

SEQ ID NO: 115707 - RNA, 23 nt, Human
cacaaaggacuaaaaagcugcag

SEQ ID NO: 115708 - RNA, 23 nt, Human
cacaccuggccacaggauaacuu

SEQ ID NO: 115709 - RNA, 18 nt, Human
cacgggacgcugggcgcc

SEQ ID NO: 115710 - RNA, 19 nt, Human
cagaauagagggugggguu

SEQ ID NO: 115711 - RNA, 20 nt, Human
cagaggaguggcgacccaca

SEQ ID NO: 115712 - RNA, 19 nt, Human
cagcagugcccugggagac

SEQ ID NO: 115713 - RNA, 25 nt, Human
cagcagugcccugggagacugagua

SEQ ID NO: 115714 - RNA, 18 nt, Human
caggggcuggcaguccag

SEQ ID NO: 115715 - RNA, 18 nt, Human
cagucaccaggaaggggg

SEQ ID NO: 115716 - RNA, 19 nt, Human
cagugcacagcagccgggu

SEQ ID NO: 115717 - RNA, 22 nt, Human
cauccugucaagcuucaagacc

SEQ ID NO: 115718 - RNA, 18 nt, Human
cauguggaauccccaguc

SEQ ID NO: 115719 - RNA, 18 nt, Human
ccagacauuccuaugcaa

SEQ ID NO: 115720 - RNA, 21 nt, Human
ccagcagugcccugggagacu

SEQ ID NO: 115721 - RNA, 18 nt, Human
ccagugcacagcagccgg

SEQ ID NO: 115722 - RNA, 22 nt, Human
cccaagggacaggaaugugagc

SEQ ID NO: 115723 - RNA, 20 nt, Human
ccccgaccaaugaaucccua

SEQ ID NO: 115724 - RNA, 26 nt, Human
cccgccccccugugggaaggagaccc

SEQ ID NO: 115725 - RNA, 20 nt, Human
ccuggcagcggagggaaagg

SEQ ID NO: 115726 - RNA, 18 nt, Human
cgagaccacaccuggcca

SEQ ID NO: 115727 - RNA, 19 nt, Human
cggaccagcagugcccugg

SEQ ID NO: 115728 - RNA, 22 nt, Human
cgggcuccgaaaggagagcgug

SEQ ID NO: 115729 - RNA, 18 nt, Human
cgucacuuccggcgggcg

SEQ ID NO: 115730 - RNA, 20 nt, Human
cuggccaccaagugccacuc

SEQ ID NO: 115731 - RNA, 20 nt, Human
cuguguauguguacccccau

SEQ ID NO: 115732 - RNA, 22 nt, Human
cuuccccgccccccugugggag

SEQ ID NO: 115733 - RNA, 21 nt, Human
cuugagacucccaaggcaaag

SEQ ID NO: 115734 - RNA, 23 nt, Human
cuuucuggccaccaagugccacu

SEQ ID NO: 115735 - RNA, 19 nt, Human
gaaaacauccugucaagcu

SEQ ID NO: 115736 - RNA, 22 nt, Human
gaaaggagagcguggugucugg

SEQ ID NO: 115737 - RNA, 24 nt, Human
gacccucaaagggaaaaauaauuc

SEQ ID NO: 115738 - RNA, 20 nt, Human
gagcucacagaacuacagac

SEQ ID NO: 115739 - RNA, 18 nt, Human
gagcugaugcauuucuua

SEQ ID NO: 115740 - RNA, 18 nt, Human
gaggaggaagaaacagaa

SEQ ID NO: 115741 - RNA, 22 nt, Human
gaggaggaagaaacagaauaga

SEQ ID NO: 115742 - RNA, 23 nt, Human
gaggaggaagaaacagaauagag

SEQ ID NO: 115743 - RNA, 19 nt, Human
gaguggcgacccacaguag

SEQ ID NO: 115744 - RNA, 21 nt, Human
gcagccaagagggaagauuuc

SEQ ID NO: 115745 - RNA, 19 nt, Human
gccggguccuagcuauugg

SEQ ID NO: 115746 - RNA, 21 nt, Human
gcuacccuuuuagaaggaacu

SEQ ID NO: 115747 - RNA, 26 nt, Human
ggaagggacuggcuggaguguggcgg

SEQ ID NO: 115748 - RNA, 23 nt, Human
ggagagcguggugucuggaggug

SEQ ID NO: 115749 - RNA, 24 nt, Human
ggauggaaccaaaagaggaagcug

SEQ ID NO: 115750 - RNA, 18 nt, Human
ggcagccaagagggaaga

SEQ ID NO: 115751 - RNA, 20 nt, Human
ggcggugggcgucccagugc

SEQ ID NO: 115752 - RNA, 24 nt, Human
gggacaggaaugugagcucugugg

SEQ ID NO: 115753 - RNA, 22 nt, Human
gggagcacaaaggacuaaaaag

SEQ ID NO: 115754 - RNA, 18 nt, Human
ggugguaaggauggaacc

SEQ ID NO: 115755 - RNA, 20 nt, Human
guaaggauggaaccaaaaga

SEQ ID NO: 115756 - RNA, 21 nt, Human
guauuaaguccagggcuaccc

SEQ ID NO: 115757 - RNA, 23 nt, Human
uaacuucccuucucaauacagcc

SEQ ID NO: 115758 - RNA, 19 nt, Human
uaccacaacaugcucgccu

SEQ ID NO: 115759 - RNA, 24 nt, Human
uagaaggaacugcuuccaacagug

SEQ ID NO: 115760 - RNA, 18 nt, Human
uaguuccgggccgucacu

SEQ ID NO: 115761 - RNA, 18 nt, Human
ucccuguguccucucucc

SEQ ID NO: 115762 - RNA, 23 nt, Human
ucugcagacccgugggagcacaa

SEQ ID NO: 115763 - RNA, 20 nt, Human
ucugugggcugguuagccca

SEQ ID NO: 115764 - RNA, 20 nt, Human
ugaagggaggacaggggcug

SEQ ID NO: 115765 - RNA, 21 nt, Human
ugagacucccaaggcaaacau

SEQ ID NO: 115766 - RNA, 25 nt, Human
ugaggaggaagaaacagaauagagg

SEQ ID NO: 115767 - RNA, 23 nt, Human
ugcaauguucuccacaguaaaua

SEQ ID NO: 115768 - RNA, 19 nt, Human
ugccugugacuccuuggag

SEQ ID NO: 115769 - RNA, 20 nt, Human
uggaaccaaaagaggaagcu

SEQ ID NO: 115770 - RNA, 21 nt, Human
uggaaccaaaagaggaagcug

SEQ ID NO: 115771 - RNA, 21 nt, Human
ugggacucugcagacccgugg

SEQ ID NO: 115772 - RNA, 22 nt, Human
ugggacucugcagacccguggg

SEQ ID NO: 115773 - RNA, 24 nt, Human
ugggagcacaaaggacuaaaaagc

SEQ ID NO: 115774 - RNA, 22 nt, Human
ugggggcagccaagagggaaga

SEQ ID NO: 115775 - RNA, 22 nt, Human
uggggugggggccagagguauc

SEQ ID NO: 115776 - RNA, 27 nt, Human
uggggugggggccagagguauccggcu

SEQ ID NO: 115777 - RNA, 25 nt, Human
uggguaauauuuaaaaaaaaaaaaa

SEQ ID NO: 115778 - RNA, 26 nt, Human
ugguaaccgagaccacaccuggccac

SEQ ID NO: 115779 - RNA, 21 nt, Human
ugguaaggauggaaccaaaag

SEQ ID NO: 115780 - RNA, 23 nt, Human
ugguaaggauggaaccaaaagag

SEQ ID NO: 115781 - RNA, 19 nt, Human
uggugucuggaggugaucg

SEQ ID NO: 115782 - RNA, 19 nt, Human
uguagaggcuuuuuccaga

SEQ ID NO: 115783 - RNA, 19 nt, Human
uguauaaagacccucaaag

SEQ ID NO: 115784 - RNA, 19 nt, Human
ugugagcucugugggcugg

SEQ ID NO: 115785 - RNA, 19 nt, Human
uguggcgggcugacagguc

SEQ ID NO: 115786 - RNA, 19 nt, Human
uguguauguguacccccau

SEQ ID NO: 115787 - RNA, 20 nt, Human
uucacugacugagcugaugc

SEQ ID NO: 115788 - RNA, 24 nt, Human
uucccagaacccugcuucuggcuc

SEQ ID NO: 115789 - RNA, 19 nt, Human
uucccuucucaauacagcc

SEQ ID NO: 115790 - RNA, 21 nt, Human
uuguggaaggaaaagagaauc

SEQ ID NO: 115791 - RNA, 21 nt, Human
uuuaaaaaaaaaaaaaacugu

SEQ ID NO: 115792 - RNA, 21 nt, Human
uuuuuuguauucacugacuga

SEQ ID NO: 115793 - RNA, 18 nt, Human
uuuuuuuuuuuuuucuug

SEQ ID NO: 115794 - RNA, 19 nt, Human
uuuuuuuuuuuuuucuugu

SEQ ID NO: 115795 - RNA, 23 nt, Human
aaaaaacaaagcggcuuaguggg

SEQ ID NO: 115796 - RNA, 23 nt, Human
aaaaauuaguugagaaaaaauaa

SEQ ID NO: 115797 - RNA, 18 nt, Human
aaaauacugacuauucau

SEQ ID NO: 115798 - RNA, 21 nt, Human
aaaauacugacuauucauaau

SEQ ID NO: 115799 - RNA, 18 nt, Human
aaacaaauaacccugagc

SEQ ID NO: 115800 - RNA, 20 nt, Human
aaagacaagagaguuaucaa

SEQ ID NO: 115801 - RNA, 22 nt, Human
aaauagcccuaaaccuuaaagg

SEQ ID NO: 115802 - RNA, 25 nt, Human
aacacagaaaaugaaaauauuuaga

SEQ ID NO: 115803 - RNA, 18 nt, Human
aacacccacccgccucuc

SEQ ID NO: 115804 - RNA, 23 nt, Human
aagcggcuuauuuuaauaguauc

SEQ ID NO: 115805 - RNA, 19 nt, Human
aagggaauuauggaauuaa

SEQ ID NO: 115806 - RNA, 20 nt, Human
aagggaauuauggaauuaag

SEQ ID NO: 115807 - RNA, 26 nt, Human
aauagcccuaaaccuuaaaggacaaa

SEQ ID NO: 115808 - RNA, 18 nt, Human
acaacagcgugagauuuc

SEQ ID NO: 115809 - RNA, 25 nt, Human
acacagaaaaugaaaauauuuagaa

SEQ ID NO: 115810 - RNA, 21 nt, Human
acccucugaacuaacacccac

SEQ ID NO: 115811 - RNA, 26 nt, Human
acccugagcauacauuuuugaaaaac

SEQ ID NO: 115812 - RNA, 25 nt, Human
acuagacucuacauugggcagccuu

SEQ ID NO: 115813 - RNA, 22 nt, Human
agaaggacaggaugaauacugg

SEQ ID NO: 115814 - RNA, 21 nt, Human
agaauuuaaaucuuuggacaa

SEQ ID NO: 115815 - RNA, 19 nt, Human
agcacaaguaaauucuuua

SEQ ID NO: 115816 - RNA, 18 nt, Human
aggaagacuuaguugcug

SEQ ID NO: 115817 - RNA, 22 nt, Human
aggccaaccaauuuaacugcag

SEQ ID NO: 115818 - RNA, 19 nt, Human
aggugccaacucucuaaaa

SEQ ID NO: 115819 - RNA, 24 nt, Human
aguaaagacaagagaguuaucaag

SEQ ID NO: 115820 - RNA, 24 nt, Human
auaaaauagcccuaaaccuuaaag

SEQ ID NO: 115821 - RNA, 19 nt, Human
auaccuaccaacaugucaa

SEQ ID NO: 115822 - RNA, 24 nt, Human
aucgucacacagcugugauaagag

SEQ ID NO: 115823 - RNA, 25 nt, Human
augccugcauauuuaaaaaacaaag

SEQ ID NO: 115824 - RNA, 24 nt, Human
auguaaaagucaauuugcacuucu

SEQ ID NO: 115825 - RNA, 24 nt, Human
auuuuucuaaucuuucuucuacua

SEQ ID NO: 115826 - RNA, 22 nt, Human
caaaggcaccuacaguugaaau

SEQ ID NO: 115827 - RNA, 21 nt, Human
caccuacaguugaaauuuuuc

SEQ ID NO: 115828 - RNA, 23 nt, Human
cagaaagcguucuucuguaacuu

SEQ ID NO: 115829 - RNA, 22 nt, Human
ccaaaaaucacaacuuugaagg

SEQ ID NO: 115830 - RNA, 22 nt, Human
cccaugccugcauauuuaaaaa

SEQ ID NO: 115831 - RNA, 25 nt, Human
cccucugaacuaacacccacccgcc

SEQ ID NO: 115832 - RNA, 26 nt, Human
cuaccacaucaaaggugccaacucuc

SEQ ID NO: 115833 - RNA, 21 nt, Human
cuuaaaacuucagcagaagaa

SEQ ID NO: 115834 - RNA, 23 nt, Human
cuucuacuagacugugacucucc

SEQ ID NO: 115835 - RNA, 19 nt, Human
cuuuggcuaacagccuagu

SEQ ID NO: 115836 - RNA, 24 nt, Human
gaacuaacacccacccgccucuca

SEQ ID NO: 115837 - RNA, 20 nt, Human
gacacaauaaacaugguuag

SEQ ID NO: 115838 - RNA, 21 nt, Human
gaugaauacuggccauuuucu

SEQ ID NO: 115839 - RNA, 24 nt, Human
gccaggaucagaaagcguucuucu

SEQ ID NO: 115840 - RNA, 21 nt, Human
gcccuaaaccuuaaaggacaa

SEQ ID NO: 115841 - RNA, 20 nt, Human
ggaauggggaaagagaagga

SEQ ID NO: 115842 - RNA, 23 nt, Human
uaaauaugauucuuuguaaugcu

SEQ ID NO: 115843 - RNA, 19 nt, Human
uaacaguuccaggauaaca

SEQ ID NO: 115844 - RNA, 24 nt, Human
uaccacaucaaaggugccaacucu

SEQ ID NO: 115845 - RNA, 21 nt, Human
uaccuaccaacaugucaaagc

SEQ ID NO: 115846 - RNA, 19 nt, Human
uacucacuuaaaacuucag

SEQ ID NO: 115847 - RNA, 22 nt, Human
uagaagaaaguggaugaucagc

SEQ ID NO: 115848 - RNA, 19 nt, Human
uagguugcaaaggcaccua

SEQ ID NO: 115849 - RNA, 18 nt, Human
uauccagagauguuagag

SEQ ID NO: 115850 - RNA, 21 nt, Human
uaugauacuacaguuucaaag

SEQ ID NO: 115851 - RNA, 23 nt, Human
ucccaaaaaucacaacuuugaag

SEQ ID NO: 115852 - RNA, 19 nt, Human
uccugacaacagcgugaga

SEQ ID NO: 115853 - RNA, 22 nt, Human
ucuacuagacugugacucucca

SEQ ID NO: 115854 - RNA, 23 nt, Human
ucuguaacuucuucauguugacc

SEQ ID NO: 115855 - RNA, 21 nt, Human
ucuuuauaauccucugguuua

SEQ ID NO: 115856 - RNA, 21 nt, Human
ugaaacaaauaacccugagca

SEQ ID NO: 115857 - RNA, 18 nt, Human
ugaacuaacacccacccg

SEQ ID NO: 115858 - RNA, 27 nt, Human
ugacaacagcgugagauuucaacagaa

SEQ ID NO: 115859 - RNA, 24 nt, Human
ugagcauacauuuuugaaaaacau

SEQ ID NO: 115860 - RNA, 19 nt, Human
ugagugccuucauuuaacu

SEQ ID NO: 115861 - RNA, 20 nt, Human
ugcagcuuugaagccuggaa

SEQ ID NO: 115862 - RNA, 23 nt, Human
uggaacaaauacucacuuaaaac

SEQ ID NO: 115863 - RNA, 22 nt, Human
uggggaaagagaaggacaggau

SEQ ID NO: 115864 - RNA, 22 nt, Human
ugucagauucauugcuguaagu

SEQ ID NO: 115865 - RNA, 18 nt, Human
uuaaaacaauuuaauacu

SEQ ID NO: 115866 - RNA, 20 nt, Human
uuagggucucccaggauagg

SEQ ID NO: 115867 - RNA, 20 nt, Human
uucacaaucccaccuguaca

SEQ ID NO: 115868 - RNA, 22 nt, Human
uucaggaagaauacugagugcc

SEQ ID NO: 115869 - RNA, 18 nt, Human
uuguacaauauuucuccu

SEQ ID NO: 115870 - RNA, 23 nt, Human
uuuaacaaagguuuguuuccaga

SEQ ID NO: 115871 - RNA, 21 nt, Human
uuuacugcaacuuaauauuuc

SEQ ID NO: 115872 - RNA, 25 nt, Human
uuuccagaagaacuuuugaugucag

SEQ ID NO: 115873 - RNA, 20 nt, Human
uuuuuuuuuuuuuuuuuugg

SEQ ID NO: 115874 - RNA, 22 nt, Human
aaaaaaaaaaaaaauggaacua

SEQ ID NO: 115875 - RNA, 25 nt, Human
aaaaaaaaaaauggaacuauuuggc

SEQ ID NO: 115876 - RNA, 24 nt, Human
aaacaaaaacccagaagaucuaac

SEQ ID NO: 115877 - RNA, 20 nt, Human
aaacaggaaaagauuuuuaa

SEQ ID NO: 115878 - RNA, 20 nt, Human
aaagaaaagagguuuauuug

SEQ ID NO: 115879 - RNA, 25 nt, Human
aaagaggaacuagcugggcguggug

SEQ ID NO: 115880 - RNA, 18 nt, Human
aaagggaacauuuagggu

SEQ ID NO: 115881 - RNA, 21 nt, Human
aaauaccuccuacuaggccca

SEQ ID NO: 115882 - RNA, 20 nt, Human
aaaucaggauauuagaagac

SEQ ID NO: 115883 - RNA, 24 nt, Human
aaaucauccacguagaaccaagag

SEQ ID NO: 115884 - RNA, 21 nt, Human
aaccaagagcuugccaacacu

SEQ ID NO: 115885 - RNA, 23 nt, Human
aaccagagugagaacucacucau

SEQ ID NO: 115886 - RNA, 20 nt, Human
aagcaaaacaaaaacccaga

SEQ ID NO: 115887 - RNA, 27 nt, Human
aagcaaaacaaaaacccagaagaucua

SEQ ID NO: 115888 - RNA, 28 nt, Human
aagcaaaacaaaaacccagaagaucuaa

SEQ ID NO: 115889 - RNA, 18 nt, Human
aagcagcaaauggcagac

SEQ ID NO: 115890 - RNA, 26 nt, Human
aaguggagguugcagagugagcugag

SEQ ID NO: 115891 - RNA, 18 nt, Human
aaucgcuugaaccuggga

SEQ ID NO: 115892 - RNA, 22 nt, Human
aauuagccaggcauggugacuu

SEQ ID NO: 115893 - RNA, 20 nt, Human
acaagagugaaacucugucu

SEQ ID NO: 115894 - RNA, 21 nt, Human
acaagagugaaacucugucuc

SEQ ID NO: 115895 - RNA, 23 nt, Human
acagggaacagccaccucuucca

SEQ ID NO: 115896 - RNA, 23 nt, Human
accauaucaccaccugagaaugg

SEQ ID NO: 115897 - RNA, 19 nt, Human
acccaaauaccuccuacua

SEQ ID NO: 115898 - RNA, 24 nt, Human
accccuucucuacuaaaaauacaa

SEQ ID NO: 115899 - RNA, 20 nt, Human
accugaggucaggaguucaa

SEQ ID NO: 115900 - RNA, 24 nt, Human
accugaggucaggaguucaagacc

SEQ ID NO: 115901 - RNA, 25 nt, Human
acuccagccugggcaacaagaguga

SEQ ID NO: 115902 - RNA, 19 nt, Human
agaagaucuaacaacccug

SEQ ID NO: 115903 - RNA, 22 nt, Human
agagagcaagcgagagaggagg

SEQ ID NO: 115904 - RNA, 18 nt, Human
agagugaaacucugucuc

SEQ ID NO: 115905 - RNA, 22 nt, Human
agagugaaacucugucucaaaa

SEQ ID NO: 115906 - RNA, 22 nt, Human
agaugggcggauuaccugaggu

SEQ ID NO: 115907 - RNA, 23 nt, Human
agccaggcauggugacuugugcc

SEQ ID NO: 115908 - RNA, 24 nt, Human
agcccggccaauguggugaaaccc

SEQ ID NO: 115909 - RNA, 23 nt, Human
aggaaacccucucaggaaccaac

SEQ ID NO: 115910 - RNA, 20 nt, Human
aggaggcugguccucuaaga

SEQ ID NO: 115911 - RNA, 22 nt, Human
aggcaugagaaucgcuugaacc

SEQ ID NO: 115912 - RNA, 24 nt, Human
aggcaugagaaucgcuugaaccug

SEQ ID NO: 115913 - RNA, 24 nt, Human
aggcugaggcaugagaaucgcuug

SEQ ID NO: 115914 - RNA, 25 nt, Human
agugagaacucacucauuacuaugg

SEQ ID NO: 115915 - RNA, 24 nt, Human
auaagcuuauuuuccuuauuucaa

SEQ ID NO: 115916 - RNA, 24 nt, Human
aucacgccauuguacuccagccug

SEQ ID NO: 115917 - RNA, 21 nt, Human
aucauauaauaacaacaugaa

SEQ ID NO: 115918 - RNA, 18 nt, Human
auccaaaccauaucacca

SEQ ID NO: 115919 - RNA, 22 nt, Human
auccgcccccaugacccaaaua

SEQ ID NO: 115920 - RNA, 18 nt, Human
aucuagguauauccaagg

SEQ ID NO: 115921 - RNA, 19 nt, Human
augccuguaaucucagcac

SEQ ID NO: 115922 - RNA, 19 nt, Human
augggcggauuaccugagg

SEQ ID NO: 115923 - RNA, 24 nt, Human
auuaccugaggucaggaguucaag

SEQ ID NO: 115924 - RNA, 24 nt, Human
auuguacuccagccugggcaacaa

SEQ ID NO: 115925 - RNA, 19 nt, Human
caaagccuguuaagcagca

SEQ ID NO: 115926 - RNA, 23 nt, Human
caacaagagugaaacucugucuc

SEQ ID NO: 115927 - RNA, 21 nt, Human
caacacugaaaaaccugacac

SEQ ID NO: 115928 - RNA, 24 nt, Human
caacacugaaaaaccugacacaaa

SEQ ID NO: 115929 - RNA, 24 nt, Human
caagaccagcccggccaauguggu

SEQ ID NO: 115930 - RNA, 22 nt, Human
caagagcuugccaacacugaaa

SEQ ID NO: 115931 - RNA, 23 nt, Human
caauccuauccuuucaaucuuca

SEQ ID NO: 115932 - RNA, 24 nt, Human
caauguggugaaaccccuucucua

SEQ ID NO: 115933 - RNA, 20 nt, Human
cacagaaacuuacagaguac

SEQ ID NO: 115934 - RNA, 25 nt, Human
caccuauucccugugugacaggggu

SEQ ID NO: 115935 - RNA, 20 nt, Human
caccucuuccacaacccagu

SEQ ID NO: 115936 - RNA, 24 nt, Human
cagaagauuugcugacuuaaacac

SEQ ID NO: 115937 - RNA, 21 nt, Human
cagacacguuaagccugcaua

SEQ ID NO: 115938 - RNA, 21 nt, Human
cagagugaaaugcaguauguu

SEQ ID NO: 115939 - RNA, 24 nt, Human
cagcacuuugggaagccgagaugg

SEQ ID NO: 115940 - RNA, 28 nt, Human
cagcacuuugggaagccgagaugggcgg

SEQ ID NO: 115941 - RNA, 21 nt, Human
cagccuuaucaaaagaggaac

SEQ ID NO: 115942 - RNA, 21 nt, Human
cagcucuugcauaaacaacca

SEQ ID NO: 115943 - RNA, 22 nt, Human
caggagaacauccacguagaaa

SEQ ID NO: 115944 - RNA, 25 nt, Human
caucaauaucuugcuuaaauuuggu

SEQ ID NO: 115945 - RNA, 20 nt, Human
caugccuguaaucucagcac

SEQ ID NO: 115946 - RNA, 23 nt, Human
cauuaagcuugucaaaaucugca

SEQ ID NO: 115947 - RNA, 19 nt, Human
cauuguacuccagccuggg

SEQ ID NO: 115948 - RNA, 21 nt, Human
cauuguacuccagccugggca

SEQ ID NO: 115949 - RNA, 22 nt, Human
cauuguacuccagccugggcaa

SEQ ID NO: 115950 - RNA, 23 nt, Human
cauuguacuccagccugggcaac

SEQ ID NO: 115951 - RNA, 24 nt, Human
cauuguacuccagccugggcaaca

SEQ ID NO: 115952 - RNA, 20 nt, Human
cauuuugcuacauauacaca

SEQ ID NO: 115953 - RNA, 24 nt, Human
ccaagagcuugccaacacugaaaa

SEQ ID NO: 115954 - RNA, 18 nt, Human
ccaugccuguaaucucag

SEQ ID NO: 115955 - RNA, 20 nt, Human
ccauuguacuccagccuggg

SEQ ID NO: 115956 - RNA, 21 nt, Human
ccauuguacuccagccugggc

SEQ ID NO: 115957 - RNA, 22 nt, Human
ccauuguacuccagccugggca

SEQ ID NO: 115958 - RNA, 23 nt, Human
ccauuguacuccagccugggcaa

SEQ ID NO: 115959 - RNA, 24 nt, Human
ccauuguacuccagccugggcaac

SEQ ID NO: 115960 - RNA, 24 nt, Human
cccaugccuguaaucucagcacuu

SEQ ID NO: 115961 - RNA, 20 nt, Human
ccccaugacccaaauaccuc

SEQ ID NO: 115962 - RNA, 23 nt, Human
ccccaugacccaaauaccuccua

SEQ ID NO: 115963 - RNA, 18 nt, Human
cccggccaauguggugaa

SEQ ID NO: 115964 - RNA, 23 nt, Human
cccggccaauguggugaaacccc

SEQ ID NO: 115965 - RNA, 20 nt, Human
ccuccuacuaggcccaccuc

SEQ ID NO: 115966 - RNA, 21 nt, Human
ccugggaaguggagguugcag

SEQ ID NO: 115967 - RNA, 20 nt, Human
ccuguaaucucagcacuuug

SEQ ID NO: 115968 - RNA, 19 nt, Human
ccuguagucccagcuacuc

SEQ ID NO: 115969 - RNA, 21 nt, Human
ccuguagucccagcuacucgg

SEQ ID NO: 115970 - RNA, 20 nt, Human
ccuucaccuauucccugugu

SEQ ID NO: 115971 - RNA, 24 nt, Human
cgagaugggcggauuaccugaggu

SEQ ID NO: 115972 - RNA, 26 nt, Human
cgagaugggcggauuaccugagguca

SEQ ID NO: 115973 - RNA, 24 nt, Human
cgccauuguacuccagccugggca

SEQ ID NO: 115974 - RNA, 24 nt, Human
cggauuaccugaggucaggaguuc

SEQ ID NO: 115975 - RNA, 23 nt, Human
cggccaauguggugaaaccccuu

SEQ ID NO: 115976 - RNA, 24 nt, Human
cguagaaccaagagcuugccaaca

SEQ ID NO: 115977 - RNA, 22 nt, Human
cuacuaggcccaccucuaacac

SEQ ID NO: 115978 - RNA, 18 nt, Human
cuagcugggcgugguggc

SEQ ID NO: 115979 - RNA, 23 nt, Human
cuagcugggcgugguggcccaug

SEQ ID NO: 115980 - RNA, 24 nt, Human
cuagcugggcgugguggcccaugc

SEQ ID NO: 115981 - RNA, 22 nt, Human
cuaggcccaccucuaacacuga

SEQ ID NO: 115982 - RNA, 18 nt, Human
cucaaaaaaaaaaaaaaa

SEQ ID NO: 115983 - RNA, 21 nt, Human
cucgauggggucauucuggga

SEQ ID NO: 115984 - RNA, 19 nt, Human
cucugucucaaaaaaaaaa

SEQ ID NO: 115985 - RNA, 20 nt, Human
cugacuuaaacacugcaaaa

SEQ ID NO: 115986 - RNA, 24 nt, Human
cugcucgccaguguuacugucucc

SEQ ID NO: 115987 - RNA, 19 nt, Human
cuugccaacacugaaaaac

SEQ ID NO: 115988 - RNA, 18 nt, Human
cuuuuaaacaaccagcuc

SEQ ID NO: 115989 - RNA, 24 nt, Human
gaaaucauccacguagaaccaaga

SEQ ID NO: 115990 - RNA, 20 nt, Human
gaaguggagguugcagagug

SEQ ID NO: 115991 - RNA, 24 nt, Human
gacagggaacagccaccucuucca

SEQ ID NO: 115992 - RNA, 23 nt, Human
gagaucacgccauuguacuccag

SEQ ID NO: 115993 - RNA, 20 nt, Human
gagguugcagagugagcuga

SEQ ID NO: 115994 - RNA, 18 nt, Human
gauguucuuccuuuguau

SEQ ID NO: 115995 - RNA, 23 nt, Human
gauuaccugaggucaggaguuca

SEQ ID NO: 115996 - RNA, 24 nt, Human
gauuaccugaggucaggaguucaa

SEQ ID NO: 115997 - RNA, 24 nt, Human
gccaauguggugaaaccccuucuc

SEQ ID NO: 115998 - RNA, 22 nt, Human
gccauuguacuccagccugggc

SEQ ID NO: 115999 - RNA, 24 nt, Human
gccauuguacuccagccugggcaa

SEQ ID NO: 116000 - RNA, 19 nt, Human
gcuuuuuuuuuuuugcuga

SEQ ID NO: 116001 - RNA, 20 nt, Human
ggaacuagcugggcguggug

SEQ ID NO: 116002 - RNA, 26 nt, Human
ggagguugcagagugagcugagauca

SEQ ID NO: 116003 - RNA, 22 nt, Human
ggauuaccugaggucaggaguu

SEQ ID NO: 116004 - RNA, 23 nt, Human
ggauuaccugaggucaggaguuc

SEQ ID NO: 116005 - RNA, 19 nt, Human
ggccagguuucuucagccc

SEQ ID NO: 116006 - RNA, 21 nt, Human
ggcccaugccuguaaucucag

SEQ ID NO: 116007 - RNA, 24 nt, Human
gggcgugguggcccaugccuguaa

SEQ ID NO: 116008 - RNA, 19 nt, Human
ggguugcuccauccucaaa

SEQ ID NO: 116009 - RNA, 21 nt, Human
gguacccagagugaaaugcag

SEQ ID NO: 116010 - RNA, 24 nt, Human
gguggcccaugccuguaaucucag

SEQ ID NO: 116011 - RNA, 25 nt, Human
guacuccagccugggcaacaagagu

SEQ ID NO: 116012 - RNA, 18 nt, Human
gugaaggggagccagugu

SEQ ID NO: 116013 - RNA, 25 nt, Human
guuccaggcucuuuuaaacaaccag

SEQ ID NO: 116014 - RNA, 23 nt, Human
guuuaucuggguagauguccaug

SEQ ID NO: 116015 - RNA, 26 nt, Human
uaaaaaacagaagauuugcugacuua

SEQ ID NO: 116016 - RNA, 20 nt, Human
uaaaaauacaaaauuagcca

SEQ ID NO: 116017 - RNA, 22 nt, Human
uaaaaauacaaaauuagccagg

SEQ ID NO: 116018 - RNA, 23 nt, Human
uaaaaauacaaaauuagccaggc

SEQ ID NO: 116019 - RNA, 21 nt, Human
uaaaagggaacauuuagggua

SEQ ID NO: 116020 - RNA, 22 nt, Human
uaaacaaccagagugagaacuc

SEQ ID NO: 116021 - RNA, 23 nt, Human
uaaacaaccagcucuugcauaaa

SEQ ID NO: 116022 - RNA, 19 nt, Human
uaacgggaaacguuagguc

SEQ ID NO: 116023 - RNA, 21 nt, Human
uaagggauccgcccccaugac

SEQ ID NO: 116024 - RNA, 23 nt, Human
uacagaguacuggaguugaaaga

SEQ ID NO: 116025 - RNA, 23 nt, Human
uaccugaggucaggaguucaaga

SEQ ID NO: 116026 - RNA, 23 nt, Human
uacuccagccugggcaacaagag

SEQ ID NO: 116027 - RNA, 24 nt, Human
uacuccagccugggcaacaagagu

SEQ ID NO: 116028 - RNA, 25 nt, Human
uacuccagccugggcaacaagagug

SEQ ID NO: 116029 - RNA, 22 nt, Human
uagaaagaaaagagguuuauuu

SEQ ID NO: 116030 - RNA, 21 nt, Human
uagaaccaagagcuugccaac

SEQ ID NO: 116031 - RNA, 22 nt, Human
uaguccgagcuggggcaccugc

SEQ ID NO: 116032 - RNA, 24 nt, Human
uaguccgagcuggggcaccugcuc

SEQ ID NO: 116033 - RNA, 20 nt, Human
uauccaaggaaaaauaaacu

SEQ ID NO: 116034 - RNA, 20 nt, Human
ucaccuaauggaagugaagu

SEQ ID NO: 116035 - RNA, 23 nt, Human
ucacgccauuguacuccagccug

SEQ ID NO: 116036 - RNA, 23 nt, Human
ucacucauuacuauggggauggc

SEQ ID NO: 116037 - RNA, 24 nt, Human
uccaaggaaaaauaaacuuaagau

SEQ ID NO: 116038 - RNA, 22 nt, Human
uccuacuaggcccaccucuaac

SEQ ID NO: 116039 - RNA, 22 nt, Human
uccuauccuuucaaucuucacc

SEQ ID NO: 116040 - RNA, 21 nt, Human
uccuuuguauuuguauuguca

SEQ ID NO: 116041 - RNA, 24 nt, Human
ucgcuugaaccugggaaguggagg

SEQ ID NO: 116042 - RNA, 24 nt, Human
ucgggaggcugaggcaugagaauc

SEQ ID NO: 116043 - RNA, 19 nt, Human
ucucaaaacaggaaaagau

SEQ ID NO: 116044 - RNA, 20 nt, Human
ucucuacuaaaaauacaaaa

SEQ ID NO: 116045 - RNA, 18 nt, Human
ucucucuccagauguucu

SEQ ID NO: 116046 - RNA, 18 nt, Human
ucugcagcauaauggaag

SEQ ID NO: 116047 - RNA, 23 nt, Human
ucugucucaaaaaaaaaaaaaaa

SEQ ID NO: 116048 - RNA, 25 nt, Human
ucugucucaaaaaaaaaaaaaaaaa

SEQ ID NO: 116049 - RNA, 19 nt, Human
ugaaaagcagauuuaaaag

SEQ ID NO: 116050 - RNA, 23 nt, Human
ugaaaagcagauuuaaaagggaa

SEQ ID NO: 116051 - RNA, 21 nt, Human
ugaaagagaacugagaucacc

SEQ ID NO: 116052 - RNA, 24 nt, Human
ugaaccugggaaguggagguugca

SEQ ID NO: 116053 - RNA, 21 nt, Human
ugaccccagugagcauuugau

SEQ ID NO: 116054 - RNA, 22 nt, Human
ugagcugagaucacgccauugu

SEQ ID NO: 116055 - RNA, 24 nt, Human
ugaggcaugagaaucgcuugaacc

SEQ ID NO: 116056 - RNA, 21 nt, Human
ugaggucaaggaugaaaucca

SEQ ID NO: 116057 - RNA, 22 nt, Human
ugauaaaaccugaaguaccacu

SEQ ID NO: 116058 - RNA, 21 nt, Human
ugcaacuuucauccauugcug

SEQ ID NO: 116059 - RNA, 20 nt, Human
ugcacuacaccaucaaggcc

SEQ ID NO: 116060 - RNA, 20 nt, Human
ugcauaaacaaccagaguga

SEQ ID NO: 116061 - RNA, 23 nt, Human
ugccuguaaucucagcacuuugg

SEQ ID NO: 116062 - RNA, 24 nt, Human
ugccuguaaucucagcacuuuggg

SEQ ID NO: 116063 - RNA, 24 nt, Human
ugccuguagucccagcuacucggg

SEQ ID NO: 116064 - RNA, 20 nt, Human
ugcugaagaccagcuggcua

SEQ ID NO: 116065 - RNA, 23 nt, Human
uggaagcucauucccucuucugc

SEQ ID NO: 116066 - RNA, 22 nt, Human
uggaggggacaaaacauccaaa

SEQ ID NO: 116067 - RNA, 22 nt, Human
uggcacaaagucauacauaagg

SEQ ID NO: 116068 - RNA, 23 nt, Human
uggcagcaacagaccagaacuca

SEQ ID NO: 116069 - RNA, 21 nt, Human
uggcccaugccuguaaucuca

SEQ ID NO: 116070 - RNA, 24 nt, Human
uggcccaugccuguaaucucagca

SEQ ID NO: 116071 - RNA, 20 nt, Human
uggcugugacacuucuacug

SEQ ID NO: 116072 - RNA, 22 nt, Human
ugggaagccgagaugggcggau

SEQ ID NO: 116073 - RNA, 26 nt, Human
ugggaaguggagguugcagagugagc

SEQ ID NO: 116074 - RNA, 24 nt, Human
ugggcggauuaccugaggucagga

SEQ ID NO: 116075 - RNA, 19 nt, Human
uggugaaaccccuucucua

SEQ ID NO: 116076 - RNA, 24 nt, Human
uggugacuugugccuguaguccca

SEQ ID NO: 116077 - RNA, 24 nt, Human
ugguggcccaugccuguaaucuca

SEQ ID NO: 116078 - RNA, 19 nt, Human
uguacuccagccugggcaa

SEQ ID NO: 116079 - RNA, 22 nt, Human
uguacuccagccugggcaacaa

SEQ ID NO: 116080 - RNA, 24 nt, Human
ugucacuguauggaaucuagguau

SEQ ID NO: 116081 - RNA, 22 nt, Human
uguuacugucuccaucagccug

SEQ ID NO: 116082 - RNA, 23 nt, Human
uuacuauggggauggcacaaagu

SEQ ID NO: 116083 - RNA, 23 nt, Human
uucaaaaagcaaaacaaaaaccc

SEQ ID NO: 116084 - RNA, 21 nt, Human
uugaaagagaacugagaucac

SEQ ID NO: 116085 - RNA, 24 nt, Human
uugaaccugggaaguggagguugc

SEQ ID NO: 116086 - RNA, 20 nt, Human
uugcagagugagcugagauc

SEQ ID NO: 116087 - RNA, 19 nt, Human
uuguauuuguauugucacu

SEQ ID NO: 116088 - RNA, 24 nt, Human
uuuggaggggacaaaacauccaaa

SEQ ID NO: 116089 - RNA, 20 nt, Human
uuuuuuuuuuagaaagaaaa

SEQ ID NO: 116090 - RNA, 18 nt, Human
uuuuuuuuuuucagcagu

SEQ ID NO: 116091 - RNA, 20 nt, Human
uuuuuuuuuuuucagcaguc

SEQ ID NO: 116092 - RNA, 22 nt, Human
uuuuuuuuuuuuuuuuuuucag

SEQ ID NO: 116093 - RNA, 23 nt, Human
caaaagcagcuaugagcggagac

SEQ ID NO: 116094 - RNA, 24 nt, Human
cgucaaagaacucccaaaauuaau

SEQ ID NO: 116095 - RNA, 22 nt, Human
ggagacagccaaaucuaugcca

SEQ ID NO: 116096 - RNA, 20 nt, Human
uucacacagcagaccaccau

SEQ ID NO: 116097 - RNA, 19 nt, Human
accguggagcggaaaaggg

SEQ ID NO: 116098 - RNA, 20 nt, Human
aggugcaggcgcaggccagc

SEQ ID NO: 116099 - RNA, 21 nt, Human
ccacgggaucgaggaagacuc

SEQ ID NO: 116100 - RNA, 21 nt, Human
ccacugcccgccgcgaccgcc

SEQ ID NO: 116101 - RNA, 24 nt, Human
cccgcgaccggaagagagcaaggc

SEQ ID NO: 116102 - RNA, 22 nt, Human
ccgccacugcccgccgcgaccg

SEQ ID NO: 116103 - RNA, 18 nt, Human
cgaccgcccucuacaccc

SEQ ID NO: 116104 - RNA, 19 nt, Human
cgaccgcccucuacacccg

SEQ ID NO: 116105 - RNA, 23 nt, Human
cgccacugcccgccgcgaccgcc

SEQ ID NO: 116106 - RNA, 18 nt, Human
cgcccgcacccggccgca

SEQ ID NO: 116107 - RNA, 23 nt, Human
cucuacacccggugucccgcgac

SEQ ID NO: 116108 - RNA, 20 nt, Human
cugccgccacugcccgccgc

SEQ ID NO: 116109 - RNA, 20 nt, Human
gcacggaggucaccguggag

SEQ ID NO: 116110 - RNA, 19 nt, Human
ggaagacuccgcccgcacc

SEQ ID NO: 116111 - RNA, 19 nt, Human
guggagcggaaaaggguag

SEQ ID NO: 116112 - RNA, 18 nt, Human
uccgcccgcacccggccg

SEQ ID NO: 116113 - RNA, 22 nt, Human
ugccgccacugcccgccgcgac

SEQ ID NO: 116114 - RNA, 24 nt, Human
aagaagaaacuuuacagcacauuu

SEQ ID NO: 116115 - RNA, 21 nt, Human
ccaaugcaauggcuagucuuu

SEQ ID NO: 116116 - RNA, 21 nt, Human
cgcgacuagcagcaaaacuuc

SEQ ID NO: 116117 - RNA, 24 nt, Human
uagucuuuacuggaaagaagaaac

SEQ ID NO: 116118 - RNA, 28 nt, Human
uccgcgacuagcagcaaaaccggggucc

SEQ ID NO: 116119 - RNA, 18 nt, Human
ugcaauggcuagucuuua

SEQ ID NO: 116120 - RNA, 22 nt, Human
uggaaagaagaaacuuuacagc

SEQ ID NO: 116121 - RNA, 23 nt, Human
ugggagaaggagccaaugcaaug

SEQ ID NO: 116122 - RNA, 24 nt, Human
uuuuuuuuuuuuuuuuuuuauggg

SEQ ID NO: 116123 - RNA, 21 nt, Human
accagugcuguggucccuggu

SEQ ID NO: 116124 - RNA, 25 nt, Human
cagaguaacgguccaaaccagugcu

SEQ ID NO: 116125 - RNA, 27 nt, Human
ccugccacaagcaaagggaugggagac

SEQ ID NO: 116126 - RNA, 23 nt, Human
ucccuggugcccggguagugguc

SEQ ID NO: 116127 - RNA, 23 nt, Human
uuaaggucccauauacuuuuucu

SEQ ID NO: 116128 - RNA, 18 nt, Human
uugauacaaguaaagaag

SEQ ID NO: 116129 - RNA, 22 nt, Human
uuuuucugguccaugugcagag

SEQ ID NO: 116130 - RNA, 25 nt, Human
aaagacaccacagucggacaggaag

SEQ ID NO: 116131 - RNA, 19 nt, Human
agaggaaagggagaugcag

SEQ ID NO: 116132 - RNA, 20 nt, Human
caaagacaccacagucggac

SEQ ID NO: 116133 - RNA, 18 nt, Human
ccucagcaaagacaccac

SEQ ID NO: 116134 - RNA, 21 nt, Human
ccugggguggggaucacuggg

SEQ ID NO: 116135 - RNA, 21 nt, Human
cgagcggcuucagcucccucc

SEQ ID NO: 116136 - RNA, 21 nt, Human
gcggcuucagcucccucccag

SEQ ID NO: 116137 - RNA, 18 nt, Human
uaaaggcaccccggauuc

SEQ ID NO: 116138 - RNA, 23 nt, Human
uaccaggucccccuucaccaucc

SEQ ID NO: 116139 - RNA, 24 nt, Human
uaccaggucccccuucaccauccu

SEQ ID NO: 116140 - RNA, 23 nt, Human
uagcagguaagucaugauuuagg

SEQ ID NO: 116141 - RNA, 18 nt, Human
uccugggguggggaucac

SEQ ID NO: 116142 - RNA, 19 nt, Human
ugaauccuaaaggcacccc

SEQ ID NO: 116143 - RNA, 19 nt, Human
ugacccucagcaaagacac

SEQ ID NO: 116144 - RNA, 18 nt, Human
uggaggacagaggaaagg

SEQ ID NO: 116145 - RNA, 19 nt, Human
uggaggacagaggaaaggg

SEQ ID NO: 116146 - RNA, 24 nt, Human
uuucacuuuuccaaugaguuuuua

SEQ ID NO: 116147 - RNA, 20 nt, Human
uuuuuuuuuuuuucacuuuu

SEQ ID NO: 116148 - RNA, 23 nt, Human
uuuuuuuuuuuuucacuuuucca

SEQ ID NO: 116149 - RNA, 24 nt, Human
uuuuuuuuuuuuuuuuucacuuuu

SEQ ID NO: 116150 - RNA, 22 nt, Human
agaggaacuauuucuuagccca

SEQ ID NO: 116151 - RNA, 20 nt, Human
aggaacacaagucagugaca

SEQ ID NO: 116152 - RNA, 18 nt, Human
caagaggaacuauuucuu

SEQ ID NO: 116153 - RNA, 23 nt, Human
ccucaacaccaacguccuuccug

SEQ ID NO: 116154 - RNA, 24 nt, Human
cucaacaccaacguccuuccugac

SEQ ID NO: 116155 - RNA, 18 nt, Human
uaucaagaggaacuauuu

SEQ ID NO: 116156 - RNA, 21 nt, Human
ugcuaaccucaacaccaacgu

SEQ ID NO: 116157 - RNA, 23 nt, Human
uguuuauuuaucaagaggaacua

SEQ ID NO: 116158 - RNA, 24 nt, Human
uuuuuuuuuuuuuuuuuuucaaag

SEQ ID NO: 116159 - RNA, 18 nt, Human
aacuccuccccggaucuc

SEQ ID NO: 116160 - RNA, 22 nt, Human
accacggaggaggcgguccaga

SEQ ID NO: 116161 - RNA, 18 nt, Human
accccaggccccacccgc

SEQ ID NO: 116162 - RNA, 23 nt, Human
agagugaggaaacgcagaaggcc

SEQ ID NO: 116163 - RNA, 21 nt, Human
caccacggaggaggcggucca

SEQ ID NO: 116164 - RNA, 21 nt, Human
caccucccuucuccgcccaag

SEQ ID NO: 116165 - RNA, 22 nt, Human
caccucccuucuccgcccaagg

SEQ ID NO: 116166 - RNA, 20 nt, Human
ccaccggagcccaaagcggu

SEQ ID NO: 116167 - RNA, 22 nt, Human
ccaggccccacccgcugcgcgc

SEQ ID NO: 116168 - RNA, 21 nt, Human
cccaaagcgguaccagggaau

SEQ ID NO: 116169 - RNA, 24 nt, Human
ccgggggcaagugcaacuccuccc

SEQ ID NO: 116170 - RNA, 22 nt, Human
ccucuguccaggaaccccaggc

SEQ ID NO: 116171 - RNA, 18 nt, Human
ccugggccgcagcgcgca

SEQ ID NO: 116172 - RNA, 20 nt, Human
cgugacagcuggggacgcgg

SEQ ID NO: 116173 - RNA, 20 nt, Human
cucaggccccccaggcuucu

SEQ ID NO: 116174 - RNA, 18 nt, Human
gcgcagcgugacagcugg

SEQ ID NO: 116175 - RNA, 21 nt, Human
ggaauuucgcuuggucccacc

SEQ ID NO: 116176 - RNA, 23 nt, Human
ggagucaccucccuucuccgccc

SEQ ID NO: 116177 - RNA, 23 nt, Human
ggcuggggcuggggcuggguugc

SEQ ID NO: 116178 - RNA, 20 nt, Human
gggcuggggcuggggcuggg

SEQ ID NO: 116179 - RNA, 22 nt, Human
gggcuggggcuggggcuggggc

SEQ ID NO: 116180 - RNA, 23 nt, Human
gggcuggggcuggggcuggggcu

SEQ ID NO: 116181 - RNA, 24 nt, Human
gggcuggggcuggguugcggggag

SEQ ID NO: 116182 - RNA, 18 nt, Human
gggcuggguugcggggag

SEQ ID NO: 116183 - RNA, 18 nt, Human
ggucccaccggagcccaa

SEQ ID NO: 116184 - RNA, 18 nt, Human
ucaggccccccaggcuuc

SEQ ID NO: 116185 - RNA, 22 nt, Human
ucaggccccccaggcuucuugg

SEQ ID NO: 116186 - RNA, 19 nt, Human
uccccggaucucucccugc

SEQ ID NO: 116187 - RNA, 21 nt, Human
uccgccggagucaccucccuu

SEQ ID NO: 116188 - RNA, 24 nt, Human
uccuccucuguccaggaaccccag

SEQ ID NO: 116189 - RNA, 21 nt, Human
ucucggaauuucgcuuggucc

SEQ ID NO: 116190 - RNA, 25 nt, Human
ugacagcuggggacgcggcggggcu

SEQ ID NO: 116191 - RNA, 19 nt, Human
ugcccgcugguaugugaga

SEQ ID NO: 116192 - RNA, 20 nt, Human
uggggcuggggcuggggcuc

SEQ ID NO: 116193 - RNA, 23 nt, Human
uggggcuggggcuggggcugggu

SEQ ID NO: 116194 - RNA, 21 nt, Human
uguuccaacucccuguucugu

SEQ ID NO: 116195 - RNA, 23 nt, Human
uugacacuuguucaagucucuca

SEQ ID NO: 116196 - RNA, 20 nt, Human
uuuuuuuuuuuucagaggcc

SEQ ID NO: 116197 - RNA, 21 nt, Human
uuuuuuuuuuuuuuuucagag

SEQ ID NO: 116198 - RNA, 22 nt, Human
uuuuuuuuuuuuuuuuuuucag

SEQ ID NO: 116199 - RNA, 18 nt, Human
aaccgccacaacugaaca

SEQ ID NO: 116200 - RNA, 24 nt, Human
accaccaacgaaaauggccacgcc

SEQ ID NO: 116201 - RNA, 21 nt, Human
accgccacaacugaacaccac

SEQ ID NO: 116202 - RNA, 19 nt, Human
acugaacaccaccaacgaa

SEQ ID NO: 116203 - RNA, 21 nt, Human
agagcugaaugaaacugaacc

SEQ ID NO: 116204 - RNA, 21 nt, Human
ccacaacugaacaccaccaac

SEQ ID NO: 116205 - RNA, 19 nt, Human
cugaccagcaaccgccaca

SEQ ID NO: 116206 - RNA, 20 nt, Human
gacugcuuuauugguggcag

SEQ ID NO: 116207 - RNA, 23 nt, Human
uccccaaagaagagcucgguuau

SEQ ID NO: 116208 - RNA, 21 nt, Human
ugaaugaaacugaaccaagcg

SEQ ID NO: 116209 - RNA, 23 nt, Human
ugguaaagacugcuuuauuggug

SEQ ID NO: 116210 - RNA, 24 nt, Human
uugguggcaguuacuacaagucaa

SEQ ID NO: 116211 - RNA, 19 nt, Human
uuuaucagauuacuggucc

SEQ ID NO: 116212 - RNA, 21 nt, Human
aaacagguauucucuguuccc

SEQ ID NO: 116213 - RNA, 22 nt, Human
aacaaaacagacaccagucuaa

SEQ ID NO: 116214 - RNA, 23 nt, Human
aacaaaacagacaccagucuaaa

SEQ ID NO: 116215 - RNA, 20 nt, Human
aauccccgaggugacuaacu

SEQ ID NO: 116216 - RNA, 23 nt, Human
acccuuugaaauuaccugcccaa

SEQ ID NO: 116217 - RNA, 26 nt, Human
acuucaaaggguuuaugccaaaaaag

SEQ ID NO: 116218 - RNA, 19 nt, Human
agaaaggcuccugcacccc

SEQ ID NO: 116219 - RNA, 23 nt, Human
agcacagacugacauuaacaagc

SEQ ID NO: 116220 - RNA, 19 nt, Human
aggagcacaaacacagagc

SEQ ID NO: 116221 - RNA, 26 nt, Human
caaaaaacaaaccaguccucugcagc

SEQ ID NO: 116222 - RNA, 27 nt, Human
caaaaaacaaaccaguccucugcagcc

SEQ ID NO: 116223 - RNA, 18 nt, Human
caaacacagagcaaagca

SEQ ID NO: 116224 - RNA, 23 nt, Human
caaccucaagucccugagguccu

SEQ ID NO: 116225 - RNA, 24 nt, Human
cacaaacacagagcaaagcaccau

SEQ ID NO: 116226 - RNA, 24 nt, Human
cacauccaaauccagaaaggcucc

SEQ ID NO: 116227 - RNA, 18 nt, Human
cacaugaccuuggcuucu

SEQ ID NO: 116228 - RNA, 18 nt, Human
cauccaaguaaaaaaaaa

SEQ ID NO: 116229 - RNA, 23 nt, Human
ccacauccaaauccagaaaggcu

SEQ ID NO: 116230 - RNA, 21 nt, Human
ccagggaaaucaggagcacaa

SEQ ID NO: 116231 - RNA, 21 nt, Human
gcaaagcaccauuucuuuaaa

SEQ ID NO: 116232 - RNA, 22 nt, Human
gcaccccaugcucaaaaaugca

SEQ ID NO: 116233 - RNA, 22 nt, Human
gccaaaaaacaaaccaguccuc

SEQ ID NO: 116234 - RNA, 19 nt, Human
ucaaaaaugcaaccucaag

SEQ ID NO: 116235 - RNA, 24 nt, Human
ucagcacagacugacauuaacaag

SEQ ID NO: 116236 - RNA, 19 nt, Human
uccaaauccagaaaggcuc

SEQ ID NO: 116237 - RNA, 26 nt, Human
uccauagccacauccaaauccagaaa

SEQ ID NO: 116238 - RNA, 19 nt, Human
uccccgaggugacuaacuc

SEQ ID NO: 116239 - RNA, 21 nt, Human
uccucauuucaugcacaugac

SEQ ID NO: 116240 - RNA, 21 nt, Human
ugcaaaaauguuaagccaucc

SEQ ID NO: 116241 - RNA, 18 nt, Human
ugcaaaauggaaaaaauc

SEQ ID NO: 116242 - RNA, 23 nt, Human
ugcaaaauggaaaaaauccccga

SEQ ID NO: 116243 - RNA, 18 nt, Human
ugccaaaaaacaaaccag

SEQ ID NO: 116244 - RNA, 22 nt, Human
ugccaacgcgaccgccccagag

SEQ ID NO: 116245 - RNA, 19 nt, Human
uggcuucuguguucuuucc

SEQ ID NO: 116246 - RNA, 21 nt, Human
uguggcacagcugcauuaaca

SEQ ID NO: 116247 - RNA, 23 nt, Human
uuucauaaacaaaccaaaacauc

SEQ ID NO: 116248 - RNA, 23 nt, Human
uuuccauagccacauccaaaucc

SEQ ID NO: 116249 - RNA, 24 nt, Human
uuuuuuuucauucauguauuuauu

SEQ ID NO: 116250 - RNA, 21 nt, Human
uuuuuuuuuuuuuuuuucauu

SEQ ID NO: 116251 - RNA, 20 nt, Human
acuuccagaggcugcaccuc

SEQ ID NO: 116252 - RNA, 22 nt, Human
auccacuuccagaggcugcacc

SEQ ID NO: 116253 - RNA, 19 nt, Human
caccaagaccuuuuuuuuc

SEQ ID NO: 116254 - RNA, 24 nt, Human
cgaaaggcgcagagaaugaggaca

SEQ ID NO: 116255 - RNA, 18 nt, Human
cggcaccucaccaagacc

SEQ ID NO: 116256 - RNA, 21 nt, Human
gaaaggcgcagagaaugagga

SEQ ID NO: 116257 - RNA, 19 nt, Human
ugaggacagaugaaauggc

SEQ ID NO: 116258 - RNA, 22 nt, Human
uugauccacuuccagaggcugc

SEQ ID NO: 116259 - RNA, 20 nt, Human
uuuuuuuuuuuuuuuuucac

SEQ ID NO: 116260 - RNA, 20 nt, Human
uuuuuuuuuuuuuuuuucac

SEQ ID NO: 116261 - RNA, 21 nt, Human
aagaggucaugauugcagaag

SEQ ID NO: 116262 - RNA, 19 nt, Human
aagcagggucagugacccc

SEQ ID NO: 116263 - RNA, 19 nt, Human
aaggaggucaccauggaga

SEQ ID NO: 116264 - RNA, 24 nt, Human
acaugauccaggggaggccggcca

SEQ ID NO: 116265 - RNA, 18 nt, Human
auggagacaucaagaggu

SEQ ID NO: 116266 - RNA, 20 nt, Human
cacagugugagggacagaac

SEQ ID NO: 116267 - RNA, 19 nt, Human
caggaugggccgguggggc

SEQ ID NO: 116268 - RNA, 24 nt, Human
caggggaggccggccacaaaugca

SEQ ID NO: 116269 - RNA, 19 nt, Human
ccacaaaaaacggucagcc

SEQ ID NO: 116270 - RNA, 19 nt, Human
ccaggggaggccggccaca

SEQ ID NO: 116271 - RNA, 22 nt, Human
ccggccacaaaugcaguaacau

SEQ ID NO: 116272 - RNA, 23 nt, Human
gccggccacaaaugcaguaacau

SEQ ID NO: 116273 - RNA, 22 nt, Human
ggaggccggccacaaaugcagu

SEQ ID NO: 116274 - RNA, 21 nt, Human
ugauugcagaagaggugacug

SEQ ID NO: 116275 - RNA, 20 nt, Human
uggggcuggucaggucacag

SEQ ID NO: 116276 - RNA, 26 nt, Human
cauugguuuuucucuuuuuuccacuu

SEQ ID NO: 116277 - RNA, 22 nt, Human
ccacuuaucaccaauuuauuuc

SEQ ID NO: 116278 - RNA, 20 nt, Human
uacauuguuaugaaucauug

SEQ ID NO: 116279 - RNA, 21 nt, Human
ucauugguuuuucucuuuuuu

SEQ ID NO: 116280 - RNA, 22 nt, Human
uuaugaaucauugguuuuucuc

SEQ ID NO: 116281 - RNA, 20 nt, Human
ugccuggauggggccagaga

SEQ ID NO: 116282 - RNA, 19 nt, Human
uggggccagagaggaggac

SEQ ID NO: 116283 - RNA, 19 nt, Human
uuuuuuuuuugcaagcccc

SEQ ID NO: 116284 - RNA, 22 nt, Human
uuuuuuuuuuuugcaagcccca

SEQ ID NO: 116285 - RNA, 18 nt, Human
uuuuuuuuuuuuuuuuug

SEQ ID NO: 116286 - RNA, 21 nt, Human
uuuuuuuuuuuuuuuuugcaa

SEQ ID NO: 116287 - RNA, 21 nt, Human
ccaaagagauuuuaauggcuc

SEQ ID NO: 116288 - RNA, 18 nt, Human
gcucuuguuucuucccca

SEQ ID NO: 116289 - RNA, 21 nt, Human
uuaauggcucuuguuucuucc

SEQ ID NO: 116290 - RNA, 24 nt, Human
aagcaaacagcaguaacaugggac

SEQ ID NO: 116291 - RNA, 19 nt, Human
aggcacaaaaaaggauuaa

SEQ ID NO: 116292 - RNA, 22 nt, Human
cacuguauaucaccuuucaaaa

SEQ ID NO: 116293 - RNA, 23 nt, Human
cacuguauaucaccuuucaaaau

SEQ ID NO: 116294 - RNA, 20 nt, Human
cacuuggagcaaagaaaggu

SEQ ID NO: 116295 - RNA, 23 nt, Human
cccacuguauaucaccuuucaaa

SEQ ID NO: 116296 - RNA, 19 nt, Human
cuuaaaugagcaagagaag

SEQ ID NO: 116297 - RNA, 19 nt, Human
gaaauagaagcugcauuug

SEQ ID NO: 116298 - RNA, 19 nt, Human
gaagccacauggugaaaau

SEQ ID NO: 116299 - RNA, 21 nt, Human
gaugaaaggcacaaaaaagga

SEQ ID NO: 116300 - RNA, 19 nt, Human
gcauuuuauuuuauuguau

SEQ ID NO: 116301 - RNA, 21 nt, Human
gguccaaacuucacuuggagc

SEQ ID NO: 116302 - RNA, 18 nt, Human
guuauggugcuacugaaa

SEQ ID NO: 116303 - RNA, 26 nt, Human
uaaguaaaagcaaacagcaguaacau

SEQ ID NO: 116304 - RNA, 19 nt, Human
ucauuuguuuucugugccc

SEQ ID NO: 116305 - RNA, 20 nt, Human
ucugugagaaacugaggguu

SEQ ID NO: 116306 - RNA, 19 nt, Human
ugaaaggcacaaaaaagga

SEQ ID NO: 116307 - RNA, 21 nt, Human
ugaaaggcacaaaaaaggauu

SEQ ID NO: 116308 - RNA, 20 nt, Human
ugaaaguaaguaaaagcaaa

SEQ ID NO: 116309 - RNA, 25 nt, Human
ugagaaacugaggguuuucauuugu

SEQ ID NO: 116310 - RNA, 24 nt, Human
ugagcaagagaaggauucagguga

SEQ ID NO: 116311 - RNA, 19 nt, Human
ugaggguuuucauuuguuu

SEQ ID NO: 116312 - RNA, 22 nt, Human
ugggacuuaaaugagcaagaga

SEQ ID NO: 116313 - RNA, 18 nt, Human
uuccaaacagagggcagu

SEQ ID NO: 116314 - RNA, 23 nt, Human
uucugcuggguccaaacuucacu

SEQ ID NO: 116315 - RNA, 18 nt, Human
uuuucauuuguuuucugu

SEQ ID NO: 116316 - RNA, 22 nt, Human
uuuucauuuguuuucugugccc

SEQ ID NO: 116317 - RNA, 18 nt, Human
aaaguugcuugagauggc

SEQ ID NO: 116318 - RNA, 18 nt, Human
aaaguugcuugagauggc

SEQ ID NO: 116319 - RNA, 19 nt, Human
aaaguugcuugagauggcu

SEQ ID NO: 116320 - RNA, 19 nt, Human
aaaguugcuugagauggcu

SEQ ID NO: 116321 - RNA, 21 nt, Human
aagcagaaugauaaaaucagg

SEQ ID NO: 116322 - RNA, 21 nt, Human
aagcagaaugauaaaaucagg

SEQ ID NO: 116323 - RNA, 22 nt, Human
aagcagaaugauaaaaucaggg

SEQ ID NO: 116324 - RNA, 22 nt, Human
aagcagaaugauaaaaucaggg

SEQ ID NO: 116325 - RNA, 18 nt, Human
cagcgugagaugaucuuu

SEQ ID NO: 116326 - RNA, 20 nt, Human
caugaacccuagucugccuu

SEQ ID NO: 116327 - RNA, 20 nt, Human
caugaacccuagucugccuu

SEQ ID NO: 116328 - RNA, 18 nt, Human
cuggaaucaguaaauuaa

SEQ ID NO: 116329 - RNA, 21 nt, Human
gugagaugaucuuugauuaaa

SEQ ID NO: 116330 - RNA, 21 nt, Human
gugagaugaucuuugauuaaa

SEQ ID NO: 116331 - RNA, 28 nt, Human
uaaaggcacaagcagaaauuggagaccc

SEQ ID NO: 116332 - RNA, 28 nt, Human
uaaaggcacaagcagaaauuggagaccc

SEQ ID NO: 116333 - RNA, 24 nt, Human
uagguucucugacagaaccaagga

SEQ ID NO: 116334 - RNA, 24 nt, Human
uagguucucugacagaaccaagga

SEQ ID NO: 116335 - RNA, 23 nt, Human
ucaaacgucgaaaaucaaagaaa

SEQ ID NO: 116336 - RNA, 23 nt, Human
ucaaacgucgaaaaucaaagaaa

SEQ ID NO: 116337 - RNA, 20 nt, Human
ucaguaaauuaaaauacgga

SEQ ID NO: 116338 - RNA, 20 nt, Human
ucaguaaauuaaaauacgga

SEQ ID NO: 116339 - RNA, 18 nt, Human
ucgaaaaucaaagaaaaa

SEQ ID NO: 116340 - RNA, 19 nt, Human
ucgaaaaucaaagaaaaag

SEQ ID NO: 116341 - RNA, 22 nt, Human
ucgaaaguugcuugagauggcu

SEQ ID NO: 116342 - RNA, 22 nt, Human
ucgaaaguugcuugagauggcu

SEQ ID NO: 116343 - RNA, 21 nt, Human
ugaaaauuuggagcagaaauc

SEQ ID NO: 116344 - RNA, 21 nt, Human
ugaaaauuuggagcagaaauc

SEQ ID NO: 116345 - RNA, 21 nt, Human
uggagcagaaaucuuuaaugu

SEQ ID NO: 116346 - RNA, 21 nt, Human
uggagcagaaaucuuuaaugu

SEQ ID NO: 116347 - RNA, 20 nt, Human
uugaguaggauccaaugauc

SEQ ID NO: 116348 - RNA, 20 nt, Human
uugaguaggauccaaugauc

SEQ ID NO: 116349 - RNA, 19 nt, Human
uuucuaaaggcacaagcag

SEQ ID NO: 116350 - RNA, 19 nt, Human
uuucuaaaggcacaagcag

SEQ ID NO: 116351 - RNA, 26 nt, Human
aaaccccuccaccugaaggcuuuggg

SEQ ID NO: 116352 - RNA, 24 nt, Human
aaagaaaaauacuaaagccacuag

SEQ ID NO: 116353 - RNA, 22 nt, Human
aaccaaaucacucccagaggcc

SEQ ID NO: 116354 - RNA, 24 nt, Human
aaccaaaucacucccagaggccua

SEQ ID NO: 116355 - RNA, 25 nt, Human
aagacagacauaauaaaaugcaaau

SEQ ID NO: 116356 - RNA, 21 nt, Human
aagagaccgucaaaugaaaca

SEQ ID NO: 116357 - RNA, 18 nt, Human
aagaugacacuuucacac

SEQ ID NO: 116358 - RNA, 19 nt, Human
aagccaaaugcagaagccc

SEQ ID NO: 116359 - RNA, 19 nt, Human
accugaauaagaaaaacuc

SEQ ID NO: 116360 - RNA, 27 nt, Human
agaaaaacuccagcuauuuaacaacua

SEQ ID NO: 116361 - RNA, 24 nt, Human
agcagcagcaccuguggguuuuua

SEQ ID NO: 116362 - RNA, 21 nt, Human
auggcugggucaucugaaaac

SEQ ID NO: 116363 - RNA, 24 nt, Human
caacuagagaaaaguacuccucag

SEQ ID NO: 116364 - RNA, 25 nt, Human
caagaggaacuguaauuuugcuugg

SEQ ID NO: 116365 - RNA, 20 nt, Human
caauauuaaagaaucaggca

SEQ ID NO: 116366 - RNA, 21 nt, Human
cagguuaagaaugugcaagua

SEQ ID NO: 116367 - RNA, 23 nt, Human
cccaagaggaacuguaauuuugc

SEQ ID NO: 116368 - RNA, 20 nt, Human
ccgaucuagccuuggaacag

SEQ ID NO: 116369 - RNA, 26 nt, Human
ccuacuguuauauguguuuaaaaauc

SEQ ID NO: 116370 - RNA, 22 nt, Human
ccugaauaagaaaaacuccagc

SEQ ID NO: 116371 - RNA, 19 nt, Human
cgacugaacuuuuagaaaa

SEQ ID NO: 116372 - RNA, 20 nt, Human
cucccuuaaaaugggcuauu

SEQ ID NO: 116373 - RNA, 18 nt, Human
gauaagacagacauaaua

SEQ ID NO: 116374 - RNA, 27 nt, Human
gauaagacagacauaauaaaaugcaaa

SEQ ID NO: 116375 - RNA, 22 nt, Human
gccaaaugcagaagcccauuua

SEQ ID NO: 116376 - RNA, 18 nt, Human
gcugggagauaugcaaaa

SEQ ID NO: 116377 - RNA, 23 nt, Human
ggcaaagaaccaaaucacuccca

SEQ ID NO: 116378 - RNA, 24 nt, Human
gugaaauucacagagaauacaaau

SEQ ID NO: 116379 - RNA, 18 nt, Human
uaacugauacauuaaugg

SEQ ID NO: 116380 - RNA, 21 nt, Human
uaagagagguagugaaauccu

SEQ ID NO: 116381 - RNA, 18 nt, Human
uagagaaaaguacuccuc

SEQ ID NO: 116382 - RNA, 19 nt, Human
uagguugaaaaaaccuuga

SEQ ID NO: 116383 - RNA, 24 nt, Human
uauuaaagaaucaggcauuccuag

SEQ ID NO: 116384 - RNA, 21 nt, Human
uauuuuguguucaaauacagg

SEQ ID NO: 116385 - RNA, 26 nt, Human
ucaaaaagagaccgucaaaugaaaca

SEQ ID NO: 116386 - RNA, 22 nt, Human
ucaaaugaaacauuagggcaaa

SEQ ID NO: 116387 - RNA, 23 nt, Human
ucaauucaaccuccauuaaaccu

SEQ ID NO: 116388 - RNA, 24 nt, Human
ucagaucuuguagauggcuggguc

SEQ ID NO: 116389 - RNA, 22 nt, Human
ucagcagucauaguuuacauuu

SEQ ID NO: 116390 - RNA, 22 nt, Human
ucucccuuaaaaugggcuauuu

SEQ ID NO: 116391 - RNA, 21 nt, Human
ugaaggcuuugggauaacuga

SEQ ID NO: 116392 - RNA, 22 nt, Human
ugauuggcagugaagaugacac

SEQ ID NO: 116393 - RNA, 21 nt, Human
ugcaaguaggucucuuccaca

SEQ ID NO: 116394 - RNA, 22 nt, Human
ugcaaguaggucucuuccacau

SEQ ID NO: 116395 - RNA, 23 nt, Human
uggaacagguagaaagccaaaug

SEQ ID NO: 116396 - RNA, 24 nt, Human
uggcugggucaucugaaaaccaug

SEQ ID NO: 116397 - RNA, 22 nt, Human
ugucccugccuuaauguuucug

SEQ ID NO: 116398 - RNA, 19 nt, Human
ugugaacaagaccggucaa

SEQ ID NO: 116399 - RNA, 23 nt, Human
ugugcaacauagaaaaagguucc

SEQ ID NO: 116400 - RNA, 23 nt, Human
uuaaagcuuuaugucgauucuga

SEQ ID NO: 116401 - RNA, 19 nt, Human
uuaauuucccaaagcucuu

SEQ ID NO: 116402 - RNA, 19 nt, Human
uucccaaagcucuuugaag

SEQ ID NO: 116403 - RNA, 19 nt, Human
uugcuagaucucucucuca

SEQ ID NO: 116404 - RNA, 18 nt, Human
uuggccauuuaaaacaaa

SEQ ID NO: 116405 - RNA, 23 nt, Human
uuggccauuuaaaacaaagaaaa

SEQ ID NO: 116406 - RNA, 18 nt, Human
uugguacuuaugcuggga

SEQ ID NO: 116407 - RNA, 19 nt, Human
uuuccuacuguuauaugug

SEQ ID NO: 116408 - RNA, 20 nt, Human
uuuugcuagaucucucucuc

SEQ ID NO: 116409 - RNA, 18 nt, Human
uuuuuuuuuuuuuucuug

SEQ ID NO: 116410 - RNA, 21 nt, Human
acuaauuuuugaaagcuagaa

SEQ ID NO: 116411 - RNA, 20 nt, Human
acugcgaggcagggggccgg

SEQ ID NO: 116412 - RNA, 31 nt, Human
acuggggauuuuuuuuuaaccuuuauucauu

SEQ ID NO: 116413 - RNA, 22 nt, Human
agaggagacgggcaaagccgcg

SEQ ID NO: 116414 - RNA, 24 nt, Human
agucagcacaagaaaaaaacgaca

SEQ ID NO: 116415 - RNA, 25 nt, Human
auaaaaccucuuuguaaacauguaa

SEQ ID NO: 116416 - RNA, 20 nt, Human
auagguaggaaaaugaauac

SEQ ID NO: 116417 - RNA, 18 nt, Human
caagagaaaacccuaaac

SEQ ID NO: 116418 - RNA, 22 nt, Human
caccagccucuacucgccucac

SEQ ID NO: 116419 - RNA, 21 nt, Human
cacucuacaaccaagagaaaa

SEQ ID NO: 116420 - RNA, 26 nt, Human
caucaaaaaugcauuaacaagaucau

SEQ ID NO: 116421 - RNA, 25 nt, Human
cauucagaaugcaauucugggccac

SEQ ID NO: 116422 - RNA, 21 nt, Human
ccacgggcugcacuacuggcc

SEQ ID NO: 116423 - RNA, 26 nt, Human
cccggcccugggcuuagcccgccggc

SEQ ID NO: 116424 - RNA, 19 nt, Human
ccgccgccgccggccgugc

SEQ ID NO: 116425 - RNA, 21 nt, Human
ccuacgcgggcggccucuuuu

SEQ ID NO: 116426 - RNA, 23 nt, Human
ccucuacucgccucaccuucccc

SEQ ID NO: 116427 - RNA, 24 nt, Human
ccucuacucgccucaccuuccccg

SEQ ID NO: 116428 - RNA, 22 nt, Human
cgccggccgugccuuccuacgc

SEQ ID NO: 116429 - RNA, 21 nt, Human
cgccucaccuuccccggcuga

SEQ ID NO: 116430 - RNA, 18 nt, Human
cgcggagcccaggggagc

SEQ ID NO: 116431 - RNA, 21 nt, Human
cgcugcgcuccgccgccgccg

SEQ ID NO: 116432 - RNA, 19 nt, Human
cggcuccacgggcugcacu

SEQ ID NO: 116433 - RNA, 20 nt, Human
cucuacaaccaagagaaaac

SEQ ID NO: 116434 - RNA, 25 nt, Human
cugcacaaaaucuaaaaaaaagacc

SEQ ID NO: 116435 - RNA, 19 nt, Human
gagacgggcaaagccgcgg

SEQ ID NO: 116436 - RNA, 24 nt, Human
gcacaaaaucuaaaaaaaagacca

SEQ ID NO: 116437 - RNA, 20 nt, Human
gcacaagaaaaaaacgacaa

SEQ ID NO: 116438 - RNA, 20 nt, Human
gcccgccggcgcugcugggg

SEQ ID NO: 116439 - RNA, 19 nt, Human
gcuuauaguuagucagcac

SEQ ID NO: 116440 - RNA, 23 nt, Human
ggccacucuacaaccaagagaaa

SEQ ID NO: 116441 - RNA, 19 nt, Human
guuaaccuuuucaauagca

SEQ ID NO: 116442 - RNA, 18 nt, Human
uaaaaaauaaaucaaugu

SEQ ID NO: 116443 - RNA, 24 nt, Human
uaacugcacaaaaucuaaaaaaaa

SEQ ID NO: 116444 - RNA, 21 nt, Human
uaagccuaggauggcaaaauu

SEQ ID NO: 116445 - RNA, 23 nt, Human
uacucgccucaccuuccccggcu

SEQ ID NO: 116446 - RNA, 21 nt, Human
ucaccaauuacaguaaaagaa

SEQ ID NO: 116447 - RNA, 22 nt, Human
ucagcacaagaaaaaaacgaca

SEQ ID NO: 116448 - RNA, 24 nt, Human
ucugggccacucuacaaccaagag

SEQ ID NO: 116449 - RNA, 20 nt, Human
ucuuuugucugcccggcccu

SEQ ID NO: 116450 - RNA, 24 nt, Human
ugcauuaacaagaucaugcuuaua

SEQ ID NO: 116451 - RNA, 22 nt, Human
ugcauuuaagccuaggauggca

SEQ ID NO: 116452 - RNA, 24 nt, Human
uguaaacauguaccuuuucuuccc

SEQ ID NO: 116453 - RNA, 18 nt, Human
uucagaaugcaauucugg

SEQ ID NO: 116454 - RNA, 25 nt, Human
aaaaagaaaagaaagaaccaaaaag

SEQ ID NO: 116455 - RNA, 26 nt, Human
aaccuaauaaaaagaaaagaaagaac

SEQ ID NO: 116456 - RNA, 25 nt, Human
aagaaagaaccaaaaagaaguagua

SEQ ID NO: 116457 - RNA, 21 nt, Human
aagaaccaaaaagaaguagua

SEQ ID NO: 116458 - RNA, 18 nt, Human
acccugggaugaagggag

SEQ ID NO: 116459 - RNA, 22 nt, Human
aggcugcagcuccuccgcggcc

SEQ ID NO: 116460 - RNA, 18 nt, Human
aggcuggggcaggaggcc

SEQ ID NO: 116461 - RNA, 18 nt, Human
cagaggccaacugagguu

SEQ ID NO: 116462 - RNA, 22 nt, Human
ccccuggccagggaagaggggc

SEQ ID NO: 116463 - RNA, 21 nt, Human
cccuucagaauugagacuuaa

SEQ ID NO: 116464 - RNA, 20 nt, Human
ccgggccgagguucuggcgc

SEQ ID NO: 116465 - RNA, 21 nt, Human
ccuggcuggccuggcuuggga

SEQ ID NO: 116466 - RNA, 20 nt, Human
ccugggaugaagggaggugu

SEQ ID NO: 116467 - RNA, 25 nt, Human
ccuucagaauugagacuuaaccuaa

SEQ ID NO: 116468 - RNA, 23 nt, Human
cgcccgggccgagguucuggcgc

SEQ ID NO: 116469 - RNA, 18 nt, Human
cgcggccgacgagggcgc

SEQ ID NO: 116470 - RNA, 18 nt, Human
cggcagaauuugcaugca

SEQ ID NO: 116471 - RNA, 31 nt, Human
cgugccuuagcccacggcagaauuugcaugg

SEQ ID NO: 116472 - RNA, 21 nt, Human
cucccccucuuccuugacucc

SEQ ID NO: 116473 - RNA, 24 nt, Human
cucccucccccucuuccuugacuc

SEQ ID NO: 116474 - RNA, 23 nt, Human
cucugguuagcgugccuuagccc

SEQ ID NO: 116475 - RNA, 19 nt, Human
cugcagcuccuccgcggcc

SEQ ID NO: 116476 - RNA, 18 nt, Human
cuggcuggccuggcuugg

SEQ ID NO: 116477 - RNA, 21 nt, Human
cuuccuguuggaggcugcagc

SEQ ID NO: 116478 - RNA, 18 nt, Human
ggcagggaucacaccuuc

SEQ ID NO: 116479 - RNA, 23 nt, Human
ggggcagaggccaacugagguuu

SEQ ID NO: 116480 - RNA, 20 nt, Human
ggugugagggagagcugagg

SEQ ID NO: 116481 - RNA, 18 nt, Human
gugagggagagcugaggg

SEQ ID NO: 116482 - RNA, 25 nt, Human
uagcauggcagggaucacaccuucc

SEQ ID NO: 116483 - RNA, 24 nt, Human
uccgcggccgacgagggccggggc

SEQ ID NO: 116484 - RNA, 21 nt, Human
uccuccgcggccgacgagggc

SEQ ID NO: 116485 - RNA, 22 nt, Human
uccuggcuggccuggcuuggga

SEQ ID NO: 116486 - RNA, 18 nt, Human
ugagggggagaagccccu

SEQ ID NO: 116487 - RNA, 18 nt, Human
uggaguaggcuggggcag

SEQ ID NO: 116488 - RNA, 19 nt, Human
uucucccucccccucuucc

SEQ ID NO: 116489 - RNA, 20 nt, Human
uucucccucccccucuuccu

SEQ ID NO: 116490 - RNA, 24 nt, Human
uugcaugcagcgcuccuggcuggc

SEQ ID NO: 116491 - RNA, 20 nt, Human
aaagugcugggauuacaagg

SEQ ID NO: 116492 - RNA, 25 nt, Human
aaagugcugggauuacaagguguga

SEQ ID NO: 116493 - RNA, 24 nt, Human
aaccucagggugauccgcccaccu

SEQ ID NO: 116494 - RNA, 20 nt, Human
aagugcugggauuacaaggu

SEQ ID NO: 116495 - RNA, 22 nt, Human
aagugcugggauuacaaggugu

SEQ ID NO: 116496 - RNA, 27 nt, Human
aagugcugggauuacaaggugugagcc

SEQ ID NO: 116497 - RNA, 21 nt, Human
aauggcacuaucucggcucac

SEQ ID NO: 116498 - RNA, 21 nt, Human
acaggguuucaccauguuggu

SEQ ID NO: 116499 - RNA, 23 nt, Human
acaggguuucaccauguugguca

SEQ ID NO: 116500 - RNA, 24 nt, Human
acaggguuucaccauguuggucag

SEQ ID NO: 116501 - RNA, 20 nt, Human
accauguuggucaggcuggu

SEQ ID NO: 116502 - RNA, 21 nt, Human
accucagggugauccgcccac

SEQ ID NO: 116503 - RNA, 30 nt, Human
acucuguugcccaagcuggaguacaauggg

SEQ ID NO: 116504 - RNA, 23 nt, Human
agugagcaaucccugauuccagg

SEQ ID NO: 116505 - RNA, 25 nt, Human
caaagugcugggauuacaaggugug

SEQ ID NO: 116506 - RNA, 22 nt, Human
caagcgauucuccugucucagc

SEQ ID NO: 116507 - RNA, 21 nt, Human
caccauguuggucaggcuggu

SEQ ID NO: 116508 - RNA, 21 nt, Human
caccauguuggucaggcuggu

SEQ ID NO: 116509 - RNA, 24 nt, Human
caccauguuggucaggcugguuuu

SEQ ID NO: 116510 - RNA, 24 nt, Human
caggguuucaccauguuggucagg

SEQ ID NO: 116511 - RNA, 21 nt, Human
caggugcccgccaccacaccc

SEQ ID NO: 116512 - RNA, 22 nt, Human
caggugcccgccaccacacccc

SEQ ID NO: 116513 - RNA, 24 nt, Human
cauguuggucaggcugguuuugaa

SEQ ID NO: 116514 - RNA, 21 nt, Human
ccaaagugcugggauuacaag

SEQ ID NO: 116515 - RNA, 24 nt, Human
ccaaagugcugggauuacaaggug

SEQ ID NO: 116516 - RNA, 25 nt, Human
ccaaagugcugggauuacaaggugu

SEQ ID NO: 116517 - RNA, 21 nt, Human
ccacugcuccuggccuuaugg

SEQ ID NO: 116518 - RNA, 23 nt, Human
cccaagcuggaguacaauggcac

SEQ ID NO: 116519 - RNA, 24 nt, Human
ccucuaggguucaagcgauucucc

SEQ ID NO: 116520 - RNA, 20 nt, Human
ccuggccuuauggugaaguc

SEQ ID NO: 116521 - RNA, 22 nt, Human
cgucaagacugaaucauucuuu

SEQ ID NO: 116522 - RNA, 23 nt, Human
cugucucagccuccugaaaggcu

SEQ ID NO: 116523 - RNA, 23 nt, Human
cuucaggaagaucguggaguuuc

SEQ ID NO: 116524 - RNA, 19 nt, Human
gauuacaaggugugagcca

SEQ ID NO: 116525 - RNA, 23 nt, Human
gauuacaaggugugagccacugc

SEQ ID NO: 116526 - RNA, 18 nt, Human
gauuacaggugcccgcca

SEQ ID NO: 116527 - RNA, 21 nt, Human
gauucuccugucucagccucc

SEQ ID NO: 116528 - RNA, 22 nt, Human
gcaaacuccgccucuaggguuc

SEQ ID NO: 116529 - RNA, 20 nt, Human
gcaguacuuguuagguaagu

SEQ ID NO: 116530 - RNA, 24 nt, Human
gcgauucuccugucucagccuccu

SEQ ID NO: 116531 - RNA, 20 nt, Human
gcuggaguacaauggcacua

SEQ ID NO: 116532 - RNA, 23 nt, Human
gcugguuuugaacuccuaaccuc

SEQ ID NO: 116533 - RNA, 24 nt, Human
ggcugguuuugaacuccuaaccuc

SEQ ID NO: 116534 - RNA, 22 nt, Human
gggauuacaaggugugagccac

SEQ ID NO: 116535 - RNA, 20 nt, Human
ggguucaagcgauucuccug

SEQ ID NO: 116536 - RNA, 22 nt, Human
ggguuucaccauguuggucagg

SEQ ID NO: 116537 - RNA, 23 nt, Human
ggugauccgcccaccuuggccuc

SEQ ID NO: 116538 - RNA, 19 nt, Human
uaagugucuuccauucacc

SEQ ID NO: 116539 - RNA, 22 nt, Human
uagagacaggguuucaccaugu

SEQ ID NO: 116540 - RNA, 21 nt, Human
uaggguucaagcgauucuccu

SEQ ID NO: 116541 - RNA, 24 nt, Human
uaguagagacaggguuucaccaug

SEQ ID NO: 116542 - RNA, 25 nt, Human
uaguagagacaggguuucaccaugu

SEQ ID NO: 116543 - RNA, 24 nt, Human
uauuuaguagagacaggguuucac

SEQ ID NO: 116544 - RNA, 18 nt, Human
ucacugcaaacuccgccu

SEQ ID NO: 116545 - RNA, 19 nt, Human
ucacugcaaacuccgccuc

SEQ ID NO: 116546 - RNA, 23 nt, Human
ucacugcaaacuccgccucuagg

SEQ ID NO: 116547 - RNA, 24 nt, Human
ucacugcaaacuccgccucuaggg

SEQ ID NO: 116548 - RNA, 18 nt, Human
ucagccuccugaaaggcu

SEQ ID NO: 116549 - RNA, 24 nt, Human
ucagggugauccgcccaccuuggc

SEQ ID NO: 116550 - RNA, 23 nt, Human
uccauucaccgucaagacugaau

SEQ ID NO: 116551 - RNA, 23 nt, Human
ucccaaagugcugggauuacaag

SEQ ID NO: 116552 - RNA, 24 nt, Human
ucuaggguucaagcgauucuccug

SEQ ID NO: 116553 - RNA, 26 nt, Human
ucuccugucucagccuccugaaaggc

SEQ ID NO: 116554 - RNA, 22 nt, Human
ucuuacucuguugcccaagcug

SEQ ID NO: 116555 - RNA, 23 nt, Human
ucuuacucuguugcccaagcugg

SEQ ID NO: 116556 - RNA, 24 nt, Human
ucuuacucuguugcccaagcugga

SEQ ID NO: 116557 - RNA, 24 nt, Human
ugauccgcccaccuuggccuccca

SEQ ID NO: 116558 - RNA, 24 nt, Human
ugcccaagcuggaguacaauggca

SEQ ID NO: 116559 - RNA, 21 nt, Human
ugcgauuacaggugcccgcca

SEQ ID NO: 116560 - RNA, 22 nt, Human
ugcgauuacaggugcccgccac

SEQ ID NO: 116561 - RNA, 24 nt, Human
ugcgauuacaggugcccgccacca

SEQ ID NO: 116562 - RNA, 25 nt, Human
ugcuccuggccuuauggugaagucu

SEQ ID NO: 116563 - RNA, 25 nt, Human
ugcugggauuacaaggugugagcca

SEQ ID NO: 116564 - RNA, 20 nt, Human
ugggauuacaaggugugagc

SEQ ID NO: 116565 - RNA, 23 nt, Human
ugggauuacaaggugugagccac

SEQ ID NO: 116566 - RNA, 23 nt, Human
ugggauuacaaggugugagccac

SEQ ID NO: 116567 - RNA, 25 nt, Human
ugggauuacaaggugugagccacug

SEQ ID NO: 116568 - RNA, 24 nt, Human
uggucaggcugguuuugaacuccu

SEQ ID NO: 116569 - RNA, 25 nt, Human
ugucucagccuccugaaaggcugcg

SEQ ID NO: 116570 - RNA, 23 nt, Human
uguggguugaguuucacauuuua

SEQ ID NO: 116571 - RNA, 24 nt, Human
uuaguagagacaggguuucaccau

SEQ ID NO: 116572 - RNA, 23 nt, Human
uucaagcgauucuccugucucag

SEQ ID NO: 116573 - RNA, 18 nt, Human
uuggccucccaaagugcu

SEQ ID NO: 116574 - RNA, 24 nt, Human
uuucaccauguuggucaggcuggu

SEQ ID NO: 116575 - RNA, 23 nt, Human
uuucauuaucaccacauauugcu

SEQ ID NO: 116576 - RNA, 21 nt, Human
aacaaccuagccucuucaccc

SEQ ID NO: 116577 - RNA, 19 nt, Human
aaccuagccucuucacccg

SEQ ID NO: 116578 - RNA, 25 nt, Human
acucaucucuccucccucacucccu

SEQ ID NO: 116579 - RNA, 20 nt, Human
agaaagaaugcuugaucuga

SEQ ID NO: 116580 - RNA, 18 nt, Human
caccuccuuaaacaaccu

SEQ ID NO: 116581 - RNA, 19 nt, Human
caggagcaaagccuuucug

SEQ ID NO: 116582 - RNA, 24 nt, Human
ccaccuccuuaaacaaccuagccu

SEQ ID NO: 116583 - RNA, 21 nt, Human
cccaccuccuuaaacaaccuu

SEQ ID NO: 116584 - RNA, 23 nt, Human
ccuagccucuucacccgccaaaa

SEQ ID NO: 116585 - RNA, 18 nt, Human
ccuuaaacaaccuagccu

SEQ ID NO: 116586 - RNA, 24 nt, Human
cgccccaccuccuuaaacaaccua

SEQ ID NO: 116587 - RNA, 18 nt, Human
gaaauucuuuaugucguu

SEQ ID NO: 116588 - RNA, 18 nt, Human
gagcaggagcaaagccuu

SEQ ID NO: 116589 - RNA, 22 nt, Human
gccaaaauccaagguccaccua

SEQ ID NO: 116590 - RNA, 22 nt, Human
gcgccccaccuccuuaaacaac

SEQ ID NO: 116591 - RNA, 23 nt, Human
uagccacucaucucuccucccuc

SEQ ID NO: 116592 - RNA, 18 nt, Human
ucccgcuuguaaacacca

SEQ ID NO: 116593 - RNA, 19 nt, Human
ugaaacgcgccccaccucc

SEQ ID NO: 116594 - RNA, 23 nt, Human
ugcugggcuuuuucaaagagagc

SEQ ID NO: 116595 - RNA, 20 nt, Human
uggaagacguucccagcugu

SEQ ID NO: 116596 - RNA, 21 nt, Human
aaaaaaaaaaagcacauaaaa

SEQ ID NO: 116597 - RNA, 23 nt, Human
aaaaaaaaaaagcacauaaaauc

SEQ ID NO: 116598 - RNA, 19 nt, Human
aaaaaaaaagccaaaucug

SEQ ID NO: 116599 - RNA, 21 nt, Human
aaaaaaagccaaaucugacca

SEQ ID NO: 116600 - RNA, 19 nt, Human
aaacaaaaacaacaacaga

SEQ ID NO: 116601 - RNA, 23 nt, Human
aaacaaaaacaacaacagaauaa

SEQ ID NO: 116602 - RNA, 30 nt, Human
aaacaacaacagaauaagcuuuccccacac

SEQ ID NO: 116603 - RNA, 25 nt, Human
aaaccacaucaucccaacaguuuuc

SEQ ID NO: 116604 - RNA, 18 nt, Human
aaacugugaaaacugaua

SEQ ID NO: 116605 - RNA, 19 nt, Human
aaaucagaauauaaaauaa

SEQ ID NO: 116606 - RNA, 20 nt, Human
aacaucugagacaacuaugg

SEQ ID NO: 116607 - RNA, 25 nt, Human
aaccacaucaucccaacaguuuucc

SEQ ID NO: 116608 - RNA, 22 nt, Human
aaccugcaaaccacaucauccc

SEQ ID NO: 116609 - RNA, 22 nt, Human
aagaaaaaaaaaguauguccaa

SEQ ID NO: 116610 - RNA, 22 nt, Human
aagcaccuugugcaggugacuc

SEQ ID NO: 116611 - RNA, 19 nt, Human
aaguaugacauccauaaaa

SEQ ID NO: 116612 - RNA, 23 nt, Human
aaugcucaucugggcuaggcaac

SEQ ID NO: 116613 - RNA, 26 nt, Human
acaacaacagaauaagcuuuccccac

SEQ ID NO: 116614 - RNA, 22 nt, Human
acaauaaaauaaaauaucuaga

SEQ ID NO: 116615 - RNA, 22 nt, Human
acacauguauugucaaguauga

SEQ ID NO: 116616 - RNA, 25 nt, Human
accacaucaucccaacaguuuucca

SEQ ID NO: 116617 - RNA, 20 nt, Human
acccuaguuugcuggaauca

SEQ ID NO: 116618 - RNA, 23 nt, Human
acuuagugaagacagcuuuccag

SEQ ID NO: 116619 - RNA, 21 nt, Human
agaaaggcaaauaaaaauggc

SEQ ID NO: 116620 - RNA, 21 nt, Human
agaacaaacagcacuuaaaug

SEQ ID NO: 116621 - RNA, 21 nt, Human
agaaggaaacggaauucugaa

SEQ ID NO: 116622 - RNA, 23 nt, Human
agaguuacaggaacaaauuugau

SEQ ID NO: 116623 - RNA, 25 nt, Human
agcaagcagguccccucucagccug

SEQ ID NO: 116624 - RNA, 19 nt, Human
agcgacgguggagaacagg

SEQ ID NO: 116625 - RNA, 22 nt, Human
aggaggauaugcccagugacug

SEQ ID NO: 116626 - RNA, 24 nt, Human
aggcacagcaaccugcaaaccaca

SEQ ID NO: 116627 - RNA, 25 nt, Human
aggugacucaggggcugcugagaag

SEQ ID NO: 116628 - RNA, 21 nt, Human
agguggaagucgagcgacggu

SEQ ID NO: 116629 - RNA, 20 nt, Human
agucuucuuuuuucuuuccu

SEQ ID NO: 116630 - RNA, 18 nt, Human
auaugaggugugaaaguc

SEQ ID NO: 116631 - RNA, 20 nt, Human
auccaaagagcuuuacugca

SEQ ID NO: 116632 - RNA, 23 nt, Human
augaagaccaaauccaauugaca

SEQ ID NO: 116633 - RNA, 22 nt, Human
caaaacaguccuaaccguuuua

SEQ ID NO: 116634 - RNA, 25 nt, Human
caacaacagaauaagcuuuccccac

SEQ ID NO: 116635 - RNA, 23 nt, Human
caacuauggcuccaaacaaucag

SEQ ID NO: 116636 - RNA, 24 nt, Human
caacucuuaaaaaaaaaaagcaca

SEQ ID NO: 116637 - RNA, 19 nt, Human
cacugaauugacugggcaa

SEQ ID NO: 116638 - RNA, 30 nt, Human
cagcaaccugcaaaccacaucaucccaacu

SEQ ID NO: 116639 - RNA, 19 nt, Human
cagcaaccugcaaaccacu

SEQ ID NO: 116640 - RNA, 22 nt, Human
cagcaagcagguccccucucag

SEQ ID NO: 116641 - RNA, 26 nt, Human
cagcaagcagguccccucucagccuu

SEQ ID NO: 116642 - RNA, 21 nt, Human
cagcaucaaacagauaagcuc

SEQ ID NO: 116643 - RNA, 24 nt, Human
caggcacagcaaccugcaaaccac

SEQ ID NO: 116644 - RNA, 18 nt, Human
cauaaccagcaguuccca

SEQ ID NO: 116645 - RNA, 22 nt, Human
ccccaaaauaaccuagaaagaa

SEQ ID NO: 116646 - RNA, 18 nt, Human
ccccacacuaauuucuaa

SEQ ID NO: 116647 - RNA, 23 nt, Human
ccccaguuaacagcacauaucca

SEQ ID NO: 116648 - RNA, 24 nt, Human
ccuaaccguuuuaacaaaucucaa

SEQ ID NO: 116649 - RNA, 22 nt, Human
ccucuuaucuuuccuggacaaa

SEQ ID NO: 116650 - RNA, 20 nt, Human
ccuugcagaaaagcacugua

SEQ ID NO: 116651 - RNA, 24 nt, Human
cucagccuggccuuggcaaugagc

SEQ ID NO: 116652 - RNA, 24 nt, Human
cucuuaaaaaaaaaaagcacauaa

SEQ ID NO: 116653 - RNA, 24 nt, Human
cuuaaaaaaaggagaaaaugacua

SEQ ID NO: 116654 - RNA, 19 nt, Human
cuugcagaaaagcacugua

SEQ ID NO: 116655 - RNA, 19 nt, Human
cuuggcaaugagcugcuuc

SEQ ID NO: 116656 - RNA, 21 nt, Human
gaaaaaaaaagccaaaucuga

SEQ ID NO: 116657 - RNA, 23 nt, Human
gaaaaggacuauuuuaauguaaa

SEQ ID NO: 116658 - RNA, 21 nt, Human
gaaauaacuuuauccaaaagg

SEQ ID NO: 116659 - RNA, 21 nt, Human
gaacaucugagacaacuaugg

SEQ ID NO: 116660 - RNA, 21 nt, Human
gagaaaauucugaaaaccaca

SEQ ID NO: 116661 - RNA, 21 nt, Human
gagcgacgguggagaacaggu

SEQ ID NO: 116662 - RNA, 23 nt, Human
gauuuggggugagagauggcauu

SEQ ID NO: 116663 - RNA, 21 nt, Human
gcaaaaaucagaugcauagac

SEQ ID NO: 116664 - RNA, 21 nt, Human
gccuuggcaaugagcugcuuc

SEQ ID NO: 116665 - RNA, 22 nt, Human
gggaaaaggacuauuuuaaugu

SEQ ID NO: 116666 - RNA, 22 nt, Human
guuaguuuucuuuucuccuauu

SEQ ID NO: 116667 - RNA, 19 nt, Human
uaaaaaucagaugaaaaug

SEQ ID NO: 116668 - RNA, 20 nt, Human
uaaaagcacaaaacaguuuc

SEQ ID NO: 116669 - RNA, 25 nt, Human
uaaaagcacaaaacaguuucuaaca

SEQ ID NO: 116670 - RNA, 22 nt, Human
uaaaauaaugaagaccaaaucc

SEQ ID NO: 116671 - RNA, 25 nt, Human
uaaacaaaaacaacaacaaccccgg

SEQ ID NO: 116672 - RNA, 19 nt, Human
uaaauugcuaucaaucacu

SEQ ID NO: 116673 - RNA, 21 nt, Human
uaacagcacauauccaaagga

SEQ ID NO: 116674 - RNA, 19 nt, Human
uaaccagcaguucccaagc

SEQ ID NO: 116675 - RNA, 20 nt, Human
uaaggcaccacuauaaugaa

SEQ ID NO: 116676 - RNA, 20 nt, Human
uaaguaauacgcuguaaaag

SEQ ID NO: 116677 - RNA, 27 nt, Human
uaauuuuucuuuaaaugcauuuuaaga

SEQ ID NO: 116678 - RNA, 21 nt, Human
uacaggaacaaauuugauauc

SEQ ID NO: 116679 - RNA, 22 nt, Human
uacuuuggaaagauugccuaag

SEQ ID NO: 116680 - RNA, 20 nt, Human
uagaaaggcaaauaaaaaug

SEQ ID NO: 116681 - RNA, 18 nt, Human
uagaacaucugagacaac

SEQ ID NO: 116682 - RNA, 20 nt, Human
uagcaucuacugaugaacau

SEQ ID NO: 116683 - RNA, 22 nt, Human
uagccaagugggaaggugguag

SEQ ID NO: 116684 - RNA, 21 nt, Human
uaggcccucaauaaaauauua

SEQ ID NO: 116685 - RNA, 19 nt, Human
uagguaaaugcucaucugg

SEQ ID NO: 116686 - RNA, 19 nt, Human
uaguuagaugccuucccca

SEQ ID NO: 116687 - RNA, 23 nt, Human
uaucauauaauuuaagaagcucu

SEQ ID NO: 116688 - RNA, 19 nt, Human
uauccaaaggacagcuagc

SEQ ID NO: 116689 - RNA, 23 nt, Human
uaugaugagguugagugcugaaa

SEQ ID NO: 116690 - RNA, 22 nt, Human
ucaaaacuguaaaaaggcacca

SEQ ID NO: 116691 - RNA, 22 nt, Human
ucagccuggccuuggcaaugag

SEQ ID NO: 116692 - RNA, 23 nt, Human
ucaggcacagcaaccugcaaacc

SEQ ID NO: 116693 - RNA, 19 nt, Human
ucauuuuuuaaaaggcuuc

SEQ ID NO: 116694 - RNA, 18 nt, Human
uccacaauaaaauaaaau

SEQ ID NO: 116695 - RNA, 24 nt, Human
ucugaucagacuucaaauuuuucu

SEQ ID NO: 116696 - RNA, 18 nt, Human
ucuguuuuacuguacauu

SEQ ID NO: 116697 - RNA, 22 nt, Human
ugaaaaaaaaagccaaaucuga

SEQ ID NO: 116698 - RNA, 26 nt, Human
ugaaaaaaaaagccaaaucugaccau

SEQ ID NO: 116699 - RNA, 22 nt, Human
ugaaaguaaacaaaaacaacaa

SEQ ID NO: 116700 - RNA, 19 nt, Human
ugacaaacacuuaaacaca

SEQ ID NO: 116701 - RNA, 23 nt, Human
ugagaagccacagcuaucugugg

SEQ ID NO: 116702 - RNA, 18 nt, Human
ugagugcugaaacuguga

SEQ ID NO: 116703 - RNA, 20 nt, Human
ugaguucaguuguguaauuu

SEQ ID NO: 116704 - RNA, 21 nt, Human
ugcccagugacugggacccug

SEQ ID NO: 116705 - RNA, 18 nt, Human
uggagaacagguuggcag

SEQ ID NO: 116706 - RNA, 19 nt, Human
uggcacaacagggaaaagg

SEQ ID NO: 116707 - RNA, 21 nt, Human
uggcauaaguagcaauggggc

SEQ ID NO: 116708 - RNA, 20 nt, Human
uggcugaagaaaaccaggaa

SEQ ID NO: 116709 - RNA, 21 nt, Human
uggcuuauacaacauacacug

SEQ ID NO: 116710 - RNA, 20 nt, Human
ugggacccugccacagcauc

SEQ ID NO: 116711 - RNA, 21 nt, Human
uguaaaaaggcaccaauuacc

SEQ ID NO: 116712 - RNA, 20 nt, Human
uguacauuuaaaaaacugag

SEQ ID NO: 116713 - RNA, 21 nt, Human
uuaaacagauauaauccauag

SEQ ID NO: 116714 - RNA, 21 nt, Human
uuaaugcagcaguuggaaaag

SEQ ID NO: 116715 - RNA, 23 nt, Human
uuacuguacauugagaauaugug

SEQ ID NO: 116716 - RNA, 19 nt, Human
uuagagguggaagucgagc

SEQ ID NO: 116717 - RNA, 21 nt, Human
uucaaaagguaaauuauuaaa

SEQ ID NO: 116718 - RNA, 22 nt, Human
uugauaaugucaaaaugaugug

SEQ ID NO: 116719 - RNA, 21 nt, Human
agaacccagggggcacaccug

SEQ ID NO: 116720 - RNA, 21 nt, Human
aggaagucacugaggggccac

SEQ ID NO: 116721 - RNA, 21 nt, Human
cacgagggucaggacaggcac

SEQ ID NO: 116722 - RNA, 22 nt, Human
cacugggcucucggucgggggc

SEQ ID NO: 116723 - RNA, 19 nt, Human
cagcauugaaggguauggg

SEQ ID NO: 116724 - RNA, 24 nt, Human
caggcacugagaggcugagggagu

SEQ ID NO: 116725 - RNA, 18 nt, Human
cagggggcacaccugguc

SEQ ID NO: 116726 - RNA, 20 nt, Human
ccagaacccagggggcacac

SEQ ID NO: 116727 - RNA, 24 nt, Human
cccuugcugcuccagccgcuggcg

SEQ ID NO: 116728 - RNA, 19 nt, Human
cgagggucaggacaggcac

SEQ ID NO: 116729 - RNA, 27 nt, Human
cuccggcucucuggcccuggcccugac

SEQ ID NO: 116730 - RNA, 19 nt, Human
cuggcccuggcccugacuc

SEQ ID NO: 116731 - RNA, 18 nt, Human
gagcaggacccaccacuc

SEQ ID NO: 116732 - RNA, 21 nt, Human
gcucucuggcccuggcccuga

SEQ ID NO: 116733 - RNA, 23 nt, Human
gcucucuggcccuggcccugacu

SEQ ID NO: 116734 - RNA, 19 nt, Human
ggccacagcauugaagggu

SEQ ID NO: 116735 - RNA, 24 nt, Human
ggcucucuggcccuggcccugacu

SEQ ID NO: 116736 - RNA, 21 nt, Human
gguccaagagguggaggcauu

SEQ ID NO: 116737 - RNA, 19 nt, Human
ucacugaggggccacagca

SEQ ID NO: 116738 - RNA, 21 nt, Human
ucccuugcugcuccagccgcu

SEQ ID NO: 116739 - RNA, 26 nt, Human
ucuccggcucucuggcccuggcccca

SEQ ID NO: 116740 - RNA, 20 nt, Human
ucucuccggcucucuggccc

SEQ ID NO: 116741 - RNA, 20 nt, Human
ugagaggcugagggaguguu

SEQ ID NO: 116742 - RNA, 21 nt, Human
ugaggggccacagcauugaag

SEQ ID NO: 116743 - RNA, 23 nt, Human
ugaggggccacagcauugaaggg

SEQ ID NO: 116744 - RNA, 20 nt, Human
ugcuaggagcaguucucuuu

SEQ ID NO: 116745 - RNA, 24 nt, Human
aagcacaggguagguggguguggg

SEQ ID NO: 116746 - RNA, 19 nt, Human
aagcagagcccccaguccc

SEQ ID NO: 116747 - RNA, 20 nt, Human
aagccagcaggaucccagga

SEQ ID NO: 116748 - RNA, 23 nt, Human
acaggguaggugggugugggggc

SEQ ID NO: 116749 - RNA, 24 nt, Human
accccauggacccaggugcagagg

SEQ ID NO: 116750 - RNA, 22 nt, Human
acugccuugcuggcccuccccc

SEQ ID NO: 116751 - RNA, 23 nt, Human
agaccccgcagaccccauggaag

SEQ ID NO: 116752 - RNA, 21 nt, Human
agaccccgcagaccccgcaga

SEQ ID NO: 116753 - RNA, 23 nt, Human
agcagagcccccagucccugccc

SEQ ID NO: 116754 - RNA, 22 nt, Human
agcagggacaggaggcugacug

SEQ ID NO: 116755 - RNA, 20 nt, Human
aggcagaccccgcagacccc

SEQ ID NO: 116756 - RNA, 21 nt, Human
aggcagggccaggcauggggg

SEQ ID NO: 116757 - RNA, 21 nt, Human
aggccaggcagaccccgcaga

SEQ ID NO: 116758 - RNA, 20 nt, Human
cacaggguaggugggugugg

SEQ ID NO: 116759 - RNA, 23 nt, Human
cacaggguaggugggugugggaa

SEQ ID NO: 116760 - RNA, 19 nt, Human
caccuggcucaggcagggc

SEQ ID NO: 116761 - RNA, 20 nt, Human
caccuggcucaggcagggcc

SEQ ID NO: 116762 - RNA, 19 nt, Human
cacugcccccacccuacgc

SEQ ID NO: 116763 - RNA, 20 nt, Human
cacugcccccacccuacgcc

SEQ ID NO: 116764 - RNA, 26 nt, Human
cacuuuauuacuccugaagccccacc

SEQ ID NO: 116765 - RNA, 22 nt, Human
cagaacccacaggccaggcaga

SEQ ID NO: 116766 - RNA, 23 nt, Human
cagcaggaucccaggaggacugg

SEQ ID NO: 116767 - RNA, 19 nt, Human
caggcagggccaggcaugg

SEQ ID NO: 116768 - RNA, 20 nt, Human
cagggacaggaggcugacug

SEQ ID NO: 116769 - RNA, 23 nt, Human
ccaggcuuucucgggcguggggg

SEQ ID NO: 116770 - RNA, 24 nt, Human
cccaagccagcaggaucccaggag

SEQ ID NO: 116771 - RNA, 24 nt, Human
cccacaaagguuagacgcaaagca

SEQ ID NO: 116772 - RNA, 23 nt, Human
cccacaggccaggcagaccccgc

SEQ ID NO: 116773 - RNA, 18 nt, Human
cccagcucccuccaaguc

SEQ ID NO: 116774 - RNA, 23 nt, Human
cccauuccucacugcccccaccc

SEQ ID NO: 116775 - RNA, 23 nt, Human
ccccagagccgggcccaagccag

SEQ ID NO: 116776 - RNA, 19 nt, Human
ccccgcagaccccauggac

SEQ ID NO: 116777 - RNA, 19 nt, Human
ccccgcagaccccgcagac

SEQ ID NO: 116778 - RNA, 20 nt, Human
cccgcagaccccauggaccc

SEQ ID NO: 116779 - RNA, 20 nt, Human
cccgcagaccccgcagaccc

SEQ ID NO: 116780 - RNA, 19 nt, Human
cccuucggccuugggggcc

SEQ ID NO: 116781 - RNA, 24 nt, Human
ccggcagaacccacaggccaggca

SEQ ID NO: 116782 - RNA, 25 nt, Human
ccucaugaucucccucccuccaccc

SEQ ID NO: 116783 - RNA, 18 nt, Human
cggcguucgggggcccgg

SEQ ID NO: 116784 - RNA, 22 nt, Human
cucccagcucccuccaaguccc

SEQ ID NO: 116785 - RNA, 21 nt, Human
cucccuccaagucccucauga

SEQ ID NO: 116786 - RNA, 18 nt, Human
cucccucccuccacccac

SEQ ID NO: 116787 - RNA, 18 nt, Human
gaacucccagcucccucc

SEQ ID NO: 116788 - RNA, 22 nt, Human
gacccauuccucacugccccca

SEQ ID NO: 116789 - RNA, 24 nt, Human
gaccccgcagaccccgcagacccc

SEQ ID NO: 116790 - RNA, 23 nt, Human
gagccgggcccaagccagcagga

SEQ ID NO: 116791 - RNA, 21 nt, Human
gaucucccucccuccacccac

SEQ ID NO: 116792 - RNA, 19 nt, Human
gcaccagcagggacaggag

SEQ ID NO: 116793 - RNA, 22 nt, Human
gcaugggggccuguauuuuguc

SEQ ID NO: 116794 - RNA, 22 nt, Human
gcccccacccuacgcccuccac

SEQ ID NO: 116795 - RNA, 19 nt, Human
gcuggcccucccccacaaa

SEQ ID NO: 116796 - RNA, 23 nt, Human
ggacaggugucugggucccccag

SEQ ID NO: 116797 - RNA, 20 nt, Human
ggacugggaguggggccugg

SEQ ID NO: 116798 - RNA, 21 nt, Human
ggccuugggggccccagagcc

SEQ ID NO: 116799 - RNA, 26 nt, Human
gggaggucggagggagcuuaagggac

SEQ ID NO: 116800 - RNA, 19 nt, Human
gggaguggggccugguggg

SEQ ID NO: 116801 - RNA, 18 nt, Human
gggcccggcugggcgcac

SEQ ID NO: 116802 - RNA, 24 nt, Human
ggggacuggaggcuucugggaggu

SEQ ID NO: 116803 - RNA, 20 nt, Human
gggggacugccuugcuggcc

SEQ ID NO: 116804 - RNA, 19 nt, Human
gggggcaccagcagggaca

SEQ ID NO: 116805 - RNA, 21 nt, Human
ggggggacugccuugcuggcc

SEQ ID NO: 116806 - RNA, 22 nt, Human
gucccucaugaucucccucccu

SEQ ID NO: 116807 - RNA, 18 nt, Human
guggggacuggaggcuuc

SEQ ID NO: 116808 - RNA, 19 nt, Human
gugucugggucccccaggc

SEQ ID NO: 116809 - RNA, 25 nt, Human
ucacugcccccacccuacgcccucc

SEQ ID NO: 116810 - RNA, 19 nt, Human
ucccggcguucgggggccc

SEQ ID NO: 116811 - RNA, 23 nt, Human
ucccguggaugaacucccagcuc

SEQ ID NO: 116812 - RNA, 20 nt, Human
ucccuccacccaccuggcuc

SEQ ID NO: 116813 - RNA, 19 nt, Human
ucccugaacgccugccggg

SEQ ID NO: 116814 - RNA, 20 nt, Human
ucccugaacgccugccgggc

SEQ ID NO: 116815 - RNA, 21 nt, Human
ucucccguggaugaacuccca

SEQ ID NO: 116816 - RNA, 18 nt, Human
ucucccucccuccaccca

SEQ ID NO: 116817 - RNA, 20 nt, Human
ucugggucccccaggcuuuc

SEQ ID NO: 116818 - RNA, 19 nt, Human
ugaagccccaccggcagaa

SEQ ID NO: 116819 - RNA, 22 nt, Human
ugacuguggggacaggugucug

SEQ ID NO: 116820 - RNA, 20 nt, Human
ugaucucccucccuccaccc

SEQ ID NO: 116821 - RNA, 20 nt, Human
ugcccccacccuacgcccuc

SEQ ID NO: 116822 - RNA, 20 nt, Human
ugccuugcuggcccuccccc

SEQ ID NO: 116823 - RNA, 24 nt, Human
uggccggcccaggcguggccgcgc

SEQ ID NO: 116824 - RNA, 24 nt, Human
uggggacaggaugucugggucccc

SEQ ID NO: 116825 - RNA, 24 nt, Human
uggggacaggugucuggguccccc

SEQ ID NO: 116826 - RNA, 26 nt, Human
ugggggcaccagcagggacaggaggc

SEQ ID NO: 116827 - RNA, 22 nt, Human
uggggggacugccuugcuggcc

SEQ ID NO: 116828 - RNA, 26 nt, Human
ugggucccccaggcuuuccccuaggg

SEQ ID NO: 116829 - RNA, 23 nt, Human
ugguggggacuggaggcuucugg

SEQ ID NO: 116830 - RNA, 27 nt, Human
uugcagacagaggcuguacggacccau

SEQ ID NO: 116831 - RNA, 24 nt, Human
aaaaaaagaggacauuuucaaugu

SEQ ID NO: 116832 - RNA, 27 nt, Human
aaaaaauacaugaaacaaaaacaaagc

SEQ ID NO: 116833 - RNA, 23 nt, Human
aaacaagaugagagauuuccuga

SEQ ID NO: 116834 - RNA, 21 nt, Human
aagaaggaaauuauuucucau

SEQ ID NO: 116835 - RNA, 22 nt, Human
aagaauccuguugugauuugcu

SEQ ID NO: 116836 - RNA, 22 nt, Human
aagacaguugaagaauucauac

SEQ ID NO: 116837 - RNA, 25 nt, Human
aagcaaauaaaauaauacauucaua

SEQ ID NO: 116838 - RNA, 27 nt, Human
aaguaucagaauucagggauauaagcu

SEQ ID NO: 116839 - RNA, 19 nt, Human
agaaggaaauuauuucuca

SEQ ID NO: 116840 - RNA, 20 nt, Human
caaacuacagaaauaacuga

SEQ ID NO: 116841 - RNA, 23 nt, Human
cacacagaaucacaaacauucaa

SEQ ID NO: 116842 - RNA, 22 nt, Human
cacgauaaugauauguaugaga

SEQ ID NO: 116843 - RNA, 22 nt, Human
cagaaauaacugaauuguaaca

SEQ ID NO: 116844 - RNA, 20 nt, Human
cagaaucacaaacauucaac

SEQ ID NO: 116845 - RNA, 24 nt, Human
cagagcccugcguuugagcccccc

SEQ ID NO: 116846 - RNA, 18 nt, Human
ccaaaccccugcacagcc

SEQ ID NO: 116847 - RNA, 19 nt, Human
ccagccccaaaaaggccac

SEQ ID NO: 116848 - RNA, 23 nt, Human
ccagccccaaaaaggccacacag

SEQ ID NO: 116849 - RNA, 22 nt, Human
ccccugcacagccauucugccu

SEQ ID NO: 116850 - RNA, 22 nt, Human
cccgcacuaucaccuggagcag

SEQ ID NO: 116851 - RNA, 20 nt, Human
ccuccaaaccccugcacagc

SEQ ID NO: 116852 - RNA, 20 nt, Human
cuccaaaccccugcacagcc

SEQ ID NO: 116853 - RNA, 22 nt, Human
gaaacaaaaacaagaugagaga

SEQ ID NO: 116854 - RNA, 24 nt, Human
gaaaugccuccaaguuucucauac

SEQ ID NO: 116855 - RNA, 23 nt, Human
gagcagugccugcgucccagagc

SEQ ID NO: 116856 - RNA, 22 nt, Human
ggagcacacaucgugugcccuc

SEQ ID NO: 116857 - RNA, 22 nt, Human
guguuccacgauaaugauaugu

SEQ ID NO: 116858 - RNA, 21 nt, Human
guugcauucuaaaauuacuau

SEQ ID NO: 116859 - RNA, 25 nt, Human
uaaaaaauacaugaaacaaaaacaa

SEQ ID NO: 116860 - RNA, 19 nt, Human
uaaaaugacacuagaagua

SEQ ID NO: 116861 - RNA, 20 nt, Human
uaagagcaaagagcugcaga

SEQ ID NO: 116862 - RNA, 24 nt, Human
uacuaugaagucucaacuucacug

SEQ ID NO: 116863 - RNA, 21 nt, Human
uaugaacaaagaaaucauaca

SEQ ID NO: 116864 - RNA, 24 nt, Human
uccaaaccccugcacagccauucu

SEQ ID NO: 116865 - RNA, 23 nt, Human
uccacgauaaugauauguaugag

SEQ ID NO: 116866 - RNA, 22 nt, Human
uccagccccaaaaaggccacac

SEQ ID NO: 116867 - RNA, 18 nt, Human
ucccgcacuaucaccugg

SEQ ID NO: 116868 - RNA, 22 nt, Human
ucccuaggauuauucuuagucu

SEQ ID NO: 116869 - RNA, 18 nt, Human
ucucuggagaaagauaua

SEQ ID NO: 116870 - RNA, 23 nt, Human
ucucuuguaagacaguugaagaa

SEQ ID NO: 116871 - RNA, 21 nt, Human
ucugaaauagaaaacucuuaa

SEQ ID NO: 116872 - RNA, 22 nt, Human
ugaaauagaaaacucuuaagua

SEQ ID NO: 116873 - RNA, 21 nt, Human
ugaagucucaacuucacugaa

SEQ ID NO: 116874 - RNA, 21 nt, Human
ugacacuagaaguauaaauga

SEQ ID NO: 116875 - RNA, 23 nt, Human
ugagaugcucuuccuuauaaacu

SEQ ID NO: 116876 - RNA, 24 nt, Human
ugcagagaaucccaacauuaacag

SEQ ID NO: 116877 - RNA, 18 nt, Human
ugccuaaauucaugacau

SEQ ID NO: 116878 - RNA, 21 nt, Human
uggcaaagugccgaccagugg

SEQ ID NO: 116879 - RNA, 23 nt, Human
uuacuaugaagucucaacuucac

SEQ ID NO: 116880 - RNA, 18 nt, Human
uuccagccccaaaaaggc

SEQ ID NO: 116881 - RNA, 20 nt, Human
uuuaaaaaauacaugaaaca

SEQ ID NO: 116882 - RNA, 23 nt, Human
uuuguaaacuagucauauaaaau

SEQ ID NO: 116883 - RNA, 21 nt, Human
uuuuuuuuuuuuuucuuauuu

SEQ ID NO: 116884 - RNA, 21 nt, Human
aaaaacaacaacacaucuaca

SEQ ID NO: 116885 - RNA, 21 nt, Human
aaaaagaaaaaaagaaaaaga

SEQ ID NO: 116886 - RNA, 25 nt, Human
aaaaagaaaaagaaaaagaaaagaa

SEQ ID NO: 116887 - RNA, 22 nt, Human
aaaaagaaaaagaaaagaaaag

SEQ ID NO: 116888 - RNA, 19 nt, Human
aaaaagaaaagaaaagucc

SEQ ID NO: 116889 - RNA, 21 nt, Human
aaaagaaaaaaagaaaaagaa

SEQ ID NO: 116890 - RNA, 21 nt, Human
aaaugccucugucacauuucu

SEQ ID NO: 116891 - RNA, 22 nt, Human
aaauugcagugagccgagauug

SEQ ID NO: 116892 - RNA, 25 nt, Human
aagaaaagaaaaguccauacucuaa

SEQ ID NO: 116893 - RNA, 21 nt, Human
aagaaauccauagucuaaagc

SEQ ID NO: 116894 - RNA, 19 nt, Human
aagaagcaauacacaaaca

SEQ ID NO: 116895 - RNA, 18 nt, Human
aagcaauacacaaacauc

SEQ ID NO: 116896 - RNA, 21 nt, Human
aagcaggagaaucgcuugaac

SEQ ID NO: 116897 - RNA, 24 nt, Human
aagcaggagaaucgcuugaacuug

SEQ ID NO: 116898 - RNA, 25 nt, Human
aagcaggagaaucgcuugaacuugg

SEQ ID NO: 116899 - RNA, 24 nt, Human
aaggcauaacaaaguaaacugaaa

SEQ ID NO: 116900 - RNA, 18 nt, Human
aaguaacaaaggcugccc

SEQ ID NO: 116901 - RNA, 21 nt, Human
aauccaaugauaaaaacaaca

SEQ ID NO: 116902 - RNA, 18 nt, Human
aaucgcuugaacuuggga

SEQ ID NO: 116903 - RNA, 20 nt, Human
acaaaguaaacugaaaugaa

SEQ ID NO: 116904 - RNA, 21 nt, Human
accauaaaaaguaaaaagcua

SEQ ID NO: 116905 - RNA, 20 nt, Human
accccauaguucaacagaau

SEQ ID NO: 116906 - RNA, 19 nt, Human
acugcacuccagccuggag

SEQ ID NO: 116907 - RNA, 21 nt, Human
agaaaaagaaaaagaaaagaa

SEQ ID NO: 116908 - RNA, 20 nt, Human
agaaugaggauccaaaaaga

SEQ ID NO: 116909 - RNA, 24 nt, Human
agacgcaaauugcagugagccgag

SEQ ID NO: 116910 - RNA, 28 nt, Human
aguaacaaaggcugcccuuggggagaga

SEQ ID NO: 116911 - RNA, 22 nt, Human
agugcagugugggaccccauag

SEQ ID NO: 116912 - RNA, 19 nt, Human
aguuuaguuaucaauauuc

SEQ ID NO: 116913 - RNA, 24 nt, Human
auugcagugagccgagauugugcc

SEQ ID NO: 116914 - RNA, 24 nt, Human
auugugccacugcacuccagccug

SEQ ID NO: 116915 - RNA, 23 nt, Human
caacaacacaucuacauaaacac

SEQ ID NO: 116916 - RNA, 28 nt, Human
caacuucaauauaaugggaagggauaac

SEQ ID NO: 116917 - RNA, 21 nt, Human
caauuuaauugcaaaagacac

SEQ ID NO: 116918 - RNA, 18 nt, Human
cacaucuacauaaacacu

SEQ ID NO: 116919 - RNA, 18 nt, Human
cacuccagccuggagagu

SEQ ID NO: 116920 - RNA, 19 nt, Human
cacuccagccuggagagug

SEQ ID NO: 116921 - RNA, 18 nt, Human
cacugcacuccagccugg

SEQ ID NO: 116922 - RNA, 19 nt, Human
cacugcacuccagccugga

SEQ ID NO: 116923 - RNA, 22 nt, Human
cacugcacuccagccuggagag

SEQ ID NO: 116924 - RNA, 25 nt, Human
cacugcacuccagccuggagagugu

SEQ ID NO: 116925 - RNA, 24 nt, Human
ccaaaaagaagcaauacacaaaca

SEQ ID NO: 116926 - RNA, 19 nt, Human
ccacugcacuccagccugg

SEQ ID NO: 116927 - RNA, 20 nt, Human
ccacugcacuccagccugga

SEQ ID NO: 116928 - RNA, 22 nt, Human
ccacugcacuccagccuggaga

SEQ ID NO: 116929 - RNA, 22 nt, Human
ccacugcacuccagccuggaga

SEQ ID NO: 116930 - RNA, 23 nt, Human
ccacugcacuccagccuggagag

SEQ ID NO: 116931 - RNA, 24 nt, Human
ccacugcacuccagccuggagagu

SEQ ID NO: 116932 - RNA, 26 nt, Human
ccacugcacuccagccuggagagugu

SEQ ID NO: 116933 - RNA, 21 nt, Human
ccuuggggagagacuuuuuuc

SEQ ID NO: 116934 - RNA, 24 nt, Human
cgagauugugccacugcacuccag

SEQ ID NO: 116935 - RNA, 23 nt, Human
cucaaaaagaaaaaaagaaaaag

SEQ ID NO: 116936 - RNA, 26 nt, Human
cugucacauuucucaacuucaauaua

SEQ ID NO: 116937 - RNA, 23 nt, Human
gagaaucgcuugaacuugggaga

SEQ ID NO: 116938 - RNA, 22 nt, Human
gagaaugaggauccaaaaagaa

SEQ ID NO: 116939 - RNA, 24 nt, Human
gcaaauugcagugagccgagauug

SEQ ID NO: 116940 - RNA, 21 nt, Human
gcaagccuaguccaccaagau

SEQ ID NO: 116941 - RNA, 18 nt, Human
gcacuccagccuggagag

SEQ ID NO: 116942 - RNA, 19 nt, Human
uaaaaagcuacacauaagc

SEQ ID NO: 116943 - RNA, 19 nt, Human
uaaaaagcuacacauaagc

SEQ ID NO: 116944 - RNA, 21 nt, Human
uaaaaagcuacacauaagcac

SEQ ID NO: 116945 - RNA, 23 nt, Human
uaaagcaggagaaucgcuugaac

SEQ ID NO: 116946 - RNA, 20 nt, Human
uaacaauauuccuggauuag

SEQ ID NO: 116947 - RNA, 22 nt, Human
uacaguauuaguaaauggauga

SEQ ID NO: 116948 - RNA, 20 nt, Human
uaggaaggacuguaagguuu

SEQ ID NO: 116949 - RNA, 27 nt, Human
ucaaaaagaaaaaaagaaaaagaaaaa

SEQ ID NO: 116950 - RNA, 18 nt, Human
uccaaaaagaagcaauac

SEQ ID NO: 116951 - RNA, 18 nt, Human
uccaaaaagaagcaauac

SEQ ID NO: 116952 - RNA, 24 nt, Human
uccaaaacugggggagagugugaa

SEQ ID NO: 116953 - RNA, 22 nt, Human
uccagaaaacaaaacugcaaac

SEQ ID NO: 116954 - RNA, 20 nt, Human
ucgcuugaacuugggagacg

SEQ ID NO: 116955 - RNA, 18 nt, Human
ucucaaaaagaaaaaaag

SEQ ID NO: 116956 - RNA, 28 nt, Human
ucucaaaaagaaaaaaagaaaaagaaaa

SEQ ID NO: 116957 - RNA, 25 nt, Human
ucucugagaaaguugugaaucaguu

SEQ ID NO: 116958 - RNA, 22 nt, Human
ugagccgagauugugccacugc

SEQ ID NO: 116959 - RNA, 19 nt, Human
ugauaaaaacaacaacaca

SEQ ID NO: 116960 - RNA, 23 nt, Human
ugcaaaagacacagaauauuaag

SEQ ID NO: 116961 - RNA, 22 nt, Human
ugcccuuacaguggguggaauu

SEQ ID NO: 116962 - RNA, 20 nt, Human
ugggaggggugcagucagug

SEQ ID NO: 116963 - RNA, 23 nt, Human
ugggaggggugcagucaguguuu

SEQ ID NO: 116964 - RNA, 18 nt, Human
uuaauaauggggcugggg

SEQ ID NO: 116965 - RNA, 24 nt, Human
uuaaucagcaccauaaaaaguaaa

SEQ ID NO: 116966 - RNA, 20 nt, Human
uuccuuuagauaacaugugg

SEQ ID NO: 116967 - RNA, 18 nt, Human
uugcagugagccgagauu

SEQ ID NO: 116968 - RNA, 19 nt, Human
uugcagugagccgagauug

SEQ ID NO: 116969 - RNA, 22 nt, Human
uugcagugagccgagauugugc

SEQ ID NO: 116970 - RNA, 23 nt, Human
uugugccacugcacuccagccug

SEQ ID NO: 116971 - RNA, 23 nt, Human
uuuuuuuuuuuuuuuaccucuua

SEQ ID NO: 116972 - RNA, 19 nt, Human
aacuaccuagccaagcccc

SEQ ID NO: 116973 - RNA, 19 nt, Human
aagcaggcgugagcuggcc

SEQ ID NO: 116974 - RNA, 23 nt, Human
acagccaggcccacaugcccagc

SEQ ID NO: 116975 - RNA, 22 nt, Human
acagcuuuaggauucagcaggg

SEQ ID NO: 116976 - RNA, 23 nt, Human
acaguuucacauuuuccaggcuc

SEQ ID NO: 116977 - RNA, 25 nt, Human
agaacuaccuagccaagccccuccc

SEQ ID NO: 116978 - RNA, 22 nt, Human
aggaagcaggcgugagcuggcc

SEQ ID NO: 116979 - RNA, 23 nt, Human
aggcgaagcgaaggaggagcgag

SEQ ID NO: 116980 - RNA, 24 nt, Human
caacaagcgcaugaaacaguuaaa

SEQ ID NO: 116981 - RNA, 21 nt, Human
cacagccaggcccacaugccc

SEQ ID NO: 116982 - RNA, 23 nt, Human
cacagcuuuaggauucagcaggg

SEQ ID NO: 116983 - RNA, 21 nt, Human
cagcagggcagggagggagga

SEQ ID NO: 116984 - RNA, 20 nt, Human
caggagacaguuucacauuu

SEQ ID NO: 116985 - RNA, 22 nt, Human
ccaagagaaaauuaagcccaga

SEQ ID NO: 116986 - RNA, 26 nt, Human
ccagccaaacaugaugucgacugcag

SEQ ID NO: 116987 - RNA, 18 nt, Human
ccccaaagggcucccuca

SEQ ID NO: 116988 - RNA, 19 nt, Human
ccccaaagggcucccucau

SEQ ID NO: 116989 - RNA, 21 nt, Human
ccccaagagaaaauuaagccc

SEQ ID NO: 116990 - RNA, 23 nt, Human
ccccagcagcugccucccucccu

SEQ ID NO: 116991 - RNA, 24 nt, Human
ccccuccccagcagcugccucccu

SEQ ID NO: 116992 - RNA, 20 nt, Human
ccgggagucccagaaaggag

SEQ ID NO: 116993 - RNA, 19 nt, Human
ccuagccaagccccucccc

SEQ ID NO: 116994 - RNA, 18 nt, Human
ccucaggcuugagagccc

SEQ ID NO: 116995 - RNA, 18 nt, Human
ccucccuggaugagggga

SEQ ID NO: 116996 - RNA, 21 nt, Human
ccuccucaaccgcugccaccu

SEQ ID NO: 116997 - RNA, 25 nt, Human
ccugggaccagggccagccugaggc

SEQ ID NO: 116998 - RNA, 25 nt, Human
cuccucaaccgcugccaccugggac

SEQ ID NO: 116999 - RNA, 22 nt, Human
gaacacagccaggcccacaugc

SEQ ID NO: 117000 - RNA, 21 nt, Human
gaagaaaaccucaggcuugag

SEQ ID NO: 117001 - RNA, 20 nt, Human
gacugcagggacccacagga

SEQ ID NO: 117002 - RNA, 21 nt, Human
gcgaagcgaaggaggagcgag

SEQ ID NO: 117003 - RNA, 24 nt, Human
ggacccacaggacacaugucccuu

SEQ ID NO: 117004 - RNA, 21 nt, Human
ggcaaaaugauaggaaacuaa

SEQ ID NO: 117005 - RNA, 19 nt, Human
ggcaaugggggcaccugaa

SEQ ID NO: 117006 - RNA, 23 nt, Human
uaccuagccaagccccuccccag

SEQ ID NO: 117007 - RNA, 24 nt, Human
uagccaagccccuccccagcagcu

SEQ ID NO: 117008 - RNA, 21 nt, Human
uccccagcagcugccucccuc

SEQ ID NO: 117009 - RNA, 24 nt, Human
uccucaaccgcugccaccugggac

SEQ ID NO: 117010 - RNA, 22 nt, Human
ugacaguguagacgccugaugg

SEQ ID NO: 117011 - RNA, 20 nt, Human
ugagagcccuguaccccucc

SEQ ID NO: 117012 - RNA, 20 nt, Human
ugaggggaguugugccggga

SEQ ID NO: 117013 - RNA, 26 nt, Human
ugagugacaguguagacgccugaugg

SEQ ID NO: 117014 - RNA, 20 nt, Human
ugcaggagacaguuucacau

SEQ ID NO: 117015 - RNA, 21 nt, Human
ugccgggagucccagaaagga

SEQ ID NO: 117016 - RNA, 20 nt, Human
uguaccccuccucaaccggu

SEQ ID NO: 117017 - RNA, 22 nt, Human
uuuaaugaggggaaugaccacc

SEQ ID NO: 117018 - RNA, 19 nt, Human
uuuucaaaaaauacuacgg

SEQ ID NO: 117019 - RNA, 18 nt, Human
gacaagcggcuucuuuua

SEQ ID NO: 117020 - RNA, 24 nt, Human
ucacagagacaagcggcuucuuuu

SEQ ID NO: 117021 - RNA, 18 nt, Human
aaaaacaagcauuuacuu

SEQ ID NO: 117022 - RNA, 24 nt, Human
aaaaacaccuaaucaaguugacac

SEQ ID NO: 117023 - RNA, 22 nt, Human
aaaaacagcaaguaauugcagc

SEQ ID NO: 117024 - RNA, 19 nt, Human
aaaaacagcuagaaaagcc

SEQ ID NO: 117025 - RNA, 26 nt, Human
aaacacaaaauauuuuaaaauaaaac

SEQ ID NO: 117026 - RNA, 23 nt, Human
aacaaacuacuacaaaaacaagc

SEQ ID NO: 117027 - RNA, 27 nt, Human
aacaagaacaaacuacuacaaaaacaa

SEQ ID NO: 117028 - RNA, 21 nt, Human
aagaaauaaaccauaagauca

SEQ ID NO: 117029 - RNA, 22 nt, Human
aagaacaaacuacuacaaaaac

SEQ ID NO: 117030 - RNA, 18 nt, Human
aaguugcaaaagcuauaa

SEQ ID NO: 117031 - RNA, 19 nt, Human
aaugaacaucacauccuuc

SEQ ID NO: 117032 - RNA, 21 nt, Human
acaagaacaaacuacuacaaa

SEQ ID NO: 117033 - RNA, 22 nt, Human
acacuacaucuauuguaaucaa

SEQ ID NO: 117034 - RNA, 21 nt, Human
acagguuuccuucaaauaaaa

SEQ ID NO: 117035 - RNA, 25 nt, Human
acuacaaaaacaagcauuuacuuga

SEQ ID NO: 117036 - RNA, 21 nt, Human
acuacuacaaaaacaagcauu

SEQ ID NO: 117037 - RNA, 21 nt, Human
aggcagguuugaaaaaaaucu

SEQ ID NO: 117038 - RNA, 20 nt, Human
auaaacaucaacgaucccag

SEQ ID NO: 117039 - RNA, 20 nt, Human
caaaaacgcuauugcaaugc

SEQ ID NO: 117040 - RNA, 23 nt, Human
caagaacaaacuacuacaaaaac

SEQ ID NO: 117041 - RNA, 24 nt, Human
caagaacacaugcuagucaggugc

SEQ ID NO: 117042 - RNA, 18 nt, Human
cagcaaagucacaagcua

SEQ ID NO: 117043 - RNA, 26 nt, Human
cagcaguggaaauuucuggaggguuu

SEQ ID NO: 117044 - RNA, 20 nt, Human
ccaugaauccuuacagguuc

SEQ ID NO: 117045 - RNA, 22 nt, Human
cccauaaaaacaccuaaucaag

SEQ ID NO: 117046 - RNA, 19 nt, Human
ccucuguuuuuuuugaccc

SEQ ID NO: 117047 - RNA, 22 nt, Human
cuacuacaaaaacaagcauuua

SEQ ID NO: 117048 - RNA, 21 nt, Human
cuagaaaagcagaauauagaa

SEQ ID NO: 117049 - RNA, 19 nt, Human
cugaaagugaacaguucug

SEQ ID NO: 117050 - RNA, 23 nt, Human
cugccucugccaauuuugcaauc

SEQ ID NO: 117051 - RNA, 25 nt, Human
cuuaaaaacauauuaacgugcucaa

SEQ ID NO: 117052 - RNA, 21 nt, Human
gaaaagcagaauauagaaaua

SEQ ID NO: 117053 - RNA, 18 nt, Human
gcaguggaaauuucugga

SEQ ID NO: 117054 - RNA, 19 nt, Human
gccucggccgccgccgccc

SEQ ID NO: 117055 - RNA, 20 nt, Human
gccucugccaauuuugcaau

SEQ ID NO: 117056 - RNA, 22 nt, Human
gcugaacacaagacuuucccug

SEQ ID NO: 117057 - RNA, 23 nt, Human
guaaacaucaaauaacuugaaca

SEQ ID NO: 117058 - RNA, 18 nt, Human
gugaagaacagcagugga

SEQ ID NO: 117059 - RNA, 18 nt, Human
uaaaaacaccuaaucaag

SEQ ID NO: 117060 - RNA, 19 nt, Human
uaaaaacagcuagaaaagc

SEQ ID NO: 117061 - RNA, 26 nt, Human
uaaaacaguuaagcaacauaaaaaau

SEQ ID NO: 117062 - RNA, 18 nt, Human
uaaaccauaagaucaaua

SEQ ID NO: 117063 - RNA, 19 nt, Human
uaagaucaauaaaaacagc

SEQ ID NO: 117064 - RNA, 23 nt, Human
uaaguguuucgguacaucugugu

SEQ ID NO: 117065 - RNA, 24 nt, Human
uaaguguuucgguacaucuguguu

SEQ ID NO: 117066 - RNA, 23 nt, Human
uacggugcaugaauauacauagu

SEQ ID NO: 117067 - RNA, 20 nt, Human
uagcaugaaucaauacgguu

SEQ ID NO: 117068 - RNA, 19 nt, Human
ucagccccauuaaacaguu

SEQ ID NO: 117069 - RNA, 22 nt, Human
ucagccucggccgccgccgccc

SEQ ID NO: 117070 - RNA, 22 nt, Human
uccuucaaaaauuuuauaccaa

SEQ ID NO: 117071 - RNA, 24 nt, Human
ucucuauuuuuacaaguuuacaua

SEQ ID NO: 117072 - RNA, 25 nt, Human
ucucuuuacucacauuuaccugcug

SEQ ID NO: 117073 - RNA, 25 nt, Human
ugaacagcuuuacacaucagcccca

SEQ ID NO: 117074 - RNA, 19 nt, Human
ugaagaacagcaguggaaa

SEQ ID NO: 117075 - RNA, 19 nt, Human
ugaccccuuacacauugac

SEQ ID NO: 117076 - RNA, 22 nt, Human
ugaugcuguuuacagacauuau

SEQ ID NO: 117077 - RNA, 21 nt, Human
ugcacagauacuucaaacaca

SEQ ID NO: 117078 - RNA, 22 nt, Human
ugcauuacacaucaaauaugua

SEQ ID NO: 117079 - RNA, 21 nt, Human
ugccaauuuugcaaucaagaa

SEQ ID NO: 117080 - RNA, 21 nt, Human
ugcugcagggcuguauuuaca

SEQ ID NO: 117081 - RNA, 18 nt, Human
uggaaggugauccucuuc

SEQ ID NO: 117082 - RNA, 21 nt, Human
ugggccuauauguaaggcagg

SEQ ID NO: 117083 - RNA, 24 nt, Human
uguaaacaucaaauaacuugaaca

SEQ ID NO: 117084 - RNA, 23 nt, Human
uguauuuacacugacuauggcuu

SEQ ID NO: 117085 - RNA, 18 nt, Human
uucaaauaaaacaguuaa

SEQ ID NO: 117086 - RNA, 28 nt, Human
uucacaauuaaguguuucgguacaucug

SEQ ID NO: 117087 - RNA, 22 nt, Human
uucccugagguguaaacaucaa

SEQ ID NO: 117088 - RNA, 26 nt, Human
uucuacaguugcacauaacacaguau

SEQ ID NO: 117089 - RNA, 22 nt, Human
uuuaaaauaaaacuggcaguga

SEQ ID NO: 117090 - RNA, 25 nt, Human
uuuaacaagaacaaacuacuacaaa

SEQ ID NO: 117091 - RNA, 26 nt, Human
uuucgguacaucuguguuguaauuaa

SEQ ID NO: 117092 - RNA, 19 nt, Human
agagaguaccgagucagcu

SEQ ID NO: 117093 - RNA, 21 nt, Human
agcggcagcggcggcggcggc

SEQ ID NO: 117094 - RNA, 23 nt, Human
agcggcggcggcggcggcggcgg

SEQ ID NO: 117095 - RNA, 19 nt, Human
cagcggcagcggcagcggc

SEQ ID NO: 117096 - RNA, 23 nt, Human
cagcggcagcggcagcggcggcg

SEQ ID NO: 117097 - RNA, 23 nt, Human
cggcggcggcggcggcgguggag

SEQ ID NO: 117098 - RNA, 19 nt, Human
cggcggcggcggcggugga

SEQ ID NO: 117099 - RNA, 22 nt, Human
gcagcggcggcggcggcggcuu

SEQ ID NO: 117100 - RNA, 20 nt, Human
gcggcggcggcggcggcggc

SEQ ID NO: 117101 - RNA, 20 nt, Human
gcggcggcggcggcggcggc

SEQ ID NO: 117102 - RNA, 24 nt, Human
gcggcggcggcggcggcggcggug

SEQ ID NO: 117103 - RNA, 20 nt, Human
gcggcggcggcggcggcggu

SEQ ID NO: 117104 - RNA, 18 nt, Human
gcggcggcggcgguggag

SEQ ID NO: 117105 - RNA, 23 nt, Human
ggcagcggcggcggcggcggcgg

SEQ ID NO: 117106 - RNA, 20 nt, Human
ggcggcggcggcggcggcgg

SEQ ID NO: 117107 - RNA, 19 nt, Human
ggcggcggcggcggcggug

SEQ ID NO: 117108 - RNA, 21 nt, Human
uaccgagucagcuacggaggu

SEQ ID NO: 117109 - RNA, 18 nt, Human
uccuucccagcagcucca

SEQ ID NO: 117110 - RNA, 24 nt, Human
ucguuuuccuucccagcagcucca

SEQ ID NO: 117111 - RNA, 22 nt, Human
uucagagaguaccgagucagcu

SEQ ID NO: 117112 - RNA, 19 nt, Human
acaggucccuuccuccaca

SEQ ID NO: 117113 - RNA, 21 nt, Human
aguaucuaucaagaaaaaaaa

SEQ ID NO: 117114 - RNA, 21 nt, Human
caagaaaaaaaaaaaucaaaa

SEQ ID NO: 117115 - RNA, 23 nt, Human
caccugggcccucagggagcagc

SEQ ID NO: 117116 - RNA, 22 nt, Human
caccugugcacggccaccccuc

SEQ ID NO: 117117 - RNA, 24 nt, Human
cagcaucugcccagcgaggaccug

SEQ ID NO: 117118 - RNA, 24 nt, Human
cagcucggguucacuccuguccgu

SEQ ID NO: 117119 - RNA, 18 nt, Human
caggucccuuccuccaca

SEQ ID NO: 117120 - RNA, 27 nt, Human
caggucccuuccuccacagugugggga

SEQ ID NO: 117121 - RNA, 23 nt, Human
ccccaccuccaccaccugggccc

SEQ ID NO: 117122 - RNA, 19 nt, Human
ccucaugccugugagcugc

SEQ ID NO: 117123 - RNA, 18 nt, Human
ccuuggagccugggcacc

SEQ ID NO: 117124 - RNA, 19 nt, Human
ccuuggagccugggcaccu

SEQ ID NO: 117125 - RNA, 20 nt, Human
cuguccuuggagccugggca

SEQ ID NO: 117126 - RNA, 18 nt, Human
ggagcagcaucugcccag

SEQ ID NO: 117127 - RNA, 22 nt, Human
gguuggucggcacagcucgggu

SEQ ID NO: 117128 - RNA, 25 nt, Human
guaucuaucaagaaaaaaaaaaauc

SEQ ID NO: 117129 - RNA, 21 nt, Human
gugcacggccaccccucaugc

SEQ ID NO: 117130 - RNA, 22 nt, Human
uacacagccuuauuuuuauuag

SEQ ID NO: 117131 - RNA, 25 nt, Human
ucaaaauucccuuccugcuccaacc

SEQ ID NO: 117132 - RNA, 21 nt, Human
uccaaccccaccuccaccacc

SEQ ID NO: 117133 - RNA, 23 nt, Human
uccacaguguggggacgaaaggg

SEQ ID NO: 117134 - RNA, 24 nt, Human
uccacaguguggggacgaaagggc

SEQ ID NO: 117135 - RNA, 22 nt, Human
ucuaucaagaaaaaaaaaaauc

SEQ ID NO: 117136 - RNA, 22 nt, Human
ugccacaggucccuuccuccac

SEQ ID NO: 117137 - RNA, 20 nt, Human
ugcuccaaccccaccuccac

SEQ ID NO: 117138 - RNA, 22 nt, Human
uggggacgaaagggcagcuggc

SEQ ID NO: 117139 - RNA, 19 nt, Human
aaaaaagaaaagcuaagaa

SEQ ID NO: 117140 - RNA, 24 nt, Human
aaaaugcugggauuacaggcauga

SEQ ID NO: 117141 - RNA, 22 nt, Human
aaauacaccugaguuaguuuuc

SEQ ID NO: 117142 - RNA, 26 nt, Human
aaaugcugggauuacaggcaugagcc

SEQ ID NO: 117143 - RNA, 19 nt, Human
aaccucuauuuccucaccu

SEQ ID NO: 117144 - RNA, 24 nt, Human
aagcaauucugcuucaaccuccca

SEQ ID NO: 117145 - RNA, 24 nt, Human
aagugauccacccgccucagccuc

SEQ ID NO: 117146 - RNA, 21 nt, Human
aaucugauaacccaaaauuug

SEQ ID NO: 117147 - RNA, 24 nt, Human
acaagguuucaccauguuggccag

SEQ ID NO: 117148 - RNA, 23 nt, Human
accauguuggccagguuggucuc

SEQ ID NO: 117149 - RNA, 25 nt, Human
acccgccucagccucucaaaaugcu

SEQ ID NO: 117150 - RNA, 18 nt, Human
agaauagcacccacuggc

SEQ ID NO: 117151 - RNA, 22 nt, Human
agacagaaacuggaguuggaaa

SEQ ID NO: 117152 - RNA, 23 nt, Human
agccuccgcguugcucgucuccc

SEQ ID NO: 117153 - RNA, 19 nt, Human
aggaagugaugguagcuuu

SEQ ID NO: 117154 - RNA, 21 nt, Human
aggacuccugaggcacuucuc

SEQ ID NO: 117155 - RNA, 21 nt, Human
aggcacaugccaccacaccca

SEQ ID NO: 117156 - RNA, 21 nt, Human
aggcaugagccaccaugcccg

SEQ ID NO: 117157 - RNA, 25 nt, Human
aggccggagugcaguggugugaucu

SEQ ID NO: 117158 - RNA, 22 nt, Human
agguuucaccauguuggccagg

SEQ ID NO: 117159 - RNA, 22 nt, Human
aguagagacaagguuucaccau

SEQ ID NO: 117160 - RNA, 19 nt, Human
agugcaguggugugaucuc

SEQ ID NO: 117161 - RNA, 21 nt, Human
agugcaguggugugaucucag

SEQ ID NO: 117162 - RNA, 23 nt, Human
agugcaguggugugaucucagcu

SEQ ID NO: 117163 - RNA, 24 nt, Human
agugcaguggugugaucucagcuc

SEQ ID NO: 117164 - RNA, 24 nt, Human
aguggugugaucucagcucacugc

SEQ ID NO: 117165 - RNA, 24 nt, Human
auucuuguauuuuuaguagagaca

SEQ ID NO: 117166 - RNA, 22 nt, Human
caaaaugcugggauuacaggca

SEQ ID NO: 117167 - RNA, 23 nt, Human
caaaaugcugggauuacaggcau

SEQ ID NO: 117168 - RNA, 24 nt, Human
caaaaugcugggauuacaggcaug

SEQ ID NO: 117169 - RNA, 20 nt, Human
caaccuccaccuccuggguu

SEQ ID NO: 117170 - RNA, 23 nt, Human
caaccuccaccuccuggguucaa

SEQ ID NO: 117171 - RNA, 24 nt, Human
caagguuucaccauguuggccagg

SEQ ID NO: 117172 - RNA, 19 nt, Human
caccacacccagcuaauuc

SEQ ID NO: 117173 - RNA, 19 nt, Human
caccaugcccggccuccca

SEQ ID NO: 117174 - RNA, 21 nt, Human
caccauguuggccagguuggu

SEQ ID NO: 117175 - RNA, 22 nt, Human
caccauguuggccagguugguc

SEQ ID NO: 117176 - RNA, 24 nt, Human
caccauguuggccagguuggucuc

SEQ ID NO: 117177 - RNA, 23 nt, Human
cacccgccucagccucucaaaau

SEQ ID NO: 117178 - RNA, 21 nt, Human
cacugcaaccuccaccuccug

SEQ ID NO: 117179 - RNA, 23 nt, Human
cacugcaaccuccaccuccuggg

SEQ ID NO: 117180 - RNA, 18 nt, Human
caggacuccugaggcacu

SEQ ID NO: 117181 - RNA, 24 nt, Human
caguagcugggauauaggcacaug

SEQ ID NO: 117182 - RNA, 19 nt, Human
caugccaccacacccagcu

SEQ ID NO: 117183 - RNA, 19 nt, Human
ccacccgccucagccucuc

SEQ ID NO: 117184 - RNA, 27 nt, Human
ccaccuccuggguucaagcaauucuuu

SEQ ID NO: 117185 - RNA, 19 nt, Human
ccaggccggagugcagugg

SEQ ID NO: 117186 - RNA, 20 nt, Human
cccacuggcuacacaggccc

SEQ ID NO: 117187 - RNA, 23 nt, Human
cccacuggcuacacaggccccag

SEQ ID NO: 117188 - RNA, 20 nt, Human
cccaggccggagugcagugg

SEQ ID NO: 117189 - RNA, 22 nt, Human
ccccuguaaggccaucggcucc

SEQ ID NO: 117190 - RNA, 19 nt, Human
ccgccgccgccguuagcgc

SEQ ID NO: 117191 - RNA, 24 nt, Human
ccgccucagccucucaaaaugcug

SEQ ID NO: 117192 - RNA, 20 nt, Human
ccggccccuguaaggccauc

SEQ ID NO: 117193 - RNA, 23 nt, Human
ccuaggcagcuuaugauuaguuu

SEQ ID NO: 117194 - RNA, 19 nt, Human
ccuccaccuccuggguuca

SEQ ID NO: 117195 - RNA, 18 nt, Human
ccucccaguagcugggau

SEQ ID NO: 117196 - RNA, 22 nt, Human
ccuccuggguucaagcaauucu

SEQ ID NO: 117197 - RNA, 22 nt, Human
ccugaccucaagugauccaccc

SEQ ID NO: 117198 - RNA, 23 nt, Human
ccugaccucaagugauccacccg

SEQ ID NO: 117199 - RNA, 19 nt, Human
ccuggguucaagcaauucu

SEQ ID NO: 117200 - RNA, 20 nt, Human
cgcccaagacacugcgucag

SEQ ID NO: 117201 - RNA, 24 nt, Human
cgcccggaagggggccccagccuc

SEQ ID NO: 117202 - RNA, 24 nt, Human
cgccucagccucucaaaaugcugg

SEQ ID NO: 117203 - RNA, 24 nt, Human
cgcucugucgcccaggccggagug

SEQ ID NO: 117204 - RNA, 19 nt, Human
cggagugcaguggugugau

SEQ ID NO: 117205 - RNA, 19 nt, Human
cggagugcaguggugugau

SEQ ID NO: 117206 - RNA, 23 nt, Human
cggagugcaguggugugaucuca

SEQ ID NO: 117207 - RNA, 28 nt, Human
cggagugcaguggugugauggcucuagc

SEQ ID NO: 117208 - RNA, 24 nt, Human
cucacugcaaccuccaccuccugg

SEQ ID NO: 117209 - RNA, 27 nt, Human
cucacugcaaccuccaccuccuggguu

SEQ ID NO: 117210 - RNA, 21 nt, Human
cuccuggguucaagcaauucu

SEQ ID NO: 117211 - RNA, 19 nt, Human
cuccuuccgggcaggggcc

SEQ ID NO: 117212 - RNA, 18 nt, Human
cuggcuccuuccgggcag

SEQ ID NO: 117213 - RNA, 24 nt, Human
gaaaaaaaaaagaaaagcuaagaa

SEQ ID NO: 117214 - RNA, 24 nt, Human
gaccucaagugauccacccgccuc

SEQ ID NO: 117215 - RNA, 18 nt, Human
gauuacaggcaugagcca

SEQ ID NO: 117216 - RNA, 21 nt, Human
gauuacaggcaugagccacca

SEQ ID NO: 117217 - RNA, 24 nt, Human
gauuacaggcaugagccaccaugc

SEQ ID NO: 117218 - RNA, 22 nt, Human
gcaaccuccaccuccuggguuc

SEQ ID NO: 117219 - RNA, 20 nt, Human
gcaaguggggaguucuggag

SEQ ID NO: 117220 - RNA, 23 nt, Human
gcccggaagggggccccagccuc

SEQ ID NO: 117221 - RNA, 19 nt, Human
gcgagaacgcggcaagugg

SEQ ID NO: 117222 - RNA, 27 nt, Human
gcgccgcagccgcuccuuccccccagg

SEQ ID NO: 117223 - RNA, 18 nt, Human
gcguugcucgucucccuu

SEQ ID NO: 117224 - RNA, 25 nt, Human
gcucugucgcccaggccggagugca

SEQ ID NO: 117225 - RNA, 24 nt, Human
ggauuacaggcaugagccaccaug

SEQ ID NO: 117226 - RNA, 20 nt, Human
ggucucaaacuccugaccuc

SEQ ID NO: 117227 - RNA, 24 nt, Human
gugauccacccgccucagccucuc

SEQ ID NO: 117228 - RNA, 26 nt, Human
guuuuuuuucuuuuuugucuuuuuga

SEQ ID NO: 117229 - RNA, 26 nt, Human
uaaaaccaugaauuuaaagcucaagc

SEQ ID NO: 117230 - RNA, 24 nt, Human
uaauucuuguauuuuuaguagaga

SEQ ID NO: 117231 - RNA, 23 nt, Human
uacaggcaugagccaccaugccc

SEQ ID NO: 117232 - RNA, 27 nt, Human
uacguuuagcuuuaaaaccaugaauuu

SEQ ID NO: 117233 - RNA, 22 nt, Human
uagagacaagguuucaccaugu

SEQ ID NO: 117234 - RNA, 18 nt, Human
uagcuggcugccuaggca

SEQ ID NO: 117235 - RNA, 24 nt, Human
uaguagagacaagguuucaccaug

SEQ ID NO: 117236 - RNA, 26 nt, Human
uaguagagacaagguuucaccauguu

SEQ ID NO: 117237 - RNA, 23 nt, Human
ucaaaaugcugggauuacaggca

SEQ ID NO: 117238 - RNA, 24 nt, Human
ucaaaaugcugggauuacaggcau

SEQ ID NO: 117239 - RNA, 24 nt, Human
ucaaaguaccuacccaaaauucua

SEQ ID NO: 117240 - RNA, 21 nt, Human
ucaccauguuggccagguugg

SEQ ID NO: 117241 - RNA, 23 nt, Human
ucacugcaaccuccaccuccugg

SEQ ID NO: 117242 - RNA, 23 nt, Human
ucacugcaaccuccaccuccugg

SEQ ID NO: 117243 - RNA, 24 nt, Human
ucacugcaaccuccaccuccuggg

SEQ ID NO: 117244 - RNA, 27 nt, Human
ucacugcaaccuccaccuccuggguuc

SEQ ID NO: 117245 - RNA, 19 nt, Human
uccgccccggacuggcucc

SEQ ID NO: 117246 - RNA, 19 nt, Human
uccuggguucaagcaauuc

SEQ ID NO: 117247 - RNA, 21 nt, Human
uccuggguucaagcaauucug

SEQ ID NO: 117248 - RNA, 24 nt, Human
ucgcccaggccggagugcaguggu

SEQ ID NO: 117249 - RNA, 24 nt, Human
ucucaaaaugcugggauuacaggc

SEQ ID NO: 117250 - RNA, 18 nt, Human
ucucgcucugucgcccag

SEQ ID NO: 117251 - RNA, 19 nt, Human
ucucgcucugucgcccagg

SEQ ID NO: 117252 - RNA, 24 nt, Human
ucucgcucugucgcccaggccgga

SEQ ID NO: 117253 - RNA, 26 nt, Human
ucucgcucugucgcccaggccggagu

SEQ ID NO: 117254 - RNA, 27 nt, Human
ucucgcucugucgcccaggccggagug

SEQ ID NO: 117255 - RNA, 21 nt, Human
ucucuuguuaucuucaguugu

SEQ ID NO: 117256 - RNA, 24 nt, Human
ucucuuguuaucuucaguugugau

SEQ ID NO: 117257 - RNA, 24 nt, Human
ucugucgcccaggccggagugcag

SEQ ID NO: 117258 - RNA, 24 nt, Human
ugaccucaagugauccacccgccu

SEQ ID NO: 117259 - RNA, 23 nt, Human
ugaggaagugaugguagcuuuuc

SEQ ID NO: 117260 - RNA, 23 nt, Human
ugauuaguuucacagaauagcac

SEQ ID NO: 117261 - RNA, 22 nt, Human
ugcaguggugugaucucagcuc

SEQ ID NO: 117262 - RNA, 20 nt, Human
ugcuucaaccucccaguagc

SEQ ID NO: 117263 - RNA, 23 nt, Human
ugcuucaaccucccaguagcugg

SEQ ID NO: 117264 - RNA, 26 nt, Human
ugcuucaaccucccaguagcugggau

SEQ ID NO: 117265 - RNA, 18 nt, Human
uggaaucugauaacccaa

SEQ ID NO: 117266 - RNA, 19 nt, Human
uggagcaagacagaaacug

SEQ ID NO: 117267 - RNA, 19 nt, Human
uggaguuggaaaaaaaaaa

SEQ ID NO: 117268 - RNA, 24 nt, Human
uggccagguuggucucaaacuccu

SEQ ID NO: 117269 - RNA, 23 nt, Human
ugggauauaggcacaugccacca

SEQ ID NO: 117270 - RNA, 18 nt, Human
ugggauuacaggcaugag

SEQ ID NO: 117271 - RNA, 22 nt, Human
ugggauuacaggcaugagccac

SEQ ID NO: 117272 - RNA, 23 nt, Human
ugggauuacaggcaugagccacc

SEQ ID NO: 117273 - RNA, 24 nt, Human
ugggauuacaggcaugagccacca

SEQ ID NO: 117274 - RNA, 25 nt, Human
ugggauuacaggcaugagccaccau

SEQ ID NO: 117275 - RNA, 21 nt, Human
ugguagcuuuucaucugccca

SEQ ID NO: 117276 - RNA, 24 nt, Human
uggugugaucucagcucacugcaa

SEQ ID NO: 117277 - RNA, 27 nt, Human
uuaaagcucaagccuguagcuggcugc

SEQ ID NO: 117278 - RNA, 24 nt, Human
uuaguagagacaagguuucaccau

SEQ ID NO: 117279 - RNA, 18 nt, Human
uucacagaauagcaccca

SEQ ID NO: 117280 - RNA, 19 nt, Human
uucacagaauagcacccac

SEQ ID NO: 117281 - RNA, 20 nt, Human
uucuuguauuuuuaguagag

SEQ ID NO: 117282 - RNA, 23 nt, Human
uugagacagucucgcucugucgc

SEQ ID NO: 117283 - RNA, 18 nt, Human
uuucacagaauagcaccc

SEQ ID NO: 117284 - RNA, 19 nt, Human
uuucaccauguuggccagg

SEQ ID NO: 117285 - RNA, 20 nt, Human
uuucaccauguuggccaggu

SEQ ID NO: 117286 - RNA, 20 nt, Human
uuugauccaggcuccauccu

SEQ ID NO: 117287 - RNA, 24 nt, Human
uuuuuaguagagacaagguuucac

SEQ ID NO: 117288 - RNA, 21 nt, Human
uuuuugucuuuuugagacagu

SEQ ID NO: 117289 - RNA, 21 nt, Human
uuuuuuucuuuuuugucuuuu

SEQ ID NO: 117290 - RNA, 21 nt, Human
uuuuuuuucuuuuuugucuuu

SEQ ID NO: 117291 - RNA, 24 nt, Human
aaaaaagaagauaucgaaaucuua

SEQ ID NO: 117292 - RNA, 27 nt, Human
aaaaggaaacaaacuaaggggggaaaa

SEQ ID NO: 117293 - RNA, 18 nt, Human
aaauaucgaaagcggccu

SEQ ID NO: 117294 - RNA, 19 nt, Human
aacauggugaaaccccguc

SEQ ID NO: 117295 - RNA, 20 nt, Human
aacauggugaaaccccgucu

SEQ ID NO: 117296 - RNA, 21 nt, Human
aacauggugaaaccccgucuc

SEQ ID NO: 117297 - RNA, 22 nt, Human
aagaacagugaccaccuuacaa

SEQ ID NO: 117298 - RNA, 18 nt, Human
acaaaaguaagcuaguac

SEQ ID NO: 117299 - RNA, 24 nt, Human
acagagccagacuccaucucaaaa

SEQ ID NO: 117300 - RNA, 24 nt, Human
accccgucucuacuaaaaauacaa

SEQ ID NO: 117301 - RNA, 18 nt, Human
acgccacugcacuccagc

SEQ ID NO: 117302 - RNA, 18 nt, Human
acucaggaggcugaggca

SEQ ID NO: 117303 - RNA, 24 nt, Human
acuccagccugggagacagagcca

SEQ ID NO: 117304 - RNA, 18 nt, Human
acugcacuccagccuggg

SEQ ID NO: 117305 - RNA, 24 nt, Human
acugcacuccagccugggagacag

SEQ ID NO: 117306 - RNA, 24 nt, Human
agcacuuugggaggccgaggcggg

SEQ ID NO: 117307 - RNA, 21 nt, Human
agccgggcguguuggcaggug

SEQ ID NO: 117308 - RNA, 24 nt, Human
agccugggagacagagccagacuc

SEQ ID NO: 117309 - RNA, 24 nt, Human
agcggccaggcgcgguggcucaug

SEQ ID NO: 117310 - RNA, 28 nt, Human
aggcagaaaaugaaucaaaagggacccc

SEQ ID NO: 117311 - RNA, 18 nt, Human
aggcagaagggugggggu

SEQ ID NO: 117312 - RNA, 25 nt, Human
aggcaggaaaauggugucaacccgg

SEQ ID NO: 117313 - RNA, 21 nt, Human
aggccgaggcggguggaucac

SEQ ID NO: 117314 - RNA, 24 nt, Human
aggcgcgguggcucaugccuguaa

SEQ ID NO: 117315 - RNA, 24 nt, Human
aggcggacguugcagugagccgag

SEQ ID NO: 117316 - RNA, 24 nt, Human
aggcggguggaucacgaggucagg

SEQ ID NO: 117317 - RNA, 21 nt, Human
aggcugaggcaggaaaauggu

SEQ ID NO: 117318 - RNA, 22 nt, Human
agugaccaccuuacaaaccaga

SEQ ID NO: 117319 - RNA, 22 nt, Human
auauuucucuucaguagucuua

SEQ ID NO: 117320 - RNA, 24 nt, Human
auuacgccacugcacuccagccug

SEQ ID NO: 117321 - RNA, 18 nt, Human
cacaaagugcuuuugaau

SEQ ID NO: 117322 - RNA, 28 nt, Human
caccuuauuccuuuaaguaauccaaacu

SEQ ID NO: 117323 - RNA, 23 nt, Human
cacuccagccugggagacagagc

SEQ ID NO: 117324 - RNA, 18 nt, Human
cacugcacuccagccugg

SEQ ID NO: 117325 - RNA, 19 nt, Human
cacugcacuccagccuggg

SEQ ID NO: 117326 - RNA, 22 nt, Human
cacugcacuccagccugggaga

SEQ ID NO: 117327 - RNA, 24 nt, Human
cacugcacuccagccugggagaca

SEQ ID NO: 117328 - RNA, 25 nt, Human
cacugcacuccagccugggagacag

SEQ ID NO: 117329 - RNA, 22 nt, Human
cagacuccaucucaaaaaaaaa

SEQ ID NO: 117330 - RNA, 22 nt, Human
cagcacuuugggaggccgaggc

SEQ ID NO: 117331 - RNA, 24 nt, Human
cagcacuuugggaggccgaggcgg

SEQ ID NO: 117332 - RNA, 24 nt, Human
caugccuguaaucgcagcacuuug

SEQ ID NO: 117333 - RNA, 19 nt, Human
cauuuuccaagcucuucuu

SEQ ID NO: 117334 - RNA, 22 nt, Human
ccacucuucccaugaucauuuc

SEQ ID NO: 117335 - RNA, 19 nt, Human
ccacugcacuccagccugg

SEQ ID NO: 117336 - RNA, 20 nt, Human
ccacugcacuccagccuggg

SEQ ID NO: 117337 - RNA, 22 nt, Human
ccacugcacuccagccugggag

SEQ ID NO: 117338 - RNA, 24 nt, Human
ccacugcacuccagccugggagac

SEQ ID NO: 117339 - RNA, 24 nt, Human
ccagaccauccuggcuaacauggu

SEQ ID NO: 117340 - RNA, 21 nt, Human
ccccaagcacaucuacaaacc

SEQ ID NO: 117341 - RNA, 23 nt, Human
ccccaagcacaucuacaaaccag

SEQ ID NO: 117342 - RNA, 22 nt, Human
ccuggcuaacauggugaaaccc

SEQ ID NO: 117343 - RNA, 23 nt, Human
ccuggcuaacauggugaaacccc

SEQ ID NO: 117344 - RNA, 24 nt, Human
ccuggcuaacauggugaaaccccg

SEQ ID NO: 117345 - RNA, 22 nt, Human
ccuguaaucgcagcacuuuggg

SEQ ID NO: 117346 - RNA, 24 nt, Human
ccuguaaucgcagcacuuugggag

SEQ ID NO: 117347 - RNA, 24 nt, Human
cgaggcggguggaucacgagguca

SEQ ID NO: 117348 - RNA, 20 nt, Human
cgcacacaaagaggcaggag

SEQ ID NO: 117349 - RNA, 26 nt, Human
cgccacugcacuccagccugggagac

SEQ ID NO: 117350 - RNA, 24 nt, Human
cggccaggcgcgguggcucaugcc

SEQ ID NO: 117351 - RNA, 24 nt, Human
cucaugccuguaaucgcagcacuu

SEQ ID NO: 117352 - RNA, 24 nt, Human
cuuacaaaccagaaauuccaggca

SEQ ID NO: 117353 - RNA, 18 nt, Human
cuuacugagcccauucca

SEQ ID NO: 117354 - RNA, 19 nt, Human
cuucuuacugagcccauuc

SEQ ID NO: 117355 - RNA, 20 nt, Human
gaaagaagauaggcagaaaa

SEQ ID NO: 117356 - RNA, 23 nt, Human
gaagauaggcagaaaaugaauca

SEQ ID NO: 117357 - RNA, 23 nt, Human
gagauuacgccacugcacuccag

SEQ ID NO: 117358 - RNA, 24 nt, Human
gcacuccagccugggagacagagc

SEQ ID NO: 117359 - RNA, 24 nt, Human
gcuaacauggugaaaccccgucuc

SEQ ID NO: 117360 - RNA, 23 nt, Human
ggacguugcagugagccgagauu

SEQ ID NO: 117361 - RNA, 24 nt, Human
ggacguugcagugagccgagauua

SEQ ID NO: 117362 - RNA, 21 nt, Human
ggcucaugccuguaaucgcag

SEQ ID NO: 117363 - RNA, 21 nt, Human
gguggaucacgaggucaggag

SEQ ID NO: 117364 - RNA, 20 nt, Human
gguggcucaugccuguaauc

SEQ ID NO: 117365 - RNA, 24 nt, Human
gugcacaugucugcgucucuguga

SEQ ID NO: 117366 - RNA, 23 nt, Human
guggcucaugccuguaaucgcag

SEQ ID NO: 117367 - RNA, 21 nt, Human
guugcagugagccgagauuac

SEQ ID NO: 117368 - RNA, 26 nt, Human
uaaaaaaacacauaugugaaagaaga

SEQ ID NO: 117369 - RNA, 22 nt, Human
uaacauggugaaaccccgucuc

SEQ ID NO: 117370 - RNA, 24 nt, Human
uaacauggugaaaccccgucucua

SEQ ID NO: 117371 - RNA, 20 nt, Human
uaaccacucuucccaugauc

SEQ ID NO: 117372 - RNA, 21 nt, Human
uaaccacucuucccaugauca

SEQ ID NO: 117373 - RNA, 23 nt, Human
uacaaaccagaaauuccaggcaa

SEQ ID NO: 117374 - RNA, 24 nt, Human
uacaaaccagaaauuccaggcaac

SEQ ID NO: 117375 - RNA, 18 nt, Human
uaccagggaaggggcagc

SEQ ID NO: 117376 - RNA, 20 nt, Human
uagaacacagcacaaagugc

SEQ ID NO: 117377 - RNA, 23 nt, Human
uaggcagaaaaugaaucaaaaua

SEQ ID NO: 117378 - RNA, 19 nt, Human
uagguagcauaauuauaag

SEQ ID NO: 117379 - RNA, 24 nt, Human
uagucccaucuacugguaguccca

SEQ ID NO: 117380 - RNA, 28 nt, Human
uauagaacacagcacaaagugcuuuuga

SEQ ID NO: 117381 - RNA, 22 nt, Human
uauguaaaaaaacacauaugug

SEQ ID NO: 117382 - RNA, 19 nt, Human
ucaauuuuuauuauguuuu

SEQ ID NO: 117383 - RNA, 20 nt, Human
ucaauuuuuauuauguuuuu

SEQ ID NO: 117384 - RNA, 18 nt, Human
ucacgaggucaggagauc

SEQ ID NO: 117385 - RNA, 24 nt, Human
ucacgaggucaggagauccagacc

SEQ ID NO: 117386 - RNA, 23 nt, Human
ucaguagucuuaaccacucuucc

SEQ ID NO: 117387 - RNA, 23 nt, Human
uccauauuacaaauauuuuaaaa

SEQ ID NO: 117388 - RNA, 21 nt, Human
uccccaagcacaucuacaaac

SEQ ID NO: 117389 - RNA, 18 nt, Human
ucuauaaaauaaaaggaa

SEQ ID NO: 117390 - RNA, 24 nt, Human
ucuccccaagcacaucuacaaacc

SEQ ID NO: 117391 - RNA, 22 nt, Human
ucucuacuaaaaauacaaaaaa

SEQ ID NO: 117392 - RNA, 19 nt, Human
ucugcauuuuccaagcucu

SEQ ID NO: 117393 - RNA, 21 nt, Human
ugaaagaagauaggcagaaaa

SEQ ID NO: 117394 - RNA, 25 nt, Human
ugaccaccuuacaaaccagaaauuc

SEQ ID NO: 117395 - RNA, 22 nt, Human
ugagccgagauuacgccacugc

SEQ ID NO: 117396 - RNA, 23 nt, Human
ugaggcaggaaaauggugucaac

SEQ ID NO: 117397 - RNA, 20 nt, Human
ugccuguagucccaucuacu

SEQ ID NO: 117398 - RNA, 18 nt, Human
uggcucaugccuguaauc

SEQ ID NO: 117399 - RNA, 22 nt, Human
uggcucaugccuguaaucgcag

SEQ ID NO: 117400 - RNA, 24 nt, Human
uggcucaugccuguaaucgcagca

SEQ ID NO: 117401 - RNA, 23 nt, Human
ugggaggccgaggcggguggauc

SEQ ID NO: 117402 - RNA, 24 nt, Human
ugggaggccgaggcggguggauca

SEQ ID NO: 117403 - RNA, 21 nt, Human
uggugucaacccgggaggcgg

SEQ ID NO: 117404 - RNA, 24 nt, Human
uguaaaaaaacacauaugugaaag

SEQ ID NO: 117405 - RNA, 24 nt, Human
uguuggcaggugccuguaguccca

SEQ ID NO: 117406 - RNA, 21 nt, Human
uuaaaaaagaacagugaccac

SEQ ID NO: 117407 - RNA, 24 nt, Human
uuaaaaguuguguuuuaaaaaguu

SEQ ID NO: 117408 - RNA, 23 nt, Human
uuaaguaauccaaacuauuuucu

SEQ ID NO: 117409 - RNA, 23 nt, Human
uuacgccacugcacuccagccug

SEQ ID NO: 117410 - RNA, 20 nt, Human
uuacugagcccauuccauau

SEQ ID NO: 117411 - RNA, 23 nt, Human
uuagaaaauaucgaaagcggcca

SEQ ID NO: 117412 - RNA, 23 nt, Human
uucaauuuuuauuauguuuuuua

SEQ ID NO: 117413 - RNA, 22 nt, Human
uucacagugacgcacacaaaga

SEQ ID NO: 117414 - RNA, 23 nt, Human
uucaugccuuucuaguaaauuaa

SEQ ID NO: 117415 - RNA, 19 nt, Human
uugaucucgaagaaaacug

SEQ ID NO: 117416 - RNA, 24 nt, Human
uugaucucgaagaaaacugaaaua

SEQ ID NO: 117417 - RNA, 20 nt, Human
uugcagugagccgagauuac

SEQ ID NO: 117418 - RNA, 21 nt, Human
uugcagugagccgagauuacg

SEQ ID NO: 117419 - RNA, 25 nt, Human
uugggaggccgaggcggguggauca

SEQ ID NO: 117420 - RNA, 22 nt, Human
aaaagauuuguucacacacugg

SEQ ID NO: 117421 - RNA, 22 nt, Human
aaccagcaccaacaggaaguuc

SEQ ID NO: 117422 - RNA, 23 nt, Human
aaccagcaccaacaggaaguuca

SEQ ID NO: 117423 - RNA, 22 nt, Human
aagagcaucaugugaaccagca

SEQ ID NO: 117424 - RNA, 19 nt, Human
acacugcuauuccaaaggg

SEQ ID NO: 117425 - RNA, 24 nt, Human
aggauagcuggaggauuuggacaa

SEQ ID NO: 117426 - RNA, 27 nt, Human
aggcagaugauagaaaacgggggaccc

SEQ ID NO: 117427 - RNA, 21 nt, Human
cacaaugacuagcagaccugc

SEQ ID NO: 117428 - RNA, 18 nt, Human
cacagcgaggggcagggc

SEQ ID NO: 117429 - RNA, 21 nt, Human
cagcgaggggcagggcugcuc

SEQ ID NO: 117430 - RNA, 23 nt, Human
caucaugugaaccagcaccaaca

SEQ ID NO: 117431 - RNA, 18 nt, Human
caugagguucacuugugc

SEQ ID NO: 117432 - RNA, 22 nt, Human
cccaaugggaaacucaaaguca

SEQ ID NO: 117433 - RNA, 19 nt, Human
gaaccagcaccaacaggaa

SEQ ID NO: 117434 - RNA, 24 nt, Human
gcgaggggcagggcugcuccaaac

SEQ ID NO: 117435 - RNA, 22 nt, Human
gcuuucauuccagccaagacac

SEQ ID NO: 117436 - RNA, 21 nt, Human
ggaaacucaaagucaucaguu

SEQ ID NO: 117437 - RNA, 22 nt, Human
ggcagggcugcuccaaacccca

SEQ ID NO: 117438 - RNA, 23 nt, Human
gucugggugggggucacaugugu

SEQ ID NO: 117439 - RNA, 21 nt, Human
ucccucugucugggugggggu

SEQ ID NO: 117440 - RNA, 21 nt, Human
ugaaggucaucccucugucug

SEQ ID NO: 117441 - RNA, 23 nt, Human
uggaggauuuggacaaaagauuu

SEQ ID NO: 117442 - RNA, 23 nt, Human
uuuuaggcagaugauagaaaacg

SEQ ID NO: 117443 - RNA, 21 nt, Human
aaaagaagaugggucuagaua

SEQ ID NO: 117444 - RNA, 22 nt, Human
aaacugggcucccaucuuuacc

SEQ ID NO: 117445 - RNA, 22 nt, Human
aaagaaacauccaaagccugaa

SEQ ID NO: 117446 - RNA, 23 nt, Human
aagcaacuagaacuuaucacaaa

SEQ ID NO: 117447 - RNA, 21 nt, Human
aaucacugagugauuauggaa

SEQ ID NO: 117448 - RNA, 21 nt, Human
acaguaaggguaaaaaugaaa

SEQ ID NO: 117449 - RNA, 21 nt, Human
aggaagugaucgcuuaugaca

SEQ ID NO: 117450 - RNA, 21 nt, Human
augaaaugauuaacaccacca

SEQ ID NO: 117451 - RNA, 23 nt, Human
caguaaggguaaaaaugaaauga

SEQ ID NO: 117452 - RNA, 21 nt, Human
ccccagaaaaugcuucauacu

SEQ ID NO: 117453 - RNA, 20 nt, Human
cccgcgagcguccggcagcu

SEQ ID NO: 117454 - RNA, 25 nt, Human
cccgcggcgggaugcguuccgagac

SEQ ID NO: 117455 - RNA, 23 nt, Human
cugagugauuauggaaaggcaaa

SEQ ID NO: 117456 - RNA, 19 nt, Human
cugcuaaagaaacauccaa

SEQ ID NO: 117457 - RNA, 21 nt, Human
guuccgagacccgcgagcguc

SEQ ID NO: 117458 - RNA, 19 nt, Human
uaaagaaacauccaaagcc

SEQ ID NO: 117459 - RNA, 20 nt, Human
uaaccaaaagcagauaguaa

SEQ ID NO: 117460 - RNA, 22 nt, Human
uaagugaggcuucagaaagucc

SEQ ID NO: 117461 - RNA, 20 nt, Human
uaauaaagguaaggccauca

SEQ ID NO: 117462 - RNA, 20 nt, Human
uacaguaaugugagagaaac

SEQ ID NO: 117463 - RNA, 23 nt, Human
uaccaggacagcucuuuuuagug

SEQ ID NO: 117464 - RNA, 24 nt, Human
uagccauggccuggcuucaggcau

SEQ ID NO: 117465 - RNA, 23 nt, Human
uauaaccaaaagcagauaguaac

SEQ ID NO: 117466 - RNA, 24 nt, Human
uaucaaaauaaaaccauacuuccu

SEQ ID NO: 117467 - RNA, 22 nt, Human
uaucacaaaacugcuaaagaaa

SEQ ID NO: 117468 - RNA, 22 nt, Human
uaugacaucauuucauugaucu

SEQ ID NO: 117469 - RNA, 22 nt, Human
ucaaaaagaagaugggucuaga

SEQ ID NO: 117470 - RNA, 23 nt, Human
ucaaaauaaaaccauacuuccua

SEQ ID NO: 117471 - RNA, 22 nt, Human
ucccauaauuuaaaaaaacuug

SEQ ID NO: 117472 - RNA, 18 nt, Human
ugagagaaacucaaacag

SEQ ID NO: 117473 - RNA, 23 nt, Human
ugagagaaacucaaacaguaagg

SEQ ID NO: 117474 - RNA, 26 nt, Human
ugauuaacaccaccagaggaggaagc

SEQ ID NO: 117475 - RNA, 24 nt, Human
uggaaaggcaaaguauauacagua

SEQ ID NO: 117476 - RNA, 19 nt, Human
uucaaaaagaagauggguc

SEQ ID NO: 117477 - RNA, 19 nt, Human
agcggcggcgcagcgggca

SEQ ID NO: 117478 - RNA, 22 nt, Human
aggccugggggguggggguggg

SEQ ID NO: 117479 - RNA, 22 nt, Human
agggauacaagaggcaccaagg

SEQ ID NO: 117480 - RNA, 30 nt, Human
auggagcacuagggauacaagaggcaccag

SEQ ID NO: 117481 - RNA, 22 nt, Human
ccugcaucccuuccugaaagua

SEQ ID NO: 117482 - RNA, 21 nt, Human
cgggcacacucugagcucgca

SEQ ID NO: 117483 - RNA, 23 nt, Human
gaaaccgugcaaaugccaaacua

SEQ ID NO: 117484 - RNA, 21 nt, Human
gccugcaucccuuccugaaag

SEQ ID NO: 117485 - RNA, 21 nt, Human
gcggcgcagcgggcacacucu

SEQ ID NO: 117486 - RNA, 21 nt, Human
gcgguggcggcggcggcaggu

SEQ ID NO: 117487 - RNA, 23 nt, Human
gcgguggcggcggcggcagguac

SEQ ID NO: 117488 - RNA, 30 nt, Human
ggacacuacaacauugucauggggaaaacg

SEQ ID NO: 117489 - RNA, 22 nt, Human
gggggugggggugggggacacu

SEQ ID NO: 117490 - RNA, 19 nt, Human
gguggcgguggcggcggcg

SEQ ID NO: 117491 - RNA, 20 nt, Human
guggcgguggcggcggcggc

SEQ ID NO: 117492 - RNA, 21 nt, Human
guggcgguggcggcggcggca

SEQ ID NO: 117493 - RNA, 22 nt, Human
guggcgguggcggcggcggcag

SEQ ID NO: 117494 - RNA, 22 nt, Human
ucagaacuaugacauauuccuc

SEQ ID NO: 117495 - RNA, 22 nt, Human
ugagacacgucuaaccaguuua

SEQ ID NO: 117496 - RNA, 18 nt, Human
uggcgguggcggcggcgg

SEQ ID NO: 117497 - RNA, 21 nt, Human
ugggggacacuacaacauugu

SEQ ID NO: 117498 - RNA, 19 nt, Human
ugggggguggggguggggg

SEQ ID NO: 117499 - RNA, 20 nt, Human
ugggggugggggacacuaca

SEQ ID NO: 117500 - RNA, 18 nt, Human
ugguaggggaaaagggcg

SEQ ID NO: 117501 - RNA, 21 nt, Human
aacuguauaggcuacagggac

SEQ ID NO: 117502 - RNA, 22 nt, Human
aagacaaguccagggacaaccc

SEQ ID NO: 117503 - RNA, 21 nt, Human
aaguccccuuuagagagaccc

SEQ ID NO: 117504 - RNA, 24 nt, Human
acccugcucugggcugguuugggg

SEQ ID NO: 117505 - RNA, 19 nt, Human
agaaagcaagacccugcaa

SEQ ID NO: 117506 - RNA, 20 nt, Human
agaagaggucaaagaaagca

SEQ ID NO: 117507 - RNA, 22 nt, Human
agaaggagggggugggacggag

SEQ ID NO: 117508 - RNA, 21 nt, Human
agaggcaucccagugaccccu

SEQ ID NO: 117509 - RNA, 21 nt, Human
aucccagugacccccagaagu

SEQ ID NO: 117510 - RNA, 19 nt, Human
caagacaaguccagggaca

SEQ ID NO: 117511 - RNA, 22 nt, Human
caagacaaguccagggacaacc

SEQ ID NO: 117512 - RNA, 18 nt, Human
caagaggcaucccaguga

SEQ ID NO: 117513 - RNA, 24 nt, Human
caagaggcaucccagugaccccca

SEQ ID NO: 117514 - RNA, 18 nt, Human
cagggacaaaggguagaa

SEQ ID NO: 117515 - RNA, 18 nt, Human
caucccagugacccccag

SEQ ID NO: 117516 - RNA, 19 nt, Human
cccagugacccccagaagu

SEQ ID NO: 117517 - RNA, 22 nt, Human
cccccagaagugacugggguaa

SEQ ID NO: 117518 - RNA, 21 nt, Human
cccguagacuccuaggcugga

SEQ ID NO: 117519 - RNA, 21 nt, Human
cccugcucugggcugguuugg

SEQ ID NO: 117520 - RNA, 19 nt, Human
ccuaggcuggagcacugga

SEQ ID NO: 117521 - RNA, 21 nt, Human
ccuaggcuggagcacuggaca

SEQ ID NO: 117522 - RNA, 21 nt, Human
ccugcucugggcugguuuggg

SEQ ID NO: 117523 - RNA, 19 nt, Human
cggaaugggugaucugggc

SEQ ID NO: 117524 - RNA, 23 nt, Human
cuacagggacaaaggguagaagc

SEQ ID NO: 117525 - RNA, 19 nt, Human
cuccuaggcuggagcacug

SEQ ID NO: 117526 - RNA, 21 nt, Human
gaaccaagacaaguccaggga

SEQ ID NO: 117527 - RNA, 20 nt, Human
gagcauggccaguggugggc

SEQ ID NO: 117528 - RNA, 20 nt, Human
gagcauggccaguggugggc

SEQ ID NO: 117529 - RNA, 25 nt, Human
gagcauggccaguggugggcuucgg

SEQ ID NO: 117530 - RNA, 24 nt, Human
gagggggugggacggagggggcag

SEQ ID NO: 117531 - RNA, 19 nt, Human
gccgcgguucuaccugugg

SEQ ID NO: 117532 - RNA, 23 nt, Human
gcgcuauccuagaaggagggggu

SEQ ID NO: 117533 - RNA, 22 nt, Human
gggggugggacggagggggcag

SEQ ID NO: 117534 - RNA, 19 nt, Human
ggugggacggagggggcag

SEQ ID NO: 117535 - RNA, 21 nt, Human
uagagagacccugcucugggc

SEQ ID NO: 117536 - RNA, 26 nt, Human
ucuggaaccaagacaaguccagggac

SEQ ID NO: 117537 - RNA, 22 nt, Human
ugacccccagaagugacugggg

SEQ ID NO: 117538 - RNA, 18 nt, Human
ugacugggguaaggggag

SEQ ID NO: 117539 - RNA, 25 nt, Human
uugcagccauuccucuuuguuggug

SEQ ID NO: 117540 - RNA, 22 nt, Human
uuguugguguaggggaggagag

SEQ ID NO: 117541 - RNA, 24 nt, Human
aaagugcugggauuacagguguga

SEQ ID NO: 117542 - RNA, 24 nt, Human
aagcgauucucaugccuuggccuc

SEQ ID NO: 117543 - RNA, 18 nt, Human
aagugcugggauuacagg

SEQ ID NO: 117544 - RNA, 19 nt, Human
aagugcugggauuacaggu

SEQ ID NO: 117545 - RNA, 26 nt, Human
aagugcugggauuacaggugugagcc

SEQ ID NO: 117546 - RNA, 23 nt, Human
aauuuuuguaucuuuaguagaga

SEQ ID NO: 117547 - RNA, 24 nt, Human
accauguuggccaggcuggucuug

SEQ ID NO: 117548 - RNA, 21 nt, Human
acccacugccccccgugcccc

SEQ ID NO: 117549 - RNA, 24 nt, Human
acccacugccccccgugccccacc

SEQ ID NO: 117550 - RNA, 24 nt, Human
agagacuuaggggagugcacugcu

SEQ ID NO: 117551 - RNA, 23 nt, Human
agcgauucucaugccuuggccuc

SEQ ID NO: 117552 - RNA, 24 nt, Human
agcgauucucaugccuuggccucu

SEQ ID NO: 117553 - RNA, 25 nt, Human
aggccggagugcaguggugccaucu

SEQ ID NO: 117554 - RNA, 23 nt, Human
aguacccacugccccccgugccc

SEQ ID NO: 117555 - RNA, 22 nt, Human
aguagagaugggguuucaccau

SEQ ID NO: 117556 - RNA, 18 nt, Human
aguagcugggauuacagg

SEQ ID NO: 117557 - RNA, 18 nt, Human
aguagcugggauuacagg

SEQ ID NO: 117558 - RNA, 21 nt, Human
agugcaguggugccaucucag

SEQ ID NO: 117559 - RNA, 24 nt, Human
agugcaguggugccaucucagcuc

SEQ ID NO: 117560 - RNA, 19 nt, Human
auccacaccuggcccucug

SEQ ID NO: 117561 - RNA, 19 nt, Human
aucuguuuuauuaagauag

SEQ ID NO: 117562 - RNA, 22 nt, Human
augaacucuuaaaucuaaagaa

SEQ ID NO: 117563 - RNA, 22 nt, Human
augccuuggccucucgaguagc

SEQ ID NO: 117564 - RNA, 18 nt, Human
augggguuucaccauguu

SEQ ID NO: 117565 - RNA, 22 nt, Human
augggguuucaccauguuggcc

SEQ ID NO: 117566 - RNA, 23 nt, Human
augggguuucaccauguuggcca

SEQ ID NO: 117567 - RNA, 24 nt, Human
auuuuuguaucuuuaguagagaug

SEQ ID NO: 117568 - RNA, 22 nt, Human
caaaagcagccauuccccuuuc

SEQ ID NO: 117569 - RNA, 24 nt, Human
caaagugcugggauuacaggugug

SEQ ID NO: 117570 - RNA, 23 nt, Human
caaccuccaccucccagguucaa

SEQ ID NO: 117571 - RNA, 24 nt, Human
cacaccaccacgcucagcaaauuu

SEQ ID NO: 117572 - RNA, 21 nt, Human
caccauguuggccaggcuggu

SEQ ID NO: 117573 - RNA, 24 nt, Human
caccauguuggccaggcuggucuu

SEQ ID NO: 117574 - RNA, 27 nt, Human
caccauguuggccaggcuggucuugaa

SEQ ID NO: 117575 - RNA, 22 nt, Human
cacccaccuuggccucccaaag

SEQ ID NO: 117576 - RNA, 23 nt, Human
cacccaccuuggccucccaaagu

SEQ ID NO: 117577 - RNA, 20 nt, Human
cacugcaaccuccaccuccc

SEQ ID NO: 117578 - RNA, 21 nt, Human
cagcacaagugcauaaaugaa

SEQ ID NO: 117579 - RNA, 21 nt, Human
caggugcacaccaccacgcuc

SEQ ID NO: 117580 - RNA, 21 nt, Human
caggugcaucugcuucugcug

SEQ ID NO: 117581 - RNA, 24 nt, Human
cauguuggccaggcuggucuugaa

SEQ ID NO: 117582 - RNA, 20 nt, Human
ccaaagugcugggauuacag

SEQ ID NO: 117583 - RNA, 21 nt, Human
ccaaagugcugggauuacagg

SEQ ID NO: 117584 - RNA, 21 nt, Human
ccaaagugcugggauuacagg

SEQ ID NO: 117585 - RNA, 24 nt, Human
ccaaagugcugggauuacaggugu

SEQ ID NO: 117586 - RNA, 20 nt, Human
ccaccagucucacugccuga

SEQ ID NO: 117587 - RNA, 24 nt, Human
ccaccucccagguucaagcgauuc

SEQ ID NO: 117588 - RNA, 22 nt, Human
ccacugccccccgugccccacc

SEQ ID NO: 117589 - RNA, 18 nt, Human
ccagacacugaccuggag

SEQ ID NO: 117590 - RNA, 20 nt, Human
cccagguucaagcgauucuc

SEQ ID NO: 117591 - RNA, 23 nt, Human
cccagguucaagcgauucucaug

SEQ ID NO: 117592 - RNA, 19 nt, Human
ccccuuuccccuuccccau

SEQ ID NO: 117593 - RNA, 22 nt, Human
cccgugccccaccagucucacu

SEQ ID NO: 117594 - RNA, 22 nt, Human
ccucccagguucaagcgauucu

SEQ ID NO: 117595 - RNA, 24 nt, Human
ccugaccucagaugacccacccac

SEQ ID NO: 117596 - RNA, 21 nt, Human
ccuggcccucugggaaucugu

SEQ ID NO: 117597 - RNA, 28 nt, Human
cggagugcaguggugccauccuagcacg

SEQ ID NO: 117598 - RNA, 24 nt, Human
cucacugcaaccuccaccucccag

SEQ ID NO: 117599 - RNA, 24 nt, Human
cucgaguagcugggauuacaggug

SEQ ID NO: 117600 - RNA, 23 nt, Human
cugcaaccuccaccucccagguu

SEQ ID NO: 117601 - RNA, 24 nt, Human
cugcaaccuccaccucccagguuc

SEQ ID NO: 117602 - RNA, 18 nt, Human
cuggguuugaggagauuu

SEQ ID NO: 117603 - RNA, 24 nt, Human
cugucauuaauaugugugaccuug

SEQ ID NO: 117604 - RNA, 21 nt, Human
cuguggauccacaccuggccc

SEQ ID NO: 117605 - RNA, 24 nt, Human
cuuggccucucgaguagcugggau

SEQ ID NO: 117606 - RNA, 23 nt, Human
gaccaauuaguguaagcucagca

SEQ ID NO: 117607 - RNA, 20 nt, Human
gagaugggguuucaccaugu

SEQ ID NO: 117608 - RNA, 24 nt, Human
gagaugggguuucaccauguuggc

SEQ ID NO: 117609 - RNA, 26 nt, Human
gaguagcugggauuacaggugcacac

SEQ ID NO: 117610 - RNA, 18 nt, Human
gauuacaggugugagcca

SEQ ID NO: 117611 - RNA, 21 nt, Human
gauuacaggugugagccacca

SEQ ID NO: 117612 - RNA, 24 nt, Human
gauuacaggugugagccaccaugc

SEQ ID NO: 117613 - RNA, 22 nt, Human
gcaaccuccaccucccagguuc

SEQ ID NO: 117614 - RNA, 18 nt, Human
gcccugggauggaaugaa

SEQ ID NO: 117615 - RNA, 21 nt, Human
gccggagugcaguggugccag

SEQ ID NO: 117616 - RNA, 27 nt, Human
gccuggcuggagguccuuguccuuggg

SEQ ID NO: 117617 - RNA, 20 nt, Human
gccuuggccucucgaguagc

SEQ ID NO: 117618 - RNA, 21 nt, Human
gcucagcauagugcugggcac

SEQ ID NO: 117619 - RNA, 23 nt, Human
gcuggucuugaacuccugaccuc

SEQ ID NO: 117620 - RNA, 24 nt, Human
ggauuacaggugugagccaccaug

SEQ ID NO: 117621 - RNA, 18 nt, Human
ggcccucugggaaucugu

SEQ ID NO: 117622 - RNA, 24 nt, Human
ggcuggucuugaacuccugaccuc

SEQ ID NO: 117623 - RNA, 22 nt, Human
gggguuucaccauguuggccag

SEQ ID NO: 117624 - RNA, 22 nt, Human
ggguuucaccauguuggccagg

SEQ ID NO: 117625 - RNA, 19 nt, Human
ggucuugaacuccugaccu

SEQ ID NO: 117626 - RNA, 23 nt, Human
guagagaugggguuucaccaugu

SEQ ID NO: 117627 - RNA, 18 nt, Human
guagcugggauuacaggu

SEQ ID NO: 117628 - RNA, 18 nt, Human
gucuucuugcccuccugg

SEQ ID NO: 117629 - RNA, 18 nt, Human
guuuuggucuucuugccc

SEQ ID NO: 117630 - RNA, 23 nt, Human
uaaagaagacuuuuuuacuacaa

SEQ ID NO: 117631 - RNA, 18 nt, Human
uaagcucagcauagugcu

SEQ ID NO: 117632 - RNA, 22 nt, Human
uacaaguacccacugccccccg

SEQ ID NO: 117633 - RNA, 19 nt, Human
uacaggugcacaccaccac

SEQ ID NO: 117634 - RNA, 22 nt, Human
uacaggugugagccaccaugcc

SEQ ID NO: 117635 - RNA, 22 nt, Human
uagagaugggguuucaccaugu

SEQ ID NO: 117636 - RNA, 24 nt, Human
uaguagagaugggguuucaccaug

SEQ ID NO: 117637 - RNA, 25 nt, Human
uaguagagaugggguuucaccaugu

SEQ ID NO: 117638 - RNA, 24 nt, Human
uaucaaaagcagccauuccccuuu

SEQ ID NO: 117639 - RNA, 25 nt, Human
ucaaaagcagccauuccccuuuccc

SEQ ID NO: 117640 - RNA, 18 nt, Human
ucaaucccauucuugccc

SEQ ID NO: 117641 - RNA, 20 nt, Human
ucaauuccuucacaaugccu

SEQ ID NO: 117642 - RNA, 24 nt, Human
ucacugcaaccuccaccucccagg

SEQ ID NO: 117643 - RNA, 25 nt, Human
ucacugcaaccuccaccucccaggu

SEQ ID NO: 117644 - RNA, 26 nt, Human
ucacugcaaccuccaccucccagguu

SEQ ID NO: 117645 - RNA, 25 nt, Human
ucagcucacugcaaccuccaccucc

SEQ ID NO: 117646 - RNA, 23 nt, Human
uccaagucuccuacacuagauuu

SEQ ID NO: 117647 - RNA, 23 nt, Human
ucccaaagugcugggauuacagg

SEQ ID NO: 117648 - RNA, 21 nt, Human
ucccagguucaagcgauucuc

SEQ ID NO: 117649 - RNA, 24 nt, Human
ucccagguucaagcgauucucaug

SEQ ID NO: 117650 - RNA, 18 nt, Human
uccccuuuccccuucccc

SEQ ID NO: 117651 - RNA, 19 nt, Human
uccccuuuccccuucccca

SEQ ID NO: 117652 - RNA, 18 nt, Human
uccugguagcaagacucu

SEQ ID NO: 117653 - RNA, 19 nt, Human
ucguugccuaggccggagu

SEQ ID NO: 117654 - RNA, 23 nt, Human
ucucgaguagcugggauuacagg

SEQ ID NO: 117655 - RNA, 24 nt, Human
ucucgaguagcugggauuacaggu

SEQ ID NO: 117656 - RNA, 24 nt, Human
ucuuuaguagagaugggguuucac

SEQ ID NO: 117657 - RNA, 24 nt, Human
ugacccacccaccuuggccuccca

SEQ ID NO: 117658 - RNA, 25 nt, Human
ugaccucagaugacccacccaccuu

SEQ ID NO: 117659 - RNA, 22 nt, Human
ugauuguuuucuuugggccgag

SEQ ID NO: 117660 - RNA, 24 nt, Human
ugcacaccaccacgcucagcaaau

SEQ ID NO: 117661 - RNA, 19 nt, Human
ugccuaggccggagugcag

SEQ ID NO: 117662 - RNA, 24 nt, Human
ugccuaggccggagugcaguggug

SEQ ID NO: 117663 - RNA, 22 nt, Human
ugccuuggccucucgaguagcu

SEQ ID NO: 117664 - RNA, 24 nt, Human
ugccuuucugagagaagauaaucc

SEQ ID NO: 117665 - RNA, 24 nt, Human
ugcugggauuacaggugugagcca

SEQ ID NO: 117666 - RNA, 21 nt, Human
uggaaaaaagucaacguucuu

SEQ ID NO: 117667 - RNA, 21 nt, Human
uggaaugaaacuccagacacu

SEQ ID NO: 117668 - RNA, 18 nt, Human
uggagguccuuguccuug

SEQ ID NO: 117669 - RNA, 24 nt, Human
uggccaggcuggucuugaacuccu

SEQ ID NO: 117670 - RNA, 23 nt, Human
uggcuggagguccuuguccuugg

SEQ ID NO: 117671 - RNA, 20 nt, Human
ugggauggaaugaaacucca

SEQ ID NO: 117672 - RNA, 21 nt, Human
ugggauuacaggugcacacca

SEQ ID NO: 117673 - RNA, 22 nt, Human
ugggauuacaggugcacaccac

SEQ ID NO: 117674 - RNA, 24 nt, Human
ugggauuacaggugcacaccacca

SEQ ID NO: 117675 - RNA, 18 nt, Human
ugggauuacaggugugag

SEQ ID NO: 117676 - RNA, 22 nt, Human
ugggauuacaggugugagccac

SEQ ID NO: 117677 - RNA, 23 nt, Human
ugggauuacaggugugagccacc

SEQ ID NO: 117678 - RNA, 24 nt, Human
ugggauuacaggugugagccacca

SEQ ID NO: 117679 - RNA, 25 nt, Human
ugggauuacaggugugagccaccau

SEQ ID NO: 117680 - RNA, 24 nt, Human
ugggguuucaccauguuggccagg

SEQ ID NO: 117681 - RNA, 24 nt, Human
uggugccaucucagcucacugcaa

SEQ ID NO: 117682 - RNA, 22 nt, Human
uguuuguuuguuuguauuggag

SEQ ID NO: 117683 - RNA, 18 nt, Human
uuaguagagaugggguuu

SEQ ID NO: 117684 - RNA, 22 nt, Human
uuaguagagaugggguuucacc

SEQ ID NO: 117685 - RNA, 24 nt, Human
uuaguagagaugggguuucaccau

SEQ ID NO: 117686 - RNA, 22 nt, Human
uucaagauaugugucagggaac

SEQ ID NO: 117687 - RNA, 20 nt, Human
uucaagcgauucucaugccu

SEQ ID NO: 117688 - RNA, 19 nt, Human
uugaccuucaaguccugug

SEQ ID NO: 117689 - RNA, 24 nt, Human
uugccuaggccggagugcaguggu

SEQ ID NO: 117690 - RNA, 20 nt, Human
uuggagccaauuucaugagg

SEQ ID NO: 117691 - RNA, 18 nt, Human
uuggccucccaaagugcu

SEQ ID NO: 117692 - RNA, 22 nt, Human
uugggccgagaauuguuuuuuu

SEQ ID NO: 117693 - RNA, 20 nt, Human
uuggucuucuugcccuccug

SEQ ID NO: 117694 - RNA, 21 nt, Human
uuggucuucuugcccuccugg

SEQ ID NO: 117695 - RNA, 20 nt, Human
uuuaguagagaugggguuuu

SEQ ID NO: 117696 - RNA, 24 nt, Human
uuucaccauguuggccaggcuggu

SEQ ID NO: 117697 - RNA, 23 nt, Human
uuuugcucucguugccuaggccg

SEQ ID NO: 117698 - RNA, 22 nt, Human
uuuuucaacacuuucaucacuu

SEQ ID NO: 117699 - RNA, 25 nt, Human
uuuuucaacacuuucaucacuuggu

SEQ ID NO: 117700 - RNA, 20 nt, Human
uuuuuguaucuuuaguagag

SEQ ID NO: 117701 - RNA, 22 nt, Human
aaaacaaaccuacacaaaaaac

SEQ ID NO: 117702 - RNA, 20 nt, Human
aaaacaaagaauuguugagc

SEQ ID NO: 117703 - RNA, 24 nt, Human
aauaaaaaacaaaccuacacaaaa

SEQ ID NO: 117704 - RNA, 21 nt, Human
agccaacaugggagaucugcu

SEQ ID NO: 117705 - RNA, 20 nt, Human
auauauggauauauauuuug

SEQ ID NO: 117706 - RNA, 23 nt, Human
aucaaaaauaaaaaacaaaccua

SEQ ID NO: 117707 - RNA, 21 nt, Human
caaaccuacacaaaaaaccac

SEQ ID NO: 117708 - RNA, 23 nt, Human
cagcccacaugacucagggacac

SEQ ID NO: 117709 - RNA, 23 nt, Human
caggauucagcccacaugacucc

SEQ ID NO: 117710 - RNA, 20 nt, Human
caucaaaaauaaaaaacaaa

SEQ ID NO: 117711 - RNA, 21 nt, Human
ccaccugcucugagugaaagu

SEQ ID NO: 117712 - RNA, 23 nt, Human
cuaguggaaacccuguuuucucc

SEQ ID NO: 117713 - RNA, 22 nt, Human
cuccccagcgguugcuggaggc

SEQ ID NO: 117714 - RNA, 22 nt, Human
gaagaucaucaaaaauaaaaaa

SEQ ID NO: 117715 - RNA, 19 nt, Human
uaaaaaacaaaccuacaca

SEQ ID NO: 117716 - RNA, 23 nt, Human
uaaaaaacaaaccuacacaaaaa

SEQ ID NO: 117717 - RNA, 23 nt, Human
uauauaugggauauauauauaua

SEQ ID NO: 117718 - RNA, 23 nt, Human
uauauaugggauauauauauaua

SEQ ID NO: 117719 - RNA, 23 nt, Human
ucaaaaauaaaaaacaaaccuac

SEQ ID NO: 117720 - RNA, 22 nt, Human
ucaucaaaaauaaaaaacaaac

SEQ ID NO: 117721 - RNA, 19 nt, Human
ugaaaaugccauuacacau

SEQ ID NO: 117722 - RNA, 25 nt, Human
ugaaaaugccauuacacauuuaaaa

SEQ ID NO: 117723 - RNA, 18 nt, Human
ugacucagggacacacuc

SEQ ID NO: 117724 - RNA, 18 nt, Human
ugagacaccugccuguaa

SEQ ID NO: 117725 - RNA, 23 nt, Human
uggaaacccuguuuucuccuucc

SEQ ID NO: 117726 - RNA, 23 nt, Human
uggccuuucaagugaugucuagu

SEQ ID NO: 117727 - RNA, 20 nt, Human
ugggauauauauauauaugg

SEQ ID NO: 117728 - RNA, 18 nt, Human
uucaagugaugucuagug

SEQ ID NO: 117729 - RNA, 19 nt, Human
aaccucacacccuggcccc

SEQ ID NO: 117730 - RNA, 21 nt, Human
aaggaagagggaaccaaggag

SEQ ID NO: 117731 - RNA, 20 nt, Human
aaggagcugagcccuggugg

SEQ ID NO: 117732 - RNA, 20 nt, Human
acaauccugucuccaggucc

SEQ ID NO: 117733 - RNA, 21 nt, Human
agacaagagccaagauucagc

SEQ ID NO: 117734 - RNA, 24 nt, Human
agagcucuugccagucuccugcuc

SEQ ID NO: 117735 - RNA, 18 nt, Human
agccgguagaggcagccc

SEQ ID NO: 117736 - RNA, 23 nt, Human
aggaggacucgcgaggcggggcc

SEQ ID NO: 117737 - RNA, 23 nt, Human
aguuugggaagcaggguacagau

SEQ ID NO: 117738 - RNA, 22 nt, Human
caacacaauuccccuuuauuga

SEQ ID NO: 117739 - RNA, 21 nt, Human
cacacccuggccccucggccc

SEQ ID NO: 117740 - RNA, 18 nt, Human
cacccuggccccucggcc

SEQ ID NO: 117741 - RNA, 23 nt, Human
caccugggcuggaaagagaagac

SEQ ID NO: 117742 - RNA, 23 nt, Human
cagccgcaacggaggugaaaccu

SEQ ID NO: 117743 - RNA, 20 nt, Human
cagccucugcacucagcccc

SEQ ID NO: 117744 - RNA, 22 nt, Human
caggaaccaagcugaguggaac

SEQ ID NO: 117745 - RNA, 23 nt, Human
caggggcccgggccuaacguccu

SEQ ID NO: 117746 - RNA, 23 nt, Human
cagguggcaguggcgauggcuuu

SEQ ID NO: 117747 - RNA, 20 nt, Human
ccagacaauccugucuccag

SEQ ID NO: 117748 - RNA, 20 nt, Human
ccccacacaccgggcaaagu

SEQ ID NO: 117749 - RNA, 21 nt, Human
ccccagacaauccugucucca

SEQ ID NO: 117750 - RNA, 18 nt, Human
ccccagaggaggcaccgg

SEQ ID NO: 117751 - RNA, 21 nt, Human
ccccucggccccagacaaucc

SEQ ID NO: 117752 - RNA, 21 nt, Human
ccccuggaggaugcgguccgu

SEQ ID NO: 117753 - RNA, 21 nt, Human
cccucggccccagacaaucuu

SEQ ID NO: 117754 - RNA, 18 nt, Human
cccuggccccucggcccc

SEQ ID NO: 117755 - RNA, 18 nt, Human
ccgcgccgccgccgccgc

SEQ ID NO: 117756 - RNA, 22 nt, Human
ccgggagguuggcuguggggcg

SEQ ID NO: 117757 - RNA, 22 nt, Human
ccguggcucaguagauuugggg

SEQ ID NO: 117758 - RNA, 19 nt, Human
ccucacacccuggccccuc

SEQ ID NO: 117759 - RNA, 24 nt, Human
ccucacacccuggccccucggccc

SEQ ID NO: 117760 - RNA, 18 nt, Human
ccucggccccagacaauc

SEQ ID NO: 117761 - RNA, 23 nt, Human
ccucggccccagacaauccuguc

SEQ ID NO: 117762 - RNA, 22 nt, Human
ccuggccccucggccccagaca

SEQ ID NO: 117763 - RNA, 21 nt, Human
ccugggcuggaaagagaagac

SEQ ID NO: 117764 - RNA, 23 nt, Human
ccugucuccagguccugggaguu

SEQ ID NO: 117765 - RNA, 18 nt, Human
cgccgccgccgccgcggc

SEQ ID NO: 117766 - RNA, 18 nt, Human
cgcuccgccccacacacc

SEQ ID NO: 117767 - RNA, 22 nt, Human
cuagagccuucgggccaagguc

SEQ ID NO: 117768 - RNA, 24 nt, Human
cucagccccaggucgggcccuggc

SEQ ID NO: 117769 - RNA, 21 nt, Human
cugcaggcccccuggaggaug

SEQ ID NO: 117770 - RNA, 23 nt, Human
cugggaugacccacggaaggcac

SEQ ID NO: 117771 - RNA, 18 nt, Human
cuguggggcgggggcggg

SEQ ID NO: 117772 - RNA, 21 nt, Human
cuugcuagagccuucgggcca

SEQ ID NO: 117773 - RNA, 22 nt, Human
gaaccaagcugaguggaaccag

SEQ ID NO: 117774 - RNA, 20 nt, Human
gaaccaaggagcugagcccu

SEQ ID NO: 117775 - RNA, 21 nt, Human
gaagcccagaggcuucaccug

SEQ ID NO: 117776 - RNA, 21 nt, Human
gaggcagguggcaguggcgau

SEQ ID NO: 117777 - RNA, 25 nt, Human
gcacagccgcaacggaggugaaacc

SEQ ID NO: 117778 - RNA, 21 nt, Human
gcaguccgcuccgccccacac

SEQ ID NO: 117779 - RNA, 19 nt, Human
gccggggcugagcugguga

SEQ ID NO: 117780 - RNA, 20 nt, Human
ggaggacgugccaggggccc

SEQ ID NO: 117781 - RNA, 18 nt, Human
ggaggaggacucgcgagg

SEQ ID NO: 117782 - RNA, 24 nt, Human
ggaguggccggggcugagcuggug

SEQ ID NO: 117783 - RNA, 23 nt, Human
ggaugacccacggaaggcacuug

SEQ ID NO: 117784 - RNA, 21 nt, Human
ggccugcaggcccccuggagg

SEQ ID NO: 117785 - RNA, 23 nt, Human
ggcugguucccuuccccagagga

SEQ ID NO: 117786 - RNA, 20 nt, Human
ggcugugguggcaucggggg

SEQ ID NO: 117787 - RNA, 25 nt, Human
gggaagcaggguacagaagaaagau

SEQ ID NO: 117788 - RNA, 19 nt, Human
gggagguuggcuguggggc

SEQ ID NO: 117789 - RNA, 20 nt, Human
gggcaggaaccaagcugagu

SEQ ID NO: 117790 - RNA, 20 nt, Human
gggcaggcacccggggagga

SEQ ID NO: 117791 - RNA, 18 nt, Human
gggcccuggcaggugcug

SEQ ID NO: 117792 - RNA, 18 nt, Human
gggccugcaggcccccug

SEQ ID NO: 117793 - RNA, 18 nt, Human
gggcuucaggaagcccag

SEQ ID NO: 117794 - RNA, 18 nt, Human
gggguuguggcaguggca

SEQ ID NO: 117795 - RNA, 21 nt, Human
ggguuguggcaguggcagggg

SEQ ID NO: 117796 - RNA, 21 nt, Human
guagaggcagccccgcgccca

SEQ ID NO: 117797 - RNA, 23 nt, Human
guccugcucagccucugcacuca

SEQ ID NO: 117798 - RNA, 23 nt, Human
gugcccgggagguuggcuguggg

SEQ ID NO: 117799 - RNA, 20 nt, Human
guggcaguggcgauggcugu

SEQ ID NO: 117800 - RNA, 28 nt, Human
ucacacccuggccccucggccccagaca

SEQ ID NO: 117801 - RNA, 19 nt, Human
ucagcgggaggcagguggc

SEQ ID NO: 117802 - RNA, 19 nt, Human
uccgcgccgccgccgccgc

SEQ ID NO: 117803 - RNA, 18 nt, Human
ugaguggaaccagaggcg

SEQ ID NO: 117804 - RNA, 24 nt, Human
ugcacucagccccaggucgggccc

SEQ ID NO: 117805 - RNA, 18 nt, Human
ugcuagagccuucgggcc

SEQ ID NO: 117806 - RNA, 18 nt, Human
uggaaccagaggcggcuc

SEQ ID NO: 117807 - RNA, 18 nt, Human
uggcaggccugaguccua

SEQ ID NO: 117808 - RNA, 19 nt, Human
uggcagggaguggccgggg

SEQ ID NO: 117809 - RNA, 20 nt, Human
uggcagggaguggccggggc

SEQ ID NO: 117810 - RNA, 24 nt, Human
uggcaggggaagcuccuggacucu

SEQ ID NO: 117811 - RNA, 24 nt, Human
uggccccucggccccagacaaucc

SEQ ID NO: 117812 - RNA, 25 nt, Human
uggccccucggccccagacaauccu

SEQ ID NO: 117813 - RNA, 19 nt, Human
uggccggggcugagcuggu

SEQ ID NO: 117814 - RNA, 21 nt, Human
uggcugugguggcaucggggg

SEQ ID NO: 117815 - RNA, 23 nt, Human
ugggaugacccacggaaggcacu

SEQ ID NO: 117816 - RNA, 24 nt, Human
uggggccugcaggcccccuggagg

SEQ ID NO: 117817 - RNA, 18 nt, Human
uggggcgggggcggggca

SEQ ID NO: 117818 - RNA, 21 nt, Human
ugguggguggcccaucccagg

SEQ ID NO: 117819 - RNA, 20 nt, Human
uguggcauuggcaggccuga

SEQ ID NO: 117820 - RNA, 23 nt, Human
uuuuuuuuuuuuuuuuucaccaa

SEQ ID NO: 117821 - RNA, 22 nt, Human
agagaucuaaaaugaaucaagg

SEQ ID NO: 117822 - RNA, 18 nt, Human
aggcauuucuugaaauuc

SEQ ID NO: 117823 - RNA, 22 nt, Human
cccccaggugccaucucugucc

SEQ ID NO: 117824 - RNA, 24 nt, Human
cucagaacccccaggugccaucuc

SEQ ID NO: 117825 - RNA, 23 nt, Human
cuugaaauucaauggcuuuuuuu

SEQ ID NO: 117826 - RNA, 21 nt, Human
ucauuugggaauguucaaaug

SEQ ID NO: 117827 - RNA, 22 nt, Human
ucauuugggaauguucaaaugu

SEQ ID NO: 117828 - RNA, 21 nt, Human
ugccucagaacccccaggugc

SEQ ID NO: 117829 - RNA, 20 nt, Human
uguugcugguggucuggucc

SEQ ID NO: 117830 - RNA, 23 nt, Human
uuucuugaaauucaauggcuuuu

SEQ ID NO: 117831 - RNA, 23 nt, Human
aaauguugaacacauacagaacu

SEQ ID NO: 117832 - RNA, 22 nt, Human
aagaagacaacauacauaaaaa

SEQ ID NO: 117833 - RNA, 20 nt, Human
aaugcaaaagcacaaaugaa

SEQ ID NO: 117834 - RNA, 19 nt, Human
acaaaugaaugaaauucug

SEQ ID NO: 117835 - RNA, 18 nt, Human
accuuacuuacuuuaugc

SEQ ID NO: 117836 - RNA, 21 nt, Human
acugaauuaagaagcaacaac

SEQ ID NO: 117837 - RNA, 22 nt, Human
agaaaaaaagaaauguuuagaa

SEQ ID NO: 117838 - RNA, 21 nt, Human
agaaugcuuuuaagaaccaag

SEQ ID NO: 117839 - RNA, 24 nt, Human
agaaugcuuuuaagaaccaaggac

SEQ ID NO: 117840 - RNA, 19 nt, Human
agaggcugggguaauucug

SEQ ID NO: 117841 - RNA, 19 nt, Human
aggaggguggggguugaaa

SEQ ID NO: 117842 - RNA, 25 nt, Human
caacauacauaaaaagcacuccaaa

SEQ ID NO: 117843 - RNA, 23 nt, Human
caacaugucaauuuggcaaucaa

SEQ ID NO: 117844 - RNA, 21 nt, Human
caguauugaagaagacaacau

SEQ ID NO: 117845 - RNA, 19 nt, Human
ccacacauuacuucagcuc

SEQ ID NO: 117846 - RNA, 18 nt, Human
cccccacguaacacaccg

SEQ ID NO: 117847 - RNA, 29 nt, Human
cucccccacguaacacaccgcgucaagau

SEQ ID NO: 117848 - RNA, 18 nt, Human
gaacugaauuaagaagca

SEQ ID NO: 117849 - RNA, 24 nt, Human
gaagaagacaacauacauaaaaag

SEQ ID NO: 117850 - RNA, 18 nt, Human
gagaaguggaggcaggug

SEQ ID NO: 117851 - RNA, 19 nt, Human
gaggggagaaguggaggca

SEQ ID NO: 117852 - RNA, 24 nt, Human
gcacaucuaacacuguacuuuuua

SEQ ID NO: 117853 - RNA, 19 nt, Human
ggagaaguggaggcaggug

SEQ ID NO: 117854 - RNA, 18 nt, Human
gguauguaagugcaaugg

SEQ ID NO: 117855 - RNA, 19 nt, Human
uacaagagaacaaaaaaau

SEQ ID NO: 117856 - RNA, 27 nt, Human
uacagcauauuggaaagcuaaagcaga

SEQ ID NO: 117857 - RNA, 18 nt, Human
uaugucucuuaacaacuu

SEQ ID NO: 117858 - RNA, 19 nt, Human
ucccuaaggcaaucaagga

SEQ ID NO: 117859 - RNA, 21 nt, Human
uccuccgucacugcuuucguu

SEQ ID NO: 117860 - RNA, 19 nt, Human
ucuguaguugcuuucaggc

SEQ ID NO: 117861 - RNA, 19 nt, Human
ucuugaggagggugggggu

SEQ ID NO: 117862 - RNA, 18 nt, Human
ugaaaagcagaagucucu

SEQ ID NO: 117863 - RNA, 24 nt, Human
ugaacacauacagaacugaauuaa

SEQ ID NO: 117864 - RNA, 18 nt, Human
ugaagaagacaacauaca

SEQ ID NO: 117865 - RNA, 26 nt, Human
ugaauuaagaagcaacaacugcccua

SEQ ID NO: 117866 - RNA, 19 nt, Human
ugacaaaggcuauacagca

SEQ ID NO: 117867 - RNA, 19 nt, Human
ugcuuuuaagaaccaagga

SEQ ID NO: 117868 - RNA, 19 nt, Human
uggaaagcuaaagcagaac

SEQ ID NO: 117869 - RNA, 22 nt, Human
uggaacauucacaguuuaaugc

SEQ ID NO: 117870 - RNA, 19 nt, Human
uggaagagcuguauuagua

SEQ ID NO: 117871 - RNA, 24 nt, Human
ugguacaagcuccuccgucacugc

SEQ ID NO: 117872 - RNA, 19 nt, Human
uguaagaaugacaauccaa

SEQ ID NO: 117873 - RNA, 22 nt, Human
ugugcacaucuaacacuguacu

SEQ ID NO: 117874 - RNA, 23 nt, Human
uuaccggugguacaagcuccucc

SEQ ID NO: 117875 - RNA, 25 nt, Human
uucaaaaauguugaacacauacaga

SEQ ID NO: 117876 - RNA, 18 nt, Human
uucaguauugaagaagac

SEQ ID NO: 117877 - RNA, 19 nt, Human
uucugucccuaaggcaauc

SEQ ID NO: 117878 - RNA, 24 nt, Human
uucuugaggggagaaguggaggca

SEQ ID NO: 117879 - RNA, 22 nt, Human
uuuacauaauucacaaugagaa

SEQ ID NO: 117880 - RNA, 23 nt, Human
uuuaguacuaacuaaaauaugcu

SEQ ID NO: 117881 - RNA, 22 nt, Human
uuucagguuguggccaagccag

SEQ ID NO: 117882 - RNA, 24 nt, Human
uuucauaaacaaauauauaucacu

SEQ ID NO: 117883 - RNA, 22 nt, Human
uuuccaccuuaacaggugaaaa

SEQ ID NO: 117884 - RNA, 19 nt, Human
uuucuugguggugguaugu

SEQ ID NO: 117885 - RNA, 22 nt, Human
uuuucuuuuccucauuucuccc

SEQ ID NO: 117886 - RNA, 25 nt, Human
uuuucuuuuccucauuuugguuuuu

SEQ ID NO: 117887 - RNA, 24 nt, Human
aaaaaaaaaccaaagagagagacc

SEQ ID NO: 117888 - RNA, 26 nt, Human
aaaaaaauauauucuuuguauuguuu

SEQ ID NO: 117889 - RNA, 26 nt, Human
aaaaaaccaaagagagagaccagaua

SEQ ID NO: 117890 - RNA, 24 nt, Human
aaaaaaccccgaacacuaaguguu

SEQ ID NO: 117891 - RNA, 22 nt, Human
aaaaaaucuucccgaaacauca

SEQ ID NO: 117892 - RNA, 22 nt, Human
aaaaaccaaagagagagaccag

SEQ ID NO: 117893 - RNA, 18 nt, Human
aaaaagaaccccccccac

SEQ ID NO: 117894 - RNA, 19 nt, Human
aaaaagaaccuagaugccu

SEQ ID NO: 117895 - RNA, 23 nt, Human
aaaaaggcaugagucaccagcaa

SEQ ID NO: 117896 - RNA, 27 nt, Human
aaaacagcauuuucauaacaaaaaacc

SEQ ID NO: 117897 - RNA, 20 nt, Human
aaaacggaaaaaaaagaacc

SEQ ID NO: 117898 - RNA, 22 nt, Human
aaaagguccaagaacaugaaag

SEQ ID NO: 117899 - RNA, 22 nt, Human
aaacaaaaacaaaacggaaaaa

SEQ ID NO: 117900 - RNA, 21 nt, Human
aaacaaaaccccccucccccc

SEQ ID NO: 117901 - RNA, 23 nt, Human
aaacaaaaccccccuccccccaa

SEQ ID NO: 117902 - RNA, 24 nt, Human
aaaccaaagagagagaccagauau

SEQ ID NO: 117903 - RNA, 20 nt, Human
aaaccccccuccccccaaac

SEQ ID NO: 117904 - RNA, 24 nt, Human
aaacggaaaaaaaagaaccccccc

SEQ ID NO: 117905 - RNA, 20 nt, Human
aaagaaccccccccaccccc

SEQ ID NO: 117906 - RNA, 23 nt, Human
aaagaaccccccccacccccccg

SEQ ID NO: 117907 - RNA, 23 nt, Human
aaagaaccccccccacccccccg

SEQ ID NO: 117908 - RNA, 19 nt, Human
aacaaaaccccccuccccc

SEQ ID NO: 117909 - RNA, 21 nt, Human
aacaaaacggaaaaaaaagaa

SEQ ID NO: 117910 - RNA, 21 nt, Human
aacaauuucuacaucugcaag

SEQ ID NO: 117911 - RNA, 24 nt, Human
aacaucaauccacccuuccauggc

SEQ ID NO: 117912 - RNA, 21 nt, Human
aacaugaaagggaaaagguga

SEQ ID NO: 117913 - RNA, 22 nt, Human
aacaugaaagggaaaaggugaa

SEQ ID NO: 117914 - RNA, 22 nt, Human
aaccccccccacccccccgcca

SEQ ID NO: 117915 - RNA, 26 nt, Human
aagaaccccccccacccccccgccaa

SEQ ID NO: 117916 - RNA, 30 nt, Human
aagaauccaaacaaaaccccccuccccccc

SEQ ID NO: 117917 - RNA, 22 nt, Human
aauaaaaagaaccuagaugccu

SEQ ID NO: 117918 - RNA, 21 nt, Human
acaaaaagaauccaaacaaaa

SEQ ID NO: 117919 - RNA, 23 nt, Human
acaaaaagaauccaaacaaaacc

SEQ ID NO: 117920 - RNA, 24 nt, Human
acaaaaccccccuccccccaaaca

SEQ ID NO: 117921 - RNA, 25 nt, Human
acagaccaaaaaauauauauaaaua

SEQ ID NO: 117922 - RNA, 21 nt, Human
acaugcauaguccaaauacaa

SEQ ID NO: 117923 - RNA, 24 nt, Human
accccccuccccccaaacaaaaac

SEQ ID NO: 117924 - RNA, 19 nt, Human
agaaccccccccacccccc

SEQ ID NO: 117925 - RNA, 22 nt, Human
agauagaugugugugggugugu

SEQ ID NO: 117926 - RNA, 20 nt, Human
agcaaugacgacaaaaagaa

SEQ ID NO: 117927 - RNA, 25 nt, Human
agcaaugacgacaaaaagaauccaa

SEQ ID NO: 117928 - RNA, 21 nt, Human
agggagaggagcgagcgcggg

SEQ ID NO: 117929 - RNA, 27 nt, Human
auccaaacaaaaccccccuccccccaa

SEQ ID NO: 117930 - RNA, 24 nt, Human
augacgacaaaaagaauccaaaca

SEQ ID NO: 117931 - RNA, 23 nt, Human
caaaacggaaaaaaaagaacccc

SEQ ID NO: 117932 - RNA, 23 nt, Human
caaacaaaaacaaaacggaaaaa

SEQ ID NO: 117933 - RNA, 24 nt, Human
caaacaaaaacaaaacggaaaaaa

SEQ ID NO: 117934 - RNA, 27 nt, Human
caaacaaaaccccccuccccccaaaca

SEQ ID NO: 117935 - RNA, 22 nt, Human
caauuucuacaucugcaagaca

SEQ ID NO: 117936 - RNA, 20 nt, Human
caccagcaaugacgacaaaa

SEQ ID NO: 117937 - RNA, 27 nt, Human
cacccccccgccaaaaaaaaaccaaag

SEQ ID NO: 117938 - RNA, 22 nt, Human
caccugcucgcgaaaacagccc

SEQ ID NO: 117939 - RNA, 25 nt, Human
cacuauagaaaaaaaucuucccgaa

SEQ ID NO: 117940 - RNA, 19 nt, Human
caguacaaaagguccaaga

SEQ ID NO: 117941 - RNA, 26 nt, Human
caguuuuaucagagaaacaaagcaac

SEQ ID NO: 117942 - RNA, 24 nt, Human
ccaaacaaaaacaaaacggaaaaa

SEQ ID NO: 117943 - RNA, 19 nt, Human
ccaaacaaaaccccccucc

SEQ ID NO: 117944 - RNA, 25 nt, Human
ccacccccccgccaaaaaaaaacca

SEQ ID NO: 117945 - RNA, 21 nt, Human
ccagauauuuaaaucaacugg

SEQ ID NO: 117946 - RNA, 28 nt, Human
ccagcaaugacgacaaaaagaauccaaa

SEQ ID NO: 117947 - RNA, 21 nt, Human
cccacagaguucacuauagaa

SEQ ID NO: 117948 - RNA, 22 nt, Human
cccacagaguucacuauagaaa

SEQ ID NO: 117949 - RNA, 24 nt, Human
cccacccccccgccaaaaaaaaac

SEQ ID NO: 117950 - RNA, 26 nt, Human
ccccaaacaaaaacaaaacggaaaaa

SEQ ID NO: 117951 - RNA, 30 nt, Human
ccccacccccccgccaaaaaaaaaccaaaa

SEQ ID NO: 117952 - RNA, 22 nt, Human
cccccaaacaaaaacaaaacgg

SEQ ID NO: 117953 - RNA, 24 nt, Human
cccccacccccccgccaaaaaaaa

SEQ ID NO: 117954 - RNA, 19 nt, Human
ccccccaaacaaaaacaaa

SEQ ID NO: 117955 - RNA, 27 nt, Human
ccccccuccccccaaaccggguccuuc

SEQ ID NO: 117956 - RNA, 20 nt, Human
cccuccccccaaacaaaaac

SEQ ID NO: 117957 - RNA, 27 nt, Human
ccuuccauggcucggaagucgcaguuc

SEQ ID NO: 117958 - RNA, 26 nt, Human
cgagggagaggagcgagcgcgggcgg

SEQ ID NO: 117959 - RNA, 23 nt, Human
cgcucgaagccccggucgggucc

SEQ ID NO: 117960 - RNA, 22 nt, Human
cggaaaaaaaagaacccccccc

SEQ ID NO: 117961 - RNA, 24 nt, Human
cggaaaaaaaagaaccccccccac

SEQ ID NO: 117962 - RNA, 24 nt, Human
gaaaacagcauuuucauaacaaaa

SEQ ID NO: 117963 - RNA, 22 nt, Human
gaaccccccccacccccccgcc

SEQ ID NO: 117964 - RNA, 27 nt, Human
gaaccccccccacccccccgccaaaaa

SEQ ID NO: 117965 - RNA, 22 nt, Human
gagaggagcgagcgcgggcggu

SEQ ID NO: 117966 - RNA, 19 nt, Human
gcaaugacgacaaaaagaa

SEQ ID NO: 117967 - RNA, 24 nt, Human
gccaaaaaaaaaccaaagagagag

SEQ ID NO: 117968 - RNA, 20 nt, Human
gccgggccggcgagggcccg

SEQ ID NO: 117969 - RNA, 22 nt, Human
ggaaaaaaaagaacccccccca

SEQ ID NO: 117970 - RNA, 20 nt, Human
ggcggccgggccggcgaggg

SEQ ID NO: 117971 - RNA, 24 nt, Human
ggcugcgagggagaggagcgagcg

SEQ ID NO: 117972 - RNA, 18 nt, Human
gggggucgggggcccugc

SEQ ID NO: 117973 - RNA, 18 nt, Human
guggggcccgggaccggc

SEQ ID NO: 117974 - RNA, 25 nt, Human
uaaaaaccucaguaauuuauaucaa

SEQ ID NO: 117975 - RNA, 19 nt, Human
uaaauaaaaaccuuaaaca

SEQ ID NO: 117976 - RNA, 21 nt, Human
uaacaaaaaaccccgaacacu

SEQ ID NO: 117977 - RNA, 23 nt, Human
uacaaagaacagaccaaaaaaua

SEQ ID NO: 117978 - RNA, 25 nt, Human
uaggaauaaaaagaaccuagaugcc

SEQ ID NO: 117979 - RNA, 18 nt, Human
uaucagagaaacaaagca

SEQ ID NO: 117980 - RNA, 20 nt, Human
uaucagagaaacaaagcaac

SEQ ID NO: 117981 - RNA, 24 nt, Human
uaucagagaaacaaagcaacaauu

SEQ ID NO: 117982 - RNA, 19 nt, Human
ucagagaaacaaagcaaca

SEQ ID NO: 117983 - RNA, 19 nt, Human
uccaaacaaaaccccccuc

SEQ ID NO: 117984 - RNA, 18 nt, Human
uccaagaacaugaaaggg

SEQ ID NO: 117985 - RNA, 22 nt, Human
uccccccaaacaaaaacaaaac

SEQ ID NO: 117986 - RNA, 19 nt, Human
ugaaagggaaaaggugaug

SEQ ID NO: 117987 - RNA, 22 nt, Human
ugccuggauuuucaguacaaaa

SEQ ID NO: 117988 - RNA, 20 nt, Human
uggggcccgggaccggcggg

SEQ ID NO: 117989 - RNA, 20 nt, Human
uggguguguacgugugugca

SEQ ID NO: 117990 - RNA, 19 nt, Human
uguauagauagaugugugu

SEQ ID NO: 117991 - RNA, 22 nt, Human
uguauagauagauguguguggg

SEQ ID NO: 117992 - RNA, 24 nt, Human
uguggggcccgggaccggcggggc

SEQ ID NO: 117993 - RNA, 21 nt, Human
uguguggguguguacgugugu

SEQ ID NO: 117994 - RNA, 23 nt, Human
uguguggguguguacgugugugc

SEQ ID NO: 117995 - RNA, 24 nt, Human
uguguggguguguacgugugugca

SEQ ID NO: 117996 - RNA, 20 nt, Human
uuaaagaacagaauacaugu

SEQ ID NO: 117997 - RNA, 23 nt, Human
uuacaaagaacagaccaaaaaau

SEQ ID NO: 117998 - RNA, 23 nt, Human
uucauaacaaaaaaccccgaaca

SEQ ID NO: 117999 - RNA, 28 nt, Human
uucauaacaaaaaaccccgaacacuaag

SEQ ID NO: 118000 - RNA, 24 nt, Human
uuccauggcucggaagucgcaguu

SEQ ID NO: 118001 - RNA, 22 nt, Human
uugcauuauuucaggaaucagu

SEQ ID NO: 118002 - RNA, 20 nt, Human
uuguauuguuucuuuaaaca

SEQ ID NO: 118003 - RNA, 21 nt, Human
uuucauaacaaaaaaccccga

SEQ ID NO: 118004 - RNA, 23 nt, Human
uuuuuuuuuuuuuuuuuacaaag

SEQ ID NO: 118005 - RNA, 21 nt, Human
aaacuucccuugucccaccug

SEQ ID NO: 118006 - RNA, 19 nt, Human
aacagucccaccuggccac

SEQ ID NO: 118007 - RNA, 21 nt, Human
aacugaaccucacacaauccc

SEQ ID NO: 118008 - RNA, 21 nt, Human
aagaagccaggacuggggguu

SEQ ID NO: 118009 - RNA, 21 nt, Human
aauccccucaaacaaagaagc

SEQ ID NO: 118010 - RNA, 21 nt, Human
acaaaauaaaaaauaugcagc

SEQ ID NO: 118011 - RNA, 26 nt, Human
acacaauccccucaaacaaagaagcc

SEQ ID NO: 118012 - RNA, 26 nt, Human
acacacauaaaccugaacuccccccc

SEQ ID NO: 118013 - RNA, 20 nt, Human
acagucccaccuggccaccu

SEQ ID NO: 118014 - RNA, 21 nt, Human
accaauugccccaagccuggg

SEQ ID NO: 118015 - RNA, 23 nt, Human
accugaacucccccccaccccac

SEQ ID NO: 118016 - RNA, 19 nt, Human
aguaacuagcuccaaaaug

SEQ ID NO: 118017 - RNA, 23 nt, Human
auaauaauaaaaaagaaaugcac

SEQ ID NO: 118018 - RNA, 18 nt, Human
cacaauccccucaaacaa

SEQ ID NO: 118019 - RNA, 28 nt, Human
cacacacauaaaccugaacuccccccca

SEQ ID NO: 118020 - RNA, 22 nt, Human
cacacauaaaccugaacucccc

SEQ ID NO: 118021 - RNA, 18 nt, Human
cacccaccccacaacuga

SEQ ID NO: 118022 - RNA, 21 nt, Human
cacccaccccacaacugaacc

SEQ ID NO: 118023 - RNA, 18 nt, Human
caccccacccucccuuac

SEQ ID NO: 118024 - RNA, 23 nt, Human
caccccacccucccuuacuccca

SEQ ID NO: 118025 - RNA, 19 nt, Human
cacccucccuuacucccag

SEQ ID NO: 118026 - RNA, 20 nt, Human
cacugccauaacacuagaga

SEQ ID NO: 118027 - RNA, 18 nt, Human
caggaaugagaggagccc

SEQ ID NO: 118028 - RNA, 19 nt, Human
cauaacacuagagaaacaa

SEQ ID NO: 118029 - RNA, 20 nt, Human
ccaaaaugaaaaaacuuccc

SEQ ID NO: 118030 - RNA, 23 nt, Human
ccaccccacccucccuuacuccc

SEQ ID NO: 118031 - RNA, 24 nt, Human
ccaguaacuagcuccaaaaugaaa

SEQ ID NO: 118032 - RNA, 22 nt, Human
cccacaccugcucuuuccuuua

SEQ ID NO: 118033 - RNA, 18 nt, Human
cccaccccacaacugaac

SEQ ID NO: 118034 - RNA, 22 nt, Human
cccaccuccacugccauaacac

SEQ ID NO: 118035 - RNA, 25 nt, Human
ccccaccccacccucccuuacuccc

SEQ ID NO: 118036 - RNA, 18 nt, Human
ccccaccccccaaccagg

SEQ ID NO: 118037 - RNA, 23 nt, Human
ccccacccucccuuacucccagu

SEQ ID NO: 118038 - RNA, 25 nt, Human
cccccaccccacccucccuuacucc

SEQ ID NO: 118039 - RNA, 18 nt, Human
ccccccaaccaggagacg

SEQ ID NO: 118040 - RNA, 18 nt, Human
ccccccaccccacccucc

SEQ ID NO: 118041 - RNA, 23 nt, Human
ccccccaccccacccucccuuac

SEQ ID NO: 118042 - RNA, 26 nt, Human
ccccccaccccacccucccuuacucc

SEQ ID NO: 118043 - RNA, 23 nt, Human
cccccccaccccacccucccuua

SEQ ID NO: 118044 - RNA, 25 nt, Human
cccccccaccccacccucccuuacu

SEQ ID NO: 118045 - RNA, 23 nt, Human
cccccccaccccccaaccaggag

SEQ ID NO: 118046 - RNA, 21 nt, Human
ccugaacucccccccacccca

SEQ ID NO: 118047 - RNA, 22 nt, Human
ccuggccaccugguacccccuc

SEQ ID NO: 118048 - RNA, 18 nt, Human
cucccccccaccccaccc

SEQ ID NO: 118049 - RNA, 23 nt, Human
cugaaaagggaugagaagagagg

SEQ ID NO: 118050 - RNA, 18 nt, Human
gaacacccccaccucaaa

SEQ ID NO: 118051 - RNA, 22 nt, Human
gaagccaggacuggggguucac

SEQ ID NO: 118052 - RNA, 25 nt, Human
uaaaaaauaugcagcagcucaccac

SEQ ID NO: 118053 - RNA, 23 nt, Human
ucccaccuggccaccugguaccc

SEQ ID NO: 118054 - RNA, 21 nt, Human
ucccccccaccccacccuccc

SEQ ID NO: 118055 - RNA, 25 nt, Human
ucccccccaccccacccucccuuac

SEQ ID NO: 118056 - RNA, 25 nt, Human
uccccucaaacaaagaagccaggac

SEQ ID NO: 118057 - RNA, 24 nt, Human
ugaaaaaacuucccuugucccacc

SEQ ID NO: 118058 - RNA, 21 nt, Human
ugccauaacacuagagaaaca

SEQ ID NO: 118059 - RNA, 22 nt, Human
ugccauaacacuagagaaacaa

SEQ ID NO: 118060 - RNA, 26 nt, Human
ugccauaacacuagagaaaccggcgc

SEQ ID NO: 118061 - RNA, 24 nt, Human
ugcucuuuccuuuaccaauugccc

SEQ ID NO: 118062 - RNA, 18 nt, Human
uggccaccugguaccccc

SEQ ID NO: 118063 - RNA, 27 nt, Human
aaaauuauacauccucuacugcucuuc

SEQ ID NO: 118064 - RNA, 20 nt, Human
aaacagaaugcuacauagug

SEQ ID NO: 118065 - RNA, 19 nt, Human
aaagaacuacccugcccuu

SEQ ID NO: 118066 - RNA, 21 nt, Human
aacuauauccuaaaacuugac

SEQ ID NO: 118067 - RNA, 18 nt, Human
aagaacuacccugcccuu

SEQ ID NO: 118068 - RNA, 20 nt, Human
aagaaggggauaugguucug

SEQ ID NO: 118069 - RNA, 21 nt, Human
aagaaggggauaugguucugg

SEQ ID NO: 118070 - RNA, 18 nt, Human
aagcaucacaacauguua

SEQ ID NO: 118071 - RNA, 20 nt, Human
aaguaccuuguaaucuuaaa

SEQ ID NO: 118072 - RNA, 19 nt, Human
aaucucagcagcuaauuuc

SEQ ID NO: 118073 - RNA, 22 nt, Human
aaugcuacauagugaugcugag

SEQ ID NO: 118074 - RNA, 20 nt, Human
acaaagcaacauaaaguaag

SEQ ID NO: 118075 - RNA, 24 nt, Human
acaacuccaguuccaaugcuuccc

SEQ ID NO: 118076 - RNA, 21 nt, Human
acagcagguugauacuaaaau

SEQ ID NO: 118077 - RNA, 20 nt, Human
acagucaguagaucuaccag

SEQ ID NO: 118078 - RNA, 24 nt, Human
acucccucccggagcccucccccg

SEQ ID NO: 118079 - RNA, 25 nt, Human
acucuguaauuuagaauuacaacca

SEQ ID NO: 118080 - RNA, 19 nt, Human
agaaagcaaggagagcagc

SEQ ID NO: 118081 - RNA, 22 nt, Human
agacaggccggccuggccaggc

SEQ ID NO: 118082 - RNA, 20 nt, Human
agacccagcaaacugggcua

SEQ ID NO: 118083 - RNA, 23 nt, Human
agcaaggagagcagcaccuucuc

SEQ ID NO: 118084 - RNA, 22 nt, Human
agccagcacaauagccgaggca

SEQ ID NO: 118085 - RNA, 22 nt, Human
agccaggcccacuagcugcggu

SEQ ID NO: 118086 - RNA, 21 nt, Human
agcugcaaggggaaauggaaa

SEQ ID NO: 118087 - RNA, 20 nt, Human
agcugucuugaggguuuucc

SEQ ID NO: 118088 - RNA, 24 nt, Human
aggaagaaggggauaugguucugg

SEQ ID NO: 118089 - RNA, 24 nt, Human
aggcagaaacucaaucucagcagc

SEQ ID NO: 118090 - RNA, 19 nt, Human
agggaaaguaccuuguaau

SEQ ID NO: 118091 - RNA, 22 nt, Human
aguuugcaaccaaguacaagag

SEQ ID NO: 118092 - RNA, 23 nt, Human
aguuugcaaccaaguacaagagg

SEQ ID NO: 118093 - RNA, 18 nt, Human
auacuagcgggaggggag

SEQ ID NO: 118094 - RNA, 21 nt, Human
augcuacauagugaugcugag

SEQ ID NO: 118095 - RNA, 25 nt, Human
caaagaugcuaaaacagaaugcuac

SEQ ID NO: 118096 - RNA, 19 nt, Human
caaaguguccagccagcac

SEQ ID NO: 118097 - RNA, 22 nt, Human
caaggagagcagcaccuucucc

SEQ ID NO: 118098 - RNA, 22 nt, Human
caagguaaguccaguuuaaacc

SEQ ID NO: 118099 - RNA, 18 nt, Human
caauaccaacccagacag

SEQ ID NO: 118100 - RNA, 26 nt, Human
cacacacagacauacaauuacaugaa

SEQ ID NO: 118101 - RNA, 21 nt, Human
cagauggcaaaaacauaccaa

SEQ ID NO: 118102 - RNA, 23 nt, Human
caguguguuucuggcucagagcc

SEQ ID NO: 118103 - RNA, 25 nt, Human
caguugcucuaauauacagcagguu

SEQ ID NO: 118104 - RNA, 21 nt, Human
cauaaaacacacacagacaua

SEQ ID NO: 118105 - RNA, 18 nt, Human
cauacauauauagacaua

SEQ ID NO: 118106 - RNA, 21 nt, Human
cauccaucuuccaugggaauc

SEQ ID NO: 118107 - RNA, 21 nt, Human
ccaaauaaauagguuuaggaa

SEQ ID NO: 118108 - RNA, 20 nt, Human
ccauccaucuuccaugggaa

SEQ ID NO: 118109 - RNA, 19 nt, Human
ccccaaacgccucccuucg

SEQ ID NO: 118110 - RNA, 21 nt, Human
ccccaaacgccucccuucgcc

SEQ ID NO: 118111 - RNA, 23 nt, Human
ccccaaacgccucccuucgccgc

SEQ ID NO: 118112 - RNA, 23 nt, Human
cccuucgccgccgccgccuccuc

SEQ ID NO: 118113 - RNA, 19 nt, Human
ccgccgccgccuccuccuc

SEQ ID NO: 118114 - RNA, 19 nt, Human
ccggccuggcccggccccc

SEQ ID NO: 118115 - RNA, 23 nt, Human
ccuccacaguggaggcauaucca

SEQ ID NO: 118116 - RNA, 19 nt, Human
ccucccccuccaugacagu

SEQ ID NO: 118117 - RNA, 22 nt, Human
ccucccggagcccucccccggc

SEQ ID NO: 118118 - RNA, 19 nt, Human
ccugugaaaguuauccucc

SEQ ID NO: 118119 - RNA, 21 nt, Human
cgaggaagaaggggauauggu

SEQ ID NO: 118120 - RNA, 27 nt, Human
cgccgccgccuccuccucccccuccaa

SEQ ID NO: 118121 - RNA, 22 nt, Human
cuacugcucuucccugcuccug

SEQ ID NO: 118122 - RNA, 19 nt, Human
cucagagccugucaggaaa

SEQ ID NO: 118123 - RNA, 19 nt, Human
cuccaaaacaccaaauaaa

SEQ ID NO: 118124 - RNA, 21 nt, Human
cucccccggcucagccggccu

SEQ ID NO: 118125 - RNA, 21 nt, Human
cugaaggccugaauaucaaca

SEQ ID NO: 118126 - RNA, 18 nt, Human
cuguccuccccacauaca

SEQ ID NO: 118127 - RNA, 19 nt, Human
cuguguuuucaagcaucac

SEQ ID NO: 118128 - RNA, 22 nt, Human
cuuccaaaacauagagacccag

SEQ ID NO: 118129 - RNA, 20 nt, Human
gaacauucacuccuguccuc

SEQ ID NO: 118130 - RNA, 22 nt, Human
gaauggcagagcggacccugga

SEQ ID NO: 118131 - RNA, 22 nt, Human
gaccagauggcaaaaacauacc

SEQ ID NO: 118132 - RNA, 22 nt, Human
gagaauaaacauuacucaagua

SEQ ID NO: 118133 - RNA, 22 nt, Human
gaggcggccccaaacgccuccc

SEQ ID NO: 118134 - RNA, 19 nt, Human
gccgccgccgccuccuccu

SEQ ID NO: 118135 - RNA, 24 nt, Human
gccgccgccgccuccuccuccccc

SEQ ID NO: 118136 - RNA, 19 nt, Human
gccuccuccucccccucca

SEQ ID NO: 118137 - RNA, 20 nt, Human
gcggacccuggaggcggccc

SEQ ID NO: 118138 - RNA, 20 nt, Human
gcugagaaauacugucaauu

SEQ ID NO: 118139 - RNA, 19 nt, Human
gcugccuccuccucucgcc

SEQ ID NO: 118140 - RNA, 24 nt, Human
ggcaaaaacauaccaauuacaauc

SEQ ID NO: 118141 - RNA, 20 nt, Human
gggucugucuggguguauca

SEQ ID NO: 118142 - RNA, 21 nt, Human
gguucuggcugccuccuccuc

SEQ ID NO: 118143 - RNA, 23 nt, Human
guagggcaaucaaaaacaugaaa

SEQ ID NO: 118144 - RNA, 24 nt, Human
guagguaguaaauggagccaagaa

SEQ ID NO: 118145 - RNA, 21 nt, Human
gugaccaaaguguccagccag

SEQ ID NO: 118146 - RNA, 19 nt, Human
gugguccaucauauauucu

SEQ ID NO: 118147 - RNA, 18 nt, Human
uaaacccccaacuuccaa

SEQ ID NO: 118148 - RNA, 20 nt, Human
uaaagcaauguggaguuaag

SEQ ID NO: 118149 - RNA, 18 nt, Human
uaacucaaggugacucag

SEQ ID NO: 118150 - RNA, 27 nt, Human
uaccaauuacccugugaaaguuauccu

SEQ ID NO: 118151 - RNA, 25 nt, Human
uacgcaagaaaagugugugaacauu

SEQ ID NO: 118152 - RNA, 21 nt, Human
uacugcucuucccugcuccug

SEQ ID NO: 118153 - RNA, 21 nt, Human
uagagacccagcaaacugggc

SEQ ID NO: 118154 - RNA, 18 nt, Human
uagccaaaucaaaugauc

SEQ ID NO: 118155 - RNA, 21 nt, Human
uauaacauuuauguuuuuaga

SEQ ID NO: 118156 - RNA, 22 nt, Human
uauaacauuuauguuuuuagau

SEQ ID NO: 118157 - RNA, 25 nt, Human
uauaauagaaagauuuuagauaaaa

SEQ ID NO: 118158 - RNA, 23 nt, Human
uauccuaaaacuugaccugguca

SEQ ID NO: 118159 - RNA, 19 nt, Human
uauuauauucaguugcucu

SEQ ID NO: 118160 - RNA, 20 nt, Human
uauuuucccccuuuucuuuc

SEQ ID NO: 118161 - RNA, 18 nt, Human
ucaaaagauuucuggguc

SEQ ID NO: 118162 - RNA, 23 nt, Human
ucacaggagaaaucaugguucau

SEQ ID NO: 118163 - RNA, 23 nt, Human
ucacuggaaagggaaggaaaugc

SEQ ID NO: 118164 - RNA, 19 nt, Human
ucagaaagcaaggagagca

SEQ ID NO: 118165 - RNA, 23 nt, Human
ucagcucauuugguuucucuuuu

SEQ ID NO: 118166 - RNA, 18 nt, Human
ucagggagaaaguaagug

SEQ ID NO: 118167 - RNA, 31 nt, Human
ucauauauucuaccucaaagacaaucuagaa

SEQ ID NO: 118168 - RNA, 25 nt, Human
uccacaguggaggcauauccagggc

SEQ ID NO: 118169 - RNA, 19 nt, Human
ucccggagcccucccccgg

SEQ ID NO: 118170 - RNA, 23 nt, Human
ucccggagcccucccccggcuca

SEQ ID NO: 118171 - RNA, 23 nt, Human
ucccuucgccgccgccgccuccu

SEQ ID NO: 118172 - RNA, 24 nt, Human
ucccuucgccgccgccgccuccuc

SEQ ID NO: 118173 - RNA, 20 nt, Human
uccuccucucgccuaacagu

SEQ ID NO: 118174 - RNA, 24 nt, Human
uccuccucucgccuaacaguucgc

SEQ ID NO: 118175 - RNA, 22 nt, Human
uccuguccuccccacauacaua

SEQ ID NO: 118176 - RNA, 21 nt, Human
ucucuacuccuguguuuucaa

SEQ ID NO: 118177 - RNA, 20 nt, Human
ucuugcccauccaucuucca

SEQ ID NO: 118178 - RNA, 22 nt, Human
ugaccaaaguguccagccagca

SEQ ID NO: 118179 - RNA, 21 nt, Human
ugaccuggucaaacuuauucc

SEQ ID NO: 118180 - RNA, 24 nt, Human
ugcaaaauaaaaauauacaauuga

SEQ ID NO: 118181 - RNA, 21 nt, Human
ugcaaggggaaauggaaagaa

SEQ ID NO: 118182 - RNA, 23 nt, Human
ugggaaucagaauauuggcuuca

SEQ ID NO: 118183 - RNA, 21 nt, Human
uguuaauacauauucacagcu

SEQ ID NO: 118184 - RNA, 22 nt, Human
uguuuuuagauuuucuuugccu

SEQ ID NO: 118185 - RNA, 22 nt, Human
uucauccaauuuucuucagaaa

SEQ ID NO: 118186 - RNA, 20 nt, Human
uugaggguuuuccugauaga

SEQ ID NO: 118187 - RNA, 18 nt, Human
uugaugaauuauucugca

SEQ ID NO: 118188 - RNA, 21 nt, Human
uuuauguuuaugauccuaaaa

SEQ ID NO: 118189 - RNA, 18 nt, Human
uuucugggucugucuggg

SEQ ID NO: 118190 - RNA, 19 nt, Human
uuugucccuuuuuuuguuu

SEQ ID NO: 118191 - RNA, 20 nt, Human
uuuguuucagauuuuaaggc

SEQ ID NO: 118192 - RNA, 21 nt, Human
uuuucccccuuuucuuucuuu

SEQ ID NO: 118193 - RNA, 24 nt, Human
uuuuguuucagauuuuaaggcaga

SEQ ID NO: 118194 - RNA, 20 nt, Human
aaagcagaagcaaagggcaa

SEQ ID NO: 118195 - RNA, 21 nt, Human
aagcagaagcaaagggcaaac

SEQ ID NO: 118196 - RNA, 20 nt, Human
aggcauuuuacauauucuuu

SEQ ID NO: 118197 - RNA, 19 nt, Human
auggcaauaaguaggacug

SEQ ID NO: 118198 - RNA, 21 nt, Human
auucuuuggcagcuucccuga

SEQ ID NO: 118199 - RNA, 19 nt, Human
caaaugucuuucaagguuu

SEQ ID NO: 118200 - RNA, 20 nt, Human
cagcuucccugaaaaaaagc

SEQ ID NO: 118201 - RNA, 19 nt, Human
cauuccacauccuggaaca

SEQ ID NO: 118202 - RNA, 20 nt, Human
cugaaaaaaagcagaagcaa

SEQ ID NO: 118203 - RNA, 23 nt, Human
cuucccacaaguccacauggcaa

SEQ ID NO: 118204 - RNA, 18 nt, Human
guaaacaagguccaaguc

SEQ ID NO: 118205 - RNA, 21 nt, Human
ucacgcugcauuccacauccu

SEQ ID NO: 118206 - RNA, 22 nt, Human
uccacauggcaauaaguaggac

SEQ ID NO: 118207 - RNA, 18 nt, Human
ucccugaaaaaaagcaga

SEQ ID NO: 118208 - RNA, 21 nt, Human
ucccugaaaaaaagcagaagc

SEQ ID NO: 118209 - RNA, 24 nt, Human
ucccugaaaaaaagcagaagcaaa

SEQ ID NO: 118210 - RNA, 20 nt, Human
ugaaaaaaagcagaagcaaa

SEQ ID NO: 118211 - RNA, 22 nt, Human
ugauuagaguaaacaaggucca

SEQ ID NO: 118212 - RNA, 20 nt, Human
ugcaacucggcucuccaggc

SEQ ID NO: 118213 - RNA, 21 nt, Human
ugcugcaucuccugccuugau

SEQ ID NO: 118214 - RNA, 22 nt, Human
uggacuuccagcacugcaacuc

SEQ ID NO: 118215 - RNA, 27 nt, Human
uggacuuccagcacugcaacucggcuc

SEQ ID NO: 118216 - RNA, 23 nt, Human
uguccuucccacaaguccacaug

SEQ ID NO: 118217 - RNA, 23 nt, Human
uuuuuugcaugcuauugacaaac

SEQ ID NO: 118218 - RNA, 20 nt, Human
aaacaaauggcauaagagca

SEQ ID NO: 118219 - RNA, 22 nt, Human
acuauaaacaccuggaaacgga

SEQ ID NO: 118220 - RNA, 18 nt, Human
acuuggucucugaguuuc

SEQ ID NO: 118221 - RNA, 18 nt, Human
caaacugaccaaggacug

SEQ ID NO: 118222 - RNA, 20 nt, Human
caccacuauaaacaccugga

SEQ ID NO: 118223 - RNA, 23 nt, Human
cacgugaauacacuuugugcaug

SEQ ID NO: 118224 - RNA, 19 nt, Human
cacucucuuuuucuuucuc

SEQ ID NO: 118225 - RNA, 19 nt, Human
ccacucucuuuuucuuucu

SEQ ID NO: 118226 - RNA, 18 nt, Human
cccucucucccucuaugu

SEQ ID NO: 118227 - RNA, 18 nt, Human
cucagaccacaacaaaaa

SEQ ID NO: 118228 - RNA, 27 nt, Human
cucucuuuuucuuucucuccucucuuu

SEQ ID NO: 118229 - RNA, 18 nt, Human
cucuuuuucuuucucucc

SEQ ID NO: 118230 - RNA, 19 nt, Human
cugcugcacgugaauacca

SEQ ID NO: 118231 - RNA, 19 nt, Human
gcacucgcuucccaggcgc

SEQ ID NO: 118232 - RNA, 23 nt, Human
gccgggugcugccgccucucugc

SEQ ID NO: 118233 - RNA, 22 nt, Human
uaaaacaccacuauaaacaccu

SEQ ID NO: 118234 - RNA, 24 nt, Human
uaaacaccuggaaacggaaacuaa

SEQ ID NO: 118235 - RNA, 20 nt, Human
uaaguaagggguauaggcuc

SEQ ID NO: 118236 - RNA, 20 nt, Human
uauaaacaccuggaaacgga

SEQ ID NO: 118237 - RNA, 18 nt, Human
ucacaggucuacauucuc

SEQ ID NO: 118238 - RNA, 19 nt, Human
ucagaccacaacaaaaaca

SEQ ID NO: 118239 - RNA, 24 nt, Human
ucccaggcgcuucgcaggugagcc

SEQ ID NO: 118240 - RNA, 24 nt, Human
ucucacaggucuacauucucuuua

SEQ ID NO: 118241 - RNA, 24 nt, Human
ucucccucucucccucuauguuuc

SEQ ID NO: 118242 - RNA, 19 nt, Human
ucucuuuuucuuucucucc

SEQ ID NO: 118243 - RNA, 18 nt, Human
ucuuacccacccaagagg

SEQ ID NO: 118244 - RNA, 20 nt, Human
ugaauacacuuugugcaugc

SEQ ID NO: 118245 - RNA, 22 nt, Human
ugaccaaggacuggaaagaugu

SEQ ID NO: 118246 - RNA, 23 nt, Human
ugaccaaggacuggaaagauguu

SEQ ID NO: 118247 - RNA, 18 nt, Human
ugagccgggugcugccgc

SEQ ID NO: 118248 - RNA, 20 nt, Human
ugcagauucuuuuuggccaa

SEQ ID NO: 118249 - RNA, 21 nt, Human
uggcucagaccacaacaaaaa

SEQ ID NO: 118250 - RNA, 18 nt, Human
ugguacagaauacuguau

SEQ ID NO: 118251 - RNA, 22 nt, Human
uuaaaacaccacuauaaacacc

SEQ ID NO: 118252 - RNA, 22 nt, Human
uuacacaaccaaacugaccaag

SEQ ID NO: 118253 - RNA, 19 nt, Human
uuucaaagagcuuacagau

SEQ ID NO: 118254 - RNA, 19 nt, Human
uuucucuccucucuuuccc

SEQ ID NO: 118255 - RNA, 18 nt, Human
caaaaucauacacaaugg

SEQ ID NO: 118256 - RNA, 28 nt, Human
cacccucgcgcagacugagagcuagaag

SEQ ID NO: 118257 - RNA, 22 nt, Human
ccggagguccugggcuuuccuu

SEQ ID NO: 118258 - RNA, 18 nt, Human
ccucgcgcagacugagag

SEQ ID NO: 118259 - RNA, 23 nt, Human
cgcgcagacugagagcuagaagc

SEQ ID NO: 118260 - RNA, 19 nt, Human
cggagguccugggcuuucc

SEQ ID NO: 118261 - RNA, 22 nt, Human
cucugcagcugcugugcucugc

SEQ ID NO: 118262 - RNA, 23 nt, Human
cucugcuccggagguccugggcu

SEQ ID NO: 118263 - RNA, 18 nt, Human
cugugcucugcuccggag

SEQ ID NO: 118264 - RNA, 24 nt, Human
gcucugcuccggagguccugggcu

SEQ ID NO: 118265 - RNA, 23 nt, Human
gugugugugugugcgcgcgugcg

SEQ ID NO: 118266 - RNA, 21 nt, Human
uaaaagaagcaaaguacaaaa

SEQ ID NO: 118267 - RNA, 24 nt, Human
uaaugcguguguguaugugugugu

SEQ ID NO: 118268 - RNA, 27 nt, Human
uacaaacauaaaagaagcaaaguacaa

SEQ ID NO: 118269 - RNA, 21 nt, Human
ugaaaggcuuuuaacuaguug

SEQ ID NO: 118270 - RNA, 26 nt, Human
ugcguguguguaugugugugugugug

SEQ ID NO: 118271 - RNA, 18 nt, Human
ugcugugcucugcuccgg

SEQ ID NO: 118272 - RNA, 20 nt, Human
uggccuugccucugcagcug

SEQ ID NO: 118273 - RNA, 20 nt, Human
uguguaugugugugugugug

SEQ ID NO: 118274 - RNA, 21 nt, Human
uguguaugugugugugugugu

SEQ ID NO: 118275 - RNA, 19 nt, Human
uguguguaugugugugugu

SEQ ID NO: 118276 - RNA, 21 nt, Human
ugugugugugugcgcgcgugc

SEQ ID NO: 118277 - RNA, 21 nt, Human
ugugugugugugugugcgcgc

SEQ ID NO: 118278 - RNA, 22 nt, Human
ugugugugugugugugcgcgcg

SEQ ID NO: 118279 - RNA, 21 nt, Human
aagccagaggcccugggcccg

SEQ ID NO: 118280 - RNA, 18 nt, Human
agaggaaaaggagcagga

SEQ ID NO: 118281 - RNA, 19 nt, Human
agaggaaaaggagcaggag

SEQ ID NO: 118282 - RNA, 21 nt, Human
agcaggaggugacugguaugg

SEQ ID NO: 118283 - RNA, 18 nt, Human
aggcaggguggucaggga

SEQ ID NO: 118284 - RNA, 22 nt, Human
agugccccccaaagcccugccc

SEQ ID NO: 118285 - RNA, 25 nt, Human
auucauucccaugucccuucuccag

SEQ ID NO: 118286 - RNA, 20 nt, Human
caaagcccugcccuggcugu

SEQ ID NO: 118287 - RNA, 20 nt, Human
caagagccacuugggcaggg

SEQ ID NO: 118288 - RNA, 22 nt, Human
caagcucugccccagaggcugg

SEQ ID NO: 118289 - RNA, 20 nt, Human
cacaggccacucugcccccu

SEQ ID NO: 118290 - RNA, 20 nt, Human
cacucugcccccuccagccc

SEQ ID NO: 118291 - RNA, 27 nt, Human
cacucugcccccuccagcccccaucuu

SEQ ID NO: 118292 - RNA, 18 nt, Human
cagcaaauggccuccccu

SEQ ID NO: 118293 - RNA, 21 nt, Human
cagccgacacccucaucuucu

SEQ ID NO: 118294 - RNA, 23 nt, Human
caggaggugacugguauggggug

SEQ ID NO: 118295 - RNA, 19 nt, Human
caggggucuucuccuggcu

SEQ ID NO: 118296 - RNA, 19 nt, Human
caguaagguucuggaggcc

SEQ ID NO: 118297 - RNA, 19 nt, Human
cagugccagcugcuccugg

SEQ ID NO: 118298 - RNA, 27 nt, Human
cagugggcuggccuucuucccccuggg

SEQ ID NO: 118299 - RNA, 18 nt, Human
ccacagugccaguaaggu

SEQ ID NO: 118300 - RNA, 18 nt, Human
ccacccgccucacagccg

SEQ ID NO: 118301 - RNA, 23 nt, Human
ccacucugcccccuccagccccc

SEQ ID NO: 118302 - RNA, 19 nt, Human
ccagagggaccggcgggcg

SEQ ID NO: 118303 - RNA, 23 nt, Human
ccagccacagcucuuugggggcu

SEQ ID NO: 118304 - RNA, 19 nt, Human
cccaugucccuucuccagg

SEQ ID NO: 118305 - RNA, 25 nt, Human
ccccagaggcugggacugggacacc

SEQ ID NO: 118306 - RNA, 21 nt, Human
ccccauuucaauucauuccca

SEQ ID NO: 118307 - RNA, 24 nt, Human
cccccaaagcccugcccuggcugu

SEQ ID NO: 118308 - RNA, 22 nt, Human
ccccuccagcccccaucuucuc

SEQ ID NO: 118309 - RNA, 20 nt, Human
cccugggcccggcccagucc

SEQ ID NO: 118310 - RNA, 23 nt, Human
ccucaucuucuagugccccccaa

SEQ ID NO: 118311 - RNA, 27 nt, Human
ccuccacaggcaggguggucagggagc

SEQ ID NO: 118312 - RNA, 19 nt, Human
cuagugccccccaaagccc

SEQ ID NO: 118313 - RNA, 21 nt, Human
cucugcccccuccagccccca

SEQ ID NO: 118314 - RNA, 22 nt, Human
cugcgggcucgggcggcacggg

SEQ ID NO: 118315 - RNA, 18 nt, Human
cuggaggccugggggggu

SEQ ID NO: 118316 - RNA, 22 nt, Human
cuucuagugccccccaaagccc

SEQ ID NO: 118317 - RNA, 24 nt, Human
cuugcuuagcuagugguccugccc

SEQ ID NO: 118318 - RNA, 19 nt, Human
gagucagaggcugucacga

SEQ ID NO: 118319 - RNA, 19 nt, Human
gcacggggugggcggccgg

SEQ ID NO: 118320 - RNA, 22 nt, Human
gcccugggcccggcccaguccu

SEQ ID NO: 118321 - RNA, 24 nt, Human
gcccuugguucccaguggugucgg

SEQ ID NO: 118322 - RNA, 23 nt, Human
gccgagggcagccccagggccca

SEQ ID NO: 118323 - RNA, 24 nt, Human
gcucugggagaagacagccuugga

SEQ ID NO: 118324 - RNA, 19 nt, Human
ggaccggcgggcggcugcg

SEQ ID NO: 118325 - RNA, 23 nt, Human
ggccacucugcccccuccagccc

SEQ ID NO: 118326 - RNA, 20 nt, Human
ggcccaguccuguaggugac

SEQ ID NO: 118327 - RNA, 22 nt, Human
gggaagucuggccgccguuucc

SEQ ID NO: 118328 - RNA, 20 nt, Human
gggagugggcaugagaccua

SEQ ID NO: 118329 - RNA, 19 nt, Human
gggcagcaaauggccuccc

SEQ ID NO: 118330 - RNA, 19 nt, Human
gggcaggucagugggggcu

SEQ ID NO: 118331 - RNA, 20 nt, Human
gggcauugcugguggcagug

SEQ ID NO: 118332 - RNA, 22 nt, Human
gggcggcacggggugggcggcc

SEQ ID NO: 118333 - RNA, 21 nt, Human
gggcggcugcgggcucgggcg

SEQ ID NO: 118334 - RNA, 19 nt, Human
gggugggcggccgggcucc

SEQ ID NO: 118335 - RNA, 22 nt, Human
gucauccccccagccacagcuc

SEQ ID NO: 118336 - RNA, 19 nt, Human
gugagggcccuugguuccc

SEQ ID NO: 118337 - RNA, 19 nt, Human
gugaggggaagcuggccug

SEQ ID NO: 118338 - RNA, 24 nt, Human
gugguccugccccagaggccaucc

SEQ ID NO: 118339 - RNA, 18 nt, Human
guggugagucagaggcug

SEQ ID NO: 118340 - RNA, 22 nt, Human
uaacaggucaccuccacaggcc

SEQ ID NO: 118341 - RNA, 19 nt, Human
ucaauucauucccaugucc

SEQ ID NO: 118342 - RNA, 19 nt, Human
ucagugggggcugcggccg

SEQ ID NO: 118343 - RNA, 26 nt, Human
ucauccccccagccacagcucuuugg

SEQ ID NO: 118344 - RNA, 26 nt, Human
uccugcacggcugcagggggagagcg

SEQ ID NO: 118345 - RNA, 20 nt, Human
ucggcgcuucccggccccgc

SEQ ID NO: 118346 - RNA, 18 nt, Human
ucuagugccccccaaagc

SEQ ID NO: 118347 - RNA, 22 nt, Human
ucuagugcuguggccgcaaguc

SEQ ID NO: 118348 - RNA, 28 nt, Human
ugaaggcagcaaggcagggcauugcugg

SEQ ID NO: 118349 - RNA, 24 nt, Human
ugaggggaagcuggccuggccugc

SEQ ID NO: 118350 - RNA, 18 nt, Human
ugcagggggagagcggcc

SEQ ID NO: 118351 - RNA, 23 nt, Human
ugcccggguccuacggacauccc

SEQ ID NO: 118352 - RNA, 19 nt, Human
ugccgagggcagccccagg

SEQ ID NO: 118353 - RNA, 20 nt, Human
ugccuggugaggagaugccc

SEQ ID NO: 118354 - RNA, 21 nt, Human
ugcucugggagaagacagccu

SEQ ID NO: 118355 - RNA, 19 nt, Human
uggcuugcuuagcuagugg

SEQ ID NO: 118356 - RNA, 21 nt, Human
ugggacugggacaccccuggc

SEQ ID NO: 118357 - RNA, 23 nt, Human
ugggcaggucagugggggcugcg

SEQ ID NO: 118358 - RNA, 19 nt, Human
ugggggcugcuccaugacc

SEQ ID NO: 118359 - RNA, 18 nt, Human
uggucagggagccuggcc

SEQ ID NO: 118360 - RNA, 23 nt, Human
ugucccaagagccacuugggcag

SEQ ID NO: 118361 - RNA, 21 nt, Human
uucccaugucccuucuccagg

SEQ ID NO: 118362 - RNA, 22 nt, Human
uugcugguggcagugccacagu

SEQ ID NO: 118363 - RNA, 20 nt, Human
acaggaacagggugggguac

SEQ ID NO: 118364 - RNA, 25 nt, Human
acaggaacagggugggguacaagug

SEQ ID NO: 118365 - RNA, 18 nt, Human
acccccucuuuccugcca

SEQ ID NO: 118366 - RNA, 28 nt, Human
acucaucccugucccuugcagucccccu

SEQ ID NO: 118367 - RNA, 19 nt, Human
agaggaagaagguggagga

SEQ ID NO: 118368 - RNA, 19 nt, Human
agaggaagccaggccugga

SEQ ID NO: 118369 - RNA, 20 nt, Human
agcacagagaacccagagga

SEQ ID NO: 118370 - RNA, 21 nt, Human
agcacagagaacccagaggaa

SEQ ID NO: 118371 - RNA, 18 nt, Human
agccaggccuggaagccu

SEQ ID NO: 118372 - RNA, 22 nt, Human
agcuggucucucccgugacaca

SEQ ID NO: 118373 - RNA, 19 nt, Human
aggaagaagguggaggagg

SEQ ID NO: 118374 - RNA, 21 nt, Human
aggaagaagguggaggaggac

SEQ ID NO: 118375 - RNA, 25 nt, Human
aggaagaagguggaggaggacaggg

SEQ ID NO: 118376 - RNA, 18 nt, Human
aggcggggaggauggcuc

SEQ ID NO: 118377 - RNA, 21 nt, Human
aggcggggaggauggcugggg

SEQ ID NO: 118378 - RNA, 20 nt, Human
aggcugggaugggcaaaugc

SEQ ID NO: 118379 - RNA, 21 nt, Human
aucccacgccucccuccucca

SEQ ID NO: 118380 - RNA, 21 nt, Human
aucccugucccuugcaguccc

SEQ ID NO: 118381 - RNA, 19 nt, Human
augggcaaaugccugcaga

SEQ ID NO: 118382 - RNA, 18 nt, Human
auucccaucccacgccuc

SEQ ID NO: 118383 - RNA, 21 nt, Human
caaggcggggaggauggcugg

SEQ ID NO: 118384 - RNA, 24 nt, Human
cacgccucccuccuccaugccucu

SEQ ID NO: 118385 - RNA, 24 nt, Human
ccaaggcggggaggauggcugggg

SEQ ID NO: 118386 - RNA, 22 nt, Human
ccacgagagccugcccagcaca

SEQ ID NO: 118387 - RNA, 21 nt, Human
ccagaggaagaagguggagga

SEQ ID NO: 118388 - RNA, 22 nt, Human
ccagcacagagaacccagagga

SEQ ID NO: 118389 - RNA, 27 nt, Human
cccacgagagccugcccagcacagaga

SEQ ID NO: 118390 - RNA, 21 nt, Human
ccccaaggcggggaggauggc

SEQ ID NO: 118391 - RNA, 24 nt, Human
ccgcacccccucuuuccugccagg

SEQ ID NO: 118392 - RNA, 19 nt, Human
ccucccaucuccugcccca

SEQ ID NO: 118393 - RNA, 24 nt, Human
ccucugcuuccucuugcgcugagc

SEQ ID NO: 118394 - RNA, 26 nt, Human
cgccucccuccuccaugccucugcuc

SEQ ID NO: 118395 - RNA, 19 nt, Human
cuccaugccucugcuccuc

SEQ ID NO: 118396 - RNA, 19 nt, Human
cucccaucuccugccccac

SEQ ID NO: 118397 - RNA, 20 nt, Human
cuccuccaugccucugcucc

SEQ ID NO: 118398 - RNA, 24 nt, Human
cucuccccucccaucuccugcccc

SEQ ID NO: 118399 - RNA, 27 nt, Human
cucugcucugggcccaguaaggccccu

SEQ ID NO: 118400 - RNA, 23 nt, Human
cugcuuccucuugcgcugagccu

SEQ ID NO: 118401 - RNA, 18 nt, Human
cugggcccaguaaggccc

SEQ ID NO: 118402 - RNA, 24 nt, Human
cuucauggagcccccaaggcgggg

SEQ ID NO: 118403 - RNA, 24 nt, Human
cuugcgcugagccugguggccccc

SEQ ID NO: 118404 - RNA, 20 nt, Human
gaacccagaggaagaaggug

SEQ ID NO: 118405 - RNA, 18 nt, Human
gaagguggaggaggacag

SEQ ID NO: 118406 - RNA, 18 nt, Human
gacuggagggcaaagggc

SEQ ID NO: 118407 - RNA, 18 nt, Human
gagcugugcaggugggcc

SEQ ID NO: 118408 - RNA, 25 nt, Human
gaggaggacaggggagcugugcagg

SEQ ID NO: 118409 - RNA, 19 nt, Human
gcaaaugccugcagacauc

SEQ ID NO: 118410 - RNA, 22 nt, Human
gcugccgcacccccucuuuccu

SEQ ID NO: 118411 - RNA, 20 nt, Human
ggaggacaggggagcugugc

SEQ ID NO: 118412 - RNA, 22 nt, Human
ggcugcuggcuccaugaguagg

SEQ ID NO: 118413 - RNA, 22 nt, Human
ggggagacuggagggcaaaggg

SEQ ID NO: 118414 - RNA, 20 nt, Human
ggggagcugugcaggugggc

SEQ ID NO: 118415 - RNA, 21 nt, Human
gguggaggaggacaggggagc

SEQ ID NO: 118416 - RNA, 22 nt, Human
uaaauagcuguguguguuggac

SEQ ID NO: 118417 - RNA, 20 nt, Human
ucauggagcccccaaggcgg

SEQ ID NO: 118418 - RNA, 22 nt, Human
uccaugaguagggcaggggagc

SEQ ID NO: 118419 - RNA, 20 nt, Human
ucccaucccacgccucccuu

SEQ ID NO: 118420 - RNA, 18 nt, Human
ucccuccuccaugccucu

SEQ ID NO: 118421 - RNA, 19 nt, Human
ucccuugcagucccccuug

SEQ ID NO: 118422 - RNA, 20 nt, Human
ucuccccucccaucuccugc

SEQ ID NO: 118423 - RNA, 21 nt, Human
ucugaaggggagacuggaggg

SEQ ID NO: 118424 - RNA, 19 nt, Human
ugaaggggagacuggaggg

SEQ ID NO: 118425 - RNA, 22 nt, Human
ugaaggggagacuggagggcaa

SEQ ID NO: 118426 - RNA, 23 nt, Human
ugccaggcuggagagcuggucuc

SEQ ID NO: 118427 - RNA, 23 nt, Human
ugcccagcacagagaacccagag

SEQ ID NO: 118428 - RNA, 22 nt, Human
ugccugcagacaucugacuggc

SEQ ID NO: 118429 - RNA, 24 nt, Human
uggagagcuggucucuccccuccc

SEQ ID NO: 118430 - RNA, 21 nt, Human
uggagggcaaagggcaauggg

SEQ ID NO: 118431 - RNA, 19 nt, Human
uggaguccaagggccagug

SEQ ID NO: 118432 - RNA, 19 nt, Human
uggcccccacucaucccug

SEQ ID NO: 118433 - RNA, 18 nt, Human
ugggaugggcaaaugccu

SEQ ID NO: 118434 - RNA, 22 nt, Human
uggucucuccccucccaucucc

SEQ ID NO: 118435 - RNA, 22 nt, Human
uguguguguuggacagguccuu

SEQ ID NO: 118436 - RNA, 20 nt, Human
uugccuggcugcuggcucca

SEQ ID NO: 118437 - RNA, 19 nt, Human
aaaaaugguuaugacaaug

SEQ ID NO: 118438 - RNA, 22 nt, Human
aacccaaaagauagcggaaagu

SEQ ID NO: 118439 - RNA, 25 nt, Human
acacugaaaauguagccuuugauaa

SEQ ID NO: 118440 - RNA, 23 nt, Human
acagagggaaacuucagauacca

SEQ ID NO: 118441 - RNA, 21 nt, Human
aucaagauacauguacaaaca

SEQ ID NO: 118442 - RNA, 23 nt, Human
cagauaccaagguaauuucuggg

SEQ ID NO: 118443 - RNA, 22 nt, Human
cagcaagcaaaacaaaauuucu

SEQ ID NO: 118444 - RNA, 23 nt, Human
cauguacaaacaaaauuucagau

SEQ ID NO: 118445 - RNA, 24 nt, Human
ccaaugcaaggaaaauaaucugga

SEQ ID NO: 118446 - RNA, 20 nt, Human
ccucaaguaguuuccuccuc

SEQ ID NO: 118447 - RNA, 20 nt, Human
ccucuaggaaaaagcuucca

SEQ ID NO: 118448 - RNA, 20 nt, Human
cugggcagguuuaaaaccuu

SEQ ID NO: 118449 - RNA, 18 nt, Human
gaacccaaaagauagcgg

SEQ ID NO: 118450 - RNA, 24 nt, Human
gauuugaaacuuuuuaauuaagga

SEQ ID NO: 118451 - RNA, 24 nt, Human
ggagacagagggaaacuucagaua

SEQ ID NO: 118452 - RNA, 20 nt, Human
uaacaguucuuacaauauga

SEQ ID NO: 118453 - RNA, 21 nt, Human
uaacucaaaagauaugugucc

SEQ ID NO: 118454 - RNA, 21 nt, Human
uaagauacaaagcacacguga

SEQ ID NO: 118455 - RNA, 18 nt, Human
uacaaacaaaauuucaga

SEQ ID NO: 118456 - RNA, 24 nt, Human
uacagcaaacaaauaugaaagaua

SEQ ID NO: 118457 - RNA, 26 nt, Human
uagaucacaaaauagaauuuuccaag

SEQ ID NO: 118458 - RNA, 21 nt, Human
uaguaucagugggcuuuugua

SEQ ID NO: 118459 - RNA, 19 nt, Human
ucaauaacaaagucaaagc

SEQ ID NO: 118460 - RNA, 24 nt, Human
ucagaugcucuuggaaacacaucu

SEQ ID NO: 118461 - RNA, 25 nt, Human
ucuuaaaaucuuuuuucuuuuucuu

SEQ ID NO: 118462 - RNA, 22 nt, Human
ugacaaauaacaagcuuaauua

SEQ ID NO: 118463 - RNA, 20 nt, Human
ugcaaggaaaauaaucugga

SEQ ID NO: 118464 - RNA, 19 nt, Human
ugcaugacaaauaacaagc

SEQ ID NO: 118465 - RNA, 22 nt, Human
ugggcuuuuguauuggcaguuu

SEQ ID NO: 118466 - RNA, 18 nt, Human
uguauuggcaguuugucu

SEQ ID NO: 118467 - RNA, 23 nt, Human
uguccuaguuggauacauuuuuu

SEQ ID NO: 118468 - RNA, 18 nt, Human
ugucuagauuugaaacuu

SEQ ID NO: 118469 - RNA, 23 nt, Human
uuaaaacagcaagcaaaacaaaa

SEQ ID NO: 118470 - RNA, 19 nt, Human
uuacacugaaaauguagcc

SEQ ID NO: 118471 - RNA, 20 nt, Human
uucuugcaaaaccaucuuua

SEQ ID NO: 118472 - RNA, 24 nt, Human
uuuaaaaguugauagaauaacugu

SEQ ID NO: 118473 - RNA, 21 nt, Human
uuucacaacugugcagucacu

SEQ ID NO: 118474 - RNA, 24 nt, Human
uuuuuuuuuuuuuuuuuuacacag

SEQ ID NO: 118475 - RNA, 24 nt, Human
aaaaaaaaaagcuccagugcucac

SEQ ID NO: 118476 - RNA, 23 nt, Human
aaaaaacaaaaagcaagcaucua

SEQ ID NO: 118477 - RNA, 20 nt, Human
aaacagugaaauauagcccc

SEQ ID NO: 118478 - RNA, 23 nt, Human
aaaggguucugaugugcucgucu

SEQ ID NO: 118479 - RNA, 19 nt, Human
aacaaaaacuaugaacaac

SEQ ID NO: 118480 - RNA, 21 nt, Human
aacaaaaacuaugaacaacca

SEQ ID NO: 118481 - RNA, 19 nt, Human
aacagaacaaagcaacaac

SEQ ID NO: 118482 - RNA, 21 nt, Human
aacuaugaugcacuccaagug

SEQ ID NO: 118483 - RNA, 20 nt, Human
aacucacuguccccacccca

SEQ ID NO: 118484 - RNA, 23 nt, Human
aagaaaacaaaaacaaacuguag

SEQ ID NO: 118485 - RNA, 22 nt, Human
aagaaaacucaaugcacaaaug

SEQ ID NO: 118486 - RNA, 24 nt, Human
aagaauccccaaacagucuuuuua

SEQ ID NO: 118487 - RNA, 22 nt, Human
aagagcacaacaggaaccaaag

SEQ ID NO: 118488 - RNA, 23 nt, Human
aagagcacaacaggaaccaaagu

SEQ ID NO: 118489 - RNA, 21 nt, Human
aagcaacaacaaacagugaaa

SEQ ID NO: 118490 - RNA, 23 nt, Human
aauauaacagaacaaagcaacaa

SEQ ID NO: 118491 - RNA, 20 nt, Human
acaaaaagcaagcaucuaca

SEQ ID NO: 118492 - RNA, 21 nt, Human
acaaaaagcaagcaucuacaa

SEQ ID NO: 118493 - RNA, 21 nt, Human
acaaagcaacaacaaacagug

SEQ ID NO: 118494 - RNA, 23 nt, Human
acacacacacacacacacacaca

SEQ ID NO: 118495 - RNA, 23 nt, Human
acacacacacacacacacacaua

SEQ ID NO: 118496 - RNA, 27 nt, Human
acacacacacacacacauacauacucu

SEQ ID NO: 118497 - RNA, 27 nt, Human
acacacacauacauacucucacacaca

SEQ ID NO: 118498 - RNA, 27 nt, Human
acacacauacauacucucacacacaca

SEQ ID NO: 118499 - RNA, 19 nt, Human
acagaacaaagcaacaaca

SEQ ID NO: 118500 - RNA, 23 nt, Human
accaauuuuucuucccaacacca

SEQ ID NO: 118501 - RNA, 20 nt, Human
accccaaauaucucuacagc

SEQ ID NO: 118502 - RNA, 20 nt, Human
acccucccacccauuucccc

SEQ ID NO: 118503 - RNA, 23 nt, Human
accuuguccuauauccuguuagu

SEQ ID NO: 118504 - RNA, 25 nt, Human
agaaaacaaaaacaaacuguagaac

SEQ ID NO: 118505 - RNA, 22 nt, Human
agaaaauaaaagcagcaaaaag

SEQ ID NO: 118506 - RNA, 20 nt, Human
agcaacaacaaacagugaaa

SEQ ID NO: 118507 - RNA, 23 nt, Human
aggaaaaagaauccccaaacagu

SEQ ID NO: 118508 - RNA, 19 nt, Human
aggaagauuuuaauaaagg

SEQ ID NO: 118509 - RNA, 22 nt, Human
auauauguauauauauauauua

SEQ ID NO: 118510 - RNA, 20 nt, Human
augucucuggccagugagca

SEQ ID NO: 118511 - RNA, 20 nt, Human
auuuucuuuucacguuaagc

SEQ ID NO: 118512 - RNA, 22 nt, Human
caacaaaaacuaugaacaacca

SEQ ID NO: 118513 - RNA, 23 nt, Human
caagagcacaacaggaaccaaag

SEQ ID NO: 118514 - RNA, 20 nt, Human
caaguauuuacaacaauacu

SEQ ID NO: 118515 - RNA, 19 nt, Human
caauaggaaaaaaauaacc

SEQ ID NO: 118516 - RNA, 21 nt, Human
cacaacaggaaccaaaguaaa

SEQ ID NO: 118517 - RNA, 20 nt, Human
cacacacacacacacacaca

SEQ ID NO: 118518 - RNA, 20 nt, Human
cacacacacacacacacaca

SEQ ID NO: 118519 - RNA, 20 nt, Human
cacacacacacacacacaca

SEQ ID NO: 118520 - RNA, 20 nt, Human
cacacacacacacacacaca

SEQ ID NO: 118521 - RNA, 22 nt, Human
cacacacacacacacacacaca

SEQ ID NO: 118522 - RNA, 26 nt, Human
cacacacacacacacacacacacaca

SEQ ID NO: 118523 - RNA, 25 nt, Human
cacacacacacacacacacacauac

SEQ ID NO: 118524 - RNA, 22 nt, Human
cacacacacacacacacacaua

SEQ ID NO: 118525 - RNA, 26 nt, Human
cacacacacacacacacacauacaua

SEQ ID NO: 118526 - RNA, 20 nt, Human
cacacacacacacacacaua

SEQ ID NO: 118527 - RNA, 22 nt, Human
cacacacacacacacacauaca

SEQ ID NO: 118528 - RNA, 19 nt, Human
cacacacacacacacauac

SEQ ID NO: 118529 - RNA, 30 nt, Human
cacacauacauacucucacacacacaucuu

SEQ ID NO: 118530 - RNA, 20 nt, Human
cacccauuuccccauccaaa

SEQ ID NO: 118531 - RNA, 20 nt, Human
cacccucccacccauuuccc

SEQ ID NO: 118532 - RNA, 20 nt, Human
cacccucucccuccucuucc

SEQ ID NO: 118533 - RNA, 19 nt, Human
cacugcuauggaaugccug

SEQ ID NO: 118534 - RNA, 18 nt, Human
cagcaaccagugcagucu

SEQ ID NO: 118535 - RNA, 24 nt, Human
cagcacucaggauaaaucauaucu

SEQ ID NO: 118536 - RNA, 25 nt, Human
caugauugaaaaaacaaaaagcaag

SEQ ID NO: 118537 - RNA, 21 nt, Human
ccacccauuuccccauccaaa

SEQ ID NO: 118538 - RNA, 26 nt, Human
cccaacaccacccucccacccauuuc

SEQ ID NO: 118539 - RNA, 24 nt, Human
cccauccaaacucacuguccccac

SEQ ID NO: 118540 - RNA, 22 nt, Human
ccccaaauaucucuacagcuau

SEQ ID NO: 118541 - RNA, 20 nt, Human
cccucccacccauuucccca

SEQ ID NO: 118542 - RNA, 19 nt, Human
ccgccgccgccuccuccuc

SEQ ID NO: 118543 - RNA, 20 nt, Human
ccgccgccgccuccuccucg

SEQ ID NO: 118544 - RNA, 21 nt, Human
ccgccgccgccuccuccucgc

SEQ ID NO: 118545 - RNA, 20 nt, Human
ccuccugcgccgccgccgcc

SEQ ID NO: 118546 - RNA, 20 nt, Human
ccugcucauucaggccugag

SEQ ID NO: 118547 - RNA, 21 nt, Human
ccugucacguuguaaaaaaaa

SEQ ID NO: 118548 - RNA, 20 nt, Human
cgcacacacacacacacaca

SEQ ID NO: 118549 - RNA, 25 nt, Human
cgcgcacacacacacacacacacac

SEQ ID NO: 118550 - RNA, 25 nt, Human
cgcgcgcacacacacacacacacac

SEQ ID NO: 118551 - RNA, 19 nt, Human
cuagagcuucaacaaaaac

SEQ ID NO: 118552 - RNA, 22 nt, Human
cucccacccauuuccccaucca

SEQ ID NO: 118553 - RNA, 22 nt, Human
cuggcuuccucacugccuacug

SEQ ID NO: 118554 - RNA, 18 nt, Human
cuguccccaccccaaaua

SEQ ID NO: 118555 - RNA, 18 nt, Human
cuugaggaaaagugggaa

SEQ ID NO: 118556 - RNA, 24 nt, Human
gaccugggauggcugucaaagggu

SEQ ID NO: 118557 - RNA, 23 nt, Human
gcacacacacacacacacacaca

SEQ ID NO: 118558 - RNA, 19 nt, Human
gccgccgccgccuccuccu

SEQ ID NO: 118559 - RNA, 22 nt, Human
guaagugaucaaaagcacugcc

SEQ ID NO: 118560 - RNA, 22 nt, Human
guuaaaaucucauaaaaauaca

SEQ ID NO: 118561 - RNA, 19 nt, Human
guuauggcagcugggucgc

SEQ ID NO: 118562 - RNA, 19 nt, Human
guugugacuguauagaaaa

SEQ ID NO: 118563 - RNA, 21 nt, Human
guuuaucugccuuuguucugg

SEQ ID NO: 118564 - RNA, 25 nt, Human
uaaaaaaaguuucuucuuaagcuag

SEQ ID NO: 118565 - RNA, 22 nt, Human
uaaaagaaaacucaaugcacaa

SEQ ID NO: 118566 - RNA, 19 nt, Human
uaaccucugggccacugaa

SEQ ID NO: 118567 - RNA, 22 nt, Human
uaagauaguuacauaaauacuc

SEQ ID NO: 118568 - RNA, 18 nt, Human
uacaaaacagaacacauu

SEQ ID NO: 118569 - RNA, 23 nt, Human
uacaagagcacaacaggaaccaa

SEQ ID NO: 118570 - RNA, 22 nt, Human
uacacaugcacacaaauacuuu

SEQ ID NO: 118571 - RNA, 20 nt, Human
uacauacucucacacacaca

SEQ ID NO: 118572 - RNA, 18 nt, Human
uacaucaagucacaaucc

SEQ ID NO: 118573 - RNA, 21 nt, Human
uacaucaagucacaauccaau

SEQ ID NO: 118574 - RNA, 18 nt, Human
uacuacaacaaacuucca

SEQ ID NO: 118575 - RNA, 22 nt, Human
uagcaacuuuaaaaacuuuggu

SEQ ID NO: 118576 - RNA, 26 nt, Human
uagcaggugcaaugcugacugcucaa

SEQ ID NO: 118577 - RNA, 18 nt, Human
uauaaaagugcuaagggc

SEQ ID NO: 118578 - RNA, 22 nt, Human
uauaauaaggaaaaagaauccu

SEQ ID NO: 118579 - RNA, 23 nt, Human
uauauauauauauuauauacaca

SEQ ID NO: 118580 - RNA, 22 nt, Human
uauauauauauuauauacacau

SEQ ID NO: 118581 - RNA, 18 nt, Human
uauauauguauauauaua

SEQ ID NO: 118582 - RNA, 21 nt, Human
uauauauguauauauauauau

SEQ ID NO: 118583 - RNA, 25 nt, Human
uauauauguauauauauauauuaua

SEQ ID NO: 118584 - RNA, 18 nt, Human
uauauguauauauauaua

SEQ ID NO: 118585 - RNA, 24 nt, Human
uauggccaugauugaaaaaacaaa

SEQ ID NO: 118586 - RNA, 23 nt, Human
uauguauauauauauauuauaua

SEQ ID NO: 118587 - RNA, 25 nt, Human
uauguauauauauauauuauauaca

SEQ ID NO: 118588 - RNA, 19 nt, Human
uauguguauaaauauauau

SEQ ID NO: 118589 - RNA, 22 nt, Human
ucacaauccaauacaauccacu

SEQ ID NO: 118590 - RNA, 19 nt, Human
ucacugccuacugcaguug

SEQ ID NO: 118591 - RNA, 23 nt, Human
ucaguauauaauaaggaaaaaga

SEQ ID NO: 118592 - RNA, 19 nt, Human
ucaugugcugacucugcua

SEQ ID NO: 118593 - RNA, 18 nt, Human
ucccaacaccacccuccc

SEQ ID NO: 118594 - RNA, 19 nt, Human
ucccaacaccacccuccca

SEQ ID NO: 118595 - RNA, 19 nt, Human
ucccaacaccacccuccca

SEQ ID NO: 118596 - RNA, 21 nt, Human
ucccaacaccacccucccacc

SEQ ID NO: 118597 - RNA, 18 nt, Human
uccccgagccaagcugac

SEQ ID NO: 118598 - RNA, 23 nt, Human
uccugcgccgccgccgccuccuc

SEQ ID NO: 118599 - RNA, 21 nt, Human
ucuaagaaaacacuuggucag

SEQ ID NO: 118600 - RNA, 23 nt, Human
ucuaagaaaacacuuggucaguu

SEQ ID NO: 118601 - RNA, 21 nt, Human
ucucuggcuuccucacugccu

SEQ ID NO: 118602 - RNA, 18 nt, Human
ucuucccaacaccacccu

SEQ ID NO: 118603 - RNA, 18 nt, Human
ugaaaaaacaaaaagcaa

SEQ ID NO: 118604 - RNA, 20 nt, Human
ugaacaaccaacaauauaac

SEQ ID NO: 118605 - RNA, 23 nt, Human
ugauugauuggcuuggaagaaaa

SEQ ID NO: 118606 - RNA, 19 nt, Human
ugcaaacagcuagaacacc

SEQ ID NO: 118607 - RNA, 20 nt, Human
ugccaagaaucaaguugcag

SEQ ID NO: 118608 - RNA, 23 nt, Human
ugcucaaggcgugcgugcgcgcg

SEQ ID NO: 118609 - RNA, 26 nt, Human
ugggauggcugucaaaggguucugau

SEQ ID NO: 118610 - RNA, 18 nt, Human
uguaaaaaaaaaaaagcu

SEQ ID NO: 118611 - RNA, 21 nt, Human
uguaaaaaaaaaaaagcucca

SEQ ID NO: 118612 - RNA, 21 nt, Human
uguagaaucaguauauaauaa

SEQ ID NO: 118613 - RNA, 24 nt, Human
uguauguguauaaauauauaugua

SEQ ID NO: 118614 - RNA, 24 nt, Human
uguggcuuuagaccugggauggcu

SEQ ID NO: 118615 - RNA, 24 nt, Human
uguguauaaauauauauguauaua

SEQ ID NO: 118616 - RNA, 20 nt, Human
uucaacaggaaaacauaaau

SEQ ID NO: 118617 - RNA, 23 nt, Human
uucccaacaccacccucccaccc

SEQ ID NO: 118618 - RNA, 22 nt, Human
uuccccauccaaacucacuguc

SEQ ID NO: 118619 - RNA, 23 nt, Human
uuguaaaaaaaaaaaagcuccag

SEQ ID NO: 118620 - RNA, 21 nt, Human
uuuguaagugaucaaaagcac

SEQ ID NO: 118621 - RNA, 23 nt, Human
uuuuugauuucaacucaaaaugu

SEQ ID NO: 118622 - RNA, 20 nt, Human
uuuuuuuuuuuuuuuuuugg

SEQ ID NO: 118623 - RNA, 23 nt, Human
aaaaaaaaaaagauuguucccau

SEQ ID NO: 118624 - RNA, 23 nt, Human
aaaauaucacagguaacagaaug

SEQ ID NO: 118625 - RNA, 19 nt, Human
aaccacugaauaaaucagg

SEQ ID NO: 118626 - RNA, 27 nt, Human
aaccacugaauaaaucaggguaagcag

SEQ ID NO: 118627 - RNA, 21 nt, Human
aaugaaaacaaaaccacugaa

SEQ ID NO: 118628 - RNA, 21 nt, Human
acuagacugcuuuugacaucu

SEQ ID NO: 118629 - RNA, 18 nt, Human
acugccugagagaaagga

SEQ ID NO: 118630 - RNA, 20 nt, Human
acugccugagagaaaggagg

SEQ ID NO: 118631 - RNA, 18 nt, Human
agauggcaguuggaaaaa

SEQ ID NO: 118632 - RNA, 22 nt, Human
auggcaguuggaaaaaaaaaaa

SEQ ID NO: 118633 - RNA, 19 nt, Human
cacacaggcacgaccacua

SEQ ID NO: 118634 - RNA, 27 nt, Human
cacuccuuccuguccaucgguuuucca

SEQ ID NO: 118635 - RNA, 21 nt, Human
caguuggaaaaaaaaaaaaaa

SEQ ID NO: 118636 - RNA, 19 nt, Human
ccacagggugauuugcacu

SEQ ID NO: 118637 - RNA, 18 nt, Human
cccccggcgcccgccgcc

SEQ ID NO: 118638 - RNA, 20 nt, Human
ccccggcgcccgccgcccag

SEQ ID NO: 118639 - RNA, 20 nt, Human
ccgccuccaauugccaauuc

SEQ ID NO: 118640 - RNA, 21 nt, Human
ccgcgcgcgccccuccggccc

SEQ ID NO: 118641 - RNA, 21 nt, Human
cgcgcgcgccccuccggcccc

SEQ ID NO: 118642 - RNA, 22 nt, Human
cggcccccggcgcccgccgccc

SEQ ID NO: 118643 - RNA, 21 nt, Human
cggcgcccgccgcccagcgga

SEQ ID NO: 118644 - RNA, 22 nt, Human
cuaccgccuccaauugccaauu

SEQ ID NO: 118645 - RNA, 24 nt, Human
cuuccuguccaucgguuuuccaca

SEQ ID NO: 118646 - RNA, 20 nt, Human
gccuaaacgcuggggugccg

SEQ ID NO: 118647 - RNA, 23 nt, Human
gcgcgccccuccggcccccggcg

SEQ ID NO: 118648 - RNA, 23 nt, Human
ggcccccggcgcccgccgcccag

SEQ ID NO: 118649 - RNA, 21 nt, Human
gggugccgccgccgcgcgcgc

SEQ ID NO: 118650 - RNA, 21 nt, Human
uauaaacuagacugcuuuuga

SEQ ID NO: 118651 - RNA, 19 nt, Human
ucagaagcuaacacacaag

SEQ ID NO: 118652 - RNA, 25 nt, Human
uccagaaugaaaacaaaaccacuga

SEQ ID NO: 118653 - RNA, 18 nt, Human
ucccuucugauacacaca

SEQ ID NO: 118654 - RNA, 20 nt, Human
ucuguaagaaaauuguauag

SEQ ID NO: 118655 - RNA, 24 nt, Human
ugagagaaaggaggcaagauaccu

SEQ ID NO: 118656 - RNA, 20 nt, Human
ugccgccgccgcgcgcgccc

SEQ ID NO: 118657 - RNA, 19 nt, Human
ugccugagagaaaggaggc

SEQ ID NO: 118658 - RNA, 19 nt, Human
uggaaaaaaaaaaaaaaga

SEQ ID NO: 118659 - RNA, 23 nt, Human
uucacacggugcaugauuacuuc

SEQ ID NO: 118660 - RNA, 19 nt, Human
aaagaaaagcaagauggca

SEQ ID NO: 118661 - RNA, 19 nt, Human
aacaacaaagcagcaggaa

SEQ ID NO: 118662 - RNA, 18 nt, Human
aagaacucuaaaaucggc

SEQ ID NO: 118663 - RNA, 26 nt, Human
aagacccuuuccacgucaaggcacuc

SEQ ID NO: 118664 - RNA, 20 nt, Human
aagcuggacuucggcaaugc

SEQ ID NO: 118665 - RNA, 20 nt, Human
acaaagcagcaggaaacagg

SEQ ID NO: 118666 - RNA, 21 nt, Human
acaaagcagcaggaaacaggg

SEQ ID NO: 118667 - RNA, 21 nt, Human
acaaagcagcaggaaacaggg

SEQ ID NO: 118668 - RNA, 18 nt, Human
accccgggguucucgggc

SEQ ID NO: 118669 - RNA, 20 nt, Human
acccgagccgcagcggaggc

SEQ ID NO: 118670 - RNA, 24 nt, Human
accucgaggagcgcucagagggcu

SEQ ID NO: 118671 - RNA, 23 nt, Human
acuucaaaggagacuaggacagg

SEQ ID NO: 118672 - RNA, 20 nt, Human
agaacaacaaagcagcagga

SEQ ID NO: 118673 - RNA, 18 nt, Human
agccgcagcggaggccac

SEQ ID NO: 118674 - RNA, 19 nt, Human
agcggcagccaccuccccc

SEQ ID NO: 118675 - RNA, 18 nt, Human
agcuggacuucggcaaug

SEQ ID NO: 118676 - RNA, 19 nt, Human
aggaagacccuuuccacgu

SEQ ID NO: 118677 - RNA, 26 nt, Human
aggcagaacaacaaagcagcaggaaa

SEQ ID NO: 118678 - RNA, 19 nt, Human
caaacccgagccgcagcgg

SEQ ID NO: 118679 - RNA, 20 nt, Human
caacaaaauggcggacgcgg

SEQ ID NO: 118680 - RNA, 24 nt, Human
cacaauacgacuaugauacaaaca

SEQ ID NO: 118681 - RNA, 21 nt, Human
caccgacccccgccgucacac

SEQ ID NO: 118682 - RNA, 20 nt, Human
cagcaggaaacagggcaaca

SEQ ID NO: 118683 - RNA, 19 nt, Human
caggaaacagggcaacagc

SEQ ID NO: 118684 - RNA, 21 nt, Human
caggaggcagccgcugugugc

SEQ ID NO: 118685 - RNA, 18 nt, Human
ccaauagccacagcaaca

SEQ ID NO: 118686 - RNA, 18 nt, Human
ccacuucaaaggagacua

SEQ ID NO: 118687 - RNA, 21 nt, Human
ccauggccucaagcuuucucu

SEQ ID NO: 118688 - RNA, 24 nt, Human
ccccgggguucucgggcugcucgg

SEQ ID NO: 118689 - RNA, 19 nt, Human
ccuccagugacucccggcc

SEQ ID NO: 118690 - RNA, 25 nt, Human
ccuccggggugcuuuugcccagcuu

SEQ ID NO: 118691 - RNA, 20 nt, Human
ccucucgcacaccucgagga

SEQ ID NO: 118692 - RNA, 21 nt, Human
cgacagaaucagucccaugua

SEQ ID NO: 118693 - RNA, 19 nt, Human
cgaggcaccgaacucgaag

SEQ ID NO: 118694 - RNA, 23 nt, Human
cgccuuagcccggcagacggcuu

SEQ ID NO: 118695 - RNA, 23 nt, Human
cggcuccgggcccgcagcauccu

SEQ ID NO: 118696 - RNA, 22 nt, Human
cgucacacgaggcaccgaacuc

SEQ ID NO: 118697 - RNA, 27 nt, Human
cucuuccuuaagguucacuuccuguug

SEQ ID NO: 118698 - RNA, 18 nt, Human
cugcucggcgucccaggg

SEQ ID NO: 118699 - RNA, 19 nt, Human
gaaaagcaagauggcagcu

SEQ ID NO: 118700 - RNA, 20 nt, Human
gagccgcagcggaggccacc

SEQ ID NO: 118701 - RNA, 26 nt, Human
gcaaacccgagccgcagcggaggcca

SEQ ID NO: 118702 - RNA, 24 nt, Human
gccagcacuuuccucucgacaggg

SEQ ID NO: 118703 - RNA, 25 nt, Human
ggcagaacaacaaagcagcaggaaa

SEQ ID NO: 118704 - RNA, 19 nt, Human
ggcggcggcuguccucgcc

SEQ ID NO: 118705 - RNA, 27 nt, Human
gggccagcacuuuccucucgacagggg

SEQ ID NO: 118706 - RNA, 19 nt, Human
gggcccgcagcauccuccg

SEQ ID NO: 118707 - RNA, 22 nt, Human
uaggacaggcagaacaacaaag

SEQ ID NO: 118708 - RNA, 18 nt, Human
uccaaagaaaagcaagau

SEQ ID NO: 118709 - RNA, 22 nt, Human
ucugcggcgguaggggcggcgg

SEQ ID NO: 118710 - RNA, 20 nt, Human
ugagagaaaaugcuuuccca

SEQ ID NO: 118711 - RNA, 24 nt, Human
ugagagaaaaugcuuucccacuuc

SEQ ID NO: 118712 - RNA, 18 nt, Human
ugcaguaucucgccaugg

SEQ ID NO: 118713 - RNA, 18 nt, Human
ugcgacugccagucugca

SEQ ID NO: 118714 - RNA, 19 nt, Human
ugcuccggggccgccacac

SEQ ID NO: 118715 - RNA, 18 nt, Human
uggcagcuaagccacugc

SEQ ID NO: 118716 - RNA, 23 nt, Human
uguacaaacgggcagcaaugaga

SEQ ID NO: 118717 - RNA, 18 nt, Human
uguccaaagaaaagcaag

SEQ ID NO: 118718 - RNA, 25 nt, Human
uguccaaagaaaagcaagauggcag

SEQ ID NO: 118719 - RNA, 20 nt, Human
ugugcauuccaaaugugugu

SEQ ID NO: 118720 - RNA, 25 nt, Human
ugugcauuccaaaugugugugcgac

SEQ ID NO: 118721 - RNA, 23 nt, Human
ugugugcauuccaaaugugugug

SEQ ID NO: 118722 - RNA, 20 nt, Human
uuccucucggcuccgggccc

SEQ ID NO: 118723 - RNA, 19 nt, Human
aauggggaguaaugacucc

SEQ ID NO: 118724 - RNA, 18 nt, Human
acagagguggccccaguu

SEQ ID NO: 118725 - RNA, 23 nt, Human
acccccagcccuggcagggguuc

SEQ ID NO: 118726 - RNA, 21 nt, Human
acucaaccaacccucacacac

SEQ ID NO: 118727 - RNA, 28 nt, Human
cacacacccacuggggugcacccaaagg

SEQ ID NO: 118728 - RNA, 21 nt, Human
caccccagcuccugcugaggg

SEQ ID NO: 118729 - RNA, 19 nt, Human
caggggccaccccagcucc

SEQ ID NO: 118730 - RNA, 22 nt, Human
cccccagcccuggcagggguuc

SEQ ID NO: 118731 - RNA, 20 nt, Human
ccccuucucacccccagccc

SEQ ID NO: 118732 - RNA, 20 nt, Human
cccucacacacacacacaca

SEQ ID NO: 118733 - RNA, 22 nt, Human
cgccgcuggccccgcccggccc

SEQ ID NO: 118734 - RNA, 20 nt, Human
cgcgcggcgggcugcggcuc

SEQ ID NO: 118735 - RNA, 20 nt, Human
cgcgggacgcaggccgggcg

SEQ ID NO: 118736 - RNA, 22 nt, Human
cgcgggagggcgcgggccaggc

SEQ ID NO: 118737 - RNA, 19 nt, Human
cggcucggcggcgguggcg

SEQ ID NO: 118738 - RNA, 21 nt, Human
cggcucggcggcgguggcgca

SEQ ID NO: 118739 - RNA, 22 nt, Human
cguggcagggaggguggccuga

SEQ ID NO: 118740 - RNA, 20 nt, Human
cucacacacacacacacacc

SEQ ID NO: 118741 - RNA, 18 nt, Human
cucacccccagcccuggc

SEQ ID NO: 118742 - RNA, 21 nt, Human
cucaggggccaccccagcucc

SEQ ID NO: 118743 - RNA, 24 nt, Human
gacgcggaggccggagcaagucug

SEQ ID NO: 118744 - RNA, 21 nt, Human
gcagggguucuaggcaacuca

SEQ ID NO: 118745 - RNA, 21 nt, Human
gcgcggacgcggaggccggag

SEQ ID NO: 118746 - RNA, 21 nt, Human
gcgcugggcgcggacgcggag

SEQ ID NO: 118747 - RNA, 20 nt, Human
gcggcucggcggcgguggcg

SEQ ID NO: 118748 - RNA, 22 nt, Human
gcgggccaggccgcccgcacgu

SEQ ID NO: 118749 - RNA, 18 nt, Human
gcucauuuauuuaaaagg

SEQ ID NO: 118750 - RNA, 18 nt, Human
gcuggccccgcccggccc

SEQ ID NO: 118751 - RNA, 20 nt, Human
ggccggagcaagucugagca

SEQ ID NO: 118752 - RNA, 22 nt, Human
ggguggccugagccccuacagc

SEQ ID NO: 118753 - RNA, 21 nt, Human
gguggccccaguuuggguucg

SEQ ID NO: 118754 - RNA, 21 nt, Human
gguggcucaggugcccugaag

SEQ ID NO: 118755 - RNA, 20 nt, Human
guggccccaguuuggguucg

SEQ ID NO: 118756 - RNA, 21 nt, Human
ucggcggcgguggcgcagggc

SEQ ID NO: 118757 - RNA, 19 nt, Human
ucuuuuggaggggcccuag

SEQ ID NO: 118758 - RNA, 25 nt, Human
ugacaaggcgcuaaugcgccgcugg

SEQ ID NO: 118759 - RNA, 19 nt, Human
ugacuccccuucucacccc

SEQ ID NO: 118760 - RNA, 20 nt, Human
ugacuccccuucucaccccc

SEQ ID NO: 118761 - RNA, 19 nt, Human
uggccugagccccuacagc

SEQ ID NO: 118762 - RNA, 21 nt, Human
uuggaggggcccuagguaaug

SEQ ID NO: 118763 - RNA, 21 nt, Human
aaacacaccacacuaguacca

SEQ ID NO: 118764 - RNA, 29 nt, Human
aaacagaaaagggaaagagcauccuucgg

SEQ ID NO: 118765 - RNA, 26 nt, Human
aaacagaaaagggaaagaggggaccc

SEQ ID NO: 118766 - RNA, 18 nt, Human
aacacaccacacuaguac

SEQ ID NO: 118767 - RNA, 19 nt, Human
aacugccucagagggaccg

SEQ ID NO: 118768 - RNA, 22 nt, Human
aagaacacacacagaccagaag

SEQ ID NO: 118769 - RNA, 18 nt, Human
aagugccacggagaccag

SEQ ID NO: 118770 - RNA, 22 nt, Human
aauuuccaagcaaacacaccac

SEQ ID NO: 118771 - RNA, 19 nt, Human
acaaaacuuuaaaaaucug

SEQ ID NO: 118772 - RNA, 21 nt, Human
acagaacaagacaaugcuaaa

SEQ ID NO: 118773 - RNA, 19 nt, Human
accacuucuuccuaaacag

SEQ ID NO: 118774 - RNA, 18 nt, Human
acugccccgucaacugcc

SEQ ID NO: 118775 - RNA, 21 nt, Human
agaacaagacaaugcuaaaac

SEQ ID NO: 118776 - RNA, 20 nt, Human
agaacaucuacagggugcaa

SEQ ID NO: 118777 - RNA, 21 nt, Human
agaccagaagacagcacggug

SEQ ID NO: 118778 - RNA, 20 nt, Human
agagaaucauggagccagug

SEQ ID NO: 118779 - RNA, 22 nt, Human
agccccgaauggggauggggag

SEQ ID NO: 118780 - RNA, 24 nt, Human
agcgggcgcgcugacaaaggcccg

SEQ ID NO: 118781 - RNA, 22 nt, Human
aggaauuuccaagcaaacacac

SEQ ID NO: 118782 - RNA, 18 nt, Human
augaaaacaccaugcucc

SEQ ID NO: 118783 - RNA, 20 nt, Human
auggagccaguggaguuaga

SEQ ID NO: 118784 - RNA, 26 nt, Human
caagcaaacacaccacacuaguacca

SEQ ID NO: 118785 - RNA, 21 nt, Human
caaggaauuuccaagcaaaca

SEQ ID NO: 118786 - RNA, 22 nt, Human
cacacagaccagaagacagcac

SEQ ID NO: 118787 - RNA, 20 nt, Human
cacagaccagaagacagcac

SEQ ID NO: 118788 - RNA, 18 nt, Human
cacgcaggggcagccauc

SEQ ID NO: 118789 - RNA, 21 nt, Human
cagaacaagacaaugcuaaaa

SEQ ID NO: 118790 - RNA, 24 nt, Human
cagaauccuucaggcuagcuccuc

SEQ ID NO: 118791 - RNA, 20 nt, Human
cagccccccaucgucagccc

SEQ ID NO: 118792 - RNA, 19 nt, Human
caggacucaggccacgcag

SEQ ID NO: 118793 - RNA, 18 nt, Human
ccaagcaaacacaccaca

SEQ ID NO: 118794 - RNA, 20 nt, Human
ccacgcgcggcugccccggc

SEQ ID NO: 118795 - RNA, 19 nt, Human
cccacgcgcggcugccccg

SEQ ID NO: 118796 - RNA, 18 nt, Human
ccccccaucgucagcccc

SEQ ID NO: 118797 - RNA, 19 nt, Human
cccgggagggauagagaca

SEQ ID NO: 118798 - RNA, 18 nt, Human
ccgcccgccgccgcuccg

SEQ ID NO: 118799 - RNA, 19 nt, Human
ccgccgccgcuccggcugc

SEQ ID NO: 118800 - RNA, 20 nt, Human
ccgccgccgcuccggcugcc

SEQ ID NO: 118801 - RNA, 25 nt, Human
ccucccuccaucagcaccaacuaaa

SEQ ID NO: 118802 - RNA, 18 nt, Human
ccucuggcgcccucggcc

SEQ ID NO: 118803 - RNA, 23 nt, Human
ccucuggcgcccucggcccggcc

SEQ ID NO: 118804 - RNA, 27 nt, Human
cgcacucacagacuugcauacguagug

SEQ ID NO: 118805 - RNA, 21 nt, Human
cggccugaagccuagagcugg

SEQ ID NO: 118806 - RNA, 28 nt, Human
cgggagggauagagacacggacggaggc

SEQ ID NO: 118807 - RNA, 23 nt, Human
cuaaaacuguggguuucaaaaac

SEQ ID NO: 118808 - RNA, 22 nt, Human
cuacagggugcaaaggaaccac

SEQ ID NO: 118809 - RNA, 24 nt, Human
cuagagcuggcuugaagaacacac

SEQ ID NO: 118810 - RNA, 18 nt, Human
cucggcccggccgcugac

SEQ ID NO: 118811 - RNA, 18 nt, Human
cucugcaaccuagugcaa

SEQ ID NO: 118812 - RNA, 25 nt, Human
cugcucggcccgcccgccgccgcuc

SEQ ID NO: 118813 - RNA, 18 nt, Human
cuucacuguaaggguuuu

SEQ ID NO: 118814 - RNA, 21 nt, Human
gaacacacacagaccagaaga

SEQ ID NO: 118815 - RNA, 19 nt, Human
gaagccuagagcuggcuug

SEQ ID NO: 118816 - RNA, 21 nt, Human
gaauggggauggggagaccuc

SEQ ID NO: 118817 - RNA, 24 nt, Human
gacagaacaagacaaugcuaaaac

SEQ ID NO: 118818 - RNA, 19 nt, Human
gacugccccgucaacugcc

SEQ ID NO: 118819 - RNA, 21 nt, Human
gaggaugcuucucugcaaccu

SEQ ID NO: 118820 - RNA, 22 nt, Human
gcaaggcuuccccugccauucc

SEQ ID NO: 118821 - RNA, 23 nt, Human
gcccucggcccggccgcugaccu

SEQ ID NO: 118822 - RNA, 24 nt, Human
gccgcuccggcugccagcaccgcc

SEQ ID NO: 118823 - RNA, 19 nt, Human
gcgcugacaaaggcccggg

SEQ ID NO: 118824 - RNA, 21 nt, Human
gcucggcccgcccgccgccgc

SEQ ID NO: 118825 - RNA, 22 nt, Human
gcugacaaaggcccgggaggga

SEQ ID NO: 118826 - RNA, 19 nt, Human
gggcaaggaauuuccaagc

SEQ ID NO: 118827 - RNA, 22 nt, Human
uacaagugccacggagaccagg

SEQ ID NO: 118828 - RNA, 24 nt, Human
uagaacaucuacagggugcaaagg

SEQ ID NO: 118829 - RNA, 24 nt, Human
uaggaagggggaaugaaaacacca

SEQ ID NO: 118830 - RNA, 19 nt, Human
ucacagguggagguggggc

SEQ ID NO: 118831 - RNA, 23 nt, Human
uccaagcaaacacaccacacuag

SEQ ID NO: 118832 - RNA, 20 nt, Human
ucugagugugaaccuggcuc

SEQ ID NO: 118833 - RNA, 22 nt, Human
ugaaaacaccaugcuccgaggu

SEQ ID NO: 118834 - RNA, 19 nt, Human
ugaagaacacacacagacc

SEQ ID NO: 118835 - RNA, 20 nt, Human
ugaagccuagagcuggcuug

SEQ ID NO: 118836 - RNA, 21 nt, Human
ugaggucucggcaucgugucu

SEQ ID NO: 118837 - RNA, 22 nt, Human
ugauuacaaaggaaaacuuugu

SEQ ID NO: 118838 - RNA, 24 nt, Human
uggaagggacagaacaagacaaug

SEQ ID NO: 118839 - RNA, 19 nt, Human
uggaccagaggugggggca

SEQ ID NO: 118840 - RNA, 19 nt, Human
uggaccagaggugggggca

SEQ ID NO: 118841 - RNA, 30 nt, Human
uguggggcaaggaauuuccaagcaaacacc

SEQ ID NO: 118842 - RNA, 22 nt, Human
uuacaagugccacggagaccag

SEQ ID NO: 118843 - RNA, 21 nt, Human
uucgacuucccccucccucca

SEQ ID NO: 118844 - RNA, 21 nt, Human
uuugggacugccccucagggc

SEQ ID NO: 118845 - RNA, 24 nt, Human
uuuuuuuuuuuuuuuuuucagugg

SEQ ID NO: 118846 - RNA, 18 nt, Human
aaaaauauuucuaccuuc

SEQ ID NO: 118847 - RNA, 22 nt, Human
aaacaaaacaaaaagcuauaua

SEQ ID NO: 118848 - RNA, 21 nt, Human
aaacaggaaugaaucauuuau

SEQ ID NO: 118849 - RNA, 23 nt, Human
aaacuccuagcuucaagcaaucc

SEQ ID NO: 118850 - RNA, 24 nt, Human
aaagugcuaagauuauaggcauga

SEQ ID NO: 118851 - RNA, 21 nt, Human
aaaucacaauaggaaaccagu

SEQ ID NO: 118852 - RNA, 23 nt, Human
aacaaaaauacuuaaaaauuaga

SEQ ID NO: 118853 - RNA, 22 nt, Human
aacccauguaaguaccaacaaa

SEQ ID NO: 118854 - RNA, 25 nt, Human
aagcaauccuccuaccuuggccucc

SEQ ID NO: 118855 - RNA, 25 nt, Human
aagcaauccuccuaccuuggccucc

SEQ ID NO: 118856 - RNA, 24 nt, Human
aaguagcuuggacuacaggcacac

SEQ ID NO: 118857 - RNA, 21 nt, Human
acaaguuuucuuaacuuguua

SEQ ID NO: 118858 - RNA, 24 nt, Human
acagcgaggaggaaaaaauucuga

SEQ ID NO: 118859 - RNA, 24 nt, Human
acagcucacugcagccacaaccuc

SEQ ID NO: 118860 - RNA, 25 nt, Human
acccuguugcccaggcuggucucaa

SEQ ID NO: 118861 - RNA, 19 nt, Human
agacagggucucacgcucu

SEQ ID NO: 118862 - RNA, 19 nt, Human
agacagggucucacgcucu

SEQ ID NO: 118863 - RNA, 22 nt, Human
agauuauaggcaugagccacug

SEQ ID NO: 118864 - RNA, 24 nt, Human
agauuauaggcaugagccacugca

SEQ ID NO: 118865 - RNA, 18 nt, Human
aggaggaaaaaauucuga

SEQ ID NO: 118866 - RNA, 21 nt, Human
aggaggaaaaaauucugacaa

SEQ ID NO: 118867 - RNA, 21 nt, Human
aggcaugagccacugcaccca

SEQ ID NO: 118868 - RNA, 21 nt, Human
aggcuauagcauaagggcaca

SEQ ID NO: 118869 - RNA, 22 nt, Human
aucacaauaggaaaccaguaca

SEQ ID NO: 118870 - RNA, 23 nt, Human
aucacagcucacugcagccacaa

SEQ ID NO: 118871 - RNA, 24 nt, Human
caaagugcuaagauuauaggcaug

SEQ ID NO: 118872 - RNA, 25 nt, Human
caaccuccugggcucaaccgauccu

SEQ ID NO: 118873 - RNA, 27 nt, Human
caagcaauccuccuaccuuggccuccc

SEQ ID NO: 118874 - RNA, 22 nt, Human
caaguagcuuggacuacaggca

SEQ ID NO: 118875 - RNA, 25 nt, Human
cacaucacagcucacugcagccaca

SEQ ID NO: 118876 - RNA, 19 nt, Human
cacugcacccagcccaaaa

SEQ ID NO: 118877 - RNA, 23 nt, Human
cagccacaaccuccugggcucaa

SEQ ID NO: 118878 - RNA, 24 nt, Human
caggaccuuacccuguugcccagg

SEQ ID NO: 118879 - RNA, 22 nt, Human
caggagccugcugcaacaauug

SEQ ID NO: 118880 - RNA, 18 nt, Human
cagggaaauuagcauaca

SEQ ID NO: 118881 - RNA, 24 nt, Human
cagggucucacgcucuugcccagg

SEQ ID NO: 118882 - RNA, 23 nt, Human
cauauuaccaacucacucccagc

SEQ ID NO: 118883 - RNA, 21 nt, Human
caucacagcucacugcagcca

SEQ ID NO: 118884 - RNA, 23 nt, Human
caucacagcucacugcagccaca

SEQ ID NO: 118885 - RNA, 23 nt, Human
caugcaccaccauacccggcuaa

SEQ ID NO: 118886 - RNA, 24 nt, Human
ccaaagugcuaagauuauaggcau

SEQ ID NO: 118887 - RNA, 19 nt, Human
ccacugcacccagcccaaa

SEQ ID NO: 118888 - RNA, 23 nt, Human
ccacugcacccagcccaaaaaag

SEQ ID NO: 118889 - RNA, 18 nt, Human
ccaucaaacauaacaggc

SEQ ID NO: 118890 - RNA, 26 nt, Human
ccuccuaccuuggccucccaaagugc

SEQ ID NO: 118891 - RNA, 24 nt, Human
ccuccugggcucaaccgauccucc

SEQ ID NO: 118892 - RNA, 25 nt, Human
ccuccugucucagccuucaaguagc

SEQ ID NO: 118893 - RNA, 23 nt, Human
ccugucucagccuucaaguagcu

SEQ ID NO: 118894 - RNA, 27 nt, Human
ccuuacccuguugcccaggcuggucuc

SEQ ID NO: 118895 - RNA, 24 nt, Human
cucacugcagccacaaccuccugg

SEQ ID NO: 118896 - RNA, 23 nt, Human
cucauauuaccaacucacuccca

SEQ ID NO: 118897 - RNA, 23 nt, Human
cugcagccacaaccuccugggcu

SEQ ID NO: 118898 - RNA, 21 nt, Human
cuuacccuguugcccaggcug

SEQ ID NO: 118899 - RNA, 24 nt, Human
cuucaaguagcuuggacuacaggc

SEQ ID NO: 118900 - RNA, 18 nt, Human
cuuggacuacaggcacac

SEQ ID NO: 118901 - RNA, 22 nt, Human
gauuauaggcaugagccacugc

SEQ ID NO: 118902 - RNA, 20 nt, Human
gcagccacaaccuccugggc

SEQ ID NO: 118903 - RNA, 26 nt, Human
ggacuacaggcacacaugcaccacca

SEQ ID NO: 118904 - RNA, 21 nt, Human
ggcacaucacagcucacugca

SEQ ID NO: 118905 - RNA, 19 nt, Human
gggcucaaccgauccuccu

SEQ ID NO: 118906 - RNA, 19 nt, Human
gggcucaaccgauccuccu

SEQ ID NO: 118907 - RNA, 21 nt, Human
guaaguaccaacaaaaauacu

SEQ ID NO: 118908 - RNA, 24 nt, Human
uaaaagucacuguaacaaauuuaa

SEQ ID NO: 118909 - RNA, 21 nt, Human
uaaaaucacaauaggaaacca

SEQ ID NO: 118910 - RNA, 21 nt, Human
uaaaggaauguuagcaaguca

SEQ ID NO: 118911 - RNA, 22 nt, Human
uaacuuguuaaaggaauguuag

SEQ ID NO: 118912 - RNA, 21 nt, Human
uaagauuauaggcaugagcca

SEQ ID NO: 118913 - RNA, 24 nt, Human
uaagauuauaggcaugagccacug

SEQ ID NO: 118914 - RNA, 24 nt, Human
uaagauuauaggcaugagccacug

SEQ ID NO: 118915 - RNA, 24 nt, Human
uaaguuuuugaucuuguagagaca

SEQ ID NO: 118916 - RNA, 21 nt, Human
uacccuguugcccaggcuggu

SEQ ID NO: 118917 - RNA, 24 nt, Human
uacccuguugcccaggcuggucuc

SEQ ID NO: 118918 - RNA, 27 nt, Human
uacccuguugcccaggcuggucucaaa

SEQ ID NO: 118919 - RNA, 22 nt, Human
uagagacaggaccuuacccugu

SEQ ID NO: 118920 - RNA, 20 nt, Human
uagcaagucaacauuccuuc

SEQ ID NO: 118921 - RNA, 21 nt, Human
uagcaagucaacauuccuucc

SEQ ID NO: 118922 - RNA, 20 nt, Human
uagcuucaagcaauccuccu

SEQ ID NO: 118923 - RNA, 21 nt, Human
uagcuucaagcaauccuccua

SEQ ID NO: 118924 - RNA, 25 nt, Human
uagcuucaagcaauccuccuaccuu

SEQ ID NO: 118925 - RNA, 23 nt, Human
uauuuuagaucaccauuagauug

SEQ ID NO: 118926 - RNA, 25 nt, Human
ucaaccgauccuccugucucagccu

SEQ ID NO: 118927 - RNA, 24 nt, Human
ucaagcaauccuccuaccuuggcc

SEQ ID NO: 118928 - RNA, 24 nt, Human
ucacugcagccacaaccuccuggg

SEQ ID NO: 118929 - RNA, 21 nt, Human
ucacuguaacaaauuuaaaca

SEQ ID NO: 118930 - RNA, 24 nt, Human
ucccaaagugcuaagauuauaggc

SEQ ID NO: 118931 - RNA, 25 nt, Human
ucccaucaaacauaacaggcuuuuc

SEQ ID NO: 118932 - RNA, 18 nt, Human
uccuagcuucaagcaauc

SEQ ID NO: 118933 - RNA, 19 nt, Human
ucuacauugauguccagag

SEQ ID NO: 118934 - RNA, 19 nt, Human
ucucacgcucuugcccagg

SEQ ID NO: 118935 - RNA, 21 nt, Human
ugagccacugcacccagccca

SEQ ID NO: 118936 - RNA, 23 nt, Human
ugcccaggcuauagcauaagggc

SEQ ID NO: 118937 - RNA, 24 nt, Human
ugcccaggcuggucucaaacuccu

SEQ ID NO: 118938 - RNA, 22 nt, Human
ugcuugagacugccaggagccu

SEQ ID NO: 118939 - RNA, 24 nt, Human
uggacuacaggcacacaugcacca

SEQ ID NO: 118940 - RNA, 27 nt, Human
uggacuacaggcacacaugcaccacca

SEQ ID NO: 118941 - RNA, 24 nt, Human
ugggcucaaccgauccuccugucu

SEQ ID NO: 118942 - RNA, 22 nt, Human
uguugcccaggcuggucucaaa

SEQ ID NO: 118943 - RNA, 22 nt, Human
uuauaacccauguaaguaccaa

SEQ ID NO: 118944 - RNA, 24 nt, Human
uucaagcaauccuccuaccuuggc

SEQ ID NO: 118945 - RNA, 18 nt, Human
uuggccucccaaagugcu

SEQ ID NO: 118946 - RNA, 18 nt, Human
uuuuuuuuuuuaaacagg

SEQ ID NO: 118947 - RNA, 22 nt, Human
uuuuuuuuuuuuuuaaacagga

SEQ ID NO: 118948 - RNA, 23 nt, Human
uuuuuuuuuuuuuuuuaaacagg

SEQ ID NO: 118949 - RNA, 21 nt, Human
aaagcgggagguaccagagac

SEQ ID NO: 118950 - RNA, 23 nt, Human
aagaaagcacugcaagcaaacaa

SEQ ID NO: 118951 - RNA, 21 nt, Human
aagagcccugugaaugugggc

SEQ ID NO: 118952 - RNA, 19 nt, Human
aaugcggggaugaagaaag

SEQ ID NO: 118953 - RNA, 23 nt, Human
accagacacuuuaccuccauucu

SEQ ID NO: 118954 - RNA, 28 nt, Human
accagagacagagacguggggcccaguc

SEQ ID NO: 118955 - RNA, 18 nt, Human
accuccauucucaggcgc

SEQ ID NO: 118956 - RNA, 24 nt, Human
accuccauucucaggcgcugagga

SEQ ID NO: 118957 - RNA, 22 nt, Human
agagccauaaaauuaagaaagc

SEQ ID NO: 118958 - RNA, 18 nt, Human
agcagaucugcucugcug

SEQ ID NO: 118959 - RNA, 22 nt, Human
agguaccuucaggacccacagc

SEQ ID NO: 118960 - RNA, 24 nt, Human
auaaaaaugaaaacaaaacaccuc

SEQ ID NO: 118961 - RNA, 22 nt, Human
auaaaauuaagaaagcacugca

SEQ ID NO: 118962 - RNA, 23 nt, Human
augaagaaagaauucacagcccc

SEQ ID NO: 118963 - RNA, 18 nt, Human
caaaccagacaccuggcc

SEQ ID NO: 118964 - RNA, 20 nt, Human
caaaggcccagagacagaga

SEQ ID NO: 118965 - RNA, 23 nt, Human
cagcauaguuaacgagcucccag

SEQ ID NO: 118966 - RNA, 24 nt, Human
ccagaagagccauaaaauuaagaa

SEQ ID NO: 118967 - RNA, 25 nt, Human
ccagacaccuggccaguguccugau

SEQ ID NO: 118968 - RNA, 25 nt, Human
cccaaaccagacaccuggccagugu

SEQ ID NO: 118969 - RNA, 22 nt, Human
cuaauggccuuuccagugugcu

SEQ ID NO: 118970 - RNA, 20 nt, Human
cugcaagcaaacaaaaacca

SEQ ID NO: 118971 - RNA, 22 nt, Human
cugcuggggcaauucuaauggc

SEQ ID NO: 118972 - RNA, 19 nt, Human
cuggacccaaaccagacac

SEQ ID NO: 118973 - RNA, 19 nt, Human
gagaaaguggagggacugc

SEQ ID NO: 118974 - RNA, 22 nt, Human
gagacagagacguggggcccau

SEQ ID NO: 118975 - RNA, 23 nt, Human
gcacugcaagcaaacaaaaacca

SEQ ID NO: 118976 - RNA, 23 nt, Human
gggaaugcggggaugaagaaaga

SEQ ID NO: 118977 - RNA, 24 nt, Human
uaaaaaagcgggagguaccagaga

SEQ ID NO: 118978 - RNA, 21 nt, Human
uaacgagcucccagaccagac

SEQ ID NO: 118979 - RNA, 24 nt, Human
uaaguucuuggcaguaacaacaua

SEQ ID NO: 118980 - RNA, 23 nt, Human
uaccuagugcuucauuuugcucu

SEQ ID NO: 118981 - RNA, 21 nt, Human
uagaagaucagcgcuuccuuc

SEQ ID NO: 118982 - RNA, 19 nt, Human
uauucggcugaaaguucag

SEQ ID NO: 118983 - RNA, 19 nt, Human
ucccagaccagacacuuua

SEQ ID NO: 118984 - RNA, 19 nt, Human
ucguguggaaaaggggagg

SEQ ID NO: 118985 - RNA, 20 nt, Human
ugaaugugggcaaugcccuc

SEQ ID NO: 118986 - RNA, 24 nt, Human
ugacaugaugaugagcacucugga

SEQ ID NO: 118987 - RNA, 18 nt, Human
ugagcacucuggacccaa

SEQ ID NO: 118988 - RNA, 18 nt, Human
ugcaagcaaacaaaaacc

SEQ ID NO: 118989 - RNA, 25 nt, Human
ugcaguguaaaaaagcgggagguac

SEQ ID NO: 118990 - RNA, 24 nt, Human
ugcggggaugaagaaagaauucac

SEQ ID NO: 118991 - RNA, 25 nt, Human
ugcgguguaaaaaaccgggagguac

SEQ ID NO: 118992 - RNA, 21 nt, Human
ugcucugcuggggcaauucua

SEQ ID NO: 118993 - RNA, 18 nt, Human
ugcuuugagaaaguggag

SEQ ID NO: 118994 - RNA, 19 nt, Human
uggaaaaaaagcagaucug

SEQ ID NO: 118995 - RNA, 20 nt, Human
uggaaaaaaagcagaucugc

SEQ ID NO: 118996 - RNA, 29 nt, Human
uggguguuaguuuucucaucuaugugagg

SEQ ID NO: 118997 - RNA, 23 nt, Human
ugguauugcugggcuucccauuu

SEQ ID NO: 118998 - RNA, 20 nt, Human
uucccagaagagccauaaaa

SEQ ID NO: 118999 - RNA, 20 nt, Human
uucugauucuuuuggaccgu

SEQ ID NO: 119000 - RNA, 25 nt, Human
uugcucuggaaaaaaagcagaucug

SEQ ID NO: 119001 - RNA, 22 nt, Human
aaaaaacgagguacgaagagga

SEQ ID NO: 119002 - RNA, 21 nt, Human
aaaaacgagguacgaagagga

SEQ ID NO: 119003 - RNA, 19 nt, Human
aaacuucugcauuucaaag

SEQ ID NO: 119004 - RNA, 20 nt, Human
aagaaggaauauuuuaaaaa

SEQ ID NO: 119005 - RNA, 24 nt, Human
aagcccgcagccgcggugccucag

SEQ ID NO: 119006 - RNA, 19 nt, Human
aaggagcuggcccagcaac

SEQ ID NO: 119007 - RNA, 24 nt, Human
acgcucagacuggaaacaaaggag

SEQ ID NO: 119008 - RNA, 22 nt, Human
agcggugggaggaccccccacg

SEQ ID NO: 119009 - RNA, 21 nt, Human
agcuggcccagcaacuuuccc

SEQ ID NO: 119010 - RNA, 22 nt, Human
aggaccccccacgagccaaaaa

SEQ ID NO: 119011 - RNA, 21 nt, Human
auacaacuguacauaaacuuc

SEQ ID NO: 119012 - RNA, 19 nt, Human
caaaaaacgagguacgaag

SEQ ID NO: 119013 - RNA, 22 nt, Human
cacgagccaaaaaacgagguac

SEQ ID NO: 119014 - RNA, 18 nt, Human
cagccgcggugccucaga

SEQ ID NO: 119015 - RNA, 21 nt, Human
ccagcggugggaggacccccc

SEQ ID NO: 119016 - RNA, 21 nt, Human
ccccacgagccaaaaaacgag

SEQ ID NO: 119017 - RNA, 18 nt, Human
ccccccacgagccaaaaa

SEQ ID NO: 119018 - RNA, 25 nt, Human
ccccccacgagccaaaaaacgaggu

SEQ ID NO: 119019 - RNA, 23 nt, Human
gaugucaacaucaaagaaggaau

SEQ ID NO: 119020 - RNA, 23 nt, Human
gcggugccucagaagacccucgg

SEQ ID NO: 119021 - RNA, 18 nt, Human
ggagagccgggaacucag

SEQ ID NO: 119022 - RNA, 20 nt, Human
uaaaaagcacauagaaaccc

SEQ ID NO: 119023 - RNA, 20 nt, Human
ucccugcggagagccgggaa

SEQ ID NO: 119024 - RNA, 24 nt, Human
ucucuucuuugugcuuauaguuga

SEQ ID NO: 119025 - RNA, 22 nt, Human
uggaaacaaaggagcuggccca

SEQ ID NO: 119026 - RNA, 24 nt, Human
uuugaugucaacaucaaagaagga

SEQ ID NO: 119027 - RNA, 30 nt, Human
uuuuuuuuauuguuuuuuuuuuuuuuuuuu

SEQ ID NO: 119028 - RNA, 24 nt, Human
uuuuuuuuuuaaaaccacauacuu

SEQ ID NO: 119029 - RNA, 24 nt, Human
uuuuuuuuuuuuuuuauuguuuuu

SEQ ID NO: 119030 - RNA, 23 nt, Human
aaaagguuuauugcuuauaaaaa

SEQ ID NO: 119031 - RNA, 21 nt, Human
aagccccacaaaacacaagaa

SEQ ID NO: 119032 - RNA, 24 nt, Human
aaguuaccaaaacccaagccccac

SEQ ID NO: 119033 - RNA, 19 nt, Human
acaaaacacaagaaccccg

SEQ ID NO: 119034 - RNA, 21 nt, Human
accaaaacccaagccccacaa

SEQ ID NO: 119035 - RNA, 18 nt, Human
acccaagccccacaaaac

SEQ ID NO: 119036 - RNA, 18 nt, Human
agacaccagcacugccga

SEQ ID NO: 119037 - RNA, 21 nt, Human
aggagcagcuguacacaucug

SEQ ID NO: 119038 - RNA, 22 nt, Human
caaaacacaagaaccccgcaug

SEQ ID NO: 119039 - RNA, 22 nt, Human
caaaacccaagccccacaaaac

SEQ ID NO: 119040 - RNA, 19 nt, Human
caagaaccccgcaugacga

SEQ ID NO: 119041 - RNA, 23 nt, Human
caagaaccccgcaugacgauacc

SEQ ID NO: 119042 - RNA, 22 nt, Human
caagccccacaaaacacaagaa

SEQ ID NO: 119043 - RNA, 26 nt, Human
cagcucgcggagacgacagacaccag

SEQ ID NO: 119044 - RNA, 21 nt, Human
ccaaaacccaagccccacaaa

SEQ ID NO: 119045 - RNA, 25 nt, Human
ccaaaacccaagccccacaaaacac

SEQ ID NO: 119046 - RNA, 22 nt, Human
ccacaaaacacaagaaccccgc

SEQ ID NO: 119047 - RNA, 18 nt, Human
cccaagccccacaaaaca

SEQ ID NO: 119048 - RNA, 20 nt, Human
cccacaaaacacaagaaccc

SEQ ID NO: 119049 - RNA, 21 nt, Human
cccacaaaacacaagaacccc

SEQ ID NO: 119050 - RNA, 19 nt, Human
cccaugaacacaagggcuc

SEQ ID NO: 119051 - RNA, 23 nt, Human
ccucugcacacauggcgcugcuu

SEQ ID NO: 119052 - RNA, 21 nt, Human
cuggguggggucugaggcugg

SEQ ID NO: 119053 - RNA, 18 nt, Human
cuguacacaucugggcag

SEQ ID NO: 119054 - RNA, 21 nt, Human
gaaggugcuggguggggucug

SEQ ID NO: 119055 - RNA, 19 nt, Human
gcagugaggaaccagcuga

SEQ ID NO: 119056 - RNA, 20 nt, Human
gccccacaaaacacaagaac

SEQ ID NO: 119057 - RNA, 21 nt, Human
ggguggggucugaggcugggg

SEQ ID NO: 119058 - RNA, 22 nt, Human
ggguggggucugaggcuggggc

SEQ ID NO: 119059 - RNA, 21 nt, Human
guuaccaaaacccaagcccca

SEQ ID NO: 119060 - RNA, 24 nt, Human
uacaaaagguuuauugcuuauaaa

SEQ ID NO: 119061 - RNA, 23 nt, Human
uaccaaaacccaagccccacaaa

SEQ ID NO: 119062 - RNA, 26 nt, Human
uaccaaaacccaagccccacaaaaca

SEQ ID NO: 119063 - RNA, 21 nt, Human
uaccagguucuagaaaggucu

SEQ ID NO: 119064 - RNA, 24 nt, Human
uaccagguucuagaaaggucuucu

SEQ ID NO: 119065 - RNA, 25 nt, Human
ucuaccagguucuagaaaggucuuc

SEQ ID NO: 119066 - RNA, 21 nt, Human
ugcgugucugggaaggugcug

SEQ ID NO: 119067 - RNA, 22 nt, Human
ugcuggguggggucugaggcuc

SEQ ID NO: 119068 - RNA, 23 nt, Human
uuuaugaaagggaggagcagcug

SEQ ID NO: 119069 - RNA, 20 nt, Human
aaaaaagaaaaagaaacauc

SEQ ID NO: 119070 - RNA, 19 nt, Human
aaaagaaaaagaaacaucu

SEQ ID NO: 119071 - RNA, 26 nt, Human
aagcacuaggauuauaagugugagcc

SEQ ID NO: 119072 - RNA, 21 nt, Human
aagugugagccaccguaccca

SEQ ID NO: 119073 - RNA, 23 nt, Human
acacugguagccgccuuccccuc

SEQ ID NO: 119074 - RNA, 19 nt, Human
agcucaagugauccucuca

SEQ ID NO: 119075 - RNA, 22 nt, Human
agugaaacuucucuuaagacug

SEQ ID NO: 119076 - RNA, 28 nt, Human
caaaagaaaaugaacuaauauaugaugg

SEQ ID NO: 119077 - RNA, 24 nt, Human
caaagcacuaggauuauaagugug

SEQ ID NO: 119078 - RNA, 23 nt, Human
caacagcagcuaacacuuugcuu

SEQ ID NO: 119079 - RNA, 27 nt, Human
caagugauccucucacaucaaccuccc

SEQ ID NO: 119080 - RNA, 24 nt, Human
cacaucaaccucccaaagcacuag

SEQ ID NO: 119081 - RNA, 24 nt, Human
cacuaggauuauaagugugagcca

SEQ ID NO: 119082 - RNA, 21 nt, Human
cauacaacagcagcuaacacu

SEQ ID NO: 119083 - RNA, 21 nt, Human
caucaaccucccaaagcacua

SEQ ID NO: 119084 - RNA, 21 nt, Human
ccagcccauaccccacuuugc

SEQ ID NO: 119085 - RNA, 20 nt, Human
cccauacaacagcagcuaac

SEQ ID NO: 119086 - RNA, 20 nt, Human
ccucccaaagcacuaggauu

SEQ ID NO: 119087 - RNA, 22 nt, Human
ccucucacaucaaccucccaaa

SEQ ID NO: 119088 - RNA, 20 nt, Human
ccugagcucaagugauccuc

SEQ ID NO: 119089 - RNA, 24 nt, Human
cucaagugauccucucacaucaac

SEQ ID NO: 119090 - RNA, 18 nt, Human
gauuauaagugugagcca

SEQ ID NO: 119091 - RNA, 24 nt, Human
gauuauaagugugagccaccguac

SEQ ID NO: 119092 - RNA, 20 nt, Human
ggaaaaaaagaaaaagaaac

SEQ ID NO: 119093 - RNA, 22 nt, Human
ggauuauaagugugagccaccg

SEQ ID NO: 119094 - RNA, 22 nt, Human
gugagccaccguacccagccca

SEQ ID NO: 119095 - RNA, 21 nt, Human
uaggauuauaagugugagcca

SEQ ID NO: 119096 - RNA, 22 nt, Human
uaggauuauaagugugagccac

SEQ ID NO: 119097 - RNA, 23 nt, Human
uaggauuauaagugugagccacc

SEQ ID NO: 119098 - RNA, 24 nt, Human
uaggauuauaagugugagccaccg

SEQ ID NO: 119099 - RNA, 22 nt, Human
uauguugcccccauuggucuca

SEQ ID NO: 119100 - RNA, 24 nt, Human
uauguugcccccauuggucucaaa

SEQ ID NO: 119101 - RNA, 22 nt, Human
ucaaaaggaaaaaaagaaaaag

SEQ ID NO: 119102 - RNA, 24 nt, Human
ucaaaaggaaaaaaagaaaaagaa

SEQ ID NO: 119103 - RNA, 19 nt, Human
ucacaucaaccucccaaag

SEQ ID NO: 119104 - RNA, 19 nt, Human
ucccauacaacagcagcua

SEQ ID NO: 119105 - RNA, 23 nt, Human
ucucaaauuccugagcucaagug

SEQ ID NO: 119106 - RNA, 23 nt, Human
ucucacaucaaccucccaaagca

SEQ ID NO: 119107 - RNA, 24 nt, Human
ucucacuauguugcccccauuggu

SEQ ID NO: 119108 - RNA, 18 nt, Human
ugagcucaagugauccuc

SEQ ID NO: 119109 - RNA, 19 nt, Human
ugagcucaagugauccucu

SEQ ID NO: 119110 - RNA, 18 nt, Human
uguuuacauuuuuaguga

SEQ ID NO: 119111 - RNA, 18 nt, Human
uuaaagcuguuuacauuu

SEQ ID NO: 119112 - RNA, 25 nt, Human
uuccugagcucaagugauccucuca

SEQ ID NO: 119113 - RNA, 19 nt, Human
uuuacugcaacucuaaaac

SEQ ID NO: 119114 - RNA, 21 nt, Human
uuuuuagugaaacuucucuua

SEQ ID NO: 119115 - RNA, 24 nt, Human
aaaaacaaaaaaacaagccagaga

SEQ ID NO: 119116 - RNA, 25 nt, Human
aaaaacaaaaaaacaagccagagaa

SEQ ID NO: 119117 - RNA, 23 nt, Human
aaaacaaaaaaacaagccagaga

SEQ ID NO: 119118 - RNA, 24 nt, Human
aaacagaugugaggauaagaagac

SEQ ID NO: 119119 - RNA, 22 nt, Human
aaagcaaauaagccaaaggagg

SEQ ID NO: 119120 - RNA, 25 nt, Human
aaagcaaauaagccaaaggagguuu

SEQ ID NO: 119121 - RNA, 19 nt, Human
aacaaaaaaacaagccaga

SEQ ID NO: 119122 - RNA, 20 nt, Human
aacauggcaaaaccccgucu

SEQ ID NO: 119123 - RNA, 21 nt, Human
aacauggcaaaaccccgucuc

SEQ ID NO: 119124 - RNA, 22 nt, Human
aaugguaagaaaggcagcuaug

SEQ ID NO: 119125 - RNA, 24 nt, Human
aauugcuugaacccaagaggcgga

SEQ ID NO: 119126 - RNA, 19 nt, Human
acagguguaaaggugagaa

SEQ ID NO: 119127 - RNA, 22 nt, Human
acugcccuucaaaccaaaaugg

SEQ ID NO: 119128 - RNA, 21 nt, Human
agaaagaggccgggcauggug

SEQ ID NO: 119129 - RNA, 22 nt, Human
agaaaggagacuaaaaucugga

SEQ ID NO: 119130 - RNA, 23 nt, Human
agaaaggagacuaaaaucuggaa

SEQ ID NO: 119131 - RNA, 23 nt, Human
agacagcucuggcuuucuuccuu

SEQ ID NO: 119132 - RNA, 21 nt, Human
agacagguguaaaggugagaa

SEQ ID NO: 119133 - RNA, 22 nt, Human
agacuaaaaucuggaaaagcaa

SEQ ID NO: 119134 - RNA, 24 nt, Human
agagagcgagacuccaucucaaaa

SEQ ID NO: 119135 - RNA, 22 nt, Human
agaggcggagguugcagugagc

SEQ ID NO: 119136 - RNA, 19 nt, Human
agccacauuucugcacucu

SEQ ID NO: 119137 - RNA, 23 nt, Human
agccgggcgugguggcacaugcc

SEQ ID NO: 119138 - RNA, 18 nt, Human
agccuggccaacauggca

SEQ ID NO: 119139 - RNA, 24 nt, Human
agccuggccaacauggcaaaaccc

SEQ ID NO: 119140 - RNA, 24 nt, Human
agccugggcaagagagcgagacuc

SEQ ID NO: 119141 - RNA, 23 nt, Human
agcuaugaacauggggaagacaa

SEQ ID NO: 119142 - RNA, 24 nt, Human
agcuaugaacauggggaagacaag

SEQ ID NO: 119143 - RNA, 26 nt, Human
aggcagauggaucaucugaagucaag

SEQ ID NO: 119144 - RNA, 22 nt, Human
aggccgggcaugguggcucacg

SEQ ID NO: 119145 - RNA, 20 nt, Human
aggcggagguugcagugagc

SEQ ID NO: 119146 - RNA, 24 nt, Human
aggcggagguugcagugagcugag

SEQ ID NO: 119147 - RNA, 21 nt, Human
agguugcagugagcugagaac

SEQ ID NO: 119148 - RNA, 23 nt, Human
augcagcagaauugcuugaaccc

SEQ ID NO: 119149 - RNA, 22 nt, Human
auugcacuccagccugggcaag

SEQ ID NO: 119150 - RNA, 18 nt, Human
caaaaaaaaggugagaaa

SEQ ID NO: 119151 - RNA, 19 nt, Human
caacagccugggcuguugg

SEQ ID NO: 119152 - RNA, 24 nt, Human
caacauggcaaaaccccgucucuu

SEQ ID NO: 119153 - RNA, 22 nt, Human
cacgccuguaaucccagcacug

SEQ ID NO: 119154 - RNA, 23 nt, Human
cacuccagccugggcaagagagc

SEQ ID NO: 119155 - RNA, 24 nt, Human
cacuccagccugggcaagagagcg

SEQ ID NO: 119156 - RNA, 24 nt, Human
cagauggaucaucugaagucaaga

SEQ ID NO: 119157 - RNA, 22 nt, Human
cagcacugugggaggcccaagg

SEQ ID NO: 119158 - RNA, 25 nt, Human
cagcacugugggaggcccaaggcag

SEQ ID NO: 119159 - RNA, 21 nt, Human
cagcagaauugcuugaaccca

SEQ ID NO: 119160 - RNA, 18 nt, Human
cagcucuggcuuucuucc

SEQ ID NO: 119161 - RNA, 20 nt, Human
cauugcacuccagccugggc

SEQ ID NO: 119162 - RNA, 21 nt, Human
cauugcacuccagccugggca

SEQ ID NO: 119163 - RNA, 22 nt, Human
cauugcacuccagccugggcaa

SEQ ID NO: 119164 - RNA, 22 nt, Human
cauugcacuccagccugggcaa

SEQ ID NO: 119165 - RNA, 23 nt, Human
cauugcacuccagccugggcaag

SEQ ID NO: 119166 - RNA, 24 nt, Human
cauugcacuccagccugggcaaga

SEQ ID NO: 119167 - RNA, 24 nt, Human
ccaaggcagauggaucaucugaag

SEQ ID NO: 119168 - RNA, 27 nt, Human
ccaaggcagauggaucaucugaaguca

SEQ ID NO: 119169 - RNA, 20 nt, Human
ccauugcacuccagccuggg

SEQ ID NO: 119170 - RNA, 21 nt, Human
ccauugcacuccagccugggc

SEQ ID NO: 119171 - RNA, 22 nt, Human
ccauugcacuccagccugggca

SEQ ID NO: 119172 - RNA, 24 nt, Human
ccauugcacuccagccugggcaag

SEQ ID NO: 119173 - RNA, 22 nt, Human
cccagguacucgggaggcugau

SEQ ID NO: 119174 - RNA, 23 nt, Human
ccuggccaacauggcaaaacccc

SEQ ID NO: 119175 - RNA, 24 nt, Human
ccuggccaacauggcaaaaccccg

SEQ ID NO: 119176 - RNA, 22 nt, Human
ccugggcaagagagcgagacuc

SEQ ID NO: 119177 - RNA, 21 nt, Human
ccuguaaucccagcacugugg

SEQ ID NO: 119178 - RNA, 21 nt, Human
cgagaccagccuggccaacau

SEQ ID NO: 119179 - RNA, 23 nt, Human
cgagacuccaucucaaaaaaaag

SEQ ID NO: 119180 - RNA, 24 nt, Human
cgccuguaaucccagcacuguggg

SEQ ID NO: 119181 - RNA, 19 nt, Human
cucaaaaaaaaggugagaa

SEQ ID NO: 119182 - RNA, 22 nt, Human
cucacgccuguaaucccagcac

SEQ ID NO: 119183 - RNA, 23 nt, Human
cucacgccuguaaucccagcacu

SEQ ID NO: 119184 - RNA, 25 nt, Human
cucuggcuuucuuccuuuuccaacu

SEQ ID NO: 119185 - RNA, 24 nt, Human
cuggaaaagcaaauaagccaaagg

SEQ ID NO: 119186 - RNA, 18 nt, Human
gaaaggcagcuaugaaca

SEQ ID NO: 119187 - RNA, 22 nt, Human
gaccaagugaagaccauuguga

SEQ ID NO: 119188 - RNA, 23 nt, Human
gagaacgugccauugcacuccag

SEQ ID NO: 119189 - RNA, 23 nt, Human
gagaguaaagagaaggcucugag

SEQ ID NO: 119190 - RNA, 20 nt, Human
gagguugcagugagcugaga

SEQ ID NO: 119191 - RNA, 19 nt, Human
gaucaucugaagucaagag

SEQ ID NO: 119192 - RNA, 24 nt, Human
gaucaucugaagucaagaguucga

SEQ ID NO: 119193 - RNA, 23 nt, Human
gcaggugugaagauaggaaaggc

SEQ ID NO: 119194 - RNA, 21 nt, Human
gccaacauggcaaaaccccgu

SEQ ID NO: 119195 - RNA, 19 nt, Human
gccauugcacuccagccug

SEQ ID NO: 119196 - RNA, 22 nt, Human
gccauugcacuccagccugggc

SEQ ID NO: 119197 - RNA, 24 nt, Human
gccauugcacuccagccugggcaa

SEQ ID NO: 119198 - RNA, 23 nt, Human
gccugggcaagagagcgagacuc

SEQ ID NO: 119199 - RNA, 19 nt, Human
ggagaugcaaaguggggca

SEQ ID NO: 119200 - RNA, 21 nt, Human
ggagguugcagugagcugaga

SEQ ID NO: 119201 - RNA, 24 nt, Human
ggagguugcagugagcugagaacg

SEQ ID NO: 119202 - RNA, 20 nt, Human
ggaucaucugaagucaagaa

SEQ ID NO: 119203 - RNA, 21 nt, Human
ggcacaugccuguaaucccag

SEQ ID NO: 119204 - RNA, 23 nt, Human
ggcaugguggcucacgccuguaa

SEQ ID NO: 119205 - RNA, 23 nt, Human
ggcgugguggcacaugccuguaa

SEQ ID NO: 119206 - RNA, 21 nt, Human
gggaaaaacaaaaaaacaagc

SEQ ID NO: 119207 - RNA, 24 nt, Human
gguggcucacgccuguaaucccag

SEQ ID NO: 119208 - RNA, 18 nt, Human
gguguaaaggugagaaag

SEQ ID NO: 119209 - RNA, 23 nt, Human
guggcacaugccuguaaucccag

SEQ ID NO: 119210 - RNA, 23 nt, Human
guggcucacgccuguaaucccag

SEQ ID NO: 119211 - RNA, 24 nt, Human
guugcagugagcugagaacgugcc

SEQ ID NO: 119212 - RNA, 22 nt, Human
uaaaaauacaaaauuagccggg

SEQ ID NO: 119213 - RNA, 23 nt, Human
uaaaaauacaaaauuagccgggc

SEQ ID NO: 119214 - RNA, 19 nt, Human
uaagaaaggcagcuaugaa

SEQ ID NO: 119215 - RNA, 22 nt, Human
uagccgggcgugguggcacaug

SEQ ID NO: 119216 - RNA, 25 nt, Human
ucaaaaaaaaggugagaaagauagg

SEQ ID NO: 119217 - RNA, 27 nt, Human
ucaaaccaaaaugguaagaaaggcagu

SEQ ID NO: 119218 - RNA, 23 nt, Human
uccagccugggcaagagagcgag

SEQ ID NO: 119219 - RNA, 24 nt, Human
uccagccugggcaagagagcgaga

SEQ ID NO: 119220 - RNA, 24 nt, Human
uccugaacgccaagaggaagucuc

SEQ ID NO: 119221 - RNA, 19 nt, Human
ucgggaggcugaugcagca

SEQ ID NO: 119222 - RNA, 23 nt, Human
ucgggaggcugaugcagcagaau

SEQ ID NO: 119223 - RNA, 19 nt, Human
ucucuacucaacuuguuuu

SEQ ID NO: 119224 - RNA, 22 nt, Human
ucugaagucaagaguucgagac

SEQ ID NO: 119225 - RNA, 21 nt, Human
ugaggaagacagggaugaagg

SEQ ID NO: 119226 - RNA, 18 nt, Human
ugagguaucaacagccug

SEQ ID NO: 119227 - RNA, 19 nt, Human
ugcacuccagccugggcaa

SEQ ID NO: 119228 - RNA, 22 nt, Human
ugcacuccagccugggcaagag

SEQ ID NO: 119229 - RNA, 21 nt, Human
ugcagcagaauugcuugaacc

SEQ ID NO: 119230 - RNA, 23 nt, Human
ugccuguaaucccagguacucgg

SEQ ID NO: 119231 - RNA, 24 nt, Human
ugccuguaaucccagguacucggg

SEQ ID NO: 119232 - RNA, 24 nt, Human
uggaaaagcaaauaagccaaagga

SEQ ID NO: 119233 - RNA, 24 nt, Human
uggaucaucugaagucaagaguuc

SEQ ID NO: 119234 - RNA, 21 nt, Human
uggcacaugccuguaauccca

SEQ ID NO: 119235 - RNA, 22 nt, Human
uggcacaugccuguaaucccag

SEQ ID NO: 119236 - RNA, 22 nt, Human
uggcucacgccuguaaucccag

SEQ ID NO: 119237 - RNA, 24 nt, Human
uggcucacgccuguaaucccagca

SEQ ID NO: 119238 - RNA, 20 nt, Human
ugggaaaaacaaaaaaacaa

SEQ ID NO: 119239 - RNA, 21 nt, Human
ugggaaaaacaaaaaaacaag

SEQ ID NO: 119240 - RNA, 26 nt, Human
ugggaaaaacaaaaaaacaagccaga

SEQ ID NO: 119241 - RNA, 19 nt, Human
ugggaggcccaaggcagau

SEQ ID NO: 119242 - RNA, 25 nt, Human
ugggaggcccaaggcagauggauca

SEQ ID NO: 119243 - RNA, 24 nt, Human
ugguggcacaugccuguaauccca

SEQ ID NO: 119244 - RNA, 24 nt, Human
ugguggcucacgccuguaauccca

SEQ ID NO: 119245 - RNA, 19 nt, Human
ugugaaaacagaugugagg

SEQ ID NO: 119246 - RNA, 24 nt, Human
ugugaagauaggaaaggcaggcuc

SEQ ID NO: 119247 - RNA, 22 nt, Human
ugugaggcuggagaaauuuagc

SEQ ID NO: 119248 - RNA, 18 nt, Human
uuagccgggcgugguggc

SEQ ID NO: 119249 - RNA, 20 nt, Human
uuagccgggcgugguggcac

SEQ ID NO: 119250 - RNA, 24 nt, Human
uuagccgggcgugguggcacaugc

SEQ ID NO: 119251 - RNA, 24 nt, Human
uugaacccaagaggcggagguugc

SEQ ID NO: 119252 - RNA, 22 nt, Human
uugcagugagcugagaacgugc

SEQ ID NO: 119253 - RNA, 24 nt, Human
uugcuugaacccaagaggcggagg

SEQ ID NO: 119254 - RNA, 22 nt, Human
uuuuuuuuuuuuacucaauaaa

SEQ ID NO: 119255 - RNA, 24 nt, Human
aaaaaaacaccuuucacauguucu

SEQ ID NO: 119256 - RNA, 18 nt, Human
aacuugcaugaguucaua

SEQ ID NO: 119257 - RNA, 23 nt, Human
agaaaagcaaagcgucaccagga

SEQ ID NO: 119258 - RNA, 21 nt, Human
agaagaaaagcaaagcgucac

SEQ ID NO: 119259 - RNA, 23 nt, Human
agaaggaggcacuuucucaccaa

SEQ ID NO: 119260 - RNA, 19 nt, Human
agagguccugauccuggga

SEQ ID NO: 119261 - RNA, 25 nt, Human
aguucauauuggaaaaaaaaaacac

SEQ ID NO: 119262 - RNA, 22 nt, Human
cagaagaaaagcaaagcgucac

SEQ ID NO: 119263 - RNA, 18 nt, Human
ccugaaauccaggaguuc

SEQ ID NO: 119264 - RNA, 21 nt, Human
cugauccugggaagaaggagg

SEQ ID NO: 119265 - RNA, 19 nt, Human
gagugugugugcagaaugu

SEQ ID NO: 119266 - RNA, 30 nt, Human
gugugagagugugugugugugugugugugg

SEQ ID NO: 119267 - RNA, 20 nt, Human
gugugugugugugugugugu

SEQ ID NO: 119268 - RNA, 26 nt, Human
uaaaacuagugcgcucuaagggcaca

SEQ ID NO: 119269 - RNA, 23 nt, Human
ucugggcgagugugagagugugu

SEQ ID NO: 119270 - RNA, 22 nt, Human
ugggaagaaggaggcacuuucu

SEQ ID NO: 119271 - RNA, 26 nt, Human
ugugagugugugugcagaaugucucu

SEQ ID NO: 119272 - RNA, 18 nt, Human
ugugugagugugugugca

SEQ ID NO: 119273 - RNA, 22 nt, Human
ugugugagugugugugcagaau

SEQ ID NO: 119274 - RNA, 19 nt, Human
ugugugugcagaaugucuc

SEQ ID NO: 119275 - RNA, 20 nt, Human
ugugugugugugagugugug

SEQ ID NO: 119276 - RNA, 21 nt, Human
ugugugugugugagugugugu

SEQ ID NO: 119277 - RNA, 21 nt, Human
ugugugugugugagugugugu

SEQ ID NO: 119278 - RNA, 21 nt, Human
ugugugugugugugagugugu

SEQ ID NO: 119279 - RNA, 25 nt, Human
ugugugugugugugugagugugugu

SEQ ID NO: 119280 - RNA, 18 nt, Human
ugugugugugugugugug

SEQ ID NO: 119281 - RNA, 18 nt, Human
ugugugugugugugugug

SEQ ID NO: 119282 - RNA, 25 nt, Human
ugugugugugugugugugagugugu

SEQ ID NO: 119283 - RNA, 20 nt, Human
ugugugugugugugugugug

SEQ ID NO: 119284 - RNA, 21 nt, Human
ugugugugugugugugugugu

SEQ ID NO: 119285 - RNA, 21 nt, Human
ugugugugugugugugugugu

SEQ ID NO: 119286 - RNA, 22 nt, Human
ugugugugugugugugugugug

SEQ ID NO: 119287 - RNA, 19 nt, Human
uuggaagcuggagaucaag

SEQ ID NO: 119288 - RNA, 20 nt, Human
uuugucucugggcgagugug

SEQ ID NO: 119289 - RNA, 22 nt, Human
aaaaaugacuccgaggagggga

SEQ ID NO: 119290 - RNA, 22 nt, Human
aaacauuauuaucaaagagugc

SEQ ID NO: 119291 - RNA, 25 nt, Human
aaagaaacagagacagagaacuuaa

SEQ ID NO: 119292 - RNA, 21 nt, Human
aacaggaaaaaaugacuccga

SEQ ID NO: 119293 - RNA, 21 nt, Human
aaccggaggggaaugagcccc

SEQ ID NO: 119294 - RNA, 24 nt, Human
aacugcuuuccaucaaugaagaau

SEQ ID NO: 119295 - RNA, 19 nt, Human
acagaaaugucauuagaaa

SEQ ID NO: 119296 - RNA, 21 nt, Human
accaaggcggccccuaaagac

SEQ ID NO: 119297 - RNA, 24 nt, Human
acuccgaggaggggaccggagaag

SEQ ID NO: 119298 - RNA, 21 nt, Human
agaaccggaggggaaugagcc

SEQ ID NO: 119299 - RNA, 21 nt, Human
agacagagaacuuaacacaug

SEQ ID NO: 119300 - RNA, 25 nt, Human
agccccugucggcgacgcugucucu

SEQ ID NO: 119301 - RNA, 18 nt, Human
agccggcacggacggccc

SEQ ID NO: 119302 - RNA, 19 nt, Human
aggcgggggcgcuggaggc

SEQ ID NO: 119303 - RNA, 19 nt, Human
caaaacggcccgcccgagg

SEQ ID NO: 119304 - RNA, 24 nt, Human
caacaguauuccuccugaauguuu

SEQ ID NO: 119305 - RNA, 19 nt, Human
caaccgccuggaggcgacg

SEQ ID NO: 119306 - RNA, 22 nt, Human
caaggcggccccuaaagacaaa

SEQ ID NO: 119307 - RNA, 18 nt, Human
caccuucgcuuccaagag

SEQ ID NO: 119308 - RNA, 19 nt, Human
caguggaaagaugaaugga

SEQ ID NO: 119309 - RNA, 19 nt, Human
cccgcgcccgccgcaaccg

SEQ ID NO: 119310 - RNA, 23 nt, Human
cccggggcgugaggaaagggcgg

SEQ ID NO: 119311 - RNA, 20 nt, Human
ccgaggugagucaccgagga

SEQ ID NO: 119312 - RNA, 20 nt, Human
ccuccuuuuuucccacugac

SEQ ID NO: 119313 - RNA, 19 nt, Human
cgccacgacggcccgagcc

SEQ ID NO: 119314 - RNA, 19 nt, Human
cggcagagggggaacagga

SEQ ID NO: 119315 - RNA, 21 nt, Human
cggccccuaaagacaaaacgg

SEQ ID NO: 119316 - RNA, 24 nt, Human
cggccccuaaagacaaaacggccc

SEQ ID NO: 119317 - RNA, 22 nt, Human
cggcccgagccggcacggacgg

SEQ ID NO: 119318 - RNA, 21 nt, Human
cggcccgggagaaaggaccgg

SEQ ID NO: 119319 - RNA, 18 nt, Human
cugcaacaguauuccucc

SEQ ID NO: 119320 - RNA, 21 nt, Human
cugucggcgacgcugucucuc

SEQ ID NO: 119321 - RNA, 22 nt, Human
gaaaagcuauugaacuccccac

SEQ ID NO: 119322 - RNA, 25 nt, Human
gaaaagcuauugaacuccccaccaa

SEQ ID NO: 119323 - RNA, 23 nt, Human
gaaaccucgccccaccaaggcgg

SEQ ID NO: 119324 - RNA, 19 nt, Human
gagaaaggaccgggaacgg

SEQ ID NO: 119325 - RNA, 21 nt, Human
gagcucgagucgccacgacgg

SEQ ID NO: 119326 - RNA, 23 nt, Human
gcggguccuccacggagaaauuc

SEQ ID NO: 119327 - RNA, 20 nt, Human
ggaccggagaaggcgggggc

SEQ ID NO: 119328 - RNA, 18 nt, Human
ggagaaggcgggggcgcu

SEQ ID NO: 119329 - RNA, 18 nt, Human
ggcgcuggaggcgcagug

SEQ ID NO: 119330 - RNA, 18 nt, Human
gggaacaggaaaaaauga

SEQ ID NO: 119331 - RNA, 22 nt, Human
ggggaccggagaaggcgggggc

SEQ ID NO: 119332 - RNA, 18 nt, Human
uaaacaacaucaagaaaa

SEQ ID NO: 119333 - RNA, 25 nt, Human
uaacuuaauugaaaagcuauugaac

SEQ ID NO: 119334 - RNA, 30 nt, Human
uaagcaaauucucuugccaaguucuuuauu

SEQ ID NO: 119335 - RNA, 22 nt, Human
uacaaauuaccaauuguccucu

SEQ ID NO: 119336 - RNA, 20 nt, Human
uaucaaagagugcaaaguua

SEQ ID NO: 119337 - RNA, 18 nt, Human
ucacggaaaccucgcccc

SEQ ID NO: 119338 - RNA, 23 nt, Human
ucagcugcaacaguauuccuccu

SEQ ID NO: 119339 - RNA, 19 nt, Human
ucauagccgacaccuucgc

SEQ ID NO: 119340 - RNA, 19 nt, Human
uccaagagaauugccucac

SEQ ID NO: 119341 - RNA, 21 nt, Human
ucuaaaaaccuccuuuuuucc

SEQ ID NO: 119342 - RNA, 22 nt, Human
ucuaaaaaccuccuuuuuuccc

SEQ ID NO: 119343 - RNA, 29 nt, Human
ucuaaaaaccuccuuuuuucccacugacu

SEQ ID NO: 119344 - RNA, 23 nt, Human
ugacuccgaggaggggaccggag

SEQ ID NO: 119345 - RNA, 19 nt, Human
ugaggaaagggcggcagag

SEQ ID NO: 119346 - RNA, 20 nt, Human
ugaggaaagggcggcagagg

SEQ ID NO: 119347 - RNA, 23 nt, Human
ugggucuauacuaauugugacug

SEQ ID NO: 119348 - RNA, 22 nt, Human
uuaacacaugauacuuccacaa

SEQ ID NO: 119349 - RNA, 19 nt, Human
uuaacagaggcuacaauac

SEQ ID NO: 119350 - RNA, 18 nt, Human
uuccaagagaauugccuc

SEQ ID NO: 119351 - RNA, 18 nt, Human
uuuacauuaagcaaauuc

SEQ ID NO: 119352 - RNA, 24 nt, Human
uuuuuuuuuuuuuuuuucauauuu

SEQ ID NO: 119353 - RNA, 23 nt, Human
aaaaauccaaacaggaaucagcc

SEQ ID NO: 119354 - RNA, 23 nt, Human
aaacaagugaauauucacaaagg

SEQ ID NO: 119355 - RNA, 21 nt, Human
aaaccucccaccuacugcucc

SEQ ID NO: 119356 - RNA, 23 nt, Human
aacacaccuucccagcaauagaa

SEQ ID NO: 119357 - RNA, 18 nt, Human
aaccuggucuccuccugg

SEQ ID NO: 119358 - RNA, 20 nt, Human
aagcccccaacccaaugcuc

SEQ ID NO: 119359 - RNA, 22 nt, Human
aaggaacaaugacagcugggau

SEQ ID NO: 119360 - RNA, 19 nt, Human
acaaguccaggacaggccc

SEQ ID NO: 119361 - RNA, 21 nt, Human
acacacacacacacguaccac

SEQ ID NO: 119362 - RNA, 21 nt, Human
acacacacacacacguaccac

SEQ ID NO: 119363 - RNA, 22 nt, Human
acacacacacacguaccacaca

SEQ ID NO: 119364 - RNA, 31 nt, Human
acacacacguaccacacacgcacacacacag

SEQ ID NO: 119365 - RNA, 26 nt, Human
acacaccuucccagcaauagaaaauc

SEQ ID NO: 119366 - RNA, 31 nt, Human
acacacgcacacacacacacacacuuugugg

SEQ ID NO: 119367 - RNA, 21 nt, Human
acacgcacacacacacacaca

SEQ ID NO: 119368 - RNA, 23 nt, Human
acaguaccaggcauaccccacac

SEQ ID NO: 119369 - RNA, 22 nt, Human
accacacacgcacacacacaca

SEQ ID NO: 119370 - RNA, 23 nt, Human
accacucccuccucugcacacgc

SEQ ID NO: 119371 - RNA, 18 nt, Human
acccugcccuucccucuu

SEQ ID NO: 119372 - RNA, 23 nt, Human
accugagcugggagaagggaggc

SEQ ID NO: 119373 - RNA, 19 nt, Human
acgcacacacacacacaca

SEQ ID NO: 119374 - RNA, 20 nt, Human
acggagcaagggcucugcag

SEQ ID NO: 119375 - RNA, 23 nt, Human
acgugaggagggagggaaggagg

SEQ ID NO: 119376 - RNA, 19 nt, Human
acuggcgugcuacagguac

SEQ ID NO: 119377 - RNA, 24 nt, Human
acuuuguggcucaagugcaggcca

SEQ ID NO: 119378 - RNA, 19 nt, Human
agaaagcaggaacucagca

SEQ ID NO: 119379 - RNA, 27 nt, Human
agacuagaaugguuucccuggcugggu

SEQ ID NO: 119380 - RNA, 20 nt, Human
agcagggcucuggcugccuc

SEQ ID NO: 119381 - RNA, 24 nt, Human
agcauccauccacuccggccugcu

SEQ ID NO: 119382 - RNA, 20 nt, Human
agccuugugucuggaggccc

SEQ ID NO: 119383 - RNA, 19 nt, Human
aggacagugagggacaggg

SEQ ID NO: 119384 - RNA, 21 nt, Human
aggugugcugucuuaggcucc

SEQ ID NO: 119385 - RNA, 18 nt, Human
aguccuuggagcucagcu

SEQ ID NO: 119386 - RNA, 18 nt, Human
agugagggacagggcugg

SEQ ID NO: 119387 - RNA, 19 nt, Human
auggccucaugcucagucc

SEQ ID NO: 119388 - RNA, 20 nt, Human
caaggacagaggacagugag

SEQ ID NO: 119389 - RNA, 18 nt, Human
cacaaacaggcacaccac

SEQ ID NO: 119390 - RNA, 20 nt, Human
cacacaaacaggcacaccac

SEQ ID NO: 119391 - RNA, 21 nt, Human
cacacacaaacaggcacacca

SEQ ID NO: 119392 - RNA, 18 nt, Human
cacacacacacuuugugg

SEQ ID NO: 119393 - RNA, 20 nt, Human
cacacgcacacacacacaca

SEQ ID NO: 119394 - RNA, 18 nt, Human
caccauggagcuccaggc

SEQ ID NO: 119395 - RNA, 30 nt, Human
cacguaccacacacgcacacacacacacag

SEQ ID NO: 119396 - RNA, 18 nt, Human
cacuccuggaaugcaagg

SEQ ID NO: 119397 - RNA, 23 nt, Human
cacugcaaccuggucuccuccug

SEQ ID NO: 119398 - RNA, 21 nt, Human
cagaaucccagcuaggguccu

SEQ ID NO: 119399 - RNA, 19 nt, Human
cagaggccagguggcuacg

SEQ ID NO: 119400 - RNA, 29 nt, Human
cagaugcaugcacacacaaacaggcacag

SEQ ID NO: 119401 - RNA, 20 nt, Human
cagccacccccgcuccgccc

SEQ ID NO: 119402 - RNA, 22 nt, Human
cagccacccccgcuccgccccg

SEQ ID NO: 119403 - RNA, 18 nt, Human
cagccagaacugcugugc

SEQ ID NO: 119404 - RNA, 18 nt, Human
cagcuccuggguaggcuc

SEQ ID NO: 119405 - RNA, 19 nt, Human
caggaagaagccugucagu

SEQ ID NO: 119406 - RNA, 22 nt, Human
caggacaggcccuggaagccaa

SEQ ID NO: 119407 - RNA, 19 nt, Human
cagggccaccugagcuggg

SEQ ID NO: 119408 - RNA, 24 nt, Human
cauaccccacaccagucagguauc

SEQ ID NO: 119409 - RNA, 24 nt, Human
caugaagccaccauggagcuccag

SEQ ID NO: 119410 - RNA, 24 nt, Human
ccacugcaaccuggucuccuccug

SEQ ID NO: 119411 - RNA, 28 nt, Human
ccaggacaggcccuggaagccaacagaa

SEQ ID NO: 119412 - RNA, 19 nt, Human
ccagucagguaucugugug

SEQ ID NO: 119413 - RNA, 20 nt, Human
cccaacccaaugcucugaau

SEQ ID NO: 119414 - RNA, 22 nt, Human
cccagaagcccaaggaagggcc

SEQ ID NO: 119415 - RNA, 21 nt, Human
ccccuucacagcuccugggua

SEQ ID NO: 119416 - RNA, 21 nt, Human
cccucucuacccugcccuucc

SEQ ID NO: 119417 - RNA, 19 nt, Human
cccuggaagccaacagaau

SEQ ID NO: 119418 - RNA, 28 nt, Human
ccucauagccacacacacacacacguag

SEQ ID NO: 119419 - RNA, 19 nt, Human
ccuggcugggugucagcug

SEQ ID NO: 119420 - RNA, 23 nt, Human
cgagccuugugucuggaggccgg

SEQ ID NO: 119421 - RNA, 23 nt, Human
cguaccacacacgcacacacagg

SEQ ID NO: 119422 - RNA, 18 nt, Human
cucacuggcagcacugug

SEQ ID NO: 119423 - RNA, 19 nt, Human
cucacuggcagcacugugg

SEQ ID NO: 119424 - RNA, 19 nt, Human
cucauagccacacacacac

SEQ ID NO: 119425 - RNA, 28 nt, Human
cucauagccacacacacacacacguacc

SEQ ID NO: 119426 - RNA, 21 nt, Human
cucugcugcugcgguggcugc

SEQ ID NO: 119427 - RNA, 19 nt, Human
cugcaaccuggucuccucc

SEQ ID NO: 119428 - RNA, 20 nt, Human
cugggccucggccuuuggcc

SEQ ID NO: 119429 - RNA, 20 nt, Human
cuggggcugagggaacaggg

SEQ ID NO: 119430 - RNA, 19 nt, Human
cuuucuggcaguggcccga

SEQ ID NO: 119431 - RNA, 21 nt, Human
gaaacacaccuucccagcaau

SEQ ID NO: 119432 - RNA, 22 nt, Human
gacagcauccauccacuccggc

SEQ ID NO: 119433 - RNA, 23 nt, Human
gacccuugccccuucacagcucc

SEQ ID NO: 119434 - RNA, 18 nt, Human
gagcugggagaagggagg

SEQ ID NO: 119435 - RNA, 19 nt, Human
gaggacagugagggacagg

SEQ ID NO: 119436 - RNA, 21 nt, Human
gaggacagugagggacagggc

SEQ ID NO: 119437 - RNA, 21 nt, Human
gauagcugacauggcagucug

SEQ ID NO: 119438 - RNA, 23 nt, Human
gcacacacaaacaggcacaccac

SEQ ID NO: 119439 - RNA, 27 nt, Human
gcacacgcgcacacacacacacauggu

SEQ ID NO: 119440 - RNA, 19 nt, Human
gccagagaaaccagggggc

SEQ ID NO: 119441 - RNA, 18 nt, Human
gcccugcuccccucccac

SEQ ID NO: 119442 - RNA, 18 nt, Human
gccuuggaguguggccag

SEQ ID NO: 119443 - RNA, 23 nt, Human
gcgcacacacacacacaugcucg

SEQ ID NO: 119444 - RNA, 25 nt, Human
gcgcacacacacacacaugcucgcu

SEQ ID NO: 119445 - RNA, 23 nt, Human
gcggaggugguccugccaaccug

SEQ ID NO: 119446 - RNA, 21 nt, Human
gcugcugcgguggcugcuugg

SEQ ID NO: 119447 - RNA, 19 nt, Human
ggaaggaagaggugggagg

SEQ ID NO: 119448 - RNA, 26 nt, Human
ggagggaaggaggucuaggggucgac

SEQ ID NO: 119449 - RNA, 21 nt, Human
ggcaguggcccgauucucuuu

SEQ ID NO: 119450 - RNA, 21 nt, Human
ggcaugaagccaccauggagc

SEQ ID NO: 119451 - RNA, 18 nt, Human
ggccacaggguggaagga

SEQ ID NO: 119452 - RNA, 19 nt, Human
ggcugagaaaaccugagga

SEQ ID NO: 119453 - RNA, 18 nt, Human
gggaagagagccagcagc

SEQ ID NO: 119454 - RNA, 20 nt, Human
gggaaggaggucuagggagg

SEQ ID NO: 119455 - RNA, 19 nt, Human
gggagaagggaggcaugaa

SEQ ID NO: 119456 - RNA, 18 nt, Human
gggcuggggccaaaagaa

SEQ ID NO: 119457 - RNA, 23 nt, Human
ggucacaggggagguagaaagga

SEQ ID NO: 119458 - RNA, 22 nt, Human
guagaaaggaaaaggcccaaag

SEQ ID NO: 119459 - RNA, 24 nt, Human
gucaaaccucccaccuacugcucc

SEQ ID NO: 119460 - RNA, 19 nt, Human
gucacaggggagguagaaa

SEQ ID NO: 119461 - RNA, 20 nt, Human
gucagaaagcaggaacucag

SEQ ID NO: 119462 - RNA, 23 nt, Human
gucuggaugcugacaaguccagg

SEQ ID NO: 119463 - RNA, 24 nt, Human
uaacagaucugaggcuaggaaagg

SEQ ID NO: 119464 - RNA, 21 nt, Human
uaccacacacgcacacacaca

SEQ ID NO: 119465 - RNA, 26 nt, Human
uacccugcccuucccucuuggcucca

SEQ ID NO: 119466 - RNA, 22 nt, Human
uacucccccagcccaggcaaca

SEQ ID NO: 119467 - RNA, 18 nt, Human
uacuggacauacccucuc

SEQ ID NO: 119468 - RNA, 19 nt, Human
uacugggauagcugacaug

SEQ ID NO: 119469 - RNA, 21 nt, Human
uauaaagugcauuuugccugc

SEQ ID NO: 119470 - RNA, 22 nt, Human
ucaaaccucccaccuacugcuc

SEQ ID NO: 119471 - RNA, 21 nt, Human
ucagacaaggcagcuggcuug

SEQ ID NO: 119472 - RNA, 19 nt, Human
ucagguaucuguguguacu

SEQ ID NO: 119473 - RNA, 22 nt, Human
ucagucccagaagcccaaggaa

SEQ ID NO: 119474 - RNA, 21 nt, Human
uccaggucagaaagcaggaac

SEQ ID NO: 119475 - RNA, 19 nt, Human
ucccaccuacugcuccugg

SEQ ID NO: 119476 - RNA, 22 nt, Human
ucccucugccugaguccuugga

SEQ ID NO: 119477 - RNA, 23 nt, Human
ucccucugccugaguccuuggag

SEQ ID NO: 119478 - RNA, 19 nt, Human
ucccucuuggcuccaggag

SEQ ID NO: 119479 - RNA, 21 nt, Human
uccuggaaugcaaggauuggc

SEQ ID NO: 119480 - RNA, 22 nt, Human
uccuggguaggcucugaggcug

SEQ ID NO: 119481 - RNA, 19 nt, Human
ucucagauuugcccuucca

SEQ ID NO: 119482 - RNA, 20 nt, Human
ucucgacuggggcugaggga

SEQ ID NO: 119483 - RNA, 23 nt, Human
ucucuauaaagugcauuuugccu

SEQ ID NO: 119484 - RNA, 22 nt, Human
ucucuuuccucucgacuggggc

SEQ ID NO: 119485 - RNA, 28 nt, Human
ucugcacacgcgcacacacacacacagu

SEQ ID NO: 119486 - RNA, 20 nt, Human
ucugcugcugcgguggcugc

SEQ ID NO: 119487 - RNA, 19 nt, Human
ugacagcugggauucucuu

SEQ ID NO: 119488 - RNA, 20 nt, Human
ugagggaacagggaagcccc

SEQ ID NO: 119489 - RNA, 18 nt, Human
ugccuccagaaucccaug

SEQ ID NO: 119490 - RNA, 20 nt, Human
ugccugaguccuuggagcuc

SEQ ID NO: 119491 - RNA, 22 nt, Human
ugccugaguccuuggagcucag

SEQ ID NO: 119492 - RNA, 20 nt, Human
uggaaggaaugguguucugg

SEQ ID NO: 119493 - RNA, 18 nt, Human
uggcagugggaaggaaga

SEQ ID NO: 119494 - RNA, 21 nt, Human
uggcucaagugcaggccacag

SEQ ID NO: 119495 - RNA, 23 nt, Human
ugggacugagcccaguagcagag

SEQ ID NO: 119496 - RNA, 23 nt, Human
ugggaggcacaggccacuccugg

SEQ ID NO: 119497 - RNA, 23 nt, Human
ugggcacccaggcuuugcucacg

SEQ ID NO: 119498 - RNA, 19 nt, Human
uggguguaaucucuacuug

SEQ ID NO: 119499 - RNA, 24 nt, Human
uggugccuuggaguguggccagag

SEQ ID NO: 119500 - RNA, 21 nt, Human
ugguggagaaguaggcggagg

SEQ ID NO: 119501 - RNA, 24 nt, Human
uguccagacugcuccagccacccc

SEQ ID NO: 119502 - RNA, 18 nt, Human
uguuccgagggagcccuc

SEQ ID NO: 119503 - RNA, 18 nt, Human
uugccccuucacagcucc

SEQ ID NO: 119504 - RNA, 24 nt, Human
aagccccggccccacgggccucac

SEQ ID NO: 119505 - RNA, 20 nt, Human
aaggaaaaaagggaagcaaa

SEQ ID NO: 119506 - RNA, 23 nt, Human
acccugagacccuaagcucuccu

SEQ ID NO: 119507 - RNA, 18 nt, Human
acgggccucacgcgcccc

SEQ ID NO: 119508 - RNA, 24 nt, Human
acgggccucacgcgccccaggagg

SEQ ID NO: 119509 - RNA, 19 nt, Human
agacagacaccccgcccuc

SEQ ID NO: 119510 - RNA, 19 nt, Human
aggaaaaaagggaagcaaa

SEQ ID NO: 119511 - RNA, 20 nt, Human
aggaagacggucugagagaa

SEQ ID NO: 119512 - RNA, 18 nt, Human
aggugcacagaagccccg

SEQ ID NO: 119513 - RNA, 22 nt, Human
cagcggggccucugggcagcgc

SEQ ID NO: 119514 - RNA, 18 nt, Human
caggagucagcggggccc

SEQ ID NO: 119515 - RNA, 20 nt, Human
cauguccccaagagcggcac

SEQ ID NO: 119516 - RNA, 25 nt, Human
ccacggggaccuggaggcuggcagg

SEQ ID NO: 119517 - RNA, 24 nt, Human
ccacuggccggugucggggucugg

SEQ ID NO: 119518 - RNA, 21 nt, Human
ccccaggggagccaggcugcu

SEQ ID NO: 119519 - RNA, 25 nt, Human
ccccgcccucagggugcucccccca

SEQ ID NO: 119520 - RNA, 20 nt, Human
ccgcggagggaggcugcagg

SEQ ID NO: 119521 - RNA, 23 nt, Human
ccugagacccuaagcucuccugg

SEQ ID NO: 119522 - RNA, 22 nt, Human
ccuggccggaggucacccccuc

SEQ ID NO: 119523 - RNA, 22 nt, Human
cgccgcggagggaggcugcagg

SEQ ID NO: 119524 - RNA, 20 nt, Human
cggagggaggcugcaggugu

SEQ ID NO: 119525 - RNA, 22 nt, Human
cucuccuggcugcucucucaaa

SEQ ID NO: 119526 - RNA, 21 nt, Human
cugcaccccaggggagccagg

SEQ ID NO: 119527 - RNA, 21 nt, Human
cuggcaggagucagcggggcc

SEQ ID NO: 119528 - RNA, 22 nt, Human
gaagaggccgcgagagcccagg

SEQ ID NO: 119529 - RNA, 21 nt, Human
gacccauguccccaagagcgg

SEQ ID NO: 119530 - RNA, 25 nt, Human
gagaagguggaaaggaaaaaaggga

SEQ ID NO: 119531 - RNA, 18 nt, Human
gcacagaagccccggccc

SEQ ID NO: 119532 - RNA, 21 nt, Human
gcaccccaggggagccaggcu

SEQ ID NO: 119533 - RNA, 18 nt, Human
ggaccuggaggcuggcag

SEQ ID NO: 119534 - RNA, 21 nt, Human
ggggaccuggaggcuggcagg

SEQ ID NO: 119535 - RNA, 18 nt, Human
gucacccccuccuucugg

SEQ ID NO: 119536 - RNA, 22 nt, Human
gucacccccuccuucuggaccc

SEQ ID NO: 119537 - RNA, 19 nt, Human
uaucuaaaggagugugagg

SEQ ID NO: 119538 - RNA, 23 nt, Human
uccuggcugcucucucaaacccu

SEQ ID NO: 119539 - RNA, 26 nt, Human
ugaggcgccugcaccccaggggagcc

SEQ ID NO: 119540 - RNA, 18 nt, Human
uggaaaggaaaaaaggga

SEQ ID NO: 119541 - RNA, 19 nt, Human
ugggcagggcccgccgcgg

SEQ ID NO: 119542 - RNA, 19 nt, Human
ugggccagggcugcagggg

SEQ ID NO: 119543 - RNA, 23 nt, Human
uguccccaagagcggcacuacau

SEQ ID NO: 119544 - RNA, 19 nt, Human
ugucggggucugggacacc

SEQ ID NO: 119545 - RNA, 25 nt, Human
ugugucaggaggcaccuggccggag

SEQ ID NO: 119546 - RNA, 20 nt, Human
uugccgcgggcugcgcucuc

SEQ ID NO: 119547 - RNA, 20 nt, Human
aagcuucagcacuagucaca

SEQ ID NO: 119548 - RNA, 21 nt, Human
uaagcuucagcacuagucaca

SEQ ID NO: 119549 - RNA, 21 nt, Human
ugaaugauauuuuauuagcuu

SEQ ID NO: 119550 - RNA, 22 nt, Human
ugcccuuagcauuaauaagcuu

SEQ ID NO: 119551 - RNA, 19 nt, Human
uggcuaggugagugugagg

SEQ ID NO: 119552 - RNA, 21 nt, Human
uucuuguuuuaaaaaaugcaa

SEQ ID NO: 119553 - RNA, 20 nt, Human
ugucugugagcagaacauaa

SEQ ID NO: 119554 - RNA, 21 nt, Human
agagggcauucaccggguggg

SEQ ID NO: 119555 - RNA, 19 nt, Human
aggaaccuuuauugagugu

SEQ ID NO: 119556 - RNA, 19 nt, Human
cccgcgcuccccucccuuc

SEQ ID NO: 119557 - RNA, 19 nt, Human
cccucccuuccccacccca

SEQ ID NO: 119558 - RNA, 22 nt, Human
cucccuuccccaccccagcaga

SEQ ID NO: 119559 - RNA, 23 nt, Human
cucgcagucuucccgcgcucccc

SEQ ID NO: 119560 - RNA, 18 nt, Human
cuggacccggcugccagg

SEQ ID NO: 119561 - RNA, 26 nt, Human
gagggcauucaccgggugggugagcg

SEQ ID NO: 119562 - RNA, 18 nt, Human
gaguguccucagggaagg

SEQ ID NO: 119563 - RNA, 21 nt, Human
gauucaggaaccuuuauugag

SEQ ID NO: 119564 - RNA, 22 nt, Human
gccccguuucgagccacacaca

SEQ ID NO: 119565 - RNA, 21 nt, Human
gcuccccucccuuccccaccc

SEQ ID NO: 119566 - RNA, 23 nt, Human
uauugaguguccucagggaaggu

SEQ ID NO: 119567 - RNA, 19 nt, Human
ugaguguccucagggaagg

SEQ ID NO: 119568 - RNA, 21 nt, Human
ugaguguccucagggaaggug

SEQ ID NO: 119569 - RNA, 19 nt, Human
ugccaggggcucgcagucu

SEQ ID NO: 119570 - RNA, 21 nt, Human
uggcaggaagauucaggaacc

SEQ ID NO: 119571 - RNA, 23 nt, Human
uuuggcaggaagauucaggaacc

SEQ ID NO: 119572 - RNA, 23 nt, Human
uuuuuuuuuuuuuuuuuggcagg

SEQ ID NO: 119573 - RNA, 20 nt, Human
uuuuuuuuuuuuuuuuuugg

SEQ ID NO: 119574 - RNA, 21 nt, Human
aaggagagaacacaccacagc

SEQ ID NO: 119575 - RNA, 19 nt, Human
acaccacagccuccagagc

SEQ ID NO: 119576 - RNA, 20 nt, Human
accacagccuccagagcgcc

SEQ ID NO: 119577 - RNA, 21 nt, Human
agagaacacaccacagccucc

SEQ ID NO: 119578 - RNA, 18 nt, Human
agauaaggcacgcaugcg

SEQ ID NO: 119579 - RNA, 19 nt, Human
agguuacagggggaggcag

SEQ ID NO: 119580 - RNA, 21 nt, Human
cacaccacagccuccagagcg

SEQ ID NO: 119581 - RNA, 18 nt, Human
cacagguuacagggggag

SEQ ID NO: 119582 - RNA, 22 nt, Human
ccuccagagcgccuccauugca

SEQ ID NO: 119583 - RNA, 18 nt, Human
cuuccgagauaggcccag

SEQ ID NO: 119584 - RNA, 23 nt, Human
gcacgcaugcgcuccuccgugcc

SEQ ID NO: 119585 - RNA, 23 nt, Human
uuuuuugugcugacugugcacgg

SEQ ID NO: 119586 - RNA, 21 nt, Human
acuugcuacuuccugcuggag

SEQ ID NO: 119587 - RNA, 19 nt, Human
caggcaggcgggcaggugc

SEQ ID NO: 119588 - RNA, 22 nt, Human
cccgccugcaaaagucugggga

SEQ ID NO: 119589 - RNA, 18 nt, Human
gacaggcaggcgggcagg

SEQ ID NO: 119590 - RNA, 23 nt, Human
uccugcuggaggacaggcaggcg

SEQ ID NO: 119591 - RNA, 18 nt, Human
aaggaggcauggugggga

SEQ ID NO: 119592 - RNA, 22 nt, Human
aaggaggcaugguggggagggc

SEQ ID NO: 119593 - RNA, 24 nt, Human
aggucuggaggguuccugggcagc

SEQ ID NO: 119594 - RNA, 20 nt, Human
cacuuuauucuucacuugga

SEQ ID NO: 119595 - RNA, 18 nt, Human
ccugggcagcagaccugg

SEQ ID NO: 119596 - RNA, 18 nt, Human
gaaggaggcauggugggg

SEQ ID NO: 119597 - RNA, 23 nt, Human
gaccuggguccugggaaggaggc

SEQ ID NO: 119598 - RNA, 22 nt, Human
ggaaggaggcaugguggggagg

SEQ ID NO: 119599 - RNA, 22 nt, Human
ggaaggaggcaugguggggagg

SEQ ID NO: 119600 - RNA, 24 nt, Human
gggaaggaggcaugguggggaggg

SEQ ID NO: 119601 - RNA, 23 nt, Human
gggcagcagaccuggguccuggg

SEQ ID NO: 119602 - RNA, 24 nt, Human
gggcagcagaccuggguccuggga

SEQ ID NO: 119603 - RNA, 18 nt, Human
gucuggaggguuccuggg

SEQ ID NO: 119604 - RNA, 19 nt, Human
ugggaaggaggcauggugg

SEQ ID NO: 119605 - RNA, 26 nt, Human
acccuggagccuccucuucuugcccu

SEQ ID NO: 119606 - RNA, 23 nt, Human
accucuggcuguugcuguagccu

SEQ ID NO: 119607 - RNA, 22 nt, Human
agaggagccacggccgucugca

SEQ ID NO: 119608 - RNA, 18 nt, Human
ccccagggugggucuggg

SEQ ID NO: 119609 - RNA, 21 nt, Human
cccccagggugggucuggguc

SEQ ID NO: 119610 - RNA, 20 nt, Human
ccucuggcuguugcuguagc

SEQ ID NO: 119611 - RNA, 21 nt, Human
ccuugcagccccccagggugg

SEQ ID NO: 119612 - RNA, 18 nt, Human
cggcccucgccccaaccc

SEQ ID NO: 119613 - RNA, 24 nt, Human
cucgccccaacccuggagccuccc

SEQ ID NO: 119614 - RNA, 24 nt, Human
gccccaacccuggagccuccucuu

SEQ ID NO: 119615 - RNA, 20 nt, Human
ggggaccaaccccaggcuuu

SEQ ID NO: 119616 - RNA, 21 nt, Human
uauugagcagauuccagggaa

SEQ ID NO: 119617 - RNA, 23 nt, Human
uccccaggaacaccucuggcugu

SEQ ID NO: 119618 - RNA, 25 nt, Human
ugauagggacaaaggggcaacuggu

SEQ ID NO: 119619 - RNA, 18 nt, Human
uggcaaaaacaacacaaa

SEQ ID NO: 119620 - RNA, 23 nt, Human
uggcaaaaacaacacaaaaggga

SEQ ID NO: 119621 - RNA, 18 nt, Human
aaggagaaaaguggaaaa

SEQ ID NO: 119622 - RNA, 23 nt, Human
uuuaaaggagaaaaguggaaaac

SEQ ID NO: 119623 - RNA, 22 nt, Human
aagaacaacacaaaaggggccg

SEQ ID NO: 119624 - RNA, 19 nt, Human
cugcacagccagucuauau

SEQ ID NO: 119625 - RNA, 21 nt, Human
gcugcugcguuggcaagaaca

SEQ ID NO: 119626 - RNA, 18 nt, Human
uggcaagaacaacacaaa

SEQ ID NO: 119627 - RNA, 21 nt, Human
agaaacaacaaaggaggaccg

SEQ ID NO: 119628 - RNA, 27 nt, Human
aaagaucuagauuggugauccucuagg

SEQ ID NO: 119629 - RNA, 21 nt, Human
aagcauuuaaggagaggcauu

SEQ ID NO: 119630 - RNA, 20 nt, Human
aggcauuauagucagcagug

SEQ ID NO: 119631 - RNA, 30 nt, Human
cacaaggccagccagcauuugggccccagg

SEQ ID NO: 119632 - RNA, 27 nt, Human
cacuguggcgagcacuguauugcuggu

SEQ ID NO: 119633 - RNA, 24 nt, Human
cagcagugggaugcaugccaacug

SEQ ID NO: 119634 - RNA, 18 nt, Human
cauuuuguuuggcacaaa

SEQ ID NO: 119635 - RNA, 20 nt, Human
ccaacuguuuuauugaugau

SEQ ID NO: 119636 - RNA, 19 nt, Human
cuggcagauggguagcuuu

SEQ ID NO: 119637 - RNA, 23 nt, Human
cuuugugugacugcccacugugg

SEQ ID NO: 119638 - RNA, 20 nt, Human
uagauuggugaucuggcaga

SEQ ID NO: 119639 - RNA, 22 nt, Human
uauugcuggucccuagaagcau

SEQ ID NO: 119640 - RNA, 18 nt, Human
uauuuggaccacaaggcc

SEQ ID NO: 119641 - RNA, 18 nt, Human
ucuaaccuuuuaaugaga

SEQ ID NO: 119642 - RNA, 21 nt, Human
uggugcauagacugguuuucc

SEQ ID NO: 119643 - RNA, 18 nt, Human
ugugugacugcccacugu

SEQ ID NO: 119644 - RNA, 23 nt, Human
uguuuuauugaugaugccuauuu

SEQ ID NO: 119645 - RNA, 24 nt, Human
aagcacaaaaggagaguucacugg

SEQ ID NO: 119646 - RNA, 20 nt, Human
agaaauuaugagaaccagca

SEQ ID NO: 119647 - RNA, 22 nt, Human
agaacagaagaaauggcuaccu

SEQ ID NO: 119648 - RNA, 25 nt, Human
caacuacaaacauaaaugaggaucu

SEQ ID NO: 119649 - RNA, 21 nt, Human
ccagcagcaauauuccucaag

SEQ ID NO: 119650 - RNA, 19 nt, Human
cucaagcauccaucucaac

SEQ ID NO: 119651 - RNA, 18 nt, Human
gcagcaauauuccucaag

SEQ ID NO: 119652 - RNA, 18 nt, Human
ggacucccucauuuacuc

SEQ ID NO: 119653 - RNA, 24 nt, Human
uaugagaaccagcagcaauauucc

SEQ ID NO: 119654 - RNA, 27 nt, Human
ugauaagcacaaaaggagaguucacug

SEQ ID NO: 119655 - RNA, 22 nt, Human
uucagggaaauauaaagggaaa

SEQ ID NO: 119656 - RNA, 23 nt, Human
aaacacaucuauuauuuacaaca

SEQ ID NO: 119657 - RNA, 19 nt, Human
acccaauaaaaauauucac

SEQ ID NO: 119658 - RNA, 18 nt, Human
uuuuuuuuuuuuuuuuug

SEQ ID NO: 119659 - RNA, 24 nt, Human
uuuuuuuuuuuuuuuuuggcgcuu

SEQ ID NO: 119660 - RNA, 22 nt, Human
uuuuuuuuuuuuuuuuuuuggc

SEQ ID NO: 119661 - RNA, 20 nt, Human
aaaagacuuacacauccaaa

SEQ ID NO: 119662 - RNA, 19 nt, Human
aagguaaguaggcuugaaa

SEQ ID NO: 119663 - RNA, 23 nt, Human
aaugcacacucaugccaaaugac

SEQ ID NO: 119664 - RNA, 26 nt, Human
acaaaaauauuugacccucaccagaa

SEQ ID NO: 119665 - RNA, 24 nt, Human
acccucaccagaaaaacagauaac

SEQ ID NO: 119666 - RNA, 20 nt, Human
acuagagaaccuuuauaaag

SEQ ID NO: 119667 - RNA, 23 nt, Human
acucuaaaucuacucugaaaauc

SEQ ID NO: 119668 - RNA, 21 nt, Human
agacaaaugcagauaauucuu

SEQ ID NO: 119669 - RNA, 22 nt, Human
agauuaguuuagaauagagguu

SEQ ID NO: 119670 - RNA, 22 nt, Human
aguucagaaaauguucaaaguc

SEQ ID NO: 119671 - RNA, 18 nt, Human
aguuuagaauagagguuu

SEQ ID NO: 119672 - RNA, 22 nt, Human
caccagaaaaacagauaacucu

SEQ ID NO: 119673 - RNA, 24 nt, Human
caccagaaaaacagauaacucuaa

SEQ ID NO: 119674 - RNA, 22 nt, Human
cagucuuauuuugaacuagcau

SEQ ID NO: 119675 - RNA, 23 nt, Human
ccacagaaaugaggacugccaca

SEQ ID NO: 119676 - RNA, 23 nt, Human
ccucaccagaaaaacagauaacu

SEQ ID NO: 119677 - RNA, 24 nt, Human
cuagcauguuuuaaucaaagguau

SEQ ID NO: 119678 - RNA, 22 nt, Human
gagcagucuuauuuugaacuag

SEQ ID NO: 119679 - RNA, 19 nt, Human
ggaaugcacacucaugcca

SEQ ID NO: 119680 - RNA, 22 nt, Human
uacagucauggcuaaucagaga

SEQ ID NO: 119681 - RNA, 21 nt, Human
uaucaaagauaaagcuacuau

SEQ ID NO: 119682 - RNA, 22 nt, Human
uauggaauuaaucaaauaucaa

SEQ ID NO: 119683 - RNA, 20 nt, Human
ucaccagaaaaacagauaac

SEQ ID NO: 119684 - RNA, 21 nt, Human
ucugaaaaucuaaucaauugc

SEQ ID NO: 119685 - RNA, 26 nt, Human
ucuucagauuccacagaaaugaggac

SEQ ID NO: 119686 - RNA, 20 nt, Human
ugaaaacccuuggaaacuga

SEQ ID NO: 119687 - RNA, 24 nt, Human
uggauauuauuuauucuugccuuu

SEQ ID NO: 119688 - RNA, 23 nt, Human
ugggaaaauacugagaaaacuaa

SEQ ID NO: 119689 - RNA, 21 nt, Human
uguuaccagacaaaugcagag

SEQ ID NO: 119690 - RNA, 18 nt, Human
uucugcucucuaaagaaa

SEQ ID NO: 119691 - RNA, 22 nt, Human
uucugcucucuaaagaaaaauc

SEQ ID NO: 119692 - RNA, 24 nt, Human
uuugacccucaccagaaaaacaga

SEQ ID NO: 119693 - RNA, 23 nt, Human
uuugggaaaauacugagaaaacu

SEQ ID NO: 119694 - RNA, 20 nt, Human
aaagcagcaguuuucuucau

SEQ ID NO: 119695 - RNA, 21 nt, Human
aaagcagcaguuuucuucaug

SEQ ID NO: 119696 - RNA, 19 nt, Human
aacacuuuucaaauguguc

SEQ ID NO: 119697 - RNA, 19 nt, Human
aacuuguuuuaucuuccuu

SEQ ID NO: 119698 - RNA, 22 nt, Human
accaccgccaccuuccaguccu

SEQ ID NO: 119699 - RNA, 18 nt, Human
acugagcaucuugucuua

SEQ ID NO: 119700 - RNA, 21 nt, Human
agaauuuuucaaacacuuuuc

SEQ ID NO: 119701 - RNA, 22 nt, Human
caccaccgccaccuuccagucc

SEQ ID NO: 119702 - RNA, 19 nt, Human
caccgccaccuuccagucc

SEQ ID NO: 119703 - RNA, 23 nt, Human
ccucugagccgccccaacggccu

SEQ ID NO: 119704 - RNA, 22 nt, Human
ccugcaccuucaccaccgccac

SEQ ID NO: 119705 - RNA, 26 nt, Human
cgacugaggucugagaaagaagaaaa

SEQ ID NO: 119706 - RNA, 20 nt, Human
cggccugcaccuucaccacc

SEQ ID NO: 119707 - RNA, 21 nt, Human
cugaaagcagcaguuuucuuc

SEQ ID NO: 119708 - RNA, 18 nt, Human
cugccucugagccgcccc

SEQ ID NO: 119709 - RNA, 24 nt, Human
gacuuuugcugaaagcagcaguuu

SEQ ID NO: 119710 - RNA, 21 nt, Human
gcaccuucaccaccgccaccu

SEQ ID NO: 119711 - RNA, 23 nt, Human
ggccugcaacagcuuuuaucaag

SEQ ID NO: 119712 - RNA, 20 nt, Human
guucauccgacugaggucug

SEQ ID NO: 119713 - RNA, 23 nt, Human
uagcagagaaacgugcuuaaaaa

SEQ ID NO: 119714 - RNA, 19 nt, Human
ucaccaccgccaccuucca

SEQ ID NO: 119715 - RNA, 22 nt, Human
ugcaccuucaccaccgccaccu

SEQ ID NO: 119716 - RNA, 25 nt, Human
ugccucugagccgccccaacggccu

SEQ ID NO: 119717 - RNA, 18 nt, Human
uggaaggaauuuuauagc

SEQ ID NO: 119718 - RNA, 19 nt, Human
uggaaggaauuuuauagca

SEQ ID NO: 119719 - RNA, 20 nt, Human
uuccaaagaaaauucuggcu

SEQ ID NO: 119720 - RNA, 24 nt, Human
uugcugaaagcagcaguuuucuuc

SEQ ID NO: 119721 - RNA, 22 nt, Human
aaaacaguaaaaaccaggaaaa

SEQ ID NO: 119722 - RNA, 23 nt, Human
aaaacaguaaaaaccaggaaaaa

SEQ ID NO: 119723 - RNA, 18 nt, Human
aaacggaaaaaaaagcau

SEQ ID NO: 119724 - RNA, 24 nt, Human
aaagcaaaaauguuauccuccccu

SEQ ID NO: 119725 - RNA, 26 nt, Human
aaccaggaaaaaaaauagaaaccuag

SEQ ID NO: 119726 - RNA, 23 nt, Human
aaugaacaaaaacggaaaaaaaa

SEQ ID NO: 119727 - RNA, 30 nt, Human
accaaaacaguaaaaaccaggaaaaaaaaa

SEQ ID NO: 119728 - RNA, 19 nt, Human
acuuuauugcuuggauguu

SEQ ID NO: 119729 - RNA, 19 nt, Human
agaaauaaauaagaaggac

SEQ ID NO: 119730 - RNA, 20 nt, Human
agaaauaaauaagaaggaca

SEQ ID NO: 119731 - RNA, 23 nt, Human
agcgcggcugguggucgcggcgg

SEQ ID NO: 119732 - RNA, 20 nt, Human
aggcggcggcggccgagggg

SEQ ID NO: 119733 - RNA, 27 nt, Human
agguggggucgcgcggcggggcagcac

SEQ ID NO: 119734 - RNA, 22 nt, Human
cagcauccaaaaugaacaaaaa

SEQ ID NO: 119735 - RNA, 24 nt, Human
cauuuucuuuuuguagauguuucu

SEQ ID NO: 119736 - RNA, 25 nt, Human
ccaaaaugaacaaaaacggaaaaaa

SEQ ID NO: 119737 - RNA, 21 nt, Human
ccgauggugaaggugccugag

SEQ ID NO: 119738 - RNA, 19 nt, Human
ccgugcaggaauucccagg

SEQ ID NO: 119739 - RNA, 22 nt, Human
cggcggaggcggcucgagcuuc

SEQ ID NO: 119740 - RNA, 25 nt, Human
cuagaaauaaauaagaaggacauaa

SEQ ID NO: 119741 - RNA, 22 nt, Human
cuccccucauccuagaaauaaa

SEQ ID NO: 119742 - RNA, 21 nt, Human
cucgcggcgcaggcggcggcg

SEQ ID NO: 119743 - RNA, 19 nt, Human
cugaaacuggagaggcuac

SEQ ID NO: 119744 - RNA, 19 nt, Human
cugcuuuuugcuuuauuuc

SEQ ID NO: 119745 - RNA, 25 nt, Human
cugguggucgcggcggccggggcuc

SEQ ID NO: 119746 - RNA, 21 nt, Human
cuuuaggucaccugccgaugg

SEQ ID NO: 119747 - RNA, 20 nt, Human
gcucucggggaggccggggc

SEQ ID NO: 119748 - RNA, 20 nt, Human
gcugguggucgcggcggccg

SEQ ID NO: 119749 - RNA, 19 nt, Human
ggccggggcucgcucucgg

SEQ ID NO: 119750 - RNA, 18 nt, Human
ggcuacucucuugucuuc

SEQ ID NO: 119751 - RNA, 19 nt, Human
uaccaaaacaguaaaaacc

SEQ ID NO: 119752 - RNA, 27 nt, Human
uaccaaaacaguaaaaaccaggaaaaa

SEQ ID NO: 119753 - RNA, 18 nt, Human
uagaaaccuagcgguugc

SEQ ID NO: 119754 - RNA, 21 nt, Human
uauuucagauuucuuugguug

SEQ ID NO: 119755 - RNA, 23 nt, Human
ucaauauauauauuaccaaaaca

SEQ ID NO: 119756 - RNA, 24 nt, Human
uccaaaaugaacaaaaacggaaaa

SEQ ID NO: 119757 - RNA, 25 nt, Human
uccaaaaugaacaaaaacggaaaaa

SEQ ID NO: 119758 - RNA, 19 nt, Human
uccucugaaggguaaaaau

SEQ ID NO: 119759 - RNA, 19 nt, Human
ucgcucaggcgccucggug

SEQ ID NO: 119760 - RNA, 24 nt, Human
ucgcucucggggaggccggggcgg

SEQ ID NO: 119761 - RNA, 19 nt, Human
ucgguggcgguuggucggc

SEQ ID NO: 119762 - RNA, 23 nt, Human
ucuuugguguugguuaagguugu

SEQ ID NO: 119763 - RNA, 22 nt, Human
ucuuugguugggguucucccca

SEQ ID NO: 119764 - RNA, 20 nt, Human
ugaacaaaaacggaaaaaaa

SEQ ID NO: 119765 - RNA, 21 nt, Human
ugaacaaaaacggaaaaaaaa

SEQ ID NO: 119766 - RNA, 25 nt, Human
ugaacaaaaacggaaaaaaaagcau

SEQ ID NO: 119767 - RNA, 24 nt, Human
uuaaagaauaacaguaaacauucc

SEQ ID NO: 119768 - RNA, 23 nt, Human
uuacugcacauuuucaaagagag

SEQ ID NO: 119769 - RNA, 22 nt, Human
uucaauauauauauuaccaaaa

SEQ ID NO: 119770 - RNA, 18 nt, Human
uugacauuuucuuuuugu

SEQ ID NO: 119771 - RNA, 24 nt, Human
uugcuuggauguuucuuugguguu

SEQ ID NO: 119772 - RNA, 22 nt, Human
uugcuuuauuucugaaugguca

SEQ ID NO: 119773 - RNA, 18 nt, Human
uuuagcaccagcauccaa

SEQ ID NO: 119774 - RNA, 26 nt, Human
uuucuuguuucaauauauauauuacc

SEQ ID NO: 119775 - RNA, 18 nt, Human
uuuuuuuuuuuuccucug

SEQ ID NO: 119776 - RNA, 24 nt, Human
uuuuuuuuuuuuuuuuuccucuga

SEQ ID NO: 119777 - RNA, 25 nt, Human
aaacagacaaaaaauauaaaggaca

SEQ ID NO: 119778 - RNA, 24 nt, Human
aaaccgugcaaacgcucaacacaa

SEQ ID NO: 119779 - RNA, 27 nt, Human
aaaccgugcaaacgcucaguuaaagag

SEQ ID NO: 119780 - RNA, 19 nt, Human
aagcaacauuuaauauccu

SEQ ID NO: 119781 - RNA, 21 nt, Human
acauaacuguaugaucacaca

SEQ ID NO: 119782 - RNA, 22 nt, Human
acccacauaacuguaugaucac

SEQ ID NO: 119783 - RNA, 18 nt, Human
acccgcuccugccgccgc

SEQ ID NO: 119784 - RNA, 23 nt, Human
acuacccgcuccugccgccgcuc

SEQ ID NO: 119785 - RNA, 22 nt, Human
agaaacggaggagggaacccca

SEQ ID NO: 119786 - RNA, 24 nt, Human
agacaaaaaauauaaaggacaaga

SEQ ID NO: 119787 - RNA, 27 nt, Human
agacaaaaaauauaaaggacaagagaa

SEQ ID NO: 119788 - RNA, 22 nt, Human
agacaaaaaauauaaaggacug

SEQ ID NO: 119789 - RNA, 26 nt, Human
caaacuagaagccacccacauaacug

SEQ ID NO: 119790 - RNA, 26 nt, Human
caaauagcaacagcuucaaaacaaaa

SEQ ID NO: 119791 - RNA, 22 nt, Human
caacacaaaccaacgccauaca

SEQ ID NO: 119792 - RNA, 18 nt, Human
cacaguguccgucaaaau

SEQ ID NO: 119793 - RNA, 22 nt, Human
cagaagccugugauuuccuagg

SEQ ID NO: 119794 - RNA, 22 nt, Human
ccgccucacauucaaaccccgg

SEQ ID NO: 119795 - RNA, 24 nt, Human
ccgcugcagggggcggggccagga

SEQ ID NO: 119796 - RNA, 24 nt, Human
ccggcaaaauggcgcgacagcgag

SEQ ID NO: 119797 - RNA, 22 nt, Human
ccugaggccagagcgcaugagc

SEQ ID NO: 119798 - RNA, 21 nt, Human
cgacagcgagccugaggccag

SEQ ID NO: 119799 - RNA, 20 nt, Human
cuccugccgccgcuccgccu

SEQ ID NO: 119800 - RNA, 21 nt, Human
cugugauuuccuaggaaacca

SEQ ID NO: 119801 - RNA, 20 nt, Human
gaccguagcuggcacuaccc

SEQ ID NO: 119802 - RNA, 21 nt, Human
gauacagaaacggaggaggga

SEQ ID NO: 119803 - RNA, 27 nt, Human
gauuauccaaaccgugcaaacgcucaa

SEQ ID NO: 119804 - RNA, 18 nt, Human
gcagcugugcucagaagc

SEQ ID NO: 119805 - RNA, 29 nt, Human
gccagagcgcaugagcgagcggcccgguc

SEQ ID NO: 119806 - RNA, 19 nt, Human
gcuccugccgccgcuccgc

SEQ ID NO: 119807 - RNA, 18 nt, Human
ggauacagaaacggagga

SEQ ID NO: 119808 - RNA, 23 nt, Human
ggccagagcgcaugagcgagcgg

SEQ ID NO: 119809 - RNA, 22 nt, Human
ggggauacagaaacggaggagg

SEQ ID NO: 119810 - RNA, 22 nt, Human
uaaaagcguaaauaaacagaca

SEQ ID NO: 119811 - RNA, 22 nt, Human
uaguaacagaaagucuccacag

SEQ ID NO: 119812 - RNA, 22 nt, Human
uauccaaaccgugcaaacgcuc

SEQ ID NO: 119813 - RNA, 23 nt, Human
uccuuuguuuuaaugcagcugug

SEQ ID NO: 119814 - RNA, 19 nt, Human
ugagcgagcggcccgcugc

SEQ ID NO: 119815 - RNA, 24 nt, Human
ugcaaacgcucaacacaaaccaac

SEQ ID NO: 119816 - RNA, 23 nt, Human
ugcaaacgcucaacacaaaccuc

SEQ ID NO: 119817 - RNA, 18 nt, Human
ugcaaacuagaagccacc

SEQ ID NO: 119818 - RNA, 19 nt, Human
ugcuauaggaucucguggg

SEQ ID NO: 119819 - RNA, 23 nt, Human
uggcgcgacagcgagccugaggc

SEQ ID NO: 119820 - RNA, 20 nt, Human
ugugcacugcuuggcaagua

SEQ ID NO: 119821 - RNA, 18 nt, Human
uuaggauuuuuauugcug

SEQ ID NO: 119822 - RNA, 19 nt, Human
aagguccccugccuucuag

SEQ ID NO: 119823 - RNA, 24 nt, Human
acuggcuguuugucuuguuuuccu

SEQ ID NO: 119824 - RNA, 19 nt, Human
acuuggcucauuacagcag

SEQ ID NO: 119825 - RNA, 20 nt, Human
aggcggggggugagggcuca

SEQ ID NO: 119826 - RNA, 18 nt, Human
aggggugaggcuguggag

SEQ ID NO: 119827 - RNA, 18 nt, Human
aguaggggaggcgggggg

SEQ ID NO: 119828 - RNA, 23 nt, Human
cacccccaacuuuuagcugccac

SEQ ID NO: 119829 - RNA, 21 nt, Human
caccuucccaaguuucagagc

SEQ ID NO: 119830 - RNA, 20 nt, Human
caguaggggaggcggggggu

SEQ ID NO: 119831 - RNA, 22 nt, Human
ccaacaccaugagaacaguagg

SEQ ID NO: 119832 - RNA, 20 nt, Human
ccagaaugacgggacugggc

SEQ ID NO: 119833 - RNA, 21 nt, Human
ccuccccugaaucccucaccu

SEQ ID NO: 119834 - RNA, 21 nt, Human
ccucuucuuccccuuuuagcc

SEQ ID NO: 119835 - RNA, 20 nt, Human
ccugaaucccucaccuuccc

SEQ ID NO: 119836 - RNA, 23 nt, Human
ccugaaucccucaccuucccaag

SEQ ID NO: 119837 - RNA, 18 nt, Human
ccugccuucuagcccaga

SEQ ID NO: 119838 - RNA, 20 nt, Human
ccugccuucuagcccagaau

SEQ ID NO: 119839 - RNA, 21 nt, Human
ccugguuuucucaguaucagu

SEQ ID NO: 119840 - RNA, 22 nt, Human
ccugguuuucucaguaucagug

SEQ ID NO: 119841 - RNA, 21 nt, Human
ccuugggcugauccucuucuu

SEQ ID NO: 119842 - RNA, 23 nt, Human
cgaggccaacaccaugagaacca

SEQ ID NO: 119843 - RNA, 23 nt, Human
cuagcccagaaugacgggacugg

SEQ ID NO: 119844 - RNA, 21 nt, Human
cucacucucugccagucuguc

SEQ ID NO: 119845 - RNA, 24 nt, Human
cucagcccccagccccugacuggc

SEQ ID NO: 119846 - RNA, 18 nt, Human
cucccugucgucaacucc

SEQ ID NO: 119847 - RNA, 24 nt, Human
cucuuccucuucucucuucuccaa

SEQ ID NO: 119848 - RNA, 18 nt, Human
cugacuggcagugauggc

SEQ ID NO: 119849 - RNA, 18 nt, Human
cugugagcaucugcugcu

SEQ ID NO: 119850 - RNA, 19 nt, Human
cuuccucucuuccucuucc

SEQ ID NO: 119851 - RNA, 19 nt, Human
gagaacaguaggggaggcc

SEQ ID NO: 119852 - RNA, 20 nt, Human
gagcucucagcuacuagcuc

SEQ ID NO: 119853 - RNA, 18 nt, Human
gaggaggggagaguggua

SEQ ID NO: 119854 - RNA, 20 nt, Human
gauaaggggauuaggaaaga

SEQ ID NO: 119855 - RNA, 19 nt, Human
gccaagguccccugccuuc

SEQ ID NO: 119856 - RNA, 21 nt, Human
gccccauccauggaggaguug

SEQ ID NO: 119857 - RNA, 24 nt, Human
gcucauuacagcaguaccaguaug

SEQ ID NO: 119858 - RNA, 23 nt, Human
ggaagugggauccucugaccucc

SEQ ID NO: 119859 - RNA, 20 nt, Human
ggaggcggggggugagggcu

SEQ ID NO: 119860 - RNA, 18 nt, Human
ggcugcaaggugcccagg

SEQ ID NO: 119861 - RNA, 24 nt, Human
ggcuguuugucuuguuuuccucuu

SEQ ID NO: 119862 - RNA, 22 nt, Human
gggaguuugugcuuccugcuug

SEQ ID NO: 119863 - RNA, 22 nt, Human
gggggugggaggggugaggcug

SEQ ID NO: 119864 - RNA, 18 nt, Human
gugggaggggugaggcug

SEQ ID NO: 119865 - RNA, 25 nt, Human
uagcaaacacgaggccaacaccaug

SEQ ID NO: 119866 - RNA, 22 nt, Human
uaggggaggcggggggugaggg

SEQ ID NO: 119867 - RNA, 19 nt, Human
ucagagcugggccgagcug

SEQ ID NO: 119868 - RNA, 21 nt, Human
ucagcuugggggaguuugugc

SEQ ID NO: 119869 - RNA, 24 nt, Human
ucaguguagcuccuggggacuuca

SEQ ID NO: 119870 - RNA, 22 nt, Human
uccccugaaucccucaccuucc

SEQ ID NO: 119871 - RNA, 19 nt, Human
uccgcagggaucgggacac

SEQ ID NO: 119872 - RNA, 21 nt, Human
ucucucuucuccaccuucucc

SEQ ID NO: 119873 - RNA, 26 nt, Human
ucugugagcaucugcugcuccucuca

SEQ ID NO: 119874 - RNA, 22 nt, Human
ucuucuccaccuucuccucacu

SEQ ID NO: 119875 - RNA, 21 nt, Human
ugaaggcggcguauagggcag

SEQ ID NO: 119876 - RNA, 23 nt, Human
ugaccgaaggcagaguuuguaug

SEQ ID NO: 119877 - RNA, 18 nt, Human
ugaccuccccugaauccc

SEQ ID NO: 119878 - RNA, 18 nt, Human
uggaggaggggagagugg

SEQ ID NO: 119879 - RNA, 22 nt, Human
uggcauagcaaacacgaggcca

SEQ ID NO: 119880 - RNA, 19 nt, Human
ugggaggggugaggcugug

SEQ ID NO: 119881 - RNA, 18 nt, Human
ugggggugggagggguga

SEQ ID NO: 119882 - RNA, 21 nt, Human
ugggggugggaggggugaggc

SEQ ID NO: 119883 - RNA, 23 nt, Human
ugggggugggaggggugaggcug

SEQ ID NO: 119884 - RNA, 19 nt, Human
uguauguucuccccguguc

SEQ ID NO: 119885 - RNA, 19 nt, Human
uguucuccccgugucgccc

SEQ ID NO: 119886 - RNA, 19 nt, Human
uguuugucuuguuuuccuc

SEQ ID NO: 119887 - RNA, 23 nt, Human
uucuuccccuuuuagccuggccg

SEQ ID NO: 119888 - RNA, 20 nt, Human
uugaaguuuggaggagggga

SEQ ID NO: 119889 - RNA, 22 nt, Human
agcuccccggcuuggccagccu

SEQ ID NO: 119890 - RNA, 19 nt, Human
aucuugaauaaauauggaa

SEQ ID NO: 119891 - RNA, 20 nt, Human
caagaugaccauccugaguu

SEQ ID NO: 119892 - RNA, 19 nt, Human
caccauggcuguggcccac

SEQ ID NO: 119893 - RNA, 23 nt, Human
caggccacucccaccauggcugu

SEQ ID NO: 119894 - RNA, 26 nt, Human
cagggcagguccaggccacucccacc

SEQ ID NO: 119895 - RNA, 21 nt, Human
cagggucaguguggcccaggg

SEQ ID NO: 119896 - RNA, 19 nt, Human
ccuccaagaugaccauccu

SEQ ID NO: 119897 - RNA, 25 nt, Human
ccuccaagaugaccauccugaguuu

SEQ ID NO: 119898 - RNA, 23 nt, Human
cugccaugccuguaucaggguca

SEQ ID NO: 119899 - RNA, 18 nt, Human
cuguggcccaccccuugg

SEQ ID NO: 119900 - RNA, 21 nt, Human
cuuggccagccucaucuggcc

SEQ ID NO: 119901 - RNA, 22 nt, Human
uccaagaugaccauccugaguu

SEQ ID NO: 119902 - RNA, 18 nt, Human
ugaguuucuagcucuugu

SEQ ID NO: 119903 - RNA, 23 nt, Human
uggcccaccccuugguccccugg

SEQ ID NO: 119904 - RNA, 18 nt, Human
uggcuguggcccaccccu

SEQ ID NO: 119905 - RNA, 18 nt, Human
uggcuguggcccaccccu

SEQ ID NO: 119906 - RNA, 22 nt, Human
uguggcccaccccuuggucccu

SEQ ID NO: 119907 - RNA, 18 nt, Human
uucccauucuucugccau

SEQ ID NO: 119908 - RNA, 20 nt, Human
uucugucaguauaaaauauu

SEQ ID NO: 119909 - RNA, 20 nt, Human
aagcccucuccauccccuug

SEQ ID NO: 119910 - RNA, 24 nt, Human
aaugcagaaccuacaaauaaguua

SEQ ID NO: 119911 - RNA, 19 nt, Human
caagcccucuccauccccu

SEQ ID NO: 119912 - RNA, 22 nt, Human
cauguacgugugugugugugug

SEQ ID NO: 119913 - RNA, 22 nt, Human
ccggagcaaggcuaucuccuuu

SEQ ID NO: 119914 - RNA, 20 nt, Human
guuaaccugacaggaaaaau

SEQ ID NO: 119915 - RNA, 23 nt, Human
uacgugugugugugugugucugu

SEQ ID NO: 119916 - RNA, 19 nt, Human
ucaggcgggagggaaggca

SEQ ID NO: 119917 - RNA, 21 nt, Human
ucccaggccucuagcuaccuu

SEQ ID NO: 119918 - RNA, 23 nt, Human
ucccaggccucuagcuccgaccc

SEQ ID NO: 119919 - RNA, 19 nt, Human
ugacugaggaaggucaggc

SEQ ID NO: 119920 - RNA, 23 nt, Human
uggucagcucuggacaggcaggc

SEQ ID NO: 119921 - RNA, 20 nt, Human
uguacgugugugugugugug

SEQ ID NO: 119922 - RNA, 19 nt, Human
ugugugcauguacgugugu

SEQ ID NO: 119923 - RNA, 20 nt, Human
ugugugugugugugucugug

SEQ ID NO: 119924 - RNA, 22 nt, Human
ugugugugugugugucugugug

SEQ ID NO: 119925 - RNA, 19 nt, Human
uuucccaggccucuagcua

SEQ ID NO: 119926 - RNA, 23 nt, Human
aaagagucacaguccugacccuc

SEQ ID NO: 119927 - RNA, 19 nt, Human
aaauagagauaaauacaug

SEQ ID NO: 119928 - RNA, 21 nt, Human
aacagggauuucuugucuccc

SEQ ID NO: 119929 - RNA, 24 nt, Human
aagaagaaaaacgagauuccccag

SEQ ID NO: 119930 - RNA, 24 nt, Human
acaggccugacaugauuccuccug

SEQ ID NO: 119931 - RNA, 19 nt, Human
acaguggaggggacacugg

SEQ ID NO: 119932 - RNA, 18 nt, Human
accaggggcucacagcgg

SEQ ID NO: 119933 - RNA, 24 nt, Human
acccucgugggggcagggcaggug

SEQ ID NO: 119934 - RNA, 22 nt, Human
agaaaaacaggagacacgucgg

SEQ ID NO: 119935 - RNA, 20 nt, Human
aggaccaggggcucacagcg

SEQ ID NO: 119936 - RNA, 23 nt, Human
aggaccaggggcucacagcggcu

SEQ ID NO: 119937 - RNA, 23 nt, Human
aggcaggagaaugaaacucagaa

SEQ ID NO: 119938 - RNA, 22 nt, Human
aggggaugggaggacaggagcu

SEQ ID NO: 119939 - RNA, 21 nt, Human
augggauggggagggcuuggc

SEQ ID NO: 119940 - RNA, 25 nt, Human
caaggcaaauguccaggcaccugcc

SEQ ID NO: 119941 - RNA, 18 nt, Human
cacacaggccugacauga

SEQ ID NO: 119942 - RNA, 22 nt, Human
cacagccaaggggaugcagggg

SEQ ID NO: 119943 - RNA, 19 nt, Human
caccucugcuuguccaggg

SEQ ID NO: 119944 - RNA, 21 nt, Human
cagagccagggcuggggagca

SEQ ID NO: 119945 - RNA, 18 nt, Human
caggagcuuuuucucacu

SEQ ID NO: 119946 - RNA, 21 nt, Human
caggagcuuuuucucacugcu

SEQ ID NO: 119947 - RNA, 21 nt, Human
cagggaaggacacagaggccu

SEQ ID NO: 119948 - RNA, 23 nt, Human
ccaaaagucuuaagaagaaaaac

SEQ ID NO: 119949 - RNA, 18 nt, Human
ccagaaaaacaggagaca

SEQ ID NO: 119950 - RNA, 21 nt, Human
ccagagugaggggugcaagga

SEQ ID NO: 119951 - RNA, 18 nt, Human
ccagggccaugccuccca

SEQ ID NO: 119952 - RNA, 23 nt, Human
ccagugcccauugcagagccagg

SEQ ID NO: 119953 - RNA, 23 nt, Human
ccguucugcucuucccugucuuu

SEQ ID NO: 119954 - RNA, 20 nt, Human
ccuaucuaccucccagucca

SEQ ID NO: 119955 - RNA, 18 nt, Human
cucccucccacaucccca

SEQ ID NO: 119956 - RNA, 20 nt, Human
cucuggccaccucugcuugu

SEQ ID NO: 119957 - RNA, 19 nt, Human
cugucugcucccucccaca

SEQ ID NO: 119958 - RNA, 20 nt, Human
gaggggugcaaggacccaga

SEQ ID NO: 119959 - RNA, 21 nt, Human
ggaccaggggcucacagcggc

SEQ ID NO: 119960 - RNA, 23 nt, Human
gggaaggacacagaggccugggg

SEQ ID NO: 119961 - RNA, 18 nt, Human
gggauggggagggcuugg

SEQ ID NO: 119962 - RNA, 23 nt, Human
gggcugggcugcaggcuccgggc

SEQ ID NO: 119963 - RNA, 20 nt, Human
ggggacccucaggaccaggg

SEQ ID NO: 119964 - RNA, 20 nt, Human
ggggcugggcugcaggcucc

SEQ ID NO: 119965 - RNA, 19 nt, Human
gggucuggguggggcuggg

SEQ ID NO: 119966 - RNA, 21 nt, Human
gguggagggugacaguggagc

SEQ ID NO: 119967 - RNA, 23 nt, Human
gguggggcugggcugcaggcucc

SEQ ID NO: 119968 - RNA, 21 nt, Human
gucaaaccaugucccaaaagu

SEQ ID NO: 119969 - RNA, 21 nt, Human
gugcaaggacccagaugggga

SEQ ID NO: 119970 - RNA, 19 nt, Human
uauuuaccuaucuaccucc

SEQ ID NO: 119971 - RNA, 20 nt, Human
uccaggcaccugccuggccc

SEQ ID NO: 119972 - RNA, 22 nt, Human
uccugacccucgugggggcagg

SEQ ID NO: 119973 - RNA, 18 nt, Human
uccugucugcucccuccc

SEQ ID NO: 119974 - RNA, 18 nt, Human
uccuuucacacacaggcc

SEQ ID NO: 119975 - RNA, 19 nt, Human
ucugcucccucccacaucc

SEQ ID NO: 119976 - RNA, 22 nt, Human
ucuggguggggcugggcugcag

SEQ ID NO: 119977 - RNA, 19 nt, Human
ugcaaggacccagaugggg

SEQ ID NO: 119978 - RNA, 22 nt, Human
ugccuggcccuaaaaagaguca

SEQ ID NO: 119979 - RNA, 20 nt, Human
uggaggggacacuggugagu

SEQ ID NO: 119980 - RNA, 20 nt, Human
uggagggugacaguggagcu

SEQ ID NO: 119981 - RNA, 19 nt, Human
ugggauggggagggcuugg

SEQ ID NO: 119982 - RNA, 22 nt, Human
uggugaguggggggugaagagg

SEQ ID NO: 119983 - RNA, 19 nt, Human
ugugcagucggcugaggcc

SEQ ID NO: 119984 - RNA, 20 nt, Human
uucgugggaccccagggcca

SEQ ID NO: 119985 - RNA, 21 nt, Human
uugcagagccagggcugggga

SEQ ID NO: 119986 - RNA, 19 nt, Human
uuucuugucucccacgugg

SEQ ID NO: 119987 - RNA, 25 nt, Human
agaggcaggcccaagaagggaaccc

SEQ ID NO: 119988 - RNA, 18 nt, Human
agccugggcugggguagu

SEQ ID NO: 119989 - RNA, 22 nt, Human
caagaagggaaccccaggaagc

SEQ ID NO: 119990 - RNA, 23 nt, Human
caccucuggcccagccccugcuu

SEQ ID NO: 119991 - RNA, 18 nt, Human
cagccccugcuuggccuc

SEQ ID NO: 119992 - RNA, 21 nt, Human
cuccuuggucucucuucucgu

SEQ ID NO: 119993 - RNA, 20 nt, Human
cugggcugggguaguuuuua

SEQ ID NO: 119994 - RNA, 25 nt, Human
cuuuaagaggcaggcccaagaaggg

SEQ ID NO: 119995 - RNA, 20 nt, Human
gaaacaagcacaaaaggcca

SEQ ID NO: 119996 - RNA, 21 nt, Human
gaaacaagcacaaaaggccau

SEQ ID NO: 119997 - RNA, 22 nt, Human
gagccucaguuuccccauguug

SEQ ID NO: 119998 - RNA, 18 nt, Human
gauugggaggagagggag

SEQ ID NO: 119999 - RNA, 24 nt, Human
gcccagccccugcuuggccuccuu

SEQ ID NO: 120000 - RNA, 19 nt, Human
gccuccuuggucucucuuc

SEQ ID NO: 120001 - RNA, 18 nt, Human
ggagauugggaggagagg

SEQ ID NO: 120002 - RNA, 22 nt, Human
gggguaguuuuuagucaugggc

SEQ ID NO: 120003 - RNA, 23 nt, Human
uaggaaacaagcacaaaaggcca

SEQ ID NO: 120004 - RNA, 18 nt, Human
ucaccagcuuugugaucu

SEQ ID NO: 120005 - RNA, 18 nt, Human
ucaugggcuuauggaccc

SEQ ID NO: 120006 - RNA, 19 nt, Human
uccuuggucucucuucucg

SEQ ID NO: 120007 - RNA, 21 nt, Human
ucuccagcuagcucaggccuu

SEQ ID NO: 120008 - RNA, 21 nt, Human
ugcuuggccuccuuggucucu

SEQ ID NO: 120009 - RNA, 19 nt, Human
ugggaggcccagccuaugg

SEQ ID NO: 120010 - RNA, 19 nt, Human
uggugagagccugggcugg

SEQ ID NO: 120011 - RNA, 19 nt, Human
acagcuacccucuacagag

SEQ ID NO: 120012 - RNA, 21 nt, Human
acccugagugguucggggagu

SEQ ID NO: 120013 - RNA, 20 nt, Human
agaagccacagcuacccucu

SEQ ID NO: 120014 - RNA, 20 nt, Human
agaagccacagcuacccucu

SEQ ID NO: 120015 - RNA, 23 nt, Human
agaagccacagcuacccucuaca

SEQ ID NO: 120016 - RNA, 23 nt, Human
agaagccacagcuacccucuaca

SEQ ID NO: 120017 - RNA, 22 nt, Human
agaaggagaggccaagcgcuug

SEQ ID NO: 120018 - RNA, 21 nt, Human
agaggcacuggggaggggucg

SEQ ID NO: 120019 - RNA, 21 nt, Human
agaggcacuggggaggggucg

SEQ ID NO: 120020 - RNA, 21 nt, Human
agaggcacuggggaggggucg

SEQ ID NO: 120021 - RNA, 23 nt, Human
agccggucucuugucgugacaca

SEQ ID NO: 120022 - RNA, 18 nt, Human
aggaaugucucgaccuug

SEQ ID NO: 120023 - RNA, 18 nt, Human
aggaaugucucgaccuug

SEQ ID NO: 120024 - RNA, 20 nt, Human
aggacccugagugguucggg

SEQ ID NO: 120025 - RNA, 22 nt, Human
aggagaggcacuggggaggggu

SEQ ID NO: 120026 - RNA, 22 nt, Human
aggagaggcacuggggaggggu

SEQ ID NO: 120027 - RNA, 25 nt, Human
auccauuuuccucccuccccuucaa

SEQ ID NO: 120028 - RNA, 25 nt, Human
auccauuuuccucccuccccuucag

SEQ ID NO: 120029 - RNA, 25 nt, Human
caaagagggcagcauguuucucucc

SEQ ID NO: 120030 - RNA, 23 nt, Human
cacaggacccugagugguucggg

SEQ ID NO: 120031 - RNA, 18 nt, Human
cacgcgggcaccuagaag

SEQ ID NO: 120032 - RNA, 18 nt, Human
cacgcgggcaccuagaag

SEQ ID NO: 120033 - RNA, 26 nt, Human
cacgcgggcaccuagaagccacagcu

SEQ ID NO: 120034 - RNA, 26 nt, Human
cacgcgggcaccuagaagccacagcu

SEQ ID NO: 120035 - RNA, 21 nt, Human
cacuguucccucccucucuca

SEQ ID NO: 120036 - RNA, 24 nt, Human
cagcauguuucucucccccagccc

SEQ ID NO: 120037 - RNA, 23 nt, Human
cagggccaggagaggcacugggg

SEQ ID NO: 120038 - RNA, 23 nt, Human
cagggccaggagaggcacugggg

SEQ ID NO: 120039 - RNA, 23 nt, Human
cagggccaggagaggcacugggg

SEQ ID NO: 120040 - RNA, 18 nt, Human
ccacagcuacccucuaca

SEQ ID NO: 120041 - RNA, 24 nt, Human
ccaggagaggcacuggggaggggu

SEQ ID NO: 120042 - RNA, 24 nt, Human
ccaggagaggcacuggggaggggu

SEQ ID NO: 120043 - RNA, 20 nt, Human
cccuggccaguucucucucc

SEQ ID NO: 120044 - RNA, 19 nt, Human
cugaagcaguagagcagcc

SEQ ID NO: 120045 - RNA, 19 nt, Human
cugaagcaguagagcagcc

SEQ ID NO: 120046 - RNA, 20 nt, Human
cugaagcaguagagcagccc

SEQ ID NO: 120047 - RNA, 20 nt, Human
cugaagcaguagagcagccc

SEQ ID NO: 120048 - RNA, 19 nt, Human
cuguucccucccucucuca

SEQ ID NO: 120049 - RNA, 23 nt, Human
gagaaggagaggccaagcgcuug

SEQ ID NO: 120050 - RNA, 18 nt, Human
gagaggcacuggggaggg

SEQ ID NO: 120051 - RNA, 18 nt, Human
gcaccaugcgcaggaaug

SEQ ID NO: 120052 - RNA, 18 nt, Human
gcaccaugcgcaggaaug

SEQ ID NO: 120053 - RNA, 18 nt, Human
gcacuggggaggggucgg

SEQ ID NO: 120054 - RNA, 18 nt, Human
gcacuggggaggggucgg

SEQ ID NO: 120055 - RNA, 18 nt, Human
gcacuggggaggggucgg

SEQ ID NO: 120056 - RNA, 19 nt, Human
gccacagcuacccucuaca

SEQ ID NO: 120057 - RNA, 22 nt, Human
gcuguaggucugcuugaggauc

SEQ ID NO: 120058 - RNA, 19 nt, Human
ggagaggcacuggggaggg

SEQ ID NO: 120059 - RNA, 19 nt, Human
ggagaggcacuggggaggg

SEQ ID NO: 120060 - RNA, 18 nt, Human
ggccuugggauccuagaa

SEQ ID NO: 120061 - RNA, 20 nt, Human
ggccuugggauccuagagcc

SEQ ID NO: 120062 - RNA, 23 nt, Human
gggcacuggaguggcaccuucca

SEQ ID NO: 120063 - RNA, 23 nt, Human
gggcacuggaguggcaccuucca

SEQ ID NO: 120064 - RNA, 23 nt, Human
gggcacuggaguggcaccuucca

SEQ ID NO: 120065 - RNA, 25 nt, Human
gguugugugaguuugugucaaacuu

SEQ ID NO: 120066 - RNA, 21 nt, Human
ucagcgccugacugcuacaaa

SEQ ID NO: 120067 - RNA, 24 nt, Human
uccagccucugcaaagugaaggaa

SEQ ID NO: 120068 - RNA, 19 nt, Human
uccagggccaggagaggca

SEQ ID NO: 120069 - RNA, 19 nt, Human
uccagggccaggagaggca

SEQ ID NO: 120070 - RNA, 19 nt, Human
uccagggccaggagaggca

SEQ ID NO: 120071 - RNA, 24 nt, Human
ugaaggaagagaaggagaggccaa

SEQ ID NO: 120072 - RNA, 24 nt, Human
ugagcagugcgucaugguugugug

SEQ ID NO: 120073 - RNA, 24 nt, Human
ugagcagugcgucaugguugugug

SEQ ID NO: 120074 - RNA, 19 nt, Human
uuuuccucccuccccuuca

SEQ ID NO: 120075 - RNA, 19 nt, Human
aagccacagcugcccucca

SEQ ID NO: 120076 - RNA, 19 nt, Human
aagccacagcugcccucca

SEQ ID NO: 120077 - RNA, 19 nt, Human
acagcugcccuccacagag

SEQ ID NO: 120078 - RNA, 21 nt, Human
acccugaguggugcggggagu

SEQ ID NO: 120079 - RNA, 18 nt, Human
aggaaugucucgaccuug

SEQ ID NO: 120080 - RNA, 18 nt, Human
aggaaugucucgaccuug

SEQ ID NO: 120081 - RNA, 22 nt, Human
aggagaggcacuggggaggggu

SEQ ID NO: 120082 - RNA, 19 nt, Human
agguggcugccgucuucca

SEQ ID NO: 120083 - RNA, 23 nt, Human
cacaggacccugaguggugcggg

SEQ ID NO: 120084 - RNA, 23 nt, Human
cagggccaggagaggcacugggg

SEQ ID NO: 120085 - RNA, 23 nt, Human
cagggccaggagaggcacugggg

SEQ ID NO: 120086 - RNA, 23 nt, Human
cagggccaggagaggcacugggg

SEQ ID NO: 120087 - RNA, 23 nt, Human
caguggagcagcccguaguucuu

SEQ ID NO: 120088 - RNA, 23 nt, Human
caguggagcagcccguaguucuu

SEQ ID NO: 120089 - RNA, 24 nt, Human
ccaggagaggcacuggggaggggu

SEQ ID NO: 120090 - RNA, 24 nt, Human
ccaggagaggcacuggggaggggu

SEQ ID NO: 120091 - RNA, 24 nt, Human
ccaggagaggcacuggggaggggu

SEQ ID NO: 120092 - RNA, 18 nt, Human
ccccuagaagccacagcu

SEQ ID NO: 120093 - RNA, 18 nt, Human
ccccuagaagccacagcu

SEQ ID NO: 120094 - RNA, 24 nt, Human
cccuagaagccacagcugcccucc

SEQ ID NO: 120095 - RNA, 24 nt, Human
cccuagaagccacagcugcccucc

SEQ ID NO: 120096 - RNA, 21 nt, Human
ccgucuuccagccuccccauc

SEQ ID NO: 120097 - RNA, 20 nt, Human
cuccacagagcggcacugca

SEQ ID NO: 120098 - RNA, 20 nt, Human
cuccacagagcggcacugca

SEQ ID NO: 120099 - RNA, 19 nt, Human
cugaagcaguggagcagcc

SEQ ID NO: 120100 - RNA, 20 nt, Human
cugaagcaguggagcagccc

SEQ ID NO: 120101 - RNA, 20 nt, Human
cugaagcaguggagcagccc

SEQ ID NO: 120102 - RNA, 24 nt, Human
gagaagcagaaggaggucugggag

SEQ ID NO: 120103 - RNA, 18 nt, Human
gagaggcacuggggaggg

SEQ ID NO: 120104 - RNA, 18 nt, Human
gagaggcacuggggaggg

SEQ ID NO: 120105 - RNA, 20 nt, Human
gagcagcagggagaugugga

SEQ ID NO: 120106 - RNA, 22 nt, Human
gagucugagaagcagaaggagg

SEQ ID NO: 120107 - RNA, 18 nt, Human
gcaccaugcgcaggaaug

SEQ ID NO: 120108 - RNA, 18 nt, Human
gcaccaugcgcaggaaug

SEQ ID NO: 120109 - RNA, 19 nt, Human
gcgacucgaugagcagcag

SEQ ID NO: 120110 - RNA, 19 nt, Human
ggagaggcacuggggaggg

SEQ ID NO: 120111 - RNA, 19 nt, Human
ggagaggcacuggggaggg

SEQ ID NO: 120112 - RNA, 24 nt, Human
gggagauguggagcagcucuaagu

SEQ ID NO: 120113 - RNA, 18 nt, Human
gggcacuggaguggcacc

SEQ ID NO: 120114 - RNA, 18 nt, Human
gggcacuggaguggcacc

SEQ ID NO: 120115 - RNA, 18 nt, Human
gggcacuggaguggcacc

SEQ ID NO: 120116 - RNA, 19 nt, Human
gggcacuggaguggcaccu

SEQ ID NO: 120117 - RNA, 19 nt, Human
gggcacuggaguggcaccu

SEQ ID NO: 120118 - RNA, 19 nt, Human
gggcacuggaguggcaccu

SEQ ID NO: 120119 - RNA, 18 nt, Human
gguuguuggugaagguac

SEQ ID NO: 120120 - RNA, 19 nt, Human
gucuuccagccuccccauc

SEQ ID NO: 120121 - RNA, 27 nt, Human
ucagggccaggagaggcacuggggagg

SEQ ID NO: 120122 - RNA, 27 nt, Human
ucagggccaggagaggcacuggggagg

SEQ ID NO: 120123 - RNA, 27 nt, Human
ucagggccaggagaggcacuggggagg

SEQ ID NO: 120124 - RNA, 23 nt, Human
uccacagagcggcacugcaccau

SEQ ID NO: 120125 - RNA, 23 nt, Human
uccacagagcggcacugcaccau

SEQ ID NO: 120126 - RNA, 20 nt, Human
ucugcugcguuuccuccaug

SEQ ID NO: 120127 - RNA, 22 nt, Human
ugagaagcagaaggaggucugg

SEQ ID NO: 120128 - RNA, 24 nt, Human
ugagcagugcgucaugguugugcg

SEQ ID NO: 120129 - RNA, 24 nt, Human
ugagcagugcgucaugguugugcg

SEQ ID NO: 120130 - RNA, 20 nt, Human
ugcggggagucgggccuugg

SEQ ID NO: 120131 - RNA, 22 nt, Human
uggaugccuuccucuagguccu

SEQ ID NO: 120132 - RNA, 23 nt, Human
uguuggaggaugucggaauagag

SEQ ID NO: 120133 - RNA, 20 nt, Human
uuaagacaaggcuggugggc

SEQ ID NO: 120134 - RNA, 20 nt, Human
uuaagacaaggcuggugggc

SEQ ID NO: 120135 - RNA, 20 nt, Human
uuaagacaaggcuggugggc

SEQ ID NO: 120136 - RNA, 22 nt, Human
uucagggccaggagaggcacug

SEQ ID NO: 120137 - RNA, 22 nt, Human
uucagggccaggagaggcacug

SEQ ID NO: 120138 - RNA, 22 nt, Human
uucagggccaggagaggcacug

SEQ ID NO: 120139 - RNA, 19 nt, Human
uuggaugccuuccucuagg

SEQ ID NO: 120140 - RNA, 22 nt, Human
uuuccuccauguuggaggaugu

SEQ ID NO: 120141 - RNA, 23 nt, Human
aaaggcgggggaagggggcggga

SEQ ID NO: 120142 - RNA, 22 nt, Human
aagaaggcgaguggcgggaggc

SEQ ID NO: 120143 - RNA, 21 nt, Human
aagcgcaaacacggggcgacc

SEQ ID NO: 120144 - RNA, 19 nt, Human
aauaaacacacggaaaaaa

SEQ ID NO: 120145 - RNA, 18 nt, Human
accgaggagacacgggac

SEQ ID NO: 120146 - RNA, 22 nt, Human
acgcaggaaaaaggcccgccag

SEQ ID NO: 120147 - RNA, 18 nt, Human
agagagacggggccggag

SEQ ID NO: 120148 - RNA, 22 nt, Human
agaggggaggagggaccgccag

SEQ ID NO: 120149 - RNA, 21 nt, Human
aggaaaggaauaaaacucuaa

SEQ ID NO: 120150 - RNA, 18 nt, Human
aggagggaccgccaggca

SEQ ID NO: 120151 - RNA, 19 nt, Human
aggcagaggcagggggacg

SEQ ID NO: 120152 - RNA, 18 nt, Human
aggcccgccagcccgcug

SEQ ID NO: 120153 - RNA, 22 nt, Human
aggcgaguggcgggaggccagg

SEQ ID NO: 120154 - RNA, 27 nt, Human
agggaagaaaggcgggggaagggggcg

SEQ ID NO: 120155 - RNA, 23 nt, Human
aggggcccggucccccccaccuc

SEQ ID NO: 120156 - RNA, 22 nt, Human
agggguccccagggggugcggu

SEQ ID NO: 120157 - RNA, 19 nt, Human
aguggcgggaggccaggga

SEQ ID NO: 120158 - RNA, 21 nt, Human
agugggcuccccaggccccac

SEQ ID NO: 120159 - RNA, 19 nt, Human
augggacacagaaugggga

SEQ ID NO: 120160 - RNA, 21 nt, Human
caaacagugcaacauggucaa

SEQ ID NO: 120161 - RNA, 22 nt, Human
cacaguaaagccaaccugucac

SEQ ID NO: 120162 - RNA, 18 nt, Human
cagaggcagggggacgga

SEQ ID NO: 120163 - RNA, 25 nt, Human
caggccccacagguggguccaagag

SEQ ID NO: 120164 - RNA, 20 nt, Human
cagggaagcccgacguggug

SEQ ID NO: 120165 - RNA, 18 nt, Human
cagugggcuccccaggcc

SEQ ID NO: 120166 - RNA, 18 nt, Human
caugacccaggcggaggc

SEQ ID NO: 120167 - RNA, 27 nt, Human
ccaccucacgggcaggacaggaaaaau

SEQ ID NO: 120168 - RNA, 19 nt, Human
cccaugacccaggcggagg

SEQ ID NO: 120169 - RNA, 22 nt, Human
ccccccaccucacgggcaggac

SEQ ID NO: 120170 - RNA, 24 nt, Human
cccgcuccguggccuccuuccucc

SEQ ID NO: 120171 - RNA, 19 nt, Human
ccggaggggugcaggcugg

SEQ ID NO: 120172 - RNA, 20 nt, Human
ccuccuuccucccuggcccc

SEQ ID NO: 120173 - RNA, 25 nt, Human
cgaggggucccuagagaggggcccg

SEQ ID NO: 120174 - RNA, 28 nt, Human
cggagggaagaaaggcgggggaaggggg

SEQ ID NO: 120175 - RNA, 24 nt, Human
cgggggaagggggcgggagggagu

SEQ ID NO: 120176 - RNA, 28 nt, Human
cgggggaagggggcgggagggagucggg

SEQ ID NO: 120177 - RNA, 23 nt, Human
cucaaaaaaggaaaggaauaaaa

SEQ ID NO: 120178 - RNA, 18 nt, Human
cuccuuccucccuggccc

SEQ ID NO: 120179 - RNA, 20 nt, Human
cugccgggggccgccccgga

SEQ ID NO: 120180 - RNA, 21 nt, Human
cugccucgggcgcaugcaaac

SEQ ID NO: 120181 - RNA, 20 nt, Human
cugggacgcaggaaaaaggc

SEQ ID NO: 120182 - RNA, 22 nt, Human
gaaggcgaguggcgggaggcca

SEQ ID NO: 120183 - RNA, 18 nt, Human
gaagggggcgggagggag

SEQ ID NO: 120184 - RNA, 19 nt, Human
gacccaggcggaggccagc

SEQ ID NO: 120185 - RNA, 22 nt, Human
gagucacaguaaagccaaccug

SEQ ID NO: 120186 - RNA, 26 nt, Human
gcugggacgcaggaaaaaggcccggu

SEQ ID NO: 120187 - RNA, 23 nt, Human
ggaaaaaaaaucucaaaaaagga

SEQ ID NO: 120188 - RNA, 24 nt, Human
ggaagggggcgggagggagucggg

SEQ ID NO: 120189 - RNA, 19 nt, Human
ggaggggcgcagggguccc

SEQ ID NO: 120190 - RNA, 18 nt, Human
gggcuccccaggccccac

SEQ ID NO: 120191 - RNA, 20 nt, Human
ggggaagggggcgggaggga

SEQ ID NO: 120192 - RNA, 18 nt, Human
ggggaggggaggggcgca

SEQ ID NO: 120193 - RNA, 21 nt, Human
ggggaggggaggggcgcaggg

SEQ ID NO: 120194 - RNA, 23 nt, Human
ggggaggggaggggcgcaggggu

SEQ ID NO: 120195 - RNA, 25 nt, Human
ggggggaggggaggggcgcaggggu

SEQ ID NO: 120196 - RNA, 25 nt, Human
ggggugcaggcugggacgcaggaaa

SEQ ID NO: 120197 - RNA, 24 nt, Human
gguaugggugcaaggagaggggag

SEQ ID NO: 120198 - RNA, 18 nt, Human
ggugcaaggagaggggag

SEQ ID NO: 120199 - RNA, 26 nt, Human
guacuuucuuucuccuuaucuugaaa

SEQ ID NO: 120200 - RNA, 25 nt, Human
uaaagccaaccugucacuugguacc

SEQ ID NO: 120201 - RNA, 19 nt, Human
uagagaggggcccgguccc

SEQ ID NO: 120202 - RNA, 18 nt, Human
ucacaaggcgggugggcg

SEQ ID NO: 120203 - RNA, 23 nt, Human
uccccaggccccacagguggguc

SEQ ID NO: 120204 - RNA, 22 nt, Human
ucccuagagaggggcccggucc

SEQ ID NO: 120205 - RNA, 18 nt, Human
uccguggccuccuuccuc

SEQ ID NO: 120206 - RNA, 23 nt, Human
ucgcggagggaagaaaggcgggg

SEQ ID NO: 120207 - RNA, 26 nt, Human
ucgggcccagugagcaggggcaccag

SEQ ID NO: 120208 - RNA, 22 nt, Human
ucggggggaggaaacaauguag

SEQ ID NO: 120209 - RNA, 18 nt, Human
ucucuuggggcacugcgg

SEQ ID NO: 120210 - RNA, 19 nt, Human
ugagcaggggcaccagguc

SEQ ID NO: 120211 - RNA, 21 nt, Human
ugaucuuccagguucaguccc

SEQ ID NO: 120212 - RNA, 22 nt, Human
ugccucgggcgcaugcaaacag

SEQ ID NO: 120213 - RNA, 21 nt, Human
uggccccucagugggcucccu

SEQ ID NO: 120214 - RNA, 31 nt, Human
uggguccaagagagacggggccggagggguu

SEQ ID NO: 120215 - RNA, 21 nt, Human
uuccagguucaguccccaccg

SEQ ID NO: 120216 - RNA, 20 nt, Human
aaacaaaauguccacuagaa

SEQ ID NO: 120217 - RNA, 22 nt, Human
aacuuaguaaacacuuuaauac

SEQ ID NO: 120218 - RNA, 21 nt, Human
aagaaaaaagaaaaucucugu

SEQ ID NO: 120219 - RNA, 22 nt, Human
aggagaaauucagagaaugaaa

SEQ ID NO: 120220 - RNA, 25 nt, Human
caacugaaauuuagacaauaaacuc

SEQ ID NO: 120221 - RNA, 22 nt, Human
caagacacaacugaaauuuaga

SEQ ID NO: 120222 - RNA, 25 nt, Human
cuuaguaaacacuuuaauacccucu

SEQ ID NO: 120223 - RNA, 25 nt, Human
uaaguagauaacucaaaaagaacaa

SEQ ID NO: 120224 - RNA, 21 nt, Human
uagcuuaagaaaaagaaugau

SEQ ID NO: 120225 - RNA, 22 nt, Human
ucacugcacaaaacuauuuuaa

SEQ ID NO: 120226 - RNA, 21 nt, Human
ucagauaagaugguuuuccuu

SEQ ID NO: 120227 - RNA, 22 nt, Human
uggagagaagcaaguuguguug

SEQ ID NO: 120228 - RNA, 19 nt, Human
uggcaagacacaacugaaa

SEQ ID NO: 120229 - RNA, 25 nt, Human
uuaguaaacacuuuaauacccucug

SEQ ID NO: 120230 - RNA, 24 nt, Human
uuauugaaaagaaaaaagaaaauc

SEQ ID NO: 120231 - RNA, 18 nt, Human
aaaauauugaauguggca

SEQ ID NO: 120232 - RNA, 22 nt, Human
agaagagcugaaucugugaaaa

SEQ ID NO: 120233 - RNA, 20 nt, Human
agagaagagcugaaucugug

SEQ ID NO: 120234 - RNA, 19 nt, Human
ggucuugguuggcaguagg

SEQ ID NO: 120235 - RNA, 25 nt, Human
uaaaauguaaggagagaagagcuga

SEQ ID NO: 120236 - RNA, 21 nt, Human
uccugcguuguguucuuugau

SEQ ID NO: 120237 - RNA, 19 nt, Human
ugaguuggccugucagcug

SEQ ID NO: 120238 - RNA, 22 nt, Human
uggcaguagguugaguuggccu

SEQ ID NO: 120239 - RNA, 21 nt, Human
uguucuuugauauuuccuugg

SEQ ID NO: 120240 - RNA, 23 nt, Human
uuggcaguagguugaguuggccu

SEQ ID NO: 120241 - RNA, 21 nt, Human
ccagucucagucaauucaaaa

SEQ ID NO: 120242 - RNA, 26 nt, Human
gcacaauuccagaaacaagggaacgc

SEQ ID NO: 120243 - RNA, 18 nt, Human
uaauuuauugaaaugacu

SEQ ID NO: 120244 - RNA, 22 nt, Human
uauaaaauaaauaaagggacaa

SEQ ID NO: 120245 - RNA, 19 nt, Human
ucaaaaauaaggagggaaa

SEQ ID NO: 120246 - RNA, 20 nt, Human
ugauauguuuguagcauuuc

SEQ ID NO: 120247 - RNA, 21 nt, Human
uggaaaggaaauagauucuua

SEQ ID NO: 120248 - RNA, 28 nt, Human
uggaaaggaaauagauucuuaaagaaau

SEQ ID NO: 120249 - RNA, 20 nt, Human
uguauacauauguuugauau

SEQ ID NO: 120250 - RNA, 27 nt, Human
aaacggaacacggaggccuuuacccuc

SEQ ID NO: 120251 - RNA, 26 nt, Human
aaauaaaaacaaaaucccagaucaua

SEQ ID NO: 120252 - RNA, 25 nt, Human
acacuggaaucuuugguugcuacca

SEQ ID NO: 120253 - RNA, 25 nt, Human
acccuaagaaugcacaauugugagc

SEQ ID NO: 120254 - RNA, 22 nt, Human
acuugaaaaaaugcaauagaaa

SEQ ID NO: 120255 - RNA, 22 nt, Human
acuugcaaaccccagggaugga

SEQ ID NO: 120256 - RNA, 18 nt, Human
agagucuuucauaugcuc

SEQ ID NO: 120257 - RNA, 22 nt, Human
agagucuuucauaugcucaaac

SEQ ID NO: 120258 - RNA, 19 nt, Human
agauggaggcuggggccaa

SEQ ID NO: 120259 - RNA, 21 nt, Human
agauguuaacuaaauuucugu

SEQ ID NO: 120260 - RNA, 20 nt, Human
agcaucaccaaugcugccca

SEQ ID NO: 120261 - RNA, 21 nt, Human
aggcaaggcuacggaggaggg

SEQ ID NO: 120262 - RNA, 19 nt, Human
aggcagagucuuucauaug

SEQ ID NO: 120263 - RNA, 21 nt, Human
aggcagagucuuucauaugcu

SEQ ID NO: 120264 - RNA, 26 nt, Human
aggcuacaacucaggauacagcauca

SEQ ID NO: 120265 - RNA, 25 nt, Human
auacagcaucaccaaugcugcccag

SEQ ID NO: 120266 - RNA, 22 nt, Human
aucacaacuguggcugaagacu

SEQ ID NO: 120267 - RNA, 24 nt, Human
auuucuagauuuggggagaaacaa

SEQ ID NO: 120268 - RNA, 24 nt, Human
caaaacaaaagguuuuaacaaaaa

SEQ ID NO: 120269 - RNA, 21 nt, Human
caagccccgacaccucuggga

SEQ ID NO: 120270 - RNA, 22 nt, Human
caauagaaaaccggacaccaug

SEQ ID NO: 120271 - RNA, 24 nt, Human
cagaggcuacaacucaggauacag

SEQ ID NO: 120272 - RNA, 28 nt, Human
cagaucauauagauguuuaguuaaagag

SEQ ID NO: 120273 - RNA, 21 nt, Human
caggauacagcaucaccaaug

SEQ ID NO: 120274 - RNA, 21 nt, Human
cauuauagaguuaaugcagag

SEQ ID NO: 120275 - RNA, 18 nt, Human
cauuuaguuaacuuuucc

SEQ ID NO: 120276 - RNA, 24 nt, Human
ccagggauggaaaaacccuaagaa

SEQ ID NO: 120277 - RNA, 19 nt, Human
ccccagggauggaaaaacc

SEQ ID NO: 120278 - RNA, 20 nt, Human
ccccagggauggaaaaaccc

SEQ ID NO: 120279 - RNA, 19 nt, Human
ccucugggaagaggacgga

SEQ ID NO: 120280 - RNA, 20 nt, Human
cggcaggaaacggaacacgg

SEQ ID NO: 120281 - RNA, 22 nt, Human
cuaguagucacuaaguuuuucu

SEQ ID NO: 120282 - RNA, 22 nt, Human
cucaggauacagcaucaccaau

SEQ ID NO: 120283 - RNA, 23 nt, Human
cuuguaaacaaaaaagcucccau

SEQ ID NO: 120284 - RNA, 19 nt, Human
gagcauuuaacaaccauca

SEQ ID NO: 120285 - RNA, 22 nt, Human
gcuccgaucaucugcucugcuu

SEQ ID NO: 120286 - RNA, 24 nt, Human
guuaacuuuuccacuugaaaaaau

SEQ ID NO: 120287 - RNA, 20 nt, Human
uaaaaacaaaaucccagauc

SEQ ID NO: 120288 - RNA, 23 nt, Human
uacaacucaggauacagcaucac

SEQ ID NO: 120289 - RNA, 26 nt, Human
ucaaaauaaaaacaaaaucccagauc

SEQ ID NO: 120290 - RNA, 24 nt, Human
ucaaccauuuaguuaacuuuucca

SEQ ID NO: 120291 - RNA, 19 nt, Human
ucauaugcucaaacacugg

SEQ ID NO: 120292 - RNA, 23 nt, Human
ucccagaucauauagauguuuac

SEQ ID NO: 120293 - RNA, 19 nt, Human
ucugcuucuucuguuccuc

SEQ ID NO: 120294 - RNA, 19 nt, Human
ucuuaagucuucacuuuag

SEQ ID NO: 120295 - RNA, 23 nt, Human
ucuuuacaccaaguaaaugguug

SEQ ID NO: 120296 - RNA, 19 nt, Human
ugaaaaaaugcaauagaaa

SEQ ID NO: 120297 - RNA, 24 nt, Human
ugaaaaaaugcaauagaaaaccgg

SEQ ID NO: 120298 - RNA, 23 nt, Human
ugaacuaaaauuucuagauuugg

SEQ ID NO: 120299 - RNA, 19 nt, Human
ugagagacgaagauggagg

SEQ ID NO: 120300 - RNA, 23 nt, Human
ugcucugcuucuucuguuccuca

SEQ ID NO: 120301 - RNA, 21 nt, Human
uggcuugcagacaagaagcca

SEQ ID NO: 120302 - RNA, 19 nt, Human
uggggccaagccccgacac

SEQ ID NO: 120303 - RNA, 23 nt, Human
uuaacuaaauuucugugacaaau

SEQ ID NO: 120304 - RNA, 23 nt, Human
uuaagugaacaacuugcaaaccc

SEQ ID NO: 120305 - RNA, 25 nt, Human
uucaaaauaaaaacaaaaucccaga

SEQ ID NO: 120306 - RNA, 24 nt, Human
uuuuuuuuuuuuuuuuuuuuacag

SEQ ID NO: 120307 - RNA, 23 nt, Human
caccacuggagggagcugaggcc

SEQ ID NO: 120308 - RNA, 23 nt, Human
caccacuggagggagcugaggcc

SEQ ID NO: 120309 - RNA, 20 nt, Human
cacgacagacugaagaccac

SEQ ID NO: 120310 - RNA, 21 nt, Human
cacuggagggagcugaggccc

SEQ ID NO: 120311 - RNA, 21 nt, Human
cacuggagggagcugaggccc

SEQ ID NO: 120312 - RNA, 23 nt, Human
cagcaauaaggagaguucucauc

SEQ ID NO: 120313 - RNA, 20 nt, Human
cagcugccuaaaggagccgc

SEQ ID NO: 120314 - RNA, 21 nt, Human
ccacccgaccaggaauccagu

SEQ ID NO: 120315 - RNA, 18 nt, Human
cccacgagcgucgcuggg

SEQ ID NO: 120316 - RNA, 18 nt, Human
cccacgagcgucgcuggg

SEQ ID NO: 120317 - RNA, 20 nt, Human
cccacgagcgucgcugggug

SEQ ID NO: 120318 - RNA, 20 nt, Human
cccacgagcgucgcugggug

SEQ ID NO: 120319 - RNA, 23 nt, Human
ccccgcuuucaccaucgcuuucc

SEQ ID NO: 120320 - RNA, 18 nt, Human
cccgcuugcccucucccc

SEQ ID NO: 120321 - RNA, 18 nt, Human
cccggcuccgccccccuc

SEQ ID NO: 120322 - RNA, 18 nt, Human
ccgccgcucccagcgccu

SEQ ID NO: 120323 - RNA, 19 nt, Human
ccgcugcugccgcuacugc

SEQ ID NO: 120324 - RNA, 19 nt, Human
ccgcuugcccucuccccgc

SEQ ID NO: 120325 - RNA, 23 nt, Human
ccggcucccggcuccgccccccu

SEQ ID NO: 120326 - RNA, 19 nt, Human
ccucccggccgcuuccugg

SEQ ID NO: 120327 - RNA, 21 nt, Human
ccucuccccgccgcggaugga

SEQ ID NO: 120328 - RNA, 19 nt, Human
ccuuccgaugggagacgag

SEQ ID NO: 120329 - RNA, 18 nt, Human
cgacagacugaagaccac

SEQ ID NO: 120330 - RNA, 24 nt, Human
cgccccgccgcucccagcgccuca

SEQ ID NO: 120331 - RNA, 19 nt, Human
cgccgccgccgcugcuccg

SEQ ID NO: 120332 - RNA, 22 nt, Human
cgccgcugcugccgcuacugcg

SEQ ID NO: 120333 - RNA, 21 nt, Human
cgcugcugccgcuacugcggg

SEQ ID NO: 120334 - RNA, 22 nt, Human
cgcuugcccucuccccgccgcg

SEQ ID NO: 120335 - RNA, 18 nt, Human
cggcccgauucgcuccug

SEQ ID NO: 120336 - RNA, 20 nt, Human
cggcucccggcuccgccccc

SEQ ID NO: 120337 - RNA, 22 nt, Human
cuaccggucccgcuugcccucu

SEQ ID NO: 120338 - RNA, 26 nt, Human
cucacggccccgcuuucaccaucgcu

SEQ ID NO: 120339 - RNA, 18 nt, Human
cucccggccgcuuccugg

SEQ ID NO: 120340 - RNA, 21 nt, Human
cucccgguguuaacauuucga

SEQ ID NO: 120341 - RNA, 22 nt, Human
cucccgguguuaacauuucgau

SEQ ID NO: 120342 - RNA, 19 nt, Human
cuccugcccucccggccgc

SEQ ID NO: 120343 - RNA, 27 nt, Human
cuucccagccccguuacaaccgaguuc

SEQ ID NO: 120344 - RNA, 27 nt, Human
cuucccagccccguuacaaccgaguuc

SEQ ID NO: 120345 - RNA, 21 nt, Human
cuuccugggucugaacucugg

SEQ ID NO: 120346 - RNA, 20 nt, Human
gaguacagggcggccaccac

SEQ ID NO: 120347 - RNA, 20 nt, Human
gaguacagggcggccaccac

SEQ ID NO: 120348 - RNA, 22 nt, Human
gccccgccgcucccagcgccuc

SEQ ID NO: 120349 - RNA, 19 nt, Human
gcugggugaguggccugga

SEQ ID NO: 120350 - RNA, 19 nt, Human
gcugggugaguggccugga

SEQ ID NO: 120351 - RNA, 22 nt, Human
gcuuccugggucugaacucugg

SEQ ID NO: 120352 - RNA, 21 nt, Human
ggaggcggcgccgcugcugcc

SEQ ID NO: 120353 - RNA, 21 nt, Human
gggaggcggcgccgcugcugc

SEQ ID NO: 120354 - RNA, 21 nt, Human
gggugaguggccuggagagcu

SEQ ID NO: 120355 - RNA, 21 nt, Human
gggugaguggccuggagagcu

SEQ ID NO: 120356 - RNA, 19 nt, Human
uaacagaguagaucagcca

SEQ ID NO: 120357 - RNA, 19 nt, Human
uaacagaguagaucagcca

SEQ ID NO: 120358 - RNA, 24 nt, Human
uagcaaaaugauacaaaacugucu

SEQ ID NO: 120359 - RNA, 24 nt, Human
uagcaaaaugauacaaaacugucu

SEQ ID NO: 120360 - RNA, 20 nt, Human
ucacggccccgcuuucacca

SEQ ID NO: 120361 - RNA, 18 nt, Human
ucagggaguacagggcgg

SEQ ID NO: 120362 - RNA, 18 nt, Human
ucagggaguacagggcgg

SEQ ID NO: 120363 - RNA, 24 nt, Human
ucccagccccguuacaaccgaguu

SEQ ID NO: 120364 - RNA, 24 nt, Human
ucccagccccguuacaaccgaguu

SEQ ID NO: 120365 - RNA, 22 nt, Human
ucccccacgagcgucgcugggu

SEQ ID NO: 120366 - RNA, 22 nt, Human
ucccccacgagcgucgcugggu

SEQ ID NO: 120367 - RNA, 21 nt, Human
ucccggcuccgccccccucac

SEQ ID NO: 120368 - RNA, 19 nt, Human
uccuagaccgggggacgug

SEQ ID NO: 120369 - RNA, 19 nt, Human
uccuagaccgggggacgug

SEQ ID NO: 120370 - RNA, 24 nt, Human
uccuagaccgggggacgugucacu

SEQ ID NO: 120371 - RNA, 24 nt, Human
uccuagaccgggggacgugucacu

SEQ ID NO: 120372 - RNA, 21 nt, Human
uccugggucugaacucuggga

SEQ ID NO: 120373 - RNA, 23 nt, Human
ucgauccuagaccgggggacgug

SEQ ID NO: 120374 - RNA, 23 nt, Human
ucgauccuagaccgggggacgug

SEQ ID NO: 120375 - RNA, 22 nt, Human
ucggugcacgacagacugaaga

SEQ ID NO: 120376 - RNA, 20 nt, Human
ucucucucugcuuuucuucc

SEQ ID NO: 120377 - RNA, 20 nt, Human
ucucucucugcuuuucuucc

SEQ ID NO: 120378 - RNA, 21 nt, Human
ugcuccggccccuaccggucc

SEQ ID NO: 120379 - RNA, 20 nt, Human
uggaaucgucagggaguaca

SEQ ID NO: 120380 - RNA, 20 nt, Human
uggaaucgucagggaguaca

SEQ ID NO: 120381 - RNA, 24 nt, Human
uggagggagcugaggcccuggaaa

SEQ ID NO: 120382 - RNA, 24 nt, Human
uggagggagcugaggcccuggaaa

SEQ ID NO: 120383 - RNA, 18 nt, Human
uggcagcucuuggagucu

SEQ ID NO: 120384 - RNA, 18 nt, Human
uggcagcucuuggagucu

SEQ ID NO: 120385 - RNA, 21 nt, Human
uggccuggagagcucccggug

SEQ ID NO: 120386 - RNA, 21 nt, Human
uggccuggagagcucccggug

SEQ ID NO: 120387 - RNA, 18 nt, Human
ugggucugaacucuggga

SEQ ID NO: 120388 - RNA, 21 nt, Human
ugucugcccuucacagcaaua

SEQ ID NO: 120389 - RNA, 21 nt, Human
ugucugcccuucacagcaaua

SEQ ID NO: 120390 - RNA, 20 nt, Human
uugguaguuacaguggaauc

SEQ ID NO: 120391 - RNA, 20 nt, Human
uugguaguuacaguggaauc

SEQ ID NO: 120392 - RNA, 19 nt, Human
uuuccugucgccccgccgc

SEQ ID NO: 120393 - RNA, 21 nt, Human
uuuccugucgccccgccgcua

SEQ ID NO: 120394 - RNA, 24 nt, Human
uuuuuuuuuuuuuucuuuacacag

SEQ ID NO: 120395 - RNA, 24 nt, Human
uuuuuuuuuuuuuucuuuacacag

SEQ ID NO: 120396 - RNA, 22 nt, Human
aaaauaaaaacaaaaagguguu

SEQ ID NO: 120397 - RNA, 24 nt, Human
aaacacaggucaauacauccacac

SEQ ID NO: 120398 - RNA, 19 nt, Human
aagcagucuccauggauuc

SEQ ID NO: 120399 - RNA, 24 nt, Human
aaguaauuuauaacucagagccag

SEQ ID NO: 120400 - RNA, 25 nt, Human
aaguacaaaauuccccccaaaguuc

SEQ ID NO: 120401 - RNA, 23 nt, Human
acaauggaaaagcccagcacggg

SEQ ID NO: 120402 - RNA, 28 nt, Human
acacacacacacacacacacgcagggga

SEQ ID NO: 120403 - RNA, 21 nt, Human
acacacacacacacacacgca

SEQ ID NO: 120404 - RNA, 21 nt, Human
acacacacggagaaaacaaac

SEQ ID NO: 120405 - RNA, 28 nt, Human
acaggaaaaaaguacaaaauucccccca

SEQ ID NO: 120406 - RNA, 24 nt, Human
acagugaagacacuaagcaaacac

SEQ ID NO: 120407 - RNA, 19 nt, Human
agcccagcacgggaaguca

SEQ ID NO: 120408 - RNA, 24 nt, Human
agguggaaccagggagagggggga

SEQ ID NO: 120409 - RNA, 25 nt, Human
aguucuucaguuuuuuuuuuuucag

SEQ ID NO: 120410 - RNA, 25 nt, Human
auacauccacacacacacacacaca

SEQ ID NO: 120411 - RNA, 20 nt, Human
caaaacccagcccugacucc

SEQ ID NO: 120412 - RNA, 23 nt, Human
caaaacccagcccugacuccagg

SEQ ID NO: 120413 - RNA, 31 nt, Human
caauacauccacacacacacacacacacaca

SEQ ID NO: 120414 - RNA, 20 nt, Human
cacacacacacacacacaca

SEQ ID NO: 120415 - RNA, 22 nt, Human
cacacacacacacacacacaca

SEQ ID NO: 120416 - RNA, 26 nt, Human
cacacacacacacacacacacacacg

SEQ ID NO: 120417 - RNA, 18 nt, Human
cacacacacggagaaaac

SEQ ID NO: 120418 - RNA, 18 nt, Human
cacaggaaaaaaguacaa

SEQ ID NO: 120419 - RNA, 21 nt, Human
ccacacacacacacacacaca

SEQ ID NO: 120420 - RNA, 18 nt, Human
ccaccuccccacccacuc

SEQ ID NO: 120421 - RNA, 20 nt, Human
ccaccuccccacccacucca

SEQ ID NO: 120422 - RNA, 21 nt, Human
cccaccaccuccccacccacu

SEQ ID NO: 120423 - RNA, 23 nt, Human
cccaccaccuccccacccacucc

SEQ ID NO: 120424 - RNA, 20 nt, Human
cccagcccugacuccaggcc

SEQ ID NO: 120425 - RNA, 25 nt, Human
ccccaccaccuccccacccacucca

SEQ ID NO: 120426 - RNA, 24 nt, Human
ccccacccacuccauggagaggca

SEQ ID NO: 120427 - RNA, 18 nt, Human
ccccaggugacugucagg

SEQ ID NO: 120428 - RNA, 23 nt, Human
ccccaggugacugucaggaccag

SEQ ID NO: 120429 - RNA, 25 nt, Human
ccccaggugacugucaggaccaggg

SEQ ID NO: 120430 - RNA, 29 nt, Human
ccucccguggaaaaacgaagggcaaagac

SEQ ID NO: 120431 - RNA, 21 nt, Human
cgauaaagcucaaaaaagucc

SEQ ID NO: 120432 - RNA, 21 nt, Human
cgcaggggacgccggccccca

SEQ ID NO: 120433 - RNA, 22 nt, Human
cgccggcccccaccaccucccc

SEQ ID NO: 120434 - RNA, 23 nt, Human
cggcccccaccaccuccccaccc

SEQ ID NO: 120435 - RNA, 18 nt, Human
cuccucccguggaaaaac

SEQ ID NO: 120436 - RNA, 22 nt, Human
gaccucuucuucuuuucccuga

SEQ ID NO: 120437 - RNA, 20 nt, Human
gcaggcggggcgggccgugg

SEQ ID NO: 120438 - RNA, 21 nt, Human
gccggcccccaccaccucccc

SEQ ID NO: 120439 - RNA, 22 nt, Human
ggaggagccuggaggccagggg

SEQ ID NO: 120440 - RNA, 19 nt, Human
gggacaauggaaaagccca

SEQ ID NO: 120441 - RNA, 21 nt, Human
uaaaaacaaaaagguguuaac

SEQ ID NO: 120442 - RNA, 26 nt, Human
uacacaggaaaaaaguacaaaauucc

SEQ ID NO: 120443 - RNA, 31 nt, Human
uacauccacacacacacacacacacacacag

SEQ ID NO: 120444 - RNA, 22 nt, Human
uaggaaaacacacacacggaga

SEQ ID NO: 120445 - RNA, 21 nt, Human
ucagaaagguggaaccaggga

SEQ ID NO: 120446 - RNA, 20 nt, Human
uccacacacacacacacaca

SEQ ID NO: 120447 - RNA, 21 nt, Human
uccacacacacacacacacac

SEQ ID NO: 120448 - RNA, 24 nt, Human
uccacacacacacacacacacaca

SEQ ID NO: 120449 - RNA, 20 nt, Human
uccccacccacuccauggag

SEQ ID NO: 120450 - RNA, 22 nt, Human
ugaagacacuaagcaaacacug

SEQ ID NO: 120451 - RNA, 24 nt, Human
ugaagacacuaagcaaacacuggu

SEQ ID NO: 120452 - RNA, 18 nt, Human
ugacuccaggcuccuccu

SEQ ID NO: 120453 - RNA, 19 nt, Human
ugacuccaggcuccuccuc

SEQ ID NO: 120454 - RNA, 19 nt, Human
uggaaaaacgaagggcaaa

SEQ ID NO: 120455 - RNA, 26 nt, Human
uggaaaagcccagcacgggaagucag

SEQ ID NO: 120456 - RNA, 18 nt, Human
uggagaggcagaggagga

SEQ ID NO: 120457 - RNA, 21 nt, Human
uggagaggcagaggaggagcc

SEQ ID NO: 120458 - RNA, 24 nt, Human
uuaauuaaaaaaaaaaaggaaaaa

SEQ ID NO: 120459 - RNA, 19 nt, Human
uuuuuuuuuuuuaaagaaa

SEQ ID NO: 120460 - RNA, 19 nt, Human
uuuuuuuuuuuuuuuuuaa

SEQ ID NO: 120461 - RNA, 18 nt, Human
aaacuagacucacagcca

SEQ ID NO: 120462 - RNA, 24 nt, Human
aaagaaacggaggggcaggagugg

SEQ ID NO: 120463 - RNA, 19 nt, Human
aacuagacucacagccacc

SEQ ID NO: 120464 - RNA, 22 nt, Human
aagcaaaaacuagacucacagc

SEQ ID NO: 120465 - RNA, 18 nt, Human
aagcugcuccacucugcc

SEQ ID NO: 120466 - RNA, 23 nt, Human
aagugaccccacgucccgggggu

SEQ ID NO: 120467 - RNA, 18 nt, Human
aaugccugucccccuccc

SEQ ID NO: 120468 - RNA, 21 nt, Human
accccacgucccggggguggg

SEQ ID NO: 120469 - RNA, 24 nt, Human
acuacucacuucagcaaagaaacg

SEQ ID NO: 120470 - RNA, 22 nt, Human
agacucacagccaccgcccugg

SEQ ID NO: 120471 - RNA, 20 nt, Human
agcaaagaaacggaggggca

SEQ ID NO: 120472 - RNA, 18 nt, Human
agccacggccccaccccu

SEQ ID NO: 120473 - RNA, 22 nt, Human
agccggcuucagccacggcccc

SEQ ID NO: 120474 - RNA, 26 nt, Human
agcgcccacccgccccuugccagggc

SEQ ID NO: 120475 - RNA, 24 nt, Human
aggaagcuccgugcccacgcgccc

SEQ ID NO: 120476 - RNA, 23 nt, Human
agggcugagggccgagcagggug

SEQ ID NO: 120477 - RNA, 21 nt, Human
agugaccccacgucccggggg

SEQ ID NO: 120478 - RNA, 20 nt, Human
caacaaugccugucccccuc

SEQ ID NO: 120479 - RNA, 19 nt, Human
caccccugccuuccccuuu

SEQ ID NO: 120480 - RNA, 24 nt, Human
caccccugccuuccccuuugguuu

SEQ ID NO: 120481 - RNA, 20 nt, Human
cacggagaagauucaggggg

SEQ ID NO: 120482 - RNA, 24 nt, Human
cagccuccagggcaccccacuggg

SEQ ID NO: 120483 - RNA, 18 nt, Human
cagcuccacagcaccccu

SEQ ID NO: 120484 - RNA, 20 nt, Human
cagcuccacagcaccccucc

SEQ ID NO: 120485 - RNA, 28 nt, Human
cagguguagaaauuucggccaaagucuu

SEQ ID NO: 120486 - RNA, 22 nt, Human
ccagccagggucuggcccuggg

SEQ ID NO: 120487 - RNA, 23 nt, Human
ccagggccgcccccaggccccug

SEQ ID NO: 120488 - RNA, 19 nt, Human
ccccaccccugccuucccc

SEQ ID NO: 120489 - RNA, 22 nt, Human
ccccacuggggaaccgcccgcc

SEQ ID NO: 120490 - RNA, 26 nt, Human
cccccaggccccugcaauauaccugc

SEQ ID NO: 120491 - RNA, 19 nt, Human
ccccuaaauucuauggcuu

SEQ ID NO: 120492 - RNA, 21 nt, Human
ccccuaaauucuauggcuuca

SEQ ID NO: 120493 - RNA, 20 nt, Human
ccccucgagaaaacggccuu

SEQ ID NO: 120494 - RNA, 24 nt, Human
ccccuggcaacaaugccugucccc

SEQ ID NO: 120495 - RNA, 18 nt, Human
cccgccccuugccagggc

SEQ ID NO: 120496 - RNA, 24 nt, Human
cccgccuggcagcgcccacccgcc

SEQ ID NO: 120497 - RNA, 25 nt, Human
cccugggccgcugugggugggcccc

SEQ ID NO: 120498 - RNA, 22 nt, Human
ccggcagccuccagggcacccc

SEQ ID NO: 120499 - RNA, 22 nt, Human
ccuccaggaucacacuacucac

SEQ ID NO: 120500 - RNA, 18 nt, Human
ccucccaccucggguucc

SEQ ID NO: 120501 - RNA, 22 nt, Human
ccucccaccucggguuccaggc

SEQ ID NO: 120502 - RNA, 21 nt, Human
ccugcagggcugggccggggg

SEQ ID NO: 120503 - RNA, 18 nt, Human
ccugcccuccccucgaga

SEQ ID NO: 120504 - RNA, 18 nt, Human
ccugucccccucccagga

SEQ ID NO: 120505 - RNA, 18 nt, Human
cgccugagccaggcgcgg

SEQ ID NO: 120506 - RNA, 24 nt, Human
cggggccaggccggggggccucca

SEQ ID NO: 120507 - RNA, 18 nt, Human
cuagacacagguguagaa

SEQ ID NO: 120508 - RNA, 21 nt, Human
cuccacggugacucugcugcc

SEQ ID NO: 120509 - RNA, 22 nt, Human
cuccaggccgggccugcccucc

SEQ ID NO: 120510 - RNA, 19 nt, Human
cuccgugcccacgcgcccc

SEQ ID NO: 120511 - RNA, 21 nt, Human
cucugcccggcagccuccagg

SEQ ID NO: 120512 - RNA, 18 nt, Human
cuggcccugggccgcugu

SEQ ID NO: 120513 - RNA, 20 nt, Human
cuggcccugggccgcugugg

SEQ ID NO: 120514 - RNA, 19 nt, Human
gacacagguguagaaauuu

SEQ ID NO: 120515 - RNA, 19 nt, Human
gacaccaaccgguccuccc

SEQ ID NO: 120516 - RNA, 22 nt, Human
gagggccgagcagggugacacc

SEQ ID NO: 120517 - RNA, 18 nt, Human
gagugggguagggcgggc

SEQ ID NO: 120518 - RNA, 22 nt, Human
gagugggguagggcgggccucc

SEQ ID NO: 120519 - RNA, 18 nt, Human
gccaguccagggccgccc

SEQ ID NO: 120520 - RNA, 18 nt, Human
gccugucccccucccagg

SEQ ID NO: 120521 - RNA, 20 nt, Human
gcgcagccuccgggagcaag

SEQ ID NO: 120522 - RNA, 19 nt, Human
ggcagccuccagggcaccc

SEQ ID NO: 120523 - RNA, 24 nt, Human
ggccgcugugggugggccccgagg

SEQ ID NO: 120524 - RNA, 18 nt, Human
gggcaggagugggguagg

SEQ ID NO: 120525 - RNA, 20 nt, Human
gggcaggagugggguagggc

SEQ ID NO: 120526 - RNA, 20 nt, Human
gugcccacgcgccccacgcg

SEQ ID NO: 120527 - RNA, 24 nt, Human
uaacgggggcggcuggcggggcgg

SEQ ID NO: 120528 - RNA, 31 nt, Human
ucacagccaccgcccugggcacggccccaag

SEQ ID NO: 120529 - RNA, 21 nt, Human
ucagcaaagaaacggaggggc

SEQ ID NO: 120530 - RNA, 22 nt, Human
ucagcaaagaaacggaggggca

SEQ ID NO: 120531 - RNA, 24 nt, Human
ucagcaaagaaacggaggggcagg

SEQ ID NO: 120532 - RNA, 21 nt, Human
ucagggggcugcacgcgccca

SEQ ID NO: 120533 - RNA, 23 nt, Human
uccacagcaccccuccaggccgg

SEQ ID NO: 120534 - RNA, 22 nt, Human
uccagggccgcccccaggcccc

SEQ ID NO: 120535 - RNA, 23 nt, Human
ucccggggguggggccgccugag

SEQ ID NO: 120536 - RNA, 20 nt, Human
ucgagaagcacccgccuggc

SEQ ID NO: 120537 - RNA, 22 nt, Human
ugagccaggcgcggccccugca

SEQ ID NO: 120538 - RNA, 23 nt, Human
ugcagggcugggccgggggcuuu

SEQ ID NO: 120539 - RNA, 24 nt, Human
ugcagucugcguucuggcuuccag

SEQ ID NO: 120540 - RNA, 19 nt, Human
ugccuuccccuuugguuuc

SEQ ID NO: 120541 - RNA, 26 nt, Human
ugcuccacucugcccggcagccucca

SEQ ID NO: 120542 - RNA, 18 nt, Human
ugggaagagacugcagca

SEQ ID NO: 120543 - RNA, 21 nt, Human
ugggguagggcgggccucugu

SEQ ID NO: 120544 - RNA, 23 nt, Human
uucagcaaagaaacggaggggca

SEQ ID NO: 120545 - RNA, 23 nt, Human
uucagccacggccccaccccugc

SEQ ID NO: 120546 - RNA, 21 nt, Human
uuuggugcagcauuuugguug

SEQ ID NO: 120547 - RNA, 24 nt, Human
uuuuuugguuucauuuuucuuuua

SEQ ID NO: 120548 - RNA, 18 nt, Human
aagauucauuuuaccacc

SEQ ID NO: 120549 - RNA, 20 nt, Human
acaacagaagaacuucugga

SEQ ID NO: 120550 - RNA, 21 nt, Human
agaaaaaaaaaaagaaaaaga

SEQ ID NO: 120551 - RNA, 22 nt, Human
agaaaaaaaaaaagaaaaagaa

SEQ ID NO: 120552 - RNA, 22 nt, Human
agagaaaaaaaaaaagaaaaag

SEQ ID NO: 120553 - RNA, 18 nt, Human
agagugaguccuugaaaa

SEQ ID NO: 120554 - RNA, 18 nt, Human
auuccauucacugauggg

SEQ ID NO: 120555 - RNA, 22 nt, Human
auuccauucacugaugggcaaa

SEQ ID NO: 120556 - RNA, 23 nt, Human
caaaauaauuacacagacaccau

SEQ ID NO: 120557 - RNA, 18 nt, Human
caacaaaagcggagcaca

SEQ ID NO: 120558 - RNA, 22 nt, Human
cacaaaauaugaacuucucaag

SEQ ID NO: 120559 - RNA, 18 nt, Human
cacugcaacaagguucac

SEQ ID NO: 120560 - RNA, 22 nt, Human
cauugcauggcacauccaaagu

SEQ ID NO: 120561 - RNA, 26 nt, Human
cauuuuaccaccaccaucugccgaac

SEQ ID NO: 120562 - RNA, 22 nt, Human
cauuuuuguuucuaagagugag

SEQ ID NO: 120563 - RNA, 23 nt, Human
cucauugguccauuccauucacu

SEQ ID NO: 120564 - RNA, 21 nt, Human
cuuccaccuuauacacugcaa

SEQ ID NO: 120565 - RNA, 22 nt, Human
gcaguaaguuucggugagauuu

SEQ ID NO: 120566 - RNA, 21 nt, Human
ggugagauuucuuuaggcuuc

SEQ ID NO: 120567 - RNA, 20 nt, Human
guugacacuuaagauacugu

SEQ ID NO: 120568 - RNA, 31 nt, Human
uaaauuagagaaaaaaaaaaagaaaaagaaa

SEQ ID NO: 120569 - RNA, 21 nt, Human
uaacuccccaggaucugucug

SEQ ID NO: 120570 - RNA, 24 nt, Human
uaacuccccaggaucugucugugu

SEQ ID NO: 120571 - RNA, 18 nt, Human
uaacugguugacacuuaa

SEQ ID NO: 120572 - RNA, 23 nt, Human
uaagacaaccacaaaaugaagua

SEQ ID NO: 120573 - RNA, 22 nt, Human
uacacagacaccauugcauggc

SEQ ID NO: 120574 - RNA, 23 nt, Human
uaccaccaccaucugccgaaccc

SEQ ID NO: 120575 - RNA, 24 nt, Human
uaccaccaccaucugccgaaccca

SEQ ID NO: 120576 - RNA, 21 nt, Human
uaguguauuucuuuauaacuc

SEQ ID NO: 120577 - RNA, 21 nt, Human
uauuuugcauuuuuaaaaaua

SEQ ID NO: 120578 - RNA, 18 nt, Human
ucauuuuaccaccaccau

SEQ ID NO: 120579 - RNA, 27 nt, Human
uccucaguaccucugggcagugacugu

SEQ ID NO: 120580 - RNA, 21 nt, Human
ucuggaaaauguucuauggaa

SEQ ID NO: 120581 - RNA, 23 nt, Human
ugaaaucaaugcagaugucacaa

SEQ ID NO: 120582 - RNA, 20 nt, Human
ugacccacuuuuuauugcug

SEQ ID NO: 120583 - RNA, 23 nt, Human
ugauaccaccucauugguccauu

SEQ ID NO: 120584 - RNA, 23 nt, Human
ugauuuuaaucacaagacagcag

SEQ ID NO: 120585 - RNA, 18 nt, Human
ugcauggcacauccaaag

SEQ ID NO: 120586 - RNA, 22 nt, Human
ugcauggcacauccaaaguuuu

SEQ ID NO: 120587 - RNA, 21 nt, Human
ugggcagugacuguaccauga

SEQ ID NO: 120588 - RNA, 24 nt, Human
uuaaucacaagacagcagaugaac

SEQ ID NO: 120589 - RNA, 24 nt, Human
uuacagaaguuauaaaaaaccaga

SEQ ID NO: 120590 - RNA, 22 nt, Human
uuagagaaaaaaaaaaagaaaa

SEQ ID NO: 120591 - RNA, 19 nt, Human
uuccucaguaccucugggc

SEQ ID NO: 120592 - RNA, 23 nt, Human
uuccucaguaccucugggcagug

SEQ ID NO: 120593 - RNA, 22 nt, Human
uucuuuaggcuuccaccuuaua

SEQ ID NO: 120594 - RNA, 24 nt, Human
uugcauggcacauccaaaguuuuc

SEQ ID NO: 120595 - RNA, 21 nt, Human
uuugacaaaacuuuaaagcuu

SEQ ID NO: 120596 - RNA, 21 nt, Human
aaaaagaaaaaagaaaaucag

SEQ ID NO: 120597 - RNA, 23 nt, Human
aacaauggugggaaugggaagaa

SEQ ID NO: 120598 - RNA, 23 nt, Human
aacagggaaaagaccaagguaag

SEQ ID NO: 120599 - RNA, 23 nt, Human
aacuacuauaaauccacaagcaa

SEQ ID NO: 120600 - RNA, 21 nt, Human
aagagcacgagauaccaaccc

SEQ ID NO: 120601 - RNA, 25 nt, Human
aagcgaccagcaagcaguccacugc

SEQ ID NO: 120602 - RNA, 19 nt, Human
aagcggcagcggcggcggc

SEQ ID NO: 120603 - RNA, 18 nt, Human
aagcugcaucaaggagag

SEQ ID NO: 120604 - RNA, 20 nt, Human
aagugugggacgguggagga

SEQ ID NO: 120605 - RNA, 24 nt, Human
acagggaaaagaccaagguaagga

SEQ ID NO: 120606 - RNA, 20 nt, Human
acuacuauaaauccacaagc

SEQ ID NO: 120607 - RNA, 19 nt, Human
acuuccacaagagccacua

SEQ ID NO: 120608 - RNA, 21 nt, Human
agaaaaaagaaaaucagccua

SEQ ID NO: 120609 - RNA, 23 nt, Human
agaagucuccaccuaaaugcagc

SEQ ID NO: 120610 - RNA, 19 nt, Human
agcugcaucaaggagaggg

SEQ ID NO: 120611 - RNA, 23 nt, Human
agucuccaccuaaaugcagcagc

SEQ ID NO: 120612 - RNA, 23 nt, Human
auggccaagacaaagaaaacuaa

SEQ ID NO: 120613 - RNA, 18 nt, Human
caagacaaagaaaacuaa

SEQ ID NO: 120614 - RNA, 22 nt, Human
cacacuuccacaagagccacua

SEQ ID NO: 120615 - RNA, 23 nt, Human
caccccuccccgccaggcgcaag

SEQ ID NO: 120616 - RNA, 18 nt, Human
cacggugcuucugaagug

SEQ ID NO: 120617 - RNA, 21 nt, Human
cagcagccgggauugaggcug

SEQ ID NO: 120618 - RNA, 22 nt, Human
cagcauguugggagaugaacag

SEQ ID NO: 120619 - RNA, 20 nt, Human
caucaaggagaggguggacu

SEQ ID NO: 120620 - RNA, 22 nt, Human
ccaagacaaagaaaacuaagaa

SEQ ID NO: 120621 - RNA, 24 nt, Human
ccaccucugcucaggcaucaggag

SEQ ID NO: 120622 - RNA, 21 nt, Human
ccaccugcagguaauuuuuca

SEQ ID NO: 120623 - RNA, 18 nt, Human
ccucccuuccuucuuucc

SEQ ID NO: 120624 - RNA, 21 nt, Human
ccuuccuuucuuccugccucc

SEQ ID NO: 120625 - RNA, 25 nt, Human
ccuuccuuucuuccugccuccccug

SEQ ID NO: 120626 - RNA, 18 nt, Human
ccuucuuuccuuccuucc

SEQ ID NO: 120627 - RNA, 24 nt, Human
cggcagcggcggcggccgcucucc

SEQ ID NO: 120628 - RNA, 21 nt, Human
cuaagacacacuuccacaaga

SEQ ID NO: 120629 - RNA, 21 nt, Human
cuuccuucuuuccuuccuucc

SEQ ID NO: 120630 - RNA, 23 nt, Human
cuucugaaguguuucaccccucc

SEQ ID NO: 120631 - RNA, 23 nt, Human
gaaaaaaaaauuuguccaugaaa

SEQ ID NO: 120632 - RNA, 21 nt, Human
gacaaagaaaacuaagaaaga

SEQ ID NO: 120633 - RNA, 19 nt, Human
gaccuuguuucagaccugu

SEQ ID NO: 120634 - RNA, 18 nt, Human
gagcacagcauguuggga

SEQ ID NO: 120635 - RNA, 22 nt, Human
gagcacgagauaccaacccccu

SEQ ID NO: 120636 - RNA, 18 nt, Human
gaggggagaaaaaaaaaa

SEQ ID NO: 120637 - RNA, 18 nt, Human
gaguuaugaaaaguucga

SEQ ID NO: 120638 - RNA, 23 nt, Human
gcacagcauguugggagaugaac

SEQ ID NO: 120639 - RNA, 18 nt, Human
gcggcagcggcggcggcc

SEQ ID NO: 120640 - RNA, 19 nt, Human
ggacucccccaccucugcu

SEQ ID NO: 120641 - RNA, 23 nt, Human
ggcagcggcggcggccgcucucc

SEQ ID NO: 120642 - RNA, 19 nt, Human
gguaaggagccugggaggg

SEQ ID NO: 120643 - RNA, 26 nt, Human
gugaugaggaacuaaauuugggaggg

SEQ ID NO: 120644 - RNA, 18 nt, Human
guggacucccccaccucu

SEQ ID NO: 120645 - RNA, 18 nt, Human
uaaccccacugaagcgcu

SEQ ID NO: 120646 - RNA, 22 nt, Human
uaacuaagacacacuuccacaa

SEQ ID NO: 120647 - RNA, 18 nt, Human
uacugaacagaaguuuuu

SEQ ID NO: 120648 - RNA, 27 nt, Human
uaugacugaacuacuauaaauccacaa

SEQ ID NO: 120649 - RNA, 18 nt, Human
ucaccccuccccgccagg

SEQ ID NO: 120650 - RNA, 25 nt, Human
ucaccccuccccgccaggcgcaagc

SEQ ID NO: 120651 - RNA, 23 nt, Human
ucagacacggugcuucugaagug

SEQ ID NO: 120652 - RNA, 20 nt, Human
ucccuuccuucuuuccuucc

SEQ ID NO: 120653 - RNA, 20 nt, Human
uccucccuuccuucuuuccc

SEQ ID NO: 120654 - RNA, 28 nt, Human
ucgaguuaaaaaaaaaaagaaaaaagaa

SEQ ID NO: 120655 - RNA, 20 nt, Human
ucuuacugaacagaaguuuu

SEQ ID NO: 120656 - RNA, 20 nt, Human
ucuuuguucuuuugugauga

SEQ ID NO: 120657 - RNA, 20 nt, Human
ugaacagggaaaagaccaag

SEQ ID NO: 120658 - RNA, 26 nt, Human
ugaguuggauuuaggguucuccccgg

SEQ ID NO: 120659 - RNA, 22 nt, Human
ugauguaacuaagacacacuuc

SEQ ID NO: 120660 - RNA, 23 nt, Human
ugcuucugaaguguuucaccccu

SEQ ID NO: 120661 - RNA, 22 nt, Human
ugggaaugggaagaagucucca

SEQ ID NO: 120662 - RNA, 21 nt, Human
ugggaggggagaaaaaaaaau

SEQ ID NO: 120663 - RNA, 18 nt, Human
uucuuacugaacagaagu

SEQ ID NO: 120664 - RNA, 20 nt, Human
uuuaguaucugucugcauuu

SEQ ID NO: 120665 - RNA, 18 nt, Human
aacaggaagccaaaggca

SEQ ID NO: 120666 - RNA, 21 nt, Human
aacaguaaccaacaacauucu

SEQ ID NO: 120667 - RNA, 24 nt, Human
aaucgcuugaaccagggaggugga

SEQ ID NO: 120668 - RNA, 21 nt, Human
accggggggcggcgcggggcg

SEQ ID NO: 120669 - RNA, 18 nt, Human
acugcacuccagccuggg

SEQ ID NO: 120670 - RNA, 23 nt, Human
acugcacuccagccugggugaca

SEQ ID NO: 120671 - RNA, 22 nt, Human
aggcaggagaaucgcuugaacc

SEQ ID NO: 120672 - RNA, 24 nt, Human
aggcaggagaaucgcuugaaccag

SEQ ID NO: 120673 - RNA, 29 nt, Human
agggagguggagguugcagugacaacggu

SEQ ID NO: 120674 - RNA, 24 nt, Human
aggguggcggcggcggcgcggcgg

SEQ ID NO: 120675 - RNA, 24 nt, Human
agguggagguugcagugagcugag

SEQ ID NO: 120676 - RNA, 24 nt, Human
auucugcauacccuucacauuccc

SEQ ID NO: 120677 - RNA, 24 nt, Human
auugcgccacugcacuccagccug

SEQ ID NO: 120678 - RNA, 21 nt, Human
cacauacugcgcccguccccc

SEQ ID NO: 120679 - RNA, 18 nt, Human
cacuccagccugggugac

SEQ ID NO: 120680 - RNA, 19 nt, Human
cacuccagccugggugaca

SEQ ID NO: 120681 - RNA, 19 nt, Human
cacugcacuccagccuggg

SEQ ID NO: 120682 - RNA, 21 nt, Human
cacugcacuccagccugggug

SEQ ID NO: 120683 - RNA, 22 nt, Human
cacugcacuccagccuggguga

SEQ ID NO: 120684 - RNA, 23 nt, Human
cacugcacuccagccugggugac

SEQ ID NO: 120685 - RNA, 24 nt, Human
cacugcacuccagccugggugaca

SEQ ID NO: 120686 - RNA, 20 nt, Human
ccacugcacuccagccuggg

SEQ ID NO: 120687 - RNA, 20 nt, Human
ccacugcacuccagccuggg

SEQ ID NO: 120688 - RNA, 20 nt, Human
ccacugcacuccagccuggg

SEQ ID NO: 120689 - RNA, 21 nt, Human
ccacugcacuccagccugggu

SEQ ID NO: 120690 - RNA, 24 nt, Human
ccacugcacuccagccugggugac

SEQ ID NO: 120691 - RNA, 21 nt, Human
ccagggagguggagguugcag

SEQ ID NO: 120692 - RNA, 18 nt, Human
cccccacuguggagucug

SEQ ID NO: 120693 - RNA, 26 nt, Human
cgccacugcacuccagccugggugac

SEQ ID NO: 120694 - RNA, 24 nt, Human
cgcggggcgcagaggguggcaggg

SEQ ID NO: 120695 - RNA, 21 nt, Human
cggcgcggcgggggacgcggg

SEQ ID NO: 120696 - RNA, 25 nt, Human
cgggaccggggggcggcgcggggcg

SEQ ID NO: 120697 - RNA, 19 nt, Human
cggggcgucgggcggagga

SEQ ID NO: 120698 - RNA, 22 nt, Human
gagaaucgcuugaaccagggag

SEQ ID NO: 120699 - RNA, 23 nt, Human
gagauugcgccacugcacuccag

SEQ ID NO: 120700 - RNA, 21 nt, Human
gagguggagguugcagugagc

SEQ ID NO: 120701 - RNA, 23 nt, Human
gagguugcagugagcugagauug

SEQ ID NO: 120702 - RNA, 18 nt, Human
gauuugguucuuguucug

SEQ ID NO: 120703 - RNA, 19 nt, Human
gccacugcacuccagccug

SEQ ID NO: 120704 - RNA, 24 nt, Human
gccacugcacuccagccuggguga

SEQ ID NO: 120705 - RNA, 18 nt, Human
gcgcggcgggggacgcgg

SEQ ID NO: 120706 - RNA, 18 nt, Human
gcggcgcggggcgcagag

SEQ ID NO: 120707 - RNA, 21 nt, Human
gcggcggcggcgcggcggggg

SEQ ID NO: 120708 - RNA, 22 nt, Human
ggaaaagugggagaaccgcaac

SEQ ID NO: 120709 - RNA, 24 nt, Human
ggacgcggggcgucgggcggagga

SEQ ID NO: 120710 - RNA, 24 nt, Human
ggaggcaggagaaucgcuugaacc

SEQ ID NO: 120711 - RNA, 22 nt, Human
ggagguugcagugagcugagau

SEQ ID NO: 120712 - RNA, 24 nt, Human
ggagguugcagugagcugagauug

SEQ ID NO: 120713 - RNA, 25 nt, Human
ggagucuguggucagcuaguuagcg

SEQ ID NO: 120714 - RNA, 22 nt, Human
ggcgcggcgggggacgcggggc

SEQ ID NO: 120715 - RNA, 20 nt, Human
gggcggcgcggggcgcagag

SEQ ID NO: 120716 - RNA, 18 nt, Human
gggcgucgggcggaggag

SEQ ID NO: 120717 - RNA, 25 nt, Human
ggggcgcagaggguggcggcggcgg

SEQ ID NO: 120718 - RNA, 19 nt, Human
gguggagguugcagugagc

SEQ ID NO: 120719 - RNA, 19 nt, Human
guggcggcggcggcgcggc

SEQ ID NO: 120720 - RNA, 19 nt, Human
guugcagugagcugagauu

SEQ ID NO: 120721 - RNA, 21 nt, Human
guugcagugagcugagauugc

SEQ ID NO: 120722 - RNA, 18 nt, Human
uacauucggaagugaggu

SEQ ID NO: 120723 - RNA, 18 nt, Human
uacgguggugggcugccc

SEQ ID NO: 120724 - RNA, 24 nt, Human
ucgcuugaaccagggagguggagg

SEQ ID NO: 120725 - RNA, 22 nt, Human
ugagcugagauugcgccacugc

SEQ ID NO: 120726 - RNA, 24 nt, Human
ugauuugguucuuguucugcuuau

SEQ ID NO: 120727 - RNA, 18 nt, Human
uggaaaaacaggcggccc

SEQ ID NO: 120728 - RNA, 21 nt, Human
uggcggcggcggcgcggcggg

SEQ ID NO: 120729 - RNA, 22 nt, Human
uggcggcggcggcgcggcgggg

SEQ ID NO: 120730 - RNA, 22 nt, Human
uuagcgugguuugcuggaaaaa

SEQ ID NO: 120731 - RNA, 18 nt, Human
uucgugcucgccaaaccu

SEQ ID NO: 120732 - RNA, 24 nt, Human
uugaaccagggagguggagguugc

SEQ ID NO: 120733 - RNA, 28 nt, Human
uugauauacgguggugggcugcccuucu

SEQ ID NO: 120734 - RNA, 19 nt, Human
uugcagugagcugagauug

SEQ ID NO: 120735 - RNA, 22 nt, Human
uugcagugagcugagauugcgc

SEQ ID NO: 120736 - RNA, 23 nt, Human
uugcgccacugcacuccagccug

SEQ ID NO: 120737 - RNA, 24 nt, Human
uugugucugcucacggaacgugau

SEQ ID NO: 120738 - RNA, 21 nt, Human
uuugauuugguucuuguucug

SEQ ID NO: 120739 - RNA, 23 nt, Human
aaaaaggaaugcagcaaagaaga

SEQ ID NO: 120740 - RNA, 23 nt, Human
aaaguccuccauucaggccuuuc

SEQ ID NO: 120741 - RNA, 20 nt, Human
aaaugcuuacuuucugcucu

SEQ ID NO: 120742 - RNA, 23 nt, Human
aagcgugguggcccggggaagga

SEQ ID NO: 120743 - RNA, 21 nt, Human
acaccuaauguucucggcugu

SEQ ID NO: 120744 - RNA, 23 nt, Human
agaguucgacauuggaguccuua

SEQ ID NO: 120745 - RNA, 21 nt, Human
aggaaaggcacaggaaguuag

SEQ ID NO: 120746 - RNA, 19 nt, Human
aguuccaucaggaucccau

SEQ ID NO: 120747 - RNA, 24 nt, Human
auugcaguuuggggggaaaauuca

SEQ ID NO: 120748 - RNA, 22 nt, Human
caacccaaaaugacugaacggg

SEQ ID NO: 120749 - RNA, 21 nt, Human
cacggcaacccaaaaugacug

SEQ ID NO: 120750 - RNA, 21 nt, Human
cacggcaacccaaaaugacuu

SEQ ID NO: 120751 - RNA, 20 nt, Human
cagcaaagaagaguucgaca

SEQ ID NO: 120752 - RNA, 23 nt, Human
cagccgaaccaaugauuaaagac

SEQ ID NO: 120753 - RNA, 24 nt, Human
caggaaaagccaucuucagucuug

SEQ ID NO: 120754 - RNA, 18 nt, Human
caggccuuucuuguaagu

SEQ ID NO: 120755 - RNA, 21 nt, Human
cauguagaagcaaacugcacc

SEQ ID NO: 120756 - RNA, 19 nt, Human
cauuuucuuucauuuuguc

SEQ ID NO: 120757 - RNA, 24 nt, Human
ccaaugauuaaagaccucuaaggc

SEQ ID NO: 120758 - RNA, 18 nt, Human
ccagaaaggcucggggca

SEQ ID NO: 120759 - RNA, 18 nt, Human
ccuauggcugagauaggg

SEQ ID NO: 120760 - RNA, 23 nt, Human
ccuuuagcaucauguagaagcca

SEQ ID NO: 120761 - RNA, 20 nt, Human
cgaggugauaggaaaggcac

SEQ ID NO: 120762 - RNA, 24 nt, Human
cgcacgccuggaguucuuccccag

SEQ ID NO: 120763 - RNA, 20 nt, Human
cggcuuauugcaguuugggg

SEQ ID NO: 120764 - RNA, 25 nt, Human
cuacauaaaagcagccgaaccaaug

SEQ ID NO: 120765 - RNA, 19 nt, Human
cugacagucaaagagcaag

SEQ ID NO: 120766 - RNA, 21 nt, Human
cugcagcgcugcgcgacuggg

SEQ ID NO: 120767 - RNA, 23 nt, Human
cuuaguuccaucaggaucccauu

SEQ ID NO: 120768 - RNA, 22 nt, Human
gaaaugaugaaaacacauguuc

SEQ ID NO: 120769 - RNA, 25 nt, Human
gaagaaaaaggaaugcagcaaagaa

SEQ ID NO: 120770 - RNA, 27 nt, Human
gaagaaaaaggaaugcagcaaagaaga

SEQ ID NO: 120771 - RNA, 18 nt, Human
gccuaaacuacauaaaag

SEQ ID NO: 120772 - RNA, 18 nt, Human
gccuggaguucuucccca

SEQ ID NO: 120773 - RNA, 18 nt, Human
gcggcuuauugcaguuug

SEQ ID NO: 120774 - RNA, 23 nt, Human
ggaguucuuccccagaaaggcuc

SEQ ID NO: 120775 - RNA, 26 nt, Human
ggcaacccaaaaugacugaacggugg

SEQ ID NO: 120776 - RNA, 18 nt, Human
ggccuuggaaggcggcuu

SEQ ID NO: 120777 - RNA, 22 nt, Human
ggugauaggaaaggcacaggaa

SEQ ID NO: 120778 - RNA, 20 nt, Human
gugaagaaaaaggaaugcag

SEQ ID NO: 120779 - RNA, 20 nt, Human
uaaaagcagccgaaccaaug

SEQ ID NO: 120780 - RNA, 24 nt, Human
uacagaaaaguccuccauucaggc

SEQ ID NO: 120781 - RNA, 18 nt, Human
uaggaaaggcacaggaag

SEQ ID NO: 120782 - RNA, 22 nt, Human
uaggaaaggcacaggaaguuag

SEQ ID NO: 120783 - RNA, 21 nt, Human
uaggaagcgugguggcccggg

SEQ ID NO: 120784 - RNA, 18 nt, Human
uaggugcaaugaccuaca

SEQ ID NO: 120785 - RNA, 23 nt, Human
ucacugcagcgcugcgcgacugg

SEQ ID NO: 120786 - RNA, 22 nt, Human
ucaucauuaaauaugcccaaac

SEQ ID NO: 120787 - RNA, 19 nt, Human
uccacaacaccuaauguuc

SEQ ID NO: 120788 - RNA, 24 nt, Human
ugacagucaaagagcaagugaaac

SEQ ID NO: 120789 - RNA, 24 nt, Human
ugacugaacggugguccaaaaauc

SEQ ID NO: 120790 - RNA, 23 nt, Human
ugauaggaaaggcacaggaaguu

SEQ ID NO: 120791 - RNA, 20 nt, Human
ugcgggaggaugcggggcug

SEQ ID NO: 120792 - RNA, 20 nt, Human
uggcccggggaaggaugcgg

SEQ ID NO: 120793 - RNA, 24 nt, Human
uggcugagauaggugcaaugaccu

SEQ ID NO: 120794 - RNA, 21 nt, Human
uguguuuucuagcuguccagg

SEQ ID NO: 120795 - RNA, 18 nt, Human
uuagauaggcuggaaaug

SEQ ID NO: 120796 - RNA, 22 nt, Human
aaaaacacugcauccccagccc

SEQ ID NO: 120797 - RNA, 24 nt, Human
aaaaacacugcauccccagccccc

SEQ ID NO: 120798 - RNA, 21 nt, Human
aaaccaagaccccccaaaaaa

SEQ ID NO: 120799 - RNA, 23 nt, Human
aacuuggcagcaccuccuugguc

SEQ ID NO: 120800 - RNA, 25 nt, Human
aagaccagagcccccucccaccaug

SEQ ID NO: 120801 - RNA, 20 nt, Human
aagcagagccagaguaagga

SEQ ID NO: 120802 - RNA, 19 nt, Human
aaugugugugugugugugu

SEQ ID NO: 120803 - RNA, 23 nt, Human
aauguguguguguguguguuugu

SEQ ID NO: 120804 - RNA, 22 nt, Human
acacacucccagaguucagccc

SEQ ID NO: 120805 - RNA, 19 nt, Human
acacugcauccccagcccc

SEQ ID NO: 120806 - RNA, 27 nt, Human
acacugcauccccagccccccgcaaac

SEQ ID NO: 120807 - RNA, 24 nt, Human
acagaacacugcagcucacagcaa

SEQ ID NO: 120808 - RNA, 20 nt, Human
accaagaccaaagacggaac

SEQ ID NO: 120809 - RNA, 19 nt, Human
accagcaggacccaaagcc

SEQ ID NO: 120810 - RNA, 20 nt, Human
accccccaaaaaacacugca

SEQ ID NO: 120811 - RNA, 24 nt, Human
accccuagguggaccauucauuug

SEQ ID NO: 120812 - RNA, 23 nt, Human
acccuacguccaggcuucuuccu

SEQ ID NO: 120813 - RNA, 24 nt, Human
acgcagacacacacgcacauccaa

SEQ ID NO: 120814 - RNA, 21 nt, Human
acugagcaucucucuacaaua

SEQ ID NO: 120815 - RNA, 21 nt, Human
acugcagcucacagcaaaacc

SEQ ID NO: 120816 - RNA, 25 nt, Human
acugcagcucacagcaaaaccagca

SEQ ID NO: 120817 - RNA, 21 nt, Human
acuugugcuucccucagcugg

SEQ ID NO: 120818 - RNA, 24 nt, Human
agaaaaaugugugugugugugugg

SEQ ID NO: 120819 - RNA, 22 nt, Human
agaaaagaccagagcccccucc

SEQ ID NO: 120820 - RNA, 18 nt, Human
agaaaguguaagcagagc

SEQ ID NO: 120821 - RNA, 22 nt, Human
agaccagagcccccucccacca

SEQ ID NO: 120822 - RNA, 19 nt, Human
agaccuggaaggguuagca

SEQ ID NO: 120823 - RNA, 23 nt, Human
agauaccacagacccacagaaca

SEQ ID NO: 120824 - RNA, 21 nt, Human
agcaaaaccagcaggacccaa

SEQ ID NO: 120825 - RNA, 22 nt, Human
agcaaaaccagcaggacccaaa

SEQ ID NO: 120826 - RNA, 22 nt, Human
agccaacauugacuaagucuga

SEQ ID NO: 120827 - RNA, 26 nt, Human
agccuggcaaacaagagaccagacca

SEQ ID NO: 120828 - RNA, 22 nt, Human
agccuucuauucccaaagcuaa

SEQ ID NO: 120829 - RNA, 24 nt, Human
aggaaaagaagaccuuuguucaaa

SEQ ID NO: 120830 - RNA, 23 nt, Human
aggagugggacccagggcagggg

SEQ ID NO: 120831 - RNA, 18 nt, Human
agggugggguggggcagg

SEQ ID NO: 120832 - RNA, 21 nt, Human
agguugcacauuugggggagg

SEQ ID NO: 120833 - RNA, 20 nt, Human
auccuggccccuggugugga

SEQ ID NO: 120834 - RNA, 22 nt, Human
augcagaaccaccaaaucucag

SEQ ID NO: 120835 - RNA, 22 nt, Human
caaaaccagcaggacccaaagc

SEQ ID NO: 120836 - RNA, 21 nt, Human
caaaagacaaaccgcccacuu

SEQ ID NO: 120837 - RNA, 24 nt, Human
caagaaguacauuaauguccacag

SEQ ID NO: 120838 - RNA, 19 nt, Human
cacacaugcagaaccacca

SEQ ID NO: 120839 - RNA, 18 nt, Human
cacagaacacugcagcuc

SEQ ID NO: 120840 - RNA, 20 nt, Human
cacagaacacugcagcucac

SEQ ID NO: 120841 - RNA, 19 nt, Human
caccauggagccgaggugg

SEQ ID NO: 120842 - RNA, 21 nt, Human
caccauggagccgaggugggg

SEQ ID NO: 120843 - RNA, 19 nt, Human
cacuuuagaaaagaccaga

SEQ ID NO: 120844 - RNA, 23 nt, Human
cagauaccacagacccacagaac

SEQ ID NO: 120845 - RNA, 23 nt, Human
cagcaaaaccagcaggacccaaa

SEQ ID NO: 120846 - RNA, 26 nt, Human
cagcaaaaccagcaggacccaaagcc

SEQ ID NO: 120847 - RNA, 18 nt, Human
cagcaggacccaaagccg

SEQ ID NO: 120848 - RNA, 24 nt, Human
cagccccccgcaaacaaaggaaaa

SEQ ID NO: 120849 - RNA, 21 nt, Human
caggaccaaauccuuauucca

SEQ ID NO: 120850 - RNA, 21 nt, Human
caggauuugggucagaaccaa

SEQ ID NO: 120851 - RNA, 19 nt, Human
cauaaaccaagacccccca

SEQ ID NO: 120852 - RNA, 24 nt, Human
cauccccagccccccgcaaacaaa

SEQ ID NO: 120853 - RNA, 24 nt, Human
caugcagaaccaccaaaucucagc

SEQ ID NO: 120854 - RNA, 21 nt, Human
ccaagaccccccaaaaaacac

SEQ ID NO: 120855 - RNA, 18 nt, Human
ccacagauuuuacccgga

SEQ ID NO: 120856 - RNA, 23 nt, Human
ccacggugcuuuuuuaacccuga

SEQ ID NO: 120857 - RNA, 22 nt, Human
ccagaaaacaggaccaaauccu

SEQ ID NO: 120858 - RNA, 24 nt, Human
ccagagcccccucccaccauggag

SEQ ID NO: 120859 - RNA, 18 nt, Human
ccaggcgaaggcuccaga

SEQ ID NO: 120860 - RNA, 22 nt, Human
ccccaaaaaacacugcaucccc

SEQ ID NO: 120861 - RNA, 23 nt, Human
ccccaaaaaacacugcauccccu

SEQ ID NO: 120862 - RNA, 24 nt, Human
cccccaaaaaacacugcaucccca

SEQ ID NO: 120863 - RNA, 24 nt, Human
ccccccaaaaaacacugcaucccc

SEQ ID NO: 120864 - RNA, 19 nt, Human
cccccgcaaacaaaggaaa

SEQ ID NO: 120865 - RNA, 19 nt, Human
cccccucccaccauggagc

SEQ ID NO: 120866 - RNA, 19 nt, Human
ccccugguguggagagacc

SEQ ID NO: 120867 - RNA, 23 nt, Human
ccuccaucaccuacauauugcuu

SEQ ID NO: 120868 - RNA, 18 nt, Human
ccucccaccauggagccg

SEQ ID NO: 120869 - RNA, 20 nt, Human
ccuggauuuaggaauucagc

SEQ ID NO: 120870 - RNA, 28 nt, Human
cguucacacgcacacacacucauaugcg

SEQ ID NO: 120871 - RNA, 18 nt, Human
cugaaggcauggagggag

SEQ ID NO: 120872 - RNA, 18 nt, Human
cuggguucugucucccca

SEQ ID NO: 120873 - RNA, 24 nt, Human
gaaagugaguaacagacauggagg

SEQ ID NO: 120874 - RNA, 19 nt, Human
gagagaaaguguaagcaga

SEQ ID NO: 120875 - RNA, 19 nt, Human
gagccucaguuucacugug

SEQ ID NO: 120876 - RNA, 22 nt, Human
gcaaaaccagcaggacccaaag

SEQ ID NO: 120877 - RNA, 24 nt, Human
gcaaaaccagcaggacccaaagcc

SEQ ID NO: 120878 - RNA, 22 nt, Human
gcaaacauacacucaugcaccc

SEQ ID NO: 120879 - RNA, 24 nt, Human
gcaaacauacacucaugcacccuc

SEQ ID NO: 120880 - RNA, 21 nt, Human
ggaacuggauccuggccccug

SEQ ID NO: 120881 - RNA, 21 nt, Human
ggagggggaagaaaucugggc

SEQ ID NO: 120882 - RNA, 24 nt, Human
ggauuugggucagaaccaagaugg

SEQ ID NO: 120883 - RNA, 19 nt, Human
ggcaggagugggacccagg

SEQ ID NO: 120884 - RNA, 20 nt, Human
ggcaggagugggacccaggg

SEQ ID NO: 120885 - RNA, 20 nt, Human
ggcugaggggcucaagggca

SEQ ID NO: 120886 - RNA, 18 nt, Human
gggaaagaucaaaagaca

SEQ ID NO: 120887 - RNA, 20 nt, Human
ggggcaggagugggacccag

SEQ ID NO: 120888 - RNA, 24 nt, Human
ggggcagggcaaacggcugagggg

SEQ ID NO: 120889 - RNA, 20 nt, Human
ggggcucaagggcagggagc

SEQ ID NO: 120890 - RNA, 20 nt, Human
gggucagaaccaagauggga

SEQ ID NO: 120891 - RNA, 20 nt, Human
gggugggguggggcaggagu

SEQ ID NO: 120892 - RNA, 23 nt, Human
guccaggaaggagguucuuuguc

SEQ ID NO: 120893 - RNA, 18 nt, Human
gugaaaagcaauuccuuc

SEQ ID NO: 120894 - RNA, 24 nt, Human
guuucaguuuuaacacugagcauc

SEQ ID NO: 120895 - RNA, 23 nt, Human
uaaaaaauuaaaaucuacaagag

SEQ ID NO: 120896 - RNA, 19 nt, Human
uaaaccaagaccccccaaa

SEQ ID NO: 120897 - RNA, 23 nt, Human
uaaaccaagaccccccaaaaaac

SEQ ID NO: 120898 - RNA, 24 nt, Human
uaaaccaagaccccccaaaaaaca

SEQ ID NO: 120899 - RNA, 20 nt, Human
uaagaagacaaaccuguauc

SEQ ID NO: 120900 - RNA, 18 nt, Human
uaaggacuggguaugugc

SEQ ID NO: 120901 - RNA, 22 nt, Human
uaagucuuuagcauggugucua

SEQ ID NO: 120902 - RNA, 21 nt, Human
uacaauaugaccgcagguagg

SEQ ID NO: 120903 - RNA, 23 nt, Human
uagaaaagaccagagcccccucc

SEQ ID NO: 120904 - RNA, 24 nt, Human
uagaaaagaccagagcccccuccc

SEQ ID NO: 120905 - RNA, 19 nt, Human
uagaugaccaaagaugugu

SEQ ID NO: 120906 - RNA, 23 nt, Human
uagccuucuauucccaaagcuaa

SEQ ID NO: 120907 - RNA, 23 nt, Human
ucaaaguaagaagacaaaccugu

SEQ ID NO: 120908 - RNA, 22 nt, Human
ucaauggucauuauuacuuccc

SEQ ID NO: 120909 - RNA, 27 nt, Human
ucacacgcacacacacucauaugcgug

SEQ ID NO: 120910 - RNA, 19 nt, Human
ucacagcaaaaccagcagg

SEQ ID NO: 120911 - RNA, 21 nt, Human
ucacagcaaaaccagcaggac

SEQ ID NO: 120912 - RNA, 23 nt, Human
ucacagcaaaaccagcaggaccc

SEQ ID NO: 120913 - RNA, 18 nt, Human
ucacuguguguaaaaugg

SEQ ID NO: 120914 - RNA, 25 nt, Human
ucagccagacgagaaugaacuuuuc

SEQ ID NO: 120915 - RNA, 18 nt, Human
uccccagccccccgcaaa

SEQ ID NO: 120916 - RNA, 18 nt, Human
uccccaggcgaaggcucc

SEQ ID NO: 120917 - RNA, 22 nt, Human
ucccucagcugggacacacucc

SEQ ID NO: 120918 - RNA, 21 nt, Human
ucucuuguuucucucuggguu

SEQ ID NO: 120919 - RNA, 21 nt, Human
ucugaaggcauggagggaggu

SEQ ID NO: 120920 - RNA, 23 nt, Human
ucuuaguugucaauggucauuau

SEQ ID NO: 120921 - RNA, 21 nt, Human
ucuuguuucucucuggguucu

SEQ ID NO: 120922 - RNA, 23 nt, Human
ugaaaagcaauuccuucauguga

SEQ ID NO: 120923 - RNA, 21 nt, Human
ugaaagugaguaacagacaug

SEQ ID NO: 120924 - RNA, 19 nt, Human
ugaagacaaggauaagggu

SEQ ID NO: 120925 - RNA, 27 nt, Human
ugaaugcaaacauacacucaugcaccc

SEQ ID NO: 120926 - RNA, 24 nt, Human
ugagagauggagggggaagaaauc

SEQ ID NO: 120927 - RNA, 21 nt, Human
ugagggaacuggauccuggcc

SEQ ID NO: 120928 - RNA, 20 nt, Human
ugcaaacauacacucaugca

SEQ ID NO: 120929 - RNA, 24 nt, Human
ugccaagaagaucuuguguaugua

SEQ ID NO: 120930 - RNA, 26 nt, Human
ugcgugccacgcacauggcacacgca

SEQ ID NO: 120931 - RNA, 24 nt, Human
uggaaggguuagcaauacacucuc

SEQ ID NO: 120932 - RNA, 19 nt, Human
uggaggaaaagcuguggau

SEQ ID NO: 120933 - RNA, 21 nt, Human
uggaggaaaagcuguggaucu

SEQ ID NO: 120934 - RNA, 23 nt, Human
ugggaguuggcucugacuucugg

SEQ ID NO: 120935 - RNA, 23 nt, Human
ugggaucuccacacuguguguuu

SEQ ID NO: 120936 - RNA, 25 nt, Human
ugggcuagaaaacuuggcagcaccu

SEQ ID NO: 120937 - RNA, 19 nt, Human
ugggggcagggcaaacggc

SEQ ID NO: 120938 - RNA, 20 nt, Human
uggguucugucuccccaggc

SEQ ID NO: 120939 - RNA, 24 nt, Human
uguaaaaaaaggaaaagaagaccc

SEQ ID NO: 120940 - RNA, 25 nt, Human
uguccuaaaaacaucccuaaaaugc

SEQ ID NO: 120941 - RNA, 22 nt, Human
uguguguguguguguguuugug

SEQ ID NO: 120942 - RNA, 23 nt, Human
uguguguguguguguguuugugu

SEQ ID NO: 120943 - RNA, 23 nt, Human
uguguguguguguguuugugugu

SEQ ID NO: 120944 - RNA, 19 nt, Human
uguguguguguguuugugu

SEQ ID NO: 120945 - RNA, 21 nt, Human
uguguguguguguuugugugu

SEQ ID NO: 120946 - RNA, 19 nt, Human
uguugugcuuucuuuuuuc

SEQ ID NO: 120947 - RNA, 24 nt, Human
uguuuauccaccaagaccaaagac

SEQ ID NO: 120948 - RNA, 22 nt, Human
uuaaccauuuccuaaaugugua

SEQ ID NO: 120949 - RNA, 22 nt, Human
uuccuuuauaucugagccucag

SEQ ID NO: 120950 - RNA, 19 nt, Human
uugcacauuugggggagga

SEQ ID NO: 120951 - RNA, 21 nt, Human
uugcuacuugugcuucccuca

SEQ ID NO: 120952 - RNA, 20 nt, Human
uuuccuuuauaucugagccu

SEQ ID NO: 120953 - RNA, 18 nt, Human
uuuuuuuuuuuuuuuuug

SEQ ID NO: 120954 - RNA, 21 nt, Human
aaaaaccaggggaggaaguuu

SEQ ID NO: 120955 - RNA, 25 nt, Human
aaagcacuguuuauccaggcuccag

SEQ ID NO: 120956 - RNA, 21 nt, Human
aagccugccuccaccuuggcc

SEQ ID NO: 120957 - RNA, 30 nt, Human
acagacccaggacccagagucaugacccaa

SEQ ID NO: 120958 - RNA, 25 nt, Human
acccauccccagagcaaccuaccca

SEQ ID NO: 120959 - RNA, 22 nt, Human
aggacccuccaccccugguguc

SEQ ID NO: 120960 - RNA, 23 nt, Human
aggucacagacccaggacccaga

SEQ ID NO: 120961 - RNA, 22 nt, Human
auaccaucucccuaaaaaacca

SEQ ID NO: 120962 - RNA, 20 nt, Human
auggggcccgggacaugggc

SEQ ID NO: 120963 - RNA, 22 nt, Human
cacagacccaggacccagaguc

SEQ ID NO: 120964 - RNA, 19 nt, Human
cacaugcauguuuagcccu

SEQ ID NO: 120965 - RNA, 21 nt, Human
caccgggcauggaagcaaugg

SEQ ID NO: 120966 - RNA, 18 nt, Human
caccuuggccccugcagu

SEQ ID NO: 120967 - RNA, 21 nt, Human
cacuggcacuacaguggccuc

SEQ ID NO: 120968 - RNA, 20 nt, Human
cagacagcaccgggcaugga

SEQ ID NO: 120969 - RNA, 20 nt, Human
cagacccaggacccagaguc

SEQ ID NO: 120970 - RNA, 19 nt, Human
cagcaucugggcccaggcc

SEQ ID NO: 120971 - RNA, 19 nt, Human
cagcccaaaccagcuccag

SEQ ID NO: 120972 - RNA, 22 nt, Human
caggacccagagucaugaccca

SEQ ID NO: 120973 - RNA, 19 nt, Human
caggggauaccaucucccu

SEQ ID NO: 120974 - RNA, 22 nt, Human
caguggccucggccugagaccc

SEQ ID NO: 120975 - RNA, 20 nt, Human
caucccacacccccaggggc

SEQ ID NO: 120976 - RNA, 24 nt, Human
caucccacacccccaggggcucca

SEQ ID NO: 120977 - RNA, 22 nt, Human
caucucccuaaaaaaccagggg

SEQ ID NO: 120978 - RNA, 18 nt, Human
caugacccauguaggagg

SEQ ID NO: 120979 - RNA, 24 nt, Human
ccagccuagccugcuccaaagcca

SEQ ID NO: 120980 - RNA, 27 nt, Human
ccauccccagagcaaccuacccacccc

SEQ ID NO: 120981 - RNA, 22 nt, Human
cccaaggucacagacccaggac

SEQ ID NO: 120982 - RNA, 19 nt, Human
cccaggacccuccaccccu

SEQ ID NO: 120983 - RNA, 22 nt, Human
cccauccccagagcaaccuacc

SEQ ID NO: 120984 - RNA, 21 nt, Human
ccccagagcaaccuacccacc

SEQ ID NO: 120985 - RNA, 21 nt, Human
ccccaggggcuccaucagucc

SEQ ID NO: 120986 - RNA, 22 nt, Human
cccccaggggcuccaucagucc

SEQ ID NO: 120987 - RNA, 21 nt, Human
ccccugggacuaucucccagg

SEQ ID NO: 120988 - RNA, 19 nt, Human
ccccuggugucuccagguc

SEQ ID NO: 120989 - RNA, 27 nt, Human
cccggaccccugggacuaucucccagg

SEQ ID NO: 120990 - RNA, 23 nt, Human
cccuccuccaucccacaccccca

SEQ ID NO: 120991 - RNA, 19 nt, Human
ccucuugcccucuacucca

SEQ ID NO: 120992 - RNA, 23 nt, Human
ccucuugcccucuacuccagggg

SEQ ID NO: 120993 - RNA, 22 nt, Human
ccugagacccucgaugagcccc

SEQ ID NO: 120994 - RNA, 21 nt, Human
ccuggguuggaguagaaaagc

SEQ ID NO: 120995 - RNA, 21 nt, Human
ccugucccuggcccgaucagc

SEQ ID NO: 120996 - RNA, 22 nt, Human
cggaccccugggacuaucuccc

SEQ ID NO: 120997 - RNA, 24 nt, Human
cuccagggcaggaggacugaacuu

SEQ ID NO: 120998 - RNA, 22 nt, Human
cuccaggggauaccaucucccu

SEQ ID NO: 120999 - RNA, 23 nt, Human
cuccaggucucucuugcucuggg

SEQ ID NO: 121000 - RNA, 24 nt, Human
cuccaucccacacccccaggggcu

SEQ ID NO: 121001 - RNA, 21 nt, Human
cuccauggaaccaagugcccc

SEQ ID NO: 121002 - RNA, 22 nt, Human
cucccuuaaauaaacccauccc

SEQ ID NO: 121003 - RNA, 26 nt, Human
cuccuugcccucuuagcagccugggu

SEQ ID NO: 121004 - RNA, 26 nt, Human
cuggcacuacaguggccucggccuga

SEQ ID NO: 121005 - RNA, 18 nt, Human
cugggcccaggccaggcc

SEQ ID NO: 121006 - RNA, 23 nt, Human
ggcaggaggacugaacuuaagcc

SEQ ID NO: 121007 - RNA, 27 nt, Human
ggcgcucucuccucuugcccucuacuc

SEQ ID NO: 121008 - RNA, 20 nt, Human
gggauaccaucucccuaaaa

SEQ ID NO: 121009 - RNA, 26 nt, Human
gggcaggaggacugaacuuaagccug

SEQ ID NO: 121010 - RNA, 19 nt, Human
gggcccgggacaugggcaa

SEQ ID NO: 121011 - RNA, 24 nt, Human
guuuuuuucucaacucuggggcag

SEQ ID NO: 121012 - RNA, 24 nt, Human
uacaguggccucggccugagaccc

SEQ ID NO: 121013 - RNA, 19 nt, Human
uacccaaggucacagaccc

SEQ ID NO: 121014 - RNA, 22 nt, Human
uacccaaggucacagacccagg

SEQ ID NO: 121015 - RNA, 19 nt, Human
uacccacccugcacccuga

SEQ ID NO: 121016 - RNA, 24 nt, Human
uaucucccaggacccuccaccccu

SEQ ID NO: 121017 - RNA, 20 nt, Human
ucaguccuggcuagcucagc

SEQ ID NO: 121018 - RNA, 20 nt, Human
uccaccuuggccccugcagu

SEQ ID NO: 121019 - RNA, 21 nt, Human
uccagagccuccaaagcacug

SEQ ID NO: 121020 - RNA, 24 nt, Human
uccagagccuccaaagcacuguuu

SEQ ID NO: 121021 - RNA, 19 nt, Human
uccagggcaggaggacuga

SEQ ID NO: 121022 - RNA, 20 nt, Human
uccagggcaggaggacugaa

SEQ ID NO: 121023 - RNA, 21 nt, Human
uccaucccacacccccagggg

SEQ ID NO: 121024 - RNA, 21 nt, Human
uccccagagcaaccuacccac

SEQ ID NO: 121025 - RNA, 18 nt, Human
uccccaggguacuuccuu

SEQ ID NO: 121026 - RNA, 23 nt, Human
ucccggaccccugggacuaucuc

SEQ ID NO: 121027 - RNA, 19 nt, Human
ucccuaaaaaaccagggga

SEQ ID NO: 121028 - RNA, 22 nt, Human
ucccuaaaaaaccaggggagga

SEQ ID NO: 121029 - RNA, 18 nt, Human
ucccuucccuccccaggg

SEQ ID NO: 121030 - RNA, 18 nt, Human
ucuccaggucucucuugc

SEQ ID NO: 121031 - RNA, 19 nt, Human
ucucccaggacccuccacc

SEQ ID NO: 121032 - RNA, 18 nt, Human
ucucccuaaaaaaccagg

SEQ ID NO: 121033 - RNA, 21 nt, Human
ugagcugagggagguuccagc

SEQ ID NO: 121034 - RNA, 25 nt, Human
ugcccccagcugccugcccuagucc

SEQ ID NO: 121035 - RNA, 26 nt, Human
ugccuccaccuuggccccugcaguuc

SEQ ID NO: 121036 - RNA, 24 nt, Human
uggaaccaagugcccccagcugcc

SEQ ID NO: 121037 - RNA, 19 nt, Human
ugggaaugaacuggcugca

SEQ ID NO: 121038 - RNA, 18 nt, Human
ugggacuaucucccagga

SEQ ID NO: 121039 - RNA, 24 nt, Human
ugguuuugacagcccaaaccagcu

SEQ ID NO: 121040 - RNA, 19 nt, Human
ugucccuucccuccccagg

SEQ ID NO: 121041 - RNA, 21 nt, Human
uuccucugucccuucccuccc

SEQ ID NO: 121042 - RNA, 18 nt, Human
uucucaacucuggggcag

SEQ ID NO: 121043 - RNA, 26 nt, Human
uuucucaacucuggggcagagacugg

SEQ ID NO: 121044 - RNA, 21 nt, Human
uuuuuuuuuuuuuuuuccaga

SEQ ID NO: 121045 - RNA, 22 nt, Human
uuuuuuuuuuuuuuuuuuccag

SEQ ID NO: 121046 - RNA, 25 nt, Human
aaaaacccagccuuccccccuccuc

SEQ ID NO: 121047 - RNA, 24 nt, Human
aaacccagccuuccccccuccuca

SEQ ID NO: 121048 - RNA, 22 nt, Human
aagcugcugggaauggaauggc

SEQ ID NO: 121049 - RNA, 21 nt, Human
aagggucccuggagaagggug

SEQ ID NO: 121050 - RNA, 22 nt, Human
acucugagggacaccaggaagc

SEQ ID NO: 121051 - RNA, 23 nt, Human
agagauaaaugaagauuugagcc

SEQ ID NO: 121052 - RNA, 21 nt, Human
aggaggcuaagaacagagcuc

SEQ ID NO: 121053 - RNA, 21 nt, Human
aggagugggcaggguguggug

SEQ ID NO: 121054 - RNA, 22 nt, Human
aggcaagaggccuggagaagca

SEQ ID NO: 121055 - RNA, 27 nt, Human
aggccagagauaaaugaagagggaccc

SEQ ID NO: 121056 - RNA, 22 nt, Human
agggguggagugaugugaucua

SEQ ID NO: 121057 - RNA, 19 nt, Human
agguguggggagaggggcc

SEQ ID NO: 121058 - RNA, 22 nt, Human
caagaacagagcccuggccugg

SEQ ID NO: 121059 - RNA, 18 nt, Human
caccuagacccaaaacac

SEQ ID NO: 121060 - RNA, 21 nt, Human
cagagcccuggccugggcucu

SEQ ID NO: 121061 - RNA, 22 nt, Human
cagaggagaaucucugagaucc

SEQ ID NO: 121062 - RNA, 18 nt, Human
cagaucccaggccugggg

SEQ ID NO: 121063 - RNA, 22 nt, Human
cagaucccaggccuggggagcc

SEQ ID NO: 121064 - RNA, 19 nt, Human
cagcccuuuccccuuccuc

SEQ ID NO: 121065 - RNA, 18 nt, Human
caggaggcuaagaacaga

SEQ ID NO: 121066 - RNA, 26 nt, Human
ccaaaaaacccagccuuccccccucc

SEQ ID NO: 121067 - RNA, 28 nt, Human
ccaaaaaacccagccuuccccccuccuc

SEQ ID NO: 121068 - RNA, 19 nt, Human
ccacaaagacucaaaggca

SEQ ID NO: 121069 - RNA, 22 nt, Human
ccacaaagacucaaaggcaaga

SEQ ID NO: 121070 - RNA, 23 nt, Human
ccaugccugcagcccuuucagug

SEQ ID NO: 121071 - RNA, 19 nt, Human
cccaccacuauuccuaacc

SEQ ID NO: 121072 - RNA, 22 nt, Human
cccaccacuauuccuaacccua

SEQ ID NO: 121073 - RNA, 18 nt, Human
cccccaaaccaaagggag

SEQ ID NO: 121074 - RNA, 23 nt, Human
cccgccugcaugccucucugccu

SEQ ID NO: 121075 - RNA, 23 nt, Human
ccgcagccucaggagccaggguu

SEQ ID NO: 121076 - RNA, 22 nt, Human
ccgccugcaugccucucugccu

SEQ ID NO: 121077 - RNA, 22 nt, Human
ccuagacccaaaacacugaggu

SEQ ID NO: 121078 - RNA, 21 nt, Human
ccuccagccuguugcugcugc

SEQ ID NO: 121079 - RNA, 25 nt, Human
ccucccaucaagcagggaacuagau

SEQ ID NO: 121080 - RNA, 19 nt, Human
ccugcaugccucucugccu

SEQ ID NO: 121081 - RNA, 19 nt, Human
ccuguugcugcugcuccuc

SEQ ID NO: 121082 - RNA, 21 nt, Human
ccuuccucccaccacuauucc

SEQ ID NO: 121083 - RNA, 22 nt, Human
ccuuuaguggggugggaccuca

SEQ ID NO: 121084 - RNA, 21 nt, Human
cuccaaagcugcugggaaugg

SEQ ID NO: 121085 - RNA, 24 nt, Human
cuccuaggaccccgccugcaugcc

SEQ ID NO: 121086 - RNA, 22 nt, Human
cucugagauccaaaaaacccag

SEQ ID NO: 121087 - RNA, 24 nt, Human
cugcaugccucucugccuccaaua

SEQ ID NO: 121088 - RNA, 18 nt, Human
cuggucuaaacagcuuua

SEQ ID NO: 121089 - RNA, 22 nt, Human
gaaagguguuuggaugaagacu

SEQ ID NO: 121090 - RNA, 19 nt, Human
gaccuggguuauucuccuc

SEQ ID NO: 121091 - RNA, 23 nt, Human
gagauaaaugaagauuugagcca

SEQ ID NO: 121092 - RNA, 26 nt, Human
gccuguugcugcugcuccucugggug

SEQ ID NO: 121093 - RNA, 23 nt, Human
ggacuccucaggcuuacucugag

SEQ ID NO: 121094 - RNA, 23 nt, Human
ggcaaagggaaagguguuuggau

SEQ ID NO: 121095 - RNA, 22 nt, Human
ggccugggcucugcuggccgca

SEQ ID NO: 121096 - RNA, 21 nt, Human
gggcucugcuggccgcagccu

SEQ ID NO: 121097 - RNA, 22 nt, Human
ggggcgagguguggggagaggg

SEQ ID NO: 121098 - RNA, 22 nt, Human
ggugucuuggucagcugaugau

SEQ ID NO: 121099 - RNA, 18 nt, Human
gugaggcccagcccuuuc

SEQ ID NO: 121100 - RNA, 21 nt, Human
guuuggaugaagacugaggca

SEQ ID NO: 121101 - RNA, 22 nt, Human
uaaaugaagauuugagccauug

SEQ ID NO: 121102 - RNA, 18 nt, Human
uaagggucccuggagaag

SEQ ID NO: 121103 - RNA, 24 nt, Human
uacagcccaugccugcagcccuuu

SEQ ID NO: 121104 - RNA, 24 nt, Human
uaccucccuccacaucugaggauc

SEQ ID NO: 121105 - RNA, 19 nt, Human
uagacccaaaacacugagg

SEQ ID NO: 121106 - RNA, 18 nt, Human
uauucuccucccaguccu

SEQ ID NO: 121107 - RNA, 23 nt, Human
ucaaaggcaagaggccuggagaa

SEQ ID NO: 121108 - RNA, 24 nt, Human
ucaggagccaggguuaaggccaga

SEQ ID NO: 121109 - RNA, 27 nt, Human
uccaauagugacucccuaagcugggac

SEQ ID NO: 121110 - RNA, 19 nt, Human
uccacaaagacucaaaggc

SEQ ID NO: 121111 - RNA, 21 nt, Human
ucccacagaggagaaucucug

SEQ ID NO: 121112 - RNA, 24 nt, Human
ucccaccacuauuccuaaccuggg

SEQ ID NO: 121113 - RNA, 25 nt, Human
uccccuuccucccaccacuauuccu

SEQ ID NO: 121114 - RNA, 25 nt, Human
ucccuccagccuguugcugcugcuc

SEQ ID NO: 121115 - RNA, 22 nt, Human
uccucaggugucuuggucagcu

SEQ ID NO: 121116 - RNA, 18 nt, Human
uccucugggugccaagau

SEQ ID NO: 121117 - RNA, 23 nt, Human
ucuccaaagcugcugggaaugga

SEQ ID NO: 121118 - RNA, 21 nt, Human
ucuugcuucccucucccucca

SEQ ID NO: 121119 - RNA, 23 nt, Human
ugacucccuaagcugggacuccu

SEQ ID NO: 121120 - RNA, 21 nt, Human
ugagggacaccaggaagcuca

SEQ ID NO: 121121 - RNA, 22 nt, Human
ugcuggccgcagccucaggagc

SEQ ID NO: 121122 - RNA, 20 nt, Human
uggcagggcugacagagaaa

SEQ ID NO: 121123 - RNA, 19 nt, Human
uggcagggguggagugaug

SEQ ID NO: 121124 - RNA, 23 nt, Human
uggggugggaccucaggcagacc

SEQ ID NO: 121125 - RNA, 21 nt, Human
uggugauggugucagauccca

SEQ ID NO: 121126 - RNA, 21 nt, Human
uucauuaggauccucccauca

SEQ ID NO: 121127 - RNA, 22 nt, Human
uugagccauugauaaaugccaa

SEQ ID NO: 121128 - RNA, 23 nt, Human
uugcuucccucucccuccagccu

SEQ ID NO: 121129 - RNA, 19 nt, Human
aagaaauguucccccaaaa

SEQ ID NO: 121130 - RNA, 19 nt, Human
agagauucucaguguguga

SEQ ID NO: 121131 - RNA, 18 nt, Human
agcgaggcugggcuggag

SEQ ID NO: 121132 - RNA, 22 nt, Human
aguguuaaagauuaucugugcc

SEQ ID NO: 121133 - RNA, 23 nt, Human
cccccaaaaugcuggugaauaaa

SEQ ID NO: 121134 - RNA, 24 nt, Human
ggcuggagggaggguccagggagu

SEQ ID NO: 121135 - RNA, 19 nt, Human
uauccaaguacagggcgau

SEQ ID NO: 121136 - RNA, 22 nt, Human
ucccccaaaaugcuggugaaua

SEQ ID NO: 121137 - RNA, 18 nt, Human
ugagucggaggcgggagc

SEQ ID NO: 121138 - RNA, 21 nt, Human
uguaaaagaaauguuccccca

SEQ ID NO: 121139 - RNA, 21 nt, Human
uuaaagauuaucugugccuag

SEQ ID NO: 121140 - RNA, 23 nt, Human
uuaaugcugguagaauuucacag

SEQ ID NO: 121141 - RNA, 22 nt, Human
accaggcgugguggcacaugcc

SEQ ID NO: 121142 - RNA, 24 nt, Human
acccacugccugagccacguccag

SEQ ID NO: 121143 - RNA, 25 nt, Human
acugugccgcugcacuccagcucug

SEQ ID NO: 121144 - RNA, 19 nt, Human
acuuggaaggcugaggcgg

SEQ ID NO: 121145 - RNA, 18 nt, Human
aggagggggcugggggcg

SEQ ID NO: 121146 - RNA, 18 nt, Human
aggcaagccgcugggcgg

SEQ ID NO: 121147 - RNA, 19 nt, Human
aggcagaaauagaacauuc

SEQ ID NO: 121148 - RNA, 21 nt, Human
aggcugaggcgggaggauugc

SEQ ID NO: 121149 - RNA, 24 nt, Human
aggcugaggcgggaggauugcuug

SEQ ID NO: 121150 - RNA, 25 nt, Human
augggcccagucuuggcuggcugcc

SEQ ID NO: 121151 - RNA, 23 nt, Human
caccagcggcguccugcucagcc

SEQ ID NO: 121152 - RNA, 27 nt, Human
caucaaauuccuuuacuucugaggucu

SEQ ID NO: 121153 - RNA, 21 nt, Human
caugccuguaguccuaguuac

SEQ ID NO: 121154 - RNA, 23 nt, Human
ccacugccugagccacguccaac

SEQ ID NO: 121155 - RNA, 18 nt, Human
ccagcaccagcggcgucc

SEQ ID NO: 121156 - RNA, 22 nt, Human
ccagcaccagcggcguccugcu

SEQ ID NO: 121157 - RNA, 19 nt, Human
cccagggagcccccccuca

SEQ ID NO: 121158 - RNA, 22 nt, Human
ccccagggagcccccccucacc

SEQ ID NO: 121159 - RNA, 20 nt, Human
ccccagggagcccccccucu

SEQ ID NO: 121160 - RNA, 23 nt, Human
ccccuuuaaggggaggcagaaau

SEQ ID NO: 121161 - RNA, 24 nt, Human
cccucugcagggagcgagcaggca

SEQ ID NO: 121162 - RNA, 20 nt, Human
ccgcugcacuccagcucugg

SEQ ID NO: 121163 - RNA, 22 nt, Human
ccgcugcacuccagcucuggau

SEQ ID NO: 121164 - RNA, 21 nt, Human
ccuguaguccuaguuacuugg

SEQ ID NO: 121165 - RNA, 23 nt, Human
cgcugcacuccagcucuggauga

SEQ ID NO: 121166 - RNA, 18 nt, Human
cugcacuccagcucugga

SEQ ID NO: 121167 - RNA, 18 nt, Human
cugcacuccagcucugga

SEQ ID NO: 121168 - RNA, 21 nt, Human
cuuuaaggggaggcagaaaua

SEQ ID NO: 121169 - RNA, 24 nt, Human
gaggcgggaggauugcuugagccu

SEQ ID NO: 121170 - RNA, 19 nt, Human
gagggggcugggggcggcc

SEQ ID NO: 121171 - RNA, 21 nt, Human
gcugggggcggccagcaccag

SEQ ID NO: 121172 - RNA, 18 nt, Human
guccugcucagccccucu

SEQ ID NO: 121173 - RNA, 24 nt, Human
uaguuacuuggaaggcugaggcgg

SEQ ID NO: 121174 - RNA, 25 nt, Human
uccagcucuggaugacacagugaga

SEQ ID NO: 121175 - RNA, 19 nt, Human
uccagugagccaugacugu

SEQ ID NO: 121176 - RNA, 24 nt, Human
ucucuguguucaugggcccagucu

SEQ ID NO: 121177 - RNA, 19 nt, Human
ucuuggcuggcugccuccc

SEQ ID NO: 121178 - RNA, 22 nt, Human
ugacugugccgcugcacuccag

SEQ ID NO: 121179 - RNA, 22 nt, Human
ugaggcgggaggauugcuugag

SEQ ID NO: 121180 - RNA, 24 nt, Human
ugaggcgggaggauugcuugagcc

SEQ ID NO: 121181 - RNA, 24 nt, Human
ugaguuccagugagccaugacugu

SEQ ID NO: 121182 - RNA, 23 nt, Human
ugccuguaguccuaguuacuugg

SEQ ID NO: 121183 - RNA, 22 nt, Human
uggaaggcugaggcgggaggau

SEQ ID NO: 121184 - RNA, 23 nt, Human
uggcugccccuuucuacccacug

SEQ ID NO: 121185 - RNA, 27 nt, Human
uggcugccuccccccagggagcccccc

SEQ ID NO: 121186 - RNA, 22 nt, Human
ugguggcacaugccuguagucc

SEQ ID NO: 121187 - RNA, 18 nt, Human
uuacuucugaggucuccc

SEQ ID NO: 121188 - RNA, 22 nt, Human
uuccagugagccaugacugugc

SEQ ID NO: 121189 - RNA, 22 nt, Human
uugcuugagccugaguuccagu

SEQ ID NO: 121190 - RNA, 20 nt, Human
uuggaaggcugaggcgggag

SEQ ID NO: 121191 - RNA, 21 nt, Human
uuggcuggcugccucccccca

SEQ ID NO: 121192 - RNA, 26 nt, Human
aagcaagaaggaaggaggggggaccc

SEQ ID NO: 121193 - RNA, 25 nt, Human
agaaggaaggagggagggcagagcc

SEQ ID NO: 121194 - RNA, 19 nt, Human
aggaaggagggagggcaga

SEQ ID NO: 121195 - RNA, 21 nt, Human
aggcagagcacaaagcuggag

SEQ ID NO: 121196 - RNA, 25 nt, Human
cagagggaggcgaugcuacuguuuu

SEQ ID NO: 121197 - RNA, 18 nt, Human
caggagaggagggugaga

SEQ ID NO: 121198 - RNA, 22 nt, Human
caggagaggagggugagagccc

SEQ ID NO: 121199 - RNA, 19 nt, Human
ccaccaguccagggguggg

SEQ ID NO: 121200 - RNA, 24 nt, Human
ccaggggugggagcacuacagggg

SEQ ID NO: 121201 - RNA, 24 nt, Human
ccugcagccuucucugucugucuc

SEQ ID NO: 121202 - RNA, 18 nt, Human
cgcccugcugagcaacaa

SEQ ID NO: 121203 - RNA, 23 nt, Human
cugcagccuucucugucugucuc

SEQ ID NO: 121204 - RNA, 23 nt, Human
cuguuuaauugcaggaggugggg

SEQ ID NO: 121205 - RNA, 24 nt, Human
gaaggaaggagggagggcagagcg

SEQ ID NO: 121206 - RNA, 23 nt, Human
gaggccucccgcagggugggggc

SEQ ID NO: 121207 - RNA, 21 nt, Human
ggaggccucccgcaggguggg

SEQ ID NO: 121208 - RNA, 20 nt, Human
ggcagagcgcccugcugagc

SEQ ID NO: 121209 - RNA, 26 nt, Human
gggugguggcuggugcgaauggccug

SEQ ID NO: 121210 - RNA, 21 nt, Human
uagaagcaagaaggaaggagg

SEQ ID NO: 121211 - RNA, 18 nt, Human
ucugucucuuggcgcagg

SEQ ID NO: 121212 - RNA, 22 nt, Human
ugagagcccgaggcagggagcc

SEQ ID NO: 121213 - RNA, 19 nt, Human
ugcaggaggugggggggug

SEQ ID NO: 121214 - RNA, 20 nt, Human
ugcugagcaacaaaggacuc

SEQ ID NO: 121215 - RNA, 21 nt, Human
ugggagugggugguggcuggg

SEQ ID NO: 121216 - RNA, 25 nt, Human
ugggagugggugguggcuggugcga

SEQ ID NO: 121217 - RNA, 19 nt, Human
uggggaggccucccgcagg

SEQ ID NO: 121218 - RNA, 25 nt, Human
uguuuaauugcaggagguggggggg

SEQ ID NO: 121219 - RNA, 21 nt, Human
uuuaauugcaggagguggggg

SEQ ID NO: 121220 - RNA, 18 nt, Human
uuuuuuuuuuucagaggg

SEQ ID NO: 121221 - RNA, 19 nt, Human
uuuuuuuuuuuuucagagg

SEQ ID NO: 121222 - RNA, 28 nt, Human
uuuuuuuuuuuuuuuuuuuuucagaggg

SEQ ID NO: 121223 - RNA, 25 nt, Human
aaaaggaaggagggagggcagagug

SEQ ID NO: 121224 - RNA, 19 nt, Human
aggaaggagggagggcaga

SEQ ID NO: 121225 - RNA, 18 nt, Human
aggggugggaguaggagg

SEQ ID NO: 121226 - RNA, 24 nt, Human
auguaccagggcuaugagaagcaa

SEQ ID NO: 121227 - RNA, 21 nt, Human
caacaaaggccuccugcagcc

SEQ ID NO: 121228 - RNA, 19 nt, Human
ccaccaguccagggguggg

SEQ ID NO: 121229 - RNA, 26 nt, Human
ccaggggugggagcacuacaaggggu

SEQ ID NO: 121230 - RNA, 18 nt, Human
ccucccacaggguggggg

SEQ ID NO: 121231 - RNA, 19 nt, Human
ccugcagccuucucugucu

SEQ ID NO: 121232 - RNA, 22 nt, Human
cugcagccuucucugucuucuc

SEQ ID NO: 121233 - RNA, 23 nt, Human
cuguuuaauugcaggaggugggg

SEQ ID NO: 121234 - RNA, 23 nt, Human
gagaagcaaaaggaaggagggag

SEQ ID NO: 121235 - RNA, 21 nt, Human
gcagccuucucugucuucucc

SEQ ID NO: 121236 - RNA, 19 nt, Human
gggaguaggagguggucag

SEQ ID NO: 121237 - RNA, 23 nt, Human
gggcuaugagaagcaaaaggaag

SEQ ID NO: 121238 - RNA, 20 nt, Human
ggugggagcacuacaagggg

SEQ ID NO: 121239 - RNA, 22 nt, Human
uccccugcugagcaacaaaggc

SEQ ID NO: 121240 - RNA, 18 nt, Human
ugagaagcaaaaggaagg

SEQ ID NO: 121241 - RNA, 23 nt, Human
ugagaagcaaaaggaaggaggga

SEQ ID NO: 121242 - RNA, 24 nt, Human
ugcagccuucucugucuucuccug

SEQ ID NO: 121243 - RNA, 20 nt, Human
ugcugcaggugcauggggag

SEQ ID NO: 121244 - RNA, 19 nt, Human
ugggaguaggaggugguca

SEQ ID NO: 121245 - RNA, 19 nt, Human
uggggagaccucccacagg

SEQ ID NO: 121246 - RNA, 18 nt, Human
ugggggccaccaguccag

SEQ ID NO: 121247 - RNA, 24 nt, Human
uguuuaauugcaggaggugggggu

SEQ ID NO: 121248 - RNA, 23 nt, Human
uucucugucuucuccugcugcag

SEQ ID NO: 121249 - RNA, 22 nt, Human
uuuaauugcaggaggugggggu

SEQ ID NO: 121250 - RNA, 26 nt, Human
aagcaagaaggaaggaggggggaccc

SEQ ID NO: 121251 - RNA, 19 nt, Human
accgcacaccggggcuaug

SEQ ID NO: 121252 - RNA, 30 nt, Human
accuuccccaaggcaggggccaccaguugu

SEQ ID NO: 121253 - RNA, 25 nt, Human
agaaggaaggagggagggcagagcc

SEQ ID NO: 121254 - RNA, 20 nt, Human
agccccuugcugagcaacaa

SEQ ID NO: 121255 - RNA, 19 nt, Human
agcuagauagagaggaccc

SEQ ID NO: 121256 - RNA, 19 nt, Human
aggaaggagggagggcaga

SEQ ID NO: 121257 - RNA, 25 nt, Human
agggggugggaggugugcauaagaa

SEQ ID NO: 121258 - RNA, 18 nt, Human
caggggccaccaguccag

SEQ ID NO: 121259 - RNA, 19 nt, Human
ccaccaguccagggguggg

SEQ ID NO: 121260 - RNA, 22 nt, Human
ccccuugcugagcaacaaaggc

SEQ ID NO: 121261 - RNA, 23 nt, Human
cccuugcugagcaacaaaggccg

SEQ ID NO: 121262 - RNA, 21 nt, Human
ccugcugccuucucugucugu

SEQ ID NO: 121263 - RNA, 18 nt, Human
ccuuccccaaggcagggg

SEQ ID NO: 121264 - RNA, 21 nt, Human
cugucugucuccuggugcagg

SEQ ID NO: 121265 - RNA, 22 nt, Human
gaaggaaggagggagggcagag

SEQ ID NO: 121266 - RNA, 31 nt, Human
gaauacagggggugggaggugugcauaagaa

SEQ ID NO: 121267 - RNA, 24 nt, Human
gagaagcaagaaggaaggagggag

SEQ ID NO: 121268 - RNA, 26 nt, Human
gcacaccggggcuaugagaagcaaga

SEQ ID NO: 121269 - RNA, 19 nt, Human
gcacaggccagcccgguac

SEQ ID NO: 121270 - RNA, 24 nt, Human
uauuuuauugcaggaggugggggu

SEQ ID NO: 121271 - RNA, 19 nt, Human
uuuuuuuuuuuuuugccga

SEQ ID NO: 121272 - RNA, 18 nt, Human
uuuuuuuuuuuuuuuuug

SEQ ID NO: 121273 - RNA, 22 nt, Human
uuuuuuuuuuuuuuuuugccga

SEQ ID NO: 121274 - RNA, 23 nt, Human
uuuuuuuuuuuuuuuuugccgau

SEQ ID NO: 121275 - RNA, 26 nt, Human
aagcaagaaggaaggaggggggaccc

SEQ ID NO: 121276 - RNA, 20 nt, Human
agaagcaagaaggaaggagg

SEQ ID NO: 121277 - RNA, 25 nt, Human
agaaggaaggagggagggcagagcc

SEQ ID NO: 121278 - RNA, 19 nt, Human
aggaaggagggagggcaga

SEQ ID NO: 121279 - RNA, 21 nt, Human
aggcagagcacaaagcuggag

SEQ ID NO: 121280 - RNA, 22 nt, Human
aggccucccgcagggugggggc

SEQ ID NO: 121281 - RNA, 18 nt, Human
caggagaggagggugaga

SEQ ID NO: 121282 - RNA, 19 nt, Human
ccaccaguccagggguggg

SEQ ID NO: 121283 - RNA, 24 nt, Human
ccugcagccuucucugucugucuc

SEQ ID NO: 121284 - RNA, 18 nt, Human
cgcccugcugagcaacaa

SEQ ID NO: 121285 - RNA, 18 nt, Human
cugagcaacaaaggacuc

SEQ ID NO: 121286 - RNA, 23 nt, Human
cugcagccuucucugucugucuc

SEQ ID NO: 121287 - RNA, 23 nt, Human
cuguuuaauugcaggaggugggg

SEQ ID NO: 121288 - RNA, 28 nt, Human
gcaagaaggaaggagggagggcagagcg

SEQ ID NO: 121289 - RNA, 21 nt, Human
ggaggccucccgcaggguggg

SEQ ID NO: 121290 - RNA, 20 nt, Human
ggcagagcgcccugcugagc

SEQ ID NO: 121291 - RNA, 21 nt, Human
gggagcacuacaguggguggg

SEQ ID NO: 121292 - RNA, 21 nt, Human
uacagugggugggagugggug

SEQ ID NO: 121293 - RNA, 18 nt, Human
ucugucucuuggcacagg

SEQ ID NO: 121294 - RNA, 19 nt, Human
ugggagugggugguggucg

SEQ ID NO: 121295 - RNA, 20 nt, Human
ugggagugggugguggucgg

SEQ ID NO: 121296 - RNA, 19 nt, Human
uggggaggccucccgcagg

SEQ ID NO: 121297 - RNA, 18 nt, Human
ugggggccaccaguccag

SEQ ID NO: 121298 - RNA, 24 nt, Human
uguuuaauugcaggaggugggggu

SEQ ID NO: 121299 - RNA, 22 nt, Human
uuuaauugcaggaggugggggu

SEQ ID NO: 121300 - RNA, 21 nt, Human
aagugcccuccaccauggccc

SEQ ID NO: 121301 - RNA, 18 nt, Human
agauacggcccacggacc

SEQ ID NO: 121302 - RNA, 19 nt, Human
caccauggccccaaaccca

SEQ ID NO: 121303 - RNA, 24 nt, Human
caccauggccccaaacccaauggc

SEQ ID NO: 121304 - RNA, 21 nt, Human
ccaaacccaauggccuucgcc

SEQ ID NO: 121305 - RNA, 19 nt, Human
ccugaagugcccuccacca

SEQ ID NO: 121306 - RNA, 18 nt, Human
cugaagugcccuccacca

SEQ ID NO: 121307 - RNA, 23 nt, Human
gaagugcccuccaccauggcccc

SEQ ID NO: 121308 - RNA, 22 nt, Human
ucagugccgucggagcccucag

SEQ ID NO: 121309 - RNA, 24 nt, Human
ugaagugcccuccaccauggcccc

SEQ ID NO: 121310 - RNA, 21 nt, Human
uuuuuuuuuuuugcaagaagc

SEQ ID NO: 121311 - RNA, 18 nt, Human
uuuuuuuuuuuuuuuuug

SEQ ID NO: 121312 - RNA, 21 nt, Human
uuuuuuuuuuuuuuuuugcaa

SEQ ID NO: 121313 - RNA, 21 nt, Human
acaggaugcuggaaccaaagu

SEQ ID NO: 121314 - RNA, 20 nt, Human
gaugcuggaaccaaagugaa

SEQ ID NO: 121315 - RNA, 21 nt, Human
ggaaccaaagugaacagggaa

SEQ ID NO: 121316 - RNA, 24 nt, Human
guuauauuuaucagcaaggaucau

SEQ ID NO: 121317 - RNA, 21 nt, Human
aaucuggcgaggggacucggc

SEQ ID NO: 121318 - RNA, 21 nt, Human
aaugcaaaagcagcugcagaa

SEQ ID NO: 121319 - RNA, 25 nt, Human
accccaaggggcacagcccggaggg

SEQ ID NO: 121320 - RNA, 21 nt, Human
agaauccugccccuuccaccc

SEQ ID NO: 121321 - RNA, 22 nt, Human
agaauccugccccuuccacccc

SEQ ID NO: 121322 - RNA, 24 nt, Human
aggaaagaaaucaacacaaugaaa

SEQ ID NO: 121323 - RNA, 25 nt, Human
aggaaagaaaucaacacaaugaaag

SEQ ID NO: 121324 - RNA, 20 nt, Human
caaggggcacagcccggaga

SEQ ID NO: 121325 - RNA, 22 nt, Human
cacagcccggagaugaagcuua

SEQ ID NO: 121326 - RNA, 23 nt, Human
cagaauccugccccuuccacccc

SEQ ID NO: 121327 - RNA, 22 nt, Human
cagcugcagaauccugccccuu

SEQ ID NO: 121328 - RNA, 21 nt, Human
gaaggaaagaaaucaacacaa

SEQ ID NO: 121329 - RNA, 21 nt, Human
ggaucacaagugcacgcucug

SEQ ID NO: 121330 - RNA, 23 nt, Human
ucacaagugcacgcucugguaga

SEQ ID NO: 121331 - RNA, 23 nt, Human
ugacgcgcgggcggaaccaaggg

SEQ ID NO: 121332 - RNA, 21 nt, Human
uuuuuuuuuuuuuuuuuaagg

SEQ ID NO: 121333 - RNA, 21 nt, Human
aaaaaaaaaaaaacaaaaaaa

SEQ ID NO: 121334 - RNA, 24 nt, Human
aaaaaaacaaaaaaaaaaaccuca

SEQ ID NO: 121335 - RNA, 19 nt, Human
aaaaagaaaaacgggaagg

SEQ ID NO: 121336 - RNA, 22 nt, Human
aaaauaagacaagcagguagaa

SEQ ID NO: 121337 - RNA, 22 nt, Human
aaacaaaaaaaaaaaccucaaa

SEQ ID NO: 121338 - RNA, 19 nt, Human
aaccaaaauauugcuagcc

SEQ ID NO: 121339 - RNA, 22 nt, Human
aagcagguagaaaaaacaaugc

SEQ ID NO: 121340 - RNA, 23 nt, Human
acaaaaaaaaaaaaaacaaaaaa

SEQ ID NO: 121341 - RNA, 19 nt, Human
agaaaaacgggaaggauuc

SEQ ID NO: 121342 - RNA, 22 nt, Human
agacaagcagguagaaaaaaca

SEQ ID NO: 121343 - RNA, 27 nt, Human
agacaagcagguagaaaaaagggaccc

SEQ ID NO: 121344 - RNA, 21 nt, Human
agcgcccacaggacggacgac

SEQ ID NO: 121345 - RNA, 21 nt, Human
agcgcugcccccucccgccuc

SEQ ID NO: 121346 - RNA, 21 nt, Human
aggcgccgaggcuggagagcu

SEQ ID NO: 121347 - RNA, 22 nt, Human
caaaaaaaaaaaaaacaaaaaa

SEQ ID NO: 121348 - RNA, 22 nt, Human
caacauacaaaaaaaaaaaaaa

SEQ ID NO: 121349 - RNA, 19 nt, Human
caagcagguagaaaaaaca

SEQ ID NO: 121350 - RNA, 19 nt, Human
caagcagguagaaaaaaca

SEQ ID NO: 121351 - RNA, 23 nt, Human
cacacagaugccuccuccacaca

SEQ ID NO: 121352 - RNA, 24 nt, Human
caccacacagaugccuccuccaca

SEQ ID NO: 121353 - RNA, 26 nt, Human
cauaaaaagaaaaacgggaaggauuc

SEQ ID NO: 121354 - RNA, 22 nt, Human
ccgccuccugacagcccggacc

SEQ ID NO: 121355 - RNA, 19 nt, Human
ccgcgggccccgaccacuc

SEQ ID NO: 121356 - RNA, 21 nt, Human
ccgucuucauuuggaacaagg

SEQ ID NO: 121357 - RNA, 22 nt, Human
cgacacgaggcccagcgcugcc

SEQ ID NO: 121358 - RNA, 19 nt, Human
cgccgaggcuggagagcuc

SEQ ID NO: 121359 - RNA, 20 nt, Human
cgcugcccccucccgccucc

SEQ ID NO: 121360 - RNA, 22 nt, Human
cuuuguaauguucuaaaaacug

SEQ ID NO: 121361 - RNA, 19 nt, Human
gcaggacggcacuggugca

SEQ ID NO: 121362 - RNA, 21 nt, Human
gcagugccagggccaccacac

SEQ ID NO: 121363 - RNA, 22 nt, Human
gccgcgggccccgaccacuccg

SEQ ID NO: 121364 - RNA, 19 nt, Human
ggcacuggugcaggcgggg

SEQ ID NO: 121365 - RNA, 22 nt, Human
gggcaccgcccaagcuuuuccu

SEQ ID NO: 121366 - RNA, 21 nt, Human
ggugcaggcggggacgcugcc

SEQ ID NO: 121367 - RNA, 20 nt, Human
uaaaaagaaaaacgggaagg

SEQ ID NO: 121368 - RNA, 19 nt, Human
ucauuuggaacaagggggg

SEQ ID NO: 121369 - RNA, 22 nt, Human
ucuaaauuauucuaaaaauaag

SEQ ID NO: 121370 - RNA, 18 nt, Human
ugacuuccaaaugcuccu

SEQ ID NO: 121371 - RNA, 21 nt, Human
ugagaaguuugccaacugccu

SEQ ID NO: 121372 - RNA, 25 nt, Human
ugcccccucccgccuccugacagcc

SEQ ID NO: 121373 - RNA, 20 nt, Human
uggcauaaaaagaaaaacgg

SEQ ID NO: 121374 - RNA, 22 nt, Human
uggugcaggcggggacgcugcc

SEQ ID NO: 121375 - RNA, 25 nt, Human
uguuuuguuuuucuaaauuauucua

SEQ ID NO: 121376 - RNA, 23 nt, Human
uucauuguccugagaaguuugcc

SEQ ID NO: 121377 - RNA, 25 nt, Human
aaacagcuugugaaacuuaauacuu

SEQ ID NO: 121378 - RNA, 26 nt, Human
aaacagcuugugaaacuuaauacuuu

SEQ ID NO: 121379 - RNA, 19 nt, Human
aaagaggucaccagccccu

SEQ ID NO: 121380 - RNA, 19 nt, Human
acaaagaccauccgauucu

SEQ ID NO: 121381 - RNA, 23 nt, Human
acccaauauaaaucuguccacaa

SEQ ID NO: 121382 - RNA, 20 nt, Human
acccaauauaaaucuguccc

SEQ ID NO: 121383 - RNA, 20 nt, Human
acuuuuuuuuuuuuuuugca

SEQ ID NO: 121384 - RNA, 20 nt, Human
acuuuuuuuuuuuuuuugca

SEQ ID NO: 121385 - RNA, 19 nt, Human
agcaaaaagaggucacccg

SEQ ID NO: 121386 - RNA, 21 nt, Human
agcagacgacaucuucaguuu

SEQ ID NO: 121387 - RNA, 20 nt, Human
agcaggguguucaggaccug

SEQ ID NO: 121388 - RNA, 25 nt, Human
aggcggcggcgcgcguuccucgcgg

SEQ ID NO: 121389 - RNA, 18 nt, Human
aggguguucaggaccugc

SEQ ID NO: 121390 - RNA, 21 nt, Human
caacucucagaucaaaaggca

SEQ ID NO: 121391 - RNA, 21 nt, Human
cacagaugaaaaacuuaacac

SEQ ID NO: 121392 - RNA, 18 nt, Human
caccuucauugguucaaa

SEQ ID NO: 121393 - RNA, 19 nt, Human
cagaaucaguuacaaagac

SEQ ID NO: 121394 - RNA, 18 nt, Human
cagaugaaaaacuuaaca

SEQ ID NO: 121395 - RNA, 19 nt, Human
cccaagggacugauaaagg

SEQ ID NO: 121396 - RNA, 25 nt, Human
cccaccccacccggcggcgguggcg

SEQ ID NO: 121397 - RNA, 21 nt, Human
ccccacccggcggcgguggcg

SEQ ID NO: 121398 - RNA, 22 nt, Human
cccccgcagcgcggcaucgccc

SEQ ID NO: 121399 - RNA, 25 nt, Human
cccggcggcgguggcgguggcggcg

SEQ ID NO: 121400 - RNA, 18 nt, Human
cggcggcgguggcggugg

SEQ ID NO: 121401 - RNA, 19 nt, Human
cggcggcgguggcgguggc

SEQ ID NO: 121402 - RNA, 18 nt, Human
cggcgguggcgguggcgg

SEQ ID NO: 121403 - RNA, 24 nt, Human
cuggaggcggcggcgcgcguuccc

SEQ ID NO: 121404 - RNA, 21 nt, Human
gaacuugcaggagucugcgug

SEQ ID NO: 121405 - RNA, 21 nt, Human
gcaaagcaguccucuaagaac

SEQ ID NO: 121406 - RNA, 22 nt, Human
gcagccuguacugucuucaauc

SEQ ID NO: 121407 - RNA, 22 nt, Human
gcagccuguacugucuucaauc

SEQ ID NO: 121408 - RNA, 18 nt, Human
gccccucccaccccaccc

SEQ ID NO: 121409 - RNA, 22 nt, Human
gccccuguagacuuaagggacu

SEQ ID NO: 121410 - RNA, 20 nt, Human
gcgcccacccuggaggcggc

SEQ ID NO: 121411 - RNA, 24 nt, Human
gcggcgguggcgguggcggcggcu

SEQ ID NO: 121412 - RNA, 20 nt, Human
ggcggcgguggcgguggcgg

SEQ ID NO: 121413 - RNA, 23 nt, Human
ggcggcgguggcgguggcggcgg

SEQ ID NO: 121414 - RNA, 26 nt, Human
ggcggcgguggcgguggcggcggcug

SEQ ID NO: 121415 - RNA, 21 nt, Human
ggggaacuugcaggagucugc

SEQ ID NO: 121416 - RNA, 22 nt, Human
gguggcgguggcggcggcugug

SEQ ID NO: 121417 - RNA, 23 nt, Human
guggcgguggcggcggcugugcg

SEQ ID NO: 121418 - RNA, 21 nt, Human
uaagaacuuaggggaacuugc

SEQ ID NO: 121419 - RNA, 24 nt, Human
uagcaaaaagaggucaccagcccc

SEQ ID NO: 121420 - RNA, 19 nt, Human
uagcaaaaagaggucaccc

SEQ ID NO: 121421 - RNA, 19 nt, Human
ucccaccccacccggcggc

SEQ ID NO: 121422 - RNA, 20 nt, Human
ucccgccccucccaccccac

SEQ ID NO: 121423 - RNA, 20 nt, Human
ucuaccacaggcaaacaguu

SEQ ID NO: 121424 - RNA, 20 nt, Human
ucuaccacaggcaaacaguu

SEQ ID NO: 121425 - RNA, 19 nt, Human
ucuucaguuuucuagcucu

SEQ ID NO: 121426 - RNA, 25 nt, Human
ucuuuauggaacuuugcaacucuca

SEQ ID NO: 121427 - RNA, 22 nt, Human
ugagaaaauauauuugaguaca

SEQ ID NO: 121428 - RNA, 22 nt, Human
ugagaaaauauauuugaguaca

SEQ ID NO: 121429 - RNA, 20 nt, Human
ugaugcaacauuguagagca

SEQ ID NO: 121430 - RNA, 21 nt, Human
ugcgugcaugacgccacuaug

SEQ ID NO: 121431 - RNA, 21 nt, Human
uggaaaaaaaaugacugugga

SEQ ID NO: 121432 - RNA, 23 nt, Human
uggaugaggcagaggagaagcuu

SEQ ID NO: 121433 - RNA, 20 nt, Human
uuaacacacaauaacagaag

SEQ ID NO: 121434 - RNA, 20 nt, Human
uucaacacugcaacaucaau

SEQ ID NO: 121435 - RNA, 19 nt, Human
uucccgccccucccacccc

SEQ ID NO: 121436 - RNA, 24 nt, Human
uuucacugucucuuggucccaagu

SEQ ID NO: 121437 - RNA, 18 nt, Human
uuucuagcucuuguaguu

SEQ ID NO: 121438 - RNA, 20 nt, Human
uuugaacucuugaugcaaca

SEQ ID NO: 121439 - RNA, 23 nt, Human
uuuuguuguuugaacucuugauu

SEQ ID NO: 121440 - RNA, 30 nt, Human
uuuuuuauuuuguuguuugaacucuugauu

SEQ ID NO: 121441 - RNA, 18 nt, Human
aaacagagacaccccaag

SEQ ID NO: 121442 - RNA, 20 nt, Human
aaagagaggcugggaaagug

SEQ ID NO: 121443 - RNA, 20 nt, Human
aacauggcgaaaccucgucu

SEQ ID NO: 121444 - RNA, 21 nt, Human
aacauggcgaaaccucgucuc

SEQ ID NO: 121445 - RNA, 22 nt, Human
aagagcuggguaaagggggagg

SEQ ID NO: 121446 - RNA, 24 nt, Human
aagcggaaggagagacggaaccca

SEQ ID NO: 121447 - RNA, 25 nt, Human
aagcggaaggagagacggaacccag

SEQ ID NO: 121448 - RNA, 18 nt, Human
aagcgggaggaucgcuug

SEQ ID NO: 121449 - RNA, 23 nt, Human
aaggauggcuugagcccaggagg

SEQ ID NO: 121450 - RNA, 19 nt, Human
aagggaugggguguggcag

SEQ ID NO: 121451 - RNA, 27 nt, Human
acagcggcagagaaagacaaagaagcc

SEQ ID NO: 121452 - RNA, 20 nt, Human
accaugcagacgaggagggu

SEQ ID NO: 121453 - RNA, 23 nt, Human
accccaagagcuggguaaagggg

SEQ ID NO: 121454 - RNA, 21 nt, Human
acccugcccguccccuccccu

SEQ ID NO: 121455 - RNA, 18 nt, Human
acugcaccccagccuggg

SEQ ID NO: 121456 - RNA, 24 nt, Human
acugcaccccagccugggcgacag

SEQ ID NO: 121457 - RNA, 22 nt, Human
agacaccgacagcggcagagaa

SEQ ID NO: 121458 - RNA, 24 nt, Human
agcacuuagggaggcugaagcggg

SEQ ID NO: 121459 - RNA, 23 nt, Human
agccggcugugguggcgcgugcc

SEQ ID NO: 121460 - RNA, 23 nt, Human
agccugggcaacauggcgaaacc

SEQ ID NO: 121461 - RNA, 24 nt, Human
agccugggcaacauggcgaaaccu

SEQ ID NO: 121462 - RNA, 24 nt, Human
aggacaucaaagggacagggcuga

SEQ ID NO: 121463 - RNA, 20 nt, Human
aggaccagcaggcacgcccc

SEQ ID NO: 121464 - RNA, 20 nt, Human
aggaggcggggcgagcugcc

SEQ ID NO: 121465 - RNA, 22 nt, Human
aggcaaagcaaagagaggcugg

SEQ ID NO: 121466 - RNA, 19 nt, Human
aggcaggaaguggggaugg

SEQ ID NO: 121467 - RNA, 25 nt, Human
aggcaggaaguggggaugggggacc

SEQ ID NO: 121468 - RNA, 26 nt, Human
aggcaggaaguggggaugggggaccc

SEQ ID NO: 121469 - RNA, 20 nt, Human
aggcugaagcgggaggaucg

SEQ ID NO: 121470 - RNA, 24 nt, Human
aggcugaagcgggaggaucgcuug

SEQ ID NO: 121471 - RNA, 21 nt, Human
agggagagcaagaaaauggua

SEQ ID NO: 121472 - RNA, 21 nt, Human
aggggcugaaggaaaggagga

SEQ ID NO: 121473 - RNA, 20 nt, Human
agguggagugagccugagga

SEQ ID NO: 121474 - RNA, 22 nt, Human
agguugaggcugcagugcuggg

SEQ ID NO: 121475 - RNA, 24 nt, Human
aguggcucacgccugcaaucccag

SEQ ID NO: 121476 - RNA, 24 nt, Human
aucgcgccacugcaccccagccug

SEQ ID NO: 121477 - RNA, 25 nt, Human
caaaaagcaaagaaggccgaggcaa

SEQ ID NO: 121478 - RNA, 20 nt, Human
caaagaaggccgaggcaaug

SEQ ID NO: 121479 - RNA, 24 nt, Human
caacauggcgaaaccucgucucua

SEQ ID NO: 121480 - RNA, 27 nt, Human
cacaaaaagcaaagaaggccgaggcaa

SEQ ID NO: 121481 - RNA, 19 nt, Human
cacgccugcaaucccagca

SEQ ID NO: 121482 - RNA, 23 nt, Human
cacugcaccccagccugggcgac

SEQ ID NO: 121483 - RNA, 24 nt, Human
cacugcaccccagccugggcgaca

SEQ ID NO: 121484 - RNA, 19 nt, Human
cagacagacaccgacagcg

SEQ ID NO: 121485 - RNA, 21 nt, Human
cagacagacaccgacagcggc

SEQ ID NO: 121486 - RNA, 23 nt, Human
cagagaaagacaaagaagcggaa

SEQ ID NO: 121487 - RNA, 21 nt, Human
cagagacccugcccguccccu

SEQ ID NO: 121488 - RNA, 24 nt, Human
cagcacuuagggaggcugaagcgg

SEQ ID NO: 121489 - RNA, 20 nt, Human
cagcaggcacgccccuggcc

SEQ ID NO: 121490 - RNA, 21 nt, Human
cagcggcagagaaagacaaag

SEQ ID NO: 121491 - RNA, 25 nt, Human
cagcuaagagcagacagacagacac

SEQ ID NO: 121492 - RNA, 21 nt, Human
cagcugcuggggaagcugagg

SEQ ID NO: 121493 - RNA, 19 nt, Human
cagggcagaggggcugaag

SEQ ID NO: 121494 - RNA, 18 nt, Human
ccacugcaccccagccug

SEQ ID NO: 121495 - RNA, 20 nt, Human
ccacugcaccccagccuggg

SEQ ID NO: 121496 - RNA, 21 nt, Human
ccacugcaccccagccugggc

SEQ ID NO: 121497 - RNA, 24 nt, Human
ccacugcaccccagccugggcgac

SEQ ID NO: 121498 - RNA, 22 nt, Human
ccccuccccucucccccacaaa

SEQ ID NO: 121499 - RNA, 24 nt, Human
ccccuccccucucccccacaaaaa

SEQ ID NO: 121500 - RNA, 20 nt, Human
ccccuggcugaucccggcuc

SEQ ID NO: 121501 - RNA, 25 nt, Human
cccggaguucaagaccagccugggc

SEQ ID NO: 121502 - RNA, 21 nt, Human
cccguccccuccccucucccc

SEQ ID NO: 121503 - RNA, 18 nt, Human
cccuccccucucccccac

SEQ ID NO: 121504 - RNA, 19 nt, Human
ccuccccucucccccacaa

SEQ ID NO: 121505 - RNA, 21 nt, Human
ccugggcaacauggcgaaacc

SEQ ID NO: 121506 - RNA, 24 nt, Human
ccugggcaacauggcgaaaccucg

SEQ ID NO: 121507 - RNA, 21 nt, Human
ccuguagucccagcugcuggg

SEQ ID NO: 121508 - RNA, 22 nt, Human
ccuguagucccagcugcugggg

SEQ ID NO: 121509 - RNA, 18 nt, Human
cgacagcggcagagaaag

SEQ ID NO: 121510 - RNA, 23 nt, Human
cgccacugcaccccagccugggc

SEQ ID NO: 121511 - RNA, 26 nt, Human
cgccacugcaccccagccugggcgac

SEQ ID NO: 121512 - RNA, 18 nt, Human
cgcuugagccccggaguu

SEQ ID NO: 121513 - RNA, 24 nt, Human
cggggcaggcaaagcaaagagagg

SEQ ID NO: 121514 - RNA, 22 nt, Human
cucacgccugcaaucccagcac

SEQ ID NO: 121515 - RNA, 24 nt, Human
cucacgccugcaaucccagcacuu

SEQ ID NO: 121516 - RNA, 20 nt, Human
cucccccacaaaaagcaaag

SEQ ID NO: 121517 - RNA, 21 nt, Human
cuccccucucccccacaaaaa

SEQ ID NO: 121518 - RNA, 22 nt, Human
cuggcugaucccggcucccuuc

SEQ ID NO: 121519 - RNA, 22 nt, Human
gaaaaaacagagacaccccaag

SEQ ID NO: 121520 - RNA, 20 nt, Human
gaacccagcgggaggaggcg

SEQ ID NO: 121521 - RNA, 19 nt, Human
gacaaagaagcggaaggag

SEQ ID NO: 121522 - RNA, 24 nt, Human
gaucgcuugagccccggaguucaa

SEQ ID NO: 121523 - RNA, 19 nt, Human
gcaaagagaggcugggaaa

SEQ ID NO: 121524 - RNA, 22 nt, Human
gcagugcugggaucgcgccacu

SEQ ID NO: 121525 - RNA, 24 nt, Human
gccacugcaccccagccugggcga

SEQ ID NO: 121526 - RNA, 24 nt, Human
gcccaggagguugaggcugcagug

SEQ ID NO: 121527 - RNA, 21 nt, Human
gcuaagagcagacagacagac

SEQ ID NO: 121528 - RNA, 20 nt, Human
gcugggaucgcgccacugca

SEQ ID NO: 121529 - RNA, 24 nt, Human
gcuugagcccaggagguugaggcu

SEQ ID NO: 121530 - RNA, 23 nt, Human
ggaaaaaacagagacaccccaag

SEQ ID NO: 121531 - RNA, 19 nt, Human
ggaccagcaggcacgcccc

SEQ ID NO: 121532 - RNA, 25 nt, Human
ggcaauggagacagcuaagagcaga

SEQ ID NO: 121533 - RNA, 18 nt, Human
gggaggccaaagggaacu

SEQ ID NO: 121534 - RNA, 22 nt, Human
gggaggcugaagcgggaggauc

SEQ ID NO: 121535 - RNA, 21 nt, Human
gggaucgcgccacugcacccc

SEQ ID NO: 121536 - RNA, 23 nt, Human
gggaucgcgccacugcaccccag

SEQ ID NO: 121537 - RNA, 18 nt, Human
gggggaggccaaagggaa

SEQ ID NO: 121538 - RNA, 19 nt, Human
gugugcagggacagggcag

SEQ ID NO: 121539 - RNA, 22 nt, Human
ucccccacaaaaagcaaagaag

SEQ ID NO: 121540 - RNA, 22 nt, Human
uccccucucccccacaaaaagc

SEQ ID NO: 121541 - RNA, 25 nt, Human
uccccucucccccacaaaaagcaaa

SEQ ID NO: 121542 - RNA, 23 nt, Human
ucgcuugagccccggaguucaag

SEQ ID NO: 121543 - RNA, 24 nt, Human
ugaaggaaaggaggacaucaaagg

SEQ ID NO: 121544 - RNA, 26 nt, Human
ugaaggaaaggaggacaucaaaggga

SEQ ID NO: 121545 - RNA, 19 nt, Human
ugagauguacacaugugcu

SEQ ID NO: 121546 - RNA, 22 nt, Human
ugagcccaggagguugaggcug

SEQ ID NO: 121547 - RNA, 23 nt, Human
ugagccccggaguucaagaccag

SEQ ID NO: 121548 - RNA, 23 nt, Human
ugagccugaggaagguggcugag

SEQ ID NO: 121549 - RNA, 18 nt, Human
ugcagggacagggcagag

SEQ ID NO: 121550 - RNA, 21 nt, Human
ugcagggacagggcagagggg

SEQ ID NO: 121551 - RNA, 25 nt, Human
ugcccguccccuccccucuccccca

SEQ ID NO: 121552 - RNA, 22 nt, Human
ugccuguagucccagcugcugg

SEQ ID NO: 121553 - RNA, 23 nt, Human
ugccuguagucccagcugcuggg

SEQ ID NO: 121554 - RNA, 19 nt, Human
ugcucacacagggccacga

SEQ ID NO: 121555 - RNA, 23 nt, Human
uggcagacuggggauguaggugg

SEQ ID NO: 121556 - RNA, 20 nt, Human
uggccccuggcugaucccuc

SEQ ID NO: 121557 - RNA, 24 nt, Human
uggcgcgugccuguagucccagcu

SEQ ID NO: 121558 - RNA, 24 nt, Human
uggcucacgccugcaaucccagca

SEQ ID NO: 121559 - RNA, 19 nt, Human
ugggaaaguggcucacgcc

SEQ ID NO: 121560 - RNA, 18 nt, Human
ugguagacucagacggag

SEQ ID NO: 121561 - RNA, 24 nt, Human
ugguggcgcgugccuguaguccca

SEQ ID NO: 121562 - RNA, 23 nt, Human
ugugcagggacagggcagagggg

SEQ ID NO: 121563 - RNA, 20 nt, Human
uugagauaaggcugagaugu

SEQ ID NO: 121564 - RNA, 22 nt, Human
uugagccccggaguucaagacc

SEQ ID NO: 121565 - RNA, 23 nt, Human
aaaacaaaaauaaaaaggcacaa

SEQ ID NO: 121566 - RNA, 21 nt, Human
aaacaaaaauaaaaaggcaca

SEQ ID NO: 121567 - RNA, 23 nt, Human
aaacaaaaauaaaaaggcacaaa

SEQ ID NO: 121568 - RNA, 21 nt, Human
aaaucagccugccaaggacac

SEQ ID NO: 121569 - RNA, 23 nt, Human
aacuuuuggucacacucucaaca

SEQ ID NO: 121570 - RNA, 21 nt, Human
aaguauccauuucaugcuuug

SEQ ID NO: 121571 - RNA, 20 nt, Human
aaugucucucacucucuggc

SEQ ID NO: 121572 - RNA, 22 nt, Human
acaaaaauaaaaaggcacaaac

SEQ ID NO: 121573 - RNA, 21 nt, Human
acacacacacacacacacaca

SEQ ID NO: 121574 - RNA, 29 nt, Human
acacacacacacacacacacaauauuuac

SEQ ID NO: 121575 - RNA, 22 nt, Human
agaaaucagccugccaaggaca

SEQ ID NO: 121576 - RNA, 18 nt, Human
aggaacaacuugacucag

SEQ ID NO: 121577 - RNA, 20 nt, Human
aggauuccgauuccugaaca

SEQ ID NO: 121578 - RNA, 21 nt, Human
agggcgcgguggcggcgagcg

SEQ ID NO: 121579 - RNA, 22 nt, Human
agggcgcgguggcggcgagcgg

SEQ ID NO: 121580 - RNA, 25 nt, Human
auaucaaagcauuaaaaacaaaaau

SEQ ID NO: 121581 - RNA, 23 nt, Human
augccuccccuuugcaaacaauc

SEQ ID NO: 121582 - RNA, 20 nt, Human
caaagcauuaaaaacaaaaa

SEQ ID NO: 121583 - RNA, 24 nt, Human
caaaguagaaacaaaugcuuccag

SEQ ID NO: 121584 - RNA, 22 nt, Human
caaggacacugaugccuccccu

SEQ ID NO: 121585 - RNA, 26 nt, Human
cacacaauauuuacaauauaaauuuu

SEQ ID NO: 121586 - RNA, 26 nt, Human
cacacacacacacacaauauuuacaa

SEQ ID NO: 121587 - RNA, 20 nt, Human
cacacacacacacacacaca

SEQ ID NO: 121588 - RNA, 23 nt, Human
cacgcuaaaauuuuccuucucaa

SEQ ID NO: 121589 - RNA, 19 nt, Human
cagugagcacgcuaaaauu

SEQ ID NO: 121590 - RNA, 19 nt, Human
cauggcacaauguuuugaa

SEQ ID NO: 121591 - RNA, 18 nt, Human
ccuaugguguucagaaau

SEQ ID NO: 121592 - RNA, 21 nt, Human
ccucccacugcuccuaaagcc

SEQ ID NO: 121593 - RNA, 19 nt, Human
cggggcugucggccgggcg

SEQ ID NO: 121594 - RNA, 22 nt, Human
cuaaagccacaccuuaauauac

SEQ ID NO: 121595 - RNA, 23 nt, Human
cucggggcugucggccgggcggc

SEQ ID NO: 121596 - RNA, 21 nt, Human
cugcgggcggagcggagggcg

SEQ ID NO: 121597 - RNA, 20 nt, Human
cuguacauauauauauauau

SEQ ID NO: 121598 - RNA, 22 nt, Human
cuguacauauauauauauauau

SEQ ID NO: 121599 - RNA, 21 nt, Human
gaggcuaacauugaaauauca

SEQ ID NO: 121600 - RNA, 21 nt, Human
gcgcgguggcggcgagcgggg

SEQ ID NO: 121601 - RNA, 22 nt, Human
gcugucacuggggcuacaggca

SEQ ID NO: 121602 - RNA, 22 nt, Human
gcugucguuuuuuuuuuuuuuu

SEQ ID NO: 121603 - RNA, 23 nt, Human
guuaaugucucucacucucuggc

SEQ ID NO: 121604 - RNA, 22 nt, Human
uaaaaaggcacaaacaacuuua

SEQ ID NO: 121605 - RNA, 18 nt, Human
uaauaaaggccauuuguu

SEQ ID NO: 121606 - RNA, 20 nt, Human
uacacacacacacacacaca

SEQ ID NO: 121607 - RNA, 22 nt, Human
uacauauauauauauauauaca

SEQ ID NO: 121608 - RNA, 24 nt, Human
uaccacauuuccuaccuagaaauc

SEQ ID NO: 121609 - RNA, 22 nt, Human
uacuaaccuuucugcugguacc

SEQ ID NO: 121610 - RNA, 26 nt, Human
uauacacacacacacacacacacaau

SEQ ID NO: 121611 - RNA, 25 nt, Human
uauauacacacacacacacacacac

SEQ ID NO: 121612 - RNA, 25 nt, Human
uauauacacacacacacacacacag

SEQ ID NO: 121613 - RNA, 18 nt, Human
uauauauauauauauaca

SEQ ID NO: 121614 - RNA, 24 nt, Human
ucacucaguuuuuaauaaaggcca

SEQ ID NO: 121615 - RNA, 21 nt, Human
ucagagcugagucugcuguuc

SEQ ID NO: 121616 - RNA, 23 nt, Human
ucgucucggggcugucggccggg

SEQ ID NO: 121617 - RNA, 18 nt, Human
ucugcugguacccuccca

SEQ ID NO: 121618 - RNA, 21 nt, Human
ugaaauaucaaagcauuaaaa

SEQ ID NO: 121619 - RNA, 20 nt, Human
ugacucagucucuugauggg

SEQ ID NO: 121620 - RNA, 18 nt, Human
uguacauauauauauaua

SEQ ID NO: 121621 - RNA, 19 nt, Human
uguacauauauauauauau

SEQ ID NO: 121622 - RNA, 20 nt, Human
uguacauauauauauauaua

SEQ ID NO: 121623 - RNA, 18 nt, Human
ugucacuggggcuacagg

SEQ ID NO: 121624 - RNA, 24 nt, Human
uguccgaaaaacagucauaucaaa

SEQ ID NO: 121625 - RNA, 24 nt, Human
uguucagaaauugaggcuaacauu

SEQ ID NO: 121626 - RNA, 25 nt, Human
uguucauuaaaagugagcgugagcu

SEQ ID NO: 121627 - RNA, 19 nt, Human
uuaaggaacaacuugacuc

SEQ ID NO: 121628 - RNA, 21 nt, Human
uucaacuagaaaggugcaaac

SEQ ID NO: 121629 - RNA, 20 nt, Human
uuuugaauugggugggaauc

SEQ ID NO: 121630 - RNA, 20 nt, Human
aaaauuaacaaaaagauauu

SEQ ID NO: 121631 - RNA, 20 nt, Human
aaacaugaucaaaauaaauc

SEQ ID NO: 121632 - RNA, 22 nt, Human
aaagaagaagagaggaaaagaa

SEQ ID NO: 121633 - RNA, 19 nt, Human
aagaagaagagaggaaaag

SEQ ID NO: 121634 - RNA, 21 nt, Human
aagaagaagagaggaaaagaa

SEQ ID NO: 121635 - RNA, 21 nt, Human
aagaagaagagaggaaaagaa

SEQ ID NO: 121636 - RNA, 22 nt, Human
aagaagaagagaggaaaagaac

SEQ ID NO: 121637 - RNA, 24 nt, Human
aagaagaagagaggaaaagaacac

SEQ ID NO: 121638 - RNA, 21 nt, Human
accgcgaaagaagaagagagg

SEQ ID NO: 121639 - RNA, 19 nt, Human
agaagaagagaggaaaaga

SEQ ID NO: 121640 - RNA, 19 nt, Human
aggaaaagaacaccgaaga

SEQ ID NO: 121641 - RNA, 19 nt, Human
auagagcaaaauuaacaaa

SEQ ID NO: 121642 - RNA, 23 nt, Human
caaaucucaccuccuucagaggc

SEQ ID NO: 121643 - RNA, 25 nt, Human
ccgaagauauaaccagucgaagccg

SEQ ID NO: 121644 - RNA, 21 nt, Human
ccgacggcgagcgcacuaaag

SEQ ID NO: 121645 - RNA, 27 nt, Human
ccuguaauuauaacaugaccggggucc

SEQ ID NO: 121646 - RNA, 23 nt, Human
gaaaaaagaacauaaucucccaa

SEQ ID NO: 121647 - RNA, 21 nt, Human
gaucuucacaggaagcagcuu

SEQ ID NO: 121648 - RNA, 21 nt, Human
guagcacaaaucucaccuccu

SEQ ID NO: 121649 - RNA, 23 nt, Human
guagcacaaaucucaccuccuuc

SEQ ID NO: 121650 - RNA, 22 nt, Human
uaaagcacgcagguagagccga

SEQ ID NO: 121651 - RNA, 21 nt, Human
uaaguguaaaccauugcuuuu

SEQ ID NO: 121652 - RNA, 23 nt, Human
uaugaaagauaaugaggugccuu

SEQ ID NO: 121653 - RNA, 21 nt, Human
ucacaaaacaucaaaaaugaa

SEQ ID NO: 121654 - RNA, 24 nt, Human
ucccaaaguagcacaaaucucacc

SEQ ID NO: 121655 - RNA, 25 nt, Human
ugaaaaaagaacauaaucucccaaa

SEQ ID NO: 121656 - RNA, 19 nt, Human
ugaaccgcgaaagaagaag

SEQ ID NO: 121657 - RNA, 23 nt, Human
ugauaugcaaaaaaaucacacuu

SEQ ID NO: 121658 - RNA, 21 nt, Human
ugggagagacagaaggaucag

SEQ ID NO: 121659 - RNA, 23 nt, Human
ugggagagacagaaggaucaggc

SEQ ID NO: 121660 - RNA, 24 nt, Human
ugggagagacagaaggaucaggcg

SEQ ID NO: 121661 - RNA, 20 nt, Human
uuaauguucuuuucaaugau

SEQ ID NO: 121662 - RNA, 20 nt, Human
uugaaaauuuugcaaaggcu

SEQ ID NO: 121663 - RNA, 23 nt, Human
uugaaaauuuugcaaaggcucau

SEQ ID NO: 121664 - RNA, 22 nt, Human
uugggagagacagaaggaucag

SEQ ID NO: 121665 - RNA, 18 nt, Human
aaccccgacugcccaccc

SEQ ID NO: 121666 - RNA, 18 nt, Human
agagauggucaggcccag

SEQ ID NO: 121667 - RNA, 23 nt, Human
aggaaggcugcccaggucagagc

SEQ ID NO: 121668 - RNA, 19 nt, Human
aggagggauggguacagua

SEQ ID NO: 121669 - RNA, 21 nt, Human
agggagaugaaggagggaugg

SEQ ID NO: 121670 - RNA, 19 nt, Human
agggauggguacaguaacc

SEQ ID NO: 121671 - RNA, 21 nt, Human
caaccccgacugcccaccccu

SEQ ID NO: 121672 - RNA, 18 nt, Human
ccaggucagagcuguugg

SEQ ID NO: 121673 - RNA, 21 nt, Human
ccccuugggauucuugccucu

SEQ ID NO: 121674 - RNA, 23 nt, Human
cccuugggauucuugccucuggc

SEQ ID NO: 121675 - RNA, 21 nt, Human
cuguugguguugacuccuucc

SEQ ID NO: 121676 - RNA, 19 nt, Human
ggagaugaaggagggaugg

SEQ ID NO: 121677 - RNA, 18 nt, Human
ggagggagaugaaggagg

SEQ ID NO: 121678 - RNA, 24 nt, Human
uacaccagagauccauuuauuaca

SEQ ID NO: 121679 - RNA, 23 nt, Human
uauuacaguccugcaaccccgac

SEQ ID NO: 121680 - RNA, 26 nt, Human
ucagagaccuccuagacuuguccccu

SEQ ID NO: 121681 - RNA, 20 nt, Human
ucagagcuguugguguugac

SEQ ID NO: 121682 - RNA, 23 nt, Human
ucccagagauggucaggcccaga

SEQ ID NO: 121683 - RNA, 23 nt, Human
ugcccaggucagagcuguuggug

SEQ ID NO: 121684 - RNA, 24 nt, Human
aaagccccaaagcacaugucaaca

SEQ ID NO: 121685 - RNA, 18 nt, Human
aaauacacaaaaacauac

SEQ ID NO: 121686 - RNA, 24 nt, Human
aaaugaccuuguguucuaccuggu

SEQ ID NO: 121687 - RNA, 22 nt, Human
aaccauugaaaggaacuggugu

SEQ ID NO: 121688 - RNA, 19 nt, Human
aagacaguguucugucaag

SEQ ID NO: 121689 - RNA, 21 nt, Human
aagucaacucagauaccaccg

SEQ ID NO: 121690 - RNA, 23 nt, Human
acaaaacuucccugggacccaag

SEQ ID NO: 121691 - RNA, 18 nt, Human
acaugugcacacacagaa

SEQ ID NO: 121692 - RNA, 20 nt, Human
acugcuaugaccucauccag

SEQ ID NO: 121693 - RNA, 18 nt, Human
agauaccaccagcugugg

SEQ ID NO: 121694 - RNA, 19 nt, Human
auauauauauauauauaua

SEQ ID NO: 121695 - RNA, 19 nt, Human
auauauauauauauauaua

SEQ ID NO: 121696 - RNA, 19 nt, Human
auauauauauauauauaua

SEQ ID NO: 121697 - RNA, 19 nt, Human
auauauauauauauauaua

SEQ ID NO: 121698 - RNA, 19 nt, Human
auauauauauauauauaua

SEQ ID NO: 121699 - RNA, 19 nt, Human
auauauauauauauauaua

SEQ ID NO: 121700 - RNA, 19 nt, Human
auauauauauauauauaua

SEQ ID NO: 121701 - RNA, 19 nt, Human
auauauauauauauauaua

SEQ ID NO: 121702 - RNA, 19 nt, Human
auauauauauauauauaua

SEQ ID NO: 121703 - RNA, 19 nt, Human
auauauauauauauauaua

SEQ ID NO: 121704 - RNA, 19 nt, Human
auauauauauauauauaua

SEQ ID NO: 121705 - RNA, 19 nt, Human
auauauauauauauauaua

SEQ ID NO: 121706 - RNA, 19 nt, Human
auauauauauauauauaua

SEQ ID NO: 121707 - RNA, 19 nt, Human
auauauauauauauauaua

SEQ ID NO: 121708 - RNA, 19 nt, Human
auauauauauauauauaua

SEQ ID NO: 121709 - RNA, 19 nt, Human
auauauauauauauauaua

SEQ ID NO: 121710 - RNA, 19 nt, Human
auauauauauauauauaua

SEQ ID NO: 121711 - RNA, 19 nt, Human
auauauauauauauauaua

SEQ ID NO: 121712 - RNA, 19 nt, Human
auauauauauauauauaua

SEQ ID NO: 121713 - RNA, 19 nt, Human
auauauauauauauauaua

SEQ ID NO: 121714 - RNA, 19 nt, Human
auauauauauauauauaua

SEQ ID NO: 121715 - RNA, 19 nt, Human
auauauauauauauauaua

SEQ ID NO: 121716 - RNA, 19 nt, Human
auauauauauauauauaua

SEQ ID NO: 121717 - RNA, 19 nt, Human
auauauauauauauauaua

SEQ ID NO: 121718 - RNA, 24 nt, Human
augaauuccccccaaaugcacaaa

SEQ ID NO: 121719 - RNA, 24 nt, Human
auuaaaauauauauauauauauau

SEQ ID NO: 121720 - RNA, 22 nt, Human
auugccucagcucuuggaaauu

SEQ ID NO: 121721 - RNA, 20 nt, Human
caaccuuuagcaucacuggc

SEQ ID NO: 121722 - RNA, 21 nt, Human
caagguggaaagacacugcca

SEQ ID NO: 121723 - RNA, 23 nt, Human
cacaaaacuucccugggacccuu

SEQ ID NO: 121724 - RNA, 25 nt, Human
cagauauguauuacacaugugcaca

SEQ ID NO: 121725 - RNA, 22 nt, Human
cagcacaauuccacgcaaucaa

SEQ ID NO: 121726 - RNA, 24 nt, Human
cauacauuuguuuaagaaauaaaa

SEQ ID NO: 121727 - RNA, 18 nt, Human
caugcaccccauucugcc

SEQ ID NO: 121728 - RNA, 25 nt, Human
caugcaccccauucugccaccugcu

SEQ ID NO: 121729 - RNA, 24 nt, Human
cccacacagaaucaaggacuuuau

SEQ ID NO: 121730 - RNA, 21 nt, Human
cccaucgaacuggagcuuccu

SEQ ID NO: 121731 - RNA, 23 nt, Human
ccccaaaugcacaaacaaauaaa

SEQ ID NO: 121732 - RNA, 23 nt, Human
ccccauucugccaccugcugccu

SEQ ID NO: 121733 - RNA, 19 nt, Human
ccuuucaggauccugaagc

SEQ ID NO: 121734 - RNA, 23 nt, Human
cgcaaucaagcacugcuaugacc

SEQ ID NO: 121735 - RNA, 24 nt, Human
cgcaaucaagcacugcuaugaccu

SEQ ID NO: 121736 - RNA, 25 nt, Human
gaaaggaacugguguaaaagcccca

SEQ ID NO: 121737 - RNA, 22 nt, Human
gaauuccccccaaaugcacaaa

SEQ ID NO: 121738 - RNA, 18 nt, Human
gaccuuguguucuaccug

SEQ ID NO: 121739 - RNA, 19 nt, Human
gaccuuguguucuaccugg

SEQ ID NO: 121740 - RNA, 18 nt, Human
gagcuccuccacaaaacu

SEQ ID NO: 121741 - RNA, 22 nt, Human
gcaaucaagcacugcuaugacc

SEQ ID NO: 121742 - RNA, 21 nt, Human
gccccaaagcacaugucaaca

SEQ ID NO: 121743 - RNA, 20 nt, Human
gucaacucagauaccaccag

SEQ ID NO: 121744 - RNA, 28 nt, Human
uaaaagccccaaagcacaugucaacacu

SEQ ID NO: 121745 - RNA, 27 nt, Human
uaaaaggcauaaaauuuaacuugaaaa

SEQ ID NO: 121746 - RNA, 23 nt, Human
uagagcaaaaccuuucaggaucc

SEQ ID NO: 121747 - RNA, 24 nt, Human
uagagcaaaaccuuucaggauccu

SEQ ID NO: 121748 - RNA, 20 nt, Human
uagcuggauagcaaaaaagu

SEQ ID NO: 121749 - RNA, 19 nt, Human
uauauauauauauauauau

SEQ ID NO: 121750 - RNA, 19 nt, Human
uauauauauauauauauau

SEQ ID NO: 121751 - RNA, 19 nt, Human
uauauauauauauauauau

SEQ ID NO: 121752 - RNA, 19 nt, Human
uauauauauauauauauau

SEQ ID NO: 121753 - RNA, 19 nt, Human
uauauauauauauauauau

SEQ ID NO: 121754 - RNA, 19 nt, Human
uauauauauauauauauau

SEQ ID NO: 121755 - RNA, 19 nt, Human
uauauauauauauauauau

SEQ ID NO: 121756 - RNA, 19 nt, Human
uauauauauauauauauau

SEQ ID NO: 121757 - RNA, 19 nt, Human
uauauauauauauauauau

SEQ ID NO: 121758 - RNA, 19 nt, Human
uauauauauauauauauau

SEQ ID NO: 121759 - RNA, 19 nt, Human
uauauauauauauauauau

SEQ ID NO: 121760 - RNA, 19 nt, Human
uauauauauauauauauau

SEQ ID NO: 121761 - RNA, 24 nt, Human
uauauauauauauauauauaugua

SEQ ID NO: 121762 - RNA, 21 nt, Human
uauauguauauaugcaauaca

SEQ ID NO: 121763 - RNA, 24 nt, Human
ucacuggcuaaaacauagccaugu

SEQ ID NO: 121764 - RNA, 19 nt, Human
ucccugggacccaaggugg

SEQ ID NO: 121765 - RNA, 20 nt, Human
uccuccacaaaacuucccug

SEQ ID NO: 121766 - RNA, 18 nt, Human
uccuugacccacaucaua

SEQ ID NO: 121767 - RNA, 21 nt, Human
ucuaugcacaauacuaucaaa

SEQ ID NO: 121768 - RNA, 24 nt, Human
ucugccaccugcugccuucuucug

SEQ ID NO: 121769 - RNA, 20 nt, Human
ugaaaagaucauuucggcua

SEQ ID NO: 121770 - RNA, 19 nt, Human
ugaaaggaacugguguaaa

SEQ ID NO: 121771 - RNA, 22 nt, Human
ugaacccacacagaaucaagga

SEQ ID NO: 121772 - RNA, 27 nt, Human
ugacccacaucauaaugcugcaucccc

SEQ ID NO: 121773 - RNA, 21 nt, Human
ugagcuccuccacaaaacuuc

SEQ ID NO: 121774 - RNA, 21 nt, Human
ugaucccagauauguauuaca

SEQ ID NO: 121775 - RNA, 24 nt, Human
ugcacaaacaaauaaaaauagcug

SEQ ID NO: 121776 - RNA, 18 nt, Human
ugccaccugcugccuucu

SEQ ID NO: 121777 - RNA, 22 nt, Human
uggaaaauauugaguuaaaaac

SEQ ID NO: 121778 - RNA, 23 nt, Human
uggaaagacacugccauauagug

SEQ ID NO: 121779 - RNA, 18 nt, Human
uggagcuuccuagaaggu

SEQ ID NO: 121780 - RNA, 21 nt, Human
uggauagcaaaaaaguuagaa

SEQ ID NO: 121781 - RNA, 21 nt, Human
uucugccaccugcugccuucu

SEQ ID NO: 121782 - RNA, 20 nt, Human
uugaacccacacagaaucaa

SEQ ID NO: 121783 - RNA, 19 nt, Human
uuucaggauccugaagcuu

SEQ ID NO: 121784 - RNA, 21 nt, Human
uuucaggauccugaagcuuug

SEQ ID NO: 121785 - RNA, 24 nt, Human
uuuucagaaaccuucaugcacccc

SEQ ID NO: 121786 - RNA, 21 nt, Human
uuuuuuuuuuuuuuaaaacga

SEQ ID NO: 121787 - RNA, 18 nt, Human
aaagugcugggauuacag

SEQ ID NO: 121788 - RNA, 19 nt, Human
aaagugcugggauuacagg

SEQ ID NO: 121789 - RNA, 22 nt, Human
aaagugcugggauuacaggugu

SEQ ID NO: 121790 - RNA, 24 nt, Human
aaagugcugggauuacagguguga

SEQ ID NO: 121791 - RNA, 18 nt, Human
aagugcugggauuacagg

SEQ ID NO: 121792 - RNA, 19 nt, Human
aagugcugggauuacaggu

SEQ ID NO: 121793 - RNA, 26 nt, Human
aagugcugggauuacaggugugagcc

SEQ ID NO: 121794 - RNA, 18 nt, Human
acggaguuucaucguguu

SEQ ID NO: 121795 - RNA, 19 nt, Human
acggaguuucaucguguug

SEQ ID NO: 121796 - RNA, 24 nt, Human
acggaguuucaucguguugcccag

SEQ ID NO: 121797 - RNA, 19 nt, Human
agaaggcuguuucggaagg

SEQ ID NO: 121798 - RNA, 22 nt, Human
aggcaauccgccugccucggcc

SEQ ID NO: 121799 - RNA, 24 nt, Human
aggcaauccgccugccucggccuc

SEQ ID NO: 121800 - RNA, 18 nt, Human
agggauucagcagugagg

SEQ ID NO: 121801 - RNA, 19 nt, Human
aguagcugggacuacaggc

SEQ ID NO: 121802 - RNA, 19 nt, Human
aguagcugggacuacaggc

SEQ ID NO: 121803 - RNA, 20 nt, Human
caaccucuuccuccuggguu

SEQ ID NO: 121804 - RNA, 22 nt, Human
caagcaauucuccugccucagc

SEQ ID NO: 121805 - RNA, 23 nt, Human
cacugcaaccucuuccuccuggg

SEQ ID NO: 121806 - RNA, 20 nt, Human
cagccuccugaguagcuggg

SEQ ID NO: 121807 - RNA, 24 nt, Human
caucguguugcccagacugaucuu

SEQ ID NO: 121808 - RNA, 27 nt, Human
caucguguugcccagacugaucuugaa

SEQ ID NO: 121809 - RNA, 22 nt, Human
ccuaaagugcugggauuacagg

SEQ ID NO: 121810 - RNA, 24 nt, Human
ccuaaagugcugggauuacaggug

SEQ ID NO: 121811 - RNA, 24 nt, Human
ccuccuggguucaagcaauucucc

SEQ ID NO: 121812 - RNA, 23 nt, Human
ccugaguagcugggacuacaggc

SEQ ID NO: 121813 - RNA, 23 nt, Human
ccugaguagcugggacuacaggc

SEQ ID NO: 121814 - RNA, 23 nt, Human
ccugccucagccuccugaguagc

SEQ ID NO: 121815 - RNA, 23 nt, Human
ccuggguucaagcaauucuccug

SEQ ID NO: 121816 - RNA, 21 nt, Human
cgaguuuuuuuuuuuuuuuuu

SEQ ID NO: 121817 - RNA, 23 nt, Human
cgcggggccgcgcuugcucuagc

SEQ ID NO: 121818 - RNA, 21 nt, Human
cggggccgcgcuugcucuagc

SEQ ID NO: 121819 - RNA, 24 nt, Human
cguguugcccagacugaucuugaa

SEQ ID NO: 121820 - RNA, 21 nt, Human
cuaaagugcugggauuacagg

SEQ ID NO: 121821 - RNA, 24 nt, Human
cuaaagugcugggauuacaggugu

SEQ ID NO: 121822 - RNA, 23 nt, Human
cucacugcaaccucuuccuccug

SEQ ID NO: 121823 - RNA, 24 nt, Human
cucacugcaaccucuuccuccugg

SEQ ID NO: 121824 - RNA, 24 nt, Human
cucagccuccugaguagcugggac

SEQ ID NO: 121825 - RNA, 21 nt, Human
cucaggcaauccgccugccuc

SEQ ID NO: 121826 - RNA, 19 nt, Human
cuccgggccgcggggccgc

SEQ ID NO: 121827 - RNA, 21 nt, Human
cuccgggccgcggggccgcgc

SEQ ID NO: 121828 - RNA, 21 nt, Human
cuccuggguucaagcaauucu

SEQ ID NO: 121829 - RNA, 23 nt, Human
cugccucagccuccugaguagcu

SEQ ID NO: 121830 - RNA, 18 nt, Human
cuguuggcaggcuucucc

SEQ ID NO: 121831 - RNA, 20 nt, Human
cuugaacuccugagcucagg

SEQ ID NO: 121832 - RNA, 18 nt, Human
cuuguucuguugcccagg

SEQ ID NO: 121833 - RNA, 24 nt, Human
gacuacaggcguacgccaccaugc

SEQ ID NO: 121834 - RNA, 24 nt, Human
gagcucaggcaauccgccugccuc

SEQ ID NO: 121835 - RNA, 26 nt, Human
gaguagcugggacuacaggcguacgc

SEQ ID NO: 121836 - RNA, 20 nt, Human
gaguuuuuuuuuuuuuuuuu

SEQ ID NO: 121837 - RNA, 18 nt, Human
gauuacaggugugagcca

SEQ ID NO: 121838 - RNA, 22 nt, Human
gauuacaggugugagccacagc

SEQ ID NO: 121839 - RNA, 22 nt, Human
gcaaccucuuccuccuggguuc

SEQ ID NO: 121840 - RNA, 20 nt, Human
gcagaguauuugggggacaa

SEQ ID NO: 121841 - RNA, 21 nt, Human
gcgcuugcucuagcucgugcc

SEQ ID NO: 121842 - RNA, 21 nt, Human
gcucacugcaaccucuuccuc

SEQ ID NO: 121843 - RNA, 24 nt, Human
gcucaggcaauccgccugccucgg

SEQ ID NO: 121844 - RNA, 20 nt, Human
gcucuagcucgugccgaauu

SEQ ID NO: 121845 - RNA, 24 nt, Human
ggacuacaggcguacgccaccaug

SEQ ID NO: 121846 - RNA, 22 nt, Human
gguucuuguucuguugcccagg

SEQ ID NO: 121847 - RNA, 18 nt, Human
guggcaugaucuuggcuc

SEQ ID NO: 121848 - RNA, 20 nt, Human
guuuuuuuuuuuuuuuuugg

SEQ ID NO: 121849 - RNA, 20 nt, Human
uaaaaaguugagaagaugga

SEQ ID NO: 121850 - RNA, 24 nt, Human
uaaagugcugggauuacaggugug

SEQ ID NO: 121851 - RNA, 23 nt, Human
uaauuuuuuguauuuuaguagag

SEQ ID NO: 121852 - RNA, 24 nt, Human
uaauuuuuuguauuuuaguagaga

SEQ ID NO: 121853 - RNA, 22 nt, Human
uacaggugugagccacagcgcc

SEQ ID NO: 121854 - RNA, 22 nt, Human
uacaggugugagccacagcgcc

SEQ ID NO: 121855 - RNA, 23 nt, Human
uacaggugugagccacagcgccu

SEQ ID NO: 121856 - RNA, 19 nt, Human
uaguagagacggaguuuca

SEQ ID NO: 121857 - RNA, 24 nt, Human
uaguagagacggaguuucaucgug

SEQ ID NO: 121858 - RNA, 19 nt, Human
ucaagcaauucuccugccu

SEQ ID NO: 121859 - RNA, 22 nt, Human
ucacugcaaccucuuccuccug

SEQ ID NO: 121860 - RNA, 24 nt, Human
ucacugcaaccucuuccuccuggg

SEQ ID NO: 121861 - RNA, 23 nt, Human
ucagccuccugaguagcugggac

SEQ ID NO: 121862 - RNA, 24 nt, Human
uccuaaagugcugggauuacaggu

SEQ ID NO: 121863 - RNA, 24 nt, Human
uccugaguagcugggacuacaggc

SEQ ID NO: 121864 - RNA, 19 nt, Human
uccuggguucaagcaauuc

SEQ ID NO: 121865 - RNA, 21 nt, Human
uccuggguucaagcaauucuc

SEQ ID NO: 121866 - RNA, 24 nt, Human
uccuggguucaagcaauucuccug

SEQ ID NO: 121867 - RNA, 18 nt, Human
ucggccuccuaaagugcu

SEQ ID NO: 121868 - RNA, 24 nt, Human
ucuccugccucagccuccugagua

SEQ ID NO: 121869 - RNA, 24 nt, Human
ucucgaguuuuuuuuuuuuuuuuu

SEQ ID NO: 121870 - RNA, 25 nt, Human
ucuggaggggcgagaaugagaugga

SEQ ID NO: 121871 - RNA, 19 nt, Human
ucuucuggaggggcgagaa

SEQ ID NO: 121872 - RNA, 23 nt, Human
ucuugaacuccugagcucaggca

SEQ ID NO: 121873 - RNA, 23 nt, Human
ucuuguucuguugcccagguugg

SEQ ID NO: 121874 - RNA, 24 nt, Human
ucuuguucuguugcccagguugga

SEQ ID NO: 121875 - RNA, 24 nt, Human
ugaacuccugagcucaggcaaucc

SEQ ID NO: 121876 - RNA, 21 nt, Human
ugagauggaguucaccagcag

SEQ ID NO: 121877 - RNA, 22 nt, Human
ugagauggguucuuguucuguu

SEQ ID NO: 121878 - RNA, 23 nt, Human
ugagauggguucuuguucuguug

SEQ ID NO: 121879 - RNA, 24 nt, Human
ugaucuugaacuccugagcucagg

SEQ ID NO: 121880 - RNA, 24 nt, Human
ugcccagacugaucuugaacuccu

SEQ ID NO: 121881 - RNA, 21 nt, Human
ugcccagguuggagugaugug

SEQ ID NO: 121882 - RNA, 24 nt, Human
ugccucagccuccugaguagcugg

SEQ ID NO: 121883 - RNA, 24 nt, Human
ugccucggccuccuaaagugcugg

SEQ ID NO: 121884 - RNA, 25 nt, Human
ugcugggauuacaggugugagccac

SEQ ID NO: 121885 - RNA, 23 nt, Human
uggaaacugaauccucuuuguau

SEQ ID NO: 121886 - RNA, 24 nt, Human
uggaggggcgagaaugagauggag

SEQ ID NO: 121887 - RNA, 24 nt, Human
uggagugauguggcaugaucuugg

SEQ ID NO: 121888 - RNA, 19 nt, Human
uggcaugaucuuggcucac

SEQ ID NO: 121889 - RNA, 21 nt, Human
uggcaugaucuuggcucacug

SEQ ID NO: 121890 - RNA, 22 nt, Human
ugggacuacaggcguacgccac

SEQ ID NO: 121891 - RNA, 24 nt, Human
ugggacuacaggcguacgccacca

SEQ ID NO: 121892 - RNA, 25 nt, Human
ugggacuacaggcguacgccaccau

SEQ ID NO: 121893 - RNA, 18 nt, Human
ugggauuacaggugugag

SEQ ID NO: 121894 - RNA, 19 nt, Human
ugggauuacaggugugagc

SEQ ID NO: 121895 - RNA, 21 nt, Human
ugggauuacaggugugagcca

SEQ ID NO: 121896 - RNA, 22 nt, Human
ugggauuacaggugugagccac

SEQ ID NO: 121897 - RNA, 22 nt, Human
ugggauuacaggugugagccac

SEQ ID NO: 121898 - RNA, 23 nt, Human
ugggauuacaggugugagccaca

SEQ ID NO: 121899 - RNA, 24 nt, Human
ugggauuacaggugugagccacag

SEQ ID NO: 121900 - RNA, 27 nt, Human
ugggauuacaggugugagccacagcgc

SEQ ID NO: 121901 - RNA, 21 nt, Human
uggguucaagcaauucuccug

SEQ ID NO: 121902 - RNA, 23 nt, Human
uggguucaagcaauucuccugcc

SEQ ID NO: 121903 - RNA, 24 nt, Human
uggguucaagcaauucuccugccu

SEQ ID NO: 121904 - RNA, 24 nt, Human
uggguucuuguucuguugcccagg

SEQ ID NO: 121905 - RNA, 18 nt, Human
uguugcccagacugaucu

SEQ ID NO: 121906 - RNA, 22 nt, Human
uguugcccagacugaucuugaa

SEQ ID NO: 121907 - RNA, 23 nt, Human
uguuucggaaggucacuguuggc

SEQ ID NO: 121908 - RNA, 21 nt, Human
uuaaaaaguugagaagaugga

SEQ ID NO: 121909 - RNA, 18 nt, Human
uuaguagagacggaguuu

SEQ ID NO: 121910 - RNA, 20 nt, Human
uuaguagagacggaguuuca

SEQ ID NO: 121911 - RNA, 21 nt, Human
uuaguagagacggaguuucau

SEQ ID NO: 121912 - RNA, 24 nt, Human
uuaguagagacggaguuucaucgu

SEQ ID NO: 121913 - RNA, 21 nt, Human
uucaagcaauucuccugccuc

SEQ ID NO: 121914 - RNA, 24 nt, Human
uucaagcaauucuccugccucagc

SEQ ID NO: 121915 - RNA, 21 nt, Human
uucuuguucuguugcccaggu

SEQ ID NO: 121916 - RNA, 21 nt, Human
uucuuguucuguugcccaggu

SEQ ID NO: 121917 - RNA, 24 nt, Human
uucuuguucuguugcccagguugg

SEQ ID NO: 121918 - RNA, 24 nt, Human
uuggagugauguggcaugaucuug

SEQ ID NO: 121919 - RNA, 25 nt, Human
uuucuguguuaaaaaguugagaagg

SEQ ID NO: 121920 - RNA, 22 nt, Human
uuuuaguagagacggaguuuca

SEQ ID NO: 121921 - RNA, 20 nt, Human
uuuuguauuuuaguagagac

SEQ ID NO: 121922 - RNA, 20 nt, Human
uuuuuguauuuuaguagaga

SEQ ID NO: 121923 - RNA, 21 nt, Human
uuuuuuuuuuuuuuuuuguuu

SEQ ID NO: 121924 - RNA, 22 nt, Human
aaaagcauuuuuaaucaacuua

SEQ ID NO: 121925 - RNA, 19 nt, Human
aacaagcuaaugugggauu

SEQ ID NO: 121926 - RNA, 24 nt, Human
aagaggaaaaaaaguguguucuga

SEQ ID NO: 121927 - RNA, 23 nt, Human
acugcaguuauuagaagugagcc

SEQ ID NO: 121928 - RNA, 24 nt, Human
caaaaaauacagcuagaaguaggc

SEQ ID NO: 121929 - RNA, 20 nt, Human
caacuuuauuaauguccugc

SEQ ID NO: 121930 - RNA, 26 nt, Human
caucacuaagagaaugggcaucucgg

SEQ ID NO: 121931 - RNA, 21 nt, Human
cauuugaagcugggagaaaga

SEQ ID NO: 121932 - RNA, 30 nt, Human
ccagagaccuuucugggaacaugccuucuu

SEQ ID NO: 121933 - RNA, 20 nt, Human
cgagacacuguagccuaaaa

SEQ ID NO: 121934 - RNA, 19 nt, Human
cugcagcagcguacauuag

SEQ ID NO: 121935 - RNA, 21 nt, Human
cugggagaaagaggaaaaaaa

SEQ ID NO: 121936 - RNA, 24 nt, Human
cuucaugauacauuauguuuuacu

SEQ ID NO: 121937 - RNA, 25 nt, Human
cuuucugggaacaugccuucuccag

SEQ ID NO: 121938 - RNA, 18 nt, Human
gcccaaugaugaauuugc

SEQ ID NO: 121939 - RNA, 20 nt, Human
gggggcggccggccugggca

SEQ ID NO: 121940 - RNA, 18 nt, Human
uacauuauguuuuacuga

SEQ ID NO: 121941 - RNA, 23 nt, Human
uaccacaggucaucuuuggucau

SEQ ID NO: 121942 - RNA, 21 nt, Human
uccugcagcagcguacauuag

SEQ ID NO: 121943 - RNA, 22 nt, Human
ucgagacacuguagccuaaaaa

SEQ ID NO: 121944 - RNA, 24 nt, Human
ucucuuugguuaugaauuuuuauu

SEQ ID NO: 121945 - RNA, 23 nt, Human
ucugcccauuucccuguggaauc

SEQ ID NO: 121946 - RNA, 21 nt, Human
uggaaucuaguaucaguguug

SEQ ID NO: 121947 - RNA, 22 nt, Human
ugggagaaagaggaaaaaaagu

SEQ ID NO: 121948 - RNA, 21 nt, Human
ugggggcggccggccugggca

SEQ ID NO: 121949 - RNA, 22 nt, Human
ugucccuccagagaccuuucug

SEQ ID NO: 121950 - RNA, 22 nt, Human
uucaggagccccgagggguggg

SEQ ID NO: 121951 - RNA, 21 nt, Human
aaaaagaaaaaaaaaugaaag

SEQ ID NO: 121952 - RNA, 24 nt, Human
aaaagaaaaaaaaaugaaagcaag

SEQ ID NO: 121953 - RNA, 26 nt, Human
aaaagaaaaagaaagaaagaaaagaa

SEQ ID NO: 121954 - RNA, 24 nt, Human
aaacaugaucacuaguaauggcac

SEQ ID NO: 121955 - RNA, 22 nt, Human
aaagaaaaagaaagaaagaaaa

SEQ ID NO: 121956 - RNA, 21 nt, Human
aagaaaaagaaagaaagaaaa

SEQ ID NO: 121957 - RNA, 24 nt, Human
aagaaagaaagaaaagaaagaaaa

SEQ ID NO: 121958 - RNA, 20 nt, Human
aagaggaaacagaaugcaga

SEQ ID NO: 121959 - RNA, 21 nt, Human
auuaaaaagaaaaagaaagaa

SEQ ID NO: 121960 - RNA, 22 nt, Human
caaaggacagcucugugccacc

SEQ ID NO: 121961 - RNA, 19 nt, Human
cacaacuagaagaggaaac

SEQ ID NO: 121962 - RNA, 18 nt, Human
cacacguugucaguuucc

SEQ ID NO: 121963 - RNA, 24 nt, Human
ccacugggccuucuauuucuagca

SEQ ID NO: 121964 - RNA, 20 nt, Human
cccaggcuacagauggauca

SEQ ID NO: 121965 - RNA, 22 nt, Human
cccccagaaggauuuuaauugu

SEQ ID NO: 121966 - RNA, 21 nt, Human
ccuucuauuucuagcaaaauc

SEQ ID NO: 121967 - RNA, 22 nt, Human
cguauugugcuuccagugcccc

SEQ ID NO: 121968 - RNA, 21 nt, Human
cugccaaccuaaugauucuug

SEQ ID NO: 121969 - RNA, 19 nt, Human
gaguuugcuuuuguagagu

SEQ ID NO: 121970 - RNA, 24 nt, Human
gaucucaucucaucuuacaugcaa

SEQ ID NO: 121971 - RNA, 25 nt, Human
gcaaaggacagcucugugccaccuu

SEQ ID NO: 121972 - RNA, 19 nt, Human
ggcauacgagcuggcaggu

SEQ ID NO: 121973 - RNA, 24 nt, Human
guacauuuuugcacugaaacagaa

SEQ ID NO: 121974 - RNA, 24 nt, Human
uaguacaggaauguccugucuccu

SEQ ID NO: 121975 - RNA, 24 nt, Human
uauuuuccccaucccucccacucc

SEQ ID NO: 121976 - RNA, 21 nt, Human
ucaaauuaaaaagaaaaaaaa

SEQ ID NO: 121977 - RNA, 21 nt, Human
uccccaucccucccacuccca

SEQ ID NO: 121978 - RNA, 20 nt, Human
ucuaccauuacacuuccaga

SEQ ID NO: 121979 - RNA, 22 nt, Human
ugaaacagaagcaauacaaguu

SEQ ID NO: 121980 - RNA, 19 nt, Human
ugcaaacagacacuguucc

SEQ ID NO: 121981 - RNA, 24 nt, Human
ugcaaaggacagcucugugccacc

SEQ ID NO: 121982 - RNA, 20 nt, Human
uggaauuaaaaagaaaaaga

SEQ ID NO: 121983 - RNA, 18 nt, Human
uggcacaacuagaagagg

SEQ ID NO: 121984 - RNA, 22 nt, Human
uguccugucuccuucccaggcu

SEQ ID NO: 121985 - RNA, 23 nt, Human
uguccugucuccuucccaggcuu

SEQ ID NO: 121986 - RNA, 22 nt, Human
uuaaaggggggaaaaaaacaug

SEQ ID NO: 121987 - RNA, 22 nt, Human
uuaugcauauaccugccaaccu

SEQ ID NO: 121988 - RNA, 18 nt, Human
uucaaauuaaaaagaaaa

SEQ ID NO: 121989 - RNA, 23 nt, Human
uucauuaaaggggggaaaaaaac

SEQ ID NO: 121990 - RNA, 23 nt, Human
aaaaaaaaaaaaaaaaaaaagag

SEQ ID NO: 121991 - RNA, 25 nt, Human
aaaaaaaaaaaaaagagcuacuuca

SEQ ID NO: 121992 - RNA, 24 nt, Human
aaaaaaaaaagagcuacuucaaag

SEQ ID NO: 121993 - RNA, 25 nt, Human
aaaaaaauuuuaacaagcaaggcua

SEQ ID NO: 121994 - RNA, 25 nt, Human
aaacaugaaauagauccaccugcuu

SEQ ID NO: 121995 - RNA, 25 nt, Human
aacaagguuccaaauaacaccucuu

SEQ ID NO: 121996 - RNA, 22 nt, Human
aagcaagcaaagucaguaccau

SEQ ID NO: 121997 - RNA, 18 nt, Human
aagcauauuaaaaaggaa

SEQ ID NO: 121998 - RNA, 25 nt, Human
aagcugcuccucagaccuuccuccg

SEQ ID NO: 121999 - RNA, 29 nt, Human
acaguuacugcaaaaaaaaaaaaaaaaaa

SEQ ID NO: 122000 - RNA, 25 nt, Human
accgcauuuucucuugaagcaucgu

SEQ ID NO: 122001 - RNA, 21 nt, Human
acuguccaaaacaagguucca

SEQ ID NO: 122002 - RNA, 25 nt, Human
aggcaacugguaaacuguccaaaac

SEQ ID NO: 122003 - RNA, 19 nt, Human
aucuugugauccauucuug

SEQ ID NO: 122004 - RNA, 22 nt, Human
caacgcugcugccacagaccga

SEQ ID NO: 122005 - RNA, 23 nt, Human
caacugguaaacuguccaaaaca

SEQ ID NO: 122006 - RNA, 22 nt, Human
caaguucagacaauacagcuaa

SEQ ID NO: 122007 - RNA, 23 nt, Human
caccccucgagcccucucagcaa

SEQ ID NO: 122008 - RNA, 18 nt, Human
cagcccaccccucgagcc

SEQ ID NO: 122009 - RNA, 22 nt, Human
ccaaaaaggaccagaacaaaaa

SEQ ID NO: 122010 - RNA, 30 nt, Human
ccaccccucgagcccucucagcaacucuaa

SEQ ID NO: 122011 - RNA, 19 nt, Human
ccccucgagcccucucagc

SEQ ID NO: 122012 - RNA, 22 nt, Human
ccccucgagcccucucagcaac

SEQ ID NO: 122013 - RNA, 21 nt, Human
cccucgagcccucucagcaac

SEQ ID NO: 122014 - RNA, 22 nt, Human
ccgccgcgggaguccgaccguc

SEQ ID NO: 122015 - RNA, 24 nt, Human
ccgucuccgccuccccucgcucuc

SEQ ID NO: 122016 - RNA, 23 nt, Human
ccuacccauacauaucccaaaua

SEQ ID NO: 122017 - RNA, 19 nt, Human
cguaucacagcagguuaca

SEQ ID NO: 122018 - RNA, 20 nt, Human
cuacaggccaaucacaaugc

SEQ ID NO: 122019 - RNA, 20 nt, Human
cuccgccuccccucgcucuc

SEQ ID NO: 122020 - RNA, 21 nt, Human
cuccgccuccccucgcucucc

SEQ ID NO: 122021 - RNA, 23 nt, Human
cucgcucuccgcucccggggccg

SEQ ID NO: 122022 - RNA, 19 nt, Human
cugcaaaaaaaaaaaaaaa

SEQ ID NO: 122023 - RNA, 18 nt, Human
cuuaaaaaaaaaaaaaaa

SEQ ID NO: 122024 - RNA, 18 nt, Human
cuuaaaaaaaaaaaaaaa

SEQ ID NO: 122025 - RNA, 20 nt, Human
cuuugggauaaaaggcaacu

SEQ ID NO: 122026 - RNA, 22 nt, Human
gccaacgcugcugccacagacc

SEQ ID NO: 122027 - RNA, 24 nt, Human
ggccaaucacaaugcaaguucaga

SEQ ID NO: 122028 - RNA, 22 nt, Human
gguuacaacaacuuugggauaa

SEQ ID NO: 122029 - RNA, 18 nt, Human
guaccauuacagauauuc

SEQ ID NO: 122030 - RNA, 23 nt, Human
uaaaaaacaguuacugcaaaaaa

SEQ ID NO: 122031 - RNA, 30 nt, Human
uaaaaaacaguuacugcaaaaaaaaaaaaa

SEQ ID NO: 122032 - RNA, 33 nt, Human
uacagauauucuuaaaaaaaaaaaaaaaaaaaa

SEQ ID NO: 122033 - RNA, 24 nt, Human
uacccuacccauacauaucccaaa

SEQ ID NO: 122034 - RNA, 24 nt, Human
uacucaauucuuaaaaauuagaaa

SEQ ID NO: 122035 - RNA, 24 nt, Human
uagaaauugcuguagcaguauuca

SEQ ID NO: 122036 - RNA, 24 nt, Human
uagcaguauucacuauaacuuaac

SEQ ID NO: 122037 - RNA, 28 nt, Human
uagugugucaggcacuuucugagauacc

SEQ ID NO: 122038 - RNA, 23 nt, Human
ucaaaaacaugaaauagauccac

SEQ ID NO: 122039 - RNA, 22 nt, Human
ucaaagcaagcaaagucaguac

SEQ ID NO: 122040 - RNA, 23 nt, Human
ucccaaauaguuuuugaucaaaa

SEQ ID NO: 122041 - RNA, 23 nt, Human
uccuccgucuccgccuccccucg

SEQ ID NO: 122042 - RNA, 22 nt, Human
ucuccgccuccccucgcucucc

SEQ ID NO: 122043 - RNA, 22 nt, Human
ugcaaaaaaaaaaaaaaaaaaa

SEQ ID NO: 122044 - RNA, 21 nt, Human
ugguauacuucaaauacccuc

SEQ ID NO: 122045 - RNA, 25 nt, Human
ugugucaggcacuuucugagauacc

SEQ ID NO: 122046 - RNA, 25 nt, Human
ugugucaggcacuuucugagauacc

SEQ ID NO: 122047 - RNA, 18 nt, Human
uuagaaauugcuguagca

SEQ ID NO: 122048 - RNA, 23 nt, Human
uuuaagcauauuaaaaaggaaac

SEQ ID NO: 122049 - RNA, 19 nt, Human
aaaaaaacaaaacagaaag

SEQ ID NO: 122050 - RNA, 24 nt, Human
aaaaaaacaaaacagaaagaaaug

SEQ ID NO: 122051 - RNA, 18 nt, Human
aaaaaacaaaacagaaag

SEQ ID NO: 122052 - RNA, 23 nt, Human
aaacagaaagaaaugucuugugg

SEQ ID NO: 122053 - RNA, 21 nt, Human
aaagaaaacugguauaaauga

SEQ ID NO: 122054 - RNA, 22 nt, Human
aacgauaacccuuacgccccac

SEQ ID NO: 122055 - RNA, 20 nt, Human
aagccgucccccacacagug

SEQ ID NO: 122056 - RNA, 24 nt, Human
aauugucagaaacugcugaaugcc

SEQ ID NO: 122057 - RNA, 24 nt, Human
acaaacaaauucacauaucagaac

SEQ ID NO: 122058 - RNA, 24 nt, Human
acaaagcgugagaagccguccccc

SEQ ID NO: 122059 - RNA, 24 nt, Human
acaacggaugaagagaguaaacaa

SEQ ID NO: 122060 - RNA, 23 nt, Human
agaaaaaaacaaaacagaaagaa

SEQ ID NO: 122061 - RNA, 21 nt, Human
agaaagaaaugucuuguggua

SEQ ID NO: 122062 - RNA, 24 nt, Human
agcacuuuguugacaaggagugug

SEQ ID NO: 122063 - RNA, 22 nt, Human
aggagaaaaaaacaaaacagaa

SEQ ID NO: 122064 - RNA, 21 nt, Human
aucaucauaaagaaaacuggu

SEQ ID NO: 122065 - RNA, 24 nt, Human
caacgcgcuuuucuucuuuaaucu

SEQ ID NO: 122066 - RNA, 23 nt, Human
caaggcaagguccugaccuugcc

SEQ ID NO: 122067 - RNA, 21 nt, Human
caaugcaaccugaagccuaga

SEQ ID NO: 122068 - RNA, 22 nt, Human
cacccuccgccggcgacagcuc

SEQ ID NO: 122069 - RNA, 23 nt, Human
cacuguaucaucauaaagaaaac

SEQ ID NO: 122070 - RNA, 20 nt, Human
cacuucucguuacuuuacag

SEQ ID NO: 122071 - RNA, 22 nt, Human
cacuuuagcuuucuacugauuu

SEQ ID NO: 122072 - RNA, 22 nt, Human
caggagaaaaaaacaaaacaga

SEQ ID NO: 122073 - RNA, 19 nt, Human
ccgccggcgacagcuccuc

SEQ ID NO: 122074 - RNA, 22 nt, Human
cgccggcgacagcuccucaguc

SEQ ID NO: 122075 - RNA, 27 nt, Human
cgugagaagccgucccccacacagugg

SEQ ID NO: 122076 - RNA, 22 nt, Human
cugaagccuagagucacaacgg

SEQ ID NO: 122077 - RNA, 19 nt, Human
cugcagcaucuuccgcuuu

SEQ ID NO: 122078 - RNA, 21 nt, Human
cuugugguaugcaugcacaug

SEQ ID NO: 122079 - RNA, 19 nt, Human
gagaaaaaaacaaaacaga

SEQ ID NO: 122080 - RNA, 22 nt, Human
gagaaaaaaacaaaacagaaag

SEQ ID NO: 122081 - RNA, 24 nt, Human
ggcaagaaacaucuugcuguacag

SEQ ID NO: 122082 - RNA, 21 nt, Human
gggaagaggcguugcgcggcg

SEQ ID NO: 122083 - RNA, 20 nt, Human
guaaacaaagcgugagaagc

SEQ ID NO: 122084 - RNA, 18 nt, Human
guaugcaugcacaugcac

SEQ ID NO: 122085 - RNA, 22 nt, Human
uaaagaaaaacuggaaauccau

SEQ ID NO: 122086 - RNA, 19 nt, Human
uagaugaggaaacacggcg

SEQ ID NO: 122087 - RNA, 23 nt, Human
uauaaagcacuucucguuacuuu

SEQ ID NO: 122088 - RNA, 21 nt, Human
uaucaucauaaagaaaacugg

SEQ ID NO: 122089 - RNA, 18 nt, Human
uauucugugucuugugcu

SEQ ID NO: 122090 - RNA, 24 nt, Human
ucaaauaucuacaucuaaaauuuu

SEQ ID NO: 122091 - RNA, 22 nt, Human
ucuuccgcuuuuguugucugag

SEQ ID NO: 122092 - RNA, 18 nt, Human
ugaggaaacacggcggca

SEQ ID NO: 122093 - RNA, 22 nt, Human
ugcacuguucccggagcgccug

SEQ ID NO: 122094 - RNA, 18 nt, Human
ugccucgucucuccuccc

SEQ ID NO: 122095 - RNA, 21 nt, Human
ugccuuguuuaguugucacaa

SEQ ID NO: 122096 - RNA, 22 nt, Human
ugcuuuuuuuuuuuuuuguuaa

SEQ ID NO: 122097 - RNA, 24 nt, Human
ugggagaaaguaaagaaaaacugg

SEQ ID NO: 122098 - RNA, 22 nt, Human
uuacaacaaugcauuaacaaaa

SEQ ID NO: 122099 - RNA, 24 nt, Human
uuaguugucacaaacaaauucaca

SEQ ID NO: 122100 - RNA, 22 nt, Human
uuuacaacaaugcauuaacaaa

SEQ ID NO: 122101 - RNA, 18 nt, Human
aagcaaucugagcgcccc

SEQ ID NO: 122102 - RNA, 25 nt, Human
aagccacuuccaaacgucccuccaa

SEQ ID NO: 122103 - RNA, 22 nt, Human
aaguggccuucagagaaagagc

SEQ ID NO: 122104 - RNA, 21 nt, Human
acaaaacacaguaauccucaa

SEQ ID NO: 122105 - RNA, 21 nt, Human
acacaguaauccucaauguua

SEQ ID NO: 122106 - RNA, 20 nt, Human
acccggaggggaggaugggg

SEQ ID NO: 122107 - RNA, 24 nt, Human
agaaaagagauggcggugucaagg

SEQ ID NO: 122108 - RNA, 24 nt, Human
aggaaacucaguggacugacaagc

SEQ ID NO: 122109 - RNA, 20 nt, Human
aggaaugcaccgcguucccc

SEQ ID NO: 122110 - RNA, 23 nt, Human
aggcagagcucaggaguccuccc

SEQ ID NO: 122111 - RNA, 20 nt, Human
aggcaggcuauugaauggcc

SEQ ID NO: 122112 - RNA, 21 nt, Human
aggcuggguacacuggguccc

SEQ ID NO: 122113 - RNA, 18 nt, Human
agggcccaaccgcuucuc

SEQ ID NO: 122114 - RNA, 22 nt, Human
agugugaaaacccggaggggag

SEQ ID NO: 122115 - RNA, 22 nt, Human
augcuaaugcgcugggcaugaa

SEQ ID NO: 122116 - RNA, 24 nt, Human
augugcucagauggggcucaucug

SEQ ID NO: 122117 - RNA, 19 nt, Human
auucagaaccaaucuggug

SEQ ID NO: 122118 - RNA, 22 nt, Human
caaaacacaguaauccucaaug

SEQ ID NO: 122119 - RNA, 19 nt, Human
caaaguccuagcccgucca

SEQ ID NO: 122120 - RNA, 18 nt, Human
caaagugcccuuggcuca

SEQ ID NO: 122121 - RNA, 22 nt, Human
caaguacaaauacuuaucugag

SEQ ID NO: 122122 - RNA, 19 nt, Human
cagcagggcacgaggccag

SEQ ID NO: 122123 - RNA, 18 nt, Human
cagcuuugggcagaggga

SEQ ID NO: 122124 - RNA, 23 nt, Human
ccaaagcaaucugagcgccccca

SEQ ID NO: 122125 - RNA, 21 nt, Human
ccaaaguccuagcccguccac

SEQ ID NO: 122126 - RNA, 22 nt, Human
ccaccagcaccucugaguucac

SEQ ID NO: 122127 - RNA, 25 nt, Human
ccaccccuccugccauaggaaggac

SEQ ID NO: 122128 - RNA, 23 nt, Human
cccaggcucgaggaaccgcccuc

SEQ ID NO: 122129 - RNA, 21 nt, Human
cccauacagauugugugaggu

SEQ ID NO: 122130 - RNA, 28 nt, Human
ccccaaaguccuagcccguccaccagca

SEQ ID NO: 122131 - RNA, 18 nt, Human
ccccaccccuccugccau

SEQ ID NO: 122132 - RNA, 21 nt, Human
ccccgcacuccgcacgucaac

SEQ ID NO: 122133 - RNA, 23 nt, Human
ccccggagccccgcacuccgcac

SEQ ID NO: 122134 - RNA, 22 nt, Human
cccggacgaaggcaggcuauug

SEQ ID NO: 122135 - RNA, 21 nt, Human
ccggagccccgcacuccgcac

SEQ ID NO: 122136 - RNA, 25 nt, Human
ccuagcccguccaccagcaccucug

SEQ ID NO: 122137 - RNA, 22 nt, Human
ccucgcuccaggggagcugguc

SEQ ID NO: 122138 - RNA, 20 nt, Human
ccucuggccccaggagcaga

SEQ ID NO: 122139 - RNA, 23 nt, Human
ccugcccggcuagacuuugggag

SEQ ID NO: 122140 - RNA, 23 nt, Human
ccugugcgcgcugccugaagccu

SEQ ID NO: 122141 - RNA, 21 nt, Human
ccuucagagaaagagccccau

SEQ ID NO: 122142 - RNA, 24 nt, Human
cgcacacugagccagcccugugug

SEQ ID NO: 122143 - RNA, 21 nt, Human
cgcccagugugaaaacccgga

SEQ ID NO: 122144 - RNA, 18 nt, Human
cuaaccccaaaguccuag

SEQ ID NO: 122145 - RNA, 24 nt, Human
cucaauguuacuggaagaggcaga

SEQ ID NO: 122146 - RNA, 19 nt, Human
cuccugaacaggccagaaa

SEQ ID NO: 122147 - RNA, 18 nt, Human
cucgugcugcucaguccc

SEQ ID NO: 122148 - RNA, 23 nt, Human
cucucagcgucuccaaagcaauc

SEQ ID NO: 122149 - RNA, 19 nt, Human
cucugaguucacuggccac

SEQ ID NO: 122150 - RNA, 19 nt, Human
gaaagagagggaaggggcc

SEQ ID NO: 122151 - RNA, 22 nt, Human
gagaaagagccccauggccuaa

SEQ ID NO: 122152 - RNA, 18 nt, Human
gaggauggggucucgugc

SEQ ID NO: 122153 - RNA, 18 nt, Human
gagguaggagagagggca

SEQ ID NO: 122154 - RNA, 20 nt, Human
gcagagggaaggagguuuga

SEQ ID NO: 122155 - RNA, 22 nt, Human
gcccauacagauugugugaggu

SEQ ID NO: 122156 - RNA, 24 nt, Human
ggaaggacagcuuugggcagaggg

SEQ ID NO: 122157 - RNA, 23 nt, Human
ggagguaggagagagggcagaag

SEQ ID NO: 122158 - RNA, 22 nt, Human
ggcacgaggccagaggcugggu

SEQ ID NO: 122159 - RNA, 21 nt, Human
ggccuucgcugggugaggccu

SEQ ID NO: 122160 - RNA, 20 nt, Human
gggcaaggccuucggcugca

SEQ ID NO: 122161 - RNA, 22 nt, Human
gucauguaugaggcacguccug

SEQ ID NO: 122162 - RNA, 18 nt, Human
uacuggaagaggcagagc

SEQ ID NO: 122163 - RNA, 18 nt, Human
uccaccagcaccucugag

SEQ ID NO: 122164 - RNA, 23 nt, Human
uccaccagcaccucugaguucac

SEQ ID NO: 122165 - RNA, 25 nt, Human
uccugggacccccaccccuccugcc

SEQ ID NO: 122166 - RNA, 22 nt, Human
ucgcugggugaggccuucccca

SEQ ID NO: 122167 - RNA, 23 nt, Human
ucucgugcugcucagucccccgg

SEQ ID NO: 122168 - RNA, 20 nt, Human
ucugagaagguggagguagg

SEQ ID NO: 122169 - RNA, 20 nt, Human
ucuggggaaagagagggaag

SEQ ID NO: 122170 - RNA, 20 nt, Human
ugaacaggccagaaauuggu

SEQ ID NO: 122171 - RNA, 18 nt, Human
ugaggcuccugaacaggc

SEQ ID NO: 122172 - RNA, 22 nt, Human
ugccagagccugugcgcgcugg

SEQ ID NO: 122173 - RNA, 20 nt, Human
ugccagggcccaaccgcuuc

SEQ ID NO: 122174 - RNA, 23 nt, Human
ugccagggcccaaccgcuucucc

SEQ ID NO: 122175 - RNA, 23 nt, Human
ugccagggcccaaccgcuucucc

SEQ ID NO: 122176 - RNA, 21 nt, Human
ugcccuuggcucacccggcug

SEQ ID NO: 122177 - RNA, 20 nt, Human
ugccuggccggggaggccca

SEQ ID NO: 122178 - RNA, 21 nt, Human
uggaagaggcagagcucagga

SEQ ID NO: 122179 - RNA, 21 nt, Human
uggaagaggcagagcucagga

SEQ ID NO: 122180 - RNA, 20 nt, Human
ugggcagagggaaggagguu

SEQ ID NO: 122181 - RNA, 19 nt, Human
ugggccccucauggcucag

SEQ ID NO: 122182 - RNA, 20 nt, Human
uggguaaggagcagcuggau

SEQ ID NO: 122183 - RNA, 24 nt, Human
uggguaaggagcagcuggaugugc

SEQ ID NO: 122184 - RNA, 20 nt, Human
ugggugaggccuuccccagc

SEQ ID NO: 122185 - RNA, 18 nt, Human
ugugccagggcccaaccg

SEQ ID NO: 122186 - RNA, 19 nt, Human
uuacugcagucacggacgc

SEQ ID NO: 122187 - RNA, 23 nt, Human
uugggcccauacagauuguguga

SEQ ID NO: 122188 - RNA, 19 nt, Human
aaaauccucucuccaugcu

SEQ ID NO: 122189 - RNA, 24 nt, Human
aaauaggaagcgcagccacaggca

SEQ ID NO: 122190 - RNA, 18 nt, Human
aacaggcagacaccacag

SEQ ID NO: 122191 - RNA, 20 nt, Human
aaggagagugucacgcaaca

SEQ ID NO: 122192 - RNA, 23 nt, Human
aaggagagugucacgcaacaggc

SEQ ID NO: 122193 - RNA, 22 nt, Human
aagugaccccuugaugcaagga

SEQ ID NO: 122194 - RNA, 20 nt, Human
aaguuucccaaauaccuuuc

SEQ ID NO: 122195 - RNA, 19 nt, Human
aauccucucuccaugcucg

SEQ ID NO: 122196 - RNA, 21 nt, Human
acaccacagaggagccaguac

SEQ ID NO: 122197 - RNA, 20 nt, Human
acaccauccuggaagaaaaa

SEQ ID NO: 122198 - RNA, 23 nt, Human
acaggcagacaccacagaggagc

SEQ ID NO: 122199 - RNA, 24 nt, Human
agaaaaauggacccuccagucaaa

SEQ ID NO: 122200 - RNA, 18 nt, Human
agaauuccccccaacuca

SEQ ID NO: 122201 - RNA, 26 nt, Human
agaauuccccccaacucagggcagua

SEQ ID NO: 122202 - RNA, 19 nt, Human
agaguacacaucgagucug

SEQ ID NO: 122203 - RNA, 23 nt, Human
agcaauacccugagguucccagc

SEQ ID NO: 122204 - RNA, 22 nt, Human
aggcagacaccacagaggagcc

SEQ ID NO: 122205 - RNA, 23 nt, Human
aggcagacaccacagaggagcca

SEQ ID NO: 122206 - RNA, 24 nt, Human
augcgagguaguugagaaacaagg

SEQ ID NO: 122207 - RNA, 21 nt, Human
caagcaauacccugagguucc

SEQ ID NO: 122208 - RNA, 18 nt, Human
caccaaguguucaaaucc

SEQ ID NO: 122209 - RNA, 21 nt, Human
cacucugcagccccacccacc

SEQ ID NO: 122210 - RNA, 19 nt, Human
cacugagaauuccccccaa

SEQ ID NO: 122211 - RNA, 24 nt, Human
cacugagaauuccccccaacucag

SEQ ID NO: 122212 - RNA, 20 nt, Human
cacuuuauaacggucuaggu

SEQ ID NO: 122213 - RNA, 23 nt, Human
cagaggagccaguacacgugaug

SEQ ID NO: 122214 - RNA, 24 nt, Human
caggcagacaccacagaggagcca

SEQ ID NO: 122215 - RNA, 21 nt, Human
caugcucgguaaguccaugug

SEQ ID NO: 122216 - RNA, 21 nt, Human
cccacccaccaucgguuccca

SEQ ID NO: 122217 - RNA, 25 nt, Human
cccacccaccaucgguucccaucgc

SEQ ID NO: 122218 - RNA, 20 nt, Human
ccccacccaccaucgguucc

SEQ ID NO: 122219 - RNA, 18 nt, Human
ccccgaccgcaugcgccc

SEQ ID NO: 122220 - RNA, 25 nt, Human
ccccggacagccagugaacaacccc

SEQ ID NO: 122221 - RNA, 23 nt, Human
ccucccgucagcgacagagcugg

SEQ ID NO: 122222 - RNA, 22 nt, Human
ccuggaagaaaaauggacccuc

SEQ ID NO: 122223 - RNA, 22 nt, Human
cggacagccagugaacaacccc

SEQ ID NO: 122224 - RNA, 21 nt, Human
cuaaaauccucucuccaugcu

SEQ ID NO: 122225 - RNA, 21 nt, Human
cuagcuaaaauccucucucca

SEQ ID NO: 122226 - RNA, 18 nt, Human
cuucagauccucccguca

SEQ ID NO: 122227 - RNA, 24 nt, Human
gaacaaccccgaccgcaugcgccc

SEQ ID NO: 122228 - RNA, 20 nt, Human
gagaauuccccccaacucag

SEQ ID NO: 122229 - RNA, 21 nt, Human
gaggagccaguacacgugaug

SEQ ID NO: 122230 - RNA, 19 nt, Human
gccggcgacgcgcgcggag

SEQ ID NO: 122231 - RNA, 20 nt, Human
ggcacucugcagccccaccc

SEQ ID NO: 122232 - RNA, 19 nt, Human
gucacauuaagaaaguaac

SEQ ID NO: 122233 - RNA, 22 nt, Human
uaaagaaagucuccaaagccga

SEQ ID NO: 122234 - RNA, 19 nt, Human
uaaguccauguggcacacu

SEQ ID NO: 122235 - RNA, 20 nt, Human
uaaguccauguggcacacuu

SEQ ID NO: 122236 - RNA, 19 nt, Human
uacccugagguucccagca

SEQ ID NO: 122237 - RNA, 20 nt, Human
uacccugagguucccagcac

SEQ ID NO: 122238 - RNA, 22 nt, Human
ucacgcaacaggcagacaccac

SEQ ID NO: 122239 - RNA, 23 nt, Human
ucauauugcccuuucaacugcag

SEQ ID NO: 122240 - RNA, 19 nt, Human
ucccagcccuagaaauagg

SEQ ID NO: 122241 - RNA, 22 nt, Human
uccuggaagaaaaauggacccu

SEQ ID NO: 122242 - RNA, 22 nt, Human
ucugccgcaacucaagaacugc

SEQ ID NO: 122243 - RNA, 22 nt, Human
ugaagaaucauccgcuacaaga

SEQ ID NO: 122244 - RNA, 19 nt, Human
ugagaggguuuuagaggaa

SEQ ID NO: 122245 - RNA, 23 nt, Human
ugcaagugacaaguuucccaaau

SEQ ID NO: 122246 - RNA, 25 nt, Human
ugcaagugacaaguuucccaaauac

SEQ ID NO: 122247 - RNA, 20 nt, Human
uggaagaaaaauggacccuc

SEQ ID NO: 122248 - RNA, 23 nt, Human
uggcaagcaauacccugagguuc

SEQ ID NO: 122249 - RNA, 25 nt, Human
uggcaagcaauacccugagguuccc

SEQ ID NO: 122250 - RNA, 21 nt, Human
uuaaagaaagucuccaaagcc

SEQ ID NO: 122251 - RNA, 22 nt, Human
uuaagaaaguaacuucauauug

SEQ ID NO: 122252 - RNA, 20 nt, Human
uuacucuuugaccugcggcc

SEQ ID NO: 122253 - RNA, 21 nt, Human
uuagaguacacaucgagucug

SEQ ID NO: 122254 - RNA, 18 nt, Human
cucuguggggagcagggu

SEQ ID NO: 122255 - RNA, 19 nt, Human
uuccauggguuuacugagg

SEQ ID NO: 122256 - RNA, 19 nt, Human
agggguugcccuggaggag

SEQ ID NO: 122257 - RNA, 21 nt, Human
caguaaacaggcugccucucc

SEQ ID NO: 122258 - RNA, 19 nt, Human
cggacccucaacagccucu

SEQ ID NO: 122259 - RNA, 22 nt, Human
cucaacagccucuucuuucucc

SEQ ID NO: 122260 - RNA, 18 nt, Human
cuggaggagggguggggg

SEQ ID NO: 122261 - RNA, 19 nt, Human
gaggaggggugggggcccc

SEQ ID NO: 122262 - RNA, 21 nt, Human
ggaagacagacaugaaugcau

SEQ ID NO: 122263 - RNA, 21 nt, Human
ggugggggccccggccucggc

SEQ ID NO: 122264 - RNA, 19 nt, Human
uacucaaggagucacucag

SEQ ID NO: 122265 - RNA, 21 nt, Human
ucagccccuucugugccagaa

SEQ ID NO: 122266 - RNA, 24 nt, Human
ucuccagggagggcugccauucau

SEQ ID NO: 122267 - RNA, 18 nt, Human
ugagcuggggagggccug

SEQ ID NO: 122268 - RNA, 19 nt, Human
ugagcuggggagggccugu

SEQ ID NO: 122269 - RNA, 18 nt, Human
ugcccuggaggaggggug

SEQ ID NO: 122270 - RNA, 19 nt, Human
ugcuguaggaccaaggggu

SEQ ID NO: 122271 - RNA, 18 nt, Human
uggaggaggggugggggc

SEQ ID NO: 122272 - RNA, 20 nt, Human
uggguugagcuggggagggc

SEQ ID NO: 122273 - RNA, 23 nt, Human
uuuaauggguugagcuggggagg

SEQ ID NO: 122274 - RNA, 18 nt, Human
uuuauuaugcguauucag

SEQ ID NO: 122275 - RNA, 21 nt, Human
uuuuuuuuuuuuuuggaugga

SEQ ID NO: 122276 - RNA, 21 nt, Human
aaauguggaaagcuacuugcu

SEQ ID NO: 122277 - RNA, 25 nt, Human
aacaccgucucuccucugauuucug

SEQ ID NO: 122278 - RNA, 22 nt, Human
acaguaaaagcugguuucuccu

SEQ ID NO: 122279 - RNA, 23 nt, Human
acuacucgggaggcugagguggg

SEQ ID NO: 122280 - RNA, 25 nt, Human
acugcacaccagcccagcgcugcag

SEQ ID NO: 122281 - RNA, 22 nt, Human
agcacaggucucccgcuguucc

SEQ ID NO: 122282 - RNA, 20 nt, Human
aggcaaucuguaaaacuagc

SEQ ID NO: 122283 - RNA, 19 nt, Human
aguagagaucaguggguca

SEQ ID NO: 122284 - RNA, 18 nt, Human
agugggucagaaacaacu

SEQ ID NO: 122285 - RNA, 20 nt, Human
auaaaaugcauuucuacccc

SEQ ID NO: 122286 - RNA, 20 nt, Human
auugcaaacucgauagaugc

SEQ ID NO: 122287 - RNA, 23 nt, Human
cacuacucgggaggcugaggugg

SEQ ID NO: 122288 - RNA, 24 nt, Human
cacuacucgggaggcugagguggg

SEQ ID NO: 122289 - RNA, 19 nt, Human
cacugcacaccagcccagc

SEQ ID NO: 122290 - RNA, 19 nt, Human
cacugcacaccagcccagc

SEQ ID NO: 122291 - RNA, 25 nt, Human
cacugcacaccagcccagcgcugca

SEQ ID NO: 122292 - RNA, 21 nt, Human
ccaauccaguccuucagaccc

SEQ ID NO: 122293 - RNA, 19 nt, Human
ccacugcacaccagcccag

SEQ ID NO: 122294 - RNA, 19 nt, Human
ccacugcacaccagcccag

SEQ ID NO: 122295 - RNA, 20 nt, Human
ccacugcacaccagcccagc

SEQ ID NO: 122296 - RNA, 20 nt, Human
ccagcccagcgcugcagccg

SEQ ID NO: 122297 - RNA, 21 nt, Human
cccccaggacuggcacgacag

SEQ ID NO: 122298 - RNA, 22 nt, Human
cccccaggacuggcacgacagg

SEQ ID NO: 122299 - RNA, 23 nt, Human
ccuagauccacuacucgggaggc

SEQ ID NO: 122300 - RNA, 19 nt, Human
cgagagccugcagcccagc

SEQ ID NO: 122301 - RNA, 21 nt, Human
cgcaccacugcacaccagccc

SEQ ID NO: 122302 - RNA, 24 nt, Human
cgucucugucuugcucccuggaga

SEQ ID NO: 122303 - RNA, 24 nt, Human
cuccaaagggcucccaacaccguc

SEQ ID NO: 122304 - RNA, 20 nt, Human
cucugucuugcucccuggag

SEQ ID NO: 122305 - RNA, 21 nt, Human
cuguaaaacuagcacaggucu

SEQ ID NO: 122306 - RNA, 25 nt, Human
gaaaaaauaaaacuucuauuaaaga

SEQ ID NO: 122307 - RNA, 19 nt, Human
gacccugucugaaacuugu

SEQ ID NO: 122308 - RNA, 18 nt, Human
gagauggauggaucacgg

SEQ ID NO: 122309 - RNA, 21 nt, Human
gauguagccaggacuuggucu

SEQ ID NO: 122310 - RNA, 20 nt, Human
gcaccacugcacaccagccc

SEQ ID NO: 122311 - RNA, 25 nt, Human
gcucccuggagauggauggaucacg

SEQ ID NO: 122312 - RNA, 24 nt, Human
ggagacuggcguucuccaaagggc

SEQ ID NO: 122313 - RNA, 19 nt, Human
ggagauggauggaucacgg

SEQ ID NO: 122314 - RNA, 21 nt, Human
gggaggcugaggugggaacca

SEQ ID NO: 122315 - RNA, 25 nt, Human
gggaggcugaggugggaaccagauc

SEQ ID NO: 122316 - RNA, 23 nt, Human
gucucugucuugcucccuggaga

SEQ ID NO: 122317 - RNA, 19 nt, Human
uaaaacuagcacaggucuc

SEQ ID NO: 122318 - RNA, 20 nt, Human
uaguagagaucaguggguca

SEQ ID NO: 122319 - RNA, 20 nt, Human
ucccaacaccgucucuccuc

SEQ ID NO: 122320 - RNA, 23 nt, Human
uccuuggaagacaggucugaugu

SEQ ID NO: 122321 - RNA, 18 nt, Human
uccuugugguaguagaga

SEQ ID NO: 122322 - RNA, 18 nt, Human
ucugugacaaauguggaa

SEQ ID NO: 122323 - RNA, 20 nt, Human
ucuugcucccuggagaugga

SEQ ID NO: 122324 - RNA, 27 nt, Human
ugacauugcaaacucgauagaugcaac

SEQ ID NO: 122325 - RNA, 21 nt, Human
ugcacgaaaaaauaaaacuuc

SEQ ID NO: 122326 - RNA, 21 nt, Human
ugcagccgagagccugcagcc

SEQ ID NO: 122327 - RNA, 30 nt, Human
uggagauggauggaucacggagggggccaa

SEQ ID NO: 122328 - RNA, 22 nt, Human
uggauggaucacggagggggcc

SEQ ID NO: 122329 - RNA, 18 nt, Human
uggccugucugcacugua

SEQ ID NO: 122330 - RNA, 21 nt, Human
ugggauguagccaggacuugg

SEQ ID NO: 122331 - RNA, 22 nt, Human
ugggucagaaacaacuccugac

SEQ ID NO: 122332 - RNA, 23 nt, Human
uggucuccuuggaagacaggucu

SEQ ID NO: 122333 - RNA, 21 nt, Human
uguagccaggacuuggucucc

SEQ ID NO: 122334 - RNA, 20 nt, Human
uguuccacuggcucacccac

SEQ ID NO: 122335 - RNA, 23 nt, Human
uuaaagaauaaaaugcauuucua

SEQ ID NO: 122336 - RNA, 22 nt, Human
aaaauggccaguggccgauuga

SEQ ID NO: 122337 - RNA, 25 nt, Human
accaauuccccuuuacaacugaugc

SEQ ID NO: 122338 - RNA, 21 nt, Human
agaaaauucccacuuaauuga

SEQ ID NO: 122339 - RNA, 18 nt, Human
agcaucuauuuuaaaagu

SEQ ID NO: 122340 - RNA, 20 nt, Human
augaaauacuggaaggcaua

SEQ ID NO: 122341 - RNA, 24 nt, Human
ccaauuccccuuuacaacugaugc

SEQ ID NO: 122342 - RNA, 19 nt, Human
ccagaaaauucccacuuaa

SEQ ID NO: 122343 - RNA, 24 nt, Human
cugagauugcugcugaaagucuac

SEQ ID NO: 122344 - RNA, 19 nt, Human
uaagggcaguuuuaauucu

SEQ ID NO: 122345 - RNA, 22 nt, Human
uagaaaaaaauggccaguggcc

SEQ ID NO: 122346 - RNA, 25 nt, Human
uauuuuuaaaacuuuauuuuaaaaa

SEQ ID NO: 122347 - RNA, 25 nt, Human
ucuacagucugugaauauaccaauu

SEQ ID NO: 122348 - RNA, 22 nt, Human
ugaccaucuuccagaaaauucc

SEQ ID NO: 122349 - RNA, 23 nt, Human
ugagcaucuauuuuaaaaguuuu

SEQ ID NO: 122350 - RNA, 21 nt, Human
uggccaguggccgauugaaag

SEQ ID NO: 122351 - RNA, 23 nt, Human
uugaaagguauauuaaaauuaag

SEQ ID NO: 122352 - RNA, 24 nt, Human
uugaaagguauauuaaaauuaagg

SEQ ID NO: 122353 - RNA, 23 nt, Human
uugauuuuaaaaaauauagcaug

SEQ ID NO: 122354 - RNA, 22 nt, Human
uuucuugugauugguacaauuu

SEQ ID NO: 122355 - RNA, 20 nt, Human
uuuguaagcuucugagauug

SEQ ID NO: 122356 - RNA, 21 nt, Human
uuuguaagcuucugagauugc

SEQ ID NO: 122357 - RNA, 22 nt, Human
uuuguaagcuucugagauugcu

SEQ ID NO: 122358 - RNA, 20 nt, Human
aaaacagcaagucgggcuug

SEQ ID NO: 122359 - RNA, 19 nt, Human
aaccacagaacaaaacagc

SEQ ID NO: 122360 - RNA, 22 nt, Human
accagcccccaaucccaacccc

SEQ ID NO: 122361 - RNA, 22 nt, Human
accccaccuccaggccaauaca

SEQ ID NO: 122362 - RNA, 22 nt, Human
acuguauuuccaugucagcugg

SEQ ID NO: 122363 - RNA, 22 nt, Human
agcccagcugggcccaagcugg

SEQ ID NO: 122364 - RNA, 19 nt, Human
agcuggggcucucagccgc

SEQ ID NO: 122365 - RNA, 24 nt, Human
aggcaggcagcauuucugaaccca

SEQ ID NO: 122366 - RNA, 18 nt, Human
agggagggcccgggagga

SEQ ID NO: 122367 - RNA, 18 nt, Human
aggggaggacaacagagg

SEQ ID NO: 122368 - RNA, 22 nt, Human
augaagggagccccaggauaca

SEQ ID NO: 122369 - RNA, 23 nt, Human
caacaagguggguuuuguccccu

SEQ ID NO: 122370 - RNA, 26 nt, Human
caaucccaaccccaccuccaggccaa

SEQ ID NO: 122371 - RNA, 20 nt, Human
cagaacaaaacagcaagucg

SEQ ID NO: 122372 - RNA, 21 nt, Human
cagagcccagcugggcccaag

SEQ ID NO: 122373 - RNA, 22 nt, Human
cagcaccacccugcaggcucca

SEQ ID NO: 122374 - RNA, 24 nt, Human
cagcaccacccugcaggcuccaac

SEQ ID NO: 122375 - RNA, 24 nt, Human
cagcaccacccugcaggcuccaac

SEQ ID NO: 122376 - RNA, 20 nt, Human
cagcccccaaucccaacccc

SEQ ID NO: 122377 - RNA, 23 nt, Human
cagcucuacccccaccaaacaga

SEQ ID NO: 122378 - RNA, 21 nt, Human
caggcagggcagguuuccaag

SEQ ID NO: 122379 - RNA, 26 nt, Human
caggcuccaacaagguggguuucuua

SEQ ID NO: 122380 - RNA, 26 nt, Human
ccaaccccaccuccaggccaauacau

SEQ ID NO: 122381 - RNA, 24 nt, Human
ccagcaccacccugcaggcuccaa

SEQ ID NO: 122382 - RNA, 19 nt, Human
ccagcccccaaucccaacc

SEQ ID NO: 122383 - RNA, 21 nt, Human
ccagcgggcgcugguagggcc

SEQ ID NO: 122384 - RNA, 20 nt, Human
ccagcucauccucaggccuc

SEQ ID NO: 122385 - RNA, 22 nt, Human
ccagggaggggaaaaccacaga

SEQ ID NO: 122386 - RNA, 27 nt, Human
cccaaucccaaccccaccuccaggcca

SEQ ID NO: 122387 - RNA, 27 nt, Human
cccccaaucccaaccccaccuccaggc

SEQ ID NO: 122388 - RNA, 19 nt, Human
ccccugggacuggcucagu

SEQ ID NO: 122389 - RNA, 21 nt, Human
ccccugggacuggcucagucc

SEQ ID NO: 122390 - RNA, 24 nt, Human
ccccugggacuggcucagucccag

SEQ ID NO: 122391 - RNA, 23 nt, Human
cccucaggcagggcagguuucca

SEQ ID NO: 122392 - RNA, 20 nt, Human
ccgcccaaggggaggacaac

SEQ ID NO: 122393 - RNA, 21 nt, Human
ccucaggccucuagcggccuc

SEQ ID NO: 122394 - RNA, 20 nt, Human
ccugcaggcuccaacaaggu

SEQ ID NO: 122395 - RNA, 23 nt, Human
ccugcaggcuccaacaagguggg

SEQ ID NO: 122396 - RNA, 25 nt, Human
ccugcaggcuccaacaagguggguu

SEQ ID NO: 122397 - RNA, 18 nt, Human
ccuggugugggguagggg

SEQ ID NO: 122398 - RNA, 19 nt, Human
cgcccaggacagugggcgg

SEQ ID NO: 122399 - RNA, 19 nt, Human
cucuagcggccucauccuc

SEQ ID NO: 122400 - RNA, 20 nt, Human
cuguuucugugcuggcgcgc

SEQ ID NO: 122401 - RNA, 26 nt, Human
gacaacagaggucagcugcagaggaa

SEQ ID NO: 122402 - RNA, 19 nt, Human
gaggacggccugguguggg

SEQ ID NO: 122403 - RNA, 19 nt, Human
gccgcugggccaggggccc

SEQ ID NO: 122404 - RNA, 23 nt, Human
gcgcugguagggccggggagggg

SEQ ID NO: 122405 - RNA, 19 nt, Human
gcgggcgcugguagggccg

SEQ ID NO: 122406 - RNA, 20 nt, Human
gcucagucccagcaccaccc

SEQ ID NO: 122407 - RNA, 23 nt, Human
ggaaggcuggcaccagccccagu

SEQ ID NO: 122408 - RNA, 18 nt, Human
ggacagugggcgggcgag

SEQ ID NO: 122409 - RNA, 22 nt, Human
ggaggacaacagaggucagcug

SEQ ID NO: 122410 - RNA, 22 nt, Human
ggaucagcucuacccccaccaa

SEQ ID NO: 122411 - RNA, 18 nt, Human
ggcccgggacacugaaca

SEQ ID NO: 122412 - RNA, 20 nt, Human
ggcggccgggucggagaggg

SEQ ID NO: 122413 - RNA, 18 nt, Human
gggaggccggaggccaac

SEQ ID NO: 122414 - RNA, 20 nt, Human
gggcccgggacacugaacag

SEQ ID NO: 122415 - RNA, 19 nt, Human
gguggcagagcccagcugg

SEQ ID NO: 122416 - RNA, 26 nt, Human
uagggccggggaggggacucccugga

SEQ ID NO: 122417 - RNA, 21 nt, Human
ucagcuggggcucucagccgc

SEQ ID NO: 122418 - RNA, 22 nt, Human
uccaagggagggcccgggagga

SEQ ID NO: 122419 - RNA, 19 nt, Human
uccaaugcacgaaacagau

SEQ ID NO: 122420 - RNA, 18 nt, Human
ucgccgaggccgugcgcu

SEQ ID NO: 122421 - RNA, 21 nt, Human
ucuacccccaccaaacagaug

SEQ ID NO: 122422 - RNA, 20 nt, Human
ugcacgaaacagaucugugc

SEQ ID NO: 122423 - RNA, 22 nt, Human
ugcacgaaacagaucugugcuc

SEQ ID NO: 122424 - RNA, 25 nt, Human
uggcaccagcccccaaucccaaccc

SEQ ID NO: 122425 - RNA, 18 nt, Human
uggcagagcccagcuggg

SEQ ID NO: 122426 - RNA, 23 nt, Human
ugggacuggcucagucccagcac

SEQ ID NO: 122427 - RNA, 18 nt, Human
ugggaggggccgcugggc

SEQ ID NO: 122428 - RNA, 21 nt, Human
ugggccaggggccuccugcuc

SEQ ID NO: 122429 - RNA, 22 nt, Human
ugggcgggcgagugugugggug

SEQ ID NO: 122430 - RNA, 21 nt, Human
ugggguaggggcucagcccag

SEQ ID NO: 122431 - RNA, 18 nt, Human
uggguuuuguccccucuc

SEQ ID NO: 122432 - RNA, 20 nt, Human
ugugugggaggggccgcugg

SEQ ID NO: 122433 - RNA, 24 nt, Human
ugugugggugugugugggaggggc

SEQ ID NO: 122434 - RNA, 20 nt, Human
uuuguccccucucacuccuu

SEQ ID NO: 122435 - RNA, 23 nt, Human
uuuuuuuuuuuugaggggaggcc

SEQ ID NO: 122436 - RNA, 19 nt, Human
uuuuuuuuuuuuugagggg

SEQ ID NO: 122437 - RNA, 22 nt, Human
uuuuuuuuuuuuuuuuugaggg

SEQ ID NO: 122438 - RNA, 22 nt, Human
aagauaccacccuucaccccga

SEQ ID NO: 122439 - RNA, 21 nt, Human
aagcgggggcagaacagagcu

SEQ ID NO: 122440 - RNA, 23 nt, Human
acccaacagacgcuccaccgacc

SEQ ID NO: 122441 - RNA, 20 nt, Human
accccgacauccuccuaagc

SEQ ID NO: 122442 - RNA, 19 nt, Human
caacugccaagauaccacc

SEQ ID NO: 122443 - RNA, 25 nt, Human
caagauaccacccuucaccccgaca

SEQ ID NO: 122444 - RNA, 24 nt, Human
caccaggucccgagcugggggccc

SEQ ID NO: 122445 - RNA, 21 nt, Human
cacccuucaccccgacauccu

SEQ ID NO: 122446 - RNA, 26 nt, Human
cagaaaauuuucuuccugcucauuac

SEQ ID NO: 122447 - RNA, 20 nt, Human
caggggcugugccccagccc

SEQ ID NO: 122448 - RNA, 18 nt, Human
cagggugggaauggggug

SEQ ID NO: 122449 - RNA, 18 nt, Human
caggucccgagcuggggg

SEQ ID NO: 122450 - RNA, 22 nt, Human
caggucccgagcugggggcccc

SEQ ID NO: 122451 - RNA, 25 nt, Human
ccacccuucaccccgacauccuccu

SEQ ID NO: 122452 - RNA, 19 nt, Human
ccccgacauccuccuaagc

SEQ ID NO: 122453 - RNA, 19 nt, Human
cccuaaauccaagggaacc

SEQ ID NO: 122454 - RNA, 23 nt, Human
cuaccacaauucaacaaaggugc

SEQ ID NO: 122455 - RNA, 23 nt, Human
cucauuacccaagcccagaguuc

SEQ ID NO: 122456 - RNA, 24 nt, Human
cugccaagauaccacccuucaccc

SEQ ID NO: 122457 - RNA, 22 nt, Human
cuuuauugcuguuagaaaaggg

SEQ ID NO: 122458 - RNA, 19 nt, Human
gacauccuccuaagcuacc

SEQ ID NO: 122459 - RNA, 24 nt, Human
gagcccgcggccagcggggccuga

SEQ ID NO: 122460 - RNA, 21 nt, Human
gcccagaguucuugccccagc

SEQ ID NO: 122461 - RNA, 18 nt, Human
gcggcccggacccaacag

SEQ ID NO: 122462 - RNA, 22 nt, Human
gcuucaacugccaagauaccac

SEQ ID NO: 122463 - RNA, 22 nt, Human
ggcagaacagagcugggcuuaa

SEQ ID NO: 122464 - RNA, 19 nt, Human
gggaauggggugcagggaa

SEQ ID NO: 122465 - RNA, 20 nt, Human
gggcgaagccggcggcccgg

SEQ ID NO: 122466 - RNA, 24 nt, Human
ggggaggggccuggacacauguca

SEQ ID NO: 122467 - RNA, 19 nt, Human
ggggcagaacagagcuggg

SEQ ID NO: 122468 - RNA, 24 nt, Human
ggggugcagggaagcaggggcugu

SEQ ID NO: 122469 - RNA, 24 nt, Human
ggugcaggugcagaacuucagggu

SEQ ID NO: 122470 - RNA, 21 nt, Human
uaaauccaagggaaccagaaa

SEQ ID NO: 122471 - RNA, 18 nt, Human
uaagaucagaaaauuuuc

SEQ ID NO: 122472 - RNA, 22 nt, Human
uacccagugccuuucccucugc

SEQ ID NO: 122473 - RNA, 18 nt, Human
uauugcuguuagaaaagg

SEQ ID NO: 122474 - RNA, 23 nt, Human
ucaaacagaggaaagcgggggca

SEQ ID NO: 122475 - RNA, 19 nt, Human
ucagaaaauuuucuuccug

SEQ ID NO: 122476 - RNA, 19 nt, Human
ucaggcuggggcagcagcc

SEQ ID NO: 122477 - RNA, 18 nt, Human
ucccucugccagcuguac

SEQ ID NO: 122478 - RNA, 19 nt, Human
uccuaagcuaccacaauuc

SEQ ID NO: 122479 - RNA, 19 nt, Human
ucuugccccagcuucaacu

SEQ ID NO: 122480 - RNA, 23 nt, Human
ugagguacccagugccuuucccu

SEQ ID NO: 122481 - RNA, 21 nt, Human
ugcagaacuucagggugggaa

SEQ ID NO: 122482 - RNA, 19 nt, Human
ugggaauggggugcaggga

SEQ ID NO: 122483 - RNA, 19 nt, Human
ugucaggcuggggcagcag

SEQ ID NO: 122484 - RNA, 27 nt, Human
uguuagaaaagggugguuacaaguuuc

SEQ ID NO: 122485 - RNA, 21 nt, Human
uucagggugggaauggggugc

SEQ ID NO: 122486 - RNA, 20 nt, Human
guggagcuggccuguguccc

SEQ ID NO: 122487 - RNA, 21 nt, Human
uuaaggcucuggcaacacugu

SEQ ID NO: 122488 - RNA, 21 nt, Human
acagaaaagacagucccugga

SEQ ID NO: 122489 - RNA, 28 nt, Human
agcagcgcuggcggcuuggcucuugcgc

SEQ ID NO: 122490 - RNA, 23 nt, Human
aggugagggcagaauguuggggg

SEQ ID NO: 122491 - RNA, 22 nt, Human
aucuccccacaacuuccuccag

SEQ ID NO: 122492 - RNA, 21 nt, Human
cacucaauguuuauugaacag

SEQ ID NO: 122493 - RNA, 18 nt, Human
cccaggcccaggcugccc

SEQ ID NO: 122494 - RNA, 23 nt, Human
cccguuccucuccuucuccgcca

SEQ ID NO: 122495 - RNA, 19 nt, Human
cgccagucugcgcugcggc

SEQ ID NO: 122496 - RNA, 25 nt, Human
cgccagucugcgcugcggcugccac

SEQ ID NO: 122497 - RNA, 19 nt, Human
cuccccacaacuuccucca

SEQ ID NO: 122498 - RNA, 19 nt, Human
cugcccguuccucuccuuc

SEQ ID NO: 122499 - RNA, 24 nt, Human
gaaggacacuaaggcacauggcug

SEQ ID NO: 122500 - RNA, 21 nt, Human
gcucaugguggaacuccuccu

SEQ ID NO: 122501 - RNA, 21 nt, Human
guggaaaguagcccuucugga

SEQ ID NO: 122502 - RNA, 19 nt, Human
uaagaaggacacuaaggca

SEQ ID NO: 122503 - RNA, 23 nt, Human
uccaggcugggcacagaggugag

SEQ ID NO: 122504 - RNA, 20 nt, Human
ucccaguggaucuccccaca

SEQ ID NO: 122505 - RNA, 18 nt, Human
uccucuccuucuccgcca

SEQ ID NO: 122506 - RNA, 20 nt, Human
uccuugucuguagguuucca

SEQ ID NO: 122507 - RNA, 21 nt, Human
ucugcgcugcggcugccacgg

SEQ ID NO: 122508 - RNA, 24 nt, Human
ugagggcagaauguuggggguccc

SEQ ID NO: 122509 - RNA, 26 nt, Human
ugagggcagaauguuggggguccuga

SEQ ID NO: 122510 - RNA, 27 nt, Human
ugagggcagaauguuggggguccugaa

SEQ ID NO: 122511 - RNA, 22 nt, Human
uggaaaguagcccuucuggaca

SEQ ID NO: 122512 - RNA, 24 nt, Human
uggaaaguagcccuucuggacaga

SEQ ID NO: 122513 - RNA, 20 nt, Human
aaacuuguaccaaagacuua

SEQ ID NO: 122514 - RNA, 23 nt, Human
aaacuuguaccaaagacuuauga

SEQ ID NO: 122515 - RNA, 18 nt, Human
aaucacauuucuuuuuau

SEQ ID NO: 122516 - RNA, 19 nt, Human
aauggaagagcaggaugga

SEQ ID NO: 122517 - RNA, 24 nt, Human
acaaaucacauuucuuuuuaucau

SEQ ID NO: 122518 - RNA, 28 nt, Human
acacagcugucagggaaaggggaacgcc

SEQ ID NO: 122519 - RNA, 19 nt, Human
accuugaggauauagaagg

SEQ ID NO: 122520 - RNA, 20 nt, Human
cagcaucagcccugggacaa

SEQ ID NO: 122521 - RNA, 24 nt, Human
gaagagcaggauggauuuggcugg

SEQ ID NO: 122522 - RNA, 19 nt, Human
gauaaauacuuuauuucaa

SEQ ID NO: 122523 - RNA, 20 nt, Human
gaucauuugaagcacaaaca

SEQ ID NO: 122524 - RNA, 19 nt, Human
guaaacuuguaccaaagac

SEQ ID NO: 122525 - RNA, 21 nt, Human
uaccuguacagcaucagcccu

SEQ ID NO: 122526 - RNA, 18 nt, Human
uaccuugaggauauagaa

SEQ ID NO: 122527 - RNA, 19 nt, Human
uaccuugaggauauagaag

SEQ ID NO: 122528 - RNA, 21 nt, Human
uaggaaggaucauuugaagca

SEQ ID NO: 122529 - RNA, 24 nt, Human
uagggugcuuaaagcuaacuaguc

SEQ ID NO: 122530 - RNA, 22 nt, Human
ucacaucucuuagccuaagagu

SEQ ID NO: 122531 - RNA, 22 nt, Human
ucaguaucaccacaucugcuuc

SEQ ID NO: 122532 - RNA, 19 nt, Human
ucauuugaagcacaaacaa

SEQ ID NO: 122533 - RNA, 19 nt, Human
ugaauagauuuaugaauuu

SEQ ID NO: 122534 - RNA, 22 nt, Human
uggaagaaauggaagagcagga

SEQ ID NO: 122535 - RNA, 22 nt, Human
uuggcagugggauauggaaucc

SEQ ID NO: 122536 - RNA, 21 nt, Human
uuucaaaagugcaaagaaggg

SEQ ID NO: 122537 - RNA, 30 nt, Human
aaacgaaaaugcaaagucaguaagugaauc

SEQ ID NO: 122538 - RNA, 22 nt, Human
aacugcccuccccggcuucccc

SEQ ID NO: 122539 - RNA, 22 nt, Human
accgcguccucucuuccagucc

SEQ ID NO: 122540 - RNA, 23 nt, Human
accgcguccucucuuccaguccc

SEQ ID NO: 122541 - RNA, 21 nt, Human
augcgccauccccagucaagu

SEQ ID NO: 122542 - RNA, 23 nt, Human
caacugcccuccccggcuucccc

SEQ ID NO: 122543 - RNA, 23 nt, Human
cacagaauucaaaucacacucgg

SEQ ID NO: 122544 - RNA, 20 nt, Human
caccucaaggccagcagagu

SEQ ID NO: 122545 - RNA, 22 nt, Human
ccagcagaguucgggguagacg

SEQ ID NO: 122546 - RNA, 31 nt, Human
ccaugcaugcgccauccccagucaaguccuu

SEQ ID NO: 122547 - RNA, 21 nt, Human
cccaugcaugcgccaucccca

SEQ ID NO: 122548 - RNA, 21 nt, Human
cgcgggguccucaacugcccu

SEQ ID NO: 122549 - RNA, 20 nt, Human
cuggccggcggcgcuuuccu

SEQ ID NO: 122550 - RNA, 21 nt, Human
cugguagacugaagaugaauu

SEQ ID NO: 122551 - RNA, 24 nt, Human
cuuccccaccucaaggccagcaga

SEQ ID NO: 122552 - RNA, 19 nt, Human
gcccuccccggcuucccca

SEQ ID NO: 122553 - RNA, 22 nt, Human
gcgggggcugguagacugaaga

SEQ ID NO: 122554 - RNA, 24 nt, Human
uaucacagaauucaaaucacacuc

SEQ ID NO: 122555 - RNA, 23 nt, Human
ucaacugcccuccccggcuuccc

SEQ ID NO: 122556 - RNA, 25 nt, Human
ucaacugcccuccccggcuucccca

SEQ ID NO: 122557 - RNA, 22 nt, Human
ucaguaagugaaucaauaauau

SEQ ID NO: 122558 - RNA, 26 nt, Human
uccucccaugcaugcgccauccccag

SEQ ID NO: 122559 - RNA, 21 nt, Human
uccugcugcggucguagcugc

SEQ ID NO: 122560 - RNA, 20 nt, Human
ugaagaugaauuccucccau

SEQ ID NO: 122561 - RNA, 20 nt, Human
uguccggccacagcugggcc

SEQ ID NO: 122562 - RNA, 22 nt, Human
uuaaaauagagguaacauuuac

SEQ ID NO: 122563 - RNA, 22 nt, Human
uuauagcaguaauuaaaauaga

SEQ ID NO: 122564 - RNA, 18 nt, Human
aacuuggauccucaauga

SEQ ID NO: 122565 - RNA, 20 nt, Human
acaucuuuuuaaaaaaugaa

SEQ ID NO: 122566 - RNA, 18 nt, Human
auaaaauuuccccagaca

SEQ ID NO: 122567 - RNA, 21 nt, Human
caaacaagccucugagauuac

SEQ ID NO: 122568 - RNA, 22 nt, Human
cagaauuaaaaucucaacuugg

SEQ ID NO: 122569 - RNA, 19 nt, Human
cagcaaacaagccucugag

SEQ ID NO: 122570 - RNA, 25 nt, Human
caggcacccucagcaaacaagccuc

SEQ ID NO: 122571 - RNA, 18 nt, Human
cccucagcaaacaagccu

SEQ ID NO: 122572 - RNA, 21 nt, Human
cccucagcaaacaagccucug

SEQ ID NO: 122573 - RNA, 19 nt, Human
ccucaaugauucaacuggu

SEQ ID NO: 122574 - RNA, 18 nt, Human
ccucugagauuacagccg

SEQ ID NO: 122575 - RNA, 18 nt, Human
cuguccuuaaguccuucc

SEQ ID NO: 122576 - RNA, 26 nt, Human
uaaaaaugucacagaauuaaaaucuc

SEQ ID NO: 122577 - RNA, 19 nt, Human
uagugguaacauuuuaccc

SEQ ID NO: 122578 - RNA, 24 nt, Human
uccucaaugauucaacugguuuau

SEQ ID NO: 122579 - RNA, 21 nt, Human
ucgcacgugcgcaggcacccu

SEQ ID NO: 122580 - RNA, 19 nt, Human
ugucacagaauuaaaaucu

SEQ ID NO: 122581 - RNA, 21 nt, Human
uuaaaaucucaacuuggaucc

SEQ ID NO: 122582 - RNA, 25 nt, Human
uuaaaguagugguaacauuuuaccc

SEQ ID NO: 122583 - RNA, 18 nt, Human
uuggucaguuucaagaua

SEQ ID NO: 122584 - RNA, 24 nt, Human
aaggaaucucgugccucagccucc

SEQ ID NO: 122585 - RNA, 19 nt, Human
aaguacugggauuacaggc

SEQ ID NO: 122586 - RNA, 22 nt, Human
aaguacugggauuacaggcgug

SEQ ID NO: 122587 - RNA, 23 nt, Human
aaguacugggauuacaggcguga

SEQ ID NO: 122588 - RNA, 26 nt, Human
aaguacugggauuacaggcgugagcc

SEQ ID NO: 122589 - RNA, 22 nt, Human
aaguagcugggauuacaggcau

SEQ ID NO: 122590 - RNA, 24 nt, Human
aaguagcugggauuacaggcaugc

SEQ ID NO: 122591 - RNA, 24 nt, Human
aauaaaacaauaagcaauuacaga

SEQ ID NO: 122592 - RNA, 21 nt, Human
acauuaaucaugacacaauua

SEQ ID NO: 122593 - RNA, 18 nt, Human
acucugucauccaggcug

SEQ ID NO: 122594 - RNA, 25 nt, Human
acucugucauccaggcuggaguaca

SEQ ID NO: 122595 - RNA, 18 nt, Human
acuuagcaaacuuuaucc

SEQ ID NO: 122596 - RNA, 19 nt, Human
aggaaucucgugccucagc

SEQ ID NO: 122597 - RNA, 23 nt, Human
aggcaugcaccaccgugcucggc

SEQ ID NO: 122598 - RNA, 23 nt, Human
aggcgugagccaccgugcccggc

SEQ ID NO: 122599 - RNA, 23 nt, Human
aggggucuuaaaagacaaagagu

SEQ ID NO: 122600 - RNA, 19 nt, Human
aguacaguggugugaucuc

SEQ ID NO: 122601 - RNA, 21 nt, Human
aguacaguggugugaucucag

SEQ ID NO: 122602 - RNA, 22 nt, Human
aguagagaugggguuucaccau

SEQ ID NO: 122603 - RNA, 21 nt, Human
aguauacaauaaaacaauaag

SEQ ID NO: 122604 - RNA, 19 nt, Human
aguggugugaucucagcuc

SEQ ID NO: 122605 - RNA, 24 nt, Human
auccaggcuggaguacaguggugu

SEQ ID NO: 122606 - RNA, 18 nt, Human
augggguuucaccauguu

SEQ ID NO: 122607 - RNA, 28 nt, Human
caaagaguauacaauaaaaccggggccc

SEQ ID NO: 122608 - RNA, 18 nt, Human
caacauagccucaaccuc

SEQ ID NO: 122609 - RNA, 18 nt, Human
caccauguuagccaggcu

SEQ ID NO: 122610 - RNA, 22 nt, Human
caccauguuagccaggcugcuc

SEQ ID NO: 122611 - RNA, 31 nt, Human
caccauguuagccaggcugcucuuuaacucc

SEQ ID NO: 122612 - RNA, 22 nt, Human
cacucugucauccaggcuggag

SEQ ID NO: 122613 - RNA, 23 nt, Human
cacucugucauccaggcuggagu

SEQ ID NO: 122614 - RNA, 33 nt, Human
cauguuagccaggcugcucuuuaacuccuggag

SEQ ID NO: 122615 - RNA, 19 nt, Human
ccaaguacugggauuacag

SEQ ID NO: 122616 - RNA, 21 nt, Human
ccaaguacugggauuacaggc

SEQ ID NO: 122617 - RNA, 23 nt, Human
ccaaguacugggauuacaggcgu

SEQ ID NO: 122618 - RNA, 23 nt, Human
ccaaguagcugggauuacaggca

SEQ ID NO: 122619 - RNA, 24 nt, Human
ccaaguagcugggauuacaggcau

SEQ ID NO: 122620 - RNA, 22 nt, Human
ccacucugucauccaggcugga

SEQ ID NO: 122621 - RNA, 24 nt, Human
ccacucugucauccaggcuggagu

SEQ ID NO: 122622 - RNA, 18 nt, Human
cccaaguacugggauuac

SEQ ID NO: 122623 - RNA, 22 nt, Human
cccaaguacugggauuacaggc

SEQ ID NO: 122624 - RNA, 24 nt, Human
cccaaguacugggauuacaggcgu

SEQ ID NO: 122625 - RNA, 23 nt, Human
cccaaguagcugggauuacaggc

SEQ ID NO: 122626 - RNA, 24 nt, Human
cccaaguagcugggauuacaggca

SEQ ID NO: 122627 - RNA, 23 nt, Human
ccggccucaaacuauauuuucua

SEQ ID NO: 122628 - RNA, 18 nt, Human
ccucaaccucuuggguuc

SEQ ID NO: 122629 - RNA, 18 nt, Human
ccucccaaguacugggau

SEQ ID NO: 122630 - RNA, 24 nt, Human
ccuggccucaaguugauaugccug

SEQ ID NO: 122631 - RNA, 24 nt, Human
cucagccucccaaguagcugggau

SEQ ID NO: 122632 - RNA, 22 nt, Human
cucagcucaacauagccucaac

SEQ ID NO: 122633 - RNA, 24 nt, Human
cuccacucugucauccaggcugga

SEQ ID NO: 122634 - RNA, 25 nt, Human
cucgugccucagccucccaaguagc

SEQ ID NO: 122635 - RNA, 20 nt, Human
cugccuuggccucccaagua

SEQ ID NO: 122636 - RNA, 24 nt, Human
cuggaguacaguggugugaucuca

SEQ ID NO: 122637 - RNA, 18 nt, Human
gagaugggguuucaccau

SEQ ID NO: 122638 - RNA, 24 nt, Human
gagaugggguuucaccauguuagc

SEQ ID NO: 122639 - RNA, 24 nt, Human
gauuacaggcaugcaccaccgugc

SEQ ID NO: 122640 - RNA, 18 nt, Human
gauuacaggcgugagcca

SEQ ID NO: 122641 - RNA, 20 nt, Human
gauuacaggcgugagccacc

SEQ ID NO: 122642 - RNA, 21 nt, Human
gauuacaggcgugagccaccg

SEQ ID NO: 122643 - RNA, 24 nt, Human
ggauuacaggcaugcaccaccgug

SEQ ID NO: 122644 - RNA, 25 nt, Human
ggccucaaguugauaugccugccuu

SEQ ID NO: 122645 - RNA, 22 nt, Human
ggcuggaguacaguggugugau

SEQ ID NO: 122646 - RNA, 18 nt, Human
gggguuucaccauguuag

SEQ ID NO: 122647 - RNA, 22 nt, Human
gggguuucaccauguuagccag

SEQ ID NO: 122648 - RNA, 22 nt, Human
ggguuucaccauguuagccagg

SEQ ID NO: 122649 - RNA, 23 nt, Human
guagagaugggguuucaccaugu

SEQ ID NO: 122650 - RNA, 22 nt, Human
gugccucagccucccaaguagc

SEQ ID NO: 122651 - RNA, 23 nt, Human
gugccucagccucccaaguagcu

SEQ ID NO: 122652 - RNA, 25 nt, Human
uaaaacaauaagcaauuaacuaaca

SEQ ID NO: 122653 - RNA, 25 nt, Human
uaaauacacauuaaucaugacacaa

SEQ ID NO: 122654 - RNA, 19 nt, Human
uaaguuaagagaaagugcu

SEQ ID NO: 122655 - RNA, 21 nt, Human
uaaucaugacacaauuauuuc

SEQ ID NO: 122656 - RNA, 24 nt, Human
uaauuuuuuguauuuuuaguagag

SEQ ID NO: 122657 - RNA, 25 nt, Human
uaauuuuuuguauuuuuaguagaga

SEQ ID NO: 122658 - RNA, 23 nt, Human
uacaggcgugagccaccgugccc

SEQ ID NO: 122659 - RNA, 22 nt, Human
uacaguggugugaucucagcuc

SEQ ID NO: 122660 - RNA, 24 nt, Human
uacugggauuacaggcgugagcca

SEQ ID NO: 122661 - RNA, 22 nt, Human
uagagaugggguuucaccaugu

SEQ ID NO: 122662 - RNA, 23 nt, Human
uagcaaacuuuauccugagauuu

SEQ ID NO: 122663 - RNA, 20 nt, Human
uagccucaaccucuuggguu

SEQ ID NO: 122664 - RNA, 24 nt, Human
uaguagagaugggguuucaccaug

SEQ ID NO: 122665 - RNA, 26 nt, Human
uaguagagaugggguuucaccauguu

SEQ ID NO: 122666 - RNA, 18 nt, Human
uagugggcucucuucuaa

SEQ ID NO: 122667 - RNA, 24 nt, Human
uauacaauaaaacaauaagcaauu

SEQ ID NO: 122668 - RNA, 23 nt, Human
ucaacauagccucaaccucuugg

SEQ ID NO: 122669 - RNA, 20 nt, Human
ucagccucccaaguagcugg

SEQ ID NO: 122670 - RNA, 23 nt, Human
uccacucugucauccaggcugga

SEQ ID NO: 122671 - RNA, 23 nt, Human
ucccaaguacugggauuacaggc

SEQ ID NO: 122672 - RNA, 24 nt, Human
ucccaaguacugggauuacaggcg

SEQ ID NO: 122673 - RNA, 24 nt, Human
ucccaaguagcugggauuacaggc

SEQ ID NO: 122674 - RNA, 18 nt, Human
ucugucauccaggcugga

SEQ ID NO: 122675 - RNA, 20 nt, Human
ucuguuuuuuugaaacagag

SEQ ID NO: 122676 - RNA, 19 nt, Human
ugaaacagagucuccacuc

SEQ ID NO: 122677 - RNA, 23 nt, Human
ugaaauggcagauuuauuaagua

SEQ ID NO: 122678 - RNA, 24 nt, Human
ugccucagccucccaaguagcugg

SEQ ID NO: 122679 - RNA, 18 nt, Human
ugccugccuuggccuccc

SEQ ID NO: 122680 - RNA, 19 nt, Human
uggaguacaguggugugau

SEQ ID NO: 122681 - RNA, 19 nt, Human
uggaguacaguggugugau

SEQ ID NO: 122682 - RNA, 28 nt, Human
uggaguacaguggugugauggcucuagc

SEQ ID NO: 122683 - RNA, 21 nt, Human
uggccucaaguugauaugccu

SEQ ID NO: 122684 - RNA, 21 nt, Human
ugggauuacaggcaugcacca

SEQ ID NO: 122685 - RNA, 24 nt, Human
ugggauuacaggcaugcaccaccg

SEQ ID NO: 122686 - RNA, 18 nt, Human
ugggauuacaggcgugag

SEQ ID NO: 122687 - RNA, 21 nt, Human
ugggauuacaggcgugagcca

SEQ ID NO: 122688 - RNA, 22 nt, Human
ugggauuacaggcgugagccac

SEQ ID NO: 122689 - RNA, 23 nt, Human
ugggauuacaggcgugagccacc

SEQ ID NO: 122690 - RNA, 23 nt, Human
ugggauuacaggcgugagccacc

SEQ ID NO: 122691 - RNA, 24 nt, Human
ugggauuacaggcgugagccaccg

SEQ ID NO: 122692 - RNA, 24 nt, Human
ugggguuucaccauguuagccagg

SEQ ID NO: 122693 - RNA, 22 nt, Human
uggugugaucucagcucaacau

SEQ ID NO: 122694 - RNA, 21 nt, Human
uguauuuuuaguagagauggg

SEQ ID NO: 122695 - RNA, 22 nt, Human
uuaaaagacaaagaguauacaa

SEQ ID NO: 122696 - RNA, 18 nt, Human
uuaguagagaugggguuu

SEQ ID NO: 122697 - RNA, 22 nt, Human
uuaguagagaugggguuucacc

SEQ ID NO: 122698 - RNA, 24 nt, Human
uuaguagagaugggguuucaccau

SEQ ID NO: 122699 - RNA, 27 nt, Human
uuguacaguuauaucuauaguacauua

SEQ ID NO: 122700 - RNA, 23 nt, Human
uuguauuuuuaguagagaugggg

SEQ ID NO: 122701 - RNA, 24 nt, Human
uuuaaaaaaaugaagaaucaaacu

SEQ ID NO: 122702 - RNA, 21 nt, Human
uuucaccauguuagccaggcu

SEQ ID NO: 122703 - RNA, 24 nt, Human
uuuuuaguagagaugggguuucac

SEQ ID NO: 122704 - RNA, 21 nt, Human
uuuuuguauuuuuaguagaga

SEQ ID NO: 122705 - RNA, 24 nt, Human
uuuuuuguauuuuuaguagagaug

SEQ ID NO: 122706 - RNA, 23 nt, Human
uuuuuuuuuuuuuugaaauuuga

SEQ ID NO: 122707 - RNA, 26 nt, Human
uuuuuuuuuuuuuuuuuuuuuugggg

SEQ ID NO: 122708 - RNA, 22 nt, Human
aacucccucccucccuccccca

SEQ ID NO: 122709 - RNA, 22 nt, Human
aagugucauaagucaucccacu

SEQ ID NO: 122710 - RNA, 20 nt, Human
accccaguuccugccagccg

SEQ ID NO: 122711 - RNA, 20 nt, Human
acucccucccucccuccccc

SEQ ID NO: 122712 - RNA, 22 nt, Human
acucccucccucccucccccac

SEQ ID NO: 122713 - RNA, 18 nt, Human
aggcagagccaugcugug

SEQ ID NO: 122714 - RNA, 19 nt, Human
aucccgcgccggcucccgc

SEQ ID NO: 122715 - RNA, 22 nt, Human
caacucccucccucccuccccc

SEQ ID NO: 122716 - RNA, 18 nt, Human
cacacauaaccauaggau

SEQ ID NO: 122717 - RNA, 22 nt, Human
cacacauaaccauaggaucccc

SEQ ID NO: 122718 - RNA, 19 nt, Human
caccccaguuccugccagc

SEQ ID NO: 122719 - RNA, 18 nt, Human
cagcacccggccgacccc

SEQ ID NO: 122720 - RNA, 21 nt, Human
caguuccugccagccagccug

SEQ ID NO: 122721 - RNA, 22 nt, Human
ccccggccucggccucggccca

SEQ ID NO: 122722 - RNA, 33 nt, Human
ccccggccucggccucggcccagcacccggccg

SEQ ID NO: 122723 - RNA, 26 nt, Human
cccucccucccccacccuugauucua

SEQ ID NO: 122724 - RNA, 20 nt, Human
ccggccucggccucggccca

SEQ ID NO: 122725 - RNA, 23 nt, Human
ccucccucccccacccuugauuc

SEQ ID NO: 122726 - RNA, 23 nt, Human
cgccccggccucggccucggccc

SEQ ID NO: 122727 - RNA, 18 nt, Human
cgcuccgagucccagauc

SEQ ID NO: 122728 - RNA, 24 nt, Human
cggcuccugggucccgcuccggau

SEQ ID NO: 122729 - RNA, 20 nt, Human
cucccucccucccuccccca

SEQ ID NO: 122730 - RNA, 33 nt, Human
cucuggaucccgccccggccucggccucggccg

SEQ ID NO: 122731 - RNA, 21 nt, Human
gccaacucccucccucccucc

SEQ ID NO: 122732 - RNA, 21 nt, Human
gccucggccucggcccagcac

SEQ ID NO: 122733 - RNA, 21 nt, Human
gcucuggaucccgccccggcc

SEQ ID NO: 122734 - RNA, 22 nt, Human
gucccagaucccgcgccggcuc

SEQ ID NO: 122735 - RNA, 18 nt, Human
uagccaccccaguuccug

SEQ ID NO: 122736 - RNA, 19 nt, Human
uaucaaguccucugcugaa

SEQ ID NO: 122737 - RNA, 23 nt, Human
ucaccaugccuuuucuuaaacug

SEQ ID NO: 122738 - RNA, 18 nt, Human
uccugggucccgcuccgg

SEQ ID NO: 122739 - RNA, 22 nt, Human
ucucaggaacacucgcagccag

SEQ ID NO: 122740 - RNA, 24 nt, Human
ugaaacugccaacucccucccucc

SEQ ID NO: 122741 - RNA, 21 nt, Human
ugcugaagaagacugaggucc

SEQ ID NO: 122742 - RNA, 18 nt, Human
ugucauaagucaucccac

SEQ ID NO: 122743 - RNA, 26 nt, Human
ugucgcaggucacuucuucaccaggu

SEQ ID NO: 122744 - RNA, 19 nt, Human
aaagugcugagaauacagg

SEQ ID NO: 122745 - RNA, 19 nt, Human
aaagugcugagugaacacg

SEQ ID NO: 122746 - RNA, 18 nt, Human
aaccugccucggccuccc

SEQ ID NO: 122747 - RNA, 21 nt, Human
acaggcacccaccaccacgcc

SEQ ID NO: 122748 - RNA, 21 nt, Human
agagugcuguccagcgugcuc

SEQ ID NO: 122749 - RNA, 20 nt, Human
aggcacccaccaccacgccu

SEQ ID NO: 122750 - RNA, 18 nt, Human
agggaaagugcugaguga

SEQ ID NO: 122751 - RNA, 20 nt, Human
agugcuguccagcgugcugc

SEQ ID NO: 122752 - RNA, 18 nt, Human
aguggcuggaauuacagg

SEQ ID NO: 122753 - RNA, 19 nt, Human
aguguaguggugugaucuu

SEQ ID NO: 122754 - RNA, 21 nt, Human
aguguaguggugugaucuuag

SEQ ID NO: 122755 - RNA, 20 nt, Human
augagguuucaccaugcugg

SEQ ID NO: 122756 - RNA, 24 nt, Human
augagguuucaccaugcuggccag

SEQ ID NO: 122757 - RNA, 24 nt, Human
augguuuggugaaaaaccauacaa

SEQ ID NO: 122758 - RNA, 18 nt, Human
caaagugcugagaauaca

SEQ ID NO: 122759 - RNA, 20 nt, Human
caaccucugccuccuggguu

SEQ ID NO: 122760 - RNA, 22 nt, Human
caaccugccucggccucccaaa

SEQ ID NO: 122761 - RNA, 22 nt, Human
caagcaauucuccugccucagc

SEQ ID NO: 122762 - RNA, 21 nt, Human
caccaugcuggccaggcuagu

SEQ ID NO: 122763 - RNA, 24 nt, Human
caccaugcuggccaggcuagucuc

SEQ ID NO: 122764 - RNA, 27 nt, Human
caccaugcuggccaggcuagucucaaa

SEQ ID NO: 122765 - RNA, 18 nt, Human
cacccaccaccacgccug

SEQ ID NO: 122766 - RNA, 21 nt, Human
cacugcaaccucugccuccug

SEQ ID NO: 122767 - RNA, 23 nt, Human
cacugcaaccucugccuccuggg

SEQ ID NO: 122768 - RNA, 18 nt, Human
cagagugcuguccagcgu

SEQ ID NO: 122769 - RNA, 19 nt, Human
cagcgugcugcagagggaa

SEQ ID NO: 122770 - RNA, 22 nt, Human
caggugaucaaccugccucggc

SEQ ID NO: 122771 - RNA, 24 nt, Human
caugcuggccaggcuagucucaaa

SEQ ID NO: 122772 - RNA, 21 nt, Human
ccacgccuggcuaauuauuau

SEQ ID NO: 122773 - RNA, 24 nt, Human
ccuccuggguucaagcaauucucc

SEQ ID NO: 122774 - RNA, 19 nt, Human
ccucugccuccuggguuca

SEQ ID NO: 122775 - RNA, 20 nt, Human
ccugaccucaggugaucaac

SEQ ID NO: 122776 - RNA, 21 nt, Human
ccugaccucaggugaucaacc

SEQ ID NO: 122777 - RNA, 23 nt, Human
ccugaccucaggugaucaaccug

SEQ ID NO: 122778 - RNA, 24 nt, Human
ccugccucagccucucgaguggcu

SEQ ID NO: 122779 - RNA, 23 nt, Human
ccuggguucaagcaauucuccug

SEQ ID NO: 122780 - RNA, 24 nt, Human
cgcccaggcuggaguguaguggug

SEQ ID NO: 122781 - RNA, 24 nt, Human
cgucucgcccaggcuggaguguag

SEQ ID NO: 122782 - RNA, 24 nt, Human
cucacugcaaccucugccuccugg

SEQ ID NO: 122783 - RNA, 21 nt, Human
cuccuggguucaagcaauucu

SEQ ID NO: 122784 - RNA, 23 nt, Human
cucgaguggcuggaauuacaggc

SEQ ID NO: 122785 - RNA, 24 nt, Human
cugcaaccucugccuccuggguuc

SEQ ID NO: 122786 - RNA, 23 nt, Human
cugccucggccucccaaagugcu

SEQ ID NO: 122787 - RNA, 24 nt, Human
gaccucaggugaucaaccugccuc

SEQ ID NO: 122788 - RNA, 28 nt, Human
gagaauacaggggggugagccgguaccc

SEQ ID NO: 122789 - RNA, 22 nt, Human
gagguuucaccaugcuggccag

SEQ ID NO: 122790 - RNA, 20 nt, Human
gcccaggcuggaguguagug

SEQ ID NO: 122791 - RNA, 23 nt, Human
gcccaggcuggaguguaguggug

SEQ ID NO: 122792 - RNA, 24 nt, Human
gcccaggcuggaguguaguggugu

SEQ ID NO: 122793 - RNA, 23 nt, Human
gcuagucucaaacuccugaccuc

SEQ ID NO: 122794 - RNA, 20 nt, Human
gcuggaauuacaggcaccca

SEQ ID NO: 122795 - RNA, 22 nt, Human
ggcuggaguguaguggugugau

SEQ ID NO: 122796 - RNA, 18 nt, Human
ggggugagccaccacgcc

SEQ ID NO: 122797 - RNA, 24 nt, Human
ggggugagccaccacgccuggccu

SEQ ID NO: 122798 - RNA, 23 nt, Human
uagagggaugagguuucaccaug

SEQ ID NO: 122799 - RNA, 23 nt, Human
uagcucacugcaaccucugccuc

SEQ ID NO: 122800 - RNA, 19 nt, Human
ucaagcaauucuccugccu

SEQ ID NO: 122801 - RNA, 24 nt, Human
ucacugcaaccucugccuccuggg

SEQ ID NO: 122802 - RNA, 25 nt, Human
ucacugcaaccucugccuccugggu

SEQ ID NO: 122803 - RNA, 26 nt, Human
ucacugcaaccucugccuccuggguu

SEQ ID NO: 122804 - RNA, 22 nt, Human
ucagccucucgaguggcuggaa

SEQ ID NO: 122805 - RNA, 21 nt, Human
uccuggguucaagcaauucuc

SEQ ID NO: 122806 - RNA, 24 nt, Human
uccuggguucaagcaauucuccug

SEQ ID NO: 122807 - RNA, 24 nt, Human
ucgcccaggcuggaguguaguggu

SEQ ID NO: 122808 - RNA, 18 nt, Human
ucggccucccaaagugcu

SEQ ID NO: 122809 - RNA, 26 nt, Human
ucuccugccucagccucucgaguggc

SEQ ID NO: 122810 - RNA, 24 nt, Human
ucucgaguggcuggaauuacaggc

SEQ ID NO: 122811 - RNA, 22 nt, Human
ucucuguggcaucagcaggggu

SEQ ID NO: 122812 - RNA, 24 nt, Human
ucugccuccuggguucaagcaauu

SEQ ID NO: 122813 - RNA, 24 nt, Human
ucuugccgucucgcccaggcugga

SEQ ID NO: 122814 - RNA, 24 nt, Human
ugaccucaggugaucaaccugccu

SEQ ID NO: 122815 - RNA, 26 nt, Human
ugagaauacaggggggugagccacca

SEQ ID NO: 122816 - RNA, 24 nt, Human
ugagguuucaccaugcuggccagg

SEQ ID NO: 122817 - RNA, 24 nt, Human
ugccgucucgcccaggcuggagug

SEQ ID NO: 122818 - RNA, 24 nt, Human
ugccucagccucucgaguggcugg

SEQ ID NO: 122819 - RNA, 21 nt, Human
ugccucggccucccaaagugc

SEQ ID NO: 122820 - RNA, 24 nt, Human
ugccucggccucccaaagugcuga

SEQ ID NO: 122821 - RNA, 19 nt, Human
uggaauuacaggcacccac

SEQ ID NO: 122822 - RNA, 21 nt, Human
uggaauuacaggcacccacca

SEQ ID NO: 122823 - RNA, 24 nt, Human
uggaauuacaggcacccaccacca

SEQ ID NO: 122824 - RNA, 24 nt, Human
uggccaggcuagucucaaacuccu

SEQ ID NO: 122825 - RNA, 21 nt, Human
uggguucaagcaauucuccug

SEQ ID NO: 122826 - RNA, 23 nt, Human
uggguucaagcaauucuccugcc

SEQ ID NO: 122827 - RNA, 24 nt, Human
uggugugaucuuagcucacugcaa

SEQ ID NO: 122828 - RNA, 23 nt, Human
uuagagggaugagguuucaccau

SEQ ID NO: 122829 - RNA, 21 nt, Human
uucaagcaauucuccugccuc

SEQ ID NO: 122830 - RNA, 24 nt, Human
uucaagcaauucuccugccucagc

SEQ ID NO: 122831 - RNA, 21 nt, Human
uucucuguggcaucagcaggg

SEQ ID NO: 122832 - RNA, 24 nt, Human
uugccgucucgcccaggcuggagu

SEQ ID NO: 122833 - RNA, 21 nt, Human
uuucaccaugcuggccaggcu

SEQ ID NO: 122834 - RNA, 19 nt, Human
aaaaaggaaagaaaaaaag

SEQ ID NO: 122835 - RNA, 25 nt, Human
aaaagaaaaaaaaacgaagaaagaa

SEQ ID NO: 122836 - RNA, 23 nt, Human
aaaaggaaaaaaaaaggaaagaa

SEQ ID NO: 122837 - RNA, 21 nt, Human
aaagaaaaaaaaacgaagaaa

SEQ ID NO: 122838 - RNA, 26 nt, Human
aacuaagcacacagagaaacaaagcc

SEQ ID NO: 122839 - RNA, 20 nt, Human
aagaaaaaaaaacgaagaaa

SEQ ID NO: 122840 - RNA, 21 nt, Human
aagaaaaaaaaacgaagaaag

SEQ ID NO: 122841 - RNA, 21 nt, Human
aagaaacaaacauaauaaaaa

SEQ ID NO: 122842 - RNA, 23 nt, Human
aagaaacaaacauaauaaaaaua

SEQ ID NO: 122843 - RNA, 26 nt, Human
aagaaagaaacaaacauaauaaaaaa

SEQ ID NO: 122844 - RNA, 24 nt, Human
aagaauuggaaucacaaaaucaag

SEQ ID NO: 122845 - RNA, 22 nt, Human
aagacaauuacaaagaauugga

SEQ ID NO: 122846 - RNA, 24 nt, Human
aagacccucucacuccagucucag

SEQ ID NO: 122847 - RNA, 23 nt, Human
aaggaaaaaaaaaggaaagaaaa

SEQ ID NO: 122848 - RNA, 19 nt, Human
aaggaaagaaaaaaagaaa

SEQ ID NO: 122849 - RNA, 19 nt, Human
acaaaaggaaaaaaaaagg

SEQ ID NO: 122850 - RNA, 22 nt, Human
acacagagaaacaaagccuaga

SEQ ID NO: 122851 - RNA, 20 nt, Human
agaagacccucucacuccaa

SEQ ID NO: 122852 - RNA, 22 nt, Human
aggaaaaaaaaaggaaagaaaa

SEQ ID NO: 122853 - RNA, 18 nt, Human
aggaaagaaaaaaagaaa

SEQ ID NO: 122854 - RNA, 20 nt, Human
aggaaagaaaaaaagaaaag

SEQ ID NO: 122855 - RNA, 18 nt, Human
aggucaacacaaggucaa

SEQ ID NO: 122856 - RNA, 23 nt, Human
caaaaccaauuuggcagcacaaa

SEQ ID NO: 122857 - RNA, 23 nt, Human
caaaaggaaaaaaaaaggaaaga

SEQ ID NO: 122858 - RNA, 24 nt, Human
caaagaauuggaaucacaaaauca

SEQ ID NO: 122859 - RNA, 21 nt, Human
caaaggucaacacaaggucaa

SEQ ID NO: 122860 - RNA, 20 nt, Human
caacgaugaacaaacggcag

SEQ ID NO: 122861 - RNA, 23 nt, Human
cacacagagaaacaaagccuaga

SEQ ID NO: 122862 - RNA, 20 nt, Human
cacagaaauacaaacaccac

SEQ ID NO: 122863 - RNA, 21 nt, Human
caccugagccugccgcugccu

SEQ ID NO: 122864 - RNA, 21 nt, Human
cagagaaacaaagccuagagg

SEQ ID NO: 122865 - RNA, 20 nt, Human
cagccgccgccgccgccucg

SEQ ID NO: 122866 - RNA, 22 nt, Human
cagcggcugcaccugagccugc

SEQ ID NO: 122867 - RNA, 25 nt, Human
cauaauaaaaauacacaucagcauc

SEQ ID NO: 122868 - RNA, 18 nt, Human
ccgaaucccgggggagcc

SEQ ID NO: 122869 - RNA, 24 nt, Human
ccgcagccgccgccgccgccucgg

SEQ ID NO: 122870 - RNA, 21 nt, Human
ccgccgccgccgccucgcugc

SEQ ID NO: 122871 - RNA, 21 nt, Human
ccgccgccgcugccgcugccc

SEQ ID NO: 122872 - RNA, 21 nt, Human
ccgccucgcugcugaggccga

SEQ ID NO: 122873 - RNA, 20 nt, Human
ccgcgucccgccgccgcugc

SEQ ID NO: 122874 - RNA, 22 nt, Human
ccgcgucccgccgccgcugccg

SEQ ID NO: 122875 - RNA, 23 nt, Human
ccgcugccucaguugcugccugc

SEQ ID NO: 122876 - RNA, 24 nt, Human
ccuccgcagccgccgccgccgccu

SEQ ID NO: 122877 - RNA, 23 nt, Human
cgaagaaagaaacaaacauaaua

SEQ ID NO: 122878 - RNA, 20 nt, Human
cgucccgccgccgcugccgc

SEQ ID NO: 122879 - RNA, 19 nt, Human
cucaguugcugccugcgcc

SEQ ID NO: 122880 - RNA, 21 nt, Human
cugcgccuccgcagccgccgc

SEQ ID NO: 122881 - RNA, 21 nt, Human
cuuuaggcacaacgaugaaca

SEQ ID NO: 122882 - RNA, 19 nt, Human
cuuugagcagcggcugcac

SEQ ID NO: 122883 - RNA, 21 nt, Human
gaaagaaacaaacauaauaaa

SEQ ID NO: 122884 - RNA, 18 nt, Human
gagccugccgcugccuca

SEQ ID NO: 122885 - RNA, 22 nt, Human
ucacagaaauacaaacaccacg

SEQ ID NO: 122886 - RNA, 21 nt, Human
ucccgccgccgcugccgcugc

SEQ ID NO: 122887 - RNA, 23 nt, Human
ugaggccgaaucccgggggagcc

SEQ ID NO: 122888 - RNA, 19 nt, Human
uggcagcacaaaaggaaaa

SEQ ID NO: 122889 - RNA, 27 nt, Human
uggcagcacaaaaggaaaaaaaaagga

SEQ ID NO: 122890 - RNA, 18 nt, Human
ugugcuaguagggcugcu

SEQ ID NO: 122891 - RNA, 22 nt, Human
uucacagaaauacaaacaccac

SEQ ID NO: 122892 - RNA, 23 nt, Human
uuggcagcacaaaaggaaaaaaa

SEQ ID NO: 122893 - RNA, 20 nt, Human
uugucuuuaaaacuaagcac

SEQ ID NO: 122894 - RNA, 19 nt, Human
aaaaacaccacccuauaca

SEQ ID NO: 122895 - RNA, 19 nt, Human
aaaacaaaaugaaacaaaa

SEQ ID NO: 122896 - RNA, 24 nt, Human
aaacaaaguauagacuguaugugg

SEQ ID NO: 122897 - RNA, 23 nt, Human
aaaggaaaauuauaacccaagac

SEQ ID NO: 122898 - RNA, 19 nt, Human
aacaaguaugucucuaaac

SEQ ID NO: 122899 - RNA, 18 nt, Human
aacauuuugugugaccag

SEQ ID NO: 122900 - RNA, 19 nt, Human
aagaaaacaaaacgcaggg

SEQ ID NO: 122901 - RNA, 21 nt, Human
aauuucauuguuacuaaaaaa

SEQ ID NO: 122902 - RNA, 23 nt, Human
acagaaaccaucuucugagacau

SEQ ID NO: 122903 - RNA, 24 nt, Human
accaguuuuuucagugcagcauca

SEQ ID NO: 122904 - RNA, 20 nt, Human
acuguaaacauuaaaacugc

SEQ ID NO: 122905 - RNA, 22 nt, Human
agaacaaaaccuaaucauuaua

SEQ ID NO: 122906 - RNA, 19 nt, Human
agaagcauaaauaucaaac

SEQ ID NO: 122907 - RNA, 19 nt, Human
agaauagcagcaaucaccu

SEQ ID NO: 122908 - RNA, 18 nt, Human
agauggagacaaaauugc

SEQ ID NO: 122909 - RNA, 19 nt, Human
agcagugaguacaacagca

SEQ ID NO: 122910 - RNA, 18 nt, Human
aggcaggcuaggggcgac

SEQ ID NO: 122911 - RNA, 24 nt, Human
aggcgggcaggcaggcuaggggcc

SEQ ID NO: 122912 - RNA, 19 nt, Human
aggggcagggaggaccuag

SEQ ID NO: 122913 - RNA, 30 nt, Human
aguacaacagcaaaaaaauuauuguacaaa

SEQ ID NO: 122914 - RNA, 25 nt, Human
aguacauaauuacaaugcuacacag

SEQ ID NO: 122915 - RNA, 19 nt, Human
auacucuggaagcacagga

SEQ ID NO: 122916 - RNA, 18 nt, Human
auaguaaaauacaugacc

SEQ ID NO: 122917 - RNA, 19 nt, Human
augaaauaaaaacaccacc

SEQ ID NO: 122918 - RNA, 21 nt, Human
auuuuugucuacaauaaauga

SEQ ID NO: 122919 - RNA, 20 nt, Human
caaaaaugugcaaaauuccu

SEQ ID NO: 122920 - RNA, 21 nt, Human
caaaauaaacacuguccugga

SEQ ID NO: 122921 - RNA, 25 nt, Human
caaaauaaacacuguccuggacuug

SEQ ID NO: 122922 - RNA, 20 nt, Human
caaaauauauauuuaggggc

SEQ ID NO: 122923 - RNA, 20 nt, Human
caauccacuauuagcaguga

SEQ ID NO: 122924 - RNA, 25 nt, Human
caccaaaauuucucugcaccaacag

SEQ ID NO: 122925 - RNA, 19 nt, Human
caccacagcuucaccaaaa

SEQ ID NO: 122926 - RNA, 24 nt, Human
cacccuauacaauccacuauuagc

SEQ ID NO: 122927 - RNA, 21 nt, Human
cagcaaauaauguaaagcuaa

SEQ ID NO: 122928 - RNA, 20 nt, Human
cagcacauucacauuuuccc

SEQ ID NO: 122929 - RNA, 20 nt, Human
cagcaucuuggggguuugau

SEQ ID NO: 122930 - RNA, 18 nt, Human
caguacugauagucaacg

SEQ ID NO: 122931 - RNA, 20 nt, Human
caguacugauagucaacgaa

SEQ ID NO: 122932 - RNA, 21 nt, Human
caucacaucgccagcaaucuc

SEQ ID NO: 122933 - RNA, 21 nt, Human
ccagaauagcagcaaucaccu

SEQ ID NO: 122934 - RNA, 25 nt, Human
ccaguccaugcgaagaguacagucc

SEQ ID NO: 122935 - RNA, 23 nt, Human
cccaacauauccggugaacaaaa

SEQ ID NO: 122936 - RNA, 18 nt, Human
cccacauugcaauaaauc

SEQ ID NO: 122937 - RNA, 20 nt, Human
cccccauucccuuuuuaagu

SEQ ID NO: 122938 - RNA, 23 nt, Human
ccuccgcgauggcggcggcggcg

SEQ ID NO: 122939 - RNA, 19 nt, Human
ccuggcucugccauuuccu

SEQ ID NO: 122940 - RNA, 22 nt, Human
cgacccccgggcagggcugggg

SEQ ID NO: 122941 - RNA, 19 nt, Human
cgacuccgaugcggcuggg

SEQ ID NO: 122942 - RNA, 26 nt, Human
cgcgauggcggcggcggcggcgaccu

SEQ ID NO: 122943 - RNA, 19 nt, Human
cggccccugggcagccgcg

SEQ ID NO: 122944 - RNA, 22 nt, Human
cggcggcuccgcgggguccccc

SEQ ID NO: 122945 - RNA, 22 nt, Human
cuccuggcucugccauuuccug

SEQ ID NO: 122946 - RNA, 21 nt, Human
cuggggagcuggccggccccu

SEQ ID NO: 122947 - RNA, 25 nt, Human
cugggggcggcggcggcgcgacccc

SEQ ID NO: 122948 - RNA, 20 nt, Human
gaagcacaggauaucugaca

SEQ ID NO: 122949 - RNA, 18 nt, Human
gacaauagcuaaauaucc

SEQ ID NO: 122950 - RNA, 22 nt, Human
gaggggcugaauuaaauauaac

SEQ ID NO: 122951 - RNA, 24 nt, Human
gcaaauaauguaaagcuaacaaaa

SEQ ID NO: 122952 - RNA, 18 nt, Human
gcgauggcggcggcggcg

SEQ ID NO: 122953 - RNA, 20 nt, Human
gcgauggcggcggcggcggc

SEQ ID NO: 122954 - RNA, 24 nt, Human
gcggcggcggcgcgacccccgggc

SEQ ID NO: 122955 - RNA, 20 nt, Human
gcggcggcggcggcggcggc

SEQ ID NO: 122956 - RNA, 23 nt, Human
gcggcggcggcggcggcggcggc

SEQ ID NO: 122957 - RNA, 25 nt, Human
gcggcggcggcggcggcucggacuc

SEQ ID NO: 122958 - RNA, 20 nt, Human
gcggcggcggcgggggcggc

SEQ ID NO: 122959 - RNA, 23 nt, Human
gcggcggcgggggcggcggcggc

SEQ ID NO: 122960 - RNA, 30 nt, Human
gcggcggcgggggcggcggcggcggcggcg

SEQ ID NO: 122961 - RNA, 20 nt, Human
gcuaggggcgacgcuggggg

SEQ ID NO: 122962 - RNA, 21 nt, Human
gcucauguuuacuaacucgac

SEQ ID NO: 122963 - RNA, 23 nt, Human
ggagacaaaauugcaauaaaagc

SEQ ID NO: 122964 - RNA, 18 nt, Human
ggcgacgcugggggcggc

SEQ ID NO: 122965 - RNA, 19 nt, Human
ggcgcggcggcuccgcggg

SEQ ID NO: 122966 - RNA, 20 nt, Human
ggcggcggcgcgacccccgg

SEQ ID NO: 122967 - RNA, 21 nt, Human
gggcagggaggaccuagggua

SEQ ID NO: 122968 - RNA, 24 nt, Human
gggcggcggcggcggcggcggcgg

SEQ ID NO: 122969 - RNA, 18 nt, Human
gggggcggcggcggcgcg

SEQ ID NO: 122970 - RNA, 24 nt, Human
gggggcggcggcggcggcggcggg

SEQ ID NO: 122971 - RNA, 22 nt, Human
gucaaaaucagaaggugaaacc

SEQ ID NO: 122972 - RNA, 19 nt, Human
gugaaugagguacaaaaaa

SEQ ID NO: 122973 - RNA, 19 nt, Human
uaaaagaacuucccagucc

SEQ ID NO: 122974 - RNA, 26 nt, Human
uaaaauaauacuuaugcagucaaaca

SEQ ID NO: 122975 - RNA, 21 nt, Human
uaaaauauucagaauaguauc

SEQ ID NO: 122976 - RNA, 21 nt, Human
uaaagcuaacaaaaaugugca

SEQ ID NO: 122977 - RNA, 21 nt, Human
uaagaugaugccaguguacua

SEQ ID NO: 122978 - RNA, 21 nt, Human
uaaguuacaguagacaggcaa

SEQ ID NO: 122979 - RNA, 22 nt, Human
uaauauggaaaaucaugucaau

SEQ ID NO: 122980 - RNA, 23 nt, Human
uaauauggaaaaucaugucaauu

SEQ ID NO: 122981 - RNA, 22 nt, Human
uacaauaaaugaaauaaaaaca

SEQ ID NO: 122982 - RNA, 19 nt, Human
uacagaaugcaaaauacua

SEQ ID NO: 122983 - RNA, 28 nt, Human
uaccauauacucuauaaaaaauuauucu

SEQ ID NO: 122984 - RNA, 23 nt, Human
uagaaauaacucagaacaaaacc

SEQ ID NO: 122985 - RNA, 24 nt, Human
uagaagagauggucgucuuaauau

SEQ ID NO: 122986 - RNA, 20 nt, Human
uagcaucugugaccucuugc

SEQ ID NO: 122987 - RNA, 19 nt, Human
uaggagacaaagcgccuau

SEQ ID NO: 122988 - RNA, 22 nt, Human
uauucuaugaaagucuuaaguu

SEQ ID NO: 122989 - RNA, 24 nt, Human
ucaaucaacugauguuggaaacuc

SEQ ID NO: 122990 - RNA, 18 nt, Human
ucaauggacacauuccag

SEQ ID NO: 122991 - RNA, 20 nt, Human
ucaauggacacauuccagaa

SEQ ID NO: 122992 - RNA, 20 nt, Human
ucacauaaagccaauaugac

SEQ ID NO: 122993 - RNA, 20 nt, Human
uccaaaacacagcugcaaga

SEQ ID NO: 122994 - RNA, 19 nt, Human
uccagaauagcagcaauca

SEQ ID NO: 122995 - RNA, 20 nt, Human
uccagaauagcagcaaucac

SEQ ID NO: 122996 - RNA, 22 nt, Human
ucccagguguuaaauaucauuu

SEQ ID NO: 122997 - RNA, 22 nt, Human
uccgcgauggcggcggcggcuu

SEQ ID NO: 122998 - RNA, 19 nt, Human
ucuuucucuagaaauaacu

SEQ ID NO: 122999 - RNA, 23 nt, Human
ugacacaauauaccauauacucu

SEQ ID NO: 123000 - RNA, 22 nt, Human
ugacacgcuuacaaauuugcca

SEQ ID NO: 123001 - RNA, 20 nt, Human
ugaccugaaauguuuuaacc

SEQ ID NO: 123002 - RNA, 21 nt, Human
ugagaaaaaauagcaucugug

SEQ ID NO: 123003 - RNA, 21 nt, Human
ugauaugcaacagcuuuccuu

SEQ ID NO: 123004 - RNA, 18 nt, Human
ugcauggcucacucgagg

SEQ ID NO: 123005 - RNA, 22 nt, Human
uggaagcacaggauaucugaca

SEQ ID NO: 123006 - RNA, 21 nt, Human
uggcgcggcggcuccgcgggg

SEQ ID NO: 123007 - RNA, 22 nt, Human
uggcggcggcggcggcgaccgg

SEQ ID NO: 123008 - RNA, 26 nt, Human
uggcucacucgaggucaacuuagacc

SEQ ID NO: 123009 - RNA, 20 nt, Human
uggggagcuggccggccccu

SEQ ID NO: 123010 - RNA, 19 nt, Human
ugggggcggcggcggcgcg

SEQ ID NO: 123011 - RNA, 19 nt, Human
uguaaaacuguagauuuga

SEQ ID NO: 123012 - RNA, 23 nt, Human
uguaaacauuaaaacugcuuucc

SEQ ID NO: 123013 - RNA, 20 nt, Human
uguccuguuuucccaggugu

SEQ ID NO: 123014 - RNA, 26 nt, Human
ugucuuaugaaaacaaaaugaaacaa

SEQ ID NO: 123015 - RNA, 24 nt, Human
uguuacccaacuuacacaaugcgc

SEQ ID NO: 123016 - RNA, 22 nt, Human
uguuuucccagguguuaaauau

SEQ ID NO: 123017 - RNA, 19 nt, Human
uuaaaugacacgcuuacaa

SEQ ID NO: 123018 - RNA, 25 nt, Human
uuacagccacacuugagacaaugac

SEQ ID NO: 123019 - RNA, 18 nt, Human
uuaggggcagggaggacc

SEQ ID NO: 123020 - RNA, 21 nt, Human
uucaauggacacauuccagaa

SEQ ID NO: 123021 - RNA, 21 nt, Human
uuccagaauagcagcaaucac

SEQ ID NO: 123022 - RNA, 20 nt, Human
uugaucucaauggucuagaa

SEQ ID NO: 123023 - RNA, 24 nt, Human
uugaucucaauggucuagaacaug

SEQ ID NO: 123024 - RNA, 19 nt, Human
uugcauggcucacucgagg

SEQ ID NO: 123025 - RNA, 19 nt, Human
uuuaaacuuauuaguaaca

SEQ ID NO: 123026 - RNA, 21 nt, Human
aaaacaaaaaaaaaucaguga

SEQ ID NO: 123027 - RNA, 18 nt, Human
aaaacaguacuuuugcca

SEQ ID NO: 123028 - RNA, 24 nt, Human
aaaagaccucaaaauacugcacag

SEQ ID NO: 123029 - RNA, 19 nt, Human
aaaauacugcacagaaaca

SEQ ID NO: 123030 - RNA, 24 nt, Human
aaacgggugaacaaccaagucaag

SEQ ID NO: 123031 - RNA, 20 nt, Human
aaagagaagaguugggaugc

SEQ ID NO: 123032 - RNA, 22 nt, Human
aaauagaaacaaggaaacaaaa

SEQ ID NO: 123033 - RNA, 19 nt, Human
aacaaagagaagaguuggg

SEQ ID NO: 123034 - RNA, 26 nt, Human
aacaaggaaacaaaauaaaaacaaaa

SEQ ID NO: 123035 - RNA, 18 nt, Human
aaccacugagaaaaaguc

SEQ ID NO: 123036 - RNA, 21 nt, Human
aaccacugagaaaaaguccac

SEQ ID NO: 123037 - RNA, 20 nt, Human
aagccuguaacaaucuacaa

SEQ ID NO: 123038 - RNA, 31 nt, Human
acaaaaaaaaaucagugacaguaaagagaaa

SEQ ID NO: 123039 - RNA, 25 nt, Human
acaaaacgggugaacaaccaaguca

SEQ ID NO: 123040 - RNA, 22 nt, Human
acaggcaaggaaauaugcugug

SEQ ID NO: 123041 - RNA, 19 nt, Human
accaccacguacacaggga

SEQ ID NO: 123042 - RNA, 22 nt, Human
acugauacagaacaacaacuga

SEQ ID NO: 123043 - RNA, 23 nt, Human
agaaaucagugaggagcugagaa

SEQ ID NO: 123044 - RNA, 18 nt, Human
agauacugaaggugacau

SEQ ID NO: 123045 - RNA, 21 nt, Human
agcacaaaaauucaacugaua

SEQ ID NO: 123046 - RNA, 23 nt, Human
agcugagcucauauaaagaaauc

SEQ ID NO: 123047 - RNA, 21 nt, Human
aggaaacaaaauaaaaacaaa

SEQ ID NO: 123048 - RNA, 21 nt, Human
agggaugaguuagaacacugu

SEQ ID NO: 123049 - RNA, 18 nt, Human
auaaacaaaauuuucugc

SEQ ID NO: 123050 - RNA, 22 nt, Human
augaagaccagguacguucuua

SEQ ID NO: 123051 - RNA, 21 nt, Human
caaacaaucaacaguagacac

SEQ ID NO: 123052 - RNA, 23 nt, Human
caacuauuuccauuaauuacacu

SEQ ID NO: 123053 - RNA, 28 nt, Human
caaggaaacaaaauaaaaacaaaaaaaa

SEQ ID NO: 123054 - RNA, 23 nt, Human
caccaaaugcugcaaggccaaca

SEQ ID NO: 123055 - RNA, 23 nt, Human
cacugagaaaaaguccacucaac

SEQ ID NO: 123056 - RNA, 19 nt, Human
cagcaugacacagaaucuc

SEQ ID NO: 123057 - RNA, 19 nt, Human
caguaaagagaagccuuug

SEQ ID NO: 123058 - RNA, 22 nt, Human
cagugaggagcugagaaaauau

SEQ ID NO: 123059 - RNA, 30 nt, Human
cauaaacaaaauuuucugcuucuccucccc

SEQ ID NO: 123060 - RNA, 21 nt, Human
cauguuaaccacugagaaaaa

SEQ ID NO: 123061 - RNA, 21 nt, Human
ccaaaugcugcaaggccaaca

SEQ ID NO: 123062 - RNA, 20 nt, Human
ccacaggucuuugagaacuc

SEQ ID NO: 123063 - RNA, 21 nt, Human
ccacugagaaaaaguccacuc

SEQ ID NO: 123064 - RNA, 18 nt, Human
ccucaaaauacugcacag

SEQ ID NO: 123065 - RNA, 20 nt, Human
ccucccuucaaagcuucaag

SEQ ID NO: 123066 - RNA, 21 nt, Human
cuacuugaaaacuuguuucca

SEQ ID NO: 123067 - RNA, 19 nt, Human
cucaagcaaacaaucaaca

SEQ ID NO: 123068 - RNA, 21 nt, Human
cucugugggaaaaaugaggga

SEQ ID NO: 123069 - RNA, 22 nt, Human
cucuucuaugauguuccucuag

SEQ ID NO: 123070 - RNA, 21 nt, Human
cugauacagaacaacaacuga

SEQ ID NO: 123071 - RNA, 20 nt, Human
cuuuuuaaaauaccuggcca

SEQ ID NO: 123072 - RNA, 20 nt, Human
cuuuuuuuuuuuaacagucu

SEQ ID NO: 123073 - RNA, 20 nt, Human
gacacaagagucaaaaaucu

SEQ ID NO: 123074 - RNA, 19 nt, Human
gagaaaaaguccacucaac

SEQ ID NO: 123075 - RNA, 22 nt, Human
gcaaagaguucaacaacauucu

SEQ ID NO: 123076 - RNA, 20 nt, Human
gcaauucugaaaggaaaacc

SEQ ID NO: 123077 - RNA, 21 nt, Human
gccucggggaggggacccgcu

SEQ ID NO: 123078 - RNA, 18 nt, Human
ggaaauagaaacaaggaa

SEQ ID NO: 123079 - RNA, 21 nt, Human
ggacauucuccugaaaacuag

SEQ ID NO: 123080 - RNA, 22 nt, Human
ggaccaacucuaucuaaaaguu

SEQ ID NO: 123081 - RNA, 18 nt, Human
ggaggaccuuuguaucua

SEQ ID NO: 123082 - RNA, 22 nt, Human
gguaaacaaaauagcugcauuu

SEQ ID NO: 123083 - RNA, 23 nt, Human
gguaaacaaaauagcugcauuug

SEQ ID NO: 123084 - RNA, 23 nt, Human
uaaaaaaaacuuugguagagaaa

SEQ ID NO: 123085 - RNA, 21 nt, Human
uaaaaguugcuuacgaguaac

SEQ ID NO: 123086 - RNA, 20 nt, Human
uaaaauaucaauagcuauga

SEQ ID NO: 123087 - RNA, 22 nt, Human
uaaaauaucaauagcuaugaca

SEQ ID NO: 123088 - RNA, 24 nt, Human
uaaacaaaauuuucugcuucuccu

SEQ ID NO: 123089 - RNA, 23 nt, Human
uaaagaaaucagugaggagcuga

SEQ ID NO: 123090 - RNA, 19 nt, Human
uaacaugcaaagaguucaa

SEQ ID NO: 123091 - RNA, 18 nt, Human
uaacuugaaucuugugua

SEQ ID NO: 123092 - RNA, 23 nt, Human
uacaauagguugaaaaagaccuc

SEQ ID NO: 123093 - RNA, 22 nt, Human
uacgaguaacuugaaucuugug

SEQ ID NO: 123094 - RNA, 22 nt, Human
uagacacaagagucaaaaaucu

SEQ ID NO: 123095 - RNA, 24 nt, Human
uagccacagggaucucuuucccag

SEQ ID NO: 123096 - RNA, 24 nt, Human
uagcuaugacaauucauuucucuu

SEQ ID NO: 123097 - RNA, 23 nt, Human
uagcugcauuugcuugucagcug

SEQ ID NO: 123098 - RNA, 21 nt, Human
uaguaaaaaaggagucaaaua

SEQ ID NO: 123099 - RNA, 18 nt, Human
uauaaagaaaucagugag

SEQ ID NO: 123100 - RNA, 19 nt, Human
uaugacaccaaaugcugca

SEQ ID NO: 123101 - RNA, 21 nt, Human
uaugacaccaaaugcugcaag

SEQ ID NO: 123102 - RNA, 21 nt, Human
ucaaaauacugcacagaaaca

SEQ ID NO: 123103 - RNA, 20 nt, Human
uccaguggcuaagagaacuc

SEQ ID NO: 123104 - RNA, 22 nt, Human
ucuuaaguguuuucugcacauc

SEQ ID NO: 123105 - RNA, 18 nt, Human
ugaaacagcaucaaguuu

SEQ ID NO: 123106 - RNA, 20 nt, Human
ugaaaggaaaaccagcauga

SEQ ID NO: 123107 - RNA, 18 nt, Human
ugaauauacaagauauua

SEQ ID NO: 123108 - RNA, 19 nt, Human
ugacaauucauuucucuuu

SEQ ID NO: 123109 - RNA, 22 nt, Human
ugacacagaaucucaaauuccc

SEQ ID NO: 123110 - RNA, 20 nt, Human
ugacaggaaaggcuuauuua

SEQ ID NO: 123111 - RNA, 24 nt, Human
ugagaaaaaguccacucaacuauu

SEQ ID NO: 123112 - RNA, 19 nt, Human
ugcaaaguuuuugcuccug

SEQ ID NO: 123113 - RNA, 24 nt, Human
ugcuucauaauuaaugguguguaa

SEQ ID NO: 123114 - RNA, 18 nt, Human
ugggacauucuccugaaa

SEQ ID NO: 123115 - RNA, 24 nt, Human
uguguaagaacccuccccccuuuu

SEQ ID NO: 123116 - RNA, 18 nt, Human
uucaaagaauuaagagcc

SEQ ID NO: 123117 - RNA, 23 nt, Human
uucaacugauacagaacaacaac

SEQ ID NO: 123118 - RNA, 22 nt, Human
uucaagcaauucugaaaggaaa

SEQ ID NO: 123119 - RNA, 19 nt, Human
uugaugcaacuagaaagaa

SEQ ID NO: 123120 - RNA, 23 nt, Human
aaaaaagagaaaaaagcaacaag

SEQ ID NO: 123121 - RNA, 21 nt, Human
aaaaagcaacaagaaccccac

SEQ ID NO: 123122 - RNA, 21 nt, Human
aaaacaacaaaccuaaauuuu

SEQ ID NO: 123123 - RNA, 22 nt, Human
aaaacagcaugcugucaaagag

SEQ ID NO: 123124 - RNA, 22 nt, Human
aaaugacccaaaauuaggaagu

SEQ ID NO: 123125 - RNA, 23 nt, Human
aaauucaccuucauaaaucaaaa

SEQ ID NO: 123126 - RNA, 18 nt, Human
aagaaaccaagagugcua

SEQ ID NO: 123127 - RNA, 22 nt, Human
aagaaccccacccucacccuuc

SEQ ID NO: 123128 - RNA, 19 nt, Human
aagagaggaaaaaaagaga

SEQ ID NO: 123129 - RNA, 22 nt, Human
aagagugcuauuucuaguuuua

SEQ ID NO: 123130 - RNA, 23 nt, Human
aagcaaauacgccaaugcugaau

SEQ ID NO: 123131 - RNA, 23 nt, Human
aagcaacaagaaccccacccuca

SEQ ID NO: 123132 - RNA, 25 nt, Human
aagcaacaagaaccccacccucacc

SEQ ID NO: 123133 - RNA, 22 nt, Human
acaaaacagcaugcugucaaag

SEQ ID NO: 123134 - RNA, 23 nt, Human
acaaaagauaacagcauuuuuca

SEQ ID NO: 123135 - RNA, 21 nt, Human
accccacccucacccuuccca

SEQ ID NO: 123136 - RNA, 22 nt, Human
accccacccucacccuucccaa

SEQ ID NO: 123137 - RNA, 24 nt, Human
agaaccccacccucacccuuccca

SEQ ID NO: 123138 - RNA, 20 nt, Human
agagaaaaaagcaacaagaa

SEQ ID NO: 123139 - RNA, 18 nt, Human
agagaggaaaaaaagaga

SEQ ID NO: 123140 - RNA, 22 nt, Human
auaggcaccuugucaacuaaau

SEQ ID NO: 123141 - RNA, 18 nt, Human
auaguuguuuuuguaagg

SEQ ID NO: 123142 - RNA, 24 nt, Human
augacccaaaauuaggaaguucca

SEQ ID NO: 123143 - RNA, 21 nt, Human
caaaaaaguucugagaacaau

SEQ ID NO: 123144 - RNA, 20 nt, Human
caaaauacaauuaggacaua

SEQ ID NO: 123145 - RNA, 22 nt, Human
caagcaaauacgccaaugcugu

SEQ ID NO: 123146 - RNA, 20 nt, Human
cagcaugcugucaaagagug

SEQ ID NO: 123147 - RNA, 23 nt, Human
cauaaccaaaaaaaaaaaaaaga

SEQ ID NO: 123148 - RNA, 24 nt, Human
cauaaccaaaaaaaaaaaaaagaa

SEQ ID NO: 123149 - RNA, 20 nt, Human
cauuuuuuaagagaggaaaa

SEQ ID NO: 123150 - RNA, 24 nt, Human
ccaagcacuccaaaauuuggguuc

SEQ ID NO: 123151 - RNA, 19 nt, Human
ccacccucacccuucccaa

SEQ ID NO: 123152 - RNA, 18 nt, Human
cccacccucacccuuccc

SEQ ID NO: 123153 - RNA, 18 nt, Human
ccccacccucacccuucc

SEQ ID NO: 123154 - RNA, 20 nt, Human
cguugggggggagggaccug

SEQ ID NO: 123155 - RNA, 22 nt, Human
cuaaaugauuuucauaaacacc

SEQ ID NO: 123156 - RNA, 23 nt, Human
gaaccccacccucacccuuccca

SEQ ID NO: 123157 - RNA, 24 nt, Human
gaaugcaaguuucuccacaaaaca

SEQ ID NO: 123158 - RNA, 24 nt, Human
gagaaaaaagcaacaagaacccca

SEQ ID NO: 123159 - RNA, 26 nt, Human
gagaggaaaaaaagagaaaaaagcaa

SEQ ID NO: 123160 - RNA, 20 nt, Human
gccaggccuugaccggaggc

SEQ ID NO: 123161 - RNA, 19 nt, Human
ggaggccggagcucccacc

SEQ ID NO: 123162 - RNA, 19 nt, Human
ggcgcucccggccaggccu

SEQ ID NO: 123163 - RNA, 29 nt, Human
guaagguuuuuuuuuucauuuuuuuuuua

SEQ ID NO: 123164 - RNA, 21 nt, Human
gugcaacaugaagggaaugcc

SEQ ID NO: 123165 - RNA, 24 nt, Human
guuuaaaacaacaaaccuaaauuu

SEQ ID NO: 123166 - RNA, 23 nt, Human
uaaaaacaaaagauaacagcauu

SEQ ID NO: 123167 - RNA, 18 nt, Human
uaaaacaacaaaccuaaa

SEQ ID NO: 123168 - RNA, 25 nt, Human
uaaaugacccaaaauuaggaaguuc

SEQ ID NO: 123169 - RNA, 20 nt, Human
uaacagcauuuuucagugcc

SEQ ID NO: 123170 - RNA, 21 nt, Human
uaagagaggaaaaaaagagaa

SEQ ID NO: 123171 - RNA, 27 nt, Human
uaaugggcucuucaugaaugcaaguuu

SEQ ID NO: 123172 - RNA, 23 nt, Human
uccaaauaaaccuuucucucagc

SEQ ID NO: 123173 - RNA, 22 nt, Human
uccacaaaacagcaugcuguca

SEQ ID NO: 123174 - RNA, 19 nt, Human
ucugaagauccuuccuugu

SEQ ID NO: 123175 - RNA, 20 nt, Human
ugauaaugggcucuucauga

SEQ ID NO: 123176 - RNA, 19 nt, Human
ugcaaguacauuuuuuaag

SEQ ID NO: 123177 - RNA, 27 nt, Human
uggcaaaauauaguuguuuuuguaagg

SEQ ID NO: 123178 - RNA, 23 nt, Human
ugguggguacaaaucaaauucac

SEQ ID NO: 123179 - RNA, 24 nt, Human
ugucaaagagugugcaacaugaag

SEQ ID NO: 123180 - RNA, 19 nt, Human
uucauuccccaaaauacaa

SEQ ID NO: 123181 - RNA, 22 nt, Human
uuuaacuuggacucucgcgaga

SEQ ID NO: 123182 - RNA, 20 nt, Human
uuucagaccuuuacaaaaug

SEQ ID NO: 123183 - RNA, 18 nt, Human
uuuuuuuuuuuuggaggg

SEQ ID NO: 123184 - RNA, 19 nt, Human
uuuuuuuuuuuuuuggagg

SEQ ID NO: 123185 - RNA, 24 nt, Human
uuuuuuuuuuuuuuuuuuggaggg

SEQ ID NO: 123186 - RNA, 24 nt, Human
aaccugaggugggggcugagaggg

SEQ ID NO: 123187 - RNA, 24 nt, Human
aagaagaaagcagaaaucacaugg

SEQ ID NO: 123188 - RNA, 20 nt, Human
aagagacuggggcucggggg

SEQ ID NO: 123189 - RNA, 22 nt, Human
aagcagaaaucacaugggucug

SEQ ID NO: 123190 - RNA, 20 nt, Human
accugaggugggggcugaga

SEQ ID NO: 123191 - RNA, 19 nt, Human
agaagaaagcagaaaucac

SEQ ID NO: 123192 - RNA, 19 nt, Human
agagacuggggcucggggg

SEQ ID NO: 123193 - RNA, 21 nt, Human
aggagacguucagaccccuca

SEQ ID NO: 123194 - RNA, 21 nt, Human
agggcaguuuccaugggggau

SEQ ID NO: 123195 - RNA, 19 nt, Human
agggcuagaggucaggcuu

SEQ ID NO: 123196 - RNA, 18 nt, Human
aucuugcuaaagaagaaa

SEQ ID NO: 123197 - RNA, 22 nt, Human
caagcuggauuaaccgcagcug

SEQ ID NO: 123198 - RNA, 24 nt, Human
cagaccccucagaccaauccauga

SEQ ID NO: 123199 - RNA, 21 nt, Human
cagacucugucaagccucaua

SEQ ID NO: 123200 - RNA, 23 nt, Human
ccucuuacggggcauggggggau

SEQ ID NO: 123201 - RNA, 23 nt, Human
ccuggccgggcauugggggcucg

SEQ ID NO: 123202 - RNA, 21 nt, Human
cuaaccugaggugggggcuga

SEQ ID NO: 123203 - RNA, 18 nt, Human
cuccaaagccugcugucc

SEQ ID NO: 123204 - RNA, 23 nt, Human
cucucuggaccuagcgggccuga

SEQ ID NO: 123205 - RNA, 18 nt, Human
gaagagacuggggcucgg

SEQ ID NO: 123206 - RNA, 19 nt, Human
gaagcgucuuccaccucuu

SEQ ID NO: 123207 - RNA, 21 nt, Human
gacucuuccuuaucuagaaac

SEQ ID NO: 123208 - RNA, 20 nt, Human
gauucuucaggggagucuaa

SEQ ID NO: 123209 - RNA, 19 nt, Human
gcagugggggagggggcag

SEQ ID NO: 123210 - RNA, 19 nt, Human
ggaccuagcgggccugaug

SEQ ID NO: 123211 - RNA, 21 nt, Human
gggcauugggggcucgcucuc

SEQ ID NO: 123212 - RNA, 19 nt, Human
ggggagggggcagacucug

SEQ ID NO: 123213 - RNA, 23 nt, Human
gggugcagugggggagggggcag

SEQ ID NO: 123214 - RNA, 20 nt, Human
gguggaggcgcagccgucac

SEQ ID NO: 123215 - RNA, 19 nt, Human
gugcagugggggagggggc

SEQ ID NO: 123216 - RNA, 21 nt, Human
gugggggcugagagggucucu

SEQ ID NO: 123217 - RNA, 20 nt, Human
guucagaccccucagaccaa

SEQ ID NO: 123218 - RNA, 20 nt, Human
uagaaaccagaauaucuugc

SEQ ID NO: 123219 - RNA, 22 nt, Human
uagccuggccgggcauuggggg

SEQ ID NO: 123220 - RNA, 24 nt, Human
uagccuggccgggcauugggggcu

SEQ ID NO: 123221 - RNA, 27 nt, Human
uaggagagcccaagaggaucgcagugg

SEQ ID NO: 123222 - RNA, 22 nt, Human
ucacaugggucugggggcaggg

SEQ ID NO: 123223 - RNA, 18 nt, Human
ucagaccaauccaugagu

SEQ ID NO: 123224 - RNA, 19 nt, Human
ucucuggaccuagcgggcc

SEQ ID NO: 123225 - RNA, 19 nt, Human
ucugaagagacuggggcuc

SEQ ID NO: 123226 - RNA, 20 nt, Human
ucugaagagacuggggcucg

SEQ ID NO: 123227 - RNA, 18 nt, Human
ucugcaggguuggggcug

SEQ ID NO: 123228 - RNA, 18 nt, Human
ugccagugcccugagagg

SEQ ID NO: 123229 - RNA, 19 nt, Human
ugcuggacagcggauaagg

SEQ ID NO: 123230 - RNA, 18 nt, Human
uggaaggaagcgucuucc

SEQ ID NO: 123231 - RNA, 18 nt, Human
uggcaaaggcaggcuggg

SEQ ID NO: 123232 - RNA, 21 nt, Human
uggggcucucucucuuggggu

SEQ ID NO: 123233 - RNA, 18 nt, Human
ugggggcagggagggggu

SEQ ID NO: 123234 - RNA, 18 nt, Human
ugggggcugagagggucu

SEQ ID NO: 123235 - RNA, 20 nt, Human
ugucacgggggaggccccgg

SEQ ID NO: 123236 - RNA, 21 nt, Human
ugugaccgagacauucuuuca

SEQ ID NO: 123237 - RNA, 22 nt, Human
uuccaugggggauucuucagga

SEQ ID NO: 123238 - RNA, 24 nt, Human
uucuucaggggagucuaagugauu

SEQ ID NO: 123239 - RNA, 21 nt, Human
aaaaagcugcucccauagccc

SEQ ID NO: 123240 - RNA, 23 nt, Human
aaaaggguugagaccugcaagag

SEQ ID NO: 123241 - RNA, 24 nt, Human
aaauaacaacaaaaaucuuuccuc

SEQ ID NO: 123242 - RNA, 21 nt, Human
aagagacaggcugauaggaug

SEQ ID NO: 123243 - RNA, 19 nt, Human
aagaggaaaacaaaucaga

SEQ ID NO: 123244 - RNA, 20 nt, Human
aagaggaaaacaaaucagau

SEQ ID NO: 123245 - RNA, 19 nt, Human
aagcagaagucuaagaggc

SEQ ID NO: 123246 - RNA, 19 nt, Human
aagcagaagucuaagaggc

SEQ ID NO: 123247 - RNA, 22 nt, Human
acagcagugccagguguggaaa

SEQ ID NO: 123248 - RNA, 20 nt, Human
accacaacuugggcacagca

SEQ ID NO: 123249 - RNA, 24 nt, Human
agaaaugucuacucuuugucauuc

SEQ ID NO: 123250 - RNA, 21 nt, Human
agacaaaaggguugagaccug

SEQ ID NO: 123251 - RNA, 21 nt, Human
agcacaauucucaacaacacu

SEQ ID NO: 123252 - RNA, 19 nt, Human
agcagguggagaugcauga

SEQ ID NO: 123253 - RNA, 19 nt, Human
aggcagacaaaaggguuga

SEQ ID NO: 123254 - RNA, 24 nt, Human
aggcucuuccaagcuuugucagca

SEQ ID NO: 123255 - RNA, 22 nt, Human
aguaagagaaaugucuacucuu

SEQ ID NO: 123256 - RNA, 22 nt, Human
auaggauggguggaguccuuug

SEQ ID NO: 123257 - RNA, 20 nt, Human
aucuuauauaucccuucccc

SEQ ID NO: 123258 - RNA, 24 nt, Human
auggggaaucuauugguaggaccc

SEQ ID NO: 123259 - RNA, 19 nt, Human
auucucaacaacacucuag

SEQ ID NO: 123260 - RNA, 24 nt, Human
caaagagcuaucagauacacagca

SEQ ID NO: 123261 - RNA, 24 nt, Human
caauaugaacaauauucaccaccc

SEQ ID NO: 123262 - RNA, 21 nt, Human
caauuuaacaguuaccacauc

SEQ ID NO: 123263 - RNA, 24 nt, Human
cagcacagcagugccaggugugga

SEQ ID NO: 123264 - RNA, 25 nt, Human
cagcagcaccugcaggcucuuccaa

SEQ ID NO: 123265 - RNA, 21 nt, Human
cagcagugccagguguggaaa

SEQ ID NO: 123266 - RNA, 22 nt, Human
caucagguucaggaacuccagg

SEQ ID NO: 123267 - RNA, 19 nt, Human
caucccuucuuauuugggg

SEQ ID NO: 123268 - RNA, 19 nt, Human
cccauccaacuucuuggaa

SEQ ID NO: 123269 - RNA, 25 nt, Human
cccugguuuccccucacuuugaggg

SEQ ID NO: 123270 - RNA, 19 nt, Human
ccuuacuggccugggagca

SEQ ID NO: 123271 - RNA, 21 nt, Human
cguuucuaggggggaaaaaaa

SEQ ID NO: 123272 - RNA, 19 nt, Human
cuaaacauuggaaacaagu

SEQ ID NO: 123273 - RNA, 23 nt, Human
cuauuucccuuacuggccuggga

SEQ ID NO: 123274 - RNA, 18 nt, Human
cucagacuuuaccagaga

SEQ ID NO: 123275 - RNA, 22 nt, Human
cugccaaagagcuaucagauac

SEQ ID NO: 123276 - RNA, 22 nt, Human
gcacaauucucaacaacacucu

SEQ ID NO: 123277 - RNA, 21 nt, Human
ggaaauauguauuucugcuuc

SEQ ID NO: 123278 - RNA, 21 nt, Human
ggaggcaauggggaaucuauu

SEQ ID NO: 123279 - RNA, 21 nt, Human
ggcaggggcuugccacaaggu

SEQ ID NO: 123280 - RNA, 22 nt, Human
ggcaguggggagcccuugcagg

SEQ ID NO: 123281 - RNA, 20 nt, Human
ggcucagacacccuuuugcu

SEQ ID NO: 123282 - RNA, 22 nt, Human
gggaaaaaaaagcugcucccau

SEQ ID NO: 123283 - RNA, 23 nt, Human
gggaauuuugcccuuggggccag

SEQ ID NO: 123284 - RNA, 20 nt, Human
gggagaggcuggaucaggca

SEQ ID NO: 123285 - RNA, 19 nt, Human
ggggagcccuugcagguuu

SEQ ID NO: 123286 - RNA, 24 nt, Human
gggugauguguggcauuuguuuug

SEQ ID NO: 123287 - RNA, 20 nt, Human
guccuuugggaaggaggagg

SEQ ID NO: 123288 - RNA, 22 nt, Human
gucuggacgggugaauacagga

SEQ ID NO: 123289 - RNA, 18 nt, Human
gugcauuggguccaucau

SEQ ID NO: 123290 - RNA, 19 nt, Human
gugcauuggguccaucauu

SEQ ID NO: 123291 - RNA, 22 nt, Human
guggaaagcagaagucuaagag

SEQ ID NO: 123292 - RNA, 23 nt, Human
uaagaggcagacaaaaggguuga

SEQ ID NO: 123293 - RNA, 26 nt, Human
uacccacccauccaacuucuuggaaa

SEQ ID NO: 123294 - RNA, 23 nt, Human
uaggauggguggaguccuuuggg

SEQ ID NO: 123295 - RNA, 26 nt, Human
uaugaacaauauucaccacccucauu

SEQ ID NO: 123296 - RNA, 18 nt, Human
ucagauacacagcaauuu

SEQ ID NO: 123297 - RNA, 19 nt, Human
ucaggaacuccagguucuc

SEQ ID NO: 123298 - RNA, 23 nt, Human
ucccauagcccuggcuccccagg

SEQ ID NO: 123299 - RNA, 24 nt, Human
ucuacagaccaggaaacugaagcu

SEQ ID NO: 123300 - RNA, 24 nt, Human
ucuauuucccuuacuggccuggga

SEQ ID NO: 123301 - RNA, 21 nt, Human
ucucuguagacacaaggcuuu

SEQ ID NO: 123302 - RNA, 25 nt, Human
ucugccagucagccacccuguccug

SEQ ID NO: 123303 - RNA, 21 nt, Human
ugaagcuugauuugucccaag

SEQ ID NO: 123304 - RNA, 18 nt, Human
ugaaggccuggcguggac

SEQ ID NO: 123305 - RNA, 18 nt, Human
ugaauacacagucuggua

SEQ ID NO: 123306 - RNA, 20 nt, Human
ugacucgaugcaguaggcag

SEQ ID NO: 123307 - RNA, 23 nt, Human
ugacucgaugcaguaggcagugg

SEQ ID NO: 123308 - RNA, 24 nt, Human
ugagagugugaacaaggucuggaa

SEQ ID NO: 123309 - RNA, 18 nt, Human
ugaucuugaaggaacaug

SEQ ID NO: 123310 - RNA, 18 nt, Human
ugauggaagagggcuuaa

SEQ ID NO: 123311 - RNA, 22 nt, Human
ugcaguaggcaguggggagccc

SEQ ID NO: 123312 - RNA, 20 nt, Human
ugccaaagagcuaucaggau

SEQ ID NO: 123313 - RNA, 18 nt, Human
ugccaagggaaccucugg

SEQ ID NO: 123314 - RNA, 23 nt, Human
ugcucagacuuuaccagagacga

SEQ ID NO: 123315 - RNA, 25 nt, Human
uggaaagcagaagucuaagaggcag

SEQ ID NO: 123316 - RNA, 18 nt, Human
uggaaaggaugaucucua

SEQ ID NO: 123317 - RNA, 24 nt, Human
uggaagagacaggcugauaggaug

SEQ ID NO: 123318 - RNA, 23 nt, Human
uggaguugggguuggaauccauc

SEQ ID NO: 123319 - RNA, 19 nt, Human
ugggaaggaggaggcaaug

SEQ ID NO: 123320 - RNA, 20 nt, Human
ugggaaggaggaggcaaugg

SEQ ID NO: 123321 - RNA, 24 nt, Human
ugggaaggaggaggcaauggggaa

SEQ ID NO: 123322 - RNA, 21 nt, Human
ugggcaggggcuugccacaag

SEQ ID NO: 123323 - RNA, 19 nt, Human
ugggguauuuucccagaug

SEQ ID NO: 123324 - RNA, 22 nt, Human
uggguggaguccuuugggaagg

SEQ ID NO: 123325 - RNA, 21 nt, Human
ugggugucagucccucucugg

SEQ ID NO: 123326 - RNA, 21 nt, Human
ugguaagggugauguguggca

SEQ ID NO: 123327 - RNA, 24 nt, Human
uguaagaaauaacaacaaaaaucu

SEQ ID NO: 123328 - RNA, 19 nt, Human
ugugaaagguaccuuaucc

SEQ ID NO: 123329 - RNA, 19 nt, Human
uuauauaucccuuccccau

SEQ ID NO: 123330 - RNA, 18 nt, Human
uucaaagaguucaauuug

SEQ ID NO: 123331 - RNA, 23 nt, Human
uucaaagaguucaauuuguucau

SEQ ID NO: 123332 - RNA, 24 nt, Human
uucaauuuguucauucuucaaauu

SEQ ID NO: 123333 - RNA, 26 nt, Human
uucauuauacaaacauauagacugcc

SEQ ID NO: 123334 - RNA, 22 nt, Human
uuccagggaugggcaccugaua

SEQ ID NO: 123335 - RNA, 23 nt, Human
uuccccauggauaacagcaccuu

SEQ ID NO: 123336 - RNA, 19 nt, Human
uucccugggaauuuugccc

SEQ ID NO: 123337 - RNA, 21 nt, Human
uucccugggaauuuugcccuu

SEQ ID NO: 123338 - RNA, 20 nt, Human
uuggggccagagaaacaugg

SEQ ID NO: 123339 - RNA, 22 nt, Human
aaacaacaacaacauaaagcac

SEQ ID NO: 123340 - RNA, 21 nt, Human
aaauacacauccuaaaaauaa

SEQ ID NO: 123341 - RNA, 26 nt, Human
aacaacaacaacauaaagcacuggaa

SEQ ID NO: 123342 - RNA, 18 nt, Human
aacuugguaugcaaguaa

SEQ ID NO: 123343 - RNA, 21 nt, Human
aagaccaccacagaucucaag

SEQ ID NO: 123344 - RNA, 21 nt, Human
aagcacuggaaccaaagaacc

SEQ ID NO: 123345 - RNA, 21 nt, Human
aagugucaaacaacaaaugag

SEQ ID NO: 123346 - RNA, 20 nt, Human
aauacagaauugauggagga

SEQ ID NO: 123347 - RNA, 22 nt, Human
acagcaacuguacauccuccca

SEQ ID NO: 123348 - RNA, 22 nt, Human
agaauaaaucaccuucacaaaa

SEQ ID NO: 123349 - RNA, 22 nt, Human
agacaaacuuuuucaaagcuca

SEQ ID NO: 123350 - RNA, 21 nt, Human
aguaaaauuaguaauuucuaa

SEQ ID NO: 123351 - RNA, 20 nt, Human
auccaaaaacaacaacaaca

SEQ ID NO: 123352 - RNA, 23 nt, Human
auccuaaaaauaaugguaaaaau

SEQ ID NO: 123353 - RNA, 22 nt, Human
augagacuacucaccaacaaaa

SEQ ID NO: 123354 - RNA, 23 nt, Human
caaaaacaacaacaacauaaagc

SEQ ID NO: 123355 - RNA, 19 nt, Human
caaagcgcuacaucuuacu

SEQ ID NO: 123356 - RNA, 18 nt, Human
cacaauuuagaccagaau

SEQ ID NO: 123357 - RNA, 22 nt, Human
cacacaacagcaacuguacauc

SEQ ID NO: 123358 - RNA, 24 nt, Human
caccacagaucucaaggcaugaga

SEQ ID NO: 123359 - RNA, 19 nt, Human
cacuggaaccaaagaacca

SEQ ID NO: 123360 - RNA, 19 nt, Human
cauagacaagguuuaugaa

SEQ ID NO: 123361 - RNA, 20 nt, Human
cauccaaaaacaacaacaac

SEQ ID NO: 123362 - RNA, 23 nt, Human
ccaaaaacaacaacaacauaaag

SEQ ID NO: 123363 - RNA, 19 nt, Human
ccaacaaaaucuauccccc

SEQ ID NO: 123364 - RNA, 21 nt, Human
ccuucacaaaacuaagacaaa

SEQ ID NO: 123365 - RNA, 26 nt, Human
cuccccgcgccucgcgcgcucccgac

SEQ ID NO: 123366 - RNA, 19 nt, Human
cucgcuccuggucccaggc

SEQ ID NO: 123367 - RNA, 21 nt, Human
cuggucccaggcuccccgcgc

SEQ ID NO: 123368 - RNA, 19 nt, Human
cuguacuaauuugggggag

SEQ ID NO: 123369 - RNA, 18 nt, Human
cuuaaaauguauuugauu

SEQ ID NO: 123370 - RNA, 18 nt, Human
cuugaucuggcuggccac

SEQ ID NO: 123371 - RNA, 23 nt, Human
gacuacucaccaacaaaaucuau

SEQ ID NO: 123372 - RNA, 21 nt, Human
gagcuguaaaaccaaguacaa

SEQ ID NO: 123373 - RNA, 23 nt, Human
gcuuaaaauguauuugauuauuc

SEQ ID NO: 123374 - RNA, 23 nt, Human
ggacacuuaacuugcuuaaaaug

SEQ ID NO: 123375 - RNA, 19 nt, Human
ggagagcacagaugagaca

SEQ ID NO: 123376 - RNA, 23 nt, Human
gugggcggcggcugcagguaggc

SEQ ID NO: 123377 - RNA, 24 nt, Human
uaaauaaaugaaauacacauccua

SEQ ID NO: 123378 - RNA, 21 nt, Human
uaagaaaaauaucaccuggga

SEQ ID NO: 123379 - RNA, 18 nt, Human
uaagaauaaaucaccuuc

SEQ ID NO: 123380 - RNA, 21 nt, Human
uaagacaaacuuuuucaaagc

SEQ ID NO: 123381 - RNA, 26 nt, Human
uaagucccuauuaccuguagcagucu

SEQ ID NO: 123382 - RNA, 25 nt, Human
uaauauguaacaccauccaaaaaca

SEQ ID NO: 123383 - RNA, 18 nt, Human
uaauuugggggagacugg

SEQ ID NO: 123384 - RNA, 18 nt, Human
uaucaaaaaaaggaaagg

SEQ ID NO: 123385 - RNA, 18 nt, Human
uaucaaaaaaaggaaagg

SEQ ID NO: 123386 - RNA, 23 nt, Human
uaucaaaaaaaggaaaggaacac

SEQ ID NO: 123387 - RNA, 21 nt, Human
uauguuuuuagagauauucca

SEQ ID NO: 123388 - RNA, 20 nt, Human
ucaaaaaaaggaaaggaaca

SEQ ID NO: 123389 - RNA, 21 nt, Human
ucaaagcucagcuugauuugc

SEQ ID NO: 123390 - RNA, 22 nt, Human
ucacaaaacuaagacaaacuuu

SEQ ID NO: 123391 - RNA, 20 nt, Human
uccccgcgccucgcgcgcuc

SEQ ID NO: 123392 - RNA, 22 nt, Human
ucuaucccugcuauugcaccua

SEQ ID NO: 123393 - RNA, 18 nt, Human
ugaaugacuuagaaguaa

SEQ ID NO: 123394 - RNA, 23 nt, Human
ugacuuagaaguaaaauuaguaa

SEQ ID NO: 123395 - RNA, 22 nt, Human
ugaucuggcuggccaccauuuu

SEQ ID NO: 123396 - RNA, 19 nt, Human
ugccgugggcggcggcugc

SEQ ID NO: 123397 - RNA, 23 nt, Human
ugccgugggcggcggcugcaggu

SEQ ID NO: 123398 - RNA, 25 nt, Human
ugccgugggcggcggcugcagguag

SEQ ID NO: 123399 - RNA, 21 nt, Human
ugcuggaacuacacagagaca

SEQ ID NO: 123400 - RNA, 22 nt, Human
uggucccaggcuccccgcgccu

SEQ ID NO: 123401 - RNA, 20 nt, Human
uucagaugguaaacuuuucu

SEQ ID NO: 123402 - RNA, 21 nt, Human
uuuaagaagucauuucauaga

SEQ ID NO: 123403 - RNA, 25 nt, Human
uuuuuuuuuuuuuuuuuuuuuaagg

SEQ ID NO: 123404 - RNA, 18 nt, Human
aaacagaugugcacauac

SEQ ID NO: 123405 - RNA, 24 nt, Human
aaacagaugugcacauacauuccc

SEQ ID NO: 123406 - RNA, 21 nt, Human
acaauccagguggccucugca

SEQ ID NO: 123407 - RNA, 21 nt, Human
agaaauguugaccacacacug

SEQ ID NO: 123408 - RNA, 18 nt, Human
agacauaaaauguccaag

SEQ ID NO: 123409 - RNA, 19 nt, Human
agaugugcacauacauucc

SEQ ID NO: 123410 - RNA, 19 nt, Human
agcaggcgggucuggcggc

SEQ ID NO: 123411 - RNA, 22 nt, Human
aggcgggucuggcggcugugag

SEQ ID NO: 123412 - RNA, 19 nt, Human
auccagguggccucugcag

SEQ ID NO: 123413 - RNA, 18 nt, Human
aucuaaacaguuacaaaa

SEQ ID NO: 123414 - RNA, 20 nt, Human
caaaaagaaugaauauaaua

SEQ ID NO: 123415 - RNA, 22 nt, Human
caaaacuaaugaauaaauaaau

SEQ ID NO: 123416 - RNA, 23 nt, Human
caauaauuaagccccuuuguucu

SEQ ID NO: 123417 - RNA, 18 nt, Human
cagugagcuuccuccucc

SEQ ID NO: 123418 - RNA, 21 nt, Human
cagugagcuuccuccucccuu

SEQ ID NO: 123419 - RNA, 24 nt, Human
ccagaaacacuguaaaacuaccau

SEQ ID NO: 123420 - RNA, 18 nt, Human
ccuucaggaacagccacc

SEQ ID NO: 123421 - RNA, 19 nt, Human
ccuuuguucuaagccagaa

SEQ ID NO: 123422 - RNA, 21 nt, Human
cuccuaagcgaugcucaaaca

SEQ ID NO: 123423 - RNA, 19 nt, Human
cucuuuccucuucuguucc

SEQ ID NO: 123424 - RNA, 23 nt, Human
gaacauuugaaaacauucuaccu

SEQ ID NO: 123425 - RNA, 19 nt, Human
gcagggccuccuucaggaa

SEQ ID NO: 123426 - RNA, 23 nt, Human
gucucucuuuccucuucuguucc

SEQ ID NO: 123427 - RNA, 23 nt, Human
uaaauaaauagaagacuucuccu

SEQ ID NO: 123428 - RNA, 18 nt, Human
ucaaacacauuaggcaca

SEQ ID NO: 123429 - RNA, 19 nt, Human
ucaaauuaaauaugaaucc

SEQ ID NO: 123430 - RNA, 18 nt, Human
ucugcagcugugucucuc

SEQ ID NO: 123431 - RNA, 25 nt, Human
ugagaaauguugaccacacacugug

SEQ ID NO: 123432 - RNA, 20 nt, Human
ugagaggagcggaagagcug

SEQ ID NO: 123433 - RNA, 23 nt, Human
ugagaggagcggaagagcuggcg

SEQ ID NO: 123434 - RNA, 19 nt, Human
ugcagcugugucucucuuu

SEQ ID NO: 123435 - RNA, 18 nt, Human
ugccuuacaagaaagaca

SEQ ID NO: 123436 - RNA, 24 nt, Human
uggcggcugugagaggagcggaag

SEQ ID NO: 123437 - RNA, 19 nt, Human
ugugaaaucauuucaauaa

SEQ ID NO: 123438 - RNA, 23 nt, Human
ugugcacauacauuccccugccu

SEQ ID NO: 123439 - RNA, 18 nt, Human
uguugcaggcuccucaga

SEQ ID NO: 123440 - RNA, 18 nt, Human
uuaggcacaauccaggug

SEQ ID NO: 123441 - RNA, 21 nt, Human
aaaaaaagucagugaaaaaga

SEQ ID NO: 123442 - RNA, 23 nt, Human
aaacuccaaguguauauagggug

SEQ ID NO: 123443 - RNA, 24 nt, Human
aauaagaaugcaaacuccaagugu

SEQ ID NO: 123444 - RNA, 20 nt, Human
aauucuccuccguagugagu

SEQ ID NO: 123445 - RNA, 20 nt, Human
aauuuucuucuuaauucaag

SEQ ID NO: 123446 - RNA, 23 nt, Human
acaaaaaaagucagugaaaaaga

SEQ ID NO: 123447 - RNA, 23 nt, Human
agcacaaaacuaaaauccagagc

SEQ ID NO: 123448 - RNA, 23 nt, Human
aggcucauuagcagagucaguuu

SEQ ID NO: 123449 - RNA, 24 nt, Human
aguuccaucugccucccaggcagc

SEQ ID NO: 123450 - RNA, 19 nt, Human
auaccagaguccccccggc

SEQ ID NO: 123451 - RNA, 23 nt, Human
cacaaaacuaaaauccagagcag

SEQ ID NO: 123452 - RNA, 20 nt, Human
cagagcagggauaagggaag

SEQ ID NO: 123453 - RNA, 18 nt, Human
cagaguccccccggcccc

SEQ ID NO: 123454 - RNA, 25 nt, Human
cccccacaaaaaaagucagugaaaa

SEQ ID NO: 123455 - RNA, 20 nt, Human
cccggccccgcccccacaaa

SEQ ID NO: 123456 - RNA, 23 nt, Human
ccuggaaaagauuuaacuaagca

SEQ ID NO: 123457 - RNA, 23 nt, Human
cuacauggauuccuuugccucuu

SEQ ID NO: 123458 - RNA, 24 nt, Human
cuuaaauucucauuccauuguuuu

SEQ ID NO: 123459 - RNA, 19 nt, Human
gagcagggauaagggaaga

SEQ ID NO: 123460 - RNA, 25 nt, Human
gagucaguuuuuucaaacaucuucu

SEQ ID NO: 123461 - RNA, 22 nt, Human
guacaucacccuuuaaaugcuu

SEQ ID NO: 123462 - RNA, 18 nt, Human
uaaaauccagagcaggga

SEQ ID NO: 123463 - RNA, 21 nt, Human
uacuacauggauuccuuugcc

SEQ ID NO: 123464 - RNA, 19 nt, Human
ucaaacaucuucucccaag

SEQ ID NO: 123465 - RNA, 18 nt, Human
uccagagcagggauaagg

SEQ ID NO: 123466 - RNA, 18 nt, Human
uccccccggccccgcccc

SEQ ID NO: 123467 - RNA, 26 nt, Human
uccccccggccccgcccccacaaaaa

SEQ ID NO: 123468 - RNA, 18 nt, Human
ucugccucccaggcagcu

SEQ ID NO: 123469 - RNA, 24 nt, Human
ugugugaaaggauacauguguaca

SEQ ID NO: 123470 - RNA, 22 nt, Human
uugaguuugccccaucagcucc

SEQ ID NO: 123471 - RNA, 19 nt, Human
uuucaaacaucuucuccca

SEQ ID NO: 123472 - RNA, 20 nt, Human
uuucacauaguccucaugcc

SEQ ID NO: 123473 - RNA, 23 nt, Human
uuuugagucuuucauagaagccu

SEQ ID NO: 123474 - RNA, 24 nt, Human
uuuuuaagcagaggauaucuacua

SEQ ID NO: 123475 - RNA, 19 nt, Human
aaaacaaagcaaagcaaaa

SEQ ID NO: 123476 - RNA, 24 nt, Human
aaaacaaagcaaagcaaaacaaaa

SEQ ID NO: 123477 - RNA, 19 nt, Human
aaacaaaauacacauagaa

SEQ ID NO: 123478 - RNA, 22 nt, Human
aaacaaagcaaagcaaaacaaa

SEQ ID NO: 123479 - RNA, 23 nt, Human
aaacaaagcaaagcaaaacaaag

SEQ ID NO: 123480 - RNA, 19 nt, Human
aaagcaaaacaaaacaaaa

SEQ ID NO: 123481 - RNA, 19 nt, Human
aaagcaaagcaaaacaaaa

SEQ ID NO: 123482 - RNA, 19 nt, Human
aacauggugaaaccccguc

SEQ ID NO: 123483 - RNA, 20 nt, Human
aacauggugaaaccccgucu

SEQ ID NO: 123484 - RNA, 21 nt, Human
aacauggugaaaccccgucuc

SEQ ID NO: 123485 - RNA, 18 nt, Human
aagcaaaacaaaacaaaa

SEQ ID NO: 123486 - RNA, 22 nt, Human
aagcaaagcaaaacaaaacaaa

SEQ ID NO: 123487 - RNA, 24 nt, Human
aaggugggaggaucacuugacuca

SEQ ID NO: 123488 - RNA, 18 nt, Human
aaucgcuugaaccuggga

SEQ ID NO: 123489 - RNA, 24 nt, Human
acaaaacaaaauacacauagaauu

SEQ ID NO: 123490 - RNA, 19 nt, Human
acaaagcaaagcaaaacaa

SEQ ID NO: 123491 - RNA, 21 nt, Human
acaaagcaaagcaaaacaaaa

SEQ ID NO: 123492 - RNA, 25 nt, Human
acaaagcaaagcaaaacaaaacaaa

SEQ ID NO: 123493 - RNA, 20 nt, Human
acagagcgagacuccgucuc

SEQ ID NO: 123494 - RNA, 24 nt, Human
acagagcgagacuccgucucaaaa

SEQ ID NO: 123495 - RNA, 24 nt, Human
accccgucucuacuaaaaauacaa

SEQ ID NO: 123496 - RNA, 24 nt, Human
acugcacuccagccuggaugacag

SEQ ID NO: 123497 - RNA, 26 nt, Human
acugcacuccagccuggaugacagag

SEQ ID NO: 123498 - RNA, 23 nt, Human
agacucaaucauuacaaaaauaa

SEQ ID NO: 123499 - RNA, 24 nt, Human
agauggggguugcagugagccgag

SEQ ID NO: 123500 - RNA, 18 nt, Human
agcaaaaaaugaagccag

SEQ ID NO: 123501 - RNA, 19 nt, Human
agcaccuguagucccagcu

SEQ ID NO: 123502 - RNA, 24 nt, Human
agcacuuugggaggccuggguggg

SEQ ID NO: 123503 - RNA, 20 nt, Human
agccgggugugguggugagc

SEQ ID NO: 123504 - RNA, 24 nt, Human
agccuggaugacagagcgagacuc

SEQ ID NO: 123505 - RNA, 21 nt, Human
agccugggcaacauagagucc

SEQ ID NO: 123506 - RNA, 21 nt, Human
agccugggcaacauagagucc

SEQ ID NO: 123507 - RNA, 22 nt, Human
agccuggucaacauggugaaac

SEQ ID NO: 123508 - RNA, 24 nt, Human
agccuggucaacauggugaaaccc

SEQ ID NO: 123509 - RNA, 22 nt, Human
agcugcacccaccggcccugcu

SEQ ID NO: 123510 - RNA, 19 nt, Human
aggagggagggugggaaag

SEQ ID NO: 123511 - RNA, 21 nt, Human
aggaguucgagaccagccugg

SEQ ID NO: 123512 - RNA, 23 nt, Human
aggaucacuugacucaggaguuc

SEQ ID NO: 123513 - RNA, 19 nt, Human
aggcaagggacugaggagg

SEQ ID NO: 123514 - RNA, 22 nt, Human
aggcaggagaaucgcuugaacc

SEQ ID NO: 123515 - RNA, 24 nt, Human
aggcaggagaaucgcuugaaccug

SEQ ID NO: 123516 - RNA, 20 nt, Human
aggcaugguggcucacaccu

SEQ ID NO: 123517 - RNA, 21 nt, Human
aggccugggugggcagaucac

SEQ ID NO: 123518 - RNA, 22 nt, Human
agggagggugggaaagcccagg

SEQ ID NO: 123519 - RNA, 18 nt, Human
aggugggaggaucacuug

SEQ ID NO: 123520 - RNA, 19 nt, Human
aguggcugguuaguccuau

SEQ ID NO: 123521 - RNA, 23 nt, Human
aguuccauaacagccugggcaac

SEQ ID NO: 123522 - RNA, 22 nt, Human
auaauaauaaaagcaauaacaa

SEQ ID NO: 123523 - RNA, 19 nt, Human
auacacauagaauuugucc

SEQ ID NO: 123524 - RNA, 21 nt, Human
aucaccaggucaggaguucga

SEQ ID NO: 123525 - RNA, 24 nt, Human
aucaugccacugcacuccagccug

SEQ ID NO: 123526 - RNA, 22 nt, Human
augauaauaaaagcaauaauaa

SEQ ID NO: 123527 - RNA, 22 nt, Human
augccacugcacuccagccugg

SEQ ID NO: 123528 - RNA, 20 nt, Human
caaaacaaaacaaaauacac

SEQ ID NO: 123529 - RNA, 25 nt, Human
caaagcaaagcaaaacaaaacaaaa

SEQ ID NO: 123530 - RNA, 20 nt, Human
caacauggugaaaccccguc

SEQ ID NO: 123531 - RNA, 22 nt, Human
caacauggugaaaccccgucuc

SEQ ID NO: 123532 - RNA, 24 nt, Human
caacauggugaaaccccgucucua

SEQ ID NO: 123533 - RNA, 19 nt, Human
caagaucagacucucacug

SEQ ID NO: 123534 - RNA, 24 nt, Human
caagggacugaggaggugaaacca

SEQ ID NO: 123535 - RNA, 24 nt, Human
cacaccuuuaaucccagcacuuug

SEQ ID NO: 123536 - RNA, 23 nt, Human
caccggcccugcugugccccgac

SEQ ID NO: 123537 - RNA, 24 nt, Human
caccuguagucccagcuacuuagg

SEQ ID NO: 123538 - RNA, 19 nt, Human
caccuuuaaucccagcacu

SEQ ID NO: 123539 - RNA, 24 nt, Human
caccuuuaaucccagcacuuuggg

SEQ ID NO: 123540 - RNA, 26 nt, Human
caccuuuaaucccagcacuuugggag

SEQ ID NO: 123541 - RNA, 23 nt, Human
cacuccagccuggaugacagagc

SEQ ID NO: 123542 - RNA, 24 nt, Human
cacuccagccuggaugacagagcg

SEQ ID NO: 123543 - RNA, 18 nt, Human
cacugcacuccagccugg

SEQ ID NO: 123544 - RNA, 19 nt, Human
cacugcacuccagccugga

SEQ ID NO: 123545 - RNA, 19 nt, Human
cacugcacuccagccugga

SEQ ID NO: 123546 - RNA, 22 nt, Human
cacugcacuccagccuggauga

SEQ ID NO: 123547 - RNA, 24 nt, Human
cacugcacuccagccuggaugaca

SEQ ID NO: 123548 - RNA, 21 nt, Human
cagcaaaaaaugaagccagga

SEQ ID NO: 123549 - RNA, 22 nt, Human
cagcaaaaaaugaagccaggaa

SEQ ID NO: 123550 - RNA, 29 nt, Human
cagcaaaaaaugaagccaggaaucacagu

SEQ ID NO: 123551 - RNA, 24 nt, Human
cagcacuuugggaggccugggugg

SEQ ID NO: 123552 - RNA, 20 nt, Human
cagggaaagccgaggaggug

SEQ ID NO: 123553 - RNA, 22 nt, Human
caucagcaaaaaaugaagccaa

SEQ ID NO: 123554 - RNA, 19 nt, Human
ccacugcacuccagccugg

SEQ ID NO: 123555 - RNA, 21 nt, Human
ccacugcacuccagccuggau

SEQ ID NO: 123556 - RNA, 24 nt, Human
ccacugcacuccagccuggaugac

SEQ ID NO: 123557 - RNA, 20 nt, Human
ccaucagcaaaaaaugaagc

SEQ ID NO: 123558 - RNA, 19 nt, Human
ccaugccagccucuggacg

SEQ ID NO: 123559 - RNA, 21 nt, Human
cccccgcacugggcccggcuc

SEQ ID NO: 123560 - RNA, 22 nt, Human
cccccgcacugggcccggcucc

SEQ ID NO: 123561 - RNA, 24 nt, Human
ccccgcacugggcccggcuccguc

SEQ ID NO: 123562 - RNA, 23 nt, Human
cccugcgcccccgcacugggccc

SEQ ID NO: 123563 - RNA, 25 nt, Human
ccgccgaccugugaggcggcugcac

SEQ ID NO: 123564 - RNA, 18 nt, Human
ccggcggcgggcgaggag

SEQ ID NO: 123565 - RNA, 21 nt, Human
ccgucucaaaacaaagcaaag

SEQ ID NO: 123566 - RNA, 22 nt, Human
ccugcgcccccgcacugggccc

SEQ ID NO: 123567 - RNA, 22 nt, Human
ccugcuaaggagggaggguggg

SEQ ID NO: 123568 - RNA, 22 nt, Human
ccuggaugacagagcgagacuc

SEQ ID NO: 123569 - RNA, 21 nt, Human
ccuggcccguccgccgaccug

SEQ ID NO: 123570 - RNA, 21 nt, Human
ccugggagauggggguugcag

SEQ ID NO: 123571 - RNA, 23 nt, Human
ccuggucaacauggugaaacccc

SEQ ID NO: 123572 - RNA, 24 nt, Human
ccuggucaacauggugaaaccccg

SEQ ID NO: 123573 - RNA, 21 nt, Human
ccuguagucccagcuacuuag

SEQ ID NO: 123574 - RNA, 24 nt, Human
cgagaccagccuggucaacauggu

SEQ ID NO: 123575 - RNA, 24 nt, Human
cgagaucaugccacugcacuccag

SEQ ID NO: 123576 - RNA, 23 nt, Human
cgagggaaggccaggaaucuugg

SEQ ID NO: 123577 - RNA, 19 nt, Human
cgcagggaaagccgaggag

SEQ ID NO: 123578 - RNA, 18 nt, Human
cgccuggcccguccgccg

SEQ ID NO: 123579 - RNA, 23 nt, Human
cgucucaaaacaaagcaaagcaa

SEQ ID NO: 123580 - RNA, 19 nt, Human
cucaaaacaaagcaaagca

SEQ ID NO: 123581 - RNA, 22 nt, Human
cucacaccuuuaaucccagcac

SEQ ID NO: 123582 - RNA, 24 nt, Human
cucacaccuuuaaucccagcacuu

SEQ ID NO: 123583 - RNA, 20 nt, Human
cucaguacucggcccgcgcc

SEQ ID NO: 123584 - RNA, 20 nt, Human
cuccucacaagcuuccauuc

SEQ ID NO: 123585 - RNA, 19 nt, Human
cugaggccaguuguuucca

SEQ ID NO: 123586 - RNA, 21 nt, Human
cugaggccaguuguuuccaua

SEQ ID NO: 123587 - RNA, 19 nt, Human
cugccggaccggcccuccu

SEQ ID NO: 123588 - RNA, 24 nt, Human
gacagagcgagacuccgucucaaa

SEQ ID NO: 123589 - RNA, 23 nt, Human
gagaaucgcuugaaccugggaga

SEQ ID NO: 123590 - RNA, 27 nt, Human
gaggaggcgcgagccagcugcacccac

SEQ ID NO: 123591 - RNA, 21 nt, Human
gaggaugcaggagagggcuga

SEQ ID NO: 123592 - RNA, 21 nt, Human
gaucaccaggucaggaguucg

SEQ ID NO: 123593 - RNA, 22 nt, Human
gaucaccaggucaggaguucga

SEQ ID NO: 123594 - RNA, 24 nt, Human
gaucaccaggucaggaguucgaga

SEQ ID NO: 123595 - RNA, 23 nt, Human
gaugcaggagagggcugaggugg

SEQ ID NO: 123596 - RNA, 18 nt, Human
gcaaagcaaaacaaaaca

SEQ ID NO: 123597 - RNA, 21 nt, Human
gcaacauagaguccgucuccu

SEQ ID NO: 123598 - RNA, 19 nt, Human
gcacccaccggcccugcug

SEQ ID NO: 123599 - RNA, 24 nt, Human
gcacuccagccuggaugacagagc

SEQ ID NO: 123600 - RNA, 21 nt, Human
gcaggagagggcugagguggg

SEQ ID NO: 123601 - RNA, 20 nt, Human
gccgagaucaugccacugca

SEQ ID NO: 123602 - RNA, 19 nt, Human
gccgggugugguggugagc

SEQ ID NO: 123603 - RNA, 19 nt, Human
gcugaggccaguuguuucc

SEQ ID NO: 123604 - RNA, 18 nt, Human
ggaagaaaccgaaagaaa

SEQ ID NO: 123605 - RNA, 19 nt, Human
ggaccggaggagacggcgg

SEQ ID NO: 123606 - RNA, 24 nt, Human
ggaggcaggagaaucgcuugaacc

SEQ ID NO: 123607 - RNA, 20 nt, Human
ggagggugggaaagcccagg

SEQ ID NO: 123608 - RNA, 22 nt, Human
ggaucacuugacucaggaguuc

SEQ ID NO: 123609 - RNA, 23 nt, Human
ggcaagggacugaggaggugaaa

SEQ ID NO: 123610 - RNA, 23 nt, Human
ggcagaucaccaggucaggaguu

SEQ ID NO: 123611 - RNA, 20 nt, Human
gggcccggcuccgucgaggg

SEQ ID NO: 123612 - RNA, 19 nt, Human
gggguugcagugagccgag

SEQ ID NO: 123613 - RNA, 21 nt, Human
gggguugcagugagccgagau

SEQ ID NO: 123614 - RNA, 22 nt, Human
gggguugcagugagccgagauc

SEQ ID NO: 123615 - RNA, 23 nt, Human
gggguugcagugagccgagauca

SEQ ID NO: 123616 - RNA, 24 nt, Human
gguggcucacaccuuuaaucccag

SEQ ID NO: 123617 - RNA, 24 nt, Human
gguggugagcaccuguagucccag

SEQ ID NO: 123618 - RNA, 20 nt, Human
gguugcagugagccgagauc

SEQ ID NO: 123619 - RNA, 24 nt, Human
gugacguccagcuggugucucaau

SEQ ID NO: 123620 - RNA, 24 nt, Human
guguaggcuggaugugguagguga

SEQ ID NO: 123621 - RNA, 24 nt, Human
guugcagugagccgagaucaugcc

SEQ ID NO: 123622 - RNA, 24 nt, Human
uaaaaaacacacauagggccaggc

SEQ ID NO: 123623 - RNA, 18 nt, Human
uacacauagaauuugucc

SEQ ID NO: 123624 - RNA, 19 nt, Human
uacguguaggcuggaugug

SEQ ID NO: 123625 - RNA, 24 nt, Human
uagggccaggcaugguggcucaca

SEQ ID NO: 123626 - RNA, 18 nt, Human
uaggugacgccuauaauc

SEQ ID NO: 123627 - RNA, 23 nt, Human
uaucacccagugugaaaagcaga

SEQ ID NO: 123628 - RNA, 25 nt, Human
ucaaaacaaagcaaagcaaaacaac

SEQ ID NO: 123629 - RNA, 20 nt, Human
ucaccaggucaggaguucga

SEQ ID NO: 123630 - RNA, 24 nt, Human
ucaccaggucaggaguucgagacc

SEQ ID NO: 123631 - RNA, 22 nt, Human
ucagcaaaaaaugaagccagga

SEQ ID NO: 123632 - RNA, 23 nt, Human
ucagcaaaaaaugaagccaggaa

SEQ ID NO: 123633 - RNA, 23 nt, Human
ucaugccacugcacuccagccug

SEQ ID NO: 123634 - RNA, 20 nt, Human
uccaaguuauuaucacccag

SEQ ID NO: 123635 - RNA, 23 nt, Human
uccagccuggaugacagagcgag

SEQ ID NO: 123636 - RNA, 24 nt, Human
uccagccuggaugacagagcgaga

SEQ ID NO: 123637 - RNA, 18 nt, Human
ucccgcgcccugcgcccc

SEQ ID NO: 123638 - RNA, 23 nt, Human
ucgcuugaaccugggagaugggg

SEQ ID NO: 123639 - RNA, 21 nt, Human
ucucacugggguaggcaaggg

SEQ ID NO: 123640 - RNA, 24 nt, Human
ucucuacuaaaaauacaaaaaauu

SEQ ID NO: 123641 - RNA, 24 nt, Human
ugaaccugggagauggggguugca

SEQ ID NO: 123642 - RNA, 23 nt, Human
ugacucaggaguuccauaacagg

SEQ ID NO: 123643 - RNA, 22 nt, Human
ugagccgagaucaugccacugc

SEQ ID NO: 123644 - RNA, 18 nt, Human
ugaggcggcugcacugcc

SEQ ID NO: 123645 - RNA, 23 nt, Human
ugaggggccuaagagagggcagu

SEQ ID NO: 123646 - RNA, 24 nt, Human
ugaggugggggaggaacaacuggu

SEQ ID NO: 123647 - RNA, 19 nt, Human
ugcacugccggaccggccc

SEQ ID NO: 123648 - RNA, 24 nt, Human
uggcucacaccuuuaaucccagca

SEQ ID NO: 123649 - RNA, 18 nt, Human
ugggagauggggguugca

SEQ ID NO: 123650 - RNA, 24 nt, Human
ugggagauggggguugcagugagc

SEQ ID NO: 123651 - RNA, 23 nt, Human
ugggaggaucacuugacucagga

SEQ ID NO: 123652 - RNA, 20 nt, Human
ugggaggccugggugggcag

SEQ ID NO: 123653 - RNA, 24 nt, Human
ugggaggccugggugggcagauca

SEQ ID NO: 123654 - RNA, 22 nt, Human
ugggugggcagaucaccagguc

SEQ ID NO: 123655 - RNA, 23 nt, Human
ugggugggcagaucaccagguca

SEQ ID NO: 123656 - RNA, 24 nt, Human
ugguggugagcaccuguaguccca

SEQ ID NO: 123657 - RNA, 22 nt, Human
uguacugggagagagauuuggg

SEQ ID NO: 123658 - RNA, 23 nt, Human
uuaaaugaggggccuaagagagg

SEQ ID NO: 123659 - RNA, 18 nt, Human
uuagccgggugugguggu

SEQ ID NO: 123660 - RNA, 24 nt, Human
uuagccgggugugguggugagcac

SEQ ID NO: 123661 - RNA, 20 nt, Human
uuaguaguuaaaaaacacac

SEQ ID NO: 123662 - RNA, 24 nt, Human
uugaaccugggagauggggguugc

SEQ ID NO: 123663 - RNA, 18 nt, Human
uugcagugagccgagauc

SEQ ID NO: 123664 - RNA, 20 nt, Human
uugcagugagccgagaucau

SEQ ID NO: 123665 - RNA, 21 nt, Human
uugcagugagccgagaucaug

SEQ ID NO: 123666 - RNA, 18 nt, Human
uuuuuuuuuuuuuuuuug

SEQ ID NO: 123667 - RNA, 24 nt, Human
aaaaaaaccaacccuuccuucuua

SEQ ID NO: 123668 - RNA, 20 nt, Human
aaaauggucaaaaccuuuaa

SEQ ID NO: 123669 - RNA, 20 nt, Human
aaccaacaugacacacagga

SEQ ID NO: 123670 - RNA, 26 nt, Human
aagaagacaucaaacaucuaaaacca

SEQ ID NO: 123671 - RNA, 23 nt, Human
aauacaaguaccaaaaaccaaca

SEQ ID NO: 123672 - RNA, 22 nt, Human
aauacaauaguuaucuucaauu

SEQ ID NO: 123673 - RNA, 22 nt, Human
acacacccaguguucuaauaca

SEQ ID NO: 123674 - RNA, 22 nt, Human
acacaggaaaaaauaaaagugc

SEQ ID NO: 123675 - RNA, 25 nt, Human
aguaaauaguggaaauacuauauua

SEQ ID NO: 123676 - RNA, 21 nt, Human
auaauuccucauaacaaaaug

SEQ ID NO: 123677 - RNA, 24 nt, Human
auauauuuucaaaacuuugcagag

SEQ ID NO: 123678 - RNA, 33 nt, Human
auuaugccauacuaagaagacaucaaacaucuu

SEQ ID NO: 123679 - RNA, 24 nt, Human
caaaugacaauacaaguaccaaaa

SEQ ID NO: 123680 - RNA, 22 nt, Human
caacaugacacacaggaaaaaa

SEQ ID NO: 123681 - RNA, 21 nt, Human
caaguaccaaaaaccaacaug

SEQ ID NO: 123682 - RNA, 23 nt, Human
cacacaggaaaaaauaaaagugc

SEQ ID NO: 123683 - RNA, 21 nt, Human
cagcacacuaauaaaacauua

SEQ ID NO: 123684 - RNA, 23 nt, Human
cauacuaagaagacaucaaacau

SEQ ID NO: 123685 - RNA, 23 nt, Human
cauguagaaaauggaaaaaaacc

SEQ ID NO: 123686 - RNA, 19 nt, Human
ccaaaaaccaacaugacac

SEQ ID NO: 123687 - RNA, 27 nt, Human
ccaacaugacacacaggaaaaaauaaa

SEQ ID NO: 123688 - RNA, 20 nt, Human
ccagaaaacugcuccgcuga

SEQ ID NO: 123689 - RNA, 23 nt, Human
cuuacuggguccagggaucucca

SEQ ID NO: 123690 - RNA, 22 nt, Human
gaacaacaggauaccucccuca

SEQ ID NO: 123691 - RNA, 21 nt, Human
gaagacaucaaacaucuaaaa

SEQ ID NO: 123692 - RNA, 20 nt, Human
gaaugugauacauguauaau

SEQ ID NO: 123693 - RNA, 24 nt, Human
gacaauacaaguaccaaaaaccaa

SEQ ID NO: 123694 - RNA, 24 nt, Human
gccuuuucgguaagacuuuaagga

SEQ ID NO: 123695 - RNA, 21 nt, Human
guaacauauuccccaagaaaa

SEQ ID NO: 123696 - RNA, 24 nt, Human
uaacaaaauggucaaaaccuuuaa

SEQ ID NO: 123697 - RNA, 24 nt, Human
uaagaacaacaggauaccucccuc

SEQ ID NO: 123698 - RNA, 19 nt, Human
uaagaagacaucaaacauc

SEQ ID NO: 123699 - RNA, 26 nt, Human
uaagaagacaucaaacaucuaaaacc

SEQ ID NO: 123700 - RNA, 19 nt, Human
uaccaaaaaccaacaugac

SEQ ID NO: 123701 - RNA, 20 nt, Human
uaccaaaaaccaacaugaca

SEQ ID NO: 123702 - RNA, 21 nt, Human
uagaaaauggaaaaaaaccaa

SEQ ID NO: 123703 - RNA, 18 nt, Human
uauucuuacuggguccag

SEQ ID NO: 123704 - RNA, 23 nt, Human
uccacaauagauaucugaaaauc

SEQ ID NO: 123705 - RNA, 20 nt, Human
uccauguagaaaauggaaaa

SEQ ID NO: 123706 - RNA, 24 nt, Human
uccauguagaaaauggaaaaaaac

SEQ ID NO: 123707 - RNA, 22 nt, Human
ucccucaacagcacacuaauaa

SEQ ID NO: 123708 - RNA, 19 nt, Human
ucuccaaaugacaauacaa

SEQ ID NO: 123709 - RNA, 23 nt, Human
ucuccaaaugacaauacaaguac

SEQ ID NO: 123710 - RNA, 23 nt, Human
ucuccaaaugacaauacaaguac

SEQ ID NO: 123711 - RNA, 20 nt, Human
ugaaaaaauagcauacaaaa

SEQ ID NO: 123712 - RNA, 23 nt, Human
ugaaaaaauagcauacaaaauca

SEQ ID NO: 123713 - RNA, 21 nt, Human
ugaaaaucuuagcaaugcugu

SEQ ID NO: 123714 - RNA, 24 nt, Human
ugacaauacaaguaccaaaaacca

SEQ ID NO: 123715 - RNA, 25 nt, Human
ugacaauacaaguaccaaaaaccaa

SEQ ID NO: 123716 - RNA, 20 nt, Human
ugagaagagugaguaagaac

SEQ ID NO: 123717 - RNA, 22 nt, Human
ugagcuggguggaggcgcggag

SEQ ID NO: 123718 - RNA, 24 nt, Human
ugccaaaggguucaauaacuuauc

SEQ ID NO: 123719 - RNA, 20 nt, Human
ugcuccgcugaagacugggg

SEQ ID NO: 123720 - RNA, 21 nt, Human
ugcuuuuauuuaaaaaaccaa

SEQ ID NO: 123721 - RNA, 19 nt, Human
uggaaaaaaaccaacccuu

SEQ ID NO: 123722 - RNA, 24 nt, Human
uggaaaaaaaccaacccuuccuuc

SEQ ID NO: 123723 - RNA, 19 nt, Human
uguagaaaauggaaaaaaa

SEQ ID NO: 123724 - RNA, 22 nt, Human
uuaaauuuuuagaaauucugaa

SEQ ID NO: 123725 - RNA, 24 nt, Human
uuagaaaucuuuuauuguuucucc

SEQ ID NO: 123726 - RNA, 25 nt, Human
uucaauucaauauucauugaaagac

SEQ ID NO: 123727 - RNA, 20 nt, Human
uuccauacgaaauccacagc

SEQ ID NO: 123728 - RNA, 20 nt, Human
uuccccaagaaaacagaacu

SEQ ID NO: 123729 - RNA, 19 nt, Human
uugcuuuuauuuaaaaaac

SEQ ID NO: 123730 - RNA, 18 nt, Human
uuuuuuuuuuuuuuuuug

SEQ ID NO: 123731 - RNA, 19 nt, Human
uuuuuuuuuuuuuuuuuug

SEQ ID NO: 123732 - RNA, 23 nt, Human
aaaaaccagcauuucuauaccac

SEQ ID NO: 123733 - RNA, 21 nt, Human
aaacacaagacaaaaauccaa

SEQ ID NO: 123734 - RNA, 23 nt, Human
aaacagcuggggaucauuucuag

SEQ ID NO: 123735 - RNA, 25 nt, Human
aaaucaacccacuccugaaaacuga

SEQ ID NO: 123736 - RNA, 20 nt, Human
aaccgcugguucuccagaug

SEQ ID NO: 123737 - RNA, 21 nt, Human
aacuaaagaaacacaagacaa

SEQ ID NO: 123738 - RNA, 20 nt, Human
aagcaauaaaaacuguacaa

SEQ ID NO: 123739 - RNA, 26 nt, Human
acacaagacaaaaauccaacaagcaa

SEQ ID NO: 123740 - RNA, 19 nt, Human
acaggaaaaacguuccacg

SEQ ID NO: 123741 - RNA, 18 nt, Human
acuccugaaaacugaaaa

SEQ ID NO: 123742 - RNA, 19 nt, Human
agacaaaaauccaacaagc

SEQ ID NO: 123743 - RNA, 26 nt, Human
agacaaaaauccaacaagcaauaaaa

SEQ ID NO: 123744 - RNA, 20 nt, Human
caaaaacuaaagaaacacaa

SEQ ID NO: 123745 - RNA, 20 nt, Human
caacaagcaauaaaaacugu

SEQ ID NO: 123746 - RNA, 24 nt, Human
caacaagcaauaaaaacuguacaa

SEQ ID NO: 123747 - RNA, 21 nt, Human
caagacaaaaauccaacaagc

SEQ ID NO: 123748 - RNA, 20 nt, Human
cacaaaaacuaaagaaacac

SEQ ID NO: 123749 - RNA, 21 nt, Human
cacgucuuaagaacaggaaaa

SEQ ID NO: 123750 - RNA, 19 nt, Human
cacuuugcuaccugcugcc

SEQ ID NO: 123751 - RNA, 20 nt, Human
ccacgagacauacagcaacu

SEQ ID NO: 123752 - RNA, 24 nt, Human
ccacuccugaaaacugaaaaacca

SEQ ID NO: 123753 - RNA, 21 nt, Human
ccaucuucuacagcaaaauca

SEQ ID NO: 123754 - RNA, 23 nt, Human
cggcgucacuuugcuaccugcug

SEQ ID NO: 123755 - RNA, 24 nt, Human
cggcgucacuuugcuaccugcugc

SEQ ID NO: 123756 - RNA, 21 nt, Human
cuaaagaaacacaagacaaaa

SEQ ID NO: 123757 - RNA, 21 nt, Human
cugaaaacugaaaaaccagca

SEQ ID NO: 123758 - RNA, 20 nt, Human
cuuaagaacaggaaaaacgu

SEQ ID NO: 123759 - RNA, 21 nt, Human
gccaucuucuacagcaaaauc

SEQ ID NO: 123760 - RNA, 25 nt, Human
gccuagacacacaucaauaugaaag

SEQ ID NO: 123761 - RNA, 21 nt, Human
gcgucacuuugcuaccugcug

SEQ ID NO: 123762 - RNA, 22 nt, Human
gugccaucuucuacagcaaaau

SEQ ID NO: 123763 - RNA, 25 nt, Human
uaaagaaacacaagacaaaaaucca

SEQ ID NO: 123764 - RNA, 19 nt, Human
uaaccgcugguucuccaga

SEQ ID NO: 123765 - RNA, 25 nt, Human
uaagugccaucuucuacagcaaaau

SEQ ID NO: 123766 - RNA, 21 nt, Human
uaccacgagacauacagcaac

SEQ ID NO: 123767 - RNA, 18 nt, Human
uaccugcugccgcagcca

SEQ ID NO: 123768 - RNA, 19 nt, Human
uaucugaaaaauguguaac

SEQ ID NO: 123769 - RNA, 20 nt, Human
ucacaaaaacuaaagaaaca

SEQ ID NO: 123770 - RNA, 24 nt, Human
ucacgucuuaagaacaggaaaaac

SEQ ID NO: 123771 - RNA, 29 nt, Human
ucugaaaaauguguaacuuaaaaaaaagg

SEQ ID NO: 123772 - RNA, 24 nt, Human
uggccacagguccugccuagacac

SEQ ID NO: 123773 - RNA, 18 nt, Human
uguacacuguaggugcug

SEQ ID NO: 123774 - RNA, 24 nt, Human
uguguaacuuaaaaaaaaguuauu

SEQ ID NO: 123775 - RNA, 27 nt, Human
uguucaguucccuuuucuacaguccua

SEQ ID NO: 123776 - RNA, 24 nt, Human
uuauuaacaacuuaauacaagacu

SEQ ID NO: 123777 - RNA, 18 nt, Human
uuccacgggaauggagag

SEQ ID NO: 123778 - RNA, 23 nt, Human
uuucuagcuuuacgugauucacu

SEQ ID NO: 123779 - RNA, 21 nt, Human
acuucagaaaugcugcuuaga

SEQ ID NO: 123780 - RNA, 23 nt, Human
agccaccaaagaguccacuucag

SEQ ID NO: 123781 - RNA, 21 nt, Human
aggaaggaaaguccuuaaaaa

SEQ ID NO: 123782 - RNA, 22 nt, Human
agucaagccccaaggugaggca

SEQ ID NO: 123783 - RNA, 20 nt, Human
agucagaagagccuucugag

SEQ ID NO: 123784 - RNA, 22 nt, Human
caagccccaaggugaggcagag

SEQ ID NO: 123785 - RNA, 20 nt, Human
caccucuucaaccuucagcc

SEQ ID NO: 123786 - RNA, 21 nt, Human
caccucuucaaccuucagccc

SEQ ID NO: 123787 - RNA, 22 nt, Human
cacuucagaaaugcugcuuaga

SEQ ID NO: 123788 - RNA, 27 nt, Human
cagaagagccuucugagcuugggcacc

SEQ ID NO: 123789 - RNA, 24 nt, Human
cagcaugaguguucaagaagagaa

SEQ ID NO: 123790 - RNA, 19 nt, Human
cauauguguguaugugugu

SEQ ID NO: 123791 - RNA, 20 nt, Human
cauuccauggaccacuggaa

SEQ ID NO: 123792 - RNA, 21 nt, Human
cauuccauggaccacuggaau

SEQ ID NO: 123793 - RNA, 21 nt, Human
ccaaggugaggcagagccuga

SEQ ID NO: 123794 - RNA, 22 nt, Human
ccacaucaagagggcacagcca

SEQ ID NO: 123795 - RNA, 18 nt, Human
ccagugugccaccuacca

SEQ ID NO: 123796 - RNA, 20 nt, Human
ccccaaggugaggcagagcc

SEQ ID NO: 123797 - RNA, 18 nt, Human
cccuugguuucagcauuc

SEQ ID NO: 123798 - RNA, 20 nt, Human
cucugaucuacacucuuugc

SEQ ID NO: 123799 - RNA, 21 nt, Human
cucuucaaccuucagccccag

SEQ ID NO: 123800 - RNA, 24 nt, Human
cucuucaaccuucagccccagucc

SEQ ID NO: 123801 - RNA, 20 nt, Human
cuucugagcuugggcaccca

SEQ ID NO: 123802 - RNA, 25 nt, Human
ggagauggaggaaggaaaguccuua

SEQ ID NO: 123803 - RNA, 23 nt, Human
uaaaaugcaaagccaccaaagag

SEQ ID NO: 123804 - RNA, 23 nt, Human
uaaacaaagccugccucaccaca

SEQ ID NO: 123805 - RNA, 19 nt, Human
uauaaacaaagccugccuc

SEQ ID NO: 123806 - RNA, 22 nt, Human
uauacaaaagucaagccccaag

SEQ ID NO: 123807 - RNA, 20 nt, Human
uauaugacauauguguguau

SEQ ID NO: 123808 - RNA, 21 nt, Human
uauaugacauauguguguaug

SEQ ID NO: 123809 - RNA, 20 nt, Human
uaugacauauguguguaugu

SEQ ID NO: 123810 - RNA, 26 nt, Human
ucaaccuucagccccagucccaauca

SEQ ID NO: 123811 - RNA, 23 nt, Human
ucagccccagucccaaucaagga

SEQ ID NO: 123812 - RNA, 21 nt, Human
ucuuugcccaguagucagaag

SEQ ID NO: 123813 - RNA, 18 nt, Human
ugacauauguguguaugu

SEQ ID NO: 123814 - RNA, 20 nt, Human
ugagaaugcgcaagcuauaa

SEQ ID NO: 123815 - RNA, 21 nt, Human
ugaggcagagccugaucucau

SEQ ID NO: 123816 - RNA, 21 nt, Human
ugccaguuuguuccagagaug

SEQ ID NO: 123817 - RNA, 21 nt, Human
ugccugagaagaagcauucca

SEQ ID NO: 123818 - RNA, 18 nt, Human
ugccugguggugccagca

SEQ ID NO: 123819 - RNA, 18 nt, Human
ugcuaguaauauaugaca

SEQ ID NO: 123820 - RNA, 19 nt, Human
uggagauggaggaaggaaa

SEQ ID NO: 123821 - RNA, 19 nt, Human
ugggcuuucagcaugagug

SEQ ID NO: 123822 - RNA, 22 nt, Human
ugggcuuucagcaugaguguuc

SEQ ID NO: 123823 - RNA, 20 nt, Human
uguauguguguggguauaua

SEQ ID NO: 123824 - RNA, 23 nt, Human
uguauguguguggguauauacau

SEQ ID NO: 123825 - RNA, 20 nt, Human
uguggguauauacauuuaca

SEQ ID NO: 123826 - RNA, 19 nt, Human
uguguguaugugugugggu

SEQ ID NO: 123827 - RNA, 22 nt, Human
uguuccagagaugagcuugcuc

SEQ ID NO: 123828 - RNA, 21 nt, Human
uucacugcugcucugaucuac

SEQ ID NO: 123829 - RNA, 21 nt, Human
uuggagacuuuaacaguuuua

SEQ ID NO: 123830 - RNA, 19 nt, Human
uuuaaaaugcaaagccacc

SEQ ID NO: 123831 - RNA, 23 nt, Human
uuugcacauuuuucaagcauucc

SEQ ID NO: 123832 - RNA, 19 nt, Human
aaaacaaauacugaaaggc

SEQ ID NO: 123833 - RNA, 20 nt, Human
aaaacaaauacugaaaggcu

SEQ ID NO: 123834 - RNA, 21 nt, Human
aaaacacacuggcuugaaaca

SEQ ID NO: 123835 - RNA, 20 nt, Human
aaauguagaggugaaauacg

SEQ ID NO: 123836 - RNA, 22 nt, Human
aacagacacuuaaauauacaug

SEQ ID NO: 123837 - RNA, 22 nt, Human
aagaagcccaguucuggguggc

SEQ ID NO: 123838 - RNA, 25 nt, Human
aagcagcagcagcgguggcagcagc

SEQ ID NO: 123839 - RNA, 23 nt, Human
aagcaugcucuugauuacaagcc

SEQ ID NO: 123840 - RNA, 21 nt, Human
aagcaugggcugacaacacca

SEQ ID NO: 123841 - RNA, 19 nt, Human
aagguaucacuggagcaaa

SEQ ID NO: 123842 - RNA, 20 nt, Human
acaaugcauaguaaacacaa

SEQ ID NO: 123843 - RNA, 27 nt, Human
acacaggagccuuucaagagagcuuca

SEQ ID NO: 123844 - RNA, 22 nt, Human
acaggcaccgggcccuguaccg

SEQ ID NO: 123845 - RNA, 22 nt, Human
accugcaaauuuauucuugacu

SEQ ID NO: 123846 - RNA, 24 nt, Human
acugggugcccagggagcugggac

SEQ ID NO: 123847 - RNA, 18 nt, Human
acuuggugguguuugcuc

SEQ ID NO: 123848 - RNA, 22 nt, Human
agaaaaaacacacuggcuugaa

SEQ ID NO: 123849 - RNA, 18 nt, Human
agaacccaggcaggggca

SEQ ID NO: 123850 - RNA, 18 nt, Human
agaacucucccagccucc

SEQ ID NO: 123851 - RNA, 21 nt, Human
agacaaaccccaaaucaacua

SEQ ID NO: 123852 - RNA, 20 nt, Human
agcagcagcagcgguggcag

SEQ ID NO: 123853 - RNA, 22 nt, Human
agcagcgguggcagcagcagcc

SEQ ID NO: 123854 - RNA, 19 nt, Human
agcgguggcagcagcagcc

SEQ ID NO: 123855 - RNA, 21 nt, Human
agcugggguuguuggccaggg

SEQ ID NO: 123856 - RNA, 21 nt, Human
aggaacagcucgccuuaaccc

SEQ ID NO: 123857 - RNA, 23 nt, Human
aggcaggggcacuucuggugggg

SEQ ID NO: 123858 - RNA, 28 nt, Human
agggagcugggacagaacccaggcaggg

SEQ ID NO: 123859 - RNA, 18 nt, Human
agguggcagcucaggggg

SEQ ID NO: 123860 - RNA, 21 nt, Human
aguaaacacaacucuacugaa

SEQ ID NO: 123861 - RNA, 23 nt, Human
agugccccagcauccugggugac

SEQ ID NO: 123862 - RNA, 22 nt, Human
auagaaaccaucaaagacaaac

SEQ ID NO: 123863 - RNA, 18 nt, Human
auaugcuggcagacagag

SEQ ID NO: 123864 - RNA, 18 nt, Human
augguaaagggaggagga

SEQ ID NO: 123865 - RNA, 22 nt, Human
auuaggaaagagcuagcggaga

SEQ ID NO: 123866 - RNA, 23 nt, Human
caaaacaaauacugaaaggcuuu

SEQ ID NO: 123867 - RNA, 24 nt, Human
caaaacaaauacugaaaggcuuua

SEQ ID NO: 123868 - RNA, 18 nt, Human
caaagacaaaccccaaau

SEQ ID NO: 123869 - RNA, 21 nt, Human
caaauauguacacguagcuug

SEQ ID NO: 123870 - RNA, 22 nt, Human
caaauggacucaucuguuggga

SEQ ID NO: 123871 - RNA, 23 nt, Human
caagguaucacuggagcaaacaa

SEQ ID NO: 123872 - RNA, 24 nt, Human
cacaaaacaaugcauaguaaacac

SEQ ID NO: 123873 - RNA, 22 nt, Human
cacacacugucucugcgccucu

SEQ ID NO: 123874 - RNA, 21 nt, Human
cacagagccuuacaucaaaac

SEQ ID NO: 123875 - RNA, 21 nt, Human
cacguagcuugaaaaaucacc

SEQ ID NO: 123876 - RNA, 21 nt, Human
cagaauucugggcuguggcau

SEQ ID NO: 123877 - RNA, 22 nt, Human
cagcaacggcagaagcagcagc

SEQ ID NO: 123878 - RNA, 23 nt, Human
cagcagcgguggcagcagcagcc

SEQ ID NO: 123879 - RNA, 20 nt, Human
cagcaggcugaagcuggggu

SEQ ID NO: 123880 - RNA, 21 nt, Human
cagcauccugggugacuugcc

SEQ ID NO: 123881 - RNA, 18 nt, Human
cagcucagggggaauauc

SEQ ID NO: 123882 - RNA, 23 nt, Human
caggagccuuucaagagagcuuc

SEQ ID NO: 123883 - RNA, 19 nt, Human
caggggcacuucugguggg

SEQ ID NO: 123884 - RNA, 19 nt, Human
caguuccccugaugcuuuc

SEQ ID NO: 123885 - RNA, 19 nt, Human
cauaugcuggcagacagag

SEQ ID NO: 123886 - RNA, 25 nt, Human
caucaaagacaaaccccaaaucaac

SEQ ID NO: 123887 - RNA, 18 nt, Human
cauuguauaauaaacaca

SEQ ID NO: 123888 - RNA, 18 nt, Human
ccaaucagauggccucug

SEQ ID NO: 123889 - RNA, 27 nt, Human
cccaaaccacagagccuuacaucaaaa

SEQ ID NO: 123890 - RNA, 24 nt, Human
cccaaaucaacuaauaauguuuac

SEQ ID NO: 123891 - RNA, 22 nt, Human
cccaaucagauggccucugaag

SEQ ID NO: 123892 - RNA, 19 nt, Human
ccccagcauccugggugac

SEQ ID NO: 123893 - RNA, 20 nt, Human
cccccccaaaccacagagcc

SEQ ID NO: 123894 - RNA, 26 nt, Human
cccuguaccgggcucugccugaggcu

SEQ ID NO: 123895 - RNA, 22 nt, Human
ccucaaguugcacacccagucu

SEQ ID NO: 123896 - RNA, 19 nt, Human
ccucugaaggcaggccugg

SEQ ID NO: 123897 - RNA, 22 nt, Human
ccuggagcuuucugggcuccug

SEQ ID NO: 123898 - RNA, 24 nt, Human
ccuguaccgggcucugccugaggc

SEQ ID NO: 123899 - RNA, 18 nt, Human
cucaaauuguaacgggag

SEQ ID NO: 123900 - RNA, 21 nt, Human
cucauugcagucaggugacga

SEQ ID NO: 123901 - RNA, 20 nt, Human
cucccaaaucuggagaacuc

SEQ ID NO: 123902 - RNA, 23 nt, Human
cucucggucugaaugguaaaggg

SEQ ID NO: 123903 - RNA, 23 nt, Human
cugaggcucuggcugcccagcag

SEQ ID NO: 123904 - RNA, 22 nt, Human
cugcugccgcugugacccaugc

SEQ ID NO: 123905 - RNA, 20 nt, Human
cuggaaguggucuucuucuu

SEQ ID NO: 123906 - RNA, 20 nt, Human
cugggcuccugacgauuucc

SEQ ID NO: 123907 - RNA, 19 nt, Human
cugggguuguuggccaggg

SEQ ID NO: 123908 - RNA, 21 nt, Human
cuucuggugggguggccuugg

SEQ ID NO: 123909 - RNA, 25 nt, Human
cuucuuucccgauuccuggagcuuu

SEQ ID NO: 123910 - RNA, 22 nt, Human
cuuuaaaccaggaacagcucgc

SEQ ID NO: 123911 - RNA, 18 nt, Human
gaaacuggaaguggucuu

SEQ ID NO: 123912 - RNA, 20 nt, Human
gaccugggaacuggcuggca

SEQ ID NO: 123913 - RNA, 18 nt, Human
gagaggaugggacacugg

SEQ ID NO: 123914 - RNA, 18 nt, Human
gaggaugggacacugggg

SEQ ID NO: 123915 - RNA, 20 nt, Human
gcaaaagagauuaagaauca

SEQ ID NO: 123916 - RNA, 20 nt, Human
gcaacggcagaagcagcagc

SEQ ID NO: 123917 - RNA, 18 nt, Human
gcagcagcagcgguggca

SEQ ID NO: 123918 - RNA, 20 nt, Human
gccagauuucaaauguagag

SEQ ID NO: 123919 - RNA, 21 nt, Human
gcucuggcugcccagcaggcu

SEQ ID NO: 123920 - RNA, 23 nt, Human
ggaaaaccauuuacaaaauuuuc

SEQ ID NO: 123921 - RNA, 19 nt, Human
ggagaacucucccagccuc

SEQ ID NO: 123922 - RNA, 21 nt, Human
ggaugggacacugggggcugg

SEQ ID NO: 123923 - RNA, 21 nt, Human
ggcaccgggcccuguaccggg

SEQ ID NO: 123924 - RNA, 26 nt, Human
ggcgaaauggggaagcaugcucuuga

SEQ ID NO: 123925 - RNA, 23 nt, Human
gggguuggggcuggcgcaaaaag

SEQ ID NO: 123926 - RNA, 24 nt, Human
ggguauggaucgacaccacuuccu

SEQ ID NO: 123927 - RNA, 21 nt, Human
gggugcacacaagcugggcuu

SEQ ID NO: 123928 - RNA, 19 nt, Human
gguagagagagggauaagc

SEQ ID NO: 123929 - RNA, 18 nt, Human
ggugcccagggagcuggg

SEQ ID NO: 123930 - RNA, 23 nt, Human
gucuggaaacuggaaguggucuu

SEQ ID NO: 123931 - RNA, 19 nt, Human
gucuggccugagugugaga

SEQ ID NO: 123932 - RNA, 23 nt, Human
guucuggguggcaucaagugcuu

SEQ ID NO: 123933 - RNA, 23 nt, Human
uaaaacagcuucugcuguaaagc

SEQ ID NO: 123934 - RNA, 18 nt, Human
uaaacacaaaacaaugca

SEQ ID NO: 123935 - RNA, 27 nt, Human
uaaaccaggaacagcucgccuuaaccc

SEQ ID NO: 123936 - RNA, 20 nt, Human
uaaagugccccagcauccuu

SEQ ID NO: 123937 - RNA, 22 nt, Human
uacagaacgaagaaaaaacaca

SEQ ID NO: 123938 - RNA, 24 nt, Human
uacagaacgaagaaaaaacacacu

SEQ ID NO: 123939 - RNA, 22 nt, Human
uacaggcaccgggcccuguacc

SEQ ID NO: 123940 - RNA, 24 nt, Human
uacccugcuggaggaacuuggugg

SEQ ID NO: 123941 - RNA, 18 nt, Human
uacucuagcuccuccagg

SEQ ID NO: 123942 - RNA, 22 nt, Human
uagaaaccaucaaagacaaacc

SEQ ID NO: 123943 - RNA, 19 nt, Human
uagaggugaaauacgaggu

SEQ ID NO: 123944 - RNA, 18 nt, Human
uaugcuggcagacagagu

SEQ ID NO: 123945 - RNA, 19 nt, Human
ucacacaaggcaauaggau

SEQ ID NO: 123946 - RNA, 20 nt, Human
uccacgagggcuucuuuccc

SEQ ID NO: 123947 - RNA, 21 nt, Human
ucuaugggcauccugcucaga

SEQ ID NO: 123948 - RNA, 24 nt, Human
ucuccuguuaacaguuccccugau

SEQ ID NO: 123949 - RNA, 21 nt, Human
ucugccugaggcucuggcugc

SEQ ID NO: 123950 - RNA, 20 nt, Human
ucugggcuguggcauuuuga

SEQ ID NO: 123951 - RNA, 19 nt, Human
ucuucaucugggcucacac

SEQ ID NO: 123952 - RNA, 23 nt, Human
ugaaaggcuuuaaaccaggaaca

SEQ ID NO: 123953 - RNA, 21 nt, Human
ugagaaaaguuuacaggacag

SEQ ID NO: 123954 - RNA, 23 nt, Human
ugagaaaaguuuacaggacagug

SEQ ID NO: 123955 - RNA, 21 nt, Human
ugagaggaugggacacugggg

SEQ ID NO: 123956 - RNA, 27 nt, Human
ugagaggaugggacacugggggcugga

SEQ ID NO: 123957 - RNA, 18 nt, Human
ugagcugguggggacuca

SEQ ID NO: 123958 - RNA, 19 nt, Human
ugaggcucuggcugcccag

SEQ ID NO: 123959 - RNA, 21 nt, Human
ugcccagcaggcugaagcugg

SEQ ID NO: 123960 - RNA, 23 nt, Human
ugcccaggggagucuggccugag

SEQ ID NO: 123961 - RNA, 18 nt, Human
ugccccagcauccugggu

SEQ ID NO: 123962 - RNA, 20 nt, Human
ugcuacaggcaccgggcccu

SEQ ID NO: 123963 - RNA, 19 nt, Human
ugcuguaaagcucauuagg

SEQ ID NO: 123964 - RNA, 24 nt, Human
uggcagcaacggcagaagcagcag

SEQ ID NO: 123965 - RNA, 19 nt, Human
uggccagaaggugagugcu

SEQ ID NO: 123966 - RNA, 20 nt, Human
uggccauacccugcuggagg

SEQ ID NO: 123967 - RNA, 24 nt, Human
ugggacagaacccaggcaggggca

SEQ ID NO: 123968 - RNA, 23 nt, Human
ugggcuccugacgauuucccacc

SEQ ID NO: 123969 - RNA, 21 nt, Human
ugggugacuugcccagaauuc

SEQ ID NO: 123970 - RNA, 20 nt, Human
uguuuacagauguucccccc

SEQ ID NO: 123971 - RNA, 22 nt, Human
uguuuacagauguuccccccca

SEQ ID NO: 123972 - RNA, 24 nt, Human
uuaacaguuccccugaugcuuucu

SEQ ID NO: 123973 - RNA, 22 nt, Human
uuccuggagcuuucugggcucc

SEQ ID NO: 123974 - RNA, 22 nt, Human
uucuaugggcauccugcucaga

SEQ ID NO: 123975 - RNA, 25 nt, Human
uucuuccugggcugcucuuguagag

SEQ ID NO: 123976 - RNA, 19 nt, Human
uuuacagauguuccccccc

SEQ ID NO: 123977 - RNA, 21 nt, Human
aaaaggcacacaucagagaga

SEQ ID NO: 123978 - RNA, 22 nt, Human
agguaguguauuagagcagagc

SEQ ID NO: 123979 - RNA, 21 nt, Human
auaaggaaaagacuuucucca

SEQ ID NO: 123980 - RNA, 23 nt, Human
caaaaggcacacaucagagagac

SEQ ID NO: 123981 - RNA, 21 nt, Human
caagagaaaaugagagacucg

SEQ ID NO: 123982 - RNA, 19 nt, Human
cgaccguccaucgcugcuc

SEQ ID NO: 123983 - RNA, 20 nt, Human
cgggugaugaggaacgucac

SEQ ID NO: 123984 - RNA, 19 nt, Human
cguccacgaacauguagga

SEQ ID NO: 123985 - RNA, 24 nt, Human
gagcagaaugcagggguuacugug

SEQ ID NO: 123986 - RNA, 21 nt, Human
gccggaucggcaaggccagga

SEQ ID NO: 123987 - RNA, 23 nt, Human
ggcaaaacuaacugguccacaag

SEQ ID NO: 123988 - RNA, 19 nt, Human
ggugaugaggaacgucacc

SEQ ID NO: 123989 - RNA, 18 nt, Human
guccacaagagaaaauga

SEQ ID NO: 123990 - RNA, 18 nt, Human
ucacccacugcagggcgg

SEQ ID NO: 123991 - RNA, 24 nt, Human
ucagagagacaguugcaaacucag

SEQ ID NO: 123992 - RNA, 18 nt, Human
ucauugaggagggggcuc

SEQ ID NO: 123993 - RNA, 24 nt, Human
uccacaagagaaaaugagagacuc

SEQ ID NO: 123994 - RNA, 20 nt, Human
ucgcuggagaacguguucuc

SEQ ID NO: 123995 - RNA, 21 nt, Human
ucugcacgaugaacuccggga

SEQ ID NO: 123996 - RNA, 21 nt, Human
uuucuuuucaauaaugucuga

SEQ ID NO: 123997 - RNA, 24 nt, Human
uuuuuuuuuuuuuuuuuuucuuuu

SEQ ID NO: 123998 - RNA, 21 nt, Human
aaagaaagagauauauuaaaa

SEQ ID NO: 123999 - RNA, 20 nt, Human
aagaaagagauauauuaaaa

SEQ ID NO: 124000 - RNA, 23 nt, Human
aagaaagagauauauuaaaauca

SEQ ID NO: 124001 - RNA, 19 nt, Human
aaggacaguucuuuuuguu

SEQ ID NO: 124002 - RNA, 20 nt, Human
aaggcgacggccacugcaga

SEQ ID NO: 124003 - RNA, 20 nt, Human
aauaaaaaggcacacucgaa

SEQ ID NO: 124004 - RNA, 23 nt, Human
aauaaaaaggcacacucgaaaaa

SEQ ID NO: 124005 - RNA, 19 nt, Human
agagauggcagggaucacc

SEQ ID NO: 124006 - RNA, 24 nt, Human
agcaggcucuuccugcgcugacuu

SEQ ID NO: 124007 - RNA, 27 nt, Human
aucaauaguagugauaagaguuuccuu

SEQ ID NO: 124008 - RNA, 22 nt, Human
augucggaagaaaaagaaagag

SEQ ID NO: 124009 - RNA, 20 nt, Human
caaaauaaaguagaugaaua

SEQ ID NO: 124010 - RNA, 25 nt, Human
caauggcuucuuuucucccgugucc

SEQ ID NO: 124011 - RNA, 23 nt, Human
cacucgaaaaauuugagcgcaga

SEQ ID NO: 124012 - RNA, 24 nt, Human
cccguguccaaagcaggccggggc

SEQ ID NO: 124013 - RNA, 18 nt, Human
cggaagaaaaagaaagag

SEQ ID NO: 124014 - RNA, 22 nt, Human
cuagaaucaauaguagugauaa

SEQ ID NO: 124015 - RNA, 24 nt, Human
gacaguucuuuuuguuuuguuucu

SEQ ID NO: 124016 - RNA, 21 nt, Human
gaguuuccuugaaacaccgcc

SEQ ID NO: 124017 - RNA, 22 nt, Human
guaguuagcaauggcuucuuuu

SEQ ID NO: 124018 - RNA, 22 nt, Human
uaaaguagaugaauaaaaaggc

SEQ ID NO: 124019 - RNA, 23 nt, Human
uacacauuaaggaaacaucaaaa

SEQ ID NO: 124020 - RNA, 19 nt, Human
ucaauaguagugauaagaa

SEQ ID NO: 124021 - RNA, 20 nt, Human
uccaccaacuggaacuagaa

SEQ ID NO: 124022 - RNA, 23 nt, Human
aaaaucccacccaaucacagaaa

SEQ ID NO: 124023 - RNA, 21 nt, Human
aaccuugcuuucaccaccaac

SEQ ID NO: 124024 - RNA, 20 nt, Human
aagcagaggaggcggagacc

SEQ ID NO: 124025 - RNA, 22 nt, Human
aagguaccccccauccccaacc

SEQ ID NO: 124026 - RNA, 24 nt, Human
aagguaccccccauccccaacccc

SEQ ID NO: 124027 - RNA, 24 nt, Human
aagguaccccccauccccaacccc

SEQ ID NO: 124028 - RNA, 19 nt, Human
aaguagcugggacuacagg

SEQ ID NO: 124029 - RNA, 20 nt, Human
aaguagcugggacuacaggc

SEQ ID NO: 124030 - RNA, 21 nt, Human
acagaaaaggcauccucugua

SEQ ID NO: 124031 - RNA, 24 nt, Human
acaggccccccgagauguacacac

SEQ ID NO: 124032 - RNA, 21 nt, Human
acaggcgcccaccaccacgcc

SEQ ID NO: 124033 - RNA, 22 nt, Human
accccccauccccaacccccau

SEQ ID NO: 124034 - RNA, 25 nt, Human
accccgcgaacccccagggccggcc

SEQ ID NO: 124035 - RNA, 20 nt, Human
acgggguuucacuguguuug

SEQ ID NO: 124036 - RNA, 21 nt, Human
acgggguuucacuguguuugu

SEQ ID NO: 124037 - RNA, 24 nt, Human
acgggguuucacuguguuuguuag

SEQ ID NO: 124038 - RNA, 24 nt, Human
agagaccugucucccaaguagcug

SEQ ID NO: 124039 - RNA, 22 nt, Human
agauaugcacagcccccccccg

SEQ ID NO: 124040 - RNA, 18 nt, Human
agaucugugcucugcgac

SEQ ID NO: 124041 - RNA, 19 nt, Human
agaugcggacacagccacc

SEQ ID NO: 124042 - RNA, 23 nt, Human
agaugcggacacagccaccccgc

SEQ ID NO: 124043 - RNA, 21 nt, Human
agcagaggaggcggagaccug

SEQ ID NO: 124044 - RNA, 21 nt, Human
agcagcuccagcagccccagg

SEQ ID NO: 124045 - RNA, 20 nt, Human
agcaggggcaggcaagaaga

SEQ ID NO: 124046 - RNA, 18 nt, Human
agcccccgcggaugcacc

SEQ ID NO: 124047 - RNA, 18 nt, Human
agccugcaguccugaaga

SEQ ID NO: 124048 - RNA, 21 nt, Human
agcggagaaacgagaagcaga

SEQ ID NO: 124049 - RNA, 19 nt, Human
aggcaagaagacaccccgc

SEQ ID NO: 124050 - RNA, 19 nt, Human
aggcagcagcuccagcagc

SEQ ID NO: 124051 - RNA, 20 nt, Human
aggccgaagccaaaugguga

SEQ ID NO: 124052 - RNA, 21 nt, Human
aggcggagaccugccccagaa

SEQ ID NO: 124053 - RNA, 22 nt, Human
aguaaggucaggacuacagcug

SEQ ID NO: 124054 - RNA, 23 nt, Human
aguagcugggacuacaggcgccc

SEQ ID NO: 124055 - RNA, 19 nt, Human
auaaaaagggaaaaaaucc

SEQ ID NO: 124056 - RNA, 21 nt, Human
caagaagacaccccgcgaacc

SEQ ID NO: 124057 - RNA, 25 nt, Human
caagguaccccccauccccaacccc

SEQ ID NO: 124058 - RNA, 30 nt, Human
cacacagcaccccccagaugcgagcagccu

SEQ ID NO: 124059 - RNA, 20 nt, Human
cacagcccccccccgaaaug

SEQ ID NO: 124060 - RNA, 27 nt, Human
cacagccucaucucacagcuucccagg

SEQ ID NO: 124061 - RNA, 18 nt, Human
cacaugucccccccuagg

SEQ ID NO: 124062 - RNA, 25 nt, Human
cacccacgcgcccgccugcugccag

SEQ ID NO: 124063 - RNA, 25 nt, Human
caccccccccggguugcgcacagcc

SEQ ID NO: 124064 - RNA, 22 nt, Human
caccccgcgaacccccagggcc

SEQ ID NO: 124065 - RNA, 22 nt, Human
caccccucaagaugcgcacagc

SEQ ID NO: 124066 - RNA, 18 nt, Human
cagaacagaggcagcagc

SEQ ID NO: 124067 - RNA, 18 nt, Human
cagagacacgggagccac

SEQ ID NO: 124068 - RNA, 21 nt, Human
cagagauaagcacgugucccc

SEQ ID NO: 124069 - RNA, 23 nt, Human
cagagccugggugagccugggag

SEQ ID NO: 124070 - RNA, 25 nt, Human
cagaggcagcagcuccagcagcccc

SEQ ID NO: 124071 - RNA, 20 nt, Human
cagcagcuccagcagcccca

SEQ ID NO: 124072 - RNA, 21 nt, Human
cagcagcuccagcagccccag

SEQ ID NO: 124073 - RNA, 22 nt, Human
cagcaggggcaggcaagaagac

SEQ ID NO: 124074 - RNA, 20 nt, Human
caggaaggggcugcaaggua

SEQ ID NO: 124075 - RNA, 25 nt, Human
caggaccgaacacccgaagucuacc

SEQ ID NO: 124076 - RNA, 25 nt, Human
caggcaagaagacaccccgcgaacc

SEQ ID NO: 124077 - RNA, 21 nt, Human
caggcgcccaccaccacgccu

SEQ ID NO: 124078 - RNA, 22 nt, Human
cagucccuccccucuccugggg

SEQ ID NO: 124079 - RNA, 21 nt, Human
cauaaaaagggaaaaaauccc

SEQ ID NO: 124080 - RNA, 22 nt, Human
cauaaaaagggaaaaaauccca

SEQ ID NO: 124081 - RNA, 19 nt, Human
cauccccaacccccauguc

SEQ ID NO: 124082 - RNA, 19 nt, Human
cauccuagggcuaaagggu

SEQ ID NO: 124083 - RNA, 19 nt, Human
ccacagccagcagcagcgg

SEQ ID NO: 124084 - RNA, 21 nt, Human
ccacguguuauucaggcugga

SEQ ID NO: 124085 - RNA, 21 nt, Human
ccagcagccccagggggcucu

SEQ ID NO: 124086 - RNA, 20 nt, Human
ccaggaccgaacacccgaag

SEQ ID NO: 124087 - RNA, 24 nt, Human
ccaggggccagucccuccccucuc

SEQ ID NO: 124088 - RNA, 19 nt, Human
ccagggggcucuagccaca

SEQ ID NO: 124089 - RNA, 23 nt, Human
cccaaguagcugggacuacaggc

SEQ ID NO: 124090 - RNA, 23 nt, Human
cccaaguagcugggacuacaggc

SEQ ID NO: 124091 - RNA, 22 nt, Human
cccacgcgcccgccugcugcca

SEQ ID NO: 124092 - RNA, 21 nt, Human
cccaggggccagucccucccc

SEQ ID NO: 124093 - RNA, 26 nt, Human
cccaugucuggagcagccugggagga

SEQ ID NO: 124094 - RNA, 19 nt, Human
ccccaagaugcacaggccc

SEQ ID NO: 124095 - RNA, 23 nt, Human
ccccagaugcgagcagccccccu

SEQ ID NO: 124096 - RNA, 22 nt, Human
ccccauccccaacccccauguc

SEQ ID NO: 124097 - RNA, 24 nt, Human
ccccauccccaacccccaugucug

SEQ ID NO: 124098 - RNA, 20 nt, Human
cccccagauaugcacagccc

SEQ ID NO: 124099 - RNA, 24 nt, Human
ccccccaagaugcacaggcccccc

SEQ ID NO: 124100 - RNA, 24 nt, Human
ccccccauccccaacccccauguc

SEQ ID NO: 124101 - RNA, 21 nt, Human
cccccccgagaugcacacagc

SEQ ID NO: 124102 - RNA, 25 nt, Human
ccccccgagaugcacacagcacccc

SEQ ID NO: 124103 - RNA, 22 nt, Human
ccccccgagauguacacacccc

SEQ ID NO: 124104 - RNA, 24 nt, Human
ccccccggguugcgcacagccccc

SEQ ID NO: 124105 - RNA, 21 nt, Human
cccccggguugcgcacagccc

SEQ ID NO: 124106 - RNA, 20 nt, Human
cccccugcacccacgcgccc

SEQ ID NO: 124107 - RNA, 21 nt, Human
cccccugcacccacgcgcccg

SEQ ID NO: 124108 - RNA, 20 nt, Human
ccccugggccuugccccagg

SEQ ID NO: 124109 - RNA, 23 nt, Human
ccgaacacccgaagucuacccaa

SEQ ID NO: 124110 - RNA, 21 nt, Human
ccucugccucccagccugagc

SEQ ID NO: 124111 - RNA, 22 nt, Human
ccugcaguccugaagacgccuc

SEQ ID NO: 124112 - RNA, 27 nt, Human
ccugcugccagagccacucuccggagc

SEQ ID NO: 124113 - RNA, 22 nt, Human
ccugggagaggaaaccagagcu

SEQ ID NO: 124114 - RNA, 19 nt, Human
ccuugccccaggcaucuac

SEQ ID NO: 124115 - RNA, 23 nt, Human
ccuuguuugaauucagcaggcca

SEQ ID NO: 124116 - RNA, 21 nt, Human
cgaaaugcgcacagccgcccc

SEQ ID NO: 124117 - RNA, 27 nt, Human
cgaacacccgaagucuacccaaagccu

SEQ ID NO: 124118 - RNA, 22 nt, Human
cgaccaggaccgaacacccgaa

SEQ ID NO: 124119 - RNA, 21 nt, Human
cgagaugcacacagcaccccc

SEQ ID NO: 124120 - RNA, 19 nt, Human
cgagaugcgcacagccccc

SEQ ID NO: 124121 - RNA, 19 nt, Human
cgcgcaacaccccccccgg

SEQ ID NO: 124122 - RNA, 23 nt, Human
cgcgcaacaccccccccggguug

SEQ ID NO: 124123 - RNA, 21 nt, Human
cgcggaugcacacagcccccc

SEQ ID NO: 124124 - RNA, 18 nt, Human
cgcuucuuuaaagaucug

SEQ ID NO: 124125 - RNA, 19 nt, Human
cggagaaacgagaagcaga

SEQ ID NO: 124126 - RNA, 22 nt, Human
cggaugcacacagccccccaag

SEQ ID NO: 124127 - RNA, 28 nt, Human
cgggguuucacuguguuuguuagucagg

SEQ ID NO: 124128 - RNA, 21 nt, Human
cuacccaaagccuucugcacu

SEQ ID NO: 124129 - RNA, 24 nt, Human
cucacagcuucccaggggccaguc

SEQ ID NO: 124130 - RNA, 20 nt, Human
cucagcaggggcaggcaaga

SEQ ID NO: 124131 - RNA, 19 nt, Human
cuccagcagccccaggggg

SEQ ID NO: 124132 - RNA, 21 nt, Human
cucccaccaaagccauccuag

SEQ ID NO: 124133 - RNA, 21 nt, Human
cuccuggccucgcacacgauc

SEQ ID NO: 124134 - RNA, 20 nt, Human
cucuccggagccugcagucc

SEQ ID NO: 124135 - RNA, 19 nt, Human
cucugccaaaggccgggcc

SEQ ID NO: 124136 - RNA, 27 nt, Human
cugcacugaagggggcaacagagacac

SEQ ID NO: 124137 - RNA, 20 nt, Human
cuggaaagaugggcagcaga

SEQ ID NO: 124138 - RNA, 18 nt, Human
cuggagcagccugggagg

SEQ ID NO: 124139 - RNA, 22 nt, Human
cuugcuccucugccaaaggccg

SEQ ID NO: 124140 - RNA, 20 nt, Human
gaaaugcgcacagccgcccc

SEQ ID NO: 124141 - RNA, 21 nt, Human
gaacacccgaagucuacccaa

SEQ ID NO: 124142 - RNA, 18 nt, Human
gaacccccagggccggcc

SEQ ID NO: 124143 - RNA, 21 nt, Human
gaagcagaggaggcggagacc

SEQ ID NO: 124144 - RNA, 21 nt, Human
gacuacagcugggccacagcc

SEQ ID NO: 124145 - RNA, 20 nt, Human
gaggaggccugccugcaucu

SEQ ID NO: 124146 - RNA, 21 nt, Human
gaugcgcgcaacacccccccc

SEQ ID NO: 124147 - RNA, 22 nt, Human
gcaagaaagagcagagcucaga

SEQ ID NO: 124148 - RNA, 21 nt, Human
gcaggcaagaagacaccccgc

SEQ ID NO: 124149 - RNA, 18 nt, Human
gccucaucucacagcuuc

SEQ ID NO: 124150 - RNA, 24 nt, Human
gccucccagccugagcagagccug

SEQ ID NO: 124151 - RNA, 24 nt, Human
gccuggcuaauuuuuuuguauuuu

SEQ ID NO: 124152 - RNA, 19 nt, Human
gcgcccgccugcugccaga

SEQ ID NO: 124153 - RNA, 21 nt, Human
gcggagaaacgagaagcagag

SEQ ID NO: 124154 - RNA, 21 nt, Human
gcggagaaacgagaagcagag

SEQ ID NO: 124155 - RNA, 18 nt, Human
gcggaugcacacagcccc

SEQ ID NO: 124156 - RNA, 22 nt, Human
gcuaguuauccaccgcuucucc

SEQ ID NO: 124157 - RNA, 24 nt, Human
gcuaguuauccaccgcuucuccaa

SEQ ID NO: 124158 - RNA, 25 nt, Human
ggaaaaaaucccacccaaucacaga

SEQ ID NO: 124159 - RNA, 18 nt, Human
ggagcagccugggaggag

SEQ ID NO: 124160 - RNA, 23 nt, Human
ggcauccucuguauguuuccugc

SEQ ID NO: 124161 - RNA, 23 nt, Human
ggccugucccugaggccccccca

SEQ ID NO: 124162 - RNA, 23 nt, Human
guagagacgggguuucacugugu

SEQ ID NO: 124163 - RNA, 24 nt, Human
gucuggagcagccugggaggaggc

SEQ ID NO: 124164 - RNA, 20 nt, Human
gucuugaucuccuggccucg

SEQ ID NO: 124165 - RNA, 23 nt, Human
gugagccugggagaggaaaccag

SEQ ID NO: 124166 - RNA, 24 nt, Human
gugccacguguuauucaggcugga

SEQ ID NO: 124167 - RNA, 23 nt, Human
guggccuuuccaggccugucccu

SEQ ID NO: 124168 - RNA, 22 nt, Human
uaaaaaauuauaagguuugugc

SEQ ID NO: 124169 - RNA, 21 nt, Human
uaaaaagggaaaaaaucccac

SEQ ID NO: 124170 - RNA, 21 nt, Human
uaaagaagaguaaggucagga

SEQ ID NO: 124171 - RNA, 26 nt, Human
uaauuuuuuuguauuuuuaguagaga

SEQ ID NO: 124172 - RNA, 19 nt, Human
uacaaggagggagccccag

SEQ ID NO: 124173 - RNA, 19 nt, Human
uagaugcaacagccccccc

SEQ ID NO: 124174 - RNA, 23 nt, Human
uagaugcgcgcaacacccccccc

SEQ ID NO: 124175 - RNA, 19 nt, Human
uagccacagccagcagcag

SEQ ID NO: 124176 - RNA, 19 nt, Human
uaggaugcgcacagccccu

SEQ ID NO: 124177 - RNA, 20 nt, Human
uaguagagacgggguuucac

SEQ ID NO: 124178 - RNA, 24 nt, Human
uaguagagacgggguuucacugug

SEQ ID NO: 124179 - RNA, 22 nt, Human
uauccccucucccaccaaagcc

SEQ ID NO: 124180 - RNA, 22 nt, Human
uauucaggcuggagggacuccu

SEQ ID NO: 124181 - RNA, 23 nt, Human
ucaggacuacagcugggccacag

SEQ ID NO: 124182 - RNA, 19 nt, Human
uccacauaaaaagggaaaa

SEQ ID NO: 124183 - RNA, 22 nt, Human
uccagaacagaggcagcagcuc

SEQ ID NO: 124184 - RNA, 21 nt, Human
uccagaugcggacacagccac

SEQ ID NO: 124185 - RNA, 24 nt, Human
ucccaaguagcugggacuacaggc

SEQ ID NO: 124186 - RNA, 24 nt, Human
uccccccagauaugcacagccccc

SEQ ID NO: 124187 - RNA, 20 nt, Human
uccguagagaccugucuccc

SEQ ID NO: 124188 - RNA, 19 nt, Human
uccugacuuccuggaaaga

SEQ ID NO: 124189 - RNA, 23 nt, Human
ucuccuggggaaccuugcuuuca

SEQ ID NO: 124190 - RNA, 21 nt, Human
ucugccaaaggccgggcccau

SEQ ID NO: 124191 - RNA, 27 nt, Human
ucugcgaccaggaccgaaccggggucc

SEQ ID NO: 124192 - RNA, 22 nt, Human
ugaagacgccucagcaggggca

SEQ ID NO: 124193 - RNA, 25 nt, Human
ugagcagagccugggugagccuggg

SEQ ID NO: 124194 - RNA, 22 nt, Human
ugagccugggagaggaaaccag

SEQ ID NO: 124195 - RNA, 26 nt, Human
ugaggcccccccaguuuccccugggc

SEQ ID NO: 124196 - RNA, 19 nt, Human
ugcaagguaccccccaucc

SEQ ID NO: 124197 - RNA, 18 nt, Human
ugccaaaggccgggccca

SEQ ID NO: 124198 - RNA, 23 nt, Human
ugccacguguuauucaggcugga

SEQ ID NO: 124199 - RNA, 19 nt, Human
ugccccaggcaucuacuac

SEQ ID NO: 124200 - RNA, 22 nt, Human
ugcgagcagccccccugagaug

SEQ ID NO: 124201 - RNA, 23 nt, Human
ugcggacacagccaccccgcgua

SEQ ID NO: 124202 - RNA, 22 nt, Human
ugcuagaugcgcgcaacacccc

SEQ ID NO: 124203 - RNA, 24 nt, Human
uggcuaguuauccaccgcuucucc

SEQ ID NO: 124204 - RNA, 21 nt, Human
ugggacuacaggcgcccacca

SEQ ID NO: 124205 - RNA, 24 nt, Human
ugggacuacaggcgcccaccacca

SEQ ID NO: 124206 - RNA, 21 nt, Human
uguauguuuccugcggaaugc

SEQ ID NO: 124207 - RNA, 21 nt, Human
uguauuuuuaguagagacggg

SEQ ID NO: 124208 - RNA, 19 nt, Human
ugucugaagucaugggcuu

SEQ ID NO: 124209 - RNA, 22 nt, Human
ugugcagacacccacgggggau

SEQ ID NO: 124210 - RNA, 18 nt, Human
uguuagucaggauggucu

SEQ ID NO: 124211 - RNA, 18 nt, Human
uuaguagagacgggguuu

SEQ ID NO: 124212 - RNA, 21 nt, Human
uuaguagagacgggguuucac

SEQ ID NO: 124213 - RNA, 21 nt, Human
uuaguagagacgggguuucac

SEQ ID NO: 124214 - RNA, 24 nt, Human
uuaguagagacgggguuucacugu

SEQ ID NO: 124215 - RNA, 23 nt, Human
uucacuuuuauuaugaacaaaca

SEQ ID NO: 124216 - RNA, 19 nt, Human
uuccccugggccuugcccc

SEQ ID NO: 124217 - RNA, 23 nt, Human
uuguauuuuuaguagagacgggg

SEQ ID NO: 124218 - RNA, 24 nt, Human
uuuccaggccugucccugaggccc

SEQ ID NO: 124219 - RNA, 24 nt, Human
uuuuuaguagagacgggguuucac

SEQ ID NO: 124220 - RNA, 21 nt, Human
uuuuuguauuuuuaguagaga

SEQ ID NO: 124221 - RNA, 21 nt, Human
uuuuuuguauuuuuaguagag

SEQ ID NO: 124222 - RNA, 24 nt, Human
uuuuuuguauuuuuaguagagacg

SEQ ID NO: 124223 - RNA, 19 nt, Human
gacacgaacccggcuggga

SEQ ID NO: 124224 - RNA, 21 nt, Human
aaaaaaaaaaaaaaaagcuag

SEQ ID NO: 124225 - RNA, 28 nt, Human
aaaaagaaaacccugcucuuggccacac

SEQ ID NO: 124226 - RNA, 18 nt, Human
aaaagcagaagaacuaag

SEQ ID NO: 124227 - RNA, 19 nt, Human
aaacaaaugaccauaucag

SEQ ID NO: 124228 - RNA, 23 nt, Human
aaauaaaccauuagucacacaga

SEQ ID NO: 124229 - RNA, 20 nt, Human
aaccuggaguaagaugggcu

SEQ ID NO: 124230 - RNA, 21 nt, Human
aagaacaaaaagaaaacccug

SEQ ID NO: 124231 - RNA, 22 nt, Human
aauuccccguaggaauuaucuc

SEQ ID NO: 124232 - RNA, 23 nt, Human
aauugcaaaagcagaagaacuaa

SEQ ID NO: 124233 - RNA, 19 nt, Human
acaaauaaaccauuaguca

SEQ ID NO: 124234 - RNA, 22 nt, Human
accagucuucugcccuuccccc

SEQ ID NO: 124235 - RNA, 19 nt, Human
acccugcuguauuaguaaa

SEQ ID NO: 124236 - RNA, 25 nt, Human
acugauuuugaggauucugaggcag

SEQ ID NO: 124237 - RNA, 23 nt, Human
agaaaugggagcaguucuaagaa

SEQ ID NO: 124238 - RNA, 25 nt, Human
agcacaacccacauuuauuuccuca

SEQ ID NO: 124239 - RNA, 19 nt, Human
aggcagcucaguauugugg

SEQ ID NO: 124240 - RNA, 23 nt, Human
auaauaaugauggcaaaaaugac

SEQ ID NO: 124241 - RNA, 22 nt, Human
auaaucccccucagcaucaaaa

SEQ ID NO: 124242 - RNA, 18 nt, Human
auacaaagccugcaagua

SEQ ID NO: 124243 - RNA, 19 nt, Human
aucuuugacauuccuuuaa

SEQ ID NO: 124244 - RNA, 24 nt, Human
caaaaaugacacaaaguagaaaua

SEQ ID NO: 124245 - RNA, 22 nt, Human
caaaguagaaauauauagcuac

SEQ ID NO: 124246 - RNA, 21 nt, Human
caacugaguucuuauuuaguu

SEQ ID NO: 124247 - RNA, 22 nt, Human
cacaguuucauaaucuuaggga

SEQ ID NO: 124248 - RNA, 26 nt, Human
cacaguuuuaagaauuccccguagga

SEQ ID NO: 124249 - RNA, 21 nt, Human
cacauuuauuuccucauggaa

SEQ ID NO: 124250 - RNA, 22 nt, Human
cagaccuacccucagugcccug

SEQ ID NO: 124251 - RNA, 18 nt, Human
cagauuccuuuggucuau

SEQ ID NO: 124252 - RNA, 18 nt, Human
cagucuucugcccuuccc

SEQ ID NO: 124253 - RNA, 18 nt, Human
caguuuuaagaauucccc

SEQ ID NO: 124254 - RNA, 24 nt, Human
caucuggcccaguuacccugcugu

SEQ ID NO: 124255 - RNA, 21 nt, Human
cauuauuugagcauuuggcag

SEQ ID NO: 124256 - RNA, 26 nt, Human
cauucauuuaacaaaacuuacuugag

SEQ ID NO: 124257 - RNA, 22 nt, Human
ccagcucuuucuccuucuuccu

SEQ ID NO: 124258 - RNA, 19 nt, Human
cccccagcucuuucuccuu

SEQ ID NO: 124259 - RNA, 19 nt, Human
cccccuuccccucucucuc

SEQ ID NO: 124260 - RNA, 21 nt, Human
ccccucucucucccuuuugcc

SEQ ID NO: 124261 - RNA, 20 nt, Human
cccucagugcccugaggauu

SEQ ID NO: 124262 - RNA, 18 nt, Human
cccuuuugccuuuuuuau

SEQ ID NO: 124263 - RNA, 23 nt, Human
ccucuccaguucauacuuuggug

SEQ ID NO: 124264 - RNA, 18 nt, Human
ccuugguuuccuucuucu

SEQ ID NO: 124265 - RNA, 23 nt, Human
ccuugguuuccuucuucuuuugg

SEQ ID NO: 124266 - RNA, 23 nt, Human
cucucaaaaccauagagcuccac

SEQ ID NO: 124267 - RNA, 23 nt, Human
cucucacucucccauucucuuuu

SEQ ID NO: 124268 - RNA, 22 nt, Human
gacccccuuccccucucucucc

SEQ ID NO: 124269 - RNA, 22 nt, Human
gcuaaaaaaaaaaaaaaaaaaa

SEQ ID NO: 124270 - RNA, 19 nt, Human
ggaaaauaaggggugggug

SEQ ID NO: 124271 - RNA, 19 nt, Human
ggcagcuggcugcuggugg

SEQ ID NO: 124272 - RNA, 20 nt, Human
guggcuggcagcugguggcu

SEQ ID NO: 124273 - RNA, 23 nt, Human
uaaaauugaguccaagaaucuuu

SEQ ID NO: 124274 - RNA, 25 nt, Human
uaaaccagucuucugcccuuccccc

SEQ ID NO: 124275 - RNA, 23 nt, Human
uaaaugcuaaauacuaagugcua

SEQ ID NO: 124276 - RNA, 20 nt, Human
uaacacagggcagaucucuc

SEQ ID NO: 124277 - RNA, 21 nt, Human
uaacuccaaucaauccaauau

SEQ ID NO: 124278 - RNA, 18 nt, Human
uaacuggauaacacaggg

SEQ ID NO: 124279 - RNA, 18 nt, Human
uaagaugggcuagaucug

SEQ ID NO: 124280 - RNA, 22 nt, Human
uaagaugggcuagaucugguca

SEQ ID NO: 124281 - RNA, 21 nt, Human
uaaucccccucagcaucaaaa

SEQ ID NO: 124282 - RNA, 21 nt, Human
uaaugauggcaaaaaugacac

SEQ ID NO: 124283 - RNA, 22 nt, Human
uaccauagauaaucaaaacaac

SEQ ID NO: 124284 - RNA, 19 nt, Human
uaccugaggugcaguguga

SEQ ID NO: 124285 - RNA, 21 nt, Human
uagaaagggccaauauucuca

SEQ ID NO: 124286 - RNA, 18 nt, Human
ucaaaaccauagagcucc

SEQ ID NO: 124287 - RNA, 21 nt, Human
ucaaaauuugugaccagauuu

SEQ ID NO: 124288 - RNA, 19 nt, Human
ucagauuccuuuggucuau

SEQ ID NO: 124289 - RNA, 18 nt, Human
uccuuauuuccuuuuccc

SEQ ID NO: 124290 - RNA, 22 nt, Human
uccuuauuuccuuuuccuccua

SEQ ID NO: 124291 - RNA, 20 nt, Human
ucucaaaaccauagagcucc

SEQ ID NO: 124292 - RNA, 24 nt, Human
ucucccuuuugccuuuuuuauuuu

SEQ ID NO: 124293 - RNA, 26 nt, Human
ucugcccuucccccagcucuuucucc

SEQ ID NO: 124294 - RNA, 18 nt, Human
ucuuucuccuucuuccuc

SEQ ID NO: 124295 - RNA, 25 nt, Human
ugacauuccuuuaagggaaaaccau

SEQ ID NO: 124296 - RNA, 20 nt, Human
ugagacccccuuccccucuc

SEQ ID NO: 124297 - RNA, 28 nt, Human
ugaugauauaauacaaauaaaccauuag

SEQ ID NO: 124298 - RNA, 22 nt, Human
ugcccugaggauucugggagac

SEQ ID NO: 124299 - RNA, 20 nt, Human
ugccuuuuuuauuuucucuc

SEQ ID NO: 124300 - RNA, 24 nt, Human
ugcugguggcuggcagcugguggc

SEQ ID NO: 124301 - RNA, 19 nt, Human
uggcagcuggcugcuggug

SEQ ID NO: 124302 - RNA, 23 nt, Human
ugggcaggaaauuagucugcauu

SEQ ID NO: 124303 - RNA, 18 nt, Human
uguccuaaugaucuggaa

SEQ ID NO: 124304 - RNA, 19 nt, Human
ugugugguucuaaauucau

SEQ ID NO: 124305 - RNA, 24 nt, Human
uuaaaacaaaugaccauaucagau

SEQ ID NO: 124306 - RNA, 19 nt, Human
uuagggaaguuacugaacc

SEQ ID NO: 124307 - RNA, 22 nt, Human
uucuaagaacaaaaagaaaacc

SEQ ID NO: 124308 - RNA, 19 nt, Human
uugugaccagauuuuaaaa

SEQ ID NO: 124309 - RNA, 24 nt, Human
uuugugaccagauuuuaaaagauu

SEQ ID NO: 124310 - RNA, 26 nt, Human
aaaauagucccuaaaaaucucacuaa

SEQ ID NO: 124311 - RNA, 22 nt, Human
acaaaaaagggaugggaacaau

SEQ ID NO: 124312 - RNA, 23 nt, Human
acacaaaaaagggaugggaacaa

SEQ ID NO: 124313 - RNA, 19 nt, Human
accaaaagcauauacaauu

SEQ ID NO: 124314 - RNA, 20 nt, Human
acggagugcagcgcgugccc

SEQ ID NO: 124315 - RNA, 24 nt, Human
agaaaggcaugccauguugaguua

SEQ ID NO: 124316 - RNA, 25 nt, Human
agcagccaauauucucaagaguucc

SEQ ID NO: 124317 - RNA, 25 nt, Human
auaagucaauuuuauaaaauuaagu

SEQ ID NO: 124318 - RNA, 18 nt, Human
auggaaugaaugaaugaa

SEQ ID NO: 124319 - RNA, 25 nt, Human
cagaaagaucccuaaacaaaagcua

SEQ ID NO: 124320 - RNA, 22 nt, Human
cagcagcauuuuaugacacagc

SEQ ID NO: 124321 - RNA, 21 nt, Human
cgaaaagcacccccuuuaaca

SEQ ID NO: 124322 - RNA, 19 nt, Human
cucacuaaauaguuuacgg

SEQ ID NO: 124323 - RNA, 18 nt, Human
gggaaucaaguucacuau

SEQ ID NO: 124324 - RNA, 25 nt, Human
uaaaagaccaucagaaagaucccua

SEQ ID NO: 124325 - RNA, 24 nt, Human
uaacagguacagagauacugaaaa

SEQ ID NO: 124326 - RNA, 24 nt, Human
uagaaaaacaauuuuguaggaacg

SEQ ID NO: 124327 - RNA, 22 nt, Human
uagaucgaaaagcacccccuuu

SEQ ID NO: 124328 - RNA, 23 nt, Human
uagucuagaaaaauaagucaauu

SEQ ID NO: 124329 - RNA, 19 nt, Human
ucagaaagaucccuaaaca

SEQ ID NO: 124330 - RNA, 27 nt, Human
ucagaaagaucccuaaacaaaagcuaa

SEQ ID NO: 124331 - RNA, 20 nt, Human
uccccaaauagcggaaccac

SEQ ID NO: 124332 - RNA, 19 nt, Human
ucccuaaacaaaagcuaaa

SEQ ID NO: 124333 - RNA, 22 nt, Human
ucucaagaguuccuaauuacca

SEQ ID NO: 124334 - RNA, 23 nt, Human
ucucauuaguuuuauuucuauaa

SEQ ID NO: 124335 - RNA, 20 nt, Human
ugaaacacacaaaaaaggga

SEQ ID NO: 124336 - RNA, 23 nt, Human
ugacacagcugccagaacauccc

SEQ ID NO: 124337 - RNA, 20 nt, Human
ugaguuacggagugcagcgc

SEQ ID NO: 124338 - RNA, 23 nt, Human
uggaagcaggggaaucaaguuca

SEQ ID NO: 124339 - RNA, 21 nt, Human
aagaaaaagcacacacugccc

SEQ ID NO: 124340 - RNA, 25 nt, Human
accuccggcuccagcaccucuacug

SEQ ID NO: 124341 - RNA, 23 nt, Human
agaaaccagcauggagaugucau

SEQ ID NO: 124342 - RNA, 19 nt, Human
agauaggugggaugauggg

SEQ ID NO: 124343 - RNA, 23 nt, Human
agcuuggugaccuccggcuccag

SEQ ID NO: 124344 - RNA, 18 nt, Human
aggggaggggccugaggc

SEQ ID NO: 124345 - RNA, 22 nt, Human
aggggggagaaaagaaaaagca

SEQ ID NO: 124346 - RNA, 23 nt, Human
agguggaggcucgaugcauggga

SEQ ID NO: 124347 - RNA, 21 nt, Human
auacucauguccuuccuccag

SEQ ID NO: 124348 - RNA, 21 nt, Human
aucucauucaugcuggagugg

SEQ ID NO: 124349 - RNA, 22 nt, Human
aucucauucaugcuggagugga

SEQ ID NO: 124350 - RNA, 18 nt, Human
caggccccgcccuaggga

SEQ ID NO: 124351 - RNA, 20 nt, Human
cauagaucucuacucgguug

SEQ ID NO: 124352 - RNA, 21 nt, Human
caugaccgcauacucaugucc

SEQ ID NO: 124353 - RNA, 26 nt, Human
cauuccuguccucaaaguuuguguca

SEQ ID NO: 124354 - RNA, 21 nt, Human
ccagcaccucuacugucuucu

SEQ ID NO: 124355 - RNA, 18 nt, Human
ccagguguacagcaugac

SEQ ID NO: 124356 - RNA, 20 nt, Human
ccuccuccagauaaggguug

SEQ ID NO: 124357 - RNA, 22 nt, Human
ccugaggcuaccgcagggcccc

SEQ ID NO: 124358 - RNA, 20 nt, Human
cgccgcgcucggccccgccc

SEQ ID NO: 124359 - RNA, 23 nt, Human
cgcgcucggccccgccccggccc

SEQ ID NO: 124360 - RNA, 18 nt, Human
cgggaacagcugcgccag

SEQ ID NO: 124361 - RNA, 21 nt, Human
cuccagcaccucuacugucuu

SEQ ID NO: 124362 - RNA, 18 nt, Human
cuuggugaccuccggcuc

SEQ ID NO: 124363 - RNA, 19 nt, Human
gaagcucuucaagcagguc

SEQ ID NO: 124364 - RNA, 22 nt, Human
gaagcucuucaagcagguccac

SEQ ID NO: 124365 - RNA, 21 nt, Human
gacaaaugcauuccuguccuc

SEQ ID NO: 124366 - RNA, 21 nt, Human
gccggggcgcaggaugcucug

SEQ ID NO: 124367 - RNA, 21 nt, Human
gcgccgcgcucggccccgccc

SEQ ID NO: 124368 - RNA, 21 nt, Human
gcgcucggccccgccccggcc

SEQ ID NO: 124369 - RNA, 22 nt, Human
gcuauggagaaaccagcaugga

SEQ ID NO: 124370 - RNA, 19 nt, Human
gcuuucucucuccugcuuc

SEQ ID NO: 124371 - RNA, 28 nt, Human
ggagaaaccagcauggagaugucauggg

SEQ ID NO: 124372 - RNA, 18 nt, Human
ggcaggcuggcuguggcu

SEQ ID NO: 124373 - RNA, 21 nt, Human
ggcuguggcuuucucucuccu

SEQ ID NO: 124374 - RNA, 24 nt, Human
gggaagcaaccacagauagguggg

SEQ ID NO: 124375 - RNA, 20 nt, Human
ggggggagaaaagaaaaagc

SEQ ID NO: 124376 - RNA, 21 nt, Human
ggucauggcugcaguuucugu

SEQ ID NO: 124377 - RNA, 21 nt, Human
gugauguguuuggggaggugc

SEQ ID NO: 124378 - RNA, 18 nt, Human
uacaugauggaggaaggu

SEQ ID NO: 124379 - RNA, 22 nt, Human
uaggugggaugaugggauggag

SEQ ID NO: 124380 - RNA, 20 nt, Human
uauggagaaaccagcaugga

SEQ ID NO: 124381 - RNA, 19 nt, Human
uccuccagauaagggucug

SEQ ID NO: 124382 - RNA, 18 nt, Human
uccuccagcaucucauuc

SEQ ID NO: 124383 - RNA, 22 nt, Human
uccugcuucucuuccuccucca

SEQ ID NO: 124384 - RNA, 18 nt, Human
ucugcggcggguccaggg

SEQ ID NO: 124385 - RNA, 22 nt, Human
ugacaaaugcauuccuguccuc

SEQ ID NO: 124386 - RNA, 21 nt, Human
ugaccuccggcuccagcaccu

SEQ ID NO: 124387 - RNA, 22 nt, Human
ugaccuccggcuccagcaccuc

SEQ ID NO: 124388 - RNA, 23 nt, Human
ugauggaggaagguggaggcucg

SEQ ID NO: 124389 - RNA, 20 nt, Human
ugcucaauguaccuugcaau

SEQ ID NO: 124390 - RNA, 25 nt, Human
uggagaaaccagcauggagauguca

SEQ ID NO: 124391 - RNA, 23 nt, Human
uggcaggcuggcuguggcuuucu

SEQ ID NO: 124392 - RNA, 18 nt, Human
uggcaggcuggcuguggg

SEQ ID NO: 124393 - RNA, 18 nt, Human
uggcugcuggucggggag

SEQ ID NO: 124394 - RNA, 22 nt, Human
uggcuguggcuuucucucuccu

SEQ ID NO: 124395 - RNA, 21 nt, Human
uggcuuucucucuccugcuuc

SEQ ID NO: 124396 - RNA, 24 nt, Human
ugggaauggcccgggaacagcugc

SEQ ID NO: 124397 - RNA, 21 nt, Human
uguccuuccuccagcaucuca

SEQ ID NO: 124398 - RNA, 23 nt, Human
uuacuuuuuuuuuuuuuuuuuca

SEQ ID NO: 124399 - RNA, 19 nt, Human
uuccuccagcaucucauuc

SEQ ID NO: 124400 - RNA, 22 nt, Human
uuuuuuuuuuuuuuuuucauuu

SEQ ID NO: 124401 - RNA, 24 nt, Human
aacuuacccccuccccagcccccg

SEQ ID NO: 124402 - RNA, 19 nt, Human
aagaagcccuggcgacugc

SEQ ID NO: 124403 - RNA, 20 nt, Human
aagaagcccuggcgacugcc

SEQ ID NO: 124404 - RNA, 22 nt, Human
aaggaucccguuccccugcccu

SEQ ID NO: 124405 - RNA, 22 nt, Human
acaaacuccagaagcugccggg

SEQ ID NO: 124406 - RNA, 21 nt, Human
acacggucaugcgugcacacg

SEQ ID NO: 124407 - RNA, 23 nt, Human
acacuguuuugucuccaaaguga

SEQ ID NO: 124408 - RNA, 22 nt, Human
acagcaaacgccgccacccaca

SEQ ID NO: 124409 - RNA, 18 nt, Human
accaggaagggaugcucc

SEQ ID NO: 124410 - RNA, 20 nt, Human
acccccuccccagcccccgc

SEQ ID NO: 124411 - RNA, 21 nt, Human
acccccuccccagcccccgcc

SEQ ID NO: 124412 - RNA, 19 nt, Human
acuccccgaugggcugcau

SEQ ID NO: 124413 - RNA, 21 nt, Human
agacuggaugcucccccuugg

SEQ ID NO: 124414 - RNA, 26 nt, Human
agcgccaccuaccuguaccagguggc

SEQ ID NO: 124415 - RNA, 21 nt, Human
agcugccucugcccugggcuc

SEQ ID NO: 124416 - RNA, 22 nt, Human
aggaagggaugcuccauguggc

SEQ ID NO: 124417 - RNA, 20 nt, Human
aggagcccaccuccgggggc

SEQ ID NO: 124418 - RNA, 19 nt, Human
aggaucccguuccccugcc

SEQ ID NO: 124419 - RNA, 18 nt, Human
aggcaggcuggcugaggg

SEQ ID NO: 124420 - RNA, 20 nt, Human
aggcaggcuggcugagggga

SEQ ID NO: 124421 - RNA, 22 nt, Human
agggcagcuccuucuggacaga

SEQ ID NO: 124422 - RNA, 24 nt, Human
agggcgagggguugggggggaagc

SEQ ID NO: 124423 - RNA, 22 nt, Human
agguggaggcugcagggccaag

SEQ ID NO: 124424 - RNA, 23 nt, Human
aguacguuauuguuacaaacacu

SEQ ID NO: 124425 - RNA, 22 nt, Human
auaauacugugucuuuggccuu

SEQ ID NO: 124426 - RNA, 21 nt, Human
aucccguuccccugcccuccg

SEQ ID NO: 124427 - RNA, 21 nt, Human
caaagugacagucccggcucc

SEQ ID NO: 124428 - RNA, 25 nt, Human
cacacguggucccucuguguguggu

SEQ ID NO: 124429 - RNA, 25 nt, Human
caccaggagcccaccuccgggggcu

SEQ ID NO: 124430 - RNA, 21 nt, Human
cacccccuccuggcgccgggg

SEQ ID NO: 124431 - RNA, 22 nt, Human
cacccccuccuggcgccgggga

SEQ ID NO: 124432 - RNA, 24 nt, Human
cacccgucaccaggagcccaccuc

SEQ ID NO: 124433 - RNA, 19 nt, Human
caccgaggccgcccagcag

SEQ ID NO: 124434 - RNA, 18 nt, Human
caccuaccuguaccaggu

SEQ ID NO: 124435 - RNA, 21 nt, Human
cacuguuuugucuccaaagug

SEQ ID NO: 124436 - RNA, 20 nt, Human
cagcaaacgccgccacccac

SEQ ID NO: 124437 - RNA, 22 nt, Human
cagccgccugcgcgccccgcgg

SEQ ID NO: 124438 - RNA, 26 nt, Human
cagggacugggaggggggccgggggg

SEQ ID NO: 124439 - RNA, 21 nt, Human
cauggauaaacuuacccccuc

SEQ ID NO: 124440 - RNA, 23 nt, Human
ccaacaccuugaaccugggggcc

SEQ ID NO: 124441 - RNA, 18 nt, Human
ccacaguauccccucagg

SEQ ID NO: 124442 - RNA, 23 nt, Human
ccccagcccccgccggccccucu

SEQ ID NO: 124443 - RNA, 23 nt, Human
cccccuccccagcccccgccggc

SEQ ID NO: 124444 - RNA, 18 nt, Human
ccccugaaugccuggcug

SEQ ID NO: 124445 - RNA, 21 nt, Human
cccgcgauaggugcucagggc

SEQ ID NO: 124446 - RNA, 21 nt, Human
cccgggcgcgcuggggggcga

SEQ ID NO: 124447 - RNA, 20 nt, Human
cccgggcggccacacggggc

SEQ ID NO: 124448 - RNA, 21 nt, Human
cccuccgcccccgccaacacc

SEQ ID NO: 124449 - RNA, 18 nt, Human
cccuggcgacugccuugg

SEQ ID NO: 124450 - RNA, 20 nt, Human
ccgcccccgccaacaccuug

SEQ ID NO: 124451 - RNA, 22 nt, Human
ccggagagccccggccuccucc

SEQ ID NO: 124452 - RNA, 21 nt, Human
ccucacaggaaaacacucccu

SEQ ID NO: 124453 - RNA, 22 nt, Human
ccuccccagcccccgccggccc

SEQ ID NO: 124454 - RNA, 18 nt, Human
ccuccgggggcucagcuc

SEQ ID NO: 124455 - RNA, 24 nt, Human
ccuccuagauggaccucuggcugu

SEQ ID NO: 124456 - RNA, 19 nt, Human
ccuggcgccggggaucccc

SEQ ID NO: 124457 - RNA, 21 nt, Human
ccugggucucagucccagaaa

SEQ ID NO: 124458 - RNA, 19 nt, Human
ccuggucuggcgagggauc

SEQ ID NO: 124459 - RNA, 22 nt, Human
ccuugaaccugggggccucgcu

SEQ ID NO: 124460 - RNA, 21 nt, Human
ccuuggccuggaaguggcuuc

SEQ ID NO: 124461 - RNA, 21 nt, Human
cgagagcuaccgaaagccaaa

SEQ ID NO: 124462 - RNA, 21 nt, Human
cgagagcuaccgaaagccaac

SEQ ID NO: 124463 - RNA, 20 nt, Human
cgagguggaggcugcagggc

SEQ ID NO: 124464 - RNA, 18 nt, Human
cgcacaggccugggauaa

SEQ ID NO: 124465 - RNA, 22 nt, Human
cgcaccgaggccgcccagcagc

SEQ ID NO: 124466 - RNA, 19 nt, Human
cgcgauaggugcucagggc

SEQ ID NO: 124467 - RNA, 20 nt, Human
cggcgcugcccaccggcugc

SEQ ID NO: 124468 - RNA, 18 nt, Human
cgggauggggcaucgggc

SEQ ID NO: 124469 - RNA, 23 nt, Human
cggugggaggugaggagaggggu

SEQ ID NO: 124470 - RNA, 22 nt, Human
cuccagaagcugccgggugucc

SEQ ID NO: 124471 - RNA, 20 nt, Human
cuccauguggcaaacacacc

SEQ ID NO: 124472 - RNA, 20 nt, Human
cuccccagcccccgccggcc

SEQ ID NO: 124473 - RNA, 23 nt, Human
cuccccagcccccgccggccccc

SEQ ID NO: 124474 - RNA, 18 nt, Human
cucccggcacccuccuag

SEQ ID NO: 124475 - RNA, 18 nt, Human
cuccgggggcucagcucc

SEQ ID NO: 124476 - RNA, 18 nt, Human
cuccuagauggaccucug

SEQ ID NO: 124477 - RNA, 24 nt, Human
cucucugccaucuucacucaccuu

SEQ ID NO: 124478 - RNA, 24 nt, Human
cucugugcaggugccuggcaagac

SEQ ID NO: 124479 - RNA, 22 nt, Human
cucuguguggccugagcauggu

SEQ ID NO: 124480 - RNA, 19 nt, Human
cugagaggcccacggaggc

SEQ ID NO: 124481 - RNA, 18 nt, Human
cugaugggggaggccuca

SEQ ID NO: 124482 - RNA, 23 nt, Human
cugcacccccuccuggcgccggg

SEQ ID NO: 124483 - RNA, 21 nt, Human
cugccuccacugacaaacucc

SEQ ID NO: 124484 - RNA, 20 nt, Human
cugcguguacuugggugugu

SEQ ID NO: 124485 - RNA, 22 nt, Human
cugggcuugaggaagcguccug

SEQ ID NO: 124486 - RNA, 20 nt, Human
cugugugugugugaacgugg

SEQ ID NO: 124487 - RNA, 19 nt, Human
cuguuggucccccagcggc

SEQ ID NO: 124488 - RNA, 21 nt, Human
cuuaaagacuggaugcucccc

SEQ ID NO: 124489 - RNA, 22 nt, Human
cuucacucaccuucguccuucc

SEQ ID NO: 124490 - RNA, 18 nt, Human
gaaugaaggaccugggga

SEQ ID NO: 124491 - RNA, 22 nt, Human
gagcaugguucacagcaaacgc

SEQ ID NO: 124492 - RNA, 21 nt, Human
gaggagagggguuuccaaacc

SEQ ID NO: 124493 - RNA, 18 nt, Human
gaucccguuccccugccc

SEQ ID NO: 124494 - RNA, 21 nt, Human
gcagaagcucccaaggaaacc

SEQ ID NO: 124495 - RNA, 21 nt, Human
gcauggauaaacuuacccccu

SEQ ID NO: 124496 - RNA, 20 nt, Human
gccaaggcuggcuuuuucca

SEQ ID NO: 124497 - RNA, 19 nt, Human
gccuggcaagaccaggaag

SEQ ID NO: 124498 - RNA, 19 nt, Human
gccuuggugacaucuucgg

SEQ ID NO: 124499 - RNA, 18 nt, Human
gcgauaggugcucagggc

SEQ ID NO: 124500 - RNA, 20 nt, Human
gcgauaggugcucagggccc

SEQ ID NO: 124501 - RNA, 18 nt, Human
gcgcugcccaccggcugc

SEQ ID NO: 124502 - RNA, 22 nt, Human
gcggaaaaagaggacagggccg

SEQ ID NO: 124503 - RNA, 21 nt, Human
gcggcgcugcccaccggcugc

SEQ ID NO: 124504 - RNA, 18 nt, Human
gcugccggguguccaggc

SEQ ID NO: 124505 - RNA, 18 nt, Human
ggacacccgucaccagga

SEQ ID NO: 124506 - RNA, 21 nt, Human
ggagcuuguacuacuguuuga

SEQ ID NO: 124507 - RNA, 24 nt, Human
ggaggugaggagagggguuuccaa

SEQ ID NO: 124508 - RNA, 18 nt, Human
ggaucccguuccccugcc

SEQ ID NO: 124509 - RNA, 20 nt, Human
ggcaggcuggcugaggggag

SEQ ID NO: 124510 - RNA, 20 nt, Human
ggcccgggcgcgcugggggg

SEQ ID NO: 124511 - RNA, 21 nt, Human
ggccuggccggauccccucug

SEQ ID NO: 124512 - RNA, 24 nt, Human
ggccugggucucagucccagaaac

SEQ ID NO: 124513 - RNA, 20 nt, Human
gggaggggacauggcugagc

SEQ ID NO: 124514 - RNA, 18 nt, Human
gggccuggccggaucccc

SEQ ID NO: 124515 - RNA, 21 nt, Human
gggcugcuccacaguaucccc

SEQ ID NO: 124516 - RNA, 19 nt, Human
ggugggaggugaggagagg

SEQ ID NO: 124517 - RNA, 20 nt, Human
guaucuguaggcacgguccu

SEQ ID NO: 124518 - RNA, 21 nt, Human
guaugugucucuguguggccu

SEQ ID NO: 124519 - RNA, 24 nt, Human
gugcacacguggucccucugugug

SEQ ID NO: 124520 - RNA, 18 nt, Human
uaaacuuacccccucccc

SEQ ID NO: 124521 - RNA, 23 nt, Human
ucacagcaaacgccgccacccac

SEQ ID NO: 124522 - RNA, 22 nt, Human
ucagcuccucccggcacccucc

SEQ ID NO: 124523 - RNA, 24 nt, Human
ucagcuccucccggcacccuccua

SEQ ID NO: 124524 - RNA, 19 nt, Human
uccacugacaaacuccaga

SEQ ID NO: 124525 - RNA, 21 nt, Human
uccaggcugaagguccccggg

SEQ ID NO: 124526 - RNA, 19 nt, Human
uccccagcccccgccggcc

SEQ ID NO: 124527 - RNA, 23 nt, Human
ucccccagcggcgagguggaggc

SEQ ID NO: 124528 - RNA, 18 nt, Human
uccccgaugggcugcauu

SEQ ID NO: 124529 - RNA, 21 nt, Human
uccccgcgauaggugcucagg

SEQ ID NO: 124530 - RNA, 20 nt, Human
ucccugagcugccggagggu

SEQ ID NO: 124531 - RNA, 18 nt, Human
ucccugcgcggcgcugcc

SEQ ID NO: 124532 - RNA, 21 nt, Human
uccuagauggaccucuggcug

SEQ ID NO: 124533 - RNA, 24 nt, Human
uccuaugaauugcacacguguccu

SEQ ID NO: 124534 - RNA, 21 nt, Human
uccugccaggccugggucuca

SEQ ID NO: 124535 - RNA, 19 nt, Human
uccuggucuggcgagggau

SEQ ID NO: 124536 - RNA, 22 nt, Human
uccuucuggacagaggggccug

SEQ ID NO: 124537 - RNA, 24 nt, Human
ucuccaaagugacagucccggcuc

SEQ ID NO: 124538 - RNA, 18 nt, Human
ucuccagguggaugcaga

SEQ ID NO: 124539 - RNA, 18 nt, Human
ucuccagguggaugcaga

SEQ ID NO: 124540 - RNA, 22 nt, Human
ucucuguagaaggcugggcuug

SEQ ID NO: 124541 - RNA, 21 nt, Human
ucugagcugccucugcccugg

SEQ ID NO: 124542 - RNA, 22 nt, Human
ucuguaggcacgguccugccag

SEQ ID NO: 124543 - RNA, 21 nt, Human
ucugugugugugugaacgugg

SEQ ID NO: 124544 - RNA, 26 nt, Human
ucugugugugugugaacguggugugu

SEQ ID NO: 124545 - RNA, 19 nt, Human
ugaagaagguucagaaggu

SEQ ID NO: 124546 - RNA, 21 nt, Human
ugacuccccgaugggcugcau

SEQ ID NO: 124547 - RNA, 21 nt, Human
ugagcugccucugcccugggc

SEQ ID NO: 124548 - RNA, 18 nt, Human
ugaggggaagauggcagg

SEQ ID NO: 124549 - RNA, 18 nt, Human
ugcacacguguccugugc

SEQ ID NO: 124550 - RNA, 21 nt, Human
ugcacccccuccuggcgccgg

SEQ ID NO: 124551 - RNA, 21 nt, Human
ugcccaaggucacggugggag

SEQ ID NO: 124552 - RNA, 22 nt, Human
ugcccuccgcccccgccaacac

SEQ ID NO: 124553 - RNA, 18 nt, Human
ugccuagagccuccacuc

SEQ ID NO: 124554 - RNA, 22 nt, Human
ugccuagagccuccacucugag

SEQ ID NO: 124555 - RNA, 18 nt, Human
ugccucugcccugggcuc

SEQ ID NO: 124556 - RNA, 19 nt, Human
ugccuggaggagguacugc

SEQ ID NO: 124557 - RNA, 22 nt, Human
ugcguguacuuggguguguaua

SEQ ID NO: 124558 - RNA, 21 nt, Human
ugcuccauguggcaaacacac

SEQ ID NO: 124559 - RNA, 21 nt, Human
ugcuggucacguccucucugc

SEQ ID NO: 124560 - RNA, 21 nt, Human
uggaaguggcuucggaaaagg

SEQ ID NO: 124561 - RNA, 23 nt, Human
uggacacccgucaccaggagccc

SEQ ID NO: 124562 - RNA, 24 nt, Human
uggauaaacuuacccccuccccag

SEQ ID NO: 124563 - RNA, 24 nt, Human
uggcaaacacaccccugaaugccu

SEQ ID NO: 124564 - RNA, 19 nt, Human
uggccggauccccucugcc

SEQ ID NO: 124565 - RNA, 21 nt, Human
uggcgacugccuuggccugga

SEQ ID NO: 124566 - RNA, 24 nt, Human
ugggaggugaggagagggguuucc

SEQ ID NO: 124567 - RNA, 21 nt, Human
ugggcaggaacgugagcgcca

SEQ ID NO: 124568 - RNA, 19 nt, Human
uggggaggggaggggugaa

SEQ ID NO: 124569 - RNA, 19 nt, Human
uggggcaucgggcuucucc

SEQ ID NO: 124570 - RNA, 23 nt, Human
ugguguggacugggcugcuccac

SEQ ID NO: 124571 - RNA, 22 nt, Human
uguagaaggcugggcuugagga

SEQ ID NO: 124572 - RNA, 21 nt, Human
ugucucuguguggccugagca

SEQ ID NO: 124573 - RNA, 22 nt, Human
ugugcaggugccuggcaagacc

SEQ ID NO: 124574 - RNA, 21 nt, Human
uguggacugggcugcuccaca

SEQ ID NO: 124575 - RNA, 19 nt, Human
uguggcaaacacaccccug

SEQ ID NO: 124576 - RNA, 22 nt, Human
ugugugugugugaacguggugu

SEQ ID NO: 124577 - RNA, 25 nt, Human
ugugugugugugaacguggugugua

SEQ ID NO: 124578 - RNA, 18 nt, Human
uuccacuguggggagggg

SEQ ID NO: 124579 - RNA, 19 nt, Human
uuccccugcccuccgcccc

SEQ ID NO: 124580 - RNA, 24 nt, Human
uugaaccugggggccucgcugggc

SEQ ID NO: 124581 - RNA, 18 nt, Human
uugguguuggugggcagc

SEQ ID NO: 124582 - RNA, 23 nt, Human
aacccauucaaccugcugagcag

SEQ ID NO: 124583 - RNA, 22 nt, Human
agaccccaugggccccaccccu

SEQ ID NO: 124584 - RNA, 26 nt, Human
agagaccccaugggccccaccccuuc

SEQ ID NO: 124585 - RNA, 24 nt, Human
aggugaccacugagaacccauuca

SEQ ID NO: 124586 - RNA, 21 nt, Human
aguggcccagcugagcugagg

SEQ ID NO: 124587 - RNA, 18 nt, Human
caccccugggccuuccuc

SEQ ID NO: 124588 - RNA, 21 nt, Human
ccaccccugggccuuccuccc

SEQ ID NO: 124589 - RNA, 22 nt, Human
ccacugagaacccauucaaccu

SEQ ID NO: 124590 - RNA, 25 nt, Human
ccccacagcugugacuguaccugcu

SEQ ID NO: 124591 - RNA, 18 nt, Human
cucccauguggcugcagg

SEQ ID NO: 124592 - RNA, 28 nt, Human
cugaggaaggugaccacugagaacccau

SEQ ID NO: 124593 - RNA, 20 nt, Human
gaccccaugggccccacccc

SEQ ID NO: 124594 - RNA, 22 nt, Human
gagaacccauucaaccugcuga

SEQ ID NO: 124595 - RNA, 25 nt, Human
gcuguuuauugucuccauggggugg

SEQ ID NO: 124596 - RNA, 23 nt, Human
ggcagaaaggagcaggacuuggg

SEQ ID NO: 124597 - RNA, 22 nt, Human
gggcagaaaggagcaggacuug

SEQ ID NO: 124598 - RNA, 18 nt, Human
uauugucuccauggggug

SEQ ID NO: 124599 - RNA, 23 nt, Human
uccccacagcugugacuguaccu

SEQ ID NO: 124600 - RNA, 24 nt, Human
ugacuguaccugcuccacuucagc

SEQ ID NO: 124601 - RNA, 21 nt, Human
ugggcagaaaggagcaggacu

SEQ ID NO: 124602 - RNA, 18 nt, Human
uggggugggugaagagga

SEQ ID NO: 124603 - RNA, 21 nt, Human
uggggugggugaagaggagug

SEQ ID NO: 124604 - RNA, 19 nt, Human
ugucuccauggggugggug

SEQ ID NO: 124605 - RNA, 21 nt, Human
uguggcugcaggccauccucu

SEQ ID NO: 124606 - RNA, 21 nt, Human
aaagggccagguggggcuggg

SEQ ID NO: 124607 - RNA, 20 nt, Human
agacuaggcaggaaggcaag

SEQ ID NO: 124608 - RNA, 20 nt, Human
agaggacagugcuugcugga

SEQ ID NO: 124609 - RNA, 18 nt, Human
agccagcacugggaggga

SEQ ID NO: 124610 - RNA, 18 nt, Human
aggcagaaagggaggcug

SEQ ID NO: 124611 - RNA, 22 nt, Human
aggcugguggccaggcugggac

SEQ ID NO: 124612 - RNA, 21 nt, Human
aggggucaggcugcaggaggg

SEQ ID NO: 124613 - RNA, 24 nt, Human
ccagguggggcuggggacaagguc

SEQ ID NO: 124614 - RNA, 19 nt, Human
ccugcaggacccuauucca

SEQ ID NO: 124615 - RNA, 18 nt, Human
gagagaagagggguggcc

SEQ ID NO: 124616 - RNA, 19 nt, Human
gagcucagggcaugcucga

SEQ ID NO: 124617 - RNA, 21 nt, Human
ggcaggaaggcaagggacaaa

SEQ ID NO: 124618 - RNA, 23 nt, Human
ggccuggggucaggcagaaaggg

SEQ ID NO: 124619 - RNA, 22 nt, Human
ggucagcaagaucuuccccagc

SEQ ID NO: 124620 - RNA, 22 nt, Human
ggucaggcagaaagggaggcug

SEQ ID NO: 124621 - RNA, 21 nt, Human
gucaggcagaaagggaggcug

SEQ ID NO: 124622 - RNA, 25 nt, Human
gugggagagaagagggguggccugg

SEQ ID NO: 124623 - RNA, 19 nt, Human
uaggcaggaaggcaaggga

SEQ ID NO: 124624 - RNA, 20 nt, Human
uauucuacccugcaggaccc

SEQ ID NO: 124625 - RNA, 20 nt, Human
ugccuaggggucaggcugca

SEQ ID NO: 124626 - RNA, 21 nt, Human
ugccuaggggucaggcugcag

SEQ ID NO: 124627 - RNA, 20 nt, Human
ugcgcaggggcccuggccag

SEQ ID NO: 124628 - RNA, 21 nt, Human
uggccaggcugggacccuggg

SEQ ID NO: 124629 - RNA, 19 nt, Human
uggggcugguuagacagag

SEQ ID NO: 124630 - RNA, 24 nt, Human
ugguggccaggcugggacccuggg

SEQ ID NO: 124631 - RNA, 23 nt, Human
uguauggccacacgaggagccug

SEQ ID NO: 124632 - RNA, 26 nt, Human
uuccccagcugugcccuggcauugcu

SEQ ID NO: 124633 - RNA, 22 nt, Human
uuccccagcugugcccuggccg

SEQ ID NO: 124634 - RNA, 24 nt, Human
aagaaggcagaguggguugggagu

SEQ ID NO: 124635 - RNA, 22 nt, Human
auggcggagaaggguggggggu

SEQ ID NO: 124636 - RNA, 19 nt, Human
cacaagcugaaaaagaagg

SEQ ID NO: 124637 - RNA, 23 nt, Human
cauugccacaagcugaaaaagaa

SEQ ID NO: 124638 - RNA, 21 nt, Human
gguggacaggggcugugaguu

SEQ ID NO: 124639 - RNA, 19 nt, Human
guggggccacauagggugg

SEQ ID NO: 124640 - RNA, 23 nt, Human
uggcggagaagggugggggguug

SEQ ID NO: 124641 - RNA, 18 nt, Human
uggggccacauagggugg

SEQ ID NO: 124642 - RNA, 19 nt, Human
uggguugggaguagggaag

SEQ ID NO: 124643 - RNA, 22 nt, Human
uggguugggaguagggaagaau

SEQ ID NO: 124644 - RNA, 23 nt, Human
uguuguggggccacauagggugg

SEQ ID NO: 124645 - RNA, 22 nt, Human
aacaggagcagaugaccaauag

SEQ ID NO: 124646 - RNA, 19 nt, Human
aagaaagagggagaaaaug

SEQ ID NO: 124647 - RNA, 23 nt, Human
aagcaaaaaugggaacaugccaa

SEQ ID NO: 124648 - RNA, 24 nt, Human
aagcaaaaaugggaacaugccaaa

SEQ ID NO: 124649 - RNA, 21 nt, Human
aagcgaauuccaaggugugca

SEQ ID NO: 124650 - RNA, 25 nt, Human
aagcgaauuccaaggugugcaauuu

SEQ ID NO: 124651 - RNA, 21 nt, Human
aaugggaacaugccaaaagga

SEQ ID NO: 124652 - RNA, 22 nt, Human
aauguuaaaucucucagguaac

SEQ ID NO: 124653 - RNA, 18 nt, Human
acagaucauauguagaca

SEQ ID NO: 124654 - RNA, 19 nt, Human
accacaggguuucugacac

SEQ ID NO: 124655 - RNA, 24 nt, Human
accacguucuuuacugaucuguug

SEQ ID NO: 124656 - RNA, 22 nt, Human
acuggggaaccagacauacauu

SEQ ID NO: 124657 - RNA, 19 nt, Human
agagggagaaaaugucgag

SEQ ID NO: 124658 - RNA, 23 nt, Human
agcaaaaaugggaacaugccaaa

SEQ ID NO: 124659 - RNA, 19 nt, Human
agcucuacuggggaaccag

SEQ ID NO: 124660 - RNA, 19 nt, Human
agcuuggugacaacccaua

SEQ ID NO: 124661 - RNA, 24 nt, Human
auugagcuaagcaaaaaugggaac

SEQ ID NO: 124662 - RNA, 24 nt, Human
caauagcaccuagcuuggugacaa

SEQ ID NO: 124663 - RNA, 22 nt, Human
cacagcaagggucaaaugcuga

SEQ ID NO: 124664 - RNA, 19 nt, Human
cacaggaccuuccguccug

SEQ ID NO: 124665 - RNA, 21 nt, Human
caccgacuauuucucccucaa

SEQ ID NO: 124666 - RNA, 22 nt, Human
caccgcgcgacgucuggaagau

SEQ ID NO: 124667 - RNA, 20 nt, Human
caccuuccuguuugccucca

SEQ ID NO: 124668 - RNA, 18 nt, Human
cagacacagggcccuaau

SEQ ID NO: 124669 - RNA, 22 nt, Human
cagcagacacagggcccuaaua

SEQ ID NO: 124670 - RNA, 20 nt, Human
cagguggguuuggccccagg

SEQ ID NO: 124671 - RNA, 19 nt, Human
ccaaauuucuggaauccac

SEQ ID NO: 124672 - RNA, 22 nt, Human
ccacaggcugaauuucaccaca

SEQ ID NO: 124673 - RNA, 25 nt, Human
cccccaagaacacuccaaauuucug

SEQ ID NO: 124674 - RNA, 26 nt, Human
cccccaagaacacuccaaauuucugg

SEQ ID NO: 124675 - RNA, 19 nt, Human
ccccuuagaaguuugagcc

SEQ ID NO: 124676 - RNA, 22 nt, Human
ccuagcuuggugacaacccaua

SEQ ID NO: 124677 - RNA, 19 nt, Human
ccuauccuucucaaagcac

SEQ ID NO: 124678 - RNA, 19 nt, Human
ccuccacagaaaacaaaau

SEQ ID NO: 124679 - RNA, 18 nt, Human
cucuuguagccugguucu

SEQ ID NO: 124680 - RNA, 19 nt, Human
cugaagcuguaguaagagc

SEQ ID NO: 124681 - RNA, 30 nt, Human
cuugaugauuauauauaguuuguauuaccu

SEQ ID NO: 124682 - RNA, 22 nt, Human
cuuggccucugcuuuuucucuu

SEQ ID NO: 124683 - RNA, 25 nt, Human
cuuggccucugcuuuuucucuuggu

SEQ ID NO: 124684 - RNA, 22 nt, Human
gagcucuacuggggaaccagac

SEQ ID NO: 124685 - RNA, 23 nt, Human
ggaaagaauuuccucugauuaaa

SEQ ID NO: 124686 - RNA, 23 nt, Human
ggaagaaagagggagaaaauguc

SEQ ID NO: 124687 - RNA, 19 nt, Human
ggcccuaauaauacuuaac

SEQ ID NO: 124688 - RNA, 24 nt, Human
gggaagaaagagggagaaaauguc

SEQ ID NO: 124689 - RNA, 20 nt, Human
gggucaugggaagaaagagg

SEQ ID NO: 124690 - RNA, 19 nt, Human
gguacccugacauuggccu

SEQ ID NO: 124691 - RNA, 21 nt, Human
ggucaugggaagaaagaggga

SEQ ID NO: 124692 - RNA, 25 nt, Human
gucuggaagaucccgagcacaggag

SEQ ID NO: 124693 - RNA, 19 nt, Human
uacccugacauuggccugg

SEQ ID NO: 124694 - RNA, 20 nt, Human
uaccugaaucuacagguaac

SEQ ID NO: 124695 - RNA, 22 nt, Human
uaccugaaucuacagguaacac

SEQ ID NO: 124696 - RNA, 22 nt, Human
uacugaucuguugcccuuggcc

SEQ ID NO: 124697 - RNA, 23 nt, Human
uacuggggaaccagacauacauu

SEQ ID NO: 124698 - RNA, 25 nt, Human
uagaaguuugagcccauuggguugg

SEQ ID NO: 124699 - RNA, 22 nt, Human
uagaguccacagggauuuccaa

SEQ ID NO: 124700 - RNA, 21 nt, Human
ucaccuuccuguuugccucca

SEQ ID NO: 124701 - RNA, 18 nt, Human
ucaguagagauaguuaua

SEQ ID NO: 124702 - RNA, 24 nt, Human
uccacagaaaacaaaauuaaagua

SEQ ID NO: 124703 - RNA, 25 nt, Human
uccacagaaaacaaaauuaaaguac

SEQ ID NO: 124704 - RNA, 22 nt, Human
ucccucaaacucuuggccucug

SEQ ID NO: 124705 - RNA, 20 nt, Human
uccuuuagaaagcgaauucc

SEQ ID NO: 124706 - RNA, 22 nt, Human
uccuuuagaaagcgaauuccaa

SEQ ID NO: 124707 - RNA, 20 nt, Human
ucucuggugugaacaggagc

SEQ ID NO: 124708 - RNA, 19 nt, Human
ugaacaggagcagaugacc

SEQ ID NO: 124709 - RNA, 18 nt, Human
ugaagugcaucaugugaa

SEQ ID NO: 124710 - RNA, 21 nt, Human
ugaggcaguagagcucuacug

SEQ ID NO: 124711 - RNA, 19 nt, Human
uggccuggucuuucuaauc

SEQ ID NO: 124712 - RNA, 19 nt, Human
ugucacauuuacaguuauc

SEQ ID NO: 124713 - RNA, 22 nt, Human
uuccccccaagaacacuccaaa

SEQ ID NO: 124714 - RNA, 21 nt, Human
uuuggccccagguacccugac

SEQ ID NO: 124715 - RNA, 19 nt, Human
aacaauaucuuuauuuagc

SEQ ID NO: 124716 - RNA, 19 nt, Human
aaguccccagccccuccag

SEQ ID NO: 124717 - RNA, 23 nt, Human
acaaguccccagccccuccagga

SEQ ID NO: 124718 - RNA, 19 nt, Human
accuguugucucuggaggg

SEQ ID NO: 124719 - RNA, 21 nt, Human
agacacaaguccccagccccu

SEQ ID NO: 124720 - RNA, 24 nt, Human
agcccagauagcaaaacugcagcc

SEQ ID NO: 124721 - RNA, 18 nt, Human
agguaguuguucuuacac

SEQ ID NO: 124722 - RNA, 23 nt, Human
auccccgcagacacaagucccca

SEQ ID NO: 124723 - RNA, 20 nt, Human
aucuuagaccacauaggcca

SEQ ID NO: 124724 - RNA, 19 nt, Human
cagagaguucuucagagcu

SEQ ID NO: 124725 - RNA, 19 nt, Human
cagcucccaauugucaaag

SEQ ID NO: 124726 - RNA, 24 nt, Human
caggaagggcagaggaaugugaug

SEQ ID NO: 124727 - RNA, 25 nt, Human
cagguagacagagucuaggccucag

SEQ ID NO: 124728 - RNA, 22 nt, Human
cagucagcacccucacagagcc

SEQ ID NO: 124729 - RNA, 24 nt, Human
cauuuuauuacaagaguguagaga

SEQ ID NO: 124730 - RNA, 23 nt, Human
ccagaccagguagacagagucua

SEQ ID NO: 124731 - RNA, 23 nt, Human
cccacagcccagauagcaaaacu

SEQ ID NO: 124732 - RNA, 18 nt, Human
cccccccucacuccagcc

SEQ ID NO: 124733 - RNA, 22 nt, Human
cccccccucacuccagcccuag

SEQ ID NO: 124734 - RNA, 24 nt, Human
ccccuccaggacagcaauaagggu

SEQ ID NO: 124735 - RNA, 25 nt, Human
cccgcagacacaaguccccagcccc

SEQ ID NO: 124736 - RNA, 22 nt, Human
cccuucacucuuggcagcuccc

SEQ ID NO: 124737 - RNA, 24 nt, Human
ccuaacccuagcaggccuccuggc

SEQ ID NO: 124738 - RNA, 18 nt, Human
ccucacagagccagcuag

SEQ ID NO: 124739 - RNA, 19 nt, Human
ccuccaggacagcaauaag

SEQ ID NO: 124740 - RNA, 23 nt, Human
ccuccaggacagcaauaaggguc

SEQ ID NO: 124741 - RNA, 22 nt, Human
cuccagcccuaguccuggugcc

SEQ ID NO: 124742 - RNA, 19 nt, Human
cucuggagggugugcagag

SEQ ID NO: 124743 - RNA, 19 nt, Human
cugaagccagucagcaccc

SEQ ID NO: 124744 - RNA, 19 nt, Human
cugggcccaggggcuucca

SEQ ID NO: 124745 - RNA, 18 nt, Human
cuugcccacagcccagau

SEQ ID NO: 124746 - RNA, 23 nt, Human
gaccuccuaacccuagcaggccu

SEQ ID NO: 124747 - RNA, 18 nt, Human
gcccuaguccuggugccu

SEQ ID NO: 124748 - RNA, 25 nt, Human
ggauaugugcacucccugugcgcuc

SEQ ID NO: 124749 - RNA, 22 nt, Human
ggccuaaggaccuccuaacccu

SEQ ID NO: 124750 - RNA, 21 nt, Human
uaagggucuuacaaggccagu

SEQ ID NO: 124751 - RNA, 21 nt, Human
uaccccccccucacuccagcc

SEQ ID NO: 124752 - RNA, 22 nt, Human
uagcaggccuccuggcucaagc

SEQ ID NO: 124753 - RNA, 20 nt, Human
uaggggcaggcaggaucccu

SEQ ID NO: 124754 - RNA, 20 nt, Human
uauccugggcugucucuucc

SEQ ID NO: 124755 - RNA, 21 nt, Human
uauuacaagaguguagagaag

SEQ ID NO: 124756 - RNA, 18 nt, Human
ucacaaggaucagggaag

SEQ ID NO: 124757 - RNA, 21 nt, Human
ucacaaggaucagggaagguu

SEQ ID NO: 124758 - RNA, 19 nt, Human
ucagggaagguuccaagga

SEQ ID NO: 124759 - RNA, 21 nt, Human
ucagggaagguuccaaggaac

SEQ ID NO: 124760 - RNA, 22 nt, Human
uccaggguaggggcaggcagga

SEQ ID NO: 124761 - RNA, 22 nt, Human
uccccagccccuccaggacagc

SEQ ID NO: 124762 - RNA, 23 nt, Human
ucccugugcgcucuggauccccg

SEQ ID NO: 124763 - RNA, 19 nt, Human
ugagguacugagcugagcu

SEQ ID NO: 124764 - RNA, 19 nt, Human
ugccuggauaugugcacuc

SEQ ID NO: 124765 - RNA, 25 nt, Human
uggauccccgcagacacaagucccc

SEQ ID NO: 124766 - RNA, 18 nt, Human
uggcuaguucuaacuugc

SEQ ID NO: 124767 - RNA, 19 nt, Human
ugggaaggcuccaucagca

SEQ ID NO: 124768 - RNA, 21 nt, Human
uguacaaacauuaaaaauaga

SEQ ID NO: 124769 - RNA, 22 nt, Human
ugucucuucccuucacucuugg

SEQ ID NO: 124770 - RNA, 29 nt, Human
ugugcagaggcaaguccagggggaacgcc

SEQ ID NO: 124771 - RNA, 19 nt, Human
uuaaaaauagacauuuuau

SEQ ID NO: 124772 - RNA, 21 nt, Human
uucccuucacucuuggcagcu

SEQ ID NO: 124773 - RNA, 21 nt, Human
uugaaauaccccccccucacu

SEQ ID NO: 124774 - RNA, 20 nt, Human
aaaaaaaaaaaacaaaaagg

SEQ ID NO: 124775 - RNA, 18 nt, Human
aaaaaaaacaaaaaggcu

SEQ ID NO: 124776 - RNA, 22 nt, Human
aaaaaaaacaaaaaggcugggc

SEQ ID NO: 124777 - RNA, 22 nt, Human
aaaaaaacaaaaaggcugggcg

SEQ ID NO: 124778 - RNA, 20 nt, Human
aaaaaaagaaaggaagagaa

SEQ ID NO: 124779 - RNA, 22 nt, Human
aaaaaacaaaaaggcugggcgc

SEQ ID NO: 124780 - RNA, 19 nt, Human
aaaaugcugggauuacagg

SEQ ID NO: 124781 - RNA, 22 nt, Human
aaagaaggugaauuauauggca

SEQ ID NO: 124782 - RNA, 20 nt, Human
aaaggaagagaaacaagggc

SEQ ID NO: 124783 - RNA, 19 nt, Human
aaaugcugggauuacaggc

SEQ ID NO: 124784 - RNA, 20 nt, Human
aacacagugaaaccucgucu

SEQ ID NO: 124785 - RNA, 21 nt, Human
aacacagugaaaccucgucuc

SEQ ID NO: 124786 - RNA, 24 nt, Human
aacagaguaagacucugucucaaa

SEQ ID NO: 124787 - RNA, 19 nt, Human
aacauggugaaaccccauc

SEQ ID NO: 124788 - RNA, 20 nt, Human
aacauggugaaaccccaucu

SEQ ID NO: 124789 - RNA, 20 nt, Human
aacauggugaaaccccaucu

SEQ ID NO: 124790 - RNA, 21 nt, Human
aacauggugaaaccccaucuc

SEQ ID NO: 124791 - RNA, 19 nt, Human
aacauggugaaacccgucu

SEQ ID NO: 124792 - RNA, 20 nt, Human
aacauggugaaacccgucuc

SEQ ID NO: 124793 - RNA, 21 nt, Human
aacccgucucuaccaaaaaua

SEQ ID NO: 124794 - RNA, 24 nt, Human
aaccugggugacagacugagauuc

SEQ ID NO: 124795 - RNA, 24 nt, Human
aagcacuugaaccugggaggcaga

SEQ ID NO: 124796 - RNA, 25 nt, Human
aaggcagguggauaacuugggguca

SEQ ID NO: 124797 - RNA, 24 nt, Human
aagugggaggauugcuugaaccug

SEQ ID NO: 124798 - RNA, 22 nt, Human
acaaaaaaaaaaaagaagguga

SEQ ID NO: 124799 - RNA, 21 nt, Human
acaaaaaggcugggcgcggug

SEQ ID NO: 124800 - RNA, 23 nt, Human
acacagaaaguagauuagcaguu

SEQ ID NO: 124801 - RNA, 18 nt, Human
acacagugaaaccucguc

SEQ ID NO: 124802 - RNA, 19 nt, Human
acacagugaaaccucgucu

SEQ ID NO: 124803 - RNA, 23 nt, Human
acagacugagauucugucucaga

SEQ ID NO: 124804 - RNA, 24 nt, Human
acagaggaagacucugucucaaaa

SEQ ID NO: 124805 - RNA, 24 nt, Human
acagaguaagacucugucucaaaa

SEQ ID NO: 124806 - RNA, 18 nt, Human
acaggcccugcacuuggc

SEQ ID NO: 124807 - RNA, 24 nt, Human
acagggucccacuauguuggccag

SEQ ID NO: 124808 - RNA, 24 nt, Human
accccaucuccacuaaaacuacaa

SEQ ID NO: 124809 - RNA, 24 nt, Human
accucgucucuacuaaaaauacaa

SEQ ID NO: 124810 - RNA, 23 nt, Human
accugggugacagacugagauuc

SEQ ID NO: 124811 - RNA, 22 nt, Human
acgccacugcacuccaaccugg

SEQ ID NO: 124812 - RNA, 18 nt, Human
acuauguuggccaggcug

SEQ ID NO: 124813 - RNA, 18 nt, Human
acugcacuccaaccuggg

SEQ ID NO: 124814 - RNA, 24 nt, Human
acugcacuccaaccugggugacag

SEQ ID NO: 124815 - RNA, 23 nt, Human
acugcacuccagccuggcaacag

SEQ ID NO: 124816 - RNA, 23 nt, Human
acugcacuccagccuggcaacag

SEQ ID NO: 124817 - RNA, 18 nt, Human
acugcacuccagcuuagg

SEQ ID NO: 124818 - RNA, 26 nt, Human
acugcacuccagcuuaggacaucggg

SEQ ID NO: 124819 - RNA, 24 nt, Human
acugcacuccagcuuaggagacag

SEQ ID NO: 124820 - RNA, 24 nt, Human
acuugaggucaggaguuugagacu

SEQ ID NO: 124821 - RNA, 18 nt, Human
acuuggggucaggaguuc

SEQ ID NO: 124822 - RNA, 24 nt, Human
agaaaguagauuagcaguugccag

SEQ ID NO: 124823 - RNA, 18 nt, Human
agacaaaaaaaaaaaaga

SEQ ID NO: 124824 - RNA, 26 nt, Human
agagaaggcaaauccauagacacaga

SEQ ID NO: 124825 - RNA, 18 nt, Human
agagguugcagugagcug

SEQ ID NO: 124826 - RNA, 22 nt, Human
agagguugcagugagcugagau

SEQ ID NO: 124827 - RNA, 23 nt, Human
agagguugcagugagcugagaug

SEQ ID NO: 124828 - RNA, 20 nt, Human
agagguugcagugagcuggc

SEQ ID NO: 124829 - RNA, 22 nt, Human
agaucacuugaggucaggaguu

SEQ ID NO: 124830 - RNA, 25 nt, Human
agaucacuugaggucaggaguuuga

SEQ ID NO: 124831 - RNA, 24 nt, Human
agcacuuugggaggcugaggcggg

SEQ ID NO: 124832 - RNA, 23 nt, Human
agccaggcgugguggugugugcc

SEQ ID NO: 124833 - RNA, 21 nt, Human
agccuggcaacagaguaagac

SEQ ID NO: 124834 - RNA, 23 nt, Human
agccuggcaacagaguaagacuc

SEQ ID NO: 124835 - RNA, 22 nt, Human
agccuggccaacauggugaaac

SEQ ID NO: 124836 - RNA, 24 nt, Human
agccuggccaacauggugaaaccc

SEQ ID NO: 124837 - RNA, 24 nt, Human
agcugcuauuuuuuaaaaaaagaa

SEQ ID NO: 124838 - RNA, 21 nt, Human
agcuggccaugguggcgcauc

SEQ ID NO: 124839 - RNA, 23 nt, Human
aggaguucgagacaagccuggcc

SEQ ID NO: 124840 - RNA, 20 nt, Human
aggcagagguugcagugagc

SEQ ID NO: 124841 - RNA, 24 nt, Human
aggcagagguugcagugagcugag

SEQ ID NO: 124842 - RNA, 21 nt, Human
aggcaggagaaucgcuugaac

SEQ ID NO: 124843 - RNA, 24 nt, Human
aggcaggagaaucgcuugaacaug

SEQ ID NO: 124844 - RNA, 23 nt, Human
aggcaggggaggcaggcuagggg

SEQ ID NO: 124845 - RNA, 26 nt, Human
aggcagguggauaacuuggggucagg

SEQ ID NO: 124846 - RNA, 20 nt, Human
aggcggagguuguagugagc

SEQ ID NO: 124847 - RNA, 21 nt, Human
aggcgggcagaucacuugagg

SEQ ID NO: 124848 - RNA, 22 nt, Human
aggcgggcagaucacuugaggu

SEQ ID NO: 124849 - RNA, 23 nt, Human
aggcgggcagaucacuugagguc

SEQ ID NO: 124850 - RNA, 26 nt, Human
aggcgggcagaucacuugaggucagg

SEQ ID NO: 124851 - RNA, 24 nt, Human
aggcggguggaucacgaggucaag

SEQ ID NO: 124852 - RNA, 24 nt, Human
aggcguagugacucaugcuuguaa

SEQ ID NO: 124853 - RNA, 19 nt, Human
aggcgugguggugugugcc

SEQ ID NO: 124854 - RNA, 24 nt, Human
aggcugaagugggaggauugcuug

SEQ ID NO: 124855 - RNA, 20 nt, Human
aggcugaggcaggagaaucg

SEQ ID NO: 124856 - RNA, 24 nt, Human
aggcugaggcaggagaaucgcuug

SEQ ID NO: 124857 - RNA, 21 nt, Human
aggcugaggcggguggaucac

SEQ ID NO: 124858 - RNA, 22 nt, Human
aggcugaggcggguggaucacg

SEQ ID NO: 124859 - RNA, 22 nt, Human
aggcuggagaagcacuugaacc

SEQ ID NO: 124860 - RNA, 24 nt, Human
aggcuggagaagcacuugaaccug

SEQ ID NO: 124861 - RNA, 22 nt, Human
aggcuggaugugguggcucaca

SEQ ID NO: 124862 - RNA, 20 nt, Human
agguggagguugcagugagc

SEQ ID NO: 124863 - RNA, 24 nt, Human
agguggagguugcagugagcugag

SEQ ID NO: 124864 - RNA, 24 nt, Human
agucugaccaacauggugaaaccc

SEQ ID NO: 124865 - RNA, 24 nt, Human
agugacucaugcuuguaaucccag

SEQ ID NO: 124866 - RNA, 19 nt, Human
aguuaggcuggauguggug

SEQ ID NO: 124867 - RNA, 24 nt, Human
auaccuguuaaucccagcacuuug

SEQ ID NO: 124868 - RNA, 24 nt, Human
aucacgccacugcacuccaaccug

SEQ ID NO: 124869 - RNA, 24 nt, Human
aucgcgccacugcacuccagccug

SEQ ID NO: 124870 - RNA, 23 nt, Human
aucuauagucccagcuacucggg

SEQ ID NO: 124871 - RNA, 22 nt, Human
auggcauaagaauuauaucucc

SEQ ID NO: 124872 - RNA, 23 nt, Human
auugcuugaaccugcgaggugga

SEQ ID NO: 124873 - RNA, 21 nt, Human
caaaaaaaaaaaaacaaaaag

SEQ ID NO: 124874 - RNA, 21 nt, Human
caaaaauacaaaaauuagcca

SEQ ID NO: 124875 - RNA, 26 nt, Human
caaaaugcugggauuacaggcccugc

SEQ ID NO: 124876 - RNA, 24 nt, Human
caacacagugaaaccucgucucua

SEQ ID NO: 124877 - RNA, 18 nt, Human
caacauggugaaacccca

SEQ ID NO: 124878 - RNA, 23 nt, Human
caacauggugaaacccgucucua

SEQ ID NO: 124879 - RNA, 18 nt, Human
caagagauggagaccauc

SEQ ID NO: 124880 - RNA, 24 nt, Human
caaggcagguggauaacuuggggu

SEQ ID NO: 124881 - RNA, 24 nt, Human
cacaccuguaaucccaggacuuug

SEQ ID NO: 124882 - RNA, 24 nt, Human
cacaccuguaaugccagcauuuug

SEQ ID NO: 124883 - RNA, 19 nt, Human
caccuguaaucccaggacu

SEQ ID NO: 124884 - RNA, 24 nt, Human
caccuguaaucccaggacuuuggg

SEQ ID NO: 124885 - RNA, 22 nt, Human
cacuaaaacuacaaaaaucagc

SEQ ID NO: 124886 - RNA, 18 nt, Human
cacuauguuggccaggcu

SEQ ID NO: 124887 - RNA, 24 nt, Human
cacuauguuggccaggcugcuuuc

SEQ ID NO: 124888 - RNA, 21 nt, Human
cacuccagccuggcaacagag

SEQ ID NO: 124889 - RNA, 22 nt, Human
cacuccagccuggcaacagagu

SEQ ID NO: 124890 - RNA, 23 nt, Human
cacugcacuccaaccugggugac

SEQ ID NO: 124891 - RNA, 24 nt, Human
cacugcacuccaaccugggugaca

SEQ ID NO: 124892 - RNA, 18 nt, Human
cacugcacuccagccugg

SEQ ID NO: 124893 - RNA, 20 nt, Human
cacugcacuccagccuggca

SEQ ID NO: 124894 - RNA, 23 nt, Human
cacugcacuccagccuggcaaca

SEQ ID NO: 124895 - RNA, 24 nt, Human
cacugcacuccagccuggcaacag

SEQ ID NO: 124896 - RNA, 26 nt, Human
cacugcacuccagcuuagaacagugg

SEQ ID NO: 124897 - RNA, 19 nt, Human
cacugcacuccagcuuagg

SEQ ID NO: 124898 - RNA, 19 nt, Human
cacugcacuccagcuuagg

SEQ ID NO: 124899 - RNA, 24 nt, Human
cacugcacuccagcuuaggagaca

SEQ ID NO: 124900 - RNA, 23 nt, Human
cacuugaggucaggaguuugaga

SEQ ID NO: 124901 - RNA, 24 nt, Human
cagaucacuugaggucaggaguuu

SEQ ID NO: 124902 - RNA, 24 nt, Human
cagcacuuugggaggcugaggcgg

SEQ ID NO: 124903 - RNA, 26 nt, Human
cagcauuuugagagaggucgaggcgg

SEQ ID NO: 124904 - RNA, 24 nt, Human
cagcuacucgggaggcugaggcag

SEQ ID NO: 124905 - RNA, 24 nt, Human
cagggucccacuauguuggccagg

SEQ ID NO: 124906 - RNA, 18 nt, Human
caggugcuugagauuggc

SEQ ID NO: 124907 - RNA, 23 nt, Human
cauaccuguuaaucccagcacuu

SEQ ID NO: 124908 - RNA, 24 nt, Human
caucuauagucccagcuacucggg

SEQ ID NO: 124909 - RNA, 23 nt, Human
ccaaaaugcugggauuacaggcc

SEQ ID NO: 124910 - RNA, 23 nt, Human
ccaaccccggccucccaaaaugc

SEQ ID NO: 124911 - RNA, 20 nt, Human
ccacugcacuccaaccuggg

SEQ ID NO: 124912 - RNA, 24 nt, Human
ccacugcacuccaaccugggugac

SEQ ID NO: 124913 - RNA, 18 nt, Human
ccacugcacuccagccug

SEQ ID NO: 124914 - RNA, 19 nt, Human
ccacugcacuccagccugg

SEQ ID NO: 124915 - RNA, 19 nt, Human
ccacugcacuccagccugg

SEQ ID NO: 124916 - RNA, 20 nt, Human
ccacugcacuccagccuggc

SEQ ID NO: 124917 - RNA, 22 nt, Human
ccacugcacuccagccuggcaa

SEQ ID NO: 124918 - RNA, 23 nt, Human
ccacugcacuccagccuggcaac

SEQ ID NO: 124919 - RNA, 20 nt, Human
ccacugcacuccagcuuagg

SEQ ID NO: 124920 - RNA, 22 nt, Human
ccacugcacuccagcuuaggag

SEQ ID NO: 124921 - RNA, 24 nt, Human
ccacugcacuccagcuuaggagac

SEQ ID NO: 124922 - RNA, 19 nt, Human
ccaggacuuugggaagcca

SEQ ID NO: 124923 - RNA, 22 nt, Human
ccugcacuuggcuaaagcugcu

SEQ ID NO: 124924 - RNA, 21 nt, Human
ccugcgagguggagguugcag

SEQ ID NO: 124925 - RNA, 21 nt, Human
ccuggcaacagaguaagacuc

SEQ ID NO: 124926 - RNA, 21 nt, Human
ccuggccaacacagugaaacc

SEQ ID NO: 124927 - RNA, 24 nt, Human
ccuggccaacacagugaaaccucg

SEQ ID NO: 124928 - RNA, 23 nt, Human
ccuggccaacauggugaaacccc

SEQ ID NO: 124929 - RNA, 24 nt, Human
ccuggccaacauggugaaacccca

SEQ ID NO: 124930 - RNA, 25 nt, Human
ccugggaggcagagguugcagugag

SEQ ID NO: 124931 - RNA, 21 nt, Human
ccuguagucucagcuacuugg

SEQ ID NO: 124932 - RNA, 24 nt, Human
cgagacaagccuggccaacauggu

SEQ ID NO: 124933 - RNA, 24 nt, Human
cgaggcgggcagaucacuugaggu

SEQ ID NO: 124934 - RNA, 26 nt, Human
cgaggcgggcagaucacuugagguca

SEQ ID NO: 124935 - RNA, 24 nt, Human
cgaggcuggagaagcacuugaacc

SEQ ID NO: 124936 - RNA, 26 nt, Human
cgccacugcacuccaaccugggugac

SEQ ID NO: 124937 - RNA, 24 nt, Human
cgggcagaucacuugaggucagga

SEQ ID NO: 124938 - RNA, 24 nt, Human
cguggcucacaccuguaaugccag

SEQ ID NO: 124939 - RNA, 21 nt, Human
cuaaaacuacaaaaaucagcc

SEQ ID NO: 124940 - RNA, 18 nt, Human
cuauagucccagcuacuc

SEQ ID NO: 124941 - RNA, 20 nt, Human
cuauagucccagcuacucgg

SEQ ID NO: 124942 - RNA, 18 nt, Human
cucaaaaaaaaaaaaaca

SEQ ID NO: 124943 - RNA, 23 nt, Human
cucaaaaaaaaaaaaacaaaaag

SEQ ID NO: 124944 - RNA, 24 nt, Human
cucaaaugauccuccaaccccggc

SEQ ID NO: 124945 - RNA, 22 nt, Human
cucacaccuguaaucccaggac

SEQ ID NO: 124946 - RNA, 24 nt, Human
cucacaccuguaaucccaggacuu

SEQ ID NO: 124947 - RNA, 21 nt, Human
cucacaccuguaaugccagca

SEQ ID NO: 124948 - RNA, 25 nt, Human
cucaugcuuguaaucccaggugcuu

SEQ ID NO: 124949 - RNA, 23 nt, Human
cucugucucaaaaaaaaaaaaac

SEQ ID NO: 124950 - RNA, 21 nt, Human
cugaccaacauggugaaaccc

SEQ ID NO: 124951 - RNA, 31 nt, Human
cugcacuccagcuuaggagacagaggaagag

SEQ ID NO: 124952 - RNA, 18 nt, Human
cuggccaacacagugaaa

SEQ ID NO: 124953 - RNA, 23 nt, Human
cuggccaacauggugaaacccca

SEQ ID NO: 124954 - RNA, 25 nt, Human
cugucucaaaaaaaaaaaaacaaaa

SEQ ID NO: 124955 - RNA, 19 nt, Human
gaagacucugucucaaaaa

SEQ ID NO: 124956 - RNA, 24 nt, Human
gaagugggaggauugcuugaaccu

SEQ ID NO: 124957 - RNA, 24 nt, Human
gacagaggaagacucugucucaaa

SEQ ID NO: 124958 - RNA, 24 nt, Human
gaccaacauggugaaacccgucuc

SEQ ID NO: 124959 - RNA, 23 nt, Human
gagaaucgcuugaacaugggagg

SEQ ID NO: 124960 - RNA, 19 nt, Human
gagacagaggaagacucug

SEQ ID NO: 124961 - RNA, 23 nt, Human
gagaggucgaggcgggcagauca

SEQ ID NO: 124962 - RNA, 18 nt, Human
gagaucacgccacugcac

SEQ ID NO: 124963 - RNA, 23 nt, Human
gagaugaugccacugcacuccag

SEQ ID NO: 124964 - RNA, 18 nt, Human
gagguggagguugcagug

SEQ ID NO: 124965 - RNA, 22 nt, Human
gagguugcagugagcugagauc

SEQ ID NO: 124966 - RNA, 21 nt, Human
gauaacuuggggucaggaguu

SEQ ID NO: 124967 - RNA, 24 nt, Human
gauaacuuggggucaggaguucga

SEQ ID NO: 124968 - RNA, 24 nt, Human
gaucacuugaggucaggaguuuga

SEQ ID NO: 124969 - RNA, 23 nt, Human
gcacuccagccuggcaacagagu

SEQ ID NO: 124970 - RNA, 21 nt, Human
gccaacacagugaaaccucgu

SEQ ID NO: 124971 - RNA, 24 nt, Human
gccaacauggugaaaccccaucuc

SEQ ID NO: 124972 - RNA, 24 nt, Human
gccacugcacuccaaccuggguga

SEQ ID NO: 124973 - RNA, 20 nt, Human
gcugagaucacgccacugca

SEQ ID NO: 124974 - RNA, 20 nt, Human
gcugagaucgcgccacugca

SEQ ID NO: 124975 - RNA, 20 nt, Human
gcuugggaggcugaaguggg

SEQ ID NO: 124976 - RNA, 19 nt, Human
ggaaauguggagggacugc

SEQ ID NO: 124977 - RNA, 21 nt, Human
ggagaagcacuugaaccuggg

SEQ ID NO: 124978 - RNA, 24 nt, Human
ggagaccauccuggccaacacagu

SEQ ID NO: 124979 - RNA, 22 nt, Human
ggagguugcagugagcugagau

SEQ ID NO: 124980 - RNA, 23 nt, Human
ggagguugcagugagcugagauc

SEQ ID NO: 124981 - RNA, 24 nt, Human
ggagguugcagugagcugagauca

SEQ ID NO: 124982 - RNA, 22 nt, Human
ggagguuguagugagcugagau

SEQ ID NO: 124983 - RNA, 24 nt, Human
ggagguuguagugagcugagaucg

SEQ ID NO: 124984 - RNA, 24 nt, Human
ggaugugguggcucacaccuguaa

SEQ ID NO: 124985 - RNA, 22 nt, Human
ggcuggugaggcaggggaggca

SEQ ID NO: 124986 - RNA, 24 nt, Human
gggcaccguggcucacaccuguaa

SEQ ID NO: 124987 - RNA, 26 nt, Human
gggcagaucacuugaggucaggaguu

SEQ ID NO: 124988 - RNA, 22 nt, Human
gggucccacuauguuggccagg

SEQ ID NO: 124989 - RNA, 22 nt, Human
ggugcuugagauuggcaggguu

SEQ ID NO: 124990 - RNA, 19 nt, Human
gguggagguugcagugagc

SEQ ID NO: 124991 - RNA, 18 nt, Human
gguggaucacgaggucaa

SEQ ID NO: 124992 - RNA, 24 nt, Human
gguggcucacaccuguaaucccag

SEQ ID NO: 124993 - RNA, 25 nt, Human
ggugguucauaccuguuaaucccag

SEQ ID NO: 124994 - RNA, 22 nt, Human
gguucauaccuguuaaucccag

SEQ ID NO: 124995 - RNA, 18 nt, Human
guagagacagggucccac

SEQ ID NO: 124996 - RNA, 21 nt, Human
gugaaaccucgucucuacuaa

SEQ ID NO: 124997 - RNA, 23 nt, Human
guggcucacaccuguaaucccag

SEQ ID NO: 124998 - RNA, 24 nt, Human
guggugugugccuguagucucagc

SEQ ID NO: 124999 - RNA, 24 nt, Human
gugguucauaccuguuaaucccag

SEQ ID NO: 125000 - RNA, 19 nt, Human
guugcagugagcugagauc

SEQ ID NO: 125001 - RNA, 24 nt, Human
guugcagugagcugagaugaugcc

SEQ ID NO: 125002 - RNA, 21 nt, Human
uaaaaaaagaaaggaagagaa

SEQ ID NO: 125003 - RNA, 21 nt, Human
uaaaacuacaaaaaucagcca

SEQ ID NO: 125004 - RNA, 19 nt, Human
uaagaauaauaaaauuaau

SEQ ID NO: 125005 - RNA, 22 nt, Human
uaagaauaauaaaauuaauucu

SEQ ID NO: 125006 - RNA, 25 nt, Human
uaccaaaaauacaaaaauuagccag

SEQ ID NO: 125007 - RNA, 18 nt, Human
uacuugggaggccgaggc

SEQ ID NO: 125008 - RNA, 22 nt, Human
uagagacagggucccacuaugu

SEQ ID NO: 125009 - RNA, 24 nt, Human
uagugacucaugcuuguaauccca

SEQ ID NO: 125010 - RNA, 18 nt, Human
uauauauauguauauaua

SEQ ID NO: 125011 - RNA, 24 nt, Human
ucacgaggucaagagauggagacc

SEQ ID NO: 125012 - RNA, 23 nt, Human
ucacgccacugcacuccaaccug

SEQ ID NO: 125013 - RNA, 19 nt, Human
ucacuugaggucaggaguu

SEQ ID NO: 125014 - RNA, 18 nt, Human
ucagaaugguggugucuu

SEQ ID NO: 125015 - RNA, 22 nt, Human
ucagacaaaaaaaaaaaagaaa

SEQ ID NO: 125016 - RNA, 26 nt, Human
ucagacaaaaaaaaaaaagaagguga

SEQ ID NO: 125017 - RNA, 23 nt, Human
ucagccaggcguagugacucaug

SEQ ID NO: 125018 - RNA, 23 nt, Human
ucauaccuguuaaucccagcacu

SEQ ID NO: 125019 - RNA, 23 nt, Human
ucaugcuuguaaucccaggugcu

SEQ ID NO: 125020 - RNA, 24 nt, Human
ucccaaaaugcugggauuacaggc

SEQ ID NO: 125021 - RNA, 27 nt, Human
ucccaaaaugcugggauuacaggcccu

SEQ ID NO: 125022 - RNA, 22 nt, Human
uccugggcucaaaugauccucc

SEQ ID NO: 125023 - RNA, 24 nt, Human
ucgcuugaacaugggaggcggagg

SEQ ID NO: 125024 - RNA, 24 nt, Human
ucgggaggcugaggcaggagaauc

SEQ ID NO: 125025 - RNA, 23 nt, Human
ucucaaaaaaaaaaaaacaaaaa

SEQ ID NO: 125026 - RNA, 20 nt, Human
ucucagacaaaaaaaaaaaa

SEQ ID NO: 125027 - RNA, 18 nt, Human
ucuccauaaagcugcuau

SEQ ID NO: 125028 - RNA, 21 nt, Human
ucucuacuaaaaauacaaaaa

SEQ ID NO: 125029 - RNA, 23 nt, Human
ucugaccaacauggugaaacccg

SEQ ID NO: 125030 - RNA, 21 nt, Human
ucugucucaaaaaaaaaaaaa

SEQ ID NO: 125031 - RNA, 18 nt, Human
ucuugcucugucacucag

SEQ ID NO: 125032 - RNA, 19 nt, Human
ucuugcucugucacucagg

SEQ ID NO: 125033 - RNA, 19 nt, Human
ugaaaccccaucuccacua

SEQ ID NO: 125034 - RNA, 22 nt, Human
ugaaaccccaucuccacuaaaa

SEQ ID NO: 125035 - RNA, 24 nt, Human
ugaaccugggaggcagagguugca

SEQ ID NO: 125036 - RNA, 19 nt, Human
ugaagugggaggauugcuu

SEQ ID NO: 125037 - RNA, 23 nt, Human
ugaccaacauggugaaacccguc

SEQ ID NO: 125038 - RNA, 21 nt, Human
ugacucaugcuuguaauccca

SEQ ID NO: 125039 - RNA, 23 nt, Human
ugagacuagucugaccaacaugg

SEQ ID NO: 125040 - RNA, 24 nt, Human
ugagacuagucugaccaacauggu

SEQ ID NO: 125041 - RNA, 24 nt, Human
ugagaucgcgccacugcacuccag

SEQ ID NO: 125042 - RNA, 22 nt, Human
ugagauggggucuugcucuguc

SEQ ID NO: 125043 - RNA, 22 nt, Human
ugagcugagaucacgccacugc

SEQ ID NO: 125044 - RNA, 22 nt, Human
ugagcugagaucgcgccacugc

SEQ ID NO: 125045 - RNA, 20 nt, Human
ugaggcaggagaaucgcuug

SEQ ID NO: 125046 - RNA, 23 nt, Human
ugaggcaggagaaucgcuugaac

SEQ ID NO: 125047 - RNA, 24 nt, Human
ugaggcggguggaucacgagguca

SEQ ID NO: 125048 - RNA, 18 nt, Human
ugaggucaggaguuugag

SEQ ID NO: 125049 - RNA, 21 nt, Human
ugauccuccaaccccggccuc

SEQ ID NO: 125050 - RNA, 25 nt, Human
ugauccuccaaccccggccucccaa

SEQ ID NO: 125051 - RNA, 23 nt, Human
ugccuguagucucagcuacuugg

SEQ ID NO: 125052 - RNA, 24 nt, Human
ugccuguagucucagcuacuuggg

SEQ ID NO: 125053 - RNA, 24 nt, Human
ugcgagguggagguugcagugagc

SEQ ID NO: 125054 - RNA, 22 nt, Human
ugcugggauuacaggcccugca

SEQ ID NO: 125055 - RNA, 24 nt, Human
ugcuuguaaucccaggugcuuggg

SEQ ID NO: 125056 - RNA, 24 nt, Human
uggauaacuuggggucaggaguuc

SEQ ID NO: 125057 - RNA, 21 nt, Human
uggcaggguuguaauggcugg

SEQ ID NO: 125058 - RNA, 24 nt, Human
uggccaacauggugaaaccccauc

SEQ ID NO: 125059 - RNA, 24 nt, Human
uggccaggcugcuuuccaauuccu

SEQ ID NO: 125060 - RNA, 21 nt, Human
uggcucacaccuguaauccca

SEQ ID NO: 125061 - RNA, 22 nt, Human
uggcucacaccuguaaucccag

SEQ ID NO: 125062 - RNA, 24 nt, Human
uggcucacaccuguaaugccagca

SEQ ID NO: 125063 - RNA, 19 nt, Human
uggcuggcccccacucgcu

SEQ ID NO: 125064 - RNA, 24 nt, Human
ugggaggcagagguugcagugagc

SEQ ID NO: 125065 - RNA, 18 nt, Human
ugggaggccgaggcugga

SEQ ID NO: 125066 - RNA, 23 nt, Human
ugggaggccgaggcuggagaagc

SEQ ID NO: 125067 - RNA, 21 nt, Human
ugggaggcggagguuguagug

SEQ ID NO: 125068 - RNA, 24 nt, Human
ugggaggcggagguuguagugagc

SEQ ID NO: 125069 - RNA, 22 nt, Human
ugggaggcugaagugggaggau

SEQ ID NO: 125070 - RNA, 24 nt, Human
ugggaggcugaagugggaggauug

SEQ ID NO: 125071 - RNA, 20 nt, Human
ugggaggcugaggcgggugg

SEQ ID NO: 125072 - RNA, 23 nt, Human
ugggaggcugaggcggguggauc

SEQ ID NO: 125073 - RNA, 24 nt, Human
ugggaggcugaggcggguggauca

SEQ ID NO: 125074 - RNA, 19 nt, Human
uggggucuugcucugucac

SEQ ID NO: 125075 - RNA, 24 nt, Human
ugguggcucacaccuguaauccca

SEQ ID NO: 125076 - RNA, 24 nt, Human
ugguggugugugccuguagucuca

SEQ ID NO: 125077 - RNA, 18 nt, Human
uggugugugccuguaguc

SEQ ID NO: 125078 - RNA, 24 nt, Human
uggugugugccuguagucucagcu

SEQ ID NO: 125079 - RNA, 24 nt, Human
uguagagacagggucccacuaugu

SEQ ID NO: 125080 - RNA, 24 nt, Human
uguuuguuuuuuuuuugagauggg

SEQ ID NO: 125081 - RNA, 24 nt, Human
uguuuuuuuuuugagauggggucu

SEQ ID NO: 125082 - RNA, 24 nt, Human
uuagccaggcgugguggugugugc

SEQ ID NO: 125083 - RNA, 18 nt, Human
uuagcuggccaugguggc

SEQ ID NO: 125084 - RNA, 23 nt, Human
uuccugggcucaaaugauccucc

SEQ ID NO: 125085 - RNA, 23 nt, Human
uugaacaugggaggcggagguug

SEQ ID NO: 125086 - RNA, 24 nt, Human
uugaaccugcgagguggagguugc

SEQ ID NO: 125087 - RNA, 24 nt, Human
uugaaccugggaggcagagguugc

SEQ ID NO: 125088 - RNA, 21 nt, Human
uugagauggggucuugcucug

SEQ ID NO: 125089 - RNA, 18 nt, Human
uugcagugagcugagauc

SEQ ID NO: 125090 - RNA, 19 nt, Human
uugcagugagcugagauca

SEQ ID NO: 125091 - RNA, 20 nt, Human
uugcagugagcugagaucac

SEQ ID NO: 125092 - RNA, 20 nt, Human
uugcagugagcugagaugau

SEQ ID NO: 125093 - RNA, 24 nt, Human
uugcuugaaccugcgagguggagg

SEQ ID NO: 125094 - RNA, 20 nt, Human
uugggaggcugaagugggag

SEQ ID NO: 125095 - RNA, 25 nt, Human
uugggaggcugaggcggguggauca

SEQ ID NO: 125096 - RNA, 24 nt, Human
uuguagagacagggucccacuaug

SEQ ID NO: 125097 - RNA, 19 nt, Human
uuguagugagcugagaucg

SEQ ID NO: 125098 - RNA, 20 nt, Human
uuguagugagcugagaucgc

SEQ ID NO: 125099 - RNA, 20 nt, Human
uuguuuguuuguuuuuuuuu

SEQ ID NO: 125100 - RNA, 22 nt, Human
uuuagagaaggcaaauccauag

SEQ ID NO: 125101 - RNA, 22 nt, Human
uuugagauggggucuugcucug

SEQ ID NO: 125102 - RNA, 18 nt, Human
uuuguagagacagggucc

SEQ ID NO: 125103 - RNA, 18 nt, Human
uuuuuuuguagagacagg

SEQ ID NO: 125104 - RNA, 22 nt, Human
uuuuuuuguuuguuuguuuuuu

SEQ ID NO: 125105 - RNA, 22 nt, Human
uuuuuuuuuugagauggggucu

SEQ ID NO: 125106 - RNA, 24 nt, Human
uuuuuuuuuugagauggggucuug

SEQ ID NO: 125107 - RNA, 22 nt, Human
uuuuuuuuuuguagagacaggg

SEQ ID NO: 125108 - RNA, 21 nt, Human
aaaaaacacaacugaccucau

SEQ ID NO: 125109 - RNA, 28 nt, Human
aaaaagcaggcauuaauguuccagucgg

SEQ ID NO: 125110 - RNA, 22 nt, Human
aaaagaacauccagguaauuca

SEQ ID NO: 125111 - RNA, 24 nt, Human
aaaauaggcuacagcagcccaaau

SEQ ID NO: 125112 - RNA, 22 nt, Human
aaaauuuugguacaaagauucc

SEQ ID NO: 125113 - RNA, 21 nt, Human
aaagaaugcuaccuucagaaa

SEQ ID NO: 125114 - RNA, 20 nt, Human
aacacaacugaccucaucuc

SEQ ID NO: 125115 - RNA, 20 nt, Human
aacaggaacccgcaggcccg

SEQ ID NO: 125116 - RNA, 20 nt, Human
aacuuggucaguuguaaugg

SEQ ID NO: 125117 - RNA, 21 nt, Human
aagcucauuuuuagcacacuu

SEQ ID NO: 125118 - RNA, 23 nt, Human
aagugccaaaaaauuuaaaugua

SEQ ID NO: 125119 - RNA, 24 nt, Human
aauucccaugcccuugcggcucuc

SEQ ID NO: 125120 - RNA, 18 nt, Human
acaaaacagaucugcuau

SEQ ID NO: 125121 - RNA, 22 nt, Human
acaaagauuccaaaaagcuuaa

SEQ ID NO: 125122 - RNA, 24 nt, Human
acaaagauuccaaaaagcuuaaua

SEQ ID NO: 125123 - RNA, 24 nt, Human
accauccccccaccccacacacac

SEQ ID NO: 125124 - RNA, 18 nt, Human
accuggaguaaaacuucu

SEQ ID NO: 125125 - RNA, 22 nt, Human
acuggagucgcagaagcgcucg

SEQ ID NO: 125126 - RNA, 22 nt, Human
agaagcagcacaaaagaggaac

SEQ ID NO: 125127 - RNA, 18 nt, Human
agaagcuccugcauagcc

SEQ ID NO: 125128 - RNA, 19 nt, Human
agaauguacuuugucuaca

SEQ ID NO: 125129 - RNA, 18 nt, Human
agacgucaacaggaaccc

SEQ ID NO: 125130 - RNA, 24 nt, Human
agccggcuccgagaaggaacuggg

SEQ ID NO: 125131 - RNA, 23 nt, Human
agcuaccaaaguaauugccaucu

SEQ ID NO: 125132 - RNA, 19 nt, Human
aggaacccgcaggcccggc

SEQ ID NO: 125133 - RNA, 21 nt, Human
agggaauuucuggucuuuauc

SEQ ID NO: 125134 - RNA, 23 nt, Human
aguaaucugauuacuccagccuc

SEQ ID NO: 125135 - RNA, 19 nt, Human
aucuuaaaaaacacaacug

SEQ ID NO: 125136 - RNA, 19 nt, Human
augaacuuuaaaacuugaa

SEQ ID NO: 125137 - RNA, 18 nt, Human
auguuaacuuucaaaaaa

SEQ ID NO: 125138 - RNA, 24 nt, Human
caaaaaauuuaaauguacugggca

SEQ ID NO: 125139 - RNA, 24 nt, Human
caaacaucuuucuucuaaaugucc

SEQ ID NO: 125140 - RNA, 19 nt, Human
caacaggaacccgcaggcc

SEQ ID NO: 125141 - RNA, 23 nt, Human
cacacuuuacacugaaauuacuu

SEQ ID NO: 125142 - RNA, 25 nt, Human
caccccacacacacauacacacaac

SEQ ID NO: 125143 - RNA, 24 nt, Human
cagcagcccaaauucacugucuuc

SEQ ID NO: 125144 - RNA, 24 nt, Human
cagcguugagauugagacuggggg

SEQ ID NO: 125145 - RNA, 22 nt, Human
caggaacccgcaggcccggccu

SEQ ID NO: 125146 - RNA, 21 nt, Human
cauccagauugguucaugauu

SEQ ID NO: 125147 - RNA, 21 nt, Human
caugcccuugcggcucucaca

SEQ ID NO: 125148 - RNA, 19 nt, Human
ccacacacacauacacaca

SEQ ID NO: 125149 - RNA, 18 nt, Human
ccacucgagucucuuggc

SEQ ID NO: 125150 - RNA, 20 nt, Human
cccacacacacauacacaca

SEQ ID NO: 125151 - RNA, 21 nt, Human
cccaccccacacacacauaca

SEQ ID NO: 125152 - RNA, 28 nt, Human
ccccaccccacacacacauacacacaac

SEQ ID NO: 125153 - RNA, 21 nt, Human
cccccaccccacacacacaua

SEQ ID NO: 125154 - RNA, 24 nt, Human
ccccgcugcccuuggggaccuggu

SEQ ID NO: 125155 - RNA, 18 nt, Human
cccgcaggcccggccugg

SEQ ID NO: 125156 - RNA, 19 nt, Human
cccggccuggacaccugcu

SEQ ID NO: 125157 - RNA, 20 nt, Human
ccugguuaccaaaauacuuc

SEQ ID NO: 125158 - RNA, 24 nt, Human
ccuucagaaauaaccaagaugcag

SEQ ID NO: 125159 - RNA, 21 nt, Human
cggggaggugcgguuuccagu

SEQ ID NO: 125160 - RNA, 23 nt, Human
cucacuggaagcuuuaacuccca

SEQ ID NO: 125161 - RNA, 21 nt, Human
cucuucaacaauauacucuga

SEQ ID NO: 125162 - RNA, 20 nt, Human
cugacuuuccaaaaagcagg

SEQ ID NO: 125163 - RNA, 21 nt, Human
cugcggggaggugcgguuucc

SEQ ID NO: 125164 - RNA, 20 nt, Human
cugcugcccucacuggaagc

SEQ ID NO: 125165 - RNA, 20 nt, Human
cuuaccauccccccaccccc

SEQ ID NO: 125166 - RNA, 25 nt, Human
cuuuccuucuuuucaguguuucucu

SEQ ID NO: 125167 - RNA, 19 nt, Human
gaagcuccugcauagcccu

SEQ ID NO: 125168 - RNA, 21 nt, Human
gagcacaccucaccugaugga

SEQ ID NO: 125169 - RNA, 21 nt, Human
gcccucacuggaagcuuuaac

SEQ ID NO: 125170 - RNA, 18 nt, Human
ggagaagggugccucgcu

SEQ ID NO: 125171 - RNA, 20 nt, Human
gguagaaacacaaugagggu

SEQ ID NO: 125172 - RNA, 20 nt, Human
ggugcgguuuccaguggcgc

SEQ ID NO: 125173 - RNA, 20 nt, Human
guaaaggcuacauauaaaug

SEQ ID NO: 125174 - RNA, 19 nt, Human
guauaccuuuuaaucacac

SEQ ID NO: 125175 - RNA, 19 nt, Human
gucgucagugccaggagcg

SEQ ID NO: 125176 - RNA, 25 nt, Human
uaaaaaaauaggcuacagcagccca

SEQ ID NO: 125177 - RNA, 18 nt, Human
uaaaaaacacaacugacc

SEQ ID NO: 125178 - RNA, 22 nt, Human
uaaagcaguaaucugauuacuc

SEQ ID NO: 125179 - RNA, 19 nt, Human
uaaaggcuaaguucuggga

SEQ ID NO: 125180 - RNA, 20 nt, Human
uaaauccacccauaaauacu

SEQ ID NO: 125181 - RNA, 23 nt, Human
uaaaugugaaugcauacauuuca

SEQ ID NO: 125182 - RNA, 22 nt, Human
uaagaaaagauuaaauaagaag

SEQ ID NO: 125183 - RNA, 23 nt, Human
uaagccagguaaacuccaagcac

SEQ ID NO: 125184 - RNA, 22 nt, Human
uaaguguuuggguguauguguc

SEQ ID NO: 125185 - RNA, 25 nt, Human
uaaguucugggacaugaaagcuuuu

SEQ ID NO: 125186 - RNA, 19 nt, Human
uaauucauggcauuuucca

SEQ ID NO: 125187 - RNA, 22 nt, Human
uacaacaucaccuuggaguuuu

SEQ ID NO: 125188 - RNA, 26 nt, Human
uaccaaaguaauugccaucuuaaaaa

SEQ ID NO: 125189 - RNA, 20 nt, Human
uacugggcaagccugcuuug

SEQ ID NO: 125190 - RNA, 20 nt, Human
uagaaaauucacaaaacaaa

SEQ ID NO: 125191 - RNA, 18 nt, Human
uaggcuacagcagcccaa

SEQ ID NO: 125192 - RNA, 20 nt, Human
ucaaaaaaucaucuagaaga

SEQ ID NO: 125193 - RNA, 19 nt, Human
ucaaucuaaaaaaauaggc

SEQ ID NO: 125194 - RNA, 19 nt, Human
ucaauucacuuuucuaaau

SEQ ID NO: 125195 - RNA, 28 nt, Human
ucaauucccaugcccuugcggcucucaa

SEQ ID NO: 125196 - RNA, 21 nt, Human
ucacagcguugagauugagac

SEQ ID NO: 125197 - RNA, 21 nt, Human
ucacagcuaaaaacacacaaa

SEQ ID NO: 125198 - RNA, 25 nt, Human
ucacagcuaaaaacacacaaauuaa

SEQ ID NO: 125199 - RNA, 24 nt, Human
ucacagguaaaggcuaaguucugg

SEQ ID NO: 125200 - RNA, 21 nt, Human
uccaaaaagcaggcauuaaug

SEQ ID NO: 125201 - RNA, 25 nt, Human
uccaaaccacaaaacagaucugcua

SEQ ID NO: 125202 - RNA, 25 nt, Human
ucccaccaaaaauggccugguuacc

SEQ ID NO: 125203 - RNA, 18 nt, Human
ucgcucccacucccacuc

SEQ ID NO: 125204 - RNA, 25 nt, Human
ucuacaacuaugcacuguagcuauu

SEQ ID NO: 125205 - RNA, 22 nt, Human
ucucucuuuucucuuaccaucc

SEQ ID NO: 125206 - RNA, 25 nt, Human
ucuucauucaguaguuugguguaac

SEQ ID NO: 125207 - RNA, 23 nt, Human
ucuuuccuucuuuucaguguuuc

SEQ ID NO: 125208 - RNA, 22 nt, Human
ucuuuuuguuuuggaaaaaagc

SEQ ID NO: 125209 - RNA, 18 nt, Human
ugaaaucaguacauuaug

SEQ ID NO: 125210 - RNA, 21 nt, Human
ugacauaaugaggcauccaga

SEQ ID NO: 125211 - RNA, 26 nt, Human
ugagaagcagcacaaaagaggaaaac

SEQ ID NO: 125212 - RNA, 19 nt, Human
ugagugaagaaaagaaacc

SEQ ID NO: 125213 - RNA, 24 nt, Human
ugaguuauaaaugucuacuaaagu

SEQ ID NO: 125214 - RNA, 27 nt, Human
ugccuagggcaagacgucaacaggaac

SEQ ID NO: 125215 - RNA, 22 nt, Human
uggaaaaaaacugaauuuuacu

SEQ ID NO: 125216 - RNA, 19 nt, Human
uggaauggcaagugccaaa

SEQ ID NO: 125217 - RNA, 20 nt, Human
uggaauggcaagugccaaaa

SEQ ID NO: 125218 - RNA, 22 nt, Human
uggaauggcaagugccaaaaaa

SEQ ID NO: 125219 - RNA, 18 nt, Human
uggacaguugauuuaugc

SEQ ID NO: 125220 - RNA, 27 nt, Human
uggccugguuaccaaaauacuucuuca

SEQ ID NO: 125221 - RNA, 21 nt, Human
uggcgcgggacagccggcucc

SEQ ID NO: 125222 - RNA, 18 nt, Human
uggcgucaauucccaugc

SEQ ID NO: 125223 - RNA, 19 nt, Human
uggguguaugugucuauau

SEQ ID NO: 125224 - RNA, 19 nt, Human
uguagaacuuucuuuggaa

SEQ ID NO: 125225 - RNA, 19 nt, Human
ugucacagcuaaaaacaca

SEQ ID NO: 125226 - RNA, 18 nt, Human
ugucucagccuugguggg

SEQ ID NO: 125227 - RNA, 23 nt, Human
ugucucagccuugguggggcaua

SEQ ID NO: 125228 - RNA, 22 nt, Human
uuaaaaaacacaacugaccuca

SEQ ID NO: 125229 - RNA, 18 nt, Human
uucacugucucagccuug

SEQ ID NO: 125230 - RNA, 22 nt, Human
uucccuuaucaccuucaaucac

SEQ ID NO: 125231 - RNA, 19 nt, Human
uucuuccauauaaacacag

SEQ ID NO: 125232 - RNA, 23 nt, Human
uucuuuggaaguuuaauugcaau

SEQ ID NO: 125233 - RNA, 23 nt, Human
uugagauugagacugggggucgg

SEQ ID NO: 125234 - RNA, 20 nt, Human
uugccgcaagcaucugauga

SEQ ID NO: 125235 - RNA, 22 nt, Human
uuggcaagcaaaagagguacaa

SEQ ID NO: 125236 - RNA, 25 nt, Human
uuuaaaauucaugauaacucaugga

SEQ ID NO: 125237 - RNA, 19 nt, Human
uuuaauagccuauuugaga

SEQ ID NO: 125238 - RNA, 24 nt, Human
uuucuuuuccuuucuuuaacuagg

SEQ ID NO: 125239 - RNA, 18 nt, Human
uuuuagcacacuugguug

SEQ ID NO: 125240 - RNA, 21 nt, Human
uuuuccuuucuuuaacuaggu

SEQ ID NO: 125241 - RNA, 28 nt, Human
aggagcaauaaaggagaaaccgguaccc

SEQ ID NO: 125242 - RNA, 20 nt, Human
agggagcucugcggggaggu

SEQ ID NO: 125243 - RNA, 23 nt, Human
caccacccagccgcuggaggaag

SEQ ID NO: 125244 - RNA, 25 nt, Human
cagcggagggucaggaagggagcuc

SEQ ID NO: 125245 - RNA, 21 nt, Human
cagggcccugaggugccacuu

SEQ ID NO: 125246 - RNA, 19 nt, Human
cccaccucucucgcacccc

SEQ ID NO: 125247 - RNA, 21 nt, Human
cccaguaugacugccgagcac

SEQ ID NO: 125248 - RNA, 21 nt, Human
ccucaauccucugcagcggag

SEQ ID NO: 125249 - RNA, 21 nt, Human
cggaaaugaagcugagaccaa

SEQ ID NO: 125250 - RNA, 23 nt, Human
cucuugacaaccccuuucccagg

SEQ ID NO: 125251 - RNA, 18 nt, Human
cuggaagggcuucgaguu

SEQ ID NO: 125252 - RNA, 21 nt, Human
cuugacaaccccuuucccagg

SEQ ID NO: 125253 - RNA, 23 nt, Human
cuugacaaccccuuucccaggga

SEQ ID NO: 125254 - RNA, 21 nt, Human
gaaaugaagcugagaccaaga

SEQ ID NO: 125255 - RNA, 21 nt, Human
gagcaauaaaggagaaacuga

SEQ ID NO: 125256 - RNA, 24 nt, Human
gagccccagccaucccuccugcug

SEQ ID NO: 125257 - RNA, 21 nt, Human
gaggagcagaugggacauccg

SEQ ID NO: 125258 - RNA, 24 nt, Human
gcucugcggggagguugguugagu

SEQ ID NO: 125259 - RNA, 23 nt, Human
ggagugagcugguaccacuggaa

SEQ ID NO: 125260 - RNA, 20 nt, Human
uaagccucaauccucugcag

SEQ ID NO: 125261 - RNA, 22 nt, Human
uccugcuguguagacuguuuug

SEQ ID NO: 125262 - RNA, 23 nt, Human
ucucuugacaaccccuuucccag

SEQ ID NO: 125263 - RNA, 22 nt, Human
ugaggugccacuuauagcucaa

SEQ ID NO: 125264 - RNA, 23 nt, Human
uggaaagggccagcucagaauua

SEQ ID NO: 125265 - RNA, 19 nt, Human
ugggaggagcagaugggac

SEQ ID NO: 125266 - RNA, 25 nt, Human
ugggaggagcagaugggacauccgg

SEQ ID NO: 125267 - RNA, 20 nt, Human
uuaaggggaaugggaggagc

SEQ ID NO: 125268 - RNA, 18 nt, Human
uuacaggggggaggggag

SEQ ID NO: 125269 - RNA, 22 nt, Human
aaaauaaacaauuuuaaggucc

SEQ ID NO: 125270 - RNA, 19 nt, Human
aacaugcccugcaccacag

SEQ ID NO: 125271 - RNA, 20 nt, Human
aagcaguaguaaaaauaugc

SEQ ID NO: 125272 - RNA, 19 nt, Human
aagugccagccucccuuuc

SEQ ID NO: 125273 - RNA, 24 nt, Human
acacacacacagacacacacacac

SEQ ID NO: 125274 - RNA, 26 nt, Human
acacacacauacacggacacacacaa

SEQ ID NO: 125275 - RNA, 28 nt, Human
acacacacauacacggacacacacacac

SEQ ID NO: 125276 - RNA, 22 nt, Human
acacagacacacacacacaugc

SEQ ID NO: 125277 - RNA, 21 nt, Human
acagaaaaauuauggcauggg

SEQ ID NO: 125278 - RNA, 19 nt, Human
acccuguagaaugccuugg

SEQ ID NO: 125279 - RNA, 24 nt, Human
acugaggcaaauuaccauuagaac

SEQ ID NO: 125280 - RNA, 22 nt, Human
agagagaaagcauauaccuaga

SEQ ID NO: 125281 - RNA, 20 nt, Human
agagcuacaguaaauggauu

SEQ ID NO: 125282 - RNA, 23 nt, Human
agcaguaguaaaaauaugcacaa

SEQ ID NO: 125283 - RNA, 23 nt, Human
aggaaaagcaguaguaaaaauau

SEQ ID NO: 125284 - RNA, 22 nt, Human
aggcagcagaaggacucggcga

SEQ ID NO: 125285 - RNA, 21 nt, Human
aggcaggaggauggggugggg

SEQ ID NO: 125286 - RNA, 23 nt, Human
aggcaggaggaugggguggggcg

SEQ ID NO: 125287 - RNA, 29 nt, Human
aggcaggaggauggggugggggggacccc

SEQ ID NO: 125288 - RNA, 23 nt, Human
aguccuuuuaaaaauagaggugu

SEQ ID NO: 125289 - RNA, 24 nt, Human
caaagagggccagcuggugugaug

SEQ ID NO: 125290 - RNA, 22 nt, Human
caaauaaaccaucuguaaacac

SEQ ID NO: 125291 - RNA, 24 nt, Human
caaauaaaccaucuguaaacacaa

SEQ ID NO: 125292 - RNA, 22 nt, Human
cacacacacacagacacacaca

SEQ ID NO: 125293 - RNA, 24 nt, Human
cacacacacacagacacacacaca

SEQ ID NO: 125294 - RNA, 20 nt, Human
caccacagauccuaaaucaa

SEQ ID NO: 125295 - RNA, 22 nt, Human
caccacgcgacagccucagagc

SEQ ID NO: 125296 - RNA, 25 nt, Human
cagaacaggcucccaggccauucua

SEQ ID NO: 125297 - RNA, 28 nt, Human
cagacacacacacacaugcaugucugug

SEQ ID NO: 125298 - RNA, 23 nt, Human
cagagaauuugaagguauacaga

SEQ ID NO: 125299 - RNA, 22 nt, Human
cagcagagagaaagcauauacc

SEQ ID NO: 125300 - RNA, 25 nt, Human
caucuuuacccuaaugccauaaagg

SEQ ID NO: 125301 - RNA, 22 nt, Human
ccacacacacauacacggacac

SEQ ID NO: 125302 - RNA, 26 nt, Human
ccacacacacauacacggacacacac

SEQ ID NO: 125303 - RNA, 19 nt, Human
ccacagauccuaaaucaag

SEQ ID NO: 125304 - RNA, 31 nt, Human
cccacacacacauacacggacacacacacaa

SEQ ID NO: 125305 - RNA, 19 nt, Human
cccagaaaauuuagcuguu

SEQ ID NO: 125306 - RNA, 19 nt, Human
ccucuugaaaagggaaagc

SEQ ID NO: 125307 - RNA, 20 nt, Human
ccugauaacuuuaaccauca

SEQ ID NO: 125308 - RNA, 18 nt, Human
ccuuggaucccagcacuc

SEQ ID NO: 125309 - RNA, 23 nt, Human
ccuuggaucccagcacucagucc

SEQ ID NO: 125310 - RNA, 18 nt, Human
cgaggaugcucgacgcug

SEQ ID NO: 125311 - RNA, 28 nt, Human
cggacacacacacacagacacacacaca

SEQ ID NO: 125312 - RNA, 21 nt, Human
cgggaaggcaggaggaugggg

SEQ ID NO: 125313 - RNA, 21 nt, Human
cugaccucuagggcuugcugg

SEQ ID NO: 125314 - RNA, 21 nt, Human
cuguagaaugccuuggauccc

SEQ ID NO: 125315 - RNA, 21 nt, Human
gaacaggcucccaggccauuc

SEQ ID NO: 125316 - RNA, 25 nt, Human
gaaggcaggaggaugggguggggcg

SEQ ID NO: 125317 - RNA, 21 nt, Human
gacagccucagagcauuggug

SEQ ID NO: 125318 - RNA, 19 nt, Human
gagccacggggagguguca

SEQ ID NO: 125319 - RNA, 24 nt, Human
gaguccuccuguugguccgcaagg

SEQ ID NO: 125320 - RNA, 26 nt, Human
gcacaaauaaaccaucuguaaacaca

SEQ ID NO: 125321 - RNA, 24 nt, Human
gcagagagaaagcauauaccuaga

SEQ ID NO: 125322 - RNA, 22 nt, Human
gcagggacauuuuccuaaguag

SEQ ID NO: 125323 - RNA, 18 nt, Human
gcgcugcguuuccuccug

SEQ ID NO: 125324 - RNA, 23 nt, Human
ggaaagcugggaguccuccuguu

SEQ ID NO: 125325 - RNA, 26 nt, Human
ggaagaaauauuuaucaaauacacag

SEQ ID NO: 125326 - RNA, 19 nt, Human
ggaggugucaaggagggua

SEQ ID NO: 125327 - RNA, 21 nt, Human
ggccagcuggugugauggagc

SEQ ID NO: 125328 - RNA, 18 nt, Human
gggaaaaggaagcaaaga

SEQ ID NO: 125329 - RNA, 22 nt, Human
uaacaaauaaugccccagugaa

SEQ ID NO: 125330 - RNA, 22 nt, Human
uaacuuuugcaugcuuuacacu

SEQ ID NO: 125331 - RNA, 23 nt, Human
uaagcagagcuacaguaaaugga

SEQ ID NO: 125332 - RNA, 23 nt, Human
uaauuucacagcagagagaaagc

SEQ ID NO: 125333 - RNA, 21 nt, Human
uacaguaugcauuuaggaaaa

SEQ ID NO: 125334 - RNA, 19 nt, Human
uacauuaagcagagcuaca

SEQ ID NO: 125335 - RNA, 20 nt, Human
uacauuaagcagagcuacag

SEQ ID NO: 125336 - RNA, 18 nt, Human
uaccugacugacaagugc

SEQ ID NO: 125337 - RNA, 18 nt, Human
uacugcaaauauuaaaaa

SEQ ID NO: 125338 - RNA, 18 nt, Human
uagaacccacacacacau

SEQ ID NO: 125339 - RNA, 23 nt, Human
uagauauguacauauuuauuaca

SEQ ID NO: 125340 - RNA, 22 nt, Human
uaugcacauacacaauuuaaaa

SEQ ID NO: 125341 - RNA, 21 nt, Human
uauugcaugcauuucugugca

SEQ ID NO: 125342 - RNA, 19 nt, Human
ucaaacagugaauguggua

SEQ ID NO: 125343 - RNA, 22 nt, Human
ucccagccccagaaaauuuagc

SEQ ID NO: 125344 - RNA, 20 nt, Human
ucccaggccauucuaagcac

SEQ ID NO: 125345 - RNA, 23 nt, Human
ucccuuucaugucauggaagaug

SEQ ID NO: 125346 - RNA, 19 nt, Human
uccuaaaucaaguacugca

SEQ ID NO: 125347 - RNA, 20 nt, Human
ucuaaaaauauaauguagga

SEQ ID NO: 125348 - RNA, 18 nt, Human
ugaaucacuagucuuaga

SEQ ID NO: 125349 - RNA, 20 nt, Human
ugaauguuuuuaagcuguga

SEQ ID NO: 125350 - RNA, 23 nt, Human
ugacuaaacuuugaaacaugccc

SEQ ID NO: 125351 - RNA, 19 nt, Human
ugagaugcugcuggcgcug

SEQ ID NO: 125352 - RNA, 23 nt, Human
ugcaaauauuaaaaaaaugacug

SEQ ID NO: 125353 - RNA, 23 nt, Human
ugcaagacagaacaggcucccag

SEQ ID NO: 125354 - RNA, 19 nt, Human
ugcaggaagaacgcaauuu

SEQ ID NO: 125355 - RNA, 19 nt, Human
ugcaugcuuuacacuuguc

SEQ ID NO: 125356 - RNA, 23 nt, Human
ugcccugcaccacagauccuaaa

SEQ ID NO: 125357 - RNA, 21 nt, Human
ugcuggcgcugcguuuccucc

SEQ ID NO: 125358 - RNA, 19 nt, Human
uggagccacggggaggugu

SEQ ID NO: 125359 - RNA, 19 nt, Human
uggaucccagcacucaguc

SEQ ID NO: 125360 - RNA, 18 nt, Human
uggugugauggagcgggg

SEQ ID NO: 125361 - RNA, 21 nt, Human
uggugugauggagcgggguga

SEQ ID NO: 125362 - RNA, 20 nt, Human
ugucaaggaggguagaugag

SEQ ID NO: 125363 - RNA, 19 nt, Human
ugucauggaagaugcaaga

SEQ ID NO: 125364 - RNA, 19 nt, Human
ugugcuucauaugcacaua

SEQ ID NO: 125365 - RNA, 24 nt, Human
uguuagcaaauaccaccaucugag

SEQ ID NO: 125366 - RNA, 19 nt, Human
uugcaugcauuucugugcc

SEQ ID NO: 125367 - RNA, 22 nt, Human
uuggaucccagcacucaguccg

SEQ ID NO: 125368 - RNA, 21 nt, Human
aaacagaugcaaagaugacaa

SEQ ID NO: 125369 - RNA, 23 nt, Human
aaacagaugcaaagaugacaaau

SEQ ID NO: 125370 - RNA, 24 nt, Human
aaacagaugcaaagaugacaaauu

SEQ ID NO: 125371 - RNA, 26 nt, Human
aacacaacacuccuuaaaaacucaua

SEQ ID NO: 125372 - RNA, 20 nt, Human
aagcagccuucacuggcuuu

SEQ ID NO: 125373 - RNA, 19 nt, Human
accuuuucagguucaucuu

SEQ ID NO: 125374 - RNA, 18 nt, Human
agaaaacagaugcaaaga

SEQ ID NO: 125375 - RNA, 21 nt, Human
aguacagcaaaccaaaaaaaa

SEQ ID NO: 125376 - RNA, 19 nt, Human
caaagcagccuucacuggc

SEQ ID NO: 125377 - RNA, 23 nt, Human
cacccgcugccccggcccaaagc

SEQ ID NO: 125378 - RNA, 21 nt, Human
cagcuaagauuucuucucaca

SEQ ID NO: 125379 - RNA, 24 nt, Human
caggacuccgaggagccggaauuc

SEQ ID NO: 125380 - RNA, 20 nt, Human
cccgcccggucccacccgcu

SEQ ID NO: 125381 - RNA, 21 nt, Human
cccgcugccccggcccaaagc

SEQ ID NO: 125382 - RNA, 19 nt, Human
cccuaaaguacagcaaacc

SEQ ID NO: 125383 - RNA, 19 nt, Human
ccgaggagccggaauucca

SEQ ID NO: 125384 - RNA, 23 nt, Human
ccgcccggucccacccgcugccc

SEQ ID NO: 125385 - RNA, 20 nt, Human
ccggcccaaagcagccuuca

SEQ ID NO: 125386 - RNA, 25 nt, Human
ccggcggucucuuuggaaucccucc

SEQ ID NO: 125387 - RNA, 18 nt, Human
ccuaaaguacagcaaacc

SEQ ID NO: 125388 - RNA, 20 nt, Human
cucaguguuaccuuuucagg

SEQ ID NO: 125389 - RNA, 24 nt, Human
gacaauuaguucacccaaaguuca

SEQ ID NO: 125390 - RNA, 19 nt, Human
gcgccgaggcagaggcggc

SEQ ID NO: 125391 - RNA, 23 nt, Human
gcggcgcgguggcggcuucccuc

SEQ ID NO: 125392 - RNA, 19 nt, Human
gcugagcuccgaggcggcg

SEQ ID NO: 125393 - RNA, 26 nt, Human
ggaaucccucccgcccggucccaccc

SEQ ID NO: 125394 - RNA, 20 nt, Human
ggcggcggugggggagggcc

SEQ ID NO: 125395 - RNA, 19 nt, Human
ggggcuaggagcugcccgc

SEQ ID NO: 125396 - RNA, 24 nt, Human
uaaaaacucauauguacacuucca

SEQ ID NO: 125397 - RNA, 19 nt, Human
uaacacacacagacauaua

SEQ ID NO: 125398 - RNA, 20 nt, Human
uacacuaagaaaauacuaaa

SEQ ID NO: 125399 - RNA, 21 nt, Human
uacacuaagaaaauacuaaac

SEQ ID NO: 125400 - RNA, 25 nt, Human
ucacccaaaguucaucuuuaauugc

SEQ ID NO: 125401 - RNA, 18 nt, Human
ucacuggcuuuccauuuc

SEQ ID NO: 125402 - RNA, 21 nt, Human
ucccacccgcugccccggccc

SEQ ID NO: 125403 - RNA, 23 nt, Human
ucccacccgcugccccggcccaa

SEQ ID NO: 125404 - RNA, 27 nt, Human
ugacaaauaaguccaggucgugacaca

SEQ ID NO: 125405 - RNA, 20 nt, Human
ugcaaagaugacaaauaagu

SEQ ID NO: 125406 - RNA, 22 nt, Human
ugcaggaacuuccuccgcuugg

SEQ ID NO: 125407 - RNA, 19 nt, Human
ugccccggcccaaagcagc

SEQ ID NO: 125408 - RNA, 21 nt, Human
ugcugagcuccgaggcggcgg

SEQ ID NO: 125409 - RNA, 19 nt, Human
uggaauaacacacacagac

SEQ ID NO: 125410 - RNA, 20 nt, Human
uggagagguuagagugacag

SEQ ID NO: 125411 - RNA, 24 nt, Human
ugggccccuggcuccuccccccgg

SEQ ID NO: 125412 - RNA, 18 nt, Human
ugugguaguauagucaaa

SEQ ID NO: 125413 - RNA, 24 nt, Human
ugugguaguauagucaaaacacau

SEQ ID NO: 125414 - RNA, 21 nt, Human
uguuaacauaaaaaacagcua

SEQ ID NO: 125415 - RNA, 24 nt, Human
uuaguucacccaaaguucaucuuu

SEQ ID NO: 125416 - RNA, 19 nt, Human
uuuggaaucccucccgccc

SEQ ID NO: 125417 - RNA, 23 nt, Human
aaaugauagaaguggcaaaagcu

SEQ ID NO: 125418 - RNA, 24 nt, Human
agcagccaggaaccacugugccag

SEQ ID NO: 125419 - RNA, 18 nt, Human
caagccccagcaaggcgg

SEQ ID NO: 125420 - RNA, 19 nt, Human
caaggacagcaaugcgaua

SEQ ID NO: 125421 - RNA, 22 nt, Human
cagcagccaggaaccacugugc

SEQ ID NO: 125422 - RNA, 24 nt, Human
cagcuagaccccuucccgcucgcu

SEQ ID NO: 125423 - RNA, 22 nt, Human
ccaaggacagcaaugcgauaaa

SEQ ID NO: 125424 - RNA, 21 nt, Human
ccagcgacgcgggagcugcag

SEQ ID NO: 125425 - RNA, 22 nt, Human
cccaaggacagcaaugcgauaa

SEQ ID NO: 125426 - RNA, 19 nt, Human
ccucccagcgacgcgggag

SEQ ID NO: 125427 - RNA, 19 nt, Human
ccuccuucucucccuccuc

SEQ ID NO: 125428 - RNA, 19 nt, Human
cgcccagacagcagugcag

SEQ ID NO: 125429 - RNA, 22 nt, Human
cggguucaaagccgggcgcugg

SEQ ID NO: 125430 - RNA, 23 nt, Human
cuucucucccuccucaucugaga

SEQ ID NO: 125431 - RNA, 24 nt, Human
gacgcgggagcugcaggagaggga

SEQ ID NO: 125432 - RNA, 21 nt, Human
gcaaaagcucagggugugugc

SEQ ID NO: 125433 - RNA, 19 nt, Human
gcaggagagggacgcggug

SEQ ID NO: 125434 - RNA, 22 nt, Human
gcucgcucccucgcuccuccca

SEQ ID NO: 125435 - RNA, 18 nt, Human
ggaguuccucccaccucu

SEQ ID NO: 125436 - RNA, 19 nt, Human
ggcaaaagcucagggugug

SEQ ID NO: 125437 - RNA, 20 nt, Human
ggcagcagccaggaaccacu

SEQ ID NO: 125438 - RNA, 19 nt, Human
gggccgagcaaaggccagc

SEQ ID NO: 125439 - RNA, 18 nt, Human
ucaaaaaugauagaagug

SEQ ID NO: 125440 - RNA, 18 nt, Human
uccccggacccgcccaga

SEQ ID NO: 125441 - RNA, 21 nt, Human
ugaguccccggacccgcccag

SEQ ID NO: 125442 - RNA, 20 nt, Human
ugcaaggaguuccucccacc

SEQ ID NO: 125443 - RNA, 21 nt, Human
aaaaagccagaggccugggca

SEQ ID NO: 125444 - RNA, 21 nt, Human
aaaacaaauaaggcuucaccc

SEQ ID NO: 125445 - RNA, 18 nt, Human
aaaaucuuaucccuauga

SEQ ID NO: 125446 - RNA, 21 nt, Human
aaagcccaaaaagagaggcag

SEQ ID NO: 125447 - RNA, 21 nt, Human
aagaaggaaggggguagacag

SEQ ID NO: 125448 - RNA, 23 nt, Human
aaggaccaaccagguacagacca

SEQ ID NO: 125449 - RNA, 25 nt, Human
aauuuucaauauaaaaagccagagg

SEQ ID NO: 125450 - RNA, 22 nt, Human
acuaugaaagcccaaaaagaga

SEQ ID NO: 125451 - RNA, 23 nt, Human
agaaggaaggggguagacagagc

SEQ ID NO: 125452 - RNA, 19 nt, Human
agacagagccuacuaagua

SEQ ID NO: 125453 - RNA, 25 nt, Human
agcccaaaaagagaggcaguugaau

SEQ ID NO: 125454 - RNA, 19 nt, Human
caauauaaaaagccagagg

SEQ ID NO: 125455 - RNA, 23 nt, Human
caguuacugagcuuaugcuuuga

SEQ ID NO: 125456 - RNA, 24 nt, Human
caguugaaucuuuccucaggccau

SEQ ID NO: 125457 - RNA, 20 nt, Human
caugcaaagacgaaggaccc

SEQ ID NO: 125458 - RNA, 27 nt, Human
ccaaagaugucucugccugagaacuaa

SEQ ID NO: 125459 - RNA, 20 nt, Human
ccaagcaagcagagagacca

SEQ ID NO: 125460 - RNA, 23 nt, Human
cccaaaaagagaggcaguugaau

SEQ ID NO: 125461 - RNA, 18 nt, Human
ccuaugaugaaugaaagg

SEQ ID NO: 125462 - RNA, 24 nt, Human
ccucacacuucacuauggugguuc

SEQ ID NO: 125463 - RNA, 20 nt, Human
ccugagucaggccaagugca

SEQ ID NO: 125464 - RNA, 20 nt, Human
cgaaggaccaaccagguaca

SEQ ID NO: 125465 - RNA, 23 nt, Human
cugcuuaucccuucugccacaug

SEQ ID NO: 125466 - RNA, 24 nt, Human
cuggcaggggacauaaaaaacaaa

SEQ ID NO: 125467 - RNA, 25 nt, Human
cuucuccugagcaucauaucucaac

SEQ ID NO: 125468 - RNA, 18 nt, Human
gaaagcccaaaaagagag

SEQ ID NO: 125469 - RNA, 22 nt, Human
gaacacuaugaaagcccaaaaa

SEQ ID NO: 125470 - RNA, 19 nt, Human
gaagauguauaccuugguc

SEQ ID NO: 125471 - RNA, 20 nt, Human
gaccaugguuuucucaccug

SEQ ID NO: 125472 - RNA, 22 nt, Human
ggccauccagcauuauuaguua

SEQ ID NO: 125473 - RNA, 23 nt, Human
gucugguucagggugcucgcgaa

SEQ ID NO: 125474 - RNA, 18 nt, Human
guggccagagagcaaagg

SEQ ID NO: 125475 - RNA, 19 nt, Human
uaaaaaacaaauaaggcuu

SEQ ID NO: 125476 - RNA, 21 nt, Human
uaaguaagcugcuuaucccuu

SEQ ID NO: 125477 - RNA, 18 nt, Human
uauaaaaagccagaggcc

SEQ ID NO: 125478 - RNA, 24 nt, Human
uauaaaaagccagaggccugggca

SEQ ID NO: 125479 - RNA, 23 nt, Human
ucaauauaaaaagccagaggccu

SEQ ID NO: 125480 - RNA, 24 nt, Human
ucacacauuggucagggccgccuc

SEQ ID NO: 125481 - RNA, 20 nt, Human
ucacccuuccucucaaagag

SEQ ID NO: 125482 - RNA, 23 nt, Human
ucaggccaagugcauacuucaca

SEQ ID NO: 125483 - RNA, 21 nt, Human
ugaaagcccaaaaagagaggc

SEQ ID NO: 125484 - RNA, 21 nt, Human
ugaaagggugaugaugacagu

SEQ ID NO: 125485 - RNA, 24 nt, Human
ugaugaaugaaagggugaugauga

SEQ ID NO: 125486 - RNA, 20 nt, Human
ugcaaagacgaaggaccaac

SEQ ID NO: 125487 - RNA, 23 nt, Human
ugcauacaugaucagaagggcca

SEQ ID NO: 125488 - RNA, 24 nt, Human
ugcauacaugaucagaagggccaa

SEQ ID NO: 125489 - RNA, 23 nt, Human
ugccugagaacuaagugaugggg

SEQ ID NO: 125490 - RNA, 21 nt, Human
uggcuuccugagucaggccuc

SEQ ID NO: 125491 - RNA, 21 nt, Human
uggucagggccgccucacacu

SEQ ID NO: 125492 - RNA, 19 nt, Human
uuccuaggggcaagacaaa

SEQ ID NO: 125493 - RNA, 21 nt, Human
aagagcugcuauuauuacuac

SEQ ID NO: 125494 - RNA, 20 nt, Human
aagcccggucuuggcccugc

SEQ ID NO: 125495 - RNA, 18 nt, Human
caaggugaacugagccgc

SEQ ID NO: 125496 - RNA, 18 nt, Human
caccggcacagcccucgc

SEQ ID NO: 125497 - RNA, 21 nt, Human
ccaagcccggucuuggcccug

SEQ ID NO: 125498 - RNA, 19 nt, Human
ccccagucuuagcugcgcc

SEQ ID NO: 125499 - RNA, 24 nt, Human
ccccagucuuagcugcgccccucu

SEQ ID NO: 125500 - RNA, 30 nt, Human
cccggucuuggcccugcccuuucccuggcc

SEQ ID NO: 125501 - RNA, 19 nt, Human
ccuggccccgcccaccaga

SEQ ID NO: 125502 - RNA, 23 nt, Human
ccuggccccgcccaccagaccug

SEQ ID NO: 125503 - RNA, 22 nt, Human
cgccccuuccuuuccgccaucc

SEQ ID NO: 125504 - RNA, 18 nt, Human
cugcgccccucucccaag

SEQ ID NO: 125505 - RNA, 18 nt, Human
cuggccccgcccaccaga

SEQ ID NO: 125506 - RNA, 23 nt, Human
cuuuccgccauccugcccccagu

SEQ ID NO: 125507 - RNA, 19 nt, Human
ggaagcaccuuaucaaggu

SEQ ID NO: 125508 - RNA, 23 nt, Human
uacuacucuucauagcauaaugu

SEQ ID NO: 125509 - RNA, 19 nt, Human
uagcugcgccccucuccca

SEQ ID NO: 125510 - RNA, 21 nt, Human
uagcugcgccccucucccaag

SEQ ID NO: 125511 - RNA, 18 nt, Human
uaucaaggugaacugagc

SEQ ID NO: 125512 - RNA, 21 nt, Human
ucccaagcccggucuuggccc

SEQ ID NO: 125513 - RNA, 19 nt, Human
ucccagcucggaagcaccu

SEQ ID NO: 125514 - RNA, 21 nt, Human
ucccucuagccaccacgcccc

SEQ ID NO: 125515 - RNA, 18 nt, Human
ucccuggccccgcccacc

SEQ ID NO: 125516 - RNA, 25 nt, Human
ucggaagcaccuuaucaaggugaac

SEQ ID NO: 125517 - RNA, 18 nt, Human
ucuguuucuucucuuccc

SEQ ID NO: 125518 - RNA, 23 nt, Human
ugcccccagucuuagcugcgccc

SEQ ID NO: 125519 - RNA, 20 nt, Human
uuccgccauccugcccccag

SEQ ID NO: 125520 - RNA, 20 nt, Human
uuccuuccucucaucccagc

SEQ ID NO: 125521 - RNA, 21 nt, Human
aaaaaaaucaaauauuguaug

SEQ ID NO: 125522 - RNA, 18 nt, Human
aaaacauuuggagcuagg

SEQ ID NO: 125523 - RNA, 22 nt, Human
aaaaccagauugacaggggccg

SEQ ID NO: 125524 - RNA, 22 nt, Human
aaauagcauucaacaugaaagc

SEQ ID NO: 125525 - RNA, 24 nt, Human
aacagugugagacucugucucaaa

SEQ ID NO: 125526 - RNA, 27 nt, Human
aacaugaaagcaaccagacacaaaaga

SEQ ID NO: 125527 - RNA, 24 nt, Human
aaccugggugacagagugagacuc

SEQ ID NO: 125528 - RNA, 24 nt, Human
aacucgaaccugggugacagagug

SEQ ID NO: 125529 - RNA, 22 nt, Human
aagcaccagugcagaaucccac

SEQ ID NO: 125530 - RNA, 24 nt, Human
aagcgugguagugcaugccuguaa

SEQ ID NO: 125531 - RNA, 24 nt, Human
aaucaccugacaucaggaguucaa

SEQ ID NO: 125532 - RNA, 22 nt, Human
aaucacuugaacccaggaugug

SEQ ID NO: 125533 - RNA, 24 nt, Human
aaucacuugaacccaggaugugga

SEQ ID NO: 125534 - RNA, 24 nt, Human
aaucacuugaguucaggaguucga

SEQ ID NO: 125535 - RNA, 23 nt, Human
aaucccacagcucagggaaccug

SEQ ID NO: 125536 - RNA, 24 nt, Human
aaucucuugaucuuggaaggcaga

SEQ ID NO: 125537 - RNA, 19 nt, Human
aaugaggacuggggaagac

SEQ ID NO: 125538 - RNA, 18 nt, Human
aauuagccaggcauggua

SEQ ID NO: 125539 - RNA, 18 nt, Human
acacagugaaaccccauc

SEQ ID NO: 125540 - RNA, 19 nt, Human
acacagugaaaccccaucu

SEQ ID NO: 125541 - RNA, 20 nt, Human
acacagugaaaccccaucuc

SEQ ID NO: 125542 - RNA, 24 nt, Human
acagagcaaggcuuaguuucaaaa

SEQ ID NO: 125543 - RNA, 21 nt, Human
acagagugagacuccaucuca

SEQ ID NO: 125544 - RNA, 24 nt, Human
acagagugagacuccaucucagaa

SEQ ID NO: 125545 - RNA, 24 nt, Human
acagugugagacucugucucaaaa

SEQ ID NO: 125546 - RNA, 24 nt, Human
accccaucucuacuaaaaauacaa

SEQ ID NO: 125547 - RNA, 19 nt, Human
acccuggaauccuuugacc

SEQ ID NO: 125548 - RNA, 23 nt, Human
accugggugacagagugagacuc

SEQ ID NO: 125549 - RNA, 24 nt, Human
acgccacugcacuccagccugggc

SEQ ID NO: 125550 - RNA, 24 nt, Human
acgccacugcacuccagccugggc

SEQ ID NO: 125551 - RNA, 23 nt, Human
acuccagccugggagacagagca

SEQ ID NO: 125552 - RNA, 21 nt, Human
acucgaaccugggugacagag

SEQ ID NO: 125553 - RNA, 24 nt, Human
acugaacucgaaccugggugacag

SEQ ID NO: 125554 - RNA, 24 nt, Human
acugcacuccagccugggcaacag

SEQ ID NO: 125555 - RNA, 19 nt, Human
agaaugggguauggggagu

SEQ ID NO: 125556 - RNA, 26 nt, Human
agacacaaaagaucacauauuaugcc

SEQ ID NO: 125557 - RNA, 24 nt, Human
agagguugcagugaacaaaaauug

SEQ ID NO: 125558 - RNA, 20 nt, Human
agaugaaaaagagaaugggg

SEQ ID NO: 125559 - RNA, 23 nt, Human
agaugguggugguuguacagcuu

SEQ ID NO: 125560 - RNA, 24 nt, Human
agcacuuuggaacacugagguggg

SEQ ID NO: 125561 - RNA, 24 nt, Human
agcacuuugggaggcuaagguggg

SEQ ID NO: 125562 - RNA, 23 nt, Human
agccaagcgugguagugcaugcc

SEQ ID NO: 125563 - RNA, 23 nt, Human
agccaggcaugguaguacaugcc

SEQ ID NO: 125564 - RNA, 23 nt, Human
agccugggagacagagcaaggcu

SEQ ID NO: 125565 - RNA, 24 nt, Human
agccugggcaacagugugagacuc

SEQ ID NO: 125566 - RNA, 18 nt, Human
agcuaggagaaucaccug

SEQ ID NO: 125567 - RNA, 19 nt, Human
agcuaggagaaucaccuga

SEQ ID NO: 125568 - RNA, 18 nt, Human
aggaagaggcagcuggga

SEQ ID NO: 125569 - RNA, 19 nt, Human
aggcagagguugcagugaa

SEQ ID NO: 125570 - RNA, 21 nt, Human
aggcaggaaguugcggggagg

SEQ ID NO: 125571 - RNA, 18 nt, Human
aggcaggagaaucacuug

SEQ ID NO: 125572 - RNA, 23 nt, Human
aggcaggagaaucacuugaaccc

SEQ ID NO: 125573 - RNA, 24 nt, Human
aggcaggagaaucacuugaaccca

SEQ ID NO: 125574 - RNA, 18 nt, Human
aggcaggagaguugcuug

SEQ ID NO: 125575 - RNA, 25 nt, Human
aggcaggagaguugcuugauccccg

SEQ ID NO: 125576 - RNA, 24 nt, Human
aggcaugguaguacaugccuguaa

SEQ ID NO: 125577 - RNA, 24 nt, Human
aggcguggugggggacgccuguga

SEQ ID NO: 125578 - RNA, 24 nt, Human
aggcugaggcaggagaaucacuug

SEQ ID NO: 125579 - RNA, 21 nt, Human
aggcugaggcaggagaguugc

SEQ ID NO: 125580 - RNA, 24 nt, Human
aggcugaggcaggagaguugcuug

SEQ ID NO: 125581 - RNA, 21 nt, Human
agggaggcugaggcaggagag

SEQ ID NO: 125582 - RNA, 18 nt, Human
aggugggugaaucacuug

SEQ ID NO: 125583 - RNA, 21 nt, Human
agguggguggaucaccugagg

SEQ ID NO: 125584 - RNA, 18 nt, Human
aguucaggaguucgagac

SEQ ID NO: 125585 - RNA, 28 nt, Human
auacauggcugggcacggugacucacgc

SEQ ID NO: 125586 - RNA, 24 nt, Human
auagcacuccagccugggagacag

SEQ ID NO: 125587 - RNA, 20 nt, Human
auaucagggaauccaaagca

SEQ ID NO: 125588 - RNA, 24 nt, Human
aucacgccacugcacuccagccug

SEQ ID NO: 125589 - RNA, 24 nt, Human
auugcaccauagcacuccagccug

SEQ ID NO: 125590 - RNA, 22 nt, Human
caaagcaccagugcagaauccc

SEQ ID NO: 125591 - RNA, 22 nt, Human
caacaggcaugaaccucaaaaa

SEQ ID NO: 125592 - RNA, 21 nt, Human
caaccagacacaaaagaucac

SEQ ID NO: 125593 - RNA, 26 nt, Human
caagaccaccuaaaaauacaaaauuu

SEQ ID NO: 125594 - RNA, 23 nt, Human
caccauagcacuccagccuggga

SEQ ID NO: 125595 - RNA, 24 nt, Human
cacgccuguaaucccagcacuuug

SEQ ID NO: 125596 - RNA, 20 nt, Human
cacuccagccugggcaacag

SEQ ID NO: 125597 - RNA, 21 nt, Human
cacuccagccugggcaacagu

SEQ ID NO: 125598 - RNA, 18 nt, Human
cacugcacuccagccugg

SEQ ID NO: 125599 - RNA, 19 nt, Human
cacugcacuccagccuggg

SEQ ID NO: 125600 - RNA, 21 nt, Human
cacugcacuccagccugggca

SEQ ID NO: 125601 - RNA, 23 nt, Human
cacugcacuccagccugggcaac

SEQ ID NO: 125602 - RNA, 24 nt, Human
cacugcacuccagccugggcaaca

SEQ ID NO: 125603 - RNA, 24 nt, Human
cagaaucccacagcucagggaacc

SEQ ID NO: 125604 - RNA, 18 nt, Human
cagaggcaggaaguugcg

SEQ ID NO: 125605 - RNA, 22 nt, Human
cagaggcaggaaguugcgggga

SEQ ID NO: 125606 - RNA, 24 nt, Human
cagcacuuuggaacacugaggugg

SEQ ID NO: 125607 - RNA, 24 nt, Human
cagcacuuugggaggcuaaggugg

SEQ ID NO: 125608 - RNA, 19 nt, Human
cagcagauuugaaggaaca

SEQ ID NO: 125609 - RNA, 19 nt, Human
cagcagugugugacugugg

SEQ ID NO: 125610 - RNA, 18 nt, Human
cagcuuaauuuuuaaaau

SEQ ID NO: 125611 - RNA, 18 nt, Human
cauagcacuccagccugg

SEQ ID NO: 125612 - RNA, 20 nt, Human
cauagcacuccagccuggga

SEQ ID NO: 125613 - RNA, 24 nt, Human
cauagcacuccagccugggagaca

SEQ ID NO: 125614 - RNA, 24 nt, Human
caucaggaguucaagaccaccuaa

SEQ ID NO: 125615 - RNA, 24 nt, Human
ccacugaacucgaaccugggugac

SEQ ID NO: 125616 - RNA, 20 nt, Human
ccacugcacuccagccuggg

SEQ ID NO: 125617 - RNA, 20 nt, Human
ccacugcacuccagccuggg

SEQ ID NO: 125618 - RNA, 21 nt, Human
ccacugcacuccagccugggc

SEQ ID NO: 125619 - RNA, 23 nt, Human
ccacugcacuccagccugggcaa

SEQ ID NO: 125620 - RNA, 24 nt, Human
ccacugcacuccagccugggcaac

SEQ ID NO: 125621 - RNA, 24 nt, Human
ccagaggcugaggcaggagaauca

SEQ ID NO: 125622 - RNA, 19 nt, Human
ccaggagcucaccaccagc

SEQ ID NO: 125623 - RNA, 20 nt, Human
ccauagcacuccagccuggg

SEQ ID NO: 125624 - RNA, 24 nt, Human
ccauagcacuccagccugggagac

SEQ ID NO: 125625 - RNA, 21 nt, Human
ccauggaggggaaggaagcug

SEQ ID NO: 125626 - RNA, 20 nt, Human
cccggggguggagguugcag

SEQ ID NO: 125627 - RNA, 24 nt, Human
ccuggccuacacagugaaacccca

SEQ ID NO: 125628 - RNA, 21 nt, Human
ccugggagacagagcaaggcu

SEQ ID NO: 125629 - RNA, 20 nt, Human
ccuguaauaucagcacuuug

SEQ ID NO: 125630 - RNA, 22 nt, Human
ccuguaaucccagcacuuuggg

SEQ ID NO: 125631 - RNA, 22 nt, Human
ccuguaaucccagcuacuaggg

SEQ ID NO: 125632 - RNA, 19 nt, Human
ccuguaaucccagcuacuu

SEQ ID NO: 125633 - RNA, 21 nt, Human
ccuguaaucccagcuacuugg

SEQ ID NO: 125634 - RNA, 22 nt, Human
ccuguaaucccagcuacuuggg

SEQ ID NO: 125635 - RNA, 24 nt, Human
cgagaccagccuggccuacacagu

SEQ ID NO: 125636 - RNA, 24 nt, Human
cgagaucacgccacugcacuccag

SEQ ID NO: 125637 - RNA, 24 nt, Human
cgccacugcacuccagccugggca

SEQ ID NO: 125638 - RNA, 23 nt, Human
cuacagcagugugugacuguggu

SEQ ID NO: 125639 - RNA, 25 nt, Human
cuagaugguggugguuguacagcuu

SEQ ID NO: 125640 - RNA, 22 nt, Human
cucacgccuguaaucccagcac

SEQ ID NO: 125641 - RNA, 24 nt, Human
cucacgccuguaaucccagcacuu

SEQ ID NO: 125642 - RNA, 21 nt, Human
cucagcagauuugaaggaaca

SEQ ID NO: 125643 - RNA, 22 nt, Human
cugacaucaggaguucaagacc

SEQ ID NO: 125644 - RNA, 20 nt, Human
cugucucaaaaaacaagaac

SEQ ID NO: 125645 - RNA, 23 nt, Human
cugucucaaaaaacaagaacaua

SEQ ID NO: 125646 - RNA, 23 nt, Human
cuugaguucaggaguucgagacc

SEQ ID NO: 125647 - RNA, 20 nt, Human
gaaagcaaccagacacaaaa

SEQ ID NO: 125648 - RNA, 23 nt, Human
gaaucaccugacaucaggaguuc

SEQ ID NO: 125649 - RNA, 19 nt, Human
gaaugaggacuggggaaga

SEQ ID NO: 125650 - RNA, 18 nt, Human
gagaaugggguaugggga

SEQ ID NO: 125651 - RNA, 22 nt, Human
gagguugcagugagccgagauc

SEQ ID NO: 125652 - RNA, 18 nt, Human
gaucaccugaggccagga

SEQ ID NO: 125653 - RNA, 24 nt, Human
gaucaccugaggccaggagcucac

SEQ ID NO: 125654 - RNA, 19 nt, Human
gauuugaaggaacauauca

SEQ ID NO: 125655 - RNA, 20 nt, Human
gcaaugugaccucagacaac

SEQ ID NO: 125656 - RNA, 24 nt, Human
gcacuccagccugggagacagagc

SEQ ID NO: 125657 - RNA, 19 nt, Human
gcagaaucccacagcucag

SEQ ID NO: 125658 - RNA, 22 nt, Human
gcaggagaaucacuugaaccca

SEQ ID NO: 125659 - RNA, 22 nt, Human
gccacugcacuccagccugggc

SEQ ID NO: 125660 - RNA, 24 nt, Human
gccacugcacuccagccugggcaa

SEQ ID NO: 125661 - RNA, 19 nt, Human
gccaggagcucaccaccag

SEQ ID NO: 125662 - RNA, 20 nt, Human
gccgagaucacgccacugca

SEQ ID NO: 125663 - RNA, 19 nt, Human
gccuguaauaucagcacuu

SEQ ID NO: 125664 - RNA, 20 nt, Human
gccuguaaucccagcuacuu

SEQ ID NO: 125665 - RNA, 19 nt, Human
gcucagggaaccugggcca

SEQ ID NO: 125666 - RNA, 22 nt, Human
ggacgccugugauaccagcucc

SEQ ID NO: 125667 - RNA, 20 nt, Human
ggagcuaggagaaucaccug

SEQ ID NO: 125668 - RNA, 20 nt, Human
ggagguugcagugagccgag

SEQ ID NO: 125669 - RNA, 22 nt, Human
ggagguugcagugagccgagau

SEQ ID NO: 125670 - RNA, 23 nt, Human
ggagguugcagugagccgagauc

SEQ ID NO: 125671 - RNA, 24 nt, Human
ggagguugcagugagccgagauca

SEQ ID NO: 125672 - RNA, 18 nt, Human
ggagguugcaguggacag

SEQ ID NO: 125673 - RNA, 24 nt, Human
ggagguugcaguggacagagaugg

SEQ ID NO: 125674 - RNA, 21 nt, Human
ggcugggcacggugacucacg

SEQ ID NO: 125675 - RNA, 18 nt, Human
gggaaugaggacugggga

SEQ ID NO: 125676 - RNA, 19 nt, Human
gggaaugaggacuggggaa

SEQ ID NO: 125677 - RNA, 19 nt, Human
gggaggcugaggcaggaga

SEQ ID NO: 125678 - RNA, 24 nt, Human
gggcacggugacucacgccuguaa

SEQ ID NO: 125679 - RNA, 18 nt, Human
ggguauggggagugacag

SEQ ID NO: 125680 - RNA, 24 nt, Human
gguaguacaugccuguaaucccag

SEQ ID NO: 125681 - RNA, 24 nt, Human
gguagugcaugccuguaaucccag

SEQ ID NO: 125682 - RNA, 24 nt, Human
ggugacucacgccuguaaucccag

SEQ ID NO: 125683 - RNA, 19 nt, Human
gguggagguugcagugagc

SEQ ID NO: 125684 - RNA, 20 nt, Human
gguggagguugcagugagcc

SEQ ID NO: 125685 - RNA, 23 nt, Human
gguggagguugcagugagccgag

SEQ ID NO: 125686 - RNA, 19 nt, Human
gucccuacuaaaacuacaa

SEQ ID NO: 125687 - RNA, 23 nt, Human
gugacucacgccuguaaucccag

SEQ ID NO: 125688 - RNA, 22 nt, Human
guggaucaccugaggccaggag

SEQ ID NO: 125689 - RNA, 20 nt, Human
gugugagacucugucucaaa

SEQ ID NO: 125690 - RNA, 19 nt, Human
guugcagugagccgagauc

SEQ ID NO: 125691 - RNA, 21 nt, Human
uaaaaauacaaaaauuagcca

SEQ ID NO: 125692 - RNA, 20 nt, Human
uaaaaauacaaaauuuagcc

SEQ ID NO: 125693 - RNA, 21 nt, Human
uaaaaauacaaaauuuagcca

SEQ ID NO: 125694 - RNA, 18 nt, Human
uaaaauuauauauauaca

SEQ ID NO: 125695 - RNA, 20 nt, Human
uaaguccauagugacaaaaa

SEQ ID NO: 125696 - RNA, 24 nt, Human
uaaguccauagugacaaaaaccag

SEQ ID NO: 125697 - RNA, 20 nt, Human
uacagcuuugugaaugaacc

SEQ ID NO: 125698 - RNA, 18 nt, Human
uacuaaaacuacaagaaa

SEQ ID NO: 125699 - RNA, 18 nt, Human
uacuagggaggcugaggc

SEQ ID NO: 125700 - RNA, 19 nt, Human
uacuagggaggcugaggca

SEQ ID NO: 125701 - RNA, 21 nt, Human
uagcaggucucucagaggcag

SEQ ID NO: 125702 - RNA, 24 nt, Human
uagcauucaacaugaaagcaacca

SEQ ID NO: 125703 - RNA, 25 nt, Human
uauauauauacauggcugggcacgg

SEQ ID NO: 125704 - RNA, 23 nt, Human
uaucagggaauccaaagcaccag

SEQ ID NO: 125705 - RNA, 20 nt, Human
ucaacaugaaagcaaccaga

SEQ ID NO: 125706 - RNA, 23 nt, Human
ucaccugacaucaggaguucaag

SEQ ID NO: 125707 - RNA, 23 nt, Human
ucacgccacugcacuccagccug

SEQ ID NO: 125708 - RNA, 20 nt, Human
ucacuugaguucaggaguuc

SEQ ID NO: 125709 - RNA, 19 nt, Human
ucacuugcaaugugaccuc

SEQ ID NO: 125710 - RNA, 20 nt, Human
ucagaaaaaaagaaaauguu

SEQ ID NO: 125711 - RNA, 25 nt, Human
uccccggggguggagguugcaguga

SEQ ID NO: 125712 - RNA, 23 nt, Human
ucccuacuaaaacuacaagaaaa

SEQ ID NO: 125713 - RNA, 24 nt, Human
ucgaaccugggugacagagugaga

SEQ ID NO: 125714 - RNA, 22 nt, Human
ucuacagaggcggggacacuga

SEQ ID NO: 125715 - RNA, 23 nt, Human
ucucuacuaaaaauacaaaaauu

SEQ ID NO: 125716 - RNA, 29 nt, Human
ucucucagaggcaggaaguugcggggagu

SEQ ID NO: 125717 - RNA, 23 nt, Human
ugaaaaagagaaugggguauggg

SEQ ID NO: 125718 - RNA, 24 nt, Human
ugaaaaagagaaugggguaugggg

SEQ ID NO: 125719 - RNA, 19 nt, Human
ugaaaccccaucucuacua

SEQ ID NO: 125720 - RNA, 25 nt, Human
ugaacaaaaauugcaccaaccccgg

SEQ ID NO: 125721 - RNA, 20 nt, Human
ugaaucacuugaguucagga

SEQ ID NO: 125722 - RNA, 24 nt, Human
ugaaucacuugaguucaggaguuc

SEQ ID NO: 125723 - RNA, 19 nt, Human
ugacaggggccgagaugaa

SEQ ID NO: 125724 - RNA, 21 nt, Human
ugacccccuucccucagcccc

SEQ ID NO: 125725 - RNA, 21 nt, Human
ugacucacgccuguaauccca

SEQ ID NO: 125726 - RNA, 24 nt, Human
ugacucacgccuguaaucccagca

SEQ ID NO: 125727 - RNA, 22 nt, Human
ugagccgagaucacgccacugc

SEQ ID NO: 125728 - RNA, 24 nt, Human
ugaggacuggggaagacuacagca

SEQ ID NO: 125729 - RNA, 24 nt, Human
ugaggcaggagaaucacuugaacc

SEQ ID NO: 125730 - RNA, 25 nt, Human
ugaggcaggagaaucacuugaaccc

SEQ ID NO: 125731 - RNA, 23 nt, Human
ugaggcaggagaguugcuugauc

SEQ ID NO: 125732 - RNA, 24 nt, Human
ugaggcaggagaguugcuugaucc

SEQ ID NO: 125733 - RNA, 23 nt, Human
ugaggccaggagcucaccaccag

SEQ ID NO: 125734 - RNA, 19 nt, Human
ugagguggguggaucaccu

SEQ ID NO: 125735 - RNA, 20 nt, Human
ugagguggguggaucaccug

SEQ ID NO: 125736 - RNA, 23 nt, Human
ugagguggguggaucaccugagg

SEQ ID NO: 125737 - RNA, 24 nt, Human
ugagguggguggaucaccugaggc

SEQ ID NO: 125738 - RNA, 25 nt, Human
ugagguggguggaucaccugaggcc

SEQ ID NO: 125739 - RNA, 26 nt, Human
ugagguggguggaucaccugaggcca

SEQ ID NO: 125740 - RNA, 24 nt, Human
ugccauggaggggaaggaagcugg

SEQ ID NO: 125741 - RNA, 18 nt, Human
ugccuguaauaucagcac

SEQ ID NO: 125742 - RNA, 23 nt, Human
ugccuguaaucccagcuacuagg

SEQ ID NO: 125743 - RNA, 23 nt, Human
ugccuguaaucccagcuacuugg

SEQ ID NO: 125744 - RNA, 24 nt, Human
ugccuguaaucccagcuacuuggg

SEQ ID NO: 125745 - RNA, 23 nt, Human
uggaaggcagagguugcagugaa

SEQ ID NO: 125746 - RNA, 19 nt, Human
uggaucaccugaggccagg

SEQ ID NO: 125747 - RNA, 26 nt, Human
uggaucaccugaggccaggagcucac

SEQ ID NO: 125748 - RNA, 23 nt, Human
uggcugggcacggugacucacgc

SEQ ID NO: 125749 - RNA, 22 nt, Human
uggcuuguagcaggucucucag

SEQ ID NO: 125750 - RNA, 19 nt, Human
ugggaaauauucagaauug

SEQ ID NO: 125751 - RNA, 19 nt, Human
ugggaggcuaaggugggug

SEQ ID NO: 125752 - RNA, 24 nt, Human
ugggaggcuaaggugggugaauca

SEQ ID NO: 125753 - RNA, 18 nt, Human
ugggggagagauaaugaa

SEQ ID NO: 125754 - RNA, 18 nt, Human
ugggguauggggagugac

SEQ ID NO: 125755 - RNA, 24 nt, Human
uggguggaucaccugaggccagga

SEQ ID NO: 125756 - RNA, 24 nt, Human
ugguaguacaugccuguaauccca

SEQ ID NO: 125757 - RNA, 24 nt, Human
ugguagugcaugccuguaauccca

SEQ ID NO: 125758 - RNA, 18 nt, Human
uguugggggagagauaau

SEQ ID NO: 125759 - RNA, 24 nt, Human
uguuuaugggaaauauucagaauu

SEQ ID NO: 125760 - RNA, 24 nt, Human
uuaguuucaaaaaaaaaaaaaaaa

SEQ ID NO: 125761 - RNA, 21 nt, Human
uucgagaccagccuggccuac

SEQ ID NO: 125762 - RNA, 24 nt, Human
uugauccccggggguggagguugc

SEQ ID NO: 125763 - RNA, 18 nt, Human
uugcagugagccgagauc

SEQ ID NO: 125764 - RNA, 20 nt, Human
uugcagugagccgagaucac

SEQ ID NO: 125765 - RNA, 21 nt, Human
uugcagugagccgagaucacg

SEQ ID NO: 125766 - RNA, 22 nt, Human
uugcuugauccccgggggugga

SEQ ID NO: 125767 - RNA, 24 nt, Human
uugcuugauccccggggguggagg

SEQ ID NO: 125768 - RNA, 21 nt, Human
uuggaaggcagagguugcagu

SEQ ID NO: 125769 - RNA, 25 nt, Human
uugggaggcuaaggugggugaauca

SEQ ID NO: 125770 - RNA, 22 nt, Human
uuguugggggagagauaaugaa

SEQ ID NO: 125771 - RNA, 26 nt, Human
uuuuaaaauuauauauauacauggcu

SEQ ID NO: 125772 - RNA, 20 nt, Human
agaugacaggugagaaaagg

SEQ ID NO: 125773 - RNA, 23 nt, Human
agggaagggaaaaugugagauga

SEQ ID NO: 125774 - RNA, 22 nt, Human
cagggacugcacagcagcagcc

SEQ ID NO: 125775 - RNA, 20 nt, Human
caugcagaaaagaaaugccu

SEQ ID NO: 125776 - RNA, 21 nt, Human
cugcagggacugcacagcagc

SEQ ID NO: 125777 - RNA, 24 nt, Human
ugagaaaaggcauuacagauagug

SEQ ID NO: 125778 - RNA, 22 nt, Human
ugcagaaaagaaaugccuuuga

SEQ ID NO: 125779 - RNA, 18 nt, Human
uggauaaugccccagagg

SEQ ID NO: 125780 - RNA, 23 nt, Human
uucagggaagggaaaaugugaga

SEQ ID NO: 125781 - RNA, 24 nt, Human
aaagacaugccacaucugccucuu

SEQ ID NO: 125782 - RNA, 20 nt, Human
aacccgcaugggcgggccuc

SEQ ID NO: 125783 - RNA, 26 nt, Human
acagcaugcagggaagacagcgugac

SEQ ID NO: 125784 - RNA, 23 nt, Human
acaucugccucugcccugcagac

SEQ ID NO: 125785 - RNA, 21 nt, Human
acuguggaccaagaaggggac

SEQ ID NO: 125786 - RNA, 22 nt, Human
auagaacaagcucuguggguac

SEQ ID NO: 125787 - RNA, 20 nt, Human
cagauuggagggauggggga

SEQ ID NO: 125788 - RNA, 18 nt, Human
caggagacacuggcuggg

SEQ ID NO: 125789 - RNA, 18 nt, Human
cggggcacagauuggagg

SEQ ID NO: 125790 - RNA, 18 nt, Human
cugccagagggaugaggg

SEQ ID NO: 125791 - RNA, 19 nt, Human
gacuguggaccaagaaggg

SEQ ID NO: 125792 - RNA, 18 nt, Human
gagggaugggggaagggc

SEQ ID NO: 125793 - RNA, 21 nt, Human
ggaagacagcgugacugccag

SEQ ID NO: 125794 - RNA, 19 nt, Human
gggaagacagcgugacugc

SEQ ID NO: 125795 - RNA, 24 nt, Human
gggcagacuguggaccaagaaggg

SEQ ID NO: 125796 - RNA, 23 nt, Human
gugccauagaacaagcucugugg

SEQ ID NO: 125797 - RNA, 22 nt, Human
uacaaaaagacaugccacaucu

SEQ ID NO: 125798 - RNA, 26 nt, Human
uacaaaaagccuagaaaagggcgugc

SEQ ID NO: 125799 - RNA, 19 nt, Human
uagaacaagcucugugggu

SEQ ID NO: 125800 - RNA, 24 nt, Human
ucaucgcucacaggcgaaucugga

SEQ ID NO: 125801 - RNA, 22 nt, Human
ugaaggcagcugcugagcugca

SEQ ID NO: 125802 - RNA, 22 nt, Human
ugagggcagacuguggaccaag

SEQ ID NO: 125803 - RNA, 24 nt, Human
ugagggcagacuguggaccaaggg

SEQ ID NO: 125804 - RNA, 24 nt, Human
ugccauagaacaagcucugugggu

SEQ ID NO: 125805 - RNA, 18 nt, Human
ugggggaagggcacgcgg

SEQ ID NO: 125806 - RNA, 24 nt, Human
uguacuaagaaaugauacaaaaag

SEQ ID NO: 125807 - RNA, 20 nt, Human
agagcugggauuuggaucua

SEQ ID NO: 125808 - RNA, 27 nt, Human
agcagacaccagugguuucagaacacg

SEQ ID NO: 125809 - RNA, 24 nt, Human
agucaaauuccucugaucuuucuu

SEQ ID NO: 125810 - RNA, 24 nt, Human
caaaccacuuaaagcucaccauuu

SEQ ID NO: 125811 - RNA, 25 nt, Human
caccagugguuucagaacacgugcc

SEQ ID NO: 125812 - RNA, 24 nt, Human
caguagagcugggauuuggaucua

SEQ ID NO: 125813 - RNA, 19 nt, Human
ccuugccccuuucuuucuu

SEQ ID NO: 125814 - RNA, 20 nt, Human
cuccuagauaaaaagguaaa

SEQ ID NO: 125815 - RNA, 26 nt, Human
ggaaacauuauccucuuuucaucucc

SEQ ID NO: 125816 - RNA, 19 nt, Human
uaaagcucaccauuucuuu

SEQ ID NO: 125817 - RNA, 21 nt, Human
uauagauagaacuuuuaugau

SEQ ID NO: 125818 - RNA, 24 nt, Human
uaugguuuacaaaccacuuaaagc

SEQ ID NO: 125819 - RNA, 20 nt, Human
ucuucuuacuuuccuugccc

SEQ ID NO: 125820 - RNA, 21 nt, Human
uuccuugccccuuucuuucuu

SEQ ID NO: 125821 - RNA, 24 nt, Human
aaacacaugcaccauuugaaugug

SEQ ID NO: 125822 - RNA, 20 nt, Human
acaugcaccauuugaaugug

SEQ ID NO: 125823 - RNA, 19 nt, Human
agagcucaggucuaggugc

SEQ ID NO: 125824 - RNA, 22 nt, Human
cauuuuauuacuuuuagcauua

SEQ ID NO: 125825 - RNA, 20 nt, Human
cccugguccuugugaggccc

SEQ ID NO: 125826 - RNA, 19 nt, Human
ccuccagaaggcccugguc

SEQ ID NO: 125827 - RNA, 20 nt, Human
cuaggaguuccaauugcuag

SEQ ID NO: 125828 - RNA, 18 nt, Human
cuccuccagaaggcccug

SEQ ID NO: 125829 - RNA, 19 nt, Human
gcccugguccuugugaggc

SEQ ID NO: 125830 - RNA, 18 nt, Human
gguagugccacuccucca

SEQ ID NO: 125831 - RNA, 20 nt, Human
guccagcaccuuccagaagc

SEQ ID NO: 125832 - RNA, 22 nt, Human
uaaguccuaaaacaaagugaag

SEQ ID NO: 125833 - RNA, 26 nt, Human
uccagaagcagaaaagugugaaacag

SEQ ID NO: 125834 - RNA, 27 nt, Human
ugaagauaccaaacacaugcaccaguc

SEQ ID NO: 125835 - RNA, 22 nt, Human
ugcugccaggugggguagugcc

SEQ ID NO: 125836 - RNA, 22 nt, Human
ugggguagugccacuccuccag

SEQ ID NO: 125837 - RNA, 21 nt, Human
uguugaagauaccaaacacau

SEQ ID NO: 125838 - RNA, 22 nt, Human
uuaauguuuuaauacaguuaug

SEQ ID NO: 125839 - RNA, 22 nt, Human
uuaauguuuuaauacaguuaug

SEQ ID NO: 125840 - RNA, 19 nt, Human
uuggaucauuugaucauuu

SEQ ID NO: 125841 - RNA, 22 nt, Human
uuuccuauaaaccauguauucc

SEQ ID NO: 125842 - RNA, 24 nt, Human
aaaaaggcauauuuuuuuaagacu

SEQ ID NO: 125843 - RNA, 21 nt, Human
aaaacauuaaaucaaaacuaa

SEQ ID NO: 125844 - RNA, 24 nt, Human
aaacugcuaggauuacaggcguga

SEQ ID NO: 125845 - RNA, 23 nt, Human
aacacucuacacagacaaugaga

SEQ ID NO: 125846 - RNA, 19 nt, Human
aagagcuucaguucuuugu

SEQ ID NO: 125847 - RNA, 19 nt, Human
aagcagaggagccaaaucu

SEQ ID NO: 125848 - RNA, 22 nt, Human
acuccagagaaaacaugugaua

SEQ ID NO: 125849 - RNA, 20 nt, Human
agaaauaugaaaggagaugg

SEQ ID NO: 125850 - RNA, 24 nt, Human
agaagcagaggagccaaaucuacc

SEQ ID NO: 125851 - RNA, 18 nt, Human
agacuggagugcaguggu

SEQ ID NO: 125852 - RNA, 18 nt, Human
agccaucaaaauaauucu

SEQ ID NO: 125853 - RNA, 24 nt, Human
aggccaggcuugucuugaacuccu

SEQ ID NO: 125854 - RNA, 24 nt, Human
aggcgauccacccggcucagccuc

SEQ ID NO: 125855 - RNA, 21 nt, Human
agguucaagugauucuccugc

SEQ ID NO: 125856 - RNA, 22 nt, Human
agguucaagugauucuccugcc

SEQ ID NO: 125857 - RNA, 23 nt, Human
agguucaagugauucuccugccu

SEQ ID NO: 125858 - RNA, 24 nt, Human
agugauucuccugccucagccucc

SEQ ID NO: 125859 - RNA, 21 nt, Human
agugcaguggugcaaucucag

SEQ ID NO: 125860 - RNA, 20 nt, Human
aucuucauuucagaguucua

SEQ ID NO: 125861 - RNA, 22 nt, Human
augcaguccauuggaugaagcc

SEQ ID NO: 125862 - RNA, 25 nt, Human
augggguuucaaccauguaggccag

SEQ ID NO: 125863 - RNA, 18 nt, Human
auucuccugccucagccu

SEQ ID NO: 125864 - RNA, 24 nt, Human
auuuguguauuuuuaguagagaug

SEQ ID NO: 125865 - RNA, 24 nt, Human
caaacugcuaggauuacaggcgug

SEQ ID NO: 125866 - RNA, 18 nt, Human
caacauccgccucccagg

SEQ ID NO: 125867 - RNA, 22 nt, Human
caagugauucuccugccucagc

SEQ ID NO: 125868 - RNA, 24 nt, Human
cacccagacuggagugcaguggug

SEQ ID NO: 125869 - RNA, 21 nt, Human
caucuucauuucagaguucua

SEQ ID NO: 125870 - RNA, 20 nt, Human
ccaaacugcuaggauuacag

SEQ ID NO: 125871 - RNA, 22 nt, Human
ccaaacugcuaggauuacaggc

SEQ ID NO: 125872 - RNA, 24 nt, Human
ccaaacugcuaggauuacaggcgu

SEQ ID NO: 125873 - RNA, 20 nt, Human
ccaaaucuaccuccucacac

SEQ ID NO: 125874 - RNA, 24 nt, Human
ccaacagugauuacaaugaccaaa

SEQ ID NO: 125875 - RNA, 23 nt, Human
cccagguucaagugauucuccuc

SEQ ID NO: 125876 - RNA, 23 nt, Human
cccagguucaagugauucuccug

SEQ ID NO: 125877 - RNA, 19 nt, Human
cccggcucagccucccaaa

SEQ ID NO: 125878 - RNA, 24 nt, Human
ccgccucccagguucaagugauuc

SEQ ID NO: 125879 - RNA, 22 nt, Human
ccucaggcgauccacccggcuc

SEQ ID NO: 125880 - RNA, 24 nt, Human
ccucccagguucaagugauucucc

SEQ ID NO: 125881 - RNA, 20 nt, Human
ccugaccucaggcgauccac

SEQ ID NO: 125882 - RNA, 24 nt, Human
ccugaccucaggcgauccacccgg

SEQ ID NO: 125883 - RNA, 25 nt, Human
ccugaccucaggcgauccacccggc

SEQ ID NO: 125884 - RNA, 22 nt, Human
ccuguguagugagauuacaggc

SEQ ID NO: 125885 - RNA, 22 nt, Human
ccuuacuuaucucucuccucug

SEQ ID NO: 125886 - RNA, 23 nt, Human
cgccaacagugauuacaaugacc

SEQ ID NO: 125887 - RNA, 22 nt, Human
cgccucccagguucaagugauu

SEQ ID NO: 125888 - RNA, 24 nt, Human
cggcucagccucccaaacugcuag

SEQ ID NO: 125889 - RNA, 21 nt, Human
cucacucucacccagacugga

SEQ ID NO: 125890 - RNA, 21 nt, Human
cucccaaacugcuaggauuac

SEQ ID NO: 125891 - RNA, 19 nt, Human
cucccagguucaagugauu

SEQ ID NO: 125892 - RNA, 23 nt, Human
cuucaacauccgccucccagguu

SEQ ID NO: 125893 - RNA, 24 nt, Human
cuucaacauccgccucccagguuc

SEQ ID NO: 125894 - RNA, 21 nt, Human
cuugaagagcaaagcagaagu

SEQ ID NO: 125895 - RNA, 22 nt, Human
gaaaacauuaaaucaaaacuaa

SEQ ID NO: 125896 - RNA, 24 nt, Human
gaccucaggcgauccacccggcuc

SEQ ID NO: 125897 - RNA, 19 nt, Human
gagaagcagaggagccaaa

SEQ ID NO: 125898 - RNA, 21 nt, Human
gagaugggguuucaaccaugu

SEQ ID NO: 125899 - RNA, 23 nt, Human
gauuacaggcgaguccaccaugc

SEQ ID NO: 125900 - RNA, 18 nt, Human
gauuacaggcgugagcca

SEQ ID NO: 125901 - RNA, 19 nt, Human
gauuacaggcgugagccac

SEQ ID NO: 125902 - RNA, 21 nt, Human
gauuacaggcgugagccacug

SEQ ID NO: 125903 - RNA, 24 nt, Human
gcagaggagccaaaucuaccuccu

SEQ ID NO: 125904 - RNA, 24 nt, Human
gcgauccacccggcucagccuccc

SEQ ID NO: 125905 - RNA, 21 nt, Human
ggaaacauguuuucugucucc

SEQ ID NO: 125906 - RNA, 22 nt, Human
ggauuacaggcgugagccacug

SEQ ID NO: 125907 - RNA, 24 nt, Human
ggcuugucuugaacuccugaccuc

SEQ ID NO: 125908 - RNA, 23 nt, Human
ggguuucaaccauguaggccagg

SEQ ID NO: 125909 - RNA, 22 nt, Human
guauaacacucuacacagacaa

SEQ ID NO: 125910 - RNA, 23 nt, Human
gugauucuccugccucagccucc

SEQ ID NO: 125911 - RNA, 19 nt, Human
gugccugaucaaaaaaggc

SEQ ID NO: 125912 - RNA, 23 nt, Human
guguagugagauuacaggcgagu

SEQ ID NO: 125913 - RNA, 20 nt, Human
uaaaugucauuguuagagcc

SEQ ID NO: 125914 - RNA, 24 nt, Human
uaacauaaaacuuauagaauacuc

SEQ ID NO: 125915 - RNA, 19 nt, Human
uaagagcuucaguucuuug

SEQ ID NO: 125916 - RNA, 23 nt, Human
uaauuuguguauuuuuaguagag

SEQ ID NO: 125917 - RNA, 24 nt, Human
uaauuuguguauuuuuaguagaga

SEQ ID NO: 125918 - RNA, 22 nt, Human
uacaggcgugagccacugugcc

SEQ ID NO: 125919 - RNA, 23 nt, Human
uacaggcgugagccacugugccu

SEQ ID NO: 125920 - RNA, 22 nt, Human
uagaauacuccagagaaaacau

SEQ ID NO: 125921 - RNA, 21 nt, Human
uaggauuacaggcgugagcca

SEQ ID NO: 125922 - RNA, 22 nt, Human
uaggauuacaggcgugagccac

SEQ ID NO: 125923 - RNA, 22 nt, Human
uaggauuacaggcgugagccac

SEQ ID NO: 125924 - RNA, 22 nt, Human
uaggauuacaggcgugagccac

SEQ ID NO: 125925 - RNA, 23 nt, Human
uaggauuacaggcgugagccacu

SEQ ID NO: 125926 - RNA, 24 nt, Human
uaggauuacaggcgugagccacug

SEQ ID NO: 125927 - RNA, 25 nt, Human
uaguagagaugggguuucaaccaug

SEQ ID NO: 125928 - RNA, 19 nt, Human
uaguucugacaaaggcccc

SEQ ID NO: 125929 - RNA, 19 nt, Human
ucaagugauucuccugccu

SEQ ID NO: 125930 - RNA, 24 nt, Human
ucacacugauuuggucaccuccuu

SEQ ID NO: 125931 - RNA, 24 nt, Human
ucacuucaacauccgccucccagg

SEQ ID NO: 125932 - RNA, 24 nt, Human
ucccaaacugcuaggauuacaggc

SEQ ID NO: 125933 - RNA, 21 nt, Human
ucccagguucaagugauucuc

SEQ ID NO: 125934 - RNA, 24 nt, Human
ucccagguucaagugauucuccug

SEQ ID NO: 125935 - RNA, 22 nt, Human
ucucacucucacccagacugga

SEQ ID NO: 125936 - RNA, 24 nt, Human
ucucacucucacccagacuggagu

SEQ ID NO: 125937 - RNA, 18 nt, Human
ucuccugccucagccucc

SEQ ID NO: 125938 - RNA, 23 nt, Human
ucugagucuuccuuucagcucug

SEQ ID NO: 125939 - RNA, 23 nt, Human
ucuugaacuccugaccucaggcg

SEQ ID NO: 125940 - RNA, 25 nt, Human
ucuuugcugggcuaugugcauggag

SEQ ID NO: 125941 - RNA, 21 nt, Human
ugaccucaggcgauccacccg

SEQ ID NO: 125942 - RNA, 25 nt, Human
ugaccucaggcgauccacccggcuc

SEQ ID NO: 125943 - RNA, 19 nt, Human
ugagaagcagaggagccaa

SEQ ID NO: 125944 - RNA, 21 nt, Human
ugagauuacaggcgaguccac

SEQ ID NO: 125945 - RNA, 23 nt, Human
ugagauuacaggcgaguccacca

SEQ ID NO: 125946 - RNA, 24 nt, Human
ugagauuacaggcgaguccaccau

SEQ ID NO: 125947 - RNA, 21 nt, Human
ugagucucacucucacccaga

SEQ ID NO: 125948 - RNA, 24 nt, Human
ugcaaucucagcucacuucaacau

SEQ ID NO: 125949 - RNA, 22 nt, Human
ugcaguggugcaaucucagcuc

SEQ ID NO: 125950 - RNA, 20 nt, Human
ugccucagccuccuguguag

SEQ ID NO: 125951 - RNA, 24 nt, Human
ugcuaggauuacaggcgugagcca

SEQ ID NO: 125952 - RNA, 18 nt, Human
uggagugcaguggugcaa

SEQ ID NO: 125953 - RNA, 23 nt, Human
uggagugcaguggugcaaucuca

SEQ ID NO: 125954 - RNA, 24 nt, Human
uggagugcaguggugcaaucucag

SEQ ID NO: 125955 - RNA, 24 nt, Human
uggugcaaucucagcucacuucaa

SEQ ID NO: 125956 - RNA, 22 nt, Human
uguguugcucuuugcugggcua

SEQ ID NO: 125957 - RNA, 18 nt, Human
uuaguagagaugggguuu

SEQ ID NO: 125958 - RNA, 23 nt, Human
uuaguagagaugggguuucaacc

SEQ ID NO: 125959 - RNA, 25 nt, Human
uuaguagagaugggguuucaaccau

SEQ ID NO: 125960 - RNA, 21 nt, Human
uucaacauccgccucccaggu

SEQ ID NO: 125961 - RNA, 21 nt, Human
uucaagugauucuccugccuc

SEQ ID NO: 125962 - RNA, 23 nt, Human
uucaagugauucuccugccucag

SEQ ID NO: 125963 - RNA, 24 nt, Human
uucaagugauucuccugccucagc

SEQ ID NO: 125964 - RNA, 24 nt, Human
uucuaguucugacaaaggccccac

SEQ ID NO: 125965 - RNA, 19 nt, Human
uuggaugaagcccaucuuc

SEQ ID NO: 125966 - RNA, 19 nt, Human
uuucagcucuguguugcuc

SEQ ID NO: 125967 - RNA, 23 nt, Human
uuucuugaagagcaaagcagaag

SEQ ID NO: 125968 - RNA, 22 nt, Human
uuuuuaguagagaugggguuuc

SEQ ID NO: 125969 - RNA, 23 nt, Human
acuuauuuggcauugauuuguca

SEQ ID NO: 125970 - RNA, 23 nt, Human
acuuauuuggcauugauuuguca

SEQ ID NO: 125971 - RNA, 25 nt, Human
agaaauguuuauucucugaucacag

SEQ ID NO: 125972 - RNA, 26 nt, Human
agaaauguuuauucucugaucacagc

SEQ ID NO: 125973 - RNA, 22 nt, Human
cauugauuugucaccugcuuug

SEQ ID NO: 125974 - RNA, 22 nt, Human
cauugauuugucaccugcuuug

SEQ ID NO: 125975 - RNA, 23 nt, Human
cuaauuauucacccaguauacua

SEQ ID NO: 125976 - RNA, 23 nt, Human
cuaauuauucacccaguauacua

SEQ ID NO: 125977 - RNA, 20 nt, Human
cuaauucuguagauucaucc

SEQ ID NO: 125978 - RNA, 20 nt, Human
cuaauucuguagauucaucc

SEQ ID NO: 125979 - RNA, 18 nt, Human
gaacuagagaagaugacu

SEQ ID NO: 125980 - RNA, 18 nt, Human
gaacuagagaagaugacu

SEQ ID NO: 125981 - RNA, 18 nt, Human
gagauagucuuaugagaa

SEQ ID NO: 125982 - RNA, 18 nt, Human
gagauagucuuaugagaa

SEQ ID NO: 125983 - RNA, 22 nt, Human
gaucacagcucaggaggacuug

SEQ ID NO: 125984 - RNA, 22 nt, Human
gaucacagcucaggaggacuug

SEQ ID NO: 125985 - RNA, 20 nt, Human
uacgagaaucacaaguauaa

SEQ ID NO: 125986 - RNA, 20 nt, Human
uacgagaaucacaaguauaa

SEQ ID NO: 125987 - RNA, 27 nt, Human
uacuagguuaauuaagcucaucuucau

SEQ ID NO: 125988 - RNA, 27 nt, Human
uacuagguuaauuaagcucaucuucau

SEQ ID NO: 125989 - RNA, 22 nt, Human
uagggaaagucaggguccacuu

SEQ ID NO: 125990 - RNA, 23 nt, Human
uagucuuaugagaacuagagaag

SEQ ID NO: 125991 - RNA, 23 nt, Human
uagucuuaugagaacuagagaag

SEQ ID NO: 125992 - RNA, 24 nt, Human
uaugagaacuagagaagaugacug

SEQ ID NO: 125993 - RNA, 24 nt, Human
uaugagaacuagagaagaugacug

SEQ ID NO: 125994 - RNA, 24 nt, Human
uauuauagaauaucacaaauggaa

SEQ ID NO: 125995 - RNA, 24 nt, Human
uauuauagaauaucacaaauggaa

SEQ ID NO: 125996 - RNA, 23 nt, Human
uccuuagggaaagucaggggaaa

SEQ ID NO: 125997 - RNA, 21 nt, Human
ucucugaucacagcucaggag

SEQ ID NO: 125998 - RNA, 21 nt, Human
ucucugaucacagcucaggag

SEQ ID NO: 125999 - RNA, 24 nt, Human
ucucuuaagugcacuuuuagaaca

SEQ ID NO: 126000 - RNA, 22 nt, Human
ucuuaagugcacuuuuagaaca

SEQ ID NO: 126001 - RNA, 25 nt, Human
ucuuugcugggcugugcauauagag

SEQ ID NO: 126002 - RNA, 20 nt, Human
ugaacaaaguggaaguccuu

SEQ ID NO: 126003 - RNA, 20 nt, Human
ugaacaaaguggaaguccuu

SEQ ID NO: 126004 - RNA, 23 nt, Human
ugcugggcugugcauauagagcu

SEQ ID NO: 126005 - RNA, 23 nt, Human
uucagcugugugcugcucuuugc

SEQ ID NO: 126006 - RNA, 21 nt, Human
uugaagaauugguagauuguc

SEQ ID NO: 126007 - RNA, 27 nt, Human
uuuuccuuuucauuaaaaauuguuggu

SEQ ID NO: 126008 - RNA, 27 nt, Human
uuuuccuuuucauuaaaaauuguuggu

SEQ ID NO: 126009 - RNA, 24 nt, Human
uuuuucagcucugucuucugaguu

SEQ ID NO: 126010 - RNA, 23 nt, Human
caucuuuauuucaagguuuuauu

SEQ ID NO: 126011 - RNA, 22 nt, Human
cugcuguuugcugggcuguuug

SEQ ID NO: 126012 - RNA, 24 nt, Human
guucugugagucuuccuuuuagcu

SEQ ID NO: 126013 - RNA, 27 nt, Human
guuugcugggcuguuugccccgucacg

SEQ ID NO: 126014 - RNA, 21 nt, Human
ugcugcuguuugcugggcugu

SEQ ID NO: 126015 - RNA, 24 nt, Human
ugcugggcuguuugccccgucacg

SEQ ID NO: 126016 - RNA, 21 nt, Human
ugcugggcuguuugccuggag

SEQ ID NO: 126017 - RNA, 21 nt, Human
ugugagucuuccuuuuagcug

SEQ ID NO: 126018 - RNA, 25 nt, Human
uguuugcugggcuguuugccuggag

SEQ ID NO: 126019 - RNA, 19 nt, Human
uucuucaacuguguucugu

SEQ ID NO: 126020 - RNA, 24 nt, Human
aagcaggcggucggcagagggccc

SEQ ID NO: 126021 - RNA, 21 nt, Human
aaggagggcuucuuggaggag

SEQ ID NO: 126022 - RNA, 18 nt, Human
acucugugccgggcccug

SEQ ID NO: 126023 - RNA, 19 nt, Human
agacaaaucacacgcagac

SEQ ID NO: 126024 - RNA, 22 nt, Human
aggagggcuucuuggaggaggu

SEQ ID NO: 126025 - RNA, 20 nt, Human
aggaggggccccugccggcg

SEQ ID NO: 126026 - RNA, 23 nt, Human
aggaggugaccccugaagagggc

SEQ ID NO: 126027 - RNA, 21 nt, Human
aggagucucguccugccugga

SEQ ID NO: 126028 - RNA, 30 nt, Human
aggcggucggcagagggcccgcuggaagcc

SEQ ID NO: 126029 - RNA, 22 nt, Human
agggagcacagaggaggggccc

SEQ ID NO: 126030 - RNA, 21 nt, Human
aggugaccccugaagagggcu

SEQ ID NO: 126031 - RNA, 19 nt, Human
caguggugguggcugggag

SEQ ID NO: 126032 - RNA, 20 nt, Human
ccagcgugaaggguggccca

SEQ ID NO: 126033 - RNA, 20 nt, Human
cccugccggcgggggguggc

SEQ ID NO: 126034 - RNA, 19 nt, Human
cccugggugggcacagggg

SEQ ID NO: 126035 - RNA, 21 nt, Human
cccuugaggcgcugacagccu

SEQ ID NO: 126036 - RNA, 23 nt, Human
cggcagagggcccgcuggaagcc

SEQ ID NO: 126037 - RNA, 19 nt, Human
cgugggcagcagagguggg

SEQ ID NO: 126038 - RNA, 23 nt, Human
cucugugccgggcccuggguggg

SEQ ID NO: 126039 - RNA, 25 nt, Human
gaagcaggcggucggcagagggccc

SEQ ID NO: 126040 - RNA, 23 nt, Human
gacggggcaggggagaagggugg

SEQ ID NO: 126041 - RNA, 18 nt, Human
gaggagucucguccugcc

SEQ ID NO: 126042 - RNA, 18 nt, Human
gagggagcacagaggagg

SEQ ID NO: 126043 - RNA, 20 nt, Human
gcagcagaggugggcgggca

SEQ ID NO: 126044 - RNA, 19 nt, Human
gccgggcccugggugggca

SEQ ID NO: 126045 - RNA, 21 nt, Human
ggcacagggggcucagagaca

SEQ ID NO: 126046 - RNA, 18 nt, Human
ggcuucuuggaggaggug

SEQ ID NO: 126047 - RNA, 22 nt, Human
gggacaguggugguggcuggga

SEQ ID NO: 126048 - RNA, 24 nt, Human
gggacaguggugguggcugggagu

SEQ ID NO: 126049 - RNA, 21 nt, Human
gggcaagggccaguccaggaa

SEQ ID NO: 126050 - RNA, 18 nt, Human
ggggacggggcaggggag

SEQ ID NO: 126051 - RNA, 23 nt, Human
ggggagaaggguggguggccgug

SEQ ID NO: 126052 - RNA, 19 nt, Human
gggggguggcaaggagggc

SEQ ID NO: 126053 - RNA, 22 nt, Human
gguggcccaggggacggggcag

SEQ ID NO: 126054 - RNA, 22 nt, Human
gugccgggcccugggugggcac

SEQ ID NO: 126055 - RNA, 25 nt, Human
gugggcagcagaggugggcgggcac

SEQ ID NO: 126056 - RNA, 18 nt, Human
ucacacgcagacccuacc

SEQ ID NO: 126057 - RNA, 23 nt, Human
ucagugguagggacagugguggu

SEQ ID NO: 126058 - RNA, 26 nt, Human
uccaggaagggccauggaguccgcag

SEQ ID NO: 126059 - RNA, 23 nt, Human
ucucguccugccuggaggccccc

SEQ ID NO: 126060 - RNA, 18 nt, Human
ugagcaaguggccugugc

SEQ ID NO: 126061 - RNA, 18 nt, Human
ugaggggugugaagcagg

SEQ ID NO: 126062 - RNA, 21 nt, Human
uggcaaggagggcuucuugga

SEQ ID NO: 126063 - RNA, 20 nt, Human
uggcccaggggacggggcag

SEQ ID NO: 126064 - RNA, 20 nt, Human
uggcugggaguugggcaagg

SEQ ID NO: 126065 - RNA, 23 nt, Human
ugggaguugggcaagggccaguc

SEQ ID NO: 126066 - RNA, 20 nt, Human
ugguagggacagugguggug

SEQ ID NO: 126067 - RNA, 22 nt, Human
ugguguuagagguagcacaggu

SEQ ID NO: 126068 - RNA, 20 nt, Human
uugagcaucgacucugugcc

SEQ ID NO: 126069 - RNA, 18 nt, Human
uuuuuuuuuuuuuuuuug

SEQ ID NO: 126070 - RNA, 21 nt, Human
uuuuuuuuuuuuuuuuugcag

SEQ ID NO: 126071 - RNA, 22 nt, Human
uuuuuuuuuuuuuuuuugcagu

SEQ ID NO: 126072 - RNA, 23 nt, Human
aaacaggauaugggcagacagga

SEQ ID NO: 126073 - RNA, 23 nt, Human
aaacagguggugagaaugggugg

SEQ ID NO: 126074 - RNA, 23 nt, Human
aacaaagaaacagguggugagaa

SEQ ID NO: 126075 - RNA, 18 nt, Human
aagcgggggucaggaaga

SEQ ID NO: 126076 - RNA, 21 nt, Human
aauauuuaaugagcauuuacu

SEQ ID NO: 126077 - RNA, 18 nt, Human
acaagggguuuuagaccc

SEQ ID NO: 126078 - RNA, 23 nt, Human
acagguggugagaaugggugggu

SEQ ID NO: 126079 - RNA, 23 nt, Human
agaaggagacagguguaugggca

SEQ ID NO: 126080 - RNA, 18 nt, Human
agacaagccaggcaggaa

SEQ ID NO: 126081 - RNA, 21 nt, Human
agacagaaaacaggauauggg

SEQ ID NO: 126082 - RNA, 24 nt, Human
agacagaaaacaggauaugggcag

SEQ ID NO: 126083 - RNA, 29 nt, Human
agacagaaaacaggauauggggggacccc

SEQ ID NO: 126084 - RNA, 23 nt, Human
agacaggaaggggacagaagcgg

SEQ ID NO: 126085 - RNA, 25 nt, Human
agacaggaaggggacagaagggacc

SEQ ID NO: 126086 - RNA, 21 nt, Human
agacagguguaugggcagaca

SEQ ID NO: 126087 - RNA, 25 nt, Human
agacagguguaugggcagacagucu

SEQ ID NO: 126088 - RNA, 25 nt, Human
agacagguguaugggcagacaguuu

SEQ ID NO: 126089 - RNA, 20 nt, Human
agagagaaaguggguccagg

SEQ ID NO: 126090 - RNA, 21 nt, Human
agagagaaaguggguccaggg

SEQ ID NO: 126091 - RNA, 18 nt, Human
agagugaagggggagggc

SEQ ID NO: 126092 - RNA, 19 nt, Human
agcaggcaggugggaagaa

SEQ ID NO: 126093 - RNA, 24 nt, Human
agcaggcaggugggaagaagggaa

SEQ ID NO: 126094 - RNA, 18 nt, Human
aggcaggaagaaggagac

SEQ ID NO: 126095 - RNA, 22 nt, Human
aggcaggaagaaggagacaggu

SEQ ID NO: 126096 - RNA, 18 nt, Human
aggcaggaguuugggagg

SEQ ID NO: 126097 - RNA, 19 nt, Human
aggcaggaguuugggaggu

SEQ ID NO: 126098 - RNA, 21 nt, Human
aggcaggaguuugggaggugg

SEQ ID NO: 126099 - RNA, 20 nt, Human
aggggugugggcaccgcugc

SEQ ID NO: 126100 - RNA, 18 nt, Human
caaagaaacaggugguga

SEQ ID NO: 126101 - RNA, 19 nt, Human
caacaagagauacaggugg

SEQ ID NO: 126102 - RNA, 21 nt, Human
caagccacgagggguuuuaug

SEQ ID NO: 126103 - RNA, 19 nt, Human
caaggagcaaggagccagc

SEQ ID NO: 126104 - RNA, 23 nt, Human
caaguccagacacauuccagagc

SEQ ID NO: 126105 - RNA, 21 nt, Human
caccuaggggaacagugggag

SEQ ID NO: 126106 - RNA, 23 nt, Human
cagacagucuggagggcaggcag

SEQ ID NO: 126107 - RNA, 23 nt, Human
caggcaggaguuugggagguggg

SEQ ID NO: 126108 - RNA, 18 nt, Human
cagguggugagaaugggu

SEQ ID NO: 126109 - RNA, 19 nt, Human
caucugcucuguuacuuga

SEQ ID NO: 126110 - RNA, 20 nt, Human
ccacccuucagcacagagcu

SEQ ID NO: 126111 - RNA, 24 nt, Human
ccacgagggguuuuaugccccggg

SEQ ID NO: 126112 - RNA, 21 nt, Human
ccagacacauuccagagccac

SEQ ID NO: 126113 - RNA, 24 nt, Human
cccaacacucagcuuuucucccaa

SEQ ID NO: 126114 - RNA, 21 nt, Human
cccuguccauguaccucacaa

SEQ ID NO: 126115 - RNA, 20 nt, Human
ccucacaaauauuuaaugag

SEQ ID NO: 126116 - RNA, 18 nt, Human
ccuggacaugauucaaga

SEQ ID NO: 126117 - RNA, 21 nt, Human
ccugggagagcaaggagcaag

SEQ ID NO: 126118 - RNA, 19 nt, Human
cgagggguuuuaugccccg

SEQ ID NO: 126119 - RNA, 22 nt, Human
cgccaaagcuaaggauggaggc

SEQ ID NO: 126120 - RNA, 19 nt, Human
cgcugcgaggaaaacagac

SEQ ID NO: 126121 - RNA, 25 nt, Human
cucagcuuuucucccaacaagagau

SEQ ID NO: 126122 - RNA, 24 nt, Human
cucucucugaccaccccuguccac

SEQ ID NO: 126123 - RNA, 20 nt, Human
gagauacagguggguaggag

SEQ ID NO: 126124 - RNA, 20 nt, Human
gaguuugggaggugggugga

SEQ ID NO: 126125 - RNA, 21 nt, Human
gcaggaagaaggagacaggug

SEQ ID NO: 126126 - RNA, 23 nt, Human
gcagguagggagcccuggagaaa

SEQ ID NO: 126127 - RNA, 18 nt, Human
gccacgagcccuggauuc

SEQ ID NO: 126128 - RNA, 23 nt, Human
gcucggccucagcuucucccaac

SEQ ID NO: 126129 - RNA, 21 nt, Human
ggacaugauucaagacucuuu

SEQ ID NO: 126130 - RNA, 18 nt, Human
ggucaggaagacaggacg

SEQ ID NO: 126131 - RNA, 18 nt, Human
ggugagagagagaagggc

SEQ ID NO: 126132 - RNA, 23 nt, Human
uaaggauggaggcugugaaggcc

SEQ ID NO: 126133 - RNA, 24 nt, Human
uaauaggaaacuaauauaggaaca

SEQ ID NO: 126134 - RNA, 18 nt, Human
uacagcaguaauaggaaa

SEQ ID NO: 126135 - RNA, 24 nt, Human
uacagguggguaggagacaggaaa

SEQ ID NO: 126136 - RNA, 24 nt, Human
uacagguggguaggagacagguag

SEQ ID NO: 126137 - RNA, 24 nt, Human
uaccucacaaauauuuaaugagca

SEQ ID NO: 126138 - RNA, 22 nt, Human
uagggagcccuggagaaaggug

SEQ ID NO: 126139 - RNA, 18 nt, Human
uaugggcagacaggaagg

SEQ ID NO: 126140 - RNA, 22 nt, Human
ucagaguucagaaucgauugac

SEQ ID NO: 126141 - RNA, 22 nt, Human
ucagcugucuaccacauucccc

SEQ ID NO: 126142 - RNA, 22 nt, Human
ucucugagugccccuuccucuc

SEQ ID NO: 126143 - RNA, 19 nt, Human
ugaagggggagggcagaac

SEQ ID NO: 126144 - RNA, 19 nt, Human
ugagaaaagacaguuugag

SEQ ID NO: 126145 - RNA, 23 nt, Human
ugagagagaaaguggguccaggg

SEQ ID NO: 126146 - RNA, 18 nt, Human
ugagauaauggagagcag

SEQ ID NO: 126147 - RNA, 24 nt, Human
ugccaggcaguaugcuaggggugg

SEQ ID NO: 126148 - RNA, 19 nt, Human
ugcuggaucucugagugcc

SEQ ID NO: 126149 - RNA, 24 nt, Human
uggagagcagguucuuuuaacuca

SEQ ID NO: 126150 - RNA, 20 nt, Human
uggagggcaggcaggaguuu

SEQ ID NO: 126151 - RNA, 21 nt, Human
ugggagguggguggagauuca

SEQ ID NO: 126152 - RNA, 18 nt, Human
uggggagagugaaggggg

SEQ ID NO: 126153 - RNA, 20 nt, Human
uggggagagugaagggggag

SEQ ID NO: 126154 - RNA, 25 nt, Human
uggggagagugaagggggagggcag

SEQ ID NO: 126155 - RNA, 22 nt, Human
ugggggacagcaggcagguggg

SEQ ID NO: 126156 - RNA, 23 nt, Human
ugguguuccaaaggccacaaggg

SEQ ID NO: 126157 - RNA, 21 nt, Human
ugugaaggccccgagcucugg

SEQ ID NO: 126158 - RNA, 19 nt, Human
uguugggguguucagaccc

SEQ ID NO: 126159 - RNA, 19 nt, Human
uucagacccaacaccaggu

SEQ ID NO: 126160 - RNA, 19 nt, Human
uuuauuacagcaguaauag

SEQ ID NO: 126161 - RNA, 23 nt, Human
aaaugaaguuucucgaaccgaaa

SEQ ID NO: 126162 - RNA, 24 nt, Human
acacaaaguucaacaaagaaacac

SEQ ID NO: 126163 - RNA, 28 nt, Human
acacacacacaaaguucaacaaagaaac

SEQ ID NO: 126164 - RNA, 23 nt, Human
acauagcacuguccucuaggagu

SEQ ID NO: 126165 - RNA, 23 nt, Human
agagagucugcuucagaauuauu

SEQ ID NO: 126166 - RNA, 18 nt, Human
agggaggucacagccuga

SEQ ID NO: 126167 - RNA, 21 nt, Human
auaaccaugaaucucagggca

SEQ ID NO: 126168 - RNA, 21 nt, Human
auucuucuauuuggugguacc

SEQ ID NO: 126169 - RNA, 22 nt, Human
cacaaaguucaacaaagaaaca

SEQ ID NO: 126170 - RNA, 27 nt, Human
cacacacaaaguucaacaaagaaacac

SEQ ID NO: 126171 - RNA, 19 nt, Human
cacacacacaaaguucaac

SEQ ID NO: 126172 - RNA, 22 nt, Human
cacacacacacaaaguucaaca

SEQ ID NO: 126173 - RNA, 19 nt, Human
cagccauaaccaugaaucu

SEQ ID NO: 126174 - RNA, 19 nt, Human
cagggcaaaacuuuccuug

SEQ ID NO: 126175 - RNA, 24 nt, Human
cauaaccaugaaucucagggcaaa

SEQ ID NO: 126176 - RNA, 19 nt, Human
ccauaaccaugaaucucag

SEQ ID NO: 126177 - RNA, 21 nt, Human
ccccaacuccuccacacccag

SEQ ID NO: 126178 - RNA, 24 nt, Human
ccccaacuccuccacacccagccu

SEQ ID NO: 126179 - RNA, 18 nt, Human
ccccuaagccauucuucu

SEQ ID NO: 126180 - RNA, 25 nt, Human
ccuccugaaggcagggggccccaac

SEQ ID NO: 126181 - RNA, 21 nt, Human
cugcauuuuuaaguuugccaa

SEQ ID NO: 126182 - RNA, 20 nt, Human
gaaguuucucgaaccgaaau

SEQ ID NO: 126183 - RNA, 19 nt, Human
gucugcuucagaauuauuu

SEQ ID NO: 126184 - RNA, 23 nt, Human
uaaaugaaguuucucgaaccgaa

SEQ ID NO: 126185 - RNA, 22 nt, Human
uaaugccuacuucccuucuaaa

SEQ ID NO: 126186 - RNA, 20 nt, Human
uacagucuucauuuagguaa

SEQ ID NO: 126187 - RNA, 21 nt, Human
ucuaugguaaugccuacuucc

SEQ ID NO: 126188 - RNA, 19 nt, Human
ucucagggcaaaacuuucc

SEQ ID NO: 126189 - RNA, 25 nt, Human
ugcccagggaggucacagccugagc

SEQ ID NO: 126190 - RNA, 20 nt, Human
uggggaggguggugcccagg

SEQ ID NO: 126191 - RNA, 21 nt, Human
uggggaggguggugcccaggg

SEQ ID NO: 126192 - RNA, 19 nt, Human
uguugaauaaaugaaugag

SEQ ID NO: 126193 - RNA, 20 nt, Human
uucuugacuucagugauggu

SEQ ID NO: 126194 - RNA, 19 nt, Human
aaagaaacuucagagucua

SEQ ID NO: 126195 - RNA, 19 nt, Human
aaagugcugggauuacagg

SEQ ID NO: 126196 - RNA, 24 nt, Human
aaagugcugggauuacagguguga

SEQ ID NO: 126197 - RNA, 26 nt, Human
aaauccaacaauaagaaggcaaacaa

SEQ ID NO: 126198 - RNA, 23 nt, Human
aaauccagaaauuuauccaccca

SEQ ID NO: 126199 - RNA, 21 nt, Human
aacaccagccaguguaacaug

SEQ ID NO: 126200 - RNA, 20 nt, Human
aacagagcgagacuccaucu

SEQ ID NO: 126201 - RNA, 25 nt, Human
aacaugauaacaaacuaucaaacug

SEQ ID NO: 126202 - RNA, 18 nt, Human
aacauggcgaaaccccgc

SEQ ID NO: 126203 - RNA, 20 nt, Human
aacauggcgaaaccccgccu

SEQ ID NO: 126204 - RNA, 21 nt, Human
aacauggcgaaaccccgccuc

SEQ ID NO: 126205 - RNA, 23 nt, Human
aagcgauucuccugccucagcca

SEQ ID NO: 126206 - RNA, 18 nt, Human
aagugcugggauuacagg

SEQ ID NO: 126207 - RNA, 19 nt, Human
aagugcugggauuacaggu

SEQ ID NO: 126208 - RNA, 18 nt, Human
aaucacacgacugacaaa

SEQ ID NO: 126209 - RNA, 24 nt, Human
aaucacccgaacgcaggaggcgga

SEQ ID NO: 126210 - RNA, 25 nt, Human
acaaaacaaugauaaaagaaauuca

SEQ ID NO: 126211 - RNA, 21 nt, Human
acaccccacacaaaauuuaac

SEQ ID NO: 126212 - RNA, 22 nt, Human
acagacucuucuccaaagaaaa

SEQ ID NO: 126213 - RNA, 24 nt, Human
acagagcgagacuccaucucaaaa

SEQ ID NO: 126214 - RNA, 21 nt, Human
acaggcccgcaccaccacgac

SEQ ID NO: 126215 - RNA, 19 nt, Human
acccaggcuggagugcagu

SEQ ID NO: 126216 - RNA, 20 nt, Human
accgagaucaugccaccgca

SEQ ID NO: 126217 - RNA, 24 nt, Human
accgcacuccagccugggcaacag

SEQ ID NO: 126218 - RNA, 24 nt, Human
accgcacuccagccugggcaacag

SEQ ID NO: 126219 - RNA, 20 nt, Human
acgugguuucaccauauugg

SEQ ID NO: 126220 - RNA, 24 nt, Human
acgugguuucaccauauuggccag

SEQ ID NO: 126221 - RNA, 24 nt, Human
acuccuggguucaagcgauucucc

SEQ ID NO: 126222 - RNA, 18 nt, Human
agaaacacaaaagaagca

SEQ ID NO: 126223 - RNA, 26 nt, Human
agacuugcaaaucacacgacugacag

SEQ ID NO: 126224 - RNA, 24 nt, Human
agcacuuugggaggccgaggcagg

SEQ ID NO: 126225 - RNA, 23 nt, Human
agcagcugugaauacaggcacac

SEQ ID NO: 126226 - RNA, 24 nt, Human
agccugggcaacagagcgagacuc

SEQ ID NO: 126227 - RNA, 24 nt, Human
agcucuuucacccaggcuggagug

SEQ ID NO: 126228 - RNA, 23 nt, Human
agcuggacgugguggugggugcc

SEQ ID NO: 126229 - RNA, 21 nt, Human
aggcaccccugucaaagucuu

SEQ ID NO: 126230 - RNA, 18 nt, Human
aggcagguggaucaccug

SEQ ID NO: 126231 - RNA, 22 nt, Human
aggcagguggaucaccugaggg

SEQ ID NO: 126232 - RNA, 22 nt, Human
aggcagguggaucaccugaggu

SEQ ID NO: 126233 - RNA, 20 nt, Human
aggcccgcaccaccacgacc

SEQ ID NO: 126234 - RNA, 21 nt, Human
aggccgaggcagguggaucac

SEQ ID NO: 126235 - RNA, 21 nt, Human
aggcggagguugcaaugaacc

SEQ ID NO: 126236 - RNA, 24 nt, Human
aggcggagguugcaaugaaccgag

SEQ ID NO: 126237 - RNA, 25 nt, Human
aggcuggagugcaguggcacaaucu

SEQ ID NO: 126238 - RNA, 18 nt, Human
agggauuuucuuuucuuu

SEQ ID NO: 126239 - RNA, 23 nt, Human
agguccggaacauuuucaccauc

SEQ ID NO: 126240 - RNA, 24 nt, Human
agucuuaccucauaaaaauuuaaa

SEQ ID NO: 126241 - RNA, 20 nt, Human
agugcaguggcacaaucucg

SEQ ID NO: 126242 - RNA, 24 nt, Human
agugcaguggcacaaucucggcuc

SEQ ID NO: 126243 - RNA, 21 nt, Human
aguggggucagagugggucuc

SEQ ID NO: 126244 - RNA, 19 nt, Human
auacaacaauuagcuggac

SEQ ID NO: 126245 - RNA, 19 nt, Human
auacaacaauuagcuggac

SEQ ID NO: 126246 - RNA, 23 nt, Human
aucaccugagguuaggaguucaa

SEQ ID NO: 126247 - RNA, 24 nt, Human
aucaugccaccgcacuccagccug

SEQ ID NO: 126248 - RNA, 24 nt, Human
auccauauacaagaaaacaguuaa

SEQ ID NO: 126249 - RNA, 24 nt, Human
augccaccgcacuccagccugggc

SEQ ID NO: 126250 - RNA, 21 nt, Human
auggaccauauuguguuuauc

SEQ ID NO: 126251 - RNA, 22 nt, Human
augucaccuucucccuucucag

SEQ ID NO: 126252 - RNA, 20 nt, Human
caaaagaagcagaauagcca

SEQ ID NO: 126253 - RNA, 22 nt, Human
caaaagaagcagaauagccaaa

SEQ ID NO: 126254 - RNA, 24 nt, Human
caaaagaagcagaauagccaaaaa

SEQ ID NO: 126255 - RNA, 21 nt, Human
caaagaaaauauaggaguguc

SEQ ID NO: 126256 - RNA, 19 nt, Human
caaauaggcacaggaaggc

SEQ ID NO: 126257 - RNA, 25 nt, Human
caaauaggcacaggaaggcacgagu

SEQ ID NO: 126258 - RNA, 18 nt, Human
caaccuccucuccccuuc

SEQ ID NO: 126259 - RNA, 26 nt, Human
caagaaaacaaauaaauacaggggua

SEQ ID NO: 126260 - RNA, 22 nt, Human
caagcgauucuccugccucagc

SEQ ID NO: 126261 - RNA, 23 nt, Human
caaggauauucuuuucaaaaaaa

SEQ ID NO: 126262 - RNA, 23 nt, Human
cacacaccaccacgccuggcuaa

SEQ ID NO: 126263 - RNA, 24 nt, Human
cacaccaccacgccuggcuaauuu

SEQ ID NO: 126264 - RNA, 24 nt, Human
cacaccccacacaaaauuuaacua

SEQ ID NO: 126265 - RNA, 23 nt, Human
caccaauccacuauacaucucuu

SEQ ID NO: 126266 - RNA, 23 nt, Human
caccaccccagcccaccgcaacc

SEQ ID NO: 126267 - RNA, 21 nt, Human
caccauauuggccaggcuggu

SEQ ID NO: 126268 - RNA, 24 nt, Human
caccauauuggccaggcuggucuc

SEQ ID NO: 126269 - RNA, 27 nt, Human
caccauauuggccaggcuggucucaaa

SEQ ID NO: 126270 - RNA, 23 nt, Human
caccaucccaggagaaaacccca

SEQ ID NO: 126271 - RNA, 24 nt, Human
caccccugucaaagucuugucuac

SEQ ID NO: 126272 - RNA, 24 nt, Human
caccgcacuccagccugggcaaca

SEQ ID NO: 126273 - RNA, 18 nt, Human
caccuccccacagcugcu

SEQ ID NO: 126274 - RNA, 23 nt, Human
cacuccagccugggcaacagagc

SEQ ID NO: 126275 - RNA, 24 nt, Human
cacuccagccugggcaacagagcg

SEQ ID NO: 126276 - RNA, 22 nt, Human
cagaaaucccaauucaaacccu

SEQ ID NO: 126277 - RNA, 24 nt, Human
cagcacuuugggaggccgaggcag

SEQ ID NO: 126278 - RNA, 24 nt, Human
cagcacuuugggaggccgaggcag

SEQ ID NO: 126279 - RNA, 23 nt, Human
cagcccaccgcaaccuccgccug

SEQ ID NO: 126280 - RNA, 24 nt, Human
caggccuguaaucccagcacuuug

SEQ ID NO: 126281 - RNA, 24 nt, Human
cagguggaucaccugagguuagga

SEQ ID NO: 126282 - RNA, 22 nt, Human
caguuaaaccacaguucacacc

SEQ ID NO: 126283 - RNA, 20 nt, Human
cauagaaacacaaaagaagc

SEQ ID NO: 126284 - RNA, 24 nt, Human
cauagaacucucaaaauccaacaa

SEQ ID NO: 126285 - RNA, 24 nt, Human
cauauuggccaggcuggucucaaa

SEQ ID NO: 126286 - RNA, 20 nt, Human
cauggaaagaugcucacaac

SEQ ID NO: 126287 - RNA, 22 nt, Human
cauuuuauuagcauuguacacc

SEQ ID NO: 126288 - RNA, 24 nt, Human
ccaacaauaagaaggcaaacaauc

SEQ ID NO: 126289 - RNA, 22 nt, Human
ccaagcagcugugaauacaggc

SEQ ID NO: 126290 - RNA, 23 nt, Human
ccaccgcaaccuccgccuguggg

SEQ ID NO: 126291 - RNA, 20 nt, Human
ccaccgcacuccagccuggg

SEQ ID NO: 126292 - RNA, 20 nt, Human
ccaccgcacuccagccuggg

SEQ ID NO: 126293 - RNA, 21 nt, Human
ccaccgcacuccagccugggc

SEQ ID NO: 126294 - RNA, 24 nt, Human
ccaccgcacuccagccugggcaac

SEQ ID NO: 126295 - RNA, 23 nt, Human
ccaggccuguaaucccagcacuu

SEQ ID NO: 126296 - RNA, 24 nt, Human
ccaucucaaaaaaaaaaaaaaaaa

SEQ ID NO: 126297 - RNA, 19 nt, Human
cccaccuugaccuccuaaa

SEQ ID NO: 126298 - RNA, 21 nt, Human
ccccacucuuccacucacaga

SEQ ID NO: 126299 - RNA, 22 nt, Human
ccccacucuuccacucacagaa

SEQ ID NO: 126300 - RNA, 23 nt, Human
ccccagcccaccgcaaccuccgc

SEQ ID NO: 126301 - RNA, 19 nt, Human
cccucccccaggcuggagc

SEQ ID NO: 126302 - RNA, 23 nt, Human
ccgcaaccuccgccuguggguuu

SEQ ID NO: 126303 - RNA, 24 nt, Human
ccgcaaccuccgccuguggguuuc

SEQ ID NO: 126304 - RNA, 19 nt, Human
ccggaacauuuucaccauc

SEQ ID NO: 126305 - RNA, 22 nt, Human
ccuaaagugcugggauuacagg

SEQ ID NO: 126306 - RNA, 24 nt, Human
ccuaaagugcugggauuacaggug

SEQ ID NO: 126307 - RNA, 18 nt, Human
ccuccucuccccuucuuc

SEQ ID NO: 126308 - RNA, 19 nt, Human
ccuccucuccccuucuucu

SEQ ID NO: 126309 - RNA, 24 nt, Human
ccugcaaucccagccacccgggag

SEQ ID NO: 126310 - RNA, 22 nt, Human
ccugggcaacagagcgagacuc

SEQ ID NO: 126311 - RNA, 23 nt, Human
ccuggguucaagcgauucuccug

SEQ ID NO: 126312 - RNA, 25 nt, Human
ccuugucccacacaaccuccucucc

SEQ ID NO: 126313 - RNA, 18 nt, Human
cgagacaggucaaucacc

SEQ ID NO: 126314 - RNA, 21 nt, Human
cgagacaggucaaucacccga

SEQ ID NO: 126315 - RNA, 22 nt, Human
cgagcagcugggaccacaggcc

SEQ ID NO: 126316 - RNA, 20 nt, Human
cgaggcagguggaucaccug

SEQ ID NO: 126317 - RNA, 21 nt, Human
cuaaagugcugggauuacagg

SEQ ID NO: 126318 - RNA, 24 nt, Human
cuaaagugcugggauuacaggugu

SEQ ID NO: 126319 - RNA, 20 nt, Human
cuagaaaagugucuaaccaa

SEQ ID NO: 126320 - RNA, 24 nt, Human
cuagggcagagacuuacuuugaaa

SEQ ID NO: 126321 - RNA, 24 nt, Human
cucacugaaaccucugacuccugg

SEQ ID NO: 126322 - RNA, 22 nt, Human
cuccaaagaaaauauaggagug

SEQ ID NO: 126323 - RNA, 19 nt, Human
cuccaucucaaaaaaaaaa

SEQ ID NO: 126324 - RNA, 20 nt, Human
cuccugaccucaugaucugc

SEQ ID NO: 126325 - RNA, 22 nt, Human
cuccugccucagccauccaagc

SEQ ID NO: 126326 - RNA, 21 nt, Human
cuccuggguucaagcgauucu

SEQ ID NO: 126327 - RNA, 18 nt, Human
cugaaacaaaaacugacc

SEQ ID NO: 126328 - RNA, 21 nt, Human
cugcaucaaccucccgagcag

SEQ ID NO: 126329 - RNA, 23 nt, Human
gaaaacaaauaaauacaggggua

SEQ ID NO: 126330 - RNA, 21 nt, Human
gaaacaguuuggcaguguuuu

SEQ ID NO: 126331 - RNA, 24 nt, Human
gaaagaugcucacaacauauucuu

SEQ ID NO: 126332 - RNA, 19 nt, Human
gaacacuugucucaauuau

SEQ ID NO: 126333 - RNA, 22 nt, Human
gaacagacucuucuccaaagaa

SEQ ID NO: 126334 - RNA, 21 nt, Human
gaauacaggcacacaccacca

SEQ ID NO: 126335 - RNA, 22 nt, Human
gacgugguggugggugccugca

SEQ ID NO: 126336 - RNA, 23 nt, Human
gagaucaugccaccgcacuccag

SEQ ID NO: 126337 - RNA, 24 nt, Human
gagcagcugggaccacaggcccgc

SEQ ID NO: 126338 - RNA, 23 nt, Human
gaggcagguggaucaccugaggu

SEQ ID NO: 126339 - RNA, 23 nt, Human
gaucaccugagguuaggaguuca

SEQ ID NO: 126340 - RNA, 24 nt, Human
gaucaccugagguuaggaguucaa

SEQ ID NO: 126341 - RNA, 21 nt, Human
gauuacaggugugagcuaccg

SEQ ID NO: 126342 - RNA, 24 nt, Human
gauuacaggugugagcuaccgugc

SEQ ID NO: 126343 - RNA, 24 nt, Human
gcacuccagccugggcaacagagc

SEQ ID NO: 126344 - RNA, 20 nt, Human
gcaucaaccucccgagcagc

SEQ ID NO: 126345 - RNA, 22 nt, Human
gccaccgcacuccagccugggc

SEQ ID NO: 126346 - RNA, 19 nt, Human
gcuaccgugcccugccaag

SEQ ID NO: 126347 - RNA, 22 nt, Human
gcucuuucacccaggcuggagu

SEQ ID NO: 126348 - RNA, 22 nt, Human
gcugaaacaaaaacugacccua

SEQ ID NO: 126349 - RNA, 18 nt, Human
gcugaaagccaccaaucc

SEQ ID NO: 126350 - RNA, 25 nt, Human
gcuggagcgcaguggcaccacccca

SEQ ID NO: 126351 - RNA, 19 nt, Human
gcuggagugcaguggcaca

SEQ ID NO: 126352 - RNA, 23 nt, Human
gcuggucucaaacuccugaccuc

SEQ ID NO: 126353 - RNA, 18 nt, Human
ggaaagaugcucacaaca

SEQ ID NO: 126354 - RNA, 24 nt, Human
ggagguugcaaugaaccgagauca

SEQ ID NO: 126355 - RNA, 20 nt, Human
ggccaggccuguaaucccag

SEQ ID NO: 126356 - RNA, 23 nt, Human
ggccuguaaucccagcacuuugg

SEQ ID NO: 126357 - RNA, 24 nt, Human
ggccuguaaucccagcacuuuggg

SEQ ID NO: 126358 - RNA, 24 nt, Human
ggcuggucucaaacuccugaccuc

SEQ ID NO: 126359 - RNA, 23 nt, Human
gggaggccgagacaggucaauca

SEQ ID NO: 126360 - RNA, 22 nt, Human
ggggccaggccuguaaucccag

SEQ ID NO: 126361 - RNA, 24 nt, Human
ggggccaggccuguaaucccagca

SEQ ID NO: 126362 - RNA, 21 nt, Human
gguuucaccauauuggccagg

SEQ ID NO: 126363 - RNA, 23 nt, Human
guauugguccaacauggaauaga

SEQ ID NO: 126364 - RNA, 24 nt, Human
gugaauacaggcacacaccaccac

SEQ ID NO: 126365 - RNA, 24 nt, Human
gugauucuccugcaucaaccuccc

SEQ ID NO: 126366 - RNA, 19 nt, Human
gugugagcuaccgugcccu

SEQ ID NO: 126367 - RNA, 18 nt, Human
uaaagucaccauuuuauu

SEQ ID NO: 126368 - RNA, 24 nt, Human
uaaagugcugggauuacaggugug

SEQ ID NO: 126369 - RNA, 18 nt, Human
uaaauucucagcuguaca

SEQ ID NO: 126370 - RNA, 21 nt, Human
uaaauucucagcuguacauuu

SEQ ID NO: 126371 - RNA, 20 nt, Human
uaacaugauaacaaacuauc

SEQ ID NO: 126372 - RNA, 27 nt, Human
uaacaugauaacaaacuaucaaacugg

SEQ ID NO: 126373 - RNA, 24 nt, Human
uaacauggcgaaaccccgccucua

SEQ ID NO: 126374 - RNA, 19 nt, Human
uaaccacaccuguaucuua

SEQ ID NO: 126375 - RNA, 23 nt, Human
uaacuuuuguacuuuaguagaga

SEQ ID NO: 126376 - RNA, 22 nt, Human
uaaggaaggcugaaacaaaaac

SEQ ID NO: 126377 - RNA, 24 nt, Human
uaauuuuucuauuuuuaauagaga

SEQ ID NO: 126378 - RNA, 18 nt, Human
uacaacaauuagcuggac

SEQ ID NO: 126379 - RNA, 19 nt, Human
uacugugaauagggcugcc

SEQ ID NO: 126380 - RNA, 24 nt, Human
uacugugaauagggcugccaugaa

SEQ ID NO: 126381 - RNA, 20 nt, Human
uagagacgugguuucaccau

SEQ ID NO: 126382 - RNA, 20 nt, Human
uagcauuuagugcacucaca

SEQ ID NO: 126383 - RNA, 18 nt, Human
uagcuggacgugguggug

SEQ ID NO: 126384 - RNA, 25 nt, Human
uaggagugucaaauaggcacaggaa

SEQ ID NO: 126385 - RNA, 19 nt, Human
uaggaguucaacaccagcc

SEQ ID NO: 126386 - RNA, 21 nt, Human
uaggcacaggaaggcacgagu

SEQ ID NO: 126387 - RNA, 18 nt, Human
uauagauucacagaaauc

SEQ ID NO: 126388 - RNA, 22 nt, Human
ucaagccauuaaagugccagaa

SEQ ID NO: 126389 - RNA, 19 nt, Human
ucaagcgauucuccugccu

SEQ ID NO: 126390 - RNA, 21 nt, Human
ucacagaaaucccaauucaaa

SEQ ID NO: 126391 - RNA, 20 nt, Human
ucaccaucccaggagaaaac

SEQ ID NO: 126392 - RNA, 19 nt, Human
ucacccaggcuggagugca

SEQ ID NO: 126393 - RNA, 24 nt, Human
ucacccaggcuggagugcaguggc

SEQ ID NO: 126394 - RNA, 24 nt, Human
ucacugaaaccucugacuccuggg

SEQ ID NO: 126395 - RNA, 23 nt, Human
ucaguaucaugcauucaagguuc

SEQ ID NO: 126396 - RNA, 23 nt, Human
uccagccugggcaacagagcgag

SEQ ID NO: 126397 - RNA, 24 nt, Human
uccagccugggcaacagagcgaga

SEQ ID NO: 126398 - RNA, 23 nt, Human
uccaucucaaaaaaaaaaaaaaa

SEQ ID NO: 126399 - RNA, 19 nt, Human
ucccccucccccaggcugg

SEQ ID NO: 126400 - RNA, 23 nt, Human
ucccgagcagcugggaccacagg

SEQ ID NO: 126401 - RNA, 24 nt, Human
uccuaaagugcugggauuacaggu

SEQ ID NO: 126402 - RNA, 22 nt, Human
uccucagucccaccuccccaca

SEQ ID NO: 126403 - RNA, 22 nt, Human
uccugcaucaaccucccgagca

SEQ ID NO: 126404 - RNA, 21 nt, Human
uccuggguucaagcgauucuc

SEQ ID NO: 126405 - RNA, 24 nt, Human
uccuggguucaagcgauucuccug

SEQ ID NO: 126406 - RNA, 24 nt, Human
ucuaaagugucuaauucaauagca

SEQ ID NO: 126407 - RNA, 23 nt, Human
ucuagcucuuucacccaggcugg

SEQ ID NO: 126408 - RNA, 24 nt, Human
ucuagcucuuucacccaggcugga

SEQ ID NO: 126409 - RNA, 21 nt, Human
ucuaggauggaauacaggacu

SEQ ID NO: 126410 - RNA, 22 nt, Human
ucuuaggguaauucuaggccuc

SEQ ID NO: 126411 - RNA, 18 nt, Human
ugaaacaaaaacugaccc

SEQ ID NO: 126412 - RNA, 21 nt, Human
ugaaacaaaaacugacccuac

SEQ ID NO: 126413 - RNA, 23 nt, Human
ugaaagaaagaaacuucagaguc

SEQ ID NO: 126414 - RNA, 23 nt, Human
ugaagaauaacucaauuuguaac

SEQ ID NO: 126415 - RNA, 28 nt, Human
ugacuccuggguucaagcgauucuccuu

SEQ ID NO: 126416 - RNA, 23 nt, Human
ugaucugcccaccuugaccuccu

SEQ ID NO: 126417 - RNA, 18 nt, Human
ugaugccaaacgaaccag

SEQ ID NO: 126418 - RNA, 22 nt, Human
ugcaaugaaccgagaucaugcc

SEQ ID NO: 126419 - RNA, 22 nt, Human
ugcaguggcacaaucucggcuc

SEQ ID NO: 126420 - RNA, 24 nt, Human
ugcaucaaccucccgagcagcugg

SEQ ID NO: 126421 - RNA, 24 nt, Human
ugccaccgcacuccagccugggca

SEQ ID NO: 126422 - RNA, 22 nt, Human
ugccagaaaagaaaucuuacaa

SEQ ID NO: 126423 - RNA, 23 nt, Human
ugccugcaaucccagccacccgg

SEQ ID NO: 126424 - RNA, 24 nt, Human
ugccugcaaucccagccacccggg

SEQ ID NO: 126425 - RNA, 20 nt, Human
ugcugggauuacagguguga

SEQ ID NO: 126426 - RNA, 21 nt, Human
ugcuucauuccuuuuuauggc

SEQ ID NO: 126427 - RNA, 23 nt, Human
uggagugcaguggcacaaucucg

SEQ ID NO: 126428 - RNA, 24 nt, Human
uggagugcaguggcacaaucucgg

SEQ ID NO: 126429 - RNA, 24 nt, Human
uggaucaccugagguuaggaguuc

SEQ ID NO: 126430 - RNA, 22 nt, Human
uggcacaaucucggcucacuga

SEQ ID NO: 126431 - RNA, 24 nt, Human
uggcaguauaaacauaauucacca

SEQ ID NO: 126432 - RNA, 24 nt, Human
uggccaggcuggucucaaacuccu

SEQ ID NO: 126433 - RNA, 21 nt, Human
ugggaccacaggcccgcacca

SEQ ID NO: 126434 - RNA, 24 nt, Human
ugggaccacaggcccgcaccacca

SEQ ID NO: 126435 - RNA, 24 nt, Human
ugggaggccgaggcagguggauca

SEQ ID NO: 126436 - RNA, 21 nt, Human
ugggauuacaggugugagcua

SEQ ID NO: 126437 - RNA, 22 nt, Human
ugggauuacaggugugagcuac

SEQ ID NO: 126438 - RNA, 23 nt, Human
ugggauuacaggugugagcuacc

SEQ ID NO: 126439 - RNA, 23 nt, Human
ugggauuacaggugugagcuacc

SEQ ID NO: 126440 - RNA, 24 nt, Human
ugggauuacaggugugagcuaccg

SEQ ID NO: 126441 - RNA, 22 nt, Human
uggggccaggccuguaauccca

SEQ ID NO: 126442 - RNA, 23 nt, Human
uggguucaagcgauucuccugcc

SEQ ID NO: 126443 - RNA, 24 nt, Human
uggguucaagcgauucuccugccu

SEQ ID NO: 126444 - RNA, 20 nt, Human
uggguuucaagugauucucc

SEQ ID NO: 126445 - RNA, 24 nt, Human
ugguggugggugccugcaauccca

SEQ ID NO: 126446 - RNA, 23 nt, Human
ugucaggagcaccuugucccaca

SEQ ID NO: 126447 - RNA, 21 nt, Human
ugucuaaccacaccuguaucu

SEQ ID NO: 126448 - RNA, 21 nt, Human
ugugaagaauccagauggaaa

SEQ ID NO: 126449 - RNA, 24 nt, Human
uguggguuucaagugauucuccug

SEQ ID NO: 126450 - RNA, 25 nt, Human
uguuuuguuuuguuuuguuuugauu

SEQ ID NO: 126451 - RNA, 25 nt, Human
uguuuuguuuuguuuuguuuugauu

SEQ ID NO: 126452 - RNA, 25 nt, Human
uguuuuguuuuguuuuguuuugauu

SEQ ID NO: 126453 - RNA, 23 nt, Human
uuaaaccacaguucacaccccac

SEQ ID NO: 126454 - RNA, 24 nt, Human
uuaauagagacgugguuucaccau

SEQ ID NO: 126455 - RNA, 24 nt, Human
uuagcuggacgugguggugggugc

SEQ ID NO: 126456 - RNA, 21 nt, Human
uucaagcgauucuccugccuc

SEQ ID NO: 126457 - RNA, 23 nt, Human
uucaagcgauucuccugccucag

SEQ ID NO: 126458 - RNA, 24 nt, Human
uucaagcgauucuccugccucagc

SEQ ID NO: 126459 - RNA, 22 nt, Human
uucaagugauucuccugcauca

SEQ ID NO: 126460 - RNA, 24 nt, Human
uucaagugauucuccugcaucaac

SEQ ID NO: 126461 - RNA, 18 nt, Human
uucuccugcaucaaccuc

SEQ ID NO: 126462 - RNA, 22 nt, Human
uugaauacuuaacaugcacauu

SEQ ID NO: 126463 - RNA, 20 nt, Human
uuggccuguucuggaaauuu

SEQ ID NO: 126464 - RNA, 25 nt, Human
uugggaggccgaggcagguggauca

SEQ ID NO: 126465 - RNA, 24 nt, Human
uuucaccauauuggccaggcuggu

SEQ ID NO: 126466 - RNA, 24 nt, Human
uuugaauacuuaacaugcacauuu

SEQ ID NO: 126467 - RNA, 25 nt, Human
uuugaugaagaauaacucaauuugu

SEQ ID NO: 126468 - RNA, 19 nt, Human
uuuguuuuguuuuguuuug

SEQ ID NO: 126469 - RNA, 19 nt, Human
uuuguuuuguuuuguuuug

SEQ ID NO: 126470 - RNA, 19 nt, Human
uuuguuuuguuuuguuuug

SEQ ID NO: 126471 - RNA, 20 nt, Human
uuuguuuuguuuuguuuuug

SEQ ID NO: 126472 - RNA, 24 nt, Human
uuuuuaauagagacgugguuucac

SEQ ID NO: 126473 - RNA, 21 nt, Human
aaaaaaacaguaaacuacaag

SEQ ID NO: 126474 - RNA, 21 nt, Human
aaaaagaaaaaaguuuguuaa

SEQ ID NO: 126475 - RNA, 18 nt, Human
aaaaauuagcagagauuc

SEQ ID NO: 126476 - RNA, 20 nt, Human
aaacccagccccaccccucg

SEQ ID NO: 126477 - RNA, 21 nt, Human
aaacccagccccaccccucgg

SEQ ID NO: 126478 - RNA, 22 nt, Human
aaagaacuguaauauacauaaa

SEQ ID NO: 126479 - RNA, 19 nt, Human
aaauaauaauaaacugugg

SEQ ID NO: 126480 - RNA, 20 nt, Human
aacagagcgagacuccaucu

SEQ ID NO: 126481 - RNA, 21 nt, Human
aacauagugaaacccccgucu

SEQ ID NO: 126482 - RNA, 22 nt, Human
aacauagugaaacccccgucuc

SEQ ID NO: 126483 - RNA, 18 nt, Human
aagaggcggaucaauccc

SEQ ID NO: 126484 - RNA, 22 nt, Human
aagcagggaacaacugagccca

SEQ ID NO: 126485 - RNA, 25 nt, Human
aagcagggaacaacugagcccaaaa

SEQ ID NO: 126486 - RNA, 19 nt, Human
aagcgggcugcgccugugg

SEQ ID NO: 126487 - RNA, 18 nt, Human
aauuagccaggcauggug

SEQ ID NO: 126488 - RNA, 24 nt, Human
aauugcuugaacccgggaggcaga

SEQ ID NO: 126489 - RNA, 24 nt, Human
acagagcgagacuccaucucaaaa

SEQ ID NO: 126490 - RNA, 22 nt, Human
accacugcacuccagccugggc

SEQ ID NO: 126491 - RNA, 24 nt, Human
accagaguucacugaucucacauu

SEQ ID NO: 126492 - RNA, 21 nt, Human
accccgugcgucacagaaugg

SEQ ID NO: 126493 - RNA, 23 nt, Human
acccuuccauccucacacacaca

SEQ ID NO: 126494 - RNA, 28 nt, Human
acuccaucucaaaaaaaaaaaaaaaaaa

SEQ ID NO: 126495 - RNA, 24 nt, Human
acugcacuccagccugggcaacag

SEQ ID NO: 126496 - RNA, 24 nt, Human
acugcacuccagccugggcaacag

SEQ ID NO: 126497 - RNA, 18 nt, Human
agaaucugccaauuaccu

SEQ ID NO: 126498 - RNA, 24 nt, Human
agaggaugcagugagcugagaucg

SEQ ID NO: 126499 - RNA, 21 nt, Human
agcacauguauaaguaucaua

SEQ ID NO: 126500 - RNA, 19 nt, Human
agcagggaaggccaggugc

SEQ ID NO: 126501 - RNA, 23 nt, Human
agccaggcaugguggcaggugcc

SEQ ID NO: 126502 - RNA, 24 nt, Human
agccugggcaacagagcgagacuc

SEQ ID NO: 126503 - RNA, 18 nt, Human
aggaagcagggaaggcca

SEQ ID NO: 126504 - RNA, 23 nt, Human
aggcagagaauugcuugaacccg

SEQ ID NO: 126505 - RNA, 20 nt, Human
aggcagaggaugcagugagc

SEQ ID NO: 126506 - RNA, 24 nt, Human
aggcagaggaugcagugagcugag

SEQ ID NO: 126507 - RNA, 24 nt, Human
aggcaugguggcaggugccuguaa

SEQ ID NO: 126508 - RNA, 22 nt, Human
aggccaaggcggguggacucac

SEQ ID NO: 126509 - RNA, 22 nt, Human
aggccaggugcgguggcucaug

SEQ ID NO: 126510 - RNA, 23 nt, Human
aggcugaggcagagaauugcuug

SEQ ID NO: 126511 - RNA, 22 nt, Human
agggaacaacugagcccaaaac

SEQ ID NO: 126512 - RNA, 21 nt, Human
aggugccuguaaucccaacua

SEQ ID NO: 126513 - RNA, 24 nt, Human
aggugcgguggcucaugccuguaa

SEQ ID NO: 126514 - RNA, 20 nt, Human
aucaaauaugguccuggauc

SEQ ID NO: 126515 - RNA, 18 nt, Human
aucaccuagugaaaacag

SEQ ID NO: 126516 - RNA, 22 nt, Human
aucccagcacuuugggaggcca

SEQ ID NO: 126517 - RNA, 24 nt, Human
aucgcaccacugcacuccagccug

SEQ ID NO: 126518 - RNA, 28 nt, Human
aucgcaccacugcacuccagccugggca

SEQ ID NO: 126519 - RNA, 19 nt, Human
augcagugagcugagaucg

SEQ ID NO: 126520 - RNA, 22 nt, Human
augcagugagcugagaucgcac

SEQ ID NO: 126521 - RNA, 19 nt, Human
augccuguaaucccagcac

SEQ ID NO: 126522 - RNA, 18 nt, Human
caaaacaaaauuaucccc

SEQ ID NO: 126523 - RNA, 24 nt, Human
caacuacuugggaggcugaggcag

SEQ ID NO: 126524 - RNA, 22 nt, Human
caacugagcccaaaacaaaauu

SEQ ID NO: 126525 - RNA, 26 nt, Human
caaggcggguggacucacgaggcuca

SEQ ID NO: 126526 - RNA, 24 nt, Human
caauuaccuagauccccccucaac

SEQ ID NO: 126527 - RNA, 23 nt, Human
cacacuuaaaaaaacaguaaacu

SEQ ID NO: 126528 - RNA, 19 nt, Human
cacauguauaaguaucaua

SEQ ID NO: 126529 - RNA, 24 nt, Human
cacgaggcucaggaguucaagacc

SEQ ID NO: 126530 - RNA, 21 nt, Human
cacgcccuuaaauaacacucu

SEQ ID NO: 126531 - RNA, 24 nt, Human
cacuccagccugggcaacagagcg

SEQ ID NO: 126532 - RNA, 18 nt, Human
cacugcacuccagccugg

SEQ ID NO: 126533 - RNA, 19 nt, Human
cacugcacuccagccuggg

SEQ ID NO: 126534 - RNA, 21 nt, Human
cacugcacuccagccugggca

SEQ ID NO: 126535 - RNA, 23 nt, Human
cacugcacuccagccugggcaac

SEQ ID NO: 126536 - RNA, 24 nt, Human
cacugcacuccagccugggcaaca

SEQ ID NO: 126537 - RNA, 25 nt, Human
cacugcacuccagccugggcaacaa

SEQ ID NO: 126538 - RNA, 24 nt, Human
cagcacuuugggaggccaaggcgg

SEQ ID NO: 126539 - RNA, 18 nt, Human
caggcaugguggcaggug

SEQ ID NO: 126540 - RNA, 20 nt, Human
cagguaaauaaauauguaau

SEQ ID NO: 126541 - RNA, 21 nt, Human
caguuaacaaaauccuaaauc

SEQ ID NO: 126542 - RNA, 20 nt, Human
caugccuguaaucccagcac

SEQ ID NO: 126543 - RNA, 24 nt, Human
caugccuguaaucccagcacuuug

SEQ ID NO: 126544 - RNA, 22 nt, Human
caugguggcaggugccuguaau

SEQ ID NO: 126545 - RNA, 24 nt, Human
ccaaaacaaaauuauccccuaagg

SEQ ID NO: 126546 - RNA, 19 nt, Human
ccaaggcggguggacucac

SEQ ID NO: 126547 - RNA, 21 nt, Human
ccacagggggccuugccccag

SEQ ID NO: 126548 - RNA, 20 nt, Human
ccacugcacuccagccuggg

SEQ ID NO: 126549 - RNA, 20 nt, Human
ccacugcacuccagccuggg

SEQ ID NO: 126550 - RNA, 21 nt, Human
ccacugcacuccagccugggc

SEQ ID NO: 126551 - RNA, 23 nt, Human
ccacugcacuccagccugggcaa

SEQ ID NO: 126552 - RNA, 24 nt, Human
ccacugcacuccagccugggcaac

SEQ ID NO: 126553 - RNA, 20 nt, Human
ccagaguucacugaucucac

SEQ ID NO: 126554 - RNA, 22 nt, Human
cccacgcgcgccaccccgugcg

SEQ ID NO: 126555 - RNA, 25 nt, Human
cccacgcgcgccaccccgugcguca

SEQ ID NO: 126556 - RNA, 26 nt, Human
cccacgcgcgccaccccgugcgucac

SEQ ID NO: 126557 - RNA, 22 nt, Human
ccccaggucuccuacuaaaccc

SEQ ID NO: 126558 - RNA, 23 nt, Human
ccccgucucuacuaaaaauacaa

SEQ ID NO: 126559 - RNA, 18 nt, Human
ccccuaaggacuugacuu

SEQ ID NO: 126560 - RNA, 22 nt, Human
ccugggcaacagagcgagacuc

SEQ ID NO: 126561 - RNA, 18 nt, Human
ccuguaaucccaacuacu

SEQ ID NO: 126562 - RNA, 19 nt, Human
ccuguaaucccaacuacuu

SEQ ID NO: 126563 - RNA, 22 nt, Human
ccuguaaucccaacuacuuggg

SEQ ID NO: 126564 - RNA, 20 nt, Human
ccuugccccaggucuccuac

SEQ ID NO: 126565 - RNA, 25 nt, Human
cgacggaacgagagaagcuggcaga

SEQ ID NO: 126566 - RNA, 23 nt, Human
cgagacuccaucucaaaaaaaaa

SEQ ID NO: 126567 - RNA, 19 nt, Human
cgagagaagcuggcagaug

SEQ ID NO: 126568 - RNA, 21 nt, Human
cgcaccacugcacuccagccu

SEQ ID NO: 126569 - RNA, 21 nt, Human
cgggaggcagaggaugcagug

SEQ ID NO: 126570 - RNA, 21 nt, Human
cuaaacccagccccaccccuc

SEQ ID NO: 126571 - RNA, 18 nt, Human
cuacuaaacccagcccca

SEQ ID NO: 126572 - RNA, 23 nt, Human
cuacuaaacccagccccaccccu

SEQ ID NO: 126573 - RNA, 18 nt, Human
cucaaaaaaaaaaaaaaa

SEQ ID NO: 126574 - RNA, 23 nt, Human
cucaaaaaaaaaaaaaaaaaaaa

SEQ ID NO: 126575 - RNA, 24 nt, Human
cucaugccuguaaucccagcacuu

SEQ ID NO: 126576 - RNA, 19 nt, Human
cuccaucucaaaaaaaaaa

SEQ ID NO: 126577 - RNA, 24 nt, Human
gaaacacugaaggccgaggucgcc

SEQ ID NO: 126578 - RNA, 18 nt, Human
gaacccgggaggcagagg

SEQ ID NO: 126579 - RNA, 23 nt, Human
gagaucgcaccacugcacuccag

SEQ ID NO: 126580 - RNA, 24 nt, Human
gaggaagcagggaaggccaggugc

SEQ ID NO: 126581 - RNA, 19 nt, Human
gaguaucaucauaccaaaa

SEQ ID NO: 126582 - RNA, 20 nt, Human
gcaccacugcacuccagccu

SEQ ID NO: 126583 - RNA, 24 nt, Human
gcacuccagccugggcaacagagc

SEQ ID NO: 126584 - RNA, 25 nt, Human
gccaacauagugaaacccccgucuc

SEQ ID NO: 126585 - RNA, 25 nt, Human
gccaauuaccuagauccccccucaa

SEQ ID NO: 126586 - RNA, 18 nt, Human
gccuguggcacaguggua

SEQ ID NO: 126587 - RNA, 22 nt, Human
gcgggauagggcaccugaggaa

SEQ ID NO: 126588 - RNA, 20 nt, Human
gcugagaucgcaccacugca

SEQ ID NO: 126589 - RNA, 23 nt, Human
ggaaggccaggugcgguggcuca

SEQ ID NO: 126590 - RNA, 19 nt, Human
gggaaggccaggugcggug

SEQ ID NO: 126591 - RNA, 23 nt, Human
gguggcucaugccuguaauccca

SEQ ID NO: 126592 - RNA, 24 nt, Human
gguggcucaugccuguaaucccag

SEQ ID NO: 126593 - RNA, 24 nt, Human
guuacaauuugagauaaguugauu

SEQ ID NO: 126594 - RNA, 20 nt, Human
uaaaaaaacaguaaacuaca

SEQ ID NO: 126595 - RNA, 22 nt, Human
uaaaaagaacuguaauauacau

SEQ ID NO: 126596 - RNA, 26 nt, Human
uaaaaagaacuguaauauacauaaag

SEQ ID NO: 126597 - RNA, 20 nt, Human
uaaacccagccccaccccuc

SEQ ID NO: 126598 - RNA, 26 nt, Human
uaaauaauaauaaacugugguuucca

SEQ ID NO: 126599 - RNA, 20 nt, Human
uaaguugauuccuaaacaga

SEQ ID NO: 126600 - RNA, 18 nt, Human
uaccuagauccccccuca

SEQ ID NO: 126601 - RNA, 20 nt, Human
uaccuagauccccccucaac

SEQ ID NO: 126602 - RNA, 19 nt, Human
uaguaauuagaucaagaua

SEQ ID NO: 126603 - RNA, 18 nt, Human
uaucaaauaugguccugg

SEQ ID NO: 126604 - RNA, 23 nt, Human
ucaaaaaaaaaaaaaaaaaaaaa

SEQ ID NO: 126605 - RNA, 21 nt, Human
ucacugaucucacauuuuaaa

SEQ ID NO: 126606 - RNA, 22 nt, Human
ucaugccuguaaucccagcacu

SEQ ID NO: 126607 - RNA, 28 nt, Human
uccaaaggauuucuuuuuccuauaauau

SEQ ID NO: 126608 - RNA, 25 nt, Human
uccaagauuugaauacccugaacuu

SEQ ID NO: 126609 - RNA, 23 nt, Human
uccagccugggcaacagagcgag

SEQ ID NO: 126610 - RNA, 24 nt, Human
uccagccugggcaacagagcgaga

SEQ ID NO: 126611 - RNA, 23 nt, Human
uccaucucaaaaaaaaaaaaaaa

SEQ ID NO: 126612 - RNA, 23 nt, Human
uccuacuaaacccagccccaccc

SEQ ID NO: 126613 - RNA, 21 nt, Human
uccucacacacacaauaauug

SEQ ID NO: 126614 - RNA, 23 nt, Human
ucgcaccacugcacuccagccug

SEQ ID NO: 126615 - RNA, 22 nt, Human
ucucuacuaaaaauacaaaaaa

SEQ ID NO: 126616 - RNA, 20 nt, Human
ugaaaacagacgauguggua

SEQ ID NO: 126617 - RNA, 23 nt, Human
ugaaggccgaggucgccaccgcu

SEQ ID NO: 126618 - RNA, 19 nt, Human
ugagcccaaaacaaaauua

SEQ ID NO: 126619 - RNA, 22 nt, Human
ugagcugagaucgcaccacugc

SEQ ID NO: 126620 - RNA, 23 nt, Human
ugaggcagagaauugcuugaacc

SEQ ID NO: 126621 - RNA, 23 nt, Human
ugaggcagagaauugcuugaacc

SEQ ID NO: 126622 - RNA, 24 nt, Human
ugaggcagagaauugcuugaaccc

SEQ ID NO: 126623 - RNA, 22 nt, Human
ugccccaggucuccuacuaaac

SEQ ID NO: 126624 - RNA, 24 nt, Human
ugccuguaaucccaacuacuuggg

SEQ ID NO: 126625 - RNA, 23 nt, Human
ugccuguaaucccagcacuuugg

SEQ ID NO: 126626 - RNA, 23 nt, Human
ugccuguaaucccagcacuuugg

SEQ ID NO: 126627 - RNA, 24 nt, Human
ugccuguaaucccagcacuuuggg

SEQ ID NO: 126628 - RNA, 24 nt, Human
uggcucaugccuguaaucccagca

SEQ ID NO: 126629 - RNA, 22 nt, Human
ugggaggccaaggcggguggac

SEQ ID NO: 126630 - RNA, 19 nt, Human
ugggaggcugaggcagaga

SEQ ID NO: 126631 - RNA, 21 nt, Human
ugggaggcugaggcagagaau

SEQ ID NO: 126632 - RNA, 24 nt, Human
ugguggcaggugccuguaauccca

SEQ ID NO: 126633 - RNA, 20 nt, Human
ugugguauuuuuucagccau

SEQ ID NO: 126634 - RNA, 18 nt, Human
uugcuugaacccgggagg

SEQ ID NO: 126635 - RNA, 24 nt, Human
uugcuugaacccgggaggcagagg

SEQ ID NO: 126636 - RNA, 19 nt, Human
uugggaggcugaggcagag

SEQ ID NO: 126637 - RNA, 22 nt, Human
uugggaggcugaggcagagaau

SEQ ID NO: 126638 - RNA, 23 nt, Human
aaauaaugcaguuucacuagaac

SEQ ID NO: 126639 - RNA, 19 nt, Human
aacaaauuauugugcuccu

SEQ ID NO: 126640 - RNA, 20 nt, Human
aagaaccccaccaucuaguc

SEQ ID NO: 126641 - RNA, 25 nt, Human
aagcaaaaagguaaauauaauuuaa

SEQ ID NO: 126642 - RNA, 19 nt, Human
aauaucaucuaguguccuc

SEQ ID NO: 126643 - RNA, 20 nt, Human
acacuccacauguuucauaa

SEQ ID NO: 126644 - RNA, 22 nt, Human
acauagagcugauaacucauac

SEQ ID NO: 126645 - RNA, 19 nt, Human
acuacaggugccugcuacc

SEQ ID NO: 126646 - RNA, 20 nt, Human
acuguguggugaggguguuc

SEQ ID NO: 126647 - RNA, 22 nt, Human
agacuacaggugccugcuacca

SEQ ID NO: 126648 - RNA, 18 nt, Human
agcuguccaggcuggucu

SEQ ID NO: 126649 - RNA, 22 nt, Human
aggaaaaaacaaucugccaauu

SEQ ID NO: 126650 - RNA, 18 nt, Human
aguagcuaagacuacagg

SEQ ID NO: 126651 - RNA, 20 nt, Human
aucaauugacauagagcuga

SEQ ID NO: 126652 - RNA, 19 nt, Human
auugugcuccuagaaacua

SEQ ID NO: 126653 - RNA, 23 nt, Human
auuuuggauauagaagaaguuga

SEQ ID NO: 126654 - RNA, 23 nt, Human
caaagcuuccaaauggcuauuuc

SEQ ID NO: 126655 - RNA, 23 nt, Human
caagucauuuagcgauaaaaagc

SEQ ID NO: 126656 - RNA, 20 nt, Human
cacuuaauacacuccacaug

SEQ ID NO: 126657 - RNA, 24 nt, Human
caggugccugcuaccacaccuggc

SEQ ID NO: 126658 - RNA, 20 nt, Human
ccugggcucaagccauccuc

SEQ ID NO: 126659 - RNA, 24 nt, Human
cgggaucucacuaagcuguccagg

SEQ ID NO: 126660 - RNA, 21 nt, Human
cuaccacaccuggcuguaaug

SEQ ID NO: 126661 - RNA, 23 nt, Human
cuccugggcucaagccauccucc

SEQ ID NO: 126662 - RNA, 19 nt, Human
cuggucuugaacuccuggg

SEQ ID NO: 126663 - RNA, 19 nt, Human
cuguccaggcuggucuuga

SEQ ID NO: 126664 - RNA, 23 nt, Human
cuucuuuggccucucgaguagcu

SEQ ID NO: 126665 - RNA, 23 nt, Human
gaaaaaacaaucugccaauuaga

SEQ ID NO: 126666 - RNA, 18 nt, Human
gaaaucaagauaaucaug

SEQ ID NO: 126667 - RNA, 19 nt, Human
gacuguguggugagggugu

SEQ ID NO: 126668 - RNA, 21 nt, Human
gagcugauaacucauaccuua

SEQ ID NO: 126669 - RNA, 21 nt, Human
gaggaagaaaaucucugauua

SEQ ID NO: 126670 - RNA, 23 nt, Human
gaggguguucugcaguccuguaa

SEQ ID NO: 126671 - RNA, 23 nt, Human
gcaacaauaaguuaaaacaugaa

SEQ ID NO: 126672 - RNA, 18 nt, Human
gccucucgaguagcuaag

SEQ ID NO: 126673 - RNA, 20 nt, Human
gcugcacuuaauacacucca

SEQ ID NO: 126674 - RNA, 18 nt, Human
ggcuggucuugaacuccu

SEQ ID NO: 126675 - RNA, 21 nt, Human
uaaaacauacaucauaaaagc

SEQ ID NO: 126676 - RNA, 24 nt, Human
uaaaagacauaacuaaucauaauc

SEQ ID NO: 126677 - RNA, 21 nt, Human
uaaaauaagcaaaaagguaaa

SEQ ID NO: 126678 - RNA, 24 nt, Human
uaagacuacaggugccugcuacca

SEQ ID NO: 126679 - RNA, 24 nt, Human
uaaucucugagaaaacucuucuca

SEQ ID NO: 126680 - RNA, 21 nt, Human
uacacaggcauuuaaacacuc

SEQ ID NO: 126681 - RNA, 22 nt, Human
uacaggugccugcuaccacacc

SEQ ID NO: 126682 - RNA, 24 nt, Human
uagaauacauaucuuuucuucgga

SEQ ID NO: 126683 - RNA, 22 nt, Human
uagucaacaaauaaugcaguuu

SEQ ID NO: 126684 - RNA, 19 nt, Human
ucaagccauccuccuucuu

SEQ ID NO: 126685 - RNA, 18 nt, Human
uccugggcucaagccauc

SEQ ID NO: 126686 - RNA, 23 nt, Human
ucuaguguccucuuauuccagcc

SEQ ID NO: 126687 - RNA, 22 nt, Human
ucucacuaagcuguccaggcug

SEQ ID NO: 126688 - RNA, 23 nt, Human
ucucacuaagcuguccaggcugg

SEQ ID NO: 126689 - RNA, 23 nt, Human
ucucgaguagcuaagacuacagg

SEQ ID NO: 126690 - RNA, 19 nt, Human
ucuugaacuccugggcuca

SEQ ID NO: 126691 - RNA, 23 nt, Human
ucuugaacuccugggcucaagcc

SEQ ID NO: 126692 - RNA, 20 nt, Human
ugacauagagcugauaacuc

SEQ ID NO: 126693 - RNA, 24 nt, Human
uguccaggcuggucuugaacuccu

SEQ ID NO: 126694 - RNA, 23 nt, Human
uuaaaagacauaacuaaucauaa

SEQ ID NO: 126695 - RNA, 18 nt, Human
uuaguguuuuugggaaau

SEQ ID NO: 126696 - RNA, 18 nt, Human
uuuaaaacauacaucaua

SEQ ID NO: 126697 - RNA, 23 nt, Human
aaaaacaacaacaacccuguuuu

SEQ ID NO: 126698 - RNA, 22 nt, Human
aaucacaacaaggagaaacuaa

SEQ ID NO: 126699 - RNA, 23 nt, Human
acaaaaguucguggacugccccc

SEQ ID NO: 126700 - RNA, 24 nt, Human
acaaggagaaacuaaaaaaacaac

SEQ ID NO: 126701 - RNA, 22 nt, Human
acuaaaaaaacaacaacaaccc

SEQ ID NO: 126702 - RNA, 23 nt, Human
acuuugcagaaauuaaaaagaaa

SEQ ID NO: 126703 - RNA, 23 nt, Human
agaaauuagcgcuuuuuaaacaa

SEQ ID NO: 126704 - RNA, 18 nt, Human
agacaggaaugucaccgu

SEQ ID NO: 126705 - RNA, 27 nt, Human
aggagaaacuaaaaaaacaacaacaac

SEQ ID NO: 126706 - RNA, 21 nt, Human
caauuuccuucuucugugaga

SEQ ID NO: 126707 - RNA, 24 nt, Human
cacaacaaggagaaacuaaaaaaa

SEQ ID NO: 126708 - RNA, 21 nt, Human
cagcccggggucugccugcga

SEQ ID NO: 126709 - RNA, 21 nt, Human
caggaaugucaccguggucuc

SEQ ID NO: 126710 - RNA, 22 nt, Human
ccgcggugggcagcccgggguc

SEQ ID NO: 126711 - RNA, 24 nt, Human
ccuacccuuaaguugauuuugaug

SEQ ID NO: 126712 - RNA, 23 nt, Human
ccugcccgcagcgcagacaggaa

SEQ ID NO: 126713 - RNA, 24 nt, Human
ccugcccgcagcgcagacaggaau

SEQ ID NO: 126714 - RNA, 22 nt, Human
cggggucugccugcgaacagcg

SEQ ID NO: 126715 - RNA, 22 nt, Human
cggucggcgacucugcagccug

SEQ ID NO: 126716 - RNA, 24 nt, Human
gagugauuuaaauuccacagugcc

SEQ ID NO: 126717 - RNA, 18 nt, Human
gauuuauuuucuuuccuu

SEQ ID NO: 126718 - RNA, 19 nt, Human
gcgcuaggccgcggugggc

SEQ ID NO: 126719 - RNA, 19 nt, Human
gguauuauuaauauaugcu

SEQ ID NO: 126720 - RNA, 20 nt, Human
gucggcgacucugcagccug

SEQ ID NO: 126721 - RNA, 24 nt, Human
uaaaaaaacaacaacaacccuguu

SEQ ID NO: 126722 - RNA, 25 nt, Human
uaacucauggaaauucaauuuccuu

SEQ ID NO: 126723 - RNA, 20 nt, Human
ucaauuuccuucuucuguga

SEQ ID NO: 126724 - RNA, 20 nt, Human
ucaccguggucucccaggcu

SEQ ID NO: 126725 - RNA, 24 nt, Human
ucucucggcggcgcccccuagucc

SEQ ID NO: 126726 - RNA, 25 nt, Human
ucugcagccugcggcggcuucucuc

SEQ ID NO: 126727 - RNA, 22 nt, Human
ucugugagaauuuggaauuugu

SEQ ID NO: 126728 - RNA, 23 nt, Human
uucaauuuccuucuucugugaga

SEQ ID NO: 126729 - RNA, 24 nt, Human
aaaaaaaagguaucauuucucuag

SEQ ID NO: 126730 - RNA, 21 nt, Human
aaaacaaacaaacaaaaccaa

SEQ ID NO: 126731 - RNA, 23 nt, Human
aaaacuauuacguuaaaauuuuu

SEQ ID NO: 126732 - RNA, 23 nt, Human
aaacaaacaaaaccaaaaaaccc

SEQ ID NO: 126733 - RNA, 24 nt, Human
aaacaaacaaaaccaaaaaacccc

SEQ ID NO: 126734 - RNA, 22 nt, Human
aaacaaacaaacaaaaccaaaa

SEQ ID NO: 126735 - RNA, 21 nt, Human
aaacaucagguaugugaaggc

SEQ ID NO: 126736 - RNA, 24 nt, Human
aacaaaaccaaaaaaccccacuac

SEQ ID NO: 126737 - RNA, 23 nt, Human
aacaaacaaaaccaaaaaacccc

SEQ ID NO: 126738 - RNA, 24 nt, Human
aacagagugagacucugucucaaa

SEQ ID NO: 126739 - RNA, 24 nt, Human
aaccaaguugcccacagauacucc

SEQ ID NO: 126740 - RNA, 21 nt, Human
aaccgugacaaaauuuaaaca

SEQ ID NO: 126741 - RNA, 18 nt, Human
aagagaaacgcagagauc

SEQ ID NO: 126742 - RNA, 24 nt, Human
aaggcaggcaucaucucccaaacc

SEQ ID NO: 126743 - RNA, 22 nt, Human
aaggcuuccaggaaggaguagc

SEQ ID NO: 126744 - RNA, 18 nt, Human
aauuacuugaacccggga

SEQ ID NO: 126745 - RNA, 24 nt, Human
aauugcuuaaacccaggaggcaga

SEQ ID NO: 126746 - RNA, 24 nt, Human
acaaacaaaaccaaaaaaccccac

SEQ ID NO: 126747 - RNA, 21 nt, Human
acacgcacacuguucccuggg

SEQ ID NO: 126748 - RNA, 23 nt, Human
acagagcaagacucugucucaaa

SEQ ID NO: 126749 - RNA, 24 nt, Human
acagagcaagacucugucucaaaa

SEQ ID NO: 126750 - RNA, 21 nt, Human
acagagugagacucugucuca

SEQ ID NO: 126751 - RNA, 24 nt, Human
acagagugagacucugucucaaaa

SEQ ID NO: 126752 - RNA, 22 nt, Human
accaagacacagaaagcaacga

SEQ ID NO: 126753 - RNA, 24 nt, Human
acgccgucucuacuaaaaauacag

SEQ ID NO: 126754 - RNA, 19 nt, Human
acuaaaaauacagaaacua

SEQ ID NO: 126755 - RNA, 23 nt, Human
acuaaaaauacagaaacuagccg

SEQ ID NO: 126756 - RNA, 24 nt, Human
acucugucucaaaacaaacaaacc

SEQ ID NO: 126757 - RNA, 20 nt, Human
acugauaggacgggggccug

SEQ ID NO: 126758 - RNA, 18 nt, Human
acugcacugcagccuggg

SEQ ID NO: 126759 - RNA, 24 nt, Human
acugcacugcagccugggcaacag

SEQ ID NO: 126760 - RNA, 24 nt, Human
acugcacugcagccugggcaacag

SEQ ID NO: 126761 - RNA, 24 nt, Human
acugcagccugggcaacagaguga

SEQ ID NO: 126762 - RNA, 20 nt, Human
acuugaacccgggaggcaga

SEQ ID NO: 126763 - RNA, 20 nt, Human
acuuggcugacuggucacgu

SEQ ID NO: 126764 - RNA, 18 nt, Human
agaaaccaagacacagaa

SEQ ID NO: 126765 - RNA, 22 nt, Human
agaagaaagcucugaguucagc

SEQ ID NO: 126766 - RNA, 18 nt, Human
agacaggaugaaaaaggg

SEQ ID NO: 126767 - RNA, 18 nt, Human
agagcaagacucugucuc

SEQ ID NO: 126768 - RNA, 19 nt, Human
agagcuuugggaggccuug

SEQ ID NO: 126769 - RNA, 25 nt, Human
agagggagggguggccagugggguc

SEQ ID NO: 126770 - RNA, 24 nt, Human
agagguagggggugccacaggacc

SEQ ID NO: 126771 - RNA, 18 nt, Human
agagguugcagugagcag

SEQ ID NO: 126772 - RNA, 23 nt, Human
agagguugcagugagcagagauc

SEQ ID NO: 126773 - RNA, 24 nt, Human
agagguugcagugagcagagaucg

SEQ ID NO: 126774 - RNA, 20 nt, Human
agagguuguagugagccaag

SEQ ID NO: 126775 - RNA, 23 nt, Human
agagguuguagugagccaagauc

SEQ ID NO: 126776 - RNA, 24 nt, Human
agagguuguagugagccaagauca

SEQ ID NO: 126777 - RNA, 18 nt, Human
agccgggugugguggugc

SEQ ID NO: 126778 - RNA, 18 nt, Human
agccgggugugguggugc

SEQ ID NO: 126779 - RNA, 24 nt, Human
agccucggcgacagagcaagacuc

SEQ ID NO: 126780 - RNA, 24 nt, Human
agccugggcaacagagugagacuc

SEQ ID NO: 126781 - RNA, 21 nt, Human
agcuuugggaggccuuggaaa

SEQ ID NO: 126782 - RNA, 26 nt, Human
aggaggagggagagugucucugggau

SEQ ID NO: 126783 - RNA, 22 nt, Human
aggagggaucuugaaugauucc

SEQ ID NO: 126784 - RNA, 20 nt, Human
aggcaagggggaccaacugu

SEQ ID NO: 126785 - RNA, 19 nt, Human
aggcagaaaccaagacaca

SEQ ID NO: 126786 - RNA, 23 nt, Human
aggcagaaaccaagacacagaaa

SEQ ID NO: 126787 - RNA, 18 nt, Human
aggcagaacagagguagg

SEQ ID NO: 126788 - RNA, 20 nt, Human
aggcagagguugcagugagc

SEQ ID NO: 126789 - RNA, 24 nt, Human
aggcagagguugcagugagcagag

SEQ ID NO: 126790 - RNA, 24 nt, Human
aggcagagguuguagugagccaag

SEQ ID NO: 126791 - RNA, 18 nt, Human
aggcaggagaauuacuug

SEQ ID NO: 126792 - RNA, 24 nt, Human
aggcaggagaauuacuugaacccg

SEQ ID NO: 126793 - RNA, 23 nt, Human
aggcaggagaauugcuuaaaccc

SEQ ID NO: 126794 - RNA, 24 nt, Human
aggcaggagaauugcuuaaaccca

SEQ ID NO: 126795 - RNA, 18 nt, Human
aggcagggguucagaugc

SEQ ID NO: 126796 - RNA, 20 nt, Human
aggcugaggcaggagaauug

SEQ ID NO: 126797 - RNA, 21 nt, Human
aggcugaggcaggagaauugc

SEQ ID NO: 126798 - RNA, 23 nt, Human
aggguugacagcacccugaggug

SEQ ID NO: 126799 - RNA, 23 nt, Human
aguggcucaugccuguaauccca

SEQ ID NO: 126800 - RNA, 24 nt, Human
aguggcucaugccuguaaucccag

SEQ ID NO: 126801 - RNA, 21 nt, Human
agugguucagggaagaggcag

SEQ ID NO: 126802 - RNA, 24 nt, Human
aucacaccacugcacugcagccug

SEQ ID NO: 126803 - RNA, 19 nt, Human
augccuguaaucccagaac

SEQ ID NO: 126804 - RNA, 18 nt, Human
augcuaugauacaaaugg

SEQ ID NO: 126805 - RNA, 23 nt, Human
caaaaaaccccacuacucaugua

SEQ ID NO: 126806 - RNA, 19 nt, Human
caaaacaaacaaacaaaac

SEQ ID NO: 126807 - RNA, 25 nt, Human
caaaaccaaaaaaccccacuacuca

SEQ ID NO: 126808 - RNA, 19 nt, Human
caagacacagaaagcaacg

SEQ ID NO: 126809 - RNA, 24 nt, Human
caaucagcagugcuuuuggcaaaa

SEQ ID NO: 126810 - RNA, 20 nt, Human
cacccugaggugggggagac

SEQ ID NO: 126811 - RNA, 18 nt, Human
caccuauaaucccagcua

SEQ ID NO: 126812 - RNA, 19 nt, Human
caccuauaaucccagcuac

SEQ ID NO: 126813 - RNA, 20 nt, Human
cacugcacugcagccugggc

SEQ ID NO: 126814 - RNA, 23 nt, Human
cacugcacugcagccugggcaac

SEQ ID NO: 126815 - RNA, 24 nt, Human
cacugcacugcagccugggcaaca

SEQ ID NO: 126816 - RNA, 23 nt, Human
cacugcagccucggcgacagagc

SEQ ID NO: 126817 - RNA, 23 nt, Human
cacugcagccugggcaacagagu

SEQ ID NO: 126818 - RNA, 24 nt, Human
cacugggaugggcaggaacagcaa

SEQ ID NO: 126819 - RNA, 24 nt, Human
cacuguucuagaaccugaauucca

SEQ ID NO: 126820 - RNA, 18 nt, Human
cagaacuuugggaggccg

SEQ ID NO: 126821 - RNA, 20 nt, Human
cagaacuuugggaggccgag

SEQ ID NO: 126822 - RNA, 21 nt, Human
cagagguagggggugccacag

SEQ ID NO: 126823 - RNA, 18 nt, Human
cagaugccaaguucugca

SEQ ID NO: 126824 - RNA, 22 nt, Human
cagcacccugaggugggggaga

SEQ ID NO: 126825 - RNA, 24 nt, Human
cagcaggcagaaaccaagacacag

SEQ ID NO: 126826 - RNA, 20 nt, Human
caugccuguaaucccagaac

SEQ ID NO: 126827 - RNA, 24 nt, Human
caugccuguaaucccagaacuuug

SEQ ID NO: 126828 - RNA, 19 nt, Human
ccaaaaaaccccacuacuc

SEQ ID NO: 126829 - RNA, 18 nt, Human
ccaaaccaaguugcccac

SEQ ID NO: 126830 - RNA, 20 nt, Human
ccacugcacugcagccuggg

SEQ ID NO: 126831 - RNA, 21 nt, Human
ccacugcacugcagccugggc

SEQ ID NO: 126832 - RNA, 22 nt, Human
ccacugcacugcagccugggca

SEQ ID NO: 126833 - RNA, 24 nt, Human
ccacugcacugcagccugggcaac

SEQ ID NO: 126834 - RNA, 25 nt, Human
ccacugcacugcagccugggcaaca

SEQ ID NO: 126835 - RNA, 22 nt, Human
ccaggaggcagagguugcagug

SEQ ID NO: 126836 - RNA, 25 nt, Human
ccagucucuguacucaggacuucuc

SEQ ID NO: 126837 - RNA, 19 nt, Human
cccacagauacucccccuu

SEQ ID NO: 126838 - RNA, 24 nt, Human
cccagcuacucagaagccugaggc

SEQ ID NO: 126839 - RNA, 18 nt, Human
cccugggugccagagagc

SEQ ID NO: 126840 - RNA, 21 nt, Human
ccuauaaucccagcuacucag

SEQ ID NO: 126841 - RNA, 22 nt, Human
ccucggcgacagagcaagacuc

SEQ ID NO: 126842 - RNA, 24 nt, Human
ccugacugggcacaguggcucaug

SEQ ID NO: 126843 - RNA, 22 nt, Human
ccugggcaacagagugagacuc

SEQ ID NO: 126844 - RNA, 22 nt, Human
ccuguaaucccagcuacugggg

SEQ ID NO: 126845 - RNA, 20 nt, Human
cgacacauaacagauaugcu

SEQ ID NO: 126846 - RNA, 19 nt, Human
cgcaccuauaaucccagcu

SEQ ID NO: 126847 - RNA, 21 nt, Human
cggccaaaauggugaaacgcc

SEQ ID NO: 126848 - RNA, 24 nt, Human
cgggaggcagagguuguagugagc

SEQ ID NO: 126849 - RNA, 24 nt, Human
cucaugccuguaaucccagaacuu

SEQ ID NO: 126850 - RNA, 18 nt, Human
cucugggagaugggguga

SEQ ID NO: 126851 - RNA, 19 nt, Human
cucugucucaaaaaaaaaa

SEQ ID NO: 126852 - RNA, 19 nt, Human
cugagcaccuggaccuugc

SEQ ID NO: 126853 - RNA, 20 nt, Human
cugagcaccuggaccuugcc

SEQ ID NO: 126854 - RNA, 20 nt, Human
gaaaugccaauauuuuggau

SEQ ID NO: 126855 - RNA, 22 nt, Human
gaagcuuccagcuauggucaca

SEQ ID NO: 126856 - RNA, 19 nt, Human
gaauaaaauaccaugcccc

SEQ ID NO: 126857 - RNA, 21 nt, Human
gaauuggaggucagaaaugaa

SEQ ID NO: 126858 - RNA, 19 nt, Human
gacaaaauuuaaacaucag

SEQ ID NO: 126859 - RNA, 23 nt, Human
gagaauuacuugaacccgggagg

SEQ ID NO: 126860 - RNA, 19 nt, Human
gaugacuaggcggggagag

SEQ ID NO: 126861 - RNA, 24 nt, Human
gcaacagagugagacucugucuca

SEQ ID NO: 126862 - RNA, 22 nt, Human
gcacugggaugggcaggaacag

SEQ ID NO: 126863 - RNA, 18 nt, Human
gcagagagagcagggaaa

SEQ ID NO: 126864 - RNA, 21 nt, Human
gcagcaaaauguuccccugga

SEQ ID NO: 126865 - RNA, 24 nt, Human
gcagccaccugccacacacggcaa

SEQ ID NO: 126866 - RNA, 22 nt, Human
gcaggagaauugcuuaaaccca

SEQ ID NO: 126867 - RNA, 23 nt, Human
gcaggcagaaaccaagacacaga

SEQ ID NO: 126868 - RNA, 24 nt, Human
gccaaaauggugaaacgccgucuc

SEQ ID NO: 126869 - RNA, 20 nt, Human
gccaagaucacaccacugca

SEQ ID NO: 126870 - RNA, 24 nt, Human
gccauguuacucgugucugggggg

SEQ ID NO: 126871 - RNA, 22 nt, Human
gcucagagagaagcuuccagcu

SEQ ID NO: 126872 - RNA, 19 nt, Human
gcugaaaaaacuaaagcaa

SEQ ID NO: 126873 - RNA, 19 nt, Human
gcugcacugcagccucggc

SEQ ID NO: 126874 - RNA, 22 nt, Human
ggaggcagagguugcagugagc

SEQ ID NO: 126875 - RNA, 22 nt, Human
ggaugggaugcgugaaauccag

SEQ ID NO: 126876 - RNA, 23 nt, Human
ggcaaggugguaggugccuguaa

SEQ ID NO: 126877 - RNA, 23 nt, Human
gggaauuggaggucagaaaugaa

SEQ ID NO: 126878 - RNA, 22 nt, Human
gggagagagcgaggacaggcag

SEQ ID NO: 126879 - RNA, 21 nt, Human
gggaggcugaggcaggagaau

SEQ ID NO: 126880 - RNA, 18 nt, Human
gggaugggcaggaacagc

SEQ ID NO: 126881 - RNA, 18 nt, Human
gggcacaguggcucaugc

SEQ ID NO: 126882 - RNA, 24 nt, Human
gggcacaguggcucaugccuguaa

SEQ ID NO: 126883 - RNA, 18 nt, Human
ggggggaaccagucucug

SEQ ID NO: 126884 - RNA, 21 nt, Human
gguaggugccuguaaucccag

SEQ ID NO: 126885 - RNA, 23 nt, Human
ggugccuguaaucccagcuacug

SEQ ID NO: 126886 - RNA, 23 nt, Human
ggugguaggugccuguaauccca

SEQ ID NO: 126887 - RNA, 24 nt, Human
ggugguaggugccuguaaucccag

SEQ ID NO: 126888 - RNA, 20 nt, Human
gucucaaaaaaaaaaaaaag

SEQ ID NO: 126889 - RNA, 22 nt, Human
gucugagcaccuggaccuugcc

SEQ ID NO: 126890 - RNA, 21 nt, Human
uaaaaauacagaaacuagccg

SEQ ID NO: 126891 - RNA, 18 nt, Human
uaaaauaccaugccccag

SEQ ID NO: 126892 - RNA, 22 nt, Human
uaaaauaccaugccccaguagg

SEQ ID NO: 126893 - RNA, 23 nt, Human
uaaaauaccaugccccaguaggc

SEQ ID NO: 126894 - RNA, 18 nt, Human
uaaaggucugagcaccug

SEQ ID NO: 126895 - RNA, 25 nt, Human
uaagcucucgacacgcacacuguuc

SEQ ID NO: 126896 - RNA, 21 nt, Human
uagcuggcacugggaugggca

SEQ ID NO: 126897 - RNA, 21 nt, Human
uaugauacaaauggugccgca

SEQ ID NO: 126898 - RNA, 20 nt, Human
ucaaaacaaacaaacaaaac

SEQ ID NO: 126899 - RNA, 23 nt, Human
ucacaccacugcacugcagccug

SEQ ID NO: 126900 - RNA, 24 nt, Human
ucagcaaugaucauggaaaccaag

SEQ ID NO: 126901 - RNA, 22 nt, Human
ucaugccuguaaucccagaacu

SEQ ID NO: 126902 - RNA, 25 nt, Human
ucaugcuuugcucugaccuuuucag

SEQ ID NO: 126903 - RNA, 18 nt, Human
ucauggaaaccaagggag

SEQ ID NO: 126904 - RNA, 21 nt, Human
ucccugggugccagagagcuu

SEQ ID NO: 126905 - RNA, 20 nt, Human
uccucuggacuuccugugag

SEQ ID NO: 126906 - RNA, 23 nt, Human
ucucuacuaaaaauacagaaacu

SEQ ID NO: 126907 - RNA, 19 nt, Human
ucucugggagaugggguga

SEQ ID NO: 126908 - RNA, 18 nt, Human
ucuggcagcaguguagaa

SEQ ID NO: 126909 - RNA, 20 nt, Human
ucuggccagguuugcagcug

SEQ ID NO: 126910 - RNA, 21 nt, Human
ucuggggauagaagaaagcuc

SEQ ID NO: 126911 - RNA, 22 nt, Human
ucugucucaaaaaaaaaaaaaa

SEQ ID NO: 126912 - RNA, 23 nt, Human
ucugucucaaaaaaaaaaaaaag

SEQ ID NO: 126913 - RNA, 18 nt, Human
ugaaaaaacuaaagcaag

SEQ ID NO: 126914 - RNA, 22 nt, Human
ugaaaugccaauauuuuggaua

SEQ ID NO: 126915 - RNA, 19 nt, Human
ugaaggugaaagaggagga

SEQ ID NO: 126916 - RNA, 21 nt, Human
ugacaaaauguaaacgucaag

SEQ ID NO: 126917 - RNA, 21 nt, Human
ugacaaaauuuaaacaucagg

SEQ ID NO: 126918 - RNA, 19 nt, Human
ugacagcacccugaggugg

SEQ ID NO: 126919 - RNA, 24 nt, Human
ugacugggcacaguggcucaugcc

SEQ ID NO: 126920 - RNA, 22 nt, Human
ugagcagagagagcagggaaau

SEQ ID NO: 126921 - RNA, 20 nt, Human
ugaggcaggagaauuacuug

SEQ ID NO: 126922 - RNA, 24 nt, Human
ugaggcaggagaauuacuugaacc

SEQ ID NO: 126923 - RNA, 25 nt, Human
ugaggcaggagaauuacuugaaccc

SEQ ID NO: 126924 - RNA, 24 nt, Human
ugaggcaggagaauugcuuaaacc

SEQ ID NO: 126925 - RNA, 25 nt, Human
ugaggcaggagaauugcuuaaaccc

SEQ ID NO: 126926 - RNA, 18 nt, Human
ugaggugggggagacaug

SEQ ID NO: 126927 - RNA, 21 nt, Human
ugaggugggggagacaugggc

SEQ ID NO: 126928 - RNA, 18 nt, Human
ugccacaggaccagaggg

SEQ ID NO: 126929 - RNA, 21 nt, Human
ugccauguuacucgugucugg

SEQ ID NO: 126930 - RNA, 23 nt, Human
ugccuguaaucccagaacuuugg

SEQ ID NO: 126931 - RNA, 24 nt, Human
ugccuguaaucccagaacuuuggg

SEQ ID NO: 126932 - RNA, 22 nt, Human
ugccuguaaucccagcuacugg

SEQ ID NO: 126933 - RNA, 23 nt, Human
ugccuguaaucccagcuacuggg

SEQ ID NO: 126934 - RNA, 24 nt, Human
ugcucugaccuuuucagacagcuc

SEQ ID NO: 126935 - RNA, 22 nt, Human
uggaaaguccaggauguaaagg

SEQ ID NO: 126936 - RNA, 22 nt, Human
uggaagcagcaaaauguucccc

SEQ ID NO: 126937 - RNA, 18 nt, Human
uggcacugggaugggcag

SEQ ID NO: 126938 - RNA, 20 nt, Human
uggccaagcugagucagagg

SEQ ID NO: 126939 - RNA, 18 nt, Human
uggccagguuugcagcug

SEQ ID NO: 126940 - RNA, 20 nt, Human
uggccagguuugcagcuggc

SEQ ID NO: 126941 - RNA, 21 nt, Human
uggcucaugccuguaauccca

SEQ ID NO: 126942 - RNA, 22 nt, Human
uggcucaugccuguaaucccag

SEQ ID NO: 126943 - RNA, 21 nt, Human
ugggaagaacugcaaaaguac

SEQ ID NO: 126944 - RNA, 21 nt, Human
ugggaggccgaggaggccggc

SEQ ID NO: 126945 - RNA, 21 nt, Human
ugggauaaguguugcugaaaa

SEQ ID NO: 126946 - RNA, 21 nt, Human
ugggcaacagagugagacucu

SEQ ID NO: 126947 - RNA, 21 nt, Human
ugggugccagagagcuuuggg

SEQ ID NO: 126948 - RNA, 22 nt, Human
uggugcgcaccuauaaucccag

SEQ ID NO: 126949 - RNA, 21 nt, Human
ugucucaaaacaaacaaacaa

SEQ ID NO: 126950 - RNA, 26 nt, Human
uguucuagaaccugaauuccauagga

SEQ ID NO: 126951 - RNA, 20 nt, Human
uguugcugaaaaaacuaaag

SEQ ID NO: 126952 - RNA, 24 nt, Human
uuacuugaacccgggaggcagagg

SEQ ID NO: 126953 - RNA, 24 nt, Human
uuagcugggcaaggugguaggugc

SEQ ID NO: 126954 - RNA, 20 nt, Human
uucagcaaugaucauggaaa

SEQ ID NO: 126955 - RNA, 20 nt, Human
uucccugggugccagagagc

SEQ ID NO: 126956 - RNA, 19 nt, Human
uugcagugagcagagaucg

SEQ ID NO: 126957 - RNA, 22 nt, Human
uugcagugagcagagaucgcac

SEQ ID NO: 126958 - RNA, 24 nt, Human
uuggaagcagcaaaauguuccccu

SEQ ID NO: 126959 - RNA, 20 nt, Human
uuguagugagccaagaucac

SEQ ID NO: 126960 - RNA, 22 nt, Human
uuuaauagugaucacguugaaa

SEQ ID NO: 126961 - RNA, 20 nt, Human
uuucuggccagaggauggga

SEQ ID NO: 126962 - RNA, 24 nt, Human
aaaaggaaaaaagccuagagaaaa

SEQ ID NO: 126963 - RNA, 22 nt, Human
aaacagaaaacagaaagucauc

SEQ ID NO: 126964 - RNA, 21 nt, Human
aaaggaaaaaagccuagagaa

SEQ ID NO: 126965 - RNA, 22 nt, Human
aaccccaaaaggaaaaaagccu

SEQ ID NO: 126966 - RNA, 21 nt, Human
aaugagcaaggcuuccuuucu

SEQ ID NO: 126967 - RNA, 23 nt, Human
acagacacucauggagugucccc

SEQ ID NO: 126968 - RNA, 22 nt, Human
accccaaaaggaaaaaagccua

SEQ ID NO: 126969 - RNA, 22 nt, Human
acuccacaagcuccaaaaugag

SEQ ID NO: 126970 - RNA, 21 nt, Human
agacacucauggagugucccc

SEQ ID NO: 126971 - RNA, 21 nt, Human
caacuccacaagcuccaaaau

SEQ ID NO: 126972 - RNA, 20 nt, Human
caaugagucccaucacccac

SEQ ID NO: 126973 - RNA, 26 nt, Human
caaugagucccaucacccacaccacc

SEQ ID NO: 126974 - RNA, 24 nt, Human
cagauagcugccucucacagacac

SEQ ID NO: 126975 - RNA, 24 nt, Human
ccaaaaggaaaaaagccuagagaa

SEQ ID NO: 126976 - RNA, 25 nt, Human
ccaaaaggaaaaaagccuagagaaa

SEQ ID NO: 126977 - RNA, 21 nt, Human
cccccgcccauuuucuccaug

SEQ ID NO: 126978 - RNA, 18 nt, Human
ccccucccuccccaaaag

SEQ ID NO: 126979 - RNA, 19 nt, Human
ccggggcgagcgcggcgac

SEQ ID NO: 126980 - RNA, 25 nt, Human
ccuagagaaaauaugcuuagcaaau

SEQ ID NO: 126981 - RNA, 23 nt, Human
ccucucacagacacucauggagu

SEQ ID NO: 126982 - RNA, 22 nt, Human
cuacaaugagucccaucacccc

SEQ ID NO: 126983 - RNA, 21 nt, Human
gagcgcggcgacgaagacgcc

SEQ ID NO: 126984 - RNA, 18 nt, Human
gagucccaucacccacac

SEQ ID NO: 126985 - RNA, 22 nt, Human
gagucccaucacccacaccacc

SEQ ID NO: 126986 - RNA, 19 nt, Human
gcaaaguauucuccaaucg

SEQ ID NO: 126987 - RNA, 18 nt, Human
gcgcaggaguagcccggg

SEQ ID NO: 126988 - RNA, 20 nt, Human
ggcgacgaagacgccaacaa

SEQ ID NO: 126989 - RNA, 18 nt, Human
gucccaucacccacacca

SEQ ID NO: 126990 - RNA, 20 nt, Human
uaauuuacaaacagaaaaca

SEQ ID NO: 126991 - RNA, 24 nt, Human
uacaaacagaaaacagaaagucaa

SEQ ID NO: 126992 - RNA, 24 nt, Human
uacauuuccccucccuccccaaaa

SEQ ID NO: 126993 - RNA, 19 nt, Human
uaccuuaaugcuccucaag

SEQ ID NO: 126994 - RNA, 21 nt, Human
uacgacuguagaaccccaaaa

SEQ ID NO: 126995 - RNA, 18 nt, Human
uagagugcagauagcugc

SEQ ID NO: 126996 - RNA, 24 nt, Human
uagagugcagauagcugccucuca

SEQ ID NO: 126997 - RNA, 20 nt, Human
uagcccggggcgagcgcggc

SEQ ID NO: 126998 - RNA, 19 nt, Human
uauuacauuuccccucccu

SEQ ID NO: 126999 - RNA, 23 nt, Human
ucacccacaccacccccgcccau

SEQ ID NO: 127000 - RNA, 22 nt, Human
ucacugaauauaaaauuaaaau

SEQ ID NO: 127001 - RNA, 20 nt, Human
uccaaaaugaagcaguaaca

SEQ ID NO: 127002 - RNA, 19 nt, Human
uccaugauucugauucuga

SEQ ID NO: 127003 - RNA, 21 nt, Human
ucuuuuacgacuguagaaccc

SEQ ID NO: 127004 - RNA, 20 nt, Human
ugauaaauaaaacauucagu

SEQ ID NO: 127005 - RNA, 22 nt, Human
ugauucugacacucuucucccu

SEQ ID NO: 127006 - RNA, 21 nt, Human
uggaaugcccucccauuuacu

SEQ ID NO: 127007 - RNA, 23 nt, Human
uggcaguuucgaaauaccuuaau

SEQ ID NO: 127008 - RNA, 25 nt, Human
uguagaaccccaaaaggaaaaaagc

SEQ ID NO: 127009 - RNA, 22 nt, Human
ugucuaggugugcccuggaaac

SEQ ID NO: 127010 - RNA, 22 nt, Human
aaaagagugacucaguguucca

SEQ ID NO: 127011 - RNA, 18 nt, Human
aaaauauacauucucuag

SEQ ID NO: 127012 - RNA, 19 nt, Human
accaaaguacaaaacagca

SEQ ID NO: 127013 - RNA, 23 nt, Human
accaaaguacaaaacagcaacug

SEQ ID NO: 127014 - RNA, 22 nt, Human
aggugguaaaaaucacuucacu

SEQ ID NO: 127015 - RNA, 20 nt, Human
aguuauuuucugcagauucc

SEQ ID NO: 127016 - RNA, 22 nt, Human
auggaaaaaaauauaaaaaaga

SEQ ID NO: 127017 - RNA, 21 nt, Human
auuuauuugugcuaaaugaau

SEQ ID NO: 127018 - RNA, 18 nt, Human
caaaacagcaacugcuga

SEQ ID NO: 127019 - RNA, 23 nt, Human
caaaacagcaacugcugaaaaac

SEQ ID NO: 127020 - RNA, 27 nt, Human
caaaacagcaacugcugaaaaacaaaa

SEQ ID NO: 127021 - RNA, 18 nt, Human
caaacacaggugguaaaa

SEQ ID NO: 127022 - RNA, 24 nt, Human
caacagauacacauucuugucaua

SEQ ID NO: 127023 - RNA, 22 nt, Human
cagcaacugcugaaaaacaaaa

SEQ ID NO: 127024 - RNA, 21 nt, Human
cagcagaaaucaaauaacaca

SEQ ID NO: 127025 - RNA, 23 nt, Human
cagcagaaaucaaauaacacauu

SEQ ID NO: 127026 - RNA, 23 nt, Human
cauucgaaggcaaaaaucggagg

SEQ ID NO: 127027 - RNA, 23 nt, Human
cgcauuguuuuuguuacaaucac

SEQ ID NO: 127028 - RNA, 20 nt, Human
ggaaaaaaauauaaaaaaga

SEQ ID NO: 127029 - RNA, 19 nt, Human
gggcugggaaaggaggagg

SEQ ID NO: 127030 - RNA, 21 nt, Human
guuacaaucacacugccuucu

SEQ ID NO: 127031 - RNA, 19 nt, Human
uaaaaaagagaaucacauc

SEQ ID NO: 127032 - RNA, 27 nt, Human
uaaaaaagagaaucacaucuuaauaua

SEQ ID NO: 127033 - RNA, 20 nt, Human
uaaaaaucacuucacuacca

SEQ ID NO: 127034 - RNA, 21 nt, Human
uaaauaucuacaaucgucaug

SEQ ID NO: 127035 - RNA, 20 nt, Human
uaacacaaugaaaauaaccu

SEQ ID NO: 127036 - RNA, 24 nt, Human
uaacauuaaggauaaaaaagagaa

SEQ ID NO: 127037 - RNA, 21 nt, Human
uaaccuguaaaaaauguaucu

SEQ ID NO: 127038 - RNA, 25 nt, Human
uaaguagauuaacauuaaggauaaa

SEQ ID NO: 127039 - RNA, 22 nt, Human
uacaaaacagcaacugcugaaa

SEQ ID NO: 127040 - RNA, 26 nt, Human
uacaaaacagcaacugcugaaaaaca

SEQ ID NO: 127041 - RNA, 21 nt, Human
uaccaaaguacaaaacagcaa

SEQ ID NO: 127042 - RNA, 22 nt, Human
uaccaaaguacaaaacagcaac

SEQ ID NO: 127043 - RNA, 18 nt, Human
ucaucuaacuuucuguuc

SEQ ID NO: 127044 - RNA, 23 nt, Human
ucuacaaucgucaugguuccuua

SEQ ID NO: 127045 - RNA, 18 nt, Human
ugaaaugaacagccauca

SEQ ID NO: 127046 - RNA, 21 nt, Human
uggaaaaaaauauaaaaaaga

SEQ ID NO: 127047 - RNA, 23 nt, Human
uguugcacguauuaagaaaagag

SEQ ID NO: 127048 - RNA, 21 nt, Human
uucuguucuacacugaaagcc

SEQ ID NO: 127049 - RNA, 23 nt, Human
uugcaccuuuaaaauauuuguuc

SEQ ID NO: 127050 - RNA, 25 nt, Human
uugcacguauuaagaaaagagugac

SEQ ID NO: 127051 - RNA, 20 nt, Human
uuucuguucuacacugaaag

SEQ ID NO: 127052 - RNA, 24 nt, Human
uuuucaguucucugauuauauccc

SEQ ID NO: 127053 - RNA, 24 nt, Human
aaacagcaccccucccccagccca

SEQ ID NO: 127054 - RNA, 20 nt, Human
aaacuagaaaauuuagauau

SEQ ID NO: 127055 - RNA, 20 nt, Human
aacagcaccccucccccagc

SEQ ID NO: 127056 - RNA, 18 nt, Human
aacugggaaguccccaca

SEQ ID NO: 127057 - RNA, 22 nt, Human
aacugggaaguccccacacaua

SEQ ID NO: 127058 - RNA, 20 nt, Human
aagcaaguacaaaucauagc

SEQ ID NO: 127059 - RNA, 23 nt, Human
aaguggcagcaugacccccacag

SEQ ID NO: 127060 - RNA, 19 nt, Human
aaucaugcauguuugcagu

SEQ ID NO: 127061 - RNA, 20 nt, Human
accgcagagaggaaucuaaa

SEQ ID NO: 127062 - RNA, 24 nt, Human
agagaaacagucaugggacucaag

SEQ ID NO: 127063 - RNA, 19 nt, Human
agcaccccucccccagccc

SEQ ID NO: 127064 - RNA, 22 nt, Human
aggaagaaagagaggaagagaa

SEQ ID NO: 127065 - RNA, 23 nt, Human
agggaagaucuugauucuugugg

SEQ ID NO: 127066 - RNA, 20 nt, Human
caaaauacaauagugggaca

SEQ ID NO: 127067 - RNA, 21 nt, Human
caaauggcaacuuacagccaa

SEQ ID NO: 127068 - RNA, 25 nt, Human
cagcaaacucuuucuucccaaguuc

SEQ ID NO: 127069 - RNA, 18 nt, Human
caugacccccacaggcag

SEQ ID NO: 127070 - RNA, 24 nt, Human
caugcugugucucucugcuguggu

SEQ ID NO: 127071 - RNA, 19 nt, Human
ccacaggcagggaaggcac

SEQ ID NO: 127072 - RNA, 18 nt, Human
cccacuggggcagcacca

SEQ ID NO: 127073 - RNA, 24 nt, Human
cccacuggggcagcaccaccuccc

SEQ ID NO: 127074 - RNA, 23 nt, Human
cccccagcccauccacucugggc

SEQ ID NO: 127075 - RNA, 24 nt, Human
ccuuuaggaucucucuucuuuugu

SEQ ID NO: 127076 - RNA, 21 nt, Human
cucagagagggaagaucuuga

SEQ ID NO: 127077 - RNA, 19 nt, Human
cucccccagcccauccacu

SEQ ID NO: 127078 - RNA, 22 nt, Human
cugaauugccuuuaggaucucu

SEQ ID NO: 127079 - RNA, 18 nt, Human
cuggccuucucuuccuuc

SEQ ID NO: 127080 - RNA, 23 nt, Human
cugugucucucugcuguggcccu

SEQ ID NO: 127081 - RNA, 22 nt, Human
gaagaaagagaggaagagaaac

SEQ ID NO: 127082 - RNA, 18 nt, Human
gauuccugcucagagagg

SEQ ID NO: 127083 - RNA, 22 nt, Human
gcaaaggaaacguccuaagauc

SEQ ID NO: 127084 - RNA, 21 nt, Human
gcagcaccaccucccugaccc

SEQ ID NO: 127085 - RNA, 22 nt, Human
gccagcaaacucuuucuuccca

SEQ ID NO: 127086 - RNA, 21 nt, Human
gcccacuggggcagcaccacc

SEQ ID NO: 127087 - RNA, 20 nt, Human
gcccaugcugugucucucug

SEQ ID NO: 127088 - RNA, 20 nt, Human
ggaagaucuugauucuugug

SEQ ID NO: 127089 - RNA, 23 nt, Human
gggcagcaccaccucccugaccc

SEQ ID NO: 127090 - RNA, 23 nt, Human
gggcagcaccaccucccugacug

SEQ ID NO: 127091 - RNA, 23 nt, Human
gugaaccugugaaaccaaacaag

SEQ ID NO: 127092 - RNA, 22 nt, Human
uaaaagccuucuauaaaacuag

SEQ ID NO: 127093 - RNA, 23 nt, Human
uaaucauggcccacuggggcagc

SEQ ID NO: 127094 - RNA, 26 nt, Human
uacaaaucauagcaaaggaaacgucc

SEQ ID NO: 127095 - RNA, 24 nt, Human
uagaaagcagaucagaguucuucg

SEQ ID NO: 127096 - RNA, 21 nt, Human
uauguccucaguuccugaucu

SEQ ID NO: 127097 - RNA, 19 nt, Human
ucaagcaaguacaaaucau

SEQ ID NO: 127098 - RNA, 21 nt, Human
ucagagagggaagaucuugau

SEQ ID NO: 127099 - RNA, 21 nt, Human
ucagaguucuucgaagcacag

SEQ ID NO: 127100 - RNA, 21 nt, Human
ucauuuuguccuguuuuuguu

SEQ ID NO: 127101 - RNA, 19 nt, Human
uccaaaaggaagaaagaga

SEQ ID NO: 127102 - RNA, 22 nt, Human
uccaaaaggaagaaagagagga

SEQ ID NO: 127103 - RNA, 19 nt, Human
ucccccagcccauccacuc

SEQ ID NO: 127104 - RNA, 22 nt, Human
ucccccagcccauccacucugg

SEQ ID NO: 127105 - RNA, 22 nt, Human
uccucaguuccugaucuauuuc

SEQ ID NO: 127106 - RNA, 19 nt, Human
ucgaagcacaggccagcaa

SEQ ID NO: 127107 - RNA, 21 nt, Human
ucugcuguggcccugcccaug

SEQ ID NO: 127108 - RNA, 20 nt, Human
ucuuucuucccaaguucuuc

SEQ ID NO: 127109 - RNA, 25 nt, Human
ugacccccacaggcagggaaggcac

SEQ ID NO: 127110 - RNA, 25 nt, Human
ugaggcaauuuccuguggagggugg

SEQ ID NO: 127111 - RNA, 24 nt, Human
ugaucugcuggccuucucuuccuu

SEQ ID NO: 127112 - RNA, 21 nt, Human
ugcccaugaggcaauuuccug

SEQ ID NO: 127113 - RNA, 26 nt, Human
ugucuuggagaaucaugcauguuugc

SEQ ID NO: 127114 - RNA, 18 nt, Human
uuaaaacagcaccccucc

SEQ ID NO: 127115 - RNA, 21 nt, Human
uuaaaacagcaccccuccccc

SEQ ID NO: 127116 - RNA, 18 nt, Human
uucgaagcacaggccagc

SEQ ID NO: 127117 - RNA, 18 nt, Human
uuuuuuuuuuuuuuuuug

SEQ ID NO: 127118 - RNA, 21 nt, Human
uuuuuuuuuuuuuuuuugcau

SEQ ID NO: 127119 - RNA, 24 nt, Human
uuuuuuuuuuuuuuuuuugcauga

SEQ ID NO: 127120 - RNA, 23 nt, Human
aaaaaggaaaagaaugcaacuga

SEQ ID NO: 127121 - RNA, 24 nt, Human
aaaaccgcccucccccacaucccc

SEQ ID NO: 127122 - RNA, 21 nt, Human
aaaagaaaccggguccuagaa

SEQ ID NO: 127123 - RNA, 19 nt, Human
aaccgcccucccccacauc

SEQ ID NO: 127124 - RNA, 19 nt, Human
aagaaaacaaagacuacua

SEQ ID NO: 127125 - RNA, 22 nt, Human
aagaaaugguuugccuauacaa

SEQ ID NO: 127126 - RNA, 19 nt, Human
aagcugcagugaucuaagc

SEQ ID NO: 127127 - RNA, 23 nt, Human
aaugaucuaccaagcuaauaaag

SEQ ID NO: 127128 - RNA, 21 nt, Human
aauucugcaccauacuuacua

SEQ ID NO: 127129 - RNA, 25 nt, Human
acaggacacaguaaccaggcggcua

SEQ ID NO: 127130 - RNA, 21 nt, Human
accgcccucccccacaucccc

SEQ ID NO: 127131 - RNA, 18 nt, Human
aggaagaaaaaggaaaag

SEQ ID NO: 127132 - RNA, 21 nt, Human
aggaagaaaaaggaaaagaau

SEQ ID NO: 127133 - RNA, 25 nt, Human
aggaagaaaaaggaaaagaaugcaa

SEQ ID NO: 127134 - RNA, 23 nt, Human
aguugcuaguauuaaaaaaaaga

SEQ ID NO: 127135 - RNA, 20 nt, Human
auuugcaugaaauucugcac

SEQ ID NO: 127136 - RNA, 18 nt, Human
caaaaccucaaacgacaa

SEQ ID NO: 127137 - RNA, 24 nt, Human
caacccacgaaaaaaaaccuacuc

SEQ ID NO: 127138 - RNA, 18 nt, Human
caacuuuaagaaaugguu

SEQ ID NO: 127139 - RNA, 23 nt, Human
caagaagagggccaagaaaucag

SEQ ID NO: 127140 - RNA, 20 nt, Human
caagcuaauaaagaauacaa

SEQ ID NO: 127141 - RNA, 21 nt, Human
cacaguacagcacugaagaaa

SEQ ID NO: 127142 - RNA, 23 nt, Human
cacaguacagcacugaagaaaac

SEQ ID NO: 127143 - RNA, 23 nt, Human
cagauuccccccaacuugaucau

SEQ ID NO: 127144 - RNA, 18 nt, Human
cagcgcccccucuccagc

SEQ ID NO: 127145 - RNA, 21 nt, Human
caggacacaguaaccaggcgg

SEQ ID NO: 127146 - RNA, 19 nt, Human
cauccccugagcugacccu

SEQ ID NO: 127147 - RNA, 19 nt, Human
cccaacccacgaaaaaaaa

SEQ ID NO: 127148 - RNA, 21 nt, Human
cccacgaaaaaaaaccuacuc

SEQ ID NO: 127149 - RNA, 25 nt, Human
cccacgaaaaaaaaccuacucugga

SEQ ID NO: 127150 - RNA, 22 nt, Human
cccccaacccacgaaaaaaaac

SEQ ID NO: 127151 - RNA, 21 nt, Human
ccccccaacccacgaaaaaaa

SEQ ID NO: 127152 - RNA, 26 nt, Human
ccccccaacccacgaaaaaaaaccua

SEQ ID NO: 127153 - RNA, 21 nt, Human
ccucauuugcaugaaauucug

SEQ ID NO: 127154 - RNA, 21 nt, Human
ccucccccacauccccugagc

SEQ ID NO: 127155 - RNA, 19 nt, Human
cgcccucccccacaucccc

SEQ ID NO: 127156 - RNA, 20 nt, Human
cuccuaaaauugauacuaua

SEQ ID NO: 127157 - RNA, 20 nt, Human
cugaagaaaacaaagacuac

SEQ ID NO: 127158 - RNA, 25 nt, Human
cugauucuucuuuuucagcacacgu

SEQ ID NO: 127159 - RNA, 22 nt, Human
gaaaaaaaaccuacucuggaag

SEQ ID NO: 127160 - RNA, 18 nt, Human
gaagaaaaaggaaaagaa

SEQ ID NO: 127161 - RNA, 23 nt, Human
gccauuaacagaaaacuggagaa

SEQ ID NO: 127162 - RNA, 19 nt, Human
gcccccucuccagcgccgc

SEQ ID NO: 127163 - RNA, 19 nt, Human
gcucagcgcccccucucca

SEQ ID NO: 127164 - RNA, 19 nt, Human
gguccuagaagcugcagug

SEQ ID NO: 127165 - RNA, 19 nt, Human
guuuguuccuugccugauc

SEQ ID NO: 127166 - RNA, 24 nt, Human
uaaaaaaaaacaagauucauuuca

SEQ ID NO: 127167 - RNA, 22 nt, Human
uaaggcagaacaucuugccaga

SEQ ID NO: 127168 - RNA, 18 nt, Human
uaauuguaguaaaguuac

SEQ ID NO: 127169 - RNA, 26 nt, Human
uacagcacugaagaaaacaaagacua

SEQ ID NO: 127170 - RNA, 21 nt, Human
uaccaguugcguuaaaugcac

SEQ ID NO: 127171 - RNA, 24 nt, Human
ucaaacgacaagggggaagauaaa

SEQ ID NO: 127172 - RNA, 25 nt, Human
ucaggcacaacuuuuuuauuuuuuu

SEQ ID NO: 127173 - RNA, 25 nt, Human
ucaguaguauuugcugauucuucuu

SEQ ID NO: 127174 - RNA, 19 nt, Human
ucauacccaacagcucagc

SEQ ID NO: 127175 - RNA, 18 nt, Human
ucauagggccaacaagau

SEQ ID NO: 127176 - RNA, 24 nt, Human
ucucaaaaaucaguaaaacuuuau

SEQ ID NO: 127177 - RNA, 23 nt, Human
ucuuucaaagcuguugaguaggc

SEQ ID NO: 127178 - RNA, 19 nt, Human
ugaaaagugcagaauuuca

SEQ ID NO: 127179 - RNA, 25 nt, Human
ugaacagaagcuacaccaaccccgg

SEQ ID NO: 127180 - RNA, 19 nt, Human
ugaacaggaagaaaaagga

SEQ ID NO: 127181 - RNA, 19 nt, Human
ugaacuugaagcagcaguu

SEQ ID NO: 127182 - RNA, 23 nt, Human
ugaacuugaagcagcaguuucaa

SEQ ID NO: 127183 - RNA, 19 nt, Human
ugacaagauuauaaaugag

SEQ ID NO: 127184 - RNA, 21 nt, Human
ugcaacugagugcuaaggcag

SEQ ID NO: 127185 - RNA, 20 nt, Human
uggugugcuuuguggaugug

SEQ ID NO: 127186 - RNA, 20 nt, Human
uuaaaaaaaagagcgagaga

SEQ ID NO: 127187 - RNA, 21 nt, Human
uuauuuaaaaugguuuucuua

SEQ ID NO: 127188 - RNA, 19 nt, Human
uucaaaggaugaaaguugc

SEQ ID NO: 127189 - RNA, 20 nt, Human
uucaaaggaugaaaguugcu

SEQ ID NO: 127190 - RNA, 19 nt, Human
uucugcaccauacuuacua

SEQ ID NO: 127191 - RNA, 22 nt, Human
uugcaugaaauucugcaccaua

SEQ ID NO: 127192 - RNA, 20 nt, Human
uugcuaguauuaaaaaaaag

SEQ ID NO: 127193 - RNA, 24 nt, Human
uugggaagugcucuuucaaagcug

SEQ ID NO: 127194 - RNA, 18 nt, Human
uuuaaaaugguuuucuua

SEQ ID NO: 127195 - RNA, 23 nt, Human
uuuguuuuguuuuuaaaucagua

SEQ ID NO: 127196 - RNA, 24 nt, Human
uuuuuguuuuuguuuaaauauguu

SEQ ID NO: 127197 - RNA, 24 nt, Human
uuuuuuauuuuuuuuuguuuuguu

SEQ ID NO: 127198 - RNA, 25 nt, Human
acacccaacagaaagaacuuuaaag

SEQ ID NO: 127199 - RNA, 25 nt, Human
acuuugaagaauuugaaucaugaaa

SEQ ID NO: 127200 - RNA, 18 nt, Human
agcugggaaaaaauacca

SEQ ID NO: 127201 - RNA, 21 nt, Human
aggcagaaaggaaaguucuaa

SEQ ID NO: 127202 - RNA, 23 nt, Human
aggcagaaaggaaaguucuaagg

SEQ ID NO: 127203 - RNA, 21 nt, Human
auagaaagcaauccuuuucua

SEQ ID NO: 127204 - RNA, 27 nt, Human
caacagaaagaacuuuaaagccuccaa

SEQ ID NO: 127205 - RNA, 23 nt, Human
cagaaagaacuuuaaagccucca

SEQ ID NO: 127206 - RNA, 18 nt, Human
cauaacugacuucaugca

SEQ ID NO: 127207 - RNA, 24 nt, Human
cuucaugcaaacagggagcucucc

SEQ ID NO: 127208 - RNA, 21 nt, Human
gaaagaacuuuaaagccucca

SEQ ID NO: 127209 - RNA, 21 nt, Human
uaaaauggcacaguccacaga

SEQ ID NO: 127210 - RNA, 21 nt, Human
uaaaucgcaaacaucaguuaa

SEQ ID NO: 127211 - RNA, 22 nt, Human
uaacugacuucaugcaaacagg

SEQ ID NO: 127212 - RNA, 26 nt, Human
uaacugacuucaugcaaacagggagc

SEQ ID NO: 127213 - RNA, 20 nt, Human
uaagauggauugaagaggca

SEQ ID NO: 127214 - RNA, 19 nt, Human
ucagcugggaaaaaauacc

SEQ ID NO: 127215 - RNA, 23 nt, Human
ucaugaaauauugugugguaaga

SEQ ID NO: 127216 - RNA, 27 nt, Human
ugcaaacagggagcucucccuucuuuc

SEQ ID NO: 127217 - RNA, 20 nt, Human
ugccaugagcucaaucaagg

SEQ ID NO: 127218 - RNA, 20 nt, Human
uucacagaaauacagcagaa

SEQ ID NO: 127219 - RNA, 23 nt, Human
uucacagaaauacagcagaauaa

SEQ ID NO: 127220 - RNA, 19 nt, Human
uuuaaagccuccaagagcu

SEQ ID NO: 127221 - RNA, 22 nt, Human
uuuauugugccagaaggucaua

SEQ ID NO: 127222 - RNA, 18 nt, Human
uuugaagcuucuuccaag

SEQ ID NO: 127223 - RNA, 20 nt, Human
aaaaaaagcauggauugcau

SEQ ID NO: 127224 - RNA, 24 nt, Human
aacauuuacagacuguauccccac

SEQ ID NO: 127225 - RNA, 22 nt, Human
aaugugaaugcauacacgaaag

SEQ ID NO: 127226 - RNA, 23 nt, Human
acauuuacagacuguauccccac

SEQ ID NO: 127227 - RNA, 19 nt, Human
aguauugugcuucugaaca

SEQ ID NO: 127228 - RNA, 25 nt, Human
auauauacacacauacauuuacaua

SEQ ID NO: 127229 - RNA, 28 nt, Human
auauauacacacauacauuuacauacac

SEQ ID NO: 127230 - RNA, 19 nt, Human
auuuacagacuguaucccc

SEQ ID NO: 127231 - RNA, 19 nt, Human
caacacucagacaucuaua

SEQ ID NO: 127232 - RNA, 23 nt, Human
cagagaauucuuccuuuaagucu

SEQ ID NO: 127233 - RNA, 18 nt, Human
cagccccugcaugcugga

SEQ ID NO: 127234 - RNA, 24 nt, Human
ccauacguauaggucuccagacaa

SEQ ID NO: 127235 - RNA, 23 nt, Human
cuccagacaacacucagacaucu

SEQ ID NO: 127236 - RNA, 19 nt, Human
cugaacagucauggcguuc

SEQ ID NO: 127237 - RNA, 19 nt, Human
gaaggaaaaaauugccacu

SEQ ID NO: 127238 - RNA, 19 nt, Human
gagaauucuuccuuuaagu

SEQ ID NO: 127239 - RNA, 19 nt, Human
gggaaagaaaaugagccac

SEQ ID NO: 127240 - RNA, 22 nt, Human
uaauauauacacacauacagug

SEQ ID NO: 127241 - RNA, 20 nt, Human
uaggucuccagacaacacuc

SEQ ID NO: 127242 - RNA, 26 nt, Human
uauauacacacauacauuuacauaca

SEQ ID NO: 127243 - RNA, 21 nt, Human
uccgguuaaacaguuuccuuc

SEQ ID NO: 127244 - RNA, 19 nt, Human
ucuccagacaacacucaga

SEQ ID NO: 127245 - RNA, 22 nt, Human
ucuccagacaacacucagacau

SEQ ID NO: 127246 - RNA, 18 nt, Human
ucugcacucuggguacaa

SEQ ID NO: 127247 - RNA, 18 nt, Human
ugaagaaauuaucaagag

SEQ ID NO: 127248 - RNA, 22 nt, Human
ugaaugcauacacgaaagguuu

SEQ ID NO: 127249 - RNA, 21 nt, Human
ugaauucuguucuauuucuug

SEQ ID NO: 127250 - RNA, 21 nt, Human
ugacuaaacgcugagcagccc

SEQ ID NO: 127251 - RNA, 24 nt, Human
ugacuaaacgcugagcagccccug

SEQ ID NO: 127252 - RNA, 24 nt, Human
ugccuuugaaucuagggaaugucu

SEQ ID NO: 127253 - RNA, 19 nt, Human
uggaaaggcggcucugcac

SEQ ID NO: 127254 - RNA, 23 nt, Human
ugggauccgguuaaacaguuucc

SEQ ID NO: 127255 - RNA, 21 nt, Human
ugucagaaauucaaagcuggu

SEQ ID NO: 127256 - RNA, 19 nt, Human
ugugacuaaacgcugagca

SEQ ID NO: 127257 - RNA, 22 nt, Human
uguuuguuuguuuguuucuucu

SEQ ID NO: 127258 - RNA, 20 nt, Human
uuaaaaaaagcauggauugc

SEQ ID NO: 127259 - RNA, 22 nt, Human
uuuaaaggauaucaagcuugga

SEQ ID NO: 127260 - RNA, 21 nt, Human
uuuguuucuucuguuuugccu

SEQ ID NO: 127261 - RNA, 18 nt, Human
aaauaucaccaccuccuc

SEQ ID NO: 127262 - RNA, 20 nt, Human
aacagccuuggcgugaaggc

SEQ ID NO: 127263 - RNA, 22 nt, Human
aacagcuuccauaguccuuuug

SEQ ID NO: 127264 - RNA, 26 nt, Human
aaggaaccccuugcaaguugggcuga

SEQ ID NO: 127265 - RNA, 21 nt, Human
aagggccaagagcucauugau

SEQ ID NO: 127266 - RNA, 19 nt, Human
aauaccuggggccagggca

SEQ ID NO: 127267 - RNA, 19 nt, Human
aauggccagguguccagga

SEQ ID NO: 127268 - RNA, 18 nt, Human
acaaccucccaucuuccc

SEQ ID NO: 127269 - RNA, 18 nt, Human
acacacagccccccaucc

SEQ ID NO: 127270 - RNA, 19 nt, Human
acacagcacccaggaucuc

SEQ ID NO: 127271 - RNA, 18 nt, Human
acaggaacucuggacaag

SEQ ID NO: 127272 - RNA, 23 nt, Human
accagucccugucucccggccuc

SEQ ID NO: 127273 - RNA, 23 nt, Human
accgacccuguguuucuuccccc

SEQ ID NO: 127274 - RNA, 18 nt, Human
acuuaucuaaagguggca

SEQ ID NO: 127275 - RNA, 22 nt, Human
agaaggaaucaugugaagggga

SEQ ID NO: 127276 - RNA, 18 nt, Human
agagaagggagucuggau

SEQ ID NO: 127277 - RNA, 24 nt, Human
agagccacuggccagauguagaaa

SEQ ID NO: 127278 - RNA, 20 nt, Human
agaggcuggaacagacccuu

SEQ ID NO: 127279 - RNA, 21 nt, Human
agagugagaaggcugagcucu

SEQ ID NO: 127280 - RNA, 23 nt, Human
agauacagccaucccauccacca

SEQ ID NO: 127281 - RNA, 21 nt, Human
agccaaacucucugcagcugu

SEQ ID NO: 127282 - RNA, 25 nt, Human
agccuggucaguuugggagaggacc

SEQ ID NO: 127283 - RNA, 21 nt, Human
agcuacuacggucccagcccc

SEQ ID NO: 127284 - RNA, 18 nt, Human
agcuggugagaacagccu

SEQ ID NO: 127285 - RNA, 20 nt, Human
aggaaucaugugaaggggag

SEQ ID NO: 127286 - RNA, 18 nt, Human
aggaccagaaggaacccc

SEQ ID NO: 127287 - RNA, 21 nt, Human
aggagccccuuaagguaagcg

SEQ ID NO: 127288 - RNA, 22 nt, Human
aggcagaagauaggcagcugag

SEQ ID NO: 127289 - RNA, 22 nt, Human
aggcagggccagucucaaagaa

SEQ ID NO: 127290 - RNA, 22 nt, Human
aggugaggguagagaaggaagg

SEQ ID NO: 127291 - RNA, 22 nt, Human
aggugagucuucuaggacugug

SEQ ID NO: 127292 - RNA, 22 nt, Human
agguguggugaugcaugagguc

SEQ ID NO: 127293 - RNA, 24 nt, Human
agugagaaacacagggaagggcag

SEQ ID NO: 127294 - RNA, 20 nt, Human
auggccucaggcugugccag

SEQ ID NO: 127295 - RNA, 18 nt, Human
augguaggggauggggag

SEQ ID NO: 127296 - RNA, 24 nt, Human
caaaauggaagguggcaguggaug

SEQ ID NO: 127297 - RNA, 22 nt, Human
caagaaacaaccuauuaaggac

SEQ ID NO: 127298 - RNA, 25 nt, Human
caagaccaagaaacaaccuauuaag

SEQ ID NO: 127299 - RNA, 18 nt, Human
caagugaaaggcagaaga

SEQ ID NO: 127300 - RNA, 21 nt, Human
cacacacaccgcccgcccccu

SEQ ID NO: 127301 - RNA, 18 nt, Human
cacacaccgcccgccccc

SEQ ID NO: 127302 - RNA, 22 nt, Human
cacagcacccaggaucuccagc

SEQ ID NO: 127303 - RNA, 22 nt, Human
cacaugguuccaaguggccacc

SEQ ID NO: 127304 - RNA, 18 nt, Human
caccgcccgcccccucaa

SEQ ID NO: 127305 - RNA, 22 nt, Human
cagaucccucccaccagaacac

SEQ ID NO: 127306 - RNA, 19 nt, Human
cagcacagccaccuugguc

SEQ ID NO: 127307 - RNA, 23 nt, Human
cagcaugagauggacaaaaugga

SEQ ID NO: 127308 - RNA, 22 nt, Human
cagccaccuuggucuugcuguu

SEQ ID NO: 127309 - RNA, 20 nt, Human
cagccugggguuaccuggcc

SEQ ID NO: 127310 - RNA, 24 nt, Human
cagccugggguuaccuggccugag

SEQ ID NO: 127311 - RNA, 19 nt, Human
caugaagaaagcaagacca

SEQ ID NO: 127312 - RNA, 18 nt, Human
caugagguguggugaugc

SEQ ID NO: 127313 - RNA, 21 nt, Human
cauguuaauguagagggcagc

SEQ ID NO: 127314 - RNA, 24 nt, Human
ccaaggcucuaaaccaagcaccaa

SEQ ID NO: 127315 - RNA, 21 nt, Human
ccacacacagccccccauccc

SEQ ID NO: 127316 - RNA, 21 nt, Human
ccaccuccuccacucagcccc

SEQ ID NO: 127317 - RNA, 18 nt, Human
ccaggucaauguucuguu

SEQ ID NO: 127318 - RNA, 18 nt, Human
ccagucuuccaugguggg

SEQ ID NO: 127319 - RNA, 20 nt, Human
ccaguugguggaaaugggau

SEQ ID NO: 127320 - RNA, 24 nt, Human
cccacaaccucccaucuuccccaa

SEQ ID NO: 127321 - RNA, 21 nt, Human
cccacugcccuaaacacuuua

SEQ ID NO: 127322 - RNA, 19 nt, Human
cccaggacccagcccaagg

SEQ ID NO: 127323 - RNA, 22 nt, Human
cccaucuuccccaacacuuguc

SEQ ID NO: 127324 - RNA, 19 nt, Human
cccaugguaggggaugggg

SEQ ID NO: 127325 - RNA, 22 nt, Human
cccccaucccaggacccagccc

SEQ ID NO: 127326 - RNA, 21 nt, Human
ccccccgcagcuacuacgguc

SEQ ID NO: 127327 - RNA, 26 nt, Human
ccccccucucagccuuccuccuuggc

SEQ ID NO: 127328 - RNA, 19 nt, Human
ccccgugcuacacaggaac

SEQ ID NO: 127329 - RNA, 21 nt, Human
ccccgugcuacacaggaacuc

SEQ ID NO: 127330 - RNA, 20 nt, Human
cccuaaacacuuuauuucca

SEQ ID NO: 127331 - RNA, 24 nt, Human
cccucagaccucucaggaaccaac

SEQ ID NO: 127332 - RNA, 20 nt, Human
ccucauuugucaucugaggc

SEQ ID NO: 127333 - RNA, 21 nt, Human
ccucucagccuuccuccuugg

SEQ ID NO: 127334 - RNA, 21 nt, Human
ccugcagcaccuucuuguggc

SEQ ID NO: 127335 - RNA, 23 nt, Human
ccuggagaauuuucuccucccac

SEQ ID NO: 127336 - RNA, 23 nt, Human
ccugggguuaccuggccugaggc

SEQ ID NO: 127337 - RNA, 25 nt, Human
ccuuccaacauugacuguucucugg

SEQ ID NO: 127338 - RNA, 21 nt, Human
cgcccgcccccucaaaccaac

SEQ ID NO: 127339 - RNA, 25 nt, Human
cguucagcagggucuggaagcgggu

SEQ ID NO: 127340 - RNA, 19 nt, Human
cucaaaccaacgcacaugc

SEQ ID NO: 127341 - RNA, 18 nt, Human
cucaggaaccaacucccc

SEQ ID NO: 127342 - RNA, 19 nt, Human
cucaggaaccaacucccca

SEQ ID NO: 127343 - RNA, 22 nt, Human
cuccauccccaucuccccaguu

SEQ ID NO: 127344 - RNA, 19 nt, Human
cucccacugcccuaaacac

SEQ ID NO: 127345 - RNA, 21 nt, Human
cucccggccuccuguguggcc

SEQ ID NO: 127346 - RNA, 22 nt, Human
cucucaggaaccaacuccccaa

SEQ ID NO: 127347 - RNA, 20 nt, Human
cugaggcagcuggugagaac

SEQ ID NO: 127348 - RNA, 18 nt, Human
cuggauucccucaccaga

SEQ ID NO: 127349 - RNA, 22 nt, Human
cuggccagauguagaaaauaaa

SEQ ID NO: 127350 - RNA, 23 nt, Human
cugggcaccagccccuucuuacu

SEQ ID NO: 127351 - RNA, 20 nt, Human
cugguagugcagcauggccu

SEQ ID NO: 127352 - RNA, 25 nt, Human
gaacacacacacaccgcccgccccc

SEQ ID NO: 127353 - RNA, 18 nt, Human
gaacuguucugugccagc

SEQ ID NO: 127354 - RNA, 24 nt, Human
gaagguggcaguggaugggaggac

SEQ ID NO: 127355 - RNA, 20 nt, Human
gaauauauaaugccuccucu

SEQ ID NO: 127356 - RNA, 18 nt, Human
gacaggauggaggugagg

SEQ ID NO: 127357 - RNA, 23 nt, Human
gaccaagaaacaaccuauuaagg

SEQ ID NO: 127358 - RNA, 19 nt, Human
gacccuguguuucuucccc

SEQ ID NO: 127359 - RNA, 20 nt, Human
gagcagggccccuucagccu

SEQ ID NO: 127360 - RNA, 21 nt, Human
gaggcugcuguggcuucugcc

SEQ ID NO: 127361 - RNA, 18 nt, Human
gcagggagaggccagagg

SEQ ID NO: 127362 - RNA, 19 nt, Human
gcaguggaugggaggacca

SEQ ID NO: 127363 - RNA, 18 nt, Human
gccaucccauccaccaag

SEQ ID NO: 127364 - RNA, 23 nt, Human
gccuggucaguuugggagaggac

SEQ ID NO: 127365 - RNA, 22 nt, Human
gcucuggcccucagaccucuca

SEQ ID NO: 127366 - RNA, 26 nt, Human
gcuguucucugugcguaggcucuggg

SEQ ID NO: 127367 - RNA, 25 nt, Human
ggaaacccaaggugagucuucuagg

SEQ ID NO: 127368 - RNA, 20 nt, Human
ggaagggcagaagggccaag

SEQ ID NO: 127369 - RNA, 18 nt, Human
ggaagguggcaguggaug

SEQ ID NO: 127370 - RNA, 23 nt, Human
ggacagaggcugcuguggcuucu

SEQ ID NO: 127371 - RNA, 24 nt, Human
ggagcccuccccuguucccugccc

SEQ ID NO: 127372 - RNA, 23 nt, Human
ggaggugaggguagagaaggaag

SEQ ID NO: 127373 - RNA, 19 nt, Human
ggcacuguuggagaucugg

SEQ ID NO: 127374 - RNA, 20 nt, Human
ggcugaagaaccaaauuggg

SEQ ID NO: 127375 - RNA, 22 nt, Human
ggcugaagaaccaaauugggua

SEQ ID NO: 127376 - RNA, 18 nt, Human
ggcuguggaccucuccag

SEQ ID NO: 127377 - RNA, 21 nt, Human
gggagcucuuggggcugcaga

SEQ ID NO: 127378 - RNA, 20 nt, Human
gggccagggcacagaaggaa

SEQ ID NO: 127379 - RNA, 21 nt, Human
gggcugcagaugcauauagcc

SEQ ID NO: 127380 - RNA, 23 nt, Human
guagagggcagcucuggcccuca

SEQ ID NO: 127381 - RNA, 19 nt, Human
guccagccacacacagccc

SEQ ID NO: 127382 - RNA, 19 nt, Human
gugcugcccucugcugagg

SEQ ID NO: 127383 - RNA, 23 nt, Human
guggcaguggaugggaggaccag

SEQ ID NO: 127384 - RNA, 22 nt, Human
guggccccccucucagccuucc

SEQ ID NO: 127385 - RNA, 24 nt, Human
uaacuagaauauauaaugccuccu

SEQ ID NO: 127386 - RNA, 23 nt, Human
uacaguggcaucuagcaccagag

SEQ ID NO: 127387 - RNA, 21 nt, Human
uaccagaaaugggguggcccc

SEQ ID NO: 127388 - RNA, 24 nt, Human
uaccagaaaugggguggccccccu

SEQ ID NO: 127389 - RNA, 25 nt, Human
uaccuggccugaggccauccaaggc

SEQ ID NO: 127390 - RNA, 20 nt, Human
uagacaggauggaggugagg

SEQ ID NO: 127391 - RNA, 21 nt, Human
uagaggccucacccacaaccu

SEQ ID NO: 127392 - RNA, 23 nt, Human
uagauacagccaucccauccacc

SEQ ID NO: 127393 - RNA, 24 nt, Human
uagauacagccaucccauccacca

SEQ ID NO: 127394 - RNA, 20 nt, Human
uagcaccagagccacuggcc

SEQ ID NO: 127395 - RNA, 19 nt, Human
uagccaaacucucugcagc

SEQ ID NO: 127396 - RNA, 22 nt, Human
uaggcccagcucaccagucucc

SEQ ID NO: 127397 - RNA, 24 nt, Human
uaguguuagagaaggggugggagg

SEQ ID NO: 127398 - RNA, 18 nt, Human
uaucagccuuccuccucc

SEQ ID NO: 127399 - RNA, 24 nt, Human
uaugggauggagcuaagcauucaa

SEQ ID NO: 127400 - RNA, 18 nt, Human
uauuaaggaccagcucag

SEQ ID NO: 127401 - RNA, 19 nt, Human
ucacaacaauggccaggug

SEQ ID NO: 127402 - RNA, 19 nt, Human
ucacaccugugucagccag

SEQ ID NO: 127403 - RNA, 19 nt, Human
ucacaggggagaaaugcug

SEQ ID NO: 127404 - RNA, 28 nt, Human
ucaccuggagaauuuucuccuccccccu

SEQ ID NO: 127405 - RNA, 23 nt, Human
ucaccuggguuccaggauggccu

SEQ ID NO: 127406 - RNA, 21 nt, Human
ucagaauaauaccuggggcca

SEQ ID NO: 127407 - RNA, 23 nt, Human
uccaaguggccaccugcaggcug

SEQ ID NO: 127408 - RNA, 20 nt, Human
uccacuggcaauaacccuga

SEQ ID NO: 127409 - RNA, 23 nt, Human
uccauaguccuuuuguuuccagg

SEQ ID NO: 127410 - RNA, 21 nt, Human
ucccaccagaacacacacaca

SEQ ID NO: 127411 - RNA, 18 nt, Human
ucccacugcccuaaacac

SEQ ID NO: 127412 - RNA, 23 nt, Human
ucccaggacccagcccaaggcuc

SEQ ID NO: 127413 - RNA, 23 nt, Human
ucccauccaccaaggccagcaug

SEQ ID NO: 127414 - RNA, 18 nt, Human
uccccaguuucccuugcc

SEQ ID NO: 127415 - RNA, 22 nt, Human
ucccucaccagauucccucuca

SEQ ID NO: 127416 - RNA, 18 nt, Human
uccuguguggcuaguucc

SEQ ID NO: 127417 - RNA, 19 nt, Human
ucucaccagucccugucuc

SEQ ID NO: 127418 - RNA, 26 nt, Human
ucucaggggcucccuccaucauugcu

SEQ ID NO: 127419 - RNA, 24 nt, Human
ucuccagcacagccaccuuggucu

SEQ ID NO: 127420 - RNA, 19 nt, Human
ucucugcagcuguucugcc

SEQ ID NO: 127421 - RNA, 21 nt, Human
ucucuggaaccuaccagagcu

SEQ ID NO: 127422 - RNA, 21 nt, Human
ucugcagcuguucugccugga

SEQ ID NO: 127423 - RNA, 21 nt, Human
ucuuguggccaccaggcacga

SEQ ID NO: 127424 - RNA, 21 nt, Human
ugaaaggcagaagauaggcag

SEQ ID NO: 127425 - RNA, 19 nt, Human
ugaacagcuuccauagucc

SEQ ID NO: 127426 - RNA, 26 nt, Human
ugaagaaagcaagaccaaggaaaagu

SEQ ID NO: 127427 - RNA, 19 nt, Human
ugaaggggagauaagagga

SEQ ID NO: 127428 - RNA, 18 nt, Human
ugagaagguuguguuugu

SEQ ID NO: 127429 - RNA, 20 nt, Human
ugagaggaggggccacccuu

SEQ ID NO: 127430 - RNA, 23 nt, Human
ugagauggacaaaauggaaggug

SEQ ID NO: 127431 - RNA, 19 nt, Human
ugaggcagcuggugagaac

SEQ ID NO: 127432 - RNA, 22 nt, Human
ugaggguagagaaggaagggaa

SEQ ID NO: 127433 - RNA, 23 nt, Human
ugaggucugucuugagccccucg

SEQ ID NO: 127434 - RNA, 23 nt, Human
ugcacuugcucagaucccuccca

SEQ ID NO: 127435 - RNA, 24 nt, Human
ugcagggagaggccagaggacuug

SEQ ID NO: 127436 - RNA, 22 nt, Human
ugccuggaagccuucaucuugc

SEQ ID NO: 127437 - RNA, 22 nt, Human
ugcuacacaggaacucuggaca

SEQ ID NO: 127438 - RNA, 23 nt, Human
ugcucagaucccucccaccagaa

SEQ ID NO: 127439 - RNA, 27 nt, Human
uggaaaugggaugggaguagggagagg

SEQ ID NO: 127440 - RNA, 19 nt, Human
uggaacuguucugugccag

SEQ ID NO: 127441 - RNA, 21 nt, Human
uggagcccuccccuguucccu

SEQ ID NO: 127442 - RNA, 22 nt, Human
uggaugcaagugaaaggcagaa

SEQ ID NO: 127443 - RNA, 23 nt, Human
uggcaguggaugggaggaccaga

SEQ ID NO: 127444 - RNA, 24 nt, Human
uggccccccucucagccuuccucc

SEQ ID NO: 127445 - RNA, 21 nt, Human
uggccugaggccauccaaggc

SEQ ID NO: 127446 - RNA, 18 nt, Human
ugggagggccugagcaau

SEQ ID NO: 127447 - RNA, 21 nt, Human
ugggaguagggagaggcugga

SEQ ID NO: 127448 - RNA, 19 nt, Human
ugggaugggaguagggaga

SEQ ID NO: 127449 - RNA, 23 nt, Human
ugggaugggaguagggagaggcu

SEQ ID NO: 127450 - RNA, 23 nt, Human
ugggcugaagaaccaaauugggu

SEQ ID NO: 127451 - RNA, 21 nt, Human
uggggagacaccugguccagc

SEQ ID NO: 127452 - RNA, 23 nt, Human
uggggagacaccugguccagcca

SEQ ID NO: 127453 - RNA, 22 nt, Human
ugggguggccccccucucagcc

SEQ ID NO: 127454 - RNA, 25 nt, Human
ugggugcccaugguaggggaugggg

SEQ ID NO: 127455 - RNA, 20 nt, Human
ugguaggggauggggagcag

SEQ ID NO: 127456 - RNA, 19 nt, Human
ugguauugaauaagagccu

SEQ ID NO: 127457 - RNA, 19 nt, Human
uggugggugggaaugccag

SEQ ID NO: 127458 - RNA, 18 nt, Human
ugucuugagccccucgcc

SEQ ID NO: 127459 - RNA, 19 nt, Human
uguggauuaguagacagga

SEQ ID NO: 127460 - RNA, 23 nt, Human
uguuagagaaggggugggagggc

SEQ ID NO: 127461 - RNA, 20 nt, Human
uguucuguugagccuccccu

SEQ ID NO: 127462 - RNA, 24 nt, Human
uuaagguaagcguggggagacacc

SEQ ID NO: 127463 - RNA, 21 nt, Human
uucuaggacuguggauuagua

SEQ ID NO: 127464 - RNA, 22 nt, Human
uuggaugcaagugaaaggcaga

SEQ ID NO: 127465 - RNA, 22 nt, Human
uuggcaccuucaggugauguga

SEQ ID NO: 127466 - RNA, 20 nt, Human
aaaugcuuaguucccucuuu

SEQ ID NO: 127467 - RNA, 21 nt, Human
aagaauacaagagagccuguc

SEQ ID NO: 127468 - RNA, 22 nt, Human
aagacuccucccuucagggcac

SEQ ID NO: 127469 - RNA, 21 nt, Human
acagaucccgggccucggcca

SEQ ID NO: 127470 - RNA, 20 nt, Human
caagagagccugucgugaug

SEQ ID NO: 127471 - RNA, 21 nt, Human
cacagaucccgggccucggcc

SEQ ID NO: 127472 - RNA, 23 nt, Human
cauuucauucacucuuuuugagu

SEQ ID NO: 127473 - RNA, 20 nt, Human
ccaagagaaagacuccuccc

SEQ ID NO: 127474 - RNA, 21 nt, Human
cccaccacgagcucgcaucga

SEQ ID NO: 127475 - RNA, 22 nt, Human
cccuucagaaaugacacucuga

SEQ ID NO: 127476 - RNA, 19 nt, Human
cuuaggucuguugaucugc

SEQ ID NO: 127477 - RNA, 22 nt, Human
gagaaagacuccucccuucaga

SEQ ID NO: 127478 - RNA, 18 nt, Human
ggccaggcucauugagga

SEQ ID NO: 127479 - RNA, 20 nt, Human
ucagaaaugacacucugagc

SEQ ID NO: 127480 - RNA, 21 nt, Human
ucccgggccucggccaggcuc

SEQ ID NO: 127481 - RNA, 20 nt, Human
ugaauuucuugugggaagag

SEQ ID NO: 127482 - RNA, 24 nt, Human
ugaucugcgcguacagaggcucug

SEQ ID NO: 127483 - RNA, 21 nt, Human
ugcugauguccaugccagucu

SEQ ID NO: 127484 - RNA, 18 nt, Human
uuuuuugugugcugccau

SEQ ID NO: 127485 - RNA, 20 nt, Human
uuuuuugugugcugccauag

SEQ ID NO: 127486 - RNA, 23 nt, Human
uuuuuuuuuuuuuuuugugugcu

SEQ ID NO: 127487 - RNA, 18 nt, Human
uuuuuuuuuuuuuuuuug

SEQ ID NO: 127488 - RNA, 19 nt, Human
uuuuuuuuuuuuuuuuugu

SEQ ID NO: 127489 - RNA, 23 nt, Human
aaacaacucugaacaauaaggau

SEQ ID NO: 127490 - RNA, 20 nt, Human
aaacagaacccccaaacaac

SEQ ID NO: 127491 - RNA, 22 nt, Human
aaagaaucagaaaaaaaagggg

SEQ ID NO: 127492 - RNA, 18 nt, Human
aaagcuggaacaagggca

SEQ ID NO: 127493 - RNA, 18 nt, Human
aacagaacccccaaacaa

SEQ ID NO: 127494 - RNA, 23 nt, Human
aacccccaaacaacucugaacaa

SEQ ID NO: 127495 - RNA, 20 nt, Human
aaggcaacagauaauacguc

SEQ ID NO: 127496 - RNA, 19 nt, Human
acagaacccccaaacaacu

SEQ ID NO: 127497 - RNA, 24 nt, Human
accuuuuuauuccucuggaugguc

SEQ ID NO: 127498 - RNA, 19 nt, Human
agacagaaagugaaaagca

SEQ ID NO: 127499 - RNA, 21 nt, Human
aggcagcaaaccucaguacca

SEQ ID NO: 127500 - RNA, 20 nt, Human
agggaaacuacuguacuuca

SEQ ID NO: 127501 - RNA, 18 nt, Human
auaaacauaaccucccac

SEQ ID NO: 127502 - RNA, 24 nt, Human
auaaggcaacagauaauacgucaa

SEQ ID NO: 127503 - RNA, 19 nt, Human
caaaacaguaugauaugaa

SEQ ID NO: 127504 - RNA, 24 nt, Human
caacagauaauacgucaaagcugg

SEQ ID NO: 127505 - RNA, 24 nt, Human
caagaaggcaggcagcaaaccuca

SEQ ID NO: 127506 - RNA, 24 nt, Human
cagaaaaaaaaggggaggagagau

SEQ ID NO: 127507 - RNA, 26 nt, Human
cagaacccccaaacaacucugaacaa

SEQ ID NO: 127508 - RNA, 21 nt, Human
caggcgaucccgauggagaag

SEQ ID NO: 127509 - RNA, 19 nt, Human
caguggacacuuggugaca

SEQ ID NO: 127510 - RNA, 21 nt, Human
ccaaagugucuaaggagaagu

SEQ ID NO: 127511 - RNA, 23 nt, Human
ccaggagcaaaacugacugaaaa

SEQ ID NO: 127512 - RNA, 25 nt, Human
ccaggagcaaaacugacugaaaaaa

SEQ ID NO: 127513 - RNA, 21 nt, Human
cccacagacaccggcuagcua

SEQ ID NO: 127514 - RNA, 20 nt, Human
ccccaaacaacucugaacaa

SEQ ID NO: 127515 - RNA, 20 nt, Human
ccccaaacaacucugaacaa

SEQ ID NO: 127516 - RNA, 20 nt, Human
ccucccacagacaccggcua

SEQ ID NO: 127517 - RNA, 19 nt, Human
cucccaaccagaggguaga

SEQ ID NO: 127518 - RNA, 22 nt, Human
cugacugaaaaaagaaucagaa

SEQ ID NO: 127519 - RNA, 21 nt, Human
gaaaaaagaaucagaaaaaaa

SEQ ID NO: 127520 - RNA, 20 nt, Human
gaaaagcauuuuacaaguag

SEQ ID NO: 127521 - RNA, 18 nt, Human
gaacccccaaacaacucu

SEQ ID NO: 127522 - RNA, 22 nt, Human
gcuaucagcuuuguuuuugacu

SEQ ID NO: 127523 - RNA, 19 nt, Human
ggcgaucccgauggagaag

SEQ ID NO: 127524 - RNA, 19 nt, Human
guucuagaagguuccaggg

SEQ ID NO: 127525 - RNA, 24 nt, Human
uaaacauaaccucccacagacacc

SEQ ID NO: 127526 - RNA, 21 nt, Human
uaaccucccacagacaccggc

SEQ ID NO: 127527 - RNA, 19 nt, Human
uacuguacuucauuuacac

SEQ ID NO: 127528 - RNA, 19 nt, Human
uagaagaggcaaugagaaa

SEQ ID NO: 127529 - RNA, 24 nt, Human
uagaagguuccagggacacaagag

SEQ ID NO: 127530 - RNA, 22 nt, Human
uagauuccaaagugucuaagga

SEQ ID NO: 127531 - RNA, 18 nt, Human
uagcaagaaaugggagaa

SEQ ID NO: 127532 - RNA, 20 nt, Human
uagcaagaaaugggagaaaa

SEQ ID NO: 127533 - RNA, 23 nt, Human
uagcaagaaaugggagaaaagga

SEQ ID NO: 127534 - RNA, 21 nt, Human
uaggaaauucucuguaacuga

SEQ ID NO: 127535 - RNA, 21 nt, Human
uaugaagggaugugguggcug

SEQ ID NO: 127536 - RNA, 22 nt, Human
uaugcucugaaacagaaccccc

SEQ ID NO: 127537 - RNA, 20 nt, Human
ucagaaaaaaaaggggagga

SEQ ID NO: 127538 - RNA, 21 nt, Human
ucaguaccaguggacacuugg

SEQ ID NO: 127539 - RNA, 22 nt, Human
ucaguuuagcuuuaaccuagac

SEQ ID NO: 127540 - RNA, 21 nt, Human
ucccucauuugcaauagcuag

SEQ ID NO: 127541 - RNA, 22 nt, Human
ucuguaacugauggucugaagc

SEQ ID NO: 127542 - RNA, 22 nt, Human
ugaaaaaagaaucagaaaaaaa

SEQ ID NO: 127543 - RNA, 20 nt, Human
ugaaacagaacccccaaacc

SEQ ID NO: 127544 - RNA, 21 nt, Human
ugaacccaggagcaaaacuga

SEQ ID NO: 127545 - RNA, 22 nt, Human
ugaacccaggagcaaaacugac

SEQ ID NO: 127546 - RNA, 19 nt, Human
ugacuacuaaggccaaccu

SEQ ID NO: 127547 - RNA, 23 nt, Human
ugauaugaagggaugugguggcu

SEQ ID NO: 127548 - RNA, 19 nt, Human
ugcccugugagagucuguu

SEQ ID NO: 127549 - RNA, 21 nt, Human
ugccuuguucuacuauaaccu

SEQ ID NO: 127550 - RNA, 23 nt, Human
ugccuuguucuacuauaaccuuu

SEQ ID NO: 127551 - RNA, 18 nt, Human
uggacacuuggugacacc

SEQ ID NO: 127552 - RNA, 20 nt, Human
uuuacaaguagaagaggcaa

SEQ ID NO: 127553 - RNA, 18 nt, Human
uuuuuuuuuuuuuugccc

SEQ ID NO: 127554 - RNA, 22 nt, Human
uuuuuuuuuuuuuuuugcccug

SEQ ID NO: 127555 - RNA, 18 nt, Human
uuuuuuuuuuuuuuuuug

SEQ ID NO: 127556 - RNA, 22 nt, Human
uuuuuuuuuuuuuuuuugcccu

SEQ ID NO: 127557 - RNA, 21 nt, Human
aaaaggaggagguuugaagga

SEQ ID NO: 127558 - RNA, 19 nt, Human
aaaaguugccacacacccc

SEQ ID NO: 127559 - RNA, 22 nt, Human
aaacaaacacauagaacuagga

SEQ ID NO: 127560 - RNA, 22 nt, Human
aaacagacggaggagaagcgag

SEQ ID NO: 127561 - RNA, 18 nt, Human
aaauaaugcucccuuugu

SEQ ID NO: 127562 - RNA, 26 nt, Human
aacagacggaggagaagcgagaggaa

SEQ ID NO: 127563 - RNA, 18 nt, Human
aacuaggaaaagaauccc

SEQ ID NO: 127564 - RNA, 22 nt, Human
aagaaucccuugugcucaaaca

SEQ ID NO: 127565 - RNA, 21 nt, Human
aagcacuguuugccgcuuuac

SEQ ID NO: 127566 - RNA, 25 nt, Human
aauaaauaauguuacgaucauacaa

SEQ ID NO: 127567 - RNA, 18 nt, Human
aauauuucugguguuuug

SEQ ID NO: 127568 - RNA, 19 nt, Human
acaaacauucucaggucuc

SEQ ID NO: 127569 - RNA, 23 nt, Human
acauagaacuaggaaaagaaucc

SEQ ID NO: 127570 - RNA, 20 nt, Human
accauaaaaugggcacauuu

SEQ ID NO: 127571 - RNA, 23 nt, Human
acuccgggagagaacgagaagga

SEQ ID NO: 127572 - RNA, 18 nt, Human
agaaaaaaaaaccuucag

SEQ ID NO: 127573 - RNA, 21 nt, Human
agaaaaccaaguuucuacaaa

SEQ ID NO: 127574 - RNA, 19 nt, Human
agaaagggagagaaggggg

SEQ ID NO: 127575 - RNA, 18 nt, Human
agaaggagcgaggggggc

SEQ ID NO: 127576 - RNA, 25 nt, Human
agaagggggagaaaaggaggugaag

SEQ ID NO: 127577 - RNA, 23 nt, Human
agaauccucuaugcccccuacaa

SEQ ID NO: 127578 - RNA, 22 nt, Human
agaccuaaaagguauagaagcg

SEQ ID NO: 127579 - RNA, 19 nt, Human
agacggaggagaagcgaga

SEQ ID NO: 127580 - RNA, 18 nt, Human
agagaagggggagaaaag

SEQ ID NO: 127581 - RNA, 18 nt, Human
aggaugaaggugaaaagg

SEQ ID NO: 127582 - RNA, 24 nt, Human
aggcuaccauagaaaaauuuccaa

SEQ ID NO: 127583 - RNA, 24 nt, Human
agggaaacaaacacauagaacuag

SEQ ID NO: 127584 - RNA, 20 nt, Human
aggggaaggggaaaaaaggg

SEQ ID NO: 127585 - RNA, 22 nt, Human
aggggggagaaggagcgagggg

SEQ ID NO: 127586 - RNA, 23 nt, Human
aggggggagaaggagcgaggggg

SEQ ID NO: 127587 - RNA, 23 nt, Human
aggggggagaaggagcgaggggg

SEQ ID NO: 127588 - RNA, 20 nt, Human
augaaggugaaaaggaggag

SEQ ID NO: 127589 - RNA, 19 nt, Human
caacuccgggagagaacga

SEQ ID NO: 127590 - RNA, 21 nt, Human
cacauagccacccuucccucu

SEQ ID NO: 127591 - RNA, 21 nt, Human
cagaagaggaaaaugguucau

SEQ ID NO: 127592 - RNA, 21 nt, Human
ccacacacccccgggagggga

SEQ ID NO: 127593 - RNA, 19 nt, Human
ccacaggugaaaaucaaug

SEQ ID NO: 127594 - RNA, 18 nt, Human
ccccgggaggggaagggg

SEQ ID NO: 127595 - RNA, 23 nt, Human
cgaaugucugacugcaaaguucu

SEQ ID NO: 127596 - RNA, 23 nt, Human
cgggaggggaaggggaaaaaagg

SEQ ID NO: 127597 - RNA, 21 nt, Human
cuaaagcauucucaaaggucu

SEQ ID NO: 127598 - RNA, 25 nt, Human
cuauauaccacuaccaguuuggaau

SEQ ID NO: 127599 - RNA, 20 nt, Human
cucuaugccaggagcagagc

SEQ ID NO: 127600 - RNA, 24 nt, Human
cugaccaacagggugacaaaacau

SEQ ID NO: 127601 - RNA, 19 nt, Human
cugcuacaagagucucuug

SEQ ID NO: 127602 - RNA, 21 nt, Human
cuuaaucaaguaauuaauacc

SEQ ID NO: 127603 - RNA, 20 nt, Human
cuugcuaaaauuuccuuuua

SEQ ID NO: 127604 - RNA, 18 nt, Human
cuuucugaccaacagggu

SEQ ID NO: 127605 - RNA, 18 nt, Human
gaacuuagcuggcuaaua

SEQ ID NO: 127606 - RNA, 23 nt, Human
gaccaacagggugacaaaacaua

SEQ ID NO: 127607 - RNA, 22 nt, Human
gagaacgagaaggagaaaggga

SEQ ID NO: 127608 - RNA, 19 nt, Human
gagagaagggggagaaaag

SEQ ID NO: 127609 - RNA, 18 nt, Human
gcaaaaaacaaagagaag

SEQ ID NO: 127610 - RNA, 21 nt, Human
gcaaaaaacaaagagaaggua

SEQ ID NO: 127611 - RNA, 19 nt, Human
gcacuguuugccgcuuuac

SEQ ID NO: 127612 - RNA, 18 nt, Human
gccacaauccauucccaa

SEQ ID NO: 127613 - RNA, 18 nt, Human
gccaggagcagagcaaug

SEQ ID NO: 127614 - RNA, 19 nt, Human
gcucaaauaacuaggcuac

SEQ ID NO: 127615 - RNA, 20 nt, Human
ggaaaagaaucccuugugcu

SEQ ID NO: 127616 - RNA, 22 nt, Human
ggaaaaguugccacacaccccc

SEQ ID NO: 127617 - RNA, 25 nt, Human
ggaagaccuaaaagguauagaagcg

SEQ ID NO: 127618 - RNA, 21 nt, Human
ggagagaagggggagaaaagg

SEQ ID NO: 127619 - RNA, 23 nt, Human
ggaggagguuugaaggacuuggg

SEQ ID NO: 127620 - RNA, 22 nt, Human
ggaggggaaggggaaaaaaggg

SEQ ID NO: 127621 - RNA, 23 nt, Human
ggaggggaaggggaaaaaagggg

SEQ ID NO: 127622 - RNA, 23 nt, Human
ggcaacaacaacuccgggagaga

SEQ ID NO: 127623 - RNA, 27 nt, Human
ggggagggucggcuguuguuguguggg

SEQ ID NO: 127624 - RNA, 23 nt, Human
gggucggcuguuguugugugggu

SEQ ID NO: 127625 - RNA, 26 nt, Human
ggguggggguggggcggggagggucc

SEQ ID NO: 127626 - RNA, 25 nt, Human
guacaacaaaauucguaauaaccuu

SEQ ID NO: 127627 - RNA, 23 nt, Human
uaaauaaaaauaaugcucccuuu

SEQ ID NO: 127628 - RNA, 21 nt, Human
uaaccacugcuacaagagucu

SEQ ID NO: 127629 - RNA, 18 nt, Human
uaacuaggcuaccauaga

SEQ ID NO: 127630 - RNA, 22 nt, Human
uaacuaggcuaccauagaaaaa

SEQ ID NO: 127631 - RNA, 20 nt, Human
uaagaaaaaaaaaccuucag

SEQ ID NO: 127632 - RNA, 21 nt, Human
uaagaaaaaaaaaccuucagu

SEQ ID NO: 127633 - RNA, 18 nt, Human
uacaugccugcaugcguu

SEQ ID NO: 127634 - RNA, 20 nt, Human
uacugugacuccagacaaau

SEQ ID NO: 127635 - RNA, 25 nt, Human
uagaaaaaaacaaagcuaggucuua

SEQ ID NO: 127636 - RNA, 20 nt, Human
uagaaaacuuuaaauauaua

SEQ ID NO: 127637 - RNA, 22 nt, Human
uagguccuacaugaagaugagu

SEQ ID NO: 127638 - RNA, 22 nt, Human
uaguauacuacugcauacauaa

SEQ ID NO: 127639 - RNA, 24 nt, Human
uauauaccacuaccaguuuggaau

SEQ ID NO: 127640 - RNA, 20 nt, Human
uauuuacaugccugcaugcg

SEQ ID NO: 127641 - RNA, 22 nt, Human
ucaagaauccucuaugcccccu

SEQ ID NO: 127642 - RNA, 21 nt, Human
ucaauggagaaaacuuuuuuu

SEQ ID NO: 127643 - RNA, 19 nt, Human
ucaggagaaaacccacaau

SEQ ID NO: 127644 - RNA, 22 nt, Human
ucccuugugcucaaacaacaaa

SEQ ID NO: 127645 - RNA, 23 nt, Human
uccgggggcugggaucgagggcu

SEQ ID NO: 127646 - RNA, 22 nt, Human
ucgcucuagcacaaaguuaagg

SEQ ID NO: 127647 - RNA, 26 nt, Human
ucuaaaauuuucauuuuccuaaacuc

SEQ ID NO: 127648 - RNA, 18 nt, Human
ugaaaacacauacuguaa

SEQ ID NO: 127649 - RNA, 21 nt, Human
ugaaaacacauacuguaacuu

SEQ ID NO: 127650 - RNA, 20 nt, Human
ugaaaacauguuacauuuau

SEQ ID NO: 127651 - RNA, 22 nt, Human
ugaaaauaacacauagccaccc

SEQ ID NO: 127652 - RNA, 18 nt, Human
ugaaggugaaaaggagga

SEQ ID NO: 127653 - RNA, 19 nt, Human
ugaaggugaaaaggaggag

SEQ ID NO: 127654 - RNA, 18 nt, Human
ugaauaagaagcaacauu

SEQ ID NO: 127655 - RNA, 20 nt, Human
ugaauaagaagcaacauuau

SEQ ID NO: 127656 - RNA, 23 nt, Human
ugacuccagacaaauauuuacau

SEQ ID NO: 127657 - RNA, 19 nt, Human
ugagcuacacaaaagaauu

SEQ ID NO: 127658 - RNA, 23 nt, Human
ugcaaaaaacaaagagaagguaa

SEQ ID NO: 127659 - RNA, 25 nt, Human
ugcaaaguucuuuucuauaacaugg

SEQ ID NO: 127660 - RNA, 22 nt, Human
ugcagcuuggggcacuagccua

SEQ ID NO: 127661 - RNA, 26 nt, Human
ugcauacauaauaccuuccuugugug

SEQ ID NO: 127662 - RNA, 24 nt, Human
ugccaaaacacaaauuuccaaacc

SEQ ID NO: 127663 - RNA, 19 nt, Human
ugcugguuucuggaggaca

SEQ ID NO: 127664 - RNA, 20 nt, Human
ugcuguucagccacaaucca

SEQ ID NO: 127665 - RNA, 21 nt, Human
ugggaucgagggcugguuugg

SEQ ID NO: 127666 - RNA, 18 nt, Human
uggggguggggcggggag

SEQ ID NO: 127667 - RNA, 18 nt, Human
uggggguggggguggggc

SEQ ID NO: 127668 - RNA, 21 nt, Human
uggguaaccacugcuacaaga

SEQ ID NO: 127669 - RNA, 19 nt, Human
ugguauuaaaaagaugaac

SEQ ID NO: 127670 - RNA, 21 nt, Human
ugguuuggggguggggguggg

SEQ ID NO: 127671 - RNA, 23 nt, Human
uguacagauuuuguacaacaaaa

SEQ ID NO: 127672 - RNA, 22 nt, Human
uguagaauacuuaaacuuuuaa

SEQ ID NO: 127673 - RNA, 18 nt, Human
uguccagcagcaaguugc

SEQ ID NO: 127674 - RNA, 23 nt, Human
uguucuugcugguuucuggagga

SEQ ID NO: 127675 - RNA, 19 nt, Human
uuaaaaccagaaagacauc

SEQ ID NO: 127676 - RNA, 22 nt, Human
uuaaauacaauaacaguaaacg

SEQ ID NO: 127677 - RNA, 19 nt, Human
uuagaaaaaaacaaagcua

SEQ ID NO: 127678 - RNA, 23 nt, Human
uuccauuagaaaaaaacaaagcu

SEQ ID NO: 127679 - RNA, 21 nt, Human
uugaagauuuugcuguuuugu

SEQ ID NO: 127680 - RNA, 20 nt, Human
uugacacaaguccauucaau

SEQ ID NO: 127681 - RNA, 22 nt, Human
uuuaacucuguauacaauuguc

SEQ ID NO: 127682 - RNA, 21 nt, Human
uuuacaaacauucucaggucu

SEQ ID NO: 127683 - RNA, 19 nt, Human
uuuucagaagaggaaaaug

SEQ ID NO: 127684 - RNA, 18 nt, Human
aagcugccaucuccagaa

SEQ ID NO: 127685 - RNA, 22 nt, Human
aagcugccaucuccagaacucu

SEQ ID NO: 127686 - RNA, 19 nt, Human
agguacuccgguccgcgcc

SEQ ID NO: 127687 - RNA, 22 nt, Human
auaagcugccaucuccagaacu

SEQ ID NO: 127688 - RNA, 22 nt, Human
ccgguccgcgccccaaacucuu

SEQ ID NO: 127689 - RNA, 23 nt, Human
cgcaagguacuccgguccgcgcc

SEQ ID NO: 127690 - RNA, 22 nt, Human
gaacucuuauccaggaaauuca

SEQ ID NO: 127691 - RNA, 24 nt, Human
gcaagguacuccgguccgcgcccc

SEQ ID NO: 127692 - RNA, 22 nt, Human
gccccaaacucuuggaggaccc

SEQ ID NO: 127693 - RNA, 21 nt, Human
uagcaguaagugucaaauccu

SEQ ID NO: 127694 - RNA, 22 nt, Human
uccauguguccaauaagcugcc

SEQ ID NO: 127695 - RNA, 21 nt, Human
ucuuauccaggaaauucaaag

SEQ ID NO: 127696 - RNA, 21 nt, Human
ugaacucugggcuuuucuccu

SEQ ID NO: 127697 - RNA, 25 nt, Human
uguucugacacacagugaacucugg

SEQ ID NO: 127698 - RNA, 20 nt, Human
uuuuuuuuuuuuugaggagu

SEQ ID NO: 127699 - RNA, 22 nt, Human
aaaucacuuuccuucucuuuuc

SEQ ID NO: 127700 - RNA, 22 nt, Human
aagaagacaccuuucacaggcu

SEQ ID NO: 127701 - RNA, 21 nt, Human
aaguggaaauaacauuacaga

SEQ ID NO: 127702 - RNA, 27 nt, Human
acuuuuaaagacauuaagucaaagaag

SEQ ID NO: 127703 - RNA, 20 nt, Human
agaauguucacugucauaaa

SEQ ID NO: 127704 - RNA, 20 nt, Human
agacaccuuucacaggcuuu

SEQ ID NO: 127705 - RNA, 21 nt, Human
aggaaaggaaucacucucaau

SEQ ID NO: 127706 - RNA, 21 nt, Human
aggaaucacucucaauucugc

SEQ ID NO: 127707 - RNA, 24 nt, Human
aucaccaucaacaccccugguuca

SEQ ID NO: 127708 - RNA, 23 nt, Human
caaacucuauuugugcaacaaag

SEQ ID NO: 127709 - RNA, 24 nt, Human
caccagcauguuuuaccuuuaaaa

SEQ ID NO: 127710 - RNA, 19 nt, Human
cccgaaggaaagaugaaaa

SEQ ID NO: 127711 - RNA, 25 nt, Human
cuaaauacgaacaaaucucuaugcu

SEQ ID NO: 127712 - RNA, 23 nt, Human
cucccuuaucaccaucaacaccc

SEQ ID NO: 127713 - RNA, 26 nt, Human
cuccuugcucuguugacauuccuaac

SEQ ID NO: 127714 - RNA, 18 nt, Human
cuugcucuguugacauuc

SEQ ID NO: 127715 - RNA, 19 nt, Human
gagucgcagcuacgcccag

SEQ ID NO: 127716 - RNA, 21 nt, Human
ggacaucucgauucagaaaua

SEQ ID NO: 127717 - RNA, 19 nt, Human
uaaagacaaugaaagcauc

SEQ ID NO: 127718 - RNA, 22 nt, Human
uaagaaacuaggaacagucugu

SEQ ID NO: 127719 - RNA, 20 nt, Human
uaaguggaaauaacauuaca

SEQ ID NO: 127720 - RNA, 24 nt, Human
uacauguaaaaucagaauguucac

SEQ ID NO: 127721 - RNA, 22 nt, Human
uagaagagacugaauuggguuu

SEQ ID NO: 127722 - RNA, 19 nt, Human
ucacuuuccuucucuuuuc

SEQ ID NO: 127723 - RNA, 22 nt, Human
ucccauucuaaauacgaacaaa

SEQ ID NO: 127724 - RNA, 22 nt, Human
ucuucacauaucuucuucaacu

SEQ ID NO: 127725 - RNA, 21 nt, Human
uuaaagacaaugaaagcaucc

SEQ ID NO: 127726 - RNA, 22 nt, Human
uuaaagacaaugaaagcauccc

SEQ ID NO: 127727 - RNA, 21 nt, Human
uuccuaacacaucuuaaagac

SEQ ID NO: 127728 - RNA, 19 nt, Human
uuuauuucuauuuaggaaa

SEQ ID NO: 127729 - RNA, 18 nt, Human
uuucacaggcuuuuucca

SEQ ID NO: 127730 - RNA, 24 nt, Human
aaaaaaaaaaacaaugcacagaaa

SEQ ID NO: 127731 - RNA, 25 nt, Human
aaaaaaaaaaacaaugcacagaaaa

SEQ ID NO: 127732 - RNA, 22 nt, Human
aaaaaaaaaacaaugcacagaa

SEQ ID NO: 127733 - RNA, 22 nt, Human
aaaaaaggcaaaagaaccccag

SEQ ID NO: 127734 - RNA, 25 nt, Human
aaacaagcaaagccgucaguuccau

SEQ ID NO: 127735 - RNA, 25 nt, Human
aaaccaaaagcuguuaggcaaaaaa

SEQ ID NO: 127736 - RNA, 18 nt, Human
aaagucucuccagcugcu

SEQ ID NO: 127737 - RNA, 21 nt, Human
aacagcgggagagcaaaccca

SEQ ID NO: 127738 - RNA, 23 nt, Human
aagcaagugacuuggucccagag

SEQ ID NO: 127739 - RNA, 23 nt, Human
aagcaguuggcccacccuggagc

SEQ ID NO: 127740 - RNA, 27 nt, Human
aaguagcugcucuguguugugcacgcg

SEQ ID NO: 127741 - RNA, 28 nt, Human
acagacaacaccaugucguccgaggucc

SEQ ID NO: 127742 - RNA, 23 nt, Human
acagaguccaacggccaucacca

SEQ ID NO: 127743 - RNA, 19 nt, Human
acagcgggagagcaaaccc

SEQ ID NO: 127744 - RNA, 23 nt, Human
acccaaaauaacgcuucagacau

SEQ ID NO: 127745 - RNA, 21 nt, Human
acccucaaucaggggaaugga

SEQ ID NO: 127746 - RNA, 20 nt, Human
acccuggagcaccaaaguug

SEQ ID NO: 127747 - RNA, 20 nt, Human
accgugauauuccuuuuagg

SEQ ID NO: 127748 - RNA, 19 nt, Human
accuggaacauugggaauu

SEQ ID NO: 127749 - RNA, 24 nt, Human
acugcuuuuauuuaguuugauaug

SEQ ID NO: 127750 - RNA, 19 nt, Human
agaaaaaggguaaaacaaa

SEQ ID NO: 127751 - RNA, 23 nt, Human
agaaggaaauaaaaacacaucag

SEQ ID NO: 127752 - RNA, 21 nt, Human
agagaaaagggaugggguggg

SEQ ID NO: 127753 - RNA, 25 nt, Human
agagaacucucccccccuccuacca

SEQ ID NO: 127754 - RNA, 21 nt, Human
agagugggcgccccugaguca

SEQ ID NO: 127755 - RNA, 27 nt, Human
agccaauccagcggccagcuccgcgcg

SEQ ID NO: 127756 - RNA, 18 nt, Human
aggcaaaacgcagagagc

SEQ ID NO: 127757 - RNA, 23 nt, Human
aggcaaaacgcagagagccaggg

SEQ ID NO: 127758 - RNA, 19 nt, Human
aggcaugagcccagucacc

SEQ ID NO: 127759 - RNA, 21 nt, Human
aggccccugugucaggacccu

SEQ ID NO: 127760 - RNA, 25 nt, Human
aggcucccccacagggggacugcuc

SEQ ID NO: 127761 - RNA, 22 nt, Human
agggauggggugggucggggca

SEQ ID NO: 127762 - RNA, 21 nt, Human
agggcgcugagcgcaagggcg

SEQ ID NO: 127763 - RNA, 21 nt, Human
aguuugauauguuucuuuaca

SEQ ID NO: 127764 - RNA, 24 nt, Human
caaaacgcagagagccagggggcc

SEQ ID NO: 127765 - RNA, 25 nt, Human
caaaaugucccccacugaguguuuc

SEQ ID NO: 127766 - RNA, 21 nt, Human
caaaccaaaagcuguuaggca

SEQ ID NO: 127767 - RNA, 23 nt, Human
caaccaaguugacguagugugaa

SEQ ID NO: 127768 - RNA, 21 nt, Human
caagaaaagucaugcucaaaa

SEQ ID NO: 127769 - RNA, 19 nt, Human
caauggucugcaggccacc

SEQ ID NO: 127770 - RNA, 22 nt, Human
cacacagagcccagcgccggcg

SEQ ID NO: 127771 - RNA, 20 nt, Human
cacagaguccaacggccauc

SEQ ID NO: 127772 - RNA, 24 nt, Human
caccagggacuuggcgugagccag

SEQ ID NO: 127773 - RNA, 18 nt, Human
cacccucugcacaccugc

SEQ ID NO: 127774 - RNA, 24 nt, Human
caccuggaacauugggaauuguuu

SEQ ID NO: 127775 - RNA, 23 nt, Human
cagaaugcagaaaacacaucuua

SEQ ID NO: 127776 - RNA, 21 nt, Human
cagagaacucucccccccucc

SEQ ID NO: 127777 - RNA, 22 nt, Human
cagcugcuuugggguuugggag

SEQ ID NO: 127778 - RNA, 21 nt, Human
cagguccaaguuugcucaagu

SEQ ID NO: 127779 - RNA, 18 nt, Human
caguuccauggaaucaaa

SEQ ID NO: 127780 - RNA, 22 nt, Human
caucagaaauaaucucaccagg

SEQ ID NO: 127781 - RNA, 23 nt, Human
caucagaaauaaucucaccaggu

SEQ ID NO: 127782 - RNA, 20 nt, Human
cauggugcuuucagagccag

SEQ ID NO: 127783 - RNA, 20 nt, Human
ccaagagaccccuccagcuu

SEQ ID NO: 127784 - RNA, 23 nt, Human
ccacaggaggagaaucgaagcag

SEQ ID NO: 127785 - RNA, 24 nt, Human
ccacccaaaaauuauacauacaag

SEQ ID NO: 127786 - RNA, 23 nt, Human
ccacccacccacccucaaucagg

SEQ ID NO: 127787 - RNA, 21 nt, Human
ccacugagcccgcauuuacag

SEQ ID NO: 127788 - RNA, 24 nt, Human
ccagcccagcgcucaggggagcag

SEQ ID NO: 127789 - RNA, 18 nt, Human
ccaggacgccgccaccgc

SEQ ID NO: 127790 - RNA, 18 nt, Human
ccauguuacauccugcag

SEQ ID NO: 127791 - RNA, 26 nt, Human
cccacaagcaguuggcccacccugga

SEQ ID NO: 127792 - RNA, 27 nt, Human
ccccaggacgccgccaccgccgcuccc

SEQ ID NO: 127793 - RNA, 19 nt, Human
ccccaucgccuccaguugc

SEQ ID NO: 127794 - RNA, 20 nt, Human
ccccaucgccuccaguugcu

SEQ ID NO: 127795 - RNA, 21 nt, Human
cccccacaagcaguuggccca

SEQ ID NO: 127796 - RNA, 24 nt, Human
cccccacaagcaguuggcccaccc

SEQ ID NO: 127797 - RNA, 21 nt, Human
cccuaaaaaguacccaaaaua

SEQ ID NO: 127798 - RNA, 21 nt, Human
ccgccagaccuuuuccaguaa

SEQ ID NO: 127799 - RNA, 22 nt, Human
ccgccgccaccgccaagccuaa

SEQ ID NO: 127800 - RNA, 22 nt, Human
ccgccgccgccaccgccaagcc

SEQ ID NO: 127801 - RNA, 28 nt, Human
ccgccgccgccaccgccaaggccucggc

SEQ ID NO: 127802 - RNA, 21 nt, Human
ccuaccaggccuccccuccug

SEQ ID NO: 127803 - RNA, 21 nt, Human
ccucccaggugcccccacaag

SEQ ID NO: 127804 - RNA, 22 nt, Human
ccucccuaaaaaguacccaaaa

SEQ ID NO: 127805 - RNA, 21 nt, Human
ccuccuaccaggccuccccuc

SEQ ID NO: 127806 - RNA, 21 nt, Human
ccugcuccaucccggagcaca

SEQ ID NO: 127807 - RNA, 22 nt, Human
ccuggccccaggacgccgccac

SEQ ID NO: 127808 - RNA, 18 nt, Human
ccuggguccacccaccca

SEQ ID NO: 127809 - RNA, 23 nt, Human
ccuggguccacccacccacccuc

SEQ ID NO: 127810 - RNA, 22 nt, Human
cgcauuuacaggcucccccaca

SEQ ID NO: 127811 - RNA, 18 nt, Human
cgccgccaccgccgcucc

SEQ ID NO: 127812 - RNA, 21 nt, Human
cgccgccaccgccgcuccccg

SEQ ID NO: 127813 - RNA, 22 nt, Human
cgccgccaccgccgcuccccgg

SEQ ID NO: 127814 - RNA, 19 nt, Human
cgcggcagguguucgcucc

SEQ ID NO: 127815 - RNA, 21 nt, Human
cggccaucaccagcccagcgc

SEQ ID NO: 127816 - RNA, 23 nt, Human
cuaaaaaaggcaaaagaacccca

SEQ ID NO: 127817 - RNA, 22 nt, Human
cuaccaggccuccccuccugag

SEQ ID NO: 127818 - RNA, 24 nt, Human
cuacccugccuccacccaggcgcu

SEQ ID NO: 127819 - RNA, 23 nt, Human
cucuccaucucacagaguccaac

SEQ ID NO: 127820 - RNA, 22 nt, Human
cuggagcaccaaaguugggggg

SEQ ID NO: 127821 - RNA, 22 nt, Human
cuggcaacagcgggagagcaaa

SEQ ID NO: 127822 - RNA, 23 nt, Human
cuucucuaaguuugaaacacccu

SEQ ID NO: 127823 - RNA, 24 nt, Human
gaaaaaaaaaaacaaugcacagaa

SEQ ID NO: 127824 - RNA, 22 nt, Human
gaacaaaccaaaagcuguuagg

SEQ ID NO: 127825 - RNA, 20 nt, Human
gacuugggcaggggagaggg

SEQ ID NO: 127826 - RNA, 24 nt, Human
gagccagggccgggaggcccccaa

SEQ ID NO: 127827 - RNA, 19 nt, Human
gagccuagcaaccgccuga

SEQ ID NO: 127828 - RNA, 25 nt, Human
gaggcccccaaucaggcucuggggu

SEQ ID NO: 127829 - RNA, 19 nt, Human
gagugccagagaaaaggga

SEQ ID NO: 127830 - RNA, 20 nt, Human
gcaaacccagcaccagggac

SEQ ID NO: 127831 - RNA, 28 nt, Human
gcaaagcaauuccccauacccacccaaa

SEQ ID NO: 127832 - RNA, 20 nt, Human
gcaacaggccauucugggcc

SEQ ID NO: 127833 - RNA, 20 nt, Human
gcauuuacaggcucccccac

SEQ ID NO: 127834 - RNA, 21 nt, Human
gccacagccaccacugccucu

SEQ ID NO: 127835 - RNA, 18 nt, Human
gccaccacugccucuugg

SEQ ID NO: 127836 - RNA, 23 nt, Human
gccagccaucaaaaaugaagcga

SEQ ID NO: 127837 - RNA, 19 nt, Human
gcgacggagcuguuuggaa

SEQ ID NO: 127838 - RNA, 23 nt, Human
gcggccggagccuagcaaccgcc

SEQ ID NO: 127839 - RNA, 21 nt, Human
gcugagcgcaagggcggggcg

SEQ ID NO: 127840 - RNA, 24 nt, Human
ggacacacaaauccucugcaaaac

SEQ ID NO: 127841 - RNA, 19 nt, Human
ggagcacacagagcccagc

SEQ ID NO: 127842 - RNA, 23 nt, Human
ggcaaaaaauaaaaauaaaaaag

SEQ ID NO: 127843 - RNA, 20 nt, Human
ggcaaaacgcagagagccag

SEQ ID NO: 127844 - RNA, 21 nt, Human
ggcaccaggggaaacucugac

SEQ ID NO: 127845 - RNA, 18 nt, Human
gggcaggggagaggggcu

SEQ ID NO: 127846 - RNA, 21 nt, Human
gggcccugcccuacccugccu

SEQ ID NO: 127847 - RNA, 20 nt, Human
ggggcugggcccugugggag

SEQ ID NO: 127848 - RNA, 19 nt, Human
ggucggggcaggacugugg

SEQ ID NO: 127849 - RNA, 23 nt, Human
gguuccucggucccuccaccucc

SEQ ID NO: 127850 - RNA, 21 nt, Human
gguuugggaggaccagagagg

SEQ ID NO: 127851 - RNA, 23 nt, Human
guaaaacaaaauagguugaugug

SEQ ID NO: 127852 - RNA, 23 nt, Human
guaggacagagaacucucccccc

SEQ ID NO: 127853 - RNA, 21 nt, Human
gugaacacuugaaugugagau

SEQ ID NO: 127854 - RNA, 20 nt, Human
gugaauagaaaaaacaguac

SEQ ID NO: 127855 - RNA, 21 nt, Human
gugagccagggccgggaggcc

SEQ ID NO: 127856 - RNA, 22 nt, Human
guggagaccuuugaccucccag

SEQ ID NO: 127857 - RNA, 20 nt, Human
uaaaaaaggcaaaagaaccc

SEQ ID NO: 127858 - RNA, 26 nt, Human
uaaaaaaggcaaaagaaccccagugu

SEQ ID NO: 127859 - RNA, 18 nt, Human
uaaaaacacaucaguggu

SEQ ID NO: 127860 - RNA, 20 nt, Human
uacaggcucccccacagggg

SEQ ID NO: 127861 - RNA, 23 nt, Human
uacccacccaaaaauuauacaua

SEQ ID NO: 127862 - RNA, 19 nt, Human
uagaaggaaauaaaaacac

SEQ ID NO: 127863 - RNA, 23 nt, Human
uagacacacgugaauagaaaaaa

SEQ ID NO: 127864 - RNA, 22 nt, Human
uaggucaggugucggcucccgg

SEQ ID NO: 127865 - RNA, 24 nt, Human
uauggcaacaggccauucugggcc

SEQ ID NO: 127866 - RNA, 18 nt, Human
uauucuguucacugcccc

SEQ ID NO: 127867 - RNA, 25 nt, Human
ucaccaggucagaucccacuugugc

SEQ ID NO: 127868 - RNA, 23 nt, Human
ucaccuggaacauugggaauugu

SEQ ID NO: 127869 - RNA, 25 nt, Human
ucagugguuggugaacacuugaaug

SEQ ID NO: 127870 - RNA, 21 nt, Human
uccacagacaacaccaugucg

SEQ ID NO: 127871 - RNA, 27 nt, Human
uccacagacaacaccaugucgucucca

SEQ ID NO: 127872 - RNA, 21 nt, Human
uccacauggugcuuucagagc

SEQ ID NO: 127873 - RNA, 19 nt, Human
uccacccacccacccucaa

SEQ ID NO: 127874 - RNA, 23 nt, Human
uccauggaaucaacacuuaagag

SEQ ID NO: 127875 - RNA, 18 nt, Human
ucccaggugcccccacaa

SEQ ID NO: 127876 - RNA, 22 nt, Human
uccccaaagucucuccagcugc

SEQ ID NO: 127877 - RNA, 18 nt, Human
uccccagccgccagaccu

SEQ ID NO: 127878 - RNA, 18 nt, Human
uccccggggauucggcgc

SEQ ID NO: 127879 - RNA, 19 nt, Human
ucccuaaaaaguacccaaa

SEQ ID NO: 127880 - RNA, 18 nt, Human
ucccuccaccuccacucc

SEQ ID NO: 127881 - RNA, 18 nt, Human
uccuggccccaggacgcc

SEQ ID NO: 127882 - RNA, 23 nt, Human
ucggcgcgaagcugccgccgccg

SEQ ID NO: 127883 - RNA, 22 nt, Human
ucuccacagacaacaccauguc

SEQ ID NO: 127884 - RNA, 18 nt, Human
ucugcacaccugcuccau

SEQ ID NO: 127885 - RNA, 20 nt, Human
ucugcauggcagugcccaau

SEQ ID NO: 127886 - RNA, 22 nt, Human
ucugcuaaaaaaggcaaaagaa

SEQ ID NO: 127887 - RNA, 23 nt, Human
ugaauagaaaaaacaguacaguu

SEQ ID NO: 127888 - RNA, 19 nt, Human
ugaccucccaggugccccc

SEQ ID NO: 127889 - RNA, 20 nt, Human
ugacuuggucccagagcugg

SEQ ID NO: 127890 - RNA, 18 nt, Human
ugagagcaguaggacaga

SEQ ID NO: 127891 - RNA, 24 nt, Human
ugauauguuucuuuacagaaugca

SEQ ID NO: 127892 - RNA, 23 nt, Human
ugcacagaaaaaggguaaaacaa

SEQ ID NO: 127893 - RNA, 21 nt, Human
ugcagaaaacacaucuuaaaa

SEQ ID NO: 127894 - RNA, 24 nt, Human
ugcagaaaacacaucuuaaaauca

SEQ ID NO: 127895 - RNA, 24 nt, Human
ugcagauggacggacggauguucu

SEQ ID NO: 127896 - RNA, 20 nt, Human
uggaaggccuuucaaagccc

SEQ ID NO: 127897 - RNA, 24 nt, Human
uggaaggccuuucaaagcccucac

SEQ ID NO: 127898 - RNA, 23 nt, Human
uggagcaccaaaguugggggcca

SEQ ID NO: 127899 - RNA, 23 nt, Human
uggauacauuauugcgaaaggca

SEQ ID NO: 127900 - RNA, 22 nt, Human
ugggcaggggagaggggcuggg

SEQ ID NO: 127901 - RNA, 22 nt, Human
uggggcaccaggggaaacucug

SEQ ID NO: 127902 - RNA, 18 nt, Human
uggugcuuucagagccag

SEQ ID NO: 127903 - RNA, 18 nt, Human
ugguggagaccuuugacc

SEQ ID NO: 127904 - RNA, 24 nt, Human
ugguggagaccuuugaccucccag

SEQ ID NO: 127905 - RNA, 21 nt, Human
ugugaaaaaauaguauuccuu

SEQ ID NO: 127906 - RNA, 18 nt, Human
ugugguggagaccuuuga

SEQ ID NO: 127907 - RNA, 21 nt, Human
uguucgcuccuccuggcccca

SEQ ID NO: 127908 - RNA, 22 nt, Human
uuccauguuacauccugcagcu

SEQ ID NO: 127909 - RNA, 23 nt, Human
uuccucggucccuccaccuccac

SEQ ID NO: 127910 - RNA, 23 nt, Human
uucugggccagccacgucucugc

SEQ ID NO: 127911 - RNA, 19 nt, Human
uugcuggcacuccucccca

SEQ ID NO: 127912 - RNA, 21 nt, Human
uuggagucccuuuuucaugga

SEQ ID NO: 127913 - RNA, 21 nt, Human
uuuggaaggccuuucaaagcc

SEQ ID NO: 127914 - RNA, 22 nt, Human
uuuuccauguuacauccugcag

SEQ ID NO: 127915 - RNA, 20 nt, Human
aacccucuggcuuuucgagg

SEQ ID NO: 127916 - RNA, 30 nt, Human
aacucauucccuuaguucuuacucucccag

SEQ ID NO: 127917 - RNA, 24 nt, Human
agagggaaauuuggcauugcuguu

SEQ ID NO: 127918 - RNA, 23 nt, Human
agcagacuaggacaucucuagac

SEQ ID NO: 127919 - RNA, 19 nt, Human
agccagugagcagacuagg

SEQ ID NO: 127920 - RNA, 19 nt, Human
agcuaccugucuccagccu

SEQ ID NO: 127921 - RNA, 22 nt, Human
aggaucccccaucucacgagag

SEQ ID NO: 127922 - RNA, 24 nt, Human
caaccugaugcacccaagugacaa

SEQ ID NO: 127923 - RNA, 18 nt, Human
cacaggaucccccaucuc

SEQ ID NO: 127924 - RNA, 22 nt, Human
caucagccugcacaggaucccc

SEQ ID NO: 127925 - RNA, 19 nt, Human
ccagaaaggcuggugguug

SEQ ID NO: 127926 - RNA, 19 nt, Human
cccaggcagcugugccgag

SEQ ID NO: 127927 - RNA, 18 nt, Human
ccuaaccuuaaucucauc

SEQ ID NO: 127928 - RNA, 19 nt, Human
ccucggagcuaccugucuc

SEQ ID NO: 127929 - RNA, 20 nt, Human
ccucuaagguccuuuaugag

SEQ ID NO: 127930 - RNA, 19 nt, Human
ccugcagcagaucggcugu

SEQ ID NO: 127931 - RNA, 22 nt, Human
cgaggacgcaggguacccuacu

SEQ ID NO: 127932 - RNA, 18 nt, Human
cggaggacaaccugaugc

SEQ ID NO: 127933 - RNA, 20 nt, Human
cuccagccucauucuuuggc

SEQ ID NO: 127934 - RNA, 18 nt, Human
cucuucuuuggugucucc

SEQ ID NO: 127935 - RNA, 19 nt, Human
cuggagaacagcaccagaa

SEQ ID NO: 127936 - RNA, 23 nt, Human
gaaguccucccucggagcuaccu

SEQ ID NO: 127937 - RNA, 18 nt, Human
gacacaguugcugaccug

SEQ ID NO: 127938 - RNA, 22 nt, Human
gacccaggcagcugugccgaga

SEQ ID NO: 127939 - RNA, 24 nt, Human
gagcaggacagucaggcccuccac

SEQ ID NO: 127940 - RNA, 18 nt, Human
gcaccagaaaggcuggug

SEQ ID NO: 127941 - RNA, 25 nt, Human
ggaaauuuggcauugcuguucccug

SEQ ID NO: 127942 - RNA, 22 nt, Human
gugagcaggacagucaggcccu

SEQ ID NO: 127943 - RNA, 22 nt, Human
guggguguuucugcacaauucg

SEQ ID NO: 127944 - RNA, 18 nt, Human
uacccuacugccaccagc

SEQ ID NO: 127945 - RNA, 18 nt, Human
uaccugucuccagccuca

SEQ ID NO: 127946 - RNA, 22 nt, Human
uaggacaucucuagacaggaaa

SEQ ID NO: 127947 - RNA, 19 nt, Human
uccacaagcacuguucugg

SEQ ID NO: 127948 - RNA, 22 nt, Human
ucugcacaauucgcauuccacc

SEQ ID NO: 127949 - RNA, 23 nt, Human
ucuuucucuucuuuggugucucc

SEQ ID NO: 127950 - RNA, 24 nt, Human
ucuuucucuucuuuggugucuccu

SEQ ID NO: 127951 - RNA, 19 nt, Human
ugacuaggugaacccucug

SEQ ID NO: 127952 - RNA, 22 nt, Human
ugccagaaguccucccucggag

SEQ ID NO: 127953 - RNA, 18 nt, Human
ugccgagaucucaugcca

SEQ ID NO: 127954 - RNA, 19 nt, Human
uggagaacagcaccagaaa

SEQ ID NO: 127955 - RNA, 23 nt, Human
uggcagacgugaacuggagaaaa

SEQ ID NO: 127956 - RNA, 23 nt, Human
uucuuuggcauguugacuccugg

SEQ ID NO: 127957 - RNA, 18 nt, Human
acaugcugugaucuuggc

SEQ ID NO: 127958 - RNA, 18 nt, Human
augcagguccagagccaa

SEQ ID NO: 127959 - RNA, 24 nt, Human
caagggccuggcuccucuuccugu

SEQ ID NO: 127960 - RNA, 20 nt, Human
cacgcauucacagugaaacc

SEQ ID NO: 127961 - RNA, 21 nt, Human
cagauguccacugucuuccuc

SEQ ID NO: 127962 - RNA, 24 nt, Human
cagauguccacugucuuccucaca

SEQ ID NO: 127963 - RNA, 22 nt, Human
cagcauaaagcagauguccacu

SEQ ID NO: 127964 - RNA, 23 nt, Human
cagguccagagccaacugcaguc

SEQ ID NO: 127965 - RNA, 20 nt, Human
caguccuguccaaucccaua

SEQ ID NO: 127966 - RNA, 24 nt, Human
cauucccucaccgugagucgagga

SEQ ID NO: 127967 - RNA, 24 nt, Human
cccauagguacaagggccuggcuc

SEQ ID NO: 127968 - RNA, 23 nt, Human
ccgacacacgcugccuggggccg

SEQ ID NO: 127969 - RNA, 18 nt, Human
ccucaccgugagucgagg

SEQ ID NO: 127970 - RNA, 19 nt, Human
ccuggcuccucuuccugug

SEQ ID NO: 127971 - RNA, 19 nt, Human
cgacacacgcugccugggg

SEQ ID NO: 127972 - RNA, 19 nt, Human
ggccuggcuccucuuccug

SEQ ID NO: 127973 - RNA, 25 nt, Human
uaggaaaagagccauaauuaucuua

SEQ ID NO: 127974 - RNA, 19 nt, Human
ucccauagguacaagggcc

SEQ ID NO: 127975 - RNA, 20 nt, Human
ucccucaccgugagucgagg

SEQ ID NO: 127976 - RNA, 25 nt, Human
ugaaaaaccacauccaauaaacuga

SEQ ID NO: 127977 - RNA, 18 nt, Human
ugagucgaggacuaguuc

SEQ ID NO: 127978 - RNA, 24 nt, Human
ugauauaaaguuuuaggaacaagg

SEQ ID NO: 127979 - RNA, 18 nt, Human
uuaaaugugaaaaaccac

SEQ ID NO: 127980 - RNA, 19 nt, Human
uuaaaugugaaaaaccaca

SEQ ID NO: 127981 - RNA, 24 nt, Human
uuccucacaugcugugaucuuggc

SEQ ID NO: 127982 - RNA, 22 nt, Human
aaaaaaagaaaaaaacaaacaa

SEQ ID NO: 127983 - RNA, 23 nt, Human
aaaacagaaaaacugucagaaaa

SEQ ID NO: 127984 - RNA, 23 nt, Human
aaaugucuuccuagagcaacaac

SEQ ID NO: 127985 - RNA, 18 nt, Human
aaauuaucaguaagaagc

SEQ ID NO: 127986 - RNA, 21 nt, Human
aacacccucagcaucuccaaa

SEQ ID NO: 127987 - RNA, 23 nt, Human
aacccuacaacugugucaaccuu

SEQ ID NO: 127988 - RNA, 22 nt, Human
aaguacaggaaguuaugaaacc

SEQ ID NO: 127989 - RNA, 19 nt, Human
aaugaccauccacagacaa

SEQ ID NO: 127990 - RNA, 23 nt, Human
acaaaacagaaaaacugucagaa

SEQ ID NO: 127991 - RNA, 24 nt, Human
acaaaacagaaaaacugucagaaa

SEQ ID NO: 127992 - RNA, 29 nt, Human
acaaaacagaaaaacugucagaaaacaag

SEQ ID NO: 127993 - RNA, 19 nt, Human
acccucuucugcaaaaggc

SEQ ID NO: 127994 - RNA, 22 nt, Human
acccuguccaagccagaggcug

SEQ ID NO: 127995 - RNA, 22 nt, Human
agaagaauuaggacauguuccc

SEQ ID NO: 127996 - RNA, 21 nt, Human
agagauggaguccaaaacacu

SEQ ID NO: 127997 - RNA, 20 nt, Human
agagcaacaacacugaucau

SEQ ID NO: 127998 - RNA, 18 nt, Human
agccggggcggcggcggg

SEQ ID NO: 127999 - RNA, 18 nt, Human
agcucccccggucccucc

SEQ ID NO: 128000 - RNA, 23 nt, Human
aggggacuucagcuccgcuuccc

SEQ ID NO: 128001 - RNA, 22 nt, Human
agguacuggaggaugagagaug

SEQ ID NO: 128002 - RNA, 23 nt, Human
aguaagaagcaagguacuggagg

SEQ ID NO: 128003 - RNA, 23 nt, Human
auaggucucuguaacccuacaac

SEQ ID NO: 128004 - RNA, 23 nt, Human
caaaacaaaacucagggugaagc

SEQ ID NO: 128005 - RNA, 26 nt, Human
caaacaaaacagaaaaacugucagaa

SEQ ID NO: 128006 - RNA, 21 nt, Human
caaacacacccucuucugcaa

SEQ ID NO: 128007 - RNA, 23 nt, Human
cacccucuucugcaaaaggcaac

SEQ ID NO: 128008 - RNA, 23 nt, Human
cacugaucauaaaaucacccugg

SEQ ID NO: 128009 - RNA, 21 nt, Human
cagaaaaacugucagaaaaca

SEQ ID NO: 128010 - RNA, 21 nt, Human
cagaaaacaauacaaaacaaa

SEQ ID NO: 128011 - RNA, 24 nt, Human
cagaaaacaauacaaaacaaaacu

SEQ ID NO: 128012 - RNA, 22 nt, Human
cagacccuguccaagccagagg

SEQ ID NO: 128013 - RNA, 22 nt, Human
cagcauacagcaagggacagag

SEQ ID NO: 128014 - RNA, 21 nt, Human
caguccaaacagacccugucc

SEQ ID NO: 128015 - RNA, 18 nt, Human
caucaccaccgcuccugc

SEQ ID NO: 128016 - RNA, 22 nt, Human
ccagcgccggagacuagccggg

SEQ ID NO: 128017 - RNA, 19 nt, Human
cccgggcgccugggagcuc

SEQ ID NO: 128018 - RNA, 26 nt, Human
cccuacaacugugucaaccuucuacc

SEQ ID NO: 128019 - RNA, 24 nt, Human
cccucagcaucuccaaagggaagg

SEQ ID NO: 128020 - RNA, 18 nt, Human
ccggagggaggaguggca

SEQ ID NO: 128021 - RNA, 18 nt, Human
ccggccccagacccugcc

SEQ ID NO: 128022 - RNA, 18 nt, Human
ccggccccagacccugcc

SEQ ID NO: 128023 - RNA, 25 nt, Human
ccugccgcugcgaguugccgagucc

SEQ ID NO: 128024 - RNA, 22 nt, Human
ccuggcugugggugcaggaaga

SEQ ID NO: 128025 - RNA, 18 nt, Human
ccuucuccccuuuccuug

SEQ ID NO: 128026 - RNA, 18 nt, Human
cgccugggagcucccccg

SEQ ID NO: 128027 - RNA, 19 nt, Human
cggcguuggcucgguccgg

SEQ ID NO: 128028 - RNA, 24 nt, Human
cuaccugagaugagagggaaugau

SEQ ID NO: 128029 - RNA, 20 nt, Human
cucaggacagaagaauuagg

SEQ ID NO: 128030 - RNA, 19 nt, Human
cuccccuuuccuugccaaa

SEQ ID NO: 128031 - RNA, 24 nt, Human
cuccugcgccuccguaggccccuc

SEQ ID NO: 128032 - RNA, 20 nt, Human
gaaacacccucagcaucucc

SEQ ID NO: 128033 - RNA, 25 nt, Human
gacaacggaaugagacggggaggga

SEQ ID NO: 128034 - RNA, 22 nt, Human
gaccauaggcgccagcgccgga

SEQ ID NO: 128035 - RNA, 24 nt, Human
gcaaugaccauccacagacaacgg

SEQ ID NO: 128036 - RNA, 22 nt, Human
ggaacaaaagcaaacggaaaaa

SEQ ID NO: 128037 - RNA, 22 nt, Human
ggaggaugagagauggagucca

SEQ ID NO: 128038 - RNA, 18 nt, Human
ggagggaacaaagucccc

SEQ ID NO: 128039 - RNA, 23 nt, Human
ggcggcgggaacacagcuaggga

SEQ ID NO: 128040 - RNA, 19 nt, Human
gggaacacagcuagggagu

SEQ ID NO: 128041 - RNA, 19 nt, Human
gugcauauauauauauaca

SEQ ID NO: 128042 - RNA, 21 nt, Human
uaaaggacaaucaauaugaua

SEQ ID NO: 128043 - RNA, 19 nt, Human
uaagaagcaagguacugga

SEQ ID NO: 128044 - RNA, 19 nt, Human
uacauagugcauauauaua

SEQ ID NO: 128045 - RNA, 23 nt, Human
uaggacauguucccuccuaucaa

SEQ ID NO: 128046 - RNA, 19 nt, Human
uaggccccucaugcaucag

SEQ ID NO: 128047 - RNA, 18 nt, Human
uagggagugagugggggg

SEQ ID NO: 128048 - RNA, 22 nt, Human
uagugcauauauauauauacau

SEQ ID NO: 128049 - RNA, 23 nt, Human
uagugcauauauauauauacaua

SEQ ID NO: 128050 - RNA, 19 nt, Human
uauaacacagaaaagcgua

SEQ ID NO: 128051 - RNA, 20 nt, Human
uauaagaaauacacauuuug

SEQ ID NO: 128052 - RNA, 24 nt, Human
uauaagggacugccacaaaugaug

SEQ ID NO: 128053 - RNA, 23 nt, Human
uauauacauagugcauauauaua

SEQ ID NO: 128054 - RNA, 24 nt, Human
uauauauauacauaugauauaaca

SEQ ID NO: 128055 - RNA, 18 nt, Human
uauauauguauauacaua

SEQ ID NO: 128056 - RNA, 25 nt, Human
uauguauauacauagugcauauaua

SEQ ID NO: 128057 - RNA, 25 nt, Human
ucaggacagaagaauuaggacaaca

SEQ ID NO: 128058 - RNA, 24 nt, Human
ucccagaccaucaccaccgcuccu

SEQ ID NO: 128059 - RNA, 23 nt, Human
ucccaggcgccggccccagaccc

SEQ ID NO: 128060 - RNA, 24 nt, Human
ucccaggcgccggccccagacccu

SEQ ID NO: 128061 - RNA, 21 nt, Human
uccccggcguuggcucggucc

SEQ ID NO: 128062 - RNA, 20 nt, Human
ucccgggcgccugggagcuc

SEQ ID NO: 128063 - RNA, 25 nt, Human
ucugcaguccaaacagaccgggguc

SEQ ID NO: 128064 - RNA, 21 nt, Human
ugaaaaguuaggaauuccagc

SEQ ID NO: 128065 - RNA, 25 nt, Human
ugacaguguguagguuucaugugga

SEQ ID NO: 128066 - RNA, 23 nt, Human
ugagaggagguacacuagcuuuu

SEQ ID NO: 128067 - RNA, 25 nt, Human
ugagaggagguacacuagcuuuuca

SEQ ID NO: 128068 - RNA, 22 nt, Human
ugagagggaaugaugaagcaug

SEQ ID NO: 128069 - RNA, 21 nt, Human
ugaguggggggcgcagauccc

SEQ ID NO: 128070 - RNA, 18 nt, Human
ugaugagucaggggucuu

SEQ ID NO: 128071 - RNA, 22 nt, Human
ugcaggaagaaacacccucagc

SEQ ID NO: 128072 - RNA, 18 nt, Human
uggaacaaaagcaaacgg

SEQ ID NO: 128073 - RNA, 24 nt, Human
uggaagaaaacuugcuuccuuuau

SEQ ID NO: 128074 - RNA, 18 nt, Human
uggaguccaaaacacuga

SEQ ID NO: 128075 - RNA, 20 nt, Human
uggcugacuccgaugauuuc

SEQ ID NO: 128076 - RNA, 19 nt, Human
uggcugugggugcaggaag

SEQ ID NO: 128077 - RNA, 19 nt, Human
ugucagaaaacaauacaaa

SEQ ID NO: 128078 - RNA, 22 nt, Human
ugucagaaaacaauacaaaaca

SEQ ID NO: 128079 - RNA, 24 nt, Human
ugucagaaaacaauacaaaacaaa

SEQ ID NO: 128080 - RNA, 24 nt, Human
ugugucaaccuucuaccugagaug

SEQ ID NO: 128081 - RNA, 23 nt, Human
uuaaaacucgaucacaauuuaaa

SEQ ID NO: 128082 - RNA, 27 nt, Human
uuaaaggacaaucaauaugauaguuaa

SEQ ID NO: 128083 - RNA, 19 nt, Human
uucccuucuccccuuuccu

SEQ ID NO: 128084 - RNA, 23 nt, Human
uuuagacuucaaguacaggaagu

SEQ ID NO: 128085 - RNA, 20 nt, Human
uuuccuuggugacagcuccu

SEQ ID NO: 128086 - RNA, 18 nt, Human
aaaaagcuuuggaacaca

SEQ ID NO: 128087 - RNA, 22 nt, Human
aaacaacacaauacauuuuaac

SEQ ID NO: 128088 - RNA, 24 nt, Human
aaaguccugggauuacaggcauga

SEQ ID NO: 128089 - RNA, 20 nt, Human
aacaaacauaaaacuauaca

SEQ ID NO: 128090 - RNA, 19 nt, Human
aacacaauauuacccaccc

SEQ ID NO: 128091 - RNA, 19 nt, Human
aacagggugaaaauaaugg

SEQ ID NO: 128092 - RNA, 21 nt, Human
aaccuggaugucagacaggcu

SEQ ID NO: 128093 - RNA, 18 nt, Human
aagaaaacaaacauaaaa

SEQ ID NO: 128094 - RNA, 25 nt, Human
aagaaaacaaacauaaaacuauaca

SEQ ID NO: 128095 - RNA, 20 nt, Human
aagcauuuucuauuuuaguu

SEQ ID NO: 128096 - RNA, 18 nt, Human
aaggaccugccaaauuuc

SEQ ID NO: 128097 - RNA, 21 nt, Human
acaagguuucaucauguuggc

SEQ ID NO: 128098 - RNA, 24 nt, Human
acaagguuucaucauguuggccag

SEQ ID NO: 128099 - RNA, 22 nt, Human
acagagguagagagagagacac

SEQ ID NO: 128100 - RNA, 24 nt, Human
accaaaguccugggauuacaggca

SEQ ID NO: 128101 - RNA, 22 nt, Human
acccaaagaaacacauuuguuu

SEQ ID NO: 128102 - RNA, 20 nt, Human
accuuuuaaaaagagaaaau

SEQ ID NO: 128103 - RNA, 18 nt, Human
acucugucacccaggcua

SEQ ID NO: 128104 - RNA, 24 nt, Human
acucugucacccaggcuagagugc

SEQ ID NO: 128105 - RNA, 25 nt, Human
agaaaacaaacauaaaacuauacau

SEQ ID NO: 128106 - RNA, 25 nt, Human
agacaggcugaccaugaccggaccc

SEQ ID NO: 128107 - RNA, 22 nt, Human
agguuucaucauguuggccagg

SEQ ID NO: 128108 - RNA, 23 nt, Human
aguaacuucuuacuuuacaaaca

SEQ ID NO: 128109 - RNA, 19 nt, Human
aguagcugggauuacaggc

SEQ ID NO: 128110 - RNA, 24 nt, Human
agugcagcgccgcgaucuugguuc

SEQ ID NO: 128111 - RNA, 21 nt, Human
aucuauuuaaagaugaacgac

SEQ ID NO: 128112 - RNA, 24 nt, Human
caaaguccugggauuacaggcaug

SEQ ID NO: 128113 - RNA, 23 nt, Human
caaccuccaccucccggguucaa

SEQ ID NO: 128114 - RNA, 22 nt, Human
caagcaauucuccugccucagc

SEQ ID NO: 128115 - RNA, 24 nt, Human
caagguuucaucauguuggccagg

SEQ ID NO: 128116 - RNA, 24 nt, Human
caccaugcccagcuaauuuuugua

SEQ ID NO: 128117 - RNA, 21 nt, Human
cacugcaaccuccaccucccg

SEQ ID NO: 128118 - RNA, 23 nt, Human
cacugcaaccuccaccucccggg

SEQ ID NO: 128119 - RNA, 22 nt, Human
cagaagucaucuaagccuccaa

SEQ ID NO: 128120 - RNA, 20 nt, Human
cagcaacgugagucagcaac

SEQ ID NO: 128121 - RNA, 20 nt, Human
cagccuccugaguagcuggg

SEQ ID NO: 128122 - RNA, 20 nt, Human
caucauggaagggcagcaac

SEQ ID NO: 128123 - RNA, 21 nt, Human
caucauggaagggcagcaacg

SEQ ID NO: 128124 - RNA, 31 nt, Human
caucauguuggccaggcugauguugaacucc

SEQ ID NO: 128125 - RNA, 24 nt, Human
cauguuggccaggcugauguugaa

SEQ ID NO: 128126 - RNA, 22 nt, Human
ccaaaguccugggauuacaggc

SEQ ID NO: 128127 - RNA, 24 nt, Human
ccaaaguccugggauuacaggcau

SEQ ID NO: 128128 - RNA, 21 nt, Human
ccacccaaagaaacacauuug

SEQ ID NO: 128129 - RNA, 27 nt, Human
ccaccucccggguucaagcaauucuuu

SEQ ID NO: 128130 - RNA, 23 nt, Human
cccggguucaagcaauucuccug

SEQ ID NO: 128131 - RNA, 21 nt, Human
ccgacuggaaauagaaguugc

SEQ ID NO: 128132 - RNA, 24 nt, Human
ccucccggguucaagcaauucucc

SEQ ID NO: 128133 - RNA, 23 nt, Human
ccugaccucaagugaucugcuug

SEQ ID NO: 128134 - RNA, 23 nt, Human
ccugaguagcugggauuacaggc

SEQ ID NO: 128135 - RNA, 23 nt, Human
ccugaguagcugggauuacaggc

SEQ ID NO: 128136 - RNA, 23 nt, Human
ccugccucagccuccugaguagc

SEQ ID NO: 128137 - RNA, 19 nt, Human
cucaagugaucugcuuguc

SEQ ID NO: 128138 - RNA, 24 nt, Human
cucagccuccugaguagcugggau

SEQ ID NO: 128139 - RNA, 26 nt, Human
cuccugaccucaagugaucugcuugu

SEQ ID NO: 128140 - RNA, 22 nt, Human
cuccugccucagccuccugagu

SEQ ID NO: 128141 - RNA, 22 nt, Human
cugaguagcugggauuacaggc

SEQ ID NO: 128142 - RNA, 18 nt, Human
cugcaaccuccaccuccc

SEQ ID NO: 128143 - RNA, 23 nt, Human
cugcaaccuccaccucccggguu

SEQ ID NO: 128144 - RNA, 23 nt, Human
cugccucagccuccugaguagcu

SEQ ID NO: 128145 - RNA, 21 nt, Human
cugcugcagaucacagcguca

SEQ ID NO: 128146 - RNA, 22 nt, Human
gaaacuucuaucuaaacaaaaa

SEQ ID NO: 128147 - RNA, 25 nt, Human
gacacaacugggcugcuccugacac

SEQ ID NO: 128148 - RNA, 26 nt, Human
gaccacaaugagugaaaacaaaaacc

SEQ ID NO: 128149 - RNA, 24 nt, Human
gacucugucacccaggcuagagug

SEQ ID NO: 128150 - RNA, 26 nt, Human
gaguagcugggauuacaggcgccugc

SEQ ID NO: 128151 - RNA, 19 nt, Human
gaucgugccuuccccuugg

SEQ ID NO: 128152 - RNA, 20 nt, Human
gauuacaggcaugagccgcc

SEQ ID NO: 128153 - RNA, 21 nt, Human
gauuacaggcaugagccgccg

SEQ ID NO: 128154 - RNA, 18 nt, Human
gauuacaggcgccugcca

SEQ ID NO: 128155 - RNA, 24 nt, Human
gauuacaggcgccugccaccaugc

SEQ ID NO: 128156 - RNA, 22 nt, Human
gcaaccuccaccucccggguuc

SEQ ID NO: 128157 - RNA, 22 nt, Human
gcccagcuaauuuuuguauuuu

SEQ ID NO: 128158 - RNA, 20 nt, Human
gcucuuuaauaaggcccagg

SEQ ID NO: 128159 - RNA, 23 nt, Human
gcugauguugaacuccugaccuc

SEQ ID NO: 128160 - RNA, 19 nt, Human
ggauuacaggcaugagccg

SEQ ID NO: 128161 - RNA, 21 nt, Human
ggccagagcauuccuuggcaa

SEQ ID NO: 128162 - RNA, 24 nt, Human
ggcugauguugaacuccugaccuc

SEQ ID NO: 128163 - RNA, 26 nt, Human
gggccagagcauuccuuggcaagaaa

SEQ ID NO: 128164 - RNA, 19 nt, Human
guaaacauaguaaaacaca

SEQ ID NO: 128165 - RNA, 19 nt, Human
uaaaaaagauaacagaagg

SEQ ID NO: 128166 - RNA, 20 nt, Human
uaaaacacaauauuacccac

SEQ ID NO: 128167 - RNA, 20 nt, Human
uaaacaaagccaaagaauau

SEQ ID NO: 128168 - RNA, 24 nt, Human
uaagaaaacaaacauaaaacuaua

SEQ ID NO: 128169 - RNA, 19 nt, Human
uaagaaacuucuuuaauca

SEQ ID NO: 128170 - RNA, 24 nt, Human
uaauuuuuguauuuuuaguaaaga

SEQ ID NO: 128171 - RNA, 22 nt, Human
uacaggcaugagccgccgcucc

SEQ ID NO: 128172 - RNA, 21 nt, Human
uacaugcacagcaaaaucaug

SEQ ID NO: 128173 - RNA, 23 nt, Human
uagagugcagcgccgcgaucuug

SEQ ID NO: 128174 - RNA, 24 nt, Human
uagagugcagcgccgcgaucuugg

SEQ ID NO: 128175 - RNA, 20 nt, Human
uaggacaucuagcucucaca

SEQ ID NO: 128176 - RNA, 24 nt, Human
uaguaaagacaagguuucaucaug

SEQ ID NO: 128177 - RNA, 23 nt, Human
ucacugcaaccuccaccucccgg

SEQ ID NO: 128178 - RNA, 23 nt, Human
ucacugcaaccuccaccucccgg

SEQ ID NO: 128179 - RNA, 24 nt, Human
ucacugcaaccuccaccucccggg

SEQ ID NO: 128180 - RNA, 25 nt, Human
ucacugcaaccuccaccucccgggu

SEQ ID NO: 128181 - RNA, 27 nt, Human
ucacugcaaccuccaccucccggguuc

SEQ ID NO: 128182 - RNA, 18 nt, Human
ucagacaggcugaccaug

SEQ ID NO: 128183 - RNA, 20 nt, Human
ucagccuccugaguagcugg

SEQ ID NO: 128184 - RNA, 22 nt, Human
ucauggaagggcagcaacguga

SEQ ID NO: 128185 - RNA, 21 nt, Human
uccccugaaaauauuugaugu

SEQ ID NO: 128186 - RNA, 21 nt, Human
ucccggguucaagcaauucuc

SEQ ID NO: 128187 - RNA, 24 nt, Human
ucccggguucaagcaauucuccug

SEQ ID NO: 128188 - RNA, 22 nt, Human
ucccuuuggacugcaagagcag

SEQ ID NO: 128189 - RNA, 24 nt, Human
uccugaguagcugggauuacaggc

SEQ ID NO: 128190 - RNA, 24 nt, Human
ucugacucugucacccaggcuaga

SEQ ID NO: 128191 - RNA, 24 nt, Human
ucugucacccaggcuagagugcag

SEQ ID NO: 128192 - RNA, 20 nt, Human
ucuuggccuaccaaaguccu

SEQ ID NO: 128193 - RNA, 21 nt, Human
ucuuguagcuuuaguguuacu

SEQ ID NO: 128194 - RNA, 22 nt, Human
ucuuguagcuuuaguguuacuc

SEQ ID NO: 128195 - RNA, 25 nt, Human
ugaaaacaaaaacccuuccucuucc

SEQ ID NO: 128196 - RNA, 23 nt, Human
ugaccucaagugaucugcuuguc

SEQ ID NO: 128197 - RNA, 24 nt, Human
ugaccucaagugaucugcuugucu

SEQ ID NO: 128198 - RNA, 18 nt, Human
ugagcagaccuaagagug

SEQ ID NO: 128199 - RNA, 21 nt, Human
ugaguauucauuuguaacuuc

SEQ ID NO: 128200 - RNA, 20 nt, Human
ugagugaaaacaaaaacccu

SEQ ID NO: 128201 - RNA, 24 nt, Human
ugccucagccuccugaguagcugg

SEQ ID NO: 128202 - RNA, 24 nt, Human
uggccaggcugauguugaacuccu

SEQ ID NO: 128203 - RNA, 19 nt, Human
ugggacggagucugacucu

SEQ ID NO: 128204 - RNA, 20 nt, Human
ugggacggagucugacucug

SEQ ID NO: 128205 - RNA, 22 nt, Human
ugggacggagucugacucuguc

SEQ ID NO: 128206 - RNA, 18 nt, Human
ugggauuacaggcaugag

SEQ ID NO: 128207 - RNA, 19 nt, Human
ugggauuacaggcaugagc

SEQ ID NO: 128208 - RNA, 20 nt, Human
ugggauuacaggcaugagcc

SEQ ID NO: 128209 - RNA, 20 nt, Human
ugggauuacaggcaugagcc

SEQ ID NO: 128210 - RNA, 21 nt, Human
ugggauuacaggcaugagccg

SEQ ID NO: 128211 - RNA, 22 nt, Human
ugggauuacaggcaugagccgc

SEQ ID NO: 128212 - RNA, 23 nt, Human
ugggauuacaggcaugagccgcc

SEQ ID NO: 128213 - RNA, 24 nt, Human
ugggauuacaggcaugagccgccg

SEQ ID NO: 128214 - RNA, 21 nt, Human
ugggauuacaggcgccugcca

SEQ ID NO: 128215 - RNA, 22 nt, Human
ugggauuacaggcgccugccac

SEQ ID NO: 128216 - RNA, 24 nt, Human
ugggauuacaggcgccugccacca

SEQ ID NO: 128217 - RNA, 25 nt, Human
ugggauuacaggcgccugccaccau

SEQ ID NO: 128218 - RNA, 18 nt, Human
ugggccaacccuauacaa

SEQ ID NO: 128219 - RNA, 21 nt, Human
ugucacccaggcuagagugca

SEQ ID NO: 128220 - RNA, 19 nt, Human
ugucuuggccuaccaaagu

SEQ ID NO: 128221 - RNA, 21 nt, Human
ugucuuggccuaccaaagucc

SEQ ID NO: 128222 - RNA, 24 nt, Human
uuaguaaagacaagguuucaucau

SEQ ID NO: 128223 - RNA, 21 nt, Human
uucaagcaauucuccugccuc

SEQ ID NO: 128224 - RNA, 24 nt, Human
uucaagcaauucuccugccucagc

SEQ ID NO: 128225 - RNA, 19 nt, Human
uuccaccuugcuccugggc

SEQ ID NO: 128226 - RNA, 23 nt, Human
uuccccuugguugagcuguuuuc

SEQ ID NO: 128227 - RNA, 23 nt, Human
uuccuucuugguuaauagcacaa

SEQ ID NO: 128228 - RNA, 24 nt, Human
uucuuacuuuacaaacaacacaau

SEQ ID NO: 128229 - RNA, 21 nt, Human
uuuaauaaacaaagccaaaga

SEQ ID NO: 128230 - RNA, 21 nt, Human
uuucaucauguuggccaggcu

SEQ ID NO: 128231 - RNA, 24 nt, Human
uuucuauuuuaguuuuggaaaugu

SEQ ID NO: 128232 - RNA, 18 nt, Human
uuuguuuuguuuuguuug

SEQ ID NO: 128233 - RNA, 19 nt, Human
uuuuacucucaggcucuuc

SEQ ID NO: 128234 - RNA, 20 nt, Human
uuuuguuuguuuguuuuuuu

SEQ ID NO: 128235 - RNA, 23 nt, Human
uuuuuaguaaagacaagguuuca

SEQ ID NO: 128236 - RNA, 20 nt, Human
uuuuuguauuuuuaguaaag

SEQ ID NO: 128237 - RNA, 23 nt, Human
uuuuuguauuuuuaguaaagaca

SEQ ID NO: 128238 - RNA, 19 nt, Human
aaacaccaccaaaagggga

SEQ ID NO: 128239 - RNA, 21 nt, Human
aggaagugguggggauuucag

SEQ ID NO: 128240 - RNA, 21 nt, Human
aggcagggagaaggggaggca

SEQ ID NO: 128241 - RNA, 18 nt, Human
agggaggaaguggugggg

SEQ ID NO: 128242 - RNA, 22 nt, Human
aggggaucaaaucccccggagg

SEQ ID NO: 128243 - RNA, 18 nt, Human
caaauguuaucccagaac

SEQ ID NO: 128244 - RNA, 21 nt, Human
ccagaacauucuggaggcagg

SEQ ID NO: 128245 - RNA, 18 nt, Human
cccaccuuccuccaaaug

SEQ ID NO: 128246 - RNA, 20 nt, Human
ccgccuuccuucccacuccc

SEQ ID NO: 128247 - RNA, 18 nt, Human
ccuuccuucccacuccca

SEQ ID NO: 128248 - RNA, 21 nt, Human
ccuuccuucccacucccaccg

SEQ ID NO: 128249 - RNA, 18 nt, Human
cuggaggcagggagaagg

SEQ ID NO: 128250 - RNA, 19 nt, Human
cuucccaccuuccuccaaa

SEQ ID NO: 128251 - RNA, 21 nt, Human
gcaugguucccuccgccuucc

SEQ ID NO: 128252 - RNA, 19 nt, Human
ggaagugguggggauuuca

SEQ ID NO: 128253 - RNA, 18 nt, Human
uaucccagaacauucugg

SEQ ID NO: 128254 - RNA, 23 nt, Human
ucccagaacauucuggaggcagg

SEQ ID NO: 128255 - RNA, 18 nt, Human
ucgcaugguucccuccgc

SEQ ID NO: 128256 - RNA, 21 nt, Human
ugcuucccaccuuccuccaaa

SEQ ID NO: 128257 - RNA, 25 nt, Human
ugguggggauuucagaauuccugcu

SEQ ID NO: 128258 - RNA, 22 nt, Human
uuagcuuaguccaucccuuccu

SEQ ID NO: 128259 - RNA, 19 nt, Human
uuaguccaucccuuccuuc

SEQ ID NO: 128260 - RNA, 18 nt, Human
uucccuccgccuuccuuc

SEQ ID NO: 128261 - RNA, 25 nt, Human
uuucagaauuccugcuccucauuug

SEQ ID NO: 128262 - RNA, 20 nt, Human
aaaacaaaaauaaaaaucua

SEQ ID NO: 128263 - RNA, 24 nt, Human
aaaagaggcugggaaaacaagacu

SEQ ID NO: 128264 - RNA, 23 nt, Human
aaacacuuuaaaaugcaaguuuc

SEQ ID NO: 128265 - RNA, 27 nt, Human
aaaccaagggcgggcgaacccucggaa

SEQ ID NO: 128266 - RNA, 21 nt, Human
aaacgaaacaaauccauagcc

SEQ ID NO: 128267 - RNA, 21 nt, Human
aaacgaaacaaauccauagcc

SEQ ID NO: 128268 - RNA, 21 nt, Human
aaacgaaacaaauccauagcc

SEQ ID NO: 128269 - RNA, 22 nt, Human
aaagacuguauccuucggauuc

SEQ ID NO: 128270 - RNA, 19 nt, Human
aacaagacugugaguauag

SEQ ID NO: 128271 - RNA, 20 nt, Human
aacuuggauaagcaggaaau

SEQ ID NO: 128272 - RNA, 20 nt, Human
aacuuggauaagcaggaaau

SEQ ID NO: 128273 - RNA, 19 nt, Human
aagacuaguaaaagaggcc

SEQ ID NO: 128274 - RNA, 24 nt, Human
aagcuaacuauacauugaguuccu

SEQ ID NO: 128275 - RNA, 22 nt, Human
aaggacguggcugcacaugacg

SEQ ID NO: 128276 - RNA, 22 nt, Human
aaggacguggcugcacaugacg

SEQ ID NO: 128277 - RNA, 22 nt, Human
aaggacguggcugcacaugacg

SEQ ID NO: 128278 - RNA, 20 nt, Human
aaggaggaacagaggcagug

SEQ ID NO: 128279 - RNA, 24 nt, Human
aauauaacaggcuaaaaaacaaaa

SEQ ID NO: 128280 - RNA, 20 nt, Human
accucauugagaagguuaua

SEQ ID NO: 128281 - RNA, 27 nt, Human
acgauuuugccuucugguaacacccag

SEQ ID NO: 128282 - RNA, 27 nt, Human
acgauuuugccuucugguaacacccag

SEQ ID NO: 128283 - RNA, 18 nt, Human
acugaaccguaucuacca

SEQ ID NO: 128284 - RNA, 25 nt, Human
acuucaauaaagcuaacuauacauu

SEQ ID NO: 128285 - RNA, 20 nt, Human
agaaggaaauauaacaggcu

SEQ ID NO: 128286 - RNA, 21 nt, Human
agcugcagcugaugaagacug

SEQ ID NO: 128287 - RNA, 21 nt, Human
agcugcagcugaugaagacug

SEQ ID NO: 128288 - RNA, 19 nt, Human
aggaggaggauuaacuacc

SEQ ID NO: 128289 - RNA, 19 nt, Human
aggaggaggauuaacuacc

SEQ ID NO: 128290 - RNA, 19 nt, Human
aggaggaggauuaacuacc

SEQ ID NO: 128291 - RNA, 18 nt, Human
aggcucaaggaggaacag

SEQ ID NO: 128292 - RNA, 22 nt, Human
agggcacugcgguggcaucugg

SEQ ID NO: 128293 - RNA, 22 nt, Human
auaaaaacaauuccuuucagau

SEQ ID NO: 128294 - RNA, 24 nt, Human
auaaaaacaauuccuuucagauac

SEQ ID NO: 128295 - RNA, 23 nt, Human
auauaacaggcuaaaaaacaaaa

SEQ ID NO: 128296 - RNA, 20 nt, Human
aucuauuuauagcaaguaac

SEQ ID NO: 128297 - RNA, 19 nt, Human
aucucaguuucauccaucc

SEQ ID NO: 128298 - RNA, 21 nt, Human
auggcagaucaaaugauacug

SEQ ID NO: 128299 - RNA, 19 nt, Human
auuuggggcugcagguagg

SEQ ID NO: 128300 - RNA, 19 nt, Human
auuuggggcugcagguagg

SEQ ID NO: 128301 - RNA, 19 nt, Human
auuuggggcugcagguagg

SEQ ID NO: 128302 - RNA, 23 nt, Human
caaagacaaaaauuuauuccuuu

SEQ ID NO: 128303 - RNA, 30 nt, Human
caaaggacguggcugcacaugacgagcacc

SEQ ID NO: 128304 - RNA, 30 nt, Human; identical to SEQ ID NO: 128303

SEQ ID NO: 128305 - RNA, 30 nt, Human; identical to SEQ ID NO: 128303

SEQ ID NO: 128306 - RNA, 19 nt, Human
caaguaacuaauacuucaa

SEQ ID NO: 128307 - RNA, 19 nt, Human
cacaccaguucgauucgug

SEQ ID NO: 128308 - RNA, 19 nt, Human
cacugaaccguaucuacca

SEQ ID NO: 128309 - RNA, 20 nt, Human
cacuucugggucugcuggug

SEQ ID NO: 128310 - RNA, 20 nt, Human
cagaaagccacuuuaaacac

SEQ ID NO: 128311 - RNA, 22 nt, Human
cagaaggaaauauaacaggcua

SEQ ID NO: 128312 - RNA, 19 nt, Human
cagcagacugaacgugcug

SEQ ID NO: 128313 - RNA, 19 nt, Human
cagcagacugaacgugcug

SEQ ID NO: 128314 - RNA, 20 nt, Human
cagcugaugaagacugggug

SEQ ID NO: 128315 - RNA, 20 nt, Human
cagcugaugaagacugggug

SEQ ID NO: 128316 - RNA, 22 nt, Human
caguggugaccugaacugcuga

SEQ ID NO: 128317 - RNA, 20 nt, Human
cauccagugaugaccugacc

SEQ ID NO: 128318 - RNA, 24 nt, Human
cauuaugacucacugauuggacug

SEQ ID NO: 128319 - RNA, 26 nt, Human
ccaaucaaauuggacauagauaugug

SEQ ID NO: 128320 - RNA, 22 nt, Human
ccagacguucugaaacuguggu

SEQ ID NO: 128321 - RNA, 22 nt, Human
ccagacguucugaaacuguggu

SEQ ID NO: 128322 - RNA, 22 nt, Human
ccagacguucugaaacuguggu

SEQ ID NO: 128323 - RNA, 20 nt, Human
cccauugcuaccauuccacg

SEQ ID NO: 128324 - RNA, 24 nt, Human
ccugauaauuguauacaggcaacu

SEQ ID NO: 128325 - RNA, 20 nt, Human
cgaaacaaauccauagccuu

SEQ ID NO: 128326 - RNA, 20 nt, Human
cgaaacaaauccauagccuu

SEQ ID NO: 128327 - RNA, 20 nt, Human
cgaaacaaauccauagccuu

SEQ ID NO: 128328 - RNA, 21 nt, Human
cgauuaaccuuugagugacau

SEQ ID NO: 128329 - RNA, 23 nt, Human
cucaguuucauccauccuagcau

SEQ ID NO: 128330 - RNA, 23 nt, Human
cucaguuucauccauccuagcau

SEQ ID NO: 128331 - RNA, 20 nt, Human
cuccugaaagacuaguaaaa

SEQ ID NO: 128332 - RNA, 23 nt, Human
cucuggugcucuagcuguguggu

SEQ ID NO: 128333 - RNA, 23 nt, Human
cugauaauuguauacaggcaacu

SEQ ID NO: 128334 - RNA, 24 nt, Human
cuuccaaucucaguuucauccauc

SEQ ID NO: 128335 - RNA, 24 nt, Human
cuuccaaucucaguuucauccauc

SEQ ID NO: 128336 - RNA, 24 nt, Human
cuucggauuccgaaugaaaauuuu

SEQ ID NO: 128337 - RNA, 18 nt, Human
gaaacaacaugccucuuc

SEQ ID NO: 128338 - RNA, 21 nt, Human
gaauguuaaaagcacuaaaaa

SEQ ID NO: 128339 - RNA, 24 nt, Human
gaguauagcaaaagggcucuggug

SEQ ID NO: 128340 - RNA, 20 nt, Human
gauccuacuaucuucuggac

SEQ ID NO: 128341 - RNA, 20 nt, Human
gauccuacuaucuucuggac

SEQ ID NO: 128342 - RNA, 20 nt, Human
gauccuacuaucuucuggac

SEQ ID NO: 128343 - RNA, 20 nt, Human
gcaaagcucaauacugaaau

SEQ ID NO: 128344 - RNA, 23 nt, Human
gcccagcuucagcuuuuuaccau

SEQ ID NO: 128345 - RNA, 23 nt, Human
gcccagcuucagcuuuuuaccau

SEQ ID NO: 128346 - RNA, 23 nt, Human
gcccagcuucagcuuuuuaccau

SEQ ID NO: 128347 - RNA, 21 nt, Human
gcgaacccucggagguagaac

SEQ ID NO: 128348 - RNA, 18 nt, Human
ggaggaacagaggcagug

SEQ ID NO: 128349 - RNA, 20 nt, Human
ggauuccgccagacguucug

SEQ ID NO: 128350 - RNA, 20 nt, Human
ggauuccgccagacguucug

SEQ ID NO: 128351 - RNA, 20 nt, Human
ggauuccgccagacguucug

SEQ ID NO: 128352 - RNA, 22 nt, Human
ggccucucuggagaugguugag

SEQ ID NO: 128353 - RNA, 22 nt, Human
ggccucucuggagaugguugag

SEQ ID NO: 128354 - RNA, 20 nt, Human
gggcgcgugguaucggccug

SEQ ID NO: 128355 - RNA, 21 nt, Human
ggggcugcagguagguuucag

SEQ ID NO: 128356 - RNA, 21 nt, Human
ggggcugcagguagguuucag

SEQ ID NO: 128357 - RNA, 22 nt, Human
gguaguaggaacauuuuucuca

SEQ ID NO: 128358 - RNA, 21 nt, Human
ggugcucuagcugugugguca

SEQ ID NO: 128359 - RNA, 18 nt, Human
gucaaaggagccaaaggc

SEQ ID NO: 128360 - RNA, 21 nt, Human
uaaaaaagaaugguaccucau

SEQ ID NO: 128361 - RNA, 20 nt, Human
uaaaaugaggacacuaccua

SEQ ID NO: 128362 - RNA, 21 nt, Human
uaaauaaacaucuaaugaaga

SEQ ID NO: 128363 - RNA, 26 nt, Human
uaacuaauacuucaauguuuuuauaa

SEQ ID NO: 128364 - RNA, 20 nt, Human
uaagauaaaacuagagaguc

SEQ ID NO: 128365 - RNA, 21 nt, Human
uaaguuuagcauuucaaggaa

SEQ ID NO: 128366 - RNA, 19 nt, Human
uaauacaaguuauacagaa

SEQ ID NO: 128367 - RNA, 19 nt, Human
uacaaauguuucccuuaga

SEQ ID NO: 128368 - RNA, 21 nt, Human
uaccuaaucuagaaacaacau

SEQ ID NO: 128369 - RNA, 21 nt, Human
uaccucauugagaagguuaua

SEQ ID NO: 128370 - RNA, 20 nt, Human
uagaaccgccaggcugagga

SEQ ID NO: 128371 - RNA, 26 nt, Human
uaguuugucuuggauucuuuaaaaaa

SEQ ID NO: 128372 - RNA, 23 nt, Human
uauaaaaugaggacacuaccuaa

SEQ ID NO: 128373 - RNA, 21 nt, Human
uauauacaagcaacugacauc

SEQ ID NO: 128374 - RNA, 23 nt, Human
ucaaaaccagcaacuucccauga

SEQ ID NO: 128375 - RNA, 24 nt, Human
ucaaaaccagcaacuucccaugaa

SEQ ID NO: 128376 - RNA, 24 nt, Human
ucaaaggagccaaaggcuaaggug

SEQ ID NO: 128377 - RNA, 21 nt, Human
ucaauuccaccaacaaaaaca

SEQ ID NO: 128378 - RNA, 21 nt, Human
ucaauuccaccaacaaaaaca

SEQ ID NO: 128379 - RNA, 21 nt, Human
uccacggcuuggccuuggaac

SEQ ID NO: 128380 - RNA, 21 nt, Human
uccaguggugaccugaaaugg

SEQ ID NO: 128381 - RNA, 21 nt, Human
ucccauugcuaccauuccacg

SEQ ID NO: 128382 - RNA, 19 nt, Human
uccccaacagggcacugcg

SEQ ID NO: 128383 - RNA, 18 nt, Human
ucugguaacacccagccu

SEQ ID NO: 128384 - RNA, 18 nt, Human
ucugguaacacccagccu

SEQ ID NO: 128385 - RNA, 21 nt, Human
ucugugauccuacuaucuucu

SEQ ID NO: 128386 - RNA, 21 nt, Human
ucugugauccuacuaucuucu

SEQ ID NO: 128387 - RNA, 21 nt, Human
ucugugauccuacuaucuucu

SEQ ID NO: 128388 - RNA, 19 nt, Human
ugaaacuagauagcugaga

SEQ ID NO: 128389 - RNA, 21 nt, Human
ugaaagucaguaauuugcuuu

SEQ ID NO: 128390 - RNA, 20 nt, Human
ugaaaugcugaaucgggaua

SEQ ID NO: 128391 - RNA, 20 nt, Human
ugaaauggugaacuuggaua

SEQ ID NO: 128392 - RNA, 20 nt, Human
ugaaauggugaacuuggaua

SEQ ID NO: 128393 - RNA, 23 nt, Human
ugaaauggugaacuuggauaagc

SEQ ID NO: 128394 - RNA, 23 nt, Human
ugaaauggugaacuuggauaagc

SEQ ID NO: 128395 - RNA, 19 nt, Human
ugaaauggugaucuuggau

SEQ ID NO: 128396 - RNA, 23 nt, Human
ugaacuuggauaagcaggaaaug

SEQ ID NO: 128397 - RNA, 23 nt, Human
ugaacuuggauaagcaggaaaug

SEQ ID NO: 128398 - RNA, 20 nt, Human
ugagaggauccaacagauuu

SEQ ID NO: 128399 - RNA, 19 nt, Human
ugauacaaauguuucccuu

SEQ ID NO: 128400 - RNA, 24 nt, Human
ugauuuggggcugcagguagguuu

SEQ ID NO: 128401 - RNA, 24 nt, Human
ugauuuggggcugcagguagguuu

SEQ ID NO: 128402 - RNA, 24 nt, Human
ugauuuggggcugcagguagguuu

SEQ ID NO: 128403 - RNA, 20 nt, Human
ugcaaauuucacauacagcc

SEQ ID NO: 128404 - RNA, 18 nt, Human
ugcuggccucucuggaga

SEQ ID NO: 128405 - RNA, 18 nt, Human
ugcuggccucucuggaga

SEQ ID NO: 128406 - RNA, 18 nt, Human
uggccuuggaacugcuca

SEQ ID NO: 128407 - RNA, 18 nt, Human
uggcuagcugcagcugau

SEQ ID NO: 128408 - RNA, 18 nt, Human
uggcuagcugcagcugau

SEQ ID NO: 128409 - RNA, 19 nt, Human
uggcugcacaugacgagca

SEQ ID NO: 128410 - RNA, 19 nt, Human
uggcugcacaugacgagca

SEQ ID NO: 128411 - RNA, 19 nt, Human
uggcugcacaugacgagca

SEQ ID NO: 128412 - RNA, 24 nt, Human
uggggcugcagguagguuucagug

SEQ ID NO: 128413 - RNA, 19 nt, Human
uguaauaaagccuucuugg

SEQ ID NO: 128414 - RNA, 21 nt, Human
uguaauaaagccuucuuggga

SEQ ID NO: 128415 - RNA, 24 nt, Human
uguggggcuucgaguggucaaagg

SEQ ID NO: 128416 - RNA, 19 nt, Human
uguuucacccaccacuucu

SEQ ID NO: 128417 - RNA, 18 nt, Human
uuaauaccaguauuuugc

SEQ ID NO: 128418 - RNA, 24 nt, Human
uuggacuguuugcuuagaaucugu

SEQ ID NO: 128419 - RNA, 19 nt, Human
uuuacagagaucuggagau

SEQ ID NO: 128420 - RNA, 25 nt, Human
uuuggcacgauuuugccuucuggua

SEQ ID NO: 128421 - RNA, 25 nt, Human
uuuggcacgauuuugccuucuggua

SEQ ID NO: 128422 - RNA, 22 nt, Human
uuuugcaaauuucacauacagc

SEQ ID NO: 128423 - RNA, 22 nt, Human
aaaaagaagaauggugacucau

SEQ ID NO: 128424 - RNA, 28 nt, Human
aaaaggaaaaccaagagcgggugacaag

SEQ ID NO: 128425 - RNA, 20 nt, Human
aaaaggaaauauaacagacu

SEQ ID NO: 128426 - RNA, 19 nt, Human
aagaagacuucaauaaagc

SEQ ID NO: 128427 - RNA, 21 nt, Human
aagaagacuucaauaaagcua

SEQ ID NO: 128428 - RNA, 20 nt, Human
aagagacauaaaaaaguugc

SEQ ID NO: 128429 - RNA, 18 nt, Human
acaaggcugaggagcccc

SEQ ID NO: 128430 - RNA, 19 nt, Human
agaaaaggaaaaccaagag

SEQ ID NO: 128431 - RNA, 23 nt, Human
agacaccagcuaaucuagaaaca

SEQ ID NO: 128432 - RNA, 26 nt, Human
agacuaaaucuauuuauagcaaguaa

SEQ ID NO: 128433 - RNA, 24 nt, Human
agagacauaaaaaaguuccguuuc

SEQ ID NO: 128434 - RNA, 24 nt, Human
agcaacuucccauguaacuagaua

SEQ ID NO: 128435 - RNA, 19 nt, Human
aggaggagcagaggcugug

SEQ ID NO: 128436 - RNA, 21 nt, Human
agugacaaaggcuggaaacga

SEQ ID NO: 128437 - RNA, 22 nt, Human
auaaaaacaauucccuucagau

SEQ ID NO: 128438 - RNA, 20 nt, Human
aucuauuuauagcaaguaac

SEQ ID NO: 128439 - RNA, 19 nt, Human
auggcggcaggcagcaguu

SEQ ID NO: 128440 - RNA, 25 nt, Human
caaaaaaacuacagaucauuuuuaa

SEQ ID NO: 128441 - RNA, 22 nt, Human
caaaaggaaauauaacagacua

SEQ ID NO: 128442 - RNA, 23 nt, Human
caaagacaaaaauuuauucccuu

SEQ ID NO: 128443 - RNA, 21 nt, Human
caaggcugaggagccccgaaa

SEQ ID NO: 128444 - RNA, 19 nt, Human
caaguaacuaauauuucaa

SEQ ID NO: 128445 - RNA, 23 nt, Human
cacaauguaaaaugaagacacca

SEQ ID NO: 128446 - RNA, 20 nt, Human
cacuccaacaaagacaaaaa

SEQ ID NO: 128447 - RNA, 18 nt, Human
cagcaguucccgaccggc

SEQ ID NO: 128448 - RNA, 19 nt, Human
cauagugcuuucaauuucu

SEQ ID NO: 128449 - RNA, 22 nt, Human
cauggcagaucaaaugguacug

SEQ ID NO: 128450 - RNA, 19 nt, Human
cauuuauaguaagcuggag

SEQ ID NO: 128451 - RNA, 21 nt, Human
ccuucagauucagaaugaaaa

SEQ ID NO: 128452 - RNA, 24 nt, Human
cuucuggggcugcugugagguccu

SEQ ID NO: 128453 - RNA, 22 nt, Human
gaacaguuuaagauaaaacuag

SEQ ID NO: 128454 - RNA, 18 nt, Human
gagccaaagaugaagaga

SEQ ID NO: 128455 - RNA, 19 nt, Human
gcaccaaaaaaacuacaga

SEQ ID NO: 128456 - RNA, 21 nt, Human
gcaccaaaaaaacuacagauc

SEQ ID NO: 128457 - RNA, 21 nt, Human
uaaauaaacaucuaaugaaga

SEQ ID NO: 128458 - RNA, 21 nt, Human
uaagauaaaacuagagagucu

SEQ ID NO: 128459 - RNA, 24 nt, Human
uagcauuucaaagaaaaaaguuuu

SEQ ID NO: 128460 - RNA, 21 nt, Human
uagggaagaagucacugaaag

SEQ ID NO: 128461 - RNA, 26 nt, Human
uaguuugucuuggauucuuuaaaaaa

SEQ ID NO: 128462 - RNA, 23 nt, Human
uauuugcuuuuaaacacuuaaaa

SEQ ID NO: 128463 - RNA, 24 nt, Human
ucaaaaccagcaacuucccaugua

SEQ ID NO: 128464 - RNA, 25 nt, Human
ucaaaaccagcaacuucccauguaa

SEQ ID NO: 128465 - RNA, 18 nt, Human
ucauugagaagcuuaugu

SEQ ID NO: 128466 - RNA, 22 nt, Human
ucuaggagcaaaccuccucaaa

SEQ ID NO: 128467 - RNA, 20 nt, Human
ucugaccuuucaaaauaggu

SEQ ID NO: 128468 - RNA, 25 nt, Human
ugaagacaccagcuaaucuagaaac

SEQ ID NO: 128469 - RNA, 18 nt, Human
ugaauaaacauaugaccc

SEQ ID NO: 128470 - RNA, 19 nt, Human
ugaauaaacauaugaccca

SEQ ID NO: 128471 - RNA, 25 nt, Human
ugcucugcucauacagcuacuuuca

SEQ ID NO: 128472 - RNA, 23 nt, Human
uguaaaaugaagacaccagcuaa

SEQ ID NO: 128473 - RNA, 21 nt, Human
uguaauaaagcccucuuggga

SEQ ID NO: 128474 - RNA, 19 nt, Human
ugugucagaauguuauagc

SEQ ID NO: 128475 - RNA, 19 nt, Human
uguuugucacaauguaaaa

SEQ ID NO: 128476 - RNA, 22 nt, Human
uuaaauggacaaauucauagug

SEQ ID NO: 128477 - RNA, 18 nt, Human
uuaguuauccuaauuacu

SEQ ID NO: 128478 - RNA, 25 nt, Human
uucuaaauaaacaucuaaugaagaa

SEQ ID NO: 128479 - RNA, 24 nt, Human
uucugagguguaauaaagcccucu

SEQ ID NO: 128480 - RNA, 20 nt, Human
uucuggggcugcugugaggu

SEQ ID NO: 128481 - RNA, 23 nt, Human
uuuacaaaaaagaagaaugguga

SEQ ID NO: 128482 - RNA, 24 nt, Human
uuucugagguguaauaaagcccuc

SEQ ID NO: 128483 - RNA, 22 nt, Human
uuugcacaauuugacauacagc

SEQ ID NO: 128484 - RNA, 23 nt, Human
uuuuaaaaauuuugcuuuugugg

SEQ ID NO: 128485 - RNA, 22 nt, Human
aauacagcaccugaggccuaag

SEQ ID NO: 128486 - RNA, 23 nt, Human
aauacagcaccugaggccuaaga

SEQ ID NO: 128487 - RNA, 23 nt, Human
acaaaaggcugagacccuucuuc

SEQ ID NO: 128488 - RNA, 18 nt, Human
acaacaacaggaaaaguc

SEQ ID NO: 128489 - RNA, 22 nt, Human
acauuuuacaaauuuuuguggg

SEQ ID NO: 128490 - RNA, 19 nt, Human
acuacucccucugccuccc

SEQ ID NO: 128491 - RNA, 20 nt, Human
acucccucugccucccggcu

SEQ ID NO: 128492 - RNA, 23 nt, Human
caaaaggcugagacccuucuuca

SEQ ID NO: 128493 - RNA, 23 nt, Human
caaaaggcugagacccuucuuca

SEQ ID NO: 128494 - RNA, 20 nt, Human
caacaacaggaaaaguccau

SEQ ID NO: 128495 - RNA, 20 nt, Human
cacggcgcggggacugcagg

SEQ ID NO: 128496 - RNA, 22 nt, Human
cacggcgcggggacugcaggcg

SEQ ID NO: 128497 - RNA, 21 nt, Human
cacuacucccucugccucccg

SEQ ID NO: 128498 - RNA, 18 nt, Human
caggaaaaguccauggca

SEQ ID NO: 128499 - RNA, 18 nt, Human
cauggcaaggagucccgg

SEQ ID NO: 128500 - RNA, 29 nt, Human
ccggaaggcggucacuacucccucugccc

SEQ ID NO: 128501 - RNA, 19 nt, Human
cggcucggugggaacuugg

SEQ ID NO: 128502 - RNA, 19 nt, Human
cggcucucucgcucucgcu

SEQ ID NO: 128503 - RNA, 22 nt, Human
cuccaaaaaggaaaaauggcag

SEQ ID NO: 128504 - RNA, 22 nt, Human
cucccucaaugcuccacaaaag

SEQ ID NO: 128505 - RNA, 18 nt, Human
cucgccugcgcucuccuc

SEQ ID NO: 128506 - RNA, 20 nt, Human
cucgccugcgcucuccuccu

SEQ ID NO: 128507 - RNA, 20 nt, Human
cucgcucgcucucucccucu

SEQ ID NO: 128508 - RNA, 21 nt, Human
cuggucccgaggacaggcaug

SEQ ID NO: 128509 - RNA, 23 nt, Human
cuuuacaauucauugcauaugcu

SEQ ID NO: 128510 - RNA, 23 nt, Human
gagcccugcguccagcucgcauu

SEQ ID NO: 128511 - RNA, 20 nt, Human
gccucccggcucucucgcuc

SEQ ID NO: 128512 - RNA, 23 nt, Human
gcgcggggacugcaggcgugggg

SEQ ID NO: 128513 - RNA, 18 nt, Human
gcucgcucucucccucuc

SEQ ID NO: 128514 - RNA, 23 nt, Human
ggcacggcgcggggacugcaggc

SEQ ID NO: 128515 - RNA, 23 nt, Human
gggguaccuggcuccuagcagcc

SEQ ID NO: 128516 - RNA, 26 nt, Human
uaacaaacaugcccaacgcuuuuaua

SEQ ID NO: 128517 - RNA, 20 nt, Human
uacagcaccugaggccuaag

SEQ ID NO: 128518 - RNA, 19 nt, Human
uaccuggcuccuagcagcc

SEQ ID NO: 128519 - RNA, 21 nt, Human
uagaaauaacaaacaugccca

SEQ ID NO: 128520 - RNA, 20 nt, Human
uaucuauguccauuuccucc

SEQ ID NO: 128521 - RNA, 23 nt, Human
ucacuacucccucugccucccgg

SEQ ID NO: 128522 - RNA, 19 nt, Human
ucccggcucucucgcucuc

SEQ ID NO: 128523 - RNA, 19 nt, Human
ucccucugccucccggcuc

SEQ ID NO: 128524 - RNA, 18 nt, Human
uccgggcacggcgcgggg

SEQ ID NO: 128525 - RNA, 24 nt, Human
uccuggagucaauguccgucuuug

SEQ ID NO: 128526 - RNA, 25 nt, Human
ucgcucgcucucucccucucucgcg

SEQ ID NO: 128527 - RNA, 22 nt, Human
ugaagauuuuccuccuuuucuu

SEQ ID NO: 128528 - RNA, 22 nt, Human
ugacagagugaguauagaaaua

SEQ ID NO: 128529 - RNA, 21 nt, Human
ugcuuucucccuucuccccca

SEQ ID NO: 128530 - RNA, 19 nt, Human
uggcucauacucagccgua

SEQ ID NO: 128531 - RNA, 23 nt, Human
ugggaacuugggagagcccugcg

SEQ ID NO: 128532 - RNA, 24 nt, Human
ugggaacuugggagagcccugcgu

SEQ ID NO: 128533 - RNA, 21 nt, Human
uugcagccgugggguccggga

SEQ ID NO: 128534 - RNA, 25 nt, Human
uugcauaugcuuucucccuucuccc

SEQ ID NO: 128535 - RNA, 18 nt, Human
aaauggcccgcccaaggc

SEQ ID NO: 128536 - RNA, 19 nt, Human
aagcacagcccugacucca

SEQ ID NO: 128537 - RNA, 26 nt, Human
acagugccggugugagcccacaggga

SEQ ID NO: 128538 - RNA, 19 nt, Human
agcagcggggcgggggcgg

SEQ ID NO: 128539 - RNA, 22 nt, Human
agcauggugccugucccagaag

SEQ ID NO: 128540 - RNA, 19 nt, Human
agccacucagcagggaaau

SEQ ID NO: 128541 - RNA, 19 nt, Human
agcggggcgggggcggggg

SEQ ID NO: 128542 - RNA, 19 nt, Human
aggcaggggcguggucugg

SEQ ID NO: 128543 - RNA, 24 nt, Human
aggggacccugggggaagaaggcu

SEQ ID NO: 128544 - RNA, 21 nt, Human
caacagggcacccacacccuc

SEQ ID NO: 128545 - RNA, 20 nt, Human
caccccacguggaaccggcg

SEQ ID NO: 128546 - RNA, 19 nt, Human
cacccgcacccgcugcaca

SEQ ID NO: 128547 - RNA, 19 nt, Human
cagggacagcauggaggag

SEQ ID NO: 128548 - RNA, 27 nt, Human
ccacacccucucagccaugcaggggac

SEQ ID NO: 128549 - RNA, 21 nt, Human
cccagaagccccgcuggaucu

SEQ ID NO: 128550 - RNA, 20 nt, Human
ccgcugcacaccgggagcag

SEQ ID NO: 128551 - RNA, 25 nt, Human
ccgcugcacaccgggagcagcgggg

SEQ ID NO: 128552 - RNA, 20 nt, Human
cgccucgucuuuuggugaua

SEQ ID NO: 128553 - RNA, 19 nt, Human
cgggagcagcggggcgggg

SEQ ID NO: 128554 - RNA, 19 nt, Human
cggggcgggggcgggggcg

SEQ ID NO: 128555 - RNA, 25 nt, Human
cuggccccaccggcagagaagcaag

SEQ ID NO: 128556 - RNA, 18 nt, Human
cuggccccuucauccugg

SEQ ID NO: 128557 - RNA, 20 nt, Human
cuggccccuucauccugggc

SEQ ID NO: 128558 - RNA, 18 nt, Human
cugguccugccuccgucg

SEQ ID NO: 128559 - RNA, 24 nt, Human
gaaccacgcggaaagcacagcccu

SEQ ID NO: 128560 - RNA, 21 nt, Human
gaaccggcgcccagaagcccc

SEQ ID NO: 128561 - RNA, 18 nt, Human
gagcagcggggcgggggc

SEQ ID NO: 128562 - RNA, 19 nt, Human
gaggagggggaggaguagg

SEQ ID NO: 128563 - RNA, 20 nt, Human
gcacccgcacccgcugcaca

SEQ ID NO: 128564 - RNA, 19 nt, Human
gcccagaagccccgcugga

SEQ ID NO: 128565 - RNA, 21 nt, Human
gcccugacuccaccccggucu

SEQ ID NO: 128566 - RNA, 21 nt, Human
ggaacagggcuggcggagggc

SEQ ID NO: 128567 - RNA, 21 nt, Human
gggagcagcggggcgggggcg

SEQ ID NO: 128568 - RNA, 19 nt, Human
ggggcgggggcguucccgg

SEQ ID NO: 128569 - RNA, 22 nt, Human
ggugauaguuguugucagggcu

SEQ ID NO: 128570 - RNA, 19 nt, Human
guucagcgcuggccccacc

SEQ ID NO: 128571 - RNA, 23 nt, Human
uaagcggcacccgcacccgcugc

SEQ ID NO: 128572 - RNA, 18 nt, Human
ucccggugauuccacacc

SEQ ID NO: 128573 - RNA, 21 nt, Human
ucccuuuaggugggcgaaaau

SEQ ID NO: 128574 - RNA, 26 nt, Human
ucucuaacuagcuaaaugccuggucc

SEQ ID NO: 128575 - RNA, 19 nt, Human
ugaaauggcccgcccaagg

SEQ ID NO: 128576 - RNA, 20 nt, Human
uggaggagggggaggaguag

SEQ ID NO: 128577 - RNA, 19 nt, Human
uggcagaaccacgcggaaa

SEQ ID NO: 128578 - RNA, 21 nt, Human
uggcccagcgacugagggcgg

SEQ ID NO: 128579 - RNA, 22 nt, Human
uggcccagcgacugagggcggg

SEQ ID NO: 128580 - RNA, 22 nt, Human
ugggggaagaaggcuggauugg

SEQ ID NO: 128581 - RNA, 22 nt, Human
ugugcaggcugucccugcacug

SEQ ID NO: 128582 - RNA, 19 nt, Human
uguuccauggggaucgucg

SEQ ID NO: 128583 - RNA, 22 nt, Human
uuccauggggaucgucgcagaa

SEQ ID NO: 128584 - RNA, 19 nt, Human
uuuacagaugagaaaagug

SEQ ID NO: 128585 - RNA, 21 nt, Human
uuuaggugggcgaaaauaucu

SEQ ID NO: 128586 - RNA, 19 nt, Human
acauggcacaguaaccaaa

SEQ ID NO: 128587 - RNA, 21 nt, Human
agccguauggugagcagccuu

SEQ ID NO: 128588 - RNA, 18 nt, Human
aguaaccaaauccagucu

SEQ ID NO: 128589 - RNA, 19 nt, Human
gccguauggugagcagccu

SEQ ID NO: 128590 - RNA, 25 nt, Human
uagaaaaaaacaaggcauugucuca

SEQ ID NO: 128591 - RNA, 18 nt, Human
uaggauaaacacauggca

SEQ ID NO: 128592 - RNA, 24 nt, Human
uaggauaaacacauggcacaguaa

SEQ ID NO: 128593 - RNA, 21 nt, Human
uccacgguauuagaaaaaaac

SEQ ID NO: 128594 - RNA, 19 nt, Human
ugagcagccuugaguagcu

SEQ ID NO: 128595 - RNA, 20 nt, Human
ugaguagcugguuuaacugg

SEQ ID NO: 128596 - RNA, 24 nt, Human
uuagagccguauggugagcagccu

SEQ ID NO: 128597 - RNA, 23 nt, Human
uucagauaaaaacuacucaagga

SEQ ID NO: 128598 - RNA, 23 nt, Human
aaaaaaaacaguuacuaaacgug

SEQ ID NO: 128599 - RNA, 24 nt, Human
aaaaaggaacccaagcaaagagga

SEQ ID NO: 128600 - RNA, 21 nt, Human
aaaagaagggcggggaggggg

SEQ ID NO: 128601 - RNA, 25 nt, Human
aaacauaaaacuaggaaaagaggug

SEQ ID NO: 128602 - RNA, 18 nt, Human
aaacuaggaaaagaggug

SEQ ID NO: 128603 - RNA, 20 nt, Human
aaagagaaaagcuguaaaag

SEQ ID NO: 128604 - RNA, 20 nt, Human
aacauccuuccaccucacuc

SEQ ID NO: 128605 - RNA, 18 nt, Human
aaccugggaccugcccgg

SEQ ID NO: 128606 - RNA, 20 nt, Human
aaccugggaccugcccggca

SEQ ID NO: 128607 - RNA, 19 nt, Human
aagaagaaccuguucccau

SEQ ID NO: 128608 - RNA, 19 nt, Human
aagaggaaggaguugggga

SEQ ID NO: 128609 - RNA, 19 nt, Human
aagccagucaacuguacaa

SEQ ID NO: 128610 - RNA, 27 nt, Human
aaggaacccaagcaaagaggaaggagu

SEQ ID NO: 128611 - RNA, 20 nt, Human
aaggugcccuuggccgcccc

SEQ ID NO: 128612 - RNA, 20 nt, Human
aaguccccagccagggccgg

SEQ ID NO: 128613 - RNA, 20 nt, Human
acagacaugagcacgacccg

SEQ ID NO: 128614 - RNA, 20 nt, Human
acagcgucucaacuaccaac

SEQ ID NO: 128615 - RNA, 21 nt, Human
acaucgggaccccgcgccucc

SEQ ID NO: 128616 - RNA, 18 nt, Human
accccgcgccuccgggcc

SEQ ID NO: 128617 - RNA, 23 nt, Human
accugaaccgcgccuagggccuc

SEQ ID NO: 128618 - RNA, 18 nt, Human
acgcgcggacggacgggc

SEQ ID NO: 128619 - RNA, 23 nt, Human
acuccgagaggccccccgguggg

SEQ ID NO: 128620 - RNA, 18 nt, Human
agaagggcggggaggggg

SEQ ID NO: 128621 - RNA, 18 nt, Human
agaagggcggggaggggg

SEQ ID NO: 128622 - RNA, 26 nt, Human
agacaggaaggggucaaaagggaccc

SEQ ID NO: 128623 - RNA, 23 nt, Human
agagcuccccccacgccaggccc

SEQ ID NO: 128624 - RNA, 18 nt, Human
agaggaaggaguugggga

SEQ ID NO: 128625 - RNA, 24 nt, Human
agaggaaggaguuggggaggggcc

SEQ ID NO: 128626 - RNA, 23 nt, Human
agcagggaggacuaagagcuaca

SEQ ID NO: 128627 - RNA, 18 nt, Human
agcccgcuccgcuccucc

SEQ ID NO: 128628 - RNA, 18 nt, Human
aggaaggaguuggggagg

SEQ ID NO: 128629 - RNA, 18 nt, Human
aggaaggaguuggggagg

SEQ ID NO: 128630 - RNA, 19 nt, Human
aggaaggaguuggggaggg

SEQ ID NO: 128631 - RNA, 20 nt, Human
aggaggagggagggaaagag

SEQ ID NO: 128632 - RNA, 21 nt, Human
aggcacggcgggccgucuggc

SEQ ID NO: 128633 - RNA, 19 nt, Human
aggccuccaacccggccag

SEQ ID NO: 128634 - RNA, 19 nt, Human
agggaaggagggguggaau

SEQ ID NO: 128635 - RNA, 23 nt, Human
agggcggggagggggucccaggg

SEQ ID NO: 128636 - RNA, 18 nt, Human
aggggccccagcugggcc

SEQ ID NO: 128637 - RNA, 20 nt, Human
agugggugccaggcggagcu

SEQ ID NO: 128638 - RNA, 21 nt, Human
auccucuccuccagaagcccc

SEQ ID NO: 128639 - RNA, 18 nt, Human
caacgagaggaaagccag

SEQ ID NO: 128640 - RNA, 23 nt, Human
caacuuuuuaaaaaaagagaaaa

SEQ ID NO: 128641 - RNA, 24 nt, Human
caacuuuuuaaaaaaagagaaaag

SEQ ID NO: 128642 - RNA, 26 nt, Human
caaguccccagccagggccggaaucc

SEQ ID NO: 128643 - RNA, 20 nt, Human
caccucacuccagcccaggu

SEQ ID NO: 128644 - RNA, 23 nt, Human
cacuccagcccagguuucggggg

SEQ ID NO: 128645 - RNA, 25 nt, Human
cagaguccccaccuggcugcccucc

SEQ ID NO: 128646 - RNA, 20 nt, Human
cagcccaagcggggucccuc

SEQ ID NO: 128647 - RNA, 21 nt, Human
caggccccaagcagggugagg

SEQ ID NO: 128648 - RNA, 21 nt, Human
caggucagaguccccaccugg

SEQ ID NO: 128649 - RNA, 19 nt, Human
caggugggcggccuuggca

SEQ ID NO: 128650 - RNA, 28 nt, Human
cagugugcgggugaggccagcccaagcg

SEQ ID NO: 128651 - RNA, 23 nt, Human
caguuacuaaacgugaaaaagga

SEQ ID NO: 128652 - RNA, 23 nt, Human
ccaaaaaaaaaaaaaaaaaaaaa

SEQ ID NO: 128653 - RNA, 25 nt, Human
ccaagcggggucccucagaccugcc

SEQ ID NO: 128654 - RNA, 20 nt, Human
ccacaucgggaccccgcgcc

SEQ ID NO: 128655 - RNA, 22 nt, Human
ccagccagggccggaauccgga

SEQ ID NO: 128656 - RNA, 19 nt, Human
ccagggccggaauccggag

SEQ ID NO: 128657 - RNA, 22 nt, Human
ccauccauagcccugaccugaa

SEQ ID NO: 128658 - RNA, 19 nt, Human
cccacgccaggccccaagc

SEQ ID NO: 128659 - RNA, 19 nt, Human
ccccaccuggcugcccucc

SEQ ID NO: 128660 - RNA, 21 nt, Human
ccccagcugggccugcuacuu

SEQ ID NO: 128661 - RNA, 22 nt, Human
ccccagcugggccugcuacuuc

SEQ ID NO: 128662 - RNA, 18 nt, Human
ccccaggucagagucccc

SEQ ID NO: 128663 - RNA, 22 nt, Human
ccccccacgccaggccccaagc

SEQ ID NO: 128664 - RNA, 22 nt, Human
ccccgccccguccccgcccgga

SEQ ID NO: 128665 - RNA, 19 nt, Human
ccccgcccggaccucgccc

SEQ ID NO: 128666 - RNA, 24 nt, Human
ccccgcgccuccgggccgcguccg

SEQ ID NO: 128667 - RNA, 19 nt, Human
ccccgggccccacaucggg

SEQ ID NO: 128668 - RNA, 24 nt, Human
ccccgggccccacaucgggacccc

SEQ ID NO: 128669 - RNA, 21 nt, Human
ccccugggccccauccauagc

SEQ ID NO: 128670 - RNA, 18 nt, Human
cccgccccguccccgccc

SEQ ID NO: 128671 - RNA, 21 nt, Human
cccgcccggaccucgcccgcu

SEQ ID NO: 128672 - RNA, 21 nt, Human
cccgugcacaccugucccccg

SEQ ID NO: 128673 - RNA, 20 nt, Human
cccugggccccauccauagc

SEQ ID NO: 128674 - RNA, 22 nt, Human
cccugggccccauccauagccc

SEQ ID NO: 128675 - RNA, 23 nt, Human
cccugggccccauccauagcccu

SEQ ID NO: 128676 - RNA, 21 nt, Human
ccgccccguccccgcccggac

SEQ ID NO: 128677 - RNA, 23 nt, Human
ccgccccgugcacaccugucccc

SEQ ID NO: 128678 - RNA, 18 nt, Human
ccgccgccgccucggagc

SEQ ID NO: 128679 - RNA, 22 nt, Human
ccgcgccuagggccuccaaccu

SEQ ID NO: 128680 - RNA, 22 nt, Human
ccgcgccuccgggccgcguccg

SEQ ID NO: 128681 - RNA, 20 nt, Human
ccuagggccuccaaccuggg

SEQ ID NO: 128682 - RNA, 20 nt, Human
ccuccagaagcccccagguc

SEQ ID NO: 128683 - RNA, 22 nt, Human
ccucccagugugcgggugaggc

SEQ ID NO: 128684 - RNA, 20 nt, Human
ccucgcuuuccuuugugcug

SEQ ID NO: 128685 - RNA, 20 nt, Human
ccuggacagagaauacaaag

SEQ ID NO: 128686 - RNA, 22 nt, Human
ccuggcccccagcccgcuccgc

SEQ ID NO: 128687 - RNA, 20 nt, Human
cgagccgagcgacgcagcgg

SEQ ID NO: 128688 - RNA, 20 nt, Human
cgccucggagccucugcagc

SEQ ID NO: 128689 - RNA, 21 nt, Human
cggaauccggagugggugccg

SEQ ID NO: 128690 - RNA, 18 nt, Human
cggccccgggccccacau

SEQ ID NO: 128691 - RNA, 19 nt, Human
cggcgguaagggagucacu

SEQ ID NO: 128692 - RNA, 25 nt, Human
cgggcggacggaggaggagggaggg

SEQ ID NO: 128693 - RNA, 19 nt, Human
cgguccccgccccgucccc

SEQ ID NO: 128694 - RNA, 22 nt, Human
cggugggcggggcgcccuggcc

SEQ ID NO: 128695 - RNA, 22 nt, Human
cuccccccacgccaggccccaa

SEQ ID NO: 128696 - RNA, 18 nt, Human
cugccuccuccgcgaccc

SEQ ID NO: 128697 - RNA, 20 nt, Human
cuggaccagggaaggagggg

SEQ ID NO: 128698 - RNA, 24 nt, Human
cugggccccauccauagcccugac

SEQ ID NO: 128699 - RNA, 19 nt, Human
cuucgggccggaccgggcc

SEQ ID NO: 128700 - RNA, 22 nt, Human
cuuugccucaguuuccucaaga

SEQ ID NO: 128701 - RNA, 20 nt, Human
cuuugugcuguggccgggcc

SEQ ID NO: 128702 - RNA, 25 nt, Human
gaaaaaggaacccaagcaaagagga

SEQ ID NO: 128703 - RNA, 21 nt, Human
gaacggacagacgcgcggacg

SEQ ID NO: 128704 - RNA, 22 nt, Human
gaccugcccuccucuuugccuc

SEQ ID NO: 128705 - RNA, 21 nt, Human
gagaaaagcuguaaaagucag

SEQ ID NO: 128706 - RNA, 24 nt, Human
gagcagggaggacuaagagcuaca

SEQ ID NO: 128707 - RNA, 18 nt, Human
gaggaaggaguuggggag

SEQ ID NO: 128708 - RNA, 19 nt, Human
gaggaaggaguuggggagg

SEQ ID NO: 128709 - RNA, 19 nt, Human
gagggaaagagggagucgc

SEQ ID NO: 128710 - RNA, 20 nt, Human
gagucgccgccgccgccucg

SEQ ID NO: 128711 - RNA, 22 nt, Human
gccauguggcagcaaacauccu

SEQ ID NO: 128712 - RNA, 24 nt, Human
gccccaagcagggugaggccucca

SEQ ID NO: 128713 - RNA, 18 nt, Human
gccccagcugggccugcu

SEQ ID NO: 128714 - RNA, 21 nt, Human
gcccccaggucagagucccca

SEQ ID NO: 128715 - RNA, 24 nt, Human
gccccgggccccacaucgggaccc

SEQ ID NO: 128716 - RNA, 18 nt, Human
gcccuggacagagaauac

SEQ ID NO: 128717 - RNA, 19 nt, Human
gccucggagccucugcagc

SEQ ID NO: 128718 - RNA, 18 nt, Human
gcuuuccuuugugcugug

SEQ ID NO: 128719 - RNA, 21 nt, Human
ggaccgggccgaacggacaga

SEQ ID NO: 128720 - RNA, 20 nt, Human
ggaggaggagggagggaaag

SEQ ID NO: 128721 - RNA, 22 nt, Human
ggaggagggagggaaagaggga

SEQ ID NO: 128722 - RNA, 21 nt, Human
ggccacgcggccccgggcccc

SEQ ID NO: 128723 - RNA, 19 nt, Human
ggccccagcugggccugcu

SEQ ID NO: 128724 - RNA, 22 nt, Human
ggccuuggcaaggguagccuag

SEQ ID NO: 128725 - RNA, 20 nt, Human
gggcggggagggggucccag

SEQ ID NO: 128726 - RNA, 21 nt, Human
gggcugagccgggcaggcugc

SEQ ID NO: 128727 - RNA, 20 nt, Human
ggggagggcggcccacuccg

SEQ ID NO: 128728 - RNA, 20 nt, Human
gggguagggugggggauggg

SEQ ID NO: 128729 - RNA, 21 nt, Human
gggugccaggcggagcugcug

SEQ ID NO: 128730 - RNA, 19 nt, Human
gguagggaagcggccaagu

SEQ ID NO: 128731 - RNA, 20 nt, Human
gucccucagaccugcccucc

SEQ ID NO: 128732 - RNA, 27 nt, Human
gugcuuuccaaaaaaaaaaaaaaaaaa

SEQ ID NO: 128733 - RNA, 22 nt, Human
guuggggaggggccaccaaagc

SEQ ID NO: 128734 - RNA, 22 nt, Human
uaaaaaaagagaaaagcuguaa

SEQ ID NO: 128735 - RNA, 18 nt, Human
uaagagcuacaaucugga

SEQ ID NO: 128736 - RNA, 22 nt, Human
uacaaagugauauuuucccaag

SEQ ID NO: 128737 - RNA, 19 nt, Human
uagcucgguccccgccccg

SEQ ID NO: 128738 - RNA, 18 nt, Human
uaggaaaagagguggggg

SEQ ID NO: 128739 - RNA, 25 nt, Human
uagggugggggaugggcucccgcag

SEQ ID NO: 128740 - RNA, 18 nt, Human
ucaggcccuguggguagg

SEQ ID NO: 128741 - RNA, 20 nt, Human
ucauccucuccuccagaagc

SEQ ID NO: 128742 - RNA, 23 nt, Human
uccaaaaaaaaaaaaaaaaaaaa

SEQ ID NO: 128743 - RNA, 18 nt, Human
ucccaccagagcuccccc

SEQ ID NO: 128744 - RNA, 21 nt, Human
ucccaccagagcuccccccac

SEQ ID NO: 128745 - RNA, 19 nt, Human
uccccccacgccaggcccc

SEQ ID NO: 128746 - RNA, 19 nt, Human
ucccucagaccugcccucc

SEQ ID NO: 128747 - RNA, 22 nt, Human
uccgcuagcucgguccccgccc

SEQ ID NO: 128748 - RNA, 19 nt, Human
uccgcuccucccccgcccu

SEQ ID NO: 128749 - RNA, 25 nt, Human
uccuccagaagcccccaggucagag

SEQ ID NO: 128750 - RNA, 19 nt, Human
uccuuccaccucacuccag

SEQ ID NO: 128751 - RNA, 23 nt, Human
ugaaaaaggaacccaagcaaaga

SEQ ID NO: 128752 - RNA, 18 nt, Human
ugaagcccuggacagaga

SEQ ID NO: 128753 - RNA, 20 nt, Human
ugaagcccuggacagagaau

SEQ ID NO: 128754 - RNA, 19 nt, Human
ugagcacgacccguuacag

SEQ ID NO: 128755 - RNA, 21 nt, Human
ugcaaaauaucugaagcccug

SEQ ID NO: 128756 - RNA, 23 nt, Human
ugcaggugggcggccuuggcaag

SEQ ID NO: 128757 - RNA, 18 nt, Human
ugccagcagggagaggag

SEQ ID NO: 128758 - RNA, 20 nt, Human
uggccagaggcugaugcagg

SEQ ID NO: 128759 - RNA, 21 nt, Human
uggccagaggcugaugcaggu

SEQ ID NO: 128760 - RNA, 24 nt, Human
uggcccccagcccgcuccgcuccu

SEQ ID NO: 128761 - RNA, 19 nt, Human
uggcgaaggugcccuuggc

SEQ ID NO: 128762 - RNA, 19 nt, Human
ugggaccugcccggcagga

SEQ ID NO: 128763 - RNA, 21 nt, Human
ugggcaccuucccccugccuc

SEQ ID NO: 128764 - RNA, 19 nt, Human
ugggccagacaggaagggg

SEQ ID NO: 128765 - RNA, 21 nt, Human
ugggggacauuuucccaccag

SEQ ID NO: 128766 - RNA, 22 nt, Human
uguggccgggccgggcugagcc

SEQ ID NO: 128767 - RNA, 21 nt, Human
uuaaaaaaagagaaaagcugu

SEQ ID NO: 128768 - RNA, 23 nt, Human
uuccucaagaagaaccuguuccc

SEQ ID NO: 128769 - RNA, 19 nt, Human
uuucggggggagggcggcc

SEQ ID NO: 128770 - RNA, 27 nt, Human
aaccacaguaucagaaccugcaaaucu

SEQ ID NO: 128771 - RNA, 23 nt, Human
acagagaacccuccccgcccccg

SEQ ID NO: 128772 - RNA, 24 nt, Human
acuccagugguuuggacgaguguc

SEQ ID NO: 128773 - RNA, 20 nt, Human
agaacccuccccgcccccgc

SEQ ID NO: 128774 - RNA, 20 nt, Human
agagaacccuccccgccccc

SEQ ID NO: 128775 - RNA, 22 nt, Human
aggcgaagggcuggcugcgauc

SEQ ID NO: 128776 - RNA, 19 nt, Human
aggcggugggaggauaggg

SEQ ID NO: 128777 - RNA, 21 nt, Human
cacaguaucagaaccugcaaa

SEQ ID NO: 128778 - RNA, 23 nt, Human
caccugccccaggcucacggguu

SEQ ID NO: 128779 - RNA, 21 nt, Human
cccuccccgcccccgcaagag

SEQ ID NO: 128780 - RNA, 23 nt, Human
ccuggcaccugccccaggcucac

SEQ ID NO: 128781 - RNA, 24 nt, Human
ccuggcaccugccccaggcucacc

SEQ ID NO: 128782 - RNA, 22 nt, Human
cgccugccagguggggaugugg

SEQ ID NO: 128783 - RNA, 20 nt, Human
cucgaaccacaguaucagaa

SEQ ID NO: 128784 - RNA, 24 nt, Human
ggaggauagggucccugacgugcc

SEQ ID NO: 128785 - RNA, 22 nt, Human
ggaggcggugggaggauagggu

SEQ ID NO: 128786 - RNA, 19 nt, Human
ucccuggggcacccagcug

SEQ ID NO: 128787 - RNA, 19 nt, Human
ucgaaccacaguaucagaa

SEQ ID NO: 128788 - RNA, 18 nt, Human
uggagaggcgaagggcug

SEQ ID NO: 128789 - RNA, 19 nt, Human
uggagaggcgaagggcugg

SEQ ID NO: 128790 - RNA, 24 nt, Human
aaaacuguagagaugggguuucac

SEQ ID NO: 128791 - RNA, 27 nt, Human
aaaacuguagagaugggguuucaccau

SEQ ID NO: 128792 - RNA, 28 nt, Human
aaaacuguagagaugggguuucaccaug

SEQ ID NO: 128793 - RNA, 22 nt, Human
aaaaggaaguagacuucucaaa

SEQ ID NO: 128794 - RNA, 23 nt, Human
aaacaaacaccuuuaauagacug

SEQ ID NO: 128795 - RNA, 18 nt, Human
aaagugcuggauuacagg

SEQ ID NO: 128796 - RNA, 23 nt, Human
aaagugcuggauuacaggcguga

SEQ ID NO: 128797 - RNA, 24 nt, Human
aaagugcugggauuacaggcguga

SEQ ID NO: 128798 - RNA, 20 nt, Human
aacaaacaccuuuaauagac

SEQ ID NO: 128799 - RNA, 25 nt, Human
aagcaauucuccugccucagccucc

SEQ ID NO: 128800 - RNA, 25 nt, Human
aagcgauucuccugccucagccucc

SEQ ID NO: 128801 - RNA, 20 nt, Human
aaguagcugggacuacaggc

SEQ ID NO: 128802 - RNA, 24 nt, Human
aaguagcugggacuacaggccugu

SEQ ID NO: 128803 - RNA, 25 nt, Human
aaguagcugggacuacaggccugug

SEQ ID NO: 128804 - RNA, 19 nt, Human
aagugcugggauuacaggc

SEQ ID NO: 128805 - RNA, 19 nt, Human
aagugcugggauuacaggc

SEQ ID NO: 128806 - RNA, 26 nt, Human
aagugcugggauuacaggcgugagcc

SEQ ID NO: 128807 - RNA, 20 nt, Human
aauauuagaaacaacaugga

SEQ ID NO: 128808 - RNA, 18 nt, Human
aauuuuguuaaucuugcc

SEQ ID NO: 128809 - RNA, 31 nt, Human
acaaaacuguagagaugggguuucaccaugg

SEQ ID NO: 128810 - RNA, 18 nt, Human
acaaaacuucacuuaaac

SEQ ID NO: 128811 - RNA, 19 nt, Human
acagagcaagaauauacuc

SEQ ID NO: 128812 - RNA, 21 nt, Human
accaugcccggccuaauuuug

SEQ ID NO: 128813 - RNA, 18 nt, Human
accauguuggccaggcug

SEQ ID NO: 128814 - RNA, 24 nt, Human
accauguuggccaggguggucucg

SEQ ID NO: 128815 - RNA, 23 nt, Human
acccaggcuggagugcaguggug

SEQ ID NO: 128816 - RNA, 22 nt, Human
accuccaccucuugggcucaag

SEQ ID NO: 128817 - RNA, 25 nt, Human
acuauauccauuuuaaacaaacacc

SEQ ID NO: 128818 - RNA, 25 nt, Human
acuauguugcccaggcuggucucaa

SEQ ID NO: 128819 - RNA, 25 nt, Human
acucugucacccauacuggaggaua

SEQ ID NO: 128820 - RNA, 24 nt, Human
agaaaauaccaaagcauuaccagu

SEQ ID NO: 128821 - RNA, 24 nt, Human
agcgauucuccugccucagccucc

SEQ ID NO: 128822 - RNA, 18 nt, Human
aggagaaccauuacacca

SEQ ID NO: 128823 - RNA, 25 nt, Human
aggcuggagugcaguggugugaucu

SEQ ID NO: 128824 - RNA, 24 nt, Human
agguagaggccagguuucaccaug

SEQ ID NO: 128825 - RNA, 21 nt, Human
aggugaaggucuuccccaaga

SEQ ID NO: 128826 - RNA, 22 nt, Human
agguuucaccauguuggccagg

SEQ ID NO: 128827 - RNA, 18 nt, Human
aguagcugggacuauagg

SEQ ID NO: 128828 - RNA, 25 nt, Human
aguagcugggacuauaggugcacac

SEQ ID NO: 128829 - RNA, 18 nt, Human
agugcaguggugugaucu

SEQ ID NO: 128830 - RNA, 19 nt, Human
agugcaguggugugaucuc

SEQ ID NO: 128831 - RNA, 19 nt, Human
agugcaguggugugaucuc

SEQ ID NO: 128832 - RNA, 24 nt, Human
agugcaguggugugaucucugcuc

SEQ ID NO: 128833 - RNA, 18 nt, Human
agugcugggauuacaggc

SEQ ID NO: 128834 - RNA, 18 nt, Human
auaaaaugugacagcccc

SEQ ID NO: 128835 - RNA, 25 nt, Human
auauuagaaacaacauggauuuccg

SEQ ID NO: 128836 - RNA, 22 nt, Human
augggguuucaccauguuggcc

SEQ ID NO: 128837 - RNA, 23 nt, Human
augggguuucaccauguuggcca

SEQ ID NO: 128838 - RNA, 24 nt, Human
augggguuucaccauguuggccag

SEQ ID NO: 128839 - RNA, 25 nt, Human
auuaaaacaaccuuuuuucugucac

SEQ ID NO: 128840 - RNA, 21 nt, Human
auucuccugccucagccuccc

SEQ ID NO: 128841 - RNA, 18 nt, Human
auugugccuuagauccuu

SEQ ID NO: 128842 - RNA, 23 nt, Human
caaagugcuggauuacaggcgug

SEQ ID NO: 128843 - RNA, 24 nt, Human
caaagugcugggauuacaggcgug

SEQ ID NO: 128844 - RNA, 25 nt, Human
caaauugaaauguuggauacauuca

SEQ ID NO: 128845 - RNA, 23 nt, Human
caaccuccaccucccagguucaa

SEQ ID NO: 128846 - RNA, 22 nt, Human
caagcaauucuccugccucagc

SEQ ID NO: 128847 - RNA, 22 nt, Human
caagcgauucuccugccucagc

SEQ ID NO: 128848 - RNA, 21 nt, Human
caagucaucacaccuggcuga

SEQ ID NO: 128849 - RNA, 22 nt, Human
caagugauccuccugcuucagc

SEQ ID NO: 128850 - RNA, 27 nt, Human
caagugauccuccugcuucagccuccc

SEQ ID NO: 128851 - RNA, 24 nt, Human
caccaggcccagguaauuuuugua

SEQ ID NO: 128852 - RNA, 21 nt, Human
caccauguuggccaggcuggu

SEQ ID NO: 128853 - RNA, 24 nt, Human
caccauguuggccaggcuggucuc

SEQ ID NO: 128854 - RNA, 18 nt, Human
caccauguuggccagggu

SEQ ID NO: 128855 - RNA, 22 nt, Human
caccauguuggccagggugguc

SEQ ID NO: 128856 - RNA, 24 nt, Human
caccauguuggccaggguggucuc

SEQ ID NO: 128857 - RNA, 21 nt, Human
cacccaggcuggagugcagug

SEQ ID NO: 128858 - RNA, 24 nt, Human
caccucggccucccaaagugcugg

SEQ ID NO: 128859 - RNA, 21 nt, Human
caccugggccucccaaagugc

SEQ ID NO: 128860 - RNA, 19 nt, Human
cacuauguugcccaggcug

SEQ ID NO: 128861 - RNA, 24 nt, Human
cacuauguugcccaggcuggucuc

SEQ ID NO: 128862 - RNA, 27 nt, Human
cacuauguugcccaggcuggucucaaa

SEQ ID NO: 128863 - RNA, 25 nt, Human
cacucugucacccauacuggaggau

SEQ ID NO: 128864 - RNA, 21 nt, Human
cacugcaaccuccaccuccca

SEQ ID NO: 128865 - RNA, 23 nt, Human
cacuguaaccuccaccucuuggg

SEQ ID NO: 128866 - RNA, 20 nt, Human
cagcuuccugaguagcuggg

SEQ ID NO: 128867 - RNA, 22 nt, Human
cagguuucaccauguuggccag

SEQ ID NO: 128868 - RNA, 24 nt, Human
cauguuggccaggcuggucucaaa

SEQ ID NO: 128869 - RNA, 19 nt, Human
ccaaagugcuggauuacag

SEQ ID NO: 128870 - RNA, 21 nt, Human
ccaaagugcuggauuacaggc

SEQ ID NO: 128871 - RNA, 23 nt, Human
ccaaagugcuggauuacaggcgu

SEQ ID NO: 128872 - RNA, 22 nt, Human
ccaaagugcugggauuacaggc

SEQ ID NO: 128873 - RNA, 22 nt, Human
ccaaagugcugggauuacaggc

SEQ ID NO: 128874 - RNA, 24 nt, Human
ccaaagugcugggauuacaggcgu

SEQ ID NO: 128875 - RNA, 22 nt, Human
ccaccacacuuggcuuuuuggu

SEQ ID NO: 128876 - RNA, 26 nt, Human
ccaccaggcuaauuuuaaaaauaaug

SEQ ID NO: 128877 - RNA, 24 nt, Human
ccaccucccagguucaagcgauuc

SEQ ID NO: 128878 - RNA, 24 nt, Human
ccagguuucaccauguuggccagg

SEQ ID NO: 128879 - RNA, 24 nt, Human
cccaaagugcuggauuacaggcgu

SEQ ID NO: 128880 - RNA, 20 nt, Human
cccaagaaaauaccaaagca

SEQ ID NO: 128881 - RNA, 25 nt, Human
cccaaguagcugggacuacaggccu

SEQ ID NO: 128882 - RNA, 20 nt, Human
cccaggcuggagugcagugg

SEQ ID NO: 128883 - RNA, 20 nt, Human
cccagguucaagcgauucuc

SEQ ID NO: 128884 - RNA, 23 nt, Human
cccagguucaagcgauucuccug

SEQ ID NO: 128885 - RNA, 20 nt, Human
ccccaggagaaccauuacac

SEQ ID NO: 128886 - RNA, 24 nt, Human
ccucccagguucaagcgauucucc

SEQ ID NO: 128887 - RNA, 22 nt, Human
ccuccugcuucagccuccccua

SEQ ID NO: 128888 - RNA, 24 nt, Human
ccuccugcuucagccuccccuaua

SEQ ID NO: 128889 - RNA, 24 nt, Human
ccucuugggcucaagcaauucucc

SEQ ID NO: 128890 - RNA, 24 nt, Human
ccugaccucaggugaucuggccac

SEQ ID NO: 128891 - RNA, 19 nt, Human
ccugaguagcugggacuau

SEQ ID NO: 128892 - RNA, 24 nt, Human
ccugaguagcugggacuauaggug

SEQ ID NO: 128893 - RNA, 23 nt, Human
ccugccucagccucccaaguagc

SEQ ID NO: 128894 - RNA, 18 nt, Human
ccuggccucaagugaucc

SEQ ID NO: 128895 - RNA, 21 nt, Human
ccuggccucaagugauccucc

SEQ ID NO: 128896 - RNA, 22 nt, Human
ccuggccucaagugauccuccu

SEQ ID NO: 128897 - RNA, 23 nt, Human
ccuggccucaagugauccuccug

SEQ ID NO: 128898 - RNA, 22 nt, Human
ccugggcucaauugauccucuu

SEQ ID NO: 128899 - RNA, 22 nt, Human
cgccccaccugggccucccaaa

SEQ ID NO: 128900 - RNA, 20 nt, Human
cgguacccaccaccacaccc

SEQ ID NO: 128901 - RNA, 24 nt, Human
cucaagcaauucuccugccucagc

SEQ ID NO: 128902 - RNA, 24 nt, Human
cucaagugauccuccugcuucagc

SEQ ID NO: 128903 - RNA, 24 nt, Human
cucacugcaaccuccaccucccag

SEQ ID NO: 128904 - RNA, 24 nt, Human
cucacuguaaccuccaccucuugg

SEQ ID NO: 128905 - RNA, 24 nt, Human
cucagccucccaaguagcugggac

SEQ ID NO: 128906 - RNA, 22 nt, Human
cucagcuuccugaguagcuggg

SEQ ID NO: 128907 - RNA, 24 nt, Human
cucagcuuccugaguagcugggac

SEQ ID NO: 128908 - RNA, 23 nt, Human
cuccugggcucaauugauccucu

SEQ ID NO: 128909 - RNA, 19 nt, Human
cucugccacccaggcugga

SEQ ID NO: 128910 - RNA, 23 nt, Human
cugcaaccuccaccucccagguu

SEQ ID NO: 128911 - RNA, 24 nt, Human
cugcaaccuccaccucccagguuc

SEQ ID NO: 128912 - RNA, 19 nt, Human
cugccacccaggcuggagu

SEQ ID NO: 128913 - RNA, 23 nt, Human
cugccucagccucccaaguagcu

SEQ ID NO: 128914 - RNA, 21 nt, Human
cugggccucccaaagugcugg

SEQ ID NO: 128915 - RNA, 24 nt, Human
cuguaaccuccaccucuugggcuc

SEQ ID NO: 128916 - RNA, 21 nt, Human
cuugcucugucgcccaggcug

SEQ ID NO: 128917 - RNA, 24 nt, Human
cuugucucagcuuccugaguagcu

SEQ ID NO: 128918 - RNA, 24 nt, Human
gaccucaggugaucuggccaccuc

SEQ ID NO: 128919 - RNA, 20 nt, Human
gagaugggguuucaccaugu

SEQ ID NO: 128920 - RNA, 24 nt, Human
gagaugggguuucaccauguuggc

SEQ ID NO: 128921 - RNA, 21 nt, Human
gaugggguuucaccauguugg

SEQ ID NO: 128922 - RNA, 20 nt, Human
gaugggguuucaccauguuu

SEQ ID NO: 128923 - RNA, 18 nt, Human
gauuacaggcgugagcca

SEQ ID NO: 128924 - RNA, 18 nt, Human
gauuacaggcgugagcca

SEQ ID NO: 128925 - RNA, 21 nt, Human
gauuacaggcgugagccacca

SEQ ID NO: 128926 - RNA, 21 nt, Human
gauuacaggcgugagccacca

SEQ ID NO: 128927 - RNA, 21 nt, Human
gauuacaggcgugagccacca

SEQ ID NO: 128928 - RNA, 24 nt, Human
gauuacaggcgugagccaccaugc

SEQ ID NO: 128929 - RNA, 22 nt, Human
gcaaccuccaccucccagguuc

SEQ ID NO: 128930 - RNA, 24 nt, Human
gccagguuucaccauguuggccag

SEQ ID NO: 128931 - RNA, 19 nt, Human
gcccaggcuggagugcaau

SEQ ID NO: 128932 - RNA, 20 nt, Human
gccucagccucccaaguagc

SEQ ID NO: 128933 - RNA, 24 nt, Human
gcgauucuccugccucagccuccc

SEQ ID NO: 128934 - RNA, 19 nt, Human
gcgugagccaccaugcccg

SEQ ID NO: 128935 - RNA, 20 nt, Human
gcucugccacccaggcugga

SEQ ID NO: 128936 - RNA, 25 nt, Human
gcucugccacccaggcuggagugca

SEQ ID NO: 128937 - RNA, 27 nt, Human
gcucugucgcccaggcuggagugcaau

SEQ ID NO: 128938 - RNA, 19 nt, Human
gcuggagugcaauagcacg

SEQ ID NO: 128939 - RNA, 23 nt, Human
gcuggucucaaacuccuggccuc

SEQ ID NO: 128940 - RNA, 24 nt, Human
ggagaaccauuacaccauuauuca

SEQ ID NO: 128941 - RNA, 22 nt, Human
ggagugcaguggugugaucucu

SEQ ID NO: 128942 - RNA, 22 nt, Human
ggaucucacuauguugcccagg

SEQ ID NO: 128943 - RNA, 19 nt, Human
ggauuacaggcgugagcca

SEQ ID NO: 128944 - RNA, 22 nt, Human
ggauuacaggcgugagccacca

SEQ ID NO: 128945 - RNA, 23 nt, Human
ggauuacaggcgugagccaccau

SEQ ID NO: 128946 - RNA, 24 nt, Human
ggauuacaggcgugagccaccaug

SEQ ID NO: 128947 - RNA, 21 nt, Human
ggauuuccgaaugcaaauuga

SEQ ID NO: 128948 - RNA, 20 nt, Human
ggcauacaguuuucaacugg

SEQ ID NO: 128949 - RNA, 19 nt, Human
ggccucaagugauccuccu

SEQ ID NO: 128950 - RNA, 24 nt, Human
ggccucaagugauccuccugcuuc

SEQ ID NO: 128951 - RNA, 23 nt, Human
ggcgucuugcucugucgcccagg

SEQ ID NO: 128952 - RNA, 22 nt, Human
ggcuggagugcaguggugugau

SEQ ID NO: 128953 - RNA, 24 nt, Human
ggcuggucucaaacuccuggccuc

SEQ ID NO: 128954 - RNA, 20 nt, Human
gggcucaagcaauucuccug

SEQ ID NO: 128955 - RNA, 22 nt, Human
gggcucaagcaauucuccugcc

SEQ ID NO: 128956 - RNA, 23 nt, Human
gggguuucaccauguuggccagg

SEQ ID NO: 128957 - RNA, 18 nt, Human
gguacccaccaccacacc

SEQ ID NO: 128958 - RNA, 21 nt, Human
gguagaggccagguuucacca

SEQ ID NO: 128959 - RNA, 23 nt, Human
gguggucucgaacuccugaccuc

SEQ ID NO: 128960 - RNA, 21 nt, Human
guagagaugggguuucaccau

SEQ ID NO: 128961 - RNA, 22 nt, Human
guagagaugggguuucaccaug

SEQ ID NO: 128962 - RNA, 31 nt, Human
guagagaugggguuucaccauguuggccagg

SEQ ID NO: 128963 - RNA, 21 nt, Human
guagaggccagguuucaccau

SEQ ID NO: 128964 - RNA, 24 nt, Human
gugauccuccugcuucagccuccc

SEQ ID NO: 128965 - RNA, 18 nt, Human
guuggccaggguggucuc

SEQ ID NO: 128966 - RNA, 22 nt, Human
uaaaaaaagaaaugucaguggc

SEQ ID NO: 128967 - RNA, 20 nt, Human
uaaccucaggugaucgcccc

SEQ ID NO: 128968 - RNA, 24 nt, Human
uaagaagucacacucugaccuaua

SEQ ID NO: 128969 - RNA, 19 nt, Human
uaauuuuuguauuuuuaca

SEQ ID NO: 128970 - RNA, 19 nt, Human
uacaggccugugcaccagg

SEQ ID NO: 128971 - RNA, 22 nt, Human
uacaggccugugcaccaggccc

SEQ ID NO: 128972 - RNA, 18 nt, Human
uacaggcgugagccacca

SEQ ID NO: 128973 - RNA, 22 nt, Human
uacaggcgugagccaccaggcu

SEQ ID NO: 128974 - RNA, 23 nt, Human
uacaggcgugagccaccaugccc

SEQ ID NO: 128975 - RNA, 19 nt, Human
uaccaaagcauuaccacaa

SEQ ID NO: 128976 - RNA, 22 nt, Human
uaccaaagcauuaccacaaauc

SEQ ID NO: 128977 - RNA, 20 nt, Human
uacccaccaccacacccggu

SEQ ID NO: 128978 - RNA, 22 nt, Human
uagagaugggguuucaccaugu

SEQ ID NO: 128979 - RNA, 21 nt, Human
uagaggccagguuucaccaug

SEQ ID NO: 128980 - RNA, 24 nt, Human
uagcacgaucucagcucacugcaa

SEQ ID NO: 128981 - RNA, 20 nt, Human
uagcauaauaacggaaaugg

SEQ ID NO: 128982 - RNA, 24 nt, Human
uagguagaggccagguuucaccau

SEQ ID NO: 128983 - RNA, 21 nt, Human
uaggugcacaccaccacacuu

SEQ ID NO: 128984 - RNA, 24 nt, Human
uaggugcacaccaccacacuuggc

SEQ ID NO: 128985 - RNA, 23 nt, Human
uauguugcccaggcuggucucaa

SEQ ID NO: 128986 - RNA, 24 nt, Human
uauguugcccaggcuggucucaaa

SEQ ID NO: 128987 - RNA, 24 nt, Human
ucaccauguuggccaggguggucu

SEQ ID NO: 128988 - RNA, 24 nt, Human
ucacuacagcuuugaacuccuggg

SEQ ID NO: 128989 - RNA, 24 nt, Human
ucacugcaaccuccaccucccagg

SEQ ID NO: 128990 - RNA, 25 nt, Human
ucacugcaaccuccaccucccaggu

SEQ ID NO: 128991 - RNA, 27 nt, Human
ucacugcaaccuccaccucccagguuc

SEQ ID NO: 128992 - RNA, 23 nt, Human
ucacuguaaccuccaccucuugg

SEQ ID NO: 128993 - RNA, 24 nt, Human
ucacuguaaccuccaccucuuggg

SEQ ID NO: 128994 - RNA, 25 nt, Human
ucacuguaaccuccaccucuugggc

SEQ ID NO: 128995 - RNA, 20 nt, Human
ucagccucccaaguagcugg

SEQ ID NO: 128996 - RNA, 25 nt, Human
ucagcucacugcaaccuccaccucc

SEQ ID NO: 128997 - RNA, 23 nt, Human
ucagcuuccugaguagcugggac

SEQ ID NO: 128998 - RNA, 19 nt, Human
ucaguuaaaaaaaauaggg

SEQ ID NO: 128999 - RNA, 20 nt, Human
ucaguuaaaaaaaauagggc

SEQ ID NO: 129000 - RNA, 23 nt, Human
ucccaaagugcuggauuacaggc

SEQ ID NO: 129001 - RNA, 24 nt, Human
ucccaaagugcugggauuacaggc

SEQ ID NO: 129002 - RNA, 24 nt, Human
ucccaaguagcugggacuacaggc

SEQ ID NO: 129003 - RNA, 21 nt, Human
ucccagguucaagcgauucuc

SEQ ID NO: 129004 - RNA, 24 nt, Human
ucccagguucaagcgauucuccug

SEQ ID NO: 129005 - RNA, 24 nt, Human
uccugaguagcugggacuauaggu

SEQ ID NO: 129006 - RNA, 18 nt, Human
ucgcccaggcuggagugc

SEQ ID NO: 129007 - RNA, 18 nt, Human
ucggccucccaaagugcu

SEQ ID NO: 129008 - RNA, 18 nt, Human
ucucacuauguugcccag

SEQ ID NO: 129009 - RNA, 19 nt, Human
ucucacuauguugcccagg

SEQ ID NO: 129010 - RNA, 23 nt, Human
ucucacuauguugcccaggcugg

SEQ ID NO: 129011 - RNA, 24 nt, Human
ucucacuauguugcccaggcuggu

SEQ ID NO: 129012 - RNA, 26 nt, Human
ucucacuauguugcccaggcuggucu

SEQ ID NO: 129013 - RNA, 27 nt, Human
ucucacuauguugcccaggcuggucuc

SEQ ID NO: 129014 - RNA, 24 nt, Human
ucucacucugucacccauacugga

SEQ ID NO: 129015 - RNA, 26 nt, Human
ucuccugccucagccucccaaguagc

SEQ ID NO: 129016 - RNA, 26 nt, Human
ucuccugccucagccucccaaguagc

SEQ ID NO: 129017 - RNA, 23 nt, Human
ucucgaacuccugaccucaggug

SEQ ID NO: 129018 - RNA, 24 nt, Human
ucugccacccaggcuggagugcag

SEQ ID NO: 129019 - RNA, 24 nt, Human
ucugucgcccaggcuggagugcaa

SEQ ID NO: 129020 - RNA, 23 nt, Human
ucuugcucugucgcccaggcugg

SEQ ID NO: 129021 - RNA, 24 nt, Human
ucuugcucugucgcccaggcugga

SEQ ID NO: 129022 - RNA, 24 nt, Human
ucuugggcucaagcaauucuccug

SEQ ID NO: 129023 - RNA, 22 nt, Human
ucuuuccugauuuuaaaauuau

SEQ ID NO: 129024 - RNA, 21 nt, Human
ugaaaccuucauuucuauaca

SEQ ID NO: 129025 - RNA, 25 nt, Human
ugaacuccugggcucaauugauccu

SEQ ID NO: 129026 - RNA, 23 nt, Human
ugaccucaggugaucuggccacc

SEQ ID NO: 129027 - RNA, 24 nt, Human
ugaccucaggugaucuggccaccu

SEQ ID NO: 129028 - RNA, 25 nt, Human
ugaccucaggugaucuggccaccuc

SEQ ID NO: 129029 - RNA, 22 nt, Human
ugagauggcgucuugcucuguc

SEQ ID NO: 129030 - RNA, 20 nt, Human
ugaucgccccaccugggccu

SEQ ID NO: 129031 - RNA, 23 nt, Human
ugaucucugcucacuguaaccuc

SEQ ID NO: 129032 - RNA, 24 nt, Human
ugaucuggccaccucggccuccca

SEQ ID NO: 129033 - RNA, 24 nt, Human
ugcccaggcuggucucaaacuccu

SEQ ID NO: 129034 - RNA, 19 nt, Human
ugcccggccuaauuuuguu

SEQ ID NO: 129035 - RNA, 23 nt, Human
ugccucagccucccaaguagcgg

SEQ ID NO: 129036 - RNA, 24 nt, Human
ugccucagccucccaaguagcugg

SEQ ID NO: 129037 - RNA, 22 nt, Human
ugccuuagauccuuaaucauac

SEQ ID NO: 129038 - RNA, 24 nt, Human
ugcucugccacccaggcuggagug

SEQ ID NO: 129039 - RNA, 24 nt, Human
ugcucugucgcccaggcuggagug

SEQ ID NO: 129040 - RNA, 24 nt, Human
ugcugggauuacaggcgugagcca

SEQ ID NO: 129041 - RNA, 24 nt, Human
ugcuucagccuccccuauaacugg

SEQ ID NO: 129042 - RNA, 23 nt, Human
uggagugcaauagcacgaucuca

SEQ ID NO: 129043 - RNA, 19 nt, Human
uggagugcaguggugugau

SEQ ID NO: 129044 - RNA, 22 nt, Human
uggagugcaguggugugaucuc

SEQ ID NO: 129045 - RNA, 23 nt, Human
uggagugcaguggugugaucucu

SEQ ID NO: 129046 - RNA, 24 nt, Human
uggagugcaguggugugaucucug

SEQ ID NO: 129047 - RNA, 21 nt, Human
uggauuacaggcgugagccac

SEQ ID NO: 129048 - RNA, 23 nt, Human
uggauuacaggcgugagccacca

SEQ ID NO: 129049 - RNA, 23 nt, Human
uggcacaaugacagcucacuaca

SEQ ID NO: 129050 - RNA, 24 nt, Human
uggccaggcuggucucaaacuucu

SEQ ID NO: 129051 - RNA, 24 nt, Human
uggccaggguggucucgaacuccu

SEQ ID NO: 129052 - RNA, 18 nt, Human
uggccucaagugauccuc

SEQ ID NO: 129053 - RNA, 20 nt, Human
uggccucaagugauccuccu

SEQ ID NO: 129054 - RNA, 24 nt, Human
uggccucaagugauccuccugcuu

SEQ ID NO: 129055 - RNA, 24 nt, Human
uggcgucuugcucugucgcccagg

SEQ ID NO: 129056 - RNA, 23 nt, Human
ugggacuacaggccugugcacca

SEQ ID NO: 129057 - RNA, 24 nt, Human
ugggacuauaggugcacaccacca

SEQ ID NO: 129058 - RNA, 24 nt, Human
ugggaucucacuauguugcccagg

SEQ ID NO: 129059 - RNA, 18 nt, Human
ugggauuacaggcgugag

SEQ ID NO: 129060 - RNA, 19 nt, Human
ugggauuacaggcgugagc

SEQ ID NO: 129061 - RNA, 22 nt, Human
ugggauuacaggcgugagccac

SEQ ID NO: 129062 - RNA, 23 nt, Human
ugggauuacaggcgugagccacc

SEQ ID NO: 129063 - RNA, 24 nt, Human
ugggauuacaggcgugagccacca

SEQ ID NO: 129064 - RNA, 21 nt, Human
ugggauuacaguuacaaguca

SEQ ID NO: 129065 - RNA, 22 nt, Human
ugggauuacaguuacaagucau

SEQ ID NO: 129066 - RNA, 24 nt, Human
ugggauuacaguuacaagucauca

SEQ ID NO: 129067 - RNA, 24 nt, Human
ugggcucaagcaauucuccugccu

SEQ ID NO: 129068 - RNA, 24 nt, Human
ugggcucaauugauccucuugucu

SEQ ID NO: 129069 - RNA, 24 nt, Human
ugggguuucaccauguuggccagg

SEQ ID NO: 129070 - RNA, 24 nt, Human
uggugugaucucugcucacuguaa

SEQ ID NO: 129071 - RNA, 24 nt, Human
uguagagaugggguuucaccaugu

SEQ ID NO: 129072 - RNA, 20 nt, Human
ugucgcccaggcuggagugc

SEQ ID NO: 129073 - RNA, 24 nt, Human
ugucucagcuuccugaguagcugg

SEQ ID NO: 129074 - RNA, 23 nt, Human
uguugcucugccacccaggcugg

SEQ ID NO: 129075 - RNA, 24 nt, Human
uguugcucugccacccaggcugga

SEQ ID NO: 129076 - RNA, 24 nt, Human
uuacaaaacuguagagaugggguu

SEQ ID NO: 129077 - RNA, 19 nt, Human
uuagcugaagaccaaaaaa

SEQ ID NO: 129078 - RNA, 19 nt, Human
uucaagaaugucuuaucag

SEQ ID NO: 129079 - RNA, 21 nt, Human
uucaagcgauucuccugccuc

SEQ ID NO: 129080 - RNA, 23 nt, Human
uucaagcgauucuccugccucag

SEQ ID NO: 129081 - RNA, 24 nt, Human
uucaagcgauucuccugccucagc

SEQ ID NO: 129082 - RNA, 22 nt, Human
uugagaugggaucucacuaugu

SEQ ID NO: 129083 - RNA, 20 nt, Human
uugcucugccacccaggcug

SEQ ID NO: 129084 - RNA, 22 nt, Human
uugcucugccacccaggcugga

SEQ ID NO: 129085 - RNA, 24 nt, Human
uugcucugucgcccaggcuggagu

SEQ ID NO: 129086 - RNA, 22 nt, Human
uuggcauacaguuuucaacugg

SEQ ID NO: 129087 - RNA, 20 nt, Human
uuuacauacucuuuggaagc

SEQ ID NO: 129088 - RNA, 19 nt, Human
uuucaccauguuggccagg

SEQ ID NO: 129089 - RNA, 24 nt, Human
uuucaccauguuggccaggcuggu

SEQ ID NO: 129090 - RNA, 24 nt, Human
uuuuagguagaggccagguuucac

SEQ ID NO: 129091 - RNA, 24 nt, Human
uuuuugagauggcgucuugcucug

SEQ ID NO: 129092 - RNA, 19 nt, Human
uuuuugguuuuugguuuuu

SEQ ID NO: 129093 - RNA, 18 nt, Human
uuuuuuuuuuuuuuucug

SEQ ID NO: 129094 - RNA, 21 nt, Human
aaaacacauaacaaaacucaa

SEQ ID NO: 129095 - RNA, 18 nt, Human
aaauaaccauguuugagg

SEQ ID NO: 129096 - RNA, 23 nt, Human
aaaucucccccauuuuaucaaag

SEQ ID NO: 129097 - RNA, 22 nt, Human
aaccaauuucugaauagggcug

SEQ ID NO: 129098 - RNA, 22 nt, Human
aagcaggaggggaagaggggac

SEQ ID NO: 129099 - RNA, 27 nt, Human
aagcaggaggggaagaguuuaauccaa

SEQ ID NO: 129100 - RNA, 20 nt, Human
aagcuacacaauauagucug

SEQ ID NO: 129101 - RNA, 19 nt, Human
aaggcacaauaacuugaaa

SEQ ID NO: 129102 - RNA, 20 nt, Human
aaucacugaaaaucaaacac

SEQ ID NO: 129103 - RNA, 25 nt, Human
aaucacugaaaaucaaacacagcaa

SEQ ID NO: 129104 - RNA, 26 nt, Human
acacagcaaaacacauaacaaaacuc

SEQ ID NO: 129105 - RNA, 21 nt, Human
acacccacacaagacauauau

SEQ ID NO: 129106 - RNA, 21 nt, Human
acaguacguuaacaaacaaac

SEQ ID NO: 129107 - RNA, 21 nt, Human
acauauagaacacacaccuug

SEQ ID NO: 129108 - RNA, 24 nt, Human
accaaaaaacaucaacacuagcau

SEQ ID NO: 129109 - RNA, 21 nt, Human
acugaaaaucaaacacagcag

SEQ ID NO: 129110 - RNA, 23 nt, Human
acugcacauauagaacacacacc

SEQ ID NO: 129111 - RNA, 19 nt, Human
acuuuuacagugacucgag

SEQ ID NO: 129112 - RNA, 21 nt, Human
agacaaguauaucaaaaccuu

SEQ ID NO: 129113 - RNA, 22 nt, Human
agacaaucacugaaaaucaaac

SEQ ID NO: 129114 - RNA, 23 nt, Human
agaccagaauccaaccaggccug

SEQ ID NO: 129115 - RNA, 18 nt, Human
agagcacaugcggugcca

SEQ ID NO: 129116 - RNA, 23 nt, Human
auuaaaagcucacacuaccccaa

SEQ ID NO: 129117 - RNA, 26 nt, Human
auuaaaucucccccauuuuaucaaag

SEQ ID NO: 129118 - RNA, 22 nt, Human
auuugacucaaguuuaacagac

SEQ ID NO: 129119 - RNA, 21 nt, Human
auuuuuagugguggacaauca

SEQ ID NO: 129120 - RNA, 18 nt, Human
caaaacucaaacaguccu

SEQ ID NO: 129121 - RNA, 22 nt, Human
caaacuagagcaauuacaucuu

SEQ ID NO: 129122 - RNA, 22 nt, Human
caacaaucuccaagagacgaaa

SEQ ID NO: 129123 - RNA, 24 nt, Human
caacaaucuccaagagacgaaaua

SEQ ID NO: 129124 - RNA, 24 nt, Human
cacaaaaucaguacagaauuccaa

SEQ ID NO: 129125 - RNA, 22 nt, Human
cacacuaccccaaaauauauua

SEQ ID NO: 129126 - RNA, 18 nt, Human
cacauacggugacauuca

SEQ ID NO: 129127 - RNA, 19 nt, Human
cacauauagaacacacacc

SEQ ID NO: 129128 - RNA, 23 nt, Human
cacccacacaagacauauauaua

SEQ ID NO: 129129 - RNA, 25 nt, Human
cagaauaaacagagcacaugcggug

SEQ ID NO: 129130 - RNA, 18 nt, Human
cagcuacauugccaaugc

SEQ ID NO: 129131 - RNA, 22 nt, Human
cauuucaaugcagcuuuaacag

SEQ ID NO: 129132 - RNA, 22 nt, Human
ccaaccccaagucugcaaaacu

SEQ ID NO: 129133 - RNA, 25 nt, Human
ccaagguuugauuuuaggccaaguu

SEQ ID NO: 129134 - RNA, 21 nt, Human
cccacacaagacauauauaua

SEQ ID NO: 129135 - RNA, 23 nt, Human
ccccaagucugcaaaacucaaac

SEQ ID NO: 129136 - RNA, 21 nt, Human
ccgaauguuaagucacugaca

SEQ ID NO: 129137 - RNA, 20 nt, Human
ccugcugcacaauccuuccu

SEQ ID NO: 129138 - RNA, 24 nt, Human
cgcuaaaacugcacauauagaaca

SEQ ID NO: 129139 - RNA, 21 nt, Human
cuacuuaaaauuuuagaacaa

SEQ ID NO: 129140 - RNA, 21 nt, Human
cucaauacugucaagugcccu

SEQ ID NO: 129141 - RNA, 18 nt, Human
cucccccauuuuaucaaa

SEQ ID NO: 129142 - RNA, 25 nt, Human
cucccccauuuuaucaaagcuuuaa

SEQ ID NO: 129143 - RNA, 22 nt, Human
cucccuaaacauuacaugagaa

SEQ ID NO: 129144 - RNA, 23 nt, Human
cugcacauauagaacacacaccu

SEQ ID NO: 129145 - RNA, 23 nt, Human
cuugaccaaaaaacaucaacacu

SEQ ID NO: 129146 - RNA, 20 nt, Human
gacacccacacaagacauau

SEQ ID NO: 129147 - RNA, 21 nt, Human
gcaacuaaaauacgcuaaaac

SEQ ID NO: 129148 - RNA, 23 nt, Human
gcacaauccuuccuguuuaaacc

SEQ ID NO: 129149 - RNA, 18 nt, Human
gcagcaaaaaguaucuaa

SEQ ID NO: 129150 - RNA, 21 nt, Human
gcuuuaaugcuuuaagauguu

SEQ ID NO: 129151 - RNA, 19 nt, Human
gucuuaaauuuugucagaa

SEQ ID NO: 129152 - RNA, 22 nt, Human
gugguuuccauauuagcuucuu

SEQ ID NO: 129153 - RNA, 20 nt, Human
uaaaagaacucuuucaaaaa

SEQ ID NO: 129154 - RNA, 19 nt, Human
uaaaauucucugaaugugc

SEQ ID NO: 129155 - RNA, 21 nt, Human
uaaaauuuuagaacaaggcac

SEQ ID NO: 129156 - RNA, 24 nt, Human
uaaacagagcacaugcggugccaa

SEQ ID NO: 129157 - RNA, 20 nt, Human
uaaacucccuaaacauuaca

SEQ ID NO: 129158 - RNA, 28 nt, Human
uaaaucucccccauuuuaucaaagcuuu

SEQ ID NO: 129159 - RNA, 21 nt, Human
uaacaaacaaacgauccucag

SEQ ID NO: 129160 - RNA, 19 nt, Human
uaacauuaaaagcucacac

SEQ ID NO: 129161 - RNA, 28 nt, Human
uaaccuaaaagaacucuuucaaaaauau

SEQ ID NO: 129162 - RNA, 20 nt, Human
uaagacaaguauaucaaaac

SEQ ID NO: 129163 - RNA, 19 nt, Human
uaagauguucucccaaccc

SEQ ID NO: 129164 - RNA, 21 nt, Human
uaagggugacuuugcugcaaa

SEQ ID NO: 129165 - RNA, 21 nt, Human
uacacaauauagucuggcuaa

SEQ ID NO: 129166 - RNA, 19 nt, Human
uacagaauuccaaguggga

SEQ ID NO: 129167 - RNA, 29 nt, Human
uaccagacaaucacugaaaaucaaacacc

SEQ ID NO: 129168 - RNA, 20 nt, Human
uacuuaaaauuuuagaacaa

SEQ ID NO: 129169 - RNA, 21 nt, Human
uagcacaagagacuauaaaua

SEQ ID NO: 129170 - RNA, 24 nt, Human
uagcagcaaaaaguaucuaaaauc

SEQ ID NO: 129171 - RNA, 22 nt, Human
uagcaggcauuaaaaaaacuga

SEQ ID NO: 129172 - RNA, 21 nt, Human
uagcaugcauuaaagaccaga

SEQ ID NO: 129173 - RNA, 23 nt, Human
uauuugcaagcugugugauuuca

SEQ ID NO: 129174 - RNA, 20 nt, Human
ucaacacuagcaugcauuaa

SEQ ID NO: 129175 - RNA, 18 nt, Human
uccaagagacgaaauaag

SEQ ID NO: 129176 - RNA, 24 nt, Human
uccaagugggagaggcauuuuuag

SEQ ID NO: 129177 - RNA, 25 nt, Human
ucccaaccccaagucugcaaaacuc

SEQ ID NO: 129178 - RNA, 25 nt, Human
uccccaauaaaauuuaggaaucuac

SEQ ID NO: 129179 - RNA, 18 nt, Human
ucuguugugugcaaauag

SEQ ID NO: 129180 - RNA, 23 nt, Human
ucuuuauuuacugaagaauacug

SEQ ID NO: 129181 - RNA, 18 nt, Human
ugaaaaucaaacacagca

SEQ ID NO: 129182 - RNA, 23 nt, Human
ugaaaaucaaacacagcaaaaca

SEQ ID NO: 129183 - RNA, 18 nt, Human
ugaaauagcaccuuaaca

SEQ ID NO: 129184 - RNA, 28 nt, Human
ugaccaaaaaacaucaacacuagcaugc

SEQ ID NO: 129185 - RNA, 18 nt, Human
ugacucgagguucaauga

SEQ ID NO: 129186 - RNA, 21 nt, Human
ugagcaagucagaacuuaauu

SEQ ID NO: 129187 - RNA, 20 nt, Human
ugaggccuggucacugccau

SEQ ID NO: 129188 - RNA, 24 nt, Human
ugauuaaaucucccccauuuuauc

SEQ ID NO: 129189 - RNA, 20 nt, Human
ugcggugccagcaucuaaaa

SEQ ID NO: 129190 - RNA, 26 nt, Human
ugcuguacuuaaauuaaccuaaaaga

SEQ ID NO: 129191 - RNA, 23 nt, Human
uggcugguaaaaccgaauguuaa

SEQ ID NO: 129192 - RNA, 19 nt, Human
ugguggacaaucaucuuug

SEQ ID NO: 129193 - RNA, 26 nt, Human
ugucagaaaauuacagcuacauugcc

SEQ ID NO: 129194 - RNA, 23 nt, Human
uuaaaguuguaucauaccucugu

SEQ ID NO: 129195 - RNA, 22 nt, Human
uuaagacaaguauaucaaaacc

SEQ ID NO: 129196 - RNA, 22 nt, Human
uucaauaaauauuacacaacua

SEQ ID NO: 129197 - RNA, 21 nt, Human
uucacuggcugcauucaacaa

SEQ ID NO: 129198 - RNA, 23 nt, Human
uugaagcuacacaauauagucug

SEQ ID NO: 129199 - RNA, 23 nt, Human
uuuaagauguucucccaacccuu

SEQ ID NO: 129200 - RNA, 19 nt, Human
uuuguacugucuuuugguc

SEQ ID NO: 129201 - RNA, 22 nt, Human
uuugucuuaaauuuugucagaa

SEQ ID NO: 129202 - RNA, 20 nt, Human
uuuuuuccuuucauuuuucu

SEQ ID NO: 129203 - RNA, 25 nt, Human
aaacuuugacauugcagugaaaaug

SEQ ID NO: 129204 - RNA, 22 nt, Human
caucuuugcuuuuguuuaggga

SEQ ID NO: 129205 - RNA, 22 nt, Human
cuaaacuuugacauugcaguga

SEQ ID NO: 129206 - RNA, 23 nt, Human
cucauaaucaucauuugacaauu

SEQ ID NO: 129207 - RNA, 19 nt, Human
guucccggaaaauucaccu

SEQ ID NO: 129208 - RNA, 19 nt, Human
ucaggaucuuccuuaacug

SEQ ID NO: 129209 - RNA, 19 nt, Human
uggguaauugguaugcugc

SEQ ID NO: 129210 - RNA, 23 nt, Human
ccuggguaucauuucucagcuuc

SEQ ID NO: 129211 - RNA, 18 nt, Human
cuccuggguaucauuucu

SEQ ID NO: 129212 - RNA, 24 nt, Human
uggaguggguaugccaccaaaucc

SEQ ID NO: 129213 - RNA, 21 nt, Human
uggguaucauuucucagcuuc

SEQ ID NO: 129214 - RNA, 22 nt, Human
aagaccucccugggacccacag

SEQ ID NO: 129215 - RNA, 24 nt, Human
ccucccugggacccacaggggcug

SEQ ID NO: 129216 - RNA, 23 nt, Human
uaccuuguuuaagaccucccugg

SEQ ID NO: 129217 - RNA, 22 nt, Human
uggccguaagccuguggcagcc

SEQ ID NO: 129218 - RNA, 23 nt, Human
uuuaagaccucccugggacccuu

SEQ ID NO: 129219 - RNA, 23 nt, Human
aaaaaaaaaacaaaagaaaagaa

SEQ ID NO: 129220 - RNA, 21 nt, Human
aaaaaacaaaagaaaagaaac

SEQ ID NO: 129221 - RNA, 19 nt, Human
aaaaaagccaaccugcuga

SEQ ID NO: 129222 - RNA, 22 nt, Human
aaaaacaaaagaaaagaaacug

SEQ ID NO: 129223 - RNA, 21 nt, Human
aaaaacaaacuaaaaaaaugc

SEQ ID NO: 129224 - RNA, 26 nt, Human
aaaaagagaaaaacuuaaaagcagaa

SEQ ID NO: 129225 - RNA, 24 nt, Human
aaaaaucacugaaauaugucucca

SEQ ID NO: 129226 - RNA, 25 nt, Human
aaaagaaaagaaacugaucaaaaag

SEQ ID NO: 129227 - RNA, 23 nt, Human
aaacuagaaagaaaauauauuua

SEQ ID NO: 129228 - RNA, 21 nt, Human
aaagcagacugaggcaggaag

SEQ ID NO: 129229 - RNA, 22 nt, Human
aaagcagacugaggcaggaagu

SEQ ID NO: 129230 - RNA, 24 nt, Human
aaccaaaaacaaaaaugacuugga

SEQ ID NO: 129231 - RNA, 23 nt, Human
aagaaaccaaaaacaaaaaugac

SEQ ID NO: 129232 - RNA, 21 nt, Human
aagcaaacuacaaagcaaaga

SEQ ID NO: 129233 - RNA, 18 nt, Human
aagcaaagaguaaucaca

SEQ ID NO: 129234 - RNA, 23 nt, Human
aagcaaagcaaacuacaaagcaa

SEQ ID NO: 129235 - RNA, 21 nt, Human
aagugugucucauuaauuaau

SEQ ID NO: 129236 - RNA, 21 nt, Human
acaaaagaaaagaaacugauc

SEQ ID NO: 129237 - RNA, 22 nt, Human
acaaaagaaaagaaacugauca

SEQ ID NO: 129238 - RNA, 21 nt, Human
acaaagcaaagcaaacuacaa

SEQ ID NO: 129239 - RNA, 21 nt, Human
acaaauuaauuuauaccaaac

SEQ ID NO: 129240 - RNA, 21 nt, Human
acccuacaaagcaaagcaaac

SEQ ID NO: 129241 - RNA, 23 nt, Human
acuaccauuuacuauguaacauu

SEQ ID NO: 129242 - RNA, 20 nt, Human
agaacuaagaugaguccauu

SEQ ID NO: 129243 - RNA, 24 nt, Human
agaaggaagcuggaucuuuuauaa

SEQ ID NO: 129244 - RNA, 24 nt, Human
agacugaggcaggaaguaagaggu

SEQ ID NO: 129245 - RNA, 29 nt, Human
aggcaggaaguaagagguggggggacccc

SEQ ID NO: 129246 - RNA, 24 nt, Human
agggcugggaggcggccacgggug

SEQ ID NO: 129247 - RNA, 22 nt, Human
agugagaggcaccagggaaaaa

SEQ ID NO: 129248 - RNA, 19 nt, Human
auacuggaaccaucuaccu

SEQ ID NO: 129249 - RNA, 26 nt, Human
caaacuaaaaaaaugcauacguauaa

SEQ ID NO: 129250 - RNA, 23 nt, Human
caaagcaaacuacaaagcaaaga

SEQ ID NO: 129251 - RNA, 19 nt, Human
caaagcaaagaguaaucac

SEQ ID NO: 129252 - RNA, 24 nt, Human
caacaaaaaauaaugcuuucagga

SEQ ID NO: 129253 - RNA, 22 nt, Human
cacaggaaaaacacugcacacc

SEQ ID NO: 129254 - RNA, 23 nt, Human
caggaaaaacacugcacaccuua

SEQ ID NO: 129255 - RNA, 18 nt, Human
ccacuaaauuaucaucuu

SEQ ID NO: 129256 - RNA, 24 nt, Human
ccagagcucguccggcaaagaggg

SEQ ID NO: 129257 - RNA, 21 nt, Human
ccgccgcggugucgggguuug

SEQ ID NO: 129258 - RNA, 21 nt, Human
ccgcuaagccagauccugacc

SEQ ID NO: 129259 - RNA, 18 nt, Human
cgaagauacacaaagcug

SEQ ID NO: 129260 - RNA, 23 nt, Human
cgcuaagccagauccugaccugc

SEQ ID NO: 129261 - RNA, 22 nt, Human
cggcccagagcucguccggcaa

SEQ ID NO: 129262 - RNA, 23 nt, Human
cguauaaugagacaguuuaugua

SEQ ID NO: 129263 - RNA, 18 nt, Human
cuccacuuaaaauggaau

SEQ ID NO: 129264 - RNA, 20 nt, Human
cugaaauuacauuucaauga

SEQ ID NO: 129265 - RNA, 20 nt, Human
gacaguagagaaagcagacu

SEQ ID NO: 129266 - RNA, 19 nt, Human
gcaaagcaaacuacaaagc

SEQ ID NO: 129267 - RNA, 21 nt, Human
gcaaagcaaacuacaaagcaa

SEQ ID NO: 129268 - RNA, 18 nt, Human
ggaaaaaagccaaccugc

SEQ ID NO: 129269 - RNA, 20 nt, Human
ggcugggaggcggccacggg

SEQ ID NO: 129270 - RNA, 27 nt, Human
gggaaugacagaaggaagccgguaccc

SEQ ID NO: 129271 - RNA, 21 nt, Human
uaaaaacuuggguuuucuaaa

SEQ ID NO: 129272 - RNA, 24 nt, Human
uaaaagcagaacccuacaaagcaa

SEQ ID NO: 129273 - RNA, 23 nt, Human
uaacuaaacaaacuagaaagaaa

SEQ ID NO: 129274 - RNA, 23 nt, Human
uaagaaaccaaaaacaaaaauga

SEQ ID NO: 129275 - RNA, 18 nt, Human
uaaguaguuaaguguguc

SEQ ID NO: 129276 - RNA, 18 nt, Human
uaauuacagauuugaaau

SEQ ID NO: 129277 - RNA, 23 nt, Human
uacaaagcaaagaguaaucacag

SEQ ID NO: 129278 - RNA, 24 nt, Human
uacacaggaaaaacacugcacacc

SEQ ID NO: 129279 - RNA, 18 nt, Human
uaccaaacaaaaacaaac

SEQ ID NO: 129280 - RNA, 26 nt, Human
uaccaaacaaaaacaaacuaaaaaaa

SEQ ID NO: 129281 - RNA, 22 nt, Human
uaucaguaauuugucugaaaaa

SEQ ID NO: 129282 - RNA, 21 nt, Human
uaucuggaaccauuuggcugc

SEQ ID NO: 129283 - RNA, 22 nt, Human
ucaguaauuugucugaaaaaga

SEQ ID NO: 129284 - RNA, 21 nt, Human
ugaaaaagagaaaaacuuaaa

SEQ ID NO: 129285 - RNA, 21 nt, Human
ugaauaagaaaccaaaaacaa

SEQ ID NO: 129286 - RNA, 18 nt, Human
ugacagaaggaagcugga

SEQ ID NO: 129287 - RNA, 21 nt, Human
ugacuuggaaagaaaaauagu

SEQ ID NO: 129288 - RNA, 23 nt, Human
ugagaaauaaugucuuugucuuu

SEQ ID NO: 129289 - RNA, 23 nt, Human
ugagaggcaccagggaaaaaagc

SEQ ID NO: 129290 - RNA, 20 nt, Human
ugcaaaauagaaauguguga

SEQ ID NO: 129291 - RNA, 19 nt, Human
ugcugaggaagacaaaaga

SEQ ID NO: 129292 - RNA, 19 nt, Human
ugguuuagagauaaguagu

SEQ ID NO: 129293 - RNA, 22 nt, Human
ugucuccacuuaaaauggaauc

SEQ ID NO: 129294 - RNA, 23 nt, Human
uuaaaagcagaacccuacaaagc

SEQ ID NO: 129295 - RNA, 22 nt, Human
uuaauacacaggaaaaacacug

SEQ ID NO: 129296 - RNA, 25 nt, Human
uucaccuuuaauauucauaauuuau

SEQ ID NO: 129297 - RNA, 20 nt, Human
uuuaaaaaucuuuuuuccuu

SEQ ID NO: 129298 - RNA, 20 nt, Human
aaaaccgcagcugaagccaa

SEQ ID NO: 129299 - RNA, 18 nt, Human
aaagugcugggauuacaa

SEQ ID NO: 129300 - RNA, 24 nt, Human
aaagugcugggauuacaaguguga

SEQ ID NO: 129301 - RNA, 23 nt, Human
aaguagagacacauuucacugug

SEQ ID NO: 129302 - RNA, 18 nt, Human
aagugcugggauuacaag

SEQ ID NO: 129303 - RNA, 19 nt, Human
aagugcugggauuacaagu

SEQ ID NO: 129304 - RNA, 26 nt, Human
aagugcugggauuacaagugugagcc

SEQ ID NO: 129305 - RNA, 24 nt, Human
acacaaucucagcucacugcaacc

SEQ ID NO: 129306 - RNA, 23 nt, Human
acacauuucacuguguuggccag

SEQ ID NO: 129307 - RNA, 24 nt, Human
acacauuucacuguguuggccagg

SEQ ID NO: 129308 - RNA, 26 nt, Human
accccaaaaccgcagcugaagccaag

SEQ ID NO: 129309 - RNA, 19 nt, Human
acugcaaccaccaccuccc

SEQ ID NO: 129310 - RNA, 19 nt, Human
acugcagccucaaucuccu

SEQ ID NO: 129311 - RNA, 24 nt, Human
acuguguuggccaggcuggugucg

SEQ ID NO: 129312 - RNA, 24 nt, Human
agccaaggccagcccugaccgcgc

SEQ ID NO: 129313 - RNA, 22 nt, Human
agcccugaccgcgccgccacuu

SEQ ID NO: 129314 - RNA, 22 nt, Human
agcugggauuacaggcaugagc

SEQ ID NO: 129315 - RNA, 20 nt, Human
aggcaugagccaccgugccu

SEQ ID NO: 129316 - RNA, 23 nt, Human
aggcaugagccaccgugccuggc

SEQ ID NO: 129317 - RNA, 21 nt, Human
agguucaagugauucuccugc

SEQ ID NO: 129318 - RNA, 22 nt, Human
agguucaagugauucuccugcc

SEQ ID NO: 129319 - RNA, 23 nt, Human
agguucaagugauucuccugccu

SEQ ID NO: 129320 - RNA, 23 nt, Human
aguacuguauuuucucuauugua

SEQ ID NO: 129321 - RNA, 18 nt, Human
aguagagacacauuucac

SEQ ID NO: 129322 - RNA, 19 nt, Human
agucauggcucacugcagc

SEQ ID NO: 129323 - RNA, 21 nt, Human
aguccgggaccccaaaaccgc

SEQ ID NO: 129324 - RNA, 24 nt, Human
agugcugggauuacaagugugagc

SEQ ID NO: 129325 - RNA, 18 nt, Human
auucuccugccuuggccu

SEQ ID NO: 129326 - RNA, 20 nt, Human
auuucacuguguuggccagg

SEQ ID NO: 129327 - RNA, 20 nt, Human
caaagugcugggauuacaag

SEQ ID NO: 129328 - RNA, 23 nt, Human
caaagugcugggauuacaagugu

SEQ ID NO: 129329 - RNA, 24 nt, Human
caaagugcugggauuacaagugug

SEQ ID NO: 129330 - RNA, 19 nt, Human
caagugauucuccugccuu

SEQ ID NO: 129331 - RNA, 22 nt, Human
caagugauucuccugccuuggc

SEQ ID NO: 129332 - RNA, 21 nt, Human
cacugcaaccaccaccuccca

SEQ ID NO: 129333 - RNA, 19 nt, Human
cacugcagccucaaucucc

SEQ ID NO: 129334 - RNA, 18 nt, Human
cacuguguuggccaggcu

SEQ ID NO: 129335 - RNA, 19 nt, Human
cacuguguuggccaggcug

SEQ ID NO: 129336 - RNA, 21 nt, Human
cacuguguuggccaggcuggu

SEQ ID NO: 129337 - RNA, 24 nt, Human
cacuguguuggccaggcugguguc

SEQ ID NO: 129338 - RNA, 23 nt, Human
cagccucaaucuccugggcucaa

SEQ ID NO: 129339 - RNA, 24 nt, Human
cagccucaaucuccugggcucaag

SEQ ID NO: 129340 - RNA, 24 nt, Human
caggcuggugucgaacuccugggc

SEQ ID NO: 129341 - RNA, 18 nt, Human
caguggcacagucauggc

SEQ ID NO: 129342 - RNA, 21 nt, Human
caguggcacagucauggcuca

SEQ ID NO: 129343 - RNA, 19 nt, Human
ccaccucccagguucaagu

SEQ ID NO: 129344 - RNA, 24 nt, Human
ccaccucccagguucaagugauuc

SEQ ID NO: 129345 - RNA, 19 nt, Human
ccacuaaagauaucugggu

SEQ ID NO: 129346 - RNA, 23 nt, Human
cccagguucaagugauucuccuc

SEQ ID NO: 129347 - RNA, 23 nt, Human
cccagguucaagugauucuccug

SEQ ID NO: 129348 - RNA, 18 nt, Human
ccucaaagugcugggauu

SEQ ID NO: 129349 - RNA, 22 nt, Human
ccucaaucuccugggcucaagu

SEQ ID NO: 129350 - RNA, 23 nt, Human
ccuccagaguagcccaccaccau

SEQ ID NO: 129351 - RNA, 24 nt, Human
ccucccagguucaagugauucucc

SEQ ID NO: 129352 - RNA, 23 nt, Human
ccugccuuggccuccugcguagc

SEQ ID NO: 129353 - RNA, 19 nt, Human
ccugcguagcugggauuac

SEQ ID NO: 129354 - RNA, 20 nt, Human
ccugggcucaagugguccuc

SEQ ID NO: 129355 - RNA, 20 nt, Human
cgaacuccugggcucaagcc

SEQ ID NO: 129356 - RNA, 19 nt, Human
cgggaccccaaaaccgcag

SEQ ID NO: 129357 - RNA, 21 nt, Human
cguagcugggauuacaggcau

SEQ ID NO: 129358 - RNA, 24 nt, Human
cucacugcaaccaccaccucccag

SEQ ID NO: 129359 - RNA, 21 nt, Human
cucacugcagccucaaucucc

SEQ ID NO: 129360 - RNA, 24 nt, Human
cucacugcagccucaaucuccugg

SEQ ID NO: 129361 - RNA, 22 nt, Human
cucagcucacugcaaccaccac

SEQ ID NO: 129362 - RNA, 25 nt, Human
cucauagcgccgccgaucccagagu

SEQ ID NO: 129363 - RNA, 19 nt, Human
cucccagguucaagugauu

SEQ ID NO: 129364 - RNA, 20 nt, Human
cucuuguugcccaggcugga

SEQ ID NO: 129365 - RNA, 22 nt, Human
cucuuguugcccaggcuggagu

SEQ ID NO: 129366 - RNA, 21 nt, Human
cugaagccaaggccagcccug

SEQ ID NO: 129367 - RNA, 23 nt, Human
cugcaaccaccaccucccagguu

SEQ ID NO: 129368 - RNA, 24 nt, Human
cugcaaccaccaccucccagguuc

SEQ ID NO: 129369 - RNA, 24 nt, Human
cugcguagcugggauuacaggcau

SEQ ID NO: 129370 - RNA, 24 nt, Human
cuuggccuccugcguagcugggau

SEQ ID NO: 129371 - RNA, 24 nt, Human
cuuguugcccaggcuggagugcaa

SEQ ID NO: 129372 - RNA, 24 nt, Human
gaacucauagcgccgccgauccca

SEQ ID NO: 129373 - RNA, 24 nt, Human
gacacauuucacuguguuggccag

SEQ ID NO: 129374 - RNA, 22 nt, Human
gagacagaguuuugcucuuguu

SEQ ID NO: 129375 - RNA, 18 nt, Human
gauuacaagugugagcca

SEQ ID NO: 129376 - RNA, 18 nt, Human
gauuacaggcaugagcca

SEQ ID NO: 129377 - RNA, 21 nt, Human
gauuacaggcaugagccaccg

SEQ ID NO: 129378 - RNA, 24 nt, Human
gauuacaggcaugagccaccgugc

SEQ ID NO: 129379 - RNA, 19 nt, Human
gcccaggcuggagugcaau

SEQ ID NO: 129380 - RNA, 24 nt, Human
gcguagcugggauuacaggcauga

SEQ ID NO: 129381 - RNA, 21 nt, Human
gcucacugcagccucaaucuc

SEQ ID NO: 129382 - RNA, 26 nt, Human
gcucugucacccagacuagaggugca

SEQ ID NO: 129383 - RNA, 20 nt, Human
gcucuuguugcccaggcugg

SEQ ID NO: 129384 - RNA, 21 nt, Human
gcucuuguugcccaggcugga

SEQ ID NO: 129385 - RNA, 24 nt, Human
gcucuuguugcccaggcuggagug

SEQ ID NO: 129386 - RNA, 19 nt, Human
gcuggagugcaaugacaca

SEQ ID NO: 129387 - RNA, 19 nt, Human
ggacaggaaguaggcgcgg

SEQ ID NO: 129388 - RNA, 24 nt, Human
ggauuacaggcaugagccaccgug

SEQ ID NO: 129389 - RNA, 19 nt, Human
ggccaggcuggugucgaac

SEQ ID NO: 129390 - RNA, 23 nt, Human
gggcucaagccauugcccaccuc

SEQ ID NO: 129391 - RNA, 18 nt, Human
gggcucguuaacaacaac

SEQ ID NO: 129392 - RNA, 20 nt, Human
ggugcaguggcacagucaug

SEQ ID NO: 129393 - RNA, 23 nt, Human
ggugcaguggcacagucauggcu

SEQ ID NO: 129394 - RNA, 19 nt, Human
guagcugggauuacaggca

SEQ ID NO: 129395 - RNA, 20 nt, Human
guagcugggauuacaggcau

SEQ ID NO: 129396 - RNA, 22 nt, Human
guagcugggauuacaggcauga

SEQ ID NO: 129397 - RNA, 23 nt, Human
guagcugggauuacaggcaugag

SEQ ID NO: 129398 - RNA, 23 nt, Human
uaaguagagacacauuucacugu

SEQ ID NO: 129399 - RNA, 24 nt, Human
uacaagugugagccaccacaccca

SEQ ID NO: 129400 - RNA, 22 nt, Human
uacaggcaugagccaccgugcc

SEQ ID NO: 129401 - RNA, 19 nt, Human
uacuguauuuucucuauug

SEQ ID NO: 129402 - RNA, 21 nt, Human
uagauaaaccuucaagcugca

SEQ ID NO: 129403 - RNA, 20 nt, Human
ucaaagugcugggauuacaa

SEQ ID NO: 129404 - RNA, 24 nt, Human
ucaaagugcugggauuacaagugu

SEQ ID NO: 129405 - RNA, 19 nt, Human
ucaagugauucuccugccu

SEQ ID NO: 129406 - RNA, 19 nt, Human
ucacugcaaccaccaccuc

SEQ ID NO: 129407 - RNA, 24 nt, Human
ucacugcaaccaccaccucccagg

SEQ ID NO: 129408 - RNA, 23 nt, Human
ucacugcagccucaaucuccugg

SEQ ID NO: 129409 - RNA, 24 nt, Human
ucacugcagccucaaucuccuggg

SEQ ID NO: 129410 - RNA, 22 nt, Human
ucacuguguuggccaggcuggu

SEQ ID NO: 129411 - RNA, 27 nt, Human
ucagcucacugcaaccaccaccuccca

SEQ ID NO: 129412 - RNA, 21 nt, Human
ucccagguucaagugauucuc

SEQ ID NO: 129413 - RNA, 24 nt, Human
ucccagguucaagugauucuccug

SEQ ID NO: 129414 - RNA, 24 nt, Human
uccugcguagcugggauuacaggc

SEQ ID NO: 129415 - RNA, 18 nt, Human
uccugggcucaagccauu

SEQ ID NO: 129416 - RNA, 21 nt, Human
uccugggcucaagugguccuc

SEQ ID NO: 129417 - RNA, 21 nt, Human
ucuggguaggagucucgauuu

SEQ ID NO: 129418 - RNA, 25 nt, Human
ucugucacccagacuagaggugcag

SEQ ID NO: 129419 - RNA, 18 nt, Human
ucuugcucugucacccag

SEQ ID NO: 129420 - RNA, 19 nt, Human
ucuugcucugucacccaga

SEQ ID NO: 129421 - RNA, 24 nt, Human
ucuugcucugucacccagacuaga

SEQ ID NO: 129422 - RNA, 22 nt, Human
ucuuguugcccaggcuggagug

SEQ ID NO: 129423 - RNA, 24 nt, Human
ugacacaaucucagcucacugcaa

SEQ ID NO: 129424 - RNA, 23 nt, Human
ugcaaugacacaaucucagcuca

SEQ ID NO: 129425 - RNA, 18 nt, Human
ugcccaggcuggagugca

SEQ ID NO: 129426 - RNA, 21 nt, Human
ugcccaggcuggagugcaaug

SEQ ID NO: 129427 - RNA, 24 nt, Human
ugcccaggcuggagugcaaugaca

SEQ ID NO: 129428 - RNA, 25 nt, Human
ugccuggcuuuuuuuuuuuuuuuuu

SEQ ID NO: 129429 - RNA, 26 nt, Human
ugcugggauuacaagugugagccacc

SEQ ID NO: 129430 - RNA, 23 nt, Human
uggagugcaaugacacaaucuca

SEQ ID NO: 129431 - RNA, 24 nt, Human
uggccaggcuggugucgaacuccu

SEQ ID NO: 129432 - RNA, 24 nt, Human
uggcucacugcagccucaaucucc

SEQ ID NO: 129433 - RNA, 22 nt, Human
uggcuuuuuuuuuuuuuuuuuu

SEQ ID NO: 129434 - RNA, 18 nt, Human
ugggauuacaagugugag

SEQ ID NO: 129435 - RNA, 19 nt, Human
ugggauuacaagugugagc

SEQ ID NO: 129436 - RNA, 22 nt, Human
ugggauuacaagugugagccac

SEQ ID NO: 129437 - RNA, 23 nt, Human
ugggauuacaagugugagccacc

SEQ ID NO: 129438 - RNA, 24 nt, Human
ugggauuacaagugugagccacca

SEQ ID NO: 129439 - RNA, 18 nt, Human
ugggauuacaggcaugag

SEQ ID NO: 129440 - RNA, 21 nt, Human
ugggauuacaggcaugagcca

SEQ ID NO: 129441 - RNA, 22 nt, Human
ugggauuacaggcaugagccac

SEQ ID NO: 129442 - RNA, 23 nt, Human
ugggauuacaggcaugagccacc

SEQ ID NO: 129443 - RNA, 23 nt, Human
ugggauuacaggcaugagccacc

SEQ ID NO: 129444 - RNA, 24 nt, Human
ugggauuacaggcaugagccaccg

SEQ ID NO: 129445 - RNA, 19 nt, Human
ugggcucaagugguccuca

SEQ ID NO: 129446 - RNA, 21 nt, Human
ugucgaacuccugggcucaag

SEQ ID NO: 129447 - RNA, 24 nt, Human
uguguuggccaggcuggugucgaa

SEQ ID NO: 129448 - RNA, 20 nt, Human
uguugcccaggcuggagugc

SEQ ID NO: 129449 - RNA, 20 nt, Human
uucaagugauucuccugccu

SEQ ID NO: 129450 - RNA, 24 nt, Human
uucaagugauucuccugccuuggc

SEQ ID NO: 129451 - RNA, 18 nt, Human
uugcccaggcuggagugc

SEQ ID NO: 129452 - RNA, 22 nt, Human
uugcucuuguugcccaggcugg

SEQ ID NO: 129453 - RNA, 23 nt, Human
uugcucuuguugcccaggcugga

SEQ ID NO: 129454 - RNA, 24 nt, Human
uuggccuccugcguagcugggauu

SEQ ID NO: 129455 - RNA, 23 nt, Human
uuucacuguguuggccaggcugu

SEQ ID NO: 129456 - RNA, 24 nt, Human
uuugcucuuguugcccaggcugga

SEQ ID NO: 129457 - RNA, 21 nt, Human
uuuguggcagugggacaggaa

SEQ ID NO: 129458 - RNA, 23 nt, Human
uuuugcucuuguugcccaggcug

SEQ ID NO: 129459 - RNA, 24 nt, Human
uuuugcucuuguugcccaggcugg

SEQ ID NO: 129460 - RNA, 19 nt, Human
uuuuucuuuuuuaaacagg

SEQ ID NO: 129461 - RNA, 23 nt, Human
uuuuucuuuuuuaaacagggucu

SEQ ID NO: 129462 - RNA, 19 nt, Human
uuuuuuuuuguaaguagag

SEQ ID NO: 129463 - RNA, 18 nt, Human
uuuuuuuuuuuuuuuuug

SEQ ID NO: 129464 - RNA, 19 nt, Human
uuuuuuuuuuuuuuuuugu

SEQ ID NO: 129465 - RNA, 22 nt, Human
aaaaaagaaaagcuuuacuaaa

SEQ ID NO: 129466 - RNA, 22 nt, Human
aaaaaagaaaagcuuuacuaaa

SEQ ID NO: 129467 - RNA, 19 nt, Human
aacagaaagcuucaaaaga

SEQ ID NO: 129468 - RNA, 23 nt, Human
aacaucaacagaaagcuucaaaa

SEQ ID NO: 129469 - RNA, 23 nt, Human
aacaucaacagaaagcuucaaaa

SEQ ID NO: 129470 - RNA, 25 nt, Human
agaaagcuucaaaagaugauucuga

SEQ ID NO: 129471 - RNA, 25 nt, Human
agaaagcuucaaaagaugauucuga

SEQ ID NO: 129472 - RNA, 18 nt, Human
aggagcccucaaagcuga

SEQ ID NO: 129473 - RNA, 23 nt, Human
aggaggaggggguaggugcugcu

SEQ ID NO: 129474 - RNA, 20 nt, Human
aguuaacaucaacagaaagc

SEQ ID NO: 129475 - RNA, 20 nt, Human
aguuaacaucaacagaaagc

SEQ ID NO: 129476 - RNA, 23 nt, Human
caaaauuucuuuuuauuguaggc

SEQ ID NO: 129477 - RNA, 23 nt, Human
caaaauuucuuuuuauuguaggc

SEQ ID NO: 129478 - RNA, 20 nt, Human
caacagaaagcuucaaaaga

SEQ ID NO: 129479 - RNA, 20 nt, Human
caacagaaagcuucaaaaga

SEQ ID NO: 129480 - RNA, 21 nt, Human
caguuaacaucaacagaaagc

SEQ ID NO: 129481 - RNA, 23 nt, Human
cauagccuguauugaauucacac

SEQ ID NO: 129482 - RNA, 23 nt, Human
cauagccuguauugaauucacac

SEQ ID NO: 129483 - RNA, 21 nt, Human
ccaguaaugauggggauuaau

SEQ ID NO: 129484 - RNA, 21 nt, Human
ccaguaaugauggggauuaau

SEQ ID NO: 129485 - RNA, 22 nt, Human
ccuccugcuucuacuccauagc

SEQ ID NO: 129486 - RNA, 23 nt, Human
cgggaauuugccacaggagcccu

SEQ ID NO: 129487 - RNA, 21 nt, Human
cuccugcuucuacuccauagc

SEQ ID NO: 129488 - RNA, 19 nt, Human
cugaaaagacucacacccg

SEQ ID NO: 129489 - RNA, 27 nt, Human
cugaaaauggcaggcaaaauuucuuuu

SEQ ID NO: 129490 - RNA, 27 nt, Human
cugaaaauggcaggcaaaauuucuuuu

SEQ ID NO: 129491 - RNA, 20 nt, Human
cuucuguguccccuggcuca

SEQ ID NO: 129492 - RNA, 24 nt, Human
gccacaggagcccucaaagcugag

SEQ ID NO: 129493 - RNA, 19 nt, Human
ggaggaggggguaggugcu

SEQ ID NO: 129494 - RNA, 20 nt, Human
guaaugauggggauuaauac

SEQ ID NO: 129495 - RNA, 20 nt, Human
guaaugauggggauuaauac

SEQ ID NO: 129496 - RNA, 21 nt, Human
uaaaaaugagggcuuucuuga

SEQ ID NO: 129497 - RNA, 21 nt, Human
uaaaaaugagggcuuucuuga

SEQ ID NO: 129498 - RNA, 24 nt, Human
uaaaugagauagugggcuucucuu

SEQ ID NO: 129499 - RNA, 18 nt, Human
uaacaagauuuugccagg

SEQ ID NO: 129500 - RNA, 18 nt, Human
uaacaagauuuugccagg

SEQ ID NO: 129501 - RNA, 22 nt, Human
uaagucauguggguaaaacauc

SEQ ID NO: 129502 - RNA, 22 nt, Human
uaagucauguggguaaaacauc

SEQ ID NO: 129503 - RNA, 19 nt, Human
uagguuuccaguaucuagc

SEQ ID NO: 129504 - RNA, 19 nt, Human
uagguuuccaguaucuagc

SEQ ID NO: 129505 - RNA, 23 nt, Human
uagugggcuucucuucugugucc

SEQ ID NO: 129506 - RNA, 24 nt, Human
ucacaaccagggaaccuuuuaauc

SEQ ID NO: 129507 - RNA, 18 nt, Human
uccaguaucuagcuuuua

SEQ ID NO: 129508 - RNA, 18 nt, Human
uccaguaucuagcuuuua

SEQ ID NO: 129509 - RNA, 20 nt, Human
uccccuggcucauccaggca

SEQ ID NO: 129510 - RNA, 28 nt, Human
ucugugacuagguugaaaaccggggucc

SEQ ID NO: 129511 - RNA, 23 nt, Human
ugaaaaccuccugcuucuacucc

SEQ ID NO: 129512 - RNA, 20 nt, Human
ugaaaagacucacacccgaa

SEQ ID NO: 129513 - RNA, 25 nt, Human
ugaauggcagagcgcacguagacac

SEQ ID NO: 129514 - RNA, 25 nt, Human
ugcagguguggaaaggaggaggggg

SEQ ID NO: 129515 - RNA, 26 nt, Human
ugccacaggagcccucaaagcugaga

SEQ ID NO: 129516 - RNA, 24 nt, Human
uggaaauuaaaaaagaaaagcuuu

SEQ ID NO: 129517 - RNA, 24 nt, Human
uggaaauuaaaaaagaaaagcuuu

SEQ ID NO: 129518 - RNA, 19 nt, Human
uggguaaaacauccacauu

SEQ ID NO: 129519 - RNA, 19 nt, Human
uggguaaaacauccacauu

SEQ ID NO: 129520 - RNA, 18 nt, Human
uguggaaaggaggagggg

SEQ ID NO: 129521 - RNA, 19 nt, Human
uguggaaaggaggaggggg

SEQ ID NO: 129522 - RNA, 20 nt, Human
uucacacauucaaaugaggc

SEQ ID NO: 129523 - RNA, 20 nt, Human
uucacacauucaaaugaggc

SEQ ID NO: 129524 - RNA, 23 nt, Human
uuccuggaaauuaaaaaagaaaa

SEQ ID NO: 129525 - RNA, 23 nt, Human
uuccuggaaauuaaaaaagaaaa

SEQ ID NO: 129526 - RNA, 23 nt, Human
uugcagguguggaaaggaggagg

SEQ ID NO: 129527 - RNA, 24 nt, Human
uugccagguuauaaaaaugagggc

SEQ ID NO: 129528 - RNA, 24 nt, Human
uugccagguuauaaaaaugagggc

SEQ ID NO: 129529 - RNA, 21 nt, Human
aaaaggaggaggcuuaaucaa

SEQ ID NO: 129530 - RNA, 24 nt, Human
aacgugcacacacaauuuuaugug

SEQ ID NO: 129531 - RNA, 22 nt, Human
aaucacagagguuacaugugug

SEQ ID NO: 129532 - RNA, 24 nt, Human
acucuuucagucuuuucuuuucag

SEQ ID NO: 129533 - RNA, 26 nt, Human
caacuaacagacuuaauuuccuuaga

SEQ ID NO: 129534 - RNA, 21 nt, Human
cacacaauuuuaugugauuca

SEQ ID NO: 129535 - RNA, 18 nt, Human
cccacaagaaucacagag

SEQ ID NO: 129536 - RNA, 18 nt, Human
cccucucccucccuccuu

SEQ ID NO: 129537 - RNA, 23 nt, Human
ccucccuccuuagcucuugacuu

SEQ ID NO: 129538 - RNA, 22 nt, Human
cgugcacacacaauuuuaugug

SEQ ID NO: 129539 - RNA, 21 nt, Human
cuaaacccucucccucccucc

SEQ ID NO: 129540 - RNA, 21 nt, Human
cucucucucucuuacuuuccu

SEQ ID NO: 129541 - RNA, 23 nt, Human
cuguggcuuggccagccucuucu

SEQ ID NO: 129542 - RNA, 25 nt, Human
gaaacuacagcuaagcaucuucuga

SEQ ID NO: 129543 - RNA, 23 nt, Human
ggaggcuuaaucaauauuggggg

SEQ ID NO: 129544 - RNA, 21 nt, Human
ggcuuaaucaauauugggggg

SEQ ID NO: 129545 - RNA, 23 nt, Human
uaaaaaaauacccacaagaauca

SEQ ID NO: 129546 - RNA, 26 nt, Human
uaacaaccaaauuuaaugaggguagc

SEQ ID NO: 129547 - RNA, 20 nt, Human
uacaugugugcacaugugua

SEQ ID NO: 129548 - RNA, 22 nt, Human
uauagaagaaccuaugucaaag

SEQ ID NO: 129549 - RNA, 24 nt, Human
uauuaugcugguauuucuaaaccc

SEQ ID NO: 129550 - RNA, 19 nt, Human
ucaaagaucuucaacucaa

SEQ ID NO: 129551 - RNA, 19 nt, Human
ucagaaaaggaggaggcuu

SEQ ID NO: 129552 - RNA, 22 nt, Human
ucuuucagucuuuucuuuucag

SEQ ID NO: 129553 - RNA, 21 nt, Human
ugaguuaauuuacagagcacc

SEQ ID NO: 129554 - RNA, 18 nt, Human
uggccagccucuucucuu

SEQ ID NO: 129555 - RNA, 21 nt, Human
ugucaaagaucuucaacucaa

SEQ ID NO: 129556 - RNA, 22 nt, Human
uguguacaugaacgugcacaca

SEQ ID NO: 129557 - RNA, 19 nt, Human
ugugugcacauguguacau

SEQ ID NO: 129558 - RNA, 20 nt, Human
ugugugcacauguguacaug

SEQ ID NO: 129559 - RNA, 21 nt, Human
uuaaugaggguagcgcuucuc

SEQ ID NO: 129560 - RNA, 20 nt, Human
uuacagagcacccagucaua

SEQ ID NO: 129561 - RNA, 23 nt, Human
uuagaagcgccucuaacaaccaa

SEQ ID NO: 129562 - RNA, 29 nt, Human
uucaaacaacuaacagacuuaauuuccuu

SEQ ID NO: 129563 - RNA, 19 nt, Human
uuccuugucucugucguac

SEQ ID NO: 129564 - RNA, 18 nt, Human
uuuccuugucucugucgu

SEQ ID NO: 129565 - RNA, 20 nt, Human
aagagaagggcaguaaugaa

SEQ ID NO: 129566 - RNA, 24 nt, Human
aagcaucaagugacacuucaaagc

SEQ ID NO: 129567 - RNA, 21 nt, Human
aagccaaguacccuagccccc

SEQ ID NO: 129568 - RNA, 21 nt, Human
aagcgaucagcugccuagagc

SEQ ID NO: 129569 - RNA, 22 nt, Human
acacggguaggggugggggcag

SEQ ID NO: 129570 - RNA, 23 nt, Human
acccacucaccaucacuguuccc

SEQ ID NO: 129571 - RNA, 19 nt, Human
acccacucccccagcuggc

SEQ ID NO: 129572 - RNA, 19 nt, Human
acccucagcacucaacucu

SEQ ID NO: 129573 - RNA, 21 nt, Human
accuuuggugguggggucuca

SEQ ID NO: 129574 - RNA, 20 nt, Human
acggggcaggaagagcuuaa

SEQ ID NO: 129575 - RNA, 21 nt, Human
acucaccaucacuguuccccu

SEQ ID NO: 129576 - RNA, 22 nt, Human
acucccccagcuggccaaagac

SEQ ID NO: 129577 - RNA, 27 nt, Human
agagaaaagguagaaaccuaggcagga

SEQ ID NO: 129578 - RNA, 23 nt, Human
agagagaaaagguagaaaccuag

SEQ ID NO: 129579 - RNA, 22 nt, Human
agaggaggcaggcccugcccag

SEQ ID NO: 129580 - RNA, 21 nt, Human
agcaaguccccucugcugccu

SEQ ID NO: 129581 - RNA, 21 nt, Human
agccaaaauaagggucucuca

SEQ ID NO: 129582 - RNA, 18 nt, Human
agccaaguacccuagccc

SEQ ID NO: 129583 - RNA, 20 nt, Human
agugaugggggcugaggagg

SEQ ID NO: 129584 - RNA, 18 nt, Human
caaagcaagccaaguacc

SEQ ID NO: 129585 - RNA, 19 nt, Human
caagccaaguacccuagcc

SEQ ID NO: 129586 - RNA, 21 nt, Human
caagcccugaggccccucagg

SEQ ID NO: 129587 - RNA, 27 nt, Human
caaggggaccucacuuaaccuuuggug

SEQ ID NO: 129588 - RNA, 24 nt, Human
caaguacccuagcccccucccaca

SEQ ID NO: 129589 - RNA, 22 nt, Human
cacacauagcaaagcaagccaa

SEQ ID NO: 129590 - RNA, 20 nt, Human
cacccggccucuacccacuc

SEQ ID NO: 129591 - RNA, 23 nt, Human
cacgugggccagaaacuaagggc

SEQ ID NO: 129592 - RNA, 19 nt, Human
cagagcggcaccagagggc

SEQ ID NO: 129593 - RNA, 21 nt, Human
cagccaaaauaagggucucuc

SEQ ID NO: 129594 - RNA, 18 nt, Human
cagccuaccccccacaag

SEQ ID NO: 129595 - RNA, 18 nt, Human
cagccuaccccccacaag

SEQ ID NO: 129596 - RNA, 19 nt, Human
cagcugccuagagccucca

SEQ ID NO: 129597 - RNA, 24 nt, Human
cagcuggccaaagacagagagaaa

SEQ ID NO: 129598 - RNA, 20 nt, Human
caggaagagcuuaacccacg

SEQ ID NO: 129599 - RNA, 18 nt, Human
ccacacagccaaaauaag

SEQ ID NO: 129600 - RNA, 21 nt, Human
cccacaagcccugaggccccu

SEQ ID NO: 129601 - RNA, 24 nt, Human
cccccacaagcccugaggccccuc

SEQ ID NO: 129602 - RNA, 21 nt, Human
cccccaggauguaaggccuca

SEQ ID NO: 129603 - RNA, 22 nt, Human
ccccccacaagcccugaggccc

SEQ ID NO: 129604 - RNA, 26 nt, Human
ccccccugcuucacgugggccagaaa

SEQ ID NO: 129605 - RNA, 21 nt, Human
cccggccucuacccacucccc

SEQ ID NO: 129606 - RNA, 25 nt, Human
cccggccucuacccacucccccagc

SEQ ID NO: 129607 - RNA, 21 nt, Human
cccgggucaaggugaaggggc

SEQ ID NO: 129608 - RNA, 19 nt, Human
ccuaccccccacaagcccu

SEQ ID NO: 129609 - RNA, 21 nt, Human
ccucacucgguggccuacacg

SEQ ID NO: 129610 - RNA, 24 nt, Human
ccuccacacagccaaaauaagggu

SEQ ID NO: 129611 - RNA, 23 nt, Human
ccucccacaaggcuggcaaaggu

SEQ ID NO: 129612 - RNA, 24 nt, Human
ccuccuagucuguacccacucacc

SEQ ID NO: 129613 - RNA, 18 nt, Human
cuacccacucccccagcu

SEQ ID NO: 129614 - RNA, 18 nt, Human
cuaccccccacaagcccu

SEQ ID NO: 129615 - RNA, 19 nt, Human
cuagagccuccacacagcc

SEQ ID NO: 129616 - RNA, 23 nt, Human
cuccuagucuguacccacucacc

SEQ ID NO: 129617 - RNA, 19 nt, Human
cucugcgcuagugcugcuc

SEQ ID NO: 129618 - RNA, 23 nt, Human
cucugcgcuagugcugcucuaga

SEQ ID NO: 129619 - RNA, 18 nt, Human
cugcccaggaggcagcaa

SEQ ID NO: 129620 - RNA, 23 nt, Human
cuggugcucuucucucucccucc

SEQ ID NO: 129621 - RNA, 18 nt, Human
cuguuccccucuccccca

SEQ ID NO: 129622 - RNA, 21 nt, Human
cuuuggugguggggucucagc

SEQ ID NO: 129623 - RNA, 19 nt, Human
gaaggcaacuucacacaca

SEQ ID NO: 129624 - RNA, 24 nt, Human
gaaggggacagcaggggaaaggag

SEQ ID NO: 129625 - RNA, 22 nt, Human
gagaaaagguagaaaccuaggc

SEQ ID NO: 129626 - RNA, 24 nt, Human
gagcaguugaacaacaaauuaugg

SEQ ID NO: 129627 - RNA, 22 nt, Human
gagguggcugugcaucgggcag

SEQ ID NO: 129628 - RNA, 22 nt, Human
gcaagagaagggcaguaaugaa

SEQ ID NO: 129629 - RNA, 24 nt, Human
gcaguaaugaaggcaacuucacac

SEQ ID NO: 129630 - RNA, 22 nt, Human
gccuagagccuccacacagcca

SEQ ID NO: 129631 - RNA, 18 nt, Human
gccuccacacagccaaaa

SEQ ID NO: 129632 - RNA, 20 nt, Human
ggcagugaugggggcugagg

SEQ ID NO: 129633 - RNA, 19 nt, Human
ggccagaaacuaagggcug

SEQ ID NO: 129634 - RNA, 20 nt, Human
ggcugugcaucgggcagagc

SEQ ID NO: 129635 - RNA, 18 nt, Human
gggaaugggaguggggga

SEQ ID NO: 129636 - RNA, 19 nt, Human
gggagugggggaacccggg

SEQ ID NO: 129637 - RNA, 19 nt, Human
gggagugggggaacccggg

SEQ ID NO: 129638 - RNA, 20 nt, Human
gggagugggggaacccgggg

SEQ ID NO: 129639 - RNA, 22 nt, Human
ggggugggggcagugauggggg

SEQ ID NO: 129640 - RNA, 24 nt, Human
ggggugggggcagugaugggggcu

SEQ ID NO: 129641 - RNA, 22 nt, Human
ggguccuagugccccccugcuu

SEQ ID NO: 129642 - RNA, 23 nt, Human
gggucgaaggggacagcagggga

SEQ ID NO: 129643 - RNA, 21 nt, Human
gggugggggcagugauggggg

SEQ ID NO: 129644 - RNA, 19 nt, Human
gugaagcugaacggggcag

SEQ ID NO: 129645 - RNA, 25 nt, Human
guggccuacacggguaggggugggg

SEQ ID NO: 129646 - RNA, 21 nt, Human
uaagggucucucaucuaccuu

SEQ ID NO: 129647 - RNA, 19 nt, Human
uacccuagcccccucccac

SEQ ID NO: 129648 - RNA, 24 nt, Human
uagccucuggguccuagugccccc

SEQ ID NO: 129649 - RNA, 23 nt, Human
uaggggugggggcagugaugggg

SEQ ID NO: 129650 - RNA, 24 nt, Human
ucacacacauagcaaagcaagcca

SEQ ID NO: 129651 - RNA, 22 nt, Human
ucacacugagccagaggaggca

SEQ ID NO: 129652 - RNA, 27 nt, Human
ucagcacucaacucuugaauacacugu

SEQ ID NO: 129653 - RNA, 22 nt, Human
ucagccuaccccccacaagccc

SEQ ID NO: 129654 - RNA, 21 nt, Human
uccccaguccaugggccucac

SEQ ID NO: 129655 - RNA, 22 nt, Human
ucccccagcuggccaaagacag

SEQ ID NO: 129656 - RNA, 20 nt, Human
uccccucugcugccugagga

SEQ ID NO: 129657 - RNA, 19 nt, Human
ucucagccuaccccccaca

SEQ ID NO: 129658 - RNA, 19 nt, Human
ugagccagaggaggcaggc

SEQ ID NO: 129659 - RNA, 18 nt, Human
ugaggauuccugaaccca

SEQ ID NO: 129660 - RNA, 19 nt, Human
ugagucucacucugcgcua

SEQ ID NO: 129661 - RNA, 18 nt, Human
ugccuagagccuccacac

SEQ ID NO: 129662 - RNA, 20 nt, Human
ugccuagagccuccacacag

SEQ ID NO: 129663 - RNA, 23 nt, Human
ugccuagagccuccacacagcca

SEQ ID NO: 129664 - RNA, 21 nt, Human
ugcucuagacuugucaggaac

SEQ ID NO: 129665 - RNA, 18 nt, Human
ugcucuucucucucccuc

SEQ ID NO: 129666 - RNA, 20 nt, Human
uggcagaggccagggaaugg

SEQ ID NO: 129667 - RNA, 24 nt, Human
ugggagugggggaacccgggucaa

SEQ ID NO: 129668 - RNA, 21 nt, Human
ugggggcugaggagcaagucc

SEQ ID NO: 129669 - RNA, 23 nt, Human
ugggggcuggcugagguggcugu

SEQ ID NO: 129670 - RNA, 22 nt, Human
uucacacacauagcaaagcaag

SEQ ID NO: 129671 - RNA, 18 nt, Human
aacccuuuccccaccaag

SEQ ID NO: 129672 - RNA, 22 nt, Human
aaggagcuacccaagguuagca

SEQ ID NO: 129673 - RNA, 21 nt, Human
acagccuccagggaacagcca

SEQ ID NO: 129674 - RNA, 22 nt, Human
augaauccauagccugacaaaa

SEQ ID NO: 129675 - RNA, 19 nt, Human
caagcccucuuuccuacuc

SEQ ID NO: 129676 - RNA, 21 nt, Human
cacacaugcccacaugacuaa

SEQ ID NO: 129677 - RNA, 23 nt, Human
cacacaugcccacaugacuaaca

SEQ ID NO: 129678 - RNA, 18 nt, Human
cagccuccagggaacagc

SEQ ID NO: 129679 - RNA, 18 nt, Human
ccccagaauaaacuaaga

SEQ ID NO: 129680 - RNA, 26 nt, Human
ccuaucaaauuggaacuucgggcuaa

SEQ ID NO: 129681 - RNA, 24 nt, Human
ccucagagacugacaguggcuccu

SEQ ID NO: 129682 - RNA, 20 nt, Human
ccuugaagagaacagaagga

SEQ ID NO: 129683 - RNA, 21 nt, Human
cuaaugugugcauccccuccc

SEQ ID NO: 129684 - RNA, 18 nt, Human
gcauccccuccccccaga

SEQ ID NO: 129685 - RNA, 21 nt, Human
guaaaugaauccauagccuga

SEQ ID NO: 129686 - RNA, 21 nt, Human
uacccaagguuagcaucucca

SEQ ID NO: 129687 - RNA, 24 nt, Human
uagccugacaaaauuccccuugaa

SEQ ID NO: 129688 - RNA, 24 nt, Human
uccucacacaugcccacaugacua

SEQ ID NO: 129689 - RNA, 24 nt, Human
uccuuuaaagggacagccuccagg

SEQ ID NO: 129690 - RNA, 21 nt, Human
ucgggcuaaauacauuaaaac

SEQ ID NO: 129691 - RNA, 22 nt, Human
ucuguuuccucacacaugccca

SEQ ID NO: 129692 - RNA, 19 nt, Human
ugcauccccuccccccaga

SEQ ID NO: 129693 - RNA, 18 nt, Human
uggaaccucagagacuga

SEQ ID NO: 129694 - RNA, 24 nt, Human
uguuuccucacacaugcccacaug

SEQ ID NO: 129695 - RNA, 21 nt, Human
aggacagaguugguggagaag

SEQ ID NO: 129696 - RNA, 21 nt, Human
auggggcaggggcgcgacggu

SEQ ID NO: 129697 - RNA, 19 nt, Human
cagcaguaccccaaggcca

SEQ ID NO: 129698 - RNA, 20 nt, Human
cagcggccacccccacuccu

SEQ ID NO: 129699 - RNA, 20 nt, Human
cagcggccacccccacuccu

SEQ ID NO: 129700 - RNA, 23 nt, Human
cauauacuacgauggggcagggg

SEQ ID NO: 129701 - RNA, 18 nt, Human
ccacacagacucccccuc

SEQ ID NO: 129702 - RNA, 25 nt, Human
ccaguggauccuuuucccuacacuc

SEQ ID NO: 129703 - RNA, 20 nt, Human
ccccaccccccgaggacaga

SEQ ID NO: 129704 - RNA, 21 nt, Human
ccccccgaggacagaguuggu

SEQ ID NO: 129705 - RNA, 18 nt, Human
ccccgucuucaagccucg

SEQ ID NO: 129706 - RNA, 22 nt, Human
cccgucuucaagccucggggac

SEQ ID NO: 129707 - RNA, 20 nt, Human
cccuccuuccccuucuacuu

SEQ ID NO: 129708 - RNA, 23 nt, Human
cccuccuuccccuucuacuuccu

SEQ ID NO: 129709 - RNA, 18 nt, Human
ccucggggacugggagcu

SEQ ID NO: 129710 - RNA, 22 nt, Human
ccucggggacugggagcucugg

SEQ ID NO: 129711 - RNA, 19 nt, Human
cggcuggggccccaccccc

SEQ ID NO: 129712 - RNA, 22 nt, Human
cuccggggcauugucuaagcgg

SEQ ID NO: 129713 - RNA, 25 nt, Human
cucggggacugggagcucuggcuuu

SEQ ID NO: 129714 - RNA, 18 nt, Human
gcggccacccccacuccu

SEQ ID NO: 129715 - RNA, 18 nt, Human
gggacugggagcucuggc

SEQ ID NO: 129716 - RNA, 23 nt, Human
ucagcauucucuaucuaacccuc

SEQ ID NO: 129717 - RNA, 21 nt, Human
uccacacagacucccccucca

SEQ ID NO: 129718 - RNA, 22 nt, Human
ucccaacuacugccuauucagc

SEQ ID NO: 129719 - RNA, 22 nt, Human
ucccuacacucuccccuccccc

SEQ ID NO: 129720 - RNA, 24 nt, Human
ucccuacacucuccccucccccaa

SEQ ID NO: 129721 - RNA, 21 nt, Human
ucuacuuccuauacuauccua

SEQ ID NO: 129722 - RNA, 23 nt, Human
ucuucaccugucuccagcggcca

SEQ ID NO: 129723 - RNA, 21 nt, Human
uggggccccaccccccgagga

SEQ ID NO: 129724 - RNA, 19 nt, Human
uguuucuucaccugucucc

SEQ ID NO: 129725 - RNA, 21 nt, Human
uuuuuuuuuuuuuaaaagguc

SEQ ID NO: 129726 - RNA, 24 nt, Human
uuuuuuuuuuuuuuuuuuaaaagg

SEQ ID NO: 129727 - RNA, 21 nt, Human
aaaaagaggacaaugcaugag

SEQ ID NO: 129728 - RNA, 24 nt, Human
aaacuaacaauucacauccuccca

SEQ ID NO: 129729 - RNA, 21 nt, Human
aacccucuuccccacuaccca

SEQ ID NO: 129730 - RNA, 22 nt, Human
aacccucuuccccacuacccac

SEQ ID NO: 129731 - RNA, 23 nt, Human
aacccucuuccccacuacccaca

SEQ ID NO: 129732 - RNA, 22 nt, Human
aagaagacgaugguggagagga

SEQ ID NO: 129733 - RNA, 18 nt, Human
aaggggcccccugcccuu

SEQ ID NO: 129734 - RNA, 18 nt, Human
acaacucccuacacugcc

SEQ ID NO: 129735 - RNA, 19 nt, Human
acaagcgaaaagacaggug

SEQ ID NO: 129736 - RNA, 23 nt, Human
acacacacacacauacacacaca

SEQ ID NO: 129737 - RNA, 23 nt, Human
acacacacacauacacacacaca

SEQ ID NO: 129738 - RNA, 23 nt, Human
acacacauacacacacacacacg

SEQ ID NO: 129739 - RNA, 21 nt, Human
acacauacacacacacacaua

SEQ ID NO: 129740 - RNA, 18 nt, Human
acagguggcccccaacag

SEQ ID NO: 129741 - RNA, 22 nt, Human
acccucuuccccacuacccacu

SEQ ID NO: 129742 - RNA, 20 nt, Human
agaaagagggacacaagcga

SEQ ID NO: 129743 - RNA, 22 nt, Human
agaggagggggagggcagcagg

SEQ ID NO: 129744 - RNA, 21 nt, Human
agagggacacaagcgaaaaga

SEQ ID NO: 129745 - RNA, 18 nt, Human
agggcaaagccuuugggg

SEQ ID NO: 129746 - RNA, 23 nt, Human
agggucagcaaaggggcccccug

SEQ ID NO: 129747 - RNA, 23 nt, Human
auacacacacacacauacacaca

SEQ ID NO: 129748 - RNA, 24 nt, Human
auacacacacacacauacacacac

SEQ ID NO: 129749 - RNA, 24 nt, Human
cacacacacacauacacacacaca

SEQ ID NO: 129750 - RNA, 22 nt, Human
cacacacauacacacacacaca

SEQ ID NO: 129751 - RNA, 28 nt, Human
cacacacauacacacacacacacgcaca

SEQ ID NO: 129752 - RNA, 22 nt, Human
cagcaaaggggcccccugcccu

SEQ ID NO: 129753 - RNA, 23 nt, Human
cagcagggcaaagccuuugggga

SEQ ID NO: 129754 - RNA, 22 nt, Human
cagcuuccuuucagccaaagaa

SEQ ID NO: 129755 - RNA, 22 nt, Human
cauacacacacacacacgcaca

SEQ ID NO: 129756 - RNA, 20 nt, Human
cauccaccaucuccagguuu

SEQ ID NO: 129757 - RNA, 25 nt, Human
ccacaacucccuacacugccaaucu

SEQ ID NO: 129758 - RNA, 19 nt, Human
cccacuuccacauagggga

SEQ ID NO: 129759 - RNA, 23 nt, Human
cccauggccaagaagaccggggc

SEQ ID NO: 129760 - RNA, 25 nt, Human
ccccaacagcgcgcagcgaacucca

SEQ ID NO: 129761 - RNA, 20 nt, Human
ccccacuacccacaacuccc

SEQ ID NO: 129762 - RNA, 24 nt, Human
ccccacuacccacaacucccuaca

SEQ ID NO: 129763 - RNA, 21 nt, Human
ccccggaaggaggacaacugg

SEQ ID NO: 129764 - RNA, 23 nt, Human
cccuccuaacccucuuccccacu

SEQ ID NO: 129765 - RNA, 22 nt, Human
ccuaacccucuuccccacuacc

SEQ ID NO: 129766 - RNA, 23 nt, Human
ccucccaccuucuucuuuccgaa

SEQ ID NO: 129767 - RNA, 19 nt, Human
ccucuaggccugaugcucu

SEQ ID NO: 129768 - RNA, 22 nt, Human
ccuuuggggagggucagcaaag

SEQ ID NO: 129769 - RNA, 20 nt, Human
cuaaauaaaaagaggacaau

SEQ ID NO: 129770 - RNA, 21 nt, Human
cucagaaacuaacaauucaca

SEQ ID NO: 129771 - RNA, 22 nt, Human
cuugguggucuaaggugauggc

SEQ ID NO: 129772 - RNA, 23 nt, Human
gagacugguaaaaauccagggag

SEQ ID NO: 129773 - RNA, 29 nt, Human
gagauacacauacacacacacacauacac

SEQ ID NO: 129774 - RNA, 23 nt, Human
gcacagcuuccuuucagccaaag

SEQ ID NO: 129775 - RNA, 19 nt, Human
gcgaaaagacagguggccc

SEQ ID NO: 129776 - RNA, 22 nt, Human
gcgaaaagacagguggccccca

SEQ ID NO: 129777 - RNA, 22 nt, Human
gcgacacuagaaagagggacac

SEQ ID NO: 129778 - RNA, 18 nt, Human
ggaggacaacuggcaaca

SEQ ID NO: 129779 - RNA, 25 nt, Human
ggcaauagaagaaaaguaaaaggaa

SEQ ID NO: 129780 - RNA, 19 nt, Human
gggaacuguggcucugggg

SEQ ID NO: 129781 - RNA, 18 nt, Human
gucucacuucacagacaa

SEQ ID NO: 129782 - RNA, 31 nt, Human
gugugagauacacauacacacacacacauag

SEQ ID NO: 129783 - RNA, 22 nt, Human
uacacacacacacacgcacagc

SEQ ID NO: 129784 - RNA, 23 nt, Human
uacacacacacacacgcacagcu

SEQ ID NO: 129785 - RNA, 21 nt, Human
uacacugccaaucuaaauaaa

SEQ ID NO: 129786 - RNA, 22 nt, Human
uagaagaaaaguaaaaggaagg

SEQ ID NO: 129787 - RNA, 19 nt, Human
uaugaagcccgccccacuu

SEQ ID NO: 129788 - RNA, 18 nt, Human
ucacauccucccaccuuc

SEQ ID NO: 129789 - RNA, 22 nt, Human
ucagccaaagaacugcaaaauc

SEQ ID NO: 129790 - RNA, 18 nt, Human
ucucagaggcaauagaag

SEQ ID NO: 129791 - RNA, 21 nt, Human
uggagaggagggggagggcag

SEQ ID NO: 129792 - RNA, 22 nt, Human
uggggagggucagcaaaggggc

SEQ ID NO: 129793 - RNA, 23 nt, Human
uggggagggucagcaaaggggcc

SEQ ID NO: 129794 - RNA, 21 nt, Human
ugguaaaaauccagggagaaa

SEQ ID NO: 129795 - RNA, 18 nt, Human
ugguggagaggaggggga

SEQ ID NO: 129796 - RNA, 22 nt, Human
ugguggagaggagggggagggc

SEQ ID NO: 129797 - RNA, 24 nt, Human
ugguggagaggagggggagggcag

SEQ ID NO: 129798 - RNA, 24 nt, Human
uucuucuuuccgaagaaggcaguu

SEQ ID NO: 129799 - RNA, 21 nt, Human
aagagcacaaaucaaauaacu

SEQ ID NO: 129800 - RNA, 23 nt, Human
acuacaaaacugcggggccacag

SEQ ID NO: 129801 - RNA, 24 nt, Human
agaaacaaggcggggacuacaaaa

SEQ ID NO: 129802 - RNA, 22 nt, Human
agcuaagccaacuucccgccaa

SEQ ID NO: 129803 - RNA, 23 nt, Human
agggcuuguucaaaccagcuugg

SEQ ID NO: 129804 - RNA, 20 nt, Human
aggggcccuugggacagcug

SEQ ID NO: 129805 - RNA, 20 nt, Human
augugugggcuccaaggccu

SEQ ID NO: 129806 - RNA, 20 nt, Human
caaauaacugcuugaucccc

SEQ ID NO: 129807 - RNA, 28 nt, Human
caacccuaaccuuggauacuuuuggccc

SEQ ID NO: 129808 - RNA, 20 nt, Human
caaggcggggacuacaaaac

SEQ ID NO: 129809 - RNA, 23 nt, Human
caccccugcuccaacccuaaccu

SEQ ID NO: 129810 - RNA, 21 nt, Human
cagcaccccugcuccaacccu

SEQ ID NO: 129811 - RNA, 18 nt, Human
cccacaccuucuuuagug

SEQ ID NO: 129812 - RNA, 21 nt, Human
cccagcaccccugcuccaacc

SEQ ID NO: 129813 - RNA, 18 nt, Human
ccccaggucccagcaccc

SEQ ID NO: 129814 - RNA, 24 nt, Human
ccccaggucccagcaccccugcuc

SEQ ID NO: 129815 - RNA, 18 nt, Human
cccucugcuaccacccac

SEQ ID NO: 129816 - RNA, 30 nt, Human
cuccaacccuaaccuuggauacuuuuggcc

SEQ ID NO: 129817 - RNA, 19 nt, Human
cuucccgccaaacaugccc

SEQ ID NO: 129818 - RNA, 20 nt, Human
gagcagucucuggaggcaag

SEQ ID NO: 129819 - RNA, 18 nt, Human
gagggaggauugagaggc

SEQ ID NO: 129820 - RNA, 21 nt, Human
gaucccucugcuaccacccac

SEQ ID NO: 129821 - RNA, 23 nt, Human
gcccagggcuuguucaaaccagc

SEQ ID NO: 129822 - RNA, 22 nt, Human
ggacuacaaaacugcggggcca

SEQ ID NO: 129823 - RNA, 21 nt, Human
ggaggauugagaggccucugg

SEQ ID NO: 129824 - RNA, 20 nt, Human
gugugggcuccaaggccuug

SEQ ID NO: 129825 - RNA, 20 nt, Human
ucaaaagagcacaaaucaaa

SEQ ID NO: 129826 - RNA, 19 nt, Human
uccaacccuaaccuuggau

SEQ ID NO: 129827 - RNA, 18 nt, Human
ucccagucccacagugcc

SEQ ID NO: 129828 - RNA, 25 nt, Human
ucccagucccacagugccccagguc

SEQ ID NO: 129829 - RNA, 20 nt, Human
ucuggagcagucucuggagg

SEQ ID NO: 129830 - RNA, 21 nt, Human
ugagaggagaaaagucauuua

SEQ ID NO: 129831 - RNA, 20 nt, Human
ugaucccucugcuaccaccc

SEQ ID NO: 129832 - RNA, 19 nt, Human
ugcaggacuugaucccaug

SEQ ID NO: 129833 - RNA, 25 nt, Human
ugcuugaucccucugcuaccaccca

SEQ ID NO: 129834 - RNA, 27 nt, Human
ugcuugaucccucugcuaccacccacu

SEQ ID NO: 129835 - RNA, 18 nt, Human
ugggcuccaaggccuugu

SEQ ID NO: 129836 - RNA, 22 nt, Human
ugucuggcccacaccuucuuua

SEQ ID NO: 129837 - RNA, 24 nt, Human
aacccucuggauggcuuuggagaa

SEQ ID NO: 129838 - RNA, 20 nt, Human
aagcagacaaaaucacaacc

SEQ ID NO: 129839 - RNA, 24 nt, Human
acaaaagacaauuugaagaccaca

SEQ ID NO: 129840 - RNA, 24 nt, Human
agacaugggaagccacagacagcu

SEQ ID NO: 129841 - RNA, 18 nt, Human
caaaaucacaacccucug

SEQ ID NO: 129842 - RNA, 24 nt, Human
cacagcuaaugaauaaaagcuaug

SEQ ID NO: 129843 - RNA, 19 nt, Human
cagugaggcuuuccuacca

SEQ ID NO: 129844 - RNA, 24 nt, Human
ggugaaaaaggcagccgggaguga

SEQ ID NO: 129845 - RNA, 22 nt, Human
uagccacaugacaaaagacaau

SEQ ID NO: 129846 - RNA, 24 nt, Human
ugcgugaacauugauugcccugga

SEQ ID NO: 129847 - RNA, 24 nt, Human
uggagaaagacaugggaagccaca

SEQ ID NO: 129848 - RNA, 24 nt, Human
ugucagaggugaaaaaggcagccg

SEQ ID NO: 129849 - RNA, 22 nt, Human
uucaaguugcgugaacauugau

SEQ ID NO: 129850 - RNA, 22 nt, Human
uuccaguuuucagauauaucuc

SEQ ID NO: 129851 - RNA, 20 nt, Human
uuuccuaccacuucugauga

SEQ ID NO: 129852 - RNA, 20 nt, Human
aaacauggcugggaugaaaa

SEQ ID NO: 129853 - RNA, 21 nt, Human
aacaaagagcaugggaaaaga

SEQ ID NO: 129854 - RNA, 20 nt, Human
aagcaaauguagugccagaa

SEQ ID NO: 129855 - RNA, 22 nt, Human
aagcaaauguagugccagaaug

SEQ ID NO: 129856 - RNA, 24 nt, Human
aagugcuagaugccaaggauggcu

SEQ ID NO: 129857 - RNA, 23 nt, Human
acugacuguggaguacaacuauu

SEQ ID NO: 129858 - RNA, 21 nt, Human
agaaagccagugauuagaaac

SEQ ID NO: 129859 - RNA, 19 nt, Human
agagcaugggaaaagaaac

SEQ ID NO: 129860 - RNA, 23 nt, Human
agcagaacuaaauuaauauucac

SEQ ID NO: 129861 - RNA, 24 nt, Human
auaacacaauaugucaauccauac

SEQ ID NO: 129862 - RNA, 20 nt, Human
auacugcauuguuaggaaca

SEQ ID NO: 129863 - RNA, 23 nt, Human
auacuggugaaggcagaaaacca

SEQ ID NO: 129864 - RNA, 21 nt, Human
augaguuucuuacucuguaac

SEQ ID NO: 129865 - RNA, 18 nt, Human
caaauguagugccagaau

SEQ ID NO: 129866 - RNA, 23 nt, Human
caaauguagugccagaaugacac

SEQ ID NO: 129867 - RNA, 22 nt, Human
caacacacauuauaucccccuc

SEQ ID NO: 129868 - RNA, 25 nt, Human
caagauucucugcuuaaaaauauua

SEQ ID NO: 129869 - RNA, 20 nt, Human
caaguuuaaaaaauguacaa

SEQ ID NO: 129870 - RNA, 19 nt, Human
cacugagcacuguaacgau

SEQ ID NO: 129871 - RNA, 26 nt, Human
cagaacccaccucuuugcuaauguug

SEQ ID NO: 129872 - RNA, 27 nt, Human
cagagcuuaagacuggaaaaauuaucu

SEQ ID NO: 129873 - RNA, 22 nt, Human
cagagucaauucuaugccuuuc

SEQ ID NO: 129874 - RNA, 24 nt, Human
cauacaguagggaaacugugugaa

SEQ ID NO: 129875 - RNA, 18 nt, Human
cauagcagcguucaaaaa

SEQ ID NO: 129876 - RNA, 19 nt, Human
ccugaaauuugaacuucau

SEQ ID NO: 129877 - RNA, 24 nt, Human
ccuggaaaacagaacccaccucuu

SEQ ID NO: 129878 - RNA, 18 nt, Human
ccuggauucuacauacag

SEQ ID NO: 129879 - RNA, 20 nt, Human
ccuuucaacgguugcuggag

SEQ ID NO: 129880 - RNA, 25 nt, Human
cucacucauugccaagauucucugc

SEQ ID NO: 129881 - RNA, 22 nt, Human
cucauugccaagauucucugcu

SEQ ID NO: 129882 - RNA, 22 nt, Human
cugagguggcccuuccaugagu

SEQ ID NO: 129883 - RNA, 24 nt, Human
cugucauggagcuaaaaguuucac

SEQ ID NO: 129884 - RNA, 18 nt, Human
gaaaacagaacccaccuc

SEQ ID NO: 129885 - RNA, 23 nt, Human
gaaacaaauauuguugcaaccuu

SEQ ID NO: 129886 - RNA, 18 nt, Human
gagcaaccucagaugcag

SEQ ID NO: 129887 - RNA, 19 nt, Human
gaggcuaauauuuucuggc

SEQ ID NO: 129888 - RNA, 23 nt, Human
gaugaaaagaaaacugagaggga

SEQ ID NO: 129889 - RNA, 23 nt, Human
gaugcagacuuccauccggacac

SEQ ID NO: 129890 - RNA, 20 nt, Human
gcuauucaaaguuuguauag

SEQ ID NO: 129891 - RNA, 18 nt, Human
guuacaugaaggcagcag

SEQ ID NO: 129892 - RNA, 18 nt, Human
uaaaagacugaaauacaa

SEQ ID NO: 129893 - RNA, 21 nt, Human
uaaaaugccauaaagaguuuu

SEQ ID NO: 129894 - RNA, 23 nt, Human
uaacaaagagcaugggaaaagaa

SEQ ID NO: 129895 - RNA, 19 nt, Human
uaacacaauaugucaaucc

SEQ ID NO: 129896 - RNA, 22 nt, Human
uaacagcagcuauauacacacu

SEQ ID NO: 129897 - RNA, 18 nt, Human
uaauauucacugagcacu

SEQ ID NO: 129898 - RNA, 21 nt, Human
uacaacacacauuauaucccc

SEQ ID NO: 129899 - RNA, 22 nt, Human
uacaacacacauuauauccccc

SEQ ID NO: 129900 - RNA, 23 nt, Human
uauagcaaccacuuaagcagaac

SEQ ID NO: 129901 - RNA, 22 nt, Human
ucaaaguuuguauagcaaccac

SEQ ID NO: 129902 - RNA, 21 nt, Human
ucaccuggaaaacagaacccu

SEQ ID NO: 129903 - RNA, 21 nt, Human
ucagugaauauuuugcugaag

SEQ ID NO: 129904 - RNA, 23 nt, Human
uccaagaacaaaacuaagaaaau

SEQ ID NO: 129905 - RNA, 18 nt, Human
ucucacucauugccaaga

SEQ ID NO: 129906 - RNA, 19 nt, Human
ugaaggcagaaaaccacag

SEQ ID NO: 129907 - RNA, 18 nt, Human
ugacuugaagguggacag

SEQ ID NO: 129908 - RNA, 21 nt, Human
uggaagagggcuuuuccuaaa

SEQ ID NO: 129909 - RNA, 22 nt, Human
uguaaaagacugaaauacaaug

SEQ ID NO: 129910 - RNA, 19 nt, Human
ugucuaaacuugcaugagg

SEQ ID NO: 129911 - RNA, 21 nt, Human
uuaacugagcacuuuucugua

SEQ ID NO: 129912 - RNA, 23 nt, Human
uuaauauucacugagcacuguaa

SEQ ID NO: 129913 - RNA, 23 nt, Human
uucacaugugcccugacacugag

SEQ ID NO: 129914 - RNA, 23 nt, Human
uucuuacucuguaacagcagcua

SEQ ID NO: 129915 - RNA, 25 nt, Human
uucuuugcuauuugucaauacugau

SEQ ID NO: 129916 - RNA, 23 nt, Human
uugguuccugaaauuugaacuuc

SEQ ID NO: 129917 - RNA, 27 nt, Human
aaaaaaacaaaaacaaaaaacuacaga

SEQ ID NO: 129918 - RNA, 22 nt, Human
aaaaacuacagauauaacacau

SEQ ID NO: 129919 - RNA, 21 nt, Human
aaaacaccuaaagcauauaaa

SEQ ID NO: 129920 - RNA, 23 nt, Human
aaaacaccuaaagcauauaaacu

SEQ ID NO: 129921 - RNA, 21 nt, Human
aaaauagcauccuaagcugca

SEQ ID NO: 129922 - RNA, 20 nt, Human
aaaaugccagaauccugcag

SEQ ID NO: 129923 - RNA, 23 nt, Human
aaacaaaaacaaaaaacuacaga

SEQ ID NO: 129924 - RNA, 23 nt, Human
aaacaaaaaguacaaugccaaaa

SEQ ID NO: 129925 - RNA, 21 nt, Human
aaaugccagaauccugcagcu

SEQ ID NO: 129926 - RNA, 24 nt, Human
aacaaaaaguacaaugccaaaaaa

SEQ ID NO: 129927 - RNA, 26 nt, Human
aacaaaaaguacaaugccaaaaaaaa

SEQ ID NO: 129928 - RNA, 19 nt, Human
aacagauguagugcuuuaa

SEQ ID NO: 129929 - RNA, 27 nt, Human
aaggcaaauuccaaaacaccuaaagca

SEQ ID NO: 129930 - RNA, 19 nt, Human
aaguaaucaggugaaugaa

SEQ ID NO: 129931 - RNA, 18 nt, Human
aauacagaugcaggagga

SEQ ID NO: 129932 - RNA, 19 nt, Human
aaucaaaugcaccaucaca

SEQ ID NO: 129933 - RNA, 24 nt, Human
aaugcaggaagaauuuauucauua

SEQ ID NO: 129934 - RNA, 22 nt, Human
acaaaaacaaaaaguacaaugc

SEQ ID NO: 129935 - RNA, 22 nt, Human
acaaaaaguacaaugccaaaaa

SEQ ID NO: 129936 - RNA, 18 nt, Human
acaaacaguucaugaaac

SEQ ID NO: 129937 - RNA, 21 nt, Human
acagcauggucugcgccacag

SEQ ID NO: 129938 - RNA, 23 nt, Human
acaguugugcugcaaccaaagua

SEQ ID NO: 129939 - RNA, 22 nt, Human
agcagcaguucacuggccgccu

SEQ ID NO: 129940 - RNA, 21 nt, Human
agcgagccccgaggcgggcgc

SEQ ID NO: 129941 - RNA, 18 nt, Human
agcuggcaccaggugguc

SEQ ID NO: 129942 - RNA, 24 nt, Human
aggaaacagcaagugauguguuaa

SEQ ID NO: 129943 - RNA, 18 nt, Human
aggaaguucaagaaggca

SEQ ID NO: 129944 - RNA, 22 nt, Human
auaacaaaaacaaaaaguacaa

SEQ ID NO: 129945 - RNA, 21 nt, Human
auacagcauggucugcgccac

SEQ ID NO: 129946 - RNA, 21 nt, Human
auacaucucaaaauagcaucc

SEQ ID NO: 129947 - RNA, 23 nt, Human
auccaccccuuaacagaucacac

SEQ ID NO: 129948 - RNA, 21 nt, Human
augccaaaaaaaaaaaaaacu

SEQ ID NO: 129949 - RNA, 22 nt, Human
augccaaaaaaaaaaaaaacuc

SEQ ID NO: 129950 - RNA, 23 nt, Human
augccuauuuauucucagagugc

SEQ ID NO: 129951 - RNA, 23 nt, Human
caaaacaccuaaagcauauaaac

SEQ ID NO: 129952 - RNA, 22 nt, Human
caaaaggcugacuauaaaauac

SEQ ID NO: 129953 - RNA, 18 nt, Human
caaaauagcauccuaagc

SEQ ID NO: 129954 - RNA, 20 nt, Human
caaaauagcauccuaagcug

SEQ ID NO: 129955 - RNA, 21 nt, Human
caaaaugccagaauccugcag

SEQ ID NO: 129956 - RNA, 18 nt, Human
caauagcaccaaauugua

SEQ ID NO: 129957 - RNA, 19 nt, Human
caccagguggucaaaaggc

SEQ ID NO: 129958 - RNA, 20 nt, Human
caccgccgcugccgccgccg

SEQ ID NO: 129959 - RNA, 20 nt, Human
caccgccgcugccgccgccg

SEQ ID NO: 129960 - RNA, 18 nt, Human
caccuaaagcauauaaac

SEQ ID NO: 129961 - RNA, 23 nt, Human
caccuaaagcauauaaacuaauu

SEQ ID NO: 129962 - RNA, 20 nt, Human
cacucaguaggaaacagcaa

SEQ ID NO: 129963 - RNA, 22 nt, Human
cagaauccugcagcugcaguuc

SEQ ID NO: 129964 - RNA, 18 nt, Human
cagagcaguggcauuaga

SEQ ID NO: 129965 - RNA, 22 nt, Human
cagagugccaaaauuuccaaua

SEQ ID NO: 129966 - RNA, 23 nt, Human
cagccgcaggggcgccgccgccu

SEQ ID NO: 129967 - RNA, 21 nt, Human
cauaugccuauuuauucucag

SEQ ID NO: 129968 - RNA, 30 nt, Human
ccgccgcucggacaccgccgcugccgccgg

SEQ ID NO: 129969 - RNA, 19 nt, Human
ccgccgcugccgccgccgc

SEQ ID NO: 129970 - RNA, 19 nt, Human
ccucccgcggagaggggcg

SEQ ID NO: 129971 - RNA, 19 nt, Human
ccugggcuagaagggaagg

SEQ ID NO: 129972 - RNA, 20 nt, Human
cgaggcgggcgcgcacagcc

SEQ ID NO: 129973 - RNA, 22 nt, Human
cgccgcugccgccgccgcuccg

SEQ ID NO: 129974 - RNA, 20 nt, Human
cggcccgcggacaaagggga

SEQ ID NO: 129975 - RNA, 21 nt, Human
cuaguuaacaagaagaguaaa

SEQ ID NO: 129976 - RNA, 18 nt, Human
cugcauuaaggacaauga

SEQ ID NO: 129977 - RNA, 18 nt, Human
cugccucacuuuccaagc

SEQ ID NO: 129978 - RNA, 20 nt, Human
cugcgccacagaauucuacu

SEQ ID NO: 129979 - RNA, 18 nt, Human
cugcgcgccgagggcucc

SEQ ID NO: 129980 - RNA, 20 nt, Human
cuggcgcacagccgcagggg

SEQ ID NO: 129981 - RNA, 22 nt, Human
cuuaacagaucacacaguuacu

SEQ ID NO: 129982 - RNA, 25 nt, Human
gaacagaaugaacuguaguuacuac

SEQ ID NO: 129983 - RNA, 24 nt, Human
gccacccagccgcgggccccgacg

SEQ ID NO: 129984 - RNA, 20 nt, Human
gccgcaggggcgccgccgcc

SEQ ID NO: 129985 - RNA, 18 nt, Human
gcgcgggagccgcgcggg

SEQ ID NO: 129986 - RNA, 20 nt, Human
ggacaaaggggagcgccggg

SEQ ID NO: 129987 - RNA, 20 nt, Human
ggucaaaaggcugacuauaa

SEQ ID NO: 129988 - RNA, 24 nt, Human
uaaaaaaaaacaaaaacaaaaaac

SEQ ID NO: 129989 - RNA, 18 nt, Human
uaaauagauaucuacaau

SEQ ID NO: 129990 - RNA, 28 nt, Human
uaacaaaaacaaaaaguacaaugccaaa

SEQ ID NO: 129991 - RNA, 19 nt, Human
uaacaagaagaguaaacuu

SEQ ID NO: 129992 - RNA, 21 nt, Human
uaacagcauugcugccucacu

SEQ ID NO: 129993 - RNA, 22 nt, Human
uaagaguacuauuaguuacugc

SEQ ID NO: 129994 - RNA, 22 nt, Human
uaauaaagacaagcugcuucag

SEQ ID NO: 129995 - RNA, 21 nt, Human
uaaucaggugaaugaacugaa

SEQ ID NO: 129996 - RNA, 23 nt, Human
uacaaugccaaaaaaaaaaaaaa

SEQ ID NO: 129997 - RNA, 25 nt, Human
uacaaugccaaaaaaaaaaaaaacu

SEQ ID NO: 129998 - RNA, 27 nt, Human
uacaaugccaaaaaaaaaaaaaacucu

SEQ ID NO: 129999 - RNA, 19 nt, Human
uagaagggaaggcaguggu

SEQ ID NO: 130000 - RNA, 23 nt, Human
uagaggcaggaucuugauuaugu

SEQ ID NO: 130001 - RNA, 22 nt, Human
uaguugcuuuuuuaauuugcaa

SEQ ID NO: 130002 - RNA, 18 nt, Human
uccaucauccuuaguuuu

SEQ ID NO: 130003 - RNA, 24 nt, Human
uccucuacuaccaccccaaguagc

SEQ ID NO: 130004 - RNA, 19 nt, Human
ugaaaaccacaaauuauaa

SEQ ID NO: 130005 - RNA, 20 nt, Human
ugauagcugcaaccucacaa

SEQ ID NO: 130006 - RNA, 21 nt, Human
ugccaaaaaaaaaaaaaacuc

SEQ ID NO: 130007 - RNA, 21 nt, Human
uggaaaaauauuuccuaggua

SEQ ID NO: 130008 - RNA, 21 nt, Human
uggcgcacagccgcaggggcg

SEQ ID NO: 130009 - RNA, 23 nt, Human
ugggaaauucaguuuuuccuaau

SEQ ID NO: 130010 - RNA, 22 nt, Human
ugggaguauuaccugggaccua

SEQ ID NO: 130011 - RNA, 22 nt, Human
uguaaauuuccaaguugcuuuc

SEQ ID NO: 130012 - RNA, 23 nt, Human
uguguacaguugcuuucugugug

SEQ ID NO: 130013 - RNA, 20 nt, Human
uguuaaaaguccaagugggu

SEQ ID NO: 130014 - RNA, 22 nt, Human
uuauacauacaugcagaauaua

SEQ ID NO: 130015 - RNA, 23 nt, Human
uuauauaaccuggaacagaauga

SEQ ID NO: 130016 - RNA, 20 nt, Human
uuauucucagagugccaaaa

SEQ ID NO: 130017 - RNA, 18 nt, Human
uucaaaggaauguguguc

SEQ ID NO: 130018 - RNA, 24 nt, Human
uucacuggccgccuaaaauaauaa

SEQ ID NO: 130019 - RNA, 24 nt, Human
uucagagcugggcuauggacuucu

SEQ ID NO: 130020 - RNA, 23 nt, Human
uuguagacuggaaaaauauuucc

SEQ ID NO: 130021 - RNA, 19 nt, Human
aagucucucucucucccuc

SEQ ID NO: 130022 - RNA, 22 nt, Human
agguguggugauguaugaagau

SEQ ID NO: 130023 - RNA, 18 nt, Human
cauagaaagucacuuuaa

SEQ ID NO: 130024 - RNA, 20 nt, Human
cauagaaagucacuuuaaua

SEQ ID NO: 130025 - RNA, 23 nt, Human
cccaagugggggacugaugcucc

SEQ ID NO: 130026 - RNA, 21 nt, Human
ccuuagacuuaagucucucuc

SEQ ID NO: 130027 - RNA, 22 nt, Human
ccuucuugaacacucucuccuc

SEQ ID NO: 130028 - RNA, 21 nt, Human
gguguggugauguaugaagau

SEQ ID NO: 130029 - RNA, 20 nt, Human
uaagucucucucucucccuc

SEQ ID NO: 130030 - RNA, 24 nt, Human
uaagucucucucucucccucgugc

SEQ ID NO: 130031 - RNA, 18 nt, Human
uaguguggcccaaguggg

SEQ ID NO: 130032 - RNA, 18 nt, Human
ucagguguggugauguau

SEQ ID NO: 130033 - RNA, 26 nt, Human
ucugcaguuggaucagucuggaaaag

SEQ ID NO: 130034 - RNA, 25 nt, Human
uggcacuagugagaggguagucagu

SEQ ID NO: 130035 - RNA, 18 nt, Human
ugggaaagguggguagug

SEQ ID NO: 130036 - RNA, 20 nt, Human
uguggugauguaugaagaua

SEQ ID NO: 130037 - RNA, 25 nt, Human
aaaaauuaucccaacucccaccccu

SEQ ID NO: 130038 - RNA, 18 nt, Human
aaacaaagcaaaacaaaa

SEQ ID NO: 130039 - RNA, 24 nt, Human
aaagugcugggauuacaggcauga

SEQ ID NO: 130040 - RNA, 23 nt, Human
aacaaaaccaccaauccuaauaa

SEQ ID NO: 130041 - RNA, 24 nt, Human
aacacuguugcccaggcuggagug

SEQ ID NO: 130042 - RNA, 21 nt, Human
aacucccaccccuuggcucuc

SEQ ID NO: 130043 - RNA, 18 nt, Human
aagcaaaacaaaaccacc

SEQ ID NO: 130044 - RNA, 20 nt, Human
aagcaaaacaaaaccaccaa

SEQ ID NO: 130045 - RNA, 19 nt, Human
aagugcugggauuacaggc

SEQ ID NO: 130046 - RNA, 21 nt, Human
aagugcugggauuacaggcau

SEQ ID NO: 130047 - RNA, 26 nt, Human
aagugcugggauuacaggcaugagcc

SEQ ID NO: 130048 - RNA, 18 nt, Human
acaaagcaaaacaaaacc

SEQ ID NO: 130049 - RNA, 23 nt, Human
acaaagcaaaacaaaaccaccaa

SEQ ID NO: 130050 - RNA, 20 nt, Human
acacuguugcccaggcugga

SEQ ID NO: 130051 - RNA, 27 nt, Human
acacuguugcccaggcuggagugcaau

SEQ ID NO: 130052 - RNA, 18 nt, Human
acaggguuuuaccguguu

SEQ ID NO: 130053 - RNA, 19 nt, Human
acaggguuuuaccguguua

SEQ ID NO: 130054 - RNA, 20 nt, Human
acaggguuuuaccguguuag

SEQ ID NO: 130055 - RNA, 24 nt, Human
acaggguuuuaccguguuagccag

SEQ ID NO: 130056 - RNA, 23 nt, Human
accguguuagccaggauagucuc

SEQ ID NO: 130057 - RNA, 18 nt, Human
agacaggguuuuaccgug

SEQ ID NO: 130058 - RNA, 19 nt, Human
agagacaggguuuuaccgu

SEQ ID NO: 130059 - RNA, 25 nt, Human
agcaaaacaaaaccaccaauccuaa

SEQ ID NO: 130060 - RNA, 20 nt, Human
aggcaugagccaccgugccu

SEQ ID NO: 130061 - RNA, 23 nt, Human
aggcaugagccaccgugccuggc

SEQ ID NO: 130062 - RNA, 18 nt, Human
aguagcugggacuacagg

SEQ ID NO: 130063 - RNA, 21 nt, Human
agugcaauggcgugaucucag

SEQ ID NO: 130064 - RNA, 24 nt, Human
agugcaauggcgugaucucagcuc

SEQ ID NO: 130065 - RNA, 18 nt, Human
agugcugggauuacaggc

SEQ ID NO: 130066 - RNA, 24 nt, Human
caaagugcugggauuacaggcaug

SEQ ID NO: 130067 - RNA, 20 nt, Human
cacauaggaaaaaugccacu

SEQ ID NO: 130068 - RNA, 19 nt, Human
caccaauccuaauaacccc

SEQ ID NO: 130069 - RNA, 24 nt, Human
caggguuuuaccguguuagccagg

SEQ ID NO: 130070 - RNA, 19 nt, Human
caggugcccaccaccacgc

SEQ ID NO: 130071 - RNA, 21 nt, Human
caggugcccaccaccacgccc

SEQ ID NO: 130072 - RNA, 22 nt, Human
caugccuuucuccugccucagc

SEQ ID NO: 130073 - RNA, 23 nt, Human
ccaaagugcugggauuacaggca

SEQ ID NO: 130074 - RNA, 24 nt, Human
ccaaagugcugggauuacaggcau

SEQ ID NO: 130075 - RNA, 24 nt, Human
ccaacucccaccccuuggcucuca

SEQ ID NO: 130076 - RNA, 24 nt, Human
cccaaagugcugggauuacaggca

SEQ ID NO: 130077 - RNA, 21 nt, Human
cccaccaccacgcccagcuaa

SEQ ID NO: 130078 - RNA, 21 nt, Human
cccaggcuggagugcaauggc

SEQ ID NO: 130079 - RNA, 22 nt, Human
cccaggcuggagugcaauggcg

SEQ ID NO: 130080 - RNA, 23 nt, Human
cccgaguagcugggacuacaggu

SEQ ID NO: 130081 - RNA, 24 nt, Human
cccgaguagcugggacuacaggug

SEQ ID NO: 130082 - RNA, 23 nt, Human
ccugccucagccucccgaguagc

SEQ ID NO: 130083 - RNA, 18 nt, Human
cuaauaaccccccucccu

SEQ ID NO: 130084 - RNA, 24 nt, Human
cucacugcaagcucugccuccugg

SEQ ID NO: 130085 - RNA, 24 nt, Human
cucagccucccgaguagcugggac

SEQ ID NO: 130086 - RNA, 19 nt, Human
cucccaccccuuggcucuc

SEQ ID NO: 130087 - RNA, 24 nt, Human
cuccugaccucgugagccgccugc

SEQ ID NO: 130088 - RNA, 22 nt, Human
cuccugccucagccucccgagu

SEQ ID NO: 130089 - RNA, 21 nt, Human
cuccuggauucaugccuuucu

SEQ ID NO: 130090 - RNA, 19 nt, Human
cugcaagcucugccuccug

SEQ ID NO: 130091 - RNA, 23 nt, Human
cugccucagccucccgaguagcu

SEQ ID NO: 130092 - RNA, 23 nt, Human
cugccucggccucccaaagugcu

SEQ ID NO: 130093 - RNA, 24 nt, Human
cuggagugcaauggcgugaucuca

SEQ ID NO: 130094 - RNA, 24 nt, Human
cuuaacacuguugcccaggcugga

SEQ ID NO: 130095 - RNA, 22 nt, Human
cuuucuccugccucagccuccc

SEQ ID NO: 130096 - RNA, 21 nt, Human
cuuuuaguagagacaggguuu

SEQ ID NO: 130097 - RNA, 22 nt, Human
gaccucgugagccgccugccuc

SEQ ID NO: 130098 - RNA, 24 nt, Human
gaccucgugagccgccugccucgg

SEQ ID NO: 130099 - RNA, 21 nt, Human
gagacagagucuuaacacugu

SEQ ID NO: 130100 - RNA, 18 nt, Human
gagucuuaacacuguugc

SEQ ID NO: 130101 - RNA, 18 nt, Human
gauuacaggcaugagcca

SEQ ID NO: 130102 - RNA, 20 nt, Human
gauuacaggcaugagccacc

SEQ ID NO: 130103 - RNA, 21 nt, Human
gauuacaggcaugagccaccg

SEQ ID NO: 130104 - RNA, 19 nt, Human
gcuggagugcaauggcgug

SEQ ID NO: 130105 - RNA, 24 nt, Human
ggauuacaggcaugagccaccgug

SEQ ID NO: 130106 - RNA, 22 nt, Human
ggcuggagugcaauggcgugau

SEQ ID NO: 130107 - RNA, 24 nt, Human
uaacacuguugcccaggcuggagu

SEQ ID NO: 130108 - RNA, 19 nt, Human
uaaccccccucccugcccc

SEQ ID NO: 130109 - RNA, 24 nt, Human
uaaccccccucccugccccgucuc

SEQ ID NO: 130110 - RNA, 26 nt, Human
uaauaaccccccucccugccccgucu

SEQ ID NO: 130111 - RNA, 24 nt, Human
uaauuuuuuguacuuuuaguagag

SEQ ID NO: 130112 - RNA, 25 nt, Human
uaauuuuuuguacuuuuaguagaga

SEQ ID NO: 130113 - RNA, 22 nt, Human
uacaggcaugagccaccgugcc

SEQ ID NO: 130114 - RNA, 24 nt, Human
uacaggugcccaccaccacgccca

SEQ ID NO: 130115 - RNA, 24 nt, Human
uaccguguuagccaggauagucuc

SEQ ID NO: 130116 - RNA, 22 nt, Human
uagagacaggguuuuaccgugu

SEQ ID NO: 130117 - RNA, 22 nt, Human
uagcccaaucgcggcucgugcc

SEQ ID NO: 130118 - RNA, 21 nt, Human
uaguagagacaggguuuuacc

SEQ ID NO: 130119 - RNA, 24 nt, Human
uaguagagacaggguuuuaccgug

SEQ ID NO: 130120 - RNA, 18 nt, Human
ucacugcaagcucugccu

SEQ ID NO: 130121 - RNA, 19 nt, Human
ucacugcaagcucugccuc

SEQ ID NO: 130122 - RNA, 23 nt, Human
ucacugcaagcucugccuccugg

SEQ ID NO: 130123 - RNA, 23 nt, Human
ucagccucccgaguagcugggac

SEQ ID NO: 130124 - RNA, 24 nt, Human
ucccaaagugcugggauuacaggc

SEQ ID NO: 130125 - RNA, 23 nt, Human
ucccgaguagcugggacuacagg

SEQ ID NO: 130126 - RNA, 23 nt, Human
ucccuauuuuagaaaugagagga

SEQ ID NO: 130127 - RNA, 22 nt, Human
uccuaauaaccccccucccugc

SEQ ID NO: 130128 - RNA, 24 nt, Human
uccuggauucaugccuuucuccug

SEQ ID NO: 130129 - RNA, 18 nt, Human
ucggccucccaaagugcu

SEQ ID NO: 130130 - RNA, 24 nt, Human
ucuuaacacuguugcccaggcugg

SEQ ID NO: 130131 - RNA, 19 nt, Human
ugagacagagucuuaacac

SEQ ID NO: 130132 - RNA, 19 nt, Human
ugagaggagugacugcaca

SEQ ID NO: 130133 - RNA, 19 nt, Human
ugagaggagugacugcaca

SEQ ID NO: 130134 - RNA, 20 nt, Human
ugcacauaggaaaaaugcca

SEQ ID NO: 130135 - RNA, 18 nt, Human
ugcccaggcuggagugca

SEQ ID NO: 130136 - RNA, 21 nt, Human
ugcccaggcuggagugcaaug

SEQ ID NO: 130137 - RNA, 21 nt, Human
ugcccaggcuggagugcaaug

SEQ ID NO: 130138 - RNA, 24 nt, Human
ugccucagccucccgaguagcugg

SEQ ID NO: 130139 - RNA, 19 nt, Human
ugccuccuggauucaugcc

SEQ ID NO: 130140 - RNA, 20 nt, Human
ugccuccuggauucaugccu

SEQ ID NO: 130141 - RNA, 21 nt, Human
ugccucggccucccaaagugc

SEQ ID NO: 130142 - RNA, 24 nt, Human
ugccucggccucccaaagugcugg

SEQ ID NO: 130143 - RNA, 20 nt, Human
ugccuuucuccugccucagc

SEQ ID NO: 130144 - RNA, 19 nt, Human
uggagugcaauggcgugau

SEQ ID NO: 130145 - RNA, 24 nt, Human
uggagugcaauggcgugaucucag

SEQ ID NO: 130146 - RNA, 24 nt, Human
uggcgugaucucagcucacugcaa

SEQ ID NO: 130147 - RNA, 21 nt, Human
ugggacuacaggugcccacca

SEQ ID NO: 130148 - RNA, 24 nt, Human
ugggacuacaggugcccaccacca

SEQ ID NO: 130149 - RNA, 18 nt, Human
ugggauuacaggcaugag

SEQ ID NO: 130150 - RNA, 21 nt, Human
ugggauuacaggcaugagcca

SEQ ID NO: 130151 - RNA, 22 nt, Human
ugggauuacaggcaugagccac

SEQ ID NO: 130152 - RNA, 23 nt, Human
ugggauuacaggcaugagccacc

SEQ ID NO: 130153 - RNA, 23 nt, Human
ugggauuacaggcaugagccacc

SEQ ID NO: 130154 - RNA, 24 nt, Human
ugggauuacaggcaugagccaccg

SEQ ID NO: 130155 - RNA, 20 nt, Human
uguugcccaggcuggagugc

SEQ ID NO: 130156 - RNA, 22 nt, Human
uguugcccaggcuggagugcaa

SEQ ID NO: 130157 - RNA, 24 nt, Human
uuaccguguuagccaggauagucu

SEQ ID NO: 130158 - RNA, 22 nt, Human
uuaguagagacaggguuuuacc

SEQ ID NO: 130159 - RNA, 24 nt, Human
uuaguagagacaggguuuuaccgu

SEQ ID NO: 130160 - RNA, 18 nt, Human
uuauuuauuuauuuauuu

SEQ ID NO: 130161 - RNA, 25 nt, Human
uuauuuauuuauuuauuuauauuug

SEQ ID NO: 130162 - RNA, 18 nt, Human
uugcccaggcuggagugc

SEQ ID NO: 130163 - RNA, 24 nt, Human
uuuaaacaaagcaaaacaaaacca

SEQ ID NO: 130164 - RNA, 23 nt, Human
uuuauuuauuuauuuauuuauuu

SEQ ID NO: 130165 - RNA, 18 nt, Human
uuugagggcaacaucucg

SEQ ID NO: 130166 - RNA, 21 nt, Human
uuuuuguacuuuuaguagaga

SEQ ID NO: 130167 - RNA, 24 nt, Human
uuuuuugagggcaacaucucgcuu

SEQ ID NO: 130168 - RNA, 24 nt, Human
uuuuuuguacuuuuaguagagaca

SEQ ID NO: 130169 - RNA, 19 nt, Human
uuuuuuuuuuuuugagggc

SEQ ID NO: 130170 - RNA, 28 nt, Human
uuuuuuuuuuuuuuuuuuuuuuugaggg

SEQ ID NO: 130171 - RNA, 19 nt, Human
aagcagccaguucacagau

SEQ ID NO: 130172 - RNA, 20 nt, Human
cccuggaucccuccgugccc

SEQ ID NO: 130173 - RNA, 22 nt, Human
cgggcagaggaacggaaacagc

SEQ ID NO: 130174 - RNA, 20 nt, Human
cuccaggcccucacucugcc

SEQ ID NO: 130175 - RNA, 19 nt, Human
gccaguucacagaugcccu

SEQ ID NO: 130176 - RNA, 22 nt, Human
gccaguucacagaugcccugga

SEQ ID NO: 130177 - RNA, 21 nt, Human
gcccuggaucccuccgugccc

SEQ ID NO: 130178 - RNA, 18 nt, Human
gccuggaacugggcaggg

SEQ ID NO: 130179 - RNA, 22 nt, Human
ggaacggaaacagcuccucaga

SEQ ID NO: 130180 - RNA, 18 nt, Human
ggcagggucccuggcacc

SEQ ID NO: 130181 - RNA, 20 nt, Human
ucucuggaagaagcagccag

SEQ ID NO: 130182 - RNA, 24 nt, Human
ucuggguuaggcgacgccuggaac

SEQ ID NO: 130183 - RNA, 21 nt, Human
uggaagaagcagccaguucac

SEQ ID NO: 130184 - RNA, 21 nt, Human
uucacagaugcccuggauccc

SEQ ID NO: 130185 - RNA, 22 nt, Human
acagacuuucauuacucaaauc

SEQ ID NO: 130186 - RNA, 22 nt, Human
aguccgggcagggacucagccc

SEQ ID NO: 130187 - RNA, 19 nt, Human
ccggccccuggucuucggc

SEQ ID NO: 130188 - RNA, 22 nt, Human
ccucugggaccuagggcuucug

SEQ ID NO: 130189 - RNA, 20 nt, Human
ccugcucgcucccucccucc

SEQ ID NO: 130190 - RNA, 23 nt, Human
ccuggucuucggcguucggaguc

SEQ ID NO: 130191 - RNA, 21 nt, Human
cgccggccccgccuuaugcgc

SEQ ID NO: 130192 - RNA, 25 nt, Human
cguggcaguggcggcgcgcgcuucc

SEQ ID NO: 130193 - RNA, 20 nt, Human
cguucggaguccgggcaggg

SEQ ID NO: 130194 - RNA, 22 nt, Human
cucccgacugacacggcguggc

SEQ ID NO: 130195 - RNA, 21 nt, Human
cugcucgcucccucccucccg

SEQ ID NO: 130196 - RNA, 18 nt, Human
gcccgcgccggccccgcc

SEQ ID NO: 130197 - RNA, 20 nt, Human
ggccccuggucuucggcguc

SEQ ID NO: 130198 - RNA, 20 nt, Human
ggcggcgcgcgcuuccggcc

SEQ ID NO: 130199 - RNA, 18 nt, Human
gggcaccauguguucgga

SEQ ID NO: 130200 - RNA, 18 nt, Human
ucauugggaugccauuuu

SEQ ID NO: 130201 - RNA, 21 nt, Human
ucgccugcucgcucccucccu

SEQ ID NO: 130202 - RNA, 23 nt, Human
ugcugcuuggaagcaguacaacu

SEQ ID NO: 130203 - RNA, 22 nt, Human
uggaaggaaaggcccgcgccgg

SEQ ID NO: 130204 - RNA, 21 nt, Human
uuccgauggaaggaaaggccc

SEQ ID NO: 130205 - RNA, 19 nt, Human
aaagcauguccugugagag

SEQ ID NO: 130206 - RNA, 21 nt, Human
aagcaagacagggauuucuaa

SEQ ID NO: 130207 - RNA, 22 nt, Human
acagcaacagaaacuucuguac

SEQ ID NO: 130208 - RNA, 22 nt, Human
agcucggaucaaccccagacac

SEQ ID NO: 130209 - RNA, 21 nt, Human
aggagaaggcaggcgcaggaa

SEQ ID NO: 130210 - RNA, 22 nt, Human
caagacagggauuucuaacaau

SEQ ID NO: 130211 - RNA, 20 nt, Human
cacaugcuggaaaacggggu

SEQ ID NO: 130212 - RNA, 22 nt, Human
cacccucgaucugaguaugcuc

SEQ ID NO: 130213 - RNA, 25 nt, Human
cacgagacaccuaaggucagacuca

SEQ ID NO: 130214 - RNA, 23 nt, Human
cagcucggaucaaccccagacac

SEQ ID NO: 130215 - RNA, 23 nt, Human
cagcucggaucaaccccagacac

SEQ ID NO: 130216 - RNA, 20 nt, Human
caggaaaugguaucauccac

SEQ ID NO: 130217 - RNA, 23 nt, Human
ccccaaaucaacuguuuuucaac

SEQ ID NO: 130218 - RNA, 21 nt, Human
cuuggagauacgaucgcuucu

SEQ ID NO: 130219 - RNA, 20 nt, Human
gacaccuaaggucagacuca

SEQ ID NO: 130220 - RNA, 23 nt, Human
gagacaccuaaggucagacucac

SEQ ID NO: 130221 - RNA, 24 nt, Human
gcggcggcggcgacagcucggauc

SEQ ID NO: 130222 - RNA, 21 nt, Human
uaacagaacacaugcuggaaa

SEQ ID NO: 130223 - RNA, 21 nt, Human
uaagugcccccaaaucaacug

SEQ ID NO: 130224 - RNA, 27 nt, Human
ucagugauggcacaaagcauguccuuu

SEQ ID NO: 130225 - RNA, 20 nt, Human
ucaugagcaauuuuaacagc

SEQ ID NO: 130226 - RNA, 19 nt, Human
ucggaucaaccccagacac

SEQ ID NO: 130227 - RNA, 19 nt, Human
ugagagggacuuggagaua

SEQ ID NO: 130228 - RNA, 20 nt, Human
ugcccuuugggaauggggca

SEQ ID NO: 130229 - RNA, 18 nt, Human
ugggaauggggcauaugg

SEQ ID NO: 130230 - RNA, 18 nt, Human
uucaaggagaaggcaggc

SEQ ID NO: 130231 - RNA, 26 nt, Human
uuccaaugacaaggcguaggguaccc

SEQ ID NO: 130232 - RNA, 19 nt, Human
uuuuuuuuuuuuauaggaa

SEQ ID NO: 130233 - RNA, 19 nt, Human
aaaacuccaccacgcgcuc

SEQ ID NO: 130234 - RNA, 21 nt, Human
aaacagaccaccccuccagga

SEQ ID NO: 130235 - RNA, 20 nt, Human
aaacgccacugaguuugaaa

SEQ ID NO: 130236 - RNA, 20 nt, Human
aacgccccaaggacagccag

SEQ ID NO: 130237 - RNA, 20 nt, Human
aacgccccaaggacagccag

SEQ ID NO: 130238 - RNA, 23 nt, Human
aagaaacagaccaccccuccagg

SEQ ID NO: 130239 - RNA, 20 nt, Human
aagccccugggcaggagccu

SEQ ID NO: 130240 - RNA, 18 nt, Human
aagggccagcagcugcuc

SEQ ID NO: 130241 - RNA, 25 nt, Human
aaugugaucucgggguggggaggcu

SEQ ID NO: 130242 - RNA, 23 nt, Human
acagcagcaauggcggggccaaa

SEQ ID NO: 130243 - RNA, 21 nt, Human
accacgcccacgacaaacacu

SEQ ID NO: 130244 - RNA, 21 nt, Human
accacgcccacgacaaacacu

SEQ ID NO: 130245 - RNA, 20 nt, Human
accuggaauaugccagcagc

SEQ ID NO: 130246 - RNA, 28 nt, Human
acugaaggagugacucaggaaggaggag

SEQ ID NO: 130247 - RNA, 28 nt, Human
acugaaggagugacucaggaaggaggag

SEQ ID NO: 130248 - RNA, 19 nt, Human
acugaggcugccuuggcgg

SEQ ID NO: 130249 - RNA, 18 nt, Human
agaaacagaccaccccuc

SEQ ID NO: 130250 - RNA, 22 nt, Human
agaaagaaaaagguaggacuga

SEQ ID NO: 130251 - RNA, 19 nt, Human
agacuuggaggaacuggca

SEQ ID NO: 130252 - RNA, 19 nt, Human
agacuuggaggaacuggca

SEQ ID NO: 130253 - RNA, 24 nt, Human
agagggagaagacaggcgcaguca

SEQ ID NO: 130254 - RNA, 24 nt, Human
agagggagaagacaggcgcaguca

SEQ ID NO: 130255 - RNA, 22 nt, Human
agcacagccacgaauuucucca

SEQ ID NO: 130256 - RNA, 22 nt, Human
agcagcaccugcuccaccuggu

SEQ ID NO: 130257 - RNA, 21 nt, Human
agcagcugcuccauguccuuc

SEQ ID NO: 130258 - RNA, 19 nt, Human
agccuaauggcccuuggca

SEQ ID NO: 130259 - RNA, 19 nt, Human
agcuaacgccugugccugg

SEQ ID NO: 130260 - RNA, 19 nt, Human
agcuaacgccugugccugg

SEQ ID NO: 130261 - RNA, 18 nt, Human
agcuccuuucuucuucuc

SEQ ID NO: 130262 - RNA, 19 nt, Human
agcuccuuucuucuucucu

SEQ ID NO: 130263 - RNA, 22 nt, Human
agcuggucgcagggugcuggcc

SEQ ID NO: 130264 - RNA, 21 nt, Human
aggaacuggcacgaagccaag

SEQ ID NO: 130265 - RNA, 21 nt, Human
aggaacuggcacgaagccaag

SEQ ID NO: 130266 - RNA, 18 nt, Human
aggaaggaggaggggaag

SEQ ID NO: 130267 - RNA, 18 nt, Human
aggaaggaggaggggaag

SEQ ID NO: 130268 - RNA, 22 nt, Human
aggccagcagcugcugccggaa

SEQ ID NO: 130269 - RNA, 24 nt, Human
agggacaggcccgggccuccuucc

SEQ ID NO: 130270 - RNA, 18 nt, Human
agugguugagagggaggg

SEQ ID NO: 130271 - RNA, 18 nt, Human
agugguugagagggaggg

SEQ ID NO: 130272 - RNA, 20 nt, Human
aucugcuucagguacaucag

SEQ ID NO: 130273 - RNA, 23 nt, Human
augagaacacugcuccguaccgu

SEQ ID NO: 130274 - RNA, 23 nt, Human
augcaggauggaaagaaagauuc

SEQ ID NO: 130275 - RNA, 23 nt, Human
augcaggauggaaagaaagauuc

SEQ ID NO: 130276 - RNA, 21 nt, Human
caagccccugggcaggagccc

SEQ ID NO: 130277 - RNA, 22 nt, Human
caagccccugggcaggagcccu

SEQ ID NO: 130278 - RNA, 22 nt, Human
cacagaaccuaggcuuuucacg

SEQ ID NO: 130279 - RNA, 20 nt, Human
caccacacaccggccuaggu

SEQ ID NO: 130280 - RNA, 20 nt, Human
caccagagccuucccugggg

SEQ ID NO: 130281 - RNA, 18 nt, Human
caccaucaccacacaccg

SEQ ID NO: 130282 - RNA, 22 nt, Human
caccccggcacaggccagcagc

SEQ ID NO: 130283 - RNA, 20 nt, Human
caccgcacagguuacagaga

SEQ ID NO: 130284 - RNA, 22 nt, Human
caccucguccaucaucugaggc

SEQ ID NO: 130285 - RNA, 23 nt, Human
caccucugccagggccucauccc

SEQ ID NO: 130286 - RNA, 21 nt, Human
caccuucuucgccggcagaau

SEQ ID NO: 130287 - RNA, 21 nt, Human
cacguacugcagcagcuggga

SEQ ID NO: 130288 - RNA, 21 nt, Human
cagaagaucccagcugaccac

SEQ ID NO: 130289 - RNA, 21 nt, Human
cagaagaucccagcugaccac

SEQ ID NO: 130290 - RNA, 23 nt, Human
cagaccacgcccacgacaaacac

SEQ ID NO: 130291 - RNA, 20 nt, Human
cagagcugggagccgcugac

SEQ ID NO: 130292 - RNA, 20 nt, Human
cagcaccugcuccaccuggu

SEQ ID NO: 130293 - RNA, 20 nt, Human
cagcaccugcuccaccuggu

SEQ ID NO: 130294 - RNA, 22 nt, Human
cagcagcaauggcggggccaaa

SEQ ID NO: 130295 - RNA, 22 nt, Human
cagcagcugcuccauguccuuc

SEQ ID NO: 130296 - RNA, 20 nt, Human
cagcaggggcagcuguugca

SEQ ID NO: 130297 - RNA, 20 nt, Human
cagcaggggcagcuguugca

SEQ ID NO: 130298 - RNA, 27 nt, Human
cagccaguuugggcugcucccgggaug

SEQ ID NO: 130299 - RNA, 19 nt, Human
cagccgaacauccuugcca

SEQ ID NO: 130300 - RNA, 21 nt, Human
cagcugcugccggaagucaga

SEQ ID NO: 130301 - RNA, 23 nt, Human
cagcuuggccaggacagggggcc

SEQ ID NO: 130302 - RNA, 26 nt, Human
caggaaccacaccgcacaaccuucag

SEQ ID NO: 130303 - RNA, 23 nt, Human
cagguucuccaccagagccuucc

SEQ ID NO: 130304 - RNA, 26 nt, Human
cagugacuuuccuccugcccccguuu

SEQ ID NO: 130305 - RNA, 21 nt, Human
caguuugcgauuucaccaguc

SEQ ID NO: 130306 - RNA, 21 nt, Human
caguuugcgauuucaccaguc

SEQ ID NO: 130307 - RNA, 21 nt, Human
caucaggaagaggccgacuuc

SEQ ID NO: 130308 - RNA, 24 nt, Human
caugcaggauggaaagaaagauuc

SEQ ID NO: 130309 - RNA, 20 nt, Human
ccaaggacagccaggaccca

SEQ ID NO: 130310 - RNA, 20 nt, Human
ccaaggacagccaggaccca

SEQ ID NO: 130311 - RNA, 19 nt, Human
ccacaccgcacagguuaca

SEQ ID NO: 130312 - RNA, 22 nt, Human
ccacagagaggagcagggcccc

SEQ ID NO: 130313 - RNA, 22 nt, Human
ccacaggaacaaaggucuccgu

SEQ ID NO: 130314 - RNA, 22 nt, Human
ccacaggaacaaaggucuccgu

SEQ ID NO: 130315 - RNA, 19 nt, Human
ccaccaucaccacacaccg

SEQ ID NO: 130316 - RNA, 18 nt, Human
ccacgcccacgacaaaca

SEQ ID NO: 130317 - RNA, 18 nt, Human
ccacgcccacgacaaaca

SEQ ID NO: 130318 - RNA, 21 nt, Human
ccacugaguuagaacucgugc

SEQ ID NO: 130319 - RNA, 23 nt, Human
ccacugcccggcauuccuucacc

SEQ ID NO: 130320 - RNA, 28 nt, Human
ccacugcccggcauuccuucaccacuug

SEQ ID NO: 130321 - RNA, 20 nt, Human
ccagcagcugcuccaugucc

SEQ ID NO: 130322 - RNA, 19 nt, Human
cccaccaucaccacacacc

SEQ ID NO: 130323 - RNA, 23 nt, Human
cccaccaucaccacacaccggcc

SEQ ID NO: 130324 - RNA, 21 nt, Human
ccccaaggacagccaggaccc

SEQ ID NO: 130325 - RNA, 21 nt, Human
ccccaaggacagccaggaccc

SEQ ID NO: 130326 - RNA, 23 nt, Human
cccggcauuccuucaccacuugg

SEQ ID NO: 130327 - RNA, 24 nt, Human
cccguaauagggacaggcccgggc

SEQ ID NO: 130328 - RNA, 22 nt, Human
cccugaugguggcagaagaucc

SEQ ID NO: 130329 - RNA, 19 nt, Human
ccuccaaccacagagagga

SEQ ID NO: 130330 - RNA, 19 nt, Human
ccuccaggaaccacaccgc

SEQ ID NO: 130331 - RNA, 21 nt, Human
ccuccugcccccguuuguccc

SEQ ID NO: 130332 - RNA, 21 nt, Human
ccuccugcccccguuuguccc

SEQ ID NO: 130333 - RNA, 25 nt, Human
ccuccugcccccguuugucccugau

SEQ ID NO: 130334 - RNA, 19 nt, Human
ccucgucccgcugcuccuc

SEQ ID NO: 130335 - RNA, 19 nt, Human
ccucgucccgcugcuccuc

SEQ ID NO: 130336 - RNA, 23 nt, Human
ccugacucucgucugcaggggcu

SEQ ID NO: 130337 - RNA, 20 nt, Human
ccugcagcucugcagaccug

SEQ ID NO: 130338 - RNA, 26 nt, Human
ccugccuccuccucuuuggcuucucc

SEQ ID NO: 130339 - RNA, 20 nt, Human
ccuggguccuggcagcacuc

SEQ ID NO: 130340 - RNA, 20 nt, Human
ccuggguccuggcagcgcuc

SEQ ID NO: 130341 - RNA, 21 nt, Human
ccugugccuggguccuggcag

SEQ ID NO: 130342 - RNA, 21 nt, Human
ccugugccuggguccuggcag

SEQ ID NO: 130343 - RNA, 20 nt, Human
cggcacaggccagcagcugc

SEQ ID NO: 130344 - RNA, 21 nt, Human
cggcacaggccagcagcugcu

SEQ ID NO: 130345 - RNA, 21 nt, Human
cggcgccaggcaguggugugg

SEQ ID NO: 130346 - RNA, 21 nt, Human
cggcgccaggcaguggugugg

SEQ ID NO: 130347 - RNA, 22 nt, Human
cgucccgcugcuccucguccua

SEQ ID NO: 130348 - RNA, 22 nt, Human
cgucccgcugcuccucguccua

SEQ ID NO: 130349 - RNA, 24 nt, Human
cguccuaaggagcucugcugccac

SEQ ID NO: 130350 - RNA, 24 nt, Human
cguccuaaggagcucugcugccac

SEQ ID NO: 130351 - RNA, 20 nt, Human
cuauuccaggaggggagcug

SEQ ID NO: 130352 - RNA, 20 nt, Human
cuauuccaggaggggagcug

SEQ ID NO: 130353 - RNA, 18 nt, Human
cucaggaaggaggagggg

SEQ ID NO: 130354 - RNA, 18 nt, Human
cucaggaaggaggagggg

SEQ ID NO: 130355 - RNA, 21 nt, Human
cucaggaaggaggaggggaag

SEQ ID NO: 130356 - RNA, 21 nt, Human
cucaggaaggaggaggggaag

SEQ ID NO: 130357 - RNA, 20 nt, Human
cuccacacgggcucggaucc

SEQ ID NO: 130358 - RNA, 22 nt, Human
cuccacacucuccuccuggguu

SEQ ID NO: 130359 - RNA, 22 nt, Human
cuccacacucuccuccuggguu

SEQ ID NO: 130360 - RNA, 19 nt, Human
cuccacgcugugcaugccc

SEQ ID NO: 130361 - RNA, 24 nt, Human
cuccuggguuucaccuuuguaaca

SEQ ID NO: 130362 - RNA, 22 nt, Human
cucuauagucauguugagagcc

SEQ ID NO: 130363 - RNA, 20 nt, Human
cucuggacuccacacucucc

SEQ ID NO: 130364 - RNA, 20 nt, Human
cucuggacuccacacucucc

SEQ ID NO: 130365 - RNA, 24 nt, Human
cugaaacccagccaguuugggcug

SEQ ID NO: 130366 - RNA, 21 nt, Human
cugaggcugccuuggcggcuc

SEQ ID NO: 130367 - RNA, 22 nt, Human
cugaucaugcucuucucacagu

SEQ ID NO: 130368 - RNA, 19 nt, Human
cugcagaugacaaggggca

SEQ ID NO: 130369 - RNA, 19 nt, Human
cuucacucaucuuuccucc

SEQ ID NO: 130370 - RNA, 19 nt, Human
cuucuucaccucaugcaca

SEQ ID NO: 130371 - RNA, 22 nt, Human
cuuuccuccugcccccguuugu

SEQ ID NO: 130372 - RNA, 22 nt, Human
cuuucugcugaucaugcucuuc

SEQ ID NO: 130373 - RNA, 22 nt, Human
cuuucuucuucucugcuucucu

SEQ ID NO: 130374 - RNA, 23 nt, Human
gaaaacacaggaaaacuccacca

SEQ ID NO: 130375 - RNA, 22 nt, Human
gaaacagaccaccccuccagga

SEQ ID NO: 130376 - RNA, 20 nt, Human
gaagagaaagucguugaugg

SEQ ID NO: 130377 - RNA, 18 nt, Human
gaagaggccgacuucucc

SEQ ID NO: 130378 - RNA, 19 nt, Human
gaaggaggaggggaaggug

SEQ ID NO: 130379 - RNA, 19 nt, Human
gaaggaggaggggaaggug

SEQ ID NO: 130380 - RNA, 25 nt, Human
gacucuguguauugggauuuugcuu

SEQ ID NO: 130381 - RNA, 24 nt, Human
gagaagacaggcgcagucagcagg

SEQ ID NO: 130382 - RNA, 24 nt, Human
gagaagacaggcgcagucagcagg

SEQ ID NO: 130383 - RNA, 19 nt, Human
gagagggagggaggugcca

SEQ ID NO: 130384 - RNA, 19 nt, Human
gagagggagggaggugcca

SEQ ID NO: 130385 - RNA, 19 nt, Human
gagagggagggaggugcca

SEQ ID NO: 130386 - RNA, 19 nt, Human
gagggauauuuucccacag

SEQ ID NO: 130387 - RNA, 19 nt, Human
gagggauauuuucccacag

SEQ ID NO: 130388 - RNA, 23 nt, Human
gaucaugcucuucucacaguauc

SEQ ID NO: 130389 - RNA, 18 nt, Human
gcacuaugcuggcaaaau

SEQ ID NO: 130390 - RNA, 19 nt, Human
gcagaccacgcccacgaca

SEQ ID NO: 130391 - RNA, 19 nt, Human
gcagaccacgcccacgaca

SEQ ID NO: 130392 - RNA, 24 nt, Human
gcagaccacgcccacgacaaacac

SEQ ID NO: 130393 - RNA, 18 nt, Human
gccacaggccuggaugca

SEQ ID NO: 130394 - RNA, 20 nt, Human
gccacaguggaugccacagc

SEQ ID NO: 130395 - RNA, 20 nt, Human
gccacaguggaugccacagc

SEQ ID NO: 130396 - RNA, 21 nt, Human
gccagacggcccagcaggcca

SEQ ID NO: 130397 - RNA, 18 nt, Human
gccaggacagggggccgg

SEQ ID NO: 130398 - RNA, 20 nt, Human
gcccaucaggaagaggccga

SEQ ID NO: 130399 - RNA, 19 nt, Human
gccccugucaccuggccuc

SEQ ID NO: 130400 - RNA, 23 nt, Human
gcccgggccuccuucccaagggc

SEQ ID NO: 130401 - RNA, 19 nt, Human
gcccuguggccauggaucc

SEQ ID NO: 130402 - RNA, 20 nt, Human
gccggaagucagacaccggc

SEQ ID NO: 130403 - RNA, 24 nt, Human
gccugacucucgucugcaggggcu

SEQ ID NO: 130404 - RNA, 18 nt, Human
gcucgugguuguagaagg

SEQ ID NO: 130405 - RNA, 18 nt, Human
ggaacagacgcccaguuu

SEQ ID NO: 130406 - RNA, 18 nt, Human
ggaacagacgcccaguuu

SEQ ID NO: 130407 - RNA, 23 nt, Human
ggagaugccacaguggaugccac

SEQ ID NO: 130408 - RNA, 23 nt, Human
ggagaugccacaguggaugccac

SEQ ID NO: 130409 - RNA, 20 nt, Human
ggcaggacggagaugccaca

SEQ ID NO: 130410 - RNA, 22 nt, Human
ggcaggcugccugcuucuccug

SEQ ID NO: 130411 - RNA, 18 nt, Human
ggcauuccuucaccacuu

SEQ ID NO: 130412 - RNA, 25 nt, Human
ggcccgggccuccuucccaagggcc

SEQ ID NO: 130413 - RNA, 18 nt, Human
gggcagaggcagaugggc

SEQ ID NO: 130414 - RNA, 18 nt, Human
gggcagaggcagaugggc

SEQ ID NO: 130415 - RNA, 19 nt, Human
gggcaggagccuguggcca

SEQ ID NO: 130416 - RNA, 25 nt, Human
gggcaggauagggagcagggccuuc

SEQ ID NO: 130417 - RNA, 24 nt, Human
gggccaaagguagcuuugaccucc

SEQ ID NO: 130418 - RNA, 18 nt, Human
gggccuggcagagcuggg

SEQ ID NO: 130419 - RNA, 24 nt, Human
gggccuggcagagcugggagccgc

SEQ ID NO: 130420 - RNA, 20 nt, Human
gggcucuggggaggguuuga

SEQ ID NO: 130421 - RNA, 20 nt, Human
ggggaagaaacagaccaccc

SEQ ID NO: 130422 - RNA, 20 nt, Human
ggucagagggagaagacagg

SEQ ID NO: 130423 - RNA, 20 nt, Human
ggucagagggagaagacagg

SEQ ID NO: 130424 - RNA, 22 nt, Human
ggugugguugcccaucaggaag

SEQ ID NO: 130425 - RNA, 20 nt, Human
gucauguugagagccuaacg

SEQ ID NO: 130426 - RNA, 19 nt, Human
guccugguuggccguagug

SEQ ID NO: 130427 - RNA, 19 nt, Human
guuagaacucgugccgaau

SEQ ID NO: 130428 - RNA, 20 nt, Human
guucauucaggauuccccca

SEQ ID NO: 130429 - RNA, 23 nt, Human
uacaaauccaggcagggcugugg

SEQ ID NO: 130430 - RNA, 23 nt, Human
uacaaauccaggcagggcugugg

SEQ ID NO: 130431 - RNA, 19 nt, Human
uagcugugcaggaugcaaa

SEQ ID NO: 130432 - RNA, 19 nt, Human
uagcugugcaggaugcaaa

SEQ ID NO: 130433 - RNA, 20 nt, Human
ucaagugguugagagggagg

SEQ ID NO: 130434 - RNA, 20 nt, Human
ucaagugguugagagggagg

SEQ ID NO: 130435 - RNA, 24 nt, Human
ucaccaccugguccugcagccgga

SEQ ID NO: 130436 - RNA, 21 nt, Human
ucaccuggccucucuccuggc

SEQ ID NO: 130437 - RNA, 21 nt, Human
ucaccuucuucgccggcagaa

SEQ ID NO: 130438 - RNA, 21 nt, Human
ucaccuucuucgccggcagca

SEQ ID NO: 130439 - RNA, 22 nt, Human
ucacgucuucauuuacacaaag

SEQ ID NO: 130440 - RNA, 23 nt, Human
ucagaaagaaaaagguaggacug

SEQ ID NO: 130441 - RNA, 18 nt, Human
ucagugaauccaaagagc

SEQ ID NO: 130442 - RNA, 23 nt, Human
ucagugacuuuccuccugccccc

SEQ ID NO: 130443 - RNA, 23 nt, Human
ucagugacuuuccuccugccccc

SEQ ID NO: 130444 - RNA, 19 nt, Human
uccaaagagcuuucugcug

SEQ ID NO: 130445 - RNA, 24 nt, Human
uccacacucuccuccuggguuuca

SEQ ID NO: 130446 - RNA, 24 nt, Human
uccacacucuccuccuggguuuca

SEQ ID NO: 130447 - RNA, 18 nt, Human
uccaggaggggagcugcc

SEQ ID NO: 130448 - RNA, 18 nt, Human
uccaggaggggagcugcc

SEQ ID NO: 130449 - RNA, 23 nt, Human
uccaggaggggagcugcccugga

SEQ ID NO: 130450 - RNA, 23 nt, Human
uccaggaggggagcugcccugga

SEQ ID NO: 130451 - RNA, 18 nt, Human
ucccccauuuucuccuac

SEQ ID NO: 130452 - RNA, 21 nt, Human
ucccccauuuucuccuacggg

SEQ ID NO: 130453 - RNA, 21 nt, Human
ucccccauuuucuccuacggg

SEQ ID NO: 130454 - RNA, 24 nt, Human
ucccccauuuucuccuacgggaga

SEQ ID NO: 130455 - RNA, 24 nt, Human
ucccccauuuucuccuacgggaga

SEQ ID NO: 130456 - RNA, 21 nt, Human
ucccgcugcagaugacaaggg

SEQ ID NO: 130457 - RNA, 23 nt, Human
ucccugaugguggcagaagaucc

SEQ ID NO: 130458 - RNA, 24 nt, Human
uccgugaugacacggggucucuau

SEQ ID NO: 130459 - RNA, 24 nt, Human
uccgugaugacacggggucucuau

SEQ ID NO: 130460 - RNA, 22 nt, Human
uccuccugcccccguuuguccc

SEQ ID NO: 130461 - RNA, 22 nt, Human
uccuccugcccccguuuguccc

SEQ ID NO: 130462 - RNA, 24 nt, Human
uccugggcugcaggcucugcagga

SEQ ID NO: 130463 - RNA, 25 nt, Human
ucguccugggcugcaggcucugcag

SEQ ID NO: 130464 - RNA, 19 nt, Human
ucgugguuguagaaggggc

SEQ ID NO: 130465 - RNA, 28 nt, Human
ucuccagcgggcaggacaaaggaagggc

SEQ ID NO: 130466 - RNA, 24 nt, Human
ucuccuccucagcuccuuucuucu

SEQ ID NO: 130467 - RNA, 20 nt, Human
ucugcagaccugauguuggg

SEQ ID NO: 130468 - RNA, 20 nt, Human
ucugcccuuccucguccccc

SEQ ID NO: 130469 - RNA, 20 nt, Human
ucugcccuuccucguccccc

SEQ ID NO: 130470 - RNA, 19 nt, Human
ucugcuucagguacaucag

SEQ ID NO: 130471 - RNA, 23 nt, Human
ugacugaggcugccuuggcggcu

SEQ ID NO: 130472 - RNA, 19 nt, Human
ugagagggagggaggugcc

SEQ ID NO: 130473 - RNA, 21 nt, Human
ugagagggagggaggugccau

SEQ ID NO: 130474 - RNA, 18 nt, Human
ugaggcagcucucuuuuc

SEQ ID NO: 130475 - RNA, 19 nt, Human
ugaggcagcucucuuuucu

SEQ ID NO: 130476 - RNA, 25 nt, Human
ugcagccggaugcccgcggccugcc

SEQ ID NO: 130477 - RNA, 20 nt, Human
ugccacagccuccugcggag

SEQ ID NO: 130478 - RNA, 20 nt, Human
ugccacagccuccugcggag

SEQ ID NO: 130479 - RNA, 25 nt, Human
ugccacagccuccugcggagaccag

SEQ ID NO: 130480 - RNA, 25 nt, Human
ugccacagccuccugcggagaccag

SEQ ID NO: 130481 - RNA, 21 nt, Human
ugccacagcugccacagccuc

SEQ ID NO: 130482 - RNA, 21 nt, Human
ugccacagcugccacagccuc

SEQ ID NO: 130483 - RNA, 24 nt, Human
ugccacaguggaugccacagcugc

SEQ ID NO: 130484 - RNA, 24 nt, Human
ugccacaguggaugccacagcugc

SEQ ID NO: 130485 - RNA, 22 nt, Human
ugcccaccaucaccacacaccg

SEQ ID NO: 130486 - RNA, 22 nt, Human
ugcccuggaacgccccaaggac

SEQ ID NO: 130487 - RNA, 22 nt, Human
ugcccuggaacgccccaaggac

SEQ ID NO: 130488 - RNA, 19 nt, Human
ugcccuuccucgucccgcu

SEQ ID NO: 130489 - RNA, 19 nt, Human
ugcccuuccucgucccgcu

SEQ ID NO: 130490 - RNA, 22 nt, Human
ugccuggccgggggcucugggg

SEQ ID NO: 130491 - RNA, 25 nt, Human
ugccuggguccuggcagcacucugg

SEQ ID NO: 130492 - RNA, 25 nt, Human
ugccuggguccuggcagcgcucugg

SEQ ID NO: 130493 - RNA, 20 nt, Human
uggaauaucuucuuccuggc

SEQ ID NO: 130494 - RNA, 18 nt, Human
uggagaucccgcugcaga

SEQ ID NO: 130495 - RNA, 19 nt, Human
uggaugccacagcugccac

SEQ ID NO: 130496 - RNA, 19 nt, Human
uggaugccacagcugccac

SEQ ID NO: 130497 - RNA, 19 nt, Human
uggcagaagaucccagcug

SEQ ID NO: 130498 - RNA, 19 nt, Human
uggcagaagaucccagcug

SEQ ID NO: 130499 - RNA, 18 nt, Human
ugggauuuugcuuaaugu

SEQ ID NO: 130500 - RNA, 22 nt, Human
ugggcaggacggagaugccaca

SEQ ID NO: 130501 - RNA, 20 nt, Human
ugggcugcucccgggaugaa

SEQ ID NO: 130502 - RNA, 21 nt, Human
uggggaagggcaugcccacca

SEQ ID NO: 130503 - RNA, 22 nt, Human
uggggaggcucucagaaagaaa

SEQ ID NO: 130504 - RNA, 20 nt, Human
uggggucagagggagaagac

SEQ ID NO: 130505 - RNA, 20 nt, Human
uggggucagagggagaagac

SEQ ID NO: 130506 - RNA, 18 nt, Human
ugguuguagaaggggcag

SEQ ID NO: 130507 - RNA, 21 nt, Human
ugguuguagaaggggcaggcu

SEQ ID NO: 130508 - RNA, 23 nt, Human
ugugcaucaguggagaagcuggu

SEQ ID NO: 130509 - RNA, 20 nt, Human
ugugcgcucuuagguuccug

SEQ ID NO: 130510 - RNA, 18 nt, Human
uucacgucuucauuuaca

SEQ ID NO: 130511 - RNA, 20 nt, Human
uucagcuccgucccugucug

SEQ ID NO: 130512 - RNA, 19 nt, Human
uuccagcggcugguuggag

SEQ ID NO: 130513 - RNA, 26 nt, Human
uucccacaggaacaaaggucuccgug

SEQ ID NO: 130514 - RNA, 26 nt, Human
uucccacaggaacaaaggucuccgug

SEQ ID NO: 130515 - RNA, 20 nt, Human
uuccucgucccgcugcuccu

SEQ ID NO: 130516 - RNA, 21 nt, Human
uuccucgucccgcugcuccuc

SEQ ID NO: 130517 - RNA, 18 nt, Human
uuccuggaauaucuucuu

SEQ ID NO: 130518 - RNA, 19 nt, Human
uuucccacaggaacaaagg

SEQ ID NO: 130519 - RNA, 21 nt, Human
uuuccuccugcccccguuugu

SEQ ID NO: 130520 - RNA, 22 nt, Human
uuucuucuucucugcuucucuc

SEQ ID NO: 130521 - RNA, 24 nt, Human
uuuggcuucuccuccucagcuccu

SEQ ID NO: 130522 - RNA, 22 nt, Human
uuuucuggaacgugaauuccag

SEQ ID NO: 130523 - RNA, 22 nt, Human
aaaggccauuaucgaaccaacg

SEQ ID NO: 130524 - RNA, 19 nt, Human
aauaaacugcaaaacauug

SEQ ID NO: 130525 - RNA, 21 nt, Human
acuacagcccacacggugcgg

SEQ ID NO: 130526 - RNA, 21 nt, Human
agcuacagugucaacacaaaa

SEQ ID NO: 130527 - RNA, 20 nt, Human
aggacccccaccccucccgc

SEQ ID NO: 130528 - RNA, 22 nt, Human
caccccucccgcuacuacagcc

SEQ ID NO: 130529 - RNA, 24 nt, Human
caccccucccgcuacuacagccca

SEQ ID NO: 130530 - RNA, 26 nt, Human
cccacacggugcggccggaaccaaca

SEQ ID NO: 130531 - RNA, 21 nt, Human
ccccucccgcuacuacagccc

SEQ ID NO: 130532 - RNA, 23 nt, Human
ccccucccgcuacuacagcccac

SEQ ID NO: 130533 - RNA, 22 nt, Human
cucuggaggacccccaccccuc

SEQ ID NO: 130534 - RNA, 23 nt, Human
cuggaggacccccaccccucccg

SEQ ID NO: 130535 - RNA, 20 nt, Human
gaacgggcaguuauuaagga

SEQ ID NO: 130536 - RNA, 18 nt, Human
gacagccacuuaacucug

SEQ ID NO: 130537 - RNA, 20 nt, Human
ggaauauuuacuguaaagaa

SEQ ID NO: 130538 - RNA, 18 nt, Human
guaaagaaaaauuaaaaa

SEQ ID NO: 130539 - RNA, 24 nt, Human
uaauuuaugaaaucagaauggaau

SEQ ID NO: 130540 - RNA, 20 nt, Human
uaccauggucgauaaucaca

SEQ ID NO: 130541 - RNA, 23 nt, Human
uaccauggucgauaaucacauuu

SEQ ID NO: 130542 - RNA, 25 nt, Human
uaccauggucgauaaucacauuuua

SEQ ID NO: 130543 - RNA, 18 nt, Human
uaucgaaccaacgugaag

SEQ ID NO: 130544 - RNA, 21 nt, Human
uggaauauuuacuguaaagaa

SEQ ID NO: 130545 - RNA, 18 nt, Human
uuuuuuuuuuuuuuuccg

SEQ ID NO: 130546 - RNA, 21 nt, Human
uuuuuuuuuuuuuuuuuccgu

SEQ ID NO: 130547 - RNA, 19 nt, Human
aauguauagaaggaaaagg

SEQ ID NO: 130548 - RNA, 24 nt, Human
agcuuuauuccaaaaauaauuuua

SEQ ID NO: 130549 - RNA, 22 nt, Human
cagaggccuggagcccucggcu

SEQ ID NO: 130550 - RNA, 23 nt, Human
cagcuaccuugggaccucuagga

SEQ ID NO: 130551 - RNA, 22 nt, Human
cuggagccucagcuucgcaagu

SEQ ID NO: 130552 - RNA, 26 nt, Human
ggccuggagcccucggcuggagccuc

SEQ ID NO: 130553 - RNA, 22 nt, Human
guauagaaggaaaaggagcugg

SEQ ID NO: 130554 - RNA, 22 nt, Human
gucagcuaccuugggaccucua

SEQ ID NO: 130555 - RNA, 19 nt, Human
ucagaggccuggagcccuc

SEQ ID NO: 130556 - RNA, 21 nt, Human
ugcucccggcccugaagcguc

SEQ ID NO: 130557 - RNA, 27 nt, Human
uguauagaaggaaaaggagcugguuga

SEQ ID NO: 130558 - RNA, 21 nt, Human
uuaauagguauuaaauaaugu

SEQ ID NO: 130559 - RNA, 21 nt, Human
agggauggcacgagggaucgu

SEQ ID NO: 130560 - RNA, 24 nt, Human
caaguccaaacauaauuugaagug

SEQ ID NO: 130561 - RNA, 24 nt, Human
cacgagggaucgugggcuccgggg

SEQ ID NO: 130562 - RNA, 20 nt, Human
caucaguggcugguggagcu

SEQ ID NO: 130563 - RNA, 22 nt, Human
gugcugguggauucgagggaug

SEQ ID NO: 130564 - RNA, 22 nt, Human
uccaaacauaauuugaagugag

SEQ ID NO: 130565 - RNA, 24 nt, Human
ucucuguguauucaugccuaaucu

SEQ ID NO: 130566 - RNA, 21 nt, Human
ugggacgcucgugcuggugga

SEQ ID NO: 130567 - RNA, 21 nt, Human
uucgagggauggcacgaggga

SEQ ID NO: 130568 - RNA, 26 nt, Human
uucgagggauggcacgagggaucgug

SEQ ID NO: 130569 - RNA, 20 nt, Human
uuugaagugagguagguagu

SEQ ID NO: 130570 - RNA, 21 nt, Human
aaaagauaaacaacaaacaug

SEQ ID NO: 130571 - RNA, 18 nt, Human
aaagguaucauuuguuga

SEQ ID NO: 130572 - RNA, 19 nt, Human
aagcccuuuguaaagaacu

SEQ ID NO: 130573 - RNA, 21 nt, Human
aagcuaacagaucaaaucaaa

SEQ ID NO: 130574 - RNA, 22 nt, Human
aauuucuacaagaaugcaccuc

SEQ ID NO: 130575 - RNA, 18 nt, Human
acccugaaacuuucagcu

SEQ ID NO: 130576 - RNA, 23 nt, Human
aggcugagagacugcccagacac

SEQ ID NO: 130577 - RNA, 20 nt, Human
aggggaggcggggaucuugg

SEQ ID NO: 130578 - RNA, 19 nt, Human
auaccuggccuaaaucaaa

SEQ ID NO: 130579 - RNA, 23 nt, Human
auagaaaauggcacccugaaacu

SEQ ID NO: 130580 - RNA, 19 nt, Human
augcaccucuauagaagga

SEQ ID NO: 130581 - RNA, 24 nt, Human
caaaagacauucaaaagauaaaca

SEQ ID NO: 130582 - RNA, 19 nt, Human
cacagccucaaaagacauu

SEQ ID NO: 130583 - RNA, 25 nt, Human
cacagccucaaaagacauucaaaag

SEQ ID NO: 130584 - RNA, 27 nt, Human
cagcaaaaauguggacagcuuucacag

SEQ ID NO: 130585 - RNA, 20 nt, Human
caugcuacaaauuucuacaa

SEQ ID NO: 130586 - RNA, 22 nt, Human
ccaagagggaggagaggaaaga

SEQ ID NO: 130587 - RNA, 26 nt, Human
ccagacacacaaaaaauguggccuga

SEQ ID NO: 130588 - RNA, 21 nt, Human
ccccaagagggaggagaggaa

SEQ ID NO: 130589 - RNA, 21 nt, Human
ccucaaaagacauucaaaaga

SEQ ID NO: 130590 - RNA, 23 nt, Human
ccuuccugccuaaaaccuaagag

SEQ ID NO: 130591 - RNA, 19 nt, Human
cgcccggccuggaagugga

SEQ ID NO: 130592 - RNA, 21 nt, Human
gaggaggauggauauccaaag

SEQ ID NO: 130593 - RNA, 24 nt, Human
gccuaagcccuuuguaaagaacuc

SEQ ID NO: 130594 - RNA, 18 nt, Human
gcgggccugcgguggggg

SEQ ID NO: 130595 - RNA, 21 nt, Human
ggaagcuaacagaucaaauca

SEQ ID NO: 130596 - RNA, 24 nt, Human
ggugcuuaaggggaggcggggauc

SEQ ID NO: 130597 - RNA, 19 nt, Human
uaaacaacaaacauguaaa

SEQ ID NO: 130598 - RNA, 20 nt, Human
uaauacacagcaaaaaugug

SEQ ID NO: 130599 - RNA, 22 nt, Human
uacacagcaaaaauguggacag

SEQ ID NO: 130600 - RNA, 20 nt, Human
uaggaaaaucuaaagcaaug

SEQ ID NO: 130601 - RNA, 21 nt, Human
uaucagaaaugccacuauaca

SEQ ID NO: 130602 - RNA, 23 nt, Human
ucagaaaugccacuauacaccac

SEQ ID NO: 130603 - RNA, 22 nt, Human
ucauuuguugacaguuccugau

SEQ ID NO: 130604 - RNA, 21 nt, Human
ugacccacagcuauuuaauac

SEQ ID NO: 130605 - RNA, 18 nt, Human
ugaggaaagccccaagag

SEQ ID NO: 130606 - RNA, 21 nt, Human
ugccuguggccugcagagggc

SEQ ID NO: 130607 - RNA, 21 nt, Human
ugcuacaaauuucuacaagaa

SEQ ID NO: 130608 - RNA, 21 nt, Human
uggaagaaagggacgggaguc

SEQ ID NO: 130609 - RNA, 20 nt, Human
uguaaagaacuccacagcaa

SEQ ID NO: 130610 - RNA, 21 nt, Human
uguggacagcuuucacagccu

SEQ ID NO: 130611 - RNA, 21 nt, Human
uuuaaauauuccuuccugccu

SEQ ID NO: 130612 - RNA, 20 nt, Human
uuuguugacaguuccugaug

SEQ ID NO: 130613 - RNA, 21 nt, Human
aaauagccagagaacagaaac

SEQ ID NO: 130614 - RNA, 18 nt, Human
aacacugcaauacagaaa

SEQ ID NO: 130615 - RNA, 19 nt, Human
aacacugcaauacagaaaa

SEQ ID NO: 130616 - RNA, 20 nt, Human
acaagaagccuauaaacacu

SEQ ID NO: 130617 - RNA, 19 nt, Human
agccagagaacagaaacca

SEQ ID NO: 130618 - RNA, 18 nt, Human
agggugggagagguuuug

SEQ ID NO: 130619 - RNA, 21 nt, Human
caagaagccuauaaacacugc

SEQ ID NO: 130620 - RNA, 19 nt, Human
caauacagaaaaauuaagc

SEQ ID NO: 130621 - RNA, 22 nt, Human
cacacaagaagccuauaaacac

SEQ ID NO: 130622 - RNA, 19 nt, Human
ccuauaaacacugcaauac

SEQ ID NO: 130623 - RNA, 23 nt, Human
ccucagaaaccgccgcuguaccu

SEQ ID NO: 130624 - RNA, 26 nt, Human
cgccgcuguaccucagccgggugucc

SEQ ID NO: 130625 - RNA, 21 nt, Human
cugcaugaggucucucccgcu

SEQ ID NO: 130626 - RNA, 19 nt, Human
gaagagagggagacuuuuu

SEQ ID NO: 130627 - RNA, 18 nt, Human
gcaaaucugcaugagguc

SEQ ID NO: 130628 - RNA, 21 nt, Human
gccagagaacagaaaccaaug

SEQ ID NO: 130629 - RNA, 20 nt, Human
ggugguggagugaaacacaa

SEQ ID NO: 130630 - RNA, 22 nt, Human
uaacacacaagaagccuauaaa

SEQ ID NO: 130631 - RNA, 20 nt, Human
uaccucagcugcagcagcaa

SEQ ID NO: 130632 - RNA, 18 nt, Human
uagccagagaacagaaac

SEQ ID NO: 130633 - RNA, 21 nt, Human
uagccagagaacagaaaccaa

SEQ ID NO: 130634 - RNA, 28 nt, Human
ugcaauacagaaaaauuaagcugcugca

SEQ ID NO: 130635 - RNA, 31 nt, Human
uuuuuuuuuuuucugaccauuguuuuuaauu

SEQ ID NO: 130636 - RNA, 18 nt, Human
uuuuuuuuuuuuuuucug

SEQ ID NO: 130637 - RNA, 23 nt, Human
aaaauaacuguauauacaaaaca

SEQ ID NO: 130638 - RNA, 20 nt, Human
agaggggagugggcugaggg

SEQ ID NO: 130639 - RNA, 19 nt, Human
caaccuuaacagaggugac

SEQ ID NO: 130640 - RNA, 23 nt, Human
cacuguaaaaugauggaaaaagg

SEQ ID NO: 130641 - RNA, 19 nt, Human
caggaguggggaccuggga

SEQ ID NO: 130642 - RNA, 22 nt, Human
cagugcuccccgucguaccccc

SEQ ID NO: 130643 - RNA, 25 nt, Human
ccacccccgguacaggaguggggac

SEQ ID NO: 130644 - RNA, 22 nt, Human
ccccaccccacccccgguacag

SEQ ID NO: 130645 - RNA, 20 nt, Human
cccccgccuccgccuccucc

SEQ ID NO: 130646 - RNA, 19 nt, Human
cccccgguacaggaguggg

SEQ ID NO: 130647 - RNA, 21 nt, Human
ccccgccuccgccuccuccug

SEQ ID NO: 130648 - RNA, 18 nt, Human
ccccggccccugugugug

SEQ ID NO: 130649 - RNA, 22 nt, Human
ccggcugcggggaguuucuccc

SEQ ID NO: 130650 - RNA, 23 nt, Human
ccgucguacccccgccuccgccu

SEQ ID NO: 130651 - RNA, 22 nt, Human
cgcuggggcgggcgcccagccg

SEQ ID NO: 130652 - RNA, 23 nt, Human
cuccuccugccugccugcccgcu

SEQ ID NO: 130653 - RNA, 21 nt, Human
cuggcuccccaccccaccccc

SEQ ID NO: 130654 - RNA, 19 nt, Human
cugggagcuggcgaagagg

SEQ ID NO: 130655 - RNA, 21 nt, Human
cuguaaaaugauggaaaaagg

SEQ ID NO: 130656 - RNA, 21 nt, Human
cuuuuuuccccaaaaauuaca

SEQ ID NO: 130657 - RNA, 20 nt, Human
gaauaacaaaagugcuuuuc

SEQ ID NO: 130658 - RNA, 23 nt, Human
gaauaacaaaagugcuuuucuua

SEQ ID NO: 130659 - RNA, 26 nt, Human
gcccuggggcuguugggagaaguuuc

SEQ ID NO: 130660 - RNA, 20 nt, Human
gccuggcuccccaccccacc

SEQ ID NO: 130661 - RNA, 22 nt, Human
gcuguugggagaaguuucaggg

SEQ ID NO: 130662 - RNA, 18 nt, Human
ggaagauuggcccugggg

SEQ ID NO: 130663 - RNA, 24 nt, Human
ggaauaacaaaagugcuuuucuua

SEQ ID NO: 130664 - RNA, 22 nt, Human
ggagaaagaggagaugguagag

SEQ ID NO: 130665 - RNA, 23 nt, Human
ggcgaagaggggagugggcugag

SEQ ID NO: 130666 - RNA, 24 nt, Human
ggcuccccaccccacccccgguac

SEQ ID NO: 130667 - RNA, 26 nt, Human
gggaccugggagcuggcgaagagggg

SEQ ID NO: 130668 - RNA, 18 nt, Human
gggagugggcugagggaa

SEQ ID NO: 130669 - RNA, 19 nt, Human
ggggagugggcugagggaa

SEQ ID NO: 130670 - RNA, 21 nt, Human
gguggagaaagaggagauggu

SEQ ID NO: 130671 - RNA, 21 nt, Human
guagagguggaggcgccggug

SEQ ID NO: 130672 - RNA, 20 nt, Human
uaagaaaauagaaccugagg

SEQ ID NO: 130673 - RNA, 20 nt, Human
uaaguggccacauucuauuu

SEQ ID NO: 130674 - RNA, 22 nt, Human
uacaaaaauaaaccaaaaugaa

SEQ ID NO: 130675 - RNA, 23 nt, Human
uagagguggaggcgccgguggcg

SEQ ID NO: 130676 - RNA, 20 nt, Human
uagugaaauaaguggccaca

SEQ ID NO: 130677 - RNA, 18 nt, Human
ucaaaauacauuuguaca

SEQ ID NO: 130678 - RNA, 22 nt, Human
ucguacccccgccuccgccucc

SEQ ID NO: 130679 - RNA, 22 nt, Human
ugaaauaaguggccacauucua

SEQ ID NO: 130680 - RNA, 21 nt, Human
ugagaggaaacuccccagacc

SEQ ID NO: 130681 - RNA, 20 nt, Human
ugccugcccgcuggggcggg

SEQ ID NO: 130682 - RNA, 23 nt, Human
uggagaaagaggagaugguagag

SEQ ID NO: 130683 - RNA, 20 nt, Human
uggcuccccaccccaccccc

SEQ ID NO: 130684 - RNA, 19 nt, Human
uggggaccugggagcuggc

SEQ ID NO: 130685 - RNA, 25 nt, Human
uggggcgggcgcccagccgucuguc

SEQ ID NO: 130686 - RNA, 26 nt, Human
uuaacagaggugacaauuuuaaaggu

SEQ ID NO: 130687 - RNA, 23 nt, Human
uuaauguaugugcuuuuuucccu

SEQ ID NO: 130688 - RNA, 26 nt, Human
uucaaauagccaacaaugcaugucag

SEQ ID NO: 130689 - RNA, 24 nt, Human
uucaaccuuaacagaggugacaau

SEQ ID NO: 130690 - RNA, 28 nt, Human
uugauggaauaacaaaagugcuuuucuu

SEQ ID NO: 130691 - RNA, 22 nt, Human
uuuucacauuacaaaaauaaac

SEQ ID NO: 130692 - RNA, 23 nt, Human
aaaaaaaacacacaacuaaacaa

SEQ ID NO: 130693 - RNA, 23 nt, Human
aaacauuaaaagcucacacuacc

SEQ ID NO: 130694 - RNA, 23 nt, Human
aaauaccuaaggcugccaugacu

SEQ ID NO: 130695 - RNA, 24 nt, Human
aaauagcaccauaacaaaugaccu

SEQ ID NO: 130696 - RNA, 21 nt, Human
aacagcucaggcugggcacgg

SEQ ID NO: 130697 - RNA, 22 nt, Human
aaccaccuucugaacagggcug

SEQ ID NO: 130698 - RNA, 18 nt, Human
aagcaggaaacgguggcu

SEQ ID NO: 130699 - RNA, 20 nt, Human
aagcaggaaacgguggcuug

SEQ ID NO: 130700 - RNA, 20 nt, Human
aaggcacaauacacuugaaa

SEQ ID NO: 130701 - RNA, 20 nt, Human
aaggcacaguacauuaacaa

SEQ ID NO: 130702 - RNA, 23 nt, Human
aaucuagucccauccccuuccua

SEQ ID NO: 130703 - RNA, 29 nt, Human
acaacaaagauaaccacauguuugaggaa

SEQ ID NO: 130704 - RNA, 19 nt, Human
acacgcacacaagacauau

SEQ ID NO: 130705 - RNA, 24 nt, Human
accaaaaaacaucaacacuagcau

SEQ ID NO: 130706 - RNA, 21 nt, Human
accacauguuugaggauugca

SEQ ID NO: 130707 - RNA, 21 nt, Human
acgcacacaagacauauauau

SEQ ID NO: 130708 - RNA, 28 nt, Human
acugaaaaaaaaaaaaacacacaacuaa

SEQ ID NO: 130709 - RNA, 18 nt, Human
agaagaaaacagcucagg

SEQ ID NO: 130710 - RNA, 21 nt, Human
agacaaguguaucaaaaccuu

SEQ ID NO: 130711 - RNA, 19 nt, Human
agaggaggagagaacagag

SEQ ID NO: 130712 - RNA, 21 nt, Human
agagggaaggggaggagaggg

SEQ ID NO: 130713 - RNA, 23 nt, Human
agagggaaggggaggagagggag

SEQ ID NO: 130714 - RNA, 23 nt, Human
agagggagggaaaagaggggagc

SEQ ID NO: 130715 - RNA, 23 nt, Human
agaugaauucuccuaaaaaccua

SEQ ID NO: 130716 - RNA, 22 nt, Human
agcacagaauucaaaguggcag

SEQ ID NO: 130717 - RNA, 19 nt, Human
agcaccauaacaaaugacc

SEQ ID NO: 130718 - RNA, 18 nt, Human
aggccucuucgccccccu

SEQ ID NO: 130719 - RNA, 23 nt, Human
aucacgcuccaaguucugcauga

SEQ ID NO: 130720 - RNA, 22 nt, Human
augauuuuugaaaccuuauuaa

SEQ ID NO: 130721 - RNA, 21 nt, Human
augcugucccaguucucucga

SEQ ID NO: 130722 - RNA, 24 nt, Human
auguaauaagagggccagaagaaa

SEQ ID NO: 130723 - RNA, 23 nt, Human
auuaaaagcucacacuaccccga

SEQ ID NO: 130724 - RNA, 23 nt, Human
auucuccuaaaaaccuauuuuca

SEQ ID NO: 130725 - RNA, 19 nt, Human
auugacaccuugugcaguu

SEQ ID NO: 130726 - RNA, 24 nt, Human
caacaaucuccaagagacaaagua

SEQ ID NO: 130727 - RNA, 22 nt, Human
caacuaaacaaaauccacacaa

SEQ ID NO: 130728 - RNA, 23 nt, Human
cacaaaauuagcacagaauucaa

SEQ ID NO: 130729 - RNA, 22 nt, Human
cacaacuaaacaaaauccacac

SEQ ID NO: 130730 - RNA, 22 nt, Human
cacacaacuaaacaaaauccac

SEQ ID NO: 130731 - RNA, 20 nt, Human
caccauaacaaaugaccuca

SEQ ID NO: 130732 - RNA, 23 nt, Human
caccgcauucuggccacaaaauu

SEQ ID NO: 130733 - RNA, 18 nt, Human
cagaauaugcacagcaca

SEQ ID NO: 130734 - RNA, 22 nt, Human
cagagggaaggggaggagaggg

SEQ ID NO: 130735 - RNA, 20 nt, Human
cagaugagcaugauccuucu

SEQ ID NO: 130736 - RNA, 22 nt, Human
cagcaaaaaguaucuagaaauc

SEQ ID NO: 130737 - RNA, 22 nt, Human
cagcacguacaacgugugcccu

SEQ ID NO: 130738 - RNA, 19 nt, Human
cagcaugcgguucucaucu

SEQ ID NO: 130739 - RNA, 19 nt, Human
cagcucaggcugggcacgg

SEQ ID NO: 130740 - RNA, 19 nt, Human
caguucacacacuucuggg

SEQ ID NO: 130741 - RNA, 18 nt, Human
cauaaacagacuauaaau

SEQ ID NO: 130742 - RNA, 25 nt, Human
cauaacaaaugaccucaauacuguc

SEQ ID NO: 130743 - RNA, 21 nt, Human
cauguaggcucacugaaaucu

SEQ ID NO: 130744 - RNA, 25 nt, Human
ccaagguuugauuuuagcccaaguu

SEQ ID NO: 130745 - RNA, 20 nt, Human
ccaaucugcaaguaucaaaa

SEQ ID NO: 130746 - RNA, 19 nt, Human
ccacacaacaaacaucuga

SEQ ID NO: 130747 - RNA, 21 nt, Human
ccaccgcgaaggcccucucac

SEQ ID NO: 130748 - RNA, 19 nt, Human
ccauaacaaaugaccucaa

SEQ ID NO: 130749 - RNA, 21 nt, Human
cccaaucugcaaguaucaaaa

SEQ ID NO: 130750 - RNA, 18 nt, Human
cccccaaucugcaaguau

SEQ ID NO: 130751 - RNA, 26 nt, Human
cccugaagaguaccgagaacucggag

SEQ ID NO: 130752 - RNA, 20 nt, Human
cccuguaauaguaugcccac

SEQ ID NO: 130753 - RNA, 21 nt, Human
ccgcuaaaacccuagucucag

SEQ ID NO: 130754 - RNA, 22 nt, Human
ccucucacgggagaacugcggc

SEQ ID NO: 130755 - RNA, 19 nt, Human
ccugugugccaagguuuga

SEQ ID NO: 130756 - RNA, 19 nt, Human
ccuuacgcauucgcucccc

SEQ ID NO: 130757 - RNA, 22 nt, Human
cgaaggcccucucacgggagaa

SEQ ID NO: 130758 - RNA, 23 nt, Human
cgccaauuuuguuuuuacuaaca

SEQ ID NO: 130759 - RNA, 18 nt, Human
cgccccccuuuccaaccu

SEQ ID NO: 130760 - RNA, 22 nt, Human
cgccugaaaauguuaaccuagg

SEQ ID NO: 130761 - RNA, 21 nt, Human
cucacugaaaucuccauucca

SEQ ID NO: 130762 - RNA, 24 nt, Human
cucauaauuaaugaucugccuaaa

SEQ ID NO: 130763 - RNA, 22 nt, Human
cucauguaauaagagggccaga

SEQ ID NO: 130764 - RNA, 19 nt, Human
cucggaguucucgagaucu

SEQ ID NO: 130765 - RNA, 22 nt, Human
cucuucuuccucucucaguucc

SEQ ID NO: 130766 - RNA, 20 nt, Human
cuggagcgcaccgcgcggcc

SEQ ID NO: 130767 - RNA, 22 nt, Human
cuucacucuucuuccucucuca

SEQ ID NO: 130768 - RNA, 19 nt, Human
cuucccaacuaucauuccc

SEQ ID NO: 130769 - RNA, 20 nt, Human
cuucuuccucucucaguucc

SEQ ID NO: 130770 - RNA, 19 nt, Human
gaagaggaggagagaacag

SEQ ID NO: 130771 - RNA, 19 nt, Human
gaaggggaggagagggagg

SEQ ID NO: 130772 - RNA, 25 nt, Human
gacacgcacacaagacauauauaua

SEQ ID NO: 130773 - RNA, 21 nt, Human
gaggagagggagggaaaagag

SEQ ID NO: 130774 - RNA, 18 nt, Human
gaggauugcaaugugcca

SEQ ID NO: 130775 - RNA, 20 nt, Human
gagggaaggggaggagaggg

SEQ ID NO: 130776 - RNA, 24 nt, Human
gaggggaagaggaggagagaacag

SEQ ID NO: 130777 - RNA, 18 nt, Human
gaggggaggggaagagga

SEQ ID NO: 130778 - RNA, 24 nt, Human
gcagauucccgaaacugagagggc

SEQ ID NO: 130779 - RNA, 18 nt, Human
gcagcaaaaaguaucuag

SEQ ID NO: 130780 - RNA, 26 nt, Human
gccucuucgccccccuuuccaaccuu

SEQ ID NO: 130781 - RNA, 23 nt, Human
gcgaguucuugaaacuacacaag

SEQ ID NO: 130782 - RNA, 26 nt, Human
gcuaaaacccuagucucagccucgga

SEQ ID NO: 130783 - RNA, 18 nt, Human
ggagagggagggaaaaga

SEQ ID NO: 130784 - RNA, 21 nt, Human
ggagagggagggaaaagaggg

SEQ ID NO: 130785 - RNA, 21 nt, Human
ggagcguuuugaucaccgcau

SEQ ID NO: 130786 - RNA, 24 nt, Human
ggaggagagggagggaaaagaggg

SEQ ID NO: 130787 - RNA, 19 nt, Human
ggaggggaggggaagagga

SEQ ID NO: 130788 - RNA, 21 nt, Human
ggaggggaggggaagaggagg

SEQ ID NO: 130789 - RNA, 21 nt, Human
ggauggggguaggcgggaggg

SEQ ID NO: 130790 - RNA, 20 nt, Human
ggcacuugcuccacagauga

SEQ ID NO: 130791 - RNA, 19 nt, Human
gggaaggggaggagaggga

SEQ ID NO: 130792 - RNA, 23 nt, Human
gggauggggguaggcgggagggg

SEQ ID NO: 130793 - RNA, 19 nt, Human
ggggaggggaagaggagga

SEQ ID NO: 130794 - RNA, 21 nt, Human
ggggaggggaggggaagagga

SEQ ID NO: 130795 - RNA, 22 nt, Human
gggggaggggaggggaagagga

SEQ ID NO: 130796 - RNA, 22 nt, Human
guuauguacauauuuccaaccu

SEQ ID NO: 130797 - RNA, 22 nt, Human
guuuuucguuuuuuuuguuuuu

SEQ ID NO: 130798 - RNA, 21 nt, Human
uaaaaaaaaaauuucagugga

SEQ ID NO: 130799 - RNA, 22 nt, Human
uaaaaaguuaugggcaaaaugu

SEQ ID NO: 130800 - RNA, 21 nt, Human
uaaaacccuagucucagccuc

SEQ ID NO: 130801 - RNA, 23 nt, Human
uaaaauaaagccugcugcauuua

SEQ ID NO: 130802 - RNA, 19 nt, Human
uaaaauucucugaaugugc

SEQ ID NO: 130803 - RNA, 22 nt, Human
uaaacaaaauccacacaacaaa

SEQ ID NO: 130804 - RNA, 19 nt, Human
uaaaugcaguuugggaugg

SEQ ID NO: 130805 - RNA, 21 nt, Human
uaacaaacaaaugauccucag

SEQ ID NO: 130806 - RNA, 23 nt, Human
uaaccuaggccucuucgcccccc

SEQ ID NO: 130807 - RNA, 20 nt, Human
uaagacaaguguaucaaaac

SEQ ID NO: 130808 - RNA, 19 nt, Human
uaagacgccugaaaauguu

SEQ ID NO: 130809 - RNA, 20 nt, Human
uaagcgaguguuuguuccac

SEQ ID NO: 130810 - RNA, 21 nt, Human
uacaauaagcaauuacuaaag

SEQ ID NO: 130811 - RNA, 23 nt, Human
uacacuucccgugcucuccgcua

SEQ ID NO: 130812 - RNA, 25 nt, Human
uagcagcaaaaaguaucuagaaauc

SEQ ID NO: 130813 - RNA, 19 nt, Human
uaggccucuucgccccccu

SEQ ID NO: 130814 - RNA, 20 nt, Human
uauauaauuucacgcauacg

SEQ ID NO: 130815 - RNA, 25 nt, Human
uauggcauuucaugggggcacuugc

SEQ ID NO: 130816 - RNA, 27 nt, Human
uauggcauuucaugggggcacuugcuc

SEQ ID NO: 130817 - RNA, 21 nt, Human
uauggcuacacugccaacgcc

SEQ ID NO: 130818 - RNA, 25 nt, Human
uauguacauauuuccaaccugugug

SEQ ID NO: 130819 - RNA, 18 nt, Human
ucacagaccaguucacac

SEQ ID NO: 130820 - RNA, 23 nt, Human
ucacugaaaucuccauuccacca

SEQ ID NO: 130821 - RNA, 20 nt, Human
ucagcaugcgguucucaucu

SEQ ID NO: 130822 - RNA, 26 nt, Human
ucaggcugggcacgggugucaccaug

SEQ ID NO: 130823 - RNA, 21 nt, Human
ucaguucccgggcuuggagau

SEQ ID NO: 130824 - RNA, 24 nt, Human
ucaguucccgggcuuggagauguc

SEQ ID NO: 130825 - RNA, 18 nt, Human
ucauacccucugaccaaa

SEQ ID NO: 130826 - RNA, 20 nt, Human
ucaugggggcacuugcucca

SEQ ID NO: 130827 - RNA, 24 nt, Human
uccacacaacaaacaucugagaaa

SEQ ID NO: 130828 - RNA, 24 nt, Human
uccacacaacaaacaucugagaau

SEQ ID NO: 130829 - RNA, 18 nt, Human
ucccauccccuuccuaga

SEQ ID NO: 130830 - RNA, 20 nt, Human
ucccuguaauaguaugccca

SEQ ID NO: 130831 - RNA, 21 nt, Human
ucccuuaaaaaaaaaauuuca

SEQ ID NO: 130832 - RNA, 21 nt, Human
uccgcuaaaacccuagucuca

SEQ ID NO: 130833 - RNA, 19 nt, Human
ucgccccccuuuccaaccu

SEQ ID NO: 130834 - RNA, 19 nt, Human
ucgcuccccuuuccaacuc

SEQ ID NO: 130835 - RNA, 20 nt, Human
ucuaauauacccgcuggaaa

SEQ ID NO: 130836 - RNA, 19 nt, Human
ucucacaccgcaauucccu

SEQ ID NO: 130837 - RNA, 22 nt, Human
ucucacgggagaacugcggcuc

SEQ ID NO: 130838 - RNA, 21 nt, Human
ucucccgcuuuccaccggcua

SEQ ID NO: 130839 - RNA, 23 nt, Human
ucugaccaaaaaacaucaacacu

SEQ ID NO: 130840 - RNA, 19 nt, Human
ucuucccaacuaucauucc

SEQ ID NO: 130841 - RNA, 22 nt, Human
ugaaaaaaaaaaaaacacacaa

SEQ ID NO: 130842 - RNA, 18 nt, Human
ugaaaccuuauuaacuga

SEQ ID NO: 130843 - RNA, 21 nt, Human
ugaaauagcaccauaacaaau

SEQ ID NO: 130844 - RNA, 26 nt, Human
ugaaauagcaccauaacaaaugaccu

SEQ ID NO: 130845 - RNA, 28 nt, Human
ugaccaaaaaacaucaacacuagcaugc

SEQ ID NO: 130846 - RNA, 18 nt, Human
ugcaaauaguuuucuucc

SEQ ID NO: 130847 - RNA, 18 nt, Human
ugcaaauaguuuucuucc

SEQ ID NO: 130848 - RNA, 18 nt, Human
ugcaugcacuuucuucac

SEQ ID NO: 130849 - RNA, 23 nt, Human
ugccaugacuacaugcuggacuc

SEQ ID NO: 130850 - RNA, 21 nt, Human
ugcugucccaguucucucgag

SEQ ID NO: 130851 - RNA, 20 nt, Human
ugcuucaagacauuuguugu

SEQ ID NO: 130852 - RNA, 19 nt, Human
uggagcgcaccgcgcggcc

SEQ ID NO: 130853 - RNA, 20 nt, Human
uggcagaggcauuuuagugg

SEQ ID NO: 130854 - RNA, 18 nt, Human
uggcuacacugccaacgc

SEQ ID NO: 130855 - RNA, 18 nt, Human
ugggagcuaggcagauuc

SEQ ID NO: 130856 - RNA, 20 nt, Human
uguaugcauguauucauaca

SEQ ID NO: 130857 - RNA, 18 nt, Human
ugucaaaauguucaauaa

SEQ ID NO: 130858 - RNA, 20 nt, Human
ugugccagacauucacugaa

SEQ ID NO: 130859 - RNA, 23 nt, Human
ugugcccucccucucacaccgca

SEQ ID NO: 130860 - RNA, 24 nt, Human
uguuccaccgcgaaggcccucuca

SEQ ID NO: 130861 - RNA, 22 nt, Human
uuaagacaaguguaucaaaacc

SEQ ID NO: 130862 - RNA, 23 nt, Human
uuaauccaaacuacagcaaugaa

SEQ ID NO: 130863 - RNA, 22 nt, Human
uuacgcauucgcuccccuuucc

SEQ ID NO: 130864 - RNA, 23 nt, Human
uucauacaucaccucaucaugac

SEQ ID NO: 130865 - RNA, 21 nt, Human
uucauacccucugaccaaaaa

SEQ ID NO: 130866 - RNA, 22 nt, Human
uucccgggcuuggagauguggu

SEQ ID NO: 130867 - RNA, 20 nt, Human
uucucauguaauaagagggc

SEQ ID NO: 130868 - RNA, 19 nt, Human
uuuaauuucaagucgccaa

SEQ ID NO: 130869 - RNA, 20 nt, Human
uuuagaaucuagucccaucc

SEQ ID NO: 130870 - RNA, 19 nt, Human
uuuguacugucuuuugguc

SEQ ID NO: 130871 - RNA, 25 nt, Human
uuuguuuuuacuaacaucagaaagu

SEQ ID NO: 130872 - RNA, 21 nt, Human
uuuuucguuuuuuuuguuuuu

SEQ ID NO: 130873 - RNA, 20 nt, Human
uuuuuuuuuugaggccaagg

SEQ ID NO: 130874 - RNA, 20 nt, Human
aaaaagacagccacagccaa

SEQ ID NO: 130875 - RNA, 21 nt, Human
aaaaagacagccacagccaag

SEQ ID NO: 130876 - RNA, 24 nt, Human
aagacagccacagccaagucacgc

SEQ ID NO: 130877 - RNA, 24 nt, Human
accaaguguccugggccaguuuua

SEQ ID NO: 130878 - RNA, 22 nt, Human
agaacuccaccuccucugccag

SEQ ID NO: 130879 - RNA, 22 nt, Human
caaggauuaaaaaagacagcca

SEQ ID NO: 130880 - RNA, 21 nt, Human
cacaaggauuaaaaaagacag

SEQ ID NO: 130881 - RNA, 20 nt, Human
caccucggauacucugcagc

SEQ ID NO: 130882 - RNA, 19 nt, Human
caugccgugcuccugcaug

SEQ ID NO: 130883 - RNA, 26 nt, Human
cccaauaccugcugccauccucucug

SEQ ID NO: 130884 - RNA, 18 nt, Human
ccucagggcucccgccag

SEQ ID NO: 130885 - RNA, 22 nt, Human
cucccgcugccccggcagcacc

SEQ ID NO: 130886 - RNA, 22 nt, Human
cuccugcauggaagaacuccac

SEQ ID NO: 130887 - RNA, 19 nt, Human
cucucaccaagcgcgacuc

SEQ ID NO: 130888 - RNA, 18 nt, Human
cuugggacccuucugucc

SEQ ID NO: 130889 - RNA, 22 nt, Human
cuugggacccuucugucccgga

SEQ ID NO: 130890 - RNA, 20 nt, Human
gaggacccaauaccugcugc

SEQ ID NO: 130891 - RNA, 22 nt, Human
gcauggaagaacuccaccuccu

SEQ ID NO: 130892 - RNA, 19 nt, Human
ggggcgccggcgcugccac

SEQ ID NO: 130893 - RNA, 26 nt, Human
uaaaaaagacagccacagccaaguca

SEQ ID NO: 130894 - RNA, 22 nt, Human
ucccuuuaggucuuuuuugcug

SEQ ID NO: 130895 - RNA, 18 nt, Human
uccugcauggaagaacuc

SEQ ID NO: 130896 - RNA, 18 nt, Human
uggggcgccggcgcugcc

SEQ ID NO: 130897 - RNA, 18 nt, Human
ugucccggauucuggggc

SEQ ID NO: 130898 - RNA, 26 nt, Human
uguccugggccaguuuuagaugcgau

SEQ ID NO: 130899 - RNA, 19 nt, Human
uuacacaaggauuaaaaaa

SEQ ID NO: 130900 - RNA, 18 nt, Human
uuuuuuuuuuuuuuuuug

SEQ ID NO: 130901 - RNA, 24 nt, Human
uuuuuuuuuuuuuuuuuuuguuuu

SEQ ID NO: 130902 - RNA, 19 nt, Human
caaaaccacagacuugaag

SEQ ID NO: 130903 - RNA, 26 nt, Human
cauuuagaaugcuuuaauauucccag

SEQ ID NO: 130904 - RNA, 26 nt, Human
cauuuagaaugcuuuaauauucccag

SEQ ID NO: 130905 - RNA, 22 nt, Human
cuucucugcaucaaaaccacag

SEQ ID NO: 130906 - RNA, 23 nt, Human
cuucuguuaaaaacucaaaaauc

SEQ ID NO: 130907 - RNA, 22 nt, Human
ggagcuaugagaauguuaaguu

SEQ ID NO: 130908 - RNA, 21 nt, Human
uagucaguaaggauuuuuuuu

SEQ ID NO: 130909 - RNA, 23 nt, Human
ugagaauacaaggacaggagcua

SEQ ID NO: 130910 - RNA, 19 nt, Human
ugcuuuaauauucccaguu

SEQ ID NO: 130911 - RNA, 19 nt, Human
ugcuuuaauauucccaguu

SEQ ID NO: 130912 - RNA, 19 nt, Human
uuuugacauuuagaaugcu

SEQ ID NO: 130913 - RNA, 19 nt, Human
uuuugacauuuagaaugcu

SEQ ID NO: 130914 - RNA, 18 nt, Human
uuuuuuuuuuuuuuuuug

SEQ ID NO: 130915 - RNA, 27 nt, Human
uuuuuuuuuuuuuuuuuuuuuuugggg

SEQ ID NO: 130916 - RNA, 24 nt, Human
aaauggccucgaugacggcgaagc

SEQ ID NO: 130917 - RNA, 21 nt, Human
aagagcaauuaugaaaaacag

SEQ ID NO: 130918 - RNA, 19 nt, Human
agagaccgguagaaaugaa

SEQ ID NO: 130919 - RNA, 18 nt, Human
agcugcacuacuagagac

SEQ ID NO: 130920 - RNA, 23 nt, Human
agcugcacuacuagagaccggua

SEQ ID NO: 130921 - RNA, 23 nt, Human
aggaauguagagaaauauccaac

SEQ ID NO: 130922 - RNA, 21 nt, Human
augacaccagccgaagcugca

SEQ ID NO: 130923 - RNA, 20 nt, Human
caaaaaaaaccuaaaaauug

SEQ ID NO: 130924 - RNA, 22 nt, Human
ggcggcagcggaggaaggacac

SEQ ID NO: 130925 - RNA, 18 nt, Human
gggcggcagcggaggaag

SEQ ID NO: 130926 - RNA, 22 nt, Human
uaaagagcaauuaugaaaaaca

SEQ ID NO: 130927 - RNA, 19 nt, Human
uaaauagcgaaaaagugca

SEQ ID NO: 130928 - RNA, 22 nt, Human
uaacacacaauauaaagagcaa

SEQ ID NO: 130929 - RNA, 22 nt, Human
uaguacaaaaaaaaccuaaaaa

SEQ ID NO: 130930 - RNA, 21 nt, Human
ucgaugacggcgaagccuugc

SEQ ID NO: 130931 - RNA, 22 nt, Human
ugacaccagccgaagcugcacu

SEQ ID NO: 130932 - RNA, 19 nt, Human
ugcaccauaauuacugcug

SEQ ID NO: 130933 - RNA, 21 nt, Human
ugccuucauuauuguauuuca

SEQ ID NO: 130934 - RNA, 24 nt, Human
ugcgacaagucgcuggaaauggcc

SEQ ID NO: 130935 - RNA, 21 nt, Human
ugcgggggcggcagcggagga

SEQ ID NO: 130936 - RNA, 22 nt, Human
uguagagaaauauccaacuuaa

SEQ ID NO: 130937 - RNA, 22 nt, Human
aaaaaacggaugaggaaucagg

SEQ ID NO: 130938 - RNA, 23 nt, Human
aaaaagguauauuccuucuuuuc

SEQ ID NO: 130939 - RNA, 25 nt, Human
aaaagaaaaaaaaaaugguguuuaa

SEQ ID NO: 130940 - RNA, 24 nt, Human
aaaagaugaaaaacccacaaagag

SEQ ID NO: 130941 - RNA, 23 nt, Human
aaagaugaaaaacccacaaagag

SEQ ID NO: 130942 - RNA, 26 nt, Human
aaauaaaagaugaaaaacccacaaag

SEQ ID NO: 130943 - RNA, 22 nt, Human
aaauacauguauuuacagugcg

SEQ ID NO: 130944 - RNA, 22 nt, Human
aacacauuuacacacuacagga

SEQ ID NO: 130945 - RNA, 19 nt, Human
aacuucuagcccugggcuc

SEQ ID NO: 130946 - RNA, 21 nt, Human
aagaaaaagaaaaaaaaagga

SEQ ID NO: 130947 - RNA, 20 nt, Human
aagaugaaaaacccacaaag

SEQ ID NO: 130948 - RNA, 24 nt, Human
aagaugaaaaacccacaaagagaa

SEQ ID NO: 130949 - RNA, 19 nt, Human
aagcuccagaacugcuaac

SEQ ID NO: 130950 - RNA, 19 nt, Human
aagcucuucaggcuuaaaa

SEQ ID NO: 130951 - RNA, 18 nt, Human
acaaugcaagagaauggc

SEQ ID NO: 130952 - RNA, 21 nt, Human
acacgcuuugccacagaggaa

SEQ ID NO: 130953 - RNA, 18 nt, Human
acagaaaauaugaggcuu

SEQ ID NO: 130954 - RNA, 23 nt, Human
acaggguaccauagaaaucugcu

SEQ ID NO: 130955 - RNA, 25 nt, Human
agaaaaagaaaaaaaaaggaaagaa

SEQ ID NO: 130956 - RNA, 21 nt, Human
agaaaacauuuuuuaaaaacc

SEQ ID NO: 130957 - RNA, 19 nt, Human
agaaaauaugaggcuuggg

SEQ ID NO: 130958 - RNA, 21 nt, Human
agaaaauuaagcuccagaacu

SEQ ID NO: 130959 - RNA, 20 nt, Human
agaggaaagagggccaaggc

SEQ ID NO: 130960 - RNA, 21 nt, Human
agaggugggggagaaagagag

SEQ ID NO: 130961 - RNA, 22 nt, Human
agcagcaguaacuugcucucuu

SEQ ID NO: 130962 - RNA, 23 nt, Human
aggaaagagggccaaggcucuga

SEQ ID NO: 130963 - RNA, 21 nt, Human
aggguuucuccccuucucuuc

SEQ ID NO: 130964 - RNA, 21 nt, Human
agguauauuccuucuuuucag

SEQ ID NO: 130965 - RNA, 20 nt, Human
auauguauauauauauauau

SEQ ID NO: 130966 - RNA, 18 nt, Human
auguauauauauauauau

SEQ ID NO: 130967 - RNA, 19 nt, Human
auguauauauauauauaua

SEQ ID NO: 130968 - RNA, 23 nt, Human
caaaaugacagguaacaauucuu

SEQ ID NO: 130969 - RNA, 27 nt, Human
caaaggucuuucaaacuucaaaacuuu

SEQ ID NO: 130970 - RNA, 23 nt, Human
caacuucaaguaauugauuccuu

SEQ ID NO: 130971 - RNA, 22 nt, Human
cacacagugcaaacaaguggaa

SEQ ID NO: 130972 - RNA, 19 nt, Human
cagcacacagugcaaacaa

SEQ ID NO: 130973 - RNA, 20 nt, Human
cagcacacagugcaaacaaa

SEQ ID NO: 130974 - RNA, 19 nt, Human
cagcaguaacuugcucucu

SEQ ID NO: 130975 - RNA, 20 nt, Human
cagccuuuuucucuucaccc

SEQ ID NO: 130976 - RNA, 21 nt, Human
cagugcaaacaaguggaacaa

SEQ ID NO: 130977 - RNA, 20 nt, Human
cauagaaaucugcucucuac

SEQ ID NO: 130978 - RNA, 19 nt, Human
ccaaaauaaaagaugaaaa

SEQ ID NO: 130979 - RNA, 25 nt, Human
ccaaacaucaagcauguugggaggg

SEQ ID NO: 130980 - RNA, 22 nt, Human
ccaguuaaaaaaagaaaauguc

SEQ ID NO: 130981 - RNA, 25 nt, Human
ccaguuaaaaaaagaaaaugucuga

SEQ ID NO: 130982 - RNA, 21 nt, Human
cccaaaaagaaaaaaaaaaug

SEQ ID NO: 130983 - RNA, 22 nt, Human
cccuggaaaaaaguuacuuccu

SEQ ID NO: 130984 - RNA, 23 nt, Human
ccucucccaccccucccuggaaa

SEQ ID NO: 130985 - RNA, 19 nt, Human
cguaaaacugagccccucu

SEQ ID NO: 130986 - RNA, 23 nt, Human
cgugcaguucuugcuacaguugu

SEQ ID NO: 130987 - RNA, 24 nt, Human
cguggcgccgccgaagucgccgcc

SEQ ID NO: 130988 - RNA, 22 nt, Human
cuaguacacuggguuaaaaggg

SEQ ID NO: 130989 - RNA, 20 nt, Human
cuccaaaaugaagagauaaa

SEQ ID NO: 130990 - RNA, 25 nt, Human
cugcuaacauuaccaaagcugguac

SEQ ID NO: 130991 - RNA, 20 nt, Human
cuggacagaaaauaugaggc

SEQ ID NO: 130992 - RNA, 21 nt, Human
cuucauaguuccaaaauaaaa

SEQ ID NO: 130993 - RNA, 25 nt, Human
cuuuccccagaaaacauuuuuuaaa

SEQ ID NO: 130994 - RNA, 24 nt, Human
cuuucuuuuccuuccuuguccccu

SEQ ID NO: 130995 - RNA, 18 nt, Human
cuuuuccuuccuuguccc

SEQ ID NO: 130996 - RNA, 19 nt, Human
gaggugggggagaaagaga

SEQ ID NO: 130997 - RNA, 22 nt, Human
gauucuucucuuuuuaggguuu

SEQ ID NO: 130998 - RNA, 21 nt, Human
gcagagggcaacacauuuaca

SEQ ID NO: 130999 - RNA, 25 nt, Human
gcagcaguaacuugcucucuugcac

SEQ ID NO: 131000 - RNA, 21 nt, Human
gccacucaauagaauuccuac

SEQ ID NO: 131001 - RNA, 19 nt, Human
gcguaaaacugagccccuc

SEQ ID NO: 131002 - RNA, 20 nt, Human
gcucaaugacacugccacuc

SEQ ID NO: 131003 - RNA, 19 nt, Human
gcuguuuuaauugcaaagg

SEQ ID NO: 131004 - RNA, 23 nt, Human
ggacacgcuuugccacagaggaa

SEQ ID NO: 131005 - RNA, 24 nt, Human
guaauaagcucuucaggcuuaaaa

SEQ ID NO: 131006 - RNA, 19 nt, Human
guauauauauauauauaua

SEQ ID NO: 131007 - RNA, 23 nt, Human
guauauauauauauauauaugaa

SEQ ID NO: 131008 - RNA, 26 nt, Human
guggaacaaaaaagguauauuccuuc

SEQ ID NO: 131009 - RNA, 18 nt, Human
uaaagcaacacuauugac

SEQ ID NO: 131010 - RNA, 25 nt, Human
uaaagcaucugccagcaauuuacag

SEQ ID NO: 131011 - RNA, 19 nt, Human
uaagcuccagaacugcuaa

SEQ ID NO: 131012 - RNA, 21 nt, Human
uaaggcacuucgcacaaauaa

SEQ ID NO: 131013 - RNA, 22 nt, Human
uaccgugcaguucuugcuacag

SEQ ID NO: 131014 - RNA, 22 nt, Human
uacuggguagaaagggaagaga

SEQ ID NO: 131015 - RNA, 18 nt, Human
uagaaagggaagagacuu

SEQ ID NO: 131016 - RNA, 19 nt, Human
uauauauauauauauauau

SEQ ID NO: 131017 - RNA, 18 nt, Human
uauauauauauguauaua

SEQ ID NO: 131018 - RNA, 20 nt, Human
uauauauauguauauauaua

SEQ ID NO: 131019 - RNA, 22 nt, Human
uauauguauauauauauauaua

SEQ ID NO: 131020 - RNA, 18 nt, Human
uauguauauauauauaua

SEQ ID NO: 131021 - RNA, 19 nt, Human
uauguauauauauauauau

SEQ ID NO: 131022 - RNA, 22 nt, Human
uauguauauauauauauauaua

SEQ ID NO: 131023 - RNA, 19 nt, Human
ucaaaaaagcaacuucaag

SEQ ID NO: 131024 - RNA, 23 nt, Human
ucagaaguaggcagagucaaaaa

SEQ ID NO: 131025 - RNA, 23 nt, Human
uccaaaauaaaagaugaaaaacc

SEQ ID NO: 131026 - RNA, 21 nt, Human
uccccaaaaagaaaaaaaaaa

SEQ ID NO: 131027 - RNA, 22 nt, Human
uccccuuaaucccagcaaccuu

SEQ ID NO: 131028 - RNA, 23 nt, Human
uccuccccaaaaagaaaaaaaaa

SEQ ID NO: 131029 - RNA, 26 nt, Human
ucguggcgccgccgaagucgccgccu

SEQ ID NO: 131030 - RNA, 23 nt, Human
ucuccccuucucuucuuucuuuu

SEQ ID NO: 131031 - RNA, 21 nt, Human
ucugaacgguaagcagcagua

SEQ ID NO: 131032 - RNA, 19 nt, Human
ucuggccgugcucaugcug

SEQ ID NO: 131033 - RNA, 19 nt, Human
ucugguaaaccuacuccaa

SEQ ID NO: 131034 - RNA, 21 nt, Human
ucuugcuacaguuguuaagga

SEQ ID NO: 131035 - RNA, 21 nt, Human
ugaacccagaaaaaaaacuua

SEQ ID NO: 131036 - RNA, 22 nt, Human
ugacuggacagaaaauaugagg

SEQ ID NO: 131037 - RNA, 26 nt, Human
ugagccccucucaucuuuagcugcuc

SEQ ID NO: 131038 - RNA, 24 nt, Human
ugauagacugcucuuuccuuuggg

SEQ ID NO: 131039 - RNA, 21 nt, Human
ugauccacagaaaauuaagcu

SEQ ID NO: 131040 - RNA, 26 nt, Human
ugcaaacaaguggaacaaaaaaggua

SEQ ID NO: 131041 - RNA, 20 nt, Human
ugcaguucuugcuacaguug

SEQ ID NO: 131042 - RNA, 22 nt, Human
ugccauacuacuacuggaggca

SEQ ID NO: 131043 - RNA, 18 nt, Human
ugcccccuguugcagagc

SEQ ID NO: 131044 - RNA, 22 nt, Human
uggcaagcagcuuucuguagca

SEQ ID NO: 131045 - RNA, 21 nt, Human
ugggggagaaagagagcugca

SEQ ID NO: 131046 - RNA, 18 nt, Human
uguauauauauauauaua

SEQ ID NO: 131047 - RNA, 22 nt, Human
uguauauauauauauauauaug

SEQ ID NO: 131048 - RNA, 22 nt, Human
ugucuacacaucaagugccaua

SEQ ID NO: 131049 - RNA, 23 nt, Human
uguugcguaaaacugagccccuc

SEQ ID NO: 131050 - RNA, 24 nt, Human
uguugcguaaaacugagccccucu

SEQ ID NO: 131051 - RNA, 22 nt, Human
uuaaaaaccagcaguuagugca

SEQ ID NO: 131052 - RNA, 23 nt, Human
uuaacagcucucagguugcccaa

SEQ ID NO: 131053 - RNA, 21 nt, Human
uuccuacacugcaagguagau

SEQ ID NO: 131054 - RNA, 18 nt, Human
uuccuucuuuucagccuu

SEQ ID NO: 131055 - RNA, 21 nt, Human
uuccuuguccccuuuccccag

SEQ ID NO: 131056 - RNA, 21 nt, Human
uucucuguucuggccgugcuc

SEQ ID NO: 131057 - RNA, 21 nt, Human
uugcccccuguugcagagcuu

SEQ ID NO: 131058 - RNA, 20 nt, Human
uuuaaagcaacacuauugac

SEQ ID NO: 131059 - RNA, 21 nt, Human
uuuacaaaguuuauacaagua

SEQ ID NO: 131060 - RNA, 28 nt, Human
uuuuaaauucccucucccaccccucccu

SEQ ID NO: 131061 - RNA, 19 nt, Human
uuuugaaagucaguagaga

SEQ ID NO: 131062 - RNA, 23 nt, Human
uuuuugcuuuuuucccccccuuu

SEQ ID NO: 131063 - RNA, 20 nt, Human
aaacgaaagccaggaaaaua

SEQ ID NO: 131064 - RNA, 22 nt, Human
acaaaaucacuaaugcaucuau

SEQ ID NO: 131065 - RNA, 23 nt, Human
acacacaggaacugacauaacca

SEQ ID NO: 131066 - RNA, 23 nt, Human
acauacgaggucaacaaacaaac

SEQ ID NO: 131067 - RNA, 21 nt, Human
acgaaagccaggaaaauacca

SEQ ID NO: 131068 - RNA, 27 nt, Human
cauuguaaaauuuucuaacauacgagg

SEQ ID NO: 131069 - RNA, 21 nt, Human
cguuauauuuuacauaauaua

SEQ ID NO: 131070 - RNA, 19 nt, Human
gaaaaaauacaaacugugg

SEQ ID NO: 131071 - RNA, 20 nt, Human
gacauuuaaaaucaacagau

SEQ ID NO: 131072 - RNA, 19 nt, Human
ggcaaauaaacauacugga

SEQ ID NO: 131073 - RNA, 19 nt, Human
uaaaaucaacagauguagc

SEQ ID NO: 131074 - RNA, 23 nt, Human
uaaagaaaaaauacaaacugugg

SEQ ID NO: 131075 - RNA, 21 nt, Human
uacaaguaguaucacuuagua

SEQ ID NO: 131076 - RNA, 23 nt, Human
uagcaugccuuuuuuuccuuacu

SEQ ID NO: 131077 - RNA, 25 nt, Human
uauaaacaaaaucacuaaugcaucu

SEQ ID NO: 131078 - RNA, 21 nt, Human
ucaacaaacaaacuacacggc

SEQ ID NO: 131079 - RNA, 21 nt, Human
uccuuaaagaaaaaauacaaa

SEQ ID NO: 131080 - RNA, 21 nt, Human
ucuauaugcuugguuuccuua

SEQ ID NO: 131081 - RNA, 23 nt, Human
uggaaaaaacacguaacacauag

SEQ ID NO: 131082 - RNA, 25 nt, Human
uggaaaaaacacguaacacauagca

SEQ ID NO: 131083 - RNA, 18 nt, Human
ugucuacacacaggaacu

SEQ ID NO: 131084 - RNA, 19 nt, Human
ugugguauuuuuaagagau

SEQ ID NO: 131085 - RNA, 23 nt, Human
ugugguauuuuuaagagaucguu

SEQ ID NO: 131086 - RNA, 20 nt, Human
uuccuuacugucuacacaca

SEQ ID NO: 131087 - RNA, 19 nt, Human
aagaagcccgguugaaugc

SEQ ID NO: 131088 - RNA, 21 nt, Human
aagaagcccgguugaaugcuc

SEQ ID NO: 131089 - RNA, 21 nt, Human
aagcaguacacauacccuaca

SEQ ID NO: 131090 - RNA, 22 nt, Human
acacauacccuacaaagaagcc

SEQ ID NO: 131091 - RNA, 19 nt, Human
agaaaagaauccuuguugg

SEQ ID NO: 131092 - RNA, 25 nt, Human
agcaagaguagcucugggauuccac

SEQ ID NO: 131093 - RNA, 26 nt, Human
agcuguuucuggcaacuccucuuccu

SEQ ID NO: 131094 - RNA, 21 nt, Human
agucaauugcucuggccaccu

SEQ ID NO: 131095 - RNA, 18 nt, Human
auagcccuucaaguuuuc

SEQ ID NO: 131096 - RNA, 24 nt, Human
aucugucuuccugggccaggguga

SEQ ID NO: 131097 - RNA, 22 nt, Human
cacauaggugugccucagggac

SEQ ID NO: 131098 - RNA, 20 nt, Human
cagcagcccaauguuguauu

SEQ ID NO: 131099 - RNA, 22 nt, Human
cuccuugucuuucucucccaca

SEQ ID NO: 131100 - RNA, 20 nt, Human
cugacugcaaauuaaucaga

SEQ ID NO: 131101 - RNA, 20 nt, Human
cuuccugggccagggugagg

SEQ ID NO: 131102 - RNA, 21 nt, Human
gaaacucuuucauauauucuu

SEQ ID NO: 131103 - RNA, 22 nt, Human
gagaagccgcagaguguucagg

SEQ ID NO: 131104 - RNA, 24 nt, Human
gccagggugagguagaaacaauag

SEQ ID NO: 131105 - RNA, 21 nt, Human
gcugaaccaggugaaaugauu

SEQ ID NO: 131106 - RNA, 23 nt, Human
ggcaguagccaucaaaaucugcu

SEQ ID NO: 131107 - RNA, 21 nt, Human
gucuuccugggccagggugag

SEQ ID NO: 131108 - RNA, 27 nt, Human
gugaaaugauuuucccaaggucaugcg

SEQ ID NO: 131109 - RNA, 19 nt, Human
uaacacacauaggugugcc

SEQ ID NO: 131110 - RNA, 20 nt, Human
uagaaaaagccuuucuagua

SEQ ID NO: 131111 - RNA, 25 nt, Human
uagauuuuuguggguucagcagccc

SEQ ID NO: 131112 - RNA, 23 nt, Human
uagcugauuuuuucugcaagccu

SEQ ID NO: 131113 - RNA, 21 nt, Human
ucaaguuuucccuuuuuccag

SEQ ID NO: 131114 - RNA, 22 nt, Human
ucaauagcccuucaaguuuucc

SEQ ID NO: 131115 - RNA, 19 nt, Human
ucccagucaauugcucugg

SEQ ID NO: 131116 - RNA, 20 nt, Human
ucugucuuccugggccaggg

SEQ ID NO: 131117 - RNA, 22 nt, Human
ugaaaugauuuucccaagguca

SEQ ID NO: 131118 - RNA, 19 nt, Human
ugcaugucucugaggaguu

SEQ ID NO: 131119 - RNA, 18 nt, Human
ugccucugacugcaaauu

SEQ ID NO: 131120 - RNA, 19 nt, Human
ugcucuggccaccuugcca

SEQ ID NO: 131121 - RNA, 20 nt, Human
ugguaaauuaacccccuccu

SEQ ID NO: 131122 - RNA, 19 nt, Human
uuccagguaacauuggcag

SEQ ID NO: 131123 - RNA, 18 nt, Human
uucuacugacauuuuagc

SEQ ID NO: 131124 - RNA, 22 nt, Human
uucuccuugucuuucucuccca

SEQ ID NO: 131125 - RNA, 24 nt, Human
acuugaaauagucaaaagaugaga

SEQ ID NO: 131126 - RNA, 21 nt, Human
aggcgguugggcgcagggggc

SEQ ID NO: 131127 - RNA, 23 nt, Human
agucuccagaacucgggccggaa

SEQ ID NO: 131128 - RNA, 25 nt, Human
auuagacuugaaauagucaaaagau

SEQ ID NO: 131129 - RNA, 20 nt, Human
cgcugccuaggccgccgggg

SEQ ID NO: 131130 - RNA, 19 nt, Human
gcgggacaaaaagaacaaa

SEQ ID NO: 131131 - RNA, 20 nt, Human
gcgggacaaaaagaacaaag

SEQ ID NO: 131132 - RNA, 24 nt, Human
gcuggaaacgcugccuaggccgcc

SEQ ID NO: 131133 - RNA, 22 nt, Human
uccagaacucgggccggaaggc

SEQ ID NO: 131134 - RNA, 22 nt, Human
ugaaauagucaaaagaugagag

SEQ ID NO: 131135 - RNA, 21 nt, Human
uggaaacgcugccuaggccgc

SEQ ID NO: 131136 - RNA, 21 nt, Human
uucucggggcuggaaacgcug

SEQ ID NO: 131137 - RNA, 19 nt, Human
aaaaaaaaaaaaaaaggca

SEQ ID NO: 131138 - RNA, 26 nt, Human
aaaauacacuucagagucccacuuuc

SEQ ID NO: 131139 - RNA, 24 nt, Human
aaacuuaauuucccaggucucuuc

SEQ ID NO: 131140 - RNA, 21 nt, Human
aaccucuucuccauccacccu

SEQ ID NO: 131141 - RNA, 23 nt, Human
aagaaagcaaaggggaaaagggc

SEQ ID NO: 131142 - RNA, 21 nt, Human
aaggagccacaucaggcagag

SEQ ID NO: 131143 - RNA, 19 nt, Human
aaucauaaagucugugucu

SEQ ID NO: 131144 - RNA, 23 nt, Human
acaaaccccagaacaguguaagc

SEQ ID NO: 131145 - RNA, 23 nt, Human
acaaaugggaaaaaggaaggagc

SEQ ID NO: 131146 - RNA, 18 nt, Human
accucuucuccauccacc

SEQ ID NO: 131147 - RNA, 22 nt, Human
agaaagcaaaggggaaaagggc

SEQ ID NO: 131148 - RNA, 24 nt, Human
agaacaguguaagcuccagaggug

SEQ ID NO: 131149 - RNA, 23 nt, Human
agaggugggugaugggaacaguc

SEQ ID NO: 131150 - RNA, 21 nt, Human
agcaccagaggccaggagaga

SEQ ID NO: 131151 - RNA, 20 nt, Human
agcucccuuacucacagccc

SEQ ID NO: 131152 - RNA, 21 nt, Human
aggaaggagccacaucaggca

SEQ ID NO: 131153 - RNA, 18 nt, Human
aggaguggaggaggggga

SEQ ID NO: 131154 - RNA, 19 nt, Human
aggggaaaagggcugcagg

SEQ ID NO: 131155 - RNA, 22 nt, Human
aucagcaaccucuucuccaucc

SEQ ID NO: 131156 - RNA, 22 nt, Human
augcccuuugcccaagccagaa

SEQ ID NO: 131157 - RNA, 23 nt, Human
auguguguacacauauaccacca

SEQ ID NO: 131158 - RNA, 20 nt, Human
caaaugggaaaaaggaagga

SEQ ID NO: 131159 - RNA, 19 nt, Human
caaccucuucuccauccac

SEQ ID NO: 131160 - RNA, 22 nt, Human
cacaucaaucccuuacaaagac

SEQ ID NO: 131161 - RNA, 22 nt, Human
cagcaccagaggccaggagaga

SEQ ID NO: 131162 - RNA, 25 nt, Human
cagccccauucucccaagcauggga

SEQ ID NO: 131163 - RNA, 19 nt, Human
cagcccuuugguuuuuuag

SEQ ID NO: 131164 - RNA, 20 nt, Human
caguccccaaagugagaaga

SEQ ID NO: 131165 - RNA, 20 nt, Human
cauggaaacugaaguucugc

SEQ ID NO: 131166 - RNA, 20 nt, Human
ccaagccagaagaaagcaaa

SEQ ID NO: 131167 - RNA, 23 nt, Human
ccacuuuccacauagcucccuua

SEQ ID NO: 131168 - RNA, 22 nt, Human
cccaagccagaagaaagcaaag

SEQ ID NO: 131169 - RNA, 23 nt, Human
cccagaacaguguaagcuccaga

SEQ ID NO: 131170 - RNA, 19 nt, Human
ccuuacucacagcccuuug

SEQ ID NO: 131171 - RNA, 18 nt, Human
ccuuugcccaagccagaa

SEQ ID NO: 131172 - RNA, 22 nt, Human
cugaaguucugcugagggcuga

SEQ ID NO: 131173 - RNA, 20 nt, Human
gaaguucugcugagggcuga

SEQ ID NO: 131174 - RNA, 22 nt, Human
gacaaaugggaaaaaggaagga

SEQ ID NO: 131175 - RNA, 19 nt, Human
gaguggaggagggggaagg

SEQ ID NO: 131176 - RNA, 21 nt, Human
gcagagaggagcagcaccaga

SEQ ID NO: 131177 - RNA, 22 nt, Human
gcccaggcacaugggugcaggg

SEQ ID NO: 131178 - RNA, 22 nt, Human
gcucauucaacaugccucccua

SEQ ID NO: 131179 - RNA, 26 nt, Human
ggaaaaaggaauuacuucacuuacac

SEQ ID NO: 131180 - RNA, 18 nt, Human
ggacaucgccuuugggaa

SEQ ID NO: 131181 - RNA, 23 nt, Human
ggacuaagcuccaguucuagacc

SEQ ID NO: 131182 - RNA, 20 nt, Human
ggagcagcaccagaggccag

SEQ ID NO: 131183 - RNA, 20 nt, Human
ggaguugguauuguaccagc

SEQ ID NO: 131184 - RNA, 22 nt, Human
ggcagagaggagcagcaccaga

SEQ ID NO: 131185 - RNA, 19 nt, Human
gggcguaggaguggaggag

SEQ ID NO: 131186 - RNA, 21 nt, Human
gggcguaggaguggaggaggg

SEQ ID NO: 131187 - RNA, 22 nt, Human
gguuugacaaaugggaaaaagg

SEQ ID NO: 131188 - RNA, 22 nt, Human
guagagaacaaaccccagaaca

SEQ ID NO: 131189 - RNA, 21 nt, Human
uaacuccuuagugcauccaaa

SEQ ID NO: 131190 - RNA, 19 nt, Human
uaagagcucucauaaagcc

SEQ ID NO: 131191 - RNA, 19 nt, Human
uacaccuaugaugcccuuu

SEQ ID NO: 131192 - RNA, 18 nt, Human
uauguguguacacauaua

SEQ ID NO: 131193 - RNA, 23 nt, Human
uauguguguacacauauaccacc

SEQ ID NO: 131194 - RNA, 22 nt, Human
ucaaaauacacuucagaguccc

SEQ ID NO: 131195 - RNA, 18 nt, Human
ucaacaugccucccuacc

SEQ ID NO: 131196 - RNA, 18 nt, Human
ucaaucccuuacaaagac

SEQ ID NO: 131197 - RNA, 21 nt, Human
ucccagccccauucucccaag

SEQ ID NO: 131198 - RNA, 21 nt, Human
ucccccuuccccuuuauaggg

SEQ ID NO: 131199 - RNA, 20 nt, Human
ucuuuaaaaaaaaaaaaaaa

SEQ ID NO: 131200 - RNA, 22 nt, Human
ugaaaaauauaauaaucauaaa

SEQ ID NO: 131201 - RNA, 20 nt, Human
ugacccagucuuaucuguuc

SEQ ID NO: 131202 - RNA, 19 nt, Human
ugcagggagggguggggaa

SEQ ID NO: 131203 - RNA, 19 nt, Human
ugcccuuugcccaagccag

SEQ ID NO: 131204 - RNA, 29 nt, Human
uggaauggaggaaaggcggcagagaggag

SEQ ID NO: 131205 - RNA, 21 nt, Human
uggaggagggggaaggaaaaa

SEQ ID NO: 131206 - RNA, 23 nt, Human
ugggaaaaaggaaggagccacau

SEQ ID NO: 131207 - RNA, 18 nt, Human
ugggaggcaugacuaggc

SEQ ID NO: 131208 - RNA, 27 nt, Human
uguacacauauaccaccacaguuggga

SEQ ID NO: 131209 - RNA, 20 nt, Human
uguauguguguacacauaua

SEQ ID NO: 131210 - RNA, 20 nt, Human
ugucccagccccauucuccc

SEQ ID NO: 131211 - RNA, 19 nt, Human
ugugauugguuggaagggu

SEQ ID NO: 131212 - RNA, 18 nt, Human
uguguauguguguacaca

SEQ ID NO: 131213 - RNA, 18 nt, Human
uguguauguguguacaca

SEQ ID NO: 131214 - RNA, 20 nt, Human
uguguauguguguacacauu

SEQ ID NO: 131215 - RNA, 21 nt, Human
uuaaaaaaaaaaaaaaaaagg

SEQ ID NO: 131216 - RNA, 22 nt, Human
uucacuugaacauggaaagaaa

SEQ ID NO: 131217 - RNA, 20 nt, Human
uucuccauccacccugugua

SEQ ID NO: 131218 - RNA, 23 nt, Human
uucuuuaaaaaaaaaaaaaaaaa

SEQ ID NO: 131219 - RNA, 24 nt, Human
uugguuggaaggguagagaacaaa

SEQ ID NO: 131220 - RNA, 20 nt, Human
uuuccagaaucccugcucag

SEQ ID NO: 131221 - RNA, 18 nt, Human
agcagaagguacaggagu

SEQ ID NO: 131222 - RNA, 23 nt, Human
aggcagggugaccagagagggca

SEQ ID NO: 131223 - RNA, 19 nt, Human
cuguagcucucaaagcaaa

SEQ ID NO: 131224 - RNA, 23 nt, Human
ggaaaggaaauugagcagaaggu

SEQ ID NO: 131225 - RNA, 22 nt, Human
ucaaagcaaauuuugagcucau

SEQ ID NO: 131226 - RNA, 21 nt, Human
ugaccagagagggcagacagc

SEQ ID NO: 131227 - RNA, 19 nt, Human
ugaggaaaggaaauugagc

SEQ ID NO: 131228 - RNA, 24 nt, Human
ugggaugaggaaaggaaauugagc

SEQ ID NO: 131229 - RNA, 23 nt, Human
uuugagcucauuuuucuuuuucu

SEQ ID NO: 131230 - RNA, 22 nt, Human
aggcagggcgagcagagagggc

SEQ ID NO: 131231 - RNA, 23 nt, Human
aggcagggcgagcagagagggca

SEQ ID NO: 131232 - RNA, 25 nt, Human
cgagauauauauuuaggaucaagaa

SEQ ID NO: 131233 - RNA, 19 nt, Human
cuguagcucucaaagcaaa

SEQ ID NO: 131234 - RNA, 27 nt, Human
gauguuaaggacaaaguauaggagaaa

SEQ ID NO: 131235 - RNA, 19 nt, Human
ggcgagcagagagggcaga

SEQ ID NO: 131236 - RNA, 20 nt, Human
ucaaagcaaauuaugagcuc

SEQ ID NO: 131237 - RNA, 21 nt, Human
ucaaagcaaauuaugagcuca

SEQ ID NO: 131238 - RNA, 22 nt, Human
ucaaagcaaauuaugagcucau

SEQ ID NO: 131239 - RNA, 26 nt, Human
ucagcugcagaagcaugugaagcuaa

SEQ ID NO: 131240 - RNA, 18 nt, Human
acuuuauuuuggagagag

SEQ ID NO: 131241 - RNA, 21 nt, Human
aggaccuugaacugaaucuug

SEQ ID NO: 131242 - RNA, 22 nt, Human
ggcuggggucaccugcaggagg

SEQ ID NO: 131243 - RNA, 26 nt, Human
ucaccugcaggagggagagcaggagu

SEQ ID NO: 131244 - RNA, 23 nt, Human
ugcaggagggagagcaggagugg

SEQ ID NO: 131245 - RNA, 25 nt, Human
uaugggacacacgacaguuuccuuc

SEQ ID NO: 131246 - RNA, 18 nt, Human
ugauggcaauguauggga

SEQ ID NO: 131247 - RNA, 22 nt, Human
uggaggagagagagcaggagca

SEQ ID NO: 131248 - RNA, 23 nt, Human
uggaggagagagagcaggagcag

SEQ ID NO: 131249 - RNA, 20 nt, Human
uaaaagaaugcuuauaaaaa

SEQ ID NO: 131250 - RNA, 19 nt, Human
ucaggaacuggggagaggc

SEQ ID NO: 131251 - RNA, 19 nt, Human
uggcaggcaacacucagga

SEQ ID NO: 131252 - RNA, 18 nt, Human
aagaaggcauuuccacac

SEQ ID NO: 131253 - RNA, 18 nt, Human
acacuuuacaacacucuc

SEQ ID NO: 131254 - RNA, 18 nt, Human
caccaugcagaacacacc

SEQ ID NO: 131255 - RNA, 21 nt, Human
caccaugcagaacacacccac

SEQ ID NO: 131256 - RNA, 22 nt, Human
caugcagaacacacccacucac

SEQ ID NO: 131257 - RNA, 23 nt, Human
ccaaugguaaggcagagcucccu

SEQ ID NO: 131258 - RNA, 24 nt, Human
cucaccaugcagaacacacccacu

SEQ ID NO: 131259 - RNA, 23 nt, Human
cuucaccccacgcugagacugga

SEQ ID NO: 131260 - RNA, 21 nt, Human
gcuaggcuucaccccacgcug

SEQ ID NO: 131261 - RNA, 21 nt, Human
ucaccccacgcugagacugga

SEQ ID NO: 131262 - RNA, 20 nt, Human
uuuauaaacuuuaagaaggc

SEQ ID NO: 131263 - RNA, 23 nt, Human
uuuuuuuuuuuugaaaaaaaaau

SEQ ID NO: 131264 - RNA, 22 nt, Human
caucagccacagcagcuucuug

SEQ ID NO: 131265 - RNA, 19 nt, Human
ucucugaugagggagcccu

SEQ ID NO: 131266 - RNA, 26 nt, Human
ugaauccgcaucagccacagcagcuu

SEQ ID NO: 131267 - RNA, 18 nt, Human
ugaugagggagcccuuuc

SEQ ID NO: 131268 - RNA, 24 nt, Human
uggacaccauaguuuaauuugguu

SEQ ID NO: 131269 - RNA, 18 nt, Human
uggcugggagcuucacca

SEQ ID NO: 131270 - RNA, 23 nt, Human
ugggaaaagccacuuuauuaaag

SEQ ID NO: 131271 - RNA, 24 nt, Human
ugggaaaagccacuuuauuaaaga

SEQ ID NO: 131272 - RNA, 19 nt, Human
accaggcagggaugggcua

SEQ ID NO: 131273 - RNA, 19 nt, Human
acccacuuucucuccuucu

SEQ ID NO: 131274 - RNA, 21 nt, Human
acccugggcuggggaaaggaa

SEQ ID NO: 131275 - RNA, 19 nt, Human
agaggugggagggacaggg

SEQ ID NO: 131276 - RNA, 21 nt, Human
agggagcagugaggacagggg

SEQ ID NO: 131277 - RNA, 20 nt, Human
aggggucagaggcugugagg

SEQ ID NO: 131278 - RNA, 20 nt, Human
aggugggagggacagggcca

SEQ ID NO: 131279 - RNA, 25 nt, Human
aucucacccacuuucucuccuucuc

SEQ ID NO: 131280 - RNA, 22 nt, Human
caacagccaaggcucacagcug

SEQ ID NO: 131281 - RNA, 18 nt, Human
caccgcucccgccugggc

SEQ ID NO: 131282 - RNA, 24 nt, Human
caccuccagcaccuucggggauuc

SEQ ID NO: 131283 - RNA, 20 nt, Human
cagcacaagagccaggcuca

SEQ ID NO: 131284 - RNA, 21 nt, Human
caucucacccacuuucucucc

SEQ ID NO: 131285 - RNA, 21 nt, Human
ccaacagccaaggcucacagc

SEQ ID NO: 131286 - RNA, 19 nt, Human
ccacaggggcuaguccccc

SEQ ID NO: 131287 - RNA, 19 nt, Human
ccaccagccugagaccgcu

SEQ ID NO: 131288 - RNA, 23 nt, Human
ccaccagccugagaccgcucucu

SEQ ID NO: 131289 - RNA, 19 nt, Human
cccaccagccugagaccgc

SEQ ID NO: 131290 - RNA, 18 nt, Human
ccccugcagcaggggagg

SEQ ID NO: 131291 - RNA, 22 nt, Human
ccccuggcuaccugccuggcuu

SEQ ID NO: 131292 - RNA, 21 nt, Human
cccugcucuggggcugucucc

SEQ ID NO: 131293 - RNA, 19 nt, Human
ccggagaguggaugcggcg

SEQ ID NO: 131294 - RNA, 21 nt, Human
ccuccagcaccuucggggauu

SEQ ID NO: 131295 - RNA, 18 nt, Human
ccugaggucacagaggug

SEQ ID NO: 131296 - RNA, 23 nt, Human
ccugcagcaggggaggggagggc

SEQ ID NO: 131297 - RNA, 24 nt, Human
ccugcaguaucccaacacccugcu

SEQ ID NO: 131298 - RNA, 18 nt, Human
ccuggcuuucucucuccu

SEQ ID NO: 131299 - RNA, 23 nt, Human
ccugugaccaggcagggaugggc

SEQ ID NO: 131300 - RNA, 19 nt, Human
cgccugggcuccauccagc

SEQ ID NO: 131301 - RNA, 27 nt, Human
cucacccacuuucucuccuucucaauc

SEQ ID NO: 131302 - RNA, 19 nt, Human
cucacucacugccaacagc

SEQ ID NO: 131303 - RNA, 21 nt, Human
cucuccugggcuaggggcugg

SEQ ID NO: 131304 - RNA, 23 nt, Human
cucucuccugggcuaggggcugg

SEQ ID NO: 131305 - RNA, 21 nt, Human
cugcaguaucccaacacccug

SEQ ID NO: 131306 - RNA, 24 nt, Human
cugccucucuccucuccucucuuc

SEQ ID NO: 131307 - RNA, 19 nt, Human
cugcggggcucaguccugg

SEQ ID NO: 131308 - RNA, 21 nt, Human
cugcucccaccuccagcaccu

SEQ ID NO: 131309 - RNA, 19 nt, Human
gaccaggcagggaugggcu

SEQ ID NO: 131310 - RNA, 20 nt, Human
gaggugggagggacagggcc

SEQ ID NO: 131311 - RNA, 22 nt, Human
gcaggggaggggagggcguggg

SEQ ID NO: 131312 - RNA, 21 nt, Human
gccccugcagcaggggagggg

SEQ ID NO: 131313 - RNA, 21 nt, Human
gccugaggucacagagguggg

SEQ ID NO: 131314 - RNA, 20 nt, Human
gccuggcuuucucucuccug

SEQ ID NO: 131315 - RNA, 19 nt, Human
gcgggcgcacggaggaggc

SEQ ID NO: 131316 - RNA, 27 nt, Human
gcucccaccuccagcaccuucggggau

SEQ ID NO: 131317 - RNA, 18 nt, Human
gcuuucucucuccugggc

SEQ ID NO: 131318 - RNA, 19 nt, Human
ggacaggggugaggacggu

SEQ ID NO: 131319 - RNA, 19 nt, Human
ggagcagugaggacagggg

SEQ ID NO: 131320 - RNA, 18 nt, Human
ggauggccagugaggagg

SEQ ID NO: 131321 - RNA, 18 nt, Human
ggccggggcaugcccugu

SEQ ID NO: 131322 - RNA, 23 nt, Human
ggcuaggggcuggggaggucugc

SEQ ID NO: 131323 - RNA, 21 nt, Human
ggcucaguccuggcccugcag

SEQ ID NO: 131324 - RNA, 19 nt, Human
ggcuggggaggucugcggg

SEQ ID NO: 131325 - RNA, 26 nt, Human
gggaggacugaggcuggguguggugg

SEQ ID NO: 131326 - RNA, 26 nt, Human
gggauucccucuuguagccccugcuu

SEQ ID NO: 131327 - RNA, 19 nt, Human
gggcuggggaaaggaaagu

SEQ ID NO: 131328 - RNA, 27 nt, Human
ggggaggacugaggcuggguguggugg

SEQ ID NO: 131329 - RNA, 18 nt, Human
ggggaggggagggcgugg

SEQ ID NO: 131330 - RNA, 19 nt, Human
ggucacagaggugggaggg

SEQ ID NO: 131331 - RNA, 18 nt, Human
guccugggauggaagaag

SEQ ID NO: 131332 - RNA, 23 nt, Human
uaaguccacccugggcuggggaa

SEQ ID NO: 131333 - RNA, 18 nt, Human
uaucccaacacccugcuc

SEQ ID NO: 131334 - RNA, 19 nt, Human
ucacccacuuucucuccuu

SEQ ID NO: 131335 - RNA, 21 nt, Human
ucagaggcugugaggggagga

SEQ ID NO: 131336 - RNA, 21 nt, Human
ucucaaucuccugcucccacc

SEQ ID NO: 131337 - RNA, 28 nt, Human
ucucacccacuuucucuccuucucaauc

SEQ ID NO: 131338 - RNA, 22 nt, Human
ucucugguggcagagggucucu

SEQ ID NO: 131339 - RNA, 21 nt, Human
ucugccucucuccucuccucc

SEQ ID NO: 131340 - RNA, 20 nt, Human
ucugcggggcucaguccugg

SEQ ID NO: 131341 - RNA, 18 nt, Human
ugaggggaggacugaggc

SEQ ID NO: 131342 - RNA, 18 nt, Human
ugcagcaggggaggggag

SEQ ID NO: 131343 - RNA, 22 nt, Human
ugcccugugaccaggcagggau

SEQ ID NO: 131344 - RNA, 26 nt, Human
ugcccugugaccaggcagggaugggc

SEQ ID NO: 131345 - RNA, 21 nt, Human
uggaagaaggcuggcuucagg

SEQ ID NO: 131346 - RNA, 23 nt, Human
ugggagggacagggccaccgcuc

SEQ ID NO: 131347 - RNA, 24 nt, Human
ugggauggaagaaggcuggcuuca

SEQ ID NO: 131348 - RNA, 20 nt, Human
ugguguccugggauggaaga

SEQ ID NO: 131349 - RNA, 24 nt, Human
uucucaaucuccugcucccaccuc

SEQ ID NO: 131350 - RNA, 20 nt, Human
uucuccagcaucucacccac

SEQ ID NO: 131351 - RNA, 23 nt, Human
aaaaaaaaaauugguggaacggc

SEQ ID NO: 131352 - RNA, 19 nt, Human
aaguagcugggauuacagg

SEQ ID NO: 131353 - RNA, 25 nt, Human
aaguagcugggauuacaggcgcccg

SEQ ID NO: 131354 - RNA, 23 nt, Human
aauuacuuuugaacagagaacau

SEQ ID NO: 131355 - RNA, 18 nt, Human
acaggguuucaccauguu

SEQ ID NO: 131356 - RNA, 19 nt, Human
acaggguuucaccauguua

SEQ ID NO: 131357 - RNA, 20 nt, Human
acaggguuucaccauguuag

SEQ ID NO: 131358 - RNA, 24 nt, Human
acaggguuucaccauguuagccag

SEQ ID NO: 131359 - RNA, 20 nt, Human
acugcaagcucugccuccca

SEQ ID NO: 131360 - RNA, 25 nt, Human
aggcuggagugcaguggcgcaaucu

SEQ ID NO: 131361 - RNA, 18 nt, Human
aguacauagguagucaaa

SEQ ID NO: 131362 - RNA, 21 nt, Human
agugcaguggcgcaaucucag

SEQ ID NO: 131363 - RNA, 18 nt, Human
agugcugggauuacaggc

SEQ ID NO: 131364 - RNA, 22 nt, Human
agugcugggauuacaggcguga

SEQ ID NO: 131365 - RNA, 22 nt, Human
aucacugccaauuacuuuugaa

SEQ ID NO: 131366 - RNA, 18 nt, Human
caccauguuagccaggau

SEQ ID NO: 131367 - RNA, 22 nt, Human
caccauguuagccaggaugguc

SEQ ID NO: 131368 - RNA, 24 nt, Human
caccauguuagccaggauggucuc

SEQ ID NO: 131369 - RNA, 24 nt, Human
caggguuucaccauguuagccagg

SEQ ID NO: 131370 - RNA, 25 nt, Human
cagugcugggauuacaggcgugagc

SEQ ID NO: 131371 - RNA, 22 nt, Human
caugccauucuccugccucagc

SEQ ID NO: 131372 - RNA, 22 nt, Human
ccaaguagcugggauuacaggc

SEQ ID NO: 131373 - RNA, 20 nt, Human
ccagugcugggauuacaggc

SEQ ID NO: 131374 - RNA, 24 nt, Human
ccagugcugggauuacaggcguga

SEQ ID NO: 131375 - RNA, 22 nt, Human
ccauggcuggcuaauuuuuuuu

SEQ ID NO: 131376 - RNA, 23 nt, Human
cccaaguagcugggauuacaggc

SEQ ID NO: 131377 - RNA, 23 nt, Human
cccaaguagcugggauuacaggc

SEQ ID NO: 131378 - RNA, 20 nt, Human
cccagguucaugccauucuc

SEQ ID NO: 131379 - RNA, 19 nt, Human
cccagugcugggauuacag

SEQ ID NO: 131380 - RNA, 21 nt, Human
cccagugcugggauuacaggc

SEQ ID NO: 131381 - RNA, 21 nt, Human
ccgccccccucggccucccag

SEQ ID NO: 131382 - RNA, 24 nt, Human
ccucccagguucaugccauucucc

SEQ ID NO: 131383 - RNA, 24 nt, Human
cgcucuguugcccaggcuggagug

SEQ ID NO: 131384 - RNA, 24 nt, Human
cggagucucgcucuguugcccagg

SEQ ID NO: 131385 - RNA, 20 nt, Human
cuaaaaaaaaaauuggugga

SEQ ID NO: 131386 - RNA, 24 nt, Human
cucagccucccaaguagcugggau

SEQ ID NO: 131387 - RNA, 24 nt, Human
cucgcucuguugcccaggcuggag

SEQ ID NO: 131388 - RNA, 24 nt, Human
cugcaagcucugccucccagguuc

SEQ ID NO: 131389 - RNA, 23 nt, Human
cugccucagccucccaaguagcu

SEQ ID NO: 131390 - RNA, 21 nt, Human
cuggcuaauuuuuuuuguauu

SEQ ID NO: 131391 - RNA, 19 nt, Human
cuguugcccaggcuggagu

SEQ ID NO: 131392 - RNA, 18 nt, Human
gacuucacgauccgcccc

SEQ ID NO: 131393 - RNA, 18 nt, Human
gauuacaggcgcccgcca

SEQ ID NO: 131394 - RNA, 18 nt, Human
gauuacaggcgugagcca

SEQ ID NO: 131395 - RNA, 19 nt, Human
gauuacaggcgugagccac

SEQ ID NO: 131396 - RNA, 22 nt, Human
gauuacaggcgugagccacugc

SEQ ID NO: 131397 - RNA, 23 nt, Human
gccacagagcuuccuuggcacac

SEQ ID NO: 131398 - RNA, 19 nt, Human
gcccaggcuggagugcagu

SEQ ID NO: 131399 - RNA, 20 nt, Human
gccucagccucccaaguagc

SEQ ID NO: 131400 - RNA, 22 nt, Human
gcuaaaaaaaaaauugguggaa

SEQ ID NO: 131401 - RNA, 20 nt, Human
gcucuaaggcaggggguaga

SEQ ID NO: 131402 - RNA, 25 nt, Human
gcucuguugcccaggcuggagugca

SEQ ID NO: 131403 - RNA, 19 nt, Human
gcuggagugcaguggcgca

SEQ ID NO: 131404 - RNA, 23 nt, Human
ggagucucgcucuguugcccagg

SEQ ID NO: 131405 - RNA, 24 nt, Human
ggauggucucgaucuccugacuuc

SEQ ID NO: 131406 - RNA, 20 nt, Human
ggggcuaaaaaaaaaauugg

SEQ ID NO: 131407 - RNA, 24 nt, Human
gguuucaccauguuagccaggaug

SEQ ID NO: 131408 - RNA, 24 nt, Human
gucucgcucuguugcccaggcugg

SEQ ID NO: 131409 - RNA, 24 nt, Human
guugagaccuggaauagcuucucu

SEQ ID NO: 131410 - RNA, 27 nt, Human
uaauuuuuuuuguauuuuuaguagaga

SEQ ID NO: 131411 - RNA, 22 nt, Human
uacaggcgugagccacugcgcc

SEQ ID NO: 131412 - RNA, 22 nt, Human
uacaggcgugagccacugcgcc

SEQ ID NO: 131413 - RNA, 23 nt, Human
uacaggcgugagccacugcgccu

SEQ ID NO: 131414 - RNA, 22 nt, Human
uagagacaggguuucaccaugu

SEQ ID NO: 131415 - RNA, 22 nt, Human
uagaggaggcgggauauuguug

SEQ ID NO: 131416 - RNA, 24 nt, Human
uaguagagacaggguuucaccaug

SEQ ID NO: 131417 - RNA, 26 nt, Human
uaguagagacaggguuucaccauguu

SEQ ID NO: 131418 - RNA, 24 nt, Human
ucaccauguuagccaggauggucu

SEQ ID NO: 131419 - RNA, 18 nt, Human
ucacugcaagcucugccu

SEQ ID NO: 131420 - RNA, 18 nt, Human
ucacugcaagcucugccu

SEQ ID NO: 131421 - RNA, 19 nt, Human
ucacugcaagcucugccuc

SEQ ID NO: 131422 - RNA, 24 nt, Human
ucacugcaagcucugccucccagg

SEQ ID NO: 131423 - RNA, 18 nt, Human
ucagccucccaaguagcu

SEQ ID NO: 131424 - RNA, 20 nt, Human
ucagccucccaaguagcugg

SEQ ID NO: 131425 - RNA, 26 nt, Human
ucagcucacugcaagcucugccuccc

SEQ ID NO: 131426 - RNA, 24 nt, Human
ucccaaguagcugggauuacaggc

SEQ ID NO: 131427 - RNA, 20 nt, Human
ucccagguucaugccauucu

SEQ ID NO: 131428 - RNA, 21 nt, Human
ucccagguucaugccauucuc

SEQ ID NO: 131429 - RNA, 24 nt, Human
ucccagguucaugccauucuccug

SEQ ID NO: 131430 - RNA, 22 nt, Human
ucccagugcugggauuacaggc

SEQ ID NO: 131431 - RNA, 22 nt, Human
ucccagugcugggauuacaggc

SEQ ID NO: 131432 - RNA, 24 nt, Human
ucccagugcugggauuacaggcgu

SEQ ID NO: 131433 - RNA, 22 nt, Human
uccgccccccucggccucccag

SEQ ID NO: 131434 - RNA, 26 nt, Human
ucuccugccucagccucccaaguagc

SEQ ID NO: 131435 - RNA, 19 nt, Human
ucucgcucuguugcccagg

SEQ ID NO: 131436 - RNA, 23 nt, Human
ucucgcucuguugcccaggcugg

SEQ ID NO: 131437 - RNA, 24 nt, Human
ucucgcucuguugcccaggcugga

SEQ ID NO: 131438 - RNA, 26 nt, Human
ucucgcucuguugcccaggcuggagu

SEQ ID NO: 131439 - RNA, 27 nt, Human
ucucgcucuguugcccaggcuggagug

SEQ ID NO: 131440 - RNA, 18 nt, Human
ucuguugcccaggcugga

SEQ ID NO: 131441 - RNA, 24 nt, Human
ucuguugcccaggcuggagugcag

SEQ ID NO: 131442 - RNA, 18 nt, Human
ugaacagagaacaucaua

SEQ ID NO: 131443 - RNA, 22 nt, Human
ugagacggagucucgcucuguu

SEQ ID NO: 131444 - RNA, 22 nt, Human
ugcaguggcgcaaucucagcuc

SEQ ID NO: 131445 - RNA, 23 nt, Human
ugcaguggcgcaaucucagcuca

SEQ ID NO: 131446 - RNA, 18 nt, Human
ugcccaggcuggagugca

SEQ ID NO: 131447 - RNA, 21 nt, Human
ugcccaggcuggagugcagug

SEQ ID NO: 131448 - RNA, 22 nt, Human
ugcccaggcuggagugcagugg

SEQ ID NO: 131449 - RNA, 24 nt, Human
ugcccaggcuggagugcaguggcg

SEQ ID NO: 131450 - RNA, 24 nt, Human
ugccucagccucccaaguagcugg

SEQ ID NO: 131451 - RNA, 24 nt, Human
ugcugggauuacaggcgugagcca

SEQ ID NO: 131452 - RNA, 18 nt, Human
uggagugcaguggcgcaa

SEQ ID NO: 131453 - RNA, 23 nt, Human
uggagugcaguggcgcaaucuca

SEQ ID NO: 131454 - RNA, 24 nt, Human
uggagugcaguggcgcaaucucag

SEQ ID NO: 131455 - RNA, 19 nt, Human
uggcacacuucccgcugcu

SEQ ID NO: 131456 - RNA, 19 nt, Human
uggcagaaguccugaagcu

SEQ ID NO: 131457 - RNA, 21 nt, Human
uggccaaucacugccaauuac

SEQ ID NO: 131458 - RNA, 24 nt, Human
uggcgcaaucucagcucacugcaa

SEQ ID NO: 131459 - RNA, 21 nt, Human
ugggauuacaggcgcccgcca

SEQ ID NO: 131460 - RNA, 22 nt, Human
ugggauuacaggcgcccgccac

SEQ ID NO: 131461 - RNA, 24 nt, Human
ugggauuacaggcgcccgccacca

SEQ ID NO: 131462 - RNA, 25 nt, Human
ugggauuacaggcgcccgccaccau

SEQ ID NO: 131463 - RNA, 18 nt, Human
ugggauuacaggcgugag

SEQ ID NO: 131464 - RNA, 19 nt, Human
ugggauuacaggcgugagc

SEQ ID NO: 131465 - RNA, 21 nt, Human
ugggauuacaggcgugagcca

SEQ ID NO: 131466 - RNA, 22 nt, Human
ugggauuacaggcgugagccac

SEQ ID NO: 131467 - RNA, 22 nt, Human
ugggauuacaggcgugagccac

SEQ ID NO: 131468 - RNA, 24 nt, Human
ugggauuacaggcgugagccacug

SEQ ID NO: 131469 - RNA, 24 nt, Human
ugggauuacaggcgugagccacug

SEQ ID NO: 131470 - RNA, 23 nt, Human
uggggcuaaaaaaaaaauuggug

SEQ ID NO: 131471 - RNA, 24 nt, Human
uggugcagcuauaucauucaaaau

SEQ ID NO: 131472 - RNA, 24 nt, Human
uuaguagagacaggguuucaccau

SEQ ID NO: 131473 - RNA, 19 nt, Human
uucaugccauucuccugcc

SEQ ID NO: 131474 - RNA, 24 nt, Human
uugcccaggcuggagugcaguggc

SEQ ID NO: 131475 - RNA, 19 nt, Human
uuucaccauguuagccagg

SEQ ID NO: 131476 - RNA, 20 nt, Human
uuucaccauguuagccagga

SEQ ID NO: 131477 - RNA, 24 nt, Human
uuuuuaguagagacaggguuucac

SEQ ID NO: 131478 - RNA, 21 nt, Human
uuuuuguauuuuuaguagaga

SEQ ID NO: 131479 - RNA, 21 nt, Human
uuuuuuguauuuuuaguagag

SEQ ID NO: 131480 - RNA, 24 nt, Human
uuuuuuguauuuuuaguagagaca

SEQ ID NO: 131481 - RNA, 25 nt, Human
uuuuuuuuuuuugagacggagucuc

SEQ ID NO: 131482 - RNA, 20 nt, Human
uuuuuuuuuuuuuuuuuugg

SEQ ID NO: 131483 - RNA, 22 nt, Human
aaaaaaaaaaaucagcagugaa

SEQ ID NO: 131484 - RNA, 18 nt, Human
aaaaaaacaaaaaaggca

SEQ ID NO: 131485 - RNA, 21 nt, Human
aaaaaaacaaaaaaggcaccu

SEQ ID NO: 131486 - RNA, 23 nt, Human
aaaaaaaccccaacaauucagaa

SEQ ID NO: 131487 - RNA, 20 nt, Human
aaaaaccccaacaauucaga

SEQ ID NO: 131488 - RNA, 25 nt, Human
aaaacaaaaaaacaaaaaaggcacc

SEQ ID NO: 131489 - RNA, 24 nt, Human
aaaacaaaacaaaacaacaaaaaa

SEQ ID NO: 131490 - RNA, 25 nt, Human
aaaacaaaacaacaaaaaaaacccc

SEQ ID NO: 131491 - RNA, 22 nt, Human
aaaacaacaaaaaaaaccccaa

SEQ ID NO: 131492 - RNA, 18 nt, Human
aaaacagcaguuucacgu

SEQ ID NO: 131493 - RNA, 20 nt, Human
aaaacagcaguuucacgugg

SEQ ID NO: 131494 - RNA, 21 nt, Human
aaaaccccaacaauucagaaa

SEQ ID NO: 131495 - RNA, 21 nt, Human
aaaagugaaacuccaucuaca

SEQ ID NO: 131496 - RNA, 22 nt, Human
aaacaaaaaaggcaccuguuaa

SEQ ID NO: 131497 - RNA, 21 nt, Human
aaacaaaacaaaacaacaaaa

SEQ ID NO: 131498 - RNA, 25 nt, Human
aaacaaaacaacaaaaaaaacccca

SEQ ID NO: 131499 - RNA, 19 nt, Human
aaacaacaaaaaaaacccc

SEQ ID NO: 131500 - RNA, 24 nt, Human
aaacaacaaaaaaaaccccaacaa

SEQ ID NO: 131501 - RNA, 23 nt, Human
aaacagcaguuucacgugguuca

SEQ ID NO: 131502 - RNA, 24 nt, Human
aaacaucguacccccaaagcauga

SEQ ID NO: 131503 - RNA, 22 nt, Human
aaaccccaacaauucagaaaug

SEQ ID NO: 131504 - RNA, 21 nt, Human
aacaaaagugaaacuccaucu

SEQ ID NO: 131505 - RNA, 22 nt, Human
aacaaaagugaaacuccaucua

SEQ ID NO: 131506 - RNA, 19 nt, Human
aacauggugaaaccccguc

SEQ ID NO: 131507 - RNA, 20 nt, Human
aacauggugaaaccccgucu

SEQ ID NO: 131508 - RNA, 21 nt, Human
aacauggugaaaccccgucuc

SEQ ID NO: 131509 - RNA, 19 nt, Human
aacauggugaaaccccguu

SEQ ID NO: 131510 - RNA, 20 nt, Human
aacauggugaaaccccguuu

SEQ ID NO: 131511 - RNA, 21 nt, Human
aacauggugaaaccccguuuc

SEQ ID NO: 131512 - RNA, 22 nt, Human
aagaauuccucagcccagagac

SEQ ID NO: 131513 - RNA, 21 nt, Human
aauucuuaucccuacugaccc

SEQ ID NO: 131514 - RNA, 23 nt, Human
acaaaaaaacaaaaaaggcaccu

SEQ ID NO: 131515 - RNA, 22 nt, Human
acaaaacaaaacaaaacaacaa

SEQ ID NO: 131516 - RNA, 25 nt, Human
acaaaacaaaacaaaacaacaaaaa

SEQ ID NO: 131517 - RNA, 22 nt, Human
acaaaacaacaaaaaaaacccc

SEQ ID NO: 131518 - RNA, 23 nt, Human
acaaaacaacaaaaaaaacccca

SEQ ID NO: 131519 - RNA, 23 nt, Human
acaaacaaaaaaaaaaaucagca

SEQ ID NO: 131520 - RNA, 23 nt, Human
acagagugagacccugucucaaa

SEQ ID NO: 131521 - RNA, 22 nt, Human
accaaaaaaacgaaaaacaaaa

SEQ ID NO: 131522 - RNA, 27 nt, Human
accaaaaaaacgaaaaacaaaaaaaca

SEQ ID NO: 131523 - RNA, 24 nt, Human
accaacauggugaaaccccgucuc

SEQ ID NO: 131524 - RNA, 19 nt, Human
accacauuacaugagcaaa

SEQ ID NO: 131525 - RNA, 23 nt, Human
accacauuacaugagcaaaccca

SEQ ID NO: 131526 - RNA, 18 nt, Human
acccccaaagcaugacac

SEQ ID NO: 131527 - RNA, 24 nt, Human
accccgucucuacuaaaaauacaa

SEQ ID NO: 131528 - RNA, 23 nt, Human
accccguuucuacuaaacauaca

SEQ ID NO: 131529 - RNA, 24 nt, Human
accccguuucuacuaaacauacaa

SEQ ID NO: 131530 - RNA, 24 nt, Human
accugaggucaggaguuugagacc

SEQ ID NO: 131531 - RNA, 18 nt, Human
acgaaaaacaaaaaaaca

SEQ ID NO: 131532 - RNA, 20 nt, Human
acggaguauaaacaucguac

SEQ ID NO: 131533 - RNA, 23 nt, Human
acggaguauaaacaucguacccc

SEQ ID NO: 131534 - RNA, 24 nt, Human
acuaaaaauacaaacauuagccgg

SEQ ID NO: 131535 - RNA, 18 nt, Human
acuacacuccagccuggg

SEQ ID NO: 131536 - RNA, 23 nt, Human
acuacacuccagccugggcaaca

SEQ ID NO: 131537 - RNA, 26 nt, Human
acucacagacauccaacgaguacccc

SEQ ID NO: 131538 - RNA, 24 nt, Human
acuccagccugagcgacagaguga

SEQ ID NO: 131539 - RNA, 18 nt, Human
acugcacuccagccugag

SEQ ID NO: 131540 - RNA, 24 nt, Human
acugcacuccagccugagcgacag

SEQ ID NO: 131541 - RNA, 20 nt, Human
agaaccacuugaaccugaga

SEQ ID NO: 131542 - RNA, 23 nt, Human
agaagagucaagaggauggagcu

SEQ ID NO: 131543 - RNA, 23 nt, Human
agaucaccugaggucaggaguuc

SEQ ID NO: 131544 - RNA, 19 nt, Human
agcaaacccaacgcuggug

SEQ ID NO: 131545 - RNA, 24 nt, Human
agcacuuugggaggcugagguggg

SEQ ID NO: 131546 - RNA, 23 nt, Human
agccgggcgugguggcacaugcc

SEQ ID NO: 131547 - RNA, 24 nt, Human
agccugaccaacauggugaaaccc

SEQ ID NO: 131548 - RNA, 22 nt, Human
agccuggccaacauggugaaac

SEQ ID NO: 131549 - RNA, 24 nt, Human
agccuggccaacauggugaaaccc

SEQ ID NO: 131550 - RNA, 21 nt, Human
agccugggcaacaaaagugaa

SEQ ID NO: 131551 - RNA, 23 nt, Human
agccugggcaacaaaagugaaac

SEQ ID NO: 131552 - RNA, 21 nt, Human
agcugccgaugcccugaacag

SEQ ID NO: 131553 - RNA, 24 nt, Human
aggaaggagaaccacuugaaccug

SEQ ID NO: 131554 - RNA, 20 nt, Human
aggaguuugagaccagccug

SEQ ID NO: 131555 - RNA, 24 nt, Human
aggcggagguugcagugagccaag

SEQ ID NO: 131556 - RNA, 22 nt, Human
aggcgggcagaucaccugaggu

SEQ ID NO: 131557 - RNA, 26 nt, Human
aggcgggcagaucaccugaggucagg

SEQ ID NO: 131558 - RNA, 24 nt, Human
aggcugaggaaggagaaccacuug

SEQ ID NO: 131559 - RNA, 24 nt, Human
aggcugaggugggcggaucaccug

SEQ ID NO: 131560 - RNA, 24 nt, Human
aggugcaguggcucaugccuguaa

SEQ ID NO: 131561 - RNA, 22 nt, Human
aggugggcggaucaccugaggu

SEQ ID NO: 131562 - RNA, 23 nt, Human
aguggcucaugccuguaauccca

SEQ ID NO: 131563 - RNA, 24 nt, Human
aguggcucaugccuguaaucccag

SEQ ID NO: 131564 - RNA, 20 nt, Human
aucaccugaggucaggaguu

SEQ ID NO: 131565 - RNA, 24 nt, Human
aucaccugaggucaggaguucgag

SEQ ID NO: 131566 - RNA, 24 nt, Human
aucaccugaggucaggaguuugag

SEQ ID NO: 131567 - RNA, 24 nt, Human
aucgcgccacuacacuccagccug

SEQ ID NO: 131568 - RNA, 19 nt, Human
augccuguaaucccagcac

SEQ ID NO: 131569 - RNA, 23 nt, Human
auucuuaucccuacugacccgua

SEQ ID NO: 131570 - RNA, 19 nt, Human
caaaaaaacaaaaaaggca

SEQ ID NO: 131571 - RNA, 22 nt, Human
caaaaaaacaaaaaaggcaccu

SEQ ID NO: 131572 - RNA, 24 nt, Human
caaaaaaacaaaaaaggcaccugu

SEQ ID NO: 131573 - RNA, 21 nt, Human
caaaaaaggcaccuguuaaaa

SEQ ID NO: 131574 - RNA, 25 nt, Human
caaaacaaaacaacaaaaaaaaccc

SEQ ID NO: 131575 - RNA, 24 nt, Human
caaaacaacaaaaaaaaccccaac

SEQ ID NO: 131576 - RNA, 19 nt, Human
caaagaccaggacguggug

SEQ ID NO: 131577 - RNA, 21 nt, Human
caaagaccaggacguggugug

SEQ ID NO: 131578 - RNA, 21 nt, Human
caaagcaugacaccucuuuug

SEQ ID NO: 131579 - RNA, 20 nt, Human
caacaaaaaaaaccccaaca

SEQ ID NO: 131580 - RNA, 25 nt, Human
caacaaauguaaaaauucaaauauu

SEQ ID NO: 131581 - RNA, 24 nt, Human
caacauggugaaaccccgucucua

SEQ ID NO: 131582 - RNA, 24 nt, Human
caacauggugaaaccccguuucua

SEQ ID NO: 131583 - RNA, 18 nt, Human
caacgcuggugaaaccag

SEQ ID NO: 131584 - RNA, 24 nt, Human
cacaccugucaucccagcacuuug

SEQ ID NO: 131585 - RNA, 21 nt, Human
cacauuacaugagcaaaccca

SEQ ID NO: 131586 - RNA, 23 nt, Human
caccugaggucaggaguucgaga

SEQ ID NO: 131587 - RNA, 23 nt, Human
caccugaggucaggaguuugaga

SEQ ID NO: 131588 - RNA, 23 nt, Human
caccugucaucccagcacuuugg

SEQ ID NO: 131589 - RNA, 24 nt, Human
caccugucaucccagcacuuuggg

SEQ ID NO: 131590 - RNA, 24 nt, Human
cacuacacuccagccugggcaaca

SEQ ID NO: 131591 - RNA, 19 nt, Human
cacuauguaaauguaucag

SEQ ID NO: 131592 - RNA, 22 nt, Human
cacuccagccugagcgacagag

SEQ ID NO: 131593 - RNA, 24 nt, Human
cacuccagccugagcgacagagug

SEQ ID NO: 131594 - RNA, 19 nt, Human
cacugcacuccagccugag

SEQ ID NO: 131595 - RNA, 20 nt, Human
cacugcacuccagccugagc

SEQ ID NO: 131596 - RNA, 21 nt, Human
cacugcacuccagccugagcg

SEQ ID NO: 131597 - RNA, 22 nt, Human
cacugcacuccagccugagcga

SEQ ID NO: 131598 - RNA, 24 nt, Human
cacugcacuccagccugagcgaca

SEQ ID NO: 131599 - RNA, 24 nt, Human
cagaucaccugaggucaggaguuc

SEQ ID NO: 131600 - RNA, 24 nt, Human
cagcacuuugggagaccgaggcgg

SEQ ID NO: 131601 - RNA, 21 nt, Human
cagcacuuugggaggcugagg

SEQ ID NO: 131602 - RNA, 24 nt, Human
cagcacuuugggaggcugaggugg

SEQ ID NO: 131603 - RNA, 19 nt, Human
cagcagugaauguccuugu

SEQ ID NO: 131604 - RNA, 20 nt, Human
caugccuguaaucccagcac

SEQ ID NO: 131605 - RNA, 24 nt, Human
caugccuguaaucccagcacuuug

SEQ ID NO: 131606 - RNA, 21 nt, Human
ccacuacacuccagccugggc

SEQ ID NO: 131607 - RNA, 23 nt, Human
ccacuacacuccagccugggcaa

SEQ ID NO: 131608 - RNA, 24 nt, Human
ccacuacacuccagccugggcaac

SEQ ID NO: 131609 - RNA, 24 nt, Human
ccacuugaaccugagaggcggagg

SEQ ID NO: 131610 - RNA, 24 nt, Human
ccaggagcuacuggagugaccaaa

SEQ ID NO: 131611 - RNA, 25 nt, Human
ccaucuacaaaacaaaacaaaacaa

SEQ ID NO: 131612 - RNA, 19 nt, Human
cccaacccccguauccccc

SEQ ID NO: 131613 - RNA, 23 nt, Human
cccaacccccguaucccccagga

SEQ ID NO: 131614 - RNA, 18 nt, Human
cccccaaagcaugacacc

SEQ ID NO: 131615 - RNA, 24 nt, Human
cccugucucaaacaaacaaaaaaa

SEQ ID NO: 131616 - RNA, 21 nt, Human
ccuagaaaacagcaguuucac

SEQ ID NO: 131617 - RNA, 22 nt, Human
ccucuguaaucuagcccaaccc

SEQ ID NO: 131618 - RNA, 23 nt, Human
ccugaccaacauggugaaacccc

SEQ ID NO: 131619 - RNA, 24 nt, Human
ccugaccaacauggugaaaccccg

SEQ ID NO: 131620 - RNA, 22 nt, Human
ccugaggucaggaguuugagac

SEQ ID NO: 131621 - RNA, 23 nt, Human
ccuggccaacauggugaaacccc

SEQ ID NO: 131622 - RNA, 24 nt, Human
ccuggccaacauggugaaaccccg

SEQ ID NO: 131623 - RNA, 25 nt, Human
ccugggcaacaaaagugaaacucca

SEQ ID NO: 131624 - RNA, 22 nt, Human
ccuguaaucccagcacuuuggg

SEQ ID NO: 131625 - RNA, 21 nt, Human
ccuguaaucccagcuacucgg

SEQ ID NO: 131626 - RNA, 22 nt, Human
ccuguaaucccagcuacucggg

SEQ ID NO: 131627 - RNA, 21 nt, Human
ccuguaaucccagcuacuugg

SEQ ID NO: 131628 - RNA, 18 nt, Human
ccuuccagaccgucucug

SEQ ID NO: 131629 - RNA, 24 nt, Human
cgagaacagccuggccaacauggu

SEQ ID NO: 131630 - RNA, 20 nt, Human
cgaggcgggcagaucaccug

SEQ ID NO: 131631 - RNA, 24 nt, Human
cgccacuacacuccagccugggca

SEQ ID NO: 131632 - RNA, 19 nt, Human
cggagcaggguucagcugc

SEQ ID NO: 131633 - RNA, 24 nt, Human
cggaucaccugaggucaggaguuu

SEQ ID NO: 131634 - RNA, 27 nt, Human
cggaucaccugaggucaggaguuugag

SEQ ID NO: 131635 - RNA, 24 nt, Human
cgggcagaucaccugaggucagga

SEQ ID NO: 131636 - RNA, 21 nt, Human
cuagcccaacccccguauccc

SEQ ID NO: 131637 - RNA, 24 nt, Human
cucacaccugucaucccagcacuu

SEQ ID NO: 131638 - RNA, 24 nt, Human
cucaugccuguaaucccagcacuu

SEQ ID NO: 131639 - RNA, 18 nt, Human
cugaaacugugacacagu

SEQ ID NO: 131640 - RNA, 20 nt, Human
cuguccucuggaaguugggc

SEQ ID NO: 131641 - RNA, 18 nt, Human
cugucucaaacaaacaaa

SEQ ID NO: 131642 - RNA, 22 nt, Human
cuuuuccugauuguacaacaaa

SEQ ID NO: 131643 - RNA, 18 nt, Human
gacaccauuugaguaugg

SEQ ID NO: 131644 - RNA, 21 nt, Human
gacagagugagacccugucuc

SEQ ID NO: 131645 - RNA, 24 nt, Human
gacagagugagacccugucucaaa

SEQ ID NO: 131646 - RNA, 23 nt, Human
gagaucgcgccacuacacuccag

SEQ ID NO: 131647 - RNA, 25 nt, Human
gaggcgggcagaucaccugagguca

SEQ ID NO: 131648 - RNA, 21 nt, Human
gaggcugagccgagaucgcgc

SEQ ID NO: 131649 - RNA, 18 nt, Human
gaggcugaggaaggagaa

SEQ ID NO: 131650 - RNA, 23 nt, Human
gaggugggcggaucaccugaggu

SEQ ID NO: 131651 - RNA, 18 nt, Human
gagguugcagugagccaa

SEQ ID NO: 131652 - RNA, 21 nt, Human
gagguugcagugagccaagau

SEQ ID NO: 131653 - RNA, 23 nt, Human
gagguugcagugagccaagauug

SEQ ID NO: 131654 - RNA, 18 nt, Human
gaguauaaacaucguacc

SEQ ID NO: 131655 - RNA, 24 nt, Human
gaucaccugaggucaggaguucga

SEQ ID NO: 131656 - RNA, 24 nt, Human
gaucaccugaggucaggaguuuga

SEQ ID NO: 131657 - RNA, 23 nt, Human
gcacuccagccugagcgacagag

SEQ ID NO: 131658 - RNA, 24 nt, Human
gcacuccagccugagcgacagagu

SEQ ID NO: 131659 - RNA, 24 nt, Human
gcaggucaggugcaguggcucaug

SEQ ID NO: 131660 - RNA, 21 nt, Human
gcaucacugcacuccagccug

SEQ ID NO: 131661 - RNA, 21 nt, Human
gccaacauggugaaaccccgu

SEQ ID NO: 131662 - RNA, 22 nt, Human
gccacuacacuccagccugggc

SEQ ID NO: 131663 - RNA, 20 nt, Human
gccgagaucgcgccacuaca

SEQ ID NO: 131664 - RNA, 23 nt, Human
gcgacagagugagacccugucuc

SEQ ID NO: 131665 - RNA, 18 nt, Human
gcgcaguggcucacaccu

SEQ ID NO: 131666 - RNA, 25 nt, Human
gcguguuuccuuccagaccgucucu

SEQ ID NO: 131667 - RNA, 21 nt, Human
ggagaaccacuugaaccugag

SEQ ID NO: 131668 - RNA, 22 nt, Human
ggagguugcagugagccaagau

SEQ ID NO: 131669 - RNA, 24 nt, Human
ggagguugcagugagccaagauug

SEQ ID NO: 131670 - RNA, 22 nt, Human
ggaucaccugaggucaggaguu

SEQ ID NO: 131671 - RNA, 22 nt, Human
ggaucaccugaggucaggaguu

SEQ ID NO: 131672 - RNA, 21 nt, Human
ggcacaugccuguaaucccag

SEQ ID NO: 131673 - RNA, 25 nt, Human
ggcagaucaccugaggucaggaguu

SEQ ID NO: 131674 - RNA, 21 nt, Human
ggcggaucaccugaggucagg

SEQ ID NO: 131675 - RNA, 23 nt, Human
ggcgugguggcacaugccuguaa

SEQ ID NO: 131676 - RNA, 19 nt, Human
gggaggcugagccgagauc

SEQ ID NO: 131677 - RNA, 20 nt, Human
gggaggcugaggugggcgga

SEQ ID NO: 131678 - RNA, 25 nt, Human
gggcaacaaaagugaaacuccaucc

SEQ ID NO: 131679 - RNA, 24 nt, Human
gggcgcaguggcucacaccuguca

SEQ ID NO: 131680 - RNA, 19 nt, Human
ggucaggaguuugagacca

SEQ ID NO: 131681 - RNA, 18 nt, Human
ggucaggugcaguggcuc

SEQ ID NO: 131682 - RNA, 24 nt, Human
ggugccuguaaucccagcuacuug

SEQ ID NO: 131683 - RNA, 24 nt, Human
ggugguaggugccuguaaucccag

SEQ ID NO: 131684 - RNA, 25 nt, Human
guaaaaauucaaauauuacaaaaug

SEQ ID NO: 131685 - RNA, 27 nt, Human
gugcacccgccacccacacggcugaca

SEQ ID NO: 131686 - RNA, 23 nt, Human
guggcacaugccuguaaucccag

SEQ ID NO: 131687 - RNA, 23 nt, Human
gugguaggugccuguaaucccag

SEQ ID NO: 131688 - RNA, 20 nt, Human
uaaaaauacaaacauuagcc

SEQ ID NO: 131689 - RNA, 19 nt, Human
uaaaagccugaaacuguga

SEQ ID NO: 131690 - RNA, 24 nt, Human
uaacauguuauaaaauaaaugccc

SEQ ID NO: 131691 - RNA, 20 nt, Human
uacaaaacaaaacaaaacaa

SEQ ID NO: 131692 - RNA, 24 nt, Human
uacaaaacaaaacaaaacaacaaa

SEQ ID NO: 131693 - RNA, 21 nt, Human
uacauaaacaacuugucccuc

SEQ ID NO: 131694 - RNA, 20 nt, Human
uacuaaaaauacaaacauua

SEQ ID NO: 131695 - RNA, 18 nt, Human
uagaaaacagcaguuuca

SEQ ID NO: 131696 - RNA, 22 nt, Human
uagccgggcgugguggcacaug

SEQ ID NO: 131697 - RNA, 21 nt, Human
uauaaacaucguacccccaaa

SEQ ID NO: 131698 - RNA, 25 nt, Human
uaugaccagguacucacagacaucc

SEQ ID NO: 131699 - RNA, 20 nt, Human
ucacugcacuccagccugag

SEQ ID NO: 131700 - RNA, 21 nt, Human
ucacugcacuccagccugagc

SEQ ID NO: 131701 - RNA, 24 nt, Human
ucacugcacuccagccugagcgac

SEQ ID NO: 131702 - RNA, 19 nt, Human
ucagaagguauaagaaaug

SEQ ID NO: 131703 - RNA, 20 nt, Human
ucagaagguauaagaaauga

SEQ ID NO: 131704 - RNA, 22 nt, Human
ucaggccucaaacaaagaccag

SEQ ID NO: 131705 - RNA, 24 nt, Human
ucaggcugggcgcaguggcucaca

SEQ ID NO: 131706 - RNA, 22 nt, Human
ucaugccuguaaucccagcacu

SEQ ID NO: 131707 - RNA, 24 nt, Human
uccagccugagcgacagagugaga

SEQ ID NO: 131708 - RNA, 20 nt, Human
uccaguuucuacacagaaac

SEQ ID NO: 131709 - RNA, 21 nt, Human
uccaucuacaaaacaaaacaa

SEQ ID NO: 131710 - RNA, 23 nt, Human
uccaucuacaaaacaaaacaaaa

SEQ ID NO: 131711 - RNA, 23 nt, Human
ucccccaggauuacugcuguuca

SEQ ID NO: 131712 - RNA, 25 nt, Human
ucccucaagcaagguggccaacuuu

SEQ ID NO: 131713 - RNA, 22 nt, Human
uccgagaugauaguaacgcuga

SEQ ID NO: 131714 - RNA, 19 nt, Human
ucucuacuaaaaauacaaa

SEQ ID NO: 131715 - RNA, 20 nt, Human
ucucugugcacccgccaccc

SEQ ID NO: 131716 - RNA, 24 nt, Human
ugaaaccagagaacagaagaauuc

SEQ ID NO: 131717 - RNA, 23 nt, Human
ugaaauaaaugaucgcucaccaa

SEQ ID NO: 131718 - RNA, 22 nt, Human
ugaccaaaaaaacgaaaaacaa

SEQ ID NO: 131719 - RNA, 23 nt, Human
ugaccaaaaaaacgaaaaacaaa

SEQ ID NO: 131720 - RNA, 24 nt, Human
ugaccaacauggugaaaccccguc

SEQ ID NO: 131721 - RNA, 19 nt, Human
ugaccacauuacaugagca

SEQ ID NO: 131722 - RNA, 19 nt, Human
ugaccagguacucacagac

SEQ ID NO: 131723 - RNA, 23 nt, Human
ugagaccagccugaccaacaugg

SEQ ID NO: 131724 - RNA, 24 nt, Human
ugagaccagccugaccaacauggu

SEQ ID NO: 131725 - RNA, 24 nt, Human
ugagaggcggagguugcagugagc

SEQ ID NO: 131726 - RNA, 23 nt, Human
ugagcaaacccaacgcuggugaa

SEQ ID NO: 131727 - RNA, 19 nt, Human
ugagccgagaucgcgccac

SEQ ID NO: 131728 - RNA, 21 nt, Human
ugagcgacagagugagacccu

SEQ ID NO: 131729 - RNA, 24 nt, Human
ugagcgacagagugagacccuguc

SEQ ID NO: 131730 - RNA, 20 nt, Human
ugaggaaggagaaccacuug

SEQ ID NO: 131731 - RNA, 24 nt, Human
ugaggaaggagaaccacuugaacc

SEQ ID NO: 131732 - RNA, 18 nt, Human
ugaggucaggaguuugag

SEQ ID NO: 131733 - RNA, 20 nt, Human
ugaggugggcggaucaccug

SEQ ID NO: 131734 - RNA, 23 nt, Human
ugaggugggcggaucaccugagg

SEQ ID NO: 131735 - RNA, 24 nt, Human
ugaggugggcggaucaccugaggu

SEQ ID NO: 131736 - RNA, 26 nt, Human
ugaggugggcggaucaccugagguca

SEQ ID NO: 131737 - RNA, 21 nt, Human
ugauagcuguucaacagacau

SEQ ID NO: 131738 - RNA, 20 nt, Human
ugauuguacaacaaauguaa

SEQ ID NO: 131739 - RNA, 21 nt, Human
ugcaucacugcacuccagccu

SEQ ID NO: 131740 - RNA, 19 nt, Human
ugcccugaacagcuuccag

SEQ ID NO: 131741 - RNA, 23 nt, Human
ugccuguaaucccagcacuuugg

SEQ ID NO: 131742 - RNA, 23 nt, Human
ugccuguaaucccagcacuuugg

SEQ ID NO: 131743 - RNA, 23 nt, Human
ugccuguaaucccagcuacucgg

SEQ ID NO: 131744 - RNA, 24 nt, Human
ugccuguaaucccagcuacucggg

SEQ ID NO: 131745 - RNA, 23 nt, Human
ugccuguaaucccagcuacuugg

SEQ ID NO: 131746 - RNA, 24 nt, Human
ugccuguaaucccagcuacuuggg

SEQ ID NO: 131747 - RNA, 23 nt, Human
uggaaguugggcugucagaaggu

SEQ ID NO: 131748 - RNA, 18 nt, Human
uggagcugcccauuugcc

SEQ ID NO: 131749 - RNA, 21 nt, Human
uggcacaugccuguaauccca

SEQ ID NO: 131750 - RNA, 22 nt, Human
uggcacaugccuguaaucccag

SEQ ID NO: 131751 - RNA, 24 nt, Human
uggccaacauggugaaaccccguu

SEQ ID NO: 131752 - RNA, 22 nt, Human
uggccaacuucagccaugacac

SEQ ID NO: 131753 - RNA, 18 nt, Human
uggccuagaaaacagcag

SEQ ID NO: 131754 - RNA, 22 nt, Human
uggcucacaccugucaucccag

SEQ ID NO: 131755 - RNA, 24 nt, Human
uggcucacaccugucaucccagca

SEQ ID NO: 131756 - RNA, 22 nt, Human
uggcucaugccuguaaucccag

SEQ ID NO: 131757 - RNA, 24 nt, Human
uggcucaugccuguaaucccagca

SEQ ID NO: 131758 - RNA, 24 nt, Human
ugggagaccgaggcgggcagauca

SEQ ID NO: 131759 - RNA, 19 nt, Human
ugggaggcugaggaaggag

SEQ ID NO: 131760 - RNA, 24 nt, Human
ugggaggcugaggaaggagaacca

SEQ ID NO: 131761 - RNA, 18 nt, Human
ugggaggcugaggugggc

SEQ ID NO: 131762 - RNA, 19 nt, Human
ugggaggcugaggugggcg

SEQ ID NO: 131763 - RNA, 24 nt, Human
ugggaggcugaggugggcggauca

SEQ ID NO: 131764 - RNA, 24 nt, Human
ugggcggaucaccugaggucagga

SEQ ID NO: 131765 - RNA, 21 nt, Human
ugggggguuuccuauuucuug

SEQ ID NO: 131766 - RNA, 22 nt, Human
ugguaggugccuguaaucccag

SEQ ID NO: 131767 - RNA, 24 nt, Human
ugguggcacaugccuguaauccca

SEQ ID NO: 131768 - RNA, 24 nt, Human
uggugguaggugccuguaauccca

SEQ ID NO: 131769 - RNA, 22 nt, Human
uguacaacaaauguaaaaauuc

SEQ ID NO: 131770 - RNA, 21 nt, Human
ugugcacccgccacccacacg

SEQ ID NO: 131771 - RNA, 23 nt, Human
uguuuccuuccagaccgucucug

SEQ ID NO: 131772 - RNA, 18 nt, Human
uuagccgggcgugguggc

SEQ ID NO: 131773 - RNA, 20 nt, Human
uuagccgggcgugguggcac

SEQ ID NO: 131774 - RNA, 24 nt, Human
uuagccgggcgugguggcacaugc

SEQ ID NO: 131775 - RNA, 25 nt, Human
uuccagaccgucucugugcacccgc

SEQ ID NO: 131776 - RNA, 23 nt, Human
uuccugauuguacaacaaaugua

SEQ ID NO: 131777 - RNA, 24 nt, Human
uugaaccugagaggcggagguugc

SEQ ID NO: 131778 - RNA, 21 nt, Human
uugcagugagccaagauugca

SEQ ID NO: 131779 - RNA, 23 nt, Human
uugcaucacugcacuccagccug

SEQ ID NO: 131780 - RNA, 25 nt, Human
uugggaggcugaggugggcggauca

SEQ ID NO: 131781 - RNA, 21 nt, Human
uuucuacuaaacauacaaaaa

SEQ ID NO: 131782 - RNA, 20 nt, Human
aacaaaaaguggaaugcaag

SEQ ID NO: 131783 - RNA, 20 nt, Human
acaugcuggaaccuaacuca

SEQ ID NO: 131784 - RNA, 20 nt, Human
agcuagggucccaagcaggg

SEQ ID NO: 131785 - RNA, 20 nt, Human
aucacuuccaaaacguagcc

SEQ ID NO: 131786 - RNA, 19 nt, Human
augcaaaaugucaccacuu

SEQ ID NO: 131787 - RNA, 22 nt, Human
caaaaugucaccacuucuuaaa

SEQ ID NO: 131788 - RNA, 22 nt, Human
caaggucacauaaaaugcauau

SEQ ID NO: 131789 - RNA, 19 nt, Human
cacugaagcauggcaaggu

SEQ ID NO: 131790 - RNA, 20 nt, Human
ccagaauacauaggaaauca

SEQ ID NO: 131791 - RNA, 23 nt, Human
cuaagaauucuccgcccucccag

SEQ ID NO: 131792 - RNA, 18 nt, Human
uaagaauucuccgcccuc

SEQ ID NO: 131793 - RNA, 25 nt, Human
uagaauacccagaauacauaggaaa

SEQ ID NO: 131794 - RNA, 19 nt, Human
ucaaaguuuccuuuaauag

SEQ ID NO: 131795 - RNA, 19 nt, Human
ucagacucuuucuauguaa

SEQ ID NO: 131796 - RNA, 23 nt, Human
ucagucaucaaauaacauacauc

SEQ ID NO: 131797 - RNA, 26 nt, Human
ugaaaaauagccuuggccaguaacac

SEQ ID NO: 131798 - RNA, 23 nt, Human
ugaauguaugcuaagaauucucc

SEQ ID NO: 131799 - RNA, 21 nt, Human
uggaaccuaacucagaugcug

SEQ ID NO: 131800 - RNA, 22 nt, Human
uggcaaggucacauaaaaugca

SEQ ID NO: 131801 - RNA, 21 nt, Human
uggcuaaaagucaggucauuc

SEQ ID NO: 131802 - RNA, 24 nt, Human
uuacaugcuggaaccuaacucaga

SEQ ID NO: 131803 - RNA, 25 nt, Human
uucaucaugcaaaaugucaccacuu

SEQ ID NO: 131804 - RNA, 27 nt, Human
acagagccccauaggggcagagaggcc

SEQ ID NO: 131805 - RNA, 21 nt, Human
agaagccaggcccucaggugc

SEQ ID NO: 131806 - RNA, 19 nt, Human
agcccgcacccggccgcag

SEQ ID NO: 131807 - RNA, 21 nt, Human
aggggcagagaggccucccug

SEQ ID NO: 131808 - RNA, 20 nt, Human
aggugggcucuggcagcggg

SEQ ID NO: 131809 - RNA, 20 nt, Human
cccgcacccggccgcagcca

SEQ ID NO: 131810 - RNA, 23 nt, Human
ccgcacccggccgcagccaagcg

SEQ ID NO: 131811 - RNA, 24 nt, Human
ccgccucaccagcgcguucaaccc

SEQ ID NO: 131812 - RNA, 23 nt, Human
ccugcugucgccaucccugaggg

SEQ ID NO: 131813 - RNA, 22 nt, Human
cgcagccaagcgugggccugcc

SEQ ID NO: 131814 - RNA, 24 nt, Human
cgccacugcccccugccggccgcc

SEQ ID NO: 131815 - RNA, 21 nt, Human
cggccgccacugcccccugcc

SEQ ID NO: 131816 - RNA, 22 nt, Human
cuaauggacggccgccucucuc

SEQ ID NO: 131817 - RNA, 19 nt, Human
cucagcccgcacccggccg

SEQ ID NO: 131818 - RNA, 23 nt, Human
gacaacggccgccacugcccccc

SEQ ID NO: 131819 - RNA, 21 nt, Human
gacccggggcagggucagcaa

SEQ ID NO: 131820 - RNA, 18 nt, Human
gagaagccaggcccucag

SEQ ID NO: 131821 - RNA, 20 nt, Human
gccucaccagcgcguucaac

SEQ ID NO: 131822 - RNA, 24 nt, Human
gcguucaacccgcccgcgucaggc

SEQ ID NO: 131823 - RNA, 18 nt, Human
ucccugaggggugcagga

SEQ ID NO: 131824 - RNA, 18 nt, Human
ucccugggaccagaggag

SEQ ID NO: 131825 - RNA, 22 nt, Human
ugagaagccaggcccucaggug

SEQ ID NO: 131826 - RNA, 26 nt, Human
ugagguggcagugagaagccaggccc

SEQ ID NO: 131827 - RNA, 22 nt, Human
ugcaggacagagccccauaggg

SEQ ID NO: 131828 - RNA, 18 nt, Human
uggcagugagaagccagg

SEQ ID NO: 131829 - RNA, 22 nt, Human
uggcagugagaagccaggcccu

SEQ ID NO: 131830 - RNA, 23 nt, Human
aaagcaaacugugaaaagcuuac

SEQ ID NO: 131831 - RNA, 18 nt, Human
aacccccucaggaaggca

SEQ ID NO: 131832 - RNA, 23 nt, Human
aagcuggaagugaaagaagggac

SEQ ID NO: 131833 - RNA, 25 nt, Human
aagggaagacaaguuucuagggaaa

SEQ ID NO: 131834 - RNA, 21 nt, Human
aagguaaacugaggccaccag

SEQ ID NO: 131835 - RNA, 20 nt, Human
acaaaagucugacauggugc

SEQ ID NO: 131836 - RNA, 25 nt, Human
acagacacccaugacacuuccaaau

SEQ ID NO: 131837 - RNA, 23 nt, Human
acuccuucuaggacuuuuuccac

SEQ ID NO: 131838 - RNA, 19 nt, Human
agacacccaugacacuucc

SEQ ID NO: 131839 - RNA, 24 nt, Human
agauuuagccaccaccuagaacag

SEQ ID NO: 131840 - RNA, 20 nt, Human
aggguuggguuuccuccccg

SEQ ID NO: 131841 - RNA, 23 nt, Human
agguagggguggcagaagggaga

SEQ ID NO: 131842 - RNA, 18 nt, Human
aggugggccagauaggga

SEQ ID NO: 131843 - RNA, 19 nt, Human
aucaagagauaacagaaca

SEQ ID NO: 131844 - RNA, 23 nt, Human
auguccaauuuuucaggaccagc

SEQ ID NO: 131845 - RNA, 21 nt, Human
caacggggcaacugugcucuc

SEQ ID NO: 131846 - RNA, 18 nt, Human
caccaccuagaacagggc

SEQ ID NO: 131847 - RNA, 21 nt, Human
caccaguaagcaugugcucca

SEQ ID NO: 131848 - RNA, 26 nt, Human
caccauguugagccuccuuugguuuc

SEQ ID NO: 131849 - RNA, 25 nt, Human
cacccaagaaaaaccaguuacucca

SEQ ID NO: 131850 - RNA, 23 nt, Human
cacccagauuaggcccagauuua

SEQ ID NO: 131851 - RNA, 23 nt, Human
cacccaugacacuuccaaauuua

SEQ ID NO: 131852 - RNA, 23 nt, Human
cacccccauccucauccuggagg

SEQ ID NO: 131853 - RNA, 20 nt, Human
cagcacaagggcaagggcag

SEQ ID NO: 131854 - RNA, 18 nt, Human
caugcucucuucucacca

SEQ ID NO: 131855 - RNA, 20 nt, Human
caugugcuccaggccaaggc

SEQ ID NO: 131856 - RNA, 19 nt, Human
ccaacuccuccccuuggca

SEQ ID NO: 131857 - RNA, 25 nt, Human
cccaagaaaaaccaguuacuccacc

SEQ ID NO: 131858 - RNA, 23 nt, Human
cccaaucuagcccuguucuagac

SEQ ID NO: 131859 - RNA, 23 nt, Human
cccacagacacccaugacacuuc

SEQ ID NO: 131860 - RNA, 27 nt, Human
cccacagacacccaugacacuuccaaa

SEQ ID NO: 131861 - RNA, 24 nt, Human
ccccaagaagacugaguuuccuuu

SEQ ID NO: 131862 - RNA, 18 nt, Human
ccccccagacucuacagg

SEQ ID NO: 131863 - RNA, 19 nt, Human
ccuccuuugguuucccaug

SEQ ID NO: 131864 - RNA, 21 nt, Human
ccucucaucccuaggggcaaa

SEQ ID NO: 131865 - RNA, 18 nt, Human
ccugaaaagggaagacuc

SEQ ID NO: 131866 - RNA, 22 nt, Human
ccugagccagccucuccccagg

SEQ ID NO: 131867 - RNA, 18 nt, Human
ccuggaggccaguccagg

SEQ ID NO: 131868 - RNA, 20 nt, Human
ccuggaggccaguccaggcu

SEQ ID NO: 131869 - RNA, 22 nt, Human
ccuuucuugggccugaaaaggg

SEQ ID NO: 131870 - RNA, 22 nt, Human
cucacauccagaaucuaggauc

SEQ ID NO: 131871 - RNA, 23 nt, Human
cuccccaggguagcuaaaaacag

SEQ ID NO: 131872 - RNA, 26 nt, Human
cugugugcccauucccuggugguccc

SEQ ID NO: 131873 - RNA, 19 nt, Human
cuuacuguucagcagucug

SEQ ID NO: 131874 - RNA, 26 nt, Human
cuuccucacauccagaaucuaggauc

SEQ ID NO: 131875 - RNA, 21 nt, Human
cuuguugggaggaacagugaa

SEQ ID NO: 131876 - RNA, 21 nt, Human
gaagaagagagguuagcugag

SEQ ID NO: 131877 - RNA, 23 nt, Human
gaaggcacagaaaagugaggcuc

SEQ ID NO: 131878 - RNA, 21 nt, Human
gcagaagggagaucaaacugg

SEQ ID NO: 131879 - RNA, 18 nt, Human
gcagcugguuccuccagg

SEQ ID NO: 131880 - RNA, 21 nt, Human
gccacccccauccucauccug

SEQ ID NO: 131881 - RNA, 22 nt, Human
gccucucaucccuaggggcaaa

SEQ ID NO: 131882 - RNA, 23 nt, Human
gcucuccaacuccuccccuuggc

SEQ ID NO: 131883 - RNA, 22 nt, Human
ggaagaagagagguuagcugag

SEQ ID NO: 131884 - RNA, 22 nt, Human
ggaagcaugugcagccuacaag

SEQ ID NO: 131885 - RNA, 21 nt, Human
ggcaagggcagcagguacuca

SEQ ID NO: 131886 - RNA, 20 nt, Human
ggccugaaaagggaagacuc

SEQ ID NO: 131887 - RNA, 24 nt, Human
ggggugagguagggguggcagaag

SEQ ID NO: 131888 - RNA, 18 nt, Human
gguuuccuccccggccca

SEQ ID NO: 131889 - RNA, 23 nt, Human
guagacucuccaugagccuaaag

SEQ ID NO: 131890 - RNA, 18 nt, Human
gugaauuucccacacugg

SEQ ID NO: 131891 - RNA, 20 nt, Human
guggggaggcaucuucuuug

SEQ ID NO: 131892 - RNA, 24 nt, Human
uaaaaaagaccuaacauuguaaug

SEQ ID NO: 131893 - RNA, 18 nt, Human
uaacagaacacacaggag

SEQ ID NO: 131894 - RNA, 20 nt, Human
uacaaaagucugacauggug

SEQ ID NO: 131895 - RNA, 25 nt, Human
uacagagcaaaaaagugauuugcag

SEQ ID NO: 131896 - RNA, 19 nt, Human
uacagagugacgagauguc

SEQ ID NO: 131897 - RNA, 19 nt, Human
uagacuccugagccagccu

SEQ ID NO: 131898 - RNA, 24 nt, Human
uagacuccugagccagccucuccc

SEQ ID NO: 131899 - RNA, 18 nt, Human
uagccccuuguugccccc

SEQ ID NO: 131900 - RNA, 19 nt, Human
uaggacuuuuuccacugcc

SEQ ID NO: 131901 - RNA, 24 nt, Human
uaggggugugacaucgcagaaggg

SEQ ID NO: 131902 - RNA, 22 nt, Human
ucagcagucugccugauucccu

SEQ ID NO: 131903 - RNA, 21 nt, Human
ucaggaagggaagaagagagg

SEQ ID NO: 131904 - RNA, 24 nt, Human
ucauacuuacuguucagcagucug

SEQ ID NO: 131905 - RNA, 18 nt, Human
ucauguuuggugggagaa

SEQ ID NO: 131906 - RNA, 21 nt, Human
uccaaauuuacagagcaaaaa

SEQ ID NO: 131907 - RNA, 19 nt, Human
uccaacuccuccccuuggc

SEQ ID NO: 131908 - RNA, 24 nt, Human
uccaugucaucagccacccaagaa

SEQ ID NO: 131909 - RNA, 20 nt, Human
ucccugguggucccaggugc

SEQ ID NO: 131910 - RNA, 18 nt, Human
uccuccccggcccaaccc

SEQ ID NO: 131911 - RNA, 22 nt, Human
uccuucuuccccaagaagacug

SEQ ID NO: 131912 - RNA, 21 nt, Human
ucuuccccaagaagacugagu

SEQ ID NO: 131913 - RNA, 21 nt, Human
ucuuccucacauccagaaucu

SEQ ID NO: 131914 - RNA, 24 nt, Human
ugaaauacugacuuuuuccuucuu

SEQ ID NO: 131915 - RNA, 23 nt, Human
ugagccacccagauuaggcccag

SEQ ID NO: 131916 - RNA, 21 nt, Human
ugagguagggguggcagaagg

SEQ ID NO: 131917 - RNA, 24 nt, Human
ugcagggugucauugccaccccca

SEQ ID NO: 131918 - RNA, 22 nt, Human
ugcccauucccuggugguccca

SEQ ID NO: 131919 - RNA, 20 nt, Human
ugcugugugcccauucccug

SEQ ID NO: 131920 - RNA, 21 nt, Human
uggaagugaaagaacuugaaa

SEQ ID NO: 131921 - RNA, 27 nt, Human
uggcaauccuucuuccccaagaagacu

SEQ ID NO: 131922 - RNA, 21 nt, Human
uggcacugcaggccacuccug

SEQ ID NO: 131923 - RNA, 20 nt, Human
uggcggcauccucccugcaa

SEQ ID NO: 131924 - RNA, 25 nt, Human
ugggagaagauaaggcuggauggug

SEQ ID NO: 131925 - RNA, 18 nt, Human
ugggaggaacagugaaua

SEQ ID NO: 131926 - RNA, 24 nt, Human
ugggaggaacagugaauacagagu

SEQ ID NO: 131927 - RNA, 19 nt, Human
uguugccccccaaucuagc

SEQ ID NO: 131928 - RNA, 20 nt, Human
uucaggaagggaagaagaga

SEQ ID NO: 131929 - RNA, 25 nt, Human
uuccccaagaagacugaguuuccuu

SEQ ID NO: 131930 - RNA, 20 nt, Human
uuccuccccggcccaacccc

SEQ ID NO: 131931 - RNA, 18 nt, Human
uucuugggccugaaaagg

SEQ ID NO: 131932 - RNA, 18 nt, Human
uugcugugugcccauucc

SEQ ID NO: 131933 - RNA, 23 nt, Human
uuggugggagaagcauggacucc

SEQ ID NO: 131934 - RNA, 20 nt, Human
uuuccuuugucacuucagga

SEQ ID NO: 131935 - RNA, 21 nt, Human
uuuuuuuuuuuuggauucuca

SEQ ID NO: 131936 - RNA, 22 nt, Human
uuuuuuuuuuuuuuuuuggauu

SEQ ID NO: 131937 - RNA, 20 nt, Human
uuuuuuuuuuuuuuuuuugg

SEQ ID NO: 131938 - RNA, 21 nt, Human
aaacauacaaaggaaagaucc

SEQ ID NO: 131939 - RNA, 27 nt, Human
aaagacacagugaagagcucaaccucc

SEQ ID NO: 131940 - RNA, 18 nt, Human
aacaggaggcaagagccc

SEQ ID NO: 131941 - RNA, 23 nt, Human
aaccaaaaacuaaaaacccuuaa

SEQ ID NO: 131942 - RNA, 19 nt, Human
aaccuccuuccaagcucuc

SEQ ID NO: 131943 - RNA, 23 nt, Human
aagagcucaaccuccuuccaagc

SEQ ID NO: 131944 - RNA, 24 nt, Human
aagcaacccuuuauggcacaaaug

SEQ ID NO: 131945 - RNA, 22 nt, Human
aagccugcccgcacacagccuc

SEQ ID NO: 131946 - RNA, 19 nt, Human
aagcggagggucaggcggg

SEQ ID NO: 131947 - RNA, 18 nt, Human
aagcucagggacaggcaa

SEQ ID NO: 131948 - RNA, 21 nt, Human
aaggagaagacagugauccaa

SEQ ID NO: 131949 - RNA, 23 nt, Human
aaggagaagacagugauccaaag

SEQ ID NO: 131950 - RNA, 24 nt, Human
aaggggccacccagcaaccccggc

SEQ ID NO: 131951 - RNA, 21 nt, Human
aauuuugucacucuucugcca

SEQ ID NO: 131952 - RNA, 22 nt, Human
acaggcaauucaguaacaaaac

SEQ ID NO: 131953 - RNA, 23 nt, Human
acaguggcagcgguguuccaggc

SEQ ID NO: 131954 - RNA, 19 nt, Human
acccagcaaccccggccag

SEQ ID NO: 131955 - RNA, 21 nt, Human
accccggccagcccaaggccc

SEQ ID NO: 131956 - RNA, 24 nt, Human
accccguuuccucacugcccccua

SEQ ID NO: 131957 - RNA, 21 nt, Human
acccgcuuaaucuccaaaccu

SEQ ID NO: 131958 - RNA, 22 nt, Human
acccuggaagagugggccccca

SEQ ID NO: 131959 - RNA, 19 nt, Human
acccugucccgcacacaca

SEQ ID NO: 131960 - RNA, 18 nt, Human
acgcgagcccgccaguga

SEQ ID NO: 131961 - RNA, 18 nt, Human
agaaguggacugugcaug

SEQ ID NO: 131962 - RNA, 21 nt, Human
agacagcacugccucagcaca

SEQ ID NO: 131963 - RNA, 20 nt, Human
agaggaggaggaccccugga

SEQ ID NO: 131964 - RNA, 23 nt, Human
agaguggagagacaggaggcagc

SEQ ID NO: 131965 - RNA, 20 nt, Human
aggaggcaagagcccagggc

SEQ ID NO: 131966 - RNA, 25 nt, Human
aggcagcccugccauguggaccuuc

SEQ ID NO: 131967 - RNA, 22 nt, Human
aggcccaggggcaauucaacag

SEQ ID NO: 131968 - RNA, 23 nt, Human
aggcgcggagaggcggcgggaaa

SEQ ID NO: 131969 - RNA, 22 nt, Human
aggcggcgggaaagagcuucgg

SEQ ID NO: 131970 - RNA, 19 nt, Human
agugcguggcguccaggcu

SEQ ID NO: 131971 - RNA, 26 nt, Human
aguucuggcacaaaggucaagucugu

SEQ ID NO: 131972 - RNA, 20 nt, Human
augcuucagacaggccuccc

SEQ ID NO: 131973 - RNA, 22 nt, Human
auggaguccauccccgagcagc

SEQ ID NO: 131974 - RNA, 24 nt, Human
augugcuaaaaaucgcacagaacc

SEQ ID NO: 131975 - RNA, 20 nt, Human
caaaaccacugcccaggagc

SEQ ID NO: 131976 - RNA, 19 nt, Human
caacagacaggugcuccca

SEQ ID NO: 131977 - RNA, 23 nt, Human
caacaggaggcaagagcccaggg

SEQ ID NO: 131978 - RNA, 24 nt, Human
caaccaaaaacuaaaaacccuuaa

SEQ ID NO: 131979 - RNA, 21 nt, Human
caacccaaccaaaaacuaaaa

SEQ ID NO: 131980 - RNA, 25 nt, Human
caacccaaccaaaaacuaaaaaccc

SEQ ID NO: 131981 - RNA, 20 nt, Human
caaccguugugacaaaguca

SEQ ID NO: 131982 - RNA, 22 nt, Human
caagagcccagggcuccagaaa

SEQ ID NO: 131983 - RNA, 21 nt, Human
cacacacaguucugaggccug

SEQ ID NO: 131984 - RNA, 21 nt, Human
cacacaguucugaggccuggc

SEQ ID NO: 131985 - RNA, 26 nt, Human
caccccuccugcaaugaagcaacccu

SEQ ID NO: 131986 - RNA, 19 nt, Human
cacccugucccgcacacac

SEQ ID NO: 131987 - RNA, 22 nt, Human
cacugcccaggagcaggcaaca

SEQ ID NO: 131988 - RNA, 23 nt, Human
cacugcccaggagcaggcaacag

SEQ ID NO: 131989 - RNA, 19 nt, Human
cacugugccugucccagac

SEQ ID NO: 131990 - RNA, 20 nt, Human
cagagccccaggggagcucc

SEQ ID NO: 131991 - RNA, 21 nt, Human
cagcagagcaucuggggccuc

SEQ ID NO: 131992 - RNA, 18 nt, Human
cagcccaggaugcaucga

SEQ ID NO: 131993 - RNA, 21 nt, Human
cagcucccacugugccugucc

SEQ ID NO: 131994 - RNA, 20 nt, Human
caggaggcagcucagucccc

SEQ ID NO: 131995 - RNA, 21 nt, Human
caggcaacaggguccgucagg

SEQ ID NO: 131996 - RNA, 22 nt, Human
caggcggggcugaaccugggcg

SEQ ID NO: 131997 - RNA, 25 nt, Human
caucuggggccucggccccacuccu

SEQ ID NO: 131998 - RNA, 18 nt, Human
cauucuggaugguggugc

SEQ ID NO: 131999 - RNA, 21 nt, Human
ccaaguaggcccaccaaaaac

SEQ ID NO: 132000 - RNA, 23 nt, Human
ccacacaucucgugccagccacc

SEQ ID NO: 132001 - RNA, 23 nt, Human
ccacccagcaaccccggccagcc

SEQ ID NO: 132002 - RNA, 23 nt, Human
ccagaguggagagacaggaggca

SEQ ID NO: 132003 - RNA, 25 nt, Human
ccagcaaccccggccagcccaaggc

SEQ ID NO: 132004 - RNA, 21 nt, Human
ccagcccaaggcccacccucu

SEQ ID NO: 132005 - RNA, 18 nt, Human
cccacacaucucgugcca

SEQ ID NO: 132006 - RNA, 19 nt, Human
cccagacugggucagcagg

SEQ ID NO: 132007 - RNA, 20 nt, Human
cccaggugcugccccgcugg

SEQ ID NO: 132008 - RNA, 25 nt, Human
cccauaaugcacaugccugcugcuc

SEQ ID NO: 132009 - RNA, 30 nt, Human
cccauaaugcacaugccugcugcucuggaa

SEQ ID NO: 132010 - RNA, 24 nt, Human
cccauaaugcacaugccugcuuug

SEQ ID NO: 132011 - RNA, 22 nt, Human
cccauggggaaggggccaccca

SEQ ID NO: 132012 - RNA, 23 nt, Human
ccccacuccagagcuucuuccug

SEQ ID NO: 132013 - RNA, 20 nt, Human
ccccggccagcccaaggccc

SEQ ID NO: 132014 - RNA, 20 nt, Human
cccggccagcccaaggcccc

SEQ ID NO: 132015 - RNA, 23 nt, Human
cccucacuggccaccuggcaccc

SEQ ID NO: 132016 - RNA, 21 nt, Human
cccuuuauggcacaaaugggg

SEQ ID NO: 132017 - RNA, 21 nt, Human
ccguugugacaaagucaagag

SEQ ID NO: 132018 - RNA, 19 nt, Human
ccguuuccucacugccccc

SEQ ID NO: 132019 - RNA, 20 nt, Human
ccuacgccacacugacgguc

SEQ ID NO: 132020 - RNA, 21 nt, Human
ccuacgccacacugacggucc

SEQ ID NO: 132021 - RNA, 26 nt, Human
ccuacgccacacugacgguccagagg

SEQ ID NO: 132022 - RNA, 23 nt, Human
ccucacugcccccuacgugucug

SEQ ID NO: 132023 - RNA, 21 nt, Human
ccuccugccacagagcugggc

SEQ ID NO: 132024 - RNA, 23 nt, Human
ccucugcagccaguaggggacuc

SEQ ID NO: 132025 - RNA, 26 nt, Human
ccugcaaugaagcaacccuuuauggc

SEQ ID NO: 132026 - RNA, 23 nt, Human
ccugcugcucuggaaccuggcug

SEQ ID NO: 132027 - RNA, 18 nt, Human
ccugggcgaggcgcggag

SEQ ID NO: 132028 - RNA, 24 nt, Human
cgaguccagcucuccucaugcucc

SEQ ID NO: 132029 - RNA, 25 nt, Human
cggccccuaauguuccucugguccc

SEQ ID NO: 132030 - RNA, 20 nt, Human
cggcgggaaagagcuucggc

SEQ ID NO: 132031 - RNA, 22 nt, Human
cguccaggcugggacaggggcc

SEQ ID NO: 132032 - RNA, 19 nt, Human
cguugggguacaggccagg

SEQ ID NO: 132033 - RNA, 22 nt, Human
cuaugcauguuucugaagcccu

SEQ ID NO: 132034 - RNA, 25 nt, Human
cuccugccacagagcugggcugcag

SEQ ID NO: 132035 - RNA, 19 nt, Human
cuccuucucagggcuucag

SEQ ID NO: 132036 - RNA, 21 nt, Human
cugcccaggagcaggcaacag

SEQ ID NO: 132037 - RNA, 21 nt, Human
cugcccugccccagugcaugu

SEQ ID NO: 132038 - RNA, 24 nt, Human
cuggagcacaagguucagcaaggg

SEQ ID NO: 132039 - RNA, 19 nt, Human
cugguccccaaaggaagcg

SEQ ID NO: 132040 - RNA, 19 nt, Human
cugugucaggcaacaaaac

SEQ ID NO: 132041 - RNA, 20 nt, Human
gacugcagcaggccuugcaa

SEQ ID NO: 132042 - RNA, 22 nt, Human
gaggcccgagugcuuguggagg

SEQ ID NO: 132043 - RNA, 22 nt, Human
gcagcaccacagaacugcaugc

SEQ ID NO: 132044 - RNA, 23 nt, Human
gcagggucaccuugauauucaca

SEQ ID NO: 132045 - RNA, 20 nt, Human
gcauguuucugaagcccuca

SEQ ID NO: 132046 - RNA, 23 nt, Human
gcauguuucugaagcccucaagg

SEQ ID NO: 132047 - RNA, 22 nt, Human
gcauucuggaugguggugcaag

SEQ ID NO: 132048 - RNA, 20 nt, Human
gccccagugcaugugggauc

SEQ ID NO: 132049 - RNA, 18 nt, Human
gcccgagugcuuguggag

SEQ ID NO: 132050 - RNA, 20 nt, Human
gcggccagcaaggggcacug

SEQ ID NO: 132051 - RNA, 18 nt, Human
gcucuccuucucagggcu

SEQ ID NO: 132052 - RNA, 21 nt, Human
gcugccccgcuggucuggaaa

SEQ ID NO: 132053 - RNA, 20 nt, Human
ggaaaaaaugggucuccagc

SEQ ID NO: 132054 - RNA, 18 nt, Human
ggaggccggaccgggccg

SEQ ID NO: 132055 - RNA, 20 nt, Human
ggaguggacuuuaaggagau

SEQ ID NO: 132056 - RNA, 20 nt, Human
ggccauggcccacaguaccu

SEQ ID NO: 132057 - RNA, 24 nt, Human
ggcgcggagaggcggcgggaaaga

SEQ ID NO: 132058 - RNA, 22 nt, Human
ggcggcgggaaagagcuucggc

SEQ ID NO: 132059 - RNA, 19 nt, Human
gggcuccagaguggagaga

SEQ ID NO: 132060 - RNA, 19 nt, Human
ggucaggcggggcugaacc

SEQ ID NO: 132061 - RNA, 21 nt, Human
gucagcaggucucucuggaca

SEQ ID NO: 132062 - RNA, 20 nt, Human
guccuagaggaggaggaccc

SEQ ID NO: 132063 - RNA, 18 nt, Human
gugcaugcggccacuggg

SEQ ID NO: 132064 - RNA, 21 nt, Human
gugcguggcguccaggcuggg

SEQ ID NO: 132065 - RNA, 20 nt, Human
uaaaaaaacaggcaucaaga

SEQ ID NO: 132066 - RNA, 21 nt, Human
uaaaaaaacaggcaucaagac

SEQ ID NO: 132067 - RNA, 22 nt, Human
uaccuucuucauucccugccuc

SEQ ID NO: 132068 - RNA, 24 nt, Human
uagugucaacccaaccaaaaacua

SEQ ID NO: 132069 - RNA, 21 nt, Human
uaugcauguuucugaagcccu

SEQ ID NO: 132070 - RNA, 24 nt, Human
ucaagucuccccagggaccggugu

SEQ ID NO: 132071 - RNA, 18 nt, Human
uccacaugggauggaaaa

SEQ ID NO: 132072 - RNA, 21 nt, Human
uccagagccccaggggagcuc

SEQ ID NO: 132073 - RNA, 21 nt, Human
uccagaguggagagacaggag

SEQ ID NO: 132074 - RNA, 22 nt, Human
uccagcaucaugcuccagcagg

SEQ ID NO: 132075 - RNA, 18 nt, Human
uccauccccgagcagcac

SEQ ID NO: 132076 - RNA, 23 nt, Human
ucccacacaucucgugccagcca

SEQ ID NO: 132077 - RNA, 23 nt, Human
ucccagacugggucagcaggucu

SEQ ID NO: 132078 - RNA, 24 nt, Human
uccccaaaggaagcgucccagucc

SEQ ID NO: 132079 - RNA, 25 nt, Human
uccccaaaggaagcgucccaguccc

SEQ ID NO: 132080 - RNA, 23 nt, Human
ucccugaagcagacccacugccu

SEQ ID NO: 132081 - RNA, 23 nt, Human
uccgucaggcaaaagggugccag

SEQ ID NO: 132082 - RNA, 18 nt, Human
uccuagaggaggaggacc

SEQ ID NO: 132083 - RNA, 18 nt, Human
uccucgggcccucacugg

SEQ ID NO: 132084 - RNA, 20 nt, Human
ucggccccacuccagagcuu

SEQ ID NO: 132085 - RNA, 20 nt, Human
ucuccuucucagggcuucag

SEQ ID NO: 132086 - RNA, 20 nt, Human
ucucucuggacagcacacug

SEQ ID NO: 132087 - RNA, 19 nt, Human
ucucuggacagcacacugc

SEQ ID NO: 132088 - RNA, 22 nt, Human
ucucuggacagcacacugcacc

SEQ ID NO: 132089 - RNA, 23 nt, Human
ucuggcacaaaggucaagucugu

SEQ ID NO: 132090 - RNA, 20 nt, Human
ucuuguggccaggacuuccu

SEQ ID NO: 132091 - RNA, 21 nt, Human
ugagugcuuguggaggcccga

SEQ ID NO: 132092 - RNA, 25 nt, Human
ugcaacagacaggugcucccagacc

SEQ ID NO: 132093 - RNA, 23 nt, Human
ugccaggaagggcccccagcccc

SEQ ID NO: 132094 - RNA, 19 nt, Human
ugccaguggccugagugcu

SEQ ID NO: 132095 - RNA, 20 nt, Human
ugccaguggccugagugcuu

SEQ ID NO: 132096 - RNA, 21 nt, Human
ugccauguggaccuucugccu

SEQ ID NO: 132097 - RNA, 20 nt, Human
ugccccagugcaugugggau

SEQ ID NO: 132098 - RNA, 23 nt, Human
ugccuggcccaacgugccagugg

SEQ ID NO: 132099 - RNA, 19 nt, Human
ugcuucguccucugcagcc

SEQ ID NO: 132100 - RNA, 18 nt, Human
uggaaagacacagugaag

SEQ ID NO: 132101 - RNA, 22 nt, Human
uggacugugcauggaguccauc

SEQ ID NO: 132102 - RNA, 22 nt, Human
uggaggcccauggggaaggggc

SEQ ID NO: 132103 - RNA, 19 nt, Human
uggaugguggugcaagaac

SEQ ID NO: 132104 - RNA, 20 nt, Human
uggaugugcuaaaaaucggu

SEQ ID NO: 132105 - RNA, 21 nt, Human
uggcacaaauggggccggggg

SEQ ID NO: 132106 - RNA, 25 nt, Human
uggcagaaggcgggcuguggucucu

SEQ ID NO: 132107 - RNA, 19 nt, Human
uggcgcacacucucggcug

SEQ ID NO: 132108 - RNA, 18 nt, Human
uggcguccaggcugggac

SEQ ID NO: 132109 - RNA, 23 nt, Human
ugggagagggacugauggggugg

SEQ ID NO: 132110 - RNA, 18 nt, Human
uggggacugcagcaggcc

SEQ ID NO: 132111 - RNA, 24 nt, Human
ugggguggggucaggccuccugcc

SEQ ID NO: 132112 - RNA, 24 nt, Human
uguggaccuucugccuggcccaac

SEQ ID NO: 132113 - RNA, 22 nt, Human
uguggccauggcccacaguacc

SEQ ID NO: 132114 - RNA, 19 nt, Human
uuggcagaaggcgggcugu

SEQ ID NO: 132115 - RNA, 19 nt, Human
uuuuggcagaaggcgggcu

SEQ ID NO: 132116 - RNA, 20 nt, Human
agaccagaacaagcacucga

SEQ ID NO: 132117 - RNA, 25 nt, Human
augaagggugacaggcagcuggggu

SEQ ID NO: 132118 - RNA, 25 nt, Human
caagucccagaugaagggugacagg

SEQ ID NO: 132119 - RNA, 22 nt, Human
cacacagagcuugggccuggga

SEQ ID NO: 132120 - RNA, 19 nt, Human
cacagagcuugggccuggg

SEQ ID NO: 132121 - RNA, 18 nt, Human
cacucgagugggccccag

SEQ ID NO: 132122 - RNA, 21 nt, Human
cacucgagugggccccagugc

SEQ ID NO: 132123 - RNA, 23 nt, Human
cagagcuugggccugggagccuc

SEQ ID NO: 132124 - RNA, 18 nt, Human
cagcaggcuggcccagcc

SEQ ID NO: 132125 - RNA, 21 nt, Human
cagcaggcuggcccagccucc

SEQ ID NO: 132126 - RNA, 22 nt, Human
cagcaggcuggcccagccuccc

SEQ ID NO: 132127 - RNA, 19 nt, Human
ccagugcagguugggaugu

SEQ ID NO: 132128 - RNA, 21 nt, Human
cccagccuccccuuuaugaga

SEQ ID NO: 132129 - RNA, 22 nt, Human
cccccagccucacucucugccu

SEQ ID NO: 132130 - RNA, 24 nt, Human
cccccugcgggcagcugggaaggc

SEQ ID NO: 132131 - RNA, 20 nt, Human
cccgaccgcggcgcgucccg

SEQ ID NO: 132132 - RNA, 22 nt, Human
cccgccccuuuuacgacagucc

SEQ ID NO: 132133 - RNA, 21 nt, Human
ccucacucucugccuggcccu

SEQ ID NO: 132134 - RNA, 22 nt, Human
ccucacucucugccuggcccug

SEQ ID NO: 132135 - RNA, 27 nt, Human
ccuggcccugaagcagacagcagcagg

SEQ ID NO: 132136 - RNA, 24 nt, Human
cgacgagcgcccccagcucacguc

SEQ ID NO: 132137 - RNA, 25 nt, Human
cggcugcagcgacgagcgcccccag

SEQ ID NO: 132138 - RNA, 18 nt, Human
cugaagcagacagcagca

SEQ ID NO: 132139 - RNA, 19 nt, Human
cugcagcgacgagcgcccc

SEQ ID NO: 132140 - RNA, 22 nt, Human
cugcaugggggcugcagcugcc

SEQ ID NO: 132141 - RNA, 23 nt, Human
cugggguccaccuggucucuccu

SEQ ID NO: 132142 - RNA, 18 nt, Human
cuugggccugggagccuc

SEQ ID NO: 132143 - RNA, 24 nt, Human
gaacaagcacucgagugggcccca

SEQ ID NO: 132144 - RNA, 18 nt, Human
gaagggugacaggcagcu

SEQ ID NO: 132145 - RNA, 19 nt, Human
gacagcagcaggcuggccc

SEQ ID NO: 132146 - RNA, 23 nt, Human
gagacuauccuaggguuugacag

SEQ ID NO: 132147 - RNA, 18 nt, Human
gccccuuuuacgacaguc

SEQ ID NO: 132148 - RNA, 20 nt, Human
gcugcagcgacgagcgcccc

SEQ ID NO: 132149 - RNA, 21 nt, Human
ggugugagaacccccagccuc

SEQ ID NO: 132150 - RNA, 26 nt, Human
ugaagcagacagcagcaggcuggccc

SEQ ID NO: 132151 - RNA, 24 nt, Human
ugagaccagaacaagcacucgagu

SEQ ID NO: 132152 - RNA, 19 nt, Human
ugcaugggggcugcagcug

SEQ ID NO: 132153 - RNA, 21 nt, Human
uggcccugaagcagacagcag

SEQ ID NO: 132154 - RNA, 21 nt, Human
ugggaaggcaguggccaaagg

SEQ ID NO: 132155 - RNA, 25 nt, Human
ugggagccucuucugcaugggggcu

SEQ ID NO: 132156 - RNA, 22 nt, Human
ugggccccagugcagguuggga

SEQ ID NO: 132157 - RNA, 23 nt, Human
ugggccugggagccucuucugca

SEQ ID NO: 132158 - RNA, 20 nt, Human
uuuuuugggccacugaggca

SEQ ID NO: 132159 - RNA, 20 nt, Human
acuuccguugcuuggaccuc

SEQ ID NO: 132160 - RNA, 20 nt, Human
aguagaguccagggacaggg

SEQ ID NO: 132161 - RNA, 21 nt, Human
auguggcagcaauguacagag

SEQ ID NO: 132162 - RNA, 18 nt, Human
cagagccucgggaguaga

SEQ ID NO: 132163 - RNA, 23 nt, Human
cagaucccaaagggaaacacaag

SEQ ID NO: 132164 - RNA, 22 nt, Human
ccagaaaggcagcuucguagua

SEQ ID NO: 132165 - RNA, 18 nt, Human
ccccaagcuggcaggagu

SEQ ID NO: 132166 - RNA, 18 nt, Human
cucaaggauggccagaaa

SEQ ID NO: 132167 - RNA, 21 nt, Human
gcagcaauguacagagccucg

SEQ ID NO: 132168 - RNA, 18 nt, Human
gccagaaaggcagcuucg

SEQ ID NO: 132169 - RNA, 27 nt, Human
gggaacagugagguggugccgguaccc

SEQ ID NO: 132170 - RNA, 22 nt, Human
gggaguagaguccagggacagg

SEQ ID NO: 132171 - RNA, 20 nt, Human
gguaggccugcuucagcugc

SEQ ID NO: 132172 - RNA, 21 nt, Human
gguggguucaaggcuggcuug

SEQ ID NO: 132173 - RNA, 20 nt, Human
gguguguguaugugugugcg

SEQ ID NO: 132174 - RNA, 22 nt, Human
uauguguuuuggggugugugua

SEQ ID NO: 132175 - RNA, 18 nt, Human
uggcaggaguauguggca

SEQ ID NO: 132176 - RNA, 21 nt, Human
ugggguguguguaugugugug

SEQ ID NO: 132177 - RNA, 18 nt, Human
ugugagggugaaggaaca

SEQ ID NO: 132178 - RNA, 19 nt, Human
uguguaugugugugcgcau

SEQ ID NO: 132179 - RNA, 18 nt, Human
ugugugcgcauggggaac

SEQ ID NO: 132180 - RNA, 19 nt, Human
uguguguaugugugugcgc

SEQ ID NO: 132181 - RNA, 21 nt, Human
uguguguaugugugugcgcau

SEQ ID NO: 132182 - RNA, 18 nt, Human
aaacugauacaaucauuu

SEQ ID NO: 132183 - RNA, 21 nt, Human
aacagugaucuaggcuguugu

SEQ ID NO: 132184 - RNA, 30 nt, Human
aacccauuucucucaagcauuguuuucugg

SEQ ID NO: 132185 - RNA, 20 nt, Human
aacucacucgcuuuccagca

SEQ ID NO: 132186 - RNA, 24 nt, Human
aagcaaaauaaaaaccgcguucua

SEQ ID NO: 132187 - RNA, 24 nt, Human
aaguuucuccucaagucauagguc

SEQ ID NO: 132188 - RNA, 20 nt, Human
aauuaaucacaggaacccua

SEQ ID NO: 132189 - RNA, 21 nt, Human
acuauguauauauagcaaggu

SEQ ID NO: 132190 - RNA, 27 nt, Human
agcuuaguaacaaaaacuguuaaacca

SEQ ID NO: 132191 - RNA, 21 nt, Human
aucacaaaauuaaucacagga

SEQ ID NO: 132192 - RNA, 20 nt, Human
aucauuuacuuccuucaagu

SEQ ID NO: 132193 - RNA, 20 nt, Human
augaaacacuaaaagaaaag

SEQ ID NO: 132194 - RNA, 19 nt, Human
augcagaguggagagaaac

SEQ ID NO: 132195 - RNA, 24 nt, Human
cacacugagaaucacguuucccau

SEQ ID NO: 132196 - RNA, 23 nt, Human
cacaggaacccuaaauuugcucc

SEQ ID NO: 132197 - RNA, 19 nt, Human
cacugagaaucacguuucc

SEQ ID NO: 132198 - RNA, 23 nt, Human
cagcaugagaaaaccuuaugccu

SEQ ID NO: 132199 - RNA, 27 nt, Human
cagcaugagaaaaccuuaugccugaua

SEQ ID NO: 132200 - RNA, 25 nt, Human
caucacaaaauuaaucacaggaacc

SEQ ID NO: 132201 - RNA, 21 nt, Human
caugcaccaaaaauaugcagu

SEQ ID NO: 132202 - RNA, 23 nt, Human
ccagcauauguguuccauggccc

SEQ ID NO: 132203 - RNA, 20 nt, Human
cuccucaagucauaggucac

SEQ ID NO: 132204 - RNA, 21 nt, Human
cucucaagcauuguuuucuga

SEQ ID NO: 132205 - RNA, 24 nt, Human
cugauacacugauucuaaaaggga

SEQ ID NO: 132206 - RNA, 18 nt, Human
gaaaacauaaaacaugca

SEQ ID NO: 132207 - RNA, 20 nt, Human
gcagaguggagagaaacuaa

SEQ ID NO: 132208 - RNA, 21 nt, Human
gcccaauuaugcuaauucaau

SEQ ID NO: 132209 - RNA, 19 nt, Human
gggaaacacauugauuagg

SEQ ID NO: 132210 - RNA, 23 nt, Human
uaaaucaugcaguucaggcacuc

SEQ ID NO: 132211 - RNA, 24 nt, Human
uaacugauccaugaaaaauuacac

SEQ ID NO: 132212 - RNA, 18 nt, Human
uaauaauuggaaucacac

SEQ ID NO: 132213 - RNA, 19 nt, Human
uaaugggcaacucacucgc

SEQ ID NO: 132214 - RNA, 24 nt, Human
uaaugggcaacucacucgcuuucc

SEQ ID NO: 132215 - RNA, 22 nt, Human
uacagguacccauuuauacuag

SEQ ID NO: 132216 - RNA, 25 nt, Human
uauguauauauagcaagguauugua

SEQ ID NO: 132217 - RNA, 22 nt, Human
ucaucuauugagcuuugauugu

SEQ ID NO: 132218 - RNA, 20 nt, Human
ucccaugguauuuccuuuuu

SEQ ID NO: 132219 - RNA, 20 nt, Human
ucucaugcagaaaggaacaa

SEQ ID NO: 132220 - RNA, 21 nt, Human
ucuucgaauuaaaaguuucuc

SEQ ID NO: 132221 - RNA, 19 nt, Human
ugaaaaaagcaagaaauca

SEQ ID NO: 132222 - RNA, 18 nt, Human
ugauucgcuuccaagagc

SEQ ID NO: 132223 - RNA, 21 nt, Human
ugcaguaucacuucagguaaa

SEQ ID NO: 132224 - RNA, 24 nt, Human
ugcaguucaggcacucguuuuccu

SEQ ID NO: 132225 - RNA, 21 nt, Human
ugcaugcaccaaaaauaugca

SEQ ID NO: 132226 - RNA, 24 nt, Human
ugccaugaacaccuucaacaguga

SEQ ID NO: 132227 - RNA, 21 nt, Human
uggaauuaaaaagaaaacuaa

SEQ ID NO: 132228 - RNA, 18 nt, Human
uggaguaggugaggagga

SEQ ID NO: 132229 - RNA, 20 nt, Human
ugugaaaggugagaauuuua

SEQ ID NO: 132230 - RNA, 24 nt, Human
uuaaaaguuucuccucaagucaua

SEQ ID NO: 132231 - RNA, 26 nt, Human
uuaaugaaacacuaaaagaaaaguac

SEQ ID NO: 132232 - RNA, 22 nt, Human
uuccagcauauguguuccaugg

SEQ ID NO: 132233 - RNA, 20 nt, Human
uuccaugauuuugcaugagc

SEQ ID NO: 132234 - RNA, 22 nt, Human
uuguguugucuggcuuauuguc

SEQ ID NO: 132235 - RNA, 22 nt, Human
uuugaaaugucauaaagauggg

SEQ ID NO: 132236 - RNA, 21 nt, Human
aaaaauguauacccauuauac

SEQ ID NO: 132237 - RNA, 22 nt, Human
aacugaaggcuggcugguuugg

SEQ ID NO: 132238 - RNA, 24 nt, Human
aauguauacccauuauacuacuag

SEQ ID NO: 132239 - RNA, 23 nt, Human
acugaaggcuggcugguuugggg

SEQ ID NO: 132240 - RNA, 21 nt, Human
acuuaucuguuucucuuuugg

SEQ ID NO: 132241 - RNA, 22 nt, Human
agcucagaaccuauaacuuaca

SEQ ID NO: 132242 - RNA, 20 nt, Human
caaaaauaagacaugagaca

SEQ ID NO: 132243 - RNA, 22 nt, Human
caaaguuuucacucccucaucc

SEQ ID NO: 132244 - RNA, 24 nt, Human
cagaggaugcucacaauuaaccau

SEQ ID NO: 132245 - RNA, 21 nt, Human
cugaaggcuggcugguuuggg

SEQ ID NO: 132246 - RNA, 22 nt, Human
cuuaaggggcaugcugcagagg

SEQ ID NO: 132247 - RNA, 22 nt, Human
gaaggcuggcugguuuggggau

SEQ ID NO: 132248 - RNA, 19 nt, Human
gauucuaugcaaaguuuuc

SEQ ID NO: 132249 - RNA, 24 nt, Human
uaauuugaucuuuccacccacacc

SEQ ID NO: 132250 - RNA, 18 nt, Human
uacacugguguuauaaaa

SEQ ID NO: 132251 - RNA, 19 nt, Human
uaccucgcgcggguggagg

SEQ ID NO: 132252 - RNA, 21 nt, Human
uacuacuagugaaauuaagag

SEQ ID NO: 132253 - RNA, 24 nt, Human
ucccacucucaaaacagucauaac

SEQ ID NO: 132254 - RNA, 19 nt, Human
ucuccuuuuggggguuccu

SEQ ID NO: 132255 - RNA, 20 nt, Human
ugagacagcacauacuucag

SEQ ID NO: 132256 - RNA, 21 nt, Human
ugcaaaguuuucacucccuca

SEQ ID NO: 132257 - RNA, 18 nt, Human
uggcugguuuggggaugc

SEQ ID NO: 132258 - RNA, 18 nt, Human
uguguccaucauaugcau

SEQ ID NO: 132259 - RNA, 20 nt, Human
uuaauacuauucauuugaag

SEQ ID NO: 132260 - RNA, 22 nt, Human
uuguagaaaaucuuaaggggca

SEQ ID NO: 132261 - RNA, 25 nt, Human
uuugaaguauuuugcugaaaaaagg

SEQ ID NO: 132262 - RNA, 18 nt, Human
aaacauguagacaccagg

SEQ ID NO: 132263 - RNA, 21 nt, Human
aagaggaaccgagagacagaa

SEQ ID NO: 132264 - RNA, 24 nt, Human
aagcuggccucuggccgugacaca

SEQ ID NO: 132265 - RNA, 21 nt, Human
acagaagggggaccgaagcug

SEQ ID NO: 132266 - RNA, 20 nt, Human
acccacuguugaaacagaau

SEQ ID NO: 132267 - RNA, 19 nt, Human
agaaguccuggcucuuccu

SEQ ID NO: 132268 - RNA, 18 nt, Human
agacagaagggggaccga

SEQ ID NO: 132269 - RNA, 21 nt, Human
agaggaaccgagagacagaag

SEQ ID NO: 132270 - RNA, 21 nt, Human
agcuggccucuggcgucuucc

SEQ ID NO: 132271 - RNA, 23 nt, Human
agcuggccucuggcgucuucccg

SEQ ID NO: 132272 - RNA, 19 nt, Human
aggaaacuugcagggcugg

SEQ ID NO: 132273 - RNA, 20 nt, Human
augcucugagagccggaggc

SEQ ID NO: 132274 - RNA, 24 nt, Human
caaaggacgaccaagaaaccaacg

SEQ ID NO: 132275 - RNA, 18 nt, Human
caagugcccaccgacggc

SEQ ID NO: 132276 - RNA, 28 nt, Human
caagugcccaccgacggcgcagaaaccc

SEQ ID NO: 132277 - RNA, 21 nt, Human
cacaaccucaugggcccuaag

SEQ ID NO: 132278 - RNA, 18 nt, Human
caccauaggcaggaaacc

SEQ ID NO: 132279 - RNA, 30 nt, Human
cacccugugcucggaguucagcagcuccaa

SEQ ID NO: 132280 - RNA, 21 nt, Human
cacucaaguguauacagcagc

SEQ ID NO: 132281 - RNA, 25 nt, Human
cagcagcagcaggcaccucucagaa

SEQ ID NO: 132282 - RNA, 19 nt, Human
cagcagcuccaaagcuguc

SEQ ID NO: 132283 - RNA, 22 nt, Human
cagcaggcaccucucagaagau

SEQ ID NO: 132284 - RNA, 19 nt, Human
cagccugcuccucgcgagc

SEQ ID NO: 132285 - RNA, 24 nt, Human
cagggcugguagaaagaaaggggg

SEQ ID NO: 132286 - RNA, 19 nt, Human
caguuucuccgcucucccu

SEQ ID NO: 132287 - RNA, 24 nt, Human
ccacaaccucaugggcccuaaguc

SEQ ID NO: 132288 - RNA, 21 nt, Human
ccagagcuccuucccuuggcc

SEQ ID NO: 132289 - RNA, 23 nt, Human
ccagguguucacagaacuaagaa

SEQ ID NO: 132290 - RNA, 23 nt, Human
cccaguuucuccgcucucccucc

SEQ ID NO: 132291 - RNA, 18 nt, Human
ccgagagacagaaggggg

SEQ ID NO: 132292 - RNA, 21 nt, Human
ccgcggagaccaggcugccag

SEQ ID NO: 132293 - RNA, 23 nt, Human
ccuggaaaauaacaagugcccac

SEQ ID NO: 132294 - RNA, 23 nt, Human
cgaccaagaaaccaacgugcgcc

SEQ ID NO: 132295 - RNA, 22 nt, Human
cgacggcgcagaaacccaagaa

SEQ ID NO: 132296 - RNA, 19 nt, Human
cgcuccuucuucgcgguuu

SEQ ID NO: 132297 - RNA, 19 nt, Human
cgcucucccucccaggugu

SEQ ID NO: 132298 - RNA, 22 nt, Human
cgcucucccucccagguguuca

SEQ ID NO: 132299 - RNA, 21 nt, Human
cuggaaccagagcuccuuccc

SEQ ID NO: 132300 - RNA, 21 nt, Human
cugugcucggaguucagcagc

SEQ ID NO: 132301 - RNA, 21 nt, Human
gaccaagaaaccaacgugcgc

SEQ ID NO: 132302 - RNA, 18 nt, Human
gagaagguuccuggaaaa

SEQ ID NO: 132303 - RNA, 18 nt, Human
gaggcccagcccagggcc

SEQ ID NO: 132304 - RNA, 18 nt, Human
gccugugggaauguggag

SEQ ID NO: 132305 - RNA, 22 nt, Human
gcugccaggcugugguugguag

SEQ ID NO: 132306 - RNA, 21 nt, Human
ggaaauacagcuuuccacagc

SEQ ID NO: 132307 - RNA, 20 nt, Human
ggcccuaaguccauucaaaa

SEQ ID NO: 132308 - RNA, 20 nt, Human
ggcgcagaaacccaagaaug

SEQ ID NO: 132309 - RNA, 22 nt, Human
gggaggaaagaggaaccgagag

SEQ ID NO: 132310 - RNA, 21 nt, Human
gggggaugcagccccaguggg

SEQ ID NO: 132311 - RNA, 26 nt, Human
gggugguuuuuuuuuuccuucccuuu

SEQ ID NO: 132312 - RNA, 20 nt, Human
ggugccgcggagaccaggcu

SEQ ID NO: 132313 - RNA, 22 nt, Human
gugugcacauaaauugugugug

SEQ ID NO: 132314 - RNA, 23 nt, Human
guguguaugugugugugugugug

SEQ ID NO: 132315 - RNA, 25 nt, Human
gugugugcaugugugagugugcaca

SEQ ID NO: 132316 - RNA, 22 nt, Human
uaaaucccaguuucuccgcucu

SEQ ID NO: 132317 - RNA, 21 nt, Human
uaagccagccacaaccucaug

SEQ ID NO: 132318 - RNA, 19 nt, Human
uaccacaucuaaggugugc

SEQ ID NO: 132319 - RNA, 23 nt, Human
uacuugggaggaaagaggaaccc

SEQ ID NO: 132320 - RNA, 18 nt, Human
uagaaagaaagggggauu

SEQ ID NO: 132321 - RNA, 23 nt, Human
uaugugugugugugugugcaugu

SEQ ID NO: 132322 - RNA, 18 nt, Human
uccaugaggaaacuugca

SEQ ID NO: 132323 - RNA, 19 nt, Human
ucccagguguucacagaac

SEQ ID NO: 132324 - RNA, 18 nt, Human
ucccgaaggguggcuuug

SEQ ID NO: 132325 - RNA, 19 nt, Human
uccuuaggcaacauccucc

SEQ ID NO: 132326 - RNA, 21 nt, Human
uccuuaggcaacauccuccug

SEQ ID NO: 132327 - RNA, 27 nt, Human
ucucaccauaggcaggaaaccugcagc

SEQ ID NO: 132328 - RNA, 18 nt, Human
ucucucuugguuuagcug

SEQ ID NO: 132329 - RNA, 25 nt, Human
ucuuggagccgccucuaagcaaaca

SEQ ID NO: 132330 - RNA, 22 nt, Human
ucuugguuuagcugguguuugg

SEQ ID NO: 132331 - RNA, 25 nt, Human
ugaaguggaggcccagcccagggcc

SEQ ID NO: 132332 - RNA, 24 nt, Human
ugauggaguuuuguucacuaggcu

SEQ ID NO: 132333 - RNA, 22 nt, Human
ugcaugugugagugugcacaua

SEQ ID NO: 132334 - RNA, 21 nt, Human
ugccaaggauuaugcucugag

SEQ ID NO: 132335 - RNA, 19 nt, Human
ugccaggcugugguuggua

SEQ ID NO: 132336 - RNA, 20 nt, Human
ugcccaccgacggcgcagaa

SEQ ID NO: 132337 - RNA, 21 nt, Human
ugcuaugcaggcagcucuggg

SEQ ID NO: 132338 - RNA, 18 nt, Human
ugcucugagagccggagg

SEQ ID NO: 132339 - RNA, 19 nt, Human
ugcuuucucucuugguuua

SEQ ID NO: 132340 - RNA, 24 nt, Human
uggaaaauaacaagugcccaccga

SEQ ID NO: 132341 - RNA, 23 nt, Human
uggaaauacagcuuuccacagcc

SEQ ID NO: 132342 - RNA, 21 nt, Human
uggaggcccagcccagggccu

SEQ ID NO: 132343 - RNA, 19 nt, Human
uggccucuggcgucuuccc

SEQ ID NO: 132344 - RNA, 23 nt, Human
uggccucuggcgucuucccgccu

SEQ ID NO: 132345 - RNA, 20 nt, Human
ugggaggaaagaggaaccga

SEQ ID NO: 132346 - RNA, 22 nt, Human
ugggcccuaaguccauucaaaa

SEQ ID NO: 132347 - RNA, 21 nt, Human
uguaagccuuucaggagacuu

SEQ ID NO: 132348 - RNA, 23 nt, Human
uguacccacuguugaaacagaau

SEQ ID NO: 132349 - RNA, 24 nt, Human
ugugcaaauucucuggaaccagag

SEQ ID NO: 132350 - RNA, 18 nt, Human
ugugcacauaaauugugu

SEQ ID NO: 132351 - RNA, 20 nt, Human
ugugcacauaaauugugugu

SEQ ID NO: 132352 - RNA, 22 nt, Human
ugugcauuauaguuucuugcuu

SEQ ID NO: 132353 - RNA, 23 nt, Human
uguggagguugcugccuaagcca

SEQ ID NO: 132354 - RNA, 20 nt, Human
uguguaugugugugugugug

SEQ ID NO: 132355 - RNA, 21 nt, Human
uguguaugugugugugugugu

SEQ ID NO: 132356 - RNA, 20 nt, Human
ugugugugugugugcaugug

SEQ ID NO: 132357 - RNA, 20 nt, Human
ugugugugugugugugcaug

SEQ ID NO: 132358 - RNA, 21 nt, Human
ugugugugugugugugcaugu

SEQ ID NO: 132359 - RNA, 18 nt, Human
uucacuaggcugaagugg

SEQ ID NO: 132360 - RNA, 22 nt, Human
uuccucaccaggcaacacuugg

SEQ ID NO: 132361 - RNA, 22 nt, Human
uuccuucccuuuuuacacaaua

SEQ ID NO: 132362 - RNA, 21 nt, Human
uucuccgcucucccucccagg

SEQ ID NO: 132363 - RNA, 22 nt, Human
uugcagggcugguagaaagaaa

SEQ ID NO: 132364 - RNA, 20 nt, Human
uugguagcgccggggucuuc

SEQ ID NO: 132365 - RNA, 18 nt, Human
uuucuccgcucucccucc

SEQ ID NO: 132366 - RNA, 19 nt, Human
uuucuugcuuucucucuug

SEQ ID NO: 132367 - RNA, 20 nt, Human
uuuuguucacuaggcugaag

SEQ ID NO: 132368 - RNA, 18 nt, Human
aaaaaaaccaaugcauag

SEQ ID NO: 132369 - RNA, 20 nt, Human
aaaaggcaaagauggcuaca

SEQ ID NO: 132370 - RNA, 23 nt, Human
aacauuguuagagugcuccauuu

SEQ ID NO: 132371 - RNA, 25 nt, Human
aagagaagagauaauauuuuucuuu

SEQ ID NO: 132372 - RNA, 21 nt, Human
aagcacagacaucucccaugc

SEQ ID NO: 132373 - RNA, 24 nt, Human
aagcacagacaucucccaugccac

SEQ ID NO: 132374 - RNA, 30 nt, Human
aagcauccuucugaaugauccaggcauccc

SEQ ID NO: 132375 - RNA, 19 nt, Human
aaguagauauuuggacaga

SEQ ID NO: 132376 - RNA, 19 nt, Human
aaugaaaaccaaaaaccua

SEQ ID NO: 132377 - RNA, 21 nt, Human
acaacaagccuuuguucuugg

SEQ ID NO: 132378 - RNA, 18 nt, Human
accacgccuggcuaauuu

SEQ ID NO: 132379 - RNA, 19 nt, Human
accgcguguuagccaggau

SEQ ID NO: 132380 - RNA, 20 nt, Human
agcaaaaggcaaagauggcu

SEQ ID NO: 132381 - RNA, 18 nt, Human
agcagccugggcugaccc

SEQ ID NO: 132382 - RNA, 18 nt, Human
agcuccgccuccuggguu

SEQ ID NO: 132383 - RNA, 18 nt, Human
agggggaggauggagcag

SEQ ID NO: 132384 - RNA, 24 nt, Human
agguagauucuugcaggagagaga

SEQ ID NO: 132385 - RNA, 18 nt, Human
aguaaugaaaaccaaaaa

SEQ ID NO: 132386 - RNA, 29 nt, Human
aguaaugaaaaccaaaaaccuaaaagaaa

SEQ ID NO: 132387 - RNA, 18 nt, Human
aguggcauggucucaggu

SEQ ID NO: 132388 - RNA, 24 nt, Human
aguggugugaucucagcucacugc

SEQ ID NO: 132389 - RNA, 23 nt, Human
aguugacauuauccauguggcac

SEQ ID NO: 132390 - RNA, 18 nt, Human
auccucccacuucuucag

SEQ ID NO: 132391 - RNA, 22 nt, Human
augaaaaccaaaaaccuaaaag

SEQ ID NO: 132392 - RNA, 22 nt, Human
auggggcuccucucaccacugu

SEQ ID NO: 132393 - RNA, 19 nt, Human
auugcaguggugugaucuc

SEQ ID NO: 132394 - RNA, 21 nt, Human
caauuuaaacagcacuuaaaa

SEQ ID NO: 132395 - RNA, 21 nt, Human
caccucaccauuccucagaga

SEQ ID NO: 132396 - RNA, 22 nt, Human
cacgccauucuccugccucagc

SEQ ID NO: 132397 - RNA, 19 nt, Human
cacuucuucagcuuuccca

SEQ ID NO: 132398 - RNA, 24 nt, Human
cacuucuucagcuuucccaguagc

SEQ ID NO: 132399 - RNA, 24 nt, Human
cagagucuugcuuugucgcccagg

SEQ ID NO: 132400 - RNA, 21 nt, Human
cagccugggcugaccccuggg

SEQ ID NO: 132401 - RNA, 20 nt, Human
cagggagggcagaugugaua

SEQ ID NO: 132402 - RNA, 24 nt, Human
caguagcugggacuacaggugugc

SEQ ID NO: 132403 - RNA, 22 nt, Human
ccaagcacagacaucucccaug

SEQ ID NO: 132404 - RNA, 24 nt, Human
ccaagcacagacaucucccaugcc

SEQ ID NO: 132405 - RNA, 20 nt, Human
ccaagcuauccucccacuuc

SEQ ID NO: 132406 - RNA, 18 nt, Human
ccaucagcuucuuccagg

SEQ ID NO: 132407 - RNA, 23 nt, Human
ccauguggcacuucccagcuccu

SEQ ID NO: 132408 - RNA, 21 nt, Human
cccauacauagaaaauggggu

SEQ ID NO: 132409 - RNA, 20 nt, Human
ccugggcccaagcuauccuc

SEQ ID NO: 132410 - RNA, 24 nt, Human
ccuguaaccacaguucccacacag

SEQ ID NO: 132411 - RNA, 20 nt, Human
ccuuuguucuugggucaagg

SEQ ID NO: 132412 - RNA, 19 nt, Human
cgccuccuggguucacgcc

SEQ ID NO: 132413 - RNA, 21 nt, Human
cgcguguuagccaggaugguc

SEQ ID NO: 132414 - RNA, 20 nt, Human
cggagcuguacagacagccc

SEQ ID NO: 132415 - RNA, 24 nt, Human
cucagccucccgaguagcugggac

SEQ ID NO: 132416 - RNA, 22 nt, Human
cucagcucacugccagcuccgc

SEQ ID NO: 132417 - RNA, 19 nt, Human
cucauacaacaagccuuug

SEQ ID NO: 132418 - RNA, 19 nt, Human
cuccagguauccugccucc

SEQ ID NO: 132419 - RNA, 19 nt, Human
cuccucucaccacuguauc

SEQ ID NO: 132420 - RNA, 21 nt, Human
cuccuggguucacgccauucu

SEQ ID NO: 132421 - RNA, 21 nt, Human
cugaccccuggguuaccucuc

SEQ ID NO: 132422 - RNA, 19 nt, Human
cugaccccuggguuaccuu

SEQ ID NO: 132423 - RNA, 19 nt, Human
cugagguaccuccaagcac

SEQ ID NO: 132424 - RNA, 23 nt, Human
cugccagcuccgccuccuggguu

SEQ ID NO: 132425 - RNA, 23 nt, Human
cugccucagccucccgaguagcu

SEQ ID NO: 132426 - RNA, 24 nt, Human
cuggauugcaguggugugaucuca

SEQ ID NO: 132427 - RNA, 22 nt, Human
cuugggucaagggcuacuugga

SEQ ID NO: 132428 - RNA, 23 nt, Human
cuugggucaagggcuacuuggag

SEQ ID NO: 132429 - RNA, 23 nt, Human
gaaaaugggguuaucaaguacga

SEQ ID NO: 132430 - RNA, 25 nt, Human
gacagagucuugcuuugucgcccag

SEQ ID NO: 132431 - RNA, 24 nt, Human
gcccaggcuggauugcaguggugu

SEQ ID NO: 132432 - RNA, 20 nt, Human
gccucagccucccgaguagc

SEQ ID NO: 132433 - RNA, 24 nt, Human
gccuggcuaauuuuuuuguauuuu

SEQ ID NO: 132434 - RNA, 18 nt, Human
gcuacagcccagcagccu

SEQ ID NO: 132435 - RNA, 18 nt, Human
gcuccuauauaaugaaac

SEQ ID NO: 132436 - RNA, 22 nt, Human
ggcuggauugcaguggugugau

SEQ ID NO: 132437 - RNA, 21 nt, Human
ggugagggggacaugcagaga

SEQ ID NO: 132438 - RNA, 22 nt, Human
gucuugauauauuuagucuuag

SEQ ID NO: 132439 - RNA, 24 nt, Human
gucuugcuuugucgcccaggcugg

SEQ ID NO: 132440 - RNA, 24 nt, Human
uaaaauggggcuccucucaccacu

SEQ ID NO: 132441 - RNA, 21 nt, Human
uaagagagguaccuguaagua

SEQ ID NO: 132442 - RNA, 21 nt, Human
uacaggugugcaccaccacac

SEQ ID NO: 132443 - RNA, 18 nt, Human
uacaguagaauuguaugg

SEQ ID NO: 132444 - RNA, 18 nt, Human
uaccccauacauagaaaa

SEQ ID NO: 132445 - RNA, 23 nt, Human
uaccgcguguuagccaggauggu

SEQ ID NO: 132446 - RNA, 22 nt, Human
uaccuccaagcacagacaucuc

SEQ ID NO: 132447 - RNA, 20 nt, Human
uagaaggccuucagacaauc

SEQ ID NO: 132448 - RNA, 24 nt, Human
uagagugcuccauuuccuguaacc

SEQ ID NO: 132449 - RNA, 23 nt, Human
uaucaaguacgaccuuuggaccu

SEQ ID NO: 132450 - RNA, 19 nt, Human
uaugguacagggaaaaaaa

SEQ ID NO: 132451 - RNA, 23 nt, Human
ucacugccagcuccgccuccugg

SEQ ID NO: 132452 - RNA, 24 nt, Human
ucacugccagcuccgccuccuggg

SEQ ID NO: 132453 - RNA, 21 nt, Human
ucagagauauagcacacaagu

SEQ ID NO: 132454 - RNA, 23 nt, Human
ucagccucccgaguagcugggac

SEQ ID NO: 132455 - RNA, 23 nt, Human
ucagcuuucccaguagcugggac

SEQ ID NO: 132456 - RNA, 22 nt, Human
ucccaguagcugggacuacagg

SEQ ID NO: 132457 - RNA, 24 nt, Human
ucccaguagcugggacuacaggug

SEQ ID NO: 132458 - RNA, 22 nt, Human
ucccaugccaccucaccauucc

SEQ ID NO: 132459 - RNA, 23 nt, Human
ucccgaguagcugggacaacagg

SEQ ID NO: 132460 - RNA, 24 nt, Human
ucccgaguagcugggacaacaggu

SEQ ID NO: 132461 - RNA, 20 nt, Human
uccugggcccaagcuauccu

SEQ ID NO: 132462 - RNA, 24 nt, Human
uccuggguucacgccauucuccug

SEQ ID NO: 132463 - RNA, 22 nt, Human
ucgcccaggcuggauugcagug

SEQ ID NO: 132464 - RNA, 24 nt, Human
ucuauugcagcaaaaggcaaagau

SEQ ID NO: 132465 - RNA, 24 nt, Human
ucuccugccucagccucccgagua

SEQ ID NO: 132466 - RNA, 22 nt, Human
ucugagguaccuccaagcacag

SEQ ID NO: 132467 - RNA, 22 nt, Human
ucuugcuuugucgcccaggcug

SEQ ID NO: 132468 - RNA, 23 nt, Human
ucuugcuuugucgcccaggcugg

SEQ ID NO: 132469 - RNA, 24 nt, Human
ucuugcuuugucgcccaggcugga

SEQ ID NO: 132470 - RNA, 24 nt, Human
ucuugggucaagggcuacuuggag

SEQ ID NO: 132471 - RNA, 19 nt, Human
ugaccccuggguuaccucu

SEQ ID NO: 132472 - RNA, 23 nt, Human
ugcagcaaaaggcaaagauggcu

SEQ ID NO: 132473 - RNA, 19 nt, Human
ugcagggagggcagaugug

SEQ ID NO: 132474 - RNA, 22 nt, Human
ugcaguggugugaucucagcuc

SEQ ID NO: 132475 - RNA, 21 nt, Human
ugccauuuauacgaacauccu

SEQ ID NO: 132476 - RNA, 24 nt, Human
ugccucagccucccgaguagcugg

SEQ ID NO: 132477 - RNA, 24 nt, Human
ugcuuugucgcccaggcuggauug

SEQ ID NO: 132478 - RNA, 19 nt, Human
uggaagugguuuuacaguu

SEQ ID NO: 132479 - RNA, 19 nt, Human
uggauugcaguggugugau

SEQ ID NO: 132480 - RNA, 19 nt, Human
uggauugcaguggugugau

SEQ ID NO: 132481 - RNA, 22 nt, Human
uggauugcaguggugugaucuc

SEQ ID NO: 132482 - RNA, 28 nt, Human
uggauugcaguggugugauggcucuagc

SEQ ID NO: 132483 - RNA, 25 nt, Human
uggcagguuuagauguuacaauucu

SEQ ID NO: 132484 - RNA, 21 nt, Human
ugggacuacaggugugcacca

SEQ ID NO: 132485 - RNA, 24 nt, Human
ugggacuacaggugugcaccacca

SEQ ID NO: 132486 - RNA, 21 nt, Human
ugggccucuguuuaauccuuu

SEQ ID NO: 132487 - RNA, 20 nt, Human
uggguucacgccauucuccu

SEQ ID NO: 132488 - RNA, 25 nt, Human
uggugugaucucagcucacugccag

SEQ ID NO: 132489 - RNA, 26 nt, Human
uguaaagagaagagauaauauuuuuc

SEQ ID NO: 132490 - RNA, 21 nt, Human
ugucgcccaggcuggauugca

SEQ ID NO: 132491 - RNA, 21 nt, Human
ugugaucucagcucacugcca

SEQ ID NO: 132492 - RNA, 21 nt, Human
uguggcacuucccagcuccua

SEQ ID NO: 132493 - RNA, 21 nt, Human
uuacaauucuaacuaucugac

SEQ ID NO: 132494 - RNA, 18 nt, Human
uuaguagagaugauguuu

SEQ ID NO: 132495 - RNA, 19 nt, Human
uuccaagucaauuagggug

SEQ ID NO: 132496 - RNA, 23 nt, Human
uuccacaaaucuccagguauccu

SEQ ID NO: 132497 - RNA, 22 nt, Human
uucccaguagcugggacuacag

SEQ ID NO: 132498 - RNA, 19 nt, Human
uuccucagagauauagcac

SEQ ID NO: 132499 - RNA, 24 nt, Human
uuuagucuuagaaauggaaguggu

SEQ ID NO: 132500 - RNA, 19 nt, Human
uuugcuguuuuuuuuuucc

SEQ ID NO: 132501 - RNA, 20 nt, Human
uuuuguauuuuuaguagaga

SEQ ID NO: 132502 - RNA, 21 nt, Human
uuuuuaguagagaugauguuu

SEQ ID NO: 132503 - RNA, 21 nt, Human
uuuuuguauuuuuaguagaga

SEQ ID NO: 132504 - RNA, 21 nt, Human
uuuuuuguauuuuuaguagag

SEQ ID NO: 132505 - RNA, 20 nt, Human
uuuuuuuuuuugagacagag

SEQ ID NO: 132506 - RNA, 24 nt, Human
uuuuuuuuuuuugagacagagucu

SEQ ID NO: 132507 - RNA, 21 nt, Human
aacaaggcuggcgggagcaga

SEQ ID NO: 132508 - RNA, 22 nt, Human
acaaggcuggcgggagcagaga

SEQ ID NO: 132509 - RNA, 21 nt, Human
agaccaccugaaaacaaggcu

SEQ ID NO: 132510 - RNA, 19 nt, Human
ccacugugugacguggagc

SEQ ID NO: 132511 - RNA, 22 nt, Human
cuccagaccaccugaaaacaag

SEQ ID NO: 132512 - RNA, 26 nt, Human
gccacugugugacguggagcugccgc

SEQ ID NO: 132513 - RNA, 21 nt, Human
ggcccgagcggcccgagcccc

SEQ ID NO: 132514 - RNA, 19 nt, Human
gggagcagagauggcucga

SEQ ID NO: 132515 - RNA, 19 nt, Human
ugggaagguaacuucaaua

SEQ ID NO: 132516 - RNA, 24 nt, Human
agaaggcuggaguccucugcuggg

SEQ ID NO: 132517 - RNA, 21 nt, Human
agcuuggcaaggcccuggggu

SEQ ID NO: 132518 - RNA, 23 nt, Human
aggcuggaguccucugcugggug

SEQ ID NO: 132519 - RNA, 21 nt, Human
cacagccccuuucuccaguga

SEQ ID NO: 132520 - RNA, 24 nt, Human
cagcaaacagcuuggcaaggcccu

SEQ ID NO: 132521 - RNA, 20 nt, Human
cagcacagccccuuucucca

SEQ ID NO: 132522 - RNA, 23 nt, Human
cagccccuuucuccagugacucc

SEQ ID NO: 132523 - RNA, 19 nt, Human
cagcuucuggcccaggccu

SEQ ID NO: 132524 - RNA, 19 nt, Human
cccuggggugugguguggg

SEQ ID NO: 132525 - RNA, 20 nt, Human
ccuugugccagucuggcccc

SEQ ID NO: 132526 - RNA, 20 nt, Human
cucugcuggguguacagcug

SEQ ID NO: 132527 - RNA, 24 nt, Human
cuugugccagucuggccccagccg

SEQ ID NO: 132528 - RNA, 23 nt, Human
gaaggcuggaguccucugcuggg

SEQ ID NO: 132529 - RNA, 24 nt, Human
gacuccugguauggucaacagcuu

SEQ ID NO: 132530 - RNA, 24 nt, Human
gccugggccccgagaaggcuggag

SEQ ID NO: 132531 - RNA, 24 nt, Human
gucuggccccagcacagccccuuu

SEQ ID NO: 132532 - RNA, 19 nt, Human
gugaagcgucuaugagccc

SEQ ID NO: 132533 - RNA, 21 nt, Human
ugaagcgucuaugagcccagc

SEQ ID NO: 132534 - RNA, 19 nt, Human
ugggccccgagaaggcugg

SEQ ID NO: 132535 - RNA, 23 nt, Human
ugggguguggugugggcacgagu

SEQ ID NO: 132536 - RNA, 20 nt, Human
aaacaauggcaaagucuaac

SEQ ID NO: 132537 - RNA, 20 nt, Human
aaacaauggcaaagucuaac

SEQ ID NO: 132538 - RNA, 20 nt, Human
aaacaauggcaaagucuaac

SEQ ID NO: 132539 - RNA, 20 nt, Human
aaacaauggcaaagucuaac

SEQ ID NO: 132540 - RNA, 23 nt, Human
aagcauaacuuaaguaaacuuua

SEQ ID NO: 132541 - RNA, 23 nt, Human
aagcauaacuuaaguaaacuuua

SEQ ID NO: 132542 - RNA, 23 nt, Human
aagcauaacuuaaguaaacuuua

SEQ ID NO: 132543 - RNA, 23 nt, Human
aagcauaacuuaaguaaacuuua

SEQ ID NO: 132544 - RNA, 24 nt, Human
aaguggagcuucguugucuuguga

SEQ ID NO: 132545 - RNA, 24 nt, Human
aaguggagcuucguugucuuguga

SEQ ID NO: 132546 - RNA, 19 nt, Human
aaugugauccggcuggcaa

SEQ ID NO: 132547 - RNA, 19 nt, Human
aaugugauccggcuggcaa

SEQ ID NO: 132548 - RNA, 19 nt, Human
acacaacauuuuucuagcu

SEQ ID NO: 132549 - RNA, 19 nt, Human
acacaacauuuuucuagcu

SEQ ID NO: 132550 - RNA, 19 nt, Human
acacaacauuuuucuagcu

SEQ ID NO: 132551 - RNA, 19 nt, Human
acacaacauuuuucuagcu

SEQ ID NO: 132552 - RNA, 24 nt, Human
acuuucaggcggcucaaaaaggaa

SEQ ID NO: 132553 - RNA, 22 nt, Human
agaaaaacaagcauaacuuaag

SEQ ID NO: 132554 - RNA, 22 nt, Human
agaaaaacaagcauaacuuaag

SEQ ID NO: 132555 - RNA, 22 nt, Human
agaaaaacaagcauaacuuaag

SEQ ID NO: 132556 - RNA, 22 nt, Human
agaaaaacaagcauaacuuaag

SEQ ID NO: 132557 - RNA, 24 nt, Human
agaaaaacaagcauaacuuaagua

SEQ ID NO: 132558 - RNA, 24 nt, Human
agaaaaacaagcauaacuuaagua

SEQ ID NO: 132559 - RNA, 24 nt, Human
agaaaaacaagcauaacuuaagua

SEQ ID NO: 132560 - RNA, 24 nt, Human
agaaaaacaagcauaacuuaagua

SEQ ID NO: 132561 - RNA, 24 nt, Human
agagcacuuccgcccuagguaucg

SEQ ID NO: 132562 - RNA, 22 nt, Human
agcacuuccgcccuagguaucg

SEQ ID NO: 132563 - RNA, 20 nt, Human
agcggcagagugcuccaggg

SEQ ID NO: 132564 - RNA, 20 nt, Human
agcggcagagugcuccaggg

SEQ ID NO: 132565 - RNA, 20 nt, Human
agcggcagagugcuccaggg

SEQ ID NO: 132566 - RNA, 20 nt, Human
agcggcagagugcuccaggg

SEQ ID NO: 132567 - RNA, 21 nt, Human
agggagcccagaucacagccu

SEQ ID NO: 132568 - RNA, 21 nt, Human
agggagcccagaucacagccu

SEQ ID NO: 132569 - RNA, 21 nt, Human
agggagcccagaucacagccu

SEQ ID NO: 132570 - RNA, 21 nt, Human
auuuuggucaggacagggguu

SEQ ID NO: 132571 - RNA, 19 nt, Human
caauuccuuucuccuccuc

SEQ ID NO: 132572 - RNA, 19 nt, Human
caauuccuuucuccuccuc

SEQ ID NO: 132573 - RNA, 19 nt, Human
cacugagggaaccauuuuc

SEQ ID NO: 132574 - RNA, 19 nt, Human
cacugagggaaccauuuuc

SEQ ID NO: 132575 - RNA, 19 nt, Human
cagagugcuccagggauga

SEQ ID NO: 132576 - RNA, 19 nt, Human
cagagugcuccagggauga

SEQ ID NO: 132577 - RNA, 19 nt, Human
cagagugcuccagggauga

SEQ ID NO: 132578 - RNA, 19 nt, Human
cagagugcuccagggauga

SEQ ID NO: 132579 - RNA, 23 nt, Human
cagcucaauuccuuucuccuccu

SEQ ID NO: 132580 - RNA, 23 nt, Human
cagcucaauuccuuucuccuccu

SEQ ID NO: 132581 - RNA, 21 nt, Human
ccaagacuuugggcagugcag

SEQ ID NO: 132582 - RNA, 24 nt, Human
cccacgauucacacagcgaucacu

SEQ ID NO: 132583 - RNA, 24 nt, Human
ccgcccuagguaucgcugcucacu

SEQ ID NO: 132584 - RNA, 20 nt, Human
ccggcuggcaaacucccaca

SEQ ID NO: 132585 - RNA, 20 nt, Human
ccggcuggcaaacucccaca

SEQ ID NO: 132586 - RNA, 22 nt, Human
cgauucacacagcgaucacuuc

SEQ ID NO: 132587 - RNA, 21 nt, Human
cggcagagugcuccagggaug

SEQ ID NO: 132588 - RNA, 21 nt, Human
cggcagagugcuccagggaug

SEQ ID NO: 132589 - RNA, 21 nt, Human
cggcagagugcuccagggaug

SEQ ID NO: 132590 - RNA, 19 nt, Human
cucaauuccuuucuccucc

SEQ ID NO: 132591 - RNA, 19 nt, Human
cucaauuccuuucuccucc

SEQ ID NO: 132592 - RNA, 18 nt, Human
cuccucccuggcccucug

SEQ ID NO: 132593 - RNA, 18 nt, Human
cucuagauaggccagcuc

SEQ ID NO: 132594 - RNA, 18 nt, Human
cucuagauaggccagcuc

SEQ ID NO: 132595 - RNA, 23 nt, Human
cucuagauaggccagcucaauuc

SEQ ID NO: 132596 - RNA, 23 nt, Human
cucuagauaggccagcucaauuc

SEQ ID NO: 132597 - RNA, 22 nt, Human
cuucaaacaaaccuggggagaa

SEQ ID NO: 132598 - RNA, 22 nt, Human
cuucaaacaaaccuggggagaa

SEQ ID NO: 132599 - RNA, 22 nt, Human
gaaaacaauggcaaagucuaac

SEQ ID NO: 132600 - RNA, 22 nt, Human
gaaaacaauggcaaagucuaac

SEQ ID NO: 132601 - RNA, 22 nt, Human
gaaaacaauggcaaagucuaac

SEQ ID NO: 132602 - RNA, 22 nt, Human
gaaaacaauggcaaagucuaac

SEQ ID NO: 132603 - RNA, 21 nt, Human
gaauguguaggaccaucgugc

SEQ ID NO: 132604 - RNA, 18 nt, Human
gagcggcagagugcucca

SEQ ID NO: 132605 - RNA, 18 nt, Human
gagcggcagagugcucca

SEQ ID NO: 132606 - RNA, 18 nt, Human
gagcggcagagugcucca

SEQ ID NO: 132607 - RNA, 18 nt, Human
gagcggcagagugcucca

SEQ ID NO: 132608 - RNA, 20 nt, Human
gcucaauuccuuucuccucc

SEQ ID NO: 132609 - RNA, 20 nt, Human
gcucaauuccuuucuccucc

SEQ ID NO: 132610 - RNA, 18 nt, Human
gcuccagggaugagaggg

SEQ ID NO: 132611 - RNA, 18 nt, Human
gcuccagggaugagaggg

SEQ ID NO: 132612 - RNA, 18 nt, Human
gcuccagggaugagaggg

SEQ ID NO: 132613 - RNA, 18 nt, Human
gcuccagggaugagaggg

SEQ ID NO: 132614 - RNA, 24 nt, Human
gcuucagguacaaaagaaaacaau

SEQ ID NO: 132615 - RNA, 24 nt, Human
gcuucagguacaaaagaaaacaau

SEQ ID NO: 132616 - RNA, 24 nt, Human
gcuucagguacaaaagaaaacaau

SEQ ID NO: 132617 - RNA, 20 nt, Human
ggagcuucguugucuuguga

SEQ ID NO: 132618 - RNA, 20 nt, Human
ggagcuucguugucuuguga

SEQ ID NO: 132619 - RNA, 20 nt, Human
ggcagagugcuccagggaug

SEQ ID NO: 132620 - RNA, 20 nt, Human
gggcagugcaggcccaauuu

SEQ ID NO: 132621 - RNA, 26 nt, Human
gguuacagauucuuuacaaagguguu

SEQ ID NO: 132622 - RNA, 26 nt, Human
gguuacagauucuuuacaaagguguu

SEQ ID NO: 132623 - RNA, 26 nt, Human
gguuacagauucuuuacaaagguguu

SEQ ID NO: 132624 - RNA, 24 nt, Human
guaaacuuuauuuucaaaaugcuu

SEQ ID NO: 132625 - RNA, 24 nt, Human
guaaacuuuauuuucaaaaugcuu

SEQ ID NO: 132626 - RNA, 24 nt, Human
guaaacuuuauuuucaaaaugcuu

SEQ ID NO: 132627 - RNA, 24 nt, Human
guaaacuuuauuuucaaaaugcuu

SEQ ID NO: 132628 - RNA, 19 nt, Human
guggagcuucguugucuug

SEQ ID NO: 132629 - RNA, 25 nt, Human
uagaaaaacaagcauaacuuaagua

SEQ ID NO: 132630 - RNA, 25 nt, Human
uagaaaaacaagcauaacuuaagua

SEQ ID NO: 132631 - RNA, 25 nt, Human
uagaaaaacaagcauaacuuaagua

SEQ ID NO: 132632 - RNA, 25 nt, Human
uagaaaaacaagcauaacuuaagua

SEQ ID NO: 132633 - RNA, 19 nt, Human
uagaugaagccauguaaug

SEQ ID NO: 132634 - RNA, 19 nt, Human
uagaugaagccauguaaug

SEQ ID NO: 132635 - RNA, 20 nt, Human
uccaacaccagcacuggaau

SEQ ID NO: 132636 - RNA, 20 nt, Human
uccaacaccagcacuggaau

SEQ ID NO: 132637 - RNA, 20 nt, Human
uccaacaccagcacuggaau

SEQ ID NO: 132638 - RNA, 20 nt, Human
uccuccucccuggcccucug

SEQ ID NO: 132639 - RNA, 19 nt, Human
ucucaugaggucuucuugu

SEQ ID NO: 132640 - RNA, 19 nt, Human
ucucaugaggucuucuugu

SEQ ID NO: 132641 - RNA, 19 nt, Human
ucucaugaggucuucuugu

SEQ ID NO: 132642 - RNA, 19 nt, Human
ucuuugcaaagauauaccu

SEQ ID NO: 132643 - RNA, 19 nt, Human
ucuuugcaaagauauaccu

SEQ ID NO: 132644 - RNA, 24 nt, Human
ugacauccaacaccagcacuggaa

SEQ ID NO: 132645 - RNA, 24 nt, Human
ugacauccaacaccagcacuggaa

SEQ ID NO: 132646 - RNA, 24 nt, Human
ugacauccaacaccagcacuggaa

SEQ ID NO: 132647 - RNA, 18 nt, Human
ugagaggggcuggggaug

SEQ ID NO: 132648 - RNA, 18 nt, Human
ugagaggggcuggggaug

SEQ ID NO: 132649 - RNA, 18 nt, Human
ugagaggggcuggggaug

SEQ ID NO: 132650 - RNA, 18 nt, Human
ugagaggggcuggggaug

SEQ ID NO: 132651 - RNA, 18 nt, Human
ugaggucuucuuguuugg

SEQ ID NO: 132652 - RNA, 18 nt, Human
ugaggucuucuuguuugg

SEQ ID NO: 132653 - RNA, 18 nt, Human
ugaggucuucuuguuugg

SEQ ID NO: 132654 - RNA, 25 nt, Human
ugcuucagguacaaaagaaaacaau

SEQ ID NO: 132655 - RNA, 21 nt, Human
uggaauguucaucagagccuc

SEQ ID NO: 132656 - RNA, 21 nt, Human
uggaauguucaucagagccuc

SEQ ID NO: 132657 - RNA, 21 nt, Human
uggaauguucaucagagccuc

SEQ ID NO: 132658 - RNA, 18 nt, Human
uggcccucugguacaguc

SEQ ID NO: 132659 - RNA, 18 nt, Human
uggcccucugguacaguc

SEQ ID NO: 132660 - RNA, 21 nt, Human
ugggagacacaacauuuuucu

SEQ ID NO: 132661 - RNA, 21 nt, Human
ugggagacacaacauuuuucu

SEQ ID NO: 132662 - RNA, 21 nt, Human
ugggagacacaacauuuuucu

SEQ ID NO: 132663 - RNA, 21 nt, Human
ugggagacacaacauuuuucu

SEQ ID NO: 132664 - RNA, 18 nt, Human
uggggagaagccuggagg

SEQ ID NO: 132665 - RNA, 18 nt, Human
uggggagaagccuggagg

SEQ ID NO: 132666 - RNA, 18 nt, Human
ugucuggaauguguagga

SEQ ID NO: 132667 - RNA, 21 nt, Human
uguguaggaccaucgugcugg

SEQ ID NO: 132668 - RNA, 23 nt, Human
uucaggcggcucaaaaaggaaaa

SEQ ID NO: 132669 - RNA, 24 nt, Human
uucagguacaaaagaaaacaaugg

SEQ ID NO: 132670 - RNA, 26 nt, Human
uucagguacaaaagaaaacaauggca

SEQ ID NO: 132671 - RNA, 26 nt, Human
uucagguacaaaagaaaacaauggca

SEQ ID NO: 132672 - RNA, 26 nt, Human
uucagguacaaaagaaaacaauggca

SEQ ID NO: 132673 - RNA, 19 nt, Human
uuccuggccuguaagaguu

SEQ ID NO: 132674 - RNA, 19 nt, Human
uuccuggccuguaagaguu

SEQ ID NO: 132675 - RNA, 23 nt, Human
aaagagggaugagugguuggaga

SEQ ID NO: 132676 - RNA, 19 nt, Human
aaaguguggaucuaggaaa

SEQ ID NO: 132677 - RNA, 20 nt, Human
aaccacagugucuaagacaa

SEQ ID NO: 132678 - RNA, 20 nt, Human
aaccuaggucuccugacuca

SEQ ID NO: 132679 - RNA, 20 nt, Human
acacagugccuguggcugua

SEQ ID NO: 132680 - RNA, 18 nt, Human
acaguagagaggggcuga

SEQ ID NO: 132681 - RNA, 19 nt, Human
acaugcacugcccacuggc

SEQ ID NO: 132682 - RNA, 19 nt, Human
acccaucuccaccccuccc

SEQ ID NO: 132683 - RNA, 21 nt, Human
acccaucuccaccccucccuu

SEQ ID NO: 132684 - RNA, 18 nt, Human
acgcaauuccuucucaga

SEQ ID NO: 132685 - RNA, 21 nt, Human
acuccguggcugcccuccucc

SEQ ID NO: 132686 - RNA, 22 nt, Human
acugggcugcccccuggaagcc

SEQ ID NO: 132687 - RNA, 23 nt, Human
agacacuggcagugugccaagcc

SEQ ID NO: 132688 - RNA, 21 nt, Human
agagaggggcugaaaccuagg

SEQ ID NO: 132689 - RNA, 19 nt, Human
agaugacaacaaccugcaa

SEQ ID NO: 132690 - RNA, 20 nt, Human
agaugggagcuggccuuggg

SEQ ID NO: 132691 - RNA, 21 nt, Human
agaugggagcuggccuugggg

SEQ ID NO: 132692 - RNA, 18 nt, Human
agccaggaggaagguggu

SEQ ID NO: 132693 - RNA, 21 nt, Human
agccuuucuggaaaugagaug

SEQ ID NO: 132694 - RNA, 24 nt, Human
agcugggguggggagugguggaag

SEQ ID NO: 132695 - RNA, 23 nt, Human
aggcacugaaauuaacuacagcu

SEQ ID NO: 132696 - RNA, 24 nt, Human
aggcaugaaggaggaaggggggag

SEQ ID NO: 132697 - RNA, 19 nt, Human
aggccugcaggguugguga

SEQ ID NO: 132698 - RNA, 23 nt, Human
agggguuaagggacucacccaga

SEQ ID NO: 132699 - RNA, 19 nt, Human
agggugggaguucuggagg

SEQ ID NO: 132700 - RNA, 22 nt, Human
aggguuggaggcuucacuggca

SEQ ID NO: 132701 - RNA, 19 nt, Human
agugguggaagaaagaaaa

SEQ ID NO: 132702 - RNA, 26 nt, Human
agugguggaagaaagaaaaagaggga

SEQ ID NO: 132703 - RNA, 21 nt, Human
auggguagggugguuccuuug

SEQ ID NO: 132704 - RNA, 18 nt, Human
caacucagaugacaacaa

SEQ ID NO: 132705 - RNA, 25 nt, Human
caagccagggaaggaccuagggagg

SEQ ID NO: 132706 - RNA, 20 nt, Human
caaggaagcacaugggucuc

SEQ ID NO: 132707 - RNA, 22 nt, Human
caaguagguauuacuaucccuu

SEQ ID NO: 132708 - RNA, 24 nt, Human
cacacaccauacacugccacaccc

SEQ ID NO: 132709 - RNA, 21 nt, Human
cacaccauacacugccacacc

SEQ ID NO: 132710 - RNA, 19 nt, Human
cacacccaucuccaccccu

SEQ ID NO: 132711 - RNA, 20 nt, Human
cacacccaucuccaccccuc

SEQ ID NO: 132712 - RNA, 20 nt, Human
cacaugcacugcccacuggc

SEQ ID NO: 132713 - RNA, 25 nt, Human
caccaagacaaaguggguuuuggga

SEQ ID NO: 132714 - RNA, 25 nt, Human
caccauacacugccacacccaucuc

SEQ ID NO: 132715 - RNA, 25 nt, Human
caccuucaaugugaccagugcucaa

SEQ ID NO: 132716 - RNA, 21 nt, Human
cacugccgccagcuccgcgcc

SEQ ID NO: 132717 - RNA, 19 nt, Human
cacuguuuaacuagcucgu

SEQ ID NO: 132718 - RNA, 25 nt, Human
cagagcggagaccacucucuccacc

SEQ ID NO: 132719 - RNA, 18 nt, Human
cagaggccaaauggguag

SEQ ID NO: 132720 - RNA, 21 nt, Human
caggaggaaggugguguuggg

SEQ ID NO: 132721 - RNA, 18 nt, Human
caucuggggccuccccac

SEQ ID NO: 132722 - RNA, 22 nt, Human
ccacaugcacugcccacuggca

SEQ ID NO: 132723 - RNA, 22 nt, Human
ccacugcagaugugacgcugaa

SEQ ID NO: 132724 - RNA, 24 nt, Human
ccacugggcugcccccuggaagcc

SEQ ID NO: 132725 - RNA, 24 nt, Human
cccacggugagaauccuacagaaa

SEQ ID NO: 132726 - RNA, 18 nt, Human
cccacucccaccaagaca

SEQ ID NO: 132727 - RNA, 21 nt, Human
cccacuccguggcugcccucc

SEQ ID NO: 132728 - RNA, 23 nt, Human
cccaucuccaccccucccuuuca

SEQ ID NO: 132729 - RNA, 23 nt, Human
ccccacuccguggcugcccuccu

SEQ ID NO: 132730 - RNA, 21 nt, Human
cccccagcccucacaagaccc

SEQ ID NO: 132731 - RNA, 19 nt, Human
ccccugcugcagagcagcg

SEQ ID NO: 132732 - RNA, 20 nt, Human
ccugaugcuguccacucccc

SEQ ID NO: 132733 - RNA, 21 nt, Human
ccugcaagccagguaugagcc

SEQ ID NO: 132734 - RNA, 23 nt, Human
ccugcaggguuggugagccaaga

SEQ ID NO: 132735 - RNA, 19 nt, Human
ccuggauccaauucagagc

SEQ ID NO: 132736 - RNA, 23 nt, Human
ccugugaggaccucgucuggcug

SEQ ID NO: 132737 - RNA, 25 nt, Human
ccuuucaacuaaugaagagacccgg

SEQ ID NO: 132738 - RNA, 19 nt, Human
ccuuucuggaaaugagaug

SEQ ID NO: 132739 - RNA, 21 nt, Human
cggaaauggaacuuucucuga

SEQ ID NO: 132740 - RNA, 18 nt, Human
cuacaaaaaaaagccaug

SEQ ID NO: 132741 - RNA, 23 nt, Human
cuacaaaaaaaagccaugaacuc

SEQ ID NO: 132742 - RNA, 23 nt, Human
cuaccacuuacccagcaccuuca

SEQ ID NO: 132743 - RNA, 21 nt, Human
cucaacucagaugacaacaac

SEQ ID NO: 132744 - RNA, 22 nt, Human
cuccaccuaggugucccaggcu

SEQ ID NO: 132745 - RNA, 24 nt, Human
cuccccacuccguggcugcccucc

SEQ ID NO: 132746 - RNA, 23 nt, Human
cuccgcgccuggcccgcucugcg

SEQ ID NO: 132747 - RNA, 24 nt, Human
cugauucuaaagaaaaccuucaug

SEQ ID NO: 132748 - RNA, 21 nt, Human
cuggagcaacauaaccggagg

SEQ ID NO: 132749 - RNA, 23 nt, Human
cuggccaaagaaacuggcuacaa

SEQ ID NO: 132750 - RNA, 20 nt, Human
cugggcugcccccuggaagc

SEQ ID NO: 132751 - RNA, 22 nt, Human
cugggguggggagugguggaag

SEQ ID NO: 132752 - RNA, 22 nt, Human
cuucccugcaagccagguauga

SEQ ID NO: 132753 - RNA, 20 nt, Human
gaaugccuucuccaggaaca

SEQ ID NO: 132754 - RNA, 20 nt, Human
gacacuggcagugugccaag

SEQ ID NO: 132755 - RNA, 19 nt, Human
gaccagugcucaacucaga

SEQ ID NO: 132756 - RNA, 22 nt, Human
gacgcaauuccuucucagauuc

SEQ ID NO: 132757 - RNA, 18 nt, Human
gagugaagggaagaugcc

SEQ ID NO: 132758 - RNA, 23 nt, Human
gagugguggaagaaagaaaaaga

SEQ ID NO: 132759 - RNA, 21 nt, Human
gcagcgcggacccacucccac

SEQ ID NO: 132760 - RNA, 21 nt, Human
gcagugugccaagccuugggu

SEQ ID NO: 132761 - RNA, 25 nt, Human
gccaagaagaaugagcccagguccc

SEQ ID NO: 132762 - RNA, 23 nt, Human
gccacacccaucuccaccccucc

SEQ ID NO: 132763 - RNA, 25 nt, Human
gccacacccaucuccaccccucccu

SEQ ID NO: 132764 - RNA, 21 nt, Human
gccccacggugagaauccuac

SEQ ID NO: 132765 - RNA, 22 nt, Human
gccuccugucacugccgccagc

SEQ ID NO: 132766 - RNA, 19 nt, Human
gccuguagcccacagcccg

SEQ ID NO: 132767 - RNA, 20 nt, Human
gcuccacugcagaugugacg

SEQ ID NO: 132768 - RNA, 19 nt, Human
ggaaagaugaggccugcag

SEQ ID NO: 132769 - RNA, 21 nt, Human
ggaagaaagaaaaagagggau

SEQ ID NO: 132770 - RNA, 20 nt, Human
ggagguucccuucccucugg

SEQ ID NO: 132771 - RNA, 21 nt, Human
ggccucggaccuggcuuuggc

SEQ ID NO: 132772 - RNA, 18 nt, Human
ggcucuggaggggagagg

SEQ ID NO: 132773 - RNA, 19 nt, Human
ggcugucagggugggaguu

SEQ ID NO: 132774 - RNA, 21 nt, Human
ggggugggccugcaggcccag

SEQ ID NO: 132775 - RNA, 22 nt, Human
guccacuggaucauuuuuccuc

SEQ ID NO: 132776 - RNA, 18 nt, Human
guggaagaaagaaaaaga

SEQ ID NO: 132777 - RNA, 18 nt, Human
guugcacagcucgcugac

SEQ ID NO: 132778 - RNA, 21 nt, Human
uaaacagaagcagcggcccca

SEQ ID NO: 132779 - RNA, 18 nt, Human
uaagggacucacccagag

SEQ ID NO: 132780 - RNA, 18 nt, Human
uacacugccacacccauc

SEQ ID NO: 132781 - RNA, 18 nt, Human
uagaaucaucaguuuugc

SEQ ID NO: 132782 - RNA, 21 nt, Human
uagaguugcauaaacaaccaa

SEQ ID NO: 132783 - RNA, 22 nt, Human
ucaacucagaugacaacaaccu

SEQ ID NO: 132784 - RNA, 19 nt, Human
ucacugccgccagcuccgc

SEQ ID NO: 132785 - RNA, 19 nt, Human
ucagugguggcuggggugg

SEQ ID NO: 132786 - RNA, 20 nt, Human
uccaaaauaccuuccuuucc

SEQ ID NO: 132787 - RNA, 21 nt, Human
uccaaaauaccuuccuuucca

SEQ ID NO: 132788 - RNA, 26 nt, Human
uccaaaucccacauucuuuccauucc

SEQ ID NO: 132789 - RNA, 23 nt, Human
uccacaugcacugcccacuggca

SEQ ID NO: 132790 - RNA, 18 nt, Human
uccaccccucccuuucaa

SEQ ID NO: 132791 - RNA, 21 nt, Human
uccacuggaucauuuuuccuc

SEQ ID NO: 132792 - RNA, 18 nt, Human
ucccaccugaugcugucc

SEQ ID NO: 132793 - RNA, 23 nt, Human
uccccaaguguccacuggaucau

SEQ ID NO: 132794 - RNA, 22 nt, Human
ucccuuaauuccagcuucccuu

SEQ ID NO: 132795 - RNA, 18 nt, Human
uccguggguuuugcaacc

SEQ ID NO: 132796 - RNA, 19 nt, Human
uccguggguuuugcaacca

SEQ ID NO: 132797 - RNA, 20 nt, Human
uccguggguuuugcaaccac

SEQ ID NO: 132798 - RNA, 19 nt, Human
uccugagaucccagggugg

SEQ ID NO: 132799 - RNA, 19 nt, Human
ucggguuuucagcugaggc

SEQ ID NO: 132800 - RNA, 19 nt, Human
ucucuggccaccgucccag

SEQ ID NO: 132801 - RNA, 21 nt, Human
ucuuucuuucuucugcccccu

SEQ ID NO: 132802 - RNA, 21 nt, Human
ugaaauuaacuacagcugggg

SEQ ID NO: 132803 - RNA, 22 nt, Human
ugacaacaaccugcaaguaggu

SEQ ID NO: 132804 - RNA, 20 nt, Human
ugacagauaauccccaagug

SEQ ID NO: 132805 - RNA, 20 nt, Human
ugaccaaagaagaaaauaaa

SEQ ID NO: 132806 - RNA, 18 nt, Human
ugacgcaauuccuucuca

SEQ ID NO: 132807 - RNA, 23 nt, Human
ugagaugggagcuggccuugggg

SEQ ID NO: 132808 - RNA, 22 nt, Human
ugaggaaacugcagcucagagg

SEQ ID NO: 132809 - RNA, 21 nt, Human
ugauuccaaaauaccuuccuu

SEQ ID NO: 132810 - RNA, 18 nt, Human
ugcacagcucgcugacag

SEQ ID NO: 132811 - RNA, 28 nt, Human
ugcacaggugaccuaauguuguaaugac

SEQ ID NO: 132812 - RNA, 19 nt, Human
ugcacugagcaaggaagca

SEQ ID NO: 132813 - RNA, 21 nt, Human
ugcagccaagaaacucagggc

SEQ ID NO: 132814 - RNA, 24 nt, Human
ugccgccagcuccgcgccuggccc

SEQ ID NO: 132815 - RNA, 18 nt, Human
ugccuggaugcccccagc

SEQ ID NO: 132816 - RNA, 22 nt, Human
ugccuguggcuguaagagccug

SEQ ID NO: 132817 - RNA, 20 nt, Human
uggaagaaagaaaaagaggg

SEQ ID NO: 132818 - RNA, 18 nt, Human
uggaagccaggaggaagg

SEQ ID NO: 132819 - RNA, 21 nt, Human
uggagcaacauaaccggaggg

SEQ ID NO: 132820 - RNA, 18 nt, Human
uggaugcccccagcccuc

SEQ ID NO: 132821 - RNA, 23 nt, Human
uggcacagcgcaucuggggccuc

SEQ ID NO: 132822 - RNA, 18 nt, Human
uggcagugugccaagccu

SEQ ID NO: 132823 - RNA, 21 nt, Human
uggcagugugccaagccuugg

SEQ ID NO: 132824 - RNA, 25 nt, Human
uggccagggacaggacuggcuacaa

SEQ ID NO: 132825 - RNA, 19 nt, Human
uggcuuaggguuggaggcu

SEQ ID NO: 132826 - RNA, 18 nt, Human
ugggaugggugaacaccc

SEQ ID NO: 132827 - RNA, 23 nt, Human
ugggaugggugaacacccuucaa

SEQ ID NO: 132828 - RNA, 23 nt, Human
ugguggaagaaagaaaaagaggg

SEQ ID NO: 132829 - RNA, 25 nt, Human
ugguggaagaaagaaaaagagggau

SEQ ID NO: 132830 - RNA, 20 nt, Human
ugucagggugggaguucugg

SEQ ID NO: 132831 - RNA, 22 nt, Human
ugucccaggcugaggcugggac

SEQ ID NO: 132832 - RNA, 18 nt, Human
uuaaacagaagcagcggc

SEQ ID NO: 132833 - RNA, 22 nt, Human
uuaauuccagcuucccuuacau

SEQ ID NO: 132834 - RNA, 23 nt, Human
uuggccucggaccuggcuuuggc

SEQ ID NO: 132835 - RNA, 21 nt, Human
uuuaaacagaagcagcggccc

SEQ ID NO: 132836 - RNA, 22 nt, Human
uuuaacuccauccaaaaccauc

SEQ ID NO: 132837 - RNA, 24 nt, Human
uuuggccucggaccuggcuuuggc

SEQ ID NO: 132838 - RNA, 21 nt, Human
aaccggccccuuaaaaguuuc

SEQ ID NO: 132839 - RNA, 20 nt, Human
acagggcgugggaagaccuc

SEQ ID NO: 132840 - RNA, 22 nt, Human
accugaaagccacagccagugg

SEQ ID NO: 132841 - RNA, 21 nt, Human
accugccuacaccugaaagcc

SEQ ID NO: 132842 - RNA, 19 nt, Human
accugcgcccaccuucccc

SEQ ID NO: 132843 - RNA, 21 nt, Human
agaaaaggaggugcccucccg

SEQ ID NO: 132844 - RNA, 18 nt, Human
agagcccaccugccuaca

SEQ ID NO: 132845 - RNA, 21 nt, Human
agcaagaguaaaugcagccua

SEQ ID NO: 132846 - RNA, 21 nt, Human
agcaggaaggaaacgacauga

SEQ ID NO: 132847 - RNA, 22 nt, Human
agcaggcaggggagggggaucu

SEQ ID NO: 132848 - RNA, 19 nt, Human
aggacuaguaaaggugacc

SEQ ID NO: 132849 - RNA, 22 nt, Human
aggcaaaagcaaggaacagagc

SEQ ID NO: 132850 - RNA, 23 nt, Human
agggaagaaagcacagaaaagga

SEQ ID NO: 132851 - RNA, 20 nt, Human
agggaaucgggaagcagagc

SEQ ID NO: 132852 - RNA, 18 nt, Human
agucugcacagucacagg

SEQ ID NO: 132853 - RNA, 24 nt, Human
agugcugggaccucucugaggucu

SEQ ID NO: 132854 - RNA, 23 nt, Human
caacacccuagggaugaggaaga

SEQ ID NO: 132855 - RNA, 22 nt, Human
caauacauggauaacgcgcacg

SEQ ID NO: 132856 - RNA, 20 nt, Human
caauacggcagugcuggaca

SEQ ID NO: 132857 - RNA, 20 nt, Human
cacaacacccuagggaugag

SEQ ID NO: 132858 - RNA, 18 nt, Human
cacagucacagggcaaga

SEQ ID NO: 132859 - RNA, 21 nt, Human
caccugccuacaccugaaagc

SEQ ID NO: 132860 - RNA, 30 nt, Human
cacucccacuuuuauuuagcaagagggggg

SEQ ID NO: 132861 - RNA, 20 nt, Human
cagaacacgcucuugacagc

SEQ ID NO: 132862 - RNA, 23 nt, Human
cagacuccaggcagagcacuccu

SEQ ID NO: 132863 - RNA, 18 nt, Human
cagcaggagcaggaagga

SEQ ID NO: 132864 - RNA, 21 nt, Human
cagccccacagggcuucuccc

SEQ ID NO: 132865 - RNA, 25 nt, Human
cagggacacugauuagagaaaaucc

SEQ ID NO: 132866 - RNA, 19 nt, Human
cagugcugggaccucucug

SEQ ID NO: 132867 - RNA, 23 nt, Human
ccaccugccuacaccugaaagcc

SEQ ID NO: 132868 - RNA, 25 nt, Human
ccagcccccauggaccuggcagaac

SEQ ID NO: 132869 - RNA, 22 nt, Human
cccaccugccuacaccugaaag

SEQ ID NO: 132870 - RNA, 20 nt, Human
ccccauggaccuggcagaac

SEQ ID NO: 132871 - RNA, 21 nt, Human
ccccuuucuccccaguguccc

SEQ ID NO: 132872 - RNA, 22 nt, Human
ccccuuucuccccaguguccca

SEQ ID NO: 132873 - RNA, 26 nt, Human
cccuccagccucuugccaaauaguuu

SEQ ID NO: 132874 - RNA, 24 nt, Human
ccucaccugcgcccaccuuccccu

SEQ ID NO: 132875 - RNA, 18 nt, Human
ccuucuugaaccggcccc

SEQ ID NO: 132876 - RNA, 18 nt, Human
cgcgcacgccccacuccc

SEQ ID NO: 132877 - RNA, 20 nt, Human
cggcuaaaguccugcgcaca

SEQ ID NO: 132878 - RNA, 23 nt, Human
cucagggaagaaagcacagaaaa

SEQ ID NO: 132879 - RNA, 25 nt, Human
cuugaaggcaaaagcaaggaacaga

SEQ ID NO: 132880 - RNA, 22 nt, Human
cuugauccuucucaaccggcua

SEQ ID NO: 132881 - RNA, 25 nt, Human
gcagcaggagcaggaaggaaacgac

SEQ ID NO: 132882 - RNA, 18 nt, Human
gcuggagaagguguggag

SEQ ID NO: 132883 - RNA, 21 nt, Human
ggaagaaagcacagaaaagga

SEQ ID NO: 132884 - RNA, 19 nt, Human
ggacaccugccaagugcug

SEQ ID NO: 132885 - RNA, 18 nt, Human
guugcucgagccagaguc

SEQ ID NO: 132886 - RNA, 20 nt, Human
uaaaguccugcgcacaccuc

SEQ ID NO: 132887 - RNA, 28 nt, Human
uaccaaggagaaacggcgcacgggcccc

SEQ ID NO: 132888 - RNA, 22 nt, Human
ucaacaccgugcacgcuaccaa

SEQ ID NO: 132889 - RNA, 24 nt, Human
ucccuugaaggcaaaagcaaggaa

SEQ ID NO: 132890 - RNA, 21 nt, Human
uccugcgcacaccucggcccc

SEQ ID NO: 132891 - RNA, 24 nt, Human
uccuucuugaaccggccccuuaaa

SEQ ID NO: 132892 - RNA, 23 nt, Human
ucgagccagagucugcacaguca

SEQ ID NO: 132893 - RNA, 26 nt, Human
ucuacacaacacccuagggaugagga

SEQ ID NO: 132894 - RNA, 21 nt, Human
ucugugcuggcaauacggcag

SEQ ID NO: 132895 - RNA, 21 nt, Human
ugaaagccacagccagugcug

SEQ ID NO: 132896 - RNA, 19 nt, Human
ugaaagccccuuucucccc

SEQ ID NO: 132897 - RNA, 22 nt, Human
ugaaggcaaaagcaaggaacag

SEQ ID NO: 132898 - RNA, 18 nt, Human
ugacagggcgugggaaga

SEQ ID NO: 132899 - RNA, 21 nt, Human
ugagaccuccucgcuggagaa

SEQ ID NO: 132900 - RNA, 23 nt, Human
ugaggaaacugaggcuccucgag

SEQ ID NO: 132901 - RNA, 22 nt, Human
ugauuagguacuggacaccugc

SEQ ID NO: 132902 - RNA, 18 nt, Human
ugcagacuccaggcagag

SEQ ID NO: 132903 - RNA, 22 nt, Human
uggcaauacggcagugcuggac

SEQ ID NO: 132904 - RNA, 23 nt, Human
uggcaauacggcagugcuggaca

SEQ ID NO: 132905 - RNA, 23 nt, Human
ugggaagaccuccugcucaccag

SEQ ID NO: 132906 - RNA, 20 nt, Human
ugggucauccuccugcccag

SEQ ID NO: 132907 - RNA, 20 nt, Human
uucccuugaaggcaaaagcu

SEQ ID NO: 132908 - RNA, 25 nt, Human
uuucacagcagaagggaacuuuucc

SEQ ID NO: 132909 - RNA, 18 nt, Human
uuuuuuuuuuugaacagg

SEQ ID NO: 132910 - RNA, 21 nt, Human
uuuuuuuuuuuuuugaacagg

SEQ ID NO: 132911 - RNA, 25 nt, Human
uuuuuuuuuuuuuuuuugaacaggg

SEQ ID NO: 132912 - RNA, 19 nt, Human
aaaaauacauacuuuuuuc

SEQ ID NO: 132913 - RNA, 22 nt, Human
aaaaauguauuauuuuaccuuc

SEQ ID NO: 132914 - RNA, 19 nt, Human
aaacaguguauuaugcucu

SEQ ID NO: 132915 - RNA, 25 nt, Human
aaaccaaagucaaacuccaucagaa

SEQ ID NO: 132916 - RNA, 24 nt, Human
aaagaaauagaugaaaaugguuaa

SEQ ID NO: 132917 - RNA, 19 nt, Human
aaagcgcugggauuacagg

SEQ ID NO: 132918 - RNA, 24 nt, Human
aaagcgcugggauuacagguguga

SEQ ID NO: 132919 - RNA, 19 nt, Human
aacauggugaaaccccauc

SEQ ID NO: 132920 - RNA, 20 nt, Human
aacauggugaaaccccaucu

SEQ ID NO: 132921 - RNA, 21 nt, Human
aacauggugaaaccccaucuc

SEQ ID NO: 132922 - RNA, 21 nt, Human
aacauggugaaaccccaucuc

SEQ ID NO: 132923 - RNA, 19 nt, Human
aacccuuuccccuuguuuu

SEQ ID NO: 132924 - RNA, 25 nt, Human
aacccuuuccccuuguuuuuuuuuu

SEQ ID NO: 132925 - RNA, 23 nt, Human
aacuccaucagaauauccugcua

SEQ ID NO: 132926 - RNA, 22 nt, Human
aagagcgaaacgcugucuaaaa

SEQ ID NO: 132927 - RNA, 18 nt, Human
aagcaaccaucaucccuc

SEQ ID NO: 132928 - RNA, 19 nt, Human
aagcgcugggauuacaggu

SEQ ID NO: 132929 - RNA, 26 nt, Human
aagcgcugggauuacaggugugagcc

SEQ ID NO: 132930 - RNA, 24 nt, Human
aagcuggucucaagucgugacaca

SEQ ID NO: 132931 - RNA, 24 nt, Human
aagguggcaacauuuaucuacaaa

SEQ ID NO: 132932 - RNA, 24 nt, Human
aagugaucugccugccuuagccuc

SEQ ID NO: 132933 - RNA, 18 nt, Human
aaucgcuugaaucuggga

SEQ ID NO: 132934 - RNA, 24 nt, Human
accaacauggugaaaccccaucuc

SEQ ID NO: 132935 - RNA, 24 nt, Human
accauugcaugcuagccugggcaa

SEQ ID NO: 132936 - RNA, 24 nt, Human
accccaucucuacuaaaaauacaa

SEQ ID NO: 132937 - RNA, 18 nt, Human
agaaauagaugaaaaugg

SEQ ID NO: 132938 - RNA, 19 nt, Human
agaaccugcucgcugacuu

SEQ ID NO: 132939 - RNA, 22 nt, Human
agaaucgcuugaaucugggaag

SEQ ID NO: 132940 - RNA, 19 nt, Human
agacgccugggaacugcgg

SEQ ID NO: 132941 - RNA, 18 nt, Human
agagagaagaguaguggg

SEQ ID NO: 132942 - RNA, 24 nt, Human
agcacuuugggaggcugagguggg

SEQ ID NO: 132943 - RNA, 24 nt, Human
agccugaccaacauggugaaaccc

SEQ ID NO: 132944 - RNA, 24 nt, Human
agccugaggcaggagaaucgcuug

SEQ ID NO: 132945 - RNA, 18 nt, Human
agcgcugggauuacaggu

SEQ ID NO: 132946 - RNA, 19 nt, Human
agcgggaggaccuccgagc

SEQ ID NO: 132947 - RNA, 20 nt, Human
aggcaggagaaucgcuugaa

SEQ ID NO: 132948 - RNA, 24 nt, Human
aggcaggagaaucgcuugaaucug

SEQ ID NO: 132949 - RNA, 21 nt, Human
aggcggagguugcaguaagcc

SEQ ID NO: 132950 - RNA, 24 nt, Human
aggcggagguugcaguaagccgag

SEQ ID NO: 132951 - RNA, 24 nt, Human
aggcugaggugggugaaucgcuug

SEQ ID NO: 132952 - RNA, 23 nt, Human
agguggccaggcuggucuggaac

SEQ ID NO: 132953 - RNA, 18 nt, Human
aggugggugaaucgcuug

SEQ ID NO: 132954 - RNA, 19 nt, Human
aguagcugggacuacaggc

SEQ ID NO: 132955 - RNA, 21 nt, Human
aguagcugggacuacaggcau

SEQ ID NO: 132956 - RNA, 20 nt, Human
agugcaguggcacaaucacg

SEQ ID NO: 132957 - RNA, 19 nt, Human
auggggcuuugccauguug

SEQ ID NO: 132958 - RNA, 19 nt, Human
auggguguggaauggcagc

SEQ ID NO: 132959 - RNA, 18 nt, Human
auuugggugaauauagau

SEQ ID NO: 132960 - RNA, 26 nt, Human
caaaauacaaaaauuagccgggcgug

SEQ ID NO: 132961 - RNA, 24 nt, Human
caaagcgcugggauuacaggugug

SEQ ID NO: 132962 - RNA, 22 nt, Human
caaaggcaucugaaacucccug

SEQ ID NO: 132963 - RNA, 19 nt, Human
caaauaaaccauguguggc

SEQ ID NO: 132964 - RNA, 24 nt, Human
caacauggugaaaccccaucucua

SEQ ID NO: 132965 - RNA, 24 nt, Human
caagccgguaaucccagcacuuug

SEQ ID NO: 132966 - RNA, 22 nt, Human
caagugaucugccugccuuagc

SEQ ID NO: 132967 - RNA, 24 nt, Human
caaugaacuucuuuccaaaugccc

SEQ ID NO: 132968 - RNA, 24 nt, Human
cacaaugcccagcuaauuuuugug

SEQ ID NO: 132969 - RNA, 18 nt, Human
cacacacaggacagggag

SEQ ID NO: 132970 - RNA, 25 nt, Human
caccuccuccuccacaggugcagcc

SEQ ID NO: 132971 - RNA, 25 nt, Human
caccugguccuagcuacuugggagc

SEQ ID NO: 132972 - RNA, 18 nt, Human
cagaggcaaauacuuuuc

SEQ ID NO: 132973 - RNA, 24 nt, Human
cagcacuuugggaggcugaggugg

SEQ ID NO: 132974 - RNA, 18 nt, Human
cagcggccgcagcgcccc

SEQ ID NO: 132975 - RNA, 19 nt, Human
cagcggccgcagcgccccc

SEQ ID NO: 132976 - RNA, 25 nt, Human
cagcugccgccgcacguaguagguu

SEQ ID NO: 132977 - RNA, 21 nt, Human
cagcuucuuacugcaaacacc

SEQ ID NO: 132978 - RNA, 19 nt, Human
caggcgaggccccgccccc

SEQ ID NO: 132979 - RNA, 24 nt, Human
caggcgaggccccgcccccccgcc

SEQ ID NO: 132980 - RNA, 18 nt, Human
caggugcuggggacucag

SEQ ID NO: 132981 - RNA, 24 nt, Human
caggugugagccacugugccuggc

SEQ ID NO: 132982 - RNA, 24 nt, Human
cauacucauuuucccaucacugga

SEQ ID NO: 132983 - RNA, 20 nt, Human
caucucagcuuccugacuag

SEQ ID NO: 132984 - RNA, 21 nt, Human
caucugaaacucccugggccc

SEQ ID NO: 132985 - RNA, 23 nt, Human
caugucauucucugguuugugua

SEQ ID NO: 132986 - RNA, 23 nt, Human
cauguugcccaagcuggucucaa

SEQ ID NO: 132987 - RNA, 23 nt, Human
cauguugcccaagcuggucucaa

SEQ ID NO: 132988 - RNA, 19 nt, Human
cauugcaugcuagccuggg

SEQ ID NO: 132989 - RNA, 23 nt, Human
cauugcaugcuagccugggcaac

SEQ ID NO: 132990 - RNA, 24 nt, Human
cauugcaugcuagccugggcaaca

SEQ ID NO: 132991 - RNA, 21 nt, Human
ccaaagcgcugggauuacagg

SEQ ID NO: 132992 - RNA, 23 nt, Human
ccaaagcgcugggauuacaggug

SEQ ID NO: 132993 - RNA, 24 nt, Human
ccaaagcgcugggauuacaggugu

SEQ ID NO: 132994 - RNA, 22 nt, Human
ccaaagucaaacuccaucagaa

SEQ ID NO: 132995 - RNA, 22 nt, Human
ccaaagucaaacuccaucagaa

SEQ ID NO: 132996 - RNA, 24 nt, Human
ccacaggugcagccgaccaggugg

SEQ ID NO: 132997 - RNA, 18 nt, Human
ccaccuccuccuccacag

SEQ ID NO: 132998 - RNA, 19 nt, Human
ccagcgcccgccuucccgc

SEQ ID NO: 132999 - RNA, 22 nt, Human
ccaguuguucuuuccagaggca

SEQ ID NO: 133000 - RNA, 22 nt, Human
ccauguugcccaagcuggucuc

SEQ ID NO: 133001 - RNA, 20 nt, Human
ccauugcaugcuagccuggg

SEQ ID NO: 133002 - RNA, 21 nt, Human
ccauugcaugcuagccugggc

SEQ ID NO: 133003 - RNA, 22 nt, Human
ccauugcaugcuagccugggca

SEQ ID NO: 133004 - RNA, 23 nt, Human
ccauugcaugcuagccugggcaa

SEQ ID NO: 133005 - RNA, 24 nt, Human
ccauugcaugcuagccugggcaac

SEQ ID NO: 133006 - RNA, 19 nt, Human
ccauuguuuucagauucgu

SEQ ID NO: 133007 - RNA, 21 nt, Human
cccacacacaggacagggagc

SEQ ID NO: 133008 - RNA, 22 nt, Human
cccauauugucccagaguaguu

SEQ ID NO: 133009 - RNA, 20 nt, Human
ccccaaucuaagacagaaac

SEQ ID NO: 133010 - RNA, 18 nt, Human
ccccagcgcccgccuucc

SEQ ID NO: 133011 - RNA, 23 nt, Human
ccccaucccuccuaauucuccag

SEQ ID NO: 133012 - RNA, 22 nt, Human
cccccagcgcccgccuucccgc

SEQ ID NO: 133013 - RNA, 18 nt, Human
ccccgcccccucgucccu

SEQ ID NO: 133014 - RNA, 23 nt, Human
cccgcagacgccugggaacugcg

SEQ ID NO: 133015 - RNA, 19 nt, Human
cccgcccccccgccccggc

SEQ ID NO: 133016 - RNA, 19 nt, Human
cccugcgcugcagcggccg

SEQ ID NO: 133017 - RNA, 21 nt, Human
cccugcgcugcagcggccgca

SEQ ID NO: 133018 - RNA, 20 nt, Human
ccgcagcgcccccagcgccc

SEQ ID NO: 133019 - RNA, 25 nt, Human
ccgcagcgcccccagcgcccgccuu

SEQ ID NO: 133020 - RNA, 18 nt, Human
ccgcccacacacaggaca

SEQ ID NO: 133021 - RNA, 21 nt, Human
ccgccccgcccccucgucccu

SEQ ID NO: 133022 - RNA, 24 nt, Human
ccuaacaguccccugccccauccc

SEQ ID NO: 133023 - RNA, 25 nt, Human
ccugaaauccaccuccuccuccaca

SEQ ID NO: 133024 - RNA, 24 nt, Human
ccugaccaacauggugaaacccca

SEQ ID NO: 133025 - RNA, 23 nt, Human
ccugaguagcugggacuacaggc

SEQ ID NO: 133026 - RNA, 24 nt, Human
ccugaguagcugggacuacaggca

SEQ ID NO: 133027 - RNA, 21 nt, Human
ccugccuuagccucccaaagc

SEQ ID NO: 133028 - RNA, 24 nt, Human
ccugccuuagccucccaaagcgcu

SEQ ID NO: 133029 - RNA, 21 nt, Human
ccugcgcugcagcggccgcag

SEQ ID NO: 133030 - RNA, 25 nt, Human
ccuugcccugccaugucucgccgga

SEQ ID NO: 133031 - RNA, 21 nt, Human
cgagacaaggucucuucuguc

SEQ ID NO: 133032 - RNA, 24 nt, Human
cgagacuagccugaccaacauggu

SEQ ID NO: 133033 - RNA, 24 nt, Human
cgcaccugguccuagcuacuuggg

SEQ ID NO: 133034 - RNA, 23 nt, Human
cgccgggcugccauccuugcccu

SEQ ID NO: 133035 - RNA, 20 nt, Human
cgcggguucgcgcuccucgc

SEQ ID NO: 133036 - RNA, 24 nt, Human
cgcugggauuacaggugugagcca

SEQ ID NO: 133037 - RNA, 22 nt, Human
cggccgcggguucgcgcuccuc

SEQ ID NO: 133038 - RNA, 19 nt, Human
cgggcggccucgcugccuc

SEQ ID NO: 133039 - RNA, 24 nt, Human
cucaagccgguaaucccagcacuu

SEQ ID NO: 133040 - RNA, 18 nt, Human
cucaagugaucugccugc

SEQ ID NO: 133041 - RNA, 20 nt, Human
cucaagugaucugccugccu

SEQ ID NO: 133042 - RNA, 20 nt, Human
cucaagugaucugccugccu

SEQ ID NO: 133043 - RNA, 25 nt, Human
cucccauauugucccagaguaguua

SEQ ID NO: 133044 - RNA, 19 nt, Human
cuccucgccgggcccugcc

SEQ ID NO: 133045 - RNA, 23 nt, Human
cucuucugucaccccggcuggag

SEQ ID NO: 133046 - RNA, 21 nt, Human
cugacaaccaaggaggggggc

SEQ ID NO: 133047 - RNA, 23 nt, Human
cugacaaccaaggaggggggcgg

SEQ ID NO: 133048 - RNA, 24 nt, Human
cugagccuccugaguagcugggac

SEQ ID NO: 133049 - RNA, 20 nt, Human
cugcagcggccgcagcgccc

SEQ ID NO: 133050 - RNA, 22 nt, Human
cugcggccgcggguucgcgcuc

SEQ ID NO: 133051 - RNA, 22 nt, Human
cugcugagccuccugaguagcu

SEQ ID NO: 133052 - RNA, 18 nt, Human
cuggacuauguuccgccc

SEQ ID NO: 133053 - RNA, 18 nt, Human
cugggacugggcagggcc

SEQ ID NO: 133054 - RNA, 26 nt, Human
cugggcccaaaaccaaagucaaacuc

SEQ ID NO: 133055 - RNA, 20 nt, Human
cuggucucaagugaucugcc

SEQ ID NO: 133056 - RNA, 18 nt, Human
cuguguacauacugcucc

SEQ ID NO: 133057 - RNA, 20 nt, Human
gaaggguauguggaucuuca

SEQ ID NO: 133058 - RNA, 18 nt, Human
gacuacaggcaugggcca

SEQ ID NO: 133059 - RNA, 19 nt, Human
gaggccccgcccccccgcc

SEQ ID NO: 133060 - RNA, 19 nt, Human
gagguugcaguaagccgag

SEQ ID NO: 133061 - RNA, 25 nt, Human
gaguagcugggacuacaggcauggg

SEQ ID NO: 133062 - RNA, 23 nt, Human
gaugugccgggugugguggcuca

SEQ ID NO: 133063 - RNA, 18 nt, Human
gauuacaggugugagcca

SEQ ID NO: 133064 - RNA, 21 nt, Human
gauuacaggugugagccacug

SEQ ID NO: 133065 - RNA, 24 nt, Human
gauuacaggugugagccacugugc

SEQ ID NO: 133066 - RNA, 21 nt, Human
gcagcggccgcagcgccccca

SEQ ID NO: 133067 - RNA, 23 nt, Human
gccacaugugauggguguggaau

SEQ ID NO: 133068 - RNA, 19 nt, Human
gccccaucccuccuaauuc

SEQ ID NO: 133069 - RNA, 18 nt, Human
gccgggugugguggcuca

SEQ ID NO: 133070 - RNA, 19 nt, Human
gcuggagugcaguggcaca

SEQ ID NO: 133071 - RNA, 23 nt, Human
gcuggucucaagugaucugccug

SEQ ID NO: 133072 - RNA, 21 nt, Human
ggaagcuuuugguauuuccac

SEQ ID NO: 133073 - RNA, 19 nt, Human
ggacuacaggcaugggcca

SEQ ID NO: 133074 - RNA, 18 nt, Human
ggagguugcaguaagccg

SEQ ID NO: 133075 - RNA, 24 nt, Human
ggagguugcaguaagccgagguca

SEQ ID NO: 133076 - RNA, 21 nt, Human
ggauaugacagaugaggauua

SEQ ID NO: 133077 - RNA, 24 nt, Human
ggucucaagugaucugccugccuu

SEQ ID NO: 133078 - RNA, 24 nt, Human
gguggcucaagccgguaaucccag

SEQ ID NO: 133079 - RNA, 23 nt, Human
ggugugguggcucaagccgguaa

SEQ ID NO: 133080 - RNA, 21 nt, Human
gguucaagcaaccaucauccc

SEQ ID NO: 133081 - RNA, 20 nt, Human
gguuuuuccaaauuauuguu

SEQ ID NO: 133082 - RNA, 19 nt, Human
guaggaagcuuuugguauu

SEQ ID NO: 133083 - RNA, 24 nt, Human
gucacaccauugcaugcuagccug

SEQ ID NO: 133084 - RNA, 24 nt, Human
gugaucugccugccuuagccuccc

SEQ ID NO: 133085 - RNA, 21 nt, Human
gugugcgccacaaugcccagc

SEQ ID NO: 133086 - RNA, 24 nt, Human
uaaaauacuucaaauaaaccaugu

SEQ ID NO: 133087 - RNA, 18 nt, Human
uaaagaaauagaugaaaa

SEQ ID NO: 133088 - RNA, 22 nt, Human
uaacucuuuuagcaaugucuuc

SEQ ID NO: 133089 - RNA, 25 nt, Human
uaagacagaaacauacucauuuucc

SEQ ID NO: 133090 - RNA, 24 nt, Human
uaagagaagggaucucacuaaggu

SEQ ID NO: 133091 - RNA, 26 nt, Human
uaagccgaggucacaccaaucaacgg

SEQ ID NO: 133092 - RNA, 24 nt, Human
uaauuuuuguguuuuuuguagaga

SEQ ID NO: 133093 - RNA, 20 nt, Human
uacaggcaugggccauucca

SEQ ID NO: 133094 - RNA, 22 nt, Human
uacaggugugagccacugugcc

SEQ ID NO: 133095 - RNA, 23 nt, Human
uacaggugugagccacugugccu

SEQ ID NO: 133096 - RNA, 23 nt, Human
uacuacaugcaacccuuugguuc

SEQ ID NO: 133097 - RNA, 20 nt, Human
uagaaugauugccuaaccaa

SEQ ID NO: 133098 - RNA, 22 nt, Human
uagagauggggcuuugccaugu

SEQ ID NO: 133099 - RNA, 22 nt, Human
uagcugggacuacaggcauggg

SEQ ID NO: 133100 - RNA, 19 nt, Human
ucaauuaauucuuccaucu

SEQ ID NO: 133101 - RNA, 23 nt, Human
ucacaccauugcaugcuagccug

SEQ ID NO: 133102 - RNA, 24 nt, Human
ucacugcagccuugaacucguggg

SEQ ID NO: 133103 - RNA, 19 nt, Human
ucacuguuacaaacaaggu

SEQ ID NO: 133104 - RNA, 21 nt, Human
ucauuucucaaaggcaucuga

SEQ ID NO: 133105 - RNA, 21 nt, Human
uccaaaugccccaaaucuggc

SEQ ID NO: 133106 - RNA, 23 nt, Human
uccagaggcaaauacuuuucauu

SEQ ID NO: 133107 - RNA, 22 nt, Human
uccagcucagccccugcgaggc

SEQ ID NO: 133108 - RNA, 24 nt, Human
uccaucagaauauccugcuacuua

SEQ ID NO: 133109 - RNA, 25 nt, Human
uccaucagaauauccugcuacuuau

SEQ ID NO: 133110 - RNA, 23 nt, Human
ucccaaagcgcugggauuacagg

SEQ ID NO: 133111 - RNA, 20 nt, Human
ucccgccccagcugccgccg

SEQ ID NO: 133112 - RNA, 25 nt, Human
uccucacauaacuuagucauuucau

SEQ ID NO: 133113 - RNA, 24 nt, Human
uccugaguagcugggacuacaggc

SEQ ID NO: 133114 - RNA, 25 nt, Human
ucgcuugaaucugggaaggcggagg

SEQ ID NO: 133115 - RNA, 19 nt, Human
ucuaagacagaaacauacu

SEQ ID NO: 133116 - RNA, 21 nt, Human
ucuacaaaccucuggauauac

SEQ ID NO: 133117 - RNA, 23 nt, Human
ucucuacuaaaaauacaaaauac

SEQ ID NO: 133118 - RNA, 23 nt, Human
ucucuucugucaccccggcugga

SEQ ID NO: 133119 - RNA, 21 nt, Human
ucuggaacucuugggcucaag

SEQ ID NO: 133120 - RNA, 23 nt, Human
ucuucugucaccccggcuggagu

SEQ ID NO: 133121 - RNA, 23 nt, Human
ucuucuguuuuuuuccucacaua

SEQ ID NO: 133122 - RNA, 21 nt, Human
ucuugggcucaagucguccug

SEQ ID NO: 133123 - RNA, 19 nt, Human
ugaaaacaacaguccugcc

SEQ ID NO: 133124 - RNA, 19 nt, Human
ugaaaccccaucucuacua

SEQ ID NO: 133125 - RNA, 19 nt, Human
ugaaauccaccuccuccuc

SEQ ID NO: 133126 - RNA, 24 nt, Human
ugaaucgcuugcggucacgaguuc

SEQ ID NO: 133127 - RNA, 25 nt, Human
ugaaucugggaaggcggagguugca

SEQ ID NO: 133128 - RNA, 24 nt, Human
ugaccaacauggugaaaccccauc

SEQ ID NO: 133129 - RNA, 20 nt, Human
ugaggcaggagaaucgcuug

SEQ ID NO: 133130 - RNA, 22 nt, Human
ugaggcaggagaaucgcuugaa

SEQ ID NO: 133131 - RNA, 24 nt, Human
ugaggcaggagaaucgcuugaauc

SEQ ID NO: 133132 - RNA, 24 nt, Human
ugaggugggugaaucgcuugcggu

SEQ ID NO: 133133 - RNA, 26 nt, Human
ugaggugggugaaucgcuugcgguca

SEQ ID NO: 133134 - RNA, 27 nt, Human
ugaggugggugaaucgcuugcgguuga

SEQ ID NO: 133135 - RNA, 22 nt, Human
ugauagagagaagaguaguggg

SEQ ID NO: 133136 - RNA, 24 nt, Human
ugauagagagaagaguagugggga

SEQ ID NO: 133137 - RNA, 19 nt, Human
ugcaugcuagccugggcaa

SEQ ID NO: 133138 - RNA, 24 nt, Human
ugccauguugcccaagcuggucuc

SEQ ID NO: 133139 - RNA, 24 nt, Human
ugccccaucccuccuaauucucca

SEQ ID NO: 133140 - RNA, 23 nt, Human
ugccgggugugguggcucaagcc

SEQ ID NO: 133141 - RNA, 24 nt, Human
ugccuuagccucccaaagcgcugg

SEQ ID NO: 133142 - RNA, 26 nt, Human
ugcugagccuccugaguagcugggac

SEQ ID NO: 133143 - RNA, 24 nt, Human
ugcuuuucuuaccuucucaguuca

SEQ ID NO: 133144 - RNA, 19 nt, Human
uggaauggcagcucacugu

SEQ ID NO: 133145 - RNA, 20 nt, Human
uggaauggcagcucacugua

SEQ ID NO: 133146 - RNA, 18 nt, Human
uggagugcaguggcacaa

SEQ ID NO: 133147 - RNA, 19 nt, Human
uggagugcaguggcacaau

SEQ ID NO: 133148 - RNA, 21 nt, Human
uggagugcaguggcacaauca

SEQ ID NO: 133149 - RNA, 18 nt, Human
uggauccuauuugcugga

SEQ ID NO: 133150 - RNA, 23 nt, Human
uggcacaaucacgacucacugca

SEQ ID NO: 133151 - RNA, 24 nt, Human
uggccaggcuggucuggaacucuu

SEQ ID NO: 133152 - RNA, 22 nt, Human
uggcgcgcaccugguccuagcu

SEQ ID NO: 133153 - RNA, 22 nt, Human
uggcucaagccgguaaucccag

SEQ ID NO: 133154 - RNA, 24 nt, Human
uggcucaagccgguaaucccagca

SEQ ID NO: 133155 - RNA, 22 nt, Human
uggcuccaaaagucuuacaaug

SEQ ID NO: 133156 - RNA, 22 nt, Human
ugggaauacaggugugcgccac

SEQ ID NO: 133157 - RNA, 18 nt, Human
ugggacuacaggcauggg

SEQ ID NO: 133158 - RNA, 21 nt, Human
ugggacuacaggcaugggcca

SEQ ID NO: 133159 - RNA, 21 nt, Human
ugggacuacaggcaugggcca

SEQ ID NO: 133160 - RNA, 22 nt, Human
ugggacuacaggcaugggccau

SEQ ID NO: 133161 - RNA, 26 nt, Human
ugggacuacaggcaugggccauucca

SEQ ID NO: 133162 - RNA, 19 nt, Human
ugggaggcugaggugggug

SEQ ID NO: 133163 - RNA, 24 nt, Human
ugggaggcugaggugggugaaucg

SEQ ID NO: 133164 - RNA, 21 nt, Human
ugggauuacaggugugagcca

SEQ ID NO: 133165 - RNA, 22 nt, Human
ugggauuacaggugugagccac

SEQ ID NO: 133166 - RNA, 22 nt, Human
ugggauuacaggugugagccac

SEQ ID NO: 133167 - RNA, 22 nt, Human
ugggauuacaggugugagccac

SEQ ID NO: 133168 - RNA, 24 nt, Human
ugggauuacaggugugagccacug

SEQ ID NO: 133169 - RNA, 24 nt, Human
uggguuuuuccaaauuauuguuuu

SEQ ID NO: 133170 - RNA, 20 nt, Human
uggucucaagugaucugccu

SEQ ID NO: 133171 - RNA, 24 nt, Human
uggucucaagugaucugccugccu

SEQ ID NO: 133172 - RNA, 20 nt, Human
ugguggcgcgcaccuggucc

SEQ ID NO: 133173 - RNA, 24 nt, Human
ugguggcucaagccgguaauccca

SEQ ID NO: 133174 - RNA, 24 nt, Human
uguagagauggggcuuugccaugu

SEQ ID NO: 133175 - RNA, 27 nt, Human
uguagcaggugcuggggacucaguugg

SEQ ID NO: 133176 - RNA, 21 nt, Human
ugucaccccggcuggagugca

SEQ ID NO: 133177 - RNA, 24 nt, Human
ugugcaggcgaggccccgcccccc

SEQ ID NO: 133178 - RNA, 20 nt, Human
uguguacauacugcuccuug

SEQ ID NO: 133179 - RNA, 24 nt, Human
uuacaccaucacaaucuucacuuu

SEQ ID NO: 133180 - RNA, 18 nt, Human
uuagccgggcgugguggc

SEQ ID NO: 133181 - RNA, 20 nt, Human
uuagccgggcgugguggcgc

SEQ ID NO: 133182 - RNA, 20 nt, Human
uuagccgggcgugguggcgc

SEQ ID NO: 133183 - RNA, 18 nt, Human
uucucucuacuucauuca

SEQ ID NO: 133184 - RNA, 25 nt, Human
uugaaucugggaaggcggagguugc

SEQ ID NO: 133185 - RNA, 20 nt, Human
uugcaguaagccgaggucac

SEQ ID NO: 133186 - RNA, 24 nt, Human
uugggaggcugaggugggugaauc

SEQ ID NO: 133187 - RNA, 24 nt, Human
uuguagagauggggcuuugccaug

SEQ ID NO: 133188 - RNA, 23 nt, Human
uuguggccgccccgcccccucgu

SEQ ID NO: 133189 - RNA, 21 nt, Human
uuguuuucaauuuuucacugu

SEQ ID NO: 133190 - RNA, 21 nt, Human
uuugcuggaguauuuucucca

SEQ ID NO: 133191 - RNA, 24 nt, Human
uuuguagagauggggcuuugccau

SEQ ID NO: 133192 - RNA, 23 nt, Human
uuuucuccaacagcuucccuaaa

SEQ ID NO: 133193 - RNA, 20 nt, Human
uuuuuguguuuuuuguagag

SEQ ID NO: 133194 - RNA, 24 nt, Human
uuuuuuguagagauggggcuuugc

SEQ ID NO: 133195 - RNA, 18 nt, Human
aaguaggggaggggcugg

SEQ ID NO: 133196 - RNA, 22 nt, Human
caaaaaguaggggaggggcugg

SEQ ID NO: 133197 - RNA, 23 nt, Human
cgggcuuacggcggcccagaaac

SEQ ID NO: 133198 - RNA, 22 nt, Human
ggccgggcuuacggcggcccag

SEQ ID NO: 133199 - RNA, 23 nt, Human
ucugcaaauuaauaaauagaaga

SEQ ID NO: 133200 - RNA, 23 nt, Human
uuacggcggcccagaaacgcguu

SEQ ID NO: 133201 - RNA, 22 nt, Human
uuuuuuuuuuuuaaggacuuca

SEQ ID NO: 133202 - RNA, 23 nt, Human
uuuuuuuuuuuuuuuuuuuaagg

SEQ ID NO: 133203 - RNA, 25 nt, Human
uuuuuuuuuuuuuuuuuuuuuaagg

SEQ ID NO: 133204 - RNA, 19 nt, Human
aagagcaccauauggccca

SEQ ID NO: 133205 - RNA, 19 nt, Human
aagagcaccauauggccca

SEQ ID NO: 133206 - RNA, 22 nt, Human
aaguuuuacuuuuuuuuuuucu

SEQ ID NO: 133207 - RNA, 18 nt, Human
acagaggaauaaauacau

SEQ ID NO: 133208 - RNA, 19 nt, Human
accccaaaacccugaggcg

SEQ ID NO: 133209 - RNA, 22 nt, Human
agacaagaggcacugcucagaa

SEQ ID NO: 133210 - RNA, 18 nt, Human
agacuccagggccaaccc

SEQ ID NO: 133211 - RNA, 20 nt, Human
aggacagggauggggcuggg

SEQ ID NO: 133212 - RNA, 23 nt, Human
aggcaggggaaccacaguucagg

SEQ ID NO: 133213 - RNA, 22 nt, Human
agggcguggggugcgcgggggc

SEQ ID NO: 133214 - RNA, 19 nt, Human
aggggcuccaggggaacug

SEQ ID NO: 133215 - RNA, 21 nt, Human
aggugauucaccagggcacgg

SEQ ID NO: 133216 - RNA, 18 nt, Human
agguggugaggccugggc

SEQ ID NO: 133217 - RNA, 21 nt, Human
auacaugugguugugggaguu

SEQ ID NO: 133218 - RNA, 22 nt, Human
caaaguuuuacuuuuuuuuuuu

SEQ ID NO: 133219 - RNA, 18 nt, Human
caagcucccggcuggcca

SEQ ID NO: 133220 - RNA, 23 nt, Human
caauacgcaagaggcuaacacaa

SEQ ID NO: 133221 - RNA, 22 nt, Human
cacucacagccgggcugggagg

SEQ ID NO: 133222 - RNA, 21 nt, Human
cagccguggcccaucugggac

SEQ ID NO: 133223 - RNA, 22 nt, Human
caggaccccaaaacccugaggc

SEQ ID NO: 133224 - RNA, 18 nt, Human
cagugggcugccaacccc

SEQ ID NO: 133225 - RNA, 21 nt, Human
cagugggcugccaacccccca

SEQ ID NO: 133226 - RNA, 21 nt, Human
caguucaggauggcagaccaa

SEQ ID NO: 133227 - RNA, 22 nt, Human
caucugggacacagcccugcuc

SEQ ID NO: 133228 - RNA, 21 nt, Human
ccagcccaggaccccaaaacc

SEQ ID NO: 133229 - RNA, 20 nt, Human
ccaucugggacacagcccug

SEQ ID NO: 133230 - RNA, 26 nt, Human
ccauggccagcccccucuucccacuc

SEQ ID NO: 133231 - RNA, 24 nt, Human
ccccagcccaggaccccaaaaccc

SEQ ID NO: 133232 - RNA, 19 nt, Human
cccccaagagggcuuucug

SEQ ID NO: 133233 - RNA, 18 nt, Human
cccugaggcgggaguggg

SEQ ID NO: 133234 - RNA, 21 nt, Human
cccugaggcgggagugggggu

SEQ ID NO: 133235 - RNA, 22 nt, Human
cccugggaccugcagcuuuggg

SEQ ID NO: 133236 - RNA, 21 nt, Human
ccugaggcggugcagugggcu

SEQ ID NO: 133237 - RNA, 21 nt, Human
ccugcagcuuugggccugcca

SEQ ID NO: 133238 - RNA, 22 nt, Human
ccugcagcuuugggccugccau

SEQ ID NO: 133239 - RNA, 21 nt, Human
cgggcugggaggcaggggaac

SEQ ID NO: 133240 - RNA, 19 nt, Human
cguggggugcgcgggggcg

SEQ ID NO: 133241 - RNA, 18 nt, Human
cucagccaggugauucac

SEQ ID NO: 133242 - RNA, 20 nt, Human
cugggggugagggaaggagg

SEQ ID NO: 133243 - RNA, 19 nt, Human
gaaaaagccaauacgcaag

SEQ ID NO: 133244 - RNA, 19 nt, Human
gacuccagggccaaccccu

SEQ ID NO: 133245 - RNA, 18 nt, Human
gagggaaggaggggacgg

SEQ ID NO: 133246 - RNA, 24 nt, Human
gcagaccaagcuccaauguuuucc

SEQ ID NO: 133247 - RNA, 18 nt, Human
gcccaggaccccaaaacc

SEQ ID NO: 133248 - RNA, 19 nt, Human
gcuggccagggcccugggg

SEQ ID NO: 133249 - RNA, 22 nt, Human
ggcagacuccagggccaacccc

SEQ ID NO: 133250 - RNA, 21 nt, Human
ggccaggcugaacccggggcc

SEQ ID NO: 133251 - RNA, 18 nt, Human
ggcccugaggcgggagug

SEQ ID NO: 133252 - RNA, 24 nt, Human
ggcguggggugcgcgggggcggug

SEQ ID NO: 133253 - RNA, 18 nt, Human
ggcuggaaggaaaugcug

SEQ ID NO: 133254 - RNA, 18 nt, Human
ggcuggggugggcccugg

SEQ ID NO: 133255 - RNA, 22 nt, Human
gggcgguggccgugugaccggu

SEQ ID NO: 133256 - RNA, 19 nt, Human
gggcguggggugcgcgggg

SEQ ID NO: 133257 - RNA, 20 nt, Human
gggcguggggugcgcggggg

SEQ ID NO: 133258 - RNA, 19 nt, Human
gggugcgcgggggcggugg

SEQ ID NO: 133259 - RNA, 22 nt, Human
gugggcccugggaccugcagcu

SEQ ID NO: 133260 - RNA, 25 nt, Human
gugucugcugacaucccgacuaugg

SEQ ID NO: 133261 - RNA, 24 nt, Human
gugugugggggguggacgaggggu

SEQ ID NO: 133262 - RNA, 23 nt, Human
uaacacaacuguagucuaaaggc

SEQ ID NO: 133263 - RNA, 19 nt, Human
uaggacagaggaauaaaua

SEQ ID NO: 133264 - RNA, 22 nt, Human
uccacggccgggaauggugggc

SEQ ID NO: 133265 - RNA, 19 nt, Human
ucccaguguggcuggcaga

SEQ ID NO: 133266 - RNA, 21 nt, Human
ucccccugugcugggggugag

SEQ ID NO: 133267 - RNA, 20 nt, Human
ucccgaaggggcuccagggg

SEQ ID NO: 133268 - RNA, 23 nt, Human
ucccggcuggccagggcccuggg

SEQ ID NO: 133269 - RNA, 23 nt, Human
ucgcugagcacucacagccgggc

SEQ ID NO: 133270 - RNA, 21 nt, Human
ugaaaaagccaauacgcaaga

SEQ ID NO: 133271 - RNA, 19 nt, Human
ugagggaaggaggggacgg

SEQ ID NO: 133272 - RNA, 18 nt, Human
ugcgauguggggagguga

SEQ ID NO: 133273 - RNA, 25 nt, Human
ugcucagaaucccccugugcugggg

SEQ ID NO: 133274 - RNA, 23 nt, Human
uggaaggaaaugcugagguucug

SEQ ID NO: 133275 - RNA, 20 nt, Human
uggcccaacugucagccugu

SEQ ID NO: 133276 - RNA, 19 nt, Human
uggcuggggugggcccugg

SEQ ID NO: 133277 - RNA, 24 nt, Human
ugggaagagcaccauauggcccaa

SEQ ID NO: 133278 - RNA, 21 nt, Human
ugggaccugcagcuuugggcc

SEQ ID NO: 133279 - RNA, 20 nt, Human
ugggcccugggaccugcagc

SEQ ID NO: 133280 - RNA, 23 nt, Human
ugggcccugggaccugcagcuuu

SEQ ID NO: 133281 - RNA, 19 nt, Human
ugggggugacaggcguggc

SEQ ID NO: 133282 - RNA, 24 nt, Human
ugggggugagggaaggaggggacg

SEQ ID NO: 133283 - RNA, 18 nt, Human
ugguaaggaccaguaagu

SEQ ID NO: 133284 - RNA, 25 nt, Human
ugugcugggggugagggaaggaggg

SEQ ID NO: 133285 - RNA, 19 nt, Human
ugugggggguggacgaggg

SEQ ID NO: 133286 - RNA, 22 nt, Human
aaaaaagaaauaaaccacagag

SEQ ID NO: 133287 - RNA, 18 nt, Human
aaaaaucugugaggaccc

SEQ ID NO: 133288 - RNA, 24 nt, Human
aaaagggacagagacagaaaaaaa

SEQ ID NO: 133289 - RNA, 25 nt, Human
aaaauaaggcaaguuuguaucugga

SEQ ID NO: 133290 - RNA, 24 nt, Human
aacaacaagauaauaaauuucuau

SEQ ID NO: 133291 - RNA, 21 nt, Human
aacauaagaaauauacaugua

SEQ ID NO: 133292 - RNA, 20 nt, Human
aacuagaaaauaaggcaagu

SEQ ID NO: 133293 - RNA, 21 nt, Human
aacuagaaaauaaggcaaguu

SEQ ID NO: 133294 - RNA, 21 nt, Human
aagaaacuggaagacacggga

SEQ ID NO: 133295 - RNA, 25 nt, Human
aagagcuacaggcccaaagggugga

SEQ ID NO: 133296 - RNA, 26 nt, Human
aagagcuacaggcccaaaggguggag

SEQ ID NO: 133297 - RNA, 20 nt, Human
aagcagaugaauccaucagc

SEQ ID NO: 133298 - RNA, 18 nt, Human
aagcugccgauuucaggc

SEQ ID NO: 133299 - RNA, 24 nt, Human
aagggaauccuugucauauagugg

SEQ ID NO: 133300 - RNA, 23 nt, Human
aaguguccuuauaagagagaggc

SEQ ID NO: 133301 - RNA, 23 nt, Human
aaucaucuaaaacaaaacugcaa

SEQ ID NO: 133302 - RNA, 21 nt, Human
aaugugugugugcaugugugu

SEQ ID NO: 133303 - RNA, 20 nt, Human
acaaaccaaggaaugauggc

SEQ ID NO: 133304 - RNA, 24 nt, Human
acaauagcuuuuagagacaaacuu

SEQ ID NO: 133305 - RNA, 19 nt, Human
acacaaucucccucaauac

SEQ ID NO: 133306 - RNA, 20 nt, Human
acacaaucucccucaauacc

SEQ ID NO: 133307 - RNA, 23 nt, Human
acacaaucucccucaauacccau

SEQ ID NO: 133308 - RNA, 18 nt, Human
acacauauuuacacauac

SEQ ID NO: 133309 - RNA, 20 nt, Human
acaccuguaauccggcacuu

SEQ ID NO: 133310 - RNA, 21 nt, Human
acagaaaaaaaugaaagaaga

SEQ ID NO: 133311 - RNA, 18 nt, Human
acagagcauaggaaucaa

SEQ ID NO: 133312 - RNA, 18 nt, Human
acagagugagaccucauc

SEQ ID NO: 133313 - RNA, 19 nt, Human
accacggucgccgccgccc

SEQ ID NO: 133314 - RNA, 20 nt, Human
accacggucgccgccgcccu

SEQ ID NO: 133315 - RNA, 22 nt, Human
acgccguugccacuacucggcg

SEQ ID NO: 133316 - RNA, 19 nt, Human
acuacacugcagccugggu

SEQ ID NO: 133317 - RNA, 24 nt, Human
acuacacugcagccugggugacag

SEQ ID NO: 133318 - RNA, 22 nt, Human
acuagggauuggaagcugacac

SEQ ID NO: 133319 - RNA, 24 nt, Human
acugcagccugggugacagaguga

SEQ ID NO: 133320 - RNA, 19 nt, Human
acuggaggcaaaggcagca

SEQ ID NO: 133321 - RNA, 23 nt, Human
acuggauaauucuuucuauucuu

SEQ ID NO: 133322 - RNA, 21 nt, Human
acuucauccagcuuaucuuga

SEQ ID NO: 133323 - RNA, 21 nt, Human
acuuggaaggcugaugcagga

SEQ ID NO: 133324 - RNA, 21 nt, Human
agaaacacuuccaacugggcc

SEQ ID NO: 133325 - RNA, 23 nt, Human
agaaagaagcaauagaaaaaaga

SEQ ID NO: 133326 - RNA, 26 nt, Human
agacagaaaaaaaugaaaggggaccc

SEQ ID NO: 133327 - RNA, 22 nt, Human
agacagaaaacagauacauuga

SEQ ID NO: 133328 - RNA, 27 nt, Human
agacagaaaacagauacauugacaaaa

SEQ ID NO: 133329 - RNA, 25 nt, Human
agacauagccacauccuaaucccca

SEQ ID NO: 133330 - RNA, 18 nt, Human
agacuagaagaauuuugg

SEQ ID NO: 133331 - RNA, 20 nt, Human
agacuagaagaauuuuggug

SEQ ID NO: 133332 - RNA, 21 nt, Human
agagauagguguuuauuccaa

SEQ ID NO: 133333 - RNA, 24 nt, Human
agagggccucaacacacgugauuc

SEQ ID NO: 133334 - RNA, 18 nt, Human
agagguagauuauauaua

SEQ ID NO: 133335 - RNA, 23 nt, Human
agauggguggauugcuugaggcu

SEQ ID NO: 133336 - RNA, 22 nt, Human
agcaguacuuucgugaauuucc

SEQ ID NO: 133337 - RNA, 21 nt, Human
agccaaaaaaugccaauagcc

SEQ ID NO: 133338 - RNA, 22 nt, Human
agccacaagaaacuggaagaca

SEQ ID NO: 133339 - RNA, 18 nt, Human
agccaggcauggugguau

SEQ ID NO: 133340 - RNA, 19 nt, Human
agccugggaguuugagguu

SEQ ID NO: 133341 - RNA, 23 nt, Human
agccugggugacagagugagacc

SEQ ID NO: 133342 - RNA, 24 nt, Human
agccugggugacagagugagaccu

SEQ ID NO: 133343 - RNA, 21 nt, Human
aggagacuccauuccaauuuc

SEQ ID NO: 133344 - RNA, 24 nt, Human
aggcacccccgacgcaaccacgcc

SEQ ID NO: 133345 - RNA, 19 nt, Human
aggcagaggcccaagugug

SEQ ID NO: 133346 - RNA, 25 nt, Human
aggcagaggcccaagugugggaaca

SEQ ID NO: 133347 - RNA, 22 nt, Human
aggcauaugcucccaaauuuua

SEQ ID NO: 133348 - RNA, 23 nt, Human
aggcauggugguaugcaccugua

SEQ ID NO: 133349 - RNA, 23 nt, Human
aggcauuuggucaaaggugucau

SEQ ID NO: 133350 - RNA, 18 nt, Human
aggcccccgggacuccag

SEQ ID NO: 133351 - RNA, 24 nt, Human
aggcugaugcaggaggaucccuug

SEQ ID NO: 133352 - RNA, 19 nt, Human
agggagcuauguuugcacc

SEQ ID NO: 133353 - RNA, 20 nt, Human
agggauuggaagcugacacu

SEQ ID NO: 133354 - RNA, 20 nt, Human
aggguuuucucaaaaauagc

SEQ ID NO: 133355 - RNA, 22 nt, Human
aguauuacaaaugcacacuacu

SEQ ID NO: 133356 - RNA, 18 nt, Human
auaagccaaaaaaugcca

SEQ ID NO: 133357 - RNA, 22 nt, Human
auaccuaaguaaggaugcacug

SEQ ID NO: 133358 - RNA, 21 nt, Human
auccggcacuuuaggaggcca

SEQ ID NO: 133359 - RNA, 18 nt, Human
augcaucuuaaaaaguga

SEQ ID NO: 133360 - RNA, 20 nt, Human
augcaucuuaaaaagugaaa

SEQ ID NO: 133361 - RNA, 19 nt, Human
auggguggauugcuugagg

SEQ ID NO: 133362 - RNA, 22 nt, Human
augugugugcauuuguguaugu

SEQ ID NO: 133363 - RNA, 21 nt, Human
augugugugugcaugugugug

SEQ ID NO: 133364 - RNA, 21 nt, Human
auuaacuuguggauuuauuug

SEQ ID NO: 133365 - RNA, 21 nt, Human
auucuuuuucuucucuuuugu

SEQ ID NO: 133366 - RNA, 25 nt, Human
auuuggagaagggggccuugcagau

SEQ ID NO: 133367 - RNA, 20 nt, Human
caaaaaaugccaauagccac

SEQ ID NO: 133368 - RNA, 19 nt, Human
caaaaugcaucauuuuguu

SEQ ID NO: 133369 - RNA, 19 nt, Human
caagauaaaggaagcacca

SEQ ID NO: 133370 - RNA, 22 nt, Human
caauagaaaaaagaaauaaacc

SEQ ID NO: 133371 - RNA, 25 nt, Human
caauagaaaaaagaaauaaaccaca

SEQ ID NO: 133372 - RNA, 24 nt, Human
cacaaaccaaggaaugauggcagc

SEQ ID NO: 133373 - RNA, 20 nt, Human
cacaaacuagaaaauaaggc

SEQ ID NO: 133374 - RNA, 20 nt, Human
cacaaauccacaguucuacu

SEQ ID NO: 133375 - RNA, 23 nt, Human
cacagcagaaagagaaauguggc

SEQ ID NO: 133376 - RNA, 20 nt, Human
caccaagaaugcaucuuaaa

SEQ ID NO: 133377 - RNA, 18 nt, Human
caccaucccgagagcaga

SEQ ID NO: 133378 - RNA, 20 nt, Human
cacccccgacgcaaccacgc

SEQ ID NO: 133379 - RNA, 22 nt, Human
caccucucccuuuaggugaggg

SEQ ID NO: 133380 - RNA, 26 nt, Human
caccuguaauccggcacuuuaggagg

SEQ ID NO: 133381 - RNA, 20 nt, Human
caccuguagacccagcuacu

SEQ ID NO: 133382 - RNA, 23 nt, Human
caccuguagacccagcuacuugg

SEQ ID NO: 133383 - RNA, 24 nt, Human
cacuacacugcagccugggugaca

SEQ ID NO: 133384 - RNA, 23 nt, Human
cacugcagccugggugacagagu

SEQ ID NO: 133385 - RNA, 24 nt, Human
cacugcagccugggugacagagug

SEQ ID NO: 133386 - RNA, 25 nt, Human
cacuuuguucuucucaaaaugcauc

SEQ ID NO: 133387 - RNA, 21 nt, Human
cagaaagagaaauguggccau

SEQ ID NO: 133388 - RNA, 18 nt, Human
cagaagccaagaauagag

SEQ ID NO: 133389 - RNA, 20 nt, Human
cagagcacagaguugggauc

SEQ ID NO: 133390 - RNA, 21 nt, Human
cagagcugcagguacagaggc

SEQ ID NO: 133391 - RNA, 22 nt, Human
cagaggcagauuagguauacag

SEQ ID NO: 133392 - RNA, 23 nt, Human
cagcacaaauccacaguucuacu

SEQ ID NO: 133393 - RNA, 23 nt, Human
cagcagccugugcagacaauagc

SEQ ID NO: 133394 - RNA, 21 nt, Human
cagcaguuugaaucauuauac

SEQ ID NO: 133395 - RNA, 22 nt, Human
cagccugggugacagagugaga

SEQ ID NO: 133396 - RNA, 24 nt, Human
caggagacuccauuccaauuucca

SEQ ID NO: 133397 - RNA, 19 nt, Human
caggcucccaggcaccccc

SEQ ID NO: 133398 - RNA, 24 nt, Human
cauaaauuuugggccaaagggcag

SEQ ID NO: 133399 - RNA, 21 nt, Human
cauagccacauccuaaucccc

SEQ ID NO: 133400 - RNA, 21 nt, Human
cauuuguucuucucucugaau

SEQ ID NO: 133401 - RNA, 22 nt, Human
ccaaaaaaugccaauagccacc

SEQ ID NO: 133402 - RNA, 26 nt, Human
ccaaaaaaugccaauagccaccaaaa

SEQ ID NO: 133403 - RNA, 23 nt, Human
ccaaucaucuaaaacaaaacugc

SEQ ID NO: 133404 - RNA, 21 nt, Human
ccacaguucuacugcaaguga

SEQ ID NO: 133405 - RNA, 22 nt, Human
ccacauccuaauccccaaaacc

SEQ ID NO: 133406 - RNA, 18 nt, Human
ccacgaagauuucagaaa

SEQ ID NO: 133407 - RNA, 24 nt, Human
ccacuacacugcagccugggugac

SEQ ID NO: 133408 - RNA, 20 nt, Human
ccagaagacguucagcccug

SEQ ID NO: 133409 - RNA, 23 nt, Human
ccaggcacccccgacgcaaccac

SEQ ID NO: 133410 - RNA, 19 nt, Human
ccaucccgagagcagagcu

SEQ ID NO: 133411 - RNA, 28 nt, Human
cccaaaaaagauauucaauauccuacuc

SEQ ID NO: 133412 - RNA, 23 nt, Human
cccaaaggguggagcccugagaa

SEQ ID NO: 133413 - RNA, 24 nt, Human
ccccaccucuccucaacugagaaa

SEQ ID NO: 133414 - RNA, 25 nt, Human
ccccaccucuccucaacugagaaag

SEQ ID NO: 133415 - RNA, 19 nt, Human
cccccgacgcaaccacgcc

SEQ ID NO: 133416 - RNA, 23 nt, Human
cccccgggacuccaggcucccag

SEQ ID NO: 133417 - RNA, 22 nt, Human
cccgggacuccaggcucccagg

SEQ ID NO: 133418 - RNA, 19 nt, Human
cccuaagucccgucacaag

SEQ ID NO: 133419 - RNA, 25 nt, Human
cccucaauacccauucaaagcaguc

SEQ ID NO: 133420 - RNA, 22 nt, Human
cccuguaaccccaccucuccuc

SEQ ID NO: 133421 - RNA, 20 nt, Human
cccuucaaaaauguaagcaa

SEQ ID NO: 133422 - RNA, 19 nt, Human
ccuacagacugauaagcug

SEQ ID NO: 133423 - RNA, 24 nt, Human
ccuaucucuuuaagagggccucaa

SEQ ID NO: 133424 - RNA, 19 nt, Human
ccucaacacacgugauucu

SEQ ID NO: 133425 - RNA, 21 nt, Human
ccugggugacagagugagacc

SEQ ID NO: 133426 - RNA, 21 nt, Human
ccuguagacccagcuacuugg

SEQ ID NO: 133427 - RNA, 18 nt, Human
cgccgccgcccucagggc

SEQ ID NO: 133428 - RNA, 20 nt, Human
cggcacuuuaggaggccaag

SEQ ID NO: 133429 - RNA, 26 nt, Human
cggcacuuuaggaggccaagaugggu

SEQ ID NO: 133430 - RNA, 19 nt, Human
cguaauagaauuuuccagg

SEQ ID NO: 133431 - RNA, 22 nt, Human
cuaaaagacauagccacauccu

SEQ ID NO: 133432 - RNA, 24 nt, Human
cuaaaagacauagccacauccuaa

SEQ ID NO: 133433 - RNA, 20 nt, Human
cuaaaauggaacacauuuug

SEQ ID NO: 133434 - RNA, 19 nt, Human
cuacaaaaaaaugcaaaaa

SEQ ID NO: 133435 - RNA, 23 nt, Human
cuacaggcccaaaggguggagcc

SEQ ID NO: 133436 - RNA, 19 nt, Human
cucaugaggugaggagauu

SEQ ID NO: 133437 - RNA, 22 nt, Human
cuccggcccugucaccugugcc

SEQ ID NO: 133438 - RNA, 22 nt, Human
cucuguagauaagcccaagggu

SEQ ID NO: 133439 - RNA, 21 nt, Human
cugagccugaauucacaaucu

SEQ ID NO: 133440 - RNA, 23 nt, Human
cugcaagugaaauacuucuucag

SEQ ID NO: 133441 - RNA, 21 nt, Human
cugggaaacaaaccuuuuaac

SEQ ID NO: 133442 - RNA, 23 nt, Human
cugggcaugguggcuuacaccug

SEQ ID NO: 133443 - RNA, 19 nt, Human
cuuagaacucuucaauuuc

SEQ ID NO: 133444 - RNA, 25 nt, Human
cuuucuauucuuuuucuucucuuuu

SEQ ID NO: 133445 - RNA, 24 nt, Human
cuuuuuccucucagguuuucuaga

SEQ ID NO: 133446 - RNA, 22 nt, Human
gaaaauaacuauauaaguggac

SEQ ID NO: 133447 - RNA, 18 nt, Human
gaaauuggaaagagagug

SEQ ID NO: 133448 - RNA, 22 nt, Human
gaaccuguuuucccugcuagac

SEQ ID NO: 133449 - RNA, 20 nt, Human
gaagacagaggagagggaga

SEQ ID NO: 133450 - RNA, 18 nt, Human
gaagacguucagcccugc

SEQ ID NO: 133451 - RNA, 19 nt, Human
gaagagcuacaggcccaaa

SEQ ID NO: 133452 - RNA, 22 nt, Human
gaauagagaugggguuguucag

SEQ ID NO: 133453 - RNA, 19 nt, Human
gacaaccuuuggcuagugc

SEQ ID NO: 133454 - RNA, 23 nt, Human
gacugauaagcugucaaaagaau

SEQ ID NO: 133455 - RNA, 18 nt, Human
gagcuauguuugcaccac

SEQ ID NO: 133456 - RNA, 18 nt, Human
gaggcagaggcagauuag

SEQ ID NO: 133457 - RNA, 19 nt, Human
gauauagcuuaguuucuuc

SEQ ID NO: 133458 - RNA, 24 nt, Human
gaucccuugagccugggaguuuga

SEQ ID NO: 133459 - RNA, 24 nt, Human
gauugcuugaggcuaggaguucga

SEQ ID NO: 133460 - RNA, 23 nt, Human
gcacacuuuguucuucucaaaau

SEQ ID NO: 133461 - RNA, 23 nt, Human
gcacuuuaggaggccaagauggg

SEQ ID NO: 133462 - RNA, 24 nt, Human
gcagagcugcagguacagaggcaa

SEQ ID NO: 133463 - RNA, 18 nt, Human
gcagauuaacuuuucugu

SEQ ID NO: 133464 - RNA, 23 nt, Human
gcaucuuaaaaagugaaaaauuc

SEQ ID NO: 133465 - RNA, 18 nt, Human
gcaugguggcuuacaccu

SEQ ID NO: 133466 - RNA, 18 nt, Human
gcauuuggucaaaggugu

SEQ ID NO: 133467 - RNA, 23 nt, Human
gccaaaaaaugccaauagccacc

SEQ ID NO: 133468 - RNA, 25 nt, Human
gcccauaguagcaaaaguaucaacc

SEQ ID NO: 133469 - RNA, 23 nt, Human
gcccccgggacuccaggcuccca

SEQ ID NO: 133470 - RNA, 25 nt, Human
ggcacagaggcagaggcccaaucca

SEQ ID NO: 133471 - RNA, 23 nt, Human
ggcacuuuaggaggccaagaugg

SEQ ID NO: 133472 - RNA, 18 nt, Human
ggcauaugcucccaaauu

SEQ ID NO: 133473 - RNA, 23 nt, Human
ggcaugguggcuuacaccuguaa

SEQ ID NO: 133474 - RNA, 21 nt, Human
ggccaaagggcagacucuggu

SEQ ID NO: 133475 - RNA, 18 nt, Human
gggcagacucuggugggc

SEQ ID NO: 133476 - RNA, 20 nt, Human
uaaaagacauagccacaucc

SEQ ID NO: 133477 - RNA, 27 nt, Human
uaaaauaauagacagacaaguuaagua

SEQ ID NO: 133478 - RNA, 19 nt, Human
uaaaauugcacuccagaga

SEQ ID NO: 133479 - RNA, 19 nt, Human
uaaacagaggcagaggcag

SEQ ID NO: 133480 - RNA, 22 nt, Human
uaaaugaugaacuuggauguuu

SEQ ID NO: 133481 - RNA, 18 nt, Human
uaaauuagaaccuaaacu

SEQ ID NO: 133482 - RNA, 23 nt, Human
uaagcaaauaaguuucuguugug

SEQ ID NO: 133483 - RNA, 18 nt, Human
uaagcugucaaaagaauu

SEQ ID NO: 133484 - RNA, 19 nt, Human
uaaguaaguagccauuaca

SEQ ID NO: 133485 - RNA, 22 nt, Human
uaauuuguuacagcagccaaag

SEQ ID NO: 133486 - RNA, 20 nt, Human
uaauuuguuacagcagccau

SEQ ID NO: 133487 - RNA, 24 nt, Human
uacacaucuuuacacuaaaaugga

SEQ ID NO: 133488 - RNA, 18 nt, Human
uacaccuguaauccggca

SEQ ID NO: 133489 - RNA, 18 nt, Human
uacacugcagccugggug

SEQ ID NO: 133490 - RNA, 19 nt, Human
uacacugcagccuggguga

SEQ ID NO: 133491 - RNA, 19 nt, Human
uacagggagcuauguuugc

SEQ ID NO: 133492 - RNA, 22 nt, Human
uacauguaagaaauuucuuaca

SEQ ID NO: 133493 - RNA, 26 nt, Human
uaccuaaguaaggaugcacuggaggc

SEQ ID NO: 133494 - RNA, 24 nt, Human
uacuagggauuggaagcugacacu

SEQ ID NO: 133495 - RNA, 23 nt, Human
uagaaaauaaggcaaguuuguau

SEQ ID NO: 133496 - RNA, 23 nt, Human
uagaagaauuuugguggauguga

SEQ ID NO: 133497 - RNA, 22 nt, Human
uaggaggccaagauggguggau

SEQ ID NO: 133498 - RNA, 24 nt, Human
uaggaggccaagauggguggauug

SEQ ID NO: 133499 - RNA, 20 nt, Human
uaggaguucgagagcagccu

SEQ ID NO: 133500 - RNA, 20 nt, Human
uaggguggagggaaaaguag

SEQ ID NO: 133501 - RNA, 19 nt, Human
uaggugagggauucacggu

SEQ ID NO: 133502 - RNA, 25 nt, Human
uaggugccuaucucuuuaagagggc

SEQ ID NO: 133503 - RNA, 22 nt, Human
uauaaguggacaaaaggaauca

SEQ ID NO: 133504 - RNA, 19 nt, Human
uauccuaugccuguuccca

SEQ ID NO: 133505 - RNA, 22 nt, Human
uaucuuauuuggagaagggggc

SEQ ID NO: 133506 - RNA, 19 nt, Human
uaugaugauaauugagaag

SEQ ID NO: 133507 - RNA, 23 nt, Human
uaugccuguucccaccauuguaa

SEQ ID NO: 133508 - RNA, 21 nt, Human
uauuuaagaaaaauguagaac

SEQ ID NO: 133509 - RNA, 24 nt, Human
ucaauauuugccuuugaaaucuaa

SEQ ID NO: 133510 - RNA, 24 nt, Human
ucacuuaguuggaauuauuguagc

SEQ ID NO: 133511 - RNA, 24 nt, Human
ucacuuguuuacuuuaucucagau

SEQ ID NO: 133512 - RNA, 22 nt, Human
ucagagguaguuuugugccugc

SEQ ID NO: 133513 - RNA, 20 nt, Human
ucaguauuucuaccuugacc

SEQ ID NO: 133514 - RNA, 21 nt, Human
ucauauaguggcaaaaaguuu

SEQ ID NO: 133515 - RNA, 23 nt, Human
uccauaguccaagaaagaagagc

SEQ ID NO: 133516 - RNA, 21 nt, Human
ucccaggcacccccgacgcaa

SEQ ID NO: 133517 - RNA, 18 nt, Human
ucccuugagccugggagu

SEQ ID NO: 133518 - RNA, 21 nt, Human
ucucaaaaugcaucauuuugu

SEQ ID NO: 133519 - RNA, 23 nt, Human
ucuccggcccugucaccugugcc

SEQ ID NO: 133520 - RNA, 23 nt, Human
ucucuacaaaaaaaugcaaaaaa

SEQ ID NO: 133521 - RNA, 23 nt, Human
ucucuuuuguuuuuggugggggu

SEQ ID NO: 133522 - RNA, 22 nt, Human
ucuguaacuguuauccuaugcc

SEQ ID NO: 133523 - RNA, 24 nt, Human
ucugugaggacccucuuuucugaa

SEQ ID NO: 133524 - RNA, 22 nt, Human
ugaagacacagcagaaagagaa

SEQ ID NO: 133525 - RNA, 19 nt, Human
ugagaaagaggauuacugc

SEQ ID NO: 133526 - RNA, 26 nt, Human
ugagaagaaguucacuuaguuggaag

SEQ ID NO: 133527 - RNA, 19 nt, Human
ugagccugggaguuugagg

SEQ ID NO: 133528 - RNA, 21 nt, Human
ugcaauaguauuacaaaugca

SEQ ID NO: 133529 - RNA, 21 nt, Human
ugcacacuacuucauccagcu

SEQ ID NO: 133530 - RNA, 21 nt, Human
ugcaccacuacacugcagccu

SEQ ID NO: 133531 - RNA, 24 nt, Human
ugcaccuguagacccagcuacuug

SEQ ID NO: 133532 - RNA, 24 nt, Human
ugcagccugggugacagagugaga

SEQ ID NO: 133533 - RNA, 20 nt, Human
ugcagucacaaaccaaggaa

SEQ ID NO: 133534 - RNA, 24 nt, Human
ugcauaaauggugcuucucaugug

SEQ ID NO: 133535 - RNA, 23 nt, Human
ugcucuguagauaagcccaaggg

SEQ ID NO: 133536 - RNA, 18 nt, Human
ugcugaagagguuaggca

SEQ ID NO: 133537 - RNA, 18 nt, Human
uggaacacauuuuguaau

SEQ ID NO: 133538 - RNA, 21 nt, Human
uggaagaaagggaauccuugu

SEQ ID NO: 133539 - RNA, 22 nt, Human
uggaagaaagggaauccuuguc

SEQ ID NO: 133540 - RNA, 25 nt, Human
uggaaugauuguaaaaaaaaaaaaa

SEQ ID NO: 133541 - RNA, 18 nt, Human
uggaggcaaaggcagcag

SEQ ID NO: 133542 - RNA, 20 nt, Human
uggaggcaaaggcagcaguu

SEQ ID NO: 133543 - RNA, 25 nt, Human
uggagggagccauggcuuugcugcc

SEQ ID NO: 133544 - RNA, 24 nt, Human
uggauugcuugaggcuaggaguuc

SEQ ID NO: 133545 - RNA, 20 nt, Human
uggcaaggaaagauucuccu

SEQ ID NO: 133546 - RNA, 23 nt, Human
uggcaguaauauggccaacaaaa

SEQ ID NO: 133547 - RNA, 19 nt, Human
uggcuuacaccuguaaucc

SEQ ID NO: 133548 - RNA, 23 nt, Human
uggcuuacaccuguaauccggca

SEQ ID NO: 133549 - RNA, 23 nt, Human
ugggaaacaaaccuuuuaacuca

SEQ ID NO: 133550 - RNA, 19 nt, Human
ugggcuaagaguggcuucc

SEQ ID NO: 133551 - RNA, 22 nt, Human
ugguaugcaccuguagacccag

SEQ ID NO: 133552 - RNA, 22 nt, Human
uguaacaaaugucuuaaaaugu

SEQ ID NO: 133553 - RNA, 21 nt, Human
uguaaccccaccucuccucaa

SEQ ID NO: 133554 - RNA, 23 nt, Human
uguaaccccaccucuccucaaag

SEQ ID NO: 133555 - RNA, 20 nt, Human
uguauaaaguagauaucugu

SEQ ID NO: 133556 - RNA, 24 nt, Human
ugugucuugacaaccuuuggcuag

SEQ ID NO: 133557 - RNA, 19 nt, Human
ugugugcaugugugugcau

SEQ ID NO: 133558 - RNA, 19 nt, Human
ugugugcaugugugugcau

SEQ ID NO: 133559 - RNA, 21 nt, Human
ugugugcaugugugugcauuu

SEQ ID NO: 133560 - RNA, 20 nt, Human
ugugugcauuuguguaugug

SEQ ID NO: 133561 - RNA, 22 nt, Human
ugugugugugcaugugugugca

SEQ ID NO: 133562 - RNA, 21 nt, Human
uuaacuuguggauuuauuuga

SEQ ID NO: 133563 - RNA, 19 nt, Human
uuacaaaugcacacuacuu

SEQ ID NO: 133564 - RNA, 18 nt, Human
uuacagcagccaaaggag

SEQ ID NO: 133565 - RNA, 21 nt, Human
uuaccacggucgccgccgccc

SEQ ID NO: 133566 - RNA, 21 nt, Human
uuacucccuaauuuauuuaag

SEQ ID NO: 133567 - RNA, 21 nt, Human
uuagaauaauugugggaggag

SEQ ID NO: 133568 - RNA, 24 nt, Human
uuagguauacagaggagggugaug

SEQ ID NO: 133569 - RNA, 20 nt, Human
uuaucuuauuuggagaaggg

SEQ ID NO: 133570 - RNA, 18 nt, Human
uucaaaguuuuccaacua

SEQ ID NO: 133571 - RNA, 25 nt, Human
uucaaaguuuuccaacuaggaaacu

SEQ ID NO: 133572 - RNA, 26 nt, Human
uucaagaucauucuccuaaccccuag

SEQ ID NO: 133573 - RNA, 20 nt, Human
uucuauuguagcagcuucag

SEQ ID NO: 133574 - RNA, 19 nt, Human
uucuguuguguuaagccau

SEQ ID NO: 133575 - RNA, 24 nt, Human
uucuguuucacugguucucagagg

SEQ ID NO: 133576 - RNA, 18 nt, Human
uucuucaggguggcuugg

SEQ ID NO: 133577 - RNA, 24 nt, Human
uugaauaaaugaugaacuuggaug

SEQ ID NO: 133578 - RNA, 18 nt, Human
uugaaugaguagaaacag

SEQ ID NO: 133579 - RNA, 19 nt, Human
uugccaagccagccauuug

SEQ ID NO: 133580 - RNA, 23 nt, Human
uugcuugaggcuaggaguucgag

SEQ ID NO: 133581 - RNA, 19 nt, Human
uuggccuccaaaacaacaa

SEQ ID NO: 133582 - RNA, 21 nt, Human
uugguggaugugauagaaaaa

SEQ ID NO: 133583 - RNA, 21 nt, Human
uuguaccaucaacccaauccu

SEQ ID NO: 133584 - RNA, 22 nt, Human
uuuaagaaaaauguagaaccug

SEQ ID NO: 133585 - RNA, 23 nt, Human
uuuccaaaauggcuucucuuaca

SEQ ID NO: 133586 - RNA, 18 nt, Human
uuuggacuuuuggccucc

SEQ ID NO: 133587 - RNA, 21 nt, Human
uuuguaauccugauaacugug

SEQ ID NO: 133588 - RNA, 24 nt, Human
aaaaagaauucggcacccuaugaa

SEQ ID NO: 133589 - RNA, 20 nt, Human
aggcgaugacuugcagggag

SEQ ID NO: 133590 - RNA, 20 nt, Human
ccuuuggggccacaggugug

SEQ ID NO: 133591 - RNA, 21 nt, Human
ggaaaaaagaauucggcaccc

SEQ ID NO: 133592 - RNA, 21 nt, Human
uuaacaagaugguuguccuuu

SEQ ID NO: 133593 - RNA, 19 nt, Human
aaaagccagcugggucuca

SEQ ID NO: 133594 - RNA, 24 nt, Human
aagucacagccguguguacuuuag

SEQ ID NO: 133595 - RNA, 24 nt, Human
acaacuggaauucuucccauaauu

SEQ ID NO: 133596 - RNA, 19 nt, Human
acugccuccuccuguuucu

SEQ ID NO: 133597 - RNA, 21 nt, Human
aggcuguggccaucauaaaca

SEQ ID NO: 133598 - RNA, 21 nt, Human
aguacucuccucuucccuggu

SEQ ID NO: 133599 - RNA, 22 nt, Human
caaaugaccauuaagagacuug

SEQ ID NO: 133600 - RNA, 20 nt, Human
cacaaaugagcuucugcaua

SEQ ID NO: 133601 - RNA, 23 nt, Human
cagagaaacagaauuucacaaau

SEQ ID NO: 133602 - RNA, 23 nt, Human
ccaacuccucaucucuuccuaac

SEQ ID NO: 133603 - RNA, 19 nt, Human
cucacccaucaucaccacc

SEQ ID NO: 133604 - RNA, 21 nt, Human
cuucccugguaaaauuaggga

SEQ ID NO: 133605 - RNA, 22 nt, Human
gaagcccucccguuggucaccu

SEQ ID NO: 133606 - RNA, 19 nt, Human
gaaugugaucuccaaagug

SEQ ID NO: 133607 - RNA, 21 nt, Human
gccuccuccuguuucuaaucc

SEQ ID NO: 133608 - RNA, 23 nt, Human
ggaaacucacccaucaucaccac

SEQ ID NO: 133609 - RNA, 24 nt, Human
gguaucagaguggcuggagagaga

SEQ ID NO: 133610 - RNA, 22 nt, Human
guacucuccucuucccugguaa

SEQ ID NO: 133611 - RNA, 21 nt, Human
uaacaacuggaauucuuccca

SEQ ID NO: 133612 - RNA, 22 nt, Human
uaaucccuccucuuccaacucc

SEQ ID NO: 133613 - RNA, 23 nt, Human
uagaugaauaccaauggcuaucc

SEQ ID NO: 133614 - RNA, 24 nt, Human
uaucagaguggcuggagagagauc

SEQ ID NO: 133615 - RNA, 22 nt, Human
uauguaaagacacagaguuaaa

SEQ ID NO: 133616 - RNA, 23 nt, Human
ucaaggguaaaagccagcugggu

SEQ ID NO: 133617 - RNA, 19 nt, Human
ucugcauaacugaaugacu

SEQ ID NO: 133618 - RNA, 19 nt, Human
ugaacagcucaaguguugc

SEQ ID NO: 133619 - RNA, 18 nt, Human
ugaaugacagcauugcug

SEQ ID NO: 133620 - RNA, 19 nt, Human
ugaaugacagcauugcugg

SEQ ID NO: 133621 - RNA, 24 nt, Human
ugagaagcccucccguuggucacc

SEQ ID NO: 133622 - RNA, 19 nt, Human
ugcaucuuauaacauuuuc

SEQ ID NO: 133623 - RNA, 21 nt, Human
ugccuauuguuugguuugguc

SEQ ID NO: 133624 - RNA, 23 nt, Human
ugcuucauuuucugauaauaaca

SEQ ID NO: 133625 - RNA, 19 nt, Human
ugggaagccaacccucccu

SEQ ID NO: 133626 - RNA, 21 nt, Human
ugggagcagugucaggcucua

SEQ ID NO: 133627 - RNA, 22 nt, Human
ugugccuguagagugcaacugc

SEQ ID NO: 133628 - RNA, 24 nt, Human
ugugccuguagagugcaacugcuc

SEQ ID NO: 133629 - RNA, 20 nt, Human
uguggccugcauuccucagc

SEQ ID NO: 133630 - RNA, 23 nt, Human
uguuucuaaucccuccucuucca

SEQ ID NO: 133631 - RNA, 20 nt, Human
uuaaaauagaugaauaccaa

SEQ ID NO: 133632 - RNA, 21 nt, Human
uucaggguacagagagcuaga

SEQ ID NO: 133633 - RNA, 23 nt, Human
uucuaaucccuccucuuccaacu

SEQ ID NO: 133634 - RNA, 19 nt, Human
uugaaaagugaggcuagug

SEQ ID NO: 133635 - RNA, 25 nt, Human
aaacccagagcacccucccccucaa

SEQ ID NO: 133636 - RNA, 21 nt, Human
aaagcacuuggcugagggcac

SEQ ID NO: 133637 - RNA, 22 nt, Human
aaauggccuucgaaucaggggc

SEQ ID NO: 133638 - RNA, 20 nt, Human
aacuacucugcccaccccuc

SEQ ID NO: 133639 - RNA, 26 nt, Human
aagcccccugggaccccucgcccucu

SEQ ID NO: 133640 - RNA, 20 nt, Human
acaguuacagaagcagaguc

SEQ ID NO: 133641 - RNA, 21 nt, Human
accccaacuucccucccauuu

SEQ ID NO: 133642 - RNA, 27 nt, Human
accgggccaaagcacuuggcugagggc

SEQ ID NO: 133643 - RNA, 18 nt, Human
agacacaaaagcaacagg

SEQ ID NO: 133644 - RNA, 18 nt, Human
agaccaguuagagauagu

SEQ ID NO: 133645 - RNA, 21 nt, Human
agcgggggaaacuacucugcc

SEQ ID NO: 133646 - RNA, 19 nt, Human
aggaaacagacacaaaagc

SEQ ID NO: 133647 - RNA, 20 nt, Human
aggaaauauuuccagcaaaa

SEQ ID NO: 133648 - RNA, 22 nt, Human
agggcacgcuggggagggggug

SEQ ID NO: 133649 - RNA, 25 nt, Human
aguuacagaagcagagucccaggaa

SEQ ID NO: 133650 - RNA, 22 nt, Human
caaaagcaacagggaacccccu

SEQ ID NO: 133651 - RNA, 21 nt, Human
caaagcagacaccccaacuuc

SEQ ID NO: 133652 - RNA, 18 nt, Human
caccaaccgcgacguggc

SEQ ID NO: 133653 - RNA, 18 nt, Human
caccaaguucagucaauu

SEQ ID NO: 133654 - RNA, 18 nt, Human
caccccaacgucauuccc

SEQ ID NO: 133655 - RNA, 20 nt, Human
caccucccagccccacaauc

SEQ ID NO: 133656 - RNA, 21 nt, Human
caccuccggcccggcccgccc

SEQ ID NO: 133657 - RNA, 22 nt, Human
caccucucuuuccccggacucc

SEQ ID NO: 133658 - RNA, 18 nt, Human
cacggaaacccagagcac

SEQ ID NO: 133659 - RNA, 30 nt, Human
cacggaaacccagagcacccucccccucaa

SEQ ID NO: 133660 - RNA, 26 nt, Human
cagcaaaacacucaccaaauggccuu

SEQ ID NO: 133661 - RNA, 25 nt, Human
cagcagugcagggaguucaauuuau

SEQ ID NO: 133662 - RNA, 22 nt, Human
caggaaacagacacaaaagcaa

SEQ ID NO: 133663 - RNA, 19 nt, Human
caggcccgaagcccccugg

SEQ ID NO: 133664 - RNA, 21 nt, Human
caggcucuccccccaccucuc

SEQ ID NO: 133665 - RNA, 19 nt, Human
cagggaacccccucuccgc

SEQ ID NO: 133666 - RNA, 21 nt, Human
caggggcccuccaccucccag

SEQ ID NO: 133667 - RNA, 25 nt, Human
caggggcccuccaccucccagcccc

SEQ ID NO: 133668 - RNA, 24 nt, Human
ccaaugccucucaagcuaucuucc

SEQ ID NO: 133669 - RNA, 26 nt, Human
ccagcaguguaaugagacaguuacag

SEQ ID NO: 133670 - RNA, 21 nt, Human
cccacaaucagcagcucugcc

SEQ ID NO: 133671 - RNA, 27 nt, Human
cccacaaucagcagcucugccuaggac

SEQ ID NO: 133672 - RNA, 19 nt, Human
ccccaacuucccucccauu

SEQ ID NO: 133673 - RNA, 24 nt, Human
cccccaccucucuuuccccggacu

SEQ ID NO: 133674 - RNA, 24 nt, Human
ccccccaccucucuuuccccggac

SEQ ID NO: 133675 - RNA, 18 nt, Human
ccccggacuccaucaccc

SEQ ID NO: 133676 - RNA, 18 nt, Human
ccccugggaccccucgcc

SEQ ID NO: 133677 - RNA, 21 nt, Human
ccccugggaccccucgccuug

SEQ ID NO: 133678 - RNA, 22 nt, Human
cccuccccauccacgacaucac

SEQ ID NO: 133679 - RNA, 21 nt, Human
cccucgcccucuccgaccacc

SEQ ID NO: 133680 - RNA, 21 nt, Human
cccuggggcgcugcgaaccuc

SEQ ID NO: 133681 - RNA, 21 nt, Human
ccucaagguuuaggugcugcu

SEQ ID NO: 133682 - RNA, 24 nt, Human
ccucacggaaacccagagcacccu

SEQ ID NO: 133683 - RNA, 19 nt, Human
ccuggaacccagcugcgcu

SEQ ID NO: 133684 - RNA, 20 nt, Human
ccuggaacccagcugcgcuc

SEQ ID NO: 133685 - RNA, 23 nt, Human
ccuggaacccagcugcgcucagg

SEQ ID NO: 133686 - RNA, 21 nt, Human
cgacaucacuuccccuaccag

SEQ ID NO: 133687 - RNA, 18 nt, Human
cggaagucacccagcagc

SEQ ID NO: 133688 - RNA, 25 nt, Human
cgggaagcaccgggccaaagcacuu

SEQ ID NO: 133689 - RNA, 20 nt, Human
cucccagccccacaaucagc

SEQ ID NO: 133690 - RNA, 24 nt, Human
cuccccccaccucucuuuccccgg

SEQ ID NO: 133691 - RNA, 19 nt, Human
cuccuggaacccagcugcg

SEQ ID NO: 133692 - RNA, 21 nt, Human
cuccuggaacccagcugcgcu

SEQ ID NO: 133693 - RNA, 19 nt, Human
cucugcccaccccucccca

SEQ ID NO: 133694 - RNA, 22 nt, Human
cucugcccaccccuccccaucc

SEQ ID NO: 133695 - RNA, 25 nt, Human
cucuggucccaaagcagacaccuua

SEQ ID NO: 133696 - RNA, 22 nt, Human
cugagagucuccuggaacccag

SEQ ID NO: 133697 - RNA, 20 nt, Human
gaaacagacacaaaagcaac

SEQ ID NO: 133698 - RNA, 22 nt, Human
gaaggcucgaaggcccagccca

SEQ ID NO: 133699 - RNA, 28 nt, Human
gacaggaaacagacacaaaagggacccc

SEQ ID NO: 133700 - RNA, 22 nt, Human
gagagucuccuggaacccagcu

SEQ ID NO: 133701 - RNA, 20 nt, Human
gagcacccucccccucaagg

SEQ ID NO: 133702 - RNA, 22 nt, Human
gagcccggaagucacccagcag

SEQ ID NO: 133703 - RNA, 22 nt, Human
gagucucagcuuuuucucucuc

SEQ ID NO: 133704 - RNA, 19 nt, Human
gcaguguaaugagacaguu

SEQ ID NO: 133705 - RNA, 18 nt, Human
gcccaccccuccccaucc

SEQ ID NO: 133706 - RNA, 21 nt, Human
gcccgaagcccccugggaccc

SEQ ID NO: 133707 - RNA, 19 nt, Human
gcucagcugagcugagagu

SEQ ID NO: 133708 - RNA, 20 nt, Human
ggacuccaucaccccaacgu

SEQ ID NO: 133709 - RNA, 19 nt, Human
gggagacuccaccuccggc

SEQ ID NO: 133710 - RNA, 18 nt, Human
ggggaggggguguaagaa

SEQ ID NO: 133711 - RNA, 18 nt, Human
ggugcagacucagucuga

SEQ ID NO: 133712 - RNA, 19 nt, Human
gguggcugcaggcccgaag

SEQ ID NO: 133713 - RNA, 22 nt, Human
gugcagcugcgggaagcaccgg

SEQ ID NO: 133714 - RNA, 19 nt, Human
uaagaaaaugcuguagagg

SEQ ID NO: 133715 - RNA, 19 nt, Human
uaagaaaaugcuguagagg

SEQ ID NO: 133716 - RNA, 19 nt, Human
uaggggagauuguucaugu

SEQ ID NO: 133717 - RNA, 21 nt, Human
ucaccaaauggccuucgaauc

SEQ ID NO: 133718 - RNA, 20 nt, Human
ucaccccaacgucauucccc

SEQ ID NO: 133719 - RNA, 22 nt, Human
ucacugggccgucccaagcgug

SEQ ID NO: 133720 - RNA, 18 nt, Human
ucaggcucuccccccacc

SEQ ID NO: 133721 - RNA, 21 nt, Human
ucuccccccaccucucuuucc

SEQ ID NO: 133722 - RNA, 25 nt, Human
ucugcccaccccuccccauccacga

SEQ ID NO: 133723 - RNA, 18 nt, Human
ugagacaguuacagaagc

SEQ ID NO: 133724 - RNA, 21 nt, Human
ugagacaguuacagaagcaga

SEQ ID NO: 133725 - RNA, 18 nt, Human
ugccuaggacuccccuca

SEQ ID NO: 133726 - RNA, 25 nt, Human
ugcuguagaggcaaaguccuggggg

SEQ ID NO: 133727 - RNA, 23 nt, Human
uggcgaggcaucugggcuucagc

SEQ ID NO: 133728 - RNA, 23 nt, Human
uggcugagggcacgcuggggagg

SEQ ID NO: 133729 - RNA, 24 nt, Human
ugggggcacacggacaagggcaag

SEQ ID NO: 133730 - RNA, 19 nt, Human
ugucacugggccgucccaa

SEQ ID NO: 133731 - RNA, 20 nt, Human
uuccagcaaaacacucacca

SEQ ID NO: 133732 - RNA, 18 nt, Human
uuggcugagggcacgcug

SEQ ID NO: 133733 - RNA, 19 nt, Human
uuugaggccccugcaauuc

SEQ ID NO: 133734 - RNA, 25 nt, Human
aacccccagcaagucccuccgcucc

SEQ ID NO: 133735 - RNA, 18 nt, Human
caacccccagcaaguccc

SEQ ID NO: 133736 - RNA, 24 nt, Human
caacccccagcaagucccuccgcu

SEQ ID NO: 133737 - RNA, 24 nt, Human
cagcaagucccuccgcuccagccu

SEQ ID NO: 133738 - RNA, 19 nt, Human
cagccaggacggcguccag

SEQ ID NO: 133739 - RNA, 18 nt, Human
cagucccccugcugcccu

SEQ ID NO: 133740 - RNA, 21 nt, Human
ccaugccagcggccccuccug

SEQ ID NO: 133741 - RNA, 21 nt, Human
ccgcuccagccuucagucccc

SEQ ID NO: 133742 - RNA, 18 nt, Human
cguccaggucccgagguc

SEQ ID NO: 133743 - RNA, 26 nt, Human
cuccagccuucagucccccugcugcc

SEQ ID NO: 133744 - RNA, 20 nt, Human
gagcaauccgggcgggcguc

SEQ ID NO: 133745 - RNA, 24 nt, Human
uaguccaugccagcggccccuccu

SEQ ID NO: 133746 - RNA, 18 nt, Human
uccacagcggucccgggg

SEQ ID NO: 133747 - RNA, 23 nt, Human
ucccccugcugcccugccagcaa

SEQ ID NO: 133748 - RNA, 20 nt, Human
ucccggggcucggggagcaa

SEQ ID NO: 133749 - RNA, 21 nt, Human
uuacccccaauccaaccccca

SEQ ID NO: 133750 - RNA, 20 nt, Human
uuacccccaauccaaccccu

SEQ ID NO: 133751 - RNA, 26 nt, Human
uuauuacccccaauccaacccccagc

SEQ ID NO: 133752 - RNA, 20 nt, Human
aaaaaggcuuaauugacuca

SEQ ID NO: 133753 - RNA, 19 nt, Human
aagcaaggaacuucacaug

SEQ ID NO: 133754 - RNA, 21 nt, Human
aagggcaagagaaacucugcc

SEQ ID NO: 133755 - RNA, 23 nt, Human
aaugcaggcuaacguaacuaccu

SEQ ID NO: 133756 - RNA, 23 nt, Human
acacucuauaaagaucuaccuga

SEQ ID NO: 133757 - RNA, 24 nt, Human
accucccaccaggccccuccucca

SEQ ID NO: 133758 - RNA, 24 nt, Human
acuucacauggugacuggagagaa

SEQ ID NO: 133759 - RNA, 19 nt, Human
acuuuaagggcaagagaaa

SEQ ID NO: 133760 - RNA, 26 nt, Human
agaaagauguguuagcuuaacaacug

SEQ ID NO: 133761 - RNA, 19 nt, Human
agauauugugagaacucac

SEQ ID NO: 133762 - RNA, 26 nt, Human
agauauuuuuauuuuaaugcaggcua

SEQ ID NO: 133763 - RNA, 19 nt, Human
agggacacaaauccaaacc

SEQ ID NO: 133764 - RNA, 21 nt, Human
agguuuuuaaaaguaaauguu

SEQ ID NO: 133765 - RNA, 24 nt, Human
caaacgaauaaagggagaugagca

SEQ ID NO: 133766 - RNA, 19 nt, Human
caaggaacuucacauggug

SEQ ID NO: 133767 - RNA, 23 nt, Human
cacaauuccacaggcuuaauaag

SEQ ID NO: 133768 - RNA, 22 nt, Human
caccaggccccuccuccaauuu

SEQ ID NO: 133769 - RNA, 24 nt, Human
caggcuuaauaagaagcaugacug

SEQ ID NO: 133770 - RNA, 18 nt, Human
caggguggguggucgggc

SEQ ID NO: 133771 - RNA, 18 nt, Human
cccaccaggccccuccuc

SEQ ID NO: 133772 - RNA, 21 nt, Human
ccucccaccaggccccuccuc

SEQ ID NO: 133773 - RNA, 19 nt, Human
gaacuucacauggugacug

SEQ ID NO: 133774 - RNA, 21 nt, Human
gacuuaucuaagaaucaagga

SEQ ID NO: 133775 - RNA, 24 nt, Human
gagaacagcaagggggaaauccgc

SEQ ID NO: 133776 - RNA, 23 nt, Human
gcauuagucuguuuucacacucu

SEQ ID NO: 133777 - RNA, 22 nt, Human
gggaagcaaggaacuucacaug

SEQ ID NO: 133778 - RNA, 23 nt, Human
ggugaugagaagcaaugccagaa

SEQ ID NO: 133779 - RNA, 19 nt, Human
gguggguggucgggcuguu

SEQ ID NO: 133780 - RNA, 24 nt, Human
gugagaacucacucacuaucauga

SEQ ID NO: 133781 - RNA, 22 nt, Human
gugaugagaagcaaugccagaa

SEQ ID NO: 133782 - RNA, 19 nt, Human
ucaggguggguggucgggc

SEQ ID NO: 133783 - RNA, 19 nt, Human
ucagucaaauauuucaaca

SEQ ID NO: 133784 - RNA, 19 nt, Human
ucccaccaggccccuccuc

SEQ ID NO: 133785 - RNA, 22 nt, Human
ucccaccaggccccuccuccaa

SEQ ID NO: 133786 - RNA, 22 nt, Human
ucugaauuuuuccuucugguga

SEQ ID NO: 133787 - RNA, 18 nt, Human
ucuuuuccaguuuuucuc

SEQ ID NO: 133788 - RNA, 22 nt, Human
ucuuuugaguaugaguacaaac

SEQ ID NO: 133789 - RNA, 24 nt, Human
ugaaagaaauucagaacaguuaag

SEQ ID NO: 133790 - RNA, 18 nt, Human
ugacuggagagaaagugc

SEQ ID NO: 133791 - RNA, 26 nt, Human
ugacuggagagaaagugcaagagggg

SEQ ID NO: 133792 - RNA, 22 nt, Human
ugauccaaucaccucccaccag

SEQ ID NO: 133793 - RNA, 21 nt, Human
ugcaagaggggaggugcacac

SEQ ID NO: 133794 - RNA, 20 nt, Human
uggaaaguaagacuuuaagg

SEQ ID NO: 133795 - RNA, 23 nt, Human
uggaggaaaacaucuuggaaggu

SEQ ID NO: 133796 - RNA, 20 nt, Human
ugggcagggacacaaaucca

SEQ ID NO: 133797 - RNA, 24 nt, Human
uguagugaggagaaagauguguua

SEQ ID NO: 133798 - RNA, 24 nt, Human
uguggagagaaauucaauagugau

SEQ ID NO: 133799 - RNA, 23 nt, Human
uuaaugucuuuuccaguuuuucu

SEQ ID NO: 133800 - RNA, 23 nt, Human
uuaauuugcucuacagcauauau

SEQ ID NO: 133801 - RNA, 23 nt, Human
uucacacucuauaaagaucuacc

SEQ ID NO: 133802 - RNA, 19 nt, Human
uuccuagaugaaagucagu

SEQ ID NO: 133803 - RNA, 23 nt, Human
aaaagcuguuaacuccagacucu

SEQ ID NO: 133804 - RNA, 23 nt, Human
aaacacuugggcuagugacgguu

SEQ ID NO: 133805 - RNA, 18 nt, Human
aaaccagccuuacugcag

SEQ ID NO: 133806 - RNA, 23 nt, Human
aaagguggcauaucacugggagg

SEQ ID NO: 133807 - RNA, 24 nt, Human
aaauacaucaugaccucacagaau

SEQ ID NO: 133808 - RNA, 24 nt, Human
aaauuuccauuguuguuguuuuga

SEQ ID NO: 133809 - RNA, 27 nt, Human
aacaaaaaguaaccuuaaugaagcaau

SEQ ID NO: 133810 - RNA, 19 nt, Human
aacacuugggcuagugacg

SEQ ID NO: 133811 - RNA, 20 nt, Human
aacacuugggcuagugacgg

SEQ ID NO: 133812 - RNA, 21 nt, Human
aacauggugaagcccugucuc

SEQ ID NO: 133813 - RNA, 20 nt, Human
aacaugguggcccaccuccc

SEQ ID NO: 133814 - RNA, 24 nt, Human
aagaaagucagcccagugucaggc

SEQ ID NO: 133815 - RNA, 20 nt, Human
aagaaauuuuugagugacau

SEQ ID NO: 133816 - RNA, 23 nt, Human
aagaugucuugugucugggaggc

SEQ ID NO: 133817 - RNA, 27 nt, Human
aagcagcccagcaggagccugaaaugc

SEQ ID NO: 133818 - RNA, 23 nt, Human
aagccgagguggggguggaucgc

SEQ ID NO: 133819 - RNA, 18 nt, Human
aagccucguuugccccag

SEQ ID NO: 133820 - RNA, 23 nt, Human
acagaagugcugcacagcaugga

SEQ ID NO: 133821 - RNA, 24 nt, Human
acagagagagacuccaucucaaaa

SEQ ID NO: 133822 - RNA, 23 nt, Human
accauuugaaagccagcauucca

SEQ ID NO: 133823 - RNA, 24 nt, Human
acugcacuccaacuugggugacag

SEQ ID NO: 133824 - RNA, 26 nt, Human
acugcacuccaacuugggugacagag

SEQ ID NO: 133825 - RNA, 19 nt, Human
acuucacugccuuacugaa

SEQ ID NO: 133826 - RNA, 23 nt, Human
acuugggugacagagagagacuc

SEQ ID NO: 133827 - RNA, 25 nt, Human
agaagcacaaacagaacaaccacug

SEQ ID NO: 133828 - RNA, 22 nt, Human
agagguugcagugagccgagau

SEQ ID NO: 133829 - RNA, 24 nt, Human
agagguugcagugagccgagauug

SEQ ID NO: 133830 - RNA, 20 nt, Human
agaucaggaugauggugggg

SEQ ID NO: 133831 - RNA, 19 nt, Human
agaugcaaucauugccaca

SEQ ID NO: 133832 - RNA, 18 nt, Human
agauugcggggccacugc

SEQ ID NO: 133833 - RNA, 21 nt, Human
agcacauucacauauugugcu

SEQ ID NO: 133834 - RNA, 24 nt, Human
agcacuuugggaagccgagguggg

SEQ ID NO: 133835 - RNA, 23 nt, Human
agcagaaggcaaauggcacagga

SEQ ID NO: 133836 - RNA, 22 nt, Human
agcagccccccggguccaaaca

SEQ ID NO: 133837 - RNA, 23 nt, Human
agccagaagaagcacgcuggccc

SEQ ID NO: 133838 - RNA, 19 nt, Human
agcucaacacucugcaaaa

SEQ ID NO: 133839 - RNA, 22 nt, Human
aggcaguagaauagcuugaacc

SEQ ID NO: 133840 - RNA, 24 nt, Human
aggcaguagaauagcuugaaccug

SEQ ID NO: 133841 - RNA, 24 nt, Human
aggcugaggcaguagaauagcuug

SEQ ID NO: 133842 - RNA, 21 nt, Human
agguagagguugcagugagcc

SEQ ID NO: 133843 - RNA, 24 nt, Human
agguagagguugcagugagccgag

SEQ ID NO: 133844 - RNA, 18 nt, Human
agugcacuuugggaagug

SEQ ID NO: 133845 - RNA, 21 nt, Human
aucacacuuacauucucauaa

SEQ ID NO: 133846 - RNA, 19 nt, Human
aucuacaaacaccuuccuu

SEQ ID NO: 133847 - RNA, 19 nt, Human
augaauaggaguuacauga

SEQ ID NO: 133848 - RNA, 23 nt, Human
auggaaggcugagcaaagcacca

SEQ ID NO: 133849 - RNA, 23 nt, Human
auggcaagggcuuagcaugguac

SEQ ID NO: 133850 - RNA, 22 nt, Human
auuacauauacaagaaggcauu

SEQ ID NO: 133851 - RNA, 22 nt, Human
caaaaaguaaccuuaaugaagc

SEQ ID NO: 133852 - RNA, 24 nt, Human
caacauggugaagcccugucucua

SEQ ID NO: 133853 - RNA, 21 nt, Human
cacaaacagaacaaccacugg

SEQ ID NO: 133854 - RNA, 24 nt, Human
cacaccuguaaucucagcacuuug

SEQ ID NO: 133855 - RNA, 21 nt, Human
cacacuuacauucucauaaaa

SEQ ID NO: 133856 - RNA, 19 nt, Human
caccccaacuucucucuaa

SEQ ID NO: 133857 - RNA, 23 nt, Human
caccuguaaucucagcacuuugg

SEQ ID NO: 133858 - RNA, 24 nt, Human
caccuguaaucucagcacuuuggg

SEQ ID NO: 133859 - RNA, 23 nt, Human
cacugcacuccaacuugggugac

SEQ ID NO: 133860 - RNA, 24 nt, Human
cacugcacuccaacuugggugaca

SEQ ID NO: 133861 - RNA, 21 nt, Human
cacugccuuacugaguacugc

SEQ ID NO: 133862 - RNA, 21 nt, Human
cacugccuuacugaguacugc

SEQ ID NO: 133863 - RNA, 24 nt, Human
cacuucugaaaaacaccaauugga

SEQ ID NO: 133864 - RNA, 20 nt, Human
cagaagcacaaacagaacaa

SEQ ID NO: 133865 - RNA, 21 nt, Human
cagaauucaccccaacuucuc

SEQ ID NO: 133866 - RNA, 24 nt, Human
cagagucuuaugcuugguuuccuu

SEQ ID NO: 133867 - RNA, 24 nt, Human
cagcaaggcagacaguauaauauc

SEQ ID NO: 133868 - RNA, 24 nt, Human
cagcacuuugggaagccgaggugg

SEQ ID NO: 133869 - RNA, 20 nt, Human
cagcauuccagcaaggcaga

SEQ ID NO: 133870 - RNA, 24 nt, Human
cagcuacuugggaggcugaggcag

SEQ ID NO: 133871 - RNA, 24 nt, Human
cagucaaaucagauucuaacucau

SEQ ID NO: 133872 - RNA, 22 nt, Human
caguggccaugaguucuuagcc

SEQ ID NO: 133873 - RNA, 20 nt, Human
cauaaaugagaacagaagca

SEQ ID NO: 133874 - RNA, 20 nt, Human
cauuuuaccagcucugugcc

SEQ ID NO: 133875 - RNA, 21 nt, Human
ccaacauggugaagcccuguc

SEQ ID NO: 133876 - RNA, 19 nt, Human
ccacgggaaaauggaacag

SEQ ID NO: 133877 - RNA, 20 nt, Human
ccacugcacuccaacuuggg

SEQ ID NO: 133878 - RNA, 24 nt, Human
ccacugcacuccaacuugggugac

SEQ ID NO: 133879 - RNA, 19 nt, Human
ccagucaaaucagauucua

SEQ ID NO: 133880 - RNA, 19 nt, Human
ccagugaaagaaaaauggg

SEQ ID NO: 133881 - RNA, 20 nt, Human
ccccgcugccagcuccuccc

SEQ ID NO: 133882 - RNA, 21 nt, Human
ccccgcugccagcuccucccg

SEQ ID NO: 133883 - RNA, 24 nt, Human
ccccggguccaaacaugguggccc

SEQ ID NO: 133884 - RNA, 23 nt, Human
cccugucucuacuaaaaauacaa

SEQ ID NO: 133885 - RNA, 25 nt, Human
ccgcuccgccugggcugccuccccc

SEQ ID NO: 133886 - RNA, 20 nt, Human
ccgcugccagcuccucccgc

SEQ ID NO: 133887 - RNA, 22 nt, Human
ccuagccaacauggugaagccc

SEQ ID NO: 133888 - RNA, 23 nt, Human
ccuagccaacauggugaagcccu

SEQ ID NO: 133889 - RNA, 24 nt, Human
ccuagccaacauggugaagcccug

SEQ ID NO: 133890 - RNA, 24 nt, Human
ccugaaaugcccuugcauuacuga

SEQ ID NO: 133891 - RNA, 23 nt, Human
ccugaguacugcacugccuaacu

SEQ ID NO: 133892 - RNA, 20 nt, Human
ccuggaccccagccaauugc

SEQ ID NO: 133893 - RNA, 18 nt, Human
ccuguaaccccagcuacu

SEQ ID NO: 133894 - RNA, 22 nt, Human
ccuguaaccccagcuacuuggg

SEQ ID NO: 133895 - RNA, 24 nt, Human
ccugucugagccuagacuucacag

SEQ ID NO: 133896 - RNA, 20 nt, Human
ccuuccucagugcacuuugg

SEQ ID NO: 133897 - RNA, 26 nt, Human
cgagguggggguggaucgccugaggu

SEQ ID NO: 133898 - RNA, 23 nt, Human
cgccugaggucaggaguuugaga

SEQ ID NO: 133899 - RNA, 21 nt, Human
cuaagaccaagcaaagacaac

SEQ ID NO: 133900 - RNA, 18 nt, Human
cuagacuucacagugagg

SEQ ID NO: 133901 - RNA, 22 nt, Human
cucacaccuguaaucucagcac

SEQ ID NO: 133902 - RNA, 24 nt, Human
cucacaccuguaaucucagcacuu

SEQ ID NO: 133903 - RNA, 19 nt, Human
cuccaucucaaaaaaaaaa

SEQ ID NO: 133904 - RNA, 20 nt, Human
cucccagggucaaaguggcu

SEQ ID NO: 133905 - RNA, 24 nt, Human
cucccucccccaucccgucacucc

SEQ ID NO: 133906 - RNA, 22 nt, Human
cuccucccgcuccgccugggcu

SEQ ID NO: 133907 - RNA, 22 nt, Human
cugaaaaacaccaauuggauga

SEQ ID NO: 133908 - RNA, 20 nt, Human
cugcacugccugaguacugu

SEQ ID NO: 133909 - RNA, 21 nt, Human
cuggcagugugggaagccucg

SEQ ID NO: 133910 - RNA, 19 nt, Human
cuucacagugaggcucccc

SEQ ID NO: 133911 - RNA, 19 nt, Human
gaacacaaucagcacauuc

SEQ ID NO: 133912 - RNA, 22 nt, Human
gaacaugaaccaccuuuccacu

SEQ ID NO: 133913 - RNA, 22 nt, Human
gaagagcagccccccgggucca

SEQ ID NO: 133914 - RNA, 21 nt, Human
gaccagagaggguacuccuuu

SEQ ID NO: 133915 - RNA, 21 nt, Human
gacuauuacugauagcauguc

SEQ ID NO: 133916 - RNA, 18 nt, Human
gauccuagugaaggcagg

SEQ ID NO: 133917 - RNA, 24 nt, Human
gaucgccugaggucaggaguuuga

SEQ ID NO: 133918 - RNA, 20 nt, Human
gcacugccugaguacuguau

SEQ ID NO: 133919 - RNA, 19 nt, Human
gcagaaggcaaauggcaca

SEQ ID NO: 133920 - RNA, 22 nt, Human
gcagaauuuucaaauacaucau

SEQ ID NO: 133921 - RNA, 24 nt, Human
gcagcagaaggcaaauggcacagg

SEQ ID NO: 133922 - RNA, 24 nt, Human
gccaacauggugaagcccugucuc

SEQ ID NO: 133923 - RNA, 24 nt, Human
gccacugcacuccaacuuggguga

SEQ ID NO: 133924 - RNA, 24 nt, Human
gccugaggucaggaguuugagacc

SEQ ID NO: 133925 - RNA, 19 nt, Human
gcuccccuggcaguguggg

SEQ ID NO: 133926 - RNA, 18 nt, Human
gcuguuaacuccagacuc

SEQ ID NO: 133927 - RNA, 20 nt, Human
gcuuuugcuuuguuuccugg

SEQ ID NO: 133928 - RNA, 20 nt, Human
ggaagccgaggugggggugg

SEQ ID NO: 133929 - RNA, 25 nt, Human
ggcccgguggcaaaugccuguaacc

SEQ ID NO: 133930 - RNA, 19 nt, Human
ggccgggugcgguggcuca

SEQ ID NO: 133931 - RNA, 18 nt, Human
ggcuuguccugagaaggu

SEQ ID NO: 133932 - RNA, 24 nt, Human
gggcccgguggcaaaugccuguaa

SEQ ID NO: 133933 - RNA, 20 nt, Human
ggggguggaucgccugaggu

SEQ ID NO: 133934 - RNA, 24 nt, Human
gggugcgguggcucacaccuguaa

SEQ ID NO: 133935 - RNA, 18 nt, Human
gguacuugaccagagagg

SEQ ID NO: 133936 - RNA, 23 nt, Human
gguggcucacaccuguaaucuca

SEQ ID NO: 133937 - RNA, 24 nt, Human
gguggcucacaccuguaaucucag

SEQ ID NO: 133938 - RNA, 24 nt, Human
gguucaucauugaaaaugaagucc

SEQ ID NO: 133939 - RNA, 21 nt, Human
gugaagcccugucucuacuaa

SEQ ID NO: 133940 - RNA, 23 nt, Human
gugcuuuugcuuguggucuuggc

SEQ ID NO: 133941 - RNA, 18 nt, Human
gugucaggcugugagugg

SEQ ID NO: 133942 - RNA, 23 nt, Human
guguuacugagcauugcauugcu

SEQ ID NO: 133943 - RNA, 21 nt, Human
guucaucauugaaaaugaagu

SEQ ID NO: 133944 - RNA, 19 nt, Human
guugcagugagccgagauu

SEQ ID NO: 133945 - RNA, 18 nt, Human
guuggccgggugcggugg

SEQ ID NO: 133946 - RNA, 24 nt, Human
guuggccgggugcgguggcucaca

SEQ ID NO: 133947 - RNA, 20 nt, Human
uaacaaaaaguaaccuuaau

SEQ ID NO: 133948 - RNA, 19 nt, Human
uaacuugcagaauuuucaa

SEQ ID NO: 133949 - RNA, 22 nt, Human
uacuacacuguuacugaguauu

SEQ ID NO: 133950 - RNA, 18 nt, Human
uacugaguacuucacugc

SEQ ID NO: 133951 - RNA, 19 nt, Human
uagccaacauggugaagcc

SEQ ID NO: 133952 - RNA, 23 nt, Human
uagccaacauggugaagcccugu

SEQ ID NO: 133953 - RNA, 21 nt, Human
uagccaggugaacaaguaagu

SEQ ID NO: 133954 - RNA, 21 nt, Human
uagcggacuuucugaaugaua

SEQ ID NO: 133955 - RNA, 19 nt, Human
uauuguguuacugaguacu

SEQ ID NO: 133956 - RNA, 21 nt, Human
ucagaaaguuggauggaacug

SEQ ID NO: 133957 - RNA, 19 nt, Human
ucagaguuuggacugggac

SEQ ID NO: 133958 - RNA, 20 nt, Human
uccaacuugggugacagaga

SEQ ID NO: 133959 - RNA, 23 nt, Human
uccacaguggccaugaguucuua

SEQ ID NO: 133960 - RNA, 18 nt, Human
ucccagggucaaaguggc

SEQ ID NO: 133961 - RNA, 24 nt, Human
uccuuuguuuagagagcuucucuu

SEQ ID NO: 133962 - RNA, 19 nt, Human
ucgccugaggucaggaguu

SEQ ID NO: 133963 - RNA, 21 nt, Human
ucucuacuaaaaauacaaaaa

SEQ ID NO: 133964 - RNA, 23 nt, Human
ucucuuggggccaccuuccucag

SEQ ID NO: 133965 - RNA, 22 nt, Human
ugaaaagacauaugucgaagua

SEQ ID NO: 133966 - RNA, 19 nt, Human
ugaaagaccucaaggcucu

SEQ ID NO: 133967 - RNA, 24 nt, Human
ugaaccugggagguagagguugca

SEQ ID NO: 133968 - RNA, 23 nt, Human
ugaauagguuuguugaugccugu

SEQ ID NO: 133969 - RNA, 18 nt, Human
ugacagagucuuaugcuu

SEQ ID NO: 133970 - RNA, 25 nt, Human
ugagaacagaagcacaaacagaaca

SEQ ID NO: 133971 - RNA, 30 nt, Human
ugagaacagaagcacaaacagaacaaccaa

SEQ ID NO: 133972 - RNA, 18 nt, Human
ugagaaugaacaugaacc

SEQ ID NO: 133973 - RNA, 22 nt, Human
ugagaaugaacaugaaccaccu

SEQ ID NO: 133974 - RNA, 24 nt, Human
ugagacccuccuagccaacauggu

SEQ ID NO: 133975 - RNA, 21 nt, Human
ugagaugaaacuauucucaaa

SEQ ID NO: 133976 - RNA, 22 nt, Human
ugaggaucuucaagaaagucag

SEQ ID NO: 133977 - RNA, 24 nt, Human
ugaggcaguagaauagcuugaacc

SEQ ID NO: 133978 - RNA, 25 nt, Human
ugaggcaguagaauagcuugaaccu

SEQ ID NO: 133979 - RNA, 22 nt, Human
ugaggcuccccuggcagugugg

SEQ ID NO: 133980 - RNA, 18 nt, Human
ugaggucaggaguuugag

SEQ ID NO: 133981 - RNA, 19 nt, Human
ugaugguggggugaauagg

SEQ ID NO: 133982 - RNA, 19 nt, Human
ugcaucaucuacaaacacc

SEQ ID NO: 133983 - RNA, 21 nt, Human
ugcauugugguucuccaagca

SEQ ID NO: 133984 - RNA, 20 nt, Human
ugccacaaaaggaaaauuga

SEQ ID NO: 133985 - RNA, 19 nt, Human
ugcccaaauacuucaaaau

SEQ ID NO: 133986 - RNA, 25 nt, Human
ugccuaauugaaaucagccuguuuu

SEQ ID NO: 133987 - RNA, 22 nt, Human
ugccugaguacuguauuguguu

SEQ ID NO: 133988 - RNA, 24 nt, Human
ugccuguaaccccagcuacuuggg

SEQ ID NO: 133989 - RNA, 19 nt, Human
ugccuuagaaaaagggaau

SEQ ID NO: 133990 - RNA, 22 nt, Human
ugcugcacagcauggaaggcug

SEQ ID NO: 133991 - RNA, 23 nt, Human
uggaacacuucugaaaaacacca

SEQ ID NO: 133992 - RNA, 18 nt, Human
uggaacaggcucaaacau

SEQ ID NO: 133993 - RNA, 22 nt, Human
uggaaggcugagcaaagcacca

SEQ ID NO: 133994 - RNA, 19 nt, Human
uggaucgccugaggucagg

SEQ ID NO: 133995 - RNA, 23 nt, Human
uggaucgccugaggucaggaguu

SEQ ID NO: 133996 - RNA, 24 nt, Human
uggaucgccugaggucaggaguuu

SEQ ID NO: 133997 - RNA, 19 nt, Human
uggcaaaugccuguaaccc

SEQ ID NO: 133998 - RNA, 23 nt, Human
uggcaaaugccuguaaccccagc

SEQ ID NO: 133999 - RNA, 21 nt, Human
uggcucacaccuguaaucuca

SEQ ID NO: 134000 - RNA, 24 nt, Human
uggcucacaccuguaaucucagca

SEQ ID NO: 134001 - RNA, 19 nt, Human
ugggaagccgagguggggg

SEQ ID NO: 134002 - RNA, 21 nt, Human
ugggaagccgaggugggggug

SEQ ID NO: 134003 - RNA, 25 nt, Human
ugggaagccgagguggggguggauc

SEQ ID NO: 134004 - RNA, 21 nt, Human
ugggaagugcugccccggggc

SEQ ID NO: 134005 - RNA, 18 nt, Human
ugggacuuccucagagaa

SEQ ID NO: 134006 - RNA, 29 nt, Human
ugggagguagagguugcagugacaacggu

SEQ ID NO: 134007 - RNA, 24 nt, Human
ugggagguagagguugcagugagc

SEQ ID NO: 134008 - RNA, 18 nt, Human
ugggccaaagaagcagcc

SEQ ID NO: 134009 - RNA, 19 nt, Human
ugguggggugaauagguuu

SEQ ID NO: 134010 - RNA, 24 nt, Human
ugguuagaucaggaugaugguggg

SEQ ID NO: 134011 - RNA, 19 nt, Human
uguagccagaagaagcacg

SEQ ID NO: 134012 - RNA, 18 nt, Human
ugucugggaggcuuuuug

SEQ ID NO: 134013 - RNA, 21 nt, Human
ugugucugggaggcuuuuuga

SEQ ID NO: 134014 - RNA, 21 nt, Human
uguuacugagcauugcauugc

SEQ ID NO: 134015 - RNA, 22 nt, Human
uguuacugaguacugcacugcc

SEQ ID NO: 134016 - RNA, 22 nt, Human
uguuacugaguacugcacugcc

SEQ ID NO: 134017 - RNA, 25 nt, Human
uuaaaauauguagaguguauuuugc

SEQ ID NO: 134018 - RNA, 21 nt, Human
uuacuauaaguucucucucag

SEQ ID NO: 134019 - RNA, 19 nt, Human
uuacugaguacugcacugu

SEQ ID NO: 134020 - RNA, 19 nt, Human
uuacugaguacugcacugu

SEQ ID NO: 134021 - RNA, 24 nt, Human
uuagaucacaggagaaguaaggug

SEQ ID NO: 134022 - RNA, 19 nt, Human
uuccucagugcacuuuggg

SEQ ID NO: 134023 - RNA, 24 nt, Human
uugaaccugggagguagagguugc

SEQ ID NO: 134024 - RNA, 19 nt, Human
uugcagugagccgagauug

SEQ ID NO: 134025 - RNA, 20 nt, Human
uugcagugagccgagauugc

SEQ ID NO: 134026 - RNA, 25 nt, Human
uuggauauuuuuauguuccccugau

SEQ ID NO: 134027 - RNA, 20 nt, Human
uuguuguuguuuugaugcuu

SEQ ID NO: 134028 - RNA, 19 nt, Human
uuucagaaaguuggaugga

SEQ ID NO: 134029 - RNA, 21 nt, Human
aaaacaggacaagaugggaug

SEQ ID NO: 134030 - RNA, 19 nt, Human
aaaauucagugacacucuu

SEQ ID NO: 134031 - RNA, 20 nt, Human
aaaguaaacgaggccuaaaa

SEQ ID NO: 134032 - RNA, 24 nt, Human
aacuaggacuacgauguuaagaca

SEQ ID NO: 134033 - RNA, 19 nt, Human
aaguaaacgaggccuaaaa

SEQ ID NO: 134034 - RNA, 24 nt, Human
acaagauggaaaacuaccaggccc

SEQ ID NO: 134035 - RNA, 21 nt, Human
accacccauauccuuaaaaca

SEQ ID NO: 134036 - RNA, 22 nt, Human
agagggcacaggaacaaguagg

SEQ ID NO: 134037 - RNA, 21 nt, Human
aggccagaacaagauggaaaa

SEQ ID NO: 134038 - RNA, 19 nt, Human
aggcccaucaggccuauaa

SEQ ID NO: 134039 - RNA, 21 nt, Human
aggcuuuaguuucuccuccag

SEQ ID NO: 134040 - RNA, 23 nt, Human
aggcuuuaguuucuccuccagcu

SEQ ID NO: 134041 - RNA, 24 nt, Human
caagaugggaugaccacaccaggu

SEQ ID NO: 134042 - RNA, 23 nt, Human
caaugaacaauuucauuuuuuaa

SEQ ID NO: 134043 - RNA, 19 nt, Human
caccagcauggacaaaacu

SEQ ID NO: 134044 - RNA, 21 nt, Human
cagauggauuuaggugagcac

SEQ ID NO: 134045 - RNA, 20 nt, Human
cagcauggacaaaacucagu

SEQ ID NO: 134046 - RNA, 18 nt, Human
ccacagccgagggaacga

SEQ ID NO: 134047 - RNA, 24 nt, Human
ccagaacaagauggaaaacuacca

SEQ ID NO: 134048 - RNA, 19 nt, Human
ccagacaccagcauggaca

SEQ ID NO: 134049 - RNA, 19 nt, Human
cccagacaccagcauggac

SEQ ID NO: 134050 - RNA, 24 nt, Human
ccgcagacucccgccgccuugguc

SEQ ID NO: 134051 - RNA, 22 nt, Human
ccgcgugcgugccgcccggucc

SEQ ID NO: 134052 - RNA, 19 nt, Human
ccuauaacccagacaccag

SEQ ID NO: 134053 - RNA, 25 nt, Human
ccugcaccgcgugcgugccgcccgg

SEQ ID NO: 134054 - RNA, 20 nt, Human
cuaggaccuauguuccacuc

SEQ ID NO: 134055 - RNA, 22 nt, Human
cuccuccagcuucaaguggccu

SEQ ID NO: 134056 - RNA, 18 nt, Human
cucucagcaacaaaagga

SEQ ID NO: 134057 - RNA, 21 nt, Human
cuuuaguuucuccuccagcuu

SEQ ID NO: 134058 - RNA, 20 nt, Human
gaaaacuaccaggcccauca

SEQ ID NO: 134059 - RNA, 22 nt, Human
gagaucaacaagaaaacccaac

SEQ ID NO: 134060 - RNA, 19 nt, Human
gauggauuuaggugagcac

SEQ ID NO: 134061 - RNA, 27 nt, Human
gccagaacaagauggaaaacuaccagg

SEQ ID NO: 134062 - RNA, 22 nt, Human
gccagaacucuucacccugucu

SEQ ID NO: 134063 - RNA, 22 nt, Human
gucuaggaccuauguuccacuc

SEQ ID NO: 134064 - RNA, 22 nt, Human
uaaaacaggacaagaugggaug

SEQ ID NO: 134065 - RNA, 24 nt, Human
uaacauguuuucucaauaaggcuu

SEQ ID NO: 134066 - RNA, 28 nt, Human
uaagacaaccacuagcagaaggucaucc

SEQ ID NO: 134067 - RNA, 21 nt, Human
uacagcauuucacugagcaga

SEQ ID NO: 134068 - RNA, 23 nt, Human
uacugggucugaaggugaggcuu

SEQ ID NO: 134069 - RNA, 19 nt, Human
ucaaaguagcagcuaaaau

SEQ ID NO: 134070 - RNA, 22 nt, Human
ucaccgaggucucaaaguagca

SEQ ID NO: 134071 - RNA, 19 nt, Human
ucacugagcagacuuaguu

SEQ ID NO: 134072 - RNA, 24 nt, Human
ucaggccuauaacccagacaccag

SEQ ID NO: 134073 - RNA, 27 nt, Human
uccacagccgagggaacgaccgcagac

SEQ ID NO: 134074 - RNA, 24 nt, Human
ucuaggccagaacaagauggaaaa

SEQ ID NO: 134075 - RNA, 18 nt, Human
ugaccacaccagguaaca

SEQ ID NO: 134076 - RNA, 19 nt, Human
ugagaucaacaagaaaacc

SEQ ID NO: 134077 - RNA, 26 nt, Human
ugagaucaacaagaaaacccaacagg

SEQ ID NO: 134078 - RNA, 24 nt, Human
ugccucuuucaucuuucaccaccc

SEQ ID NO: 134079 - RNA, 21 nt, Human
ugcggacaguuacugggucug

SEQ ID NO: 134080 - RNA, 19 nt, Human
uuuacaaaccuuuuaaaca

SEQ ID NO: 134081 - RNA, 23 nt, Human
aaaaauaggcagugcagcacccc

SEQ ID NO: 134082 - RNA, 18 nt, Human
aaggaguucacugcauuu

SEQ ID NO: 134083 - RNA, 24 nt, Human
aagugccacacugagaauuuacaa

SEQ ID NO: 134084 - RNA, 23 nt, Human
acaaagcucuuacacuccagguu

SEQ ID NO: 134085 - RNA, 24 nt, Human
auaacaagaggaaaaauaggcagu

SEQ ID NO: 134086 - RNA, 20 nt, Human
auaggcagugcagcaccuuu

SEQ ID NO: 134087 - RNA, 21 nt, Human
auguguacaaaaauuuacaua

SEQ ID NO: 134088 - RNA, 21 nt, Human
caagagggagaaagaaggaga

SEQ ID NO: 134089 - RNA, 20 nt, Human
cauaaagaaacaaagcucuu

SEQ ID NO: 134090 - RNA, 18 nt, Human
ccgugccgguucggcugc

SEQ ID NO: 134091 - RNA, 18 nt, Human
cucaagagggagaaagaa

SEQ ID NO: 134092 - RNA, 21 nt, Human
cucaagagggagaaagaagga

SEQ ID NO: 134093 - RNA, 20 nt, Human
cuccagguuuuuggaaggug

SEQ ID NO: 134094 - RNA, 25 nt, Human
cugaaaccacagaacuuguauaucc

SEQ ID NO: 134095 - RNA, 18 nt, Human
uaacaagaggaaaaauag

SEQ ID NO: 134096 - RNA, 24 nt, Human
uaauuaaaaguuucauugcauuua

SEQ ID NO: 134097 - RNA, 24 nt, Human
uagguaccuaucauuugucauucc

SEQ ID NO: 134098 - RNA, 30 nt, Human
ucaggguccgggagcccccugcgggguuuc

SEQ ID NO: 134099 - RNA, 23 nt, Human
ucauguuacauuuuagguaccua

SEQ ID NO: 134100 - RNA, 20 nt, Human
uccccaggaaaccgugccgg

SEQ ID NO: 134101 - RNA, 23 nt, Human
uccccaggaaaccgugccgguuc

SEQ ID NO: 134102 - RNA, 19 nt, Human
ugccacacugagaauuuac

SEQ ID NO: 134103 - RNA, 20 nt, Human
uuaacugaaaccacagaacu

SEQ ID NO: 134104 - RNA, 24 nt, Human
uuaacugaaaccacagaacuugua

SEQ ID NO: 134105 - RNA, 20 nt, Human
uuacugcaaucacaggggag

SEQ ID NO: 134106 - RNA, 20 nt, Human
aacccauucuucaaggacug

SEQ ID NO: 134107 - RNA, 22 nt, Human
aauugcuauagucaauuccuac

SEQ ID NO: 134108 - RNA, 21 nt, Human
agaacccauucuucaaggacu

SEQ ID NO: 134109 - RNA, 27 nt, Human
agacccucaacaaacaggaagcagcuu

SEQ ID NO: 134110 - RNA, 21 nt, Human
auggugguggaagcgguugcg

SEQ ID NO: 134111 - RNA, 22 nt, Human
caaaacuucuaaaaacaaacac

SEQ ID NO: 134112 - RNA, 19 nt, Human
caccauggugguggaagcg

SEQ ID NO: 134113 - RNA, 24 nt, Human
cagaacccauucuucaaggacugg

SEQ ID NO: 134114 - RNA, 20 nt, Human
ccccagaaagaaagcggggu

SEQ ID NO: 134115 - RNA, 18 nt, Human
cgccgcucccugccccuc

SEQ ID NO: 134116 - RNA, 22 nt, Human
cggcacccgagacgcgcgcccu

SEQ ID NO: 134117 - RNA, 22 nt, Human
cggccccagaaagaaagcgggg

SEQ ID NO: 134118 - RNA, 22 nt, Human
cggcgcuccugaugcggagagg

SEQ ID NO: 134119 - RNA, 23 nt, Human
cggcggcacccgagacgcgcgcc

SEQ ID NO: 134120 - RNA, 20 nt, Human
cggcuuccgcgucgggaccc

SEQ ID NO: 134121 - RNA, 22 nt, Human
uaaaaauguaucaaauugcuau

SEQ ID NO: 134122 - RNA, 19 nt, Human
uagucaauuccuacacucc

SEQ ID NO: 134123 - RNA, 20 nt, Human
ugaauacagacccucaacaa

SEQ ID NO: 134124 - RNA, 24 nt, Human
ugcggccauguccuggcugggagc

SEQ ID NO: 134125 - RNA, 19 nt, Human
uggugguggaagcgguugc

SEQ ID NO: 134126 - RNA, 18 nt, Human
uuuuuuuuuuuuuuuucg

SEQ ID NO: 134127 - RNA, 18 nt, Human
aauucaguccuagaaauu

SEQ ID NO: 134128 - RNA, 22 nt, Human
acuuuucuguaucagagaaaag

SEQ ID NO: 134129 - RNA, 22 nt, Human
agaauauccuguucaggaaugu

SEQ ID NO: 134130 - RNA, 24 nt, Human
agacauuugaaucauaucugaaug

SEQ ID NO: 134131 - RNA, 21 nt, Human
caccuccgcuggggcuccgcc

SEQ ID NO: 134132 - RNA, 19 nt, Human
cauaucaaauucuagcucc

SEQ ID NO: 134133 - RNA, 18 nt, Human
ccgcuggggcuccgccgu

SEQ ID NO: 134134 - RNA, 21 nt, Human
ccgcuggggcuccgccguccg

SEQ ID NO: 134135 - RNA, 23 nt, Human
ccucuucaacacaaaugcuaccc

SEQ ID NO: 134136 - RNA, 18 nt, Human
cuaccccuaaaaugaaag

SEQ ID NO: 134137 - RNA, 23 nt, Human
cuguauuuuccuuuccgccaaua

SEQ ID NO: 134138 - RNA, 20 nt, Human
cuucaaacacaacuguucac

SEQ ID NO: 134139 - RNA, 20 nt, Human
gaaauucuuggagcugugag

SEQ ID NO: 134140 - RNA, 20 nt, Human
gagaaaagagcuauuuaaau

SEQ ID NO: 134141 - RNA, 18 nt, Human
gaguugacggagauauuc

SEQ ID NO: 134142 - RNA, 24 nt, Human
uagaaauucuuggagcugugagaa

SEQ ID NO: 134143 - RNA, 25 nt, Human
uauaagaguauuccauuuuguccaa

SEQ ID NO: 134144 - RNA, 25 nt, Human
ucaggaaugugacuucuacaaaagc

SEQ ID NO: 134145 - RNA, 19 nt, Human
uccaaugugaaaaccaaau

SEQ ID NO: 134146 - RNA, 25 nt, Human
uccaaugugaaaaccaaauuaaaaa

SEQ ID NO: 134147 - RNA, 18 nt, Human
uccgccaaggucuccccu

SEQ ID NO: 134148 - RNA, 21 nt, Human
uccgccaaggucuccccuccc

SEQ ID NO: 134149 - RNA, 23 nt, Human
ucuuucaugaacagcaugaaaau

SEQ ID NO: 134150 - RNA, 26 nt, Human
ugaacagcaugaaaauaugaguugaa

SEQ ID NO: 134151 - RNA, 24 nt, Human
ugacugacuuguuuccaauguugu

SEQ ID NO: 134152 - RNA, 22 nt, Human
ugacuucuacaaaagcucccuc

SEQ ID NO: 134153 - RNA, 22 nt, Human
ugcuucaaacacaacuguucac

SEQ ID NO: 134154 - RNA, 21 nt, Human
ugguuuauagacauuugaauc

SEQ ID NO: 134155 - RNA, 21 nt, Human
uguccaaaccuauuaaauacc

SEQ ID NO: 134156 - RNA, 23 nt, Human
uucaguccuagaaauucuuggag

SEQ ID NO: 134157 - RNA, 25 nt, Human
aaaccugcaacgcgauggagguugg

SEQ ID NO: 134158 - RNA, 25 nt, Human
aaaccugcaacgcgauggagguugg

SEQ ID NO: 134159 - RNA, 22 nt, Human
aacaccaucucucucucuccac

SEQ ID NO: 134160 - RNA, 22 nt, Human
aacaccaucucucucucuccac

SEQ ID NO: 134161 - RNA, 20 nt, Human
aacauguaucucucaucaua

SEQ ID NO: 134162 - RNA, 22 nt, Human
aacccaacucagccaagugcug

SEQ ID NO: 134163 - RNA, 20 nt, Human
aagcagcuccuuucccgugg

SEQ ID NO: 134164 - RNA, 20 nt, Human
aagcagcuccuuucccgugg

SEQ ID NO: 134165 - RNA, 21 nt, Human
acaaaaugagcugcuucaccc

SEQ ID NO: 134166 - RNA, 20 nt, Human
acaccacugcguuccagcag

SEQ ID NO: 134167 - RNA, 22 nt, Human
acacccagagcggaggaagcca

SEQ ID NO: 134168 - RNA, 21 nt, Human
acagcccgcaggggcaccacc

SEQ ID NO: 134169 - RNA, 21 nt, Human
acagcccgcaggggcaccacc

SEQ ID NO: 134170 - RNA, 22 nt, Human
acagguggccggagggcacccc

SEQ ID NO: 134171 - RNA, 22 nt, Human
acagguggccggagggcacccc

SEQ ID NO: 134172 - RNA, 19 nt, Human
accgcaaaguccugcaggc

SEQ ID NO: 134173 - RNA, 19 nt, Human
acuaacaauggccccggag

SEQ ID NO: 134174 - RNA, 20 nt, Human
acucagcaccccagagcagg

SEQ ID NO: 134175 - RNA, 20 nt, Human
acucagcaccccagagcagg

SEQ ID NO: 134176 - RNA, 20 nt, Human
acucagcaccccagagcagg

SEQ ID NO: 134177 - RNA, 20 nt, Human
agacccugaaggccacagcg

SEQ ID NO: 134178 - RNA, 20 nt, Human
agacccugaaggccacagcg

SEQ ID NO: 134179 - RNA, 23 nt, Human
agagaaccuggaaagguucuacc

SEQ ID NO: 134180 - RNA, 23 nt, Human
agagaaccuggaaagguucuacc

SEQ ID NO: 134181 - RNA, 20 nt, Human
agccaggacucaggggccug

SEQ ID NO: 134182 - RNA, 27 nt, Human
agccucagggcuggugaggcaacaugu

SEQ ID NO: 134183 - RNA, 27 nt, Human
agccucagggcuggugaggcaacaugu

SEQ ID NO: 134184 - RNA, 18 nt, Human
agccuuggccccggagcc

SEQ ID NO: 134185 - RNA, 18 nt, Human
agccuuggccccggagcc

SEQ ID NO: 134186 - RNA, 20 nt, Human
agcggaggaagccagccaag

SEQ ID NO: 134187 - RNA, 24 nt, Human
agcugguggagagcugcagcucag

SEQ ID NO: 134188 - RNA, 24 nt, Human
agcugguggagagcugcagcucag

SEQ ID NO: 134189 - RNA, 18 nt, Human
aggaacacaggugggggg

SEQ ID NO: 134190 - RNA, 25 nt, Human
aggaauucuuccuccccuuagcccu

SEQ ID NO: 134191 - RNA, 18 nt, Human
aggaggugguccucaggg

SEQ ID NO: 134192 - RNA, 18 nt, Human
aggaggugguccucaggg

SEQ ID NO: 134193 - RNA, 23 nt, Human
aggcaaacacagugcccugaaaa

SEQ ID NO: 134194 - RNA, 25 nt, Human
aggcaaacacagugcccugaaaaca

SEQ ID NO: 134195 - RNA, 20 nt, Human
agggagggccagauggguca

SEQ ID NO: 134196 - RNA, 20 nt, Human
agggagggccagauggguca

SEQ ID NO: 134197 - RNA, 22 nt, Human
agggguaucagggcacacaagc

SEQ ID NO: 134198 - RNA, 22 nt, Human
agggguaucagggcacacaagc

SEQ ID NO: 134199 - RNA, 18 nt, Human
agguagagauuucuaacc

SEQ ID NO: 134200 - RNA, 18 nt, Human
agguagagauuucuaacc

SEQ ID NO: 134201 - RNA, 18 nt, Human
aguaggaggagugcccca

SEQ ID NO: 134202 - RNA, 22 nt, Human
aguaggaggagugccccaggcu

SEQ ID NO: 134203 - RNA, 21 nt, Human
agucgcugaucuucccccaca

SEQ ID NO: 134204 - RNA, 21 nt, Human
agucgcugaucuucccccaca

SEQ ID NO: 134205 - RNA, 23 nt, Human
auaaaacaccagcagcuccacca

SEQ ID NO: 134206 - RNA, 18 nt, Human
aucccaauguaguucucc

SEQ ID NO: 134207 - RNA, 21 nt, Human
augcgccauguggcugggagc

SEQ ID NO: 134208 - RNA, 24 nt, Human
auguuuuuucuccagcuggggccu

SEQ ID NO: 134209 - RNA, 22 nt, Human
auugaggaacacaggugggggg

SEQ ID NO: 134210 - RNA, 22 nt, Human
caaaaugagcugcuucacccug

SEQ ID NO: 134211 - RNA, 20 nt, Human
caaagccccucaacgugucc

SEQ ID NO: 134212 - RNA, 22 nt, Human
caacauguaucucucaucauaa

SEQ ID NO: 134213 - RNA, 19 nt, Human
caacgaggcagcuggaugc

SEQ ID NO: 134214 - RNA, 21 nt, Human
caagugcuggccugggcagga

SEQ ID NO: 134215 - RNA, 18 nt, Human
caauggccccggagcauc

SEQ ID NO: 134216 - RNA, 18 nt, Human
caaugugguggucucugc

SEQ ID NO: 134217 - RNA, 18 nt, Human
caaugugguggucucugc

SEQ ID NO: 134218 - RNA, 18 nt, Human
caaugugguggucucugc

SEQ ID NO: 134219 - RNA, 18 nt, Human
cacagcccgcaggggcac

SEQ ID NO: 134220 - RNA, 24 nt, Human
cacaucuuaaaagccuucuucaca

SEQ ID NO: 134221 - RNA, 24 nt, Human
cacaucuuaaaagccuucuucaca

SEQ ID NO: 134222 - RNA, 21 nt, Human
caccacagcccgcaggggcac

SEQ ID NO: 134223 - RNA, 18 nt, Human
caccaccugcuuggggcu

SEQ ID NO: 134224 - RNA, 18 nt, Human
caccaccugcuuggggcu

SEQ ID NO: 134225 - RNA, 22 nt, Human
caccagcucacucagcacccca

SEQ ID NO: 134226 - RNA, 22 nt, Human
caccagcucacucagcacccca

SEQ ID NO: 134227 - RNA, 22 nt, Human
caccagcucacucagcacccca

SEQ ID NO: 134228 - RNA, 19 nt, Human
caccauaggggugaaggag

SEQ ID NO: 134229 - RNA, 19 nt, Human
caccauaggggugaaggag

SEQ ID NO: 134230 - RNA, 18 nt, Human
caccaucucucucucucc

SEQ ID NO: 134231 - RNA, 18 nt, Human
caccaucucucucucucc

SEQ ID NO: 134232 - RNA, 18 nt, Human
cacccugcacaccaggug

SEQ ID NO: 134233 - RNA, 24 nt, Human
caccgagcacaccuuccaccacca

SEQ ID NO: 134234 - RNA, 24 nt, Human
caccgagcacaccuuccaccacca

SEQ ID NO: 134235 - RNA, 23 nt, Human
cagcggccuuggcuggcuccucc

SEQ ID NO: 134236 - RNA, 23 nt, Human
cagcggccuuggcuggcuccucc

SEQ ID NO: 134237 - RNA, 18 nt, Human
cagcucacucagcacccc

SEQ ID NO: 134238 - RNA, 22 nt, Human
cagcucaggcacggccaccaca

SEQ ID NO: 134239 - RNA, 22 nt, Human
cagcucaggcacggccaccaca

SEQ ID NO: 134240 - RNA, 18 nt, Human
cagcuccuuucccguggg

SEQ ID NO: 134241 - RNA, 18 nt, Human
cagcuccuuucccguggg

SEQ ID NO: 134242 - RNA, 19 nt, Human
caggagcucugugguccug

SEQ ID NO: 134243 - RNA, 19 nt, Human
caggagcucugugguccug

SEQ ID NO: 134244 - RNA, 20 nt, Human
caggggccugucucagcugg

SEQ ID NO: 134245 - RNA, 18 nt, Human
cagugcagggccuccaag

SEQ ID NO: 134246 - RNA, 18 nt, Human
cagugcagggccuccaag

SEQ ID NO: 134247 - RNA, 24 nt, Human
cauaaaacaccagcagcuccacca

SEQ ID NO: 134248 - RNA, 22 nt, Human
cauguggcugggagcuggcuga

SEQ ID NO: 134249 - RNA, 22 nt, Human
cauguggcugggagcuggcuga

SEQ ID NO: 134250 - RNA, 21 nt, Human
cauuccaggagcugcccagag

SEQ ID NO: 134251 - RNA, 21 nt, Human
cauuccaggagcugcccagag

SEQ ID NO: 134252 - RNA, 25 nt, Human
ccacccagcugguggagagcugcag

SEQ ID NO: 134253 - RNA, 25 nt, Human
ccacccagcugguggagagcugcag

SEQ ID NO: 134254 - RNA, 22 nt, Human
ccacccuauugcuggcacugga

SEQ ID NO: 134255 - RNA, 22 nt, Human
ccacccuauugcuggcacugga

SEQ ID NO: 134256 - RNA, 19 nt, Human
ccagcaggccauguuuggg

SEQ ID NO: 134257 - RNA, 19 nt, Human
ccagcaggccauguuuggg

SEQ ID NO: 134258 - RNA, 22 nt, Human
ccagccaagggucuugcugcag

SEQ ID NO: 134259 - RNA, 19 nt, Human
cccacagggcuucccucca

SEQ ID NO: 134260 - RNA, 19 nt, Human
cccaccgugcagaugaggu

SEQ ID NO: 134261 - RNA, 19 nt, Human
cccaccgugcagaugaggu

SEQ ID NO: 134262 - RNA, 24 nt, Human
cccagaaaugccuagaaccagggu

SEQ ID NO: 134263 - RNA, 24 nt, Human
cccagaaaugccuagaaccagggu

SEQ ID NO: 134264 - RNA, 22 nt, Human
cccagcuguggcuucaguguga

SEQ ID NO: 134265 - RNA, 18 nt, Human
cccaguacucgccccaca

SEQ ID NO: 134266 - RNA, 18 nt, Human
cccaguacucgccccaca

SEQ ID NO: 134267 - RNA, 24 nt, Human
ccccagagagugaagcuggccacu

SEQ ID NO: 134268 - RNA, 24 nt, Human
ccccagagagugaagcuggccacu

SEQ ID NO: 134269 - RNA, 20 nt, Human
ccccaggcggagcagaccaa

SEQ ID NO: 134270 - RNA, 20 nt, Human
ccccaggcggagcagaccaa

SEQ ID NO: 134271 - RNA, 18 nt, Human
ccccugugccgggcucca

SEQ ID NO: 134272 - RNA, 20 nt, Human
ccccugugccgggcuccacu

SEQ ID NO: 134273 - RNA, 20 nt, Human
ccccugugccgggcuccacu

SEQ ID NO: 134274 - RNA, 20 nt, Human
cccugcugccuccuucuucc

SEQ ID NO: 134275 - RNA, 21 nt, Human
cccugugccgggcuccacuuc

SEQ ID NO: 134276 - RNA, 21 nt, Human
cccugugccgggcuccacuuc

SEQ ID NO: 134277 - RNA, 20 nt, Human
cccuuuccaccuugcugucc

SEQ ID NO: 134278 - RNA, 20 nt, Human
cccuuuccaccuugcugucc

SEQ ID NO: 134279 - RNA, 23 nt, Human
ccggagcauccuuuucaugccca

SEQ ID NO: 134280 - RNA, 23 nt, Human
ccucacuugggcccagcaggcca

SEQ ID NO: 134281 - RNA, 22 nt, Human
ccucagcugcaaggcaaacaca

SEQ ID NO: 134282 - RNA, 18 nt, Human
ccuccuucuucccuuccu

SEQ ID NO: 134283 - RNA, 20 nt, Human
ccucggugggcccagcugug

SEQ ID NO: 134284 - RNA, 18 nt, Human
ccugcaccucacucucuc

SEQ ID NO: 134285 - RNA, 19 nt, Human
ccugugcuuggagcaccag

SEQ ID NO: 134286 - RNA, 23 nt, Human
ccuuccaccaccaucguggacuc

SEQ ID NO: 134287 - RNA, 23 nt, Human
ccuuccaccaccaucguggacuc

SEQ ID NO: 134288 - RNA, 23 nt, Human
ccuucugaaaacccaggguugcu

SEQ ID NO: 134289 - RNA, 23 nt, Human
ccuugugcaggaucucagggcug

SEQ ID NO: 134290 - RNA, 23 nt, Human
ccuugugcaggaucucagggcug

SEQ ID NO: 134291 - RNA, 19 nt, Human
cgaagcaccacacccuccc

SEQ ID NO: 134292 - RNA, 22 nt, Human
cgaagcaccacacccucccagg

SEQ ID NO: 134293 - RNA, 22 nt, Human
cgccccacauguuggcacagcc

SEQ ID NO: 134294 - RNA, 22 nt, Human
cgccccacauguuggcacagcc

SEQ ID NO: 134295 - RNA, 25 nt, Human
cgcugagccaaaguccaggcggagc

SEQ ID NO: 134296 - RNA, 22 nt, Human
cguggcccacagggcuucccuc

SEQ ID NO: 134297 - RNA, 21 nt, Human
cuagcaccaucuggagcacac

SEQ ID NO: 134298 - RNA, 21 nt, Human
cuagcaccaucuggagcacac

SEQ ID NO: 134299 - RNA, 19 nt, Human
cuccuccucacacuccugc

SEQ ID NO: 134300 - RNA, 19 nt, Human
cuccuccucacacuccugc

SEQ ID NO: 134301 - RNA, 18 nt, Human
cucgcacucugcugaaug

SEQ ID NO: 134302 - RNA, 18 nt, Human
cucgcacucugcugaaug

SEQ ID NO: 134303 - RNA, 22 nt, Human
cucuccauaaaauccagcugcu

SEQ ID NO: 134304 - RNA, 22 nt, Human
cucuccauaaaauccagcugcu

SEQ ID NO: 134305 - RNA, 25 nt, Human
cucucuccacucgcacucugcugaa

SEQ ID NO: 134306 - RNA, 25 nt, Human
cucucuccacucgcacucugcugaa

SEQ ID NO: 134307 - RNA, 18 nt, Human
cucugcugugguguggcc

SEQ ID NO: 134308 - RNA, 18 nt, Human
cucugcugugguguggcc

SEQ ID NO: 134309 - RNA, 18 nt, Human
cucugcugugguguggcc

SEQ ID NO: 134310 - RNA, 25 nt, Human
cucugugcugcaaucagagcucucc

SEQ ID NO: 134311 - RNA, 25 nt, Human
cucugugcugcaaucagagcucucc

SEQ ID NO: 134312 - RNA, 20 nt, Human
cugccuccuucuucccuucc

SEQ ID NO: 134313 - RNA, 21 nt, Human
cugcuccuaaucccugggcaa

SEQ ID NO: 134314 - RNA, 21 nt, Human
cugcuccuaaucccugggcaa

SEQ ID NO: 134315 - RNA, 23 nt, Human
cugcucuguagguacacaugggg

SEQ ID NO: 134316 - RNA, 23 nt, Human
cugcucuguagguacacaugggg

SEQ ID NO: 134317 - RNA, 26 nt, Human
cugggccugggugcaagaagcaaagg

SEQ ID NO: 134318 - RNA, 22 nt, Human
cuuaguggcugugguuuuuuuc

SEQ ID NO: 134319 - RNA, 21 nt, Human
cuucucaccgagcacaccuuc

SEQ ID NO: 134320 - RNA, 21 nt, Human
cuucucaccgagcacaccuuc

SEQ ID NO: 134321 - RNA, 22 nt, Human
cuuugugcugaagagcugcucc

SEQ ID NO: 134322 - RNA, 22 nt, Human
cuuugugcugaagagcugcucc

SEQ ID NO: 134323 - RNA, 19 nt, Human
gacaaagccccucaacgug

SEQ ID NO: 134324 - RNA, 22 nt, Human
gagaaacggagaagggccugga

SEQ ID NO: 134325 - RNA, 20 nt, Human
gaggaacacagguggggggu

SEQ ID NO: 134326 - RNA, 22 nt, Human
gaggaacacagguggggggucu

SEQ ID NO: 134327 - RNA, 22 nt, Human
gaggcugucuccuccucacacu

SEQ ID NO: 134328 - RNA, 22 nt, Human
gaggcugucuccuccucacacu

SEQ ID NO: 134329 - RNA, 19 nt, Human
gagggcuggggcggagccu

SEQ ID NO: 134330 - RNA, 19 nt, Human
gagggcuggggcggagccu

SEQ ID NO: 134331 - RNA, 21 nt, Human
gaguaggaggagugccccagg

SEQ ID NO: 134332 - RNA, 21 nt, Human
gaguaggaggagugccccagg

SEQ ID NO: 134333 - RNA, 19 nt, Human
gcaauguuuuuucuccagc

SEQ ID NO: 134334 - RNA, 19 nt, Human
gcaauguuuuuucuccagc

SEQ ID NO: 134335 - RNA, 20 nt, Human
gcaccauuuuccaccuccag

SEQ ID NO: 134336 - RNA, 20 nt, Human
gcaccauuuuccaccuccag

SEQ ID NO: 134337 - RNA, 20 nt, Human
gcagcccacuguuuggggag

SEQ ID NO: 134338 - RNA, 20 nt, Human
gcagcccacuguuuggggag

SEQ ID NO: 134339 - RNA, 24 nt, Human
gcaggaugacugagaugagcuucu

SEQ ID NO: 134340 - RNA, 24 nt, Human
gcaggaugacugagaugagcuucu

SEQ ID NO: 134341 - RNA, 18 nt, Human
gcauggcaggaauucuuc

SEQ ID NO: 134342 - RNA, 21 nt, Human
gccagcgcugugcuaaccugg

SEQ ID NO: 134343 - RNA, 22 nt, Human
gccccacauguuggcacagccu

SEQ ID NO: 134344 - RNA, 22 nt, Human
gccccacauguuggcacagccu

SEQ ID NO: 134345 - RNA, 20 nt, Human
gccuaggcugagaccauugu

SEQ ID NO: 134346 - RNA, 20 nt, Human
gccuaggcugagaccauugu

SEQ ID NO: 134347 - RNA, 20 nt, Human
gccugggcaggauagcaccu

SEQ ID NO: 134348 - RNA, 21 nt, Human
gccugggcaggauagcaccuc

SEQ ID NO: 134349 - RNA, 19 nt, Human
gcgccauguggcugggagc

SEQ ID NO: 134350 - RNA, 25 nt, Human
gcgugccauugauaagugugauggu

SEQ ID NO: 134351 - RNA, 25 nt, Human
gcgugccauugauaagugugauggu

SEQ ID NO: 134352 - RNA, 26 nt, Human
gcugcucuguagguacacauggggcc

SEQ ID NO: 134353 - RNA, 21 nt, Human
gcugucuccuccucacacucc

SEQ ID NO: 134354 - RNA, 21 nt, Human
gcugucuccuccucacacucc

SEQ ID NO: 134355 - RNA, 21 nt, Human
gcuguuuugggggcucccgaa

SEQ ID NO: 134356 - RNA, 21 nt, Human
gcuguuuugggggcucccgaa

SEQ ID NO: 134357 - RNA, 21 nt, Human
ggagacacccagagcggagga

SEQ ID NO: 134358 - RNA, 23 nt, Human
ggagugccccaggcucuccgcuu

SEQ ID NO: 134359 - RNA, 23 nt, Human
ggaugcugggaccagaggcagga

SEQ ID NO: 134360 - RNA, 20 nt, Human
ggcaccaccugaguggucug

SEQ ID NO: 134361 - RNA, 20 nt, Human
ggcaccaccugaguggucug

SEQ ID NO: 134362 - RNA, 20 nt, Human
ggcacccccucaugugccuu

SEQ ID NO: 134363 - RNA, 18 nt, Human
ggcaggaggcauguuggg

SEQ ID NO: 134364 - RNA, 18 nt, Human
ggcaggaggcauguuggg

SEQ ID NO: 134365 - RNA, 19 nt, Human
ggccagggccaggagcucu

SEQ ID NO: 134366 - RNA, 19 nt, Human
ggccagggccaggagcucu

SEQ ID NO: 134367 - RNA, 20 nt, Human
ggccagggccaggagcucug

SEQ ID NO: 134368 - RNA, 20 nt, Human
ggccagggccaggagcucug

SEQ ID NO: 134369 - RNA, 18 nt, Human
ggccuggggaccagagga

SEQ ID NO: 134370 - RNA, 18 nt, Human
ggccuggggaccagagga

SEQ ID NO: 134371 - RNA, 18 nt, Human
ggcuggaguuauucaggc

SEQ ID NO: 134372 - RNA, 18 nt, Human
ggcuggaguuauucaggc

SEQ ID NO: 134373 - RNA, 19 nt, Human
gggccagggacacccccag

SEQ ID NO: 134374 - RNA, 25 nt, Human
gggccuggggcugagggcuggggcg

SEQ ID NO: 134375 - RNA, 25 nt, Human
gggccuggggcugagggcuggggcg

SEQ ID NO: 134376 - RNA, 21 nt, Human
gggcuggggcggagccucagg

SEQ ID NO: 134377 - RNA, 21 nt, Human
gggcuggggcggagccucagg

SEQ ID NO: 134378 - RNA, 19 nt, Human
ggggccuggggcugagggc

SEQ ID NO: 134379 - RNA, 19 nt, Human
ggggccuggggcugagggc

SEQ ID NO: 134380 - RNA, 19 nt, Human
ggggcggagccucagggcu

SEQ ID NO: 134381 - RNA, 24 nt, Human
gguagggccccagcaugcccuggg

SEQ ID NO: 134382 - RNA, 24 nt, Human
gguagggccccagcaugcccuggg

SEQ ID NO: 134383 - RNA, 27 nt, Human
ggucaccagcucacucagcaccccaga

SEQ ID NO: 134384 - RNA, 27 nt, Human
ggucaccagcucacucagcaccccaga

SEQ ID NO: 134385 - RNA, 27 nt, Human
ggucaccagcucacucagcaccccaga

SEQ ID NO: 134386 - RNA, 21 nt, Human
ggucagcuucagguggugggu

SEQ ID NO: 134387 - RNA, 21 nt, Human
ggucagcuucagguggugggu

SEQ ID NO: 134388 - RNA, 21 nt, Human
ggucagcuucagguggugggu

SEQ ID NO: 134389 - RNA, 20 nt, Human
ggugcauuggcggaucgugc

SEQ ID NO: 134390 - RNA, 20 nt, Human
ggugcauuggcggaucgugc

SEQ ID NO: 134391 - RNA, 20 nt, Human
guagccaguacacuccaccu

SEQ ID NO: 134392 - RNA, 20 nt, Human
guagccaguacacuccaccu

SEQ ID NO: 134393 - RNA, 20 nt, Human
guccuggcuuguggggccag

SEQ ID NO: 134394 - RNA, 20 nt, Human
guccuggcuuguggggccag

SEQ ID NO: 134395 - RNA, 22 nt, Human
gugcaggaucucagggcugagc

SEQ ID NO: 134396 - RNA, 22 nt, Human
gugcaggaucucagggcugagc

SEQ ID NO: 134397 - RNA, 22 nt, Human
gugggcccagcuguggcuucag

SEQ ID NO: 134398 - RNA, 22 nt, Human
guguaggaggugguccucaggg

SEQ ID NO: 134399 - RNA, 23 nt, Human
guguaggaggugguccucaggga

SEQ ID NO: 134400 - RNA, 20 nt, Human
guguuggucagcuucaggug

SEQ ID NO: 134401 - RNA, 20 nt, Human
guguuggucagcuucaggug

SEQ ID NO: 134402 - RNA, 20 nt, Human
uaaaacaccagcagcuccac

SEQ ID NO: 134403 - RNA, 20 nt, Human
uaaaacaccagcagcuccac

SEQ ID NO: 134404 - RNA, 23 nt, Human
uaaauacaugauccaaccaugug

SEQ ID NO: 134405 - RNA, 19 nt, Human
uacuggucuucgcuaugca

SEQ ID NO: 134406 - RNA, 23 nt, Human
uagacaugugggagacacccaga

SEQ ID NO: 134407 - RNA, 20 nt, Human
uagcucugaggacaaaucau

SEQ ID NO: 134408 - RNA, 20 nt, Human
uagcucugaggacaaaucau

SEQ ID NO: 134409 - RNA, 20 nt, Human
uaggaggugguccucaggga

SEQ ID NO: 134410 - RNA, 20 nt, Human
uaggaggugguccucaggga

SEQ ID NO: 134411 - RNA, 19 nt, Human
uaucccaauguaguucucc

SEQ ID NO: 134412 - RNA, 23 nt, Human
uauuggggagcgauuggugagaa

SEQ ID NO: 134413 - RNA, 23 nt, Human
uauuggggagcgauuggugagaa

SEQ ID NO: 134414 - RNA, 23 nt, Human
ucagcucuuccuggguaugagca

SEQ ID NO: 134415 - RNA, 23 nt, Human
ucagcucuuccuggguaugagca

SEQ ID NO: 134416 - RNA, 20 nt, Human
ucagggagcugauggggcag

SEQ ID NO: 134417 - RNA, 20 nt, Human
ucagggagcugauggggcag

SEQ ID NO: 134418 - RNA, 20 nt, Human
uccaagcucaugaaacccag

SEQ ID NO: 134419 - RNA, 20 nt, Human
uccaagcucaugaaacccag

SEQ ID NO: 134420 - RNA, 23 nt, Human
uccacccugcacucccccagaga

SEQ ID NO: 134421 - RNA, 23 nt, Human
uccacccugcacucccccagaga

SEQ ID NO: 134422 - RNA, 19 nt, Human
uccauaaaauccagcugcu

SEQ ID NO: 134423 - RNA, 19 nt, Human
uccauaaaauccagcugcu

SEQ ID NO: 134424 - RNA, 21 nt, Human
ucccaaaguccacccagcugg

SEQ ID NO: 134425 - RNA, 21 nt, Human
ucccaaaguccacccagcugg

SEQ ID NO: 134426 - RNA, 20 nt, Human
ucccagaaaugccuagaacc

SEQ ID NO: 134427 - RNA, 20 nt, Human
ucccagaaaugccuagaacc

SEQ ID NO: 134428 - RNA, 22 nt, Human
ucccagaaaugccuagaaccag

SEQ ID NO: 134429 - RNA, 22 nt, Human
ucccagaaaugccuagaaccag

SEQ ID NO: 134430 - RNA, 23 nt, Human
uccccgaccucacugggcucuau

SEQ ID NO: 134431 - RNA, 21 nt, Human
uccguggaaucucccuuucca

SEQ ID NO: 134432 - RNA, 21 nt, Human
uccguggaaucucccuuucca

SEQ ID NO: 134433 - RNA, 24 nt, Human
uccucacuugggcccagcaggcca

SEQ ID NO: 134434 - RNA, 20 nt, Human
uccugugcuuggagcaccag

SEQ ID NO: 134435 - RNA, 19 nt, Human
uccuuaggaaaagugaagg

SEQ ID NO: 134436 - RNA, 25 nt, Human
uccuuuggguggccuggccacugcu

SEQ ID NO: 134437 - RNA, 25 nt, Human
uccuuuggguggccuggccacugcu

SEQ ID NO: 134438 - RNA, 23 nt, Human
ucgcugcuggcucacaaagcagg

SEQ ID NO: 134439 - RNA, 23 nt, Human
ucgcugcuggcucacaaagcagg

SEQ ID NO: 134440 - RNA, 21 nt, Human
ucuccagcuggggccuggggc

SEQ ID NO: 134441 - RNA, 21 nt, Human
ucuccagcuggggccuggggc

SEQ ID NO: 134442 - RNA, 23 nt, Human
ucucccuuuccaccuugcugucc

SEQ ID NO: 134443 - RNA, 22 nt, Human
ucuggagcacacugugaaaauc

SEQ ID NO: 134444 - RNA, 22 nt, Human
ucuggagcacacugugaaaauc

SEQ ID NO: 134445 - RNA, 24 nt, Human
ucuggccagggccaggagcucugu

SEQ ID NO: 134446 - RNA, 24 nt, Human
ucuggccagggccaggagcucugu

SEQ ID NO: 134447 - RNA, 24 nt, Human
ucuguaccucagcauacacaggaa

SEQ ID NO: 134448 - RNA, 24 nt, Human
ucuguaccucagcauacacaggaa

SEQ ID NO: 134449 - RNA, 24 nt, Human
ucuucgauuucacacagcaggucc

SEQ ID NO: 134450 - RNA, 24 nt, Human
ucuucgauuucacacagcaggucc

SEQ ID NO: 134451 - RNA, 21 nt, Human
ucuuuagcagggcaggaggcc

SEQ ID NO: 134452 - RNA, 21 nt, Human
ucuuuagcagggcaggaggcc

SEQ ID NO: 134453 - RNA, 21 nt, Human
ugaaaacaccacugcguucca

SEQ ID NO: 134454 - RNA, 20 nt, Human
ugacaagggagggccagaug

SEQ ID NO: 134455 - RNA, 20 nt, Human
ugacaagggagggccagaug

SEQ ID NO: 134456 - RNA, 23 nt, Human
ugacuuccggcagcaggucuccc

SEQ ID NO: 134457 - RNA, 23 nt, Human
ugacuuccggcagcaggucuccc

SEQ ID NO: 134458 - RNA, 18 nt, Human
ugaggacaaaucaugagg

SEQ ID NO: 134459 - RNA, 18 nt, Human
ugaggacaaaucaugagg

SEQ ID NO: 134460 - RNA, 21 nt, Human
ugaggucacuggccuggcacu

SEQ ID NO: 134461 - RNA, 21 nt, Human
ugaggucacuggccuggcacu

SEQ ID NO: 134462 - RNA, 21 nt, Human
ugaggucacuggccuggcacu

SEQ ID NO: 134463 - RNA, 21 nt, Human
ugaguaaacaccaucucucuc

SEQ ID NO: 134464 - RNA, 21 nt, Human
ugaguaaacaccaucucucuc

SEQ ID NO: 134465 - RNA, 21 nt, Human
ugauguccacccugcacuccc

SEQ ID NO: 134466 - RNA, 21 nt, Human
ugauguccacccugcacuccc

SEQ ID NO: 134467 - RNA, 20 nt, Human
ugcaagaagcaaaggccuuc

SEQ ID NO: 134468 - RNA, 19 nt, Human
ugcacagcugcugguaggg

SEQ ID NO: 134469 - RNA, 19 nt, Human
ugcacagcugcugguaggg

SEQ ID NO: 134470 - RNA, 24 nt, Human
ugccacccuauugcuggcacugga

SEQ ID NO: 134471 - RNA, 20 nt, Human
ugccuagaaccaguggcuuc

SEQ ID NO: 134472 - RNA, 20 nt, Human
ugccuagaaccaguggcuuc

SEQ ID NO: 134473 - RNA, 21 nt, Human
ugcucaggcuguuuugggggc

SEQ ID NO: 134474 - RNA, 22 nt, Human
ugcucgggaaugaggucacugg

SEQ ID NO: 134475 - RNA, 22 nt, Human
ugcucgggaaugaggucacugg

SEQ ID NO: 134476 - RNA, 22 nt, Human
ugcucgggaaugaggucacugg

SEQ ID NO: 134477 - RNA, 22 nt, Human
ugcucugugcugcaaucaggac

SEQ ID NO: 134478 - RNA, 22 nt, Human
ugcucugugcugcaaucaggac

SEQ ID NO: 134479 - RNA, 21 nt, Human
ugcugccuccuucuucccuuc

SEQ ID NO: 134480 - RNA, 19 nt, Human
ugcuucccugcugccuccu

SEQ ID NO: 134481 - RNA, 25 nt, Human
uggaacauaggucucccaauccagg

SEQ ID NO: 134482 - RNA, 25 nt, Human
uggaacauaggucucccaauccagg

SEQ ID NO: 134483 - RNA, 22 nt, Human
uggagaaggcuggggcauggca

SEQ ID NO: 134484 - RNA, 19 nt, Human
uggagggagacugggcucu

SEQ ID NO: 134485 - RNA, 19 nt, Human
uggagggagacugggcucu

SEQ ID NO: 134486 - RNA, 24 nt, Human
uggaguuuguggcuuucugcccca

SEQ ID NO: 134487 - RNA, 24 nt, Human
uggaguuuguggcuuucugcccca

SEQ ID NO: 134488 - RNA, 18 nt, Human
uggccagggccaggagcu

SEQ ID NO: 134489 - RNA, 18 nt, Human
uggccagggccaggagcu

SEQ ID NO: 134490 - RNA, 20 nt, Human
uggcccacagggcuucccuc

SEQ ID NO: 134491 - RNA, 19 nt, Human
uggccccggagccgcaggg

SEQ ID NO: 134492 - RNA, 19 nt, Human
uggccccggagccgcaggg

SEQ ID NO: 134493 - RNA, 22 nt, Human
uggcccucgggucccugcaccu

SEQ ID NO: 134494 - RNA, 19 nt, Human
uggccuggccacugcucug

SEQ ID NO: 134495 - RNA, 19 nt, Human
uggccuggccacugcucug

SEQ ID NO: 134496 - RNA, 18 nt, Human
uggcgagggcgagucuuc

SEQ ID NO: 134497 - RNA, 18 nt, Human
uggcgagggcgagucuuc

SEQ ID NO: 134498 - RNA, 18 nt, Human
ugggaaggcuggucuuuu

SEQ ID NO: 134499 - RNA, 21 nt, Human
ugggaaggcuggucuuuuugc

SEQ ID NO: 134500 - RNA, 21 nt, Human
ugggagcuucugauaggagag

SEQ ID NO: 134501 - RNA, 21 nt, Human
ugggagcuucugauaggagag

SEQ ID NO: 134502 - RNA, 21 nt, Human
ugggcccagcuguggcuucag

SEQ ID NO: 134503 - RNA, 20 nt, Human
ugggcucuaugaccccugug

SEQ ID NO: 134504 - RNA, 20 nt, Human
ugggcucuaugaccccugug

SEQ ID NO: 134505 - RNA, 22 nt, Human
uggggccagggacacccccagu

SEQ ID NO: 134506 - RNA, 24 nt, Human
uggggccuggggcugagggcuggg

SEQ ID NO: 134507 - RNA, 24 nt, Human
uggggccuggggcugagggcuggg

SEQ ID NO: 134508 - RNA, 22 nt, Human
uggggcuucuguaccucagcau

SEQ ID NO: 134509 - RNA, 22 nt, Human
uggggcuucuguaccucagcau

SEQ ID NO: 134510 - RNA, 19 nt, Human
uggguaggcaggagcgugc

SEQ ID NO: 134511 - RNA, 19 nt, Human
uggguaggcaggagcgugc

SEQ ID NO: 134512 - RNA, 18 nt, Human
ugggucagcucuuccugg

SEQ ID NO: 134513 - RNA, 18 nt, Human
ugggucagcucuuccugg

SEQ ID NO: 134514 - RNA, 25 nt, Human
ugggugacuugcuguuguuccacau

SEQ ID NO: 134515 - RNA, 25 nt, Human
ugggugacuugcuguuguuccacau

SEQ ID NO: 134516 - RNA, 24 nt, Human
ugguauggguggggaugguaaugu

SEQ ID NO: 134517 - RNA, 25 nt, Human
ugguauggguggggaugguaauguu

SEQ ID NO: 134518 - RNA, 24 nt, Human
uggugaggcaacauguaucucuca

SEQ ID NO: 134519 - RNA, 24 nt, Human
uggugaggcaacauguaucucuca

SEQ ID NO: 134520 - RNA, 18 nt, Human
ugugaaaaucccucagcu

SEQ ID NO: 134521 - RNA, 18 nt, Human
ugugcuuggagcaccagc

SEQ ID NO: 134522 - RNA, 18 nt, Human
ugugcuuggagcaccagc

SEQ ID NO: 134523 - RNA, 19 nt, Human
uguggcugggagcuggcug

SEQ ID NO: 134524 - RNA, 19 nt, Human
uguggcugggagcuggcug

SEQ ID NO: 134525 - RNA, 24 nt, Human
ugugguggucucugcuguggugug

SEQ ID NO: 134526 - RNA, 24 nt, Human
ugugguggucucugcuguggugug

SEQ ID NO: 134527 - RNA, 24 nt, Human
ugugguggucucugcuguggugug

SEQ ID NO: 134528 - RNA, 21 nt, Human
ugugucuuugugcugaagagc

SEQ ID NO: 134529 - RNA, 21 nt, Human
ugugucuuugugcugaagagc

SEQ ID NO: 134530 - RNA, 18 nt, Human
uguugggaaggcuggucu

SEQ ID NO: 134531 - RNA, 18 nt, Human
uguugggaaggcuggucu

SEQ ID NO: 134532 - RNA, 21 nt, Human
uuaguggcugugguuuuuuuc

SEQ ID NO: 134533 - RNA, 18 nt, Human
uucaccucgauuuccagg

SEQ ID NO: 134534 - RNA, 22 nt, Human
uucaucagguagaccucccgga

SEQ ID NO: 134535 - RNA, 22 nt, Human
uucaucagguagaccucccgga

SEQ ID NO: 134536 - RNA, 18 nt, Human
uuccauuccaggagcugc

SEQ ID NO: 134537 - RNA, 18 nt, Human
uuccauuccaggagcugc

SEQ ID NO: 134538 - RNA, 20 nt, Human
uucuaaccuccaccuggcug

SEQ ID NO: 134539 - RNA, 20 nt, Human
uucuaaccuccaccuggcug

SEQ ID NO: 134540 - RNA, 21 nt, Human
uugcucaggcuguuuuggggg

SEQ ID NO: 134541 - RNA, 21 nt, Human
uugcucaggcuguuuuggggg

SEQ ID NO: 134542 - RNA, 19 nt, Human
uugcuucccugcugccucc

SEQ ID NO: 134543 - RNA, 23 nt, Human
uuggccccggagccgcagggugc

SEQ ID NO: 134544 - RNA, 23 nt, Human
uuggccccggagccgcagggugc

SEQ ID NO: 134545 - RNA, 19 nt, Human
uuucaccucgauuuccagg

SEQ ID NO: 134546 - RNA, 19 nt, Human
uuucaccucgauuuccagg

SEQ ID NO: 134547 - RNA, 18 nt, Human
uuucuccagcuggggccu

SEQ ID NO: 134548 - RNA, 22 nt, Human
aaaacuguuauagaacaggaua

SEQ ID NO: 134549 - RNA, 25 nt, Human
aagcaaaaagggaaagaagggaccc

SEQ ID NO: 134550 - RNA, 25 nt, Human
aagcaaaaagggaaagaauggcugg

SEQ ID NO: 134551 - RNA, 24 nt, Human
aagggaaagaauggcuggcaaagg

SEQ ID NO: 134552 - RNA, 18 nt, Human
acugugugccaggcacug

SEQ ID NO: 134553 - RNA, 18 nt, Human
acugugugccaggcacug

SEQ ID NO: 134554 - RNA, 21 nt, Human
agaaagagaugaaauacaaag

SEQ ID NO: 134555 - RNA, 25 nt, Human
agaaagagaugaaauacaaagagaa

SEQ ID NO: 134556 - RNA, 19 nt, Human
agagaugaaauacaaagag

SEQ ID NO: 134557 - RNA, 18 nt, Human
aggaacacaaaauacaaa

SEQ ID NO: 134558 - RNA, 18 nt, Human
caaaaagggaaagaaugg

SEQ ID NO: 134559 - RNA, 20 nt, Human
caaccgaagaagcaaaggga

SEQ ID NO: 134560 - RNA, 23 nt, Human
caaccucuaaguucacuucaccu

SEQ ID NO: 134561 - RNA, 19 nt, Human
caacguagacuaaaugccu

SEQ ID NO: 134562 - RNA, 26 nt, Human
caccaaacaaaacuguuauagaacag

SEQ ID NO: 134563 - RNA, 21 nt, Human
ccccacaaccucuaaguucac

SEQ ID NO: 134564 - RNA, 24 nt, Human
ccuauguucagaacagaccggggc

SEQ ID NO: 134565 - RNA, 23 nt, Human
ccuccgcggcuuugcaaaagcug

SEQ ID NO: 134566 - RNA, 22 nt, Human
cgaccccucggccccacaaccu

SEQ ID NO: 134567 - RNA, 23 nt, Human
cgcuacacgcacgcgcaagaagc

SEQ ID NO: 134568 - RNA, 18 nt, Human
cucccaacguagacuaaa

SEQ ID NO: 134569 - RNA, 24 nt, Human
cugguagcuauaagacgaccccuc

SEQ ID NO: 134570 - RNA, 20 nt, Human
cugugugccaggcacuguuc

SEQ ID NO: 134571 - RNA, 18 nt, Human
gaccccucggccccacaa

SEQ ID NO: 134572 - RNA, 20 nt, Human
gaccccucggccccacaacc

SEQ ID NO: 134573 - RNA, 20 nt, Human
gaccccucggccccacaacu

SEQ ID NO: 134574 - RNA, 23 nt, Human
gcaaccgaagaagcaaagggaga

SEQ ID NO: 134575 - RNA, 21 nt, Human
gcgcuacacgcacgcgcagug

SEQ ID NO: 134576 - RNA, 21 nt, Human
ggacugcaaccgaagaagcaa

SEQ ID NO: 134577 - RNA, 21 nt, Human
uaaagacacagcaccaaacaa

SEQ ID NO: 134578 - RNA, 23 nt, Human
uaagacgaccccucggccccaca

SEQ ID NO: 134579 - RNA, 24 nt, Human
uaagacgaccccucggccccacaa

SEQ ID NO: 134580 - RNA, 20 nt, Human
uaagcaggacccguauuugu

SEQ ID NO: 134581 - RNA, 20 nt, Human
uacugugugccaggcacugu

SEQ ID NO: 134582 - RNA, 26 nt, Human
uagaaagagaugaaauacaaagagaa

SEQ ID NO: 134583 - RNA, 18 nt, Human
uagaacaggauaaggcag

SEQ ID NO: 134584 - RNA, 28 nt, Human
uagaacaggauaaggcaggucaucuccc

SEQ ID NO: 134585 - RNA, 18 nt, Human
uccaauauaaauacugca

SEQ ID NO: 134586 - RNA, 23 nt, Human
ucccaguugaggaguuuggaagc

SEQ ID NO: 134587 - RNA, 23 nt, Human
uccuuuuaucuucccaauggcua

SEQ ID NO: 134588 - RNA, 20 nt, Human
ucugucuccuuuuaucuucc

SEQ ID NO: 134589 - RNA, 18 nt, Human
ugaaauacaaagagaaag

SEQ ID NO: 134590 - RNA, 24 nt, Human
ugaaauacaaagagaaagagcuga

SEQ ID NO: 134591 - RNA, 21 nt, Human
ugaaugaacuuaugucccuau

SEQ ID NO: 134592 - RNA, 22 nt, Human
ugcaccacgaugauucugcgca

SEQ ID NO: 134593 - RNA, 19 nt, Human
ugggagaaacaugcuggaa

SEQ ID NO: 134594 - RNA, 25 nt, Human
uucuaaaugggagaaacaugcugga

SEQ ID NO: 134595 - RNA, 21 nt, Human
uuuucauucaucaaagauuua

SEQ ID NO: 134596 - RNA, 21 nt, Human
uuuuuuuuuuuuuuuuucauu

SEQ ID NO: 134597 - RNA, 19 nt, Human
aaauacuuacuagagccaa

SEQ ID NO: 134598 - RNA, 22 nt, Human
aagcuguaucucugaaaauguu

SEQ ID NO: 134599 - RNA, 23 nt, Human
aauaauacaaauaacaaggagau

SEQ ID NO: 134600 - RNA, 19 nt, Human
aauuccaugauuuauacau

SEQ ID NO: 134601 - RNA, 19 nt, Human
acaaaguaagaacauaaac

SEQ ID NO: 134602 - RNA, 19 nt, Human
acucucggacagguuaucc

SEQ ID NO: 134603 - RNA, 24 nt, Human
acuuacuagagccaaaucuaucuc

SEQ ID NO: 134604 - RNA, 22 nt, Human
agaaaaaaaaaagacauccgaa

SEQ ID NO: 134605 - RNA, 20 nt, Human
aguguaaaacuggcuuaaaa

SEQ ID NO: 134606 - RNA, 21 nt, Human
caaaagaaagauacagaauac

SEQ ID NO: 134607 - RNA, 19 nt, Human
cauuuucacacuuccagaa

SEQ ID NO: 134608 - RNA, 26 nt, Human
cuuagaaaaaaaaaagacauccgaaa

SEQ ID NO: 134609 - RNA, 25 nt, Human
gaaaaaaaaaagacauccgaaauac

SEQ ID NO: 134610 - RNA, 21 nt, Human
gaggaacauuuaguguaaaac

SEQ ID NO: 134611 - RNA, 22 nt, Human
uacaggucaaaaccgacugcgc

SEQ ID NO: 134612 - RNA, 27 nt, Human
uagcuccauaaguguaagcacucccga

SEQ ID NO: 134613 - RNA, 22 nt, Human
uaguguuacuauaagaagcugu

SEQ ID NO: 134614 - RNA, 24 nt, Human
uauaacuaaauacuuacuagagcc

SEQ ID NO: 134615 - RNA, 22 nt, Human
uauauaaauguuucaaaucuau

SEQ ID NO: 134616 - RNA, 18 nt, Human
ucaaaacacaagggucca

SEQ ID NO: 134617 - RNA, 19 nt, Human
ucaaaaccgacugcgccac

SEQ ID NO: 134618 - RNA, 23 nt, Human
ucaacaucuaacccuauagcaaa

SEQ ID NO: 134619 - RNA, 22 nt, Human
ucauugcuucauacuaaaaugg

SEQ ID NO: 134620 - RNA, 21 nt, Human
uccaaguaauuuuuggcgaaa

SEQ ID NO: 134621 - RNA, 18 nt, Human
ucucugcuacaggucaaa

SEQ ID NO: 134622 - RNA, 20 nt, Human
ucuucaguaccuaaacagua

SEQ ID NO: 134623 - RNA, 22 nt, Human
ugaggcuguucuccagaauugg

SEQ ID NO: 134624 - RNA, 21 nt, Human
ugcaagugauauaacuaaauc

SEQ ID NO: 134625 - RNA, 19 nt, Human
ugcauaaauuccaugauuu

SEQ ID NO: 134626 - RNA, 24 nt, Human
ugcccuuugcuccaaguaauuuuu

SEQ ID NO: 134627 - RNA, 23 nt, Human
uggaaacaggcaaacucuggggc

SEQ ID NO: 134628 - RNA, 19 nt, Human
uucaagcaguuggcauuuc

SEQ ID NO: 134629 - RNA, 23 nt, Human
uucuucaaaacacaaggguccaa

SEQ ID NO: 134630 - RNA, 21 nt, Human
uuuuuaguagaugggaaugua

SEQ ID NO: 134631 - RNA, 19 nt, Human
aagagaaacagagaaacau

SEQ ID NO: 134632 - RNA, 22 nt, Human
agggcacacaccuugcccuagc

SEQ ID NO: 134633 - RNA, 22 nt, Human
cagaaucaggaagagggcacac

SEQ ID NO: 134634 - RNA, 18 nt, Human
cagaggaaagggcaaaga

SEQ ID NO: 134635 - RNA, 22 nt, Human
ccaaagaaaauggaauugugga

SEQ ID NO: 134636 - RNA, 22 nt, Human
ccgcaguuccgaacuaaacgcg

SEQ ID NO: 134637 - RNA, 19 nt, Human
ccuugcccuagcccaccgg

SEQ ID NO: 134638 - RNA, 20 nt, Human
cgcacauaccgagacacccc

SEQ ID NO: 134639 - RNA, 19 nt, Human
cgccaggccgggaaggcuc

SEQ ID NO: 134640 - RNA, 24 nt, Human
cgugaccucgccuacaccagaucc

SEQ ID NO: 134641 - RNA, 22 nt, Human
gaaaauggaauuguggaaaaga

SEQ ID NO: 134642 - RNA, 22 nt, Human
gagaggcgugaccucgccuaca

SEQ ID NO: 134643 - RNA, 23 nt, Human
ggaaaagagaaacagagaaacau

SEQ ID NO: 134644 - RNA, 21 nt, Human
ggcaaagagaugccaaagaaa

SEQ ID NO: 134645 - RNA, 24 nt, Human
uagcccaccggcgucccgcaguuc

SEQ ID NO: 134646 - RNA, 24 nt, Human
ugccaaagaaaauggaauugugga

SEQ ID NO: 134647 - RNA, 19 nt, Human
acagcgcaagccccacaca

SEQ ID NO: 134648 - RNA, 22 nt, Human
acgauccugggcaugugcuacu

SEQ ID NO: 134649 - RNA, 24 nt, Human
agcuucucagcacagcgcaagccc

SEQ ID NO: 134650 - RNA, 23 nt, Human
caacaaaaacauaaaagccucca

SEQ ID NO: 134651 - RNA, 24 nt, Human
caacaaaaacauaaaagccuccaa

SEQ ID NO: 134652 - RNA, 19 nt, Human
caagccccacacacacgau

SEQ ID NO: 134653 - RNA, 18 nt, Human
cacacacacgauccuggg

SEQ ID NO: 134654 - RNA, 22 nt, Human
caguuugaaaaugcauugaucu

SEQ ID NO: 134655 - RNA, 22 nt, Human
cccacacacacgauccugggca

SEQ ID NO: 134656 - RNA, 23 nt, Human
ccccacacacacgauccugggca

SEQ ID NO: 134657 - RNA, 21 nt, Human
cgcaagccccacacacacgau

SEQ ID NO: 134658 - RNA, 18 nt, Human
cucagcacagcgcaagcc

SEQ ID NO: 134659 - RNA, 28 nt, Human
cuucauuggcuauauauagcauuaugcc

SEQ ID NO: 134660 - RNA, 19 nt, Human
gaaaguuaagaccucaguu

SEQ ID NO: 134661 - RNA, 21 nt, Human
uaaaugcaacaaaaacauaaa

SEQ ID NO: 134662 - RNA, 20 nt, Human
uaaggagcauauggaccggu

SEQ ID NO: 134663 - RNA, 21 nt, Human
uauguuauauauauuuuguuc

SEQ ID NO: 134664 - RNA, 21 nt, Human
ucauggcuucauacaguuugu

SEQ ID NO: 134665 - RNA, 18 nt, Human
ucugacuacaaaacgaca

SEQ ID NO: 134666 - RNA, 18 nt, Human
ucuguuuccuucauggcu

SEQ ID NO: 134667 - RNA, 26 nt, Human
ugcaaaaacauaaaugcaacaaaaac

SEQ ID NO: 134668 - RNA, 20 nt, Human
ugcaacaaaaacauaaaagc

SEQ ID NO: 134669 - RNA, 21 nt, Human
ugcaacaaaaacauaaaagcc

SEQ ID NO: 134670 - RNA, 24 nt, Human
uucucagcacagcgcaagccccac

SEQ ID NO: 134671 - RNA, 26 nt, Human
aaaaaaaaaaaagaacaggacuagaa

SEQ ID NO: 134672 - RNA, 22 nt, Human
aaaaaaaagaacaggacuagaa

SEQ ID NO: 134673 - RNA, 21 nt, Human
aaaaaagaacaggacuagaaa

SEQ ID NO: 134674 - RNA, 20 nt, Human
aagagggaggagggaagagg

SEQ ID NO: 134675 - RNA, 21 nt, Human
acaguagcauuuguucucccc

SEQ ID NO: 134676 - RNA, 21 nt, Human
agcccacgccggauuccacgc

SEQ ID NO: 134677 - RNA, 18 nt, Human
agggaggagggaagaggg

SEQ ID NO: 134678 - RNA, 20 nt, Human
caaaaaauaaacugaaacaa

SEQ ID NO: 134679 - RNA, 24 nt, Human
caaaaaauaaacugaaacaaacaa

SEQ ID NO: 134680 - RNA, 21 nt, Human
cacaagagaaugguuggaggg

SEQ ID NO: 134681 - RNA, 19 nt, Human
caccaccgccgccgccgcc

SEQ ID NO: 134682 - RNA, 20 nt, Human
caccgccgccgccgccgccg

SEQ ID NO: 134683 - RNA, 27 nt, Human
cacggugccccgcacccacggcucccc

SEQ ID NO: 134684 - RNA, 20 nt, Human
caggaaugaagagggaggag

SEQ ID NO: 134685 - RNA, 21 nt, Human
ccaccgccgccgccgccgccg

SEQ ID NO: 134686 - RNA, 19 nt, Human
ccacggugccccgcaccca

SEQ ID NO: 134687 - RNA, 23 nt, Human
cccaaaaaauaaacugaaacaaa

SEQ ID NO: 134688 - RNA, 18 nt, Human
ccccagcccacgccggau

SEQ ID NO: 134689 - RNA, 20 nt, Human
ccccgcggcucggacccccc

SEQ ID NO: 134690 - RNA, 18 nt, Human
cccgcacccacggcucca

SEQ ID NO: 134691 - RNA, 24 nt, Human
cccgggcugagcggggccuggggc

SEQ ID NO: 134692 - RNA, 28 nt, Human
ccgccaccaccgccgccgccgccgccgg

SEQ ID NO: 134693 - RNA, 21 nt, Human
ccgccgccaccaccgccgccg

SEQ ID NO: 134694 - RNA, 23 nt, Human
ccgccgccaccaccgccgccgcc

SEQ ID NO: 134695 - RNA, 24 nt, Human
ccgccgccaccaccgccgccgccg

SEQ ID NO: 134696 - RNA, 21 nt, Human
ccgccgccaccgccgccacca

SEQ ID NO: 134697 - RNA, 24 nt, Human
ccgccgccaccgccgccaccaccg

SEQ ID NO: 134698 - RNA, 18 nt, Human
ccgccgccgccgccgccg

SEQ ID NO: 134699 - RNA, 19 nt, Human
ccucuuuucucuucacuuc

SEQ ID NO: 134700 - RNA, 18 nt, Human
cggcucggaccccccagc

SEQ ID NO: 134701 - RNA, 20 nt, Human
cugaaacaaacaaaaacuua

SEQ ID NO: 134702 - RNA, 21 nt, Human
cuucacaagccgugcagcugu

SEQ ID NO: 134703 - RNA, 21 nt, Human
gaagagggaggagggaagagg

SEQ ID NO: 134704 - RNA, 20 nt, Human
gacauaucuaaaaaagggga

SEQ ID NO: 134705 - RNA, 22 nt, Human
gaggagggaagagggacuugau

SEQ ID NO: 134706 - RNA, 20 nt, Human
gcggggccuggggccgggcg

SEQ ID NO: 134707 - RNA, 26 nt, Human
gggccgggcgggcgucccggggccuc

SEQ ID NO: 134708 - RNA, 18 nt, Human
ggggccuggggccgggcg

SEQ ID NO: 134709 - RNA, 21 nt, Human
uaucuaaaaaaggggacaaga

SEQ ID NO: 134710 - RNA, 18 nt, Human
ucacaugaugaaugagau

SEQ ID NO: 134711 - RNA, 23 nt, Human
ucaguccuccucuuuucucuuca

SEQ ID NO: 134712 - RNA, 18 nt, Human
uccacgccgccgccaccg

SEQ ID NO: 134713 - RNA, 21 nt, Human
uccacgccgccgccaccgccg

SEQ ID NO: 134714 - RNA, 19 nt, Human
uccagagucugucuuucca

SEQ ID NO: 134715 - RNA, 19 nt, Human
uccccauggggacaggaau

SEQ ID NO: 134716 - RNA, 21 nt, Human
ucccuggcacacucacacugc

SEQ ID NO: 134717 - RNA, 22 nt, Human
ugaaacaaacaaaaacuuaaaa

SEQ ID NO: 134718 - RNA, 24 nt, Human
ugaagagggaggagggaagaggga

SEQ ID NO: 134719 - RNA, 24 nt, Human
ugcucggaccaagaaggggggggc

SEQ ID NO: 134720 - RNA, 25 nt, Human
uggcacacucacacugcucggacca

SEQ ID NO: 134721 - RNA, 21 nt, Human
uuucucuucacuucugcuugg

SEQ ID NO: 134722 - RNA, 19 nt, Human
aaaaagaagcugagcccag

SEQ ID NO: 134723 - RNA, 19 nt, Human
aaaaagggguagaaauugu

SEQ ID NO: 134724 - RNA, 18 nt, Human
aaagaagcugagcccagc

SEQ ID NO: 134725 - RNA, 19 nt, Human
aaccuagccacacucuccu

SEQ ID NO: 134726 - RNA, 19 nt, Human
aaggagcccagcucccccc

SEQ ID NO: 134727 - RNA, 24 nt, Human
aaggagcccagcucccccccagac

SEQ ID NO: 134728 - RNA, 21 nt, Human
aaggcaggggcccgcugcgga

SEQ ID NO: 134729 - RNA, 21 nt, Human
aauaagaaggggugggaggga

SEQ ID NO: 134730 - RNA, 24 nt, Human
accaagggcccaggugauggaggc

SEQ ID NO: 134731 - RNA, 22 nt, Human
accagcugucccauucccccag

SEQ ID NO: 134732 - RNA, 21 nt, Human
acccaucccucccuuuucccc

SEQ ID NO: 134733 - RNA, 23 nt, Human
acccaucccucccuuuuccccaa

SEQ ID NO: 134734 - RNA, 26 nt, Human
agaaaaaaaguggaaaaaagggaccc

SEQ ID NO: 134735 - RNA, 24 nt, Human
agaaaaaaauaaauaaauugcaga

SEQ ID NO: 134736 - RNA, 20 nt, Human
agaaaggaaauaaauaagaa

SEQ ID NO: 134737 - RNA, 20 nt, Human
agaagaaaaaaaguggaaaa

SEQ ID NO: 134738 - RNA, 19 nt, Human
agaagccagcaaagagggc

SEQ ID NO: 134739 - RNA, 20 nt, Human
agaaggggugggagggaggc

SEQ ID NO: 134740 - RNA, 22 nt, Human
agacagaagggaauguucagga

SEQ ID NO: 134741 - RNA, 25 nt, Human
agagaaguugggguuuuacggggga

SEQ ID NO: 134742 - RNA, 19 nt, Human
agaggcaggagaauuccug

SEQ ID NO: 134743 - RNA, 22 nt, Human
agagggcaaagacagaagggaa

SEQ ID NO: 134744 - RNA, 21 nt, Human
agcagcucaaaaagaagcuga

SEQ ID NO: 134745 - RNA, 21 nt, Human
agcccagcucucucuccuccu

SEQ ID NO: 134746 - RNA, 24 nt, Human
agcccagcucucucuccuccugac

SEQ ID NO: 134747 - RNA, 23 nt, Human
agcugcuucuccccacuaaauuc

SEQ ID NO: 134748 - RNA, 18 nt, Human
aggcaccagcaccgcacc

SEQ ID NO: 134749 - RNA, 23 nt, Human
aggcagggcgaguccaggccaag

SEQ ID NO: 134750 - RNA, 22 nt, Human
aggcuuuacuaagggaggggca

SEQ ID NO: 134751 - RNA, 25 nt, Human
agggaggggcagugaaucugggggg

SEQ ID NO: 134752 - RNA, 23 nt, Human
agguuccuggcguucaggagccc

SEQ ID NO: 134753 - RNA, 20 nt, Human
auccuaaggagcaagggcuc

SEQ ID NO: 134754 - RNA, 18 nt, Human
augaggcaggggugaccc

SEQ ID NO: 134755 - RNA, 24 nt, Human
cacacacccuggcccccucuuccc

SEQ ID NO: 134756 - RNA, 26 nt, Human
cacccucccucccgcauuucccacuu

SEQ ID NO: 134757 - RNA, 18 nt, Human
caccuccaucccucuggc

SEQ ID NO: 134758 - RNA, 23 nt, Human
cagcgggugcuccucgagggggc

SEQ ID NO: 134759 - RNA, 18 nt, Human
caggagcccaguucuggg

SEQ ID NO: 134760 - RNA, 22 nt, Human
cagggcgaguccaggccaagcc

SEQ ID NO: 134761 - RNA, 22 nt, Human
caucaguccaccuccaucccuc

SEQ ID NO: 134762 - RNA, 18 nt, Human
ccagcucccccccagacc

SEQ ID NO: 134763 - RNA, 23 nt, Human
ccaggaaaaaaaaaaaaaaagcc

SEQ ID NO: 134764 - RNA, 26 nt, Human
ccaggaaaaaaaaaaaaaaagccaca

SEQ ID NO: 134765 - RNA, 20 nt, Human
ccaucccucccuuuucccca

SEQ ID NO: 134766 - RNA, 21 nt, Human
cccaggaaaaaaaaaaaaaaa

SEQ ID NO: 134767 - RNA, 18 nt, Human
cccaucaguccaccucca

SEQ ID NO: 134768 - RNA, 24 nt, Human
cccaucccucccuuuuccccaaaa

SEQ ID NO: 134769 - RNA, 25 nt, Human
cccaucccucccuuuuccccaaaaa

SEQ ID NO: 134770 - RNA, 23 nt, Human
ccccaaaaaaauucccaggaaaa

SEQ ID NO: 134771 - RNA, 25 nt, Human
ccccaaaaaaccaccuuugagaaga

SEQ ID NO: 134772 - RNA, 21 nt, Human
ccccaaugagaauugcagaaa

SEQ ID NO: 134773 - RNA, 19 nt, Human
ccccaccacuguacccucc

SEQ ID NO: 134774 - RNA, 19 nt, Human
ccccacccucccucccgca

SEQ ID NO: 134775 - RNA, 21 nt, Human
ccccaccggagaagcccuccc

SEQ ID NO: 134776 - RNA, 19 nt, Human
cccccagaccccagguucc

SEQ ID NO: 134777 - RNA, 23 nt, Human
cccccaggucccaaggcaccagc

SEQ ID NO: 134778 - RNA, 22 nt, Human
ccccccagaccccagguuccug

SEQ ID NO: 134779 - RNA, 23 nt, Human
ccccccagaccccagguuccugg

SEQ ID NO: 134780 - RNA, 20 nt, Human
ccccccuccaacaggcugga

SEQ ID NO: 134781 - RNA, 20 nt, Human
ccccgaccccugccccaccc

SEQ ID NO: 134782 - RNA, 23 nt, Human
ccccgaccccugccccacccucc

SEQ ID NO: 134783 - RNA, 21 nt, Human
ccccugccccacccucccucc

SEQ ID NO: 134784 - RNA, 25 nt, Human
ccccugcuucuccccccaaaaaacc

SEQ ID NO: 134785 - RNA, 23 nt, Human
cccgaccccugccccacccuccc

SEQ ID NO: 134786 - RNA, 21 nt, Human
cccucccucccgcauuuccca

SEQ ID NO: 134787 - RNA, 23 nt, Human
cccugcaucccugcagcgggugc

SEQ ID NO: 134788 - RNA, 19 nt, Human
cccugccccacccucccuc

SEQ ID NO: 134789 - RNA, 18 nt, Human
cccuuuuccccaaaaaaa

SEQ ID NO: 134790 - RNA, 21 nt, Human
ccgagauagauaucaucagga

SEQ ID NO: 134791 - RNA, 20 nt, Human
ccuccaucccucuggcugca

SEQ ID NO: 134792 - RNA, 23 nt, Human
ccugggcacauagucucuggaag

SEQ ID NO: 134793 - RNA, 21 nt, Human
ccuuacacuucucuuucccua

SEQ ID NO: 134794 - RNA, 23 nt, Human
ccuuugagaagaaaaaaagugga

SEQ ID NO: 134795 - RNA, 19 nt, Human
cgacccccgaccccugccc

SEQ ID NO: 134796 - RNA, 20 nt, Human
cgacccccgaccccugcccc

SEQ ID NO: 134797 - RNA, 24 nt, Human
cgcaccaucuugcuccacacaccc

SEQ ID NO: 134798 - RNA, 22 nt, Human
cggacacccgacccccgacccc

SEQ ID NO: 134799 - RNA, 24 nt, Human
cuagacccaucccucccuuuuccc

SEQ ID NO: 134800 - RNA, 25 nt, Human
cuagacccaucccucccuuuucccc

SEQ ID NO: 134801 - RNA, 25 nt, Human
cuagccacacucuccugagaagcca

SEQ ID NO: 134802 - RNA, 23 nt, Human
cucaugcaaaccggcaaagaaaa

SEQ ID NO: 134803 - RNA, 28 nt, Human
cuccccccaaaaaaccaccuuugagaag

SEQ ID NO: 134804 - RNA, 19 nt, Human
cucccggacacccgacccc

SEQ ID NO: 134805 - RNA, 20 nt, Human
cucucuccuccugggccucc

SEQ ID NO: 134806 - RNA, 22 nt, Human
cucuuccuuucacucucucaaa

SEQ ID NO: 134807 - RNA, 18 nt, Human
cuuugagaagaaaaaaag

SEQ ID NO: 134808 - RNA, 23 nt, Human
gaaaaaaaaaaaaaaagccacau

SEQ ID NO: 134809 - RNA, 22 nt, Human
gaaaaaauaaaugagaaaucaa

SEQ ID NO: 134810 - RNA, 20 nt, Human
gaaauaaauaagaaggggug

SEQ ID NO: 134811 - RNA, 23 nt, Human
gaagcccucccaucaguccaccu

SEQ ID NO: 134812 - RNA, 23 nt, Human
gaagggaauguucaggaaggucu

SEQ ID NO: 134813 - RNA, 23 nt, Human
gaauacacuuaggguacucacac

SEQ ID NO: 134814 - RNA, 18 nt, Human
gaaucugggggggucuuc

SEQ ID NO: 134815 - RNA, 25 nt, Human
gaauugcagaaaaagggguagaaau

SEQ ID NO: 134816 - RNA, 25 nt, Human
gacccccgaccccugccccacccuc

SEQ ID NO: 134817 - RNA, 21 nt, Human
gaccccugccccacccucccu

SEQ ID NO: 134818 - RNA, 23 nt, Human
gagaagaaaaaaaguggaaaaaa

SEQ ID NO: 134819 - RNA, 19 nt, Human
gagccaagggcuugggcaa

SEQ ID NO: 134820 - RNA, 20 nt, Human
gaggggcagugaaucugggg

SEQ ID NO: 134821 - RNA, 24 nt, Human
gaguguccccccuccaacaggcug

SEQ ID NO: 134822 - RNA, 18 nt, Human
gcacauagucucuggaag

SEQ ID NO: 134823 - RNA, 19 nt, Human
gcagaggaguguccccccu

SEQ ID NO: 134824 - RNA, 26 nt, Human
gcagcgggugcuccucgagggggccc

SEQ ID NO: 134825 - RNA, 20 nt, Human
gcauugggggcagguggggg

SEQ ID NO: 134826 - RNA, 24 nt, Human
gcccagcucccccccagaccccag

SEQ ID NO: 134827 - RNA, 19 nt, Human
ggaaaaaaaaaaaaaaagc

SEQ ID NO: 134828 - RNA, 21 nt, Human
ggacacccgacccccgacccc

SEQ ID NO: 134829 - RNA, 22 nt, Human
gggagccaagggcuugggcaau

SEQ ID NO: 134830 - RNA, 18 nt, Human
gggggcauguggaaggca

SEQ ID NO: 134831 - RNA, 25 nt, Human
guccccccuccaacaggcuggaucc

SEQ ID NO: 134832 - RNA, 21 nt, Human
uaaaguaggccgucucugagc

SEQ ID NO: 134833 - RNA, 18 nt, Human
uaaccccaccggagaagc

SEQ ID NO: 134834 - RNA, 19 nt, Human
uaaccccaccggagaagcc

SEQ ID NO: 134835 - RNA, 23 nt, Human
uaaccccaccggagaagcccucc

SEQ ID NO: 134836 - RNA, 22 nt, Human
uaccuuacacuucucuuucccu

SEQ ID NO: 134837 - RNA, 19 nt, Human
uagcuugggugcccccacc

SEQ ID NO: 134838 - RNA, 19 nt, Human
uagcuugggugcccccacc

SEQ ID NO: 134839 - RNA, 20 nt, Human
ucaggaaggucucagaggcu

SEQ ID NO: 134840 - RNA, 21 nt, Human
ucccaaggcaccagcaccgca

SEQ ID NO: 134841 - RNA, 22 nt, Human
ucccacucccuagacccauccc

SEQ ID NO: 134842 - RNA, 24 nt, Human
uccccaaaaaaauucccaggaaaa

SEQ ID NO: 134843 - RNA, 21 nt, Human
uccccccuccaacaggcugga

SEQ ID NO: 134844 - RNA, 19 nt, Human
uccccugcuucucccccca

SEQ ID NO: 134845 - RNA, 20 nt, Human
uccccugcuucuccccccaa

SEQ ID NO: 134846 - RNA, 21 nt, Human
ucccggacacccgacccccga

SEQ ID NO: 134847 - RNA, 24 nt, Human
ucccggacacccgacccccgaccc

SEQ ID NO: 134848 - RNA, 24 nt, Human
ucccuacuuuucccuucuaacccc

SEQ ID NO: 134849 - RNA, 27 nt, Human
ucccuagacccaucccucccuuuuccc

SEQ ID NO: 134850 - RNA, 23 nt, Human
ucccucccuuuuccccaaaaaaa

SEQ ID NO: 134851 - RNA, 24 nt, Human
ucccucuggcugcagugacuuaag

SEQ ID NO: 134852 - RNA, 25 nt, Human
ucccuggcucccggacacccgaccc

SEQ ID NO: 134853 - RNA, 20 nt, Human
uccugggccuccucucaccc

SEQ ID NO: 134854 - RNA, 22 nt, Human
ucugucucuuccuuucacucuc

SEQ ID NO: 134855 - RNA, 22 nt, Human
ucuucccauaggcaggcagaac

SEQ ID NO: 134856 - RNA, 25 nt, Human
ucuucucucacuuuaaucucccuaa

SEQ ID NO: 134857 - RNA, 20 nt, Human
ucuugcuccacacacccugg

SEQ ID NO: 134858 - RNA, 18 nt, Human
ugaaacuguagcuguucc

SEQ ID NO: 134859 - RNA, 18 nt, Human
ugaccccagacccugccu

SEQ ID NO: 134860 - RNA, 18 nt, Human
ugagaagaaaaaaagugg

SEQ ID NO: 134861 - RNA, 19 nt, Human
ugagccgaccagcuguccc

SEQ ID NO: 134862 - RNA, 20 nt, Human
ugauggaggcagggcgaguc

SEQ ID NO: 134863 - RNA, 18 nt, Human
ugccccacccucccuccc

SEQ ID NO: 134864 - RNA, 20 nt, Human
ugccuuaggagagagcggag

SEQ ID NO: 134865 - RNA, 18 nt, Human
uggaaggaacagagggca

SEQ ID NO: 134866 - RNA, 23 nt, Human
uggcucccggacacccgaccccc

SEQ ID NO: 134867 - RNA, 23 nt, Human
ugggggagggcagguggcccccg

SEQ ID NO: 134868 - RNA, 21 nt, Human
ugggggcaggugggggcgggg

SEQ ID NO: 134869 - RNA, 22 nt, Human
ugucccauucccccagguccca

SEQ ID NO: 134870 - RNA, 20 nt, Human
ugugcauugggggcaggugg

SEQ ID NO: 134871 - RNA, 25 nt, Human
ugugcauugggggcaggugggggcg

SEQ ID NO: 134872 - RNA, 25 nt, Human
ugugggagaggaugggggagggcag

SEQ ID NO: 134873 - RNA, 18 nt, Human
uuacuaagggaggggcag

SEQ ID NO: 134874 - RNA, 20 nt, Human
uucaggaaggucucagaggc

SEQ ID NO: 134875 - RNA, 21 nt, Human
uuccugcccuagggcuagaga

SEQ ID NO: 134876 - RNA, 25 nt, Human
uugggacuuccugcccuagggcuag

SEQ ID NO: 134877 - RNA, 25 nt, Human
uuugagaagaaaaaaaguggaaaaa

SEQ ID NO: 134878 - RNA, 24 nt, Human
uuuuuuuuuuuuuuuuuuuucaag

SEQ ID NO: 134879 - RNA, 26 nt, Human
aaaaaaaaaaagcccccaaacgaaga

SEQ ID NO: 134880 - RNA, 19 nt, Human
aaaaaaaaagcccccaaac

SEQ ID NO: 134881 - RNA, 25 nt, Human
aaaaaagcccccaaacgaagacacc

SEQ ID NO: 134882 - RNA, 19 nt, Human
aaaaagaacugauguaccu

SEQ ID NO: 134883 - RNA, 24 nt, Human
aaaacagccccuacccccagaggg

SEQ ID NO: 134884 - RNA, 18 nt, Human
aaaccaacaccaaagcga

SEQ ID NO: 134885 - RNA, 21 nt, Human
aaaccuccucagggagagggc

SEQ ID NO: 134886 - RNA, 21 nt, Human
aaagcucuggucccaccaaca

SEQ ID NO: 134887 - RNA, 18 nt, Human
aaaggagcugcugccucc

SEQ ID NO: 134888 - RNA, 22 nt, Human
aaaggugggugcugaacccguc

SEQ ID NO: 134889 - RNA, 20 nt, Human
aaaugccaaaggcacugguu

SEQ ID NO: 134890 - RNA, 21 nt, Human
aaccccacaggggcccaccuc

SEQ ID NO: 134891 - RNA, 24 nt, Human
aaccgcugguucuccucccccagg

SEQ ID NO: 134892 - RNA, 20 nt, Human
aacgaaaccaacaccaaagc

SEQ ID NO: 134893 - RNA, 18 nt, Human
aagaaugccaaagucacc

SEQ ID NO: 134894 - RNA, 18 nt, Human
aagcagguagucuauuuu

SEQ ID NO: 134895 - RNA, 23 nt, Human
aagcgacaggggguugacagagg

SEQ ID NO: 134896 - RNA, 23 nt, Human
aaggagcugcugccuccuggggg

SEQ ID NO: 134897 - RNA, 19 nt, Human
acaaucuugucucgcuccu

SEQ ID NO: 134898 - RNA, 20 nt, Human
acacuguaccaucucagucc

SEQ ID NO: 134899 - RNA, 20 nt, Human
acagcugaacaccaccugga

SEQ ID NO: 134900 - RNA, 19 nt, Human
acauaaaccaccaaauacu

SEQ ID NO: 134901 - RNA, 24 nt, Human
acccagggacuuccuccgccgcac

SEQ ID NO: 134902 - RNA, 20 nt, Human
accccagugccuucaaguca

SEQ ID NO: 134903 - RNA, 22 nt, Human
accuguaaaacaaaggacagca

SEQ ID NO: 134904 - RNA, 22 nt, Human
acucagcaucuuaucagagucg

SEQ ID NO: 134905 - RNA, 24 nt, Human
acugggaugcaaacccugggggcc

SEQ ID NO: 134906 - RNA, 22 nt, Human
agaaaggagcugcugccuccug

SEQ ID NO: 134907 - RNA, 21 nt, Human
agaggcuguggaaggcaggag

SEQ ID NO: 134908 - RNA, 21 nt, Human
agcaagcuucggccgaaaacu

SEQ ID NO: 134909 - RNA, 18 nt, Human
agcacagcugaacaccac

SEQ ID NO: 134910 - RNA, 20 nt, Human
agcucacaguggugcugggg

SEQ ID NO: 134911 - RNA, 19 nt, Human
agcuccuggcacagagccu

SEQ ID NO: 134912 - RNA, 28 nt, Human
agcuggauggccgugucccucugcuggg

SEQ ID NO: 134913 - RNA, 23 nt, Human
aggcacugggacaggccuggggg

SEQ ID NO: 134914 - RNA, 20 nt, Human
aggcaggagagaaaggccga

SEQ ID NO: 134915 - RNA, 19 nt, Human
agggggcagggcgcucggg

SEQ ID NO: 134916 - RNA, 19 nt, Human
aggggguugacagagggga

SEQ ID NO: 134917 - RNA, 24 nt, Human
aguaauaagcacagauggaggaga

SEQ ID NO: 134918 - RNA, 22 nt, Human
agucaauauccuccgucucccu

SEQ ID NO: 134919 - RNA, 21 nt, Human
agucagucuccuuggccaccu

SEQ ID NO: 134920 - RNA, 23 nt, Human
agugagcaggcccaggaccugga

SEQ ID NO: 134921 - RNA, 22 nt, Human
agugcaaaaaaaaaaaaagccc

SEQ ID NO: 134922 - RNA, 21 nt, Human
aucgccucaaaccuccucagg

SEQ ID NO: 134923 - RNA, 22 nt, Human
augccacagucccccgggaaac

SEQ ID NO: 134924 - RNA, 21 nt, Human
auggagucgcuccuucuggga

SEQ ID NO: 134925 - RNA, 21 nt, Human
caaaaaaaaaaaaagccccca

SEQ ID NO: 134926 - RNA, 23 nt, Human
caaaaaaaaaaaaagcccccaaa

SEQ ID NO: 134927 - RNA, 20 nt, Human
caaaaagaacugauguaccu

SEQ ID NO: 134928 - RNA, 18 nt, Human
caaacgaagacacccaca

SEQ ID NO: 134929 - RNA, 23 nt, Human
caaagaauaaaaugaaaucaaag

SEQ ID NO: 134930 - RNA, 22 nt, Human
caaagccacgguccccagaggc

SEQ ID NO: 134931 - RNA, 22 nt, Human
caaagcucuggucccaccaaca

SEQ ID NO: 134932 - RNA, 20 nt, Human
caacaagaaccucccaaagc

SEQ ID NO: 134933 - RNA, 22 nt, Human
caauaaccauuaugcuuccccu

SEQ ID NO: 134934 - RNA, 21 nt, Human
cacacuguaccaucucagucc

SEQ ID NO: 134935 - RNA, 22 nt, Human
caccgcacggucccgcucccgc

SEQ ID NO: 134936 - RNA, 19 nt, Human
caccuccucacaccucuuc

SEQ ID NO: 134937 - RNA, 21 nt, Human
cacgugugacacgggcagagu

SEQ ID NO: 134938 - RNA, 23 nt, Human
cacuccauucuccagacugaugc

SEQ ID NO: 134939 - RNA, 24 nt, Human
cacugggaugcaaacccugggggc

SEQ ID NO: 134940 - RNA, 25 nt, Human
cacuguaccaucucagucccacucu

SEQ ID NO: 134941 - RNA, 18 nt, Human
cagagagcuucucaggca

SEQ ID NO: 134942 - RNA, 24 nt, Human
cagcacagcggcagcauacacucc

SEQ ID NO: 134943 - RNA, 22 nt, Human
cagcaguggccgccggccacgc

SEQ ID NO: 134944 - RNA, 18 nt, Human
cagcauccauugucaccg

SEQ ID NO: 134945 - RNA, 18 nt, Human
cagcccugcccacgcagc

SEQ ID NO: 134946 - RNA, 24 nt, Human
cagccguggcccucugucuacaaa

SEQ ID NO: 134947 - RNA, 18 nt, Human
cagcuccaucucccacug

SEQ ID NO: 134948 - RNA, 20 nt, Human
cagcuccaucucccacugca

SEQ ID NO: 134949 - RNA, 22 nt, Human
cagcugcccauucucccgccuc

SEQ ID NO: 134950 - RNA, 22 nt, Human
caggagccggcuguggagugug

SEQ ID NO: 134951 - RNA, 24 nt, Human
caggagccggcuguggagugugug

SEQ ID NO: 134952 - RNA, 20 nt, Human
cagucugucagcucaguacc

SEQ ID NO: 134953 - RNA, 18 nt, Human
cauagucaggauucagcc

SEQ ID NO: 134954 - RNA, 25 nt, Human
cauuaugcuuccccuaaaagcucuc

SEQ ID NO: 134955 - RNA, 22 nt, Human
ccaacaagaaccucccaaagca

SEQ ID NO: 134956 - RNA, 21 nt, Human
ccaaccccacaggggcccacc

SEQ ID NO: 134957 - RNA, 22 nt, Human
ccaccaacaagaaccucccaaa

SEQ ID NO: 134958 - RNA, 22 nt, Human
ccacccagggacuuccuccgcc

SEQ ID NO: 134959 - RNA, 25 nt, Human
ccacccucuaaaaaguuuaagaauu

SEQ ID NO: 134960 - RNA, 21 nt, Human
ccaccuucccacccagggacu

SEQ ID NO: 134961 - RNA, 20 nt, Human
ccacugucuuucuguccacu

SEQ ID NO: 134962 - RNA, 21 nt, Human
cccaaagcaaagcagccccca

SEQ ID NO: 134963 - RNA, 19 nt, Human
cccacagacggccugcuag

SEQ ID NO: 134964 - RNA, 22 nt, Human
cccacagacggccugcuagggu

SEQ ID NO: 134965 - RNA, 22 nt, Human
cccaccaacaagaaccucccaa

SEQ ID NO: 134966 - RNA, 23 nt, Human
cccaccaacaagaaccucccaaa

SEQ ID NO: 134967 - RNA, 24 nt, Human
cccacucugccuguaacuuagaaa

SEQ ID NO: 134968 - RNA, 19 nt, Human
cccccaaacgaagacaccc

SEQ ID NO: 134969 - RNA, 20 nt, Human
cccccaaacgaagacaccca

SEQ ID NO: 134970 - RNA, 23 nt, Human
ccccucaggcggccagcugcagu

SEQ ID NO: 134971 - RNA, 23 nt, Human
cccugcccacgcagcucucacgg

SEQ ID NO: 134972 - RNA, 22 nt, Human
ccgcagcagcugcccauucucc

SEQ ID NO: 134973 - RNA, 19 nt, Human
ccgccggccacgcacgucc

SEQ ID NO: 134974 - RNA, 27 nt, Human
ccgcucccgccucagguugucacacug

SEQ ID NO: 134975 - RNA, 27 nt, Human
ccugccacccucuaaaaaguuuaagaa

SEQ ID NO: 134976 - RNA, 22 nt, Human
ccugguuccggauccuuccccc

SEQ ID NO: 134977 - RNA, 21 nt, Human
ccuucagagucugccuugucc

SEQ ID NO: 134978 - RNA, 22 nt, Human
ccuucugggagguuuugggggu

SEQ ID NO: 134979 - RNA, 24 nt, Human
cgaccauguugauggcccccuccc

SEQ ID NO: 134980 - RNA, 23 nt, Human
cgagaggcuguggaaggcaggag

SEQ ID NO: 134981 - RNA, 24 nt, Human
cgagucuggucacucaggagccgg

SEQ ID NO: 134982 - RNA, 23 nt, Human
cgcaacgauccugucucccacag

SEQ ID NO: 134983 - RNA, 23 nt, Human
cgccuccaucuccucauuggccg

SEQ ID NO: 134984 - RNA, 27 nt, Human
cggaaccgggccuccuuuuccaacugg

SEQ ID NO: 134985 - RNA, 21 nt, Human
cgggaacgaaaccaacaccaa

SEQ ID NO: 134986 - RNA, 18 nt, Human
cgugugacacgggcagag

SEQ ID NO: 134987 - RNA, 20 nt, Human
cuagccucagaagugcaaaa

SEQ ID NO: 134988 - RNA, 26 nt, Human
cucaaguaauaagcacaggguacccc

SEQ ID NO: 134989 - RNA, 18 nt, Human
cucacaguggugcugggg

SEQ ID NO: 134990 - RNA, 23 nt, Human
cugaacaccaccuggaccccacu

SEQ ID NO: 134991 - RNA, 21 nt, Human
cugaacccgucuuuaguguua

SEQ ID NO: 134992 - RNA, 19 nt, Human
cugcagcagcuccaucucc

SEQ ID NO: 134993 - RNA, 19 nt, Human
cugcagcagguuucgcucc

SEQ ID NO: 134994 - RNA, 19 nt, Human
cugcagguccuuguucugc

SEQ ID NO: 134995 - RNA, 23 nt, Human
cugcugccuccuggggggccugg

SEQ ID NO: 134996 - RNA, 19 nt, Human
cuggcuccuuccugucuuc

SEQ ID NO: 134997 - RNA, 22 nt, Human
cuguaaucaagauuaaaaagac

SEQ ID NO: 134998 - RNA, 27 nt, Human
cuucagcaaccgcugguucuccucccc

SEQ ID NO: 134999 - RNA, 19 nt, Human
gaaaacagccccuaccccc

SEQ ID NO: 135000 - RNA, 19 nt, Human
gaacccgucuuuaguguua

SEQ ID NO: 135001 - RNA, 23 nt, Human
gacaauaaccauuaugcuucccc

SEQ ID NO: 135002 - RNA, 20 nt, Human
gagagacgaguuuguaagaa

SEQ ID NO: 135003 - RNA, 19 nt, Human
gagcggaaggagcucaggc

SEQ ID NO: 135004 - RNA, 21 nt, Human
gagcugcaggggccgacccug

SEQ ID NO: 135005 - RNA, 21 nt, Human
gagcugcccaccagaguggcu

SEQ ID NO: 135006 - RNA, 21 nt, Human
gaggccuccccaaccccacag

SEQ ID NO: 135007 - RNA, 21 nt, Human
gauggaggagaaacgagaggc

SEQ ID NO: 135008 - RNA, 22 nt, Human
gauggccugcuucuuguccuug

SEQ ID NO: 135009 - RNA, 25 nt, Human
gcagcacagcggcagcauacacucc

SEQ ID NO: 135010 - RNA, 20 nt, Human
gcagcaguggccgccggcca

SEQ ID NO: 135011 - RNA, 22 nt, Human
gccacgcacguccaccagccca

SEQ ID NO: 135012 - RNA, 22 nt, Human
gccagcaucucgggccgcaggu

SEQ ID NO: 135013 - RNA, 22 nt, Human
gccguggagcugagcauggccu

SEQ ID NO: 135014 - RNA, 18 nt, Human
gcggcagcauacacucca

SEQ ID NO: 135015 - RNA, 21 nt, Human
gcgggugucauccaggcugcg

SEQ ID NO: 135016 - RNA, 23 nt, Human
gcugccuccuggggggccuggcu

SEQ ID NO: 135017 - RNA, 20 nt, Human
gcugcucuugagcuuggacu

SEQ ID NO: 135018 - RNA, 19 nt, Human
gcuucuggguccugguucc

SEQ ID NO: 135019 - RNA, 18 nt, Human
ggacaggccugggggcag

SEQ ID NO: 135020 - RNA, 20 nt, Human
ggagagggcgcacuggugcu

SEQ ID NO: 135021 - RNA, 23 nt, Human
ggagcagacacaguccucaagua

SEQ ID NO: 135022 - RNA, 26 nt, Human
ggagccgcuucauguccucccaugac

SEQ ID NO: 135023 - RNA, 18 nt, Human
ggagcugugggccaucaa

SEQ ID NO: 135024 - RNA, 24 nt, Human
ggaggagaaacgagaggcuguggg

SEQ ID NO: 135025 - RNA, 18 nt, Human
ggaggccuccccaacccc

SEQ ID NO: 135026 - RNA, 19 nt, Human
ggagguuuuggggguguca

SEQ ID NO: 135027 - RNA, 22 nt, Human
ggccaugggcucgaaaacucag

SEQ ID NO: 135028 - RNA, 28 nt, Human
ggccaugggcucgaaaacucagcaucuu

SEQ ID NO: 135029 - RNA, 20 nt, Human
ggcccaggaccuggaagcag

SEQ ID NO: 135030 - RNA, 20 nt, Human
gggcagaccugcaagggucc

SEQ ID NO: 135031 - RNA, 21 nt, Human
gggcagagugugugggccugg

SEQ ID NO: 135032 - RNA, 19 nt, Human
gggccuggcuccuuccugu

SEQ ID NO: 135033 - RNA, 18 nt, Human
gggugucagaggccccgc

SEQ ID NO: 135034 - RNA, 24 nt, Human
ggugggugcugaacccgucuuuag

SEQ ID NO: 135035 - RNA, 20 nt, Human
ggugucauccaggcugcgca

SEQ ID NO: 135036 - RNA, 21 nt, Human
gucaccuuccccauuguggga

SEQ ID NO: 135037 - RNA, 23 nt, Human
gucauaguccuucuugaccaccu

SEQ ID NO: 135038 - RNA, 20 nt, Human
gucauugacccuuaagcggc

SEQ ID NO: 135039 - RNA, 22 nt, Human
gugcugggggucaaacuccggg

SEQ ID NO: 135040 - RNA, 21 nt, Human
guuguccagugcaaugccauu

SEQ ID NO: 135041 - RNA, 26 nt, Human
uaaaaugaaaucaaagauuucucgcu

SEQ ID NO: 135042 - RNA, 18 nt, Human
uaaacauaaaccaccaaa

SEQ ID NO: 135043 - RNA, 19 nt, Human
uaagaaugccaaagucacc

SEQ ID NO: 135044 - RNA, 19 nt, Human
uaagcggccaucagcaaug

SEQ ID NO: 135045 - RNA, 20 nt, Human
uaaggaggaaccacaucaaa

SEQ ID NO: 135046 - RNA, 23 nt, Human
uaaggugcccacuccuggagcuc

SEQ ID NO: 135047 - RNA, 26 nt, Human
uacaaagaauaaaaugaaaucaaaga

SEQ ID NO: 135048 - RNA, 19 nt, Human
uagaaaacagccccuaccc

SEQ ID NO: 135049 - RNA, 23 nt, Human
uagaaaacuuguaccuguaaaac

SEQ ID NO: 135050 - RNA, 18 nt, Human
uagaaaagagcugagucu

SEQ ID NO: 135051 - RNA, 22 nt, Human
uagaaaagagcugagucuggug

SEQ ID NO: 135052 - RNA, 31 nt, Human
uagaaaagagcugagucugguguccccucag

SEQ ID NO: 135053 - RNA, 24 nt, Human
uagaugggguuccgcaggauggag

SEQ ID NO: 135054 - RNA, 18 nt, Human
uaggguauagcggggggu

SEQ ID NO: 135055 - RNA, 18 nt, Human
uaguagcuggaagcaaug

SEQ ID NO: 135056 - RNA, 24 nt, Human
uagugacaaauaugccacaguccc

SEQ ID NO: 135057 - RNA, 24 nt, Human
uaugcagaaaggagcugcugccuc

SEQ ID NO: 135058 - RNA, 18 nt, Human
uauuuuggggggugucug

SEQ ID NO: 135059 - RNA, 21 nt, Human
ucaaagauggacuuucuuugc

SEQ ID NO: 135060 - RNA, 22 nt, Human
ucaaagcucuggucccaccaac

SEQ ID NO: 135061 - RNA, 19 nt, Human
ucaacaccugcugcugcug

SEQ ID NO: 135062 - RNA, 24 nt, Human
ucaccgaucuccuucugguccucc

SEQ ID NO: 135063 - RNA, 21 nt, Human
ucacucaggagccggcugugg

SEQ ID NO: 135064 - RNA, 19 nt, Human
ucagagucuuugauauuuu

SEQ ID NO: 135065 - RNA, 24 nt, Human
uccacuuuagugacaaauaugcca

SEQ ID NO: 135066 - RNA, 19 nt, Human
uccaggcucaggcgucccu

SEQ ID NO: 135067 - RNA, 23 nt, Human
uccagggaggccuccccaacccc

SEQ ID NO: 135068 - RNA, 23 nt, Human
ucccaugacugcugcagcagguu

SEQ ID NO: 135069 - RNA, 22 nt, Human
uccccagaggcaucugagcgga

SEQ ID NO: 135070 - RNA, 19 nt, Human
uccucguggagccgcuuca

SEQ ID NO: 135071 - RNA, 22 nt, Human
uccuggaaggcccagucccgcc

SEQ ID NO: 135072 - RNA, 23 nt, Human
uccuggggggccuggcuccuucc

SEQ ID NO: 135073 - RNA, 23 nt, Human
uccuucagcuccuggcacagagc

SEQ ID NO: 135074 - RNA, 27 nt, Human
uccuugagcuccuucagcucgcggcug

SEQ ID NO: 135075 - RNA, 20 nt, Human
uccuuguucugcgccguggg

SEQ ID NO: 135076 - RNA, 19 nt, Human
ucgcugucuucaccugcgu

SEQ ID NO: 135077 - RNA, 20 nt, Human
ucucugaucagcuggcuaaa

SEQ ID NO: 135078 - RNA, 24 nt, Human
ucuuuaguguuaucuguuuugugu

SEQ ID NO: 135079 - RNA, 25 nt, Human
ucuuuaguguuaucuguuuuguguu

SEQ ID NO: 135080 - RNA, 20 nt, Human
ugaagacgggaacgaaacca

SEQ ID NO: 135081 - RNA, 21 nt, Human
ugaagacgggaacgaaaccaa

SEQ ID NO: 135082 - RNA, 23 nt, Human
ugacagaggggacaggggcuggg

SEQ ID NO: 135083 - RNA, 22 nt, Human
ugagguccucaucacaggauuu

SEQ ID NO: 135084 - RNA, 23 nt, Human
ugcaaaaaaaaaaaaagccccca

SEQ ID NO: 135085 - RNA, 24 nt, Human
ugcaaaaaaaaaaaaagcccccaa

SEQ ID NO: 135086 - RNA, 21 nt, Human
ugcaaacccugggggccagca

SEQ ID NO: 135087 - RNA, 20 nt, Human
ugcaaugccauugaucgcaa

SEQ ID NO: 135088 - RNA, 18 nt, Human
ugcagaaaggagcugcug

SEQ ID NO: 135089 - RNA, 23 nt, Human
ugccccagcucauccaccuucug

SEQ ID NO: 135090 - RNA, 20 nt, Human
ugccgcagcgccuccaucuc

SEQ ID NO: 135091 - RNA, 19 nt, Human
ugccguggagcugagcaug

SEQ ID NO: 135092 - RNA, 24 nt, Human
ugccuguaacuuagaaaacagccc

SEQ ID NO: 135093 - RNA, 20 nt, Human
ugcgagggggugaugcgugc

SEQ ID NO: 135094 - RNA, 19 nt, Human
ugcugcugcugggcacgga

SEQ ID NO: 135095 - RNA, 18 nt, Human
ugcugcugggcacggagg

SEQ ID NO: 135096 - RNA, 18 nt, Human
ugcugggggucaaacucc

SEQ ID NO: 135097 - RNA, 18 nt, Human
ugcuuuggcuuuuuauaa

SEQ ID NO: 135098 - RNA, 22 nt, Human
uggaagcaaugcggacccuggc

SEQ ID NO: 135099 - RNA, 20 nt, Human
uggaagcagguagucuauuu

SEQ ID NO: 135100 - RNA, 26 nt, Human
uggaagcagguagucuauuuuggggg

SEQ ID NO: 135101 - RNA, 18 nt, Human
uggcagcugcgcagcaga

SEQ ID NO: 135102 - RNA, 20 nt, Human
uggcaggcaucagcacagcu

SEQ ID NO: 135103 - RNA, 21 nt, Human
uggcaggcaucagcacagcug

SEQ ID NO: 135104 - RNA, 20 nt, Human
uggccuugcgagggggugau

SEQ ID NO: 135105 - RNA, 18 nt, Human
uggcuaaagaaagguggg

SEQ ID NO: 135106 - RNA, 19 nt, Human
ugggaggaaaaugccaaag

SEQ ID NO: 135107 - RNA, 18 nt, Human
uggggagagugagcaggc

SEQ ID NO: 135108 - RNA, 23 nt, Human
uggggggccuggcuccuuccugu

SEQ ID NO: 135109 - RNA, 23 nt, Human
ugggugcugaacccgucuuuagu

SEQ ID NO: 135110 - RNA, 22 nt, Human
uggugugcugguucugcaggcu

SEQ ID NO: 135111 - RNA, 20 nt, Human
ugguuccggauccuuccccc

SEQ ID NO: 135112 - RNA, 24 nt, Human
ugguucuccucccccagcugcucc

SEQ ID NO: 135113 - RNA, 19 nt, Human
uguaccugccacccucuaa

SEQ ID NO: 135114 - RNA, 21 nt, Human
ugucauacaguuuguugagaa

SEQ ID NO: 135115 - RNA, 21 nt, Human
uuaaaauauagguccuacccc

SEQ ID NO: 135116 - RNA, 26 nt, Human
uuaagcggccaucagcaaugcuuccu

SEQ ID NO: 135117 - RNA, 24 nt, Human
uuagaaaacagccccuacccccag

SEQ ID NO: 135118 - RNA, 19 nt, Human
uuagaaaaggcuuguaaac

SEQ ID NO: 135119 - RNA, 20 nt, Human
uuccgcaggauggagcucac

SEQ ID NO: 135120 - RNA, 18 nt, Human
uugauggcccccucccca

SEQ ID NO: 135121 - RNA, 20 nt, Human
uugcagcaucucugaucagc

SEQ ID NO: 135122 - RNA, 20 nt, Human
uuggagccuucagagucugc

SEQ ID NO: 135123 - RNA, 22 nt, Human
uuggccggcaggugggaggagu

SEQ ID NO: 135124 - RNA, 22 nt, Human
uuguaagaaugccaaagucacc

SEQ ID NO: 135125 - RNA, 21 nt, Human
uuucgaaggauuucaaccucc

SEQ ID NO: 135126 - RNA, 19 nt, Human
uuugggggugucagaggcc

SEQ ID NO: 135127 - RNA, 24 nt, Human
uuuguuguacuaaagccuguuuaa

SEQ ID NO: 135128 - RNA, 24 nt, Human
uuuuccaacugggauuccaucugu

SEQ ID NO: 135129 - RNA, 19 nt, Human
aagagauagcgaacaccac

SEQ ID NO: 135130 - RNA, 18 nt, Human
acaaagauuaggacagac

SEQ ID NO: 135131 - RNA, 23 nt, Human
acaccacaaagauuaggacagac

SEQ ID NO: 135132 - RNA, 19 nt, Human
accgggcugcgcgcugcgc

SEQ ID NO: 135133 - RNA, 18 nt, Human
caagagauagcgaacacc

SEQ ID NO: 135134 - RNA, 20 nt, Human
caagagauagcgaacaccac

SEQ ID NO: 135135 - RNA, 20 nt, Human
cacaagagauagcgaacacc

SEQ ID NO: 135136 - RNA, 18 nt, Human
cccgggagcggugcgggc

SEQ ID NO: 135137 - RNA, 21 nt, Human
ccgcacugggcuucugguugc

SEQ ID NO: 135138 - RNA, 22 nt, Human
ccgggagcggugcgggcgcggg

SEQ ID NO: 135139 - RNA, 20 nt, Human
cgcgcagcgaggggaaagcc

SEQ ID NO: 135140 - RNA, 19 nt, Human
cggcuccuggcgccgcacu

SEQ ID NO: 135141 - RNA, 22 nt, Human
cggugcgggcgcggguccggcu

SEQ ID NO: 135142 - RNA, 18 nt, Human
cugcgcgcugcgcucucc

SEQ ID NO: 135143 - RNA, 22 nt, Human
gaggaacuccaagaaucuagag

SEQ ID NO: 135144 - RNA, 23 nt, Human
gcgcggguccggcuccuggcgcc

SEQ ID NO: 135145 - RNA, 19 nt, Human
gcggugcgggcgcgggucc

SEQ ID NO: 135146 - RNA, 20 nt, Human
gcugcaccgggcugcgcgcu

SEQ ID NO: 135147 - RNA, 19 nt, Human
ucacacagcagcacaaaga

SEQ ID NO: 135148 - RNA, 21 nt, Human
ucccgggagcggugcgggcgc

SEQ ID NO: 135149 - RNA, 20 nt, Human
ugcggacgcgaaagggggcg

SEQ ID NO: 135150 - RNA, 23 nt, Human
ugucacacagcagcacaaagaca

SEQ ID NO: 135151 - RNA, 23 nt, Human
uugcggacgcgaaagggggcgcg

SEQ ID NO: 135152 - RNA, 20 nt, Human
uuuuuuuuuuuuuaaagaug

SEQ ID NO: 135153 - RNA, 22 nt, Human
uuuuuuuuuuuuuuuuuuaaag

SEQ ID NO: 135154 - RNA, 23 nt, Human
aaaaccuuccagagacucuaccc

SEQ ID NO: 135155 - RNA, 23 nt, Human
aaaguaaguuagaacugaaaaug

SEQ ID NO: 135156 - RNA, 21 nt, Human
aagauggcagguagcucaaaa

SEQ ID NO: 135157 - RNA, 23 nt, Human
agaagauggcagguagcucaaaa

SEQ ID NO: 135158 - RNA, 19 nt, Human
uaagagggaugcaaaauag

SEQ ID NO: 135159 - RNA, 18 nt, Human
uccagagacucuacccaa

SEQ ID NO: 135160 - RNA, 23 nt, Human
ugaaaaugggcuuaaaaccuucc

SEQ ID NO: 135161 - RNA, 22 nt, Human
aaaagggcacucucuacuggcc

SEQ ID NO: 135162 - RNA, 19 nt, Human
aaacugccuccucagccca

SEQ ID NO: 135163 - RNA, 23 nt, Human
aaggccccgcuauaacgcaggaa

SEQ ID NO: 135164 - RNA, 18 nt, Human
aaggugccauugaagaag

SEQ ID NO: 135165 - RNA, 19 nt, Human
accccuuccccccuccccc

SEQ ID NO: 135166 - RNA, 23 nt, Human
agagcgugagggcaggccugggc

SEQ ID NO: 135167 - RNA, 18 nt, Human
agcaugugucugccuguc

SEQ ID NO: 135168 - RNA, 22 nt, Human
aggaacgccaagaaaagaccug

SEQ ID NO: 135169 - RNA, 18 nt, Human
aggaaggaacaaaaacug

SEQ ID NO: 135170 - RNA, 21 nt, Human
aggcugcucugagcuugggag

SEQ ID NO: 135171 - RNA, 21 nt, Human
aggugcuagaaugaggcccag

SEQ ID NO: 135172 - RNA, 21 nt, Human
agucagucuagaggagaccuc

SEQ ID NO: 135173 - RNA, 20 nt, Human
auccccuggccugugcuucc

SEQ ID NO: 135174 - RNA, 24 nt, Human
augacaacggagaaugaaggugcc

SEQ ID NO: 135175 - RNA, 21 nt, Human
auugaagaagcaaagcagcac

SEQ ID NO: 135176 - RNA, 27 nt, Human
caacuuaacugaaaagcucaaggcaau

SEQ ID NO: 135177 - RNA, 22 nt, Human
caacuuguaggguguguggguu

SEQ ID NO: 135178 - RNA, 20 nt, Human
caaugcaugaccucagggga

SEQ ID NO: 135179 - RNA, 21 nt, Human
cacacacccagauccccuggc

SEQ ID NO: 135180 - RNA, 21 nt, Human
cacacccagauccccuggccu

SEQ ID NO: 135181 - RNA, 24 nt, Human
cacagcauccuccuagaagucucu

SEQ ID NO: 135182 - RNA, 23 nt, Human
caccaggcuaacccgggacccau

SEQ ID NO: 135183 - RNA, 24 nt, Human
cacccagauccccuggccugugcu

SEQ ID NO: 135184 - RNA, 26 nt, Human
cacccccaggccucacuucuuggcuu

SEQ ID NO: 135185 - RNA, 20 nt, Human
caccccuuccccccuccccc

SEQ ID NO: 135186 - RNA, 18 nt, Human
cagauccccuggccugug

SEQ ID NO: 135187 - RNA, 21 nt, Human
cagcauccuccuagaagucuc

SEQ ID NO: 135188 - RNA, 21 nt, Human
cagcccaggugcuuacagcaa

SEQ ID NO: 135189 - RNA, 21 nt, Human
ccacacaaguggaaucaaggg

SEQ ID NO: 135190 - RNA, 18 nt, Human
ccagauccacgggcaaca

SEQ ID NO: 135191 - RNA, 18 nt, Human
ccagauccccuggccugu

SEQ ID NO: 135192 - RNA, 22 nt, Human
ccaguccacguccuccagaucu

SEQ ID NO: 135193 - RNA, 19 nt, Human
ccaugaaucccaguggcuc

SEQ ID NO: 135194 - RNA, 22 nt, Human
cccaccccuuccccccuccccc

SEQ ID NO: 135195 - RNA, 19 nt, Human
cccaugaggggacagggag

SEQ ID NO: 135196 - RNA, 18 nt, Human
cccccaggccucacuucu

SEQ ID NO: 135197 - RNA, 23 nt, Human
cccccaggccucacuucuuggcu

SEQ ID NO: 135198 - RNA, 22 nt, Human
ccccccucccccacccccaggc

SEQ ID NO: 135199 - RNA, 23 nt, Human
ccccccucccccacccccaggcc

SEQ ID NO: 135200 - RNA, 23 nt, Human
cccgggacccaugaggggacagg

SEQ ID NO: 135201 - RNA, 19 nt, Human
ccuaccccaguccacgucc

SEQ ID NO: 135202 - RNA, 23 nt, Human
ccuaugauggagagcgugagggc

SEQ ID NO: 135203 - RNA, 21 nt, Human
ccucccacucacacacccaga

SEQ ID NO: 135204 - RNA, 18 nt, Human
ccucugcccucuccuccc

SEQ ID NO: 135205 - RNA, 23 nt, Human
ccugucaccaggcuaacccggga

SEQ ID NO: 135206 - RNA, 24 nt, Human
ccugucaccaggcuaacccgggac

SEQ ID NO: 135207 - RNA, 21 nt, Human
cgccaagaaaagaccugugac

SEQ ID NO: 135208 - RNA, 19 nt, Human
cuagaagucucugcagaac

SEQ ID NO: 135209 - RNA, 21 nt, Human
cuagaaugaggcccagcaacc

SEQ ID NO: 135210 - RNA, 21 nt, Human
cucaggggaccucugcccucu

SEQ ID NO: 135211 - RNA, 19 nt, Human
cucccccacccccaggccu

SEQ ID NO: 135212 - RNA, 23 nt, Human
cucugcagaacaaacuuucaaaa

SEQ ID NO: 135213 - RNA, 18 nt, Human
cugcucugagcuugggag

SEQ ID NO: 135214 - RNA, 19 nt, Human
gacagaggcugcucugagc

SEQ ID NO: 135215 - RNA, 18 nt, Human
gacagggagaagacuggu

SEQ ID NO: 135216 - RNA, 19 nt, Human
gaccucccuucccuagucu

SEQ ID NO: 135217 - RNA, 25 nt, Human
gcagagagcugauggaagaaaggca

SEQ ID NO: 135218 - RNA, 20 nt, Human
gccaagaaaagaccugugac

SEQ ID NO: 135219 - RNA, 24 nt, Human
gcuaugagacaggugcagagaggg

SEQ ID NO: 135220 - RNA, 21 nt, Human
gcugcucugagcuugggaggc

SEQ ID NO: 135221 - RNA, 18 nt, Human
ggaaggaacaaaaacugc

SEQ ID NO: 135222 - RNA, 20 nt, Human
ggacccaugaggggacaggg

SEQ ID NO: 135223 - RNA, 24 nt, Human
ggcaacacaccuuagaaaugaccu

SEQ ID NO: 135224 - RNA, 28 nt, Human
ggcucccaccccuuccccccucccccac

SEQ ID NO: 135225 - RNA, 23 nt, Human
ggggacagggagaagacugguuu

SEQ ID NO: 135226 - RNA, 18 nt, Human
guggcuccaaggaauucc

SEQ ID NO: 135227 - RNA, 22 nt, Human
uaacgcaggaaggaacaaaaac

SEQ ID NO: 135228 - RNA, 23 nt, Human
uaagauacaaaagggcacucucu

SEQ ID NO: 135229 - RNA, 22 nt, Human
uaccagcacuagggagaagcaa

SEQ ID NO: 135230 - RNA, 24 nt, Human
uaccaggcucuggcccuuccucgg

SEQ ID NO: 135231 - RNA, 23 nt, Human
uagaaugaggcccagcaaccagc

SEQ ID NO: 135232 - RNA, 22 nt, Human
uagaggagaccucccuucccua

SEQ ID NO: 135233 - RNA, 19 nt, Human
uaguagaugcugcaggcac

SEQ ID NO: 135234 - RNA, 21 nt, Human
uauaacgcaggaaggaacaaa

SEQ ID NO: 135235 - RNA, 24 nt, Human
ucagcagccucaggccuggaugca

SEQ ID NO: 135236 - RNA, 20 nt, Human
ucccaccccuuccccccucc

SEQ ID NO: 135237 - RNA, 23 nt, Human
ucccaccccuuccccccuccccc

SEQ ID NO: 135238 - RNA, 24 nt, Human
ucccaccccuuccccccuccccca

SEQ ID NO: 135239 - RNA, 19 nt, Human
ucccacucacacacccaga

SEQ ID NO: 135240 - RNA, 18 nt, Human
uccccccucccccacccc

SEQ ID NO: 135241 - RNA, 20 nt, Human
uccccuggccugugcuuccu

SEQ ID NO: 135242 - RNA, 19 nt, Human
uccucccacucacacaccc

SEQ ID NO: 135243 - RNA, 19 nt, Human
uccucgggaccacgcuugg

SEQ ID NO: 135244 - RNA, 22 nt, Human
uccucgggaccacgcuuggucc

SEQ ID NO: 135245 - RNA, 20 nt, Human
ucgaggcuaugagacaggug

SEQ ID NO: 135246 - RNA, 20 nt, Human
ucugcccucuccucccacuc

SEQ ID NO: 135247 - RNA, 18 nt, Human
ugaagaagcaaagcagca

SEQ ID NO: 135248 - RNA, 23 nt, Human
ugaagacagaguaguagaugcug

SEQ ID NO: 135249 - RNA, 22 nt, Human
ugaaggugccauugaagaagca

SEQ ID NO: 135250 - RNA, 24 nt, Human
ugaggccaacagcaugugucugcc

SEQ ID NO: 135251 - RNA, 18 nt, Human
ugauggaagaaaggcagg

SEQ ID NO: 135252 - RNA, 21 nt, Human
ugcaugaccucaggggaccuc

SEQ ID NO: 135253 - RNA, 20 nt, Human
ugcccagauccacgggcaac

SEQ ID NO: 135254 - RNA, 21 nt, Human
ugccugucaccaggcuaaccc

SEQ ID NO: 135255 - RNA, 20 nt, Human
ugccuguguucaaucccucc

SEQ ID NO: 135256 - RNA, 22 nt, Human
uggaagaaaggcaggaauauga

SEQ ID NO: 135257 - RNA, 24 nt, Human
uggagagcgugagggcaggccugg

SEQ ID NO: 135258 - RNA, 21 nt, Human
uggcucccaccccuucccccc

SEQ ID NO: 135259 - RNA, 19 nt, Human
ugggaggcacagcauccuc

SEQ ID NO: 135260 - RNA, 20 nt, Human
uguccugcagaggaagagac

SEQ ID NO: 135261 - RNA, 18 nt, Human
uuccuggaagagguagaa

SEQ ID NO: 135262 - RNA, 19 nt, Human
uugaagaagcaaagcagca

SEQ ID NO: 135263 - RNA, 20 nt, Human
uuuuuuuuuuuuuuuuuugg

SEQ ID NO: 135264 - RNA, 27 nt, Human
aaacagccgagacccggggcucaggac

SEQ ID NO: 135265 - RNA, 23 nt, Human
aagauaauuuaaacacauuuuug

SEQ ID NO: 135266 - RNA, 20 nt, Human
aagcggcggggccgcccggg

SEQ ID NO: 135267 - RNA, 21 nt, Human
aagcggcggggccgcccgggu

SEQ ID NO: 135268 - RNA, 18 nt, Human
aaggaaaaaauaaaaagg

SEQ ID NO: 135269 - RNA, 22 nt, Human
acagacaccuuuauuuacaaac

SEQ ID NO: 135270 - RNA, 23 nt, Human
acucuguguccaaguccaggcua

SEQ ID NO: 135271 - RNA, 24 nt, Human
acugcaguuuucacaacugggggu

SEQ ID NO: 135272 - RNA, 22 nt, Human
agacccggggcucaggucagaa

SEQ ID NO: 135273 - RNA, 20 nt, Human
agagaggggcccguuuggug

SEQ ID NO: 135274 - RNA, 21 nt, Human
aggaaaaaauaaaaaggaggg

SEQ ID NO: 135275 - RNA, 20 nt, Human
aggaaggaaagaagcggcgg

SEQ ID NO: 135276 - RNA, 20 nt, Human
aggagggaaccccggcucgg

SEQ ID NO: 135277 - RNA, 23 nt, Human
aggcaccuaaacuuuuaaaaaaa

SEQ ID NO: 135278 - RNA, 18 nt, Human
agggaugggggcuccgag

SEQ ID NO: 135279 - RNA, 23 nt, Human
aggggcccguuugguggccccgg

SEQ ID NO: 135280 - RNA, 18 nt, Human
agguggguggcggcagcg

SEQ ID NO: 135281 - RNA, 20 nt, Human
caaguccaggcuaauaaucc

SEQ ID NO: 135282 - RNA, 23 nt, Human
caaguccgaggcggggcucgaaa

SEQ ID NO: 135283 - RNA, 25 nt, Human
cagcccggggcgaggaaggcgccag

SEQ ID NO: 135284 - RNA, 18 nt, Human
caggagagguggguggcg

SEQ ID NO: 135285 - RNA, 18 nt, Human
caggucagaaaugcggcc

SEQ ID NO: 135286 - RNA, 24 nt, Human
cccaaaauaccuuucauuucaaca

SEQ ID NO: 135287 - RNA, 19 nt, Human
cccccgagagaggggcccg

SEQ ID NO: 135288 - RNA, 18 nt, Human
ccccgagagaggggcccg

SEQ ID NO: 135289 - RNA, 21 nt, Human
cccgggacccagcucucagcc

SEQ ID NO: 135290 - RNA, 22 nt, Human
ccggggcgaggaaggcgccaga

SEQ ID NO: 135291 - RNA, 20 nt, Human
ccuuugccaagcugcugucc

SEQ ID NO: 135292 - RNA, 19 nt, Human
cgcgccugggaggcuucca

SEQ ID NO: 135293 - RNA, 23 nt, Human
cucccgggacccagcucucagcc

SEQ ID NO: 135294 - RNA, 25 nt, Human
cucccgggacccagcucucagccuu

SEQ ID NO: 135295 - RNA, 23 nt, Human
cugggaggcuuccaucucccggg

SEQ ID NO: 135296 - RNA, 18 nt, Human
gaaacagccgagacccgg

SEQ ID NO: 135297 - RNA, 26 nt, Human
gaaacagccgagacccggggcucagg

SEQ ID NO: 135298 - RNA, 21 nt, Human
gaaggaaagaagcggcggggc

SEQ ID NO: 135299 - RNA, 18 nt, Human
gagcgggcgaggagaaag

SEQ ID NO: 135300 - RNA, 21 nt, Human
gagcugagggagcgcuccugg

SEQ ID NO: 135301 - RNA, 19 nt, Human
gaggauaaguggucucugc

SEQ ID NO: 135302 - RNA, 28 nt, Human
gagguggguggcggcagcgacgacggcg

SEQ ID NO: 135303 - RNA, 18 nt, Human
gcagcgggccgggaggag

SEQ ID NO: 135304 - RNA, 19 nt, Human
gccccgggagugagcaggg

SEQ ID NO: 135305 - RNA, 23 nt, Human
gcggcagcgggccgggaggaggg

SEQ ID NO: 135306 - RNA, 21 nt, Human
ggaagccucgcgcgccuggga

SEQ ID NO: 135307 - RNA, 21 nt, Human
ggagggcgggcaggcgggacc

SEQ ID NO: 135308 - RNA, 21 nt, Human
ggaugaggagagagcugaggg

SEQ ID NO: 135309 - RNA, 23 nt, Human
ggccgggaggagggaaccccggc

SEQ ID NO: 135310 - RNA, 20 nt, Human
ggccugagacgggccacugc

SEQ ID NO: 135311 - RNA, 24 nt, Human
gggaacugcaggaaggaaagaagc

SEQ ID NO: 135312 - RNA, 25 nt, Human
gggggcuccgagggcugggaacugc

SEQ ID NO: 135313 - RNA, 20 nt, Human
ggguaagauaagggaugggg

SEQ ID NO: 135314 - RNA, 18 nt, Human
ggugauggaugaggagag

SEQ ID NO: 135315 - RNA, 21 nt, Human
guccgagcugagcccagggga

SEQ ID NO: 135316 - RNA, 18 nt, Human
ucacccggaggggaggga

SEQ ID NO: 135317 - RNA, 20 nt, Human
ucauccgcaaaggcaccuaa

SEQ ID NO: 135318 - RNA, 23 nt, Human
ucccgggacccagcucucagccc

SEQ ID NO: 135319 - RNA, 18 nt, Human
uccgagcugagcccaggg

SEQ ID NO: 135320 - RNA, 21 nt, Human
uccgaggcggggcucgaaaca

SEQ ID NO: 135321 - RNA, 18 nt, Human
ugaaauguuuuuaaagga

SEQ ID NO: 135322 - RNA, 18 nt, Human
ugaggauaaguggucucu

SEQ ID NO: 135323 - RNA, 19 nt, Human
ugauggaugaggagagagc

SEQ ID NO: 135324 - RNA, 20 nt, Human
ugcaggagagguggguggcg

SEQ ID NO: 135325 - RNA, 20 nt, Human
ugcaggucgcagccugcagg

SEQ ID NO: 135326 - RNA, 20 nt, Human
ugcggccuuuuagggaggcc

SEQ ID NO: 135327 - RNA, 19 nt, Human
uggcggcagcgggccggga

SEQ ID NO: 135328 - RNA, 19 nt, Human
ugggaacugcaggaaggaa

SEQ ID NO: 135329 - RNA, 20 nt, Human
aaagaaaaaaaaauacucaa

SEQ ID NO: 135330 - RNA, 19 nt, Human
aaagugucucucugagccu

SEQ ID NO: 135331 - RNA, 20 nt, Human
aaauggguugugcaaggcca

SEQ ID NO: 135332 - RNA, 22 nt, Human
aagaaaaaaaaauacucaaugu

SEQ ID NO: 135333 - RNA, 19 nt, Human
aagcgccgagggccacagc

SEQ ID NO: 135334 - RNA, 22 nt, Human
aagcgccgagggccacagccag

SEQ ID NO: 135335 - RNA, 19 nt, Human
aagugucucucugagccuc

SEQ ID NO: 135336 - RNA, 22 nt, Human
aauccaugggggcccccuccuc

SEQ ID NO: 135337 - RNA, 24 nt, Human
aauuccacauuucucugcaucucu

SEQ ID NO: 135338 - RNA, 22 nt, Human
acagccaggguaccgcggcgcc

SEQ ID NO: 135339 - RNA, 20 nt, Human
agaaggagugggggaguggc

SEQ ID NO: 135340 - RNA, 20 nt, Human
agcaaauagcaaaaagcgca

SEQ ID NO: 135341 - RNA, 22 nt, Human
agcgcagccaccaggaucgccc

SEQ ID NO: 135342 - RNA, 21 nt, Human
aggccaaaggcauacaaagaa

SEQ ID NO: 135343 - RNA, 21 nt, Human
agggaagaaggagugggggag

SEQ ID NO: 135344 - RNA, 22 nt, Human
agggagagagggaagaaggagu

SEQ ID NO: 135345 - RNA, 22 nt, Human
caaaggcauacaaagaaaaaaa

SEQ ID NO: 135346 - RNA, 22 nt, Human
caagaccaaggguucuggggac

SEQ ID NO: 135347 - RNA, 23 nt, Human
caauggcucucucuccagagucu

SEQ ID NO: 135348 - RNA, 23 nt, Human
cacaaauggguugugcaaggcca

SEQ ID NO: 135349 - RNA, 23 nt, Human
cacagccaggguaccgcggcgcc

SEQ ID NO: 135350 - RNA, 23 nt, Human
caccgcgccaggugauacaagac

SEQ ID NO: 135351 - RNA, 23 nt, Human
cagagaaaacccaucuggagcug

SEQ ID NO: 135352 - RNA, 23 nt, Human
cagccagcagcccccacacuuaa

SEQ ID NO: 135353 - RNA, 19 nt, Human
cagcggagaacgcgcgccu

SEQ ID NO: 135354 - RNA, 22 nt, Human
caggguaccgcggcgccugcgg

SEQ ID NO: 135355 - RNA, 18 nt, Human
ccccagccagcagccccc

SEQ ID NO: 135356 - RNA, 19 nt, Human
ccccaugacuuuccccucc

SEQ ID NO: 135357 - RNA, 25 nt, Human
ccccaugacuuuccccucccccccu

SEQ ID NO: 135358 - RNA, 23 nt, Human
cccccaugacuuuccccuccccc

SEQ ID NO: 135359 - RNA, 24 nt, Human
ccccuaaauccaugggggcccccu

SEQ ID NO: 135360 - RNA, 20 nt, Human
ccccucccccccuaaaucca

SEQ ID NO: 135361 - RNA, 20 nt, Human
ccccuuggccccugcccucu

SEQ ID NO: 135362 - RNA, 20 nt, Human
cccuaaauccaugggggccc

SEQ ID NO: 135363 - RNA, 18 nt, Human
ccuccagagaaaacccau

SEQ ID NO: 135364 - RNA, 18 nt, Human
ccucccagcccagaaggg

SEQ ID NO: 135365 - RNA, 20 nt, Human
ccuggguccugggcuuugca

SEQ ID NO: 135366 - RNA, 23 nt, Human
ccuggguccugggcuuugcagga

SEQ ID NO: 135367 - RNA, 20 nt, Human
cggcagcaaauagcaaaaag

SEQ ID NO: 135368 - RNA, 24 nt, Human
cgucggcagcaaauagcaaaagag

SEQ ID NO: 135369 - RNA, 21 nt, Human
cguggagcguuucaaccccca

SEQ ID NO: 135370 - RNA, 21 nt, Human
cguuucaacccccacguucac

SEQ ID NO: 135371 - RNA, 24 nt, Human
cucacaaauggguugugcaaggcc

SEQ ID NO: 135372 - RNA, 24 nt, Human
cugccuggguccugggcuuugcag

SEQ ID NO: 135373 - RNA, 25 nt, Human
cugcuccauuccuuuuucuccucua

SEQ ID NO: 135374 - RNA, 19 nt, Human
cugggugggugggagcuga

SEQ ID NO: 135375 - RNA, 25 nt, Human
cuguaguggcgauucaguccuuuuc

SEQ ID NO: 135376 - RNA, 19 nt, Human
gacccgcccuuccccagau

SEQ ID NO: 135377 - RNA, 19 nt, Human
gagagagggaagaaggagu

SEQ ID NO: 135378 - RNA, 21 nt, Human
gagagagggaagaaggagugg

SEQ ID NO: 135379 - RNA, 18 nt, Human
gaggagaaagggagagag

SEQ ID NO: 135380 - RNA, 22 nt, Human
gagggaagaaggagugggggag

SEQ ID NO: 135381 - RNA, 21 nt, Human
gcaaauagcaaaaagcgcagc

SEQ ID NO: 135382 - RNA, 19 nt, Human
gcuggagugaaggugucca

SEQ ID NO: 135383 - RNA, 19 nt, Human
ggagagagggaagaaggag

SEQ ID NO: 135384 - RNA, 24 nt, Human
ggcaagaccaaggguucuggggac

SEQ ID NO: 135385 - RNA, 18 nt, Human
ggcauacaaagaaaaaaa

SEQ ID NO: 135386 - RNA, 22 nt, Human
gggaaagggguuccgggggggu

SEQ ID NO: 135387 - RNA, 18 nt, Human
gggccccccagccagcag

SEQ ID NO: 135388 - RNA, 21 nt, Human
gggccccccagccagcagccc

SEQ ID NO: 135389 - RNA, 21 nt, Human
gggccggacgggccccccagc

SEQ ID NO: 135390 - RNA, 22 nt, Human
gggggaguggcaagaccaaggg

SEQ ID NO: 135391 - RNA, 20 nt, Human
gggggcccccuccucuccau

SEQ ID NO: 135392 - RNA, 23 nt, Human
guggcaagaccaaggguucuggg

SEQ ID NO: 135393 - RNA, 22 nt, Human
uacaaagaaaaaaaaauacuca

SEQ ID NO: 135394 - RNA, 23 nt, Human
uagcaaaaagcgcagccaccagg

SEQ ID NO: 135395 - RNA, 18 nt, Human
uaguccgcucccgcugcc

SEQ ID NO: 135396 - RNA, 21 nt, Human
uccaugggggcccccuccucu

SEQ ID NO: 135397 - RNA, 24 nt, Human
uccaugggggcccccuccucucca

SEQ ID NO: 135398 - RNA, 18 nt, Human
ucgcugggugggugggag

SEQ ID NO: 135399 - RNA, 18 nt, Human
ucucugagccucuuucag

SEQ ID NO: 135400 - RNA, 25 nt, Human
ugauggugguccacuucugcuuuug

SEQ ID NO: 135401 - RNA, 21 nt, Human
ugcaaggccaaaggcauacaa

SEQ ID NO: 135402 - RNA, 21 nt, Human
ugccuggguccugggcuuugc

SEQ ID NO: 135403 - RNA, 23 nt, Human
ugccuggguccugggcuuugcag

SEQ ID NO: 135404 - RNA, 24 nt, Human
ugcucccagggagcucccacucgu

SEQ ID NO: 135405 - RNA, 18 nt, Human
uggagugaagguguccag

SEQ ID NO: 135406 - RNA, 23 nt, Human
ugggaaagggguuccgggggggu

SEQ ID NO: 135407 - RNA, 23 nt, Human
ugggaaagggguuccgggggggu

SEQ ID NO: 135408 - RNA, 24 nt, Human
ugggggaguggcaagaccaagggu

SEQ ID NO: 135409 - RNA, 21 nt, Human
ugggugggagcugaugguggu

SEQ ID NO: 135410 - RNA, 21 nt, Human
uguccagcuggagugaaggug

SEQ ID NO: 135411 - RNA, 21 nt, Human
ugucucucugagccucuuuca

SEQ ID NO: 135412 - RNA, 18 nt, Human
ugugcaaggccaaaggca

SEQ ID NO: 135413 - RNA, 21 nt, Human
ugugcaaggccaaaggcauac

SEQ ID NO: 135414 - RNA, 19 nt, Human
uucaacccccacguucacc

SEQ ID NO: 135415 - RNA, 20 nt, Human
uuccgggggggugccccccc

SEQ ID NO: 135416 - RNA, 25 nt, Human
uucugcuuuugcucacaaauggguu

SEQ ID NO: 135417 - RNA, 24 nt, Human
uuguccagcuggagugaagguguc

SEQ ID NO: 135418 - RNA, 20 nt, Human
uuuugcucacaaauggguug

SEQ ID NO: 135419 - RNA, 22 nt, Human
aacccucucaacagugcuaaga

SEQ ID NO: 135420 - RNA, 21 nt, Human
caagaggaacaucccaagucc

SEQ ID NO: 135421 - RNA, 19 nt, Human
caccaagaggaacauccca

SEQ ID NO: 135422 - RNA, 25 nt, Human
caccaagaggaacaucccaaguccc

SEQ ID NO: 135423 - RNA, 23 nt, Human
cagugcuaagaaguaaguauuga

SEQ ID NO: 135424 - RNA, 19 nt, Human
caucccaaguccccgaguc

SEQ ID NO: 135425 - RNA, 19 nt, Human
ccaaguccccgagucaggg

SEQ ID NO: 135426 - RNA, 23 nt, Human
ccauccaggucagaacucucuug

SEQ ID NO: 135427 - RNA, 19 nt, Human
ccguaugaccaggugcagc

SEQ ID NO: 135428 - RNA, 19 nt, Human
cuccaaggaccaugagccu

SEQ ID NO: 135429 - RNA, 26 nt, Human
cuugaccucgcccugcaaccgguucc

SEQ ID NO: 135430 - RNA, 22 nt, Human
gcacaauguagggcucaaucug

SEQ ID NO: 135431 - RNA, 18 nt, Human
ggaacaucccaagucccc

SEQ ID NO: 135432 - RNA, 23 nt, Human
uaaaaggagguguguccucuagg

SEQ ID NO: 135433 - RNA, 19 nt, Human
uaacccucucaacagugcu

SEQ ID NO: 135434 - RNA, 18 nt, Human
uaaguaacccucucaaca

SEQ ID NO: 135435 - RNA, 21 nt, Human
uaaguaacccucucaacagug

SEQ ID NO: 135436 - RNA, 19 nt, Human
uccccgagucaggggucug

SEQ ID NO: 135437 - RNA, 20 nt, Human
ugacaccaagaggaacaucc

SEQ ID NO: 135438 - RNA, 19 nt, Human
ugagaagcauggauucugg

SEQ ID NO: 135439 - RNA, 22 nt, Human
ugcaacggguccuccaaggacc

SEQ ID NO: 135440 - RNA, 20 nt, Human
uggacauuuauagguaccua

SEQ ID NO: 135441 - RNA, 18 nt, Human
uuugcuggguucuucuca

SEQ ID NO: 135442 - RNA, 24 nt, Human
aaagugcugggauuacagguguga

SEQ ID NO: 135443 - RNA, 28 nt, Human
aacacacacacacacaaacauacauaua

SEQ ID NO: 135444 - RNA, 24 nt, Human
aagugauccaccugccucggccuc

SEQ ID NO: 135445 - RNA, 18 nt, Human
aagugcugggauuacagg

SEQ ID NO: 135446 - RNA, 19 nt, Human
aagugcugggauuacaggu

SEQ ID NO: 135447 - RNA, 26 nt, Human
aagugcugggauuacaggugugagcc

SEQ ID NO: 135448 - RNA, 23 nt, Human
acaaacacacacacacacaaaca

SEQ ID NO: 135449 - RNA, 24 nt, Human
acaaacauacauauacauaucccu

SEQ ID NO: 135450 - RNA, 25 nt, Human
acacaaacauacauauacauauccc

SEQ ID NO: 135451 - RNA, 26 nt, Human
acacaaacauacauauacauaucccu

SEQ ID NO: 135452 - RNA, 26 nt, Human
acacacacaaacacacacacacacaa

SEQ ID NO: 135453 - RNA, 25 nt, Human
acacacacacacaaacauacauaua

SEQ ID NO: 135454 - RNA, 23 nt, Human
acacacacacacacaaacauaca

SEQ ID NO: 135455 - RNA, 33 nt, Human
acacacacacacacaaacauacauauacauagu

SEQ ID NO: 135456 - RNA, 27 nt, Human
acauauacauaucccugaauuuacaua

SEQ ID NO: 135457 - RNA, 23 nt, Human
accuaggcuggagugcaguggug

SEQ ID NO: 135458 - RNA, 30 nt, Human
accucuauuucaagaugugaaauuggagag

SEQ ID NO: 135459 - RNA, 25 nt, Human
acucugucaccuaggcuggagugca

SEQ ID NO: 135460 - RNA, 18 nt, Human
agccuccaggguagcugg

SEQ ID NO: 135461 - RNA, 24 nt, Human
agcugggauuacaagcacaugcca

SEQ ID NO: 135462 - RNA, 25 nt, Human
aggcuggagugcaguggugccaucu

SEQ ID NO: 135463 - RNA, 22 nt, Human
aguagagaugggguuucuccau

SEQ ID NO: 135464 - RNA, 20 nt, Human
agugcaguggugccaucuug

SEQ ID NO: 135465 - RNA, 24 nt, Human
agugcaguggugccaucuuggcuc

SEQ ID NO: 135466 - RNA, 24 nt, Human
augggguuucuccauguuggccag

SEQ ID NO: 135467 - RNA, 24 nt, Human
auuuuuuuuuuuuuaguagagaug

SEQ ID NO: 135468 - RNA, 29 nt, Human
caaacacacacacacacaaacauacauag

SEQ ID NO: 135469 - RNA, 24 nt, Human
caaagugcugggauuacaggugug

SEQ ID NO: 135470 - RNA, 22 nt, Human
caagcaauucuccugccucagc

SEQ ID NO: 135471 - RNA, 27 nt, Human
caagcaauucuccugccucagccucca

SEQ ID NO: 135472 - RNA, 22 nt, Human
caagugauccaccugccucggc

SEQ ID NO: 135473 - RNA, 19 nt, Human
cacacaaacacacacacac

SEQ ID NO: 135474 - RNA, 24 nt, Human
cacacacaaacacacacacacaca

SEQ ID NO: 135475 - RNA, 19 nt, Human
cacacacaaacauacauau

SEQ ID NO: 135476 - RNA, 21 nt, Human
cacacacaaacauacauauac

SEQ ID NO: 135477 - RNA, 18 nt, Human
caccgcaaucucugccuc

SEQ ID NO: 135478 - RNA, 23 nt, Human
caccgcaaucucugccuccuggg

SEQ ID NO: 135479 - RNA, 24 nt, Human
caccuaggcuggagugcaguggug

SEQ ID NO: 135480 - RNA, 23 nt, Human
caccugccucggccucccaaagu

SEQ ID NO: 135481 - RNA, 19 nt, Human
cacuaagaagcaauuugca

SEQ ID NO: 135482 - RNA, 22 nt, Human
cacucugucaccuaggcuggag

SEQ ID NO: 135483 - RNA, 23 nt, Human
cacucugucaccuaggcuggagu

SEQ ID NO: 135484 - RNA, 23 nt, Human
cauguuggccaggcuggucuuga

SEQ ID NO: 135485 - RNA, 21 nt, Human
ccaaagugcugggauuacagg

SEQ ID NO: 135486 - RNA, 21 nt, Human
ccaaagugcugggauuacagg

SEQ ID NO: 135487 - RNA, 24 nt, Human
ccaaagugcugggauuacaggugu

SEQ ID NO: 135488 - RNA, 21 nt, Human
ccacgcccagccauaaauaca

SEQ ID NO: 135489 - RNA, 19 nt, Human
ccaggguagcugggauuac

SEQ ID NO: 135490 - RNA, 19 nt, Human
ccauguuggccaggcuggu

SEQ ID NO: 135491 - RNA, 21 nt, Human
ccauguuggccaggcuggucu

SEQ ID NO: 135492 - RNA, 21 nt, Human
ccauguuggccaggcuggucu

SEQ ID NO: 135493 - RNA, 26 nt, Human
ccucccuuaaauccucuuguggaaaa

SEQ ID NO: 135494 - RNA, 24 nt, Human
ccuccuggguucaagcaauucucc

SEQ ID NO: 135495 - RNA, 23 nt, Human
ccucuuguggaaaaacaucuagc

SEQ ID NO: 135496 - RNA, 21 nt, Human
ccugaccucaagugauccacc

SEQ ID NO: 135497 - RNA, 23 nt, Human
ccugaccucaagugauccaccug

SEQ ID NO: 135498 - RNA, 23 nt, Human
ccugaccucaagugauccaccug

SEQ ID NO: 135499 - RNA, 23 nt, Human
ccugccucagccuccaggguagc

SEQ ID NO: 135500 - RNA, 24 nt, Human
ccugccucggccucccaaagugcu

SEQ ID NO: 135501 - RNA, 23 nt, Human
ccuggguucaagcaauucuccug

SEQ ID NO: 135502 - RNA, 23 nt, Human
cucaagugauccaccugccucgg

SEQ ID NO: 135503 - RNA, 24 nt, Human
cucaccgcaaucucugccuccugg

SEQ ID NO: 135504 - RNA, 24 nt, Human
cucacucugucaccuaggcuggag

SEQ ID NO: 135505 - RNA, 22 nt, Human
cucacuuugaaaagugaaaggg

SEQ ID NO: 135506 - RNA, 24 nt, Human
cucagccuccaggguagcugggau

SEQ ID NO: 135507 - RNA, 21 nt, Human
cuccuggguucaagcaauucu

SEQ ID NO: 135508 - RNA, 23 nt, Human
cugccucagccuccaggguagcu

SEQ ID NO: 135509 - RNA, 22 nt, Human
gaaucacguacuccuuucccaa

SEQ ID NO: 135510 - RNA, 24 nt, Human
gaccucaagugauccaccugccuc

SEQ ID NO: 135511 - RNA, 18 nt, Human
gagaugggguuucuccau

SEQ ID NO: 135512 - RNA, 24 nt, Human
gagaugggguuucuccauguuggc

SEQ ID NO: 135513 - RNA, 23 nt, Human
gauuacaagcacaugccacugca

SEQ ID NO: 135514 - RNA, 18 nt, Human
gauuacaggugugagcca

SEQ ID NO: 135515 - RNA, 21 nt, Human
gauuacaggugugagccacca

SEQ ID NO: 135516 - RNA, 22 nt, Human
gauuacaggugugagccaccac

SEQ ID NO: 135517 - RNA, 21 nt, Human
gcucaccgcaaucucugccuc

SEQ ID NO: 135518 - RNA, 21 nt, Human
gcuggagugcaguggugccag

SEQ ID NO: 135519 - RNA, 23 nt, Human
gcuggucuugaccuccugaccuc

SEQ ID NO: 135520 - RNA, 20 nt, Human
ggaaaguccuuaggagaaug

SEQ ID NO: 135521 - RNA, 20 nt, Human
ggaaucacguacuccuuucc

SEQ ID NO: 135522 - RNA, 19 nt, Human
ggccaggcuggucuugacc

SEQ ID NO: 135523 - RNA, 24 nt, Human
ggcuggucuugaccuccugaccuc

SEQ ID NO: 135524 - RNA, 18 nt, Human
gggguuucuccauguugg

SEQ ID NO: 135525 - RNA, 22 nt, Human
gggguuucuccauguuggccag

SEQ ID NO: 135526 - RNA, 28 nt, Human
gguauacacacacaaacacacacacaca

SEQ ID NO: 135527 - RNA, 18 nt, Human
guagcugggauuacaagc

SEQ ID NO: 135528 - RNA, 22 nt, Human
guagcugggauuacaagcacau

SEQ ID NO: 135529 - RNA, 27 nt, Human
guauacacacacaaacacacacacaca

SEQ ID NO: 135530 - RNA, 24 nt, Human
gugauccaccugccucggccuccc

SEQ ID NO: 135531 - RNA, 25 nt, Human
guguguguguccuauaaacauuccu

SEQ ID NO: 135532 - RNA, 23 nt, Human
uaauuuuuuuuuuuuuaguagag

SEQ ID NO: 135533 - RNA, 24 nt, Human
uaauuuuuuuuuuuuuaguagaga

SEQ ID NO: 135534 - RNA, 21 nt, Human
uacaagcacaugccacugcac

SEQ ID NO: 135535 - RNA, 22 nt, Human
uacacacacaaacacacacaca

SEQ ID NO: 135536 - RNA, 24 nt, Human
uacaggugugagccaccacgccca

SEQ ID NO: 135537 - RNA, 24 nt, Human
uaguagagaugggguuucuccaug

SEQ ID NO: 135538 - RNA, 19 nt, Human
uauauacauacacagagug

SEQ ID NO: 135539 - RNA, 20 nt, Human
uauauacauacacagagugg

SEQ ID NO: 135540 - RNA, 23 nt, Human
uauauauacauacacagagugag

SEQ ID NO: 135541 - RNA, 25 nt, Human
uaugucagguauacacacacaaaca

SEQ ID NO: 135542 - RNA, 19 nt, Human
ucaagcaauucuccugccu

SEQ ID NO: 135543 - RNA, 21 nt, Human
ucaagugauccaccugccucg

SEQ ID NO: 135544 - RNA, 24 nt, Human
ucaccgcaaucucugccuccuggg

SEQ ID NO: 135545 - RNA, 25 nt, Human
ucaccgcaaucucugccuccugggu

SEQ ID NO: 135546 - RNA, 24 nt, Human
ucaccuaggcuggagugcaguggu

SEQ ID NO: 135547 - RNA, 24 nt, Human
ucacucugucaccuaggcuggagu

SEQ ID NO: 135548 - RNA, 23 nt, Human
ucccaaagugcugggauuacagg

SEQ ID NO: 135549 - RNA, 23 nt, Human
ucccaacaacuaguuuuccauag

SEQ ID NO: 135550 - RNA, 21 nt, Human
uccuggguucaagcaauucuc

SEQ ID NO: 135551 - RNA, 24 nt, Human
uccuggguucaagcaauucuccug

SEQ ID NO: 135552 - RNA, 18 nt, Human
ucggccucccaaagugcu

SEQ ID NO: 135553 - RNA, 23 nt, Human
ucucacucugucaccuaggcugg

SEQ ID NO: 135554 - RNA, 24 nt, Human
ucucacucugucaccuaggcugga

SEQ ID NO: 135555 - RNA, 24 nt, Human
ucuccugccucagccuccagggua

SEQ ID NO: 135556 - RNA, 24 nt, Human
ucugccuccuggguucaagcaauu

SEQ ID NO: 135557 - RNA, 24 nt, Human
ucugucaccuaggcuggagugcag

SEQ ID NO: 135558 - RNA, 21 nt, Human
ugaaaagugggcaacagaaaa

SEQ ID NO: 135559 - RNA, 21 nt, Human
ugaaagggagggaaucacgua

SEQ ID NO: 135560 - RNA, 24 nt, Human
ugaccucaagugauccaccugccu

SEQ ID NO: 135561 - RNA, 22 nt, Human
ugagacggagucucacucuguc

SEQ ID NO: 135562 - RNA, 24 nt, Human
ugccucagccuccaggguagcugg

SEQ ID NO: 135563 - RNA, 21 nt, Human
ugccucggccucccaaagugc

SEQ ID NO: 135564 - RNA, 24 nt, Human
ugccucggccucccaaagugcugg

SEQ ID NO: 135565 - RNA, 24 nt, Human
ugcugggauuacaggugugagcca

SEQ ID NO: 135566 - RNA, 28 nt, Human
uggagugcaguggugccauccuagcacg

SEQ ID NO: 135567 - RNA, 23 nt, Human
uggagugcaguggugccaucuug

SEQ ID NO: 135568 - RNA, 24 nt, Human
uggagugcaguggugccaucuugg

SEQ ID NO: 135569 - RNA, 24 nt, Human
uggccaggcuggucuugaccuccu

SEQ ID NO: 135570 - RNA, 21 nt, Human
ugggauuacaagcacaugcca

SEQ ID NO: 135571 - RNA, 22 nt, Human
ugggauuacaagcacaugccac

SEQ ID NO: 135572 - RNA, 22 nt, Human
ugggauuacaagcacaugccac

SEQ ID NO: 135573 - RNA, 24 nt, Human
ugggauuacaagcacaugccacug

SEQ ID NO: 135574 - RNA, 24 nt, Human
ugggauuacaagcacaugccacug

SEQ ID NO: 135575 - RNA, 18 nt, Human
ugggauuacaggugugag

SEQ ID NO: 135576 - RNA, 19 nt, Human
ugggauuacaggugugagc

SEQ ID NO: 135577 - RNA, 22 nt, Human
ugggauuacaggugugagccac

SEQ ID NO: 135578 - RNA, 23 nt, Human
ugggauuacaggugugagccacc

SEQ ID NO: 135579 - RNA, 24 nt, Human
ugggauuacaggugugagccacca

SEQ ID NO: 135580 - RNA, 24 nt, Human
ugggguuucuccauguuggccagg

SEQ ID NO: 135581 - RNA, 21 nt, Human
uggguucaagcaauucuccug

SEQ ID NO: 135582 - RNA, 23 nt, Human
uggguucaagcaauucuccugcc

SEQ ID NO: 135583 - RNA, 20 nt, Human
ugucaccuaggcuggagugc

SEQ ID NO: 135584 - RNA, 22 nt, Human
uguccuauaaacauuccucccu

SEQ ID NO: 135585 - RNA, 18 nt, Human
uguggaaaaacaucuagc

SEQ ID NO: 135586 - RNA, 25 nt, Human
uguguguguguccuauaaacauucc

SEQ ID NO: 135587 - RNA, 23 nt, Human
uuacaagcacaugccacugcacu

SEQ ID NO: 135588 - RNA, 18 nt, Human
uuaguagagaugggguuu

SEQ ID NO: 135589 - RNA, 24 nt, Human
uuaguagagaugggguuucuccau

SEQ ID NO: 135590 - RNA, 21 nt, Human
uucaagcaauucuccugccuc

SEQ ID NO: 135591 - RNA, 24 nt, Human
uucaagcaauucuccugccucagc

SEQ ID NO: 135592 - RNA, 22 nt, Human
uuccauagguauauauacauac

SEQ ID NO: 135593 - RNA, 22 nt, Human
uucuccugccucagccuccagg

SEQ ID NO: 135594 - RNA, 24 nt, Human
uuggccaggcuggucuugaccucc

SEQ ID NO: 135595 - RNA, 28 nt, Human
uuuccauagguauauauacauacacaga

SEQ ID NO: 135596 - RNA, 21 nt, Human
uuucuccauguuggccaggcu

SEQ ID NO: 135597 - RNA, 19 nt, Human
uuugaaaagugaaagggag

SEQ ID NO: 135598 - RNA, 23 nt, Human
uuuucuguugcuauaaaggugaa

SEQ ID NO: 135599 - RNA, 22 nt, Human
uuuuuaguagagaugggguuuc

SEQ ID NO: 135600 - RNA, 23 nt, Human
uuuuuuaguagagaugggguuuc

SEQ ID NO: 135601 - RNA, 26 nt, Human
uuuuuuuuuuuugagacggagucuca

SEQ ID NO: 135602 - RNA, 22 nt, Human
uuuuuuuuuuuuuugagacgga

SEQ ID NO: 135603 - RNA, 18 nt, Human
uuuuuuuuuuuuuuuuug

SEQ ID NO: 135604 - RNA, 23 nt, Human
aaaaaaagaaaaagccaugaaga

SEQ ID NO: 135605 - RNA, 24 nt, Human
aaaaaagcaacaaaaaccaaacca

SEQ ID NO: 135606 - RNA, 24 nt, Human
aaaaaagcaacaaaaaccaaacca

SEQ ID NO: 135607 - RNA, 18 nt, Human
aaaaacaaugagaaacca

SEQ ID NO: 135608 - RNA, 23 nt, Human
aaaaaccaaaccacccaguuccu

SEQ ID NO: 135609 - RNA, 23 nt, Human
aaaaaccaaaccacccaguuccu

SEQ ID NO: 135610 - RNA, 24 nt, Human
aaaaaccucuuucgguccccacgg

SEQ ID NO: 135611 - RNA, 20 nt, Human
aaaaagaaagaaauagaaga

SEQ ID NO: 135612 - RNA, 20 nt, Human
aaaaagaaagaaauagaaga

SEQ ID NO: 135613 - RNA, 18 nt, Human
aaaaagaaauaaaauggc

SEQ ID NO: 135614 - RNA, 18 nt, Human
aaaaagaaauaaaauggc

SEQ ID NO: 135615 - RNA, 19 nt, Human
aaaaagaaauaaaauggca

SEQ ID NO: 135616 - RNA, 21 nt, Human
aaaaagaaauaaaauggcaug

SEQ ID NO: 135617 - RNA, 21 nt, Human
aaaaagaaauaaaauggcaug

SEQ ID NO: 135618 - RNA, 20 nt, Human
aaaaagcaacaaaaaccaaa

SEQ ID NO: 135619 - RNA, 20 nt, Human
aaaaagcaacaaaaaccaaa

SEQ ID NO: 135620 - RNA, 24 nt, Human
aaaaagcaacaaaaaccaaaccac

SEQ ID NO: 135621 - RNA, 24 nt, Human
aaaaagcaacaaaaaccaaaccac

SEQ ID NO: 135622 - RNA, 21 nt, Human
aaacacacaaucuuuuugcac

SEQ ID NO: 135623 - RNA, 21 nt, Human
aaacagcaucuuucuccugau

SEQ ID NO: 135624 - RNA, 22 nt, Human
aaacccacucuccaaaagcuaa

SEQ ID NO: 135625 - RNA, 21 nt, Human
aaacgguuuaccgccuuccac

SEQ ID NO: 135626 - RNA, 26 nt, Human
aaagaaaaacaaaaagauuaaaacaa

SEQ ID NO: 135627 - RNA, 26 nt, Human
aaagaaaaacaaaaagauuaaaacaa

SEQ ID NO: 135628 - RNA, 20 nt, Human
aaagaacacaacacgaaaua

SEQ ID NO: 135629 - RNA, 20 nt, Human
aaagaacacaacacgaaaua

SEQ ID NO: 135630 - RNA, 18 nt, Human
aaaugcaguaaaacugaa

SEQ ID NO: 135631 - RNA, 18 nt, Human
aaaugcaguaaaacugaa

SEQ ID NO: 135632 - RNA, 20 nt, Human
aaaugcugcccuuuagacaa

SEQ ID NO: 135633 - RNA, 20 nt, Human
aaccaugcgggaaucaggag

SEQ ID NO: 135634 - RNA, 20 nt, Human
aaccaugcgggaaucaggag

SEQ ID NO: 135635 - RNA, 18 nt, Human
aacccacucuccaaaagc

SEQ ID NO: 135636 - RNA, 18 nt, Human
aacccacucuccaaaagc

SEQ ID NO: 135637 - RNA, 20 nt, Human
aacccacucuccaaaagcua

SEQ ID NO: 135638 - RNA, 20 nt, Human
aacccacucuccaaaagcua

SEQ ID NO: 135639 - RNA, 25 nt, Human
aagaaagaauuauaaaggaaaaaga

SEQ ID NO: 135640 - RNA, 25 nt, Human
aagaaagaauuauaaaggaaaaaga

SEQ ID NO: 135641 - RNA, 18 nt, Human
aagcaacaaaaaccaaac

SEQ ID NO: 135642 - RNA, 18 nt, Human
aagcaacaaaaaccaaac

SEQ ID NO: 135643 - RNA, 20 nt, Human
aagcaacaaaaaccaaacca

SEQ ID NO: 135644 - RNA, 20 nt, Human
aagcaacaaaaaccaaacca

SEQ ID NO: 135645 - RNA, 25 nt, Human
aagcaacaaaaaccaaaccacccag

SEQ ID NO: 135646 - RNA, 25 nt, Human
aagcaacaaaaaccaaaccacccag

SEQ ID NO: 135647 - RNA, 19 nt, Human
aagcagacaaacacacaag

SEQ ID NO: 135648 - RNA, 21 nt, Human
aaggucuucaagcuuuuuuuc

SEQ ID NO: 135649 - RNA, 23 nt, Human
aaguaaacgguuuaccgccuucc

SEQ ID NO: 135650 - RNA, 25 nt, Human
aaucaaccaaccaaccgauuacuca

SEQ ID NO: 135651 - RNA, 25 nt, Human
aaucaaccaaccaaccgauuacuca

SEQ ID NO: 135652 - RNA, 21 nt, Human
aauggacaaaacccacucucc

SEQ ID NO: 135653 - RNA, 21 nt, Human
aauggacaaaacccacucucc

SEQ ID NO: 135654 - RNA, 20 nt, Human
acaaaaaccaaaucuucaug

SEQ ID NO: 135655 - RNA, 20 nt, Human
acaaaaaccaaaucuucaug

SEQ ID NO: 135656 - RNA, 23 nt, Human
acacaacacgaaauaauguccaa

SEQ ID NO: 135657 - RNA, 23 nt, Human
acacaacacgaaauaauguccaa

SEQ ID NO: 135658 - RNA, 19 nt, Human
acacaagcauuuacugauu

SEQ ID NO: 135659 - RNA, 24 nt, Human
acacaaugagauacaaaaagacac

SEQ ID NO: 135660 - RNA, 21 nt, Human
acagguugugucaccagagua

SEQ ID NO: 135661 - RNA, 27 nt, Human
acauuaaggaaauaggcuggaaaaaaa

SEQ ID NO: 135662 - RNA, 20 nt, Human
accacacacaaugagauaca

SEQ ID NO: 135663 - RNA, 21 nt, Human
accacacaugagauacaaaga

SEQ ID NO: 135664 - RNA, 18 nt, Human
accacuacccuucacaaa

SEQ ID NO: 135665 - RNA, 19 nt, Human
accacuacccuucacaaaa

SEQ ID NO: 135666 - RNA, 19 nt, Human
accacuacccuucacaaaa

SEQ ID NO: 135667 - RNA, 24 nt, Human
accacuacccuucacaaaaauaua

SEQ ID NO: 135668 - RNA, 24 nt, Human
accacuacccuucacaaaaauaua

SEQ ID NO: 135669 - RNA, 18 nt, Human
accuguuucuuccacucc

SEQ ID NO: 135670 - RNA, 19 nt, Human
accuucauaggaaagcuuu

SEQ ID NO: 135671 - RNA, 21 nt, Human
acgccaaaaggaugcaaaaca

SEQ ID NO: 135672 - RNA, 21 nt, Human
acgccaaaaggaugcaaaaca

SEQ ID NO: 135673 - RNA, 20 nt, Human
acucuuguggauccuuuuuc

SEQ ID NO: 135674 - RNA, 24 nt, Human
acucuuguggauccuuuuucuuuu

SEQ ID NO: 135675 - RNA, 20 nt, Human
acuggcugaguggcugguuu

SEQ ID NO: 135676 - RNA, 20 nt, Human
acuuagaaaauugugcauuu

SEQ ID NO: 135677 - RNA, 20 nt, Human
acuuagaaaauugugcauuu

SEQ ID NO: 135678 - RNA, 22 nt, Human
acuugaugucagcccacucucc

SEQ ID NO: 135679 - RNA, 22 nt, Human
acuugaugucagcccacucucc

SEQ ID NO: 135680 - RNA, 19 nt, Human
agaaaaaaaaugugaagga

SEQ ID NO: 135681 - RNA, 18 nt, Human
agaacuagaaguuacucu

SEQ ID NO: 135682 - RNA, 18 nt, Human
agaaucucugaccagccu

SEQ ID NO: 135683 - RNA, 19 nt, Human
agcaacaaaaaccaaacca

SEQ ID NO: 135684 - RNA, 19 nt, Human
agcaacaaaaaccaaacca

SEQ ID NO: 135685 - RNA, 21 nt, Human
agcaacaaaaaccaaaccacc

SEQ ID NO: 135686 - RNA, 21 nt, Human
agcaacaaaaaccaaaccacc

SEQ ID NO: 135687 - RNA, 24 nt, Human
agcaacaaaaaccaaaccacccag

SEQ ID NO: 135688 - RNA, 24 nt, Human
agcaacaaaaaccaaaccacccag

SEQ ID NO: 135689 - RNA, 19 nt, Human
agcaauccugagaaaaccc

SEQ ID NO: 135690 - RNA, 18 nt, Human
agcagaugauuuaacugc

SEQ ID NO: 135691 - RNA, 22 nt, Human
agccagcaaugccuccgcacaa

SEQ ID NO: 135692 - RNA, 21 nt, Human
agcccacucuccaaaagcuaa

SEQ ID NO: 135693 - RNA, 18 nt, Human
agccugccccacucagcu

SEQ ID NO: 135694 - RNA, 18 nt, Human
agccugccccacucagcu

SEQ ID NO: 135695 - RNA, 24 nt, Human
agcgauaaaaaaaaccugguaaaa

SEQ ID NO: 135696 - RNA, 22 nt, Human
aggaaaaaaaugcaagacaaaa

SEQ ID NO: 135697 - RNA, 22 nt, Human
aggaaaaaaaugcaagacaaaa

SEQ ID NO: 135698 - RNA, 21 nt, Human
aggaacaccccaaaaccaaag

SEQ ID NO: 135699 - RNA, 21 nt, Human
aggaacaccccaaaaccaaag

SEQ ID NO: 135700 - RNA, 22 nt, Human
aggaagcugaauguaucaauca

SEQ ID NO: 135701 - RNA, 22 nt, Human
aggaagcugaauguaucaauca

SEQ ID NO: 135702 - RNA, 19 nt, Human
aggaggucuaggaggcgcc

SEQ ID NO: 135703 - RNA, 19 nt, Human
aggaggucuaggaggcgcc

SEQ ID NO: 135704 - RNA, 19 nt, Human
aggcacagaaucucugacc

SEQ ID NO: 135705 - RNA, 22 nt, Human
aguaaacgguuuaccgccuucc

SEQ ID NO: 135706 - RNA, 18 nt, Human
aguaaccccuuguuuuaa

SEQ ID NO: 135707 - RNA, 24 nt, Human
aguagacagugacuagauaugacc

SEQ ID NO: 135708 - RNA, 24 nt, Human
auaugcaaaaaaagaaaaagccuu

SEQ ID NO: 135709 - RNA, 24 nt, Human
auaugcaaaaaaagaaaaagccuu

SEQ ID NO: 135710 - RNA, 22 nt, Human
aucagcuuauuuuucucuuuuc

SEQ ID NO: 135711 - RNA, 22 nt, Human
auccuggaguuccuuaauaagg

SEQ ID NO: 135712 - RNA, 20 nt, Human
auccuguaggucacugaaga

SEQ ID NO: 135713 - RNA, 20 nt, Human
auccuguaggucacugaaga

SEQ ID NO: 135714 - RNA, 23 nt, Human
aucucugaccagccucacaaaag

SEQ ID NO: 135715 - RNA, 23 nt, Human
aucuuccugaaagcauucuauua

SEQ ID NO: 135716 - RNA, 23 nt, Human
aucuucuaacuuccucuucacug

SEQ ID NO: 135717 - RNA, 18 nt, Human
augagauacaaagacaca

SEQ ID NO: 135718 - RNA, 20 nt, Human
auguaaauaaaaagaaagaa

SEQ ID NO: 135719 - RNA, 18 nt, Human
augugugugugugugugu

SEQ ID NO: 135720 - RNA, 18 nt, Human
augugugugugugugugu

SEQ ID NO: 135721 - RNA, 22 nt, Human
auuaugaaggaaaaagaaagaa

SEQ ID NO: 135722 - RNA, 22 nt, Human
auuaugaaggaaaaagaaagaa

SEQ ID NO: 135723 - RNA, 22 nt, Human
auucguaucucuuuaucuauau

SEQ ID NO: 135724 - RNA, 22 nt, Human
auucguaucucuuuaucuauau

SEQ ID NO: 135725 - RNA, 22 nt, Human
auucugcuccuucuucaucugu

SEQ ID NO: 135726 - RNA, 18 nt, Human
auuguucugcaaaacccg

SEQ ID NO: 135727 - RNA, 20 nt, Human
caaaaagacacaagcauuua

SEQ ID NO: 135728 - RNA, 24 nt, Human
caaaacccacucuccaaaagcuaa

SEQ ID NO: 135729 - RNA, 24 nt, Human
caaaacccacucuccaaaagcuaa

SEQ ID NO: 135730 - RNA, 24 nt, Human
caaaacccgcagugccuuguugac

SEQ ID NO: 135731 - RNA, 24 nt, Human
caaaacccgcagugccuuguugac

SEQ ID NO: 135732 - RNA, 22 nt, Human
caacaaacuucagcagcuuuaa

SEQ ID NO: 135733 - RNA, 25 nt, Human
caacacugagugagucaacacagua

SEQ ID NO: 135734 - RNA, 25 nt, Human
caacucuuccaccaguaacuugacu

SEQ ID NO: 135735 - RNA, 20 nt, Human
caagacaaaaaccaaaucuu

SEQ ID NO: 135736 - RNA, 20 nt, Human
caagacaaaaaccaaaucuu

SEQ ID NO: 135737 - RNA, 21 nt, Human
caagacaaaaaccaaaucuuc

SEQ ID NO: 135738 - RNA, 21 nt, Human
caagacaaaaaccaaaucuuc

SEQ ID NO: 135739 - RNA, 21 nt, Human
caagugacuagauaugaccac

SEQ ID NO: 135740 - RNA, 22 nt, Human
caaugccuccgcacaaagcuuu

SEQ ID NO: 135741 - RNA, 26 nt, Human
caauuuuuguuuguuuguuuauauau

SEQ ID NO: 135742 - RNA, 26 nt, Human
caauuuuuguuuguuuguuuauauau

SEQ ID NO: 135743 - RNA, 18 nt, Human
cacaaaagcagacaaaca

SEQ ID NO: 135744 - RNA, 23 nt, Human
cacaaaagcagacaaacacacaa

SEQ ID NO: 135745 - RNA, 30 nt, Human
cacaauaucacguacauuaaggaaauaggg

SEQ ID NO: 135746 - RNA, 21 nt, Human
cacaguucaugggcuucuggg

SEQ ID NO: 135747 - RNA, 21 nt, Human
cacaguucaugggcuucuggg

SEQ ID NO: 135748 - RNA, 20 nt, Human
caccuguuucuuccacuccg

SEQ ID NO: 135749 - RNA, 18 nt, Human
cagaauaccuucugauug

SEQ ID NO: 135750 - RNA, 18 nt, Human
cagaauaccuucugauug

SEQ ID NO: 135751 - RNA, 21 nt, Human
cagagcucagaucuucuaacu

SEQ ID NO: 135752 - RNA, 25 nt, Human
cagcaaugccuccgcacaaagcuuu

SEQ ID NO: 135753 - RNA, 18 nt, Human
cagcagcuuuaaaaaaag

SEQ ID NO: 135754 - RNA, 19 nt, Human
cagcccacucuccaaaagc

SEQ ID NO: 135755 - RNA, 19 nt, Human
cagcccacucuccaaaagc

SEQ ID NO: 135756 - RNA, 19 nt, Human
cagcgauaaaaaaaaccug

SEQ ID NO: 135757 - RNA, 22 nt, Human
cagcugagaggaguucaaauau

SEQ ID NO: 135758 - RNA, 22 nt, Human
cagcuguuugcagaccuccugc

SEQ ID NO: 135759 - RNA, 18 nt, Human
caggaacaccccaaaacc

SEQ ID NO: 135760 - RNA, 18 nt, Human
caggaacaccccaaaacc

SEQ ID NO: 135761 - RNA, 23 nt, Human
caggaagcugaauguaucaauca

SEQ ID NO: 135762 - RNA, 23 nt, Human
caggaagcugaauguaucaauca

SEQ ID NO: 135763 - RNA, 18 nt, Human
caguaaaacugaaguuua

SEQ ID NO: 135764 - RNA, 18 nt, Human
caguaaaacugaaguuua

SEQ ID NO: 135765 - RNA, 21 nt, Human
caguaucacaaaugugauggg

SEQ ID NO: 135766 - RNA, 23 nt, Human
cauccuggaguuccuuaauaagg

SEQ ID NO: 135767 - RNA, 23 nt, Human
cauucuucugaauggcuguugau

SEQ ID NO: 135768 - RNA, 21 nt, Human
ccauagcccuccagcccuauc

SEQ ID NO: 135769 - RNA, 21 nt, Human
ccauagcccuccagcccuauc

SEQ ID NO: 135770 - RNA, 21 nt, Human
cccacaugggacaauaaaucu

SEQ ID NO: 135771 - RNA, 21 nt, Human
cccacaugggacaauaaaucu

SEQ ID NO: 135772 - RNA, 19 nt, Human
cccagagccgccgggcucc

SEQ ID NO: 135773 - RNA, 20 nt, Human
ccccaaaaccaaagugaggu

SEQ ID NO: 135774 - RNA, 20 nt, Human
ccccaaaaccaaagugaggu

SEQ ID NO: 135775 - RNA, 18 nt, Human
cccccugugagauaaagu

SEQ ID NO: 135776 - RNA, 22 nt, Human
ccuuggguaaagaaaaggucca

SEQ ID NO: 135777 - RNA, 22 nt, Human
ccuuggguaaagaaaaggucca

SEQ ID NO: 135778 - RNA, 20 nt, Human
cgcugccucaaaguuuugug

SEQ ID NO: 135779 - RNA, 23 nt, Human
cuagaaguuacucuaugugucag

SEQ ID NO: 135780 - RNA, 23 nt, Human
cucaucccacaugggacaauaaa

SEQ ID NO: 135781 - RNA, 23 nt, Human
cucaucccacaugggacaauaaa

SEQ ID NO: 135782 - RNA, 22 nt, Human
cuccccuuugaucuugagaauc

SEQ ID NO: 135783 - RNA, 19 nt, Human
cuccugauucugucaucuu

SEQ ID NO: 135784 - RNA, 18 nt, Human
cucuuucgguccccacgg

SEQ ID NO: 135785 - RNA, 20 nt, Human
cugaaagcauucuauuacug

SEQ ID NO: 135786 - RNA, 20 nt, Human
cugacaguucucaaaugagc

SEQ ID NO: 135787 - RNA, 20 nt, Human
cugacaguucucaaaugagc

SEQ ID NO: 135788 - RNA, 20 nt, Human
cuggagauuugucugcuuga

SEQ ID NO: 135789 - RNA, 18 nt, Human
cugucaucuuccugaaag

SEQ ID NO: 135790 - RNA, 22 nt, Human
cugucuuacaccuuuucccaaa

SEQ ID NO: 135791 - RNA, 22 nt, Human
cugucuuacaccuuuucccaaa

SEQ ID NO: 135792 - RNA, 22 nt, Human
cuguuugcagaccuccugccac

SEQ ID NO: 135793 - RNA, 20 nt, Human
cuuagaaacuacugaaaucu

SEQ ID NO: 135794 - RNA, 20 nt, Human
cuuagaaacuacugaaaucu

SEQ ID NO: 135795 - RNA, 18 nt, Human
cuucaagcuuuuuuucaa

SEQ ID NO: 135796 - RNA, 22 nt, Human
cuucccagagccgccgggcucc

SEQ ID NO: 135797 - RNA, 21 nt, Human
cuugaugucagcccacucucc

SEQ ID NO: 135798 - RNA, 21 nt, Human
cuugaugucagcccacucucc

SEQ ID NO: 135799 - RNA, 20 nt, Human
cuuugaucuugagaaucauu

SEQ ID NO: 135800 - RNA, 22 nt, Human
cuuuuguucuucuagccucuuu

SEQ ID NO: 135801 - RNA, 21 nt, Human
cuuuuucuuuuggcaguuuuu

SEQ ID NO: 135802 - RNA, 20 nt, Human
gaaaaauccauucuagacca

SEQ ID NO: 135803 - RNA, 20 nt, Human
gaaaaauccauucuagacca

SEQ ID NO: 135804 - RNA, 24 nt, Human
gaaagcaagugacuagauaugacc

SEQ ID NO: 135805 - RNA, 24 nt, Human
gaauaccuucugauugauuuccac

SEQ ID NO: 135806 - RNA, 24 nt, Human
gaauaccuucugauugauuuccac

SEQ ID NO: 135807 - RNA, 18 nt, Human
gacaaaacaugccaugug

SEQ ID NO: 135808 - RNA, 18 nt, Human
gacaaaacaugccaugug

SEQ ID NO: 135809 - RNA, 19 nt, Human
gagaauucccuggcgcagg

SEQ ID NO: 135810 - RNA, 21 nt, Human
gauccuguugcauagcaaucc

SEQ ID NO: 135811 - RNA, 20 nt, Human
gauugauuuccacugaagca

SEQ ID NO: 135812 - RNA, 20 nt, Human
gauugauuuccacugaagca

SEQ ID NO: 135813 - RNA, 22 nt, Human
gcaagacaaaaaccaaaucuuc

SEQ ID NO: 135814 - RNA, 22 nt, Human
gcaagacaaaaaccaaaucuuc

SEQ ID NO: 135815 - RNA, 23 nt, Human
gcauuugggagugaaaggagggu

SEQ ID NO: 135816 - RNA, 19 nt, Human
gccaaaaggaugcaaaaca

SEQ ID NO: 135817 - RNA, 19 nt, Human
gccaaaaggaugcaaaaca

SEQ ID NO: 135818 - RNA, 20 nt, Human
gccucccagaucugaguccu

SEQ ID NO: 135819 - RNA, 22 nt, Human
gcgcaggggcaacucuuccacc

SEQ ID NO: 135820 - RNA, 21 nt, Human
gcugacaguucucaaaugagc

SEQ ID NO: 135821 - RNA, 21 nt, Human
gcugacaguucucaaaugagc

SEQ ID NO: 135822 - RNA, 21 nt, Human
ggaaaaauccauucuagacca

SEQ ID NO: 135823 - RNA, 21 nt, Human
ggaaaaauccauucuagacca

SEQ ID NO: 135824 - RNA, 19 nt, Human
ggacaaaacccacucucca

SEQ ID NO: 135825 - RNA, 19 nt, Human
ggacaaaacccacucucca

SEQ ID NO: 135826 - RNA, 24 nt, Human
ggacaaaacccacucuccaaaagc

SEQ ID NO: 135827 - RNA, 24 nt, Human
ggacaaaacccacucuccaaaagc

SEQ ID NO: 135828 - RNA, 21 nt, Human
ggagauggcaguuuccuuagu

SEQ ID NO: 135829 - RNA, 21 nt, Human
ggaggcgccucccauccugua

SEQ ID NO: 135830 - RNA, 21 nt, Human
ggaggcgccucccauccugua

SEQ ID NO: 135831 - RNA, 23 nt, Human
ggcgcaggggcaacucuuccacc

SEQ ID NO: 135832 - RNA, 19 nt, Human
ggcuucuggguugauaccu

SEQ ID NO: 135833 - RNA, 19 nt, Human
ggcuucuggguugauaccu

SEQ ID NO: 135834 - RNA, 21 nt, Human
gggaaucaggaguuguaaaac

SEQ ID NO: 135835 - RNA, 18 nt, Human
gggcugggaauccauagc

SEQ ID NO: 135836 - RNA, 18 nt, Human
gggcugggaauccauagc

SEQ ID NO: 135837 - RNA, 20 nt, Human
gggcuucuggguugauaccu

SEQ ID NO: 135838 - RNA, 20 nt, Human
gggcuucuggguugauaccu

SEQ ID NO: 135839 - RNA, 19 nt, Human
ggugaagcugugaacucag

SEQ ID NO: 135840 - RNA, 19 nt, Human
ggugaagcugugaacucag

SEQ ID NO: 135841 - RNA, 24 nt, Human
gguuauaaagaacacaacacgaaa

SEQ ID NO: 135842 - RNA, 24 nt, Human
gguuauaaagaacacaacacgaaa

SEQ ID NO: 135843 - RNA, 20 nt, Human
guaaagcaguacuauaauac

SEQ ID NO: 135844 - RNA, 20 nt, Human
guaaagcaguacuauaauac

SEQ ID NO: 135845 - RNA, 24 nt, Human
guggauccuuuuucuuuuggcagu

SEQ ID NO: 135846 - RNA, 21 nt, Human
gugucuaaaagaaaaacaaaa

SEQ ID NO: 135847 - RNA, 21 nt, Human
gugucuaaaagaaaaacaaaa

SEQ ID NO: 135848 - RNA, 24 nt, Human
guguguguguguguguuuguuuug

SEQ ID NO: 135849 - RNA, 20 nt, Human
guguguguguguuuguuuug

SEQ ID NO: 135850 - RNA, 20 nt, Human
guguguguguguuuguuuug

SEQ ID NO: 135851 - RNA, 26 nt, Human
guguugugguuuuuuuuuuuuuuucc

SEQ ID NO: 135852 - RNA, 23 nt, Human
guuauaaagaacacaacacgaaa

SEQ ID NO: 135853 - RNA, 23 nt, Human
guuauaaagaacacaacacgaaa

SEQ ID NO: 135854 - RNA, 23 nt, Human
guuguuuaaaaugagaaacaucu

SEQ ID NO: 135855 - RNA, 23 nt, Human
guuguuuaaaaugagaaacaucu

SEQ ID NO: 135856 - RNA, 20 nt, Human
guuuugugugugugugugua

SEQ ID NO: 135857 - RNA, 20 nt, Human
guuuugugugugugugugua

SEQ ID NO: 135858 - RNA, 23 nt, Human
guuuuuuuuuuuuuuucccccug

SEQ ID NO: 135859 - RNA, 28 nt, Human
uaaaaacaaugagaaaccaacaaacuuc

SEQ ID NO: 135860 - RNA, 22 nt, Human
uaaaagaaaaacaaaaagauua

SEQ ID NO: 135861 - RNA, 23 nt, Human
uaaaagaaaaacaaaaagauuaa

SEQ ID NO: 135862 - RNA, 23 nt, Human
uaaaagaaaaacaaaaagauuaa

SEQ ID NO: 135863 - RNA, 21 nt, Human
uaaaaugagaaacaucuggag

SEQ ID NO: 135864 - RNA, 21 nt, Human
uaaaaugagaaacaucuggag

SEQ ID NO: 135865 - RNA, 26 nt, Human
uaaagaaauggcaaguuaaccgaacg

SEQ ID NO: 135866 - RNA, 26 nt, Human
uaaagaaauggcaaguuaaccgaacg

SEQ ID NO: 135867 - RNA, 25 nt, Human
uaaagaaauggcaaguuaaccgaag

SEQ ID NO: 135868 - RNA, 25 nt, Human
uaaagaaauggcaaguuaaccgaag

SEQ ID NO: 135869 - RNA, 21 nt, Human
uaaaguaaccccuuguuuuaa

SEQ ID NO: 135870 - RNA, 21 nt, Human
uaaaguaaccccuuguuuuaa

SEQ ID NO: 135871 - RNA, 22 nt, Human
uaaauuuccaacugauuccuaa

SEQ ID NO: 135872 - RNA, 23 nt, Human
uaaauuuccaacugauuccuaau

SEQ ID NO: 135873 - RNA, 23 nt, Human
uaacaaaacaauaacagacuuag

SEQ ID NO: 135874 - RNA, 23 nt, Human
uaacaaaacaauaacagacuuag

SEQ ID NO: 135875 - RNA, 18 nt, Human
uaacaugauucuuucagu

SEQ ID NO: 135876 - RNA, 22 nt, Human
uaagaacucaguaccugaaaac

SEQ ID NO: 135877 - RNA, 22 nt, Human
uaagaacucaguaccugaaaac

SEQ ID NO: 135878 - RNA, 21 nt, Human
uaagccuggaugacugacuag

SEQ ID NO: 135879 - RNA, 21 nt, Human
uaagccuggaugacugacuag

SEQ ID NO: 135880 - RNA, 22 nt, Human
uaauaccacuacccuucacaaa

SEQ ID NO: 135881 - RNA, 22 nt, Human
uaauaccacuacccuucacaaa

SEQ ID NO: 135882 - RNA, 24 nt, Human
uaauaccacuacccuucacaaaaa

SEQ ID NO: 135883 - RNA, 24 nt, Human
uaauaccacuacccuucacaaaaa

SEQ ID NO: 135884 - RNA, 25 nt, Human
uaauaccacuacccuucacaaaaau

SEQ ID NO: 135885 - RNA, 25 nt, Human
uaauaccacuacccuucacaaaaau

SEQ ID NO: 135886 - RNA, 18 nt, Human
uaauaggagauaaccaca

SEQ ID NO: 135887 - RNA, 22 nt, Human
uaauggacaaaacccacucucc

SEQ ID NO: 135888 - RNA, 22 nt, Human
uaauggacaaaacccacucucc

SEQ ID NO: 135889 - RNA, 18 nt, Human
uacauuaaggaaauaggc

SEQ ID NO: 135890 - RNA, 19 nt, Human
uacccuucacaaaaauaua

SEQ ID NO: 135891 - RNA, 19 nt, Human
uacccuucacaaaaauaua

SEQ ID NO: 135892 - RNA, 19 nt, Human
uaccgccuuccacucagag

SEQ ID NO: 135893 - RNA, 19 nt, Human
uaccugucaguaucacaaa

SEQ ID NO: 135894 - RNA, 19 nt, Human
uaccugucaguaucacaaa

SEQ ID NO: 135895 - RNA, 18 nt, Human
uacuuacaaaccugugug

SEQ ID NO: 135896 - RNA, 18 nt, Human
uacuuacaaaccugugug

SEQ ID NO: 135897 - RNA, 22 nt, Human
uacuuacuuacaaaccugugug

SEQ ID NO: 135898 - RNA, 22 nt, Human
uacuuacuuacaaaccugugug

SEQ ID NO: 135899 - RNA, 18 nt, Human
uagaagagacuguuugca

SEQ ID NO: 135900 - RNA, 21 nt, Human
uagaaugaaacuuacuuacuu

SEQ ID NO: 135901 - RNA, 21 nt, Human
uagaaugaaacuuacuuacuu

SEQ ID NO: 135902 - RNA, 19 nt, Human
uagacaaaaucucuuccac

SEQ ID NO: 135903 - RNA, 18 nt, Human
uagcuuuuccucuugagc

SEQ ID NO: 135904 - RNA, 18 nt, Human
uagcuuuuccucuugagc

SEQ ID NO: 135905 - RNA, 20 nt, Human
uaggagaggcuccaauagug

SEQ ID NO: 135906 - RNA, 24 nt, Human
uaggagauaaccacagcagcagau

SEQ ID NO: 135907 - RNA, 27 nt, Human
uaggcuuaaaaacaaugagaaaccaac

SEQ ID NO: 135908 - RNA, 20 nt, Human
uaguucagagcagccagcaa

SEQ ID NO: 135909 - RNA, 23 nt, Human
uauaaagaacacaacacgaaaua

SEQ ID NO: 135910 - RNA, 23 nt, Human
uauaaagaacacaacacgaaaua

SEQ ID NO: 135911 - RNA, 28 nt, Human
uauaaaggaaaaagaaaauaacgcaaug

SEQ ID NO: 135912 - RNA, 28 nt, Human
uauaaaggaaaaagaaaauaacgcaaug

SEQ ID NO: 135913 - RNA, 24 nt, Human
uauaucaaggcagcgauaaaaaaa

SEQ ID NO: 135914 - RNA, 23 nt, Human
uaucaaggcagcgauaaaaaaaa

SEQ ID NO: 135915 - RNA, 21 nt, Human
uaucuugcucuucugggcuua

SEQ ID NO: 135916 - RNA, 22 nt, Human
uaugaaggaaaaagaaagaauu

SEQ ID NO: 135917 - RNA, 22 nt, Human
uaugaaggaaaaagaaagaauu

SEQ ID NO: 135918 - RNA, 21 nt, Human
uaugcaaaaaaagaaaaagcc

SEQ ID NO: 135919 - RNA, 31 nt, Human
uaugcaaaaaaagaaaaagccaugaauuucc

SEQ ID NO: 135920 - RNA, 31 nt, Human; identical to SEQ ID NO: 135919

SEQ ID NO: 135921 - RNA, 18 nt, Human
uaugugugugugugugug

SEQ ID NO: 135922 - RNA, 18 nt, Human
uaugugugugugugugug

SEQ ID NO: 135923 - RNA, 22 nt, Human
uauucugcuccuucuucaucug

SEQ ID NO: 135924 - RNA, 23 nt, Human
uauucugcuccuucuucaucugu

SEQ ID NO: 135925 - RNA, 23 nt, Human
uauuguguugugguuuuuuuuuu

SEQ ID NO: 135926 - RNA, 25 nt, Human
uauuuagcuaucaagauuuuacaug

SEQ ID NO: 135927 - RNA, 25 nt, Human
uauuuagcuaucaagauuuuacaug

SEQ ID NO: 135928 - RNA, 20 nt, Human
uauuucuuccccaguugcau

SEQ ID NO: 135929 - RNA, 21 nt, Human
ucaaaaagaaauaaaauggca

SEQ ID NO: 135930 - RNA, 21 nt, Human
ucaaaaagaaauaaaauggca

SEQ ID NO: 135931 - RNA, 21 nt, Human
ucacagggaugggcugggaau

SEQ ID NO: 135932 - RNA, 21 nt, Human
ucacagggaugggcugggaau

SEQ ID NO: 135933 - RNA, 22 nt, Human
ucacgccaaaaggaugcaaaac

SEQ ID NO: 135934 - RNA, 22 nt, Human
ucacgccaaaaggaugcaaaac

SEQ ID NO: 135935 - RNA, 23 nt, Human
ucagagcucagaucuucuaacuu

SEQ ID NO: 135936 - RNA, 20 nt, Human
ucagcccacucuccaaaagc

SEQ ID NO: 135937 - RNA, 20 nt, Human
ucagcccacucuccaaaagc

SEQ ID NO: 135938 - RNA, 21 nt, Human
ucagcccacucuccaaaagcu

SEQ ID NO: 135939 - RNA, 21 nt, Human
ucagcccacucuccaaaagcu

SEQ ID NO: 135940 - RNA, 23 nt, Human
ucagcccacucuccaaaagcuaa

SEQ ID NO: 135941 - RNA, 23 nt, Human
ucagcccacucuccaaaagcuaa

SEQ ID NO: 135942 - RNA, 23 nt, Human
ucaggcuucccaauuuuuccugg

SEQ ID NO: 135943 - RNA, 22 nt, Human
ucaguaucacaaaugugauggg

SEQ ID NO: 135944 - RNA, 22 nt, Human
ucaguaucacaaaugugauggg

SEQ ID NO: 135945 - RNA, 24 nt, Human
ucauaggaaagcuuuuugcugauu

SEQ ID NO: 135946 - RNA, 19 nt, Human
uccccaguugcauucaaug

SEQ ID NO: 135947 - RNA, 23 nt, Human
ucccuguugguacuuuucucuua

SEQ ID NO: 135948 - RNA, 19 nt, Human
uccuggaguuccuuaauaa

SEQ ID NO: 135949 - RNA, 19 nt, Human
ucggugugguaaccacucu

SEQ ID NO: 135950 - RNA, 20 nt, Human
ucuaaaaaagcaacaaaaac

SEQ ID NO: 135951 - RNA, 20 nt, Human
ucuaaaaaagcaacaaaaac

SEQ ID NO: 135952 - RNA, 19 nt, Human
ucuaacuuccucuucacug

SEQ ID NO: 135953 - RNA, 21 nt, Human
ucuucacuggcugaguggcug

SEQ ID NO: 135954 - RNA, 18 nt, Human
ucuugcucuucugggcuu

SEQ ID NO: 135955 - RNA, 18 nt, Human
ucuuuguuguaugaauau

SEQ ID NO: 135956 - RNA, 18 nt, Human
ucuuuguuguaugaauau

SEQ ID NO: 135957 - RNA, 24 nt, Human
ucuuuuuugagcaauuuuuguuug

SEQ ID NO: 135958 - RNA, 24 nt, Human
ucuuuuuugagcaauuuuuguuug

SEQ ID NO: 135959 - RNA, 19 nt, Human
ugaaaaugcaguaaaacug

SEQ ID NO: 135960 - RNA, 19 nt, Human
ugaaaaugcaguaaaacug

SEQ ID NO: 135961 - RNA, 24 nt, Human
ugaaaugaaaacucaagccugccc

SEQ ID NO: 135962 - RNA, 24 nt, Human
ugaaaugaaaacucaagccugccc

SEQ ID NO: 135963 - RNA, 25 nt, Human
ugaaugaaugauuuaaaaaucaaaa

SEQ ID NO: 135964 - RNA, 25 nt, Human
ugaaugaaugauuuaaaaaucaaaa

SEQ ID NO: 135965 - RNA, 19 nt, Human
ugacaaaacaugccaugug

SEQ ID NO: 135966 - RNA, 19 nt, Human
ugacaaaacaugccaugug

SEQ ID NO: 135967 - RNA, 20 nt, Human
ugagaaaccaacaaacuuca

SEQ ID NO: 135968 - RNA, 20 nt, Human
ugagccagagcagcguuugc

SEQ ID NO: 135969 - RNA, 25 nt, Human
ugagccagagcagcguuugcauuua

SEQ ID NO: 135970 - RNA, 19 nt, Human
ugagcuuuucuccucuuuu

SEQ ID NO: 135971 - RNA, 19 nt, Human
ugagcuuuucuccucuuuu

SEQ ID NO: 135972 - RNA, 29 nt, Human
ugcaaaaaaagaaaaagccaugaauuucc

SEQ ID NO: 135973 - RNA, 29 nt, Human
ugcaaaaaaagaaaaagccaugaauuucc

SEQ ID NO: 135974 - RNA, 21 nt, Human
ugcaaaaaccucuuucggucc

SEQ ID NO: 135975 - RNA, 20 nt, Human
ugcaccuguuucuuccacuc

SEQ ID NO: 135976 - RNA, 23 nt, Human
ugcagaccuccugccaccgcaga

SEQ ID NO: 135977 - RNA, 28 nt, Human
ugcccucagcucuugaaguaaacgguuu

SEQ ID NO: 135978 - RNA, 22 nt, Human
ugcgcugccucaaaguuuugug

SEQ ID NO: 135979 - RNA, 22 nt, Human
ugcgcugccucaaaguuuugug

SEQ ID NO: 135980 - RNA, 23 nt, Human
ugcuccaguaggcuuaaaaacaa

SEQ ID NO: 135981 - RNA, 21 nt, Human
ugcuccuucuucaucugucau

SEQ ID NO: 135982 - RNA, 20 nt, Human
uggaaaaagaaauugucaag

SEQ ID NO: 135983 - RNA, 25 nt, Human
uggacaaaacccacucuccaaaagc

SEQ ID NO: 135984 - RNA, 25 nt, Human
uggacaaaacccacucuccaaaagc

SEQ ID NO: 135985 - RNA, 20 nt, Human
uggagauggcaguuuccuua

SEQ ID NO: 135986 - RNA, 19 nt, Human
uggcaugaaagaguaaagc

SEQ ID NO: 135987 - RNA, 19 nt, Human
uggcaugaaagaguaaagc

SEQ ID NO: 135988 - RNA, 18 nt, Human
uggcauuuaaaaacucau

SEQ ID NO: 135989 - RNA, 18 nt, Human
uggcauuuaaaaacucau

SEQ ID NO: 135990 - RNA, 23 nt, Human
uggcugaguggcugguuuuuccu

SEQ ID NO: 135991 - RNA, 24 nt, Human
uguaguuuccuccuggcuuccggc

SEQ ID NO: 135992 - RNA, 24 nt, Human
uguaguuuccuccuggcuuccggc

SEQ ID NO: 135993 - RNA, 21 nt, Human
ugucaagugacgugggaaagu

SEQ ID NO: 135994 - RNA, 18 nt, Human
ugucaguaucacaaaugu

SEQ ID NO: 135995 - RNA, 18 nt, Human
ugucaguaucacaaaugu

SEQ ID NO: 135996 - RNA, 20 nt, Human
ugucuaaaagaaaaacaaaa

SEQ ID NO: 135997 - RNA, 21 nt, Human
ugucuuacaccuuuucccaaa

SEQ ID NO: 135998 - RNA, 21 nt, Human
ugucuuacaccuuuucccaaa

SEQ ID NO: 135999 - RNA, 18 nt, Human
ugugauguuuaugcuuca

SEQ ID NO: 136000 - RNA, 18 nt, Human
ugugauguuuaugcuuca

SEQ ID NO: 136001 - RNA, 21 nt, Human
ugugauguuuaugcuucaguu

SEQ ID NO: 136002 - RNA, 21 nt, Human
ugugauguuuaugcuucaguu

SEQ ID NO: 136003 - RNA, 18 nt, Human
ugugcauuuacccauuuu

SEQ ID NO: 136004 - RNA, 18 nt, Human
ugugcauuuacccauuuu

SEQ ID NO: 136005 - RNA, 20 nt, Human
uguggcauuuaaaaacucau

SEQ ID NO: 136006 - RNA, 20 nt, Human
uguggcauuuaaaaacucau

SEQ ID NO: 136007 - RNA, 20 nt, Human
uguguaugugugugugugug

SEQ ID NO: 136008 - RNA, 20 nt, Human
uguguaugugugugugugug

SEQ ID NO: 136009 - RNA, 21 nt, Human
uguguaugugugugugugugu

SEQ ID NO: 136010 - RNA, 21 nt, Human
uguguaugugugugugugugu

SEQ ID NO: 136011 - RNA, 19 nt, Human
uguguguaugugugugugu

SEQ ID NO: 136012 - RNA, 19 nt, Human
uguguguaugugugugugu

SEQ ID NO: 136013 - RNA, 21 nt, Human
uguguguaugugugugugugu

SEQ ID NO: 136014 - RNA, 21 nt, Human
uguguguaugugugugugugu

SEQ ID NO: 136015 - RNA, 21 nt, Human
uguguguguaugugugugugu

SEQ ID NO: 136016 - RNA, 21 nt, Human
uguguguguaugugugugugu

SEQ ID NO: 136017 - RNA, 24 nt, Human
uguguguguaugugugugugugug

SEQ ID NO: 136018 - RNA, 24 nt, Human
uguguguguaugugugugugugug

SEQ ID NO: 136019 - RNA, 20 nt, Human
uguguguguguaugugugug

SEQ ID NO: 136020 - RNA, 20 nt, Human
uguguguguguaugugugug

SEQ ID NO: 136021 - RNA, 21 nt, Human
uguguguguguaugugugugu

SEQ ID NO: 136022 - RNA, 21 nt, Human
uguguguguguaugugugugu

SEQ ID NO: 136023 - RNA, 24 nt, Human
uguguguguguaugugugugugug

SEQ ID NO: 136024 - RNA, 24 nt, Human
uguguguguguaugugugugugug

SEQ ID NO: 136025 - RNA, 30 nt, Human
uguguguguguguaugugugugugugugug

SEQ ID NO: 136026 - RNA, 30 nt, Human; identical to SEQ ID NO: 136025

SEQ ID NO: 136027 - RNA, 19 nt, Human
uguguguguguguguaugu

SEQ ID NO: 136028 - RNA, 19 nt, Human
uguguguguguguguaugu

SEQ ID NO: 136029 - RNA, 19 nt, Human
uguguguguguguguaugu

SEQ ID NO: 136030 - RNA, 19 nt, Human
uguguguguguguguaugu

SEQ ID NO: 136031 - RNA, 21 nt, Human
uguguguguguguguaugugu

SEQ ID NO: 136032 - RNA, 21 nt, Human
uguguguguguguguaugugu

SEQ ID NO: 136033 - RNA, 21 nt, Human
uguguguguguguguaugugu

SEQ ID NO: 136034 - RNA, 21 nt, Human
uguguguguguguguaugugu

SEQ ID NO: 136035 - RNA, 30 nt, Human
uguguguguguguguaugugugugugugug

SEQ ID NO: 136036 - RNA, 30 nt, Human; identical to SEQ ID NO: 136035

SEQ ID NO: 136037 - RNA, 20 nt, Human
uguguguguguguguguuug

SEQ ID NO: 136038 - RNA, 20 nt, Human
uguguguguguguguguuug

SEQ ID NO: 136039 - RNA, 21 nt, Human
uguguguguguguguguuugu

SEQ ID NO: 136040 - RNA, 21 nt, Human
uguguguguguguguguuugu

SEQ ID NO: 136041 - RNA, 26 nt, Human
uguguguguuuguuuuguuuuuaauu

SEQ ID NO: 136042 - RNA, 19 nt, Human
uguguuuguuuuguuuuua

SEQ ID NO: 136043 - RNA, 19 nt, Human
uguguuuguuuuguuuuua

SEQ ID NO: 136044 - RNA, 19 nt, Human
uguucccuuuaaaaaaauc

SEQ ID NO: 136045 - RNA, 19 nt, Human
uguucccuuuaaaaaaauc

SEQ ID NO: 136046 - RNA, 25 nt, Human
uguugcauagcaauccugagaaaac

SEQ ID NO: 136047 - RNA, 21 nt, Human
uguuugcagaccuccugccac

SEQ ID NO: 136048 - RNA, 19 nt, Human
uguuuuguuuuuagggguu

SEQ ID NO: 136049 - RNA, 19 nt, Human
uguuuuguuuuuagggguu

SEQ ID NO: 136050 - RNA, 24 nt, Human
uguuuuguuuuuagggguuuuuau

SEQ ID NO: 136051 - RNA, 24 nt, Human
uguuuuguuuuuagggguuuuuau

SEQ ID NO: 136052 - RNA, 18 nt, Human
uuaaaaugagaaacaucu

SEQ ID NO: 136053 - RNA, 18 nt, Human
uuaaaaugagaaacaucu

SEQ ID NO: 136054 - RNA, 20 nt, Human
uuaguggcuguauuguguug

SEQ ID NO: 136055 - RNA, 24 nt, Human
uuaucaggaacaccccaaaaccaa

SEQ ID NO: 136056 - RNA, 24 nt, Human
uuaucaggaacaccccaaaaccaa

SEQ ID NO: 136057 - RNA, 20 nt, Human
uucuaacuuccucuucacug

SEQ ID NO: 136058 - RNA, 22 nt, Human
uucuccugauucugucaucuuc

SEQ ID NO: 136059 - RNA, 21 nt, Human
uucucuuucaucuuuagggaa

SEQ ID NO: 136060 - RNA, 20 nt, Human
uucuucugaauggcuguugg

SEQ ID NO: 136061 - RNA, 20 nt, Human
uugagcuuuucuccucuuuu

SEQ ID NO: 136062 - RNA, 20 nt, Human
uugagcuuuucuccucuuuu

SEQ ID NO: 136063 - RNA, 20 nt, Human
uugcagaccuccugccaccg

SEQ ID NO: 136064 - RNA, 21 nt, Human
uugcagaccuccugccaccgc

SEQ ID NO: 136065 - RNA, 30 nt, Human
uugcugaauuauuucuuccccaguugcauu

SEQ ID NO: 136066 - RNA, 20 nt, Human
uuguaauuacagagaacuuu

SEQ ID NO: 136067 - RNA, 20 nt, Human
uuguaauuacagagaacuuu

SEQ ID NO: 136068 - RNA, 24 nt, Human
uugugagagagaaaaucaaaauga

SEQ ID NO: 136069 - RNA, 27 nt, Human
uuguggauccuuuuucuuuuggcaguu

SEQ ID NO: 136070 - RNA, 23 nt, Human
uuguucagggcaugaacucuugu

SEQ ID NO: 136071 - RNA, 23 nt, Human
uuguucagggcaugaacucuugu

SEQ ID NO: 136072 - RNA, 20 nt, Human
uuuaaaaaauggaaaaaguc

SEQ ID NO: 136073 - RNA, 20 nt, Human
uuuaaaaaauggaaaaaguc

SEQ ID NO: 136074 - RNA, 24 nt, Human
uuuagaaugaaacuuacuuacuua

SEQ ID NO: 136075 - RNA, 24 nt, Human
uuuagaaugaaacuuacuuacuua

SEQ ID NO: 136076 - RNA, 19 nt, Human
uuuaugauuuccaucuacg

SEQ ID NO: 136077 - RNA, 19 nt, Human
uuuaugauuuccaucuacg

SEQ ID NO: 136078 - RNA, 19 nt, Human
uuuccugucacuccaucau

SEQ ID NO: 136079 - RNA, 20 nt, Human
uuugaucuugagaaucauua

SEQ ID NO: 136080 - RNA, 19 nt, Human
uuuggcaguuuuugcccug

SEQ ID NO: 136081 - RNA, 19 nt, Human
uuuggcaguuuuugcccug

SEQ ID NO: 136082 - RNA, 25 nt, Human
uuuguguguguguguguaugugugu

SEQ ID NO: 136083 - RNA, 25 nt, Human
uuuguguguguguguguaugugugu

SEQ ID NO: 136084 - RNA, 21 nt, Human
uuuugaacaucuucucuuuca

SEQ ID NO: 136085 - RNA, 21 nt, Human
uuuugaacaucuucucuuuca

SEQ ID NO: 136086 - RNA, 21 nt, Human
uuuugcaccuguuucuuccac

SEQ ID NO: 136087 - RNA, 18 nt, Human
uuuuuuuuuuuucccccu

SEQ ID NO: 136088 - RNA, 23 nt, Human
acgcuccggccucgccgcugccc

SEQ ID NO: 136089 - RNA, 23 nt, Human
cccuccugcccuggucuuguccc

SEQ ID NO: 136090 - RNA, 18 nt, Human
ccggccucgccgcugccc

SEQ ID NO: 136091 - RNA, 20 nt, Human
ccggcucccuccugcccugg

SEQ ID NO: 136092 - RNA, 21 nt, Human
ccuccugcccuggucuugucc

SEQ ID NO: 136093 - RNA, 23 nt, Human
cggcucccuccugcccuggucuu

SEQ ID NO: 136094 - RNA, 20 nt, Human
cgggguucucgcggcuggcc

SEQ ID NO: 136095 - RNA, 23 nt, Human
cucgcggcuggccggcucccucc

SEQ ID NO: 136096 - RNA, 18 nt, Human
cugcccuggucuuguccc

SEQ ID NO: 136097 - RNA, 23 nt, Human
uccggccucgccgcugccccgga

SEQ ID NO: 136098 - RNA, 23 nt, Human
ucgccgcugccccggaggcccgc

SEQ ID NO: 136099 - RNA, 21 nt, Human
ucuccgccgcgacgcuccggc

SEQ ID NO: 136100 - RNA, 19 nt, Human
ugcccuggucuugucccgg

SEQ ID NO: 136101 - RNA, 28 nt, Human
ugcccuggucuugucccggucucguccu

SEQ ID NO: 136102 - RNA, 19 nt, Human
uggccggcucccuccugcc

SEQ ID NO: 136103 - RNA, 23 nt, Human
aaaaaguaucuacguaaagagga

SEQ ID NO: 136104 - RNA, 22 nt, Human
aaccugcuuuacauucucaaca

SEQ ID NO: 136105 - RNA, 18 nt, Human
aaguccucccucguucuc

SEQ ID NO: 136106 - RNA, 23 nt, Human
acccuaaaaacaaguguaauuga

SEQ ID NO: 136107 - RNA, 26 nt, Human
acugugccauaauuucaaagugcuuu

SEQ ID NO: 136108 - RNA, 23 nt, Human
agaggaauuucuuucucccacuc

SEQ ID NO: 136109 - RNA, 19 nt, Human
agcaagaaacaagucuuaa

SEQ ID NO: 136110 - RNA, 19 nt, Human
aggacucagagaacaguuu

SEQ ID NO: 136111 - RNA, 23 nt, Human
caagaauagaauuccccggucuc

SEQ ID NO: 136112 - RNA, 21 nt, Human
cacuggccuuggcacucagcc

SEQ ID NO: 136113 - RNA, 19 nt, Human
ccccucuauacgcuccuca

SEQ ID NO: 136114 - RNA, 22 nt, Human
ccucugugaaaugaugacaccc

SEQ ID NO: 136115 - RNA, 27 nt, Human
cucuuuggcuguguuacuggugucacu

SEQ ID NO: 136116 - RNA, 23 nt, Human
cuuaaccugcuuuacauucucaa

SEQ ID NO: 136117 - RNA, 18 nt, Human
cuuauccaaaacaacuca

SEQ ID NO: 136118 - RNA, 19 nt, Human
gaaguccucccucguucuc

SEQ ID NO: 136119 - RNA, 23 nt, Human
gacccaauccuucuuaucaucac

SEQ ID NO: 136120 - RNA, 20 nt, Human
gcaagaaacaagucuuaacc

SEQ ID NO: 136121 - RNA, 21 nt, Human
guggguccccucuauacgcuc

SEQ ID NO: 136122 - RNA, 20 nt, Human
uaaaaacaaguguaaugucc

SEQ ID NO: 136123 - RNA, 21 nt, Human
uaccucuacccuccguaguuc

SEQ ID NO: 136124 - RNA, 24 nt, Human
uagcuuuguuuguuacguugauga

SEQ ID NO: 136125 - RNA, 19 nt, Human
uaugaaguccucccucguu

SEQ ID NO: 136126 - RNA, 18 nt, Human
ucaggagcaagaaacaag

SEQ ID NO: 136127 - RNA, 20 nt, Human
ucaguguccccagauugaua

SEQ ID NO: 136128 - RNA, 20 nt, Human
ucccacucuuccugacccaa

SEQ ID NO: 136129 - RNA, 24 nt, Human
ucugugaaaugaugacacccuaaa

SEQ ID NO: 136130 - RNA, 23 nt, Human
ugacacccuaaaaacaaguguaa

SEQ ID NO: 136131 - RNA, 22 nt, Human
ugggagaaaaagauuuucuuau

SEQ ID NO: 136132 - RNA, 24 nt, Human
ugggaguucuacaaaaaaaaaaaa

SEQ ID NO: 136133 - RNA, 19 nt, Human
ugugaaaugaugacacccu

SEQ ID NO: 136134 - RNA, 24 nt, Human
ugugacaacugcuucuuaggacag

SEQ ID NO: 136135 - RNA, 22 nt, Human
uucuuaucaucaccagugauua

SEQ ID NO: 136136 - RNA, 20 nt, Human
uucuuauccaaaacaacuca

SEQ ID NO: 136137 - RNA, 23 nt, Human
uuucucuuauacauaccccucug

SEQ ID NO: 136138 - RNA, 22 nt, Human
aagcuccagaacugggggcuag

SEQ ID NO: 136139 - RNA, 19 nt, Human
acaggcagcaccauggccc

SEQ ID NO: 136140 - RNA, 20 nt, Human
accugcugcccaaaggcugg

SEQ ID NO: 136141 - RNA, 20 nt, Human
acgcuccccagagcagggcc

SEQ ID NO: 136142 - RNA, 21 nt, Human
acguggauugggguuguuggg

SEQ ID NO: 136143 - RNA, 22 nt, Human
acguggauugggguuguugggg

SEQ ID NO: 136144 - RNA, 21 nt, Human
agaaagaaauggucugugauc

SEQ ID NO: 136145 - RNA, 23 nt, Human
agaguagggggaaugcauggaga

SEQ ID NO: 136146 - RNA, 20 nt, Human
agcagcgcaagugaggaggg

SEQ ID NO: 136147 - RNA, 27 nt, Human
aggcggugggcgcggcuucucgcgcgg

SEQ ID NO: 136148 - RNA, 24 nt, Human
aggcugggggaggaaaguggugga

SEQ ID NO: 136149 - RNA, 20 nt, Human
agggcgucaugcacaagaaa

SEQ ID NO: 136150 - RNA, 18 nt, Human
auccacgucagggccuca

SEQ ID NO: 136151 - RNA, 18 nt, Human
auggaacacggacggccc

SEQ ID NO: 136152 - RNA, 21 nt, Human
caaaccgccgaagcgggcgga

SEQ ID NO: 136153 - RNA, 22 nt, Human
caagccagccccccaagcuccc

SEQ ID NO: 136154 - RNA, 23 nt, Human
caagcucccuccuuccagggccc

SEQ ID NO: 136155 - RNA, 23 nt, Human
caauaaauauccaaaccgccgaa

SEQ ID NO: 136156 - RNA, 26 nt, Human
cacaagccagccccccaagcucccuc

SEQ ID NO: 136157 - RNA, 21 nt, Human
cacccccuugcucccgacaag

SEQ ID NO: 136158 - RNA, 23 nt, Human
cagcagcagcagcagcagcagca

SEQ ID NO: 136159 - RNA, 23 nt, Human
cagcagcagcagcagcagcagca

SEQ ID NO: 136160 - RNA, 23 nt, Human
cagcagcagcagcagcagcagca

SEQ ID NO: 136161 - RNA, 23 nt, Human
cagcagcagcagcagcagcagca

SEQ ID NO: 136162 - RNA, 23 nt, Human
cagcagcagcagcagcagcagca

SEQ ID NO: 136163 - RNA, 24 nt, Human
cagcagcagcagcagcagcauucc

SEQ ID NO: 136164 - RNA, 26 nt, Human
cagcagcagcagcagcauucccggcu

SEQ ID NO: 136165 - RNA, 21 nt, Human
cagccccccaagcucccuccu

SEQ ID NO: 136166 - RNA, 22 nt, Human
ccaccccuugguccagcccccc

SEQ ID NO: 136167 - RNA, 21 nt, Human
ccauccacgucagggccucag

SEQ ID NO: 136168 - RNA, 19 nt, Human
cccagccuuaaccccucac

SEQ ID NO: 136169 - RNA, 21 nt, Human
ccccccucccgccucccagcc

SEQ ID NO: 136170 - RNA, 30 nt, Human
ccccuucuccccaccccuugguccagcccc

SEQ ID NO: 136171 - RNA, 19 nt, Human
cccgguacacaggacugga

SEQ ID NO: 136172 - RNA, 18 nt, Human
cccucagagccugaacag

SEQ ID NO: 136173 - RNA, 27 nt, Human
cccucaggcucucugcuuuaaaccagc

SEQ ID NO: 136174 - RNA, 22 nt, Human
cccucccgccucccagccuuaa

SEQ ID NO: 136175 - RNA, 22 nt, Human
cccuguccaggcccuggagccc

SEQ ID NO: 136176 - RNA, 26 nt, Human
ccucccagccuuaaccccucacaagc

SEQ ID NO: 136177 - RNA, 21 nt, Human
ccugucccuggcuguccccug

SEQ ID NO: 136178 - RNA, 20 nt, Human
cggccccucccuccccggcc

SEQ ID NO: 136179 - RNA, 22 nt, Human
cggccccucccuccccggccgc

SEQ ID NO: 136180 - RNA, 20 nt, Human
cggcuucugugccgugcccc

SEQ ID NO: 136181 - RNA, 20 nt, Human
cgggcggagccggcuggggc

SEQ ID NO: 136182 - RNA, 21 nt, Human
cgggcggagccggcuggggcu

SEQ ID NO: 136183 - RNA, 19 nt, Human
cgggggcucgggguccucc

SEQ ID NO: 136184 - RNA, 23 nt, Human
cgggguccuccugucacagggcc

SEQ ID NO: 136185 - RNA, 24 nt, Human
cgguacacaggacuggagcugggc

SEQ ID NO: 136186 - RNA, 20 nt, Human
cuccuccccuucuccccacc

SEQ ID NO: 136187 - RNA, 18 nt, Human
cugagugacccaguagca

SEQ ID NO: 136188 - RNA, 19 nt, Human
cugcaugucugccuguccc

SEQ ID NO: 136189 - RNA, 20 nt, Human
cugccuucccaggccugcag

SEQ ID NO: 136190 - RNA, 23 nt, Human
gacuggagcugggcggagaccca

SEQ ID NO: 136191 - RNA, 21 nt, Human
gagcagcgcaagugaggaggg

SEQ ID NO: 136192 - RNA, 18 nt, Human
gagguggggaaggggugg

SEQ ID NO: 136193 - RNA, 22 nt, Human
gccagccccccaagcucccucc

SEQ ID NO: 136194 - RNA, 23 nt, Human
gcccuggagcccuggcugcaugu

SEQ ID NO: 136195 - RNA, 18 nt, Human
gccuccuccccuucuccc

SEQ ID NO: 136196 - RNA, 21 nt, Human
gcugggggaggaaaguggugg

SEQ ID NO: 136197 - RNA, 18 nt, Human
gcugggugggagaaaggg

SEQ ID NO: 136198 - RNA, 22 nt, Human
ggacaggcagcaccauggcccc

SEQ ID NO: 136199 - RNA, 20 nt, Human
ggaccaggagggggcacccc

SEQ ID NO: 136200 - RNA, 22 nt, Human
ggacccggccccucccuccccg

SEQ ID NO: 136201 - RNA, 25 nt, Human
ggagaaagggguugaggccugggaa

SEQ ID NO: 136202 - RNA, 23 nt, Human
ggccccggagucgaagacaguuc

SEQ ID NO: 136203 - RNA, 22 nt, Human
ggcugggugggagaaagggguu

SEQ ID NO: 136204 - RNA, 24 nt, Human
gggagaaagggguugaggccuggg

SEQ ID NO: 136205 - RNA, 24 nt, Human
gggcuggggguuggggcugggugg

SEQ ID NO: 136206 - RNA, 25 nt, Human
gggcuggggguuggggcuggguggg

SEQ ID NO: 136207 - RNA, 18 nt, Human
gggcugggugggagaaag

SEQ ID NO: 136208 - RNA, 20 nt, Human
gggcugggugggagaaaggg

SEQ ID NO: 136209 - RNA, 21 nt, Human
gggcugggugggagaaagggg

SEQ ID NO: 136210 - RNA, 21 nt, Human
gggcugggugggagaaagggg

SEQ ID NO: 136211 - RNA, 22 nt, Human
ggggcugggugggagaaagggg

SEQ ID NO: 136212 - RNA, 23 nt, Human
ggggguggggguccuaggugggg

SEQ ID NO: 136213 - RNA, 18 nt, Human
gguacacaggacuggagc

SEQ ID NO: 136214 - RNA, 24 nt, Human
ggucggggguggggguccuaggug

SEQ ID NO: 136215 - RNA, 22 nt, Human
ggucugugauccccccagcagc

SEQ ID NO: 136216 - RNA, 22 nt, Human
gguggugaggacaggaccagga

SEQ ID NO: 136217 - RNA, 24 nt, Human
ggugugaugaauuucaagaagaac

SEQ ID NO: 136218 - RNA, 20 nt, Human
gugaugaauuucaagaagaa

SEQ ID NO: 136219 - RNA, 24 nt, Human
uaaccccucacaagccagcccccc

SEQ ID NO: 136220 - RNA, 20 nt, Human
uacacaggacuggagcuggg

SEQ ID NO: 136221 - RNA, 18 nt, Human
uauccaaaccgccgaagc

SEQ ID NO: 136222 - RNA, 27 nt, Human
ucacacugucaccccaauaaaaaggua

SEQ ID NO: 136223 - RNA, 22 nt, Human
ucagcugucacacugucacccc

SEQ ID NO: 136224 - RNA, 19 nt, Human
uccagccccccucccgccu

SEQ ID NO: 136225 - RNA, 20 nt, Human
uccagggcccuucagaaccc

SEQ ID NO: 136226 - RNA, 25 nt, Human
ucccagccuuaaccccucacaagcc

SEQ ID NO: 136227 - RNA, 18 nt, Human
ucccaggccugcaguuug

SEQ ID NO: 136228 - RNA, 22 nt, Human
uccccaccccuugguccagccc

SEQ ID NO: 136229 - RNA, 22 nt, Human
uccccugggccucucuggccac

SEQ ID NO: 136230 - RNA, 18 nt, Human
uccccuucuccccacccc

SEQ ID NO: 136231 - RNA, 22 nt, Human
ucccgaguaagcaggcagagau

SEQ ID NO: 136232 - RNA, 18 nt, Human
ucccuggcuguccccugg

SEQ ID NO: 136233 - RNA, 23 nt, Human
ucccuggcuguccccugggccuc

SEQ ID NO: 136234 - RNA, 22 nt, Human
ugaacuggcaggcggugggcgc

SEQ ID NO: 136235 - RNA, 19 nt, Human
ugacccaguagcaaccacc

SEQ ID NO: 136236 - RNA, 22 nt, Human
ugaccugcugcccaaaggcugg

SEQ ID NO: 136237 - RNA, 19 nt, Human
ugaggaggggggcgcggga

SEQ ID NO: 136238 - RNA, 22 nt, Human
ugaggaggggggcgcgggaucc

SEQ ID NO: 136239 - RNA, 22 nt, Human
uggacaggcagcaccauggccc

SEQ ID NO: 136240 - RNA, 24 nt, Human
uggagggccuuuuauucgcgaggg

SEQ ID NO: 136241 - RNA, 24 nt, Human
uggcaggcggugggcgcggcuucu

SEQ ID NO: 136242 - RNA, 20 nt, Human
ugggagaaagggguugaggc

SEQ ID NO: 136243 - RNA, 20 nt, Human
uggggcugggugggagaaag

SEQ ID NO: 136244 - RNA, 30 nt, Human
uggggcugggugggagaaagggguugaggg

SEQ ID NO: 136245 - RNA, 18 nt, Human
ugggggaggaaaguggug

SEQ ID NO: 136246 - RNA, 25 nt, Human
ugggggcuagggggugagggcuggg

SEQ ID NO: 136247 - RNA, 22 nt, Human
ugguccagccccccucccgccu

SEQ ID NO: 136248 - RNA, 21 nt, Human
ugucugccugucccuggcugu

SEQ ID NO: 136249 - RNA, 24 nt, Human
uuccagggcccuucagaacccuuc

SEQ ID NO: 136250 - RNA, 21 nt, Human
uuuuuuuuuuuuuuuucccag

SEQ ID NO: 136251 - RNA, 23 nt, Human
uuuuuuuuuuuuuuuuucccagg

SEQ ID NO: 136252 - RNA, 23 nt, Human
uuuuuuuuuuuuuuuuuuuccca

SEQ ID NO: 136253 - RNA, 23 nt, Human
uuuuuuuuuuuuuuuuuuuuccc

SEQ ID NO: 136254 - RNA, 24 nt, Human
uuuuuuuuuuuuuuuuuuuuuccu

SEQ ID NO: 136255 - RNA, 20 nt, Human
aaaaaaaccccuaaggcacc

SEQ ID NO: 136256 - RNA, 20 nt, Human
aaccaaauacguucucaaca

SEQ ID NO: 136257 - RNA, 23 nt, Human
aaggucacuuuaaauugcacugu

SEQ ID NO: 136258 - RNA, 19 nt, Human
aaucaugaacucaaaucug

SEQ ID NO: 136259 - RNA, 21 nt, Human
aauuacacccuuuaccaaaaa

SEQ ID NO: 136260 - RNA, 20 nt, Human
acaauuuuuauuucagguaa

SEQ ID NO: 136261 - RNA, 18 nt, Human
acgcuccggaggaggagg

SEQ ID NO: 136262 - RNA, 20 nt, Human
agacuaguuucauuucagga

SEQ ID NO: 136263 - RNA, 24 nt, Human
agcaauuuuuuuuuacaggcuuua

SEQ ID NO: 136264 - RNA, 20 nt, Human
agcugcaacuaaguagaaca

SEQ ID NO: 136265 - RNA, 18 nt, Human
aggaggcgcaggagacgu

SEQ ID NO: 136266 - RNA, 25 nt, Human
auauaaaccaaauacguucucaaca

SEQ ID NO: 136267 - RNA, 22 nt, Human
cacaauauauccauuuagcaga

SEQ ID NO: 136268 - RNA, 21 nt, Human
cacacaauauauccauuuagc

SEQ ID NO: 136269 - RNA, 23 nt, Human
cagcaauuuuuuuuuacaggcuu

SEQ ID NO: 136270 - RNA, 19 nt, Human
cagcgacgcuccggaggag

SEQ ID NO: 136271 - RNA, 18 nt, Human
caugcagaugguagucac

SEQ ID NO: 136272 - RNA, 19 nt, Human
caugcagaugguagucacg

SEQ ID NO: 136273 - RNA, 19 nt, Human
ccccucucucgccuggaga

SEQ ID NO: 136274 - RNA, 24 nt, Human
cccgacggacagcgacgcuccgga

SEQ ID NO: 136275 - RNA, 19 nt, Human
cgacgcuccggaggaggag

SEQ ID NO: 136276 - RNA, 23 nt, Human
cgagcacucuggcccccucucuc

SEQ ID NO: 136277 - RNA, 21 nt, Human
cgcagcaauuuuuuuuuacag

SEQ ID NO: 136278 - RNA, 20 nt, Human
cuggcccccucucucgccug

SEQ ID NO: 136279 - RNA, 19 nt, Human
cuugaaaacuacaugaaac

SEQ ID NO: 136280 - RNA, 21 nt, Human
cuuuuauuucuugaaaacuac

SEQ ID NO: 136281 - RNA, 23 nt, Human
gaagugcgagcacucuggccccc

SEQ ID NO: 136282 - RNA, 21 nt, Human
gaguaaagcacuuaaaucaug

SEQ ID NO: 136283 - RNA, 20 nt, Human
gccucuggacuaaacucuaa

SEQ ID NO: 136284 - RNA, 20 nt, Human
gccuggagacugcugcgagg

SEQ ID NO: 136285 - RNA, 21 nt, Human
ggacagcgacgcuccggagga

SEQ ID NO: 136286 - RNA, 18 nt, Human
ggaggaugggguggggcu

SEQ ID NO: 136287 - RNA, 20 nt, Human
gguggggcuauuuccaacag

SEQ ID NO: 136288 - RNA, 20 nt, Human
gucauuaaaaaaaugaacac

SEQ ID NO: 136289 - RNA, 19 nt, Human
gugcgagcacucuggcccc

SEQ ID NO: 136290 - RNA, 19 nt, Human
uaaaucaugcagaugguag

SEQ ID NO: 136291 - RNA, 20 nt, Human
uacagcugcaacuaaguaga

SEQ ID NO: 136292 - RNA, 24 nt, Human
ucaaugcaaaauauuaacaaaccc

SEQ ID NO: 136293 - RNA, 18 nt, Human
ucagucaucaauaacaau

SEQ ID NO: 136294 - RNA, 19 nt, Human
ucuacaaacaccacucagg

SEQ ID NO: 136295 - RNA, 19 nt, Human
ucugcaucacuaaggucac

SEQ ID NO: 136296 - RNA, 19 nt, Human
ugaacccgacggacagcga

SEQ ID NO: 136297 - RNA, 26 nt, Human
ugaguaaagcacuuaaaucaugcaga

SEQ ID NO: 136298 - RNA, 19 nt, Human
ugccugcucuuuucuucuc

SEQ ID NO: 136299 - RNA, 18 nt, Human
uguuaaauuacacccuuu

SEQ ID NO: 136300 - RNA, 18 nt, Human
uuacaacaguccagacug

SEQ ID NO: 136301 - RNA, 20 nt, Human
uuacaacaguccagacugca

SEQ ID NO: 136302 - RNA, 18 nt, Human
uucacuugaaugaauucu

SEQ ID NO: 136303 - RNA, 21 nt, Human
uugccugcucuuuucuucuca

SEQ ID NO: 136304 - RNA, 23 nt, Human
uuggauugggaggaugggguggg

SEQ ID NO: 136305 - RNA, 20 nt, Human
aacagagcagcagcuugaga

SEQ ID NO: 136306 - RNA, 20 nt, Human
aacccagaagguaacagcaa

SEQ ID NO: 136307 - RNA, 19 nt, Human
aagagauuaacaucuacgg

SEQ ID NO: 136308 - RNA, 20 nt, Human
aaguggcagagggugccugg

SEQ ID NO: 136309 - RNA, 21 nt, Human
acggaauaaaaauguggaaac

SEQ ID NO: 136310 - RNA, 30 nt, Human
acuugggccaaacuaaaaaucuugaggacc

SEQ ID NO: 136311 - RNA, 19 nt, Human
agacaagacuauuuaucuu

SEQ ID NO: 136312 - RNA, 19 nt, Human
agacugcagaaaauccagc

SEQ ID NO: 136313 - RNA, 22 nt, Human
agccugaugacccugaagguca

SEQ ID NO: 136314 - RNA, 19 nt, Human
aggcagcaccagggaaccu

SEQ ID NO: 136315 - RNA, 24 nt, Human
aggcagcaccagggaaccuuccaa

SEQ ID NO: 136316 - RNA, 18 nt, Human
aggugguggcauuuagca

SEQ ID NO: 136317 - RNA, 23 nt, Human
auccugucacuaacugggggagg

SEQ ID NO: 136318 - RNA, 30 nt, Human
aucucccuuucuuuauauucucucuccagg

SEQ ID NO: 136319 - RNA, 24 nt, Human
augguuaaaucaaggccggggucc

SEQ ID NO: 136320 - RNA, 25 nt, Human
auuacagaaguccuugcuugguggu

SEQ ID NO: 136321 - RNA, 18 nt, Human
cagaaacagagcagcagc

SEQ ID NO: 136322 - RNA, 18 nt, Human
cagaagguaacagcaacc

SEQ ID NO: 136323 - RNA, 21 nt, Human
cagcaaaggcucuucuuuucc

SEQ ID NO: 136324 - RNA, 26 nt, Human
cagcaaccacuacagaucagcagaac

SEQ ID NO: 136325 - RNA, 19 nt, Human
caucaucuuuacauuagaa

SEQ ID NO: 136326 - RNA, 20 nt, Human
cauccuggacucgugcuccc

SEQ ID NO: 136327 - RNA, 19 nt, Human
ccacugggcuggggcugua

SEQ ID NO: 136328 - RNA, 21 nt, Human
ccagaagguaacagcaaccac

SEQ ID NO: 136329 - RNA, 20 nt, Human
ccagcuggccccaugcuuca

SEQ ID NO: 136330 - RNA, 21 nt, Human
cgauagccuacaagaagcaaa

SEQ ID NO: 136331 - RNA, 18 nt, Human
cuauaaugcucuaagacu

SEQ ID NO: 136332 - RNA, 21 nt, Human
cucauccugucacuaacuggg

SEQ ID NO: 136333 - RNA, 18 nt, Human
cuggaauggggcgauagc

SEQ ID NO: 136334 - RNA, 23 nt, Human
cuggccccaugcuucagggcuug

SEQ ID NO: 136335 - RNA, 19 nt, Human
cugggcuggggcuguaggc

SEQ ID NO: 136336 - RNA, 19 nt, Human
gaagcaaagauugcacaug

SEQ ID NO: 136337 - RNA, 18 nt, Human
gacccgauuugucaguaa

SEQ ID NO: 136338 - RNA, 20 nt, Human
gcccuugagcugccagggag

SEQ ID NO: 136339 - RNA, 19 nt, Human
gcggaccucucugggacag

SEQ ID NO: 136340 - RNA, 21 nt, Human
gcuauaaugcucuaagacugc

SEQ ID NO: 136341 - RNA, 23 nt, Human
ggaauggggcgauagccuacaag

SEQ ID NO: 136342 - RNA, 20 nt, Human
ggcagaaacagagcagcagc

SEQ ID NO: 136343 - RNA, 20 nt, Human
ggugguuccacugggcuggg

SEQ ID NO: 136344 - RNA, 22 nt, Human
gucccuccuacauaagucuccg

SEQ ID NO: 136345 - RNA, 25 nt, Human
uaaaaaauauaucuauaccuagagc

SEQ ID NO: 136346 - RNA, 20 nt, Human
uaacugggggagguagaggg

SEQ ID NO: 136347 - RNA, 25 nt, Human
uaagcagccuuucacugagagacac

SEQ ID NO: 136348 - RNA, 21 nt, Human
uacuucugguuguccuuaacu

SEQ ID NO: 136349 - RNA, 18 nt, Human
uagcaaauggcuauaaug

SEQ ID NO: 136350 - RNA, 19 nt, Human
uagccuacaagaagcaaag

SEQ ID NO: 136351 - RNA, 18 nt, Human
uauucucucuccagcaua

SEQ ID NO: 136352 - RNA, 18 nt, Human
ucacuaacugggggaggu

SEQ ID NO: 136353 - RNA, 18 nt, Human
ucaggagugugaggcagc

SEQ ID NO: 136354 - RNA, 23 nt, Human
ucucugggacagccugaugaccc

SEQ ID NO: 136355 - RNA, 24 nt, Human
ucuuguucuuguugcuugggucgg

SEQ ID NO: 136356 - RNA, 22 nt, Human
ucuuguucuuguugcuuguugu

SEQ ID NO: 136357 - RNA, 22 nt, Human
ugaaaugcuguguaaagugugg

SEQ ID NO: 136358 - RNA, 19 nt, Human
ugaacugaggugguggcau

SEQ ID NO: 136359 - RNA, 22 nt, Human
ugaggacaagggauacugucua

SEQ ID NO: 136360 - RNA, 24 nt, Human
ugcagaaaauccagcuuucuguuu

SEQ ID NO: 136361 - RNA, 18 nt, Human
ugcccuugagcugccagg

SEQ ID NO: 136362 - RNA, 19 nt, Human
uggaaacccagaagguaac

SEQ ID NO: 136363 - RNA, 21 nt, Human
uggaauggauuaugucuaagu

SEQ ID NO: 136364 - RNA, 22 nt, Human
uggaauggauuaugucuaagug

SEQ ID NO: 136365 - RNA, 18 nt, Human
ugggacagccugaugacc

SEQ ID NO: 136366 - RNA, 21 nt, Human
ugggagagaaauuccgucggg

SEQ ID NO: 136367 - RNA, 19 nt, Human
ugggggagguagagggaag

SEQ ID NO: 136368 - RNA, 20 nt, Human
ugucacuaacugggggaggu

SEQ ID NO: 136369 - RNA, 20 nt, Human
uguguaaagugugguacuuc

SEQ ID NO: 136370 - RNA, 23 nt, Human
uuaaaaaauauaucuauaccuag

SEQ ID NO: 136371 - RNA, 23 nt, Human
uuaauauucuucccaggcccccu

SEQ ID NO: 136372 - RNA, 24 nt, Human
uuaggggucucuucaaaggccucu

SEQ ID NO: 136373 - RNA, 20 nt, Human
uuccugggagggugaaagau

SEQ ID NO: 136374 - RNA, 22 nt, Human
uucuuuuccucauccugucacu

SEQ ID NO: 136375 - RNA, 20 nt, Human
uuggcuacaaaaaggucuuu

SEQ ID NO: 136376 - RNA, 20 nt, Human
uugggccaaacuaaaaaucu

SEQ ID NO: 136377 - RNA, 27 nt, Human
uuguuguucuuguucuuguugcuuguu

SEQ ID NO: 136378 - RNA, 24 nt, Human
uuuccucauccugucacuaacugg

SEQ ID NO: 136379 - RNA, 24 nt, Human
aaaaaacguauuuuuacuguggaa

SEQ ID NO: 136380 - RNA, 18 nt, Human
aaaacacaugaaaaacca

SEQ ID NO: 136381 - RNA, 21 nt, Human
aaaacaccuuuaacacuauga

SEQ ID NO: 136382 - RNA, 21 nt, Human
aaaacagacagaaacaggguu

SEQ ID NO: 136383 - RNA, 24 nt, Human
aaacagacagaaacaggguuagca

SEQ ID NO: 136384 - RNA, 26 nt, Human
aacaauacuauuguuugcaaugcugu

SEQ ID NO: 136385 - RNA, 23 nt, Human
aagguuuaguuuauuuucuauua

SEQ ID NO: 136386 - RNA, 18 nt, Human
aauugucccauaaacacu

SEQ ID NO: 136387 - RNA, 23 nt, Human
acacacacacacacacacacaca

SEQ ID NO: 136388 - RNA, 21 nt, Human
acacacacacacacacacgua

SEQ ID NO: 136389 - RNA, 23 nt, Human
acacacacacacacacacguaua

SEQ ID NO: 136390 - RNA, 25 nt, Human
acacacacacacacguauacauaca

SEQ ID NO: 136391 - RNA, 21 nt, Human
acacacacguauacauacaau

SEQ ID NO: 136392 - RNA, 23 nt, Human
acacacacguauacauacauaua

SEQ ID NO: 136393 - RNA, 20 nt, Human
acacuuagucccaucugccu

SEQ ID NO: 136394 - RNA, 23 nt, Human
acagaaacuuuauugccugcuaa

SEQ ID NO: 136395 - RNA, 19 nt, Human
acagcacaaaacagacaga

SEQ ID NO: 136396 - RNA, 22 nt, Human
acugcaacuugcucaacacauu

SEQ ID NO: 136397 - RNA, 21 nt, Human
agcacaaaacagacagaaaca

SEQ ID NO: 136398 - RNA, 18 nt, Human
aguaucuacuuaauuuga

SEQ ID NO: 136399 - RNA, 19 nt, Human
agugcaucaagggcaaagc

SEQ ID NO: 136400 - RNA, 26 nt, Human
caaaaaacguauuuuuacuguggaag

SEQ ID NO: 136401 - RNA, 24 nt, Human
caacauacuuuuaagauaaaagua

SEQ ID NO: 136402 - RNA, 23 nt, Human
caacggacaccgcauccagcuca

SEQ ID NO: 136403 - RNA, 18 nt, Human
cacacacacacacacaca

SEQ ID NO: 136404 - RNA, 20 nt, Human
cacacacacacacacacaca

SEQ ID NO: 136405 - RNA, 20 nt, Human
cacacacacacacacacaca

SEQ ID NO: 136406 - RNA, 25 nt, Human
cacacacacacacacacacguauac

SEQ ID NO: 136407 - RNA, 26 nt, Human
cacacacacacacacacguauacaua

SEQ ID NO: 136408 - RNA, 25 nt, Human
cacacacacacacacguauacauac

SEQ ID NO: 136409 - RNA, 19 nt, Human
cacauuuaaaauuguugaa

SEQ ID NO: 136410 - RNA, 23 nt, Human
cacauuuguuucugaaaacacug

SEQ ID NO: 136411 - RNA, 23 nt, Human
cagaauuuugagauuaaaagcac

SEQ ID NO: 136412 - RNA, 23 nt, Human
cagacagaaacaggguuagcaca

SEQ ID NO: 136413 - RNA, 21 nt, Human
cagcacaaaacagacagaaac

SEQ ID NO: 136414 - RNA, 19 nt, Human
cucaaugacaauuuuaaug

SEQ ID NO: 136415 - RNA, 20 nt, Human
cugcuuucacauuuguuucu

SEQ ID NO: 136416 - RNA, 21 nt, Human
gaaaagguacagcacaaaaca

SEQ ID NO: 136417 - RNA, 23 nt, Human
gcacaaaaacacaugaaaaacca

SEQ ID NO: 136418 - RNA, 21 nt, Human
gcacaaaacagacagaaacag

SEQ ID NO: 136419 - RNA, 31 nt, Human
guguaagauacacacacacacacacacacag

SEQ ID NO: 136420 - RNA, 21 nt, Human
uaaaaucaaguauuuaucaag

SEQ ID NO: 136421 - RNA, 24 nt, Human
uaaauauaaaaacaagaaagcauu

SEQ ID NO: 136422 - RNA, 20 nt, Human
uaacaacauacuuuuaagau

SEQ ID NO: 136423 - RNA, 21 nt, Human
uaacuuggguuccggagggua

SEQ ID NO: 136424 - RNA, 19 nt, Human
uaagagaagaguuugagau

SEQ ID NO: 136425 - RNA, 20 nt, Human
uaagauacacacacacacac

SEQ ID NO: 136426 - RNA, 23 nt, Human
uaagugaugaguauuauguacaa

SEQ ID NO: 136427 - RNA, 24 nt, Human
uaaguuaaaagcauugugcauuuu

SEQ ID NO: 136428 - RNA, 24 nt, Human
uaauaguaaauauuuuaucucauu

SEQ ID NO: 136429 - RNA, 26 nt, Human
uacacacacacacacacacacacacg

SEQ ID NO: 136430 - RNA, 25 nt, Human
uacacacacacacacacacacacag

SEQ ID NO: 136431 - RNA, 22 nt, Human
uacagcacaaaacagacagaaa

SEQ ID NO: 136432 - RNA, 20 nt, Human
uaggcaauguaaucuacuuc

SEQ ID NO: 136433 - RNA, 23 nt, Human
uauaauauacuaugauauguauu

SEQ ID NO: 136434 - RNA, 19 nt, Human
uauaugccaccacagaaac

SEQ ID NO: 136435 - RNA, 19 nt, Human
uauggcacaaaaacacaug

SEQ ID NO: 136436 - RNA, 27 nt, Human
uauuuuggucauauuuuauaauaaaau

SEQ ID NO: 136437 - RNA, 19 nt, Human
ucaaauaccuaucauuaau

SEQ ID NO: 136438 - RNA, 21 nt, Human
ucaaguuuucuauaauucuga

SEQ ID NO: 136439 - RNA, 18 nt, Human
uccauaaaauaaauauaa

SEQ ID NO: 136440 - RNA, 19 nt, Human
ucccauaaacacuuagucc

SEQ ID NO: 136441 - RNA, 21 nt, Human
ucccaucugccuguagucuca

SEQ ID NO: 136442 - RNA, 18 nt, Human
uccuauuaaacaaaauau

SEQ ID NO: 136443 - RNA, 23 nt, Human
ucuaaauaguaucuacuuaauuu

SEQ ID NO: 136444 - RNA, 22 nt, Human
ucuccauggcaaaauagucgca

SEQ ID NO: 136445 - RNA, 21 nt, Human
ucugaaugaccuuguuaauuu

SEQ ID NO: 136446 - RNA, 21 nt, Human
ucuuacaugauauaugccacc

SEQ ID NO: 136447 - RNA, 19 nt, Human
ugaaaaccuuacauauuga

SEQ ID NO: 136448 - RNA, 18 nt, Human
ugaaauacaauuuacaaa

SEQ ID NO: 136449 - RNA, 19 nt, Human
ugaaauacaauuuacaaaa

SEQ ID NO: 136450 - RNA, 20 nt, Human
ugauuugugaagaaauuacu

SEQ ID NO: 136451 - RNA, 24 nt, Human
ugcaacggacaccgcauccagcuc

SEQ ID NO: 136452 - RNA, 18 nt, Human
ugcauauaaacucucuac

SEQ ID NO: 136453 - RNA, 20 nt, Human
uggcaaaauagucgcauaug

SEQ ID NO: 136454 - RNA, 25 nt, Human
uguguaagauacacacacacacaca

SEQ ID NO: 136455 - RNA, 30 nt, Human
uguguaagauacacacacacacacacacag

SEQ ID NO: 136456 - RNA, 18 nt, Human
uucauuucuuugcuuuga

SEQ ID NO: 136457 - RNA, 18 nt, Human
uugacugcuuucacauuu

SEQ ID NO: 136458 - RNA, 21 nt, Human
uugacugcuuucacauuuguu

SEQ ID NO: 136459 - RNA, 24 nt, Human
uugguuaaaaucaaguauuuauca

SEQ ID NO: 136460 - RNA, 21 nt, Human
uuguuauggcacaaaaacaca

SEQ ID NO: 136461 - RNA, 22 nt, Human
uuuucagaauuuugagauuaaa

SEQ ID NO: 136462 - RNA, 22 nt, Human
uuuuggcaaaaauaaaauauaa

SEQ ID NO: 136463 - RNA, 20 nt, Human
aaaacaaaauuuguugcaaa

SEQ ID NO: 136464 - RNA, 18 nt, Human
aaacaaaaaaggaggaua

SEQ ID NO: 136465 - RNA, 23 nt, Human
aaacacaugagguagaaauaaaa

SEQ ID NO: 136466 - RNA, 18 nt, Human
aaagcugguaaaaauuua

SEQ ID NO: 136467 - RNA, 21 nt, Human
aaaucuacucuagaauacuga

SEQ ID NO: 136468 - RNA, 23 nt, Human
aacccauaaauucagacuuuuca

SEQ ID NO: 136469 - RNA, 24 nt, Human
aaguuaauccaucuucaaagcugg

SEQ ID NO: 136470 - RNA, 21 nt, Human
aauacugaaaacaaaaaagga

SEQ ID NO: 136471 - RNA, 21 nt, Human
acacaaaaaagggaaaacuga

SEQ ID NO: 136472 - RNA, 24 nt, Human
agacagaaaagacagcggaaccgg

SEQ ID NO: 136473 - RNA, 23 nt, Human
aggcaaaaaugcaugcauagaac

SEQ ID NO: 136474 - RNA, 26 nt, Human
aggcaaaaaugcaugcauagaaccca

SEQ ID NO: 136475 - RNA, 20 nt, Human
agguagaaauaaaaauuuua

SEQ ID NO: 136476 - RNA, 21 nt, Human
auagaacccauaaauucagac

SEQ ID NO: 136477 - RNA, 19 nt, Human
augaaaacaaaucaaaucc

SEQ ID NO: 136478 - RNA, 23 nt, Human
cacuuauguucucaucaucacaa

SEQ ID NO: 136479 - RNA, 24 nt, Human
cagaaaagacagcggaaccggggg

SEQ ID NO: 136480 - RNA, 21 nt, Human
cagaaagcuuagaaaagggaa

SEQ ID NO: 136481 - RNA, 21 nt, Human
cauagaacccauaaauucaga

SEQ ID NO: 136482 - RNA, 22 nt, Human
gaaaacacaucugauagcagaa

SEQ ID NO: 136483 - RNA, 21 nt, Human
gaggauaguaagggaggauag

SEQ ID NO: 136484 - RNA, 19 nt, Human
gccccagaagaaucuguua

SEQ ID NO: 136485 - RNA, 21 nt, Human
gcccuaguaugaaaaggcaag

SEQ ID NO: 136486 - RNA, 21 nt, Human
gcgagccugcgcaccucgcgc

SEQ ID NO: 136487 - RNA, 26 nt, Human
uaaaaaaaacccucaagagaaaugga

SEQ ID NO: 136488 - RNA, 20 nt, Human
uaaaaaaacacaugagguag

SEQ ID NO: 136489 - RNA, 22 nt, Human
uaacacucauuaaaaaaaaccc

SEQ ID NO: 136490 - RNA, 19 nt, Human
uacaccugugcuuuaaaac

SEQ ID NO: 136491 - RNA, 18 nt, Human
uaggcaaaaaugcaugca

SEQ ID NO: 136492 - RNA, 20 nt, Human
uauucagucuuucaaauaaa

SEQ ID NO: 136493 - RNA, 24 nt, Human
ucagucuuucaaauaaaguucuua

SEQ ID NO: 136494 - RNA, 20 nt, Human
ucugacuuaaaaguuuaaag

SEQ ID NO: 136495 - RNA, 20 nt, Human
ugaaaacacaucugauagca

SEQ ID NO: 136496 - RNA, 23 nt, Human
ugaaaacacaucugauagcagaa

SEQ ID NO: 136497 - RNA, 19 nt, Human
ugaaaugucugacuuaaaa

SEQ ID NO: 136498 - RNA, 19 nt, Human
uuauaucaaaaucuacucu

SEQ ID NO: 136499 - RNA, 23 nt, Human
uuauuaaauaaaaaacuucaagu

SEQ ID NO: 136500 - RNA, 23 nt, Human
uucacaguuuucgguacaccugu

SEQ ID NO: 136501 - RNA, 19 nt, Human
uuccaagccccagaagaau

SEQ ID NO: 136502 - RNA, 23 nt, Human
uuuaaagcucaaagucaaaaguu

SEQ ID NO: 136503 - RNA, 25 nt, Human
agaggcuagaggaaugccaguguua

SEQ ID NO: 136504 - RNA, 18 nt, Human
cacugcacuccagcagag

SEQ ID NO: 136505 - RNA, 19 nt, Human
cacugcacuccagcagagg

SEQ ID NO: 136506 - RNA, 19 nt, Human
cacugcacuccagcagagg

SEQ ID NO: 136507 - RNA, 20 nt, Human
cacugcacuccagcagaggc

SEQ ID NO: 136508 - RNA, 22 nt, Human
cagcaacaugcuagaaaauccu

SEQ ID NO: 136509 - RNA, 21 nt, Human
cagcagaggcuagaggaaugc

SEQ ID NO: 136510 - RNA, 18 nt, Human
ccucacugcacuccagca

SEQ ID NO: 136511 - RNA, 25 nt, Human
ccucacugcacuccagcagaggcug

SEQ ID NO: 136512 - RNA, 21 nt, Human
ucacugcacuccagcagaggc

SEQ ID NO: 136513 - RNA, 23 nt, Human
uggacaggcuggagucagcucuu

SEQ ID NO: 136514 - RNA, 23 nt, Human
aaccacagccacccugaccuuuc

SEQ ID NO: 136515 - RNA, 21 nt, Human
agcacuguuucucccaggaag

SEQ ID NO: 136516 - RNA, 18 nt, Human
agcagaaucugucuucca

SEQ ID NO: 136517 - RNA, 22 nt, Human
agcgacggggacgcggccagga

SEQ ID NO: 136518 - RNA, 21 nt, Human
aggcggaggagaggcgagaga

SEQ ID NO: 136519 - RNA, 22 nt, Human
aucucaucuuuuccucucuuua

SEQ ID NO: 136520 - RNA, 20 nt, Human
auuccuucagcucagccuca

SEQ ID NO: 136521 - RNA, 25 nt, Human
caccugucccucuaggcagccucca

SEQ ID NO: 136522 - RNA, 22 nt, Human
cagcagaaucugucuuccaguu

SEQ ID NO: 136523 - RNA, 23 nt, Human
cagcucagccucaccuuaggcac

SEQ ID NO: 136524 - RNA, 21 nt, Human
caggaaguucccagaggcgga

SEQ ID NO: 136525 - RNA, 21 nt, Human
caggguaauuuugaauccauu

SEQ ID NO: 136526 - RNA, 24 nt, Human
caucuuuuccucucuuuaugcucc

SEQ ID NO: 136527 - RNA, 21 nt, Human
cauuccuucagcucagccuca

SEQ ID NO: 136528 - RNA, 19 nt, Human
ccaaccacagccacccuga

SEQ ID NO: 136529 - RNA, 21 nt, Human
ccgugggaagaauaaccuucc

SEQ ID NO: 136530 - RNA, 27 nt, Human
ccucuaggcagccuccaagcccagcuu

SEQ ID NO: 136531 - RNA, 19 nt, Human
ccugucccucuaggcagcc

SEQ ID NO: 136532 - RNA, 18 nt, Human
cggcagcagucugcuugg

SEQ ID NO: 136533 - RNA, 18 nt, Human
cucagccucaccuuaggc

SEQ ID NO: 136534 - RNA, 22 nt, Human
cucccaggaaguucccagaggc

SEQ ID NO: 136535 - RNA, 18 nt, Human
cucgguggcucugcagga

SEQ ID NO: 136536 - RNA, 18 nt, Human
cucgguggcucugcagga

SEQ ID NO: 136537 - RNA, 21 nt, Human
cucuccaaguucccuagagga

SEQ ID NO: 136538 - RNA, 23 nt, Human
cuuugcccuuguacagccuuugg

SEQ ID NO: 136539 - RNA, 20 nt, Human
gcagccuccaagcccagcuu

SEQ ID NO: 136540 - RNA, 18 nt, Human
gcuggaguggggugcugg

SEQ ID NO: 136541 - RNA, 18 nt, Human
ggugcugguauccaagug

SEQ ID NO: 136542 - RNA, 24 nt, Human
guugauuuucacuucagucaccuu

SEQ ID NO: 136543 - RNA, 24 nt, Human
uaggcagccuccaagcccagcuuu

SEQ ID NO: 136544 - RNA, 18 nt, Human
uagugcucucgggccucg

SEQ ID NO: 136545 - RNA, 18 nt, Human
ucccucuaggcagccucc

SEQ ID NO: 136546 - RNA, 21 nt, Human
ucuaagugucuguggugaccc

SEQ ID NO: 136547 - RNA, 22 nt, Human
ugaggcccuggcagcugcuggc

SEQ ID NO: 136548 - RNA, 18 nt, Human
ugcuuggugaucucuagg

SEQ ID NO: 136549 - RNA, 19 nt, Human
uggcagacuguguaaaagc

SEQ ID NO: 136550 - RNA, 20 nt, Human
uguaaaaccauggcagacug

SEQ ID NO: 136551 - RNA, 21 nt, Human
uguaaaaccauggcagacugu

SEQ ID NO: 136552 - RNA, 22 nt, Human
uguaaaagcuuccucgaggcug

SEQ ID NO: 136553 - RNA, 22 nt, Human
uucacccaccugucccucuagg

SEQ ID NO: 136554 - RNA, 19 nt, Human
uucagcucagccucaccuu

SEQ ID NO: 136555 - RNA, 21 nt, Human
uuggugaucucuagguuuucc

SEQ ID NO: 136556 - RNA, 21 nt, Human
uuucucccaggaaguucccag

SEQ ID NO: 136557 - RNA, 22 nt, Human
uuuucucgguggcucugcagga

SEQ ID NO: 136558 - RNA, 20 nt, Human
uuuuuuuuuuuuuuuuuugg

SEQ ID NO: 136559 - RNA, 21 nt, Human
aacaagaagggaagaugcugg

SEQ ID NO: 136560 - RNA, 23 nt, Human
aagaugcugggaccugaucagga

SEQ ID NO: 136561 - RNA, 21 nt, Human
aaggugcugggaccuuaagga

SEQ ID NO: 136562 - RNA, 18 nt, Human
acaagaaaucuggacucu

SEQ ID NO: 136563 - RNA, 25 nt, Human
accuuaaggaacagaacaagaaggg

SEQ ID NO: 136564 - RNA, 21 nt, Human
agaugcugggaccugaucagg

SEQ ID NO: 136565 - RNA, 19 nt, Human
aggaacagaacaagaaggg

SEQ ID NO: 136566 - RNA, 21 nt, Human
aggcugggcuggguaccaggg

SEQ ID NO: 136567 - RNA, 19 nt, Human
ccugggguaaggugcuggg

SEQ ID NO: 136568 - RNA, 18 nt, Human
gaacagaacaagaaggga

SEQ ID NO: 136569 - RNA, 20 nt, Human
gcugggugcuaaggcugggc

SEQ ID NO: 136570 - RNA, 20 nt, Human
ggacagagacugaggccagc

SEQ ID NO: 136571 - RNA, 20 nt, Human
ggcugggcuggguaccaggg

SEQ ID NO: 136572 - RNA, 23 nt, Human
ggucacaugcugggagucaugga

SEQ ID NO: 136573 - RNA, 20 nt, Human
uaccagggucaagcccuagg

SEQ ID NO: 136574 - RNA, 21 nt, Human
ucaaccccuggagagccuaca

SEQ ID NO: 136575 - RNA, 23 nt, Human
ucaagcgaugggacagagacuga

SEQ ID NO: 136576 - RNA, 21 nt, Human
uccacuucaguuaccagucgc

SEQ ID NO: 136577 - RNA, 23 nt, Human
ucuuuagggacagccgucguugu

SEQ ID NO: 136578 - RNA, 18 nt, Human
ugugcaaaguuagagggg

SEQ ID NO: 136579 - RNA, 18 nt, Human
uuuuuuuuuuuuuuuuug

SEQ ID NO: 136580 - RNA, 20 nt, Human
uuuuuuuuuuuuuuuuuugu

SEQ ID NO: 136581 - RNA, 19 nt, Human
aagcaagggguggugggga

SEQ ID NO: 136582 - RNA, 21 nt, Human
aagcaaggggugguggggaga

SEQ ID NO: 136583 - RNA, 18 nt, Human
aaggucuucccgaggccc

SEQ ID NO: 136584 - RNA, 21 nt, Human
agcucgucccgcccguccccu

SEQ ID NO: 136585 - RNA, 25 nt, Human
agggaggguguggggugaccuucgg

SEQ ID NO: 136586 - RNA, 18 nt, Human
aggggugguggggagauc

SEQ ID NO: 136587 - RNA, 23 nt, Human
aggggugguggggagauccuagg

SEQ ID NO: 136588 - RNA, 23 nt, Human
caacuguaaucccagcacauugg

SEQ ID NO: 136589 - RNA, 24 nt, Human
caacuguaaucccagcacauuggg

SEQ ID NO: 136590 - RNA, 19 nt, Human
cagcagaacagccaagcuc

SEQ ID NO: 136591 - RNA, 21 nt, Human
caggugcagcagaacagccaa

SEQ ID NO: 136592 - RNA, 23 nt, Human
ccaccggccccuucccuaucucc

SEQ ID NO: 136593 - RNA, 20 nt, Human
ccggccccuucccuaucucc

SEQ ID NO: 136594 - RNA, 19 nt, Human
ccucccacauacuuggagg

SEQ ID NO: 136595 - RNA, 22 nt, Human
cgcauuaaaaaaaaauccugag

SEQ ID NO: 136596 - RNA, 24 nt, Human
cggcugcuggggggcagagggagg

SEQ ID NO: 136597 - RNA, 21 nt, Human
cgucccgcccguccccuccca

SEQ ID NO: 136598 - RNA, 20 nt, Human
cuauaugcuaagcauuaccc

SEQ ID NO: 136599 - RNA, 19 nt, Human
cuccacagguccugccagg

SEQ ID NO: 136600 - RNA, 22 nt, Human
cuggggggcagagggagggugu

SEQ ID NO: 136601 - RNA, 19 nt, Human
cugguuggggcaggaagca

SEQ ID NO: 136602 - RNA, 21 nt, Human
gaaacccuuccccacuccuga

SEQ ID NO: 136603 - RNA, 19 nt, Human
gaaggucuucccgaggccc

SEQ ID NO: 136604 - RNA, 20 nt, Human
gccaggacagcuccagguuc

SEQ ID NO: 136605 - RNA, 23 nt, Human
ggaaaggaaggcacacagggaua

SEQ ID NO: 136606 - RNA, 20 nt, Human
ggcagagggagggugugggg

SEQ ID NO: 136607 - RNA, 18 nt, Human
gggaggguguggggugag

SEQ ID NO: 136608 - RNA, 18 nt, Human
guccagaagcugcauccg

SEQ ID NO: 136609 - RNA, 18 nt, Human
uaggauaacagaaagcau

SEQ ID NO: 136610 - RNA, 23 nt, Human
ucaggugcagcagaacagccaag

SEQ ID NO: 136611 - RNA, 19 nt, Human
uccaaauggucagggagcu

SEQ ID NO: 136612 - RNA, 18 nt, Human
ucccgcccguccccuccc

SEQ ID NO: 136613 - RNA, 21 nt, Human
ucgaucauggaggagaaaccc

SEQ ID NO: 136614 - RNA, 19 nt, Human
ugacaacuguaaucccagc

SEQ ID NO: 136615 - RNA, 19 nt, Human
ugccaggacagcuccaggu

SEQ ID NO: 136616 - RNA, 18 nt, Human
uggggcaggaagcaaggg

SEQ ID NO: 136617 - RNA, 21 nt, Human
uggggggcagagggagggugu

SEQ ID NO: 136618 - RNA, 24 nt, Human
ugguugagggucaagaggugggaa

SEQ ID NO: 136619 - RNA, 24 nt, Human
uuucuguuccugauuuguaggugg

SEQ ID NO: 136620 - RNA, 24 nt, Human
uuuuuggcauuguuacgauucauu

SEQ ID NO: 136621 - RNA, 18 nt, Human
uuuuuuuuuuuuuuuuug

SEQ ID NO: 136622 - RNA, 18 nt, Human
uuuuuuuuuuuuuuuuug

SEQ ID NO: 136623 - RNA, 24 nt, Human
uuuuuuuuuuuuuuuuuggcauug

SEQ ID NO: 136624 - RNA, 22 nt, Human
uuuuuuuuuuuuuuuuuuuggc

SEQ ID NO: 136625 - RNA, 21 nt, Human
aaagcccucccugggcccucc

SEQ ID NO: 136626 - RNA, 26 nt, Human
aaagcccucccugggcccucccaccc

SEQ ID NO: 136627 - RNA, 26 nt, Human
aaaggucccuggucaguccuugggga

SEQ ID NO: 136628 - RNA, 24 nt, Human
aagagaagacagaauucuccagga

SEQ ID NO: 136629 - RNA, 26 nt, Human
aagagaagacagaauucuccaggaga

SEQ ID NO: 136630 - RNA, 25 nt, Human
aagcccucccugggcccucccaccc

SEQ ID NO: 136631 - RNA, 21 nt, Human
aaggaggaguguacagggucu

SEQ ID NO: 136632 - RNA, 21 nt, Human
acagggucugggaaucaagac

SEQ ID NO: 136633 - RNA, 24 nt, Human
acccccuccugcggcccgccgacc

SEQ ID NO: 136634 - RNA, 18 nt, Human
acccgcugucgccguccc

SEQ ID NO: 136635 - RNA, 21 nt, Human
acugguaagccccacgugugc

SEQ ID NO: 136636 - RNA, 22 nt, Human
agaagcccaaagacacagaggg

SEQ ID NO: 136637 - RNA, 22 nt, Human
agacacagagggaucaagucca

SEQ ID NO: 136638 - RNA, 24 nt, Human
agagaagacagaauucuccaggag

SEQ ID NO: 136639 - RNA, 24 nt, Human
agagagcacuggcugccggggaca

SEQ ID NO: 136640 - RNA, 21 nt, Human
agcaaagacccuuuuaucaaa

SEQ ID NO: 136641 - RNA, 20 nt, Human
aggaggaguguacagggucu

SEQ ID NO: 136642 - RNA, 21 nt, Human
agguccagaaauccuugagcu

SEQ ID NO: 136643 - RNA, 20 nt, Human
aucaaguccaucugcugguc

SEQ ID NO: 136644 - RNA, 23 nt, Human
auuuguuccaacuccccuucccu

SEQ ID NO: 136645 - RNA, 21 nt, Human
cagaucccuuugaaagagucc

SEQ ID NO: 136646 - RNA, 24 nt, Human
cagguugacauuaucuaccagcca

SEQ ID NO: 136647 - RNA, 22 nt, Human
caguggcaacuuacaaugaguc

SEQ ID NO: 136648 - RNA, 24 nt, Human
ccaacuccccuucccuccccaaga

SEQ ID NO: 136649 - RNA, 20 nt, Human
cccgggagggcugccagacc

SEQ ID NO: 136650 - RNA, 20 nt, Human
ccuauagcucgaaaaaccac

SEQ ID NO: 136651 - RNA, 19 nt, Human
ccugggcccucccacccuc

SEQ ID NO: 136652 - RNA, 22 nt, Human
cucaauuugagauggccaaaga

SEQ ID NO: 136653 - RNA, 22 nt, Human
cugaucacacaacagaaaagga

SEQ ID NO: 136654 - RNA, 21 nt, Human
cuggacuggccuccagggaac

SEQ ID NO: 136655 - RNA, 22 nt, Human
cugugcaaaauucaaaaggauc

SEQ ID NO: 136656 - RNA, 21 nt, Human
cuugcugaggccaggcuccca

SEQ ID NO: 136657 - RNA, 19 nt, Human
gaaaggucccuggucaguc

SEQ ID NO: 136658 - RNA, 19 nt, Human
gaugcccuauagcucgaaa

SEQ ID NO: 136659 - RNA, 21 nt, Human
gccccacgugugccaagauug

SEQ ID NO: 136660 - RNA, 21 nt, Human
gccccuugcugaggccaggcu

SEQ ID NO: 136661 - RNA, 21 nt, Human
gcccuauagcucgaaaaacca

SEQ ID NO: 136662 - RNA, 24 nt, Human
gcuccuguaaucagaagcaaagac

SEQ ID NO: 136663 - RNA, 23 nt, Human
ggacauucagcuucacuggagcc

SEQ ID NO: 136664 - RNA, 21 nt, Human
ggagccagaggucaggaaggc

SEQ ID NO: 136665 - RNA, 24 nt, Human
ggccagggacuggagguggaugug

SEQ ID NO: 136666 - RNA, 18 nt, Human
uaaaggucugagcacugg

SEQ ID NO: 136667 - RNA, 23 nt, Human
uaccugggccacugguaagcccc

SEQ ID NO: 136668 - RNA, 23 nt, Human
ucaaaaggaucagaucccuuuga

SEQ ID NO: 136669 - RNA, 25 nt, Human
uccaacuccccuucccuccccaaga

SEQ ID NO: 136670 - RNA, 21 nt, Human
uccaugaaacaaaaaauuacc

SEQ ID NO: 136671 - RNA, 21 nt, Human
ucccugggcccucccacccuc

SEQ ID NO: 136672 - RNA, 22 nt, Human
ucucauguuggcaguggcaacu

SEQ ID NO: 136673 - RNA, 23 nt, Human
ucucauguuggcaguggcaacuu

SEQ ID NO: 136674 - RNA, 19 nt, Human
ugagauggccaaagagaaa

SEQ ID NO: 136675 - RNA, 21 nt, Human
ugagcacuggacuggccucca

SEQ ID NO: 136676 - RNA, 18 nt, Human
ugcuggucugccucucac

SEQ ID NO: 136677 - RNA, 18 nt, Human
ugcuuguggacgccaacc

SEQ ID NO: 136678 - RNA, 26 nt, Human
uggaaaacauucagcaguacgaaagc

SEQ ID NO: 136679 - RNA, 21 nt, Human
uggcaguggcaacuuacaaug

SEQ ID NO: 136680 - RNA, 24 nt, Human
uggcugccggggacagguuuugag

SEQ ID NO: 136681 - RNA, 20 nt, Human
uguacaccaacuauacaugg

SEQ ID NO: 136682 - RNA, 23 nt, Human
ugugggcccaucccgggagggcu

SEQ ID NO: 136683 - RNA, 24 nt, Human
uuguggacgccaaccaggcaguuc

SEQ ID NO: 136684 - RNA, 21 nt, Human
uuugagauggccaaagagaag

SEQ ID NO: 136685 - RNA, 24 nt, Human
aaacacauaaauccauacuaagac

SEQ ID NO: 136686 - RNA, 20 nt, Human
aaacuacacacacacaaaca

SEQ ID NO: 136687 - RNA, 24 nt, Human
aaagaaauaugaaaaagcuaugua

SEQ ID NO: 136688 - RNA, 24 nt, Human
aaaucauuuuuaggcuggaaccaa

SEQ ID NO: 136689 - RNA, 28 nt, Human
aacaacuaagaaagaaauaugaaaaagc

SEQ ID NO: 136690 - RNA, 23 nt, Human
aagaaauaagucuauccgaaaac

SEQ ID NO: 136691 - RNA, 18 nt, Human
aagagugccaacaacuaa

SEQ ID NO: 136692 - RNA, 22 nt, Human
aagauaaugaggaagagucaac

SEQ ID NO: 136693 - RNA, 25 nt, Human
acacacacacaaacacauaaaucca

SEQ ID NO: 136694 - RNA, 22 nt, Human
acuacacacacacaaacacaua

SEQ ID NO: 136695 - RNA, 25 nt, Human
agagaaggaugguaagaaugcagua

SEQ ID NO: 136696 - RNA, 21 nt, Human
agcuaucaaaauuugugagag

SEQ ID NO: 136697 - RNA, 24 nt, Human
aggaaacaaauacaacaaaauuau

SEQ ID NO: 136698 - RNA, 25 nt, Human
aggaaacaaauacaacaaaauuaua

SEQ ID NO: 136699 - RNA, 21 nt, Human
aggcuggaaccaaacacauaa

SEQ ID NO: 136700 - RNA, 24 nt, Human
auaaaacaacaacgaauaucaggu

SEQ ID NO: 136701 - RNA, 22 nt, Human
caaaacuaguagauauaacuuc

SEQ ID NO: 136702 - RNA, 22 nt, Human
caaaagcacacauuucucagga

SEQ ID NO: 136703 - RNA, 24 nt, Human
cacaauuuaaaucuacaauuaacu

SEQ ID NO: 136704 - RNA, 18 nt, Human
ccauacuaagaccuaaga

SEQ ID NO: 136705 - RNA, 19 nt, Human
ccauaggauuaauacucau

SEQ ID NO: 136706 - RNA, 19 nt, Human
ccccaguucuacuguagaa

SEQ ID NO: 136707 - RNA, 23 nt, Human
cccggccccucaccgcggccucc

SEQ ID NO: 136708 - RNA, 24 nt, Human
cccuccgacuacugcugcuccucc

SEQ ID NO: 136709 - RNA, 22 nt, Human
ccuaggaaacaaauacaacaaa

SEQ ID NO: 136710 - RNA, 24 nt, Human
ccuccgacuacugcugcuccucca

SEQ ID NO: 136711 - RNA, 19 nt, Human
cgaccuagcgcuccuccuu

SEQ ID NO: 136712 - RNA, 21 nt, Human
cgccggcgcccaguccccucu

SEQ ID NO: 136713 - RNA, 21 nt, Human
cggcgcccaguccccucucag

SEQ ID NO: 136714 - RNA, 18 nt, Human
cucaccgcggccucccgg

SEQ ID NO: 136715 - RNA, 25 nt, Human
cucccggagcuggcacgcacccuaa

SEQ ID NO: 136716 - RNA, 21 nt, Human
cuccgacuacugcugcuccuc

SEQ ID NO: 136717 - RNA, 18 nt, Human
cucgggucggcagcuugg

SEQ ID NO: 136718 - RNA, 21 nt, Human
cucuuggcaauauuucguuaa

SEQ ID NO: 136719 - RNA, 18 nt, Human
cugcuccuccacagagcu

SEQ ID NO: 136720 - RNA, 20 nt, Human
cugcugcuccuccacagagc

SEQ ID NO: 136721 - RNA, 22 nt, Human
gaccuagcgcuccuccuucccc

SEQ ID NO: 136722 - RNA, 21 nt, Human
gagaaaaagcacuaggcaaaa

SEQ ID NO: 136723 - RNA, 19 nt, Human
gaggaaagaacuggcagca

SEQ ID NO: 136724 - RNA, 22 nt, Human
ggaaccaaacacauaacaaucu

SEQ ID NO: 136725 - RNA, 19 nt, Human
gguaaacucaauauuuucu

SEQ ID NO: 136726 - RNA, 19 nt, Human
guuuaaagugaaaucaugc

SEQ ID NO: 136727 - RNA, 26 nt, Human
uaaacuacacacacacaaacacauaa

SEQ ID NO: 136728 - RNA, 25 nt, Human
uaaguuuucaacuuuuuuccagccu

SEQ ID NO: 136729 - RNA, 18 nt, Human
uacaauguuguaugagac

SEQ ID NO: 136730 - RNA, 19 nt, Human
uacaauguuguaugagaca

SEQ ID NO: 136731 - RNA, 20 nt, Human
uacacacacacaaacacaua

SEQ ID NO: 136732 - RNA, 26 nt, Human
uacacacacacaaacacauaaaucca

SEQ ID NO: 136733 - RNA, 24 nt, Human
uacuguagaaaggcacagcgcugu

SEQ ID NO: 136734 - RNA, 23 nt, Human
uagaaaggcacagcgcuguggua

SEQ ID NO: 136735 - RNA, 19 nt, Human
uaguucacagaaaauuguu

SEQ ID NO: 136736 - RNA, 23 nt, Human
uauauuucucucacauacaaugu

SEQ ID NO: 136737 - RNA, 24 nt, Human
uaucaaaccauuccuuucucaacc

SEQ ID NO: 136738 - RNA, 21 nt, Human
uauccgaaaacaaaagcacac

SEQ ID NO: 136739 - RNA, 21 nt, Human
uaugaaaaagcuauguaagua

SEQ ID NO: 136740 - RNA, 19 nt, Human
uauuagugagcccaagggc

SEQ ID NO: 136741 - RNA, 24 nt, Human
uauuagugagcccaagggcaggua

SEQ ID NO: 136742 - RNA, 23 nt, Human
uccacagagcugaggcgcuggcg

SEQ ID NO: 136743 - RNA, 24 nt, Human
ucccauagcuuauaugcccucuau

SEQ ID NO: 136744 - RNA, 20 nt, Human
uccuuuaccccaguucuacu

SEQ ID NO: 136745 - RNA, 19 nt, Human
ucucaaccuuucaguagca

SEQ ID NO: 136746 - RNA, 19 nt, Human
ucugcaacgcaagucacag

SEQ ID NO: 136747 - RNA, 20 nt, Human
ugaaaucaugcacuugucaa

SEQ ID NO: 136748 - RNA, 21 nt, Human
ugaauuugucaaaaaaaaaaa

SEQ ID NO: 136749 - RNA, 21 nt, Human
ugacaaacaaaauccuaucag

SEQ ID NO: 136750 - RNA, 19 nt, Human
ugagagagaggauaaacua

SEQ ID NO: 136751 - RNA, 21 nt, Human
ugagagagaggauaaacuaca

SEQ ID NO: 136752 - RNA, 20 nt, Human
ugauuaagaaauacagcuuu

SEQ ID NO: 136753 - RNA, 24 nt, Human
uggaaaagugcagaacuaaagaaa

SEQ ID NO: 136754 - RNA, 22 nt, Human
uggcacgcacccuaaucucggu

SEQ ID NO: 136755 - RNA, 19 nt, Human
ugugaucagcauauguccc

SEQ ID NO: 136756 - RNA, 20 nt, Human
uguggaaaagugcagaacua

SEQ ID NO: 136757 - RNA, 20 nt, Human
uuacugaaugacucaauuau

SEQ ID NO: 136758 - RNA, 19 nt, Human
uucaacacuacaaaaucau

SEQ ID NO: 136759 - RNA, 22 nt, Human
uucaguagcaauuaaccaagaa

SEQ ID NO: 136760 - RNA, 25 nt, Human
uugaauuugucaaaaaaaaaaaacc

SEQ ID NO: 136761 - RNA, 21 nt, Human
uugcacagaaauuacuggcug

SEQ ID NO: 136762 - RNA, 20 nt, Human
uugucaaaaaaaaaaaaccc

SEQ ID NO: 136763 - RNA, 25 nt, Human
uuuacaaacagaaugagguaucagu

SEQ ID NO: 136764 - RNA, 20 nt, Human
uuucuugguaauaauacugg

SEQ ID NO: 136765 - RNA, 19 nt, Human
uuugaauuaguaaagguuu

SEQ ID NO: 136766 - RNA, 18 nt, Human
aacacaguaaauaacucc

SEQ ID NO: 136767 - RNA, 22 nt, Human
aacccagcagcugcccugucca

SEQ ID NO: 136768 - RNA, 22 nt, Human
acaaagggcuuaugaugauuuu

SEQ ID NO: 136769 - RNA, 19 nt, Human
agcaacccagcagcugccc

SEQ ID NO: 136770 - RNA, 19 nt, Human
agcaacccagcagcugccc

SEQ ID NO: 136771 - RNA, 23 nt, Human
aggaacacaguaaauaacuccca

SEQ ID NO: 136772 - RNA, 22 nt, Human
aguagcaacccagcagcugccc

SEQ ID NO: 136773 - RNA, 19 nt, Human
cagcagcugcccuguccag

SEQ ID NO: 136774 - RNA, 20 nt, Human
cagcagcugcccuguccagu

SEQ ID NO: 136775 - RNA, 18 nt, Human
gaguagcaacccagcagc

SEQ ID NO: 136776 - RNA, 21 nt, Human
guagcaacccagcagcugccc

SEQ ID NO: 136777 - RNA, 23 nt, Human
ucccaagugucuuguuggaaauu

SEQ ID NO: 136778 - RNA, 27 nt, Human
aagaggccaaagccacauccaaaggug

SEQ ID NO: 136779 - RNA, 24 nt, Human
aagcaguggugggggccugcagca

SEQ ID NO: 136780 - RNA, 26 nt, Human
acaaagaggccaaagccacauccaaa

SEQ ID NO: 136781 - RNA, 21 nt, Human
acaaggccaaagguuccuauc

SEQ ID NO: 136782 - RNA, 30 nt, Human
acccgaguguguguugggcuuuuuuucugg

SEQ ID NO: 136783 - RNA, 20 nt, Human
agacagggucucacacugug

SEQ ID NO: 136784 - RNA, 23 nt, Human
agagaugacgagaaugcugucaa

SEQ ID NO: 136785 - RNA, 19 nt, Human
agccuccugaguagcuaag

SEQ ID NO: 136786 - RNA, 18 nt, Human
agcgccguggggacagga

SEQ ID NO: 136787 - RNA, 18 nt, Human
agcuaaaggccaggccuc

SEQ ID NO: 136788 - RNA, 20 nt, Human
aggcagcugugaccuucccu

SEQ ID NO: 136789 - RNA, 20 nt, Human
aggcagugcgugucugggag

SEQ ID NO: 136790 - RNA, 29 nt, Human
aggcagugcgugucugggagucgagggcg

SEQ ID NO: 136791 - RNA, 23 nt, Human
aggcccaggggaucccgagugac

SEQ ID NO: 136792 - RNA, 19 nt, Human
aggcuggagugcaguggca

SEQ ID NO: 136793 - RNA, 20 nt, Human
agguaugugcgggagggugg

SEQ ID NO: 136794 - RNA, 20 nt, Human
agugaccaggucacaagggc

SEQ ID NO: 136795 - RNA, 20 nt, Human
agugcaguggcacaaucaug

SEQ ID NO: 136796 - RNA, 23 nt, Human
agugcaguggcacaaucauggcu

SEQ ID NO: 136797 - RNA, 18 nt, Human
agugcgugucugggaguu

SEQ ID NO: 136798 - RNA, 20 nt, Human
auccaaaggugcaaauggag

SEQ ID NO: 136799 - RNA, 24 nt, Human
caaagcccaccccaauugccagcc

SEQ ID NO: 136800 - RNA, 25 nt, Human
caaagcccaccccaauugccagcca

SEQ ID NO: 136801 - RNA, 21 nt, Human
caaaugugagccgucaccuga

SEQ ID NO: 136802 - RNA, 18 nt, Human
caaccgccagggcucaga

SEQ ID NO: 136803 - RNA, 22 nt, Human
caaccgccagggcucagauaau

SEQ ID NO: 136804 - RNA, 18 nt, Human
caacucugcaggaggcug

SEQ ID NO: 136805 - RNA, 20 nt, Human
caccugagagugcagaaaac

SEQ ID NO: 136806 - RNA, 23 nt, Human
cacuguguugccaaggcuggagu

SEQ ID NO: 136807 - RNA, 22 nt, Human
cacuuuggacaaagaggccaaa

SEQ ID NO: 136808 - RNA, 23 nt, Human
cagcagcuaaaggccaggccuca

SEQ ID NO: 136809 - RNA, 20 nt, Human
cagccuccugaguagcuaag

SEQ ID NO: 136810 - RNA, 26 nt, Human
caggauagggcagggaugggccaggu

SEQ ID NO: 136811 - RNA, 21 nt, Human
caguggcacaaucauggcuca

SEQ ID NO: 136812 - RNA, 22 nt, Human
ccaaagccacauccaaaggugc

SEQ ID NO: 136813 - RNA, 24 nt, Human
ccaaagccacauccaaaggugcaa

SEQ ID NO: 136814 - RNA, 23 nt, Human
cccaccccaauugccagccaagc

SEQ ID NO: 136815 - RNA, 18 nt, Human
cccccugguggcugacag

SEQ ID NO: 136816 - RNA, 18 nt, Human
ccucagagaugacgagaa

SEQ ID NO: 136817 - RNA, 22 nt, Human
ccucagccuccugaguagcuaa

SEQ ID NO: 136818 - RNA, 18 nt, Human
ccucccuccucagccucc

SEQ ID NO: 136819 - RNA, 24 nt, Human
ccucccuccucagccuccugagua

SEQ ID NO: 136820 - RNA, 23 nt, Human
ccuccucagccuccugaguagcu

SEQ ID NO: 136821 - RNA, 24 nt, Human
ccuguggcaggauggguccucucu

SEQ ID NO: 136822 - RNA, 19 nt, Human
cgagaaugcugucaagaau

SEQ ID NO: 136823 - RNA, 23 nt, Human
cggaacaagcaguggugggggcc

SEQ ID NO: 136824 - RNA, 22 nt, Human
cucccugucucuugucuggggg

SEQ ID NO: 136825 - RNA, 22 nt, Human
cugcaaagcccaccccaauugc

SEQ ID NO: 136826 - RNA, 19 nt, Human
cuguggcccaggacacgcc

SEQ ID NO: 136827 - RNA, 23 nt, Human
cuucaaggccuggcagugcugcu

SEQ ID NO: 136828 - RNA, 22 nt, Human
cuugagguagacaauaggcugg

SEQ ID NO: 136829 - RNA, 24 nt, Human
gacaggacagguggggccugcaaa

SEQ ID NO: 136830 - RNA, 22 nt, Human
gagcucggaacaagcaguggug

SEQ ID NO: 136831 - RNA, 20 nt, Human
gaggcugggggagcucggaa

SEQ ID NO: 136832 - RNA, 18 nt, Human
gaugacaauuuucuccuu

SEQ ID NO: 136833 - RNA, 23 nt, Human
gcaaagcccaccccaauugccag

SEQ ID NO: 136834 - RNA, 23 nt, Human
gcaguggugggggccugcagcac

SEQ ID NO: 136835 - RNA, 19 nt, Human
gcuggagugcaguggcaca

SEQ ID NO: 136836 - RNA, 18 nt, Human
ggcagggaugggccaggu

SEQ ID NO: 136837 - RNA, 22 nt, Human
gugggacugggcuccagucucc

SEQ ID NO: 136838 - RNA, 18 nt, Human
guggugggggccugcagc

SEQ ID NO: 136839 - RNA, 21 nt, Human
guguugccaaggcuggagugc

SEQ ID NO: 136840 - RNA, 22 nt, Human
uaauccucccuccucagccucc

SEQ ID NO: 136841 - RNA, 20 nt, Human
uccaaaggugcaaauggagc

SEQ ID NO: 136842 - RNA, 19 nt, Human
ucuaugaagaaaggucucu

SEQ ID NO: 136843 - RNA, 23 nt, Human
ucucacacuguguugccaaggcu

SEQ ID NO: 136844 - RNA, 24 nt, Human
ucucacacuguguugccaaggcug

SEQ ID NO: 136845 - RNA, 21 nt, Human
ucuguggcccaggacacgccu

SEQ ID NO: 136846 - RNA, 20 nt, Human
ucuugguucuuuuguuuugg

SEQ ID NO: 136847 - RNA, 22 nt, Human
ugagaugauggugauguccuca

SEQ ID NO: 136848 - RNA, 22 nt, Human
ugauggugauguccucagagau

SEQ ID NO: 136849 - RNA, 26 nt, Human
ugcagcaccagcgccguggcgccggc

SEQ ID NO: 136850 - RNA, 22 nt, Human
ugccaaggcuggagugcagugg

SEQ ID NO: 136851 - RNA, 24 nt, Human
ugccaaggcuggagugcaguggca

SEQ ID NO: 136852 - RNA, 22 nt, Human
ugcugcugggcuccggauccug

SEQ ID NO: 136853 - RNA, 20 nt, Human
uggacaaagaggccaaagcc

SEQ ID NO: 136854 - RNA, 21 nt, Human
uggagugcaguggcacaauca

SEQ ID NO: 136855 - RNA, 24 nt, Human
uggagugcaguggcacaaucaugg

SEQ ID NO: 136856 - RNA, 18 nt, Human
uggcacaaucauggcuca

SEQ ID NO: 136857 - RNA, 21 nt, Human
ugggcuccagucucccugucu

SEQ ID NO: 136858 - RNA, 23 nt, Human
ugggggccccaaggucacuuugg

SEQ ID NO: 136859 - RNA, 24 nt, Human
uguguugccaaggcuggagugcag

SEQ ID NO: 136860 - RNA, 20 nt, Human
uuccugcaguucaacuggug

SEQ ID NO: 136861 - RNA, 23 nt, Human
uucuugcugcuguaaaaacugcc

SEQ ID NO: 136862 - RNA, 23 nt, Human
uugagacagggucucacacugug

SEQ ID NO: 136863 - RNA, 21 nt, Human
uugguucuuuuguuuuggguu

SEQ ID NO: 136864 - RNA, 18 nt, Human
uuuuuucuggguccugug

SEQ ID NO: 136865 - RNA, 24 nt, Human
aaccaaagaacaagagccaaauca

SEQ ID NO: 136866 - RNA, 26 nt, Human
aaccaaagaacaagagccaaaucaaa

SEQ ID NO: 136867 - RNA, 19 nt, Human
accaaagaacaagagccaa

SEQ ID NO: 136868 - RNA, 23 nt, Human
accaaagaacaagagccaaauca

SEQ ID NO: 136869 - RNA, 22 nt, Human
acccagagcccacuuugucucc

SEQ ID NO: 136870 - RNA, 21 nt, Human
acgugguaauagaaggcugga

SEQ ID NO: 136871 - RNA, 19 nt, Human
agacccagggagcuggcag

SEQ ID NO: 136872 - RNA, 23 nt, Human
agagaggaggagacccagggagc

SEQ ID NO: 136873 - RNA, 22 nt, Human
agagcccacuuugucuccacuc

SEQ ID NO: 136874 - RNA, 23 nt, Human
agaggaggauggaagggaggggu

SEQ ID NO: 136875 - RNA, 24 nt, Human
agauguugccuugaccagccuugg

SEQ ID NO: 136876 - RNA, 24 nt, Human
agcacuuugggaggcugaggcggg

SEQ ID NO: 136877 - RNA, 23 nt, Human
agcaggagguggggcugaaucca

SEQ ID NO: 136878 - RNA, 22 nt, Human
agccaguguuuuuccugaccuc

SEQ ID NO: 136879 - RNA, 24 nt, Human
agccuguaccaacacagacuacag

SEQ ID NO: 136880 - RNA, 25 nt, Human
aggagacccagggagcuggcagucc

SEQ ID NO: 136881 - RNA, 21 nt, Human
aggagcuggaagucaugccuc

SEQ ID NO: 136882 - RNA, 22 nt, Human
aggaucugccccagagaggagg

SEQ ID NO: 136883 - RNA, 24 nt, Human
aggcacaagcccaaccaaagaaca

SEQ ID NO: 136884 - RNA, 22 nt, Human
aggcaggcagggguggacuaca

SEQ ID NO: 136885 - RNA, 22 nt, Human
aggcccuggggggguaggggga

SEQ ID NO: 136886 - RNA, 23 nt, Human
aggcggguggauacgaggucagg

SEQ ID NO: 136887 - RNA, 20 nt, Human
aggcugaggcggguggauac

SEQ ID NO: 136888 - RNA, 21 nt, Human
aggcugaggcggguggauacg

SEQ ID NO: 136889 - RNA, 19 nt, Human
augccuguaaucccagcac

SEQ ID NO: 136890 - RNA, 21 nt, Human
auggauucgacgugguaauag

SEQ ID NO: 136891 - RNA, 27 nt, Human
caagcccaaccaaagaacaagagccaa

SEQ ID NO: 136892 - RNA, 23 nt, Human
cacaagcccaaccaaagaacaag

SEQ ID NO: 136893 - RNA, 22 nt, Human
cacagacuacagcacccaggag

SEQ ID NO: 136894 - RNA, 20 nt, Human
cagaagagcagcuccugccu

SEQ ID NO: 136895 - RNA, 21 nt, Human
cagagcccacuuugucuccac

SEQ ID NO: 136896 - RNA, 24 nt, Human
cagcacuuugggaggcugaggcgg

SEQ ID NO: 136897 - RNA, 18 nt, Human
cagcucccggucuggguc

SEQ ID NO: 136898 - RNA, 22 nt, Human
caguaacuuuccuucuugucau

SEQ ID NO: 136899 - RNA, 19 nt, Human
cauuuugcuguguccugca

SEQ ID NO: 136900 - RNA, 20 nt, Human
ccacaauaaacauggcccau

SEQ ID NO: 136901 - RNA, 19 nt, Human
ccacuuugucuccacuccu

SEQ ID NO: 136902 - RNA, 25 nt, Human
ccagagcccacuuugucuccacucc

SEQ ID NO: 136903 - RNA, 23 nt, Human
ccaggcaugcagaagccuguacc

SEQ ID NO: 136904 - RNA, 21 nt, Human
cccaaccaaagaacaagagcc

SEQ ID NO: 136905 - RNA, 21 nt, Human
cccagagaggaggagacccag

SEQ ID NO: 136906 - RNA, 25 nt, Human
cccagccaguguuuuuccugaccuc

SEQ ID NO: 136907 - RNA, 19 nt, Human
ccccagagaggaggagacc

SEQ ID NO: 136908 - RNA, 21 nt, Human
ccccccagccccagggcugga

SEQ ID NO: 136909 - RNA, 20 nt, Human
ccccuaccccaacccagagc

SEQ ID NO: 136910 - RNA, 21 nt, Human
ccccuaccccaacccagagcc

SEQ ID NO: 136911 - RNA, 18 nt, Human
cccuggggggguaggggg

SEQ ID NO: 136912 - RNA, 20 nt, Human
ccuguaaucccagcacuuug

SEQ ID NO: 136913 - RNA, 22 nt, Human
ccuguaaucccagcacuuuggg

SEQ ID NO: 136914 - RNA, 20 nt, Human
cgcgauaccccagaagagca

SEQ ID NO: 136915 - RNA, 18 nt, Human
cuaaucuaggcacaagcc

SEQ ID NO: 136916 - RNA, 24 nt, Human
cucaugccuguaaucccagcacuu

SEQ ID NO: 136917 - RNA, 25 nt, Human
cuccuuguagcuauuggggcuuaau

SEQ ID NO: 136918 - RNA, 25 nt, Human
cugccucauccuuaaguggaucgcg

SEQ ID NO: 136919 - RNA, 18 nt, Human
cugguuucagggaaggag

SEQ ID NO: 136920 - RNA, 21 nt, Human
cuguaccaacacagacuacag

SEQ ID NO: 136921 - RNA, 18 nt, Human
cuuccccuaccccaaccc

SEQ ID NO: 136922 - RNA, 21 nt, Human
gaacccucccuuccccuaccc

SEQ ID NO: 136923 - RNA, 19 nt, Human
gaauagggcugugagucac

SEQ ID NO: 136924 - RNA, 23 nt, Human
gaggacugaggaucugccccaga

SEQ ID NO: 136925 - RNA, 23 nt, Human
gaggauggaagggagggguccgg

SEQ ID NO: 136926 - RNA, 20 nt, Human
gaggcugaggcggguggaua

SEQ ID NO: 136927 - RNA, 23 nt, Human
gcagauuuucuguguggagaugu

SEQ ID NO: 136928 - RNA, 22 nt, Human
gccuggggcaaggaggggcugg

SEQ ID NO: 136929 - RNA, 19 nt, Human
gcugggcgugguggcucau

SEQ ID NO: 136930 - RNA, 21 nt, Human
gcugggcgugguggcucaugc

SEQ ID NO: 136931 - RNA, 23 nt, Human
ggaagucaugccugaugccacga

SEQ ID NO: 136932 - RNA, 22 nt, Human
ggacaccuggguucacacagcu

SEQ ID NO: 136933 - RNA, 18 nt, Human
ggacgggggaggcugggg

SEQ ID NO: 136934 - RNA, 20 nt, Human
ggagacccagggagcuggca

SEQ ID NO: 136935 - RNA, 20 nt, Human
ggagaggaggauggaaggga

SEQ ID NO: 136936 - RNA, 21 nt, Human
ggagguggggcugaauccacu

SEQ ID NO: 136937 - RNA, 18 nt, Human
ggaucugccccagagagg

SEQ ID NO: 136938 - RNA, 25 nt, Human
ggccccuggcuuccucuccuaaucu

SEQ ID NO: 136939 - RNA, 19 nt, Human
ggcccuggggggguagggg

SEQ ID NO: 136940 - RNA, 23 nt, Human
ggcugggcgugguggcucaugcc

SEQ ID NO: 136941 - RNA, 21 nt, Human
ggcuggugccugagugagacc

SEQ ID NO: 136942 - RNA, 21 nt, Human
gggaaggaguuugauauagca

SEQ ID NO: 136943 - RNA, 18 nt, Human
gggcaaggaggggcuggu

SEQ ID NO: 136944 - RNA, 24 nt, Human
gggcgugguggcucaugccuguaa

SEQ ID NO: 136945 - RNA, 22 nt, Human
gggguccggcacgcugcuggca

SEQ ID NO: 136946 - RNA, 22 nt, Human
gguggauacgaggucaggcguu

SEQ ID NO: 136947 - RNA, 24 nt, Human
gguggcucaugccuguaaucccag

SEQ ID NO: 136948 - RNA, 21 nt, Human
gguucugagucccaguguggc

SEQ ID NO: 136949 - RNA, 23 nt, Human
guccugcagccccuuuccgggac

SEQ ID NO: 136950 - RNA, 20 nt, Human
uaacuggugcagauuuucug

SEQ ID NO: 136951 - RNA, 25 nt, Human
uaacuggugcagauuuucugugugg

SEQ ID NO: 136952 - RNA, 21 nt, Human
uaagucccaaaaggcagcagg

SEQ ID NO: 136953 - RNA, 19 nt, Human
uacagcacccaggaggugc

SEQ ID NO: 136954 - RNA, 21 nt, Human
uagcagauuaaccacccuccu

SEQ ID NO: 136955 - RNA, 21 nt, Human
uagcuauuggggcuuaauggu

SEQ ID NO: 136956 - RNA, 23 nt, Human
uaugggcugggcgugguggcuca

SEQ ID NO: 136957 - RNA, 25 nt, Human
uauuuuuuuuuuuaccuugggguga

SEQ ID NO: 136958 - RNA, 23 nt, Human
ucaccggauuauaaugagccaaa

SEQ ID NO: 136959 - RNA, 25 nt, Human
ucaugccugaugccacgagaccggg

SEQ ID NO: 136960 - RNA, 22 nt, Human
ucaugccuguaaucccagcacu

SEQ ID NO: 136961 - RNA, 19 nt, Human
ucccaaaaggcagcaggcc

SEQ ID NO: 136962 - RNA, 18 nt, Human
uccggcacgcugcuggca

SEQ ID NO: 136963 - RNA, 23 nt, Human
ucgccaggcccgucgcucagcuc

SEQ ID NO: 136964 - RNA, 19 nt, Human
ucugaacccucccuucccc

SEQ ID NO: 136965 - RNA, 22 nt, Human
ucuucugucccuguuguugggu

SEQ ID NO: 136966 - RNA, 20 nt, Human
ugaccucuguucuuuggaga

SEQ ID NO: 136967 - RNA, 23 nt, Human
ugaggcggguggauacgagguca

SEQ ID NO: 136968 - RNA, 19 nt, Human
ugcagggccccuggcuucc

SEQ ID NO: 136969 - RNA, 21 nt, Human
ugcagggccccuggcuuccuc

SEQ ID NO: 136970 - RNA, 19 nt, Human
ugccggggacaccccagga

SEQ ID NO: 136971 - RNA, 24 nt, Human
ugccugagugagaccccgagcuuc

SEQ ID NO: 136972 - RNA, 23 nt, Human
ugccuguaaucccagcacuuugg

SEQ ID NO: 136973 - RNA, 23 nt, Human
ugccuguaaucccagcacuuugg

SEQ ID NO: 136974 - RNA, 21 nt, Human
ugcuggggaaggcgcaggagc

SEQ ID NO: 136975 - RNA, 23 nt, Human
uggaagggagggguccggcacgc

SEQ ID NO: 136976 - RNA, 18 nt, Human
uggagacccaaagagagg

SEQ ID NO: 136977 - RNA, 23 nt, Human
uggagacccaaagagagggacag

SEQ ID NO: 136978 - RNA, 23 nt, Human
uggagaggaggauggaagggagg

SEQ ID NO: 136979 - RNA, 24 nt, Human
uggcucaugccuguaaucccagca

SEQ ID NO: 136980 - RNA, 20 nt, Human
ugggaggcugaggcgggugg

SEQ ID NO: 136981 - RNA, 22 nt, Human
ugggaggcugaggcggguggau

SEQ ID NO: 136982 - RNA, 21 nt, Human
ugggcugggcgugguggcuca

SEQ ID NO: 136983 - RNA, 23 nt, Human
uggguucugagucccaguguggc

SEQ ID NO: 136984 - RNA, 24 nt, Human
ugguggcucaugccuguaauccca

SEQ ID NO: 136985 - RNA, 19 nt, Human
ugugagcaggagguggggc

SEQ ID NO: 136986 - RNA, 22 nt, Human
ugugagucacucaagccugggg

SEQ ID NO: 136987 - RNA, 19 nt, Human
uuagguuuuuaauuaccuu

SEQ ID NO: 136988 - RNA, 21 nt, Human
uugcuggggaaggcgcaggag

SEQ ID NO: 136989 - RNA, 27 nt, Human
uuuccugaccucuguucuuuggagagg

SEQ ID NO: 136990 - RNA, 22 nt, Human
uuuccuggugauucuuacccau

SEQ ID NO: 136991 - RNA, 24 nt, Human
uuuuuuuuuuuuuuuuagguuuuu

SEQ ID NO: 136992 - RNA, 23 nt, Human
uuuuuuuuuuuuuuuuuuuuagg

SEQ ID NO: 136993 - RNA, 21 nt, Human
agagacauuuuauuuagaggc

SEQ ID NO: 136994 - RNA, 23 nt, Human
cucgaguuuuuuuuuuuuuuuuu

SEQ ID NO: 136995 - RNA, 19 nt, Human
cuggcuucaagacucugug

SEQ ID NO: 136996 - RNA, 20 nt, Human
gaguuuuuuuuuuuuuuuuu

SEQ ID NO: 136997 - RNA, 22 nt, Human
gaguuuuuuuuuuuuuuuuuuu

SEQ ID NO: 136998 - RNA, 21 nt, Human
ugagaagacagcagugcuugg

SEQ ID NO: 136999 - RNA, 19 nt, Human
ugcucuggcuucaagacuc

SEQ ID NO: 137000 - RNA, 20 nt, Human
uuuuuuuuuuuuuuuuuguu

SEQ ID NO: 137001 - RNA, 27 nt, Human
uuuuuuuuuuuuuuuuuuuuuuugggg

SEQ ID NO: 137002 - RNA, 20 nt, Human
aaacagagucuugcuaugug

SEQ ID NO: 137003 - RNA, 19 nt, Human
aaagugcugggauuacaua

SEQ ID NO: 137004 - RNA, 24 nt, Human
aaagugcugggauuacauacguga

SEQ ID NO: 137005 - RNA, 19 nt, Human
aaagugcugggguuacaga

SEQ ID NO: 137006 - RNA, 24 nt, Human
aaagugcugggguuacagauguga

SEQ ID NO: 137007 - RNA, 25 nt, Human
aaaucaaguccaaacugguuccuga

SEQ ID NO: 137008 - RNA, 20 nt, Human
aaccucugccucccgaguuc

SEQ ID NO: 137009 - RNA, 25 nt, Human
aagugauccucccuccuuggcuucc

SEQ ID NO: 137010 - RNA, 19 nt, Human
aagugcugggauuacauac

SEQ ID NO: 137011 - RNA, 26 nt, Human
aagugcugggauuacauacgugagcc

SEQ ID NO: 137012 - RNA, 26 nt, Human
aagugcugggguuacagaugugagcc

SEQ ID NO: 137013 - RNA, 21 nt, Human
acaggcauuuaucaccgugcc

SEQ ID NO: 137014 - RNA, 24 nt, Human
accauguuggccaggcuggucucg

SEQ ID NO: 137015 - RNA, 24 nt, Human
acccacccgucccccgcccccccu

SEQ ID NO: 137016 - RNA, 21 nt, Human
acgugagccacugcaccuggc

SEQ ID NO: 137017 - RNA, 24 nt, Human
acuauguagcccaggcuggucucg

SEQ ID NO: 137018 - RNA, 24 nt, Human
agcccaggcuggucucgaauuccu

SEQ ID NO: 137019 - RNA, 24 nt, Human
agcgauucuccugccucagccucc

SEQ ID NO: 137020 - RNA, 18 nt, Human
aggcugaagugccguggu

SEQ ID NO: 137021 - RNA, 25 nt, Human
agugauccucccuccuuggcuuccc

SEQ ID NO: 137022 - RNA, 18 nt, Human
augggguuucaccauguu

SEQ ID NO: 137023 - RNA, 22 nt, Human
augggguuucaccauguuggcc

SEQ ID NO: 137024 - RNA, 24 nt, Human
augggguuucaccauguuggccag

SEQ ID NO: 137025 - RNA, 27 nt, Human
auucugucacccaggcugaagugccgu

SEQ ID NO: 137026 - RNA, 19 nt, Human
caaaaucaaguccaaacug

SEQ ID NO: 137027 - RNA, 20 nt, Human
caaaaucaaguccaaacugg

SEQ ID NO: 137028 - RNA, 22 nt, Human
caaacugguuccugagcccuua

SEQ ID NO: 137029 - RNA, 24 nt, Human
caaacugguuccugagcccuuaga

SEQ ID NO: 137030 - RNA, 24 nt, Human
caaagugcugggauuacauacgug

SEQ ID NO: 137031 - RNA, 24 nt, Human
caaagugcugggguuacagaugug

SEQ ID NO: 137032 - RNA, 22 nt, Human
caagcgauucuccugccucagc

SEQ ID NO: 137033 - RNA, 25 nt, Human
cacacaaucaaggucauacagcuag

SEQ ID NO: 137034 - RNA, 18 nt, Human
caccaugucuggcuaauu

SEQ ID NO: 137035 - RNA, 22 nt, Human
caccaugucuggcuaauuuuua

SEQ ID NO: 137036 - RNA, 21 nt, Human
caccauguuggccaggcuggu

SEQ ID NO: 137037 - RNA, 24 nt, Human
caccauguuggccaggcuggucuc

SEQ ID NO: 137038 - RNA, 27 nt, Human
caccauguuggccaggcuggucucgaa

SEQ ID NO: 137039 - RNA, 18 nt, Human
cacccacccgucccccgc

SEQ ID NO: 137040 - RNA, 20 nt, Human
cacccaggcugaagugccgu

SEQ ID NO: 137041 - RNA, 21 nt, Human
cacuauguagcccaggcuggu

SEQ ID NO: 137042 - RNA, 24 nt, Human
cacuauguagcccaggcuggucuc

SEQ ID NO: 137043 - RNA, 22 nt, Human
cacugcacccacccgucccccg

SEQ ID NO: 137044 - RNA, 24 nt, Human
cagagucuugcuaugugacccagg

SEQ ID NO: 137045 - RNA, 22 nt, Human
cagccucccgaggagcuaggac

SEQ ID NO: 137046 - RNA, 27 nt, Human
caguggcugggacuacaggcauuuauc

SEQ ID NO: 137047 - RNA, 24 nt, Human
caucucagccucccaaagugcugg

SEQ ID NO: 137048 - RNA, 24 nt, Human
cauguuggccaggcuggucucgaa

SEQ ID NO: 137049 - RNA, 24 nt, Human
cauucugucacccaggcugaagug

SEQ ID NO: 137050 - RNA, 20 nt, Human
ccaaagugcugggauuacau

SEQ ID NO: 137051 - RNA, 22 nt, Human
ccaaagugcugggauuacauac

SEQ ID NO: 137052 - RNA, 24 nt, Human
ccaaagugcugggauuacauacgu

SEQ ID NO: 137053 - RNA, 21 nt, Human
ccaaagugcugggguuacaga

SEQ ID NO: 137054 - RNA, 22 nt, Human
ccaaagugcugggguuacagau

SEQ ID NO: 137055 - RNA, 24 nt, Human
ccaaagugcugggguuacagaugu

SEQ ID NO: 137056 - RNA, 25 nt, Human
ccaauuuccauuuauuuacuccuca

SEQ ID NO: 137057 - RNA, 20 nt, Human
ccacagacgcgugccaccau

SEQ ID NO: 137058 - RNA, 23 nt, Human
ccacugcacccacccgucccccg

SEQ ID NO: 137059 - RNA, 22 nt, Human
ccacugcaccuggccauaaggg

SEQ ID NO: 137060 - RNA, 19 nt, Human
cccacccgucccccgcccc

SEQ ID NO: 137061 - RNA, 20 nt, Human
cccgaguucaagcgauucuc

SEQ ID NO: 137062 - RNA, 23 nt, Human
cccgaguucaagcgauucuccug

SEQ ID NO: 137063 - RNA, 26 nt, Human
cccgucccccgcccccccuuuuuuuu

SEQ ID NO: 137064 - RNA, 24 nt, Human
ccucccgaguucaagcgauucucc

SEQ ID NO: 137065 - RNA, 20 nt, Human
ccucccuccuuggcuuccca

SEQ ID NO: 137066 - RNA, 23 nt, Human
ccugaccucaagugaucugccca

SEQ ID NO: 137067 - RNA, 20 nt, Human
ccugaguucaagugauccuc

SEQ ID NO: 137068 - RNA, 22 nt, Human
ccuuuuuuuuugaaacagaguc

SEQ ID NO: 137069 - RNA, 18 nt, Human
cuaggaccacagacgcgu

SEQ ID NO: 137070 - RNA, 25 nt, Human
cucaugacaaccucugccucccgag

SEQ ID NO: 137071 - RNA, 23 nt, Human
cugccucagccucccgaggagcu

SEQ ID NO: 137072 - RNA, 21 nt, Human
cuggcaccuggcgccuuucac

SEQ ID NO: 137073 - RNA, 24 nt, Human
cuucaguggcugggacuacaggca

SEQ ID NO: 137074 - RNA, 19 nt, Human
cuuuuuuuuugaaacagag

SEQ ID NO: 137075 - RNA, 24 nt, Human
gaccucaagugaucugcccaucuc

SEQ ID NO: 137076 - RNA, 20 nt, Human
gacuacaggcauuuaucacc

SEQ ID NO: 137077 - RNA, 18 nt, Human
gauuacauacgugagcca

SEQ ID NO: 137078 - RNA, 23 nt, Human
gauuacauacgugagccacugca

SEQ ID NO: 137079 - RNA, 22 nt, Human
gccucccgaguucaagcgauuc

SEQ ID NO: 137080 - RNA, 24 nt, Human
gcgauucuccugccucagccuccc

SEQ ID NO: 137081 - RNA, 21 nt, Human
gcugggauuacauacgugagc

SEQ ID NO: 137082 - RNA, 23 nt, Human
gcuggucucgaacuccugaccuc

SEQ ID NO: 137083 - RNA, 20 nt, Human
gcuucaguggcugggacuac

SEQ ID NO: 137084 - RNA, 24 nt, Human
gcuucaguggcugggacuacaggc

SEQ ID NO: 137085 - RNA, 22 nt, Human
ggaccacagacgcgugccacca

SEQ ID NO: 137086 - RNA, 24 nt, Human
ggcuggucucgaacuccugaccuc

SEQ ID NO: 137087 - RNA, 19 nt, Human
gggaugaacugggauucaa

SEQ ID NO: 137088 - RNA, 22 nt, Human
gggguuucaccauguuggccag

SEQ ID NO: 137089 - RNA, 18 nt, Human
ggguuucaccauguuggc

SEQ ID NO: 137090 - RNA, 22 nt, Human
ggucauacagcuaggaagggga

SEQ ID NO: 137091 - RNA, 19 nt, Human
ggucucgaacuccugaccu

SEQ ID NO: 137092 - RNA, 22 nt, Human
gguuacagaugugagccacugc

SEQ ID NO: 137093 - RNA, 24 nt, Human
gugaucugcccaucucagccuccc

SEQ ID NO: 137094 - RNA, 20 nt, Human
guggcugggacuacaggcau

SEQ ID NO: 137095 - RNA, 23 nt, Human
guucacugugaccaugaucuccc

SEQ ID NO: 137096 - RNA, 21 nt, Human
uaaggcacacaaucaagguca

SEQ ID NO: 137097 - RNA, 24 nt, Human
uaauggauaugggguuucaccaug

SEQ ID NO: 137098 - RNA, 24 nt, Human
uacagaugugagccacugcaccca

SEQ ID NO: 137099 - RNA, 24 nt, Human
uacauacgugagccacugcaccug

SEQ ID NO: 137100 - RNA, 22 nt, Human
uagagauguggucucacuaugu

SEQ ID NO: 137101 - RNA, 24 nt, Human
uaggaccacagacgcgugccacca

SEQ ID NO: 137102 - RNA, 19 nt, Human
uaguagagauguggucuca

SEQ ID NO: 137103 - RNA, 20 nt, Human
uaguagagauguggucucaa

SEQ ID NO: 137104 - RNA, 24 nt, Human
uaguagagauguggucucacuaug

SEQ ID NO: 137105 - RNA, 21 nt, Human
uauguagcccaggcuggucuc

SEQ ID NO: 137106 - RNA, 23 nt, Human
uauguagcccaggcuggucucga

SEQ ID NO: 137107 - RNA, 24 nt, Human
uauguagcccaggcuggucucgaa

SEQ ID NO: 137108 - RNA, 20 nt, Human
ucaccaauuuccauuuauuu

SEQ ID NO: 137109 - RNA, 20 nt, Human
ucagccucccaaagugcugg

SEQ ID NO: 137110 - RNA, 20 nt, Human
ucaguggcugggacuacagg

SEQ ID NO: 137111 - RNA, 21 nt, Human
ucaguggcugggacuacaggc

SEQ ID NO: 137112 - RNA, 18 nt, Human
ucaugacaaccucugccu

SEQ ID NO: 137113 - RNA, 20 nt, Human
uccaggaaucugugucggga

SEQ ID NO: 137114 - RNA, 18 nt, Human
ucccaaagugcugggauu

SEQ ID NO: 137115 - RNA, 21 nt, Human
ucccaaagugcugggauuaca

SEQ ID NO: 137116 - RNA, 23 nt, Human
ucccaaagugcugggguuacaga

SEQ ID NO: 137117 - RNA, 19 nt, Human
ucccgaggagcuaggacca

SEQ ID NO: 137118 - RNA, 21 nt, Human
ucccgaguucaagcgauucuc

SEQ ID NO: 137119 - RNA, 24 nt, Human
ucccgaguucaagcgauucuccug

SEQ ID NO: 137120 - RNA, 21 nt, Human
ucccuccuuggcuucccaaag

SEQ ID NO: 137121 - RNA, 21 nt, Human
uccugaguucaagugauccuc

SEQ ID NO: 137122 - RNA, 18 nt, Human
ucgauccucuggcuucag

SEQ ID NO: 137123 - RNA, 24 nt, Human
ucucacuauguagcccaggcuggu

SEQ ID NO: 137124 - RNA, 20 nt, Human
ucucagccucccaaagugcu

SEQ ID NO: 137125 - RNA, 19 nt, Human
ucucauucugucacccagg

SEQ ID NO: 137126 - RNA, 24 nt, Human
ucucauucugucacccaggcugaa

SEQ ID NO: 137127 - RNA, 25 nt, Human
ucuccugccucagccucccgaggag

SEQ ID NO: 137128 - RNA, 21 nt, Human
ucucgaacuccugaccucaag

SEQ ID NO: 137129 - RNA, 21 nt, Human
ucugugucgggacugcggggc

SEQ ID NO: 137130 - RNA, 23 nt, Human
ucuugcuaugugacccagguugg

SEQ ID NO: 137131 - RNA, 18 nt, Human
ugaccucaagugaucugc

SEQ ID NO: 137132 - RNA, 24 nt, Human
ugaucugcccaucucagccuccca

SEQ ID NO: 137133 - RNA, 22 nt, Human
ugcagacagguagacuguguca

SEQ ID NO: 137134 - RNA, 24 nt, Human
ugccucagccucccgaggagcuag

SEQ ID NO: 137135 - RNA, 24 nt, Human
ugcugggauuacauacgugagcca

SEQ ID NO: 137136 - RNA, 18 nt, Human
ugcugggguuacagaugu

SEQ ID NO: 137137 - RNA, 21 nt, Human
uggauaugggguuucaccaug

SEQ ID NO: 137138 - RNA, 22 nt, Human
uggcagguauuauguuucccau

SEQ ID NO: 137139 - RNA, 24 nt, Human
uggccaggcuggucucgaacuccu

SEQ ID NO: 137140 - RNA, 23 nt, Human
uggcguaaucauaguucacugug

SEQ ID NO: 137141 - RNA, 19 nt, Human
ugggacuacaggcauuuau

SEQ ID NO: 137142 - RNA, 21 nt, Human
ugggacuacaggcauuuauca

SEQ ID NO: 137143 - RNA, 24 nt, Human
ugggacuacaggcauuuaucaccg

SEQ ID NO: 137144 - RNA, 22 nt, Human
ugggauuacauacgugagccac

SEQ ID NO: 137145 - RNA, 22 nt, Human
ugggauuacauacgugagccac

SEQ ID NO: 137146 - RNA, 24 nt, Human
ugggauuacauacgugagccacug

SEQ ID NO: 137147 - RNA, 22 nt, Human
ugggguuacagaugugagccac

SEQ ID NO: 137148 - RNA, 22 nt, Human
ugggguuacagaugugagccac

SEQ ID NO: 137149 - RNA, 24 nt, Human
ugggguuacagaugugagccacug

SEQ ID NO: 137150 - RNA, 24 nt, Human
ugggguuucaccauguuggccagg

SEQ ID NO: 137151 - RNA, 20 nt, Human
ugugaccaugaucucccugg

SEQ ID NO: 137152 - RNA, 24 nt, Human
uguggucucacuauguagcccagg

SEQ ID NO: 137153 - RNA, 24 nt, Human
uuaauggauaugggguuucaccau

SEQ ID NO: 137154 - RNA, 21 nt, Human
uuacagaugugagccacugca

SEQ ID NO: 137155 - RNA, 21 nt, Human
uucaagcgauucuccugccuc

SEQ ID NO: 137156 - RNA, 23 nt, Human
uucaagcgauucuccugccucag

SEQ ID NO: 137157 - RNA, 24 nt, Human
uucaagcgauucuccugccucagc

SEQ ID NO: 137158 - RNA, 20 nt, Human
uucaagugauccucccuccu

SEQ ID NO: 137159 - RNA, 24 nt, Human
uucaagugauccucccuccuuggc

SEQ ID NO: 137160 - RNA, 24 nt, Human
uuucaccauguuggccaggcuggu

SEQ ID NO: 137161 - RNA, 24 nt, Human
uuuuuaauggauaugggguuucac

SEQ ID NO: 137162 - RNA, 23 nt, Human
uuuuuuuuuuuuuuuuucaccaa

SEQ ID NO: 137163 - RNA, 25 nt, Human
uuuuuuuuuuuuuuuuucaccaauu

SEQ ID NO: 137164 - RNA, 19 nt, Human
aacccauaacccccuucuc

SEQ ID NO: 137165 - RNA, 19 nt, Human
aagcacaaauuuaaccaga

SEQ ID NO: 137166 - RNA, 19 nt, Human
aagcacaaauuuaaccaga

SEQ ID NO: 137167 - RNA, 19 nt, Human
acaccacaucugcacccaa

SEQ ID NO: 137168 - RNA, 20 nt, Human
agaauacuuggagcaaagcu

SEQ ID NO: 137169 - RNA, 19 nt, Human
agccggcggcggcuccugg

SEQ ID NO: 137170 - RNA, 23 nt, Human
agcgaucacuuccucucucccag

SEQ ID NO: 137171 - RNA, 18 nt, Human
aggacacaaagguggggg

SEQ ID NO: 137172 - RNA, 26 nt, Human
auagaaaugcuguggugaauuuuggg

SEQ ID NO: 137173 - RNA, 24 nt, Human
auauaaccucaacagcagcagaga

SEQ ID NO: 137174 - RNA, 21 nt, Human
auucauaaugugagucaccau

SEQ ID NO: 137175 - RNA, 23 nt, Human
caaagcuggcacaauauggcacc

SEQ ID NO: 137176 - RNA, 23 nt, Human
caagucuuuggcccuguaccaua

SEQ ID NO: 137177 - RNA, 22 nt, Human
caccauguaaaacaccacgucu

SEQ ID NO: 137178 - RNA, 20 nt, Human
cacccaaaauaucacagcaa

SEQ ID NO: 137179 - RNA, 22 nt, Human
ccauaacccccuucucuucauu

SEQ ID NO: 137180 - RNA, 23 nt, Human
cccauaacccccuucucuucauu

SEQ ID NO: 137181 - RNA, 21 nt, Human
ccccgagccggcggcggcucc

SEQ ID NO: 137182 - RNA, 21 nt, Human
ccgggagcgaucacuuccucu

SEQ ID NO: 137183 - RNA, 21 nt, Human
ccuguaccauaauaugaggaa

SEQ ID NO: 137184 - RNA, 20 nt, Human
cuaaagauuucaugucuuca

SEQ ID NO: 137185 - RNA, 22 nt, Human
cucggcucgcgcuccuccggga

SEQ ID NO: 137186 - RNA, 18 nt, Human
cuucaguggaacuggcau

SEQ ID NO: 137187 - RNA, 20 nt, Human
gcgccggccgcucggcucgc

SEQ ID NO: 137188 - RNA, 26 nt, Human
gcggcggcuccugggcggcggcagcg

SEQ ID NO: 137189 - RNA, 23 nt, Human
ggacgcgcucggcagcggcggaa

SEQ ID NO: 137190 - RNA, 21 nt, Human
gggccggcgcgggcaggaugu

SEQ ID NO: 137191 - RNA, 22 nt, Human
uaaaguacccagaaauaauagg

SEQ ID NO: 137192 - RNA, 21 nt, Human
uaaccucaacagcagcagaga

SEQ ID NO: 137193 - RNA, 21 nt, Human
uaauaggacuaugccaggagu

SEQ ID NO: 137194 - RNA, 23 nt, Human
uaauauaaccucaacagcagcag

SEQ ID NO: 137195 - RNA, 23 nt, Human
uacaaaguaguuaaaaggcagca

SEQ ID NO: 137196 - RNA, 25 nt, Human
uacaauaaauaaggagcagcaaugu

SEQ ID NO: 137197 - RNA, 18 nt, Human
uacagcuacaaaguaguu

SEQ ID NO: 137198 - RNA, 19 nt, Human
uagcuucagugagaaguau

SEQ ID NO: 137199 - RNA, 23 nt, Human
uauaaagauagaaaugcuguggu

SEQ ID NO: 137200 - RNA, 23 nt, Human
uauaaccucaacagcagcagaga

SEQ ID NO: 137201 - RNA, 20 nt, Human
uaucacagcaauacugauac

SEQ ID NO: 137202 - RNA, 23 nt, Human
uaugccaggagugcauguaagca

SEQ ID NO: 137203 - RNA, 21 nt, Human
ucaagucuuuggcccuguacc

SEQ ID NO: 137204 - RNA, 27 nt, Human
ucaguggaaagcaugaugggacacauu

SEQ ID NO: 137205 - RNA, 22 nt, Human
uccaugcagcacacuacaauaa

SEQ ID NO: 137206 - RNA, 21 nt, Human
uccccgagccggcggcggcuc

SEQ ID NO: 137207 - RNA, 24 nt, Human
uccccgagccggcggcggcuccug

SEQ ID NO: 137208 - RNA, 26 nt, Human
ucggcagcggcggaacugggcucccc

SEQ ID NO: 137209 - RNA, 25 nt, Human
ucucacgcugcgccggccgcucggc

SEQ ID NO: 137210 - RNA, 18 nt, Human
ucugcacccaaucauauc

SEQ ID NO: 137211 - RNA, 20 nt, Human
ugacugcagacgcugagcuc

SEQ ID NO: 137212 - RNA, 20 nt, Human
ugagacagaaauauaaagau

SEQ ID NO: 137213 - RNA, 21 nt, Human
ugagacagaaauauaaagaua

SEQ ID NO: 137214 - RNA, 21 nt, Human
uggcacaauauggcacccaaa

SEQ ID NO: 137215 - RNA, 19 nt, Human
ugugagucaccauguaaaa

SEQ ID NO: 137216 - RNA, 20 nt, Human
uucauaaugugagucaccau

SEQ ID NO: 137217 - RNA, 26 nt, Human
uugagacagaaauauaaagauagaaa

SEQ ID NO: 137218 - RNA, 22 nt, Human
aaaaacagcuuucuccaagggc

SEQ ID NO: 137219 - RNA, 22 nt, Human
aaccuggaagugaggagagggc

SEQ ID NO: 137220 - RNA, 23 nt, Human
aagggcgacaaagugaacugaag

SEQ ID NO: 137221 - RNA, 19 nt, Human
agagggcgcuccggagcuc

SEQ ID NO: 137222 - RNA, 22 nt, Human
augacacagggagccaagagag

SEQ ID NO: 137223 - RNA, 18 nt, Human
caaagugaacugaagguc

SEQ ID NO: 137224 - RNA, 22 nt, Human
caaagugaacugaaggucagaa

SEQ ID NO: 137225 - RNA, 19 nt, Human
cagcuuucuccaagggcga

SEQ ID NO: 137226 - RNA, 18 nt, Human
ccagcccacacacgguca

SEQ ID NO: 137227 - RNA, 25 nt, Human
cccacacacggucacuggauuggug

SEQ ID NO: 137228 - RNA, 24 nt, Human
cuccaaaaccuggaagugaggaga

SEQ ID NO: 137229 - RNA, 24 nt, Human
cugcaagcucuugcuccaaaaccu

SEQ ID NO: 137230 - RNA, 25 nt, Human
cugcaagcucuugcuccaaaaccug

SEQ ID NO: 137231 - RNA, 26 nt, Human
cuuccugcaagcucuugcuccaaaag

SEQ ID NO: 137232 - RNA, 18 nt, Human
gaaaaacagcuuucucca

SEQ ID NO: 137233 - RNA, 21 nt, Human
gcuccaaaaccuggaagugag

SEQ ID NO: 137234 - RNA, 21 nt, Human
ucacuggauuggugugagugg

SEQ ID NO: 137235 - RNA, 22 nt, Human
uccugcaagcucuugcuccaaa

SEQ ID NO: 137236 - RNA, 19 nt, Human
ucuugcuccaaaaccugga

SEQ ID NO: 137237 - RNA, 22 nt, Human
ugacacagggagccaagagagu

SEQ ID NO: 137238 - RNA, 19 nt, Human
ugacauuaacauucuuggg

SEQ ID NO: 137239 - RNA, 22 nt, Human
ugcaagcucuugcuccaaaacc

SEQ ID NO: 137240 - RNA, 19 nt, Human
ugcgggcuuccugcaagcu

SEQ ID NO: 137241 - RNA, 19 nt, Human
ugcuccaaaaccuggaagu

SEQ ID NO: 137242 - RNA, 22 nt, Human
uggugugaguggguuccaagcc

SEQ ID NO: 137243 - RNA, 18 nt, Human
aagacuccacaaggauag

SEQ ID NO: 137244 - RNA, 19 nt, Human
acaggccgggcaugacaag

SEQ ID NO: 137245 - RNA, 19 nt, Human
aggcaggcuuggaaaggga

SEQ ID NO: 137246 - RNA, 19 nt, Human
aggcaggcuuggaaaggga

SEQ ID NO: 137247 - RNA, 22 nt, Human
aggcaggcuuggaaagggaggu

SEQ ID NO: 137248 - RNA, 20 nt, Human
aggggcacaaguuuucacca

SEQ ID NO: 137249 - RNA, 19 nt, Human
agggggugggagggauggc

SEQ ID NO: 137250 - RNA, 22 nt, Human
caaguuuucaccaacggucaca

SEQ ID NO: 137251 - RNA, 22 nt, Human
cacagcacccccaugcuuggua

SEQ ID NO: 137252 - RNA, 27 nt, Human
cacagugacugauucccagcgcuagag

SEQ ID NO: 137253 - RNA, 20 nt, Human
caccacuacaacagauuaag

SEQ ID NO: 137254 - RNA, 19 nt, Human
cauguguagguguguauau

SEQ ID NO: 137255 - RNA, 26 nt, Human
cuguccacaggccgggcaugacaagg

SEQ ID NO: 137256 - RNA, 23 nt, Human
gagggacagcaggacugguagaa

SEQ ID NO: 137257 - RNA, 20 nt, Human
gcgggggcuggcuguccaca

SEQ ID NO: 137258 - RNA, 20 nt, Human
gcucccggcuccgacuccgg

SEQ ID NO: 137259 - RNA, 19 nt, Human
gcuuuggggcugggggagc

SEQ ID NO: 137260 - RNA, 22 nt, Human
ggaggucuccgagaagaggagg

SEQ ID NO: 137261 - RNA, 24 nt, Human
ggccacacggcugccugcacagca

SEQ ID NO: 137262 - RNA, 20 nt, Human
ggcugggggagccacuguca

SEQ ID NO: 137263 - RNA, 21 nt, Human
gggaggucuccgagaagagga

SEQ ID NO: 137264 - RNA, 22 nt, Human
gggggcuggcuuuggggcuggg

SEQ ID NO: 137265 - RNA, 26 nt, Human
gggggugggagggauggcgggggcug

SEQ ID NO: 137266 - RNA, 23 nt, Human
gugacugauucccagcgcuagag

SEQ ID NO: 137267 - RNA, 26 nt, Human
uaccacagaaggggcacaaguuuuca

SEQ ID NO: 137268 - RNA, 18 nt, Human
ucacaccugaauguauca

SEQ ID NO: 137269 - RNA, 21 nt, Human
ucacaccugaauguaucagcu

SEQ ID NO: 137270 - RNA, 20 nt, Human
ucacuggagguggcacacuu

SEQ ID NO: 137271 - RNA, 21 nt, Human
ucucugguaguugggccacaa

SEQ ID NO: 137272 - RNA, 22 nt, Human
ugggagggauggcgggggcugg

SEQ ID NO: 137273 - RNA, 19 nt, Human
uguagguguguauauauau

SEQ ID NO: 137274 - RNA, 18 nt, Human
ugucaagucacagaacag

SEQ ID NO: 137275 - RNA, 18 nt, Human
uguguagguguguauaua

SEQ ID NO: 137276 - RNA, 19 nt, Human
aagaggccagggcugccca

SEQ ID NO: 137277 - RNA, 19 nt, Human
aagaggccagggcugccca

SEQ ID NO: 137278 - RNA, 20 nt, Human
accccugcaccccagcaagg

SEQ ID NO: 137279 - RNA, 23 nt, Human
acccugagacuccaucccccaaa

SEQ ID NO: 137280 - RNA, 21 nt, Human
acuccaucccccaaagugcaa

SEQ ID NO: 137281 - RNA, 25 nt, Human
agagugcaggcacuuacaguggucc

SEQ ID NO: 137282 - RNA, 24 nt, Human
agcauaggggcggcggagggcccc

SEQ ID NO: 137283 - RNA, 19 nt, Human
agcccaagcccagccaccc

SEQ ID NO: 137284 - RNA, 19 nt, Human
agccgaggcugggccaggc

SEQ ID NO: 137285 - RNA, 22 nt, Human
aggaggaggaggaggagaggaa

SEQ ID NO: 137286 - RNA, 21 nt, Human
aggauggugucaaggguucug

SEQ ID NO: 137287 - RNA, 21 nt, Human
agggcaaggccgggcaacggc

SEQ ID NO: 137288 - RNA, 21 nt, Human
agucccccccaggcuggaccc

SEQ ID NO: 137289 - RNA, 23 nt, Human
caaagugcaacaccccagcgccc

SEQ ID NO: 137290 - RNA, 27 nt, Human
caaagugcaacaccccagcgcccccug

SEQ ID NO: 137291 - RNA, 24 nt, Human
caagaccccccgccaccaccaccc

SEQ ID NO: 137292 - RNA, 21 nt, Human
caagaggccagggcugcccac

SEQ ID NO: 137293 - RNA, 19 nt, Human
cacauagcccaagcccagc

SEQ ID NO: 137294 - RNA, 23 nt, Human
cacauagcccaagcccagccacc

SEQ ID NO: 137295 - RNA, 21 nt, Human
caccaccacccacauagccca

SEQ ID NO: 137296 - RNA, 22 nt, Human
caccacccacauagcccaagcc

SEQ ID NO: 137297 - RNA, 18 nt, Human
caccccagcaaggccugg

SEQ ID NO: 137298 - RNA, 22 nt, Human
caccccagcgcccccugccugg

SEQ ID NO: 137299 - RNA, 21 nt, Human
caccucaggccugccagcugg

SEQ ID NO: 137300 - RNA, 22 nt, Human
cacugggccaggcuugccgcug

SEQ ID NO: 137301 - RNA, 22 nt, Human
cacuuacaguggucaaacugag

SEQ ID NO: 137302 - RNA, 26 nt, Human
cagagugcaggcacuuacagugguca

SEQ ID NO: 137303 - RNA, 20 nt, Human
cagcaaggccuggggaugua

SEQ ID NO: 137304 - RNA, 22 nt, Human
caggccugccagcugggcacuu

SEQ ID NO: 137305 - RNA, 19 nt, Human
ccaagaccccccgccacca

SEQ ID NO: 137306 - RNA, 19 nt, Human
ccaccacccacauagccca

SEQ ID NO: 137307 - RNA, 18 nt, Human
ccacugggccaggcuugc

SEQ ID NO: 137308 - RNA, 19 nt, Human
ccagcauaggggcggcgga

SEQ ID NO: 137309 - RNA, 24 nt, Human
ccagggcugcccacugggagccuu

SEQ ID NO: 137310 - RNA, 19 nt, Human
cccacauagcccaagccca

SEQ ID NO: 137311 - RNA, 25 nt, Human
cccacauagcccaagcccagccacc

SEQ ID NO: 137312 - RNA, 21 nt, Human
cccacugggagccugguccca

SEQ ID NO: 137313 - RNA, 21 nt, Human
cccacugggagccugguccca

SEQ ID NO: 137314 - RNA, 26 nt, Human
cccagccacccugggggacccaggag

SEQ ID NO: 137315 - RNA, 18 nt, Human
ccccagcgcccccugccc

SEQ ID NO: 137316 - RNA, 18 nt, Human
ccccagcgcccccugccu

SEQ ID NO: 137317 - RNA, 18 nt, Human
cccccaagaccccccgcc

SEQ ID NO: 137318 - RNA, 19 nt, Human
cccccaagaccccccgcca

SEQ ID NO: 137319 - RNA, 24 nt, Human
cccccaagaccccccgccaccacc

SEQ ID NO: 137320 - RNA, 18 nt, Human
ccccccaggcuggacccc

SEQ ID NO: 137321 - RNA, 21 nt, Human
cccccccaggcuggaccccuc

SEQ ID NO: 137322 - RNA, 23 nt, Human
cccccccgagagcacgccccccu

SEQ ID NO: 137323 - RNA, 19 nt, Human
ccccccgagagcacgcccc

SEQ ID NO: 137324 - RNA, 24 nt, Human
ccccccgagagcacgccccccucg

SEQ ID NO: 137325 - RNA, 25 nt, Human
ccccccgccaccaccacccacauag

SEQ ID NO: 137326 - RNA, 27 nt, Human
ccccccgccaccaccacccacauagcc

SEQ ID NO: 137327 - RNA, 21 nt, Human
ccccccucugccacccugaga

SEQ ID NO: 137328 - RNA, 25 nt, Human
ccccccucugccacccugagacucc

SEQ ID NO: 137329 - RNA, 22 nt, Human
cccccgagagcacgccccccuc

SEQ ID NO: 137330 - RNA, 18 nt, Human
cccccgccaccaccaccc

SEQ ID NO: 137331 - RNA, 24 nt, Human
cccccucugccacccugagacucc

SEQ ID NO: 137332 - RNA, 21 nt, Human
ccccgagagcacgccccccuc

SEQ ID NO: 137333 - RNA, 22 nt, Human
ccccgagagcacgccccccucg

SEQ ID NO: 137334 - RNA, 20 nt, Human
ccccgccaccaccacccaca

SEQ ID NO: 137335 - RNA, 23 nt, Human
ccgccaccaccacccacauagcc

SEQ ID NO: 137336 - RNA, 26 nt, Human
ccgccaccaccacccacauagcccaa

SEQ ID NO: 137337 - RNA, 19 nt, Human
ccgccgacccucaacgacc

SEQ ID NO: 137338 - RNA, 18 nt, Human
ccgcuggggagcuccugc

SEQ ID NO: 137339 - RNA, 18 nt, Human
ccggcccuggaccggggc

SEQ ID NO: 137340 - RNA, 24 nt, Human
ccucgcccgccgccgacccucaac

SEQ ID NO: 137341 - RNA, 21 nt, Human
ccugagacuccaucccccaaa

SEQ ID NO: 137342 - RNA, 22 nt, Human
ccugcgccgcgggugcgugagg

SEQ ID NO: 137343 - RNA, 18 nt, Human
cgagcgcccugcgcuccu

SEQ ID NO: 137344 - RNA, 22 nt, Human
cgccaccaccacccacauagcu

SEQ ID NO: 137345 - RNA, 22 nt, Human
cgccgccgacccucaacgaccu

SEQ ID NO: 137346 - RNA, 22 nt, Human
cggcccccggcccgagcgcccu

SEQ ID NO: 137347 - RNA, 23 nt, Human
cgggaaggacuauguacaccuca

SEQ ID NO: 137348 - RNA, 22 nt, Human
cuaccgagcccacugggccagg

SEQ ID NO: 137349 - RNA, 20 nt, Human
cucccggcucggccucacgg

SEQ ID NO: 137350 - RNA, 26 nt, Human
cuccucgcccgccgccgacccucaac

SEQ ID NO: 137351 - RNA, 19 nt, Human
cugcaccccagcaaggccu

SEQ ID NO: 137352 - RNA, 20 nt, Human
cugcgccgcgggugcgugag

SEQ ID NO: 137353 - RNA, 21 nt, Human
cuggggauguaggcgcccuug

SEQ ID NO: 137354 - RNA, 24 nt, Human
cugguccccccucugguccccugg

SEQ ID NO: 137355 - RNA, 18 nt, Human
cuuauagaaggccugccc

SEQ ID NO: 137356 - RNA, 19 nt, Human
cuugguagaguccccccca

SEQ ID NO: 137357 - RNA, 23 nt, Human
gaccccccgccaccaccacccac

SEQ ID NO: 137358 - RNA, 21 nt, Human
gacccucaacgaccuggcccc

SEQ ID NO: 137359 - RNA, 20 nt, Human
gagcacgccccccucgaggc

SEQ ID NO: 137360 - RNA, 23 nt, Human
gagucccccccaggcuggacccc

SEQ ID NO: 137361 - RNA, 20 nt, Human
gccaccaccacccacauagc

SEQ ID NO: 137362 - RNA, 23 nt, Human
gccaggcacaggggccggcccug

SEQ ID NO: 137363 - RNA, 23 nt, Human
gccccagaccacugaagcuccug

SEQ ID NO: 137364 - RNA, 19 nt, Human
gccuggucccagcauaggg

SEQ ID NO: 137365 - RNA, 20 nt, Human
gcgcccccugccuggagcuc

SEQ ID NO: 137366 - RNA, 22 nt, Human
ggaaggacuauguacaccucag

SEQ ID NO: 137367 - RNA, 25 nt, Human
ggaccggggccagcguuaaccaaga

SEQ ID NO: 137368 - RNA, 19 nt, Human
ggaggaggagaggaauagg

SEQ ID NO: 137369 - RNA, 21 nt, Human
ggccaggcuugccgcugggga

SEQ ID NO: 137370 - RNA, 19 nt, Human
ggcuggaccccucauucag

SEQ ID NO: 137371 - RNA, 22 nt, Human
gggccaggcuugccgcugggga

SEQ ID NO: 137372 - RNA, 19 nt, Human
gggggacccaggaggagga

SEQ ID NO: 137373 - RNA, 21 nt, Human
gguuaauauggccgggaagga

SEQ ID NO: 137374 - RNA, 19 nt, Human
guagagucccccccaggcu

SEQ ID NO: 137375 - RNA, 20 nt, Human
guagagucccccccaggcug

SEQ ID NO: 137376 - RNA, 18 nt, Human
gugcaacaccccagcgcc

SEQ ID NO: 137377 - RNA, 20 nt, Human
gugcaacaccccagcgcccc

SEQ ID NO: 137378 - RNA, 24 nt, Human
gugcaggcacuuacaguggucaaa

SEQ ID NO: 137379 - RNA, 24 nt, Human
uaccccugcaccccagcaaggccu

SEQ ID NO: 137380 - RNA, 19 nt, Human
uagccguugcucccgcccg

SEQ ID NO: 137381 - RNA, 18 nt, Human
ucagggaggcaugggcgg

SEQ ID NO: 137382 - RNA, 23 nt, Human
uccaucccccaaagugcaacacc

SEQ ID NO: 137383 - RNA, 21 nt, Human
ucccccaaagugcaacacccc

SEQ ID NO: 137384 - RNA, 21 nt, Human
ugagcgaggagugggugaggu

SEQ ID NO: 137385 - RNA, 18 nt, Human
ugaggucuccucagagag

SEQ ID NO: 137386 - RNA, 19 nt, Human
ugauauaccccugcacccc

SEQ ID NO: 137387 - RNA, 20 nt, Human
ugcaacaccccagcgccccc

SEQ ID NO: 137388 - RNA, 20 nt, Human
ugcgccgcgggugcgugagg

SEQ ID NO: 137389 - RNA, 20 nt, Human
uggcagccgaggcugggcca

SEQ ID NO: 137390 - RNA, 19 nt, Human
ugggggacccaggaggagg

SEQ ID NO: 137391 - RNA, 18 nt, Human
aacaggggugacgggagg

SEQ ID NO: 137392 - RNA, 22 nt, Human
aacauauaaaaacuacauaaag

SEQ ID NO: 137393 - RNA, 19 nt, Human
aaggccacaaacaccaugu

SEQ ID NO: 137394 - RNA, 18 nt, Human
acggacagauugacaugu

SEQ ID NO: 137395 - RNA, 22 nt, Human
agaggcgauacccugugcagaa

SEQ ID NO: 137396 - RNA, 19 nt, Human
agccaaggccacaaacacc

SEQ ID NO: 137397 - RNA, 18 nt, Human
aggauggaacggagccgg

SEQ ID NO: 137398 - RNA, 22 nt, Human
aggccacaaacaccauguacca

SEQ ID NO: 137399 - RNA, 22 nt, Human
aguccgggcgugggggaggagg

SEQ ID NO: 137400 - RNA, 21 nt, Human
auggggaggggcgaugagcgg

SEQ ID NO: 137401 - RNA, 25 nt, Human
auguuaaaaacacaacaucagugca

SEQ ID NO: 137402 - RNA, 24 nt, Human
caaggcgggcacacacccccccca

SEQ ID NO: 137403 - RNA, 24 nt, Human
cagcagacgcggcggcggcagcgc

SEQ ID NO: 137404 - RNA, 22 nt, Human
cagccaaggccacaaacaccau

SEQ ID NO: 137405 - RNA, 19 nt, Human
cagcgcaggcgccccggcu

SEQ ID NO: 137406 - RNA, 19 nt, Human
cagcgcaggcgccccggcu

SEQ ID NO: 137407 - RNA, 25 nt, Human
caugcccagggaacacgcaugcgca

SEQ ID NO: 137408 - RNA, 18 nt, Human
ccacacaugugaacggac

SEQ ID NO: 137409 - RNA, 18 nt, Human
ccaccccaguccgggcgu

SEQ ID NO: 137410 - RNA, 22 nt, Human
cgcaggcgccccggcuuuucgc

SEQ ID NO: 137411 - RNA, 21 nt, Human
cggcggcagcgcaggcgcccc

SEQ ID NO: 137412 - RNA, 22 nt, Human
cuggugccagaaacagggguga

SEQ ID NO: 137413 - RNA, 19 nt, Human
gaaacaggggugacgggag

SEQ ID NO: 137414 - RNA, 25 nt, Human
gcaaggcgggcacacacccccccca

SEQ ID NO: 137415 - RNA, 19 nt, Human
gcaugcgcaaggcgggcac

SEQ ID NO: 137416 - RNA, 19 nt, Human
gcauguuggggauuccugg

SEQ ID NO: 137417 - RNA, 20 nt, Human
gccaaggccacaaacaccau

SEQ ID NO: 137418 - RNA, 21 nt, Human
ggaacacgcaugcgcaaggcg

SEQ ID NO: 137419 - RNA, 22 nt, Human
gggauuccuggugccagaaaca

SEQ ID NO: 137420 - RNA, 27 nt, Human
ggggaggggcgaugagcggaggcgcgu

SEQ ID NO: 137421 - RNA, 20 nt, Human
uaaaaacacaacaucagugc

SEQ ID NO: 137422 - RNA, 24 nt, Human
uaagcgaaccucacacaacagcuu

SEQ ID NO: 137423 - RNA, 21 nt, Human
uacccugugcagaaggaugga

SEQ ID NO: 137424 - RNA, 18 nt, Human
uccagaaugcacaaagua

SEQ ID NO: 137425 - RNA, 23 nt, Human
ugacauguuaaaaacacaacauc

SEQ ID NO: 137426 - RNA, 19 nt, Human
uggaacggagccggccaug

SEQ ID NO: 137427 - RNA, 23 nt, Human
uggaacggagccggccaugccca

SEQ ID NO: 137428 - RNA, 18 nt, Human
ugugcagaaggauggaac

SEQ ID NO: 137429 - RNA, 23 nt, Human
uuccuggugccagaaacaggggu

SEQ ID NO: 137430 - RNA, 22 nt, Human
uugacauguuaaaaacacaaca

SEQ ID NO: 137431 - RNA, 23 nt, Human
uuuuuuuuuuuuuuuuuugguuu

SEQ ID NO: 137432 - RNA, 28 nt, Human
uuuuuuuuuuuuuuuuuuuuuuuggggg

SEQ ID NO: 137433 - RNA, 21 nt, Human
aaagaaauauuuacaggauug

SEQ ID NO: 137434 - RNA, 20 nt, Human
aaagaacaacuggggggagg

SEQ ID NO: 137435 - RNA, 23 nt, Human
aagacaaaaacaagcuuugauaa

SEQ ID NO: 137436 - RNA, 24 nt, Human
aagcauauagcagacauuccauaa

SEQ ID NO: 137437 - RNA, 18 nt, Human
aagucauaaaaguucauu

SEQ ID NO: 137438 - RNA, 21 nt, Human
aauuuccuuccugcggaaggc

SEQ ID NO: 137439 - RNA, 18 nt, Human
acacugguagauacaucu

SEQ ID NO: 137440 - RNA, 24 nt, Human
acagaaccuacaugaaagugugcc

SEQ ID NO: 137441 - RNA, 18 nt, Human
agaaacccuaauuccaag

SEQ ID NO: 137442 - RNA, 20 nt, Human
agcaaugcacaaacuuccaa

SEQ ID NO: 137443 - RNA, 21 nt, Human
auauacucuccauaaagcaua

SEQ ID NO: 137444 - RNA, 19 nt, Human
auccuccccauccaccucc

SEQ ID NO: 137445 - RNA, 22 nt, Human
caaaagcauauagcagacauuc

SEQ ID NO: 137446 - RNA, 24 nt, Human
caaccauccuccccauccaccucc

SEQ ID NO: 137447 - RNA, 21 nt, Human
caccagaauuaguucaaaaca

SEQ ID NO: 137448 - RNA, 18 nt, Human
caccgcauaugucagaau

SEQ ID NO: 137449 - RNA, 22 nt, Human
cacuaagcuacauucugucuac

SEQ ID NO: 137450 - RNA, 30 nt, Human
cagcugaaccauuuuacguucccacaagcc

SEQ ID NO: 137451 - RNA, 21 nt, Human
ccaccucuaaauagcugauuu

SEQ ID NO: 137452 - RNA, 23 nt, Human
ccacuaagcuacauucugucuac

SEQ ID NO: 137453 - RNA, 25 nt, Human
ccauccuccccauccaccuccagaa

SEQ ID NO: 137454 - RNA, 19 nt, Human
ccccggagcuaggccugcc

SEQ ID NO: 137455 - RNA, 19 nt, Human
cgccgcagccccggagcua

SEQ ID NO: 137456 - RNA, 20 nt, Human
cgccucagccgccgcagccc

SEQ ID NO: 137457 - RNA, 18 nt, Human
cguucccacaagcaaugc

SEQ ID NO: 137458 - RNA, 27 nt, Human
cuccauagcguuuuccaacagcagcug

SEQ ID NO: 137459 - RNA, 18 nt, Human
cucugucugaacacauau

SEQ ID NO: 137460 - RNA, 20 nt, Human
cugaaaucuuaacgucaugc

SEQ ID NO: 137461 - RNA, 19 nt, Human
cugauuuuuaagaagaaaa

SEQ ID NO: 137462 - RNA, 23 nt, Human
cugcauauuuucaauuaugaauu

SEQ ID NO: 137463 - RNA, 20 nt, Human
cuguucaagucccugcuuuc

SEQ ID NO: 137464 - RNA, 24 nt, Human
gaauaucauaugaccaucuuucag

SEQ ID NO: 137465 - RNA, 21 nt, Human
gacagagaaaguuaaaaguca

SEQ ID NO: 137466 - RNA, 23 nt, Human
gcagugaacagaaccuacaugaa

SEQ ID NO: 137467 - RNA, 21 nt, Human
gccgcagccccggagcuaggc

SEQ ID NO: 137468 - RNA, 24 nt, Human
gcgccucagccgccgcagccccgg

SEQ ID NO: 137469 - RNA, 19 nt, Human
ggcugguacuauuccacug

SEQ ID NO: 137470 - RNA, 19 nt, Human
gggcuggcuuacagcuucc

SEQ ID NO: 137471 - RNA, 25 nt, Human
guaaaacucuaaaccauuuuauuua

SEQ ID NO: 137472 - RNA, 18 nt, Human
uaaaauauacauaaugua

SEQ ID NO: 137473 - RNA, 18 nt, Human
uaaaaucuuguaauauga

SEQ ID NO: 137474 - RNA, 23 nt, Human
uaaaauuagaaauaaaaaacuuc

SEQ ID NO: 137475 - RNA, 24 nt, Human
uacaacauuauuaccaaaagcaua

SEQ ID NO: 137476 - RNA, 24 nt, Human
uacaguaauauaaauuugaugaaa

SEQ ID NO: 137477 - RNA, 22 nt, Human
uaccaguuuguaagcaaauguc

SEQ ID NO: 137478 - RNA, 21 nt, Human
uagccagagguggaaucgcug

SEQ ID NO: 137479 - RNA, 24 nt, Human
uaggguaauucuauguugaauuuu

SEQ ID NO: 137480 - RNA, 18 nt, Human
ucaaccgaaugugggaua

SEQ ID NO: 137481 - RNA, 21 nt, Human
ucauguagacacuaaagcucu

SEQ ID NO: 137482 - RNA, 20 nt, Human
uccaauuuauccaccucuaa

SEQ ID NO: 137483 - RNA, 22 nt, Human
uccaccuccagaacuuucucau

SEQ ID NO: 137484 - RNA, 18 nt, Human
uccacugcaugcacggaa

SEQ ID NO: 137485 - RNA, 19 nt, Human
ugacacugguagauacauc

SEQ ID NO: 137486 - RNA, 20 nt, Human
ugacacugguagauacaucu

SEQ ID NO: 137487 - RNA, 21 nt, Human
ugacacugguagauacaucuu

SEQ ID NO: 137488 - RNA, 26 nt, Human
ugcaguaaaauauacauaauguaaaa

SEQ ID NO: 137489 - RNA, 19 nt, Human
ugcucaaccgaauguggga

SEQ ID NO: 137490 - RNA, 19 nt, Human
ugcugaggaagagagacag

SEQ ID NO: 137491 - RNA, 21 nt, Human
uggggggaggggaguacuguc

SEQ ID NO: 137492 - RNA, 27 nt, Human
ugguguacaaauaucuguucaaguccc

SEQ ID NO: 137493 - RNA, 19 nt, Human
ugucugaacacauaugaaa

SEQ ID NO: 137494 - RNA, 24 nt, Human
uuaagaauuccacuaagcuacauu

SEQ ID NO: 137495 - RNA, 23 nt, Human
uucccauaauuuaagaauuccac

SEQ ID NO: 137496 - RNA, 20 nt, Human
uuucuguauaugggcuggcu

SEQ ID NO: 137497 - RNA, 19 nt, Human
uuucuuuucaucucucuuc

SEQ ID NO: 137498 - RNA, 18 nt, Human
uuuguaagcaaaugucuc

SEQ ID NO: 137499 - RNA, 23 nt, Human
uuuguuuauaaaauuguuuuuaa

SEQ ID NO: 137500 - RNA, 24 nt, Human
aaacauagaucccgguguugagcc

SEQ ID NO: 137501 - RNA, 21 nt, Human
aggcuggggcugcgcggggcu

SEQ ID NO: 137502 - RNA, 20 nt, Human
caccguauggccgguggggu

SEQ ID NO: 137503 - RNA, 21 nt, Human
caggcuggggcugcgcggggc

SEQ ID NO: 137504 - RNA, 22 nt, Human
ccgggaggcaggcuggggcugc

SEQ ID NO: 137505 - RNA, 19 nt, Human
cgccgggaggcaggcuggg

SEQ ID NO: 137506 - RNA, 18 nt, Human
gcaggcuggggcugcgcg

SEQ ID NO: 137507 - RNA, 18 nt, Human
ggcugcgcggggcugggg

SEQ ID NO: 137508 - RNA, 21 nt, Human
ggcuuuggggaaggaauuauc

SEQ ID NO: 137509 - RNA, 21 nt, Human
ggggcuggggggcugcugggc

SEQ ID NO: 137510 - RNA, 23 nt, Human
ugggcgccgggaggcaggcuggg

SEQ ID NO: 137511 - RNA, 26 nt, Human
ugggcuuuggggaaggaauuaucgug

SEQ ID NO: 137512 - RNA, 20 nt, Human
uggggcugcgcggggcuggg

SEQ ID NO: 137513 - RNA, 20 nt, Human
uggggcugcgcggggcuggg

SEQ ID NO: 137514 - RNA, 18 nt, Human
aaaaagaugagaaaugag

SEQ ID NO: 137515 - RNA, 27 nt, Human
aaaaauuagcaaaaacuguugaaacaa

SEQ ID NO: 137516 - RNA, 19 nt, Human
aaauagcccugaaugugau

SEQ ID NO: 137517 - RNA, 18 nt, Human
aagagggagauauggagg

SEQ ID NO: 137518 - RNA, 25 nt, Human
acagagcaguagccaguuuucaaaa

SEQ ID NO: 137519 - RNA, 21 nt, Human
acagcugaggaagagcagggc

SEQ ID NO: 137520 - RNA, 20 nt, Human
acuugggccacuuaacccca

SEQ ID NO: 137521 - RNA, 22 nt, Human
agacccaggaagggaaaaaaaa

SEQ ID NO: 137522 - RNA, 21 nt, Human
agagggaauggguuugagggg

SEQ ID NO: 137523 - RNA, 19 nt, Human
agcacaccccuuccugagc

SEQ ID NO: 137524 - RNA, 25 nt, Human
agcagacuucucaucuggggaccug

SEQ ID NO: 137525 - RNA, 20 nt, Human
agccuaaaaauuagcaaaaa

SEQ ID NO: 137526 - RNA, 18 nt, Human
aggaagggaaaaaaaaaa

SEQ ID NO: 137527 - RNA, 18 nt, Human
aggagaagaaaaaaugag

SEQ ID NO: 137528 - RNA, 22 nt, Human
aggcaaggggaaugugccgggu

SEQ ID NO: 137529 - RNA, 24 nt, Human
agggagccggucccguccgucggg

SEQ ID NO: 137530 - RNA, 24 nt, Human
auggaggagccauacuugucuaca

SEQ ID NO: 137531 - RNA, 18 nt, Human
caaaacuugucaacguug

SEQ ID NO: 137532 - RNA, 25 nt, Human
caagagggaacugagguacacggua

SEQ ID NO: 137533 - RNA, 22 nt, Human
cacacgucuguaaacacagagc

SEQ ID NO: 137534 - RNA, 20 nt, Human
cacgguaugacccacacagc

SEQ ID NO: 137535 - RNA, 20 nt, Human
cacgucuguaaacacagagc

SEQ ID NO: 137536 - RNA, 18 nt, Human
cacugagcaagagggaac

SEQ ID NO: 137537 - RNA, 21 nt, Human
cagccuaaaaauuagcaaaaa

SEQ ID NO: 137538 - RNA, 18 nt, Human
cagcugaggaagagcagg

SEQ ID NO: 137539 - RNA, 19 nt, Human
caggaagggaaaaaaaaaa

SEQ ID NO: 137540 - RNA, 19 nt, Human
cccacaaaacuugucaacg

SEQ ID NO: 137541 - RNA, 18 nt, Human
ccgugcagacuccagccc

SEQ ID NO: 137542 - RNA, 19 nt, Human
ccuaaaaauuagcaaaaac

SEQ ID NO: 137543 - RNA, 23 nt, Human
ccuugcuucacacuccucuccua

SEQ ID NO: 137544 - RNA, 18 nt, Human
cgcccgaccgccagggag

SEQ ID NO: 137545 - RNA, 20 nt, Human
cgcucggagcguccacgcgg

SEQ ID NO: 137546 - RNA, 21 nt, Human
cgggccggacggggcagcggg

SEQ ID NO: 137547 - RNA, 21 nt, Human
cucaggcuaccccugcaagag

SEQ ID NO: 137548 - RNA, 23 nt, Human
cuccaagcagccaggucugauuu

SEQ ID NO: 137549 - RNA, 20 nt, Human
cuccuugcuucacacuccuc

SEQ ID NO: 137550 - RNA, 19 nt, Human
cuggcucugccacacaccc

SEQ ID NO: 137551 - RNA, 18 nt, Human
cuggcuggggcgcggcug

SEQ ID NO: 137552 - RNA, 21 nt, Human
cuuaaccccagcgcugccggc

SEQ ID NO: 137553 - RNA, 19 nt, Human
cuucaggaaucacaccucc

SEQ ID NO: 137554 - RNA, 26 nt, Human
cuuccugagcuccccagaggguucua

SEQ ID NO: 137555 - RNA, 18 nt, Human
cuugggccacuuaacccc

SEQ ID NO: 137556 - RNA, 21 nt, Human
cuugggccacuuaaccccagc

SEQ ID NO: 137557 - RNA, 21 nt, Human
gacccaggaagggaaaaaaaa

SEQ ID NO: 137558 - RNA, 23 nt, Human
gagcaccgagcuuugcaguuuuc

SEQ ID NO: 137559 - RNA, 26 nt, Human
gagccgggagcagcugcugcgaggaa

SEQ ID NO: 137560 - RNA, 19 nt, Human
gcccgaccgccagggagcc

SEQ ID NO: 137561 - RNA, 18 nt, Human
gcccgcucgcccgaccgc

SEQ ID NO: 137562 - RNA, 24 nt, Human
gcccgcucgcccgaccgccgacuc

SEQ ID NO: 137563 - RNA, 19 nt, Human
gcgcggcugggcggcggag

SEQ ID NO: 137564 - RNA, 19 nt, Human
gcgggcugcggccgcggag

SEQ ID NO: 137565 - RNA, 19 nt, Human
ggaaaaaaaaaaagccacg

SEQ ID NO: 137566 - RNA, 18 nt, Human
ggccggcuggcggccgug

SEQ ID NO: 137567 - RNA, 18 nt, Human
ggcuccaguuacaaaaaa

SEQ ID NO: 137568 - RNA, 18 nt, Human
gggaauggguuugagggg

SEQ ID NO: 137569 - RNA, 20 nt, Human
gggccacuuaaccccagcgc

SEQ ID NO: 137570 - RNA, 18 nt, Human
gggccuggggaugccuuc

SEQ ID NO: 137571 - RNA, 18 nt, Human
gggcggcggagccgcggg

SEQ ID NO: 137572 - RNA, 19 nt, Human
gggcuuggggccuggcugg

SEQ ID NO: 137573 - RNA, 20 nt, Human
ggggaaaaaauagcccugaa

SEQ ID NO: 137574 - RNA, 28 nt, Human
ggggaaaaaauagcccugaaugugaugg

SEQ ID NO: 137575 - RNA, 19 nt, Human
ggggcgcggcugggcggcg

SEQ ID NO: 137576 - RNA, 20 nt, Human
ggugucuuaucuaagcuccu

SEQ ID NO: 137577 - RNA, 18 nt, Human
guacacgguaugacccac

SEQ ID NO: 137578 - RNA, 22 nt, Human
guccacgcgggcugcggccgcg

SEQ ID NO: 137579 - RNA, 18 nt, Human
gugggcuuggggccuggc

SEQ ID NO: 137580 - RNA, 23 nt, Human
guuuuaggagaagaaaaaaugag

SEQ ID NO: 137581 - RNA, 21 nt, Human
uaaaaaaucuccaaagggagc

SEQ ID NO: 137582 - RNA, 18 nt, Human
uaagaagaguaaaaggug

SEQ ID NO: 137583 - RNA, 22 nt, Human
ucaaaaauuaaacucuugcaau

SEQ ID NO: 137584 - RNA, 21 nt, Human
ucaucuggggaccugugccug

SEQ ID NO: 137585 - RNA, 19 nt, Human
uccacgcgggcugcggccg

SEQ ID NO: 137586 - RNA, 21 nt, Human
uccacgcgggcugcggccgcg

SEQ ID NO: 137587 - RNA, 24 nt, Human
ucccguucucccuaaaaacgacuu

SEQ ID NO: 137588 - RNA, 21 nt, Human
ucucucagauguggggaaggu

SEQ ID NO: 137589 - RNA, 21 nt, Human
ucugaauucccguucucccua

SEQ ID NO: 137590 - RNA, 21 nt, Human
ucugccacacaccccaguggg

SEQ ID NO: 137591 - RNA, 23 nt, Human
ucugcccccacugagcaagaggg

SEQ ID NO: 137592 - RNA, 19 nt, Human
ugaaaucaucaucauugug

SEQ ID NO: 137593 - RNA, 19 nt, Human
ugacugcugucacugccuc

SEQ ID NO: 137594 - RNA, 23 nt, Human
ugcagucacggggagggauuuag

SEQ ID NO: 137595 - RNA, 21 nt, Human
ugcccugggaaaaaacgaucc

SEQ ID NO: 137596 - RNA, 18 nt, Human
ugccuacaacugcacacg

SEQ ID NO: 137597 - RNA, 23 nt, Human
ugcgaggaagcggcgcgggccgg

SEQ ID NO: 137598 - RNA, 20 nt, Human
uggaggguaggucuccugga

SEQ ID NO: 137599 - RNA, 24 nt, Human
uggcgggaggccggcuggcggccg

SEQ ID NO: 137600 - RNA, 19 nt, Human
uggcuggggcgcggcuggg

SEQ ID NO: 137601 - RNA, 22 nt, Human
uguauaaaaagccccacaaaac

SEQ ID NO: 137602 - RNA, 21 nt, Human
ugucuuggaugauuuuucagc

SEQ ID NO: 137603 - RNA, 23 nt, Human
ugugccuguggaggguaggucuc

SEQ ID NO: 137604 - RNA, 18 nt, Human
ugugggggaaaaaauagc

SEQ ID NO: 137605 - RNA, 19 nt, Human
ugugguuuugguaucuuag

SEQ ID NO: 137606 - RNA, 23 nt, Human
uuaaaaauguccuguagcuacau

SEQ ID NO: 137607 - RNA, 19 nt, Human
uucacacuccucuccuagg

SEQ ID NO: 137608 - RNA, 20 nt, Human
uuccugccgcagggcuggcu

SEQ ID NO: 137609 - RNA, 22 nt, Human
uucucaucuggggaccugugcc

SEQ ID NO: 137610 - RNA, 23 nt, Human
uucucaucuggggaccugugccu

SEQ ID NO: 137611 - RNA, 19 nt, Human
uugcccugggaaaaaacga

SEQ ID NO: 137612 - RNA, 24 nt, Human
uuuacuugggccacuuaaccccag

SEQ ID NO: 137613 - RNA, 18 nt, Human
aaguugccuuuguucuag

SEQ ID NO: 137614 - RNA, 25 nt, Human
aggagcugcggggggucacuugggg

SEQ ID NO: 137615 - RNA, 21 nt, Human
aggguggagugaggggugggg

SEQ ID NO: 137616 - RNA, 24 nt, Human
agguuccagugguccggggcuucc

SEQ ID NO: 137617 - RNA, 20 nt, Human
aguggggagugggguucagg

SEQ ID NO: 137618 - RNA, 19 nt, Human
cacggcuccggguacagcc

SEQ ID NO: 137619 - RNA, 26 nt, Human
cagcugguggguucaagguuccagug

SEQ ID NO: 137620 - RNA, 26 nt, Human
ccagaggucaccaggcuaugggggca

SEQ ID NO: 137621 - RNA, 26 nt, Human
cgcgggggcggggaggggcgggggcg

SEQ ID NO: 137622 - RNA, 27 nt, Human
cggguacagccagcugguugcggggcg

SEQ ID NO: 137623 - RNA, 19 nt, Human
cuccggguacagccagcug

SEQ ID NO: 137624 - RNA, 21 nt, Human
cuuccaggcucaggguccccg

SEQ ID NO: 137625 - RNA, 21 nt, Human
gacugggccauggaacgaggg

SEQ ID NO: 137626 - RNA, 24 nt, Human
gaggagcugcggggggucacuugg

SEQ ID NO: 137627 - RNA, 18 nt, Human
gcggggggucacuugggg

SEQ ID NO: 137628 - RNA, 21 nt, Human
ggagugggguucaggggaggg

SEQ ID NO: 137629 - RNA, 24 nt, Human
ggcagggaaagggaacccucaggu

SEQ ID NO: 137630 - RNA, 18 nt, Human
ggcggggaggggcggggg

SEQ ID NO: 137631 - RNA, 21 nt, Human
ggcugggggauugggguucag

SEQ ID NO: 137632 - RNA, 20 nt, Human
gggaaagggaacccucaggu

SEQ ID NO: 137633 - RNA, 19 nt, Human
gggacagcggguggccaga

SEQ ID NO: 137634 - RNA, 20 nt, Human
gggcgaggagcugcgggggg

SEQ ID NO: 137635 - RNA, 19 nt, Human
gggcggggaggggcggggg

SEQ ID NO: 137636 - RNA, 22 nt, Human
gggcuuccaggcucaggguccc

SEQ ID NO: 137637 - RNA, 22 nt, Human
ggggagcuaggaagcuggggga

SEQ ID NO: 137638 - RNA, 20 nt, Human
ggggcggggaggggcggggg

SEQ ID NO: 137639 - RNA, 26 nt, Human
ggggcggggaggggcgggggcggggc

SEQ ID NO: 137640 - RNA, 19 nt, Human
ggguacagccagcuggugg

SEQ ID NO: 137641 - RNA, 22 nt, Human
ggguggagugaggggugggguu

SEQ ID NO: 137642 - RNA, 18 nt, Human
ggguggccagaggucacc

SEQ ID NO: 137643 - RNA, 24 nt, Human
guggagugaggggugggguuuggg

SEQ ID NO: 137644 - RNA, 19 nt, Human
ucaggguccccggggagga

SEQ ID NO: 137645 - RNA, 18 nt, Human
ucaguggggagugggguu

SEQ ID NO: 137646 - RNA, 23 nt, Human
ugagcuggaaggauccaggccca

SEQ ID NO: 137647 - RNA, 19 nt, Human
ugaggggugggguuugggg

SEQ ID NO: 137648 - RNA, 21 nt, Human
ugcggggggucacuuggggug

SEQ ID NO: 137649 - RNA, 22 nt, Human
ugcggggggucacuuggggugg

SEQ ID NO: 137650 - RNA, 19 nt, Human
uggccagaggucaccaggc

SEQ ID NO: 137651 - RNA, 20 nt, Human
ugggaggggcgaggagcugc

SEQ ID NO: 137652 - RNA, 22 nt, Human
uggggaccucaguggggaguga

SEQ ID NO: 137653 - RNA, 22 nt, Human
uggggaccucaguggggagugg

SEQ ID NO: 137654 - RNA, 22 nt, Human
uggggagugggguucaggggag

SEQ ID NO: 137655 - RNA, 19 nt, Human
uggggcugggggauugggg

SEQ ID NO: 137656 - RNA, 20 nt, Human
aaaguuauuuauuucuagua

SEQ ID NO: 137657 - RNA, 24 nt, Human
aagaauaggaaaaaaauguugaca

SEQ ID NO: 137658 - RNA, 20 nt, Human
aagaggcugcugcugccucu

SEQ ID NO: 137659 - RNA, 19 nt, Human
auaaccccaaacucuccua

SEQ ID NO: 137660 - RNA, 23 nt, Human
auggcaucuuuuacuaauaugaa

SEQ ID NO: 137661 - RNA, 20 nt, Human
caccuucccauguuuccaaa

SEQ ID NO: 137662 - RNA, 22 nt, Human
caccuucccauguuuccaaagu

SEQ ID NO: 137663 - RNA, 24 nt, Human
ccaguggcaccuucccauguuucc

SEQ ID NO: 137664 - RNA, 20 nt, Human
cccaaacucuccuauggcau

SEQ ID NO: 137665 - RNA, 25 nt, Human
ccuccuacacgaaggguuuugaugu

SEQ ID NO: 137666 - RNA, 22 nt, Human
ccuuacccauuaccaguggcac

SEQ ID NO: 137667 - RNA, 22 nt, Human
cuugaaaagaauaggaaaaaaa

SEQ ID NO: 137668 - RNA, 19 nt, Human
gcuacacugcgaacaaagu

SEQ ID NO: 137669 - RNA, 19 nt, Human
ggaagaggcugcugcugcc

SEQ ID NO: 137670 - RNA, 25 nt, Human
uauuagagauagacaguauuucagc

SEQ ID NO: 137671 - RNA, 25 nt, Human
ucaauaagaccuaaauaaccccaaa

SEQ ID NO: 137672 - RNA, 22 nt, Human
uccagaagggagggagacugcc

SEQ ID NO: 137673 - RNA, 19 nt, Human
ugaaaagaauaggaaaaaa

SEQ ID NO: 137674 - RNA, 27 nt, Human
ugaagcauaauuuauuuaacuugaaaa

SEQ ID NO: 137675 - RNA, 24 nt, Human
ugaauucuaugcaacagucauaaa

SEQ ID NO: 137676 - RNA, 22 nt, Human
ugcaacagucauaaacauggcc

SEQ ID NO: 137677 - RNA, 21 nt, Human
ugcgaacaaagugggcuuuga

SEQ ID NO: 137678 - RNA, 19 nt, Human
uuaccaguggcaccuuccc

SEQ ID NO: 137679 - RNA, 18 nt, Human
aacugccugcgccggggc

SEQ ID NO: 137680 - RNA, 18 nt, Human
acuugauuucuugaucaa

SEQ ID NO: 137681 - RNA, 19 nt, Human
caagugcagacuaaauauu

SEQ ID NO: 137682 - RNA, 23 nt, Human
caaguugcagucaaauuaaagug

SEQ ID NO: 137683 - RNA, 20 nt, Human
ccggggccgggcgggggccg

SEQ ID NO: 137684 - RNA, 23 nt, Human
cgauaugacuaugcaggcaacag

SEQ ID NO: 137685 - RNA, 18 nt, Human
cugccugcgccggggccg

SEQ ID NO: 137686 - RNA, 23 nt, Human
cuuucaggguggugacccuuuuc

SEQ ID NO: 137687 - RNA, 20 nt, Human
gaaaaugaaauacauaaaga

SEQ ID NO: 137688 - RNA, 20 nt, Human
gaacugccugcgccggggcc

SEQ ID NO: 137689 - RNA, 22 nt, Human
gcuccuucuccuccugagacuu

SEQ ID NO: 137690 - RNA, 21 nt, Human
ggccgggccggggccgcugua

SEQ ID NO: 137691 - RNA, 20 nt, Human
ucaggguggugacccuuuuc

SEQ ID NO: 137692 - RNA, 19 nt, Human
ucugaacugccugcgccgg

SEQ ID NO: 137693 - RNA, 21 nt, Human
ucugaacugccugcgccgggg

SEQ ID NO: 137694 - RNA, 21 nt, Human
uggugacccuuuucuccuuuu

SEQ ID NO: 137695 - RNA, 24 nt, Human
uggugacccuuuucuccuuuucuu

SEQ ID NO: 137696 - RNA, 19 nt, Human
uguaaaugaaaagauauac

SEQ ID NO: 137697 - RNA, 22 nt, Human
uucaugcacaaaccuucccaaa

SEQ ID NO: 137698 - RNA, 25 nt, Human
uuuauaauguuaaaguauuucacca

SEQ ID NO: 137699 - RNA, 25 nt, Human
aaaaauuaagaacacauauggauaa

SEQ ID NO: 137700 - RNA, 25 nt, Human
aaacagaaggaccacaaaaauuaaa

SEQ ID NO: 137701 - RNA, 21 nt, Human
aaacagcagacucaggggaca

SEQ ID NO: 137702 - RNA, 20 nt, Human
aacagcagacucaggggaca

SEQ ID NO: 137703 - RNA, 21 nt, Human
aacaucccaugacagugagga

SEQ ID NO: 137704 - RNA, 21 nt, Human
aagaaaaagcagucgcacgaa

SEQ ID NO: 137705 - RNA, 24 nt, Human
aaugcuguuuccaccccauaaauu

SEQ ID NO: 137706 - RNA, 25 nt, Human
acaaaaagaaagaauguuugggcaa

SEQ ID NO: 137707 - RNA, 23 nt, Human
acacagcuucccaagagugaugg

SEQ ID NO: 137708 - RNA, 24 nt, Human
acccauaucuaccucccagaccca

SEQ ID NO: 137709 - RNA, 24 nt, Human
accucaaccaacgaagucacacca

SEQ ID NO: 137710 - RNA, 21 nt, Human
accucccagacccaccuugcu

SEQ ID NO: 137711 - RNA, 24 nt, Human
acucacuccauggugagaacugaa

SEQ ID NO: 137712 - RNA, 20 nt, Human
aggaggggcuggauacaaca

SEQ ID NO: 137713 - RNA, 22 nt, Human
aggggacacagaaggagagggc

SEQ ID NO: 137714 - RNA, 25 nt, Human
augacagugaggaggauucuuauac

SEQ ID NO: 137715 - RNA, 23 nt, Human
auggagauggggaggggcagcac

SEQ ID NO: 137716 - RNA, 21 nt, Human
auucauuuguuuuuccauuug

SEQ ID NO: 137717 - RNA, 22 nt, Human
cacuccauggugagaacugaac

SEQ ID NO: 137718 - RNA, 26 nt, Human
cacuuccagcaguuaaaaauuaagaa

SEQ ID NO: 137719 - RNA, 19 nt, Human
cagaaggagagggcaugga

SEQ ID NO: 137720 - RNA, 19 nt, Human
cagaaugaggacaaaaaca

SEQ ID NO: 137721 - RNA, 18 nt, Human
cagacucaggggacacag

SEQ ID NO: 137722 - RNA, 19 nt, Human
cagacucucucagagccag

SEQ ID NO: 137723 - RNA, 23 nt, Human
cagcaguuaaaaauuaagaacac

SEQ ID NO: 137724 - RNA, 19 nt, Human
caucccggacccauaucua

SEQ ID NO: 137725 - RNA, 22 nt, Human
ccaacgaagucacaccaccggc

SEQ ID NO: 137726 - RNA, 21 nt, Human
cccaacucugguaacuacgau

SEQ ID NO: 137727 - RNA, 22 nt, Human
cccggacccauaucuaccuccc

SEQ ID NO: 137728 - RNA, 22 nt, Human
ccuugcuccaugacgcuaaagg

SEQ ID NO: 137729 - RNA, 23 nt, Human
cggcuggaacaaggaggggcugg

SEQ ID NO: 137730 - RNA, 20 nt, Human
cuccaugacgcuaaaggcca

SEQ ID NO: 137731 - RNA, 20 nt, Human
gacgcuaaaggccacucacu

SEQ ID NO: 137732 - RNA, 23 nt, Human
gagacacaccucaaccaacgaag

SEQ ID NO: 137733 - RNA, 19 nt, Human
gcccaaugagguaaacagc

SEQ ID NO: 137734 - RNA, 18 nt, Human
ggagauggggaggggcag

SEQ ID NO: 137735 - RNA, 21 nt, Human
gggcauggagauggggagggg

SEQ ID NO: 137736 - RNA, 21 nt, Human
uaaaacaaguucuaagaacca

SEQ ID NO: 137737 - RNA, 21 nt, Human
uaagaacacauauggauaauc

SEQ ID NO: 137738 - RNA, 22 nt, Human
uacaacaucccaugacagugag

SEQ ID NO: 137739 - RNA, 21 nt, Human
ucagaggcccccaacucuggu

SEQ ID NO: 137740 - RNA, 22 nt, Human
uccagcaguuaaaaauuaagaa

SEQ ID NO: 137741 - RNA, 27 nt, Human
uccauggugagaacugaaccggggucc

SEQ ID NO: 137742 - RNA, 21 nt, Human
ucccagacccaccuugcuccc

SEQ ID NO: 137743 - RNA, 21 nt, Human
ucuuuccagagagccuugcga

SEQ ID NO: 137744 - RNA, 23 nt, Human
ugaagaaaaagcagucgcacgaa

SEQ ID NO: 137745 - RNA, 19 nt, Human
ugaggaggauucuuauaca

SEQ ID NO: 137746 - RNA, 19 nt, Human
ugagguaaacagcagacuc

SEQ ID NO: 137747 - RNA, 18 nt, Human
uggagauggggaggggca

SEQ ID NO: 137748 - RNA, 22 nt, Human
uguguguguuuuaacacuucca

SEQ ID NO: 137749 - RNA, 24 nt, Human
uuaaaaccagcucuugugguacac

SEQ ID NO: 137750 - RNA, 23 nt, Human
uucccuggagggguugaacuuca

SEQ ID NO: 137751 - RNA, 20 nt, Human
uuggagacacaccucaacca

SEQ ID NO: 137752 - RNA, 20 nt, Human
uuuggcacaaaaagaaagaa

SEQ ID NO: 137753 - RNA, 19 nt, Human
aaguagggaagggauggcu

SEQ ID NO: 137754 - RNA, 24 nt, Human
acucucccaucccucugguccccu

SEQ ID NO: 137755 - RNA, 21 nt, Human
aguagggaagggauggcuuug

SEQ ID NO: 137756 - RNA, 19 nt, Human
caaagaacaaugcaggagu

SEQ ID NO: 137757 - RNA, 23 nt, Human
cagcauggccccucccacccucu

SEQ ID NO: 137758 - RNA, 23 nt, Human
caugcaccacuuuccacagaccu

SEQ ID NO: 137759 - RNA, 19 nt, Human
cauggccccucccacccuc

SEQ ID NO: 137760 - RNA, 20 nt, Human
ccccauggucccccuuagcc

SEQ ID NO: 137761 - RNA, 24 nt, Human
cccucaaacugcacccauucugac

SEQ ID NO: 137762 - RNA, 21 nt, Human
cccucuggcuucugcugguuc

SEQ ID NO: 137763 - RNA, 19 nt, Human
cucagccuugccguccuuc

SEQ ID NO: 137764 - RNA, 20 nt, Human
cucccacccucuggcuucug

SEQ ID NO: 137765 - RNA, 18 nt, Human
cucccaucccucuggucc

SEQ ID NO: 137766 - RNA, 20 nt, Human
cucuggcuucugcugguucu

SEQ ID NO: 137767 - RNA, 23 nt, Human
cuggucccacagccgucccuuca

SEQ ID NO: 137768 - RNA, 18 nt, Human
cuggucucacacagcaug

SEQ ID NO: 137769 - RNA, 21 nt, Human
gaggccuccacacaggccccu

SEQ ID NO: 137770 - RNA, 21 nt, Human
ggaagggauggcuuuggggga

SEQ ID NO: 137771 - RNA, 22 nt, Human
gggaagggauggcuuuggggga

SEQ ID NO: 137772 - RNA, 24 nt, Human
uaaccaucuucuuugaucccuagu

SEQ ID NO: 137773 - RNA, 24 nt, Human
uccacagaccuggucccacagccg

SEQ ID NO: 137774 - RNA, 21 nt, Human
ucccucugguccccuggucuc

SEQ ID NO: 137775 - RNA, 18 nt, Human
uccucagcccugccaucu

SEQ ID NO: 137776 - RNA, 26 nt, Human
uccucagcccugccaucugccccacu

SEQ ID NO: 137777 - RNA, 20 nt, Human
uccuucccuugacucuccca

SEQ ID NO: 137778 - RNA, 19 nt, Human
ucucccaucccucuggucc

SEQ ID NO: 137779 - RNA, 25 nt, Human
ugacucucccaucccucuggucccc

SEQ ID NO: 137780 - RNA, 23 nt, Human
ugcaggaguaaggauccaggcac

SEQ ID NO: 137781 - RNA, 19 nt, Human
uggcaaagaacaaugcagg

SEQ ID NO: 137782 - RNA, 20 nt, Human
uggcaaagaacaaugcagga

SEQ ID NO: 137783 - RNA, 25 nt, Human
uggcaaagaacaaugcaggaguaag

SEQ ID NO: 137784 - RNA, 21 nt, Human
ugguccccuggucucacacag

SEQ ID NO: 137785 - RNA, 22 nt, Human
uguccuucccuugacucuccca

SEQ ID NO: 137786 - RNA, 24 nt, Human
uucuuaggacuuccugggauuguc

SEQ ID NO: 137787 - RNA, 21 nt, Human
uuuaaugagaauuuuaaaauu

SEQ ID NO: 137788 - RNA, 20 nt, Human
uuuuuuuuuuuuuugacuuu

SEQ ID NO: 137789 - RNA, 24 nt, Human
uuuuuuuuuuuuuuuuuugacuuu

SEQ ID NO: 137790 - RNA, 21 nt, Human
uuuuuuuuuuuuuuuuuuugg

SEQ ID NO: 137791 - RNA, 20 nt, Human
aaagcuccccaacuuccacc

SEQ ID NO: 137792 - RNA, 21 nt, Human
aaagcuccccaacuuccaccu

SEQ ID NO: 137793 - RNA, 22 nt, Human
agcuaugacgucauggcaggca

SEQ ID NO: 137794 - RNA, 19 nt, Human
caaagcuccccaacuucca

SEQ ID NO: 137795 - RNA, 22 nt, Human
cagagauaugacugccucccuc

SEQ ID NO: 137796 - RNA, 19 nt, Human
ccccaacuuccaccuccgc

SEQ ID NO: 137797 - RNA, 24 nt, Human
cucaaagcuccccaacuuccaccu

SEQ ID NO: 137798 - RNA, 25 nt, Human
cucaaagcuccccaacuuccaccuc

SEQ ID NO: 137799 - RNA, 21 nt, Human
uccccaacuuccaccuccgca

SEQ ID NO: 137800 - RNA, 21 nt, Human
uggcaggcacgccagaggccg

SEQ ID NO: 137801 - RNA, 18 nt, Human
caaguucaguccugccac

SEQ ID NO: 137802 - RNA, 23 nt, Human
cagcuacagaacagccaccuccu

SEQ ID NO: 137803 - RNA, 24 nt, Human
cauccugccccccagguaagccca

SEQ ID NO: 137804 - RNA, 24 nt, Human
ccacccacggagcucuccagcuac

SEQ ID NO: 137805 - RNA, 24 nt, Human
cccaagucccagggagacagaccc

SEQ ID NO: 137806 - RNA, 24 nt, Human
cccacggagcucuccagcuacaga

SEQ ID NO: 137807 - RNA, 24 nt, Human
cccagggagacagacccgccuccu

SEQ ID NO: 137808 - RNA, 28 nt, Human
cccccagguaagcccaggcguccucuca

SEQ ID NO: 137809 - RNA, 23 nt, Human
cggcucagccacccaagucccag

SEQ ID NO: 137810 - RNA, 21 nt, Human
cgggacagggucccgaguacc

SEQ ID NO: 137811 - RNA, 23 nt, Human
cucugugcuggccuggcuggccc

SEQ ID NO: 137812 - RNA, 24 nt, Human
cugguccuugcaugugggcagcag

SEQ ID NO: 137813 - RNA, 20 nt, Human
cuggugccucugugcuggcc

SEQ ID NO: 137814 - RNA, 21 nt, Human
cuggugccucugugcuggccu

SEQ ID NO: 137815 - RNA, 21 nt, Human
cugugugcacugcugcccugg

SEQ ID NO: 137816 - RNA, 25 nt, Human
cuguguguguguccugaacuguccc

SEQ ID NO: 137817 - RNA, 23 nt, Human
gacagacccgccuccugccuccc

SEQ ID NO: 137818 - RNA, 21 nt, Human
gaccugugugcacugcugccc

SEQ ID NO: 137819 - RNA, 22 nt, Human
gggcuccuggcaucuggagucc

SEQ ID NO: 137820 - RNA, 18 nt, Human
ggggacucuggucuccca

SEQ ID NO: 137821 - RNA, 21 nt, Human
gugggcagcagggcuccuggc

SEQ ID NO: 137822 - RNA, 18 nt, Human
ucccgaguaccucggcuc

SEQ ID NO: 137823 - RNA, 20 nt, Human
ucucaggagaugcugguccu

SEQ ID NO: 137824 - RNA, 23 nt, Human
ugcaugugggcagcagggcuccu

SEQ ID NO: 137825 - RNA, 19 nt, Human
ugcccuggugccucugugc

SEQ ID NO: 137826 - RNA, 22 nt, Human
ugcccuggugccucugugcugg

SEQ ID NO: 137827 - RNA, 22 nt, Human
uggaguccugggaugggcgggu

SEQ ID NO: 137828 - RNA, 20 nt, Human
ugggaugggcgggucuuccc

SEQ ID NO: 137829 - RNA, 27 nt, Human
ugggguccccggggaccugugugcacu

SEQ ID NO: 137830 - RNA, 25 nt, Human
uguccugaacuguccccaggcaucc

SEQ ID NO: 137831 - RNA, 21 nt, Human
uuggggguuguuucugguguu

SEQ ID NO: 137832 - RNA, 18 nt, Human
aaacauggagcgaaggca

SEQ ID NO: 137833 - RNA, 18 nt, Human
aacccaaugccccgggga

SEQ ID NO: 137834 - RNA, 21 nt, Human
aagaacgcggagagcgcaggc

SEQ ID NO: 137835 - RNA, 19 nt, Human
aagggcugcuagcgcagcc

SEQ ID NO: 137836 - RNA, 18 nt, Human
acagcgcuggaagaacgc

SEQ ID NO: 137837 - RNA, 25 nt, Human
agacaccaagaggauaaaccguggg

SEQ ID NO: 137838 - RNA, 21 nt, Human
agacagcgcuggaagaacgcg

SEQ ID NO: 137839 - RNA, 22 nt, Human
agcagugaguggaggguccugg

SEQ ID NO: 137840 - RNA, 23 nt, Human
agccccuuggcugaaaccaagaa

SEQ ID NO: 137841 - RNA, 22 nt, Human
aggcaaugacaagggccuuugc

SEQ ID NO: 137842 - RNA, 18 nt, Human
aggcaggacccggauugc

SEQ ID NO: 137843 - RNA, 22 nt, Human
agggccgucucggcgcccugcu

SEQ ID NO: 137844 - RNA, 21 nt, Human
aguuggaaggcaggacccgga

SEQ ID NO: 137845 - RNA, 19 nt, Human
auggagcgaaggcaaugac

SEQ ID NO: 137846 - RNA, 21 nt, Human
auggucuuggggaucucaaag

SEQ ID NO: 137847 - RNA, 18 nt, Human
auguggcagucaccaugg

SEQ ID NO: 137848 - RNA, 25 nt, Human
caaccauauucauguuugcguuuuc

SEQ ID NO: 137849 - RNA, 20 nt, Human
caagaggauaaaccguggca

SEQ ID NO: 137850 - RNA, 25 nt, Human
caaggccaccuucuuggccugguac

SEQ ID NO: 137851 - RNA, 24 nt, Human
cacacucuccugagaggggaugac

SEQ ID NO: 137852 - RNA, 22 nt, Human
ccaaaaacauggagcgaaggca

SEQ ID NO: 137853 - RNA, 20 nt, Human
ccccaaaaacauggagcgaa

SEQ ID NO: 137854 - RNA, 19 nt, Human
ccccagccuguucagugcc

SEQ ID NO: 137855 - RNA, 25 nt, Human
ccccagccuguucagugccugugcc

SEQ ID NO: 137856 - RNA, 26 nt, Human
ccccagugauuccuccaggccccugc

SEQ ID NO: 137857 - RNA, 20 nt, Human
cccugcuccgcugccccgga

SEQ ID NO: 137858 - RNA, 23 nt, Human
cccuuggcugaaaccaagaaggc

SEQ ID NO: 137859 - RNA, 21 nt, Human
ccgaccucugccagggccguc

SEQ ID NO: 137860 - RNA, 24 nt, Human
ccugagaggggaugacuuugucag

SEQ ID NO: 137861 - RNA, 18 nt, Human
ccugcuccgcugccccgg

SEQ ID NO: 137862 - RNA, 21 nt, Human
ccugggcuuguuggauccucc

SEQ ID NO: 137863 - RNA, 19 nt, Human
cgaggggcccgaccucugc

SEQ ID NO: 137864 - RNA, 18 nt, Human
cucaagaauugauaguug

SEQ ID NO: 137865 - RNA, 24 nt, Human
cucuccaaccauauucauguuugc

SEQ ID NO: 137866 - RNA, 18 nt, Human
cugacgcuggggugcagc

SEQ ID NO: 137867 - RNA, 21 nt, Human
cuuucacucugcaaacugguc

SEQ ID NO: 137868 - RNA, 24 nt, Human
gaggguucuucaggaucucagggg

SEQ ID NO: 137869 - RNA, 19 nt, Human
gauccuccagauggucuug

SEQ ID NO: 137870 - RNA, 20 nt, Human
gauccuccagauggucuugg

SEQ ID NO: 137871 - RNA, 25 nt, Human
gaugacggaggcugccccuagagga

SEQ ID NO: 137872 - RNA, 20 nt, Human
gccccggggacagaaaccag

SEQ ID NO: 137873 - RNA, 24 nt, Human
gcgggcucuuccaaugcggagaaa

SEQ ID NO: 137874 - RNA, 26 nt, Human
gcggggaucgccugccuggcccaggg

SEQ ID NO: 137875 - RNA, 24 nt, Human
ggaagcggggaucgccugccuggc

SEQ ID NO: 137876 - RNA, 25 nt, Human
ggacagaaaccagacaccaagagga

SEQ ID NO: 137877 - RNA, 21 nt, Human
gggaucucaaaguuguaguug

SEQ ID NO: 137878 - RNA, 21 nt, Human
ggugcagcugcuggaaugaag

SEQ ID NO: 137879 - RNA, 25 nt, Human
guaguuggaaggcaggacccggauu

SEQ ID NO: 137880 - RNA, 19 nt, Human
gucucuuaacugguucugg

SEQ ID NO: 137881 - RNA, 22 nt, Human
gugagggugauggcuccgggaa

SEQ ID NO: 137882 - RNA, 19 nt, Human
uaaaaagacagcgcuggaa

SEQ ID NO: 137883 - RNA, 24 nt, Human
uaaaaagacagcgcuggaagaacg

SEQ ID NO: 137884 - RNA, 18 nt, Human
uaacugguucuggugagg

SEQ ID NO: 137885 - RNA, 23 nt, Human
uaggagcagagacauuucuugau

SEQ ID NO: 137886 - RNA, 22 nt, Human
ucaguacaggcagggcccuuau

SEQ ID NO: 137887 - RNA, 19 nt, Human
ucagugccugugccaccau

SEQ ID NO: 137888 - RNA, 20 nt, Human
ucaguguccccaaaaacaug

SEQ ID NO: 137889 - RNA, 23 nt, Human
uccauuaaggccuugugcucccc

SEQ ID NO: 137890 - RNA, 19 nt, Human
uccccaaaaacauggagcg

SEQ ID NO: 137891 - RNA, 18 nt, Human
ucucaggggggaucugau

SEQ ID NO: 137892 - RNA, 18 nt, Human
ucuuaacugguucuggug

SEQ ID NO: 137893 - RNA, 19 nt, Human
ugaaaccaagaaggccguc

SEQ ID NO: 137894 - RNA, 24 nt, Human
ugaacccaaugccccggggacaga

SEQ ID NO: 137895 - RNA, 24 nt, Human
ugagaggggaugacuuugucagug

SEQ ID NO: 137896 - RNA, 24 nt, Human
ugagggugauggcuccgggaaauu

SEQ ID NO: 137897 - RNA, 19 nt, Human
ugccccggauacgaccagc

SEQ ID NO: 137898 - RNA, 18 nt, Human
ugccccggggacagaaac

SEQ ID NO: 137899 - RNA, 18 nt, Human
ugccugugccaccauccc

SEQ ID NO: 137900 - RNA, 25 nt, Human
ugcuccgcugccccggauacgacca

SEQ ID NO: 137901 - RNA, 20 nt, Human
ugcuggaaugaaguggccac

SEQ ID NO: 137902 - RNA, 19 nt, Human
uggaaggcaggacccggau

SEQ ID NO: 137903 - RNA, 19 nt, Human
uggcccagggcacacacaa

SEQ ID NO: 137904 - RNA, 21 nt, Human
uggggugcagcugcuggaaug

SEQ ID NO: 137905 - RNA, 20 nt, Human
ugugcuccccuuuucuucag

SEQ ID NO: 137906 - RNA, 20 nt, Human
uguggcagucaccauggugc

SEQ ID NO: 137907 - RNA, 18 nt, Human
uuccuccaggccccugca

SEQ ID NO: 137908 - RNA, 19 nt, Human
uuggaaggcaggacccgga

SEQ ID NO: 137909 - RNA, 22 nt, Human
aacaaagaauuaucuggcccca

SEQ ID NO: 137910 - RNA, 20 nt, Human
acagccccacaacaaagaau

SEQ ID NO: 137911 - RNA, 26 nt, Human
accaacacuguccaaccaauagaacu

SEQ ID NO: 137912 - RNA, 22 nt, Human
accagacagccccacaacaaag

SEQ ID NO: 137913 - RNA, 21 nt, Human
acuggacagugcaggucuagc

SEQ ID NO: 137914 - RNA, 21 nt, Human
agacagccccacaacaaagaa

SEQ ID NO: 137915 - RNA, 18 nt, Human
aggcacagcuuggguggu

SEQ ID NO: 137916 - RNA, 19 nt, Human
agggggaugggagguuggu

SEQ ID NO: 137917 - RNA, 24 nt, Human
aggucuggagauauuuuugguugu

SEQ ID NO: 137918 - RNA, 19 nt, Human
agugguucucaauugaggg

SEQ ID NO: 137919 - RNA, 20 nt, Human
caacacuguccaaccaauag

SEQ ID NO: 137920 - RNA, 20 nt, Human
cacuguccaaccaauagaac

SEQ ID NO: 137921 - RNA, 21 nt, Human
cagccugggaacugggauugg

SEQ ID NO: 137922 - RNA, 21 nt, Human
cagcggggaccucccugggac

SEQ ID NO: 137923 - RNA, 24 nt, Human
cagcggggaccucccugggacagc

SEQ ID NO: 137924 - RNA, 18 nt, Human
cagggggucaaaaucgcc

SEQ ID NO: 137925 - RNA, 24 nt, Human
ccaaccaauagaacuuucugccau

SEQ ID NO: 137926 - RNA, 25 nt, Human
ccacaacaaagaauuaucuggcccc

SEQ ID NO: 137927 - RNA, 22 nt, Human
ccacagauaacauuugccaagg

SEQ ID NO: 137928 - RNA, 25 nt, Human
ccagacagccccacaacaaagaauu

SEQ ID NO: 137929 - RNA, 22 nt, Human
ccugcucucccuccuuccaggg

SEQ ID NO: 137930 - RNA, 19 nt, Human
ccuuguggggguaggggga

SEQ ID NO: 137931 - RNA, 20 nt, Human
cuagagcagcccucaggggg

SEQ ID NO: 137932 - RNA, 19 nt, Human
cucccuccuuccagggucc

SEQ ID NO: 137933 - RNA, 21 nt, Human
cucucccuccuuccagggucc

SEQ ID NO: 137934 - RNA, 18 nt, Human
gacaaggacagacccuca

SEQ ID NO: 137935 - RNA, 22 nt, Human
gcacuaaagguccuagcagcca

SEQ ID NO: 137936 - RNA, 23 nt, Human
ggacagcuucggggccugagucc

SEQ ID NO: 137937 - RNA, 19 nt, Human
gguccagaggccucaggga

SEQ ID NO: 137938 - RNA, 18 nt, Human
gugcugagcuugugccag

SEQ ID NO: 137939 - RNA, 21 nt, Human
uaaguccaucuaugucuccag

SEQ ID NO: 137940 - RNA, 23 nt, Human
uacuggacagugcaggucuagcu

SEQ ID NO: 137941 - RNA, 22 nt, Human
uagcuagaccagugguucucaa

SEQ ID NO: 137942 - RNA, 22 nt, Human
ucagccggugaguauccccuuc

SEQ ID NO: 137943 - RNA, 20 nt, Human
ucucccugagaaauaagagu

SEQ ID NO: 137944 - RNA, 25 nt, Human
ucugccaugauggcauauccuguag

SEQ ID NO: 137945 - RNA, 18 nt, Human
ugccagugccaggacagg

SEQ ID NO: 137946 - RNA, 20 nt, Human
ugccugcucucccuccuucc

SEQ ID NO: 137947 - RNA, 19 nt, Human
uggcagggggaugggaggu

SEQ ID NO: 137948 - RNA, 22 nt, Human
uggcagggggaugggagguugg

SEQ ID NO: 137949 - RNA, 18 nt, Human
uggccaaagguccugggc

SEQ ID NO: 137950 - RNA, 18 nt, Human
ugggagguuggugcaggg

SEQ ID NO: 137951 - RNA, 24 nt, Human
ugggagguuggugcagggagcacu

SEQ ID NO: 137952 - RNA, 22 nt, Human
ugggcugcccucaggaagacag

SEQ ID NO: 137953 - RNA, 18 nt, Human
ugucaaguacgaguuuga

SEQ ID NO: 137954 - RNA, 18 nt, Human
uuugacaaggacagaccc

SEQ ID NO: 137955 - RNA, 18 nt, Human
uuugccaaggucuggaga

SEQ ID NO: 137956 - RNA, 21 nt, Human
aaagaagagaacaacauuuga

SEQ ID NO: 137957 - RNA, 19 nt, Human
aacaaagguaaccuuaagu

SEQ ID NO: 137958 - RNA, 23 nt, Human
aagacacucaaagaaaugaaaua

SEQ ID NO: 137959 - RNA, 21 nt, Human
aagguaaccuuaaguuucuug

SEQ ID NO: 137960 - RNA, 22 nt, Human
acaucacugcccacaucuugcc

SEQ ID NO: 137961 - RNA, 19 nt, Human
agaaggagcgcaggcagaa

SEQ ID NO: 137962 - RNA, 24 nt, Human
agacacucaaagaaaugaaauaag

SEQ ID NO: 137963 - RNA, 23 nt, Human
agugagcguucagagaaggagcg

SEQ ID NO: 137964 - RNA, 19 nt, Human
augcuuggacuuggguucc

SEQ ID NO: 137965 - RNA, 18 nt, Human
caaagccuccauaaaaac

SEQ ID NO: 137966 - RNA, 23 nt, Human
cacaucucaguuucaagcugccu

SEQ ID NO: 137967 - RNA, 18 nt, Human
cagcucuucuccgagggg

SEQ ID NO: 137968 - RNA, 24 nt, Human
caucccuuuaaagaagagaacaac

SEQ ID NO: 137969 - RNA, 18 nt, Human
ccaguuagaaaaagauua

SEQ ID NO: 137970 - RNA, 23 nt, Human
ccaguuagaaaaagauuaaaauc

SEQ ID NO: 137971 - RNA, 21 nt, Human
cccugcuaucuucucucccua

SEQ ID NO: 137972 - RNA, 22 nt, Human
ccuauagccauaacuggcaccu

SEQ ID NO: 137973 - RNA, 20 nt, Human
ccugcaccgcugcuccgggc

SEQ ID NO: 137974 - RNA, 23 nt, Human
ccugggggccugcguugcuggca

SEQ ID NO: 137975 - RNA, 31 nt, Human
cuauagccauaacuggcaccugggggccugg

SEQ ID NO: 137976 - RNA, 19 nt, Human
cugcaccgcugcuccgggc

SEQ ID NO: 137977 - RNA, 21 nt, Human
cugucccugcccuagugacau

SEQ ID NO: 137978 - RNA, 18 nt, Human
cugugguuuuacuuagaa

SEQ ID NO: 137979 - RNA, 18 nt, Human
gaacaaagguaaccuuaa

SEQ ID NO: 137980 - RNA, 19 nt, Human
gagacuguuugaauagucu

SEQ ID NO: 137981 - RNA, 20 nt, Human
gccugcucguguugguaugc

SEQ ID NO: 137982 - RNA, 20 nt, Human
gcugugaacagcucuucucc

SEQ ID NO: 137983 - RNA, 24 nt, Human
guccaaggaaguuaaaauauucuu

SEQ ID NO: 137984 - RNA, 18 nt, Human
guuucaagcugccucuuu

SEQ ID NO: 137985 - RNA, 19 nt, Human
uaaaacccgaccggauaau

SEQ ID NO: 137986 - RNA, 18 nt, Human
uaaaaugaguccaaggaa

SEQ ID NO: 137987 - RNA, 21 nt, Human
uaaaaugaguccaaggaaguu

SEQ ID NO: 137988 - RNA, 25 nt, Human
uaaagaagagaacaacauuugaacc

SEQ ID NO: 137989 - RNA, 18 nt, Human
ucucucccuaaucccucu

SEQ ID NO: 137990 - RNA, 21 nt, Human
ucuguugugaagacagaaguu

SEQ ID NO: 137991 - RNA, 22 nt, Human
ugaaauuugggaacaaagguaa

SEQ ID NO: 137992 - RNA, 24 nt, Human
ugacaguagccugcucguguuggu

SEQ ID NO: 137993 - RNA, 19 nt, Human
ugccagucuggcugugaac

SEQ ID NO: 137994 - RNA, 27 nt, Human
uggguucccagccaugcccugcuaucu

SEQ ID NO: 137995 - RNA, 22 nt, Human
uguagaaugggaauaauaauac

SEQ ID NO: 137996 - RNA, 24 nt, Human
ugugauacaaauauuuucaucuuu

SEQ ID NO: 137997 - RNA, 19 nt, Human
uuaaagaagagaacaacau

SEQ ID NO: 137998 - RNA, 20 nt, Human
uuaaagaagagaacaacauu

SEQ ID NO: 137999 - RNA, 22 nt, Human
uuagaaaaagauuaaaauccug

SEQ ID NO: 138000 - RNA, 20 nt, Human
uugcauauuugauuuccuga

SEQ ID NO: 138001 - RNA, 21 nt, Human
uuuccugagacuguuugaaua

SEQ ID NO: 138002 - RNA, 19 nt, Human
uuuggagucuuuucaacug

SEQ ID NO: 138003 - RNA, 23 nt, Human
aaaaaaaaaaaaaggcggugggg

SEQ ID NO: 138004 - RNA, 20 nt, Human
aaacaaccccaugacggaga

SEQ ID NO: 138005 - RNA, 19 nt, Human
aaagagcuugauacgguac

SEQ ID NO: 138006 - RNA, 20 nt, Human
aaaggaaagggaaacaaggc

SEQ ID NO: 138007 - RNA, 19 nt, Human
aaggagcuuguuucccaag

SEQ ID NO: 138008 - RNA, 24 nt, Human
aaguagcaagcccauauaugaaca

SEQ ID NO: 138009 - RNA, 24 nt, Human
acagcaaaacaaccccaugacgga

SEQ ID NO: 138010 - RNA, 19 nt, Human
accccggggaaggagcuug

SEQ ID NO: 138011 - RNA, 20 nt, Human
accuugaggagggagcaguu

SEQ ID NO: 138012 - RNA, 20 nt, Human
acggagacaguggagcauca

SEQ ID NO: 138013 - RNA, 20 nt, Human
acugcgacgugagacagggu

SEQ ID NO: 138014 - RNA, 19 nt, Human
agacagggugugauguccc

SEQ ID NO: 138015 - RNA, 22 nt, Human
agacagggugugaugucccuaa

SEQ ID NO: 138016 - RNA, 25 nt, Human
aggaaguagcaagcccauauaugaa

SEQ ID NO: 138017 - RNA, 18 nt, Human
aggcagcagcagcagcag

SEQ ID NO: 138018 - RNA, 21 nt, Human
aggcccaaccccaaacagcaa

SEQ ID NO: 138019 - RNA, 26 nt, Human
aggcccaaccccaaacagcaaaacaa

SEQ ID NO: 138020 - RNA, 20 nt, Human
auagacagugcacaccuaca

SEQ ID NO: 138021 - RNA, 22 nt, Human
auuaaaaaaaaaaaaaggcggu

SEQ ID NO: 138022 - RNA, 21 nt, Human
caccuacagccaagcccuagc

SEQ ID NO: 138023 - RNA, 24 nt, Human
cagcaaaacaaccccaugacggag

SEQ ID NO: 138024 - RNA, 23 nt, Human
cagcagcagcagcagcaggcaag

SEQ ID NO: 138025 - RNA, 25 nt, Human
cagcagcagcagcaggcaagcccag

SEQ ID NO: 138026 - RNA, 26 nt, Human
ccaaccccaaacagcaaaacaacccc

SEQ ID NO: 138027 - RNA, 20 nt, Human
ccagauuaaaaaaaaaaaaa

SEQ ID NO: 138028 - RNA, 22 nt, Human
cccaaccccaaacagcaaaaca

SEQ ID NO: 138029 - RNA, 24 nt, Human
cccaaccccaaacagcaaaacaac

SEQ ID NO: 138030 - RNA, 22 nt, Human
ccccaccccgcuccagauuaaa

SEQ ID NO: 138031 - RNA, 24 nt, Human
ccccaccccgcuccagauuaaaaa

SEQ ID NO: 138032 - RNA, 21 nt, Human
ccccgccccgccccgccccuc

SEQ ID NO: 138033 - RNA, 18 nt, Human
cccgccccgccccgcccc

SEQ ID NO: 138034 - RNA, 18 nt, Human
ccgcgcuccugcuggcug

SEQ ID NO: 138035 - RNA, 20 nt, Human
ccggccccgccccgccccgc

SEQ ID NO: 138036 - RNA, 21 nt, Human
ccugcuggcugucuuuggggc

SEQ ID NO: 138037 - RNA, 19 nt, Human
cgguaccaaggaggacaag

SEQ ID NO: 138038 - RNA, 18 nt, Human
cucgcguggggccugcgg

SEQ ID NO: 138039 - RNA, 20 nt, Human
cugaagacaaccuugaggag

SEQ ID NO: 138040 - RNA, 23 nt, Human
cugcggccaccauccuuugcucu

SEQ ID NO: 138041 - RNA, 22 nt, Human
gaaacaaggcccaaccccaaac

SEQ ID NO: 138042 - RNA, 18 nt, Human
gagacacacaugcuaugg

SEQ ID NO: 138043 - RNA, 23 nt, Human
gaggcagcagcagcagcagcagg

SEQ ID NO: 138044 - RNA, 20 nt, Human
gaggggccguggcgugccgg

SEQ ID NO: 138045 - RNA, 24 nt, Human
gcccauauaugaacacgcacugcu

SEQ ID NO: 138046 - RNA, 18 nt, Human
gcgcaaagucuacacgug

SEQ ID NO: 138047 - RNA, 20 nt, Human
ggcccaaccccaaacagcaa

SEQ ID NO: 138048 - RNA, 20 nt, Human
gucugaagacaaccuugagg

SEQ ID NO: 138049 - RNA, 20 nt, Human
uaaauagacagugcacaccc

SEQ ID NO: 138050 - RNA, 21 nt, Human
uaaauagacagugcacaccua

SEQ ID NO: 138051 - RNA, 18 nt, Human
uaacugcugcguccaugg

SEQ ID NO: 138052 - RNA, 19 nt, Human
uaccaaggaggacaaggau

SEQ ID NO: 138053 - RNA, 20 nt, Human
uaccaaggaggacaaggaug

SEQ ID NO: 138054 - RNA, 20 nt, Human
uagaaagagccacguuugug

SEQ ID NO: 138055 - RNA, 23 nt, Human
uagacagugcacaccuacagcca

SEQ ID NO: 138056 - RNA, 21 nt, Human
uagguauuucuuuuaaugggu

SEQ ID NO: 138057 - RNA, 23 nt, Human
uauuuugcuuucucuccgguucc

SEQ ID NO: 138058 - RNA, 25 nt, Human
uauuuugcuuucucuccgguuccca

SEQ ID NO: 138059 - RNA, 22 nt, Human
uccagauuaaaaaaaaaaaaag

SEQ ID NO: 138060 - RNA, 23 nt, Human
ucccaagcaaaacugccuuccgc

SEQ ID NO: 138061 - RNA, 24 nt, Human
ucccacuccccaccccgcuccaga

SEQ ID NO: 138062 - RNA, 24 nt, Human
ucccuaacgggaacacagaggcug

SEQ ID NO: 138063 - RNA, 22 nt, Human
uccgguucccacuccccacccc

SEQ ID NO: 138064 - RNA, 21 nt, Human
uccugugggcucgcguggggc

SEQ ID NO: 138065 - RNA, 19 nt, Human
ucuccgguucccacucccc

SEQ ID NO: 138066 - RNA, 22 nt, Human
ucuccgguucccacuccccacc

SEQ ID NO: 138067 - RNA, 24 nt, Human
ugaagacaaccuugaggagggagc

SEQ ID NO: 138068 - RNA, 24 nt, Human
ugagugaugaccccggggaaggag

SEQ ID NO: 138069 - RNA, 31 nt, Human
ugcuucuucaucaagcgcaaagucuacacgg

SEQ ID NO: 138070 - RNA, 23 nt, Human
uggaggccgugagugaugacccc

SEQ ID NO: 138071 - RNA, 20 nt, Human
uggcacugcgacgugagaca

SEQ ID NO: 138072 - RNA, 22 nt, Human
ugggaaagagcuugauacggua

SEQ ID NO: 138073 - RNA, 23 nt, Human
ugggcgggucucaugcuuccgcu

SEQ ID NO: 138074 - RNA, 21 nt, Human
ugucuucccccucaguguuua

SEQ ID NO: 138075 - RNA, 23 nt, Human
ugugggcucgcguggggccugcg

SEQ ID NO: 138076 - RNA, 23 nt, Human
uugcucuguuccuugggggaggg

SEQ ID NO: 138077 - RNA, 24 nt, Human
uugcucuguuccuugggggagggg

SEQ ID NO: 138078 - RNA, 21 nt, Human
uuguagccccucaccauguug

SEQ ID NO: 138079 - RNA, 21 nt, Human
cacccagauuugguauguggc

SEQ ID NO: 138080 - RNA, 20 nt, Human
ccccuuuccuuucacccaga

SEQ ID NO: 138081 - RNA, 19 nt, Human
aaauauucucccuauccuc

SEQ ID NO: 138082 - RNA, 25 nt, Human
aacacuaaaacagagaguagucaaa

SEQ ID NO: 138083 - RNA, 18 nt, Human
aacagcuugccuaaccca

SEQ ID NO: 138084 - RNA, 21 nt, Human
acauaaacacuaaaacagaga

SEQ ID NO: 138085 - RNA, 22 nt, Human
accagucagagcccguaugugc

SEQ ID NO: 138086 - RNA, 18 nt, Human
agucagagcccguaugug

SEQ ID NO: 138087 - RNA, 21 nt, Human
agugaacauccaauuaacugc

SEQ ID NO: 138088 - RNA, 19 nt, Human
agugacauuugggguccag

SEQ ID NO: 138089 - RNA, 21 nt, Human
aguugcuauaaucaugaaggu

SEQ ID NO: 138090 - RNA, 24 nt, Human
auaagcaauuucagcgaaggggau

SEQ ID NO: 138091 - RNA, 23 nt, Human
auugaagaugccaugaagaggag

SEQ ID NO: 138092 - RNA, 18 nt, Human
cagaccugagacaguguu

SEQ ID NO: 138093 - RNA, 18 nt, Human
cagcauagggcaauuugg

SEQ ID NO: 138094 - RNA, 18 nt, Human
cauccaauuaacugccac

SEQ ID NO: 138095 - RNA, 22 nt, Human
cauuggcaccaccuuccuuugc

SEQ ID NO: 138096 - RNA, 19 nt, Human
ccucagaaaagaauuauuc

SEQ ID NO: 138097 - RNA, 18 nt, Human
cuauccaacaccaaaaau

SEQ ID NO: 138098 - RNA, 21 nt, Human
cugaacagcuugccuaaccca

SEQ ID NO: 138099 - RNA, 18 nt, Human
gaaucugaacagcuugcc

SEQ ID NO: 138100 - RNA, 23 nt, Human
gcaaaaaaaggaaucugaacagc

SEQ ID NO: 138101 - RNA, 21 nt, Human
gcuauaaucaugaaggugacu

SEQ ID NO: 138102 - RNA, 21 nt, Human
gcuuuaugauauuuuauuuga

SEQ ID NO: 138103 - RNA, 23 nt, Human
guugcuauaaucaugaaggugac

SEQ ID NO: 138104 - RNA, 20 nt, Human
uaaaagaggaugaguuugua

SEQ ID NO: 138105 - RNA, 20 nt, Human
uaauaauaacaaaaaauaua

SEQ ID NO: 138106 - RNA, 23 nt, Human
uaauauauauuaucaacauuaua

SEQ ID NO: 138107 - RNA, 23 nt, Human
uagaaacagcauuaaaauuaaag

SEQ ID NO: 138108 - RNA, 24 nt, Human
uagaaacagcauuaaaauuaaagg

SEQ ID NO: 138109 - RNA, 21 nt, Human
uaugugcacagcaaaagagug

SEQ ID NO: 138110 - RNA, 25 nt, Human
uauuaucaacauuauauuuuucauu

SEQ ID NO: 138111 - RNA, 20 nt, Human
uauucucccuauccucuauc

SEQ ID NO: 138112 - RNA, 21 nt, Human
ucaaacauuaguugcuauaau

SEQ ID NO: 138113 - RNA, 18 nt, Human
ucaauuuuaggcuuucuu

SEQ ID NO: 138114 - RNA, 22 nt, Human
ucuaaaagugcauaaugaaaca

SEQ ID NO: 138115 - RNA, 22 nt, Human
ucuacaaacucaauuuuaggcu

SEQ ID NO: 138116 - RNA, 20 nt, Human
ucuuagaaacagcauuaaaa

SEQ ID NO: 138117 - RNA, 21 nt, Human
ugaaaguucacagcaacuguu

SEQ ID NO: 138118 - RNA, 19 nt, Human
ugaauggucauugacauga

SEQ ID NO: 138119 - RNA, 19 nt, Human
ugacaugaaaguucacagc

SEQ ID NO: 138120 - RNA, 24 nt, Human
ugccauagcaaauaauuuuuugac

SEQ ID NO: 138121 - RNA, 24 nt, Human
uggaaagagcugaacacaaggauc

SEQ ID NO: 138122 - RNA, 20 nt, Human
uggcuguaacgccauuggca

SEQ ID NO: 138123 - RNA, 21 nt, Human
uguacacccaucucacgcaug

SEQ ID NO: 138124 - RNA, 19 nt, Human
uuaaaaccagucagagccc

SEQ ID NO: 138125 - RNA, 20 nt, Human
uuaaugauaaaauguuuccu

SEQ ID NO: 138126 - RNA, 22 nt, Human
uuacugauuaugaaaauagaga

SEQ ID NO: 138127 - RNA, 22 nt, Human
uucuagcucuugaauuugucau

SEQ ID NO: 138128 - RNA, 21 nt, Human
uugacuuucuucauuuguacu

SEQ ID NO: 138129 - RNA, 22 nt, Human
uugcauacuuugagcuuuguuc

SEQ ID NO: 138130 - RNA, 19 nt, Human
uugcuauaaucaugaaggu

SEQ ID NO: 138131 - RNA, 18 nt, Human
uuuacacuuacaaaugua

SEQ ID NO: 138132 - RNA, 22 nt, Human
uuucuuagaaacagcauuaaaa

SEQ ID NO: 138133 - RNA, 20 nt, Human
uuuuaggcuuucuuauccug

SEQ ID NO: 138134 - RNA, 25 nt, Human
aaaaaagaaacuauuuaaacaagaa

SEQ ID NO: 138135 - RNA, 26 nt, Human
aaaaaagaaacuauuuaaacaagaaa

SEQ ID NO: 138136 - RNA, 22 nt, Human
aaaacacagugagaaagacagc

SEQ ID NO: 138137 - RNA, 23 nt, Human
aaguaucaucaaugaauuuccac

SEQ ID NO: 138138 - RNA, 25 nt, Human
agcaacaaaaacacagugagaaaga

SEQ ID NO: 138139 - RNA, 18 nt, Human
aggggcuggguugggcgg

SEQ ID NO: 138140 - RNA, 18 nt, Human
agugagaaagacagcaau

SEQ ID NO: 138141 - RNA, 25 nt, Human
augcagcaacaaaaacacagugaga

SEQ ID NO: 138142 - RNA, 22 nt, Human
caaaaacacagugagaaagaca

SEQ ID NO: 138143 - RNA, 18 nt, Human
cagcccccgagcucugcc

SEQ ID NO: 138144 - RNA, 19 nt, Human
cagcccccgagcucugccu

SEQ ID NO: 138145 - RNA, 21 nt, Human
cagccuccuuuccucugauuu

SEQ ID NO: 138146 - RNA, 20 nt, Human
cccccgagcucugccucagg

SEQ ID NO: 138147 - RNA, 21 nt, Human
cgcgggguccuacucggcccg

SEQ ID NO: 138148 - RNA, 19 nt, Human
gaaagaaaaucaaagaagc

SEQ ID NO: 138149 - RNA, 19 nt, Human
gaguugaauaaggccugcu

SEQ ID NO: 138150 - RNA, 23 nt, Human
gcgggccgggcgggcuuggggug

SEQ ID NO: 138151 - RNA, 18 nt, Human
ggcccgggcugcgcgcag

SEQ ID NO: 138152 - RNA, 19 nt, Human
gggccgggcgggcuugggg

SEQ ID NO: 138153 - RNA, 18 nt, Human
gggcugcgcgcaggggcu

SEQ ID NO: 138154 - RNA, 21 nt, Human
ggguugggcgggccgggcggg

SEQ ID NO: 138155 - RNA, 18 nt, Human
uaaaguaucaucaaugaa

SEQ ID NO: 138156 - RNA, 18 nt, Human
uacaagcaaagaugacau

SEQ ID NO: 138157 - RNA, 23 nt, Human
uaccuucaaucuuaugcagcaac

SEQ ID NO: 138158 - RNA, 19 nt, Human
uaugcagcaacaaaaacac

SEQ ID NO: 138159 - RNA, 22 nt, Human
ucaaucuuaugcagcaacaaaa

SEQ ID NO: 138160 - RNA, 18 nt, Human
ucaaugaauuuccacaca

SEQ ID NO: 138161 - RNA, 23 nt, Human
uccccaccgacagcccccgagcu

SEQ ID NO: 138162 - RNA, 21 nt, Human
ucuccauggguugacaauguu

SEQ ID NO: 138163 - RNA, 19 nt, Human
ugagaaagacagcaauugc

SEQ ID NO: 138164 - RNA, 18 nt, Human
ugggcgggccgggcgggc

SEQ ID NO: 138165 - RNA, 21 nt, Human
uggguugggcgggccgggcgg

SEQ ID NO: 138166 - RNA, 23 nt, Human
uggugaauuuuuucuaaaggauc

SEQ ID NO: 138167 - RNA, 31 nt, Human
uuggcugugaagggaauggcagccuccuuuu

SEQ ID NO: 138168 - RNA, 21 nt, Human
aaaaacccaaaaccccaacca

SEQ ID NO: 138169 - RNA, 22 nt, Human
aaaaacccaaaaccccaaccag

SEQ ID NO: 138170 - RNA, 23 nt, Human
aaaaccccaaccagauccccaaa

SEQ ID NO: 138171 - RNA, 24 nt, Human
aaacaacaacaacaaaaaacccaa

SEQ ID NO: 138172 - RNA, 25 nt, Human
aaacaacaacaacaaaaaacccaaa

SEQ ID NO: 138173 - RNA, 19 nt, Human
aaacaaccaaaaauuacca

SEQ ID NO: 138174 - RNA, 22 nt, Human
aaacaaccaaaacaaccaaaaa

SEQ ID NO: 138175 - RNA, 23 nt, Human
aaacaaccaaaacaaccaaaaau

SEQ ID NO: 138176 - RNA, 23 nt, Human
aaacaccgucuccgagacaaggg

SEQ ID NO: 138177 - RNA, 22 nt, Human
aaaggagagggaaggauggaga

SEQ ID NO: 138178 - RNA, 21 nt, Human
aacaaaaaacccaaaacccca

SEQ ID NO: 138179 - RNA, 22 nt, Human
aacaaaaaacccaaaaccccaa

SEQ ID NO: 138180 - RNA, 23 nt, Human
aacaaaaaacccaaaaccccaac

SEQ ID NO: 138181 - RNA, 20 nt, Human
aacaaauaaacaacaacaac

SEQ ID NO: 138182 - RNA, 26 nt, Human
aacaacaacaaaaaacccaaaacccc

SEQ ID NO: 138183 - RNA, 24 nt, Human
aacaaccaaaacaaccaaaaauua

SEQ ID NO: 138184 - RNA, 23 nt, Human
aacaugcuuacacagccugcaga

SEQ ID NO: 138185 - RNA, 21 nt, Human
aaccaaaaauuaccaugaccc

SEQ ID NO: 138186 - RNA, 23 nt, Human
aaccaaaaauuaccaugacccgg

SEQ ID NO: 138187 - RNA, 24 nt, Human
aaccacccggaaucagcuggguga

SEQ ID NO: 138188 - RNA, 20 nt, Human
aagagaagagaauccucaaa

SEQ ID NO: 138189 - RNA, 21 nt, Human
aagcaagccaacagguaaaca

SEQ ID NO: 138190 - RNA, 23 nt, Human
aagggugcaaccgcuucgcuggu

SEQ ID NO: 138191 - RNA, 23 nt, Human
aauaacaaauaaacaacaacaac

SEQ ID NO: 138192 - RNA, 28 nt, Human
aauaacaaauaaacaacaacaacaaaaa

SEQ ID NO: 138193 - RNA, 22 nt, Human
aaugcaacacaagucagcaagg

SEQ ID NO: 138194 - RNA, 18 nt, Human
aaugguaaaagagaagag

SEQ ID NO: 138195 - RNA, 25 nt, Human
aauucacuuuaucuucccucccccc

SEQ ID NO: 138196 - RNA, 24 nt, Human
acaaaaaacccaaaaccccaacca

SEQ ID NO: 138197 - RNA, 23 nt, Human
acaaagcaagccaacagguaaac

SEQ ID NO: 138198 - RNA, 19 nt, Human
acaacaaaaaacccaaaac

SEQ ID NO: 138199 - RNA, 22 nt, Human
acaacaacaaaaaacccaaaac

SEQ ID NO: 138200 - RNA, 23 nt, Human
acaacaacaaaaaacccaaaacc

SEQ ID NO: 138201 - RNA, 24 nt, Human
acaacaacaaaaaacccaaaaccc

SEQ ID NO: 138202 - RNA, 19 nt, Human
acaacaacaacaaaaaacc

SEQ ID NO: 138203 - RNA, 19 nt, Human
acacacaaagcaagccaac

SEQ ID NO: 138204 - RNA, 24 nt, Human
acacagccugcagaaaucgucagg

SEQ ID NO: 138205 - RNA, 18 nt, Human
acagacaucaccuguggu

SEQ ID NO: 138206 - RNA, 24 nt, Human
acagugguuacaaaaaaaaaagua

SEQ ID NO: 138207 - RNA, 24 nt, Human
accacauuuugcuuuauuaggcgu

SEQ ID NO: 138208 - RNA, 24 nt, Human
acccaaaaccccaaccagaucccc

SEQ ID NO: 138209 - RNA, 22 nt, Human
accgugacuuuagccagagagc

SEQ ID NO: 138210 - RNA, 26 nt, Human
accuguggucucuaagggggccaugu

SEQ ID NO: 138211 - RNA, 25 nt, Human
acgcuuuacaaaaagcagauuuggu

SEQ ID NO: 138212 - RNA, 22 nt, Human
agaaaaaggcagcucugggcaa

SEQ ID NO: 138213 - RNA, 23 nt, Human
agaaaagaaaaaggcagcucugg

SEQ ID NO: 138214 - RNA, 24 nt, Human
agaaaagaaaaaggcagcucuggg

SEQ ID NO: 138215 - RNA, 20 nt, Human
agacagacacgaaaauauuc

SEQ ID NO: 138216 - RNA, 22 nt, Human
agagaagagaauccucaaagga

SEQ ID NO: 138217 - RNA, 19 nt, Human
agagagacagacacgaaaa

SEQ ID NO: 138218 - RNA, 19 nt, Human
agagagagacagacacgaa

SEQ ID NO: 138219 - RNA, 27 nt, Human
agagagagagagagagagagagaagga

SEQ ID NO: 138220 - RNA, 20 nt, Human
agcaaaaucuaggccaauaa

SEQ ID NO: 138221 - RNA, 21 nt, Human
aggaaaaacaggaagacucaa

SEQ ID NO: 138222 - RNA, 21 nt, Human
aggaagaaagaagucucagaa

SEQ ID NO: 138223 - RNA, 18 nt, Human
aggcggacccaacgacca

SEQ ID NO: 138224 - RNA, 19 nt, Human
auaacgcaagccugccccu

SEQ ID NO: 138225 - RNA, 18 nt, Human
aucaagucacugcaguua

SEQ ID NO: 138226 - RNA, 25 nt, Human
aucuaggccaauaacgcaagccugc

SEQ ID NO: 138227 - RNA, 22 nt, Human
auugcuuaagagaaccuguaaa

SEQ ID NO: 138228 - RNA, 22 nt, Human
caaaaaacccaaaaccccaacc

SEQ ID NO: 138229 - RNA, 25 nt, Human
caaaaaacccaaaaccccaaccaga

SEQ ID NO: 138230 - RNA, 19 nt, Human
caaaacaaccaaaaauuac

SEQ ID NO: 138231 - RNA, 21 nt, Human
caaaaccccaaccagaucccc

SEQ ID NO: 138232 - RNA, 22 nt, Human
caaaaccccaaccagaucccca

SEQ ID NO: 138233 - RNA, 18 nt, Human
caacaaaaaacccaaaac

SEQ ID NO: 138234 - RNA, 21 nt, Human
caacaaaaaacccaaaacccc

SEQ ID NO: 138235 - RNA, 25 nt, Human
caacaacaaaaaacccaaaacccca

SEQ ID NO: 138236 - RNA, 26 nt, Human
caacaacaaaaaacccaaaaccccaa

SEQ ID NO: 138237 - RNA, 18 nt, Human
caacaacaacaaaaaacc

SEQ ID NO: 138238 - RNA, 22 nt, Human
caacaacaacaaaaaacccaaa

SEQ ID NO: 138239 - RNA, 19 nt, Human
caagugaauacuagagcug

SEQ ID NO: 138240 - RNA, 20 nt, Human
caaugcaacacaagucagca

SEQ ID NO: 138241 - RNA, 19 nt, Human
cacaguaacuaucacaggc

SEQ ID NO: 138242 - RNA, 18 nt, Human
cacuaugcuugcaauggc

SEQ ID NO: 138243 - RNA, 25 nt, Human
cagaauguccucaggugucccaucc

SEQ ID NO: 138244 - RNA, 21 nt, Human
cagcaggcccucgggucagac

SEQ ID NO: 138245 - RNA, 19 nt, Human
cagccucauaccucuaaag

SEQ ID NO: 138246 - RNA, 25 nt, Human
cagccucauaccucuaaagcuucug

SEQ ID NO: 138247 - RNA, 24 nt, Human
cagcuagggcggaaaaaaaagaga

SEQ ID NO: 138248 - RNA, 18 nt, Human
caggaagcagcaggcccu

SEQ ID NO: 138249 - RNA, 22 nt, Human
caggugucccauccccaguccc

SEQ ID NO: 138250 - RNA, 25 nt, Human
caugacccgguacaggaaaaacagg

SEQ ID NO: 138251 - RNA, 26 nt, Human
cauuaggauguccaguucaaaccccu

SEQ ID NO: 138252 - RNA, 20 nt, Human
cauuguggagccucucagga

SEQ ID NO: 138253 - RNA, 23 nt, Human
ccaaaaccccaaccagaucccca

SEQ ID NO: 138254 - RNA, 23 nt, Human
ccaauaacgcaagccugccccuu

SEQ ID NO: 138255 - RNA, 34 nt, Human
ccaauuuaguauuuaaaaaaaaaaaaaaaaaaag

SEQ ID NO: 138256 - RNA, 24 nt, Human
ccaguccccaguggacgcacagcc

SEQ ID NO: 138257 - RNA, 20 nt, Human
cccaaaaccccaaccagauc

SEQ ID NO: 138258 - RNA, 21 nt, Human
cccaaaaccccaaccagaucc

SEQ ID NO: 138259 - RNA, 23 nt, Human
cccaaaaccccaaccagaucccc

SEQ ID NO: 138260 - RNA, 24 nt, Human
cccaaaaccccaaccagaucccca

SEQ ID NO: 138261 - RNA, 26 nt, Human
cccaaaaccccaaccagauccccaaa

SEQ ID NO: 138262 - RNA, 19 nt, Human
cccaaccagauccccaaag

SEQ ID NO: 138263 - RNA, 19 nt, Human
ccccaugaacuggcugcuc

SEQ ID NO: 138264 - RNA, 22 nt, Human
ccccuuuaucaacagcugaccc

SEQ ID NO: 138265 - RNA, 22 nt, Human
cccggaaucagcugggugauga

SEQ ID NO: 138266 - RNA, 24 nt, Human
cccugaccccggccccuccccagc

SEQ ID NO: 138267 - RNA, 18 nt, Human
cuagcacacauccucaug

SEQ ID NO: 138268 - RNA, 18 nt, Human
cuccuccaacacagcccc

SEQ ID NO: 138269 - RNA, 22 nt, Human
cucuccuccaacacagccccag

SEQ ID NO: 138270 - RNA, 19 nt, Human
cugacccugaagacuacag

SEQ ID NO: 138271 - RNA, 22 nt, Human
cugugggugagacggcauggcc

SEQ ID NO: 138272 - RNA, 20 nt, Human
cuucuuaaaauuuuuaaaaa

SEQ ID NO: 138273 - RNA, 27 nt, Human
gaaaguuccuccacucaugggucacaa

SEQ ID NO: 138274 - RNA, 21 nt, Human
gacccaacgaccaccaugaaa

SEQ ID NO: 138275 - RNA, 23 nt, Human
gaccccggccccuccccagcccc

SEQ ID NO: 138276 - RNA, 25 nt, Human
gaccccggccccuccccagccccac

SEQ ID NO: 138277 - RNA, 18 nt, Human
gagagagaaagagagagu

SEQ ID NO: 138278 - RNA, 19 nt, Human
gagcacugcacagaggaaa

SEQ ID NO: 138279 - RNA, 18 nt, Human
gagcugcaaguguuucuu

SEQ ID NO: 138280 - RNA, 22 nt, Human
gcaacacaagucagcaaggaca

SEQ ID NO: 138281 - RNA, 19 nt, Human
gcggacccaacgaccacca

SEQ ID NO: 138282 - RNA, 22 nt, Human
gcuagagagagaaagagagagu

SEQ ID NO: 138283 - RNA, 23 nt, Human
gcucuuaaaaaaaaaaacaaaaa

SEQ ID NO: 138284 - RNA, 18 nt, Human
gcuuacacagccugcaga

SEQ ID NO: 138285 - RNA, 19 nt, Human
gcuugguggguagucuugg

SEQ ID NO: 138286 - RNA, 20 nt, Human
ggaaaaacaggaagacucaa

SEQ ID NO: 138287 - RNA, 21 nt, Human
ggaaaaacaggaagacucaag

SEQ ID NO: 138288 - RNA, 21 nt, Human
ggaaguggaugagcaaaauca

SEQ ID NO: 138289 - RNA, 18 nt, Human
ggaauaauaaacacgaga

SEQ ID NO: 138290 - RNA, 21 nt, Human
ggugacagaaaaggagaggga

SEQ ID NO: 138291 - RNA, 25 nt, Human
ggugacagaaaaggagagggaagga

SEQ ID NO: 138292 - RNA, 24 nt, Human
gugcaggugagaaaaaaagcaaau

SEQ ID NO: 138293 - RNA, 27 nt, Human
uaaacaacaacaacaaaaaacccaaaa

SEQ ID NO: 138294 - RNA, 21 nt, Human
uaacacagaguucuuaaggaa

SEQ ID NO: 138295 - RNA, 24 nt, Human
uaacagacacacaaagcaagccaa

SEQ ID NO: 138296 - RNA, 22 nt, Human
uaagaaaacaaccaaaacaacc

SEQ ID NO: 138297 - RNA, 18 nt, Human
uaaguguugggugugguu

SEQ ID NO: 138298 - RNA, 24 nt, Human
uaauuauuuugccaucaagacagu

SEQ ID NO: 138299 - RNA, 18 nt, Human
uaccaugacccgguacag

SEQ ID NO: 138300 - RNA, 19 nt, Human
uaggauguccaguucaaac

SEQ ID NO: 138301 - RNA, 20 nt, Human
uaggcggacccaacgaccac

SEQ ID NO: 138302 - RNA, 23 nt, Human
uagggcggaaaaaaaagagagag

SEQ ID NO: 138303 - RNA, 20 nt, Human
uaucaacagcugacccugaa

SEQ ID NO: 138304 - RNA, 22 nt, Human
uaugacauucauuuaacagaca

SEQ ID NO: 138305 - RNA, 23 nt, Human
uaugacauucauuuaacagacac

SEQ ID NO: 138306 - RNA, 18 nt, Human
uauucagaaaagccugca

SEQ ID NO: 138307 - RNA, 21 nt, Human
ucacugcaguuauucaguucu

SEQ ID NO: 138308 - RNA, 26 nt, Human
ucagcaaggacagggguagguccaaa

SEQ ID NO: 138309 - RNA, 23 nt, Human
ucaggacagacacgaugaguuug

SEQ ID NO: 138310 - RNA, 18 nt, Human
uccacucaugggucacaa

SEQ ID NO: 138311 - RNA, 18 nt, Human
ucccauccccagucccca

SEQ ID NO: 138312 - RNA, 19 nt, Human
ucccauccccaguccccag

SEQ ID NO: 138313 - RNA, 20 nt, Human
ucccauccccaguccccagu

SEQ ID NO: 138314 - RNA, 20 nt, Human
uccccgaaaauaaaaagcuc

SEQ ID NO: 138315 - RNA, 23 nt, Human
uccccgaaaauaaaaagcuccca

SEQ ID NO: 138316 - RNA, 18 nt, Human
uccgagacaagggcugga

SEQ ID NO: 138317 - RNA, 24 nt, Human
uccugcacuuggccagggucccac

SEQ ID NO: 138318 - RNA, 20 nt, Human
ucucuuucuuccucuccucc

SEQ ID NO: 138319 - RNA, 20 nt, Human
ucugucucucuuucuuccuc

SEQ ID NO: 138320 - RNA, 24 nt, Human
ucuuaaauccuacacuguuuuaga

SEQ ID NO: 138321 - RNA, 21 nt, Human
ucuucccuccccccaugaaaa

SEQ ID NO: 138322 - RNA, 19 nt, Human
ucuucuggcuacacacuuu

SEQ ID NO: 138323 - RNA, 24 nt, Human
ucuuucuauguagugugucuuuag

SEQ ID NO: 138324 - RNA, 20 nt, Human
ugaaaugguagaccugggag

SEQ ID NO: 138325 - RNA, 22 nt, Human
ugaacuggugacuuugguuggu

SEQ ID NO: 138326 - RNA, 18 nt, Human
ugaaugcaauccucuguc

SEQ ID NO: 138327 - RNA, 21 nt, Human
ugacacagcacuaugcuugca

SEQ ID NO: 138328 - RNA, 22 nt, Human
ugacccgguacaggaaaaacag

SEQ ID NO: 138329 - RNA, 22 nt, Human
ugcaggugagaaaaaaagcaaa

SEQ ID NO: 138330 - RNA, 23 nt, Human
ugccgggaaggggacuuggguuu

SEQ ID NO: 138331 - RNA, 24 nt, Human
ugccgggaaggggacuuggguuuu

SEQ ID NO: 138332 - RNA, 22 nt, Human
ugcuauuaggaaauuucaagaa

SEQ ID NO: 138333 - RNA, 21 nt, Human
uggcaggugguuagcaccagu

SEQ ID NO: 138334 - RNA, 21 nt, Human
uggcgaugcgggugggcauug

SEQ ID NO: 138335 - RNA, 24 nt, Human
ugggaaaaaauuaauuucaagagg

SEQ ID NO: 138336 - RNA, 20 nt, Human
uggggccccaagggggaccc

SEQ ID NO: 138337 - RNA, 24 nt, Human
ugggugugguucccuguaugagcu

SEQ ID NO: 138338 - RNA, 19 nt, Human
ugguaaaagagaagagaau

SEQ ID NO: 138339 - RNA, 23 nt, Human
ugucucucuuucuuccucuccuc

SEQ ID NO: 138340 - RNA, 19 nt, Human
ugugauguuuuuacgcuuu

SEQ ID NO: 138341 - RNA, 21 nt, Human
ugugggugagacggcauggcc

SEQ ID NO: 138342 - RNA, 19 nt, Human
uguucgcaugucuaagugu

SEQ ID NO: 138343 - RNA, 21 nt, Human
uguuuuguuuuguuuuuuucc

SEQ ID NO: 138344 - RNA, 25 nt, Human
uguuuuguuuuguuuuuuuccuuug

SEQ ID NO: 138345 - RNA, 26 nt, Human
uuaaaaaccaucuauucuuaaauccu

SEQ ID NO: 138346 - RNA, 24 nt, Human
uuaacagacacacaaagcaagcca

SEQ ID NO: 138347 - RNA, 18 nt, Human
uuagcacuucugaacugg

SEQ ID NO: 138348 - RNA, 22 nt, Human
uucacuuuaucuucccuccccc

SEQ ID NO: 138349 - RNA, 22 nt, Human
uugccaucaagacagugguuac

SEQ ID NO: 138350 - RNA, 20 nt, Human
uuuauaagguuuccucccca

SEQ ID NO: 138351 - RNA, 21 nt, Human
uuugaguuuauagggccucuu

SEQ ID NO: 138352 - RNA, 21 nt, Human
uuuguuuuguuuuuuuccuuu

SEQ ID NO: 138353 - RNA, 23 nt, Human
aaacagaaaacaaagcaauauuc

SEQ ID NO: 138354 - RNA, 21 nt, Human
aaacgaaacaaaucugaauau

SEQ ID NO: 138355 - RNA, 19 nt, Human
aaagaaaagcacuacaaga

SEQ ID NO: 138356 - RNA, 18 nt, Human
aaagguucugguggaaug

SEQ ID NO: 138357 - RNA, 22 nt, Human
aaaucuugugcagaaucaaagg

SEQ ID NO: 138358 - RNA, 20 nt, Human
aacacaauauacaacacccc

SEQ ID NO: 138359 - RNA, 18 nt, Human
aagagcuuuaaaauagca

SEQ ID NO: 138360 - RNA, 23 nt, Human
aagaggcagggagggcaagagga

SEQ ID NO: 138361 - RNA, 24 nt, Human
aagaggccugagcaaacacuggca

SEQ ID NO: 138362 - RNA, 22 nt, Human
aagguggaaccagguccacaaa

SEQ ID NO: 138363 - RNA, 19 nt, Human
aauggaaggggaaacaggu

SEQ ID NO: 138364 - RNA, 26 nt, Human
aauuccuuuguagcccaguguguacu

SEQ ID NO: 138365 - RNA, 20 nt, Human
acacagaacugaacacccac

SEQ ID NO: 138366 - RNA, 26 nt, Human
accagacacagaacugaacacccagu

SEQ ID NO: 138367 - RNA, 19 nt, Human
acccacccaccucccuccu

SEQ ID NO: 138368 - RNA, 18 nt, Human
accgggauggauugccau

SEQ ID NO: 138369 - RNA, 18 nt, Human
accuaauaaaaccaacuu

SEQ ID NO: 138370 - RNA, 23 nt, Human
agaacugaacacccacacaccag

SEQ ID NO: 138371 - RNA, 21 nt, Human
agacacaaaguucccccagag

SEQ ID NO: 138372 - RNA, 20 nt, Human
agcucuucacguuccagagc

SEQ ID NO: 138373 - RNA, 23 nt, Human
aggaaagagaaggauuugaaagc

SEQ ID NO: 138374 - RNA, 19 nt, Human
aggaagagaagugucauuu

SEQ ID NO: 138375 - RNA, 25 nt, Human
agggaaagagauauucaacucugac

SEQ ID NO: 138376 - RNA, 22 nt, Human
aggugguuuggaauggaaaggu

SEQ ID NO: 138377 - RNA, 19 nt, Human
auaaacagaaaacaaagca

SEQ ID NO: 138378 - RNA, 22 nt, Human
augaguguaucugggacucaag

SEQ ID NO: 138379 - RNA, 20 nt, Human
caaagaacagaacccaaaga

SEQ ID NO: 138380 - RNA, 25 nt, Human
caacacaauauacaacaccccuucc

SEQ ID NO: 138381 - RNA, 22 nt, Human
caacaccccuuccacucaccug

SEQ ID NO: 138382 - RNA, 20 nt, Human
caagggaugagauggcaaag

SEQ ID NO: 138383 - RNA, 18 nt, Human
cacagaacugaacaccca

SEQ ID NO: 138384 - RNA, 27 nt, Human
caccagacacagaacugaacacccacu

SEQ ID NO: 138385 - RNA, 21 nt, Human
cacccacucaccccaaauaac

SEQ ID NO: 138386 - RNA, 18 nt, Human
caccccuuccacucaccu

SEQ ID NO: 138387 - RNA, 19 nt, Human
caccccuuccacucaccug

SEQ ID NO: 138388 - RNA, 28 nt, Human
caccccuuccacucaccugacccaguuu

SEQ ID NO: 138389 - RNA, 22 nt, Human
cacccuuuccacuacccaagga

SEQ ID NO: 138390 - RNA, 18 nt, Human
caccuaauaaaaccaacu

SEQ ID NO: 138391 - RNA, 26 nt, Human
caccugacccacccaccucccuccua

SEQ ID NO: 138392 - RNA, 28 nt, Human
caccuugcuccaggcucccaccacccac

SEQ ID NO: 138393 - RNA, 22 nt, Human
cacucaccccaaauaaccugcg

SEQ ID NO: 138394 - RNA, 18 nt, Human
cagccccucugcacccuc

SEQ ID NO: 138395 - RNA, 19 nt, Human
cagcugcuggcuuuuaaga

SEQ ID NO: 138396 - RNA, 22 nt, Human
caggacuugcuccaaaacugaa

SEQ ID NO: 138397 - RNA, 22 nt, Human
caggagauuacugucuguccau

SEQ ID NO: 138398 - RNA, 19 nt, Human
caggcucccaccacccacu

SEQ ID NO: 138399 - RNA, 21 nt, Human
caucugagcuaaaauccugac

SEQ ID NO: 138400 - RNA, 20 nt, Human
cauuaacagucacgugauga

SEQ ID NO: 138401 - RNA, 24 nt, Human
ccaaacacccuuuccacuacccaa

SEQ ID NO: 138402 - RNA, 21 nt, Human
ccacaaaaugugcucccucug

SEQ ID NO: 138403 - RNA, 20 nt, Human
ccaccacccacucaccccaa

SEQ ID NO: 138404 - RNA, 23 nt, Human
ccaccacccacucaccccaaaua

SEQ ID NO: 138405 - RNA, 19 nt, Human
ccacucaccugacccaccc

SEQ ID NO: 138406 - RNA, 22 nt, Human
ccagaagcaugccacucuucuc

SEQ ID NO: 138407 - RNA, 21 nt, Human
ccagacacagaacugaacacc

SEQ ID NO: 138408 - RNA, 21 nt, Human
cccaagcccguggcccucaga

SEQ ID NO: 138409 - RNA, 18 nt, Human
cccaccacccacucaccc

SEQ ID NO: 138410 - RNA, 22 nt, Human
cccaccacccacucaccccaaa

SEQ ID NO: 138411 - RNA, 24 nt, Human
cccaccacccacucaccccaaaua

SEQ ID NO: 138412 - RNA, 21 nt, Human
cccagccccucugcacccucc

SEQ ID NO: 138413 - RNA, 19 nt, Human
cccagcuugucuguccccu

SEQ ID NO: 138414 - RNA, 21 nt, Human
ccccuuccacucaccugaccc

SEQ ID NO: 138415 - RNA, 19 nt, Human
cccucccuccuucuucugc

SEQ ID NO: 138416 - RNA, 18 nt, Human
cccuccuucuucugcucc

SEQ ID NO: 138417 - RNA, 20 nt, Human
ccucaccacgugggccugug

SEQ ID NO: 138418 - RNA, 22 nt, Human
ccuccuacaugcccuaccccag

SEQ ID NO: 138419 - RNA, 21 nt, Human
cgacagcaacggcgacagcaa

SEQ ID NO: 138420 - RNA, 23 nt, Human
cgacagcaacggcgacagcaacg

SEQ ID NO: 138421 - RNA, 22 nt, Human
cgagagaaucaaacacaaacug

SEQ ID NO: 138422 - RNA, 24 nt, Human
cggcucgcccgcgccuuccucagc

SEQ ID NO: 138423 - RNA, 21 nt, Human
cgggauggauugccaucuggg

SEQ ID NO: 138424 - RNA, 21 nt, Human
cgggauggauugccaucuggg

SEQ ID NO: 138425 - RNA, 20 nt, Human
cuaaacucaaaacacaguuu

SEQ ID NO: 138426 - RNA, 21 nt, Human
cucaccugacccacccaccuc

SEQ ID NO: 138427 - RNA, 18 nt, Human
cucccaccacccacucac

SEQ ID NO: 138428 - RNA, 19 nt, Human
cucgcaauucccagggauu

SEQ ID NO: 138429 - RNA, 18 nt, Human
cucgcccgcgccuuccuc

SEQ ID NO: 138430 - RNA, 19 nt, Human
cugcacccuccaccuugcu

SEQ ID NO: 138431 - RNA, 21 nt, Human
cugcacccuccaccuugcucc

SEQ ID NO: 138432 - RNA, 21 nt, Human
cugcagcggcuggcucccucc

SEQ ID NO: 138433 - RNA, 21 nt, Human
cugccuggccuucccaaccca

SEQ ID NO: 138434 - RNA, 24 nt, Human
cugucccugccuggccuucccaac

SEQ ID NO: 138435 - RNA, 25 nt, Human
cuucuagaaaacuuagaaguacaag

SEQ ID NO: 138436 - RNA, 19 nt, Human
cuucuugcuucugccccuc

SEQ ID NO: 138437 - RNA, 21 nt, Human
cuuucaaaaacuccuauuuau

SEQ ID NO: 138438 - RNA, 21 nt, Human
gauggcaggggcauccucagg

SEQ ID NO: 138439 - RNA, 21 nt, Human
gauuugaaagcaacacuaaga

SEQ ID NO: 138440 - RNA, 19 nt, Human
gcagagcagagagugcaga

SEQ ID NO: 138441 - RNA, 18 nt, Human
gccagugaauucgaagag

SEQ ID NO: 138442 - RNA, 24 nt, Human
gcugugggugcccucaccacgugg

SEQ ID NO: 138443 - RNA, 20 nt, Human
ggagaaacauaaggcuugag

SEQ ID NO: 138444 - RNA, 22 nt, Human
ggcuguggcugguacugcaacc

SEQ ID NO: 138445 - RNA, 23 nt, Human
gggaaagagauauucaacucuga

SEQ ID NO: 138446 - RNA, 21 nt, Human
ggggagaaagccugggaagcu

SEQ ID NO: 138447 - RNA, 19 nt, Human
gguggaagaaaugguuggg

SEQ ID NO: 138448 - RNA, 23 nt, Human
gguguaccauuuuggcuucaaaa

SEQ ID NO: 138449 - RNA, 23 nt, Human
guauaggccuguuugaugugucu

SEQ ID NO: 138450 - RNA, 18 nt, Human
guuaguaaugguaaguga

SEQ ID NO: 138451 - RNA, 20 nt, Human
guuccagagcugccucacag

SEQ ID NO: 138452 - RNA, 20 nt, Human
uaaccagguuuacauuaaca

SEQ ID NO: 138453 - RNA, 18 nt, Human
uaagaaagaggccugagc

SEQ ID NO: 138454 - RNA, 23 nt, Human
uaagaaagaggccugagcaaaca

SEQ ID NO: 138455 - RNA, 19 nt, Human
uaagagcuacauuuucccu

SEQ ID NO: 138456 - RNA, 22 nt, Human
uaauaaccagguuuacauuaac

SEQ ID NO: 138457 - RNA, 18 nt, Human
uacaugcccuaccccagc

SEQ ID NO: 138458 - RNA, 18 nt, Human
uacugcaaccuaucccaa

SEQ ID NO: 138459 - RNA, 18 nt, Human
uagaaguacaagaaauag

SEQ ID NO: 138460 - RNA, 19 nt, Human
uaggcaagcgagcguaaca

SEQ ID NO: 138461 - RNA, 18 nt, Human
uaggggaaauccuguucc

SEQ ID NO: 138462 - RNA, 21 nt, Human
uaugaaacgaaacaaaucuga

SEQ ID NO: 138463 - RNA, 21 nt, Human
ucaaaacacaguuuuguucac

SEQ ID NO: 138464 - RNA, 21 nt, Human
ucaaagguucugguggaaugg

SEQ ID NO: 138465 - RNA, 22 nt, Human
ucaccugacccacccaccuccc

SEQ ID NO: 138466 - RNA, 22 nt, Human
uccaaauuccuuuguagcccag

SEQ ID NO: 138467 - RNA, 22 nt, Human
uccacuacccaagcccguggcc

SEQ ID NO: 138468 - RNA, 23 nt, Human
uccaggcucaggugucagcccuu

SEQ ID NO: 138469 - RNA, 23 nt, Human
ucccaagggcauuuggggguugu

SEQ ID NO: 138470 - RNA, 18 nt, Human
ucccagagcaaggaaauc

SEQ ID NO: 138471 - RNA, 20 nt, Human
ucccagguugaacauauuuc

SEQ ID NO: 138472 - RNA, 25 nt, Human
ucccagguugaacauauuucuucug

SEQ ID NO: 138473 - RNA, 18 nt, Human
ucccugacgucccagcuu

SEQ ID NO: 138474 - RNA, 19 nt, Human
ucccugccuggccuuccca

SEQ ID NO: 138475 - RNA, 18 nt, Human
uccugagcucauguuguu

SEQ ID NO: 138476 - RNA, 21 nt, Human
uccuuggcuaucuccaaauuc

SEQ ID NO: 138477 - RNA, 19 nt, Human
ucucggcagacccuaggga

SEQ ID NO: 138478 - RNA, 21 nt, Human
ucuuaaauaucgguguaccau

SEQ ID NO: 138479 - RNA, 19 nt, Human
ugaaagacccccacaucuu

SEQ ID NO: 138480 - RNA, 18 nt, Human
ugacaaagaacagaaccc

SEQ ID NO: 138481 - RNA, 21 nt, Human
ugacaaagaacagaacccaaa

SEQ ID NO: 138482 - RNA, 24 nt, Human
ugacccacccaccucccuccuaca

SEQ ID NO: 138483 - RNA, 19 nt, Human
ugagacacaaaguuccccc

SEQ ID NO: 138484 - RNA, 19 nt, Human
ugagauggcaaaggacagc

SEQ ID NO: 138485 - RNA, 21 nt, Human
ugagauggcaaaggacagcuu

SEQ ID NO: 138486 - RNA, 21 nt, Human
ugagauggcaaaggacagcuu

SEQ ID NO: 138487 - RNA, 24 nt, Human
ugagauggcaaaggacagcuuugg

SEQ ID NO: 138488 - RNA, 19 nt, Human
ugaggccugcucuucucuu

SEQ ID NO: 138489 - RNA, 24 nt, Human
ugaguaacagcagagcagagagug

SEQ ID NO: 138490 - RNA, 19 nt, Human
ugaugugacagcugccaca

SEQ ID NO: 138491 - RNA, 22 nt, Human
ugauuugaacagaagguagcuu

SEQ ID NO: 138492 - RNA, 23 nt, Human
ugcauaaacagaaaacaaagcaa

SEQ ID NO: 138493 - RNA, 20 nt, Human
ugcccagggcagcccaugag

SEQ ID NO: 138494 - RNA, 21 nt, Human
ugcuuggagaguuaguaaugg

SEQ ID NO: 138495 - RNA, 24 nt, Human
uggcaaaggacagcuuuggaauca

SEQ ID NO: 138496 - RNA, 19 nt, Human
uggcaggggcauccucagg

SEQ ID NO: 138497 - RNA, 21 nt, Human
uggcccucagagagaaccggg

SEQ ID NO: 138498 - RNA, 26 nt, Human
uggcucccucccuccuucuucugcuc

SEQ ID NO: 138499 - RNA, 20 nt, Human
uggcuucaaaacaaucucuu

SEQ ID NO: 138500 - RNA, 22 nt, Human
ugggaagcuuguggcaaggaag

SEQ ID NO: 138501 - RNA, 23 nt, Human
ugggaauugcccacccuacugga

SEQ ID NO: 138502 - RNA, 18 nt, Human
ugggacucaagcuggagu

SEQ ID NO: 138503 - RNA, 23 nt, Human
ugggccugugcuauguucucagc

SEQ ID NO: 138504 - RNA, 24 nt, Human
ugucuuaugaaacgaaacaaaucu

SEQ ID NO: 138505 - RNA, 21 nt, Human
ugugcagaaucaaagguucug

SEQ ID NO: 138506 - RNA, 23 nt, Human
uuacauuaacagucacgugauga

SEQ ID NO: 138507 - RNA, 21 nt, Human
uucaaaccugcagucagagac

SEQ ID NO: 138508 - RNA, 18 nt, Human
uucacguuccagagcugc

SEQ ID NO: 138509 - RNA, 21 nt, Human
uuuaacaauuucccaaacacc

SEQ ID NO: 138510 - RNA, 27 nt, Human
uuuaacaauuucccaaacacccuuucc

SEQ ID NO: 138511 - RNA, 21 nt, Human
uuuccucuaucugcuggcugu

SEQ ID NO: 138512 - RNA, 22 nt, Human
uuuggcuuucccaguuccccac

SEQ ID NO: 138513 - RNA, 19 nt, Human
aacacuguuuauugaucaa

SEQ ID NO: 138514 - RNA, 23 nt, Human
agacaucccuagaauaccaauga

SEQ ID NO: 138515 - RNA, 18 nt, Human
aggagcagcuggcuugag

SEQ ID NO: 138516 - RNA, 18 nt, Human
aggagcagcuggcuugag

SEQ ID NO: 138517 - RNA, 18 nt, Human
aggcugaggaggggaaag

SEQ ID NO: 138518 - RNA, 18 nt, Human
caccaagaugcauacaaa

SEQ ID NO: 138519 - RNA, 21 nt, Human
ccaaugacaaguccaccaaga

SEQ ID NO: 138520 - RNA, 23 nt, Human
ccaaugacaaguccaccaagaug

SEQ ID NO: 138521 - RNA, 18 nt, Human
cccaggcugaggagggga

SEQ ID NO: 138522 - RNA, 23 nt, Human
ccccgcugccgcugccgccgccg

SEQ ID NO: 138523 - RNA, 19 nt, Human
cccgcugccgcugccgccg

SEQ ID NO: 138524 - RNA, 22 nt, Human
ccgccgccgcugccgcugccgc

SEQ ID NO: 138525 - RNA, 22 nt, Human
ccgccgcugccgcugccgcugc

SEQ ID NO: 138526 - RNA, 22 nt, Human
ccgcugccgccgccgcugccgc

SEQ ID NO: 138527 - RNA, 21 nt, Human
ccgcugccgcugccgccgccg

SEQ ID NO: 138528 - RNA, 24 nt, Human
ccgcugccgcugccgccgccgcug

SEQ ID NO: 138529 - RNA, 21 nt, Human
ccgcugccgcugccgcugcug

SEQ ID NO: 138530 - RNA, 22 nt, Human
ccgcugccgcugcuggaacggc

SEQ ID NO: 138531 - RNA, 21 nt, Human
cgcugccgcugccgcugcugg

SEQ ID NO: 138532 - RNA, 19 nt, Human
cucaaaaagucgcccucgg

SEQ ID NO: 138533 - RNA, 22 nt, Human
cugaaccuuaaauuuucaauag

SEQ ID NO: 138534 - RNA, 19 nt, Human
cugccgcugccgccgccgc

SEQ ID NO: 138535 - RNA, 22 nt, Human
cuggaacggcgacggccgccuu

SEQ ID NO: 138536 - RNA, 20 nt, Human
gaaaaacauuuauagaagaa

SEQ ID NO: 138537 - RNA, 25 nt, Human
gaaaaugaacggaggagcagcuggc

SEQ ID NO: 138538 - RNA, 21 nt, Human
gaacuaauauggacagagcca

SEQ ID NO: 138539 - RNA, 22 nt, Human
gagagugaucccggggggugcu

SEQ ID NO: 138540 - RNA, 23 nt, Human
gagcagcuggcuugagggcuggg

SEQ ID NO: 138541 - RNA, 20 nt, Human
gaggaggggaaagcgcggug

SEQ ID NO: 138542 - RNA, 21 nt, Human
gcagggaaaaacauuuauaga

SEQ ID NO: 138543 - RNA, 19 nt, Human
gcccaggcugaggagggga

SEQ ID NO: 138544 - RNA, 22 nt, Human
gccgccgccgcugccgcugccg

SEQ ID NO: 138545 - RNA, 21 nt, Human
gccgcgguaccgggcggguac

SEQ ID NO: 138546 - RNA, 22 nt, Human
gccgcugccgccgccgcugccg

SEQ ID NO: 138547 - RNA, 21 nt, Human
ggagcagaggcaagauccagg

SEQ ID NO: 138548 - RNA, 24 nt, Human
ggaugaguuugggaagaaaguggg

SEQ ID NO: 138549 - RNA, 19 nt, Human
ggcuugagggcugggaaca

SEQ ID NO: 138550 - RNA, 20 nt, Human
gggaaaaacauuuauagaag

SEQ ID NO: 138551 - RNA, 22 nt, Human
gggcugggaacacucgcgugug

SEQ ID NO: 138552 - RNA, 21 nt, Human
gguaccgggcggguacccagc

SEQ ID NO: 138553 - RNA, 20 nt, Human
guccggaaauuugagcggcu

SEQ ID NO: 138554 - RNA, 24 nt, Human
guuugggaagaaagugggggcccg

SEQ ID NO: 138555 - RNA, 26 nt, Human
uaccaaugacaaguccaccaagaugc

SEQ ID NO: 138556 - RNA, 21 nt, Human
uauagcacacaauagaugaaa

SEQ ID NO: 138557 - RNA, 24 nt, Human
uaucuaaaauuucauaaacaccau

SEQ ID NO: 138558 - RNA, 20 nt, Human
ucuauagagcccgaggcccc

SEQ ID NO: 138559 - RNA, 21 nt, Human
ugaggaggggaaagcgcggug

SEQ ID NO: 138560 - RNA, 23 nt, Human
ugaguuugggaagaaaguggggg

SEQ ID NO: 138561 - RNA, 21 nt, Human
ugggaagaaagugggggcccg

SEQ ID NO: 138562 - RNA, 22 nt, Human
uucacuguuuuuguugugcagg

SEQ ID NO: 138563 - RNA, 25 nt, Human
uuuaaaaacuccccagcucuggucc

SEQ ID NO: 138564 - RNA, 19 nt, Human
uuucucaaaaagucgcccu

SEQ ID NO: 138565 - RNA, 23 nt, Human
aaagacaugucccuuauggcucc

SEQ ID NO: 138566 - RNA, 20 nt, Human
aaagccccugaauuccccaa

SEQ ID NO: 138567 - RNA, 19 nt, Human
aagccccugaauuccccaa

SEQ ID NO: 138568 - RNA, 24 nt, Human
aagccccuggcuccucagcagcuc

SEQ ID NO: 138569 - RNA, 20 nt, Human
aauagaaccaauaucaacaa

SEQ ID NO: 138570 - RNA, 23 nt, Human
acagagcagggccccgcgccucc

SEQ ID NO: 138571 - RNA, 20 nt, Human
acccaucucauuuucuuccc

SEQ ID NO: 138572 - RNA, 20 nt, Human
acuccuacuguaagccucaa

SEQ ID NO: 138573 - RNA, 20 nt, Human
acuuugcugggaacaguguu

SEQ ID NO: 138574 - RNA, 27 nt, Human
agagcuggagauuguucaaagggccga

SEQ ID NO: 138575 - RNA, 21 nt, Human
agcccagccagcugcgcgcag

SEQ ID NO: 138576 - RNA, 23 nt, Human
agccccuggcuccucagcagcuc

SEQ ID NO: 138577 - RNA, 19 nt, Human
caaaccccagagcaaucuc

SEQ ID NO: 138578 - RNA, 21 nt, Human
caaaccccagagcaaucuccu

SEQ ID NO: 138579 - RNA, 24 nt, Human
caacacagaaaauacacuggaaug

SEQ ID NO: 138580 - RNA, 21 nt, Human
cacuagaccccggcuaagggc

SEQ ID NO: 138581 - RNA, 23 nt, Human
cacuagaccccggcuaagggcuc

SEQ ID NO: 138582 - RNA, 22 nt, Human
cacuuccuugaagagcuggaga

SEQ ID NO: 138583 - RNA, 23 nt, Human
cagagcagggccccgcgccuccc

SEQ ID NO: 138584 - RNA, 21 nt, Human
cagagggcucuccugacaccu

SEQ ID NO: 138585 - RNA, 20 nt, Human
cagcaaacucaacccaucuc

SEQ ID NO: 138586 - RNA, 26 nt, Human
caggagauucuccccuucugagacuc

SEQ ID NO: 138587 - RNA, 18 nt, Human
caggagccuguggcaaug

SEQ ID NO: 138588 - RNA, 18 nt, Human
caugucccuuauggcucc

SEQ ID NO: 138589 - RNA, 18 nt, Human
cauuuagaaucucacaga

SEQ ID NO: 138590 - RNA, 23 nt, Human
cccaagagaggcggcggcagccc

SEQ ID NO: 138591 - RNA, 19 nt, Human
cccagagccuuggcgaacc

SEQ ID NO: 138592 - RNA, 20 nt, Human
ccccagagcaaucuccucua

SEQ ID NO: 138593 - RNA, 21 nt, Human
ccccugaauuccccaaauaaa

SEQ ID NO: 138594 - RNA, 20 nt, Human
cccgcaggcacugcccgcga

SEQ ID NO: 138595 - RNA, 18 nt, Human
cccuggcuccucagcagc

SEQ ID NO: 138596 - RNA, 20 nt, Human
ccucgggcggccuucagccc

SEQ ID NO: 138597 - RNA, 21 nt, Human
ccucgggcggccuucagcccu

SEQ ID NO: 138598 - RNA, 18 nt, Human
cgcgcagcagggguucgg

SEQ ID NO: 138599 - RNA, 19 nt, Human
cgcucggagcuuccuuggg

SEQ ID NO: 138600 - RNA, 22 nt, Human
cuaaaaacaauucugaagccaa

SEQ ID NO: 138601 - RNA, 22 nt, Human
cucacuccuacuguaagccuca

SEQ ID NO: 138602 - RNA, 25 nt, Human
cucccaggacuggucaccugggcag

SEQ ID NO: 138603 - RNA, 18 nt, Human
cuccugggccucugcucu

SEQ ID NO: 138604 - RNA, 18 nt, Human
gaauguggacuucgcugg

SEQ ID NO: 138605 - RNA, 23 nt, Human
gacaccucagagucucaccguac

SEQ ID NO: 138606 - RNA, 20 nt, Human
gaccucucaggagccugugg

SEQ ID NO: 138607 - RNA, 19 nt, Human
gagcccagagccuuggcga

SEQ ID NO: 138608 - RNA, 19 nt, Human
ggaagcgcgccugagccca

SEQ ID NO: 138609 - RNA, 25 nt, Human
ggacuucgcugggggcagcggcucc

SEQ ID NO: 138610 - RNA, 24 nt, Human
ggcuaagggcuccugggcgcucgg

SEQ ID NO: 138611 - RNA, 18 nt, Human
guauacagcaaacucaac

SEQ ID NO: 138612 - RNA, 22 nt, Human
guuuggggaaaggaucccaggc

SEQ ID NO: 138613 - RNA, 26 nt, Human
uaaaaacaauucugaagccaaagaca

SEQ ID NO: 138614 - RNA, 22 nt, Human
uaauagcaaaccccagagcaau

SEQ ID NO: 138615 - RNA, 19 nt, Human
uacaauaaauaaauagaac

SEQ ID NO: 138616 - RNA, 19 nt, Human
uacacuggaauguauuugg

SEQ ID NO: 138617 - RNA, 22 nt, Human
uagaaccaauaucaacaaaaca

SEQ ID NO: 138618 - RNA, 22 nt, Human
ucaacccaucucauuuucuucc

SEQ ID NO: 138619 - RNA, 21 nt, Human
ucagcagcucuccaaacgccu

SEQ ID NO: 138620 - RNA, 23 nt, Human
uccagugacuccugggccucugc

SEQ ID NO: 138621 - RNA, 22 nt, Human
uccccaaauaaagcacuggcuu

SEQ ID NO: 138622 - RNA, 19 nt, Human
uccccauguuuguaguguc

SEQ ID NO: 138623 - RNA, 22 nt, Human
ucgccggggugcguuuggggaa

SEQ ID NO: 138624 - RNA, 24 nt, Human
ucuaaaucaucaauccagugacuc

SEQ ID NO: 138625 - RNA, 20 nt, Human
ucuugggcaccagaaagccc

SEQ ID NO: 138626 - RNA, 19 nt, Human
ugaacaacacagaaaauac

SEQ ID NO: 138627 - RNA, 24 nt, Human
ugaacaacacagaaaauacacugg

SEQ ID NO: 138628 - RNA, 26 nt, Human
ugaacaacacagaaaauacacuggaa

SEQ ID NO: 138629 - RNA, 19 nt, Human
ugagacucagcugaaaaua

SEQ ID NO: 138630 - RNA, 19 nt, Human
ugauugacuaugaacaaca

SEQ ID NO: 138631 - RNA, 23 nt, Human
ugcaaucacauuucggggcuguu

SEQ ID NO: 138632 - RNA, 21 nt, Human
ugcccgcgaccucucaggagc

SEQ ID NO: 138633 - RNA, 21 nt, Human
ugcccuauuugguaaauccua

SEQ ID NO: 138634 - RNA, 18 nt, Human
uggaaaaaaauuucucac

SEQ ID NO: 138635 - RNA, 21 nt, Human
uggaaagcagcagagggcucu

SEQ ID NO: 138636 - RNA, 22 nt, Human
uggcuccucagcagcucuccaa

SEQ ID NO: 138637 - RNA, 19 nt, Human
uggcuuuuuagcauauucu

SEQ ID NO: 138638 - RNA, 18 nt, Human
ugggaugagcaugugugg

SEQ ID NO: 138639 - RNA, 21 nt, Human
ugggcagcuucuuuucuuggc

SEQ ID NO: 138640 - RNA, 20 nt, Human
ugggggcagcggcuccgaaa

SEQ ID NO: 138641 - RNA, 27 nt, Human
uuccuugggagagagcaacgaaauacc

SEQ ID NO: 138642 - RNA, 20 nt, Human
uucgcugggggcagcggcuc

SEQ ID NO: 138643 - RNA, 22 nt, Human
uucuccccuucugagacucagc

SEQ ID NO: 138644 - RNA, 21 nt, Human
uuggggaaaggaucccaggcc

SEQ ID NO: 138645 - RNA, 22 nt, Human
uuucgagagcccagagccuugg

SEQ ID NO: 138646 - RNA, 24 nt, Human
aaacaggagagaggaaaggccaga

SEQ ID NO: 138647 - RNA, 21 nt, Human
aagaggaggccgauccaccca

SEQ ID NO: 138648 - RNA, 23 nt, Human
aagggaaacaggagagaggaaag

SEQ ID NO: 138649 - RNA, 22 nt, Human
agaaaacucagccucugggccc

SEQ ID NO: 138650 - RNA, 21 nt, Human
agaggaaggucaaggaaggcg

SEQ ID NO: 138651 - RNA, 19 nt, Human
agccacuggguggccaggc

SEQ ID NO: 138652 - RNA, 19 nt, Human
agcugcagcuuccccuccu

SEQ ID NO: 138653 - RNA, 23 nt, Human
agcuggggggcccagccccaggg

SEQ ID NO: 138654 - RNA, 18 nt, Human
aggagaguggcggccccg

SEQ ID NO: 138655 - RNA, 18 nt, Human
aggauagggggacuggag

SEQ ID NO: 138656 - RNA, 23 nt, Human
aggcagucccucaaagaaccucu

SEQ ID NO: 138657 - RNA, 18 nt, Human
aggccccaggcuggccag

SEQ ID NO: 138658 - RNA, 22 nt, Human
aggcggcugcaucuuuggugcc

SEQ ID NO: 138659 - RNA, 21 nt, Human
agucccucaaagaaccucuga

SEQ ID NO: 138660 - RNA, 28 nt, Human
caaagaaccucugauguccccuagccca

SEQ ID NO: 138661 - RNA, 21 nt, Human
caagaugagggcuccucuucu

SEQ ID NO: 138662 - RNA, 25 nt, Human
caaggaguuccucuccccauagacc

SEQ ID NO: 138663 - RNA, 18 nt, Human
caccgccugcuccacgcc

SEQ ID NO: 138664 - RNA, 21 nt, Human
cagcuuccccuccuuccucag

SEQ ID NO: 138665 - RNA, 24 nt, Human
caggggcucucccaagcugcagcu

SEQ ID NO: 138666 - RNA, 22 nt, Human
caucggggugcgggagggagcu

SEQ ID NO: 138667 - RNA, 18 nt, Human
cauguggaaaccacuugg

SEQ ID NO: 138668 - RNA, 19 nt, Human
ccacccaggccuuccugcu

SEQ ID NO: 138669 - RNA, 19 nt, Human
ccacuggguggccaggcuc

SEQ ID NO: 138670 - RNA, 18 nt, Human
ccaggccaggccagaugg

SEQ ID NO: 138671 - RNA, 21 nt, Human
ccaggccaggccagaugguuu

SEQ ID NO: 138672 - RNA, 18 nt, Human
ccagggaccggccgagga

SEQ ID NO: 138673 - RNA, 19 nt, Human
ccccauagacccuccuggg

SEQ ID NO: 138674 - RNA, 23 nt, Human
cccgccgcauccacgcgcggccg

SEQ ID NO: 138675 - RNA, 25 nt, Human
ccuagagccccagaggaaggucaag

SEQ ID NO: 138676 - RNA, 22 nt, Human
ccucagggcagggccaggccag

SEQ ID NO: 138677 - RNA, 21 nt, Human
ccucccugccaggccccaggc

SEQ ID NO: 138678 - RNA, 24 nt, Human
ccucuccccauagacccuccuggg

SEQ ID NO: 138679 - RNA, 19 nt, Human
ccucugauguccccuagcc

SEQ ID NO: 138680 - RNA, 24 nt, Human
ccugcucacgguucgcaaggguug

SEQ ID NO: 138681 - RNA, 20 nt, Human
ccugugggccuugcagggug

SEQ ID NO: 138682 - RNA, 27 nt, Human
cgccaagccccacaaagagaaaacucc

SEQ ID NO: 138683 - RNA, 18 nt, Human
cgccccggggcagagacg

SEQ ID NO: 138684 - RNA, 19 nt, Human
cgccccggggcagagacgg

SEQ ID NO: 138685 - RNA, 21 nt, Human
cgguucgcaagggugaggcug

SEQ ID NO: 138686 - RNA, 23 nt, Human
cuaggccccaggggcucucccaa

SEQ ID NO: 138687 - RNA, 20 nt, Human
cucagccucugggcccugac

SEQ ID NO: 138688 - RNA, 19 nt, Human
cuccagcaacccuagagcc

SEQ ID NO: 138689 - RNA, 23 nt, Human
cuccagcaacccuagagccccag

SEQ ID NO: 138690 - RNA, 25 nt, Human
cuccugggcccuucaagaugagggc

SEQ ID NO: 138691 - RNA, 24 nt, Human
cucuccccauagacccuccugggc

SEQ ID NO: 138692 - RNA, 20 nt, Human
cuugcagggugugaacuguc

SEQ ID NO: 138693 - RNA, 20 nt, Human
cuugggaaucucuggggucc

SEQ ID NO: 138694 - RNA, 23 nt, Human
gaaggucaaggaaggcggcugca

SEQ ID NO: 138695 - RNA, 19 nt, Human
gagcauguggaaaccacuu

SEQ ID NO: 138696 - RNA, 23 nt, Human
gagccagggaccggccgaggaga

SEQ ID NO: 138697 - RNA, 18 nt, Human
gaggagcauggagccaag

SEQ ID NO: 138698 - RNA, 22 nt, Human
gagggugugcgggcagugagga

SEQ ID NO: 138699 - RNA, 18 nt, Human
gccacuggguggccaggc

SEQ ID NO: 138700 - RNA, 19 nt, Human
gccccggggcagagacggc

SEQ ID NO: 138701 - RNA, 22 nt, Human
gcugccccugagcuggggggcc

SEQ ID NO: 138702 - RNA, 24 nt, Human
gcuugccuccugugggccuugcag

SEQ ID NO: 138703 - RNA, 22 nt, Human
ggaaacaggagagaggaaaggc

SEQ ID NO: 138704 - RNA, 18 nt, Human
ggccagaugguuuucagc

SEQ ID NO: 138705 - RNA, 24 nt, Human
ggccagaugguuuucagcagccuc

SEQ ID NO: 138706 - RNA, 24 nt, Human
ggcccugacucaggcuccagcaac

SEQ ID NO: 138707 - RNA, 20 nt, Human
ggccgaggagaguggcggcc

SEQ ID NO: 138708 - RNA, 22 nt, Human
ggcgccggcugcuugaggcuuc

SEQ ID NO: 138709 - RNA, 18 nt, Human
ggggacuggaggugggag

SEQ ID NO: 138710 - RNA, 23 nt, Human
gugaacuguccaucucuccccac

SEQ ID NO: 138711 - RNA, 21 nt, Human
uaaggcagaggcaguggaagg

SEQ ID NO: 138712 - RNA, 21 nt, Human
uaccaugcccagcucacuagc

SEQ ID NO: 138713 - RNA, 19 nt, Human
uagaguuccagggccugac

SEQ ID NO: 138714 - RNA, 23 nt, Human
uagcacugcccuggcagagugag

SEQ ID NO: 138715 - RNA, 18 nt, Human
ucacuagcacugcccugg

SEQ ID NO: 138716 - RNA, 19 nt, Human
ucagaguguggcagaggca

SEQ ID NO: 138717 - RNA, 24 nt, Human
ucaggcuccagcaacccuagagcc

SEQ ID NO: 138718 - RNA, 23 nt, Human
uccacaucggggugcgggaggga

SEQ ID NO: 138719 - RNA, 22 nt, Human
uccacgccaagccccacaaaga

SEQ ID NO: 138720 - RNA, 22 nt, Human
uccacgcgcggccgccuccggg

SEQ ID NO: 138721 - RNA, 22 nt, Human
uccccauagacccuccugggcc

SEQ ID NO: 138722 - RNA, 21 nt, Human
ucucccaagcugcagcuuccc

SEQ ID NO: 138723 - RNA, 18 nt, Human
ugacucaggcuccagcaa

SEQ ID NO: 138724 - RNA, 24 nt, Human
ugacucaggcuccagcaacccuag

SEQ ID NO: 138725 - RNA, 19 nt, Human
ugagaagggauacauugca

SEQ ID NO: 138726 - RNA, 19 nt, Human
ugagcugccccugagcugg

SEQ ID NO: 138727 - RNA, 24 nt, Human
ugagcuggggggcccagccccagg

SEQ ID NO: 138728 - RNA, 23 nt, Human
ugcagcuuccccuccuuccucag

SEQ ID NO: 138729 - RNA, 20 nt, Human
uggaagggaagggaaacagg

SEQ ID NO: 138730 - RNA, 18 nt, Human
uggcagaggcagucccuc

SEQ ID NO: 138731 - RNA, 24 nt, Human
uggcagaggcagucccucaaagaa

SEQ ID NO: 138732 - RNA, 19 nt, Human
ugggcccuucaagaugagg

SEQ ID NO: 138733 - RNA, 24 nt, Human
uggggggcccagccccagggcugg

SEQ ID NO: 138734 - RNA, 20 nt, Human
ugguaccaugcccagcucac

SEQ ID NO: 138735 - RNA, 18 nt, Human
uuccagggccugaccucc

SEQ ID NO: 138736 - RNA, 23 nt, Human
uugcagggccgucagaaggcagc

SEQ ID NO: 138737 - RNA, 23 nt, Human
uugccuggcuccucggcaagaga

SEQ ID NO: 138738 - RNA, 20 nt, Human
uuuuuuuuuuuuuuacccag

SEQ ID NO: 138739 - RNA, 21 nt, Human
uuuuuuuuuuuuuuuacccag

SEQ ID NO: 138740 - RNA, 23 nt, Human
uuuuuuuuuuuuuuuacccaggg

SEQ ID NO: 138741 - RNA, 19 nt, Human
acaggaucuugaggaaggc

SEQ ID NO: 138742 - RNA, 19 nt, Human
acaggaucuugaggaaggc

SEQ ID NO: 138743 - RNA, 23 nt, Human
acccaagcaaagcaaacuuugcc

SEQ ID NO: 138744 - RNA, 21 nt, Human
agcaagacaggaucuugagga

SEQ ID NO: 138745 - RNA, 21 nt, Human
agcaagacaggaucuugagga

SEQ ID NO: 138746 - RNA, 22 nt, Human
agcagacaaugaaggccccaag

SEQ ID NO: 138747 - RNA, 21 nt, Human
aggcaguguccuggcagaugc

SEQ ID NO: 138748 - RNA, 23 nt, Human
augaaaugaacagaaagaaauca

SEQ ID NO: 138749 - RNA, 23 nt, Human
caacucuccuccucuuucuugga

SEQ ID NO: 138750 - RNA, 20 nt, Human
caaugaaggccccaagcaca

SEQ ID NO: 138751 - RNA, 21 nt, Human
cagacaaugaaggccccaagc

SEQ ID NO: 138752 - RNA, 18 nt, Human
cagacauacccaagcaaa

SEQ ID NO: 138753 - RNA, 18 nt, Human
cagcaagacaggaucuug

SEQ ID NO: 138754 - RNA, 18 nt, Human
cagcaagacaggaucuug

SEQ ID NO: 138755 - RNA, 19 nt, Human
cagcagacaaugaaggccc

SEQ ID NO: 138756 - RNA, 23 nt, Human
cagcagacauacccaagcaaagc

SEQ ID NO: 138757 - RNA, 23 nt, Human
caggggccccagcuucaaagaug

SEQ ID NO: 138758 - RNA, 22 nt, Human
cauuuuugccucuaaggugaaa

SEQ ID NO: 138759 - RNA, 22 nt, Human
ccaccauuuggguugccuucuu

SEQ ID NO: 138760 - RNA, 21 nt, Human
ccccaagcacaauggccacca

SEQ ID NO: 138761 - RNA, 18 nt, Human
cccgaaguggcacucccc

SEQ ID NO: 138762 - RNA, 22 nt, Human
ccgagucuucuccucucuuuuc

SEQ ID NO: 138763 - RNA, 26 nt, Human
ccugguccacccaaggcaguguccug

SEQ ID NO: 138764 - RNA, 21 nt, Human
cgagucuucuccucucuuuuc

SEQ ID NO: 138765 - RNA, 22 nt, Human
cuuugccuuucucaggacucag

SEQ ID NO: 138766 - RNA, 19 nt, Human
gaagggcagccagcagaca

SEQ ID NO: 138767 - RNA, 21 nt, Human
gacaaugaaggccccaagcac

SEQ ID NO: 138768 - RNA, 21 nt, Human
gacagcagacauacccaagca

SEQ ID NO: 138769 - RNA, 19 nt, Human
gaucacaggguugagggcg

SEQ ID NO: 138770 - RNA, 19 nt, Human
gaucacaggguugagggcg

SEQ ID NO: 138771 - RNA, 21 nt, Human
gcagacauacccaagcaaagc

SEQ ID NO: 138772 - RNA, 21 nt, Human
gccccaagcacaauggccacc

SEQ ID NO: 138773 - RNA, 27 nt, Human
gguauugagaacaugggucaagaagaa

SEQ ID NO: 138774 - RNA, 20 nt, Human
ggugggacucagggaauucc

SEQ ID NO: 138775 - RNA, 20 nt, Human
uagugcauguuucauagcug

SEQ ID NO: 138776 - RNA, 21 nt, Human
ucuaagcugagcuugggcgcu

SEQ ID NO: 138777 - RNA, 18 nt, Human
ucucaggacucagaaacu

SEQ ID NO: 138778 - RNA, 18 nt, Human
ugaaaugaacagaaagaa

SEQ ID NO: 138779 - RNA, 22 nt, Human
ugaaaugaacagaaagaaauca

SEQ ID NO: 138780 - RNA, 22 nt, Human
ugacagcagacauacccaagca

SEQ ID NO: 138781 - RNA, 25 nt, Human
ugacagcagacauacccaagcaaag

SEQ ID NO: 138782 - RNA, 18 nt, Human
ugaugccaaggggcuucc

SEQ ID NO: 138783 - RNA, 23 nt, Human
ugccuucuucucccgaaguggca

SEQ ID NO: 138784 - RNA, 21 nt, Human
uggcagaugcuguaguaacgc

SEQ ID NO: 138785 - RNA, 22 nt, Human
ugguccacccaaggcagugucc

SEQ ID NO: 138786 - RNA, 24 nt, Human
uggugggacucagggaauuccgag

SEQ ID NO: 138787 - RNA, 20 nt, Human
uucaacucuccuccucuuuc

SEQ ID NO: 138788 - RNA, 22 nt, Human
uucaacucuccuccucuuucuu

SEQ ID NO: 138789 - RNA, 21 nt, Human
uuucucaggacucagaaacua

SEQ ID NO: 138790 - RNA, 23 nt, Human
caaaagcgcccuccccaucuccu

SEQ ID NO: 138791 - RNA, 19 nt, Human
cuccccaucuccuuggucc

SEQ ID NO: 138792 - RNA, 19 nt, Human
cuccccaucuccuuggucc

SEQ ID NO: 138793 - RNA, 21 nt, Human
ucaggccggggggcguccggg

SEQ ID NO: 138794 - RNA, 18 nt, Human
uccccaucuccuuggucc

SEQ ID NO: 138795 - RNA, 23 nt, Human
uuggucccugaggccuggccauc

SEQ ID NO: 138796 - RNA, 21 nt, Human
aagaggcccccaccagcacag

SEQ ID NO: 138797 - RNA, 22 nt, Human
accacaucacugcacacacaca

SEQ ID NO: 138798 - RNA, 21 nt, Human
acugcacacacacacaaccug

SEQ ID NO: 138799 - RNA, 22 nt, Human
agugacugaacaagccauuugu

SEQ ID NO: 138800 - RNA, 24 nt, Human
agugacugaacaagccauuuguuu

SEQ ID NO: 138801 - RNA, 18 nt, Human
augauaaagggagcagca

SEQ ID NO: 138802 - RNA, 22 nt, Human
auugcaacugauucugccaauu

SEQ ID NO: 138803 - RNA, 21 nt, Human
caaacacaaacaagugacuga

SEQ ID NO: 138804 - RNA, 22 nt, Human
cagcacagagagaagaaaugac

SEQ ID NO: 138805 - RNA, 21 nt, Human
ccagcaccauacucucuucuc

SEQ ID NO: 138806 - RNA, 19 nt, Human
ccauuuguuuaaaaaggga

SEQ ID NO: 138807 - RNA, 22 nt, Human
cccaacuucagcccugccucgu

SEQ ID NO: 138808 - RNA, 20 nt, Human
cccaccacaucacugcacac

SEQ ID NO: 138809 - RNA, 22 nt, Human
cccaccacaucacugcacacac

SEQ ID NO: 138810 - RNA, 23 nt, Human
cccaccacaucacugcacacaca

SEQ ID NO: 138811 - RNA, 25 nt, Human
cccaccacaucacugcacacacaca

SEQ ID NO: 138812 - RNA, 22 nt, Human
gauaaagggagcagcacuggaa

SEQ ID NO: 138813 - RNA, 20 nt, Human
gcacagagagaagaaaugac

SEQ ID NO: 138814 - RNA, 21 nt, Human
gcauguauuugcgugugugug

SEQ ID NO: 138815 - RNA, 22 nt, Human
gcuggacugcaggggcggucug

SEQ ID NO: 138816 - RNA, 20 nt, Human
ggacugcaggggcggucugu

SEQ ID NO: 138817 - RNA, 23 nt, Human
gggaauccagacccaggaaagcu

SEQ ID NO: 138818 - RNA, 20 nt, Human
gguacauuugacugaguuua

SEQ ID NO: 138819 - RNA, 23 nt, Human
uagacaccagaauaaaucaggga

SEQ ID NO: 138820 - RNA, 19 nt, Human
ucaaacacaaacaagugac

SEQ ID NO: 138821 - RNA, 19 nt, Human
ucccaacuucagcccugcc

SEQ ID NO: 138822 - RNA, 20 nt, Human
ucccaacuucagcccugccu

SEQ ID NO: 138823 - RNA, 19 nt, Human
ugacugaacaagccauuug

SEQ ID NO: 138824 - RNA, 19 nt, Human
ugguaaagaggcccccacc

SEQ ID NO: 138825 - RNA, 21 nt, Human
ugugugcgugcuugucaguga

SEQ ID NO: 138826 - RNA, 19 nt, Human
uuuuuuuuuuuaaggaccc

SEQ ID NO: 138827 - RNA, 18 nt, Human
aaaacccccaugagaggg

SEQ ID NO: 138828 - RNA, 20 nt, Human
aaauagcagagacuugaggg

SEQ ID NO: 138829 - RNA, 24 nt, Human
acccaaacaggcccagcuaccagc

SEQ ID NO: 138830 - RNA, 24 nt, Human
acuacaaacucaaaacccccauga

SEQ ID NO: 138831 - RNA, 20 nt, Human
agcacuacaaacucaaaacc

SEQ ID NO: 138832 - RNA, 19 nt, Human
agcagccacagccuccagg

SEQ ID NO: 138833 - RNA, 18 nt, Human
agcugagggagugaggug

SEQ ID NO: 138834 - RNA, 22 nt, Human
aggcccuggcuggcgggcaugu

SEQ ID NO: 138835 - RNA, 23 nt, Human
aggcuguggagggugucagcugg

SEQ ID NO: 138836 - RNA, 21 nt, Human
aucugcuuuaggcccuggcug

SEQ ID NO: 138837 - RNA, 22 nt, Human
cacuacaaacucaaaaccccca

SEQ ID NO: 138838 - RNA, 18 nt, Human
cacugguucccaucaugg

SEQ ID NO: 138839 - RNA, 20 nt, Human
cagacagcgguggcggcggc

SEQ ID NO: 138840 - RNA, 24 nt, Human
cagacagcgguggcggcggcaccu

SEQ ID NO: 138841 - RNA, 25 nt, Human
cagcacuacaaacucaaaaccccca

SEQ ID NO: 138842 - RNA, 18 nt, Human
cagcagccacagccucca

SEQ ID NO: 138843 - RNA, 20 nt, Human
cagcagccacagccuccagg

SEQ ID NO: 138844 - RNA, 18 nt, Human
cagcugggccuuugaagc

SEQ ID NO: 138845 - RNA, 19 nt, Human
cagugcagggggcugggag

SEQ ID NO: 138846 - RNA, 19 nt, Human
caugugggcaacuugcucc

SEQ ID NO: 138847 - RNA, 22 nt, Human
ccaacacacucuucgucugccu

SEQ ID NO: 138848 - RNA, 18 nt, Human
ccagccuggcacugagca

SEQ ID NO: 138849 - RNA, 21 nt, Human
cccaaacaggcccagcuacca

SEQ ID NO: 138850 - RNA, 21 nt, Human
cccaaggggguuuccuccugg

SEQ ID NO: 138851 - RNA, 21 nt, Human
cccagugggaccaccucccca

SEQ ID NO: 138852 - RNA, 22 nt, Human
ccccaggcgugcagagccaggg

SEQ ID NO: 138853 - RNA, 21 nt, Human
cccccaugagagggcucaguc

SEQ ID NO: 138854 - RNA, 23 nt, Human
cccugggagggggaauacagggg

SEQ ID NO: 138855 - RNA, 24 nt, Human
cccugggagggggaauacaggggg

SEQ ID NO: 138856 - RNA, 23 nt, Human
ccuccaaccgagccccuuugccc

SEQ ID NO: 138857 - RNA, 18 nt, Human
ccuggcacugagcaugcc

SEQ ID NO: 138858 - RNA, 21 nt, Human
ccuguguggggcacccaaggg

SEQ ID NO: 138859 - RNA, 22 nt, Human
cucagcacuacaaacucaaaac

SEQ ID NO: 138860 - RNA, 23 nt, Human
cuccaaccgagccccuuugcccc

SEQ ID NO: 138861 - RNA, 24 nt, Human
cuccagggacccaaacaggcccag

SEQ ID NO: 138862 - RNA, 18 nt, Human
cugcccugggagggggaa

SEQ ID NO: 138863 - RNA, 21 nt, Human
cuuugccccaacacacucuuc

SEQ ID NO: 138864 - RNA, 18 nt, Human
gagagcccuguguggggc

SEQ ID NO: 138865 - RNA, 18 nt, Human
gcagagccaggguccugg

SEQ ID NO: 138866 - RNA, 18 nt, Human
ggagaacuggggacuuag

SEQ ID NO: 138867 - RNA, 19 nt, Human
ggcaagagcugagggagug

SEQ ID NO: 138868 - RNA, 19 nt, Human
gggaauacagggggaggcc

SEQ ID NO: 138869 - RNA, 20 nt, Human
gguagcagcagaggugggcg

SEQ ID NO: 138870 - RNA, 23 nt, Human
gugccaugacagcagccacagcc

SEQ ID NO: 138871 - RNA, 19 nt, Human
uacaaacucaaaaccccca

SEQ ID NO: 138872 - RNA, 18 nt, Human
ucagcacuacaaacucaa

SEQ ID NO: 138873 - RNA, 22 nt, Human
ucagucuuaugggaaaugccuc

SEQ ID NO: 138874 - RNA, 21 nt, Human
ucccagugggaccaccucccc

SEQ ID NO: 138875 - RNA, 21 nt, Human
uccuaaacucaaaagucccug

SEQ ID NO: 138876 - RNA, 21 nt, Human
ugagagggcucagucuuaugg

SEQ ID NO: 138877 - RNA, 20 nt, Human
ugagggagugaggugccaug

SEQ ID NO: 138878 - RNA, 21 nt, Human
ugaggugccaugacagcagcc

SEQ ID NO: 138879 - RNA, 18 nt, Human
ugccaugacagcagccac

SEQ ID NO: 138880 - RNA, 21 nt, Human
ugccaugacagcagccacagc

SEQ ID NO: 138881 - RNA, 26 nt, Human
ugccccaacacacucuucgucugccu

SEQ ID NO: 138882 - RNA, 22 nt, Human
ugcccugggagggggaauacag

SEQ ID NO: 138883 - RNA, 18 nt, Human
ugcugggcaggggcugcc

SEQ ID NO: 138884 - RNA, 23 nt, Human
uggaagggcccccaacccaagug

SEQ ID NO: 138885 - RNA, 23 nt, Human
uggagagcccuguguggggcacc

SEQ ID NO: 138886 - RNA, 20 nt, Human
uggcaagagcugagggagug

SEQ ID NO: 138887 - RNA, 24 nt, Human
ugggccuuugaagccacuaaccac

SEQ ID NO: 138888 - RNA, 18 nt, Human
ugggguuuugugcugggc

SEQ ID NO: 138889 - RNA, 21 nt, Human
uguguggggcacccaaggggg

SEQ ID NO: 138890 - RNA, 23 nt, Human
uucagaaaggagagccaggagaa

SEQ ID NO: 138891 - RNA, 23 nt, Human
uuccugggguacguguauuugua

SEQ ID NO: 138892 - RNA, 20 nt, Human
uugaagccacuaaccacugg

SEQ ID NO: 138893 - RNA, 19 nt, Human
aaagcaacaagaaaaaaac

SEQ ID NO: 138894 - RNA, 20 nt, Human
aagagaacuaaagcagacaa

SEQ ID NO: 138895 - RNA, 21 nt, Human
aagcagacaaaaaugaaaaca

SEQ ID NO: 138896 - RNA, 27 nt, Human
acaaaacccccgaaaccucuuaaaaac

SEQ ID NO: 138897 - RNA, 19 nt, Human
acaccagagccuucggucc

SEQ ID NO: 138898 - RNA, 22 nt, Human
acagagaaaaaaaaauuuccca

SEQ ID NO: 138899 - RNA, 21 nt, Human
accaccaccaccaccaccacc

SEQ ID NO: 138900 - RNA, 24 nt, Human
accaccaccaccaccaccaccacc

SEQ ID NO: 138901 - RNA, 21 nt, Human
accaccaccaccaccacgggc

SEQ ID NO: 138902 - RNA, 24 nt, Human
accaccaccaccaccacgggcgcu

SEQ ID NO: 138903 - RNA, 25 nt, Human
acccccgaaaccucuuaaaaacccu

SEQ ID NO: 138904 - RNA, 20 nt, Human
acguauauauauauauauaa

SEQ ID NO: 138905 - RNA, 22 nt, Human
agacaaaaaugaaaacacacag

SEQ ID NO: 138906 - RNA, 23 nt, Human
agagaaaaaaaaauuucccaaag

SEQ ID NO: 138907 - RNA, 25 nt, Human
aggaacacaaauauauagcuauaua

SEQ ID NO: 138908 - RNA, 20 nt, Human
agggggcccggccgcacugc

SEQ ID NO: 138909 - RNA, 18 nt, Human
agggggcgggggcggggg

SEQ ID NO: 138910 - RNA, 24 nt, Human
agggggcgggggcgggggccgccg

SEQ ID NO: 138911 - RNA, 21 nt, Human
aggguggcagggggcgggggc

SEQ ID NO: 138912 - RNA, 19 nt, Human
auauauauauauauauaua

SEQ ID NO: 138913 - RNA, 19 nt, Human
auauauauauauauauaua

SEQ ID NO: 138914 - RNA, 19 nt, Human
auauauauauauauauaua

SEQ ID NO: 138915 - RNA, 19 nt, Human
auauauauauauauauaua

SEQ ID NO: 138916 - RNA, 19 nt, Human
auauauauauauauauaua

SEQ ID NO: 138917 - RNA, 19 nt, Human
auauauauauauauauaua

SEQ ID NO: 138918 - RNA, 23 nt, Human
aucuuuuuucuuuucuuuuuggc

SEQ ID NO: 138919 - RNA, 18 nt, Human
caaaacccccgaaaccuc

SEQ ID NO: 138920 - RNA, 22 nt, Human
caaagcaacaagaaaaaaacaa

SEQ ID NO: 138921 - RNA, 25 nt, Human
caaagcaacaagaaaaaaacaaaaa

SEQ ID NO: 138922 - RNA, 19 nt, Human
caaauauauagcuauauag

SEQ ID NO: 138923 - RNA, 23 nt, Human
caacaagaaaaaaacaaaaauuc

SEQ ID NO: 138924 - RNA, 25 nt, Human
caagaaaaaaacaaaaauucaguga

SEQ ID NO: 138925 - RNA, 20 nt, Human
cacaacaaaacccccgaaac

SEQ ID NO: 138926 - RNA, 23 nt, Human
cacaacaaaacccccgaaaccuc

SEQ ID NO: 138927 - RNA, 19 nt, Human
cacacagugcagggaugua

SEQ ID NO: 138928 - RNA, 21 nt, Human
caccaccaccaccaccacggg

SEQ ID NO: 138929 - RNA, 22 nt, Human
caccaccaccaccaccacgggc

SEQ ID NO: 138930 - RNA, 21 nt, Human
cacgagaagcugggaguggug

SEQ ID NO: 138931 - RNA, 20 nt, Human
cacugcuguggggccaaacc

SEQ ID NO: 138932 - RNA, 20 nt, Human
cacuggacacgagaagcugg

SEQ ID NO: 138933 - RNA, 19 nt, Human
cagcuguggcuccuuucug

SEQ ID NO: 138934 - RNA, 25 nt, Human
ccaaagcaacaagaaaaaaacaaaa

SEQ ID NO: 138935 - RNA, 26 nt, Human
ccaaagcaacaagaaaaaaacaaaaa

SEQ ID NO: 138936 - RNA, 21 nt, Human
ccaccaccaccaccaccacca

SEQ ID NO: 138937 - RNA, 21 nt, Human
ccaccaccaccaccaccacca

SEQ ID NO: 138938 - RNA, 23 nt, Human
ccaccaccaccaccaccaccacc

SEQ ID NO: 138939 - RNA, 23 nt, Human
ccaccaccaccaccaccaccacc

SEQ ID NO: 138940 - RNA, 23 nt, Human
ccaccaccaccaccaccaccacc

SEQ ID NO: 138941 - RNA, 24 nt, Human
ccaccaccaccaccaccaccacgg

SEQ ID NO: 138942 - RNA, 20 nt, Human
ccaccaccaccaccacgggc

SEQ ID NO: 138943 - RNA, 18 nt, Human
ccaccuggacccccugcc

SEQ ID NO: 138944 - RNA, 21 nt, Human
cccaccuggacccccugccca

SEQ ID NO: 138945 - RNA, 19 nt, Human
cccccaagaauaaaauaga

SEQ ID NO: 138946 - RNA, 21 nt, Human
cccccgaaaccucuuaaaaac

SEQ ID NO: 138947 - RNA, 22 nt, Human
cccccgaaaccucuuaaaaacc

SEQ ID NO: 138948 - RNA, 23 nt, Human
cccccgaaaccucuuaaaaaccc

SEQ ID NO: 138949 - RNA, 19 nt, Human
ccccgaaaccucuuaaaaa

SEQ ID NO: 138950 - RNA, 22 nt, Human
ccccgaaaccucuuaaaaaccc

SEQ ID NO: 138951 - RNA, 21 nt, Human
cccuccccacccguaucuucc

SEQ ID NO: 138952 - RNA, 25 nt, Human
cccuccccacccguaucuuccgcca

SEQ ID NO: 138953 - RNA, 23 nt, Human
cccugcccaggccggcgggcucc

SEQ ID NO: 138954 - RNA, 20 nt, Human
cccugggaaacgucugccuc

SEQ ID NO: 138955 - RNA, 18 nt, Human
ccguaucuuccgccaucc

SEQ ID NO: 138956 - RNA, 26 nt, Human
ccugcggcccgggccaccaccaccac

SEQ ID NO: 138957 - RNA, 20 nt, Human
ccugcggggagggggcccgg

SEQ ID NO: 138958 - RNA, 22 nt, Human
cguauauauauauauauauaua

SEQ ID NO: 138959 - RNA, 22 nt, Human
cgugggggccgcgggggagccg

SEQ ID NO: 138960 - RNA, 25 nt, Human
cuaaagcagacaaaaaugaaaacac

SEQ ID NO: 138961 - RNA, 26 nt, Human
cuaaagcagacaaaaaugaaaacaca

SEQ ID NO: 138962 - RNA, 20 nt, Human
cuccaggguggguggcgggu

SEQ ID NO: 138963 - RNA, 20 nt, Human
cuccuuucuggauaucuucc

SEQ ID NO: 138964 - RNA, 24 nt, Human
cucucugaauguccaaaaccugag

SEQ ID NO: 138965 - RNA, 23 nt, Human
cugcagcgugggggccgcggggg

SEQ ID NO: 138966 - RNA, 18 nt, Human
cuggacccccugcccagg

SEQ ID NO: 138967 - RNA, 20 nt, Human
cuggacccccugcccaggcc

SEQ ID NO: 138968 - RNA, 25 nt, Human
cuggccccuguguggcccaccugga

SEQ ID NO: 138969 - RNA, 22 nt, Human
gaaaauaaaagagaacuaaagc

SEQ ID NO: 138970 - RNA, 18 nt, Human
gaacuaaagcagacaaaa

SEQ ID NO: 138971 - RNA, 21 nt, Human
gcagcgugggggccgcggggg

SEQ ID NO: 138972 - RNA, 20 nt, Human
gccucuuucuguuuuucuga

SEQ ID NO: 138973 - RNA, 19 nt, Human
ggaguggugaguguguggu

SEQ ID NO: 138974 - RNA, 20 nt, Human
ggcccgggccaccaccacca

SEQ ID NO: 138975 - RNA, 22 nt, Human
gggcagugcaggguggcagggg

SEQ ID NO: 138976 - RNA, 20 nt, Human
gggccaaaccagacaccaga

SEQ ID NO: 138977 - RNA, 18 nt, Human
gggcgcuaggggugggcg

SEQ ID NO: 138978 - RNA, 22 nt, Human
ggggcgggggccgccgggcuca

SEQ ID NO: 138979 - RNA, 22 nt, Human
ggugaauagaaaauaaaagaga

SEQ ID NO: 138980 - RNA, 22 nt, Human
gugaguguguggugaauagaaa

SEQ ID NO: 138981 - RNA, 22 nt, Human
guguggcccaccuggacccccu

SEQ ID NO: 138982 - RNA, 22 nt, Human
uaaaagagaacuaaagcagaca

SEQ ID NO: 138983 - RNA, 22 nt, Human
uacguauauauauauauauaua

SEQ ID NO: 138984 - RNA, 23 nt, Human
uagauauccuuuuccuaagguuu

SEQ ID NO: 138985 - RNA, 21 nt, Human
uaggggugggcggcgggggcg

SEQ ID NO: 138986 - RNA, 18 nt, Human
uauacguauauauauaua

SEQ ID NO: 138987 - RNA, 19 nt, Human
uauacguauauauauauau

SEQ ID NO: 138988 - RNA, 20 nt, Human
uauauauacguauauauaua

SEQ ID NO: 138989 - RNA, 20 nt, Human
uauauauacguauauauaua

SEQ ID NO: 138990 - RNA, 23 nt, Human
uauauauacguauauauauauau

SEQ ID NO: 138991 - RNA, 18 nt, Human
uauauauauacguauaua

SEQ ID NO: 138992 - RNA, 19 nt, Human
uauauauauauauauauau

SEQ ID NO: 138993 - RNA, 19 nt, Human
uauauauauauauauauau

SEQ ID NO: 138994 - RNA, 19 nt, Human
uauauauauauauauauau

SEQ ID NO: 138995 - RNA, 19 nt, Human
uauauauauauauauauau

SEQ ID NO: 138996 - RNA, 19 nt, Human
uauauauauauauauauau

SEQ ID NO: 138997 - RNA, 22 nt, Human
uauuuacacaacaaaacccccg

SEQ ID NO: 138998 - RNA, 18 nt, Human
ucgguccaucagggcugc

SEQ ID NO: 138999 - RNA, 20 nt, Human
ucucugaauguccaaaaccu

SEQ ID NO: 139000 - RNA, 21 nt, Human
ucucugaauguccaaaaccug

SEQ ID NO: 139001 - RNA, 21 nt, Human
ucugccucuuucuguuuuucu

SEQ ID NO: 139002 - RNA, 21 nt, Human
ucuggauaucuucccuccccc

SEQ ID NO: 139003 - RNA, 23 nt, Human
ucuuuuuucuuuucuuuuuggcg

SEQ ID NO: 139004 - RNA, 24 nt, Human
ugaaggaacacaaauauauagcua

SEQ ID NO: 139005 - RNA, 20 nt, Human
ugagguaaacaggaucggcc

SEQ ID NO: 139006 - RNA, 21 nt, Human
ugagguaaacaggaucggccc

SEQ ID NO: 139007 - RNA, 23 nt, Human
ugaucuugguucagggguuucac

SEQ ID NO: 139008 - RNA, 21 nt, Human
ugcaggguggcagggggcggg

SEQ ID NO: 139009 - RNA, 18 nt, Human
ugccugaacgcccuggga

SEQ ID NO: 139010 - RNA, 23 nt, Human
ugccugaacgcccugggaaacgu

SEQ ID NO: 139011 - RNA, 24 nt, Human
ugcggggagggggcccggccgcac

SEQ ID NO: 139012 - RNA, 18 nt, Human
uggauaucuucccucccc

SEQ ID NO: 139013 - RNA, 20 nt, Human
uggcccaccuggacccccug

SEQ ID NO: 139014 - RNA, 22 nt, Human
ugggaguggugaguguguggug

SEQ ID NO: 139015 - RNA, 21 nt, Human
ugggcggcgggggcggccccu

SEQ ID NO: 139016 - RNA, 24 nt, Human
ugggcggcgggggcggccccugcg

SEQ ID NO: 139017 - RNA, 18 nt, Human
uggugaguguguggugaa

SEQ ID NO: 139018 - RNA, 19 nt, Human
uguccaaaaccugagaaau

SEQ ID NO: 139019 - RNA, 20 nt, Human
uucccaaagcaacaagaaaa

SEQ ID NO: 139020 - RNA, 24 nt, Human
uucccaaagcaacaagaaaaaaac

SEQ ID NO: 139021 - RNA, 24 nt, Human
uuccuugguuuuccccuguuuuau

SEQ ID NO: 139022 - RNA, 20 nt, Human
uugcuuuuucaagaccaguu

SEQ ID NO: 139023 - RNA, 23 nt, Human
uuuacacaacaaaacccccgaaa

SEQ ID NO: 139024 - RNA, 22 nt, Human
uuuauauauauacguauauaua

SEQ ID NO: 139025 - RNA, 32 nt, Human
uuuauauauauacguauauauauauauauuau

SEQ ID NO: 139026 - RNA, 22 nt, Human
uuucuggauaucuucccucccc

SEQ ID NO: 139027 - RNA, 22 nt, Human
uuucuggauaucuucccucccc

SEQ ID NO: 139028 - RNA, 22 nt, Human
aaaccaaggcucauggggggga

SEQ ID NO: 139029 - RNA, 23 nt, Human
aaaggcuuugaccggaaccagga

SEQ ID NO: 139030 - RNA, 22 nt, Human
aagcaccucuuagcuuuguuga

SEQ ID NO: 139031 - RNA, 23 nt, Human
aagcaggcggcaguguaagcugg

SEQ ID NO: 139032 - RNA, 22 nt, Human
aaggcucaugggggggaugagg

SEQ ID NO: 139033 - RNA, 19 nt, Human
aaggcugaggaaaggcuuu

SEQ ID NO: 139034 - RNA, 21 nt, Human
aaggcugaggaaaggcuuuga

SEQ ID NO: 139035 - RNA, 21 nt, Human
acucucccucugucucuccca

SEQ ID NO: 139036 - RNA, 22 nt, Human
agaaagguacuuaaagggcuga

SEQ ID NO: 139037 - RNA, 24 nt, Human
agaagaaucaugccuccccuucuc

SEQ ID NO: 139038 - RNA, 20 nt, Human
agaucccugcugcugcccag

SEQ ID NO: 139039 - RNA, 23 nt, Human
aggcggcaguguaagcugggagg

SEQ ID NO: 139040 - RNA, 19 nt, Human
aucaugccuccccuucucc

SEQ ID NO: 139041 - RNA, 21 nt, Human
cagaagaaucaugccuccccu

SEQ ID NO: 139042 - RNA, 18 nt, Human
caugcaccucacauacca

SEQ ID NO: 139043 - RNA, 21 nt, Human
ccccuucucccaucacugccc

SEQ ID NO: 139044 - RNA, 19 nt, Human
ccggggcugggcugccucu

SEQ ID NO: 139045 - RNA, 23 nt, Human
ccucacauaccaccagaucccug

SEQ ID NO: 139046 - RNA, 18 nt, Human
ccugcugcugcccagagc

SEQ ID NO: 139047 - RNA, 23 nt, Human
cucaugggggggaugaggauagg

SEQ ID NO: 139048 - RNA, 19 nt, Human
gggaugaggauaggcagug

SEQ ID NO: 139049 - RNA, 19 nt, Human
uaccaccagaucccugcug

SEQ ID NO: 139050 - RNA, 18 nt, Human
ucaugggggggaugagga

SEQ ID NO: 139051 - RNA, 22 nt, Human
ucccucugucucucccacuucc

SEQ ID NO: 139052 - RNA, 18 nt, Human
ucugucucucccacuucc

SEQ ID NO: 139053 - RNA, 20 nt, Human
ugaggaaaggcuuugaccgg

SEQ ID NO: 139054 - RNA, 18 nt, Human
ugcccgcaugcaccucac

SEQ ID NO: 139055 - RNA, 21 nt, Human
ugcccgcaugcaccucacaua

SEQ ID NO: 139056 - RNA, 21 nt, Human
ugcuguaugcacacucucccu

SEQ ID NO: 139057 - RNA, 19 nt, Human
ugggaggccggggcugggc

SEQ ID NO: 139058 - RNA, 24 nt, Human
ugggcugccucugugaaucagcga

SEQ ID NO: 139059 - RNA, 24 nt, Human
aacugagcagcacccucuuggcuc

SEQ ID NO: 139060 - RNA, 21 nt, Human
aaguuccccacagcugugguc

SEQ ID NO: 139061 - RNA, 23 nt, Human
acaaggaagagagaccuggucca

SEQ ID NO: 139062 - RNA, 21 nt, Human
accugguccaagauucugugc

SEQ ID NO: 139063 - RNA, 24 nt, Human
acuuuugcaggaucuguuuucaau

SEQ ID NO: 139064 - RNA, 24 nt, Human
agcacccucuuggcucuggguggc

SEQ ID NO: 139065 - RNA, 19 nt, Human
agcagcacccucuuggcuc

SEQ ID NO: 139066 - RNA, 18 nt, Human
agcugcggaggcccugca

SEQ ID NO: 139067 - RNA, 22 nt, Human
agggaucggggaggggcagggg

SEQ ID NO: 139068 - RNA, 18 nt, Human
agggcacgguggggggag

SEQ ID NO: 139069 - RNA, 18 nt, Human
agggcacgguggggggag

SEQ ID NO: 139070 - RNA, 20 nt, Human
caaugaaaccugcugguagc

SEQ ID NO: 139071 - RNA, 23 nt, Human
cacagggguugggcaugggggag

SEQ ID NO: 139072 - RNA, 20 nt, Human
caccccaaguuccccacagc

SEQ ID NO: 139073 - RNA, 22 nt, Human
caggccaagggcacgguggggg

SEQ ID NO: 139074 - RNA, 20 nt, Human
cauauagauauuuauauaua

SEQ ID NO: 139075 - RNA, 21 nt, Human
ccaccuccccaccucugcaca

SEQ ID NO: 139076 - RNA, 21 nt, Human
ccccauccucgccaccucccc

SEQ ID NO: 139077 - RNA, 23 nt, Human
ccccauccucgccaccuccccac

SEQ ID NO: 139078 - RNA, 24 nt, Human
cccucccucccccacucucugucc

SEQ ID NO: 139079 - RNA, 24 nt, Human
ccucgccaccuccccaccucugca

SEQ ID NO: 139080 - RNA, 18 nt, Human
cggggaggggcaggggug

SEQ ID NO: 139081 - RNA, 21 nt, Human
cgguggggggagggugggggu

SEQ ID NO: 139082 - RNA, 22 nt, Human
cucccucccccacucucugucc

SEQ ID NO: 139083 - RNA, 18 nt, Human
cucuuggcucuggguggc

SEQ ID NO: 139084 - RNA, 20 nt, Human
cucuuggcucuggguggcag

SEQ ID NO: 139085 - RNA, 19 nt, Human
cuggcuggcuccgagcggg

SEQ ID NO: 139086 - RNA, 20 nt, Human
cugugcgcuuucugucccca

SEQ ID NO: 139087 - RNA, 24 nt, Human
gaccccauucuccucugccugggc

SEQ ID NO: 139088 - RNA, 25 nt, Human
gagaaaagcaggggggaccgguacc

SEQ ID NO: 139089 - RNA, 22 nt, Human
gauuccgggcuccggcgccucu

SEQ ID NO: 139090 - RNA, 24 nt, Human
gccaccuccccaccucugcacacc

SEQ ID NO: 139091 - RNA, 18 nt, Human
gcccugcaacugagcagc

SEQ ID NO: 139092 - RNA, 22 nt, Human
gcugaauacagaaacuucucug

SEQ ID NO: 139093 - RNA, 23 nt, Human
ggaagcaggaucuccaaguuucc

SEQ ID NO: 139094 - RNA, 23 nt, Human
ggagaccccauucuccucugccu

SEQ ID NO: 139095 - RNA, 20 nt, Human
ggagggugggggugcuccaa

SEQ ID NO: 139096 - RNA, 20 nt, Human
ggaucggggaggggcagggg

SEQ ID NO: 139097 - RNA, 18 nt, Human
gggaagcaggaucuccaa

SEQ ID NO: 139098 - RNA, 24 nt, Human
gggaagcaggaucuccaaguuucc

SEQ ID NO: 139099 - RNA, 20 nt, Human
ggggaggggcagggguggca

SEQ ID NO: 139100 - RNA, 18 nt, Human
ggggagggugggggugcu

SEQ ID NO: 139101 - RNA, 24 nt, Human
ggggagggugggggugcuccaagg

SEQ ID NO: 139102 - RNA, 19 nt, Human
guggggaaggggcaagggg

SEQ ID NO: 139103 - RNA, 21 nt, Human
uccagugugggcaccuggaac

SEQ ID NO: 139104 - RNA, 25 nt, Human
uccagugugggcaccuggaacuuuu

SEQ ID NO: 139105 - RNA, 21 nt, Human
uccccaccucugcacaccaca

SEQ ID NO: 139106 - RNA, 24 nt, Human
uccucgccaccuccccaccucugc

SEQ ID NO: 139107 - RNA, 28 nt, Human
ucgggacggcuggcuggcuccgagcggg

SEQ ID NO: 139108 - RNA, 23 nt, Human
ucuccucugccugggcagcugaa

SEQ ID NO: 139109 - RNA, 21 nt, Human
ucugcacaccacaucgggccu

SEQ ID NO: 139110 - RNA, 19 nt, Human
ucugcuccaccccaaguuc

SEQ ID NO: 139111 - RNA, 19 nt, Human
ucugucugucccucccucc

SEQ ID NO: 139112 - RNA, 21 nt, Human
ugagcagcacccucuuggcuc

SEQ ID NO: 139113 - RNA, 20 nt, Human
ugcacaccacaucgggccuu

SEQ ID NO: 139114 - RNA, 23 nt, Human
uggcacacgaugcuacgcaaaac

SEQ ID NO: 139115 - RNA, 19 nt, Human
uggcaggccaagggcacgg

SEQ ID NO: 139116 - RNA, 20 nt, Human
uggcuggcuccgagcgggau

SEQ ID NO: 139117 - RNA, 18 nt, Human
uggggggagggugggggu

SEQ ID NO: 139118 - RNA, 19 nt, Human
uggguggcaggccaagggc

SEQ ID NO: 139119 - RNA, 21 nt, Human
uguccccauccucgccaccuc

SEQ ID NO: 139120 - RNA, 21 nt, Human
uguggggaaggggcaaggggc

SEQ ID NO: 139121 - RNA, 23 nt, Human
uucucugcuccaccccaaguucc

SEQ ID NO: 139122 - RNA, 22 nt, Human
uucugucugucccucccucccc

SEQ ID NO: 139123 - RNA, 27 nt, Human
uucugucugucccucccucccccacuc

SEQ ID NO: 139124 - RNA, 25 nt, Human
aaaacugaagauugcacugaagaau

SEQ ID NO: 139125 - RNA, 25 nt, Human
aaaacugaagauugcacugaagaau

SEQ ID NO: 139126 - RNA, 22 nt, Human
aauauauacaugcauauaaaag

SEQ ID NO: 139127 - RNA, 23 nt, Human
acaaaaacauuagcagaugcugc

SEQ ID NO: 139128 - RNA, 23 nt, Human
acaaaaacauuagcagaugcugc

SEQ ID NO: 139129 - RNA, 22 nt, Human
acccuuaccuauacaugacaaa

SEQ ID NO: 139130 - RNA, 22 nt, Human
acccuuaccuauacaugacaaa

SEQ ID NO: 139131 - RNA, 21 nt, Human
acugagccggccagagaaccu

SEQ ID NO: 139132 - RNA, 24 nt, Human
agcgauucuccugccucagccucc

SEQ ID NO: 139133 - RNA, 24 nt, Human
agcgauucuccugccucagccucc

SEQ ID NO: 139134 - RNA, 22 nt, Human
aggcaagugauaaacaguagga

SEQ ID NO: 139135 - RNA, 23 nt, Human
aggcuggagugcaguggcaaucu

SEQ ID NO: 139136 - RNA, 23 nt, Human
aggcuggagugcaguggcaaucu

SEQ ID NO: 139137 - RNA, 20 nt, Human
agggcugcaauucuuucaug

SEQ ID NO: 139138 - RNA, 20 nt, Human
agggcugcaauucuuucaug

SEQ ID NO: 139139 - RNA, 22 nt, Human
agugcaguggcaaucucggcuc

SEQ ID NO: 139140 - RNA, 22 nt, Human
agugcaguggcaaucucggcuc

SEQ ID NO: 139141 - RNA, 21 nt, Human
auccugaaagaaaacaaugcu

SEQ ID NO: 139142 - RNA, 21 nt, Human
auccugaaagaaaacaaugcu

SEQ ID NO: 139143 - RNA, 20 nt, Human
augacaaaguuuaccuccau

SEQ ID NO: 139144 - RNA, 20 nt, Human
augacaaaguuuaccuccau

SEQ ID NO: 139145 - RNA, 21 nt, Human
augcaaagaggcuuuccuaca

SEQ ID NO: 139146 - RNA, 25 nt, Human
caacgggagaauuucuuucccccua

SEQ ID NO: 139147 - RNA, 22 nt, Human
caagcgauucuccugccucagc

SEQ ID NO: 139148 - RNA, 22 nt, Human
caagcgauucuccugccucagc

SEQ ID NO: 139149 - RNA, 19 nt, Human
cacagagcggcuaagaaga

SEQ ID NO: 139150 - RNA, 21 nt, Human
caccaacuauguucuaagaac

SEQ ID NO: 139151 - RNA, 21 nt, Human
caccaacuauguucuaagaac

SEQ ID NO: 139152 - RNA, 21 nt, Human
caccauguccggcuaauuucu

SEQ ID NO: 139153 - RNA, 21 nt, Human
caccauguccggcuaauuucu

SEQ ID NO: 139154 - RNA, 21 nt, Human
cacugcaaccuccgccuccug

SEQ ID NO: 139155 - RNA, 21 nt, Human
cacugcaaccuccgccuccug

SEQ ID NO: 139156 - RNA, 20 nt, Human
cagccuccugaguagcuggg

SEQ ID NO: 139157 - RNA, 20 nt, Human
cagccuccugaguagcuggg

SEQ ID NO: 139158 - RNA, 21 nt, Human
cagcuuucccaaaugcucuuc

SEQ ID NO: 139159 - RNA, 21 nt, Human
cagcuuucccaaaugcucuuc

SEQ ID NO: 139160 - RNA, 18 nt, Human
cagguggagagaaugcaa

SEQ ID NO: 139161 - RNA, 18 nt, Human
cagguggagagaaugcaa

SEQ ID NO: 139162 - RNA, 20 nt, Human
cagguggagagaaugcaauu

SEQ ID NO: 139163 - RNA, 20 nt, Human
cagguggagagaaugcaauu

SEQ ID NO: 139164 - RNA, 18 nt, Human
cagucccaauggccaggg

SEQ ID NO: 139165 - RNA, 21 nt, Human
ccacagauaaggcaggccuau

SEQ ID NO: 139166 - RNA, 21 nt, Human
ccacagauaaggcaggccuau

SEQ ID NO: 139167 - RNA, 24 nt, Human
ccgccuccuggauucaagcgauuc

SEQ ID NO: 139168 - RNA, 24 nt, Human
ccgccuccuggauucaagcgauuc

SEQ ID NO: 139169 - RNA, 26 nt, Human
ccuauacaugacaaaguuuaccucca

SEQ ID NO: 139170 - RNA, 26 nt, Human
ccuauacaugacaaaguuuaccucca

SEQ ID NO: 139171 - RNA, 25 nt, Human
ccuccauaaacaaaaacauuagcag

SEQ ID NO: 139172 - RNA, 25 nt, Human
ccuccauaaacaaaaacauuagcag

SEQ ID NO: 139173 - RNA, 24 nt, Human
ccuccuggauucaagcgauucucc

SEQ ID NO: 139174 - RNA, 24 nt, Human
ccuccuggauucaagcgauucucc

SEQ ID NO: 139175 - RNA, 19 nt, Human
ccucuauaauacccagcuu

SEQ ID NO: 139176 - RNA, 19 nt, Human
ccucuauaauacccagcuu

SEQ ID NO: 139177 - RNA, 22 nt, Human
ccugaguagcugggauuacagu

SEQ ID NO: 139178 - RNA, 22 nt, Human
ccugaguagcugggauuacagu

SEQ ID NO: 139179 - RNA, 23 nt, Human
ccugccucagccuccugaguagc

SEQ ID NO: 139180 - RNA, 23 nt, Human
ccugccucagccuccugaguagc

SEQ ID NO: 139181 - RNA, 24 nt, Human
ccugccucagccuccugaguagcu

SEQ ID NO: 139182 - RNA, 23 nt, Human
ccuggauucaagcgauucuccug

SEQ ID NO: 139183 - RNA, 23 nt, Human
ccuggauucaagcgauucuccug

SEQ ID NO: 139184 - RNA, 24 nt, Human
cgcucuuguugcccaggcuggagu

SEQ ID NO: 139185 - RNA, 24 nt, Human
cgcucuuguugcccaggcuggagu

SEQ ID NO: 139186 - RNA, 26 nt, Human
cuagaaacuccagucccucuucuucc

SEQ ID NO: 139187 - RNA, 22 nt, Human
cuauucccuggccagucuccuu

SEQ ID NO: 139188 - RNA, 24 nt, Human
cucacugcaaccuccgccuccugg

SEQ ID NO: 139189 - RNA, 24 nt, Human
cucacugcaaccuccgccuccugg

SEQ ID NO: 139190 - RNA, 24 nt, Human
cucagccuccugaguagcugggau

SEQ ID NO: 139191 - RNA, 24 nt, Human
cucagccuccugaguagcugggau

SEQ ID NO: 139192 - RNA, 21 nt, Human
cucuuguugcccaggcuggag

SEQ ID NO: 139193 - RNA, 22 nt, Human
cugaaagaaaacaaugcuggga

SEQ ID NO: 139194 - RNA, 22 nt, Human
cugaaagaaaacaaugcuggga

SEQ ID NO: 139195 - RNA, 23 nt, Human
cugcaaccuccgccuccuggauu

SEQ ID NO: 139196 - RNA, 23 nt, Human
cugcaaccuccgccuccuggauu

SEQ ID NO: 139197 - RNA, 24 nt, Human
cugcaaccuccgccuccuggauuc

SEQ ID NO: 139198 - RNA, 23 nt, Human
cugccucagccuccugaguagcu

SEQ ID NO: 139199 - RNA, 23 nt, Human
cuggagugcaguggcaaucucgg

SEQ ID NO: 139200 - RNA, 21 nt, Human
cugggagcacugcucugagga

SEQ ID NO: 139201 - RNA, 21 nt, Human
cugggagcacugcucugagga

SEQ ID NO: 139202 - RNA, 24 nt, Human
cuuguugcccaggcuggagugcag

SEQ ID NO: 139203 - RNA, 24 nt, Human
cuuguugcccaggcuggagugcag

SEQ ID NO: 139204 - RNA, 19 nt, Human
gaaaacaaugcugggagca

SEQ ID NO: 139205 - RNA, 19 nt, Human
gaaaacaaugcugggagca

SEQ ID NO: 139206 - RNA, 20 nt, Human
gaaaucuucucauguaaucu

SEQ ID NO: 139207 - RNA, 21 nt, Human
gaaaucuucucauguaaucuu

SEQ ID NO: 139208 - RNA, 18 nt, Human
gaacauauuuaauucgua

SEQ ID NO: 139209 - RNA, 18 nt, Human
gaacauauuuaauucgua

SEQ ID NO: 139210 - RNA, 21 nt, Human
gagcuuguucugguccuuauc

SEQ ID NO: 139211 - RNA, 21 nt, Human
gagcuuguucugguccuuauc

SEQ ID NO: 139212 - RNA, 25 nt, Human
gaguagcugggauuacagucauucg

SEQ ID NO: 139213 - RNA, 25 nt, Human
gaguagcugggauuacagucauucg

SEQ ID NO: 139214 - RNA, 21 nt, Human
gaguugcagccuaaugcauca

SEQ ID NO: 139215 - RNA, 21 nt, Human
gaguugcagccuaaugcauca

SEQ ID NO: 139216 - RNA, 20 nt, Human
gauaacagggcagccuggga

SEQ ID NO: 139217 - RNA, 22 nt, Human
gauuacagucauucgccaccau

SEQ ID NO: 139218 - RNA, 24 nt, Human
gauuacagucauucgccaccaugu

SEQ ID NO: 139219 - RNA, 22 nt, Human
gcaaccuccgccuccuggauuc

SEQ ID NO: 139220 - RNA, 22 nt, Human
gcacugaagaauacuuaaaagu

SEQ ID NO: 139221 - RNA, 22 nt, Human
gcacugaagaauacuuaaaagu

SEQ ID NO: 139222 - RNA, 20 nt, Human
gcagaugcugcuaacauucu

SEQ ID NO: 139223 - RNA, 19 nt, Human
gcccaggcuggagugcagu

SEQ ID NO: 139224 - RNA, 23 nt, Human
gcgauucuccugccucagccucc

SEQ ID NO: 139225 - RNA, 24 nt, Human
gcgauucuccugccucagccuccu

SEQ ID NO: 139226 - RNA, 24 nt, Human
gcucuuguugcccaggcuggagug

SEQ ID NO: 139227 - RNA, 21 nt, Human
gcugcaauucuuucauggaaa

SEQ ID NO: 139228 - RNA, 21 nt, Human
gcugcaauucuuucauggaaa

SEQ ID NO: 139229 - RNA, 22 nt, Human
gcuggagugcaguggcaaucuc

SEQ ID NO: 139230 - RNA, 22 nt, Human
gcuggagugcaguggcaaucuc

SEQ ID NO: 139231 - RNA, 19 nt, Human
ggcagccugggaugcacag

SEQ ID NO: 139232 - RNA, 18 nt, Human
ggccagagaaccuuugcc

SEQ ID NO: 139233 - RNA, 19 nt, Human
ggccagauaacagggcagc

SEQ ID NO: 139234 - RNA, 18 nt, Human
ggccucuauaauacccag

SEQ ID NO: 139235 - RNA, 18 nt, Human
ggccucuauaauacccag

SEQ ID NO: 139236 - RNA, 20 nt, Human
gggcagccugggaugcacag

SEQ ID NO: 139237 - RNA, 23 nt, Human
gucccuaauucugacugcccauu

SEQ ID NO: 139238 - RNA, 25 nt, Human
uaaaagagaauuaacaaacaaaacc

SEQ ID NO: 139239 - RNA, 25 nt, Human
uaaaagagaauuaacaaacaaaacc

SEQ ID NO: 139240 - RNA, 22 nt, Human
uaaaguaacuguaaauuuaggc

SEQ ID NO: 139241 - RNA, 22 nt, Human
uaaaguaacuguaaauuuaggc

SEQ ID NO: 139242 - RNA, 24 nt, Human
uaaaugcaaagaggcuuuccuaca

SEQ ID NO: 139243 - RNA, 24 nt, Human
uaauuucuuauauuuuuaguagag

SEQ ID NO: 139244 - RNA, 24 nt, Human
uaauuucuuauauuuuuaguagag

SEQ ID NO: 139245 - RNA, 19 nt, Human
uacccuuaccuauacauga

SEQ ID NO: 139246 - RNA, 19 nt, Human
uacccuuaccuauacauga

SEQ ID NO: 139247 - RNA, 19 nt, Human
uagcagaugcugcuaacau

SEQ ID NO: 139248 - RNA, 19 nt, Human
uagcagaugcugcuaacau

SEQ ID NO: 139249 - RNA, 22 nt, Human
uagcagaugcugcuaacauucu

SEQ ID NO: 139250 - RNA, 19 nt, Human
uaucuggcaccaacuaugu

SEQ ID NO: 139251 - RNA, 19 nt, Human
uaucuggcaccaacuaugu

SEQ ID NO: 139252 - RNA, 19 nt, Human
uauucugcugccaccuuga

SEQ ID NO: 139253 - RNA, 19 nt, Human
ucaagcgauucuccugccu

SEQ ID NO: 139254 - RNA, 19 nt, Human
ucaagcgauucuccugccu

SEQ ID NO: 139255 - RNA, 19 nt, Human
ucacugcaaccuccgccuc

SEQ ID NO: 139256 - RNA, 19 nt, Human
ucacugcaaccuccgccuc

SEQ ID NO: 139257 - RNA, 23 nt, Human
ucacugcaaccuccgccuccugg

SEQ ID NO: 139258 - RNA, 23 nt, Human
ucacugcaaccuccgccuccugg

SEQ ID NO: 139259 - RNA, 24 nt, Human
ucacugcaaccuccgccuccugga

SEQ ID NO: 139260 - RNA, 24 nt, Human
ucacugcaaccuccgccuccugga

SEQ ID NO: 139261 - RNA, 27 nt, Human
ucacugcaaccuccgccuccuggauuc

SEQ ID NO: 139262 - RNA, 27 nt, Human
ucacugcaaccuccgccuccuggauuc

SEQ ID NO: 139263 - RNA, 20 nt, Human
ucagccuccugaguagcugg

SEQ ID NO: 139264 - RNA, 20 nt, Human
ucagccuccugaguagcugg

SEQ ID NO: 139265 - RNA, 18 nt, Human
ucauucgccaccaugucc

SEQ ID NO: 139266 - RNA, 18 nt, Human
ucauucgccaccaugucc

SEQ ID NO: 139267 - RNA, 20 nt, Human
ucauuggccucuauaauacc

SEQ ID NO: 139268 - RNA, 20 nt, Human
ucauuggccucuauaauacc

SEQ ID NO: 139269 - RNA, 22 nt, Human
ucccuaauucugacugcccauu

SEQ ID NO: 139270 - RNA, 21 nt, Human
ucccuggccagucuccuuccu

SEQ ID NO: 139271 - RNA, 23 nt, Human
uccugaguagcugggauuacagu

SEQ ID NO: 139272 - RNA, 23 nt, Human
uccugaguagcugggauuacagu

SEQ ID NO: 139273 - RNA, 21 nt, Human
uccuggauucaagcgauucuc

SEQ ID NO: 139274 - RNA, 21 nt, Human
uccuggauucaagcgauucuc

SEQ ID NO: 139275 - RNA, 24 nt, Human
uccuggauucaagcgauucuccug

SEQ ID NO: 139276 - RNA, 24 nt, Human
uccuggauucaagcgauucuccug

SEQ ID NO: 139277 - RNA, 22 nt, Human
ucgcucuuguugcccaggcugg

SEQ ID NO: 139278 - RNA, 22 nt, Human
ucgcucuuguugcccaggcugg

SEQ ID NO: 139279 - RNA, 23 nt, Human
ucgcucuuguugcccaggcugga

SEQ ID NO: 139280 - RNA, 23 nt, Human
ucgcucuuguugcccaggcugga

SEQ ID NO: 139281 - RNA, 24 nt, Human
ucuccugccucagccuccugagua

SEQ ID NO: 139282 - RNA, 24 nt, Human
ucuccugccucagccuccugagua

SEQ ID NO: 139283 - RNA, 22 nt, Human
ucuuguugcccaggcuggagug

SEQ ID NO: 139284 - RNA, 22 nt, Human
ucuuguugcccaggcuggagug

SEQ ID NO: 139285 - RNA, 24 nt, Human
ugaaagaaaacaaugcugggagca

SEQ ID NO: 139286 - RNA, 24 nt, Human
ugaaagaaaacaaugcugggagca

SEQ ID NO: 139287 - RNA, 24 nt, Human
ugacaaaguuuaccuccauaaaca

SEQ ID NO: 139288 - RNA, 24 nt, Human
ugacaaaguuuaccuccauaaaca

SEQ ID NO: 139289 - RNA, 21 nt, Human
ugaccuaacaacaaauccaca

SEQ ID NO: 139290 - RNA, 21 nt, Human
ugaccuaacaacaaauccaca

SEQ ID NO: 139291 - RNA, 21 nt, Human
ugauaaacaguaggaggagca

SEQ ID NO: 139292 - RNA, 23 nt, Human
ugcaaagaggcuuuccuacaagu

SEQ ID NO: 139293 - RNA, 20 nt, Human
ugcaguggcaaucucggcuc

SEQ ID NO: 139294 - RNA, 20 nt, Human
ugcaugucuuugcuaauguc

SEQ ID NO: 139295 - RNA, 18 nt, Human
ugcccaggcuggagugca

SEQ ID NO: 139296 - RNA, 18 nt, Human
ugcccaggcuggagugca

SEQ ID NO: 139297 - RNA, 21 nt, Human
ugcccaggcuggagugcagug

SEQ ID NO: 139298 - RNA, 21 nt, Human
ugcccaggcuggagugcagug

SEQ ID NO: 139299 - RNA, 22 nt, Human
ugcccaggcuggagugcagugg

SEQ ID NO: 139300 - RNA, 22 nt, Human
ugcccaggcuggagugcagugg

SEQ ID NO: 139301 - RNA, 24 nt, Human
ugcccaggcuggagugcaguggca

SEQ ID NO: 139302 - RNA, 24 nt, Human
ugcccaggcuggagugcaguggca

SEQ ID NO: 139303 - RNA, 24 nt, Human
ugccucagccuccugaguagcugg

SEQ ID NO: 139304 - RNA, 24 nt, Human
ugccucagccuccugaguagcugg

SEQ ID NO: 139305 - RNA, 22 nt, Human
ugcuccucaucuuguccacaca

SEQ ID NO: 139306 - RNA, 19 nt, Human
ugcuuggagauggcaggug

SEQ ID NO: 139307 - RNA, 19 nt, Human
ugcuuggagauggcaggug

SEQ ID NO: 139308 - RNA, 24 nt, Human
uggaaaucuucucauguaaucuuc

SEQ ID NO: 139309 - RNA, 24 nt, Human
uggaaaucuucucauguaaucuuc

SEQ ID NO: 139310 - RNA, 21 nt, Human
uggaccucagggcugcaauuc

SEQ ID NO: 139311 - RNA, 21 nt, Human
uggaccucagggcugcaauuc

SEQ ID NO: 139312 - RNA, 20 nt, Human
uggagugcaguggcaaucuc

SEQ ID NO: 139313 - RNA, 20 nt, Human
uggagugcaguggcaaucuc

SEQ ID NO: 139314 - RNA, 22 nt, Human
uggagugcaguggcaaucucgg

SEQ ID NO: 139315 - RNA, 22 nt, Human
uggagugcaguggcaaucucgg

SEQ ID NO: 139316 - RNA, 24 nt, Human
uggauucaagcgauucuccugccu

SEQ ID NO: 139317 - RNA, 21 nt, Human
ugggauuacagucauucgcca

SEQ ID NO: 139318 - RNA, 21 nt, Human
ugggauuacagucauucgcca

SEQ ID NO: 139319 - RNA, 24 nt, Human
ugggauuacagucauucgccacca

SEQ ID NO: 139320 - RNA, 24 nt, Human
ugggauuacagucauucgccacca

SEQ ID NO: 139321 - RNA, 22 nt, Human
ugguuuggaagacaguccggag

SEQ ID NO: 139322 - RNA, 22 nt, Human
uguaaauuuaggcugagucuua

SEQ ID NO: 139323 - RNA, 22 nt, Human
uguaaauuuaggcugagucuua

SEQ ID NO: 139324 - RNA, 18 nt, Human
uuaguagaguggggguuu

SEQ ID NO: 139325 - RNA, 18 nt, Human
uuaguagaguggggguuu

SEQ ID NO: 139326 - RNA, 21 nt, Human
uucaagcgauucuccugccuc

SEQ ID NO: 139327 - RNA, 21 nt, Human
uucaagcgauucuccugccuc

SEQ ID NO: 139328 - RNA, 23 nt, Human
uucaagcgauucuccugccucag

SEQ ID NO: 139329 - RNA, 23 nt, Human
uucaagcgauucuccugccucag

SEQ ID NO: 139330 - RNA, 24 nt, Human
uucaagcgauucuccugccucagc

SEQ ID NO: 139331 - RNA, 24 nt, Human
uucaagcgauucuccugccucagc

SEQ ID NO: 139332 - RNA, 19 nt, Human
uuccugccgaucgcugcag

SEQ ID NO: 139333 - RNA, 24 nt, Human
uucgcucuuguugcccaggcugga

SEQ ID NO: 139334 - RNA, 24 nt, Human
uucgcucuuguugcccaggcugga

SEQ ID NO: 139335 - RNA, 21 nt, Human
uugaagaacauauuuaauucg

SEQ ID NO: 139336 - RNA, 21 nt, Human
uugaagaacauauuuaauucg

SEQ ID NO: 139337 - RNA, 24 nt, Human
uugcccaggcuggagugcaguggc

SEQ ID NO: 139338 - RNA, 24 nt, Human
uugcccaggcuggagugcaguggc

SEQ ID NO: 139339 - RNA, 20 nt, Human
uuggaagacaguccggaggc

SEQ ID NO: 139340 - RNA, 20 nt, Human
uuggccucuauaauacccag

SEQ ID NO: 139341 - RNA, 20 nt, Human
uuggccucuauaauacccag

SEQ ID NO: 139342 - RNA, 24 nt, Human
uuucgcucuuguugcccaggcugg

SEQ ID NO: 139343 - RNA, 24 nt, Human
uuucgcucuuguugcccaggcugg

SEQ ID NO: 139344 - RNA, 20 nt, Human
uuugcaaauaaaaggugcaa

SEQ ID NO: 139345 - RNA, 19 nt, Human
uuuuuaguagagugggggu

SEQ ID NO: 139346 - RNA, 25 nt, Human
uuuuuuuuuuuugagacggaguuuc

SEQ ID NO: 139347 - RNA, 25 nt, Human
uuuuuuuuuuuugagacggaguuuc

SEQ ID NO: 139348 - RNA, 22 nt, Human
uuuuuuuuuuuuuugagacgga

SEQ ID NO: 139349 - RNA, 22 nt, Human
uuuuuuuuuuuuuugagacgga

SEQ ID NO: 139350 - RNA, 18 nt, Human
uuuuuuuuuuuuuuuuug

SEQ ID NO: 139351 - RNA, 18 nt, Human
uuuuuuuuuuuuuuuuug

SEQ ID NO: 139352 - RNA, 20 nt, Human
aaaaggucacauuacaagaa

SEQ ID NO: 139353 - RNA, 20 nt, Human
aaaaggucacauuacaagaa

SEQ ID NO: 139354 - RNA, 21 nt, Human
aaauaaugagagaaaaacccc

SEQ ID NO: 139355 - RNA, 21 nt, Human
aaauaaugagagaaaaacccc

SEQ ID NO: 139356 - RNA, 22 nt, Human
aagcgccugccucucauccaag

SEQ ID NO: 139357 - RNA, 25 nt, Human
acagugaaaaggucacauuacaaga

SEQ ID NO: 139358 - RNA, 25 nt, Human
acagugaaaaggucacauuacaaga

SEQ ID NO: 139359 - RNA, 25 nt, Human
acucaucucuucaugcaugcuucug

SEQ ID NO: 139360 - RNA, 22 nt, Human
acugcaacaaccuacagaccca

SEQ ID NO: 139361 - RNA, 27 nt, Human
aggaaaacaacaguuuccaagcaccac

SEQ ID NO: 139362 - RNA, 27 nt, Human
aggaaaacaacaguuuccaagcaccac

SEQ ID NO: 139363 - RNA, 24 nt, Human
aucucuucaugcaugcuucugcua

SEQ ID NO: 139364 - RNA, 21 nt, Human
caaauaaugagagaaaaaccc

SEQ ID NO: 139365 - RNA, 21 nt, Human
caaauaaugagagaaaaaccc

SEQ ID NO: 139366 - RNA, 24 nt, Human
caacaaccuacagacccagccacc

SEQ ID NO: 139367 - RNA, 19 nt, Human
caagcaccacaugaacacu

SEQ ID NO: 139368 - RNA, 21 nt, Human
caagcaccacaugaacacuuu

SEQ ID NO: 139369 - RNA, 18 nt, Human
caggaggagcgcgaggcg

SEQ ID NO: 139370 - RNA, 22 nt, Human
cccgcugcucaggaggagcgcg

SEQ ID NO: 139371 - RNA, 19 nt, Human
ccuacagacccagccaccg

SEQ ID NO: 139372 - RNA, 22 nt, Human
cggagcgcagucugggcccgcu

SEQ ID NO: 139373 - RNA, 19 nt, Human
cuccaaauuauccaaaaau

SEQ ID NO: 139374 - RNA, 21 nt, Human
cugcaacaaccuacagaccca

SEQ ID NO: 139375 - RNA, 24 nt, Human
cuucuugucguucacugcaacaac

SEQ ID NO: 139376 - RNA, 23 nt, Human
gaaaaacccccacaaauagcauc

SEQ ID NO: 139377 - RNA, 23 nt, Human
gaaaaacccccacaaauagcauc

SEQ ID NO: 139378 - RNA, 19 nt, Human
gaaugcagucuacacacuu

SEQ ID NO: 139379 - RNA, 19 nt, Human
gaaugcagucuacacacuu

SEQ ID NO: 139380 - RNA, 24 nt, Human
gaggagguggggcgcgcggagagg

SEQ ID NO: 139381 - RNA, 19 nt, Human
gaggcggaggagguggggc

SEQ ID NO: 139382 - RNA, 22 nt, Human
gagggcuccgcggggcgagggc

SEQ ID NO: 139383 - RNA, 22 nt, Human
ggagcgcagucugggcccgcug

SEQ ID NO: 139384 - RNA, 25 nt, Human
ggcaugcuugugauuuuccucagag

SEQ ID NO: 139385 - RNA, 21 nt, Human
ggccggagcgcagucugggcc

SEQ ID NO: 139386 - RNA, 23 nt, Human
ggcucggggcaggucgcgggccg

SEQ ID NO: 139387 - RNA, 20 nt, Human
gggcucggggcaggucgcgg

SEQ ID NO: 139388 - RNA, 23 nt, Human
uaaggcagacuuuaauuucucug

SEQ ID NO: 139389 - RNA, 23 nt, Human
uaaggcagacuuuaauuucucug

SEQ ID NO: 139390 - RNA, 24 nt, Human
uacagacccagccaccgauccucu

SEQ ID NO: 139391 - RNA, 18 nt, Human
uagaacacacucaucucu

SEQ ID NO: 139392 - RNA, 18 nt, Human
uagaacacacucaucucu

SEQ ID NO: 139393 - RNA, 18 nt, Human
uccaaaaauucaagccca

SEQ ID NO: 139394 - RNA, 19 nt, Human
uccaaaaauucaagcccau

SEQ ID NO: 139395 - RNA, 21 nt, Human
uccauccaaauaaugagagaa

SEQ ID NO: 139396 - RNA, 21 nt, Human
uccauccaaauaaugagagaa

SEQ ID NO: 139397 - RNA, 24 nt, Human
ugaaaaggucacauuacaagaaua

SEQ ID NO: 139398 - RNA, 24 nt, Human
ugaaaaggucacauuacaagaaua

SEQ ID NO: 139399 - RNA, 21 nt, Human
ugaccaaagagauuccaucca

SEQ ID NO: 139400 - RNA, 21 nt, Human
ugaccaaagagauuccaucca

SEQ ID NO: 139401 - RNA, 22 nt, Human
ugaccaaagagauuccauccaa

SEQ ID NO: 139402 - RNA, 22 nt, Human
ugaccaaagagauuccauccaa

SEQ ID NO: 139403 - RNA, 24 nt, Human
ugggcuccaaauuauccaaaaauu

SEQ ID NO: 139404 - RNA, 24 nt, Human
aaaaaacaccucaucucuggaccc

SEQ ID NO: 139405 - RNA, 24 nt, Human
aaaaaacaccucaucucuggaccc

SEQ ID NO: 139406 - RNA, 23 nt, Human
aaaaacaccucaucucuggaccc

SEQ ID NO: 139407 - RNA, 23 nt, Human
aaaaacaccucaucucuggaccc

SEQ ID NO: 139408 - RNA, 19 nt, Human
aaaaccuggagucacuuaa

SEQ ID NO: 139409 - RNA, 19 nt, Human
aaaaccuggagucacuuaa

SEQ ID NO: 139410 - RNA, 25 nt, Human
aaaagaagacgacuuuaaacggaaa

SEQ ID NO: 139411 - RNA, 23 nt, Human
aaacggaaaacaaggccgggagc

SEQ ID NO: 139412 - RNA, 23 nt, Human
aaacggaaaacaaggccgggagc

SEQ ID NO: 139413 - RNA, 18 nt, Human
aaacugauuaaaaauuaa

SEQ ID NO: 139414 - RNA, 18 nt, Human
aaacugauuaaaaauuaa

SEQ ID NO: 139415 - RNA, 18 nt, Human
aaaugccuucagacucau

SEQ ID NO: 139416 - RNA, 18 nt, Human
aaaugccuucagacucau

SEQ ID NO: 139417 - RNA, 19 nt, Human
aacacagugaaaccccguc

SEQ ID NO: 139418 - RNA, 19 nt, Human
aacacagugaaaccccguc

SEQ ID NO: 139419 - RNA, 20 nt, Human
aacacagugaaaccccgucu

SEQ ID NO: 139420 - RNA, 20 nt, Human
aacacagugaaaccccgucu

SEQ ID NO: 139421 - RNA, 21 nt, Human
aacacagugaaaccccgucuc

SEQ ID NO: 139422 - RNA, 21 nt, Human
aacacagugaaaccccgucuc

SEQ ID NO: 139423 - RNA, 24 nt, Human
aacauugcaaaacaaaccccacug

SEQ ID NO: 139424 - RNA, 24 nt, Human
aacauugcaaaacaaaccccacug

SEQ ID NO: 139425 - RNA, 19 nt, Human
aaccccagcugcagcgagu

SEQ ID NO: 139426 - RNA, 19 nt, Human
aaccccagcugcagcgagu

SEQ ID NO: 139427 - RNA, 20 nt, Human
aaggaugguggaaaaccugg

SEQ ID NO: 139428 - RNA, 20 nt, Human
aaggaugguggaaaaccugg

SEQ ID NO: 139429 - RNA, 20 nt, Human
aagguaaguuuuaaaauguu

SEQ ID NO: 139430 - RNA, 20 nt, Human
aagguaaguuuuaaaauguu

SEQ ID NO: 139431 - RNA, 21 nt, Human
acaguggguguuucaguagcc

SEQ ID NO: 139432 - RNA, 21 nt, Human
acauugcaaaacaaaccccac

SEQ ID NO: 139433 - RNA, 21 nt, Human
acauugcaaaacaaaccccac

SEQ ID NO: 139434 - RNA, 24 nt, Human
accccgucucuauuaaaaauacaa

SEQ ID NO: 139435 - RNA, 24 nt, Human
accccgucucuauuaaaaauacaa

SEQ ID NO: 139436 - RNA, 23 nt, Human
acuccaaauaaggugagccauag

SEQ ID NO: 139437 - RNA, 23 nt, Human
acuccaaauaaggugagccauag

SEQ ID NO: 139438 - RNA, 24 nt, Human
acugcacuccagccugugcgucag

SEQ ID NO: 139439 - RNA, 24 nt, Human
acugcacuccagccugugcgucag

SEQ ID NO: 139440 - RNA, 26 nt, Human
acugcacuccagccugugcgucagag

SEQ ID NO: 139441 - RNA, 26 nt, Human
acugcacuccagccugugcgucagag

SEQ ID NO: 139442 - RNA, 19 nt, Human
acuuguggaugcagaaauc

SEQ ID NO: 139443 - RNA, 19 nt, Human
acuuguggaugcagaaauc

SEQ ID NO: 139444 - RNA, 21 nt, Human
agaaaacagaaaauguaggaa

SEQ ID NO: 139445 - RNA, 21 nt, Human
agaaaacagaaaauguaggaa

SEQ ID NO: 139446 - RNA, 23 nt, Human
agaauagaaacagcaauagagga

SEQ ID NO: 139447 - RNA, 20 nt, Human
agagaaaagaauuacaaauu

SEQ ID NO: 139448 - RNA, 20 nt, Human
agagaaaagaauuacaaauu

SEQ ID NO: 139449 - RNA, 24 nt, Human
agcacuuugggaggccgaggcagg

SEQ ID NO: 139450 - RNA, 24 nt, Human
agcacuuugggaggccgaggcagg

SEQ ID NO: 139451 - RNA, 23 nt, Human
agccgggcgugguggugggcgcc

SEQ ID NO: 139452 - RNA, 23 nt, Human
agccgggcgugguggugggcgcc

SEQ ID NO: 139453 - RNA, 25 nt, Human
agcucugucuccuugauuucucacu

SEQ ID NO: 139454 - RNA, 25 nt, Human
agcucugucuccuugauuucucacu

SEQ ID NO: 139455 - RNA, 20 nt, Human
aggaggacaugguuauuugg

SEQ ID NO: 139456 - RNA, 21 nt, Human
aggaggacaugguuauuuggg

SEQ ID NO: 139457 - RNA, 21 nt, Human
aggcaggagaauggcaugaac

SEQ ID NO: 139458 - RNA, 24 nt, Human
aggcaggagaauggcaugaacccg

SEQ ID NO: 139459 - RNA, 24 nt, Human
aggcaggagaauggcaugaacccg

SEQ ID NO: 139460 - RNA, 20 nt, Human
aggcaggcggaucacgaggu

SEQ ID NO: 139461 - RNA, 20 nt, Human
aggcaggcggaucacgaggu

SEQ ID NO: 139462 - RNA, 24 nt, Human
aggcaggcggaucacgaggucagg

SEQ ID NO: 139463 - RNA, 24 nt, Human
aggcaggcggaucacgaggucagg

SEQ ID NO: 139464 - RNA, 26 nt, Human
aggcaggcggaucacgaggucaggag

SEQ ID NO: 139465 - RNA, 26 nt, Human
aggcaggcggaucacgaggucaggag

SEQ ID NO: 139466 - RNA, 21 nt, Human
aggccgaggcaggcggaucac

SEQ ID NO: 139467 - RNA, 21 nt, Human
aggccgaggcaggcggaucac

SEQ ID NO: 139468 - RNA, 23 nt, Human
aggccgaggcaggcggaucacga

SEQ ID NO: 139469 - RNA, 22 nt, Human
aggcggaucacgaggucaggag

SEQ ID NO: 139470 - RNA, 24 nt, Human
aggcggaucacgaggucaggagau

SEQ ID NO: 139471 - RNA, 19 nt, Human
aggcugaggcaggagaaug

SEQ ID NO: 139472 - RNA, 19 nt, Human
aggcugaggcaggagaaug

SEQ ID NO: 139473 - RNA, 23 nt, Human
agggggggggggcaauaaaaagu

SEQ ID NO: 139474 - RNA, 23 nt, Human
agggggggggggcaauaaaaagu

SEQ ID NO: 139475 - RNA, 23 nt, Human
augaauuugguagugcaguaggg

SEQ ID NO: 139476 - RNA, 23 nt, Human
augaauuugguagugcaguaggg

SEQ ID NO: 139477 - RNA, 19 nt, Human
augccuguaaucccagcac

SEQ ID NO: 139478 - RNA, 19 nt, Human
augccuguaaucccagcac

SEQ ID NO: 139479 - RNA, 20 nt, Human
augguggaaaaccuggaguc

SEQ ID NO: 139480 - RNA, 20 nt, Human
augguggaaaaccuggaguc

SEQ ID NO: 139481 - RNA, 20 nt, Human
auuacaucgaugcaauuucu

SEQ ID NO: 139482 - RNA, 20 nt, Human
auuuaagagcccaggccuag

SEQ ID NO: 139483 - RNA, 18 nt, Human
caaaccccacugcauuuu

SEQ ID NO: 139484 - RNA, 18 nt, Human
caaaccccacugcauuuu

SEQ ID NO: 139485 - RNA, 20 nt, Human
cacacacacauuuauuucca

SEQ ID NO: 139486 - RNA, 20 nt, Human
cacacacacauuuauuucca

SEQ ID NO: 139487 - RNA, 22 nt, Human
cacaguggguguuucaguagcc

SEQ ID NO: 139488 - RNA, 23 nt, Human
caccuuacacauauaaggaaaua

SEQ ID NO: 139489 - RNA, 23 nt, Human
caccuuacacauauaaggaaaua

SEQ ID NO: 139490 - RNA, 23 nt, Human
cacuccagccugugcgucagagc

SEQ ID NO: 139491 - RNA, 23 nt, Human
cacuccagccugugcgucagagc

SEQ ID NO: 139492 - RNA, 24 nt, Human
cacuccagccugugcgucagagcg

SEQ ID NO: 139493 - RNA, 24 nt, Human
cacuccagccugugcgucagagcg

SEQ ID NO: 139494 - RNA, 19 nt, Human
cacugcacuccagccugug

SEQ ID NO: 139495 - RNA, 20 nt, Human
cacugcacuccagccugugc

SEQ ID NO: 139496 - RNA, 20 nt, Human
cacugcacuccagccugugc

SEQ ID NO: 139497 - RNA, 24 nt, Human
cacugcacuccagccugugcguca

SEQ ID NO: 139498 - RNA, 24 nt, Human
cacugcacuccagccugugcguca

SEQ ID NO: 139499 - RNA, 24 nt, Human
cacugcacuccagccugugcguca

SEQ ID NO: 139500 - RNA, 25 nt, Human
cacugcacuccagccugugcgucag

SEQ ID NO: 139501 - RNA, 18 nt, Human
cagaagaagggcagugag

SEQ ID NO: 139502 - RNA, 18 nt, Human
cagaagaagggcagugag

SEQ ID NO: 139503 - RNA, 24 nt, Human
cagaaggaauacaacaauucccau

SEQ ID NO: 139504 - RNA, 24 nt, Human
cagaaggaauacaacaauucccau

SEQ ID NO: 139505 - RNA, 22 nt, Human
cagaaugucugacaaagaccua

SEQ ID NO: 139506 - RNA, 19 nt, Human
cagagcgagacuccgucuc

SEQ ID NO: 139507 - RNA, 22 nt, Human
cagagcgagacuccgucucaaa

SEQ ID NO: 139508 - RNA, 22 nt, Human
cagagcgagacuccgucucaaa

SEQ ID NO: 139509 - RNA, 25 nt, Human
cagcaacuaggcuuacagagaauuc

SEQ ID NO: 139510 - RNA, 25 nt, Human
cagcaacuaggcuuacagagaauuc

SEQ ID NO: 139511 - RNA, 24 nt, Human
cagcacuuugggaggccgaggcag

SEQ ID NO: 139512 - RNA, 24 nt, Human
cagcacuuugggaggccgaggcag

SEQ ID NO: 139513 - RNA, 26 nt, Human
cagcacuuugggaggccgaggcaggc

SEQ ID NO: 139514 - RNA, 26 nt, Human
cagcacuuugggaggccgaggcaggc

SEQ ID NO: 139515 - RNA, 25 nt, Human
cagcaggaaauuucagcaacuaggc

SEQ ID NO: 139516 - RNA, 25 nt, Human
cagcaggaaauuucagcaacuaggc

SEQ ID NO: 139517 - RNA, 24 nt, Human
cagcuacucaggaggcugaggcag

SEQ ID NO: 139518 - RNA, 24 nt, Human
cagcuacucaggaggcugaggcag

SEQ ID NO: 139519 - RNA, 25 nt, Human
cagcugcagcgaguauuccccaguu

SEQ ID NO: 139520 - RNA, 25 nt, Human
cagcugcagcgaguauuccccaguu

SEQ ID NO: 139521 - RNA, 26 nt, Human
cagcugcuuccuuauaaaaguaagaa

SEQ ID NO: 139522 - RNA, 26 nt, Human
cagcugcuuccuuauaaaaguaagaa

SEQ ID NO: 139523 - RNA, 21 nt, Human
caugaacccgggaggcggagc

SEQ ID NO: 139524 - RNA, 21 nt, Human
caugaacccgggaggcggagc

SEQ ID NO: 139525 - RNA, 20 nt, Human
caugccuguaaucccagcac

SEQ ID NO: 139526 - RNA, 24 nt, Human
caugccuguaaucccagcacuuug

SEQ ID NO: 139527 - RNA, 24 nt, Human
caugccuguaaucccagcacuuug

SEQ ID NO: 139528 - RNA, 21 nt, Human
cauuuaagagcccaggccuag

SEQ ID NO: 139529 - RNA, 18 nt, Human
ccacugcacuccagccug

SEQ ID NO: 139530 - RNA, 18 nt, Human
ccacugcacuccagccug

SEQ ID NO: 139531 - RNA, 18 nt, Human
ccacugcacuccagccug

SEQ ID NO: 139532 - RNA, 18 nt, Human
ccacugcacuccagccug

SEQ ID NO: 139533 - RNA, 19 nt, Human
ccacugcacuccagccugu

SEQ ID NO: 139534 - RNA, 19 nt, Human
ccacugcacuccagccugu

SEQ ID NO: 139535 - RNA, 21 nt, Human
ccacugcacuccagccugugc

SEQ ID NO: 139536 - RNA, 21 nt, Human
ccacugcacuccagccugugc

SEQ ID NO: 139537 - RNA, 21 nt, Human
cccacugcauuuuagacagcu

SEQ ID NO: 139538 - RNA, 21 nt, Human
cccacugcauuuuagacagcu

SEQ ID NO: 139539 - RNA, 18 nt, Human
ccccagccucauuucaag

SEQ ID NO: 139540 - RNA, 18 nt, Human
ccccagccucauuucaag

SEQ ID NO: 139541 - RNA, 22 nt, Human
ccccuggcuucucgacugucuu

SEQ ID NO: 139542 - RNA, 22 nt, Human
ccccuggcuucucgacugucuu

SEQ ID NO: 139543 - RNA, 22 nt, Human
cccucuagccucuaaacucuag

SEQ ID NO: 139544 - RNA, 22 nt, Human
cccucuagccucuaaacucuag

SEQ ID NO: 139545 - RNA, 24 nt, Human
ccuaggaaaaaguaugaagcagac

SEQ ID NO: 139546 - RNA, 21 nt, Human
ccugcaaaugccuucagacuc

SEQ ID NO: 139547 - RNA, 21 nt, Human
ccugcaaaugccuucagacuc

SEQ ID NO: 139548 - RNA, 22 nt, Human
ccugcaaaugccuucagacuca

SEQ ID NO: 139549 - RNA, 22 nt, Human
ccugcaaaugccuucagacuca

SEQ ID NO: 139550 - RNA, 26 nt, Human
ccugcaaaugccuucagaggucguaa

SEQ ID NO: 139551 - RNA, 26 nt, Human
ccugcaaaugccuucagaggucguaa

SEQ ID NO: 139552 - RNA, 23 nt, Human
ccuggcuaacacagugaaacccc

SEQ ID NO: 139553 - RNA, 23 nt, Human
ccuggcuaacacagugaaacccc

SEQ ID NO: 139554 - RNA, 24 nt, Human
ccuggcuaacacagugaaaccccg

SEQ ID NO: 139555 - RNA, 24 nt, Human
ccuggcuaacacagugaaaccccg

SEQ ID NO: 139556 - RNA, 22 nt, Human
ccuguaaucccagcacuuuggg

SEQ ID NO: 139557 - RNA, 19 nt, Human
ccuguagucccagcuacuc

SEQ ID NO: 139558 - RNA, 21 nt, Human
ccuguagucccagcuacucag

SEQ ID NO: 139559 - RNA, 21 nt, Human
ccuguagucccagcuacucag

SEQ ID NO: 139560 - RNA, 22 nt, Human
ccuguagucccagcuacucagg

SEQ ID NO: 139561 - RNA, 21 nt, Human
ccuuguggccucuccuugccc

SEQ ID NO: 139562 - RNA, 24 nt, Human
cgagaccauccuggcuaacacagu

SEQ ID NO: 139563 - RNA, 24 nt, Human
cgagaccauccuggcuaacacagu

SEQ ID NO: 139564 - RNA, 24 nt, Human
cgaggcaggcggaucacgagguca

SEQ ID NO: 139565 - RNA, 24 nt, Human
cgaggcaggcggaucacgagguca

SEQ ID NO: 139566 - RNA, 24 nt, Human
cgccuguagucccagcuacucagg

SEQ ID NO: 139567 - RNA, 24 nt, Human
cgccuguagucccagcuacucagg

SEQ ID NO: 139568 - RNA, 19 nt, Human
cgggagggugccgagagcg

SEQ ID NO: 139569 - RNA, 20 nt, Human
cuaaaacucuguuuaaaaca

SEQ ID NO: 139570 - RNA, 20 nt, Human
cuaaaacucuguuuaaaaca

SEQ ID NO: 139571 - RNA, 22 nt, Human
cucaaaaaaaaagggggggggg

SEQ ID NO: 139572 - RNA, 18 nt, Human
cucccaaaguucccucug

SEQ ID NO: 139573 - RNA, 18 nt, Human
cucccaaaguucccucug

SEQ ID NO: 139574 - RNA, 20 nt, Human
cuccccgaaaaaaacaccuc

SEQ ID NO: 139575 - RNA, 19 nt, Human
cuccccucagcucccucua

SEQ ID NO: 139576 - RNA, 19 nt, Human
cuggacccuugcuaccaaa

SEQ ID NO: 139577 - RNA, 19 nt, Human
cuggacccuugcuaccaaa

SEQ ID NO: 139578 - RNA, 18 nt, Human
cuggcuaacacagugaaa

SEQ ID NO: 139579 - RNA, 18 nt, Human
cuggcuaacacagugaaa

SEQ ID NO: 139580 - RNA, 23 nt, Human
cuuacagagaauuccauucucag

SEQ ID NO: 139581 - RNA, 23 nt, Human
cuuacagagaauuccauucucag

SEQ ID NO: 139582 - RNA, 21 nt, Human
cuuguggaugcagaaaucuug

SEQ ID NO: 139583 - RNA, 21 nt, Human
cuuguggaugcagaaaucuug

SEQ ID NO: 139584 - RNA, 21 nt, Human
cuuguggccucuccuugcccu

SEQ ID NO: 139585 - RNA, 21 nt, Human
gaaaaaguaugaagcagacga

SEQ ID NO: 139586 - RNA, 21 nt, Human
gaaaaaguaugaagcagacga

SEQ ID NO: 139587 - RNA, 19 nt, Human
gaaagaagggggcccacaa

SEQ ID NO: 139588 - RNA, 19 nt, Human
gaaagaagggggcccacaa

SEQ ID NO: 139589 - RNA, 20 nt, Human
gaaugucugacaaagaccua

SEQ ID NO: 139590 - RNA, 20 nt, Human
gacaugguuauuuggaucua

SEQ ID NO: 139591 - RNA, 20 nt, Human
gacaugguuauuuggaucua

SEQ ID NO: 139592 - RNA, 20 nt, Human
gagaacgcgggcgccgggag

SEQ ID NO: 139593 - RNA, 24 nt, Human
gagaucggagccacugcacuccag

SEQ ID NO: 139594 - RNA, 24 nt, Human
gagaucggagccacugcacuccag

SEQ ID NO: 139595 - RNA, 24 nt, Human
gagcaaaacacaguggguguuuca

SEQ ID NO: 139596 - RNA, 24 nt, Human
gagcaaaacacaguggguguuuca

SEQ ID NO: 139597 - RNA, 23 nt, Human
gagguuuuauaaacagggaagug

SEQ ID NO: 139598 - RNA, 23 nt, Human
gagguuuuauaaacagggaagug

SEQ ID NO: 139599 - RNA, 21 nt, Human
gaucggugagugagggaguga

SEQ ID NO: 139600 - RNA, 23 nt, Human
gcaauaaaaagucuaagucuaaa

SEQ ID NO: 139601 - RNA, 24 nt, Human
gcacuccagccugugcgucagagc

SEQ ID NO: 139602 - RNA, 24 nt, Human
gcacuccagccugugcgucagagc

SEQ ID NO: 139603 - RNA, 23 nt, Human
gccuguagucccagcuacucagg

SEQ ID NO: 139604 - RNA, 21 nt, Human
gcuccccgaaaaaaacaccuc

SEQ ID NO: 139605 - RNA, 21 nt, Human
gcugcuuucucccaaaguucc

SEQ ID NO: 139606 - RNA, 22 nt, Human
ggaaaaaugaaagcuuuaaaaa

SEQ ID NO: 139607 - RNA, 22 nt, Human
ggaaaaaugaaagcuuuaaaaa

SEQ ID NO: 139608 - RNA, 24 nt, Human
ggaaaaggcagugccaagccuagg

SEQ ID NO: 139609 - RNA, 24 nt, Human
ggaaaaggcagugccaagccuagg

SEQ ID NO: 139610 - RNA, 22 nt, Human
ggaauacaacaauucccaugaa

SEQ ID NO: 139611 - RNA, 22 nt, Human
ggaauacaacaauucccaugaa

SEQ ID NO: 139612 - RNA, 21 nt, Human
ggaggcggagcuuucagugag

SEQ ID NO: 139613 - RNA, 21 nt, Human
ggaggcggagcuuucagugag

SEQ ID NO: 139614 - RNA, 22 nt, Human
ggcgugguggugggcgccugua

SEQ ID NO: 139615 - RNA, 23 nt, Human
ggcuuuccuugauucaggccaau

SEQ ID NO: 139616 - RNA, 23 nt, Human
ggcuuuccuugauucaggccaau

SEQ ID NO: 139617 - RNA, 26 nt, Human
gggaaaaaugaaagcuuuaaaaauau

SEQ ID NO: 139618 - RNA, 26 nt, Human
gggaaaaaugaaagcuuuaaaaauau

SEQ ID NO: 139619 - RNA, 24 nt, Human
gggagcggugggucaugccuguaa

SEQ ID NO: 139620 - RNA, 24 nt, Human
gggagcggugggucaugccuguaa

SEQ ID NO: 139621 - RNA, 18 nt, Human
gggagggugccgagagcg

SEQ ID NO: 139622 - RNA, 19 nt, Human
gggagugagcaaaacacag

SEQ ID NO: 139623 - RNA, 23 nt, Human
gggcagggccaggagaacgcggg

SEQ ID NO: 139624 - RNA, 24 nt, Human
gggcgugguggugggcgccuguag

SEQ ID NO: 139625 - RNA, 21 nt, Human
gggucaugccuguaaucccag

SEQ ID NO: 139626 - RNA, 23 nt, Human
ggugggucaugccuguaauccca

SEQ ID NO: 139627 - RNA, 23 nt, Human
ggugggucaugccuguaauccca

SEQ ID NO: 139628 - RNA, 24 nt, Human
ggugggucaugccuguaaucccag

SEQ ID NO: 139629 - RNA, 24 nt, Human
ggugggucaugccuguaaucccag

SEQ ID NO: 139630 - RNA, 24 nt, Human
gguggugggcgccuguagucccag

SEQ ID NO: 139631 - RNA, 18 nt, Human
guaaaaaaaaaaaagagc

SEQ ID NO: 139632 - RNA, 18 nt, Human
guaaaaaaaaaaaagagc

SEQ ID NO: 139633 - RNA, 19 nt, Human
guaggacaaacuauacccc

SEQ ID NO: 139634 - RNA, 19 nt, Human
guaggacaaacuauacccc

SEQ ID NO: 139635 - RNA, 21 nt, Human
gucagagcgagacuccgucuc

SEQ ID NO: 139636 - RNA, 25 nt, Human
gucaugccuguaaucccagcacuuu

SEQ ID NO: 139637 - RNA, 25 nt, Human
gucaugccuguaaucccagcacuuu

SEQ ID NO: 139638 - RNA, 21 nt, Human
gugaggacauaaucuugggau

SEQ ID NO: 139639 - RNA, 18 nt, Human
guggccucuccuugcccu

SEQ ID NO: 139640 - RNA, 23 nt, Human
guggugggcgccuguagucccag

SEQ ID NO: 139641 - RNA, 20 nt, Human
uaaaaaaaaaaaagagcaga

SEQ ID NO: 139642 - RNA, 20 nt, Human
uaaaaaaaaaaaagagcaga

SEQ ID NO: 139643 - RNA, 21 nt, Human
uaaaaaaaaaaaagagcagau

SEQ ID NO: 139644 - RNA, 19 nt, Human
uaaaacauugcaaaacaaa

SEQ ID NO: 139645 - RNA, 19 nt, Human
uaaaacauugcaaaacaaa

SEQ ID NO: 139646 - RNA, 23 nt, Human
uaaaaguaagaaaaaacauucug

SEQ ID NO: 139647 - RNA, 23 nt, Human
uaaaaguaagaaaaaacauucug

SEQ ID NO: 139648 - RNA, 24 nt, Human
uaacacagugaaaccccgucucua

SEQ ID NO: 139649 - RNA, 24 nt, Human
uaacacagugaaaccccgucucua

SEQ ID NO: 139650 - RNA, 22 nt, Human
uaagauccuccccucagcuccc

SEQ ID NO: 139651 - RNA, 22 nt, Human
uaagauccuccccucagcuccc

SEQ ID NO: 139652 - RNA, 19 nt, Human
uaagcaacaacuggcuuua

SEQ ID NO: 139653 - RNA, 19 nt, Human
uaagcaacaacuggcuuua

SEQ ID NO: 139654 - RNA, 22 nt, Human
uacaaauaaccuacuugggcug

SEQ ID NO: 139655 - RNA, 22 nt, Human
uacaaauaaccuacuugggcug

SEQ ID NO: 139656 - RNA, 21 nt, Human
uacagagaauuccauucucag

SEQ ID NO: 139657 - RNA, 21 nt, Human
uacagagaauuccauucucag

SEQ ID NO: 139658 - RNA, 22 nt, Human
uacuaaaacucuguuuaaaaca

SEQ ID NO: 139659 - RNA, 22 nt, Human
uacuaaaacucuguuuaaaaca

SEQ ID NO: 139660 - RNA, 22 nt, Human
uacucccacccauauuccuugu

SEQ ID NO: 139661 - RNA, 22 nt, Human
uacucccacccauauuccuugu

SEQ ID NO: 139662 - RNA, 21 nt, Human
uagaaaacagaaaauguagga

SEQ ID NO: 139663 - RNA, 21 nt, Human
uagaaaacagaaaauguagga

SEQ ID NO: 139664 - RNA, 19 nt, Human
uagugcaguaggggugagu

SEQ ID NO: 139665 - RNA, 23 nt, Human
uauaaugcagcauuuaagagccc

SEQ ID NO: 139666 - RNA, 23 nt, Human
uauaaugcagcauuuaagagccc

SEQ ID NO: 139667 - RNA, 18 nt, Human
uaugagcugcaacauuuu

SEQ ID NO: 139668 - RNA, 18 nt, Human
uaugagcugcaacauuuu

SEQ ID NO: 139669 - RNA, 22 nt, Human
ucaaguuuuuaccauuuuccuc

SEQ ID NO: 139670 - RNA, 22 nt, Human
ucaaguuuuuaccauuuuccuc

SEQ ID NO: 139671 - RNA, 18 nt, Human
ucacgaggucaggagauc

SEQ ID NO: 139672 - RNA, 18 nt, Human
ucacgaggucaggagauc

SEQ ID NO: 139673 - RNA, 24 nt, Human
ucacgaggucaggagaucgagacc

SEQ ID NO: 139674 - RNA, 24 nt, Human
ucacgaggucaggagaucgagacc

SEQ ID NO: 139675 - RNA, 19 nt, Human
ucacugcagcagcccacag

SEQ ID NO: 139676 - RNA, 20 nt, Human
ucagaauuuuagauaggcau

SEQ ID NO: 139677 - RNA, 20 nt, Human
ucagaauuuuagauaggcau

SEQ ID NO: 139678 - RNA, 20 nt, Human
ucagaccaauauuuugugcc

SEQ ID NO: 139679 - RNA, 20 nt, Human
ucagaccaauauuuugugcc

SEQ ID NO: 139680 - RNA, 24 nt, Human
ucagagcgagacuccgucucaaaa

SEQ ID NO: 139681 - RNA, 24 nt, Human
ucagagcgagacuccgucucaaaa

SEQ ID NO: 139682 - RNA, 22 nt, Human
ucaugccuguaaucccagcacu

SEQ ID NO: 139683 - RNA, 22 nt, Human
ucaugccuguaaucccagcacu

SEQ ID NO: 139684 - RNA, 23 nt, Human
ucaugccuguaaucccagcacuu

SEQ ID NO: 139685 - RNA, 23 nt, Human
ucaugccuguaaucccagcacuu

SEQ ID NO: 139686 - RNA, 21 nt, Human
uccaaagucaaaugaauuugg

SEQ ID NO: 139687 - RNA, 21 nt, Human
uccaaagucaaaugaauuugg

SEQ ID NO: 139688 - RNA, 23 nt, Human
uccagccugugcgucagagcgag

SEQ ID NO: 139689 - RNA, 23 nt, Human
uccagccugugcgucagagcgag

SEQ ID NO: 139690 - RNA, 24 nt, Human
uccagccugugcgucagagcgaga

SEQ ID NO: 139691 - RNA, 24 nt, Human
uccagccugugcgucagagcgaga

SEQ ID NO: 139692 - RNA, 24 nt, Human
uccccgaaaaaaacaccucaucuc

SEQ ID NO: 139693 - RNA, 24 nt, Human
uccccgaaaaaaacaccucaucuc

SEQ ID NO: 139694 - RNA, 23 nt, Human
ucccucuagccucuaaacucuag

SEQ ID NO: 139695 - RNA, 23 nt, Human
ucccucuagccucuaaacucuag

SEQ ID NO: 139696 - RNA, 18 nt, Human
uccuugauuucucacucc

SEQ ID NO: 139697 - RNA, 18 nt, Human
uccuugauuucucacucc

SEQ ID NO: 139698 - RNA, 24 nt, Human
ucggagccacugcacuccagccug

SEQ ID NO: 139699 - RNA, 24 nt, Human
ucggagccacugcacuccagccug

SEQ ID NO: 139700 - RNA, 24 nt, Human
ucucaaaaaaaaaggggggggggg

SEQ ID NO: 139701 - RNA, 24 nt, Human
ucucuauuaaaaauacaaaaaauu

SEQ ID NO: 139702 - RNA, 24 nt, Human
ucucuauuaaaaauacaaaaaauu

SEQ ID NO: 139703 - RNA, 22 nt, Human
ucugacaaagaccuaauuguag

SEQ ID NO: 139704 - RNA, 18 nt, Human
ugaaacagacugcaaagc

SEQ ID NO: 139705 - RNA, 18 nt, Human
ugaaacagacugcaaagc

SEQ ID NO: 139706 - RNA, 21 nt, Human
ugaaggccugcaucuuccugu

SEQ ID NO: 139707 - RNA, 21 nt, Human
ugaaggccugcaucuuccugu

SEQ ID NO: 139708 - RNA, 20 nt, Human
ugacaaagaccuaauuguag

SEQ ID NO: 139709 - RNA, 23 nt, Human
ugagagaaaagaauuacaaauuc

SEQ ID NO: 139710 - RNA, 23 nt, Human
ugagagaaaagaauuacaaauuc

SEQ ID NO: 139711 - RNA, 18 nt, Human
ugagcaaaacacaguggg

SEQ ID NO: 139712 - RNA, 18 nt, Human
ugagcaaaacacaguggg

SEQ ID NO: 139713 - RNA, 19 nt, Human
ugagccauagagaagaggu

SEQ ID NO: 139714 - RNA, 19 nt, Human
ugagccauagagaagaggu

SEQ ID NO: 139715 - RNA, 23 nt, Human
ugaggcaggagaauggcaugaac

SEQ ID NO: 139716 - RNA, 24 nt, Human
ugaggcaggagaauggcaugaacc

SEQ ID NO: 139717 - RNA, 24 nt, Human
ugaggcaggagaauggcaugaacc

SEQ ID NO: 139718 - RNA, 25 nt, Human
ugaggcaggagaauggcaugaaccc

SEQ ID NO: 139719 - RNA, 25 nt, Human
ugaggcaggagaauggcaugaaccc

SEQ ID NO: 139720 - RNA, 21 nt, Human
ugagggagugagcaaaacaca

SEQ ID NO: 139721 - RNA, 21 nt, Human
ugagggagugagcaaaacaca

SEQ ID NO: 139722 - RNA, 23 nt, Human
ugcacacucaaauaccauaaauu

SEQ ID NO: 139723 - RNA, 23 nt, Human
ugcacacucaaauaccauaaauu

SEQ ID NO: 139724 - RNA, 23 nt, Human
ugcagaaggaauacaacaauucc

SEQ ID NO: 139725 - RNA, 23 nt, Human
ugcagaaggaauacaacaauucc

SEQ ID NO: 139726 - RNA, 23 nt, Human
ugccuguaaucccagcacuuugg

SEQ ID NO: 139727 - RNA, 23 nt, Human
ugccuguaaucccagcacuuugg

SEQ ID NO: 139728 - RNA, 23 nt, Human
ugccuguaaucccagcacuuugg

SEQ ID NO: 139729 - RNA, 24 nt, Human
ugccuguaaucccagcacuuuggg

SEQ ID NO: 139730 - RNA, 21 nt, Human
ugccuuguuuguucugcacaa

SEQ ID NO: 139731 - RNA, 21 nt, Human
ugccuuguuuguucugcacaa

SEQ ID NO: 139732 - RNA, 20 nt, Human
ugcgucagagcgagacuccg

SEQ ID NO: 139733 - RNA, 20 nt, Human
ugcgucagagcgagacuccg

SEQ ID NO: 139734 - RNA, 22 nt, Human
uggaaaagauaagcaacaacug

SEQ ID NO: 139735 - RNA, 21 nt, Human
uggcugaucccucaccggacu

SEQ ID NO: 139736 - RNA, 21 nt, Human
uggcugaucccucaccggacu

SEQ ID NO: 139737 - RNA, 20 nt, Human
ugggaggccgaggcaggcgg

SEQ ID NO: 139738 - RNA, 20 nt, Human
ugggaggccgaggcaggcgg

SEQ ID NO: 139739 - RNA, 24 nt, Human
ugggaggccgaggcaggcggauca

SEQ ID NO: 139740 - RNA, 24 nt, Human
ugggaggccgaggcaggcggauca

SEQ ID NO: 139741 - RNA, 19 nt, Human
ugggagugagcaaaacaca

SEQ ID NO: 139742 - RNA, 24 nt, Human
ugggcugcuuucucccaaaguucc

SEQ ID NO: 139743 - RNA, 22 nt, Human
ugggucaugccuguaaucccag

SEQ ID NO: 139744 - RNA, 24 nt, Human
ugggucaugccuguaaucccagca

SEQ ID NO: 139745 - RNA, 24 nt, Human
ugggucaugccuguaaucccagca

SEQ ID NO: 139746 - RNA, 24 nt, Human
ugguggugggcgccuguaguccca

SEQ ID NO: 139747 - RNA, 24 nt, Human
ugguggugggcgccuguaguccca

SEQ ID NO: 139748 - RNA, 25 nt, Human
uguacaaauaaccuacuugggcugc

SEQ ID NO: 139749 - RNA, 25 nt, Human
uguacaaauaaccuacuugggcugc

SEQ ID NO: 139750 - RNA, 22 nt, Human
uguucuaaaaugacaacuugau

SEQ ID NO: 139751 - RNA, 22 nt, Human
uguucuaaaaugacaacuugau

SEQ ID NO: 139752 - RNA, 19 nt, Human
uguuuuauuacaucucccc

SEQ ID NO: 139753 - RNA, 19 nt, Human
uguuuuauuacaucucccc

SEQ ID NO: 139754 - RNA, 19 nt, Human
uguuuuauuacaucucccc

SEQ ID NO: 139755 - RNA, 19 nt, Human
uguuuuauuacaucucccc

SEQ ID NO: 139756 - RNA, 26 nt, Human
uuaaaaauauaaauuggugaguagca

SEQ ID NO: 139757 - RNA, 26 nt, Human
uuaaaaauauaaauuggugaguagca

SEQ ID NO: 139758 - RNA, 18 nt, Human
uuagccgggcgugguggu

SEQ ID NO: 139759 - RNA, 18 nt, Human
uuagccgggcgugguggu

SEQ ID NO: 139760 - RNA, 24 nt, Human
uuagccgggcgugguggugggcgc

SEQ ID NO: 139761 - RNA, 24 nt, Human
uuagccgggcgugguggugggcgc

SEQ ID NO: 139762 - RNA, 22 nt, Human
uucaacacauuuugccuccaaa

SEQ ID NO: 139763 - RNA, 22 nt, Human
uucaacacauuuugccuccaaa

SEQ ID NO: 139764 - RNA, 21 nt, Human
uucaguaagauccuccccuca

SEQ ID NO: 139765 - RNA, 21 nt, Human
uucaguaagauccuccccuca

SEQ ID NO: 139766 - RNA, 21 nt, Human
uuccuuauaaaaguaagaaaa

SEQ ID NO: 139767 - RNA, 21 nt, Human
uuccuuauaaaaguaagaaaa

SEQ ID NO: 139768 - RNA, 19 nt, Human
uuccuuguggccucuccuu

SEQ ID NO: 139769 - RNA, 19 nt, Human
uuccuuguggccucuccuu

SEQ ID NO: 139770 - RNA, 23 nt, Human
uuccuuguggccucuccuugccc

SEQ ID NO: 139771 - RNA, 24 nt, Human
uucucagaccaauauuuugugccc

SEQ ID NO: 139772 - RNA, 24 nt, Human
uucucagaccaauauuuugugccc

SEQ ID NO: 139773 - RNA, 25 nt, Human
uugggaggccgaggcaggcggauca

SEQ ID NO: 139774 - RNA, 25 nt, Human
uugggaggccgaggcaggcggauca

SEQ ID NO: 139775 - RNA, 24 nt, Human
uuguuuguucugcacaaccaguuc

SEQ ID NO: 139776 - RNA, 24 nt, Human
uuguuuguucugcacaaccaguuc

SEQ ID NO: 139777 - RNA, 19 nt, Human
uuuaaacaaauuacacaaa

SEQ ID NO: 139778 - RNA, 19 nt, Human
uuuaaacaaauuacacaaa

SEQ ID NO: 139779 - RNA, 21 nt, Human
uuucacugcagcagcccacag

SEQ ID NO: 139780 - RNA, 19 nt, Human
uuuccaacuauauuccuau

SEQ ID NO: 139781 - RNA, 19 nt, Human
uuuccaacuauauuccuau

SEQ ID NO: 139782 - RNA, 19 nt, Human
agcggccucccgugcgcca

SEQ ID NO: 139783 - RNA, 20 nt, Human
aggcagcaggcgggcgggca

SEQ ID NO: 139784 - RNA, 18 nt, Human
cagcaggcgggcgggcag

SEQ ID NO: 139785 - RNA, 22 nt, Human
cagcucagugggcccccggcag

SEQ ID NO: 139786 - RNA, 22 nt, Human
ccccacgcugcggccggagccc

SEQ ID NO: 139787 - RNA, 21 nt, Human
cccccgcgcuccgcccggccc

SEQ ID NO: 139788 - RNA, 25 nt, Human
cccgccgccgccgccgccgcugccu

SEQ ID NO: 139789 - RNA, 22 nt, Human
cccgcgagcgacgcgccggccu

SEQ ID NO: 139790 - RNA, 21 nt, Human
cccgggcacgcggcgcggccg

SEQ ID NO: 139791 - RNA, 19 nt, Human
ccgccgcccgcccgccgcc

SEQ ID NO: 139792 - RNA, 20 nt, Human
ccgccgcccgcccgccgccc

SEQ ID NO: 139793 - RNA, 24 nt, Human
ccgccgcccgccgccgccgccgcc

SEQ ID NO: 139794 - RNA, 25 nt, Human
ccgccgcccgccgccgccgccgccg

SEQ ID NO: 139795 - RNA, 26 nt, Human
ccgccgcccgccgccgccgccgccgg

SEQ ID NO: 139796 - RNA, 18 nt, Human
ccgccgccgccgccgccg

SEQ ID NO: 139797 - RNA, 18 nt, Human
ccgccgccgccgccgccg

SEQ ID NO: 139798 - RNA, 22 nt, Human
ccgccgccgccgccgccgcugc

SEQ ID NO: 139799 - RNA, 23 nt, Human
ccgccgccgccgccgccgcugcc

SEQ ID NO: 139800 - RNA, 19 nt, Human
ccgccgcugccuagccgcc

SEQ ID NO: 139801 - RNA, 20 nt, Human
ccgccgcugccuagccgccc

SEQ ID NO: 139802 - RNA, 21 nt, Human
ccgcgccccacgcugcggccg

SEQ ID NO: 139803 - RNA, 23 nt, Human
ccgcgccccacgcugcggccgga

SEQ ID NO: 139804 - RNA, 18 nt, Human
ccgcgcuccgcccggccc

SEQ ID NO: 139805 - RNA, 21 nt, Human
ccgcugccuagccgcccgggc

SEQ ID NO: 139806 - RNA, 23 nt, Human
ccgugcgccagcccucacccucc

SEQ ID NO: 139807 - RNA, 20 nt, Human
cgcccgcccgccgcccgccg

SEQ ID NO: 139808 - RNA, 25 nt, Human
cgccgccgccgccgcugccuagccg

SEQ ID NO: 139809 - RNA, 24 nt, Human
cgcgcgcugcgcuccugcacaccu

SEQ ID NO: 139810 - RNA, 26 nt, Human
cgcgcugcgcuccugcacaccugcuc

SEQ ID NO: 139811 - RNA, 19 nt, Human
cgcugcgcuccugcacacc

SEQ ID NO: 139812 - RNA, 22 nt, Human
cgcugcgcuccugcacaccugc

SEQ ID NO: 139813 - RNA, 23 nt, Human
cgggggccgccgcccgcccgccg

SEQ ID NO: 139814 - RNA, 18 nt, Human
cucaucuuugccgugcuc

SEQ ID NO: 139815 - RNA, 20 nt, Human
cuccgcccggcccggcuccc

SEQ ID NO: 139816 - RNA, 22 nt, Human
cuccgcucgccgcucggcaccu

SEQ ID NO: 139817 - RNA, 23 nt, Human
cuccggccucagucacauggauc

SEQ ID NO: 139818 - RNA, 23 nt, Human
cugcacaccugcucccgggcgcc

SEQ ID NO: 139819 - RNA, 20 nt, Human
cugccgcuccccggccuccc

SEQ ID NO: 139820 - RNA, 20 nt, Human
cugcgcucgccgcgcgcugc

SEQ ID NO: 139821 - RNA, 19 nt, Human
gcagcaggcgggcgggcag

SEQ ID NO: 139822 - RNA, 24 nt, Human
gccgccgcccgcccgccgcccgcc

SEQ ID NO: 139823 - RNA, 20 nt, Human
gccgcgccccacgcugcggc

SEQ ID NO: 139824 - RNA, 21 nt, Human
gcgacgcgccggccucgcccc

SEQ ID NO: 139825 - RNA, 18 nt, Human
gcgccggccucgcccccc

SEQ ID NO: 139826 - RNA, 19 nt, Human
gcgcggccgggcuccggag

SEQ ID NO: 139827 - RNA, 19 nt, Human
gcgcggccgggcuccggag

SEQ ID NO: 139828 - RNA, 18 nt, Human
gcgcucgccgcgcgcugc

SEQ ID NO: 139829 - RNA, 19 nt, Human
gcggccggagcccaggugc

SEQ ID NO: 139830 - RNA, 19 nt, Human
gggcacucggcgcccagaa

SEQ ID NO: 139831 - RNA, 21 nt, Human
gggcgugagcucaucccgggc

SEQ ID NO: 139832 - RNA, 19 nt, Human
uaaaaaaaagguagcuuug

SEQ ID NO: 139833 - RNA, 24 nt, Human
uaauauauuuuggcaauuuucuuu

SEQ ID NO: 139834 - RNA, 22 nt, Human
uccggagcgagggcugcgcucg

SEQ ID NO: 139835 - RNA, 19 nt, Human
ugcgcagccagcggccucc

SEQ ID NO: 139836 - RNA, 23 nt, Human
ugcggccggagcccaggugcgcc

SEQ ID NO: 139837 - RNA, 23 nt, Human
uuugaauuguauuuacaaccgcu

SEQ ID NO: 139838 - RNA, 23 nt, Human
aaaauauaauaccuauuuaccag

SEQ ID NO: 139839 - RNA, 19 nt, Human
aaaauuacaaauguuaacc

SEQ ID NO: 139840 - RNA, 26 nt, Human
aaacaacagaaacugagguccgaucc

SEQ ID NO: 139841 - RNA, 19 nt, Human
aaagaaacaacagaaacug

SEQ ID NO: 139842 - RNA, 23 nt, Human
aacaugagaacaugagggaagaa

SEQ ID NO: 139843 - RNA, 19 nt, Human
aagaauaaaaccaucuucc

SEQ ID NO: 139844 - RNA, 22 nt, Human
aaggaaacgcuacaauuuccac

SEQ ID NO: 139845 - RNA, 22 nt, Human
acagaaccuaccagaaaagaac

SEQ ID NO: 139846 - RNA, 21 nt, Human
accaccacauaaaagaaacaa

SEQ ID NO: 139847 - RNA, 23 nt, Human
acugccauacuuuucacccaagu

SEQ ID NO: 139848 - RNA, 20 nt, Human
agccucuccaguuuaaaagc

SEQ ID NO: 139849 - RNA, 21 nt, Human
augcacaaacaugagaacaug

SEQ ID NO: 139850 - RNA, 21 nt, Human
augggaacagcuuuuccuaca

SEQ ID NO: 139851 - RNA, 24 nt, Human
caaaagcacaaguuacacguugcc

SEQ ID NO: 139852 - RNA, 22 nt, Human
caaaccggcucccucuuaccaa

SEQ ID NO: 139853 - RNA, 23 nt, Human
caaagaauaaaaccaucuuccaa

SEQ ID NO: 139854 - RNA, 23 nt, Human
caaauguccuugugcgaucacca

SEQ ID NO: 139855 - RNA, 25 nt, Human
caacagaaacugagguccgauccca

SEQ ID NO: 139856 - RNA, 24 nt, Human
caacuaucucaaccaacaguuucc

SEQ ID NO: 139857 - RNA, 18 nt, Human
caccacauaaaagaaaca

SEQ ID NO: 139858 - RNA, 23 nt, Human
caccacauaaaagaaacaacaga

SEQ ID NO: 139859 - RNA, 27 nt, Human
caccacauaaaagaaacaacagaaacc

SEQ ID NO: 139860 - RNA, 18 nt, Human
caccccgaucucggcugc

SEQ ID NO: 139861 - RNA, 22 nt, Human
caccuaaacuaaaauuucucac

SEQ ID NO: 139862 - RNA, 24 nt, Human
cagacagaaccuaccagaaaagaa

SEQ ID NO: 139863 - RNA, 22 nt, Human
cagcauuagaacaaggggacac

SEQ ID NO: 139864 - RNA, 23 nt, Human
cagucgccgccgcccucguccgc

SEQ ID NO: 139865 - RNA, 24 nt, Human
cauauuugcuucucaaagaauaaa

SEQ ID NO: 139866 - RNA, 21 nt, Human
ccaaauuuccaaagcaugcau

SEQ ID NO: 139867 - RNA, 21 nt, Human
ccacaguaaaagauuccuccc

SEQ ID NO: 139868 - RNA, 18 nt, Human
ccaccacauaaaagaaac

SEQ ID NO: 139869 - RNA, 23 nt, Human
ccaccacauaaaagaaacaacag

SEQ ID NO: 139870 - RNA, 24 nt, Human
ccaccacauaaaagaaacaacaga

SEQ ID NO: 139871 - RNA, 18 nt, Human
ccaccccgaucucggcug

SEQ ID NO: 139872 - RNA, 18 nt, Human
ccaccuccacaguaaaag

SEQ ID NO: 139873 - RNA, 20 nt, Human
cccucguccgccucggccgc

SEQ ID NO: 139874 - RNA, 21 nt, Human
cccucguccgccucggccgcc

SEQ ID NO: 139875 - RNA, 18 nt, Human
ccgcccucguccgccucg

SEQ ID NO: 139876 - RNA, 20 nt, Human
ccgccucggccgcccccgcc

SEQ ID NO: 139877 - RNA, 24 nt, Human
ccuccgaagaagucgugaccagcc

SEQ ID NO: 139878 - RNA, 20 nt, Human
cgccgccgcccucguccgcc

SEQ ID NO: 139879 - RNA, 21 nt, Human
cgugaccagccaccuccacag

SEQ ID NO: 139880 - RNA, 18 nt, Human
cuagaaaaaaauuacaaa

SEQ ID NO: 139881 - RNA, 21 nt, Human
cuccugagcucacugaucaac

SEQ ID NO: 139882 - RNA, 19 nt, Human
cuggugugcagcauuagaa

SEQ ID NO: 139883 - RNA, 18 nt, Human
cuugaugucuucgugggg

SEQ ID NO: 139884 - RNA, 25 nt, Human
cuuggcacagacagaaccuaccaga

SEQ ID NO: 139885 - RNA, 21 nt, Human
gaacaaguacaaaacacuauc

SEQ ID NO: 139886 - RNA, 23 nt, Human
gaacaaguacaaaacacuaucau

SEQ ID NO: 139887 - RNA, 19 nt, Human
gaagcucucuccugagcuc

SEQ ID NO: 139888 - RNA, 18 nt, Human
gaguggccccugcaggcc

SEQ ID NO: 139889 - RNA, 18 nt, Human
gaucccaaacaccuaaac

SEQ ID NO: 139890 - RNA, 21 nt, Human
gaucccaaacaccuaaacuaa

SEQ ID NO: 139891 - RNA, 18 nt, Human
gaucucggcugccaccuc

SEQ ID NO: 139892 - RNA, 18 nt, Human
guuuuccaaacgcuuucc

SEQ ID NO: 139893 - RNA, 21 nt, Human
uaacaagaaacacuuggacag

SEQ ID NO: 139894 - RNA, 23 nt, Human
uaauaccuauuuaccagacauac

SEQ ID NO: 139895 - RNA, 23 nt, Human
uaauauacaugcacaaacauggu

SEQ ID NO: 139896 - RNA, 23 nt, Human
uacaaaacacuaucauuaucugu

SEQ ID NO: 139897 - RNA, 24 nt, Human
uacaacauaugauucacagguagg

SEQ ID NO: 139898 - RNA, 23 nt, Human
uacacguugcacgguuggggaug

SEQ ID NO: 139899 - RNA, 20 nt, Human
uacaugcacaaacaugagaa

SEQ ID NO: 139900 - RNA, 22 nt, Human
uaccagaaaagaacaaguacaa

SEQ ID NO: 139901 - RNA, 24 nt, Human
uaccagaaaagaacaaguacaaaa

SEQ ID NO: 139902 - RNA, 24 nt, Human
uaccagaaaagaacaaguacaaaa

SEQ ID NO: 139903 - RNA, 25 nt, Human
uaccagaaaagaacaaguacaaaac

SEQ ID NO: 139904 - RNA, 26 nt, Human
uaccagaaaagaacaaguacaaaaca

SEQ ID NO: 139905 - RNA, 23 nt, Human
uaccuauuuaccagacauacaca

SEQ ID NO: 139906 - RNA, 23 nt, Human
uagaaaaaaauuacaaauguuaa

SEQ ID NO: 139907 - RNA, 24 nt, Human
uagccucuccaguuuaaaagcacu

SEQ ID NO: 139908 - RNA, 19 nt, Human
uaucucaaccaacaguuuc

SEQ ID NO: 139909 - RNA, 20 nt, Human
uccaaacgcuuuccuggcuu

SEQ ID NO: 139910 - RNA, 23 nt, Human
ucccaaaccggcucccucuuacc

SEQ ID NO: 139911 - RNA, 19 nt, Human
ucccacugccauacuuuuc

SEQ ID NO: 139912 - RNA, 21 nt, Human
uccgaucccaaacaccuaaac

SEQ ID NO: 139913 - RNA, 19 nt, Human
ucgccgccgcccucguccg

SEQ ID NO: 139914 - RNA, 22 nt, Human
ucgccgccgcccucguccgccu

SEQ ID NO: 139915 - RNA, 22 nt, Human
ucuucugagcaacaugaacugg

SEQ ID NO: 139916 - RNA, 20 nt, Human
ugaccagccaccuccacagu

SEQ ID NO: 139917 - RNA, 18 nt, Human
ugagaacaugagggaaga

SEQ ID NO: 139918 - RNA, 19 nt, Human
ugagugaaugcauuccagg

SEQ ID NO: 139919 - RNA, 21 nt, Human
ugaucaaccugcccuuggcac

SEQ ID NO: 139920 - RNA, 21 nt, Human
ugcaauggucucucccaaacc

SEQ ID NO: 139921 - RNA, 24 nt, Human
ugcagcauuagaacaaggggacac

SEQ ID NO: 139922 - RNA, 19 nt, Human
ugcuguugcaaagagucga

SEQ ID NO: 139923 - RNA, 21 nt, Human
ugggaacagcuuuuccuacaa

SEQ ID NO: 139924 - RNA, 22 nt, Human
uguauagaaaccaccacauaaa

SEQ ID NO: 139925 - RNA, 18 nt, Human
uuccaaaaaaguuuuugg

SEQ ID NO: 139926 - RNA, 22 nt, Human
uucccaaaagauguaaaacaaa

SEQ ID NO: 139927 - RNA, 18 nt, Human
uucccgggugccaugaac

SEQ ID NO: 139928 - RNA, 22 nt, Human
uugcauugcugcuguuuucaca

SEQ ID NO: 139929 - RNA, 19 nt, Human
uuuggcuaugauucaugua

SEQ ID NO: 139930 - RNA, 24 nt, Human
uuuuuuucuguaaggagcauacug

SEQ ID NO: 139931 - RNA, 21 nt, Human
uuuuuuuuuuuucuguaagga

SEQ ID NO: 139932 - RNA, 18 nt, Human
uuuuuuuuuuuuuuucug

SEQ ID NO: 139933 - RNA, 23 nt, Human
uuuuuuuuuuuuuuucuguaagg

SEQ ID NO: 139934 - RNA, 20 nt, Human
aggcacagagcgccauggcc

SEQ ID NO: 139935 - RNA, 22 nt, Human
caccagggcagccgccucgcac

SEQ ID NO: 139936 - RNA, 23 nt, Human
ccauggccagagcccaccagggc

SEQ ID NO: 139937 - RNA, 19 nt, Human
ccgccucgcaccacaacca

SEQ ID NO: 139938 - RNA, 21 nt, Human
cucgcaccacaaccaagggcc

SEQ ID NO: 139939 - RNA, 20 nt, Human
uggccagagcccaccagggc

SEQ ID NO: 139940 - RNA, 24 nt, Human
cauucucaaaauauaucccccaaa

SEQ ID NO: 139941 - RNA, 25 nt, Human
ccgccccgugaccggcuggacacaa

SEQ ID NO: 139942 - RNA, 18 nt, Human
uaauauacacuacaaaac

SEQ ID NO: 139943 - RNA, 21 nt, Human
uaucccccaaaaguaaucuac

SEQ ID NO: 139944 - RNA, 20 nt, Human
uauuccguuucaucauucuc

SEQ ID NO: 139945 - RNA, 26 nt, Human
uuuuuuuuuuuuuuuuuuuaguuuuu

SEQ ID NO: 139946 - RNA, 22 nt, Human
aaaaacccuggcucaaaacagc

SEQ ID NO: 139947 - RNA, 21 nt, Human
aaaaaggaacagauaaggcaa

SEQ ID NO: 139948 - RNA, 18 nt, Human
aaacaaguauaugccgcu

SEQ ID NO: 139949 - RNA, 19 nt, Human
aaagcagcauggcuuauuu

SEQ ID NO: 139950 - RNA, 21 nt, Human
aaaggagauuauaaaccagaa

SEQ ID NO: 139951 - RNA, 21 nt, Human
aaaguuauaaugaaaaauguu

SEQ ID NO: 139952 - RNA, 20 nt, Human
aaauauauucugggaaacug

SEQ ID NO: 139953 - RNA, 22 nt, Human
aagacaggaggaucacuugagu

SEQ ID NO: 139954 - RNA, 21 nt, Human
aagauggugaagccccgucuc

SEQ ID NO: 139955 - RNA, 23 nt, Human
aagcagcauggcuuauuuugagg

SEQ ID NO: 139956 - RNA, 21 nt, Human
aaggagauuauaaaccagaaa

SEQ ID NO: 139957 - RNA, 23 nt, Human
aaggcgggugggucacgagguca

SEQ ID NO: 139958 - RNA, 20 nt, Human
aaguuucaagugacucagau

SEQ ID NO: 139959 - RNA, 21 nt, Human
acaaaagaaggcuagugugug

SEQ ID NO: 139960 - RNA, 24 nt, Human
acagacugagacuccgucucagaa

SEQ ID NO: 139961 - RNA, 24 nt, Human
acagaggcugggugugguggcuca

SEQ ID NO: 139962 - RNA, 23 nt, Human
accuguagucucagcuacucagg

SEQ ID NO: 139963 - RNA, 24 nt, Human
acuaaaaauacaaacauuagccgg

SEQ ID NO: 139964 - RNA, 23 nt, Human
acugcugggcacaguggcucaca

SEQ ID NO: 139965 - RNA, 19 nt, Human
agaaacaaaaccaaaaaac

SEQ ID NO: 139966 - RNA, 22 nt, Human
agaauagaguagggguggaggg

SEQ ID NO: 139967 - RNA, 18 nt, Human
agacaggaggaucacuug

SEQ ID NO: 139968 - RNA, 19 nt, Human
agacaggaggaucacuuga

SEQ ID NO: 139969 - RNA, 24 nt, Human
agacaggaggaucacuugagucua

SEQ ID NO: 139970 - RNA, 19 nt, Human
agaccaaauucaucaaguc

SEQ ID NO: 139971 - RNA, 21 nt, Human
agaggcugggugugguggcuc

SEQ ID NO: 139972 - RNA, 24 nt, Human
agcacuuugggaggccaaggcggg

SEQ ID NO: 139973 - RNA, 20 nt, Human
agccgggcacgguggcaguc

SEQ ID NO: 139974 - RNA, 24 nt, Human
agccuggccaagauggugaagccc

SEQ ID NO: 139975 - RNA, 24 nt, Human
agccugggcaacauagggagaccc

SEQ ID NO: 139976 - RNA, 24 nt, Human
agccugggugacagacugagacuc

SEQ ID NO: 139977 - RNA, 18 nt, Human
agcugagugugguggcac

SEQ ID NO: 139978 - RNA, 23 nt, Human
aggaaaguuaauuugagggucug

SEQ ID NO: 139979 - RNA, 22 nt, Human
aggaaaugcuggcuuuaggcca

SEQ ID NO: 139980 - RNA, 23 nt, Human
aggaguucaagaccagccugggc

SEQ ID NO: 139981 - RNA, 24 nt, Human
aggaucacuugagucuaggaguuc

SEQ ID NO: 139982 - RNA, 26 nt, Human
aggcagaccaaauucaucaagucaag

SEQ ID NO: 139983 - RNA, 22 nt, Human
aggcaggagagucgcuugaacc

SEQ ID NO: 139984 - RNA, 24 nt, Human
aggcaggagagucgcuugaaccug

SEQ ID NO: 139985 - RNA, 21 nt, Human
aggccaaggcgggugggucac

SEQ ID NO: 139986 - RNA, 24 nt, Human
aggcgggugggucacgaggucagg

SEQ ID NO: 139987 - RNA, 21 nt, Human
aggcugaggcaggagagucgc

SEQ ID NO: 139988 - RNA, 24 nt, Human
aggcugaggcaggagagucgcuug

SEQ ID NO: 139989 - RNA, 20 nt, Human
aggcugaggggagggaucgc

SEQ ID NO: 139990 - RNA, 20 nt, Human
aggcugggugugguggcuca

SEQ ID NO: 139991 - RNA, 18 nt, Human
agggagacccugucuaca

SEQ ID NO: 139992 - RNA, 24 nt, Human
agggagacugaggaaaugcuggcu

SEQ ID NO: 139993 - RNA, 20 nt, Human
agguggagguugcagugagc

SEQ ID NO: 139994 - RNA, 24 nt, Human
agguggagguugcagugagcugag

SEQ ID NO: 139995 - RNA, 27 nt, Human
agucuaggaguucaagaccagccuggg

SEQ ID NO: 139996 - RNA, 23 nt, Human
aguggcaggauuugaaggaagaa

SEQ ID NO: 139997 - RNA, 24 nt, Human
aguggcucacaccuguaaucucag

SEQ ID NO: 139998 - RNA, 19 nt, Human
aucacuccagccuggguga

SEQ ID NO: 139999 - RNA, 24 nt, Human
aucacuugagucuaggaguucaag

SEQ ID NO: 140000 - RNA, 22 nt, Human
aucccagcacuuugggaggcca

SEQ ID NO: 140001 - RNA, 18 nt, Human
caaaaaacccuggcucaa

SEQ ID NO: 140002 - RNA, 18 nt, Human
caaaaaacccuggcucaa

SEQ ID NO: 140003 - RNA, 22 nt, Human
caaaaaauuugaaaauuagcug

SEQ ID NO: 140004 - RNA, 24 nt, Human
caacuacucgggaggcugaggcag

SEQ ID NO: 140005 - RNA, 20 nt, Human
caagacaggaggaucacuug

SEQ ID NO: 140006 - RNA, 24 nt, Human
caagauggugaagccccgucucua

SEQ ID NO: 140007 - RNA, 25 nt, Human
caauaguccauauccuucgaaccac

SEQ ID NO: 140008 - RNA, 24 nt, Human
cacaccuguaaucccagcacuuug

SEQ ID NO: 140009 - RNA, 24 nt, Human
cacaccuguaaucucagcacuuug

SEQ ID NO: 140010 - RNA, 20 nt, Human
cacaguuuggaaaacugucu

SEQ ID NO: 140011 - RNA, 22 nt, Human
cacauggguuucugcuguucag

SEQ ID NO: 140012 - RNA, 23 nt, Human
caccuguaaucccaacuacucgg

SEQ ID NO: 140013 - RNA, 24 nt, Human
caccuguaaucccaacuacucggg

SEQ ID NO: 140014 - RNA, 23 nt, Human
caccuguaaucccagcacuuugg

SEQ ID NO: 140015 - RNA, 24 nt, Human
caccuguaaucccagcacuuuggg

SEQ ID NO: 140016 - RNA, 19 nt, Human
caccuguaaucucagcacu

SEQ ID NO: 140017 - RNA, 24 nt, Human
caccuguaaucucagcacuuuggg

SEQ ID NO: 140018 - RNA, 24 nt, Human
caccuguagucucagcuacucagg

SEQ ID NO: 140019 - RNA, 20 nt, Human
caccuugcggagaggggccu

SEQ ID NO: 140020 - RNA, 18 nt, Human
cacuccagccugggugac

SEQ ID NO: 140021 - RNA, 20 nt, Human
cacuccagccugggugacag

SEQ ID NO: 140022 - RNA, 21 nt, Human
cacuccagccugggugacaga

SEQ ID NO: 140023 - RNA, 24 nt, Human
cacuccagccugggugacagacug

SEQ ID NO: 140024 - RNA, 18 nt, Human
cacucuccagcaagcuca

SEQ ID NO: 140025 - RNA, 21 nt, Human
cagaaacaaaaccaaaaaacu

SEQ ID NO: 140026 - RNA, 22 nt, Human
cagaccaaauucaucaagucaa

SEQ ID NO: 140027 - RNA, 20 nt, Human
cagcacuuugggaggccaag

SEQ ID NO: 140028 - RNA, 22 nt, Human
cagcacuuugggaggccaaggc

SEQ ID NO: 140029 - RNA, 24 nt, Human
cagcacuuugggaggccaaggcgg

SEQ ID NO: 140030 - RNA, 23 nt, Human
caggagcaaacauacauguuuuc

SEQ ID NO: 140031 - RNA, 24 nt, Human
caguaacaacaggagcaaacauac

SEQ ID NO: 140032 - RNA, 26 nt, Human
caguucuugagacuucaaccuucugg

SEQ ID NO: 140033 - RNA, 21 nt, Human
caucaagucaaggaccuuuuc

SEQ ID NO: 140034 - RNA, 21 nt, Human
ccaaaaaacccuggcucaaaa

SEQ ID NO: 140035 - RNA, 22 nt, Human
cccauccagaaugaaaaguaca

SEQ ID NO: 140036 - RNA, 18 nt, Human
ccccaagagagcaaggaa

SEQ ID NO: 140037 - RNA, 24 nt, Human
ccccagggaaacaaggggcgccuc

SEQ ID NO: 140038 - RNA, 19 nt, Human
ccccaugaugccacucucc

SEQ ID NO: 140039 - RNA, 23 nt, Human
ccccgucucuacuaaaaauacaa

SEQ ID NO: 140040 - RNA, 18 nt, Human
ccccuuucccucucugcc

SEQ ID NO: 140041 - RNA, 20 nt, Human
ccgcagcagccgccacuucc

SEQ ID NO: 140042 - RNA, 23 nt, Human
ccuggccaagauggugaagcccc

SEQ ID NO: 140043 - RNA, 24 nt, Human
ccuggccaagauggugaagccccg

SEQ ID NO: 140044 - RNA, 21 nt, Human
ccugggagguggagguugcag

SEQ ID NO: 140045 - RNA, 22 nt, Human
ccugggcaacauagggagaccc

SEQ ID NO: 140046 - RNA, 22 nt, Human
ccugggugacagacugagacuc

SEQ ID NO: 140047 - RNA, 21 nt, Human
ccuguagucucagcuacucag

SEQ ID NO: 140048 - RNA, 20 nt, Human
ccuuccggcacaagagccgg

SEQ ID NO: 140049 - RNA, 21 nt, Human
cgaaccacaaagggagacuga

SEQ ID NO: 140050 - RNA, 21 nt, Human
cgcuugaaccugggaggugga

SEQ ID NO: 140051 - RNA, 22 nt, Human
cgggugggucacgaggucagga

SEQ ID NO: 140052 - RNA, 19 nt, Human
cgugaccccagggaaacaa

SEQ ID NO: 140053 - RNA, 26 nt, Human
cucaaaacagcuuccuccaguggcuc

SEQ ID NO: 140054 - RNA, 22 nt, Human
cucacaccuguaaucccagcac

SEQ ID NO: 140055 - RNA, 24 nt, Human
cucacaccuguaaucccagcacuu

SEQ ID NO: 140056 - RNA, 22 nt, Human
cucacaccuguaaucucagcac

SEQ ID NO: 140057 - RNA, 24 nt, Human
cucacaccuguaaucucagcacuu

SEQ ID NO: 140058 - RNA, 24 nt, Human
cugagaucacuccagccuggguga

SEQ ID NO: 140059 - RNA, 21 nt, Human
cuuccuccuuccggcacaaga

SEQ ID NO: 140060 - RNA, 21 nt, Human
cuucguucugggccccgcccc

SEQ ID NO: 140061 - RNA, 20 nt, Human
gaaugccccacgccuuccuc

SEQ ID NO: 140062 - RNA, 21 nt, Human
gacagacugagacuccgucuc

SEQ ID NO: 140063 - RNA, 24 nt, Human
gacagacugagacuccgucucaga

SEQ ID NO: 140064 - RNA, 18 nt, Human
gaggcugaggcaggagag

SEQ ID NO: 140065 - RNA, 24 nt, Human
gaggcugaggggagggaucgcuug

SEQ ID NO: 140066 - RNA, 22 nt, Human
gagguugcagugagcugagauc

SEQ ID NO: 140067 - RNA, 24 nt, Human
gaucacuugagucuaggaguucaa

SEQ ID NO: 140068 - RNA, 23 nt, Human
gauuuggauaaccagcuggauuu

SEQ ID NO: 140069 - RNA, 24 nt, Human
gccaagauggugaagccccgucuc

SEQ ID NO: 140070 - RNA, 19 nt, Human
gcugggugugguggcucac

SEQ ID NO: 140071 - RNA, 18 nt, Human
ggaagucaugcauuucca

SEQ ID NO: 140072 - RNA, 23 nt, Human
ggagcaaacauacauguuuuccc

SEQ ID NO: 140073 - RNA, 18 nt, Human
ggagguugcagugagcug

SEQ ID NO: 140074 - RNA, 22 nt, Human
ggagguugcagugagcugagau

SEQ ID NO: 140075 - RNA, 23 nt, Human
ggagguugcagugagcugagauc

SEQ ID NO: 140076 - RNA, 24 nt, Human
ggagguugcagugagcugagauca

SEQ ID NO: 140077 - RNA, 23 nt, Human
ggaucacuugagucuaggaguuc

SEQ ID NO: 140078 - RNA, 23 nt, Human
ggcacgguggcagucaccuguaa

SEQ ID NO: 140079 - RNA, 20 nt, Human
ggccaagauggugaagcccc

SEQ ID NO: 140080 - RNA, 19 nt, Human
gggagacugaggaaaugcu

SEQ ID NO: 140081 - RNA, 24 nt, Human
gggcacaguggcucacaccuguaa

SEQ ID NO: 140082 - RNA, 19 nt, Human
gggcacgguggcagucacc

SEQ ID NO: 140083 - RNA, 22 nt, Human
ggucacgaggucaggaguucaa

SEQ ID NO: 140084 - RNA, 24 nt, Human
ggucacgaggucaggaguucaaga

SEQ ID NO: 140085 - RNA, 19 nt, Human
gguggagguugcagugagc

SEQ ID NO: 140086 - RNA, 24 nt, Human
gguggcacucaccuguagucucag

SEQ ID NO: 140087 - RNA, 23 nt, Human
gguggcagucaccuguaauccca

SEQ ID NO: 140088 - RNA, 24 nt, Human
gguggcucacaccuguaaucccag

SEQ ID NO: 140089 - RNA, 23 nt, Human
ggugggucacgaggucaggaguu

SEQ ID NO: 140090 - RNA, 23 nt, Human
ggugugguggcucacaccuguaa

SEQ ID NO: 140091 - RNA, 21 nt, Human
gugaagccccgucucuacuaa

SEQ ID NO: 140092 - RNA, 19 nt, Human
gugacucagauaaguuuua

SEQ ID NO: 140093 - RNA, 20 nt, Human
guggagguugcagugagcug

SEQ ID NO: 140094 - RNA, 23 nt, Human
gugggucacgaggucaggaguuc

SEQ ID NO: 140095 - RNA, 18 nt, Human
gugugguggcucacaccu

SEQ ID NO: 140096 - RNA, 19 nt, Human
guugcagugagcugagauc

SEQ ID NO: 140097 - RNA, 21 nt, Human
uaaaaaggaacagauaaggca

SEQ ID NO: 140098 - RNA, 20 nt, Human
uaaaaauacaaacauuagcc

SEQ ID NO: 140099 - RNA, 24 nt, Human
uaaaaauacaaacauuagccgggc

SEQ ID NO: 140100 - RNA, 20 nt, Human
uaacaacaggagcaaacaua

SEQ ID NO: 140101 - RNA, 21 nt, Human
uacauagcaauauacauccca

SEQ ID NO: 140102 - RNA, 20 nt, Human
uacuaaaaauacaaacauua

SEQ ID NO: 140103 - RNA, 21 nt, Human
uagcaagucagagguuuccuu

SEQ ID NO: 140104 - RNA, 18 nt, Human
uagcaauauacaucccaa

SEQ ID NO: 140105 - RNA, 20 nt, Human
uagcaauauacaucccaaac

SEQ ID NO: 140106 - RNA, 21 nt, Human
uagcaauauacaucccaaacc

SEQ ID NO: 140107 - RNA, 20 nt, Human
ucaaggauagauaauuaaug

SEQ ID NO: 140108 - RNA, 18 nt, Human
ucacgaggucaggaguuc

SEQ ID NO: 140109 - RNA, 21 nt, Human
ucacgaggucaggaguucaag

SEQ ID NO: 140110 - RNA, 24 nt, Human
ucacgaggucaggaguucaagacc

SEQ ID NO: 140111 - RNA, 20 nt, Human
ucaguuuaaacacaucauca

SEQ ID NO: 140112 - RNA, 22 nt, Human
ucaucaagucaaggaccuuuuc

SEQ ID NO: 140113 - RNA, 24 nt, Human
uccagccugggugacagacugaga

SEQ ID NO: 140114 - RNA, 21 nt, Human
uccaguggcuagcacuuugcg

SEQ ID NO: 140115 - RNA, 19 nt, Human
ucccaaaccuuuucucaaa

SEQ ID NO: 140116 - RNA, 22 nt, Human
ucccagaaaguguggccucugu

SEQ ID NO: 140117 - RNA, 22 nt, Human
ucccuggcuacauccauuagca

SEQ ID NO: 140118 - RNA, 24 nt, Human
uccggcugcgcgugaccccaggga

SEQ ID NO: 140119 - RNA, 21 nt, Human
uccgucucagaaacaaaacca

SEQ ID NO: 140120 - RNA, 21 nt, Human
uccuccaguggcucagaggca

SEQ ID NO: 140121 - RNA, 22 nt, Human
ucgaaccacaaagggagacuga

SEQ ID NO: 140122 - RNA, 22 nt, Human
ucgcuugaaccugggaggugga

SEQ ID NO: 140123 - RNA, 24 nt, Human
ucgcuugaaccugggagguggagg

SEQ ID NO: 140124 - RNA, 24 nt, Human
ucgggaggcugaggcaggagaguc

SEQ ID NO: 140125 - RNA, 21 nt, Human
ucuccgcagcagccgccacuu

SEQ ID NO: 140126 - RNA, 19 nt, Human
ucucuacuaaaaauacaaa

SEQ ID NO: 140127 - RNA, 24 nt, Human
ugaaccugggagguggagguugca

SEQ ID NO: 140128 - RNA, 22 nt, Human
ugaaggaagaaauguauugcaa

SEQ ID NO: 140129 - RNA, 21 nt, Human
ugaauuucaaagaaaaggucu

SEQ ID NO: 140130 - RNA, 20 nt, Human
ugaccccagggaaacaaggg

SEQ ID NO: 140131 - RNA, 25 nt, Human
ugaccccagggaaacaaggggcgcc

SEQ ID NO: 140132 - RNA, 24 nt, Human
ugaggaaaugcuggcuuuaggcca

SEQ ID NO: 140133 - RNA, 24 nt, Human
ugaggcaggagagucgcuugaacc

SEQ ID NO: 140134 - RNA, 24 nt, Human
ugaggcaggagagucgcuugaacc

SEQ ID NO: 140135 - RNA, 18 nt, Human
ugaggggagggaucgcuu

SEQ ID NO: 140136 - RNA, 25 nt, Human
ugcaauaguccauauccuucgaacc

SEQ ID NO: 140137 - RNA, 25 nt, Human
uggaaguacauacagcuugggaggu

SEQ ID NO: 140138 - RNA, 21 nt, Human
uggccugagccuguuuuggcc

SEQ ID NO: 140139 - RNA, 21 nt, Human
uggcucacaccuguaauccca

SEQ ID NO: 140140 - RNA, 22 nt, Human
uggcucacaccuguaaucccag

SEQ ID NO: 140141 - RNA, 24 nt, Human
uggcucacaccuguaaucccagca

SEQ ID NO: 140142 - RNA, 21 nt, Human
uggcucacaccuguaaucuca

SEQ ID NO: 140143 - RNA, 24 nt, Human
uggcucacaccuguaaucucagca

SEQ ID NO: 140144 - RNA, 24 nt, Human
ugggaggccaagacaggaggauca

SEQ ID NO: 140145 - RNA, 22 nt, Human
ugggaggccaaggcgggugggu

SEQ ID NO: 140146 - RNA, 24 nt, Human
ugggaggccaaggcggguggguca

SEQ ID NO: 140147 - RNA, 18 nt, Human
ugggagguggagguugca

SEQ ID NO: 140148 - RNA, 29 nt, Human
ugggagguggagguugcagugacaacggu

SEQ ID NO: 140149 - RNA, 24 nt, Human
ugggagguggagguugcagugagc

SEQ ID NO: 140150 - RNA, 24 nt, Human
ugggcaacauagggagacccuguc

SEQ ID NO: 140151 - RNA, 22 nt, Human
ugggucacgaggucaggaguuc

SEQ ID NO: 140152 - RNA, 24 nt, Human
ugguggcacucaccuguagucuca

SEQ ID NO: 140153 - RNA, 24 nt, Human
ugguggcucacaccuguaauccca

SEQ ID NO: 140154 - RNA, 18 nt, Human
ugucaggugagcauaaaa

SEQ ID NO: 140155 - RNA, 22 nt, Human
uguuuuggccaagcccauccag

SEQ ID NO: 140156 - RNA, 18 nt, Human
uuagcugagugugguggc

SEQ ID NO: 140157 - RNA, 21 nt, Human
uuccaguggcuagcacuuugc

SEQ ID NO: 140158 - RNA, 22 nt, Human
uuccaguggcuagcacuuugcg

SEQ ID NO: 140159 - RNA, 24 nt, Human
uugaaccugggagguggagguugc

SEQ ID NO: 140160 - RNA, 21 nt, Human
uugagggucuguuucauuucu

SEQ ID NO: 140161 - RNA, 22 nt, Human
uugagucuaggaguucaagacc

SEQ ID NO: 140162 - RNA, 18 nt, Human
uugcagugagcugagauc

SEQ ID NO: 140163 - RNA, 19 nt, Human
uugcagugagcugagauca

SEQ ID NO: 140164 - RNA, 20 nt, Human
uugcagugagcugagaucac

SEQ ID NO: 140165 - RNA, 19 nt, Human
uuuggccaagcccauccag

SEQ ID NO: 140166 - RNA, 18 nt, Human
acuuccaugccccaaaga

SEQ ID NO: 140167 - RNA, 20 nt, Human
agcaguucucugugagucug

SEQ ID NO: 140168 - RNA, 21 nt, Human
aggcggaagaaaagagugagg

SEQ ID NO: 140169 - RNA, 22 nt, Human
augcugccauuauggcuguugu

SEQ ID NO: 140170 - RNA, 18 nt, Human
caaacccuuccacugcca

SEQ ID NO: 140171 - RNA, 24 nt, Human
cacgcacacccuucccaaaaaccc

SEQ ID NO: 140172 - RNA, 24 nt, Human
ccaaagacacgcacacccuuccca

SEQ ID NO: 140173 - RNA, 23 nt, Human
ccagcaguucucugugagucugg

SEQ ID NO: 140174 - RNA, 22 nt, Human
cccaaaaacccagcaguucucu

SEQ ID NO: 140175 - RNA, 23 nt, Human
cccaacuuccaugccccaaagac

SEQ ID NO: 140176 - RNA, 23 nt, Human
ccccaaagacacgcacacccuuc

SEQ ID NO: 140177 - RNA, 20 nt, Human
ccuuccacugccaugcugcc

SEQ ID NO: 140178 - RNA, 22 nt, Human
ccuuccacugccaugcugccau

SEQ ID NO: 140179 - RNA, 21 nt, Human
cgcacacccuucccaaaaacc

SEQ ID NO: 140180 - RNA, 23 nt, Human
cugagaaguagacacaagaauca

SEQ ID NO: 140181 - RNA, 21 nt, Human
gacacaagaaucagacagaug

SEQ ID NO: 140182 - RNA, 20 nt, Human
gaucaaaacgucagcuuugc

SEQ ID NO: 140183 - RNA, 19 nt, Human
gccccaaagacacgcacac

SEQ ID NO: 140184 - RNA, 22 nt, Human
gccugggcacaagacaaacccu

SEQ ID NO: 140185 - RNA, 19 nt, Human
gcuggaugugguuuaugcc

SEQ ID NO: 140186 - RNA, 18 nt, Human
ggacgacacugaugggau

SEQ ID NO: 140187 - RNA, 20 nt, Human
ggcuguuguuuuuccauaug

SEQ ID NO: 140188 - RNA, 18 nt, Human
gggaaaggcuggcccgug

SEQ ID NO: 140189 - RNA, 21 nt, Human
uacaaacuaauaccacacaga

SEQ ID NO: 140190 - RNA, 22 nt, Human
uauaaccccaacuuccaugccc

SEQ ID NO: 140191 - RNA, 26 nt, Human
ucaaaaucucucugccccaguccaca

SEQ ID NO: 140192 - RNA, 18 nt, Human
ucacauggccucucagca

SEQ ID NO: 140193 - RNA, 20 nt, Human
uccacaagaaacuugcauga

SEQ ID NO: 140194 - RNA, 21 nt, Human
uccacuauaaccccaacuucc

SEQ ID NO: 140195 - RNA, 23 nt, Human
ucccaaaaacccagcaguucucu

SEQ ID NO: 140196 - RNA, 18 nt, Human
uccucugggucuccacua

SEQ ID NO: 140197 - RNA, 18 nt, Human
ucucugccccaguccaca

SEQ ID NO: 140198 - RNA, 20 nt, Human
ugagaaguagacacaagaaa

SEQ ID NO: 140199 - RNA, 25 nt, Human
ugaggcagagaaguuuuccccgagg

SEQ ID NO: 140200 - RNA, 23 nt, Human
ugcaugaccgcaaggccugggca

SEQ ID NO: 140201 - RNA, 19 nt, Human
ugccaagaacuuuauaucu

SEQ ID NO: 140202 - RNA, 19 nt, Human
ugccccaaagacacgcaca

SEQ ID NO: 140203 - RNA, 31 nt, Human
ugccccaaagacacgcacacccuucccaaaa

SEQ ID NO: 140204 - RNA, 19 nt, Human
ugcugaggcagagaaguuu

SEQ ID NO: 140205 - RNA, 21 nt, Human
ugcugccauuauggcuguugu

SEQ ID NO: 140206 - RNA, 24 nt, Human
uggauacaaacuaauaccacacag

SEQ ID NO: 140207 - RNA, 18 nt, Human
ugggucuccacuauaacc

SEQ ID NO: 140208 - RNA, 24 nt, Human
uggucucacauggccucucagcag

SEQ ID NO: 140209 - RNA, 22 nt, Human
uguaaauaaagcucuuucuuuc

SEQ ID NO: 140210 - RNA, 24 nt, Human
uguuuuuccauauggucucacaug

SEQ ID NO: 140211 - RNA, 23 nt, Human
uucucugugagucugguagaaag

SEQ ID NO: 140212 - RNA, 20 nt, Human
uuucucauccucugggucuc

SEQ ID NO: 140213 - RNA, 22 nt, Human
uuucucauccucugggucucca

SEQ ID NO: 140214 - RNA, 23 nt, Human
uuuguggaccuacucagccuugg

SEQ ID NO: 140215 - RNA, 18 nt, Human
aaaccuccuaggcuagug

SEQ ID NO: 140216 - RNA, 25 nt, Human
aaauacgugcuugguguuacuaugg

SEQ ID NO: 140217 - RNA, 25 nt, Human
agccgcaguggggaagaggaaaacc

SEQ ID NO: 140218 - RNA, 19 nt, Human
auggucaaaauuauaaugg

SEQ ID NO: 140219 - RNA, 20 nt, Human
auucauuaacaauacuugaa

SEQ ID NO: 140220 - RNA, 24 nt, Human
auuuauggucaaaauuauaauggg

SEQ ID NO: 140221 - RNA, 22 nt, Human
auuuuugaagccaaauugggag

SEQ ID NO: 140222 - RNA, 23 nt, Human
cacacggaacacucagcaaacac

SEQ ID NO: 140223 - RNA, 21 nt, Human
cacgaccuccuuaagggcagg

SEQ ID NO: 140224 - RNA, 22 nt, Human
cagcaaacacgagaucccuuca

SEQ ID NO: 140225 - RNA, 25 nt, Human
cagcaaacacgagaucccuucagau

SEQ ID NO: 140226 - RNA, 18 nt, Human
cucagcgcugaguucucc

SEQ ID NO: 140227 - RNA, 26 nt, Human
cuggcaauggcgacggugaauuuucc

SEQ ID NO: 140228 - RNA, 20 nt, Human
cuuuagacaaucucagcgcu

SEQ ID NO: 140229 - RNA, 19 nt, Human
gcagggaccaggcuuuauc

SEQ ID NO: 140230 - RNA, 24 nt, Human
gcaguggggaagaggaaaaccuga

SEQ ID NO: 140231 - RNA, 18 nt, Human
ggggagccgcagugggga

SEQ ID NO: 140232 - RNA, 19 nt, Human
ggggagccgcaguggggaa

SEQ ID NO: 140233 - RNA, 24 nt, Human
guggggaagaggaaaaccugaggg

SEQ ID NO: 140234 - RNA, 23 nt, Human
uaaaaccuccuaggcuagugcug

SEQ ID NO: 140235 - RNA, 30 nt, Human
uauaauggcaaaaacuuauaaauaaauacc

SEQ ID NO: 140236 - RNA, 20 nt, Human
ucuauucauuaacaauacuu

SEQ ID NO: 140237 - RNA, 22 nt, Human
ugaguucuccgcgcaagcgccg

SEQ ID NO: 140238 - RNA, 22 nt, Human
ugucuccuccacaagaccacga

SEQ ID NO: 140239 - RNA, 26 nt, Human
uucauuaacaauacuugaacauuuac

SEQ ID NO: 140240 - RNA, 19 nt, Human
uuccuggggcuuuagacaa

SEQ ID NO: 140241 - RNA, 24 nt, Human
uuguagagacuaaaaccuccuagg

SEQ ID NO: 140242 - RNA, 24 nt, Human
aaaaaaaauuccccaaagcuuaag

SEQ ID NO: 140243 - RNA, 25 nt, Human
aaaauuccccaaagcuuaagcauac

SEQ ID NO: 140244 - RNA, 26 nt, Human
aaacacacacuagaaucagaagaauc

SEQ ID NO: 140245 - RNA, 20 nt, Human
aacagggcaucuggcacaca

SEQ ID NO: 140246 - RNA, 21 nt, Human
aaccagucuggauccccaccc

SEQ ID NO: 140247 - RNA, 19 nt, Human
aagcaaaacagagcaagga

SEQ ID NO: 140248 - RNA, 21 nt, Human
aagcaaaacagagcaaggaga

SEQ ID NO: 140249 - RNA, 21 nt, Human
acacuagaaucagaagaaucc

SEQ ID NO: 140250 - RNA, 19 nt, Human
acuaugaaaaagugagcug

SEQ ID NO: 140251 - RNA, 27 nt, Human
acuaugaaaaagugagcugggguccug

SEQ ID NO: 140252 - RNA, 18 nt, Human
agacgagugugauauucc

SEQ ID NO: 140253 - RNA, 26 nt, Human
agagaaaaguuuaugaaugcuaagga

SEQ ID NO: 140254 - RNA, 20 nt, Human
agggaaagacgagugugaua

SEQ ID NO: 140255 - RNA, 18 nt, Human
aucuaaaccacaaugacu

SEQ ID NO: 140256 - RNA, 19 nt, Human
caccaguaagcaauauucg

SEQ ID NO: 140257 - RNA, 24 nt, Human
caccuacuaaaaacaaaaccugaa

SEQ ID NO: 140258 - RNA, 21 nt, Human
cagagcaaggagaaugaugcc

SEQ ID NO: 140259 - RNA, 26 nt, Human
caguagauguucuuacaugcaggcuu

SEQ ID NO: 140260 - RNA, 18 nt, Human
cauccuauugccacucuc

SEQ ID NO: 140261 - RNA, 21 nt, Human
caugcaggcuuugagguguuu

SEQ ID NO: 140262 - RNA, 22 nt, Human
ccacagugguaaagggaaagac

SEQ ID NO: 140263 - RNA, 24 nt, Human
cccacccuaaaaacuugggcuggg

SEQ ID NO: 140264 - RNA, 19 nt, Human
cccaucugcuuacuuggaa

SEQ ID NO: 140265 - RNA, 19 nt, Human
ccccaaagcuuaagcauac

SEQ ID NO: 140266 - RNA, 21 nt, Human
ccccuuaaaaaaaaauucccc

SEQ ID NO: 140267 - RNA, 21 nt, Human
cgagugugauauuccucaacc

SEQ ID NO: 140268 - RNA, 23 nt, Human
cuaaaaacaaaaccugaaaacac

SEQ ID NO: 140269 - RNA, 20 nt, Human
cucauugugauuucucaccu

SEQ ID NO: 140270 - RNA, 18 nt, Human
cuccccuagcaguggugu

SEQ ID NO: 140271 - RNA, 22 nt, Human
cuccccuagcagugguguuucc

SEQ ID NO: 140272 - RNA, 19 nt, Human
cucuagugcaauaauuaag

SEQ ID NO: 140273 - RNA, 26 nt, Human
cucuguucuuuuccuuucucccacuc

SEQ ID NO: 140274 - RNA, 19 nt, Human
cugaagaaaccucauccua

SEQ ID NO: 140275 - RNA, 18 nt, Human
cuuugagguguuucugcc

SEQ ID NO: 140276 - RNA, 18 nt, Human
gaauaucaccuacuaaaa

SEQ ID NO: 140277 - RNA, 27 nt, Human
gacuacaucuaucacuaaacacacacu

SEQ ID NO: 140278 - RNA, 23 nt, Human
gauccccacccuaaaaacuuggg

SEQ ID NO: 140279 - RNA, 18 nt, Human
ggaaagacgagugugaua

SEQ ID NO: 140280 - RNA, 23 nt, Human
gguaggagugcuugauggcuugu

SEQ ID NO: 140281 - RNA, 19 nt, Human
guaauaaagagcuggauac

SEQ ID NO: 140282 - RNA, 28 nt, Human
uaaaaaaaaauuccccaaagcuuaagca

SEQ ID NO: 140283 - RNA, 21 nt, Human
uaaaaacauuuuuuuagaucc

SEQ ID NO: 140284 - RNA, 22 nt, Human
uaagcauacuacaagcugcugc

SEQ ID NO: 140285 - RNA, 27 nt, Human
uaauggaauuuuccuccuaggaaacac

SEQ ID NO: 140286 - RNA, 24 nt, Human
uacaucuaucacuaaacacacacu

SEQ ID NO: 140287 - RNA, 22 nt, Human
uagaaucagaagaauccuugac

SEQ ID NO: 140288 - RNA, 20 nt, Human
uagugaguuuugcuuucuuu

SEQ ID NO: 140289 - RNA, 23 nt, Human
uauuuuucucauugugauuucuc

SEQ ID NO: 140290 - RNA, 21 nt, Human
ucaccuacuaaaaacaaaacc

SEQ ID NO: 140291 - RNA, 21 nt, Human
uccaacuuucaccauuaaaca

SEQ ID NO: 140292 - RNA, 23 nt, Human
ucccacucagcuggugucugauu

SEQ ID NO: 140293 - RNA, 24 nt, Human
uccccaaagcuuaagcauacuaca

SEQ ID NO: 140294 - RNA, 24 nt, Human
uccuuucucccacucagcuggugu

SEQ ID NO: 140295 - RNA, 23 nt, Human
ucucuguucuuuuccuuucuccc

SEQ ID NO: 140296 - RNA, 23 nt, Human
ucugcuggauucucuuacaucca

SEQ ID NO: 140297 - RNA, 19 nt, Human
ucugugguugaauuuuuau

SEQ ID NO: 140298 - RNA, 19 nt, Human
ucugugguugaauuuuuau

SEQ ID NO: 140299 - RNA, 21 nt, Human
ucugugguugaauuuuuauuu

SEQ ID NO: 140300 - RNA, 21 nt, Human
ucuguucuuuuccuuucuccc

SEQ ID NO: 140301 - RNA, 21 nt, Human
ucuuuuuuuuuguccacagcu

SEQ ID NO: 140302 - RNA, 20 nt, Human
ugaaaacacaauucaguucc

SEQ ID NO: 140303 - RNA, 24 nt, Human
ugaaaacacaauucaguucccauc

SEQ ID NO: 140304 - RNA, 18 nt, Human
ugaaaccaacagggcauc

SEQ ID NO: 140305 - RNA, 22 nt, Human
ugacuccacagggauauuaacu

SEQ ID NO: 140306 - RNA, 20 nt, Human
uggaaaagcaaaacagagca

SEQ ID NO: 140307 - RNA, 20 nt, Human
uggaauuuauuuucucuagu

SEQ ID NO: 140308 - RNA, 21 nt, Human
uguucuucucuguucuuuucc

SEQ ID NO: 140309 - RNA, 23 nt, Human
uuaguccuaauauaagagaaaag

SEQ ID NO: 140310 - RNA, 23 nt, Human
uuccucaaccucaccaguaagca

SEQ ID NO: 140311 - RNA, 22 nt, Human
uucuuuuccuuucucccacuca

SEQ ID NO: 140312 - RNA, 24 nt, Human
uuuauguuaucugugaaaccaaca

SEQ ID NO: 140313 - RNA, 25 nt, Human
uuucucuagugcaauaauuaaggua

SEQ ID NO: 140314 - RNA, 21 nt, Human
agguacauuggaaacaugaaa

SEQ ID NO: 140315 - RNA, 19 nt, Human
ugaaaaaucagguacauug

SEQ ID NO: 140316 - RNA, 20 nt, Human
uguguaugugucucugugug

SEQ ID NO: 140317 - RNA, 25 nt, Human
aaagauccagauuuggucagugugg

SEQ ID NO: 140318 - RNA, 23 nt, Human
cagugagcuuugcuaugcuauuu

SEQ ID NO: 140319 - RNA, 23 nt, Human
ccgucugcaguuaaugucuaaga

SEQ ID NO: 140320 - RNA, 20 nt, Human
ggguaugaacccaaacauuu

SEQ ID NO: 140321 - RNA, 24 nt, Human
uauuuugaauacuuuaguccaaag

SEQ ID NO: 140322 - RNA, 22 nt, Human
ugacaacauauugcuuuugggg

SEQ ID NO: 140323 - RNA, 19 nt, Human
ugagagaagcuaauaagug

SEQ ID NO: 140324 - RNA, 19 nt, Human
uuagcccaauacagugagc

SEQ ID NO: 140325 - RNA, 22 nt, Human
aaaaagccagaacagccuuuac

SEQ ID NO: 140326 - RNA, 18 nt, Human
aaaauaaacagaaaacuu

SEQ ID NO: 140327 - RNA, 26 nt, Human
aaaauaaacagaaaacuuugaccaaa

SEQ ID NO: 140328 - RNA, 27 nt, Human
aaaauaaacagaaaacuuugaccaaag

SEQ ID NO: 140329 - RNA, 20 nt, Human
aaacacagaagagaagaaac

SEQ ID NO: 140330 - RNA, 18 nt, Human
aaacagaaaacuuugacc

SEQ ID NO: 140331 - RNA, 22 nt, Human
aaccaaacaaguacaucgaaga

SEQ ID NO: 140332 - RNA, 24 nt, Human
aaggagacucauuccaaaaugcuu

SEQ ID NO: 140333 - RNA, 21 nt, Human
aaucauggcuauauuuucugg

SEQ ID NO: 140334 - RNA, 24 nt, Human
acacagaagagaagaaacaaaucc

SEQ ID NO: 140335 - RNA, 24 nt, Human
accuuaaaguacaucgaauaugac

SEQ ID NO: 140336 - RNA, 24 nt, Human
agcaaaauaaacagaaaacuuuga

SEQ ID NO: 140337 - RNA, 20 nt, Human
agcgggaggaaagcuguggc

SEQ ID NO: 140338 - RNA, 18 nt, Human
aggcucgcgaggucgcug

SEQ ID NO: 140339 - RNA, 20 nt, Human
agugcggaaggcucgcgagg

SEQ ID NO: 140340 - RNA, 19 nt, Human
aucacucuacugcaagcac

SEQ ID NO: 140341 - RNA, 22 nt, Human
cagaaaacuuugaccaaagaaa

SEQ ID NO: 140342 - RNA, 20 nt, Human
cagcgccgaggcauaagcga

SEQ ID NO: 140343 - RNA, 22 nt, Human
cagucaaauuaauaccaaacca

SEQ ID NO: 140344 - RNA, 23 nt, Human
cagucaaauuaauaccaaaccaa

SEQ ID NO: 140345 - RNA, 19 nt, Human
ccuaauacagaauauggaa

SEQ ID NO: 140346 - RNA, 22 nt, Human
cgaaacacagaagagaagaaac

SEQ ID NO: 140347 - RNA, 23 nt, Human
cgaaacacagaagagaagaaaca

SEQ ID NO: 140348 - RNA, 18 nt, Human
gaagaaacaaauccuaag

SEQ ID NO: 140349 - RNA, 18 nt, Human
gacgcacugcauccaagu

SEQ ID NO: 140350 - RNA, 18 nt, Human
gagaaagcggagggggcc

SEQ ID NO: 140351 - RNA, 23 nt, Human
gagaaagcggagggggccaagga

SEQ ID NO: 140352 - RNA, 22 nt, Human
gaggagcugcgucggagcuggg

SEQ ID NO: 140353 - RNA, 21 nt, Human
gccggcgcggagaaagcggag

SEQ ID NO: 140354 - RNA, 21 nt, Human
gcgaggcgggccggcgcggag

SEQ ID NO: 140355 - RNA, 21 nt, Human
gcgcagaggagcugcgucgga

SEQ ID NO: 140356 - RNA, 19 nt, Human
gcucgcgaggucgcugcuc

SEQ ID NO: 140357 - RNA, 24 nt, Human
gcucgcuaccugggcccucccgag

SEQ ID NO: 140358 - RNA, 20 nt, Human
ggcggcaagggcgcagagga

SEQ ID NO: 140359 - RNA, 24 nt, Human
gggccgggggcaggagcgggagga

SEQ ID NO: 140360 - RNA, 21 nt, Human
uaagaagauaaaaagccagaa

SEQ ID NO: 140361 - RNA, 20 nt, Human
uaauaaaguggaaauucaua

SEQ ID NO: 140362 - RNA, 20 nt, Human
uacaauccacacucugaaac

SEQ ID NO: 140363 - RNA, 20 nt, Human
uacaucgaagaguauauggg

SEQ ID NO: 140364 - RNA, 18 nt, Human
uagaauguccuaucacuc

SEQ ID NO: 140365 - RNA, 25 nt, Human
uagcacuucagacgcacugcaucca

SEQ ID NO: 140366 - RNA, 19 nt, Human
uauaggcuuccaaaauuaa

SEQ ID NO: 140367 - RNA, 22 nt, Human
uauugccagaauagcaaacuuc

SEQ ID NO: 140368 - RNA, 27 nt, Human
ucagugauccauuuaauuuuuaucucc

SEQ ID NO: 140369 - RNA, 22 nt, Human
uccaaaauuaaagaauugauca

SEQ ID NO: 140370 - RNA, 21 nt, Human
ucuacugcaagcaccgggauu

SEQ ID NO: 140371 - RNA, 24 nt, Human
ucuauuauuuaauaaaguggaaau

SEQ ID NO: 140372 - RNA, 25 nt, Human
ugacaagcaaaauaaacagaaaacu

SEQ ID NO: 140373 - RNA, 21 nt, Human
ugagaagcagaaugacuaaaa

SEQ ID NO: 140374 - RNA, 22 nt, Human
ugagaggggggcuggugcuggg

SEQ ID NO: 140375 - RNA, 18 nt, Human
ugccagaauagcaaacuu

SEQ ID NO: 140376 - RNA, 22 nt, Human
ugcgucggagcuggguguuggu

SEQ ID NO: 140377 - RNA, 21 nt, Human
ugcuugguuuuggguuggggg

SEQ ID NO: 140378 - RNA, 18 nt, Human
uggcucggagggcggcaa

SEQ ID NO: 140379 - RNA, 25 nt, Human
uggggguuugagaggggggcuggug

SEQ ID NO: 140380 - RNA, 23 nt, Human
uggguuggggguuugagaggggg

SEQ ID NO: 140381 - RNA, 20 nt, Human
aaaguguucauuucaaaauu

SEQ ID NO: 140382 - RNA, 23 nt, Human
agaacacaaucucaaaguaucau

SEQ ID NO: 140383 - RNA, 20 nt, Human
agccaucguaaugcuaaccc

SEQ ID NO: 140384 - RNA, 23 nt, Human
aggaagagaaaaguuuaauuaaa

SEQ ID NO: 140385 - RNA, 19 nt, Human
agugaaaaaaaaaggaaga

SEQ ID NO: 140386 - RNA, 21 nt, Human
agugaaaaaaaaaggaagaga

SEQ ID NO: 140387 - RNA, 22 nt, Human
augaacuccuaaaacuugcaag

SEQ ID NO: 140388 - RNA, 18 nt, Human
caucucucagaacacaau

SEQ ID NO: 140389 - RNA, 19 nt, Human
gaaaaaaaaaggaagagaa

SEQ ID NO: 140390 - RNA, 24 nt, Human
gaacacaaucucaaaguaucaugc

SEQ ID NO: 140391 - RNA, 23 nt, Human
gagaaaaguuuaauuaaaaacau

SEQ ID NO: 140392 - RNA, 23 nt, Human
uaaacaugcuuuagugaaaaaaa

SEQ ID NO: 140393 - RNA, 19 nt, Human
ucaugcugaguuuuguuuu

SEQ ID NO: 140394 - RNA, 24 nt, Human
uccuuuggcucugaccugaugaaa

SEQ ID NO: 140395 - RNA, 21 nt, Human
ucucucagaacacaaucucaa

SEQ ID NO: 140396 - RNA, 21 nt, Human
ucugaccugaugaaauggcac

SEQ ID NO: 140397 - RNA, 20 nt, Human
uuagugaaaaaaaaaggaag

SEQ ID NO: 140398 - RNA, 21 nt, Human
uuagugaaaaaaaaaggaaga

SEQ ID NO: 140399 - RNA, 24 nt, Human
uuauuccuaacucaucugguguuu

SEQ ID NO: 140400 - RNA, 23 nt, Human
uucauuauaacauuuuuaauugu

SEQ ID NO: 140401 - RNA, 19 nt, Human
uuggcaaaaauaccuaaag

SEQ ID NO: 140402 - RNA, 22 nt, Human
uuuagugaaaaaaaaaggaaga

SEQ ID NO: 140403 - RNA, 26 nt, Human
uuuagugaaaaaaaaaggaagagaaa

SEQ ID NO: 140404 - RNA, 23 nt, Human
uuugccccugaccaauggcugug

SEQ ID NO: 140405 - RNA, 20 nt, Human
aaggcuucaaaaggauuuug

SEQ ID NO: 140406 - RNA, 22 nt, Human
aggaauaauaauaaucaauggc

SEQ ID NO: 140407 - RNA, 25 nt, Human
ccaacuguuugauuugauuccccca

SEQ ID NO: 140408 - RNA, 23 nt, Human
uaaucaauggcuuaaaaggcuuc

SEQ ID NO: 140409 - RNA, 22 nt, Human
uauguuuagauuuacacuuuua

SEQ ID NO: 140410 - RNA, 21 nt, Human
ucugcaggaguuaggucuugg

SEQ ID NO: 140411 - RNA, 20 nt, Human
ucuuucucuuugaagacuga

SEQ ID NO: 140412 - RNA, 18 nt, Human
ucuuugaagacugaaagu

SEQ ID NO: 140413 - RNA, 24 nt, Human
ugauuugauucccccaguuguuuu

SEQ ID NO: 140414 - RNA, 22 nt, Human
ugugugaaguauuaaagaauau

SEQ ID NO: 140415 - RNA, 21 nt, Human
uuaccaaacuuuucacaaaag

SEQ ID NO: 140416 - RNA, 19 nt, Human
uugguucugaauccaacug

SEQ ID NO: 140417 - RNA, 24 nt, Human
uuucacaaaaggaaucuuaugggu

SEQ ID NO: 140418 - RNA, 23 nt, Human
aaaaacacaaauaaauccaagca

SEQ ID NO: 140419 - RNA, 20 nt, Human
aaauaaauccaagcagauaa

SEQ ID NO: 140420 - RNA, 26 nt, Human
acgccaccgucacuaccgccuccgac

SEQ ID NO: 140421 - RNA, 18 nt, Human
caaaaacacaaauaaauc

SEQ ID NO: 140422 - RNA, 20 nt, Human
caaaaacacaaauaaaucca

SEQ ID NO: 140423 - RNA, 19 nt, Human
cacaaauaaauccaagcag

SEQ ID NO: 140424 - RNA, 22 nt, Human
ccaccgucacuaccgccuccga

SEQ ID NO: 140425 - RNA, 22 nt, Human
cgccaccgucacuaccgccucc

SEQ ID NO: 140426 - RNA, 19 nt, Human
cucaaggaaacgccaccgu

SEQ ID NO: 140427 - RNA, 18 nt, Human
uagagacuuggggaaaga

SEQ ID NO: 140428 - RNA, 22 nt, Human
uccaagcagauaaugaaauaaa

SEQ ID NO: 140429 - RNA, 24 nt, Human
uccgcgcccaacaccucccagaua

SEQ ID NO: 140430 - RNA, 22 nt, Human
aaaaaaguauguaaugacccuc

SEQ ID NO: 140431 - RNA, 22 nt, Human
aaaaaaguauguaaugacccuc

SEQ ID NO: 140432 - RNA, 19 nt, Human
aaaaagaagcaaauuagua

SEQ ID NO: 140433 - RNA, 28 nt, Human
aaaagcaaugagaaaaccgcaggucggc

SEQ ID NO: 140434 - RNA, 28 nt, Human
aaaagcaaugagaaaaccgcaggucggc

SEQ ID NO: 140435 - RNA, 20 nt, Human
aaacacacaccuaugcaccc

SEQ ID NO: 140436 - RNA, 23 nt, Human
aaacuuauaccucuggggaucua

SEQ ID NO: 140437 - RNA, 23 nt, Human
aaacuuauaccucuggggaucua

SEQ ID NO: 140438 - RNA, 19 nt, Human
aaaguauguaaugacccuc

SEQ ID NO: 140439 - RNA, 19 nt, Human
aaaguauguaaugacccuc

SEQ ID NO: 140440 - RNA, 18 nt, Human
aaauaaugugaaacuuuu

SEQ ID NO: 140441 - RNA, 20 nt, Human
aaauguguccagcauuuucc

SEQ ID NO: 140442 - RNA, 25 nt, Human
aacaugccccuuaauucuuccucug

SEQ ID NO: 140443 - RNA, 21 nt, Human
aaccaaaaaguuagcugcacu

SEQ ID NO: 140444 - RNA, 22 nt, Human
aagagauuacugucaaccaaca

SEQ ID NO: 140445 - RNA, 22 nt, Human
aagagauuacugucaaccaaca

SEQ ID NO: 140446 - RNA, 21 nt, Human
aagagccaaaaagaugggacg

SEQ ID NO: 140447 - RNA, 21 nt, Human
aagagccaaaaagaugggacg

SEQ ID NO: 140448 - RNA, 21 nt, Human
aagcugcuuuuauuuugcuuc

SEQ ID NO: 140449 - RNA, 22 nt, Human
aauaguagugauaguuauaaaa

SEQ ID NO: 140450 - RNA, 19 nt, Human
aaugaagggacagcaugaa

SEQ ID NO: 140451 - RNA, 22 nt, Human
aaugaauaauagaaaagagccg

SEQ ID NO: 140452 - RNA, 20 nt, Human
acacauuuccaaacaacucc

SEQ ID NO: 140453 - RNA, 20 nt, Human
acacuggguuccaacagaau

SEQ ID NO: 140454 - RNA, 18 nt, Human
acagaggauguagcugau

SEQ ID NO: 140455 - RNA, 22 nt, Human
acaugaaccucaggguaucucu

SEQ ID NO: 140456 - RNA, 22 nt, Human
acaugaaccucaggguaucucu

SEQ ID NO: 140457 - RNA, 21 nt, Human
acccucucgucucccggagcc

SEQ ID NO: 140458 - RNA, 21 nt, Human
acccucucgucucccggagcc

SEQ ID NO: 140459 - RNA, 21 nt, Human
acccucucgucucccggagcc

SEQ ID NO: 140460 - RNA, 18 nt, Human
accgcaggucggcaggcc

SEQ ID NO: 140461 - RNA, 18 nt, Human
accgcaggucggcaggcc

SEQ ID NO: 140462 - RNA, 21 nt, Human
acugaagcaugaacauacauu

SEQ ID NO: 140463 - RNA, 21 nt, Human
acugaagcaugaacauacauu

SEQ ID NO: 140464 - RNA, 22 nt, Human
acugguuugaaacuuauaccuc

SEQ ID NO: 140465 - RNA, 22 nt, Human
acugguuugaaacuuauaccuc

SEQ ID NO: 140466 - RNA, 19 nt, Human
agaaaagagcauacagaag

SEQ ID NO: 140467 - RNA, 21 nt, Human
agaaaagagcauacagaagaa

SEQ ID NO: 140468 - RNA, 22 nt, Human
agaauaaguaagagcacgcagu

SEQ ID NO: 140469 - RNA, 20 nt, Human
agagcaaaagcaaugagaaa

SEQ ID NO: 140470 - RNA, 21 nt, Human
agagcaaaagcaaugagaaaa

SEQ ID NO: 140471 - RNA, 21 nt, Human
agagcaaaagcaaugagaaaa

SEQ ID NO: 140472 - RNA, 18 nt, Human
agagccaaaaagauggga

SEQ ID NO: 140473 - RNA, 18 nt, Human
agagccaaaaagauggga

SEQ ID NO: 140474 - RNA, 23 nt, Human
agcagcauggguuuucagccugu

SEQ ID NO: 140475 - RNA, 20 nt, Human
aggagcugcuggguguggug

SEQ ID NO: 140476 - RNA, 20 nt, Human
aggagcugcuggguguggug

SEQ ID NO: 140477 - RNA, 23 nt, Human
aggggugggggucugucaggagc

SEQ ID NO: 140478 - RNA, 23 nt, Human
aggggugggggucugucaggagc

SEQ ID NO: 140479 - RNA, 22 nt, Human
auacagaagaaaugaaagauac

SEQ ID NO: 140480 - RNA, 18 nt, Human
aucaccaguuuucauguu

SEQ ID NO: 140481 - RNA, 18 nt, Human
aucaccaguuuucauguu

SEQ ID NO: 140482 - RNA, 18 nt, Human
aucuauauuccaagaagu

SEQ ID NO: 140483 - RNA, 26 nt, Human
augggaaugaaggguaaaaauguguc

SEQ ID NO: 140484 - RNA, 23 nt, Human
caaacaacuccaaaguaaccuuu

SEQ ID NO: 140485 - RNA, 19 nt, Human
caacagaauaaguaagagc

SEQ ID NO: 140486 - RNA, 22 nt, Human
caacuccaaaguaaccuuuaac

SEQ ID NO: 140487 - RNA, 25 nt, Human
caacuccaaaguaaccuuuaacuuc

SEQ ID NO: 140488 - RNA, 22 nt, Human
cacaaaauugagcacauuuugg

SEQ ID NO: 140489 - RNA, 22 nt, Human
cacaaaauugagcacauuuugg

SEQ ID NO: 140490 - RNA, 22 nt, Human
cacuacauugaaaaagaagcaa

SEQ ID NO: 140491 - RNA, 22 nt, Human
cacuacauugaaaaagaagcaa

SEQ ID NO: 140492 - RNA, 19 nt, Human
cacuggguuccaacagaau

SEQ ID NO: 140493 - RNA, 23 nt, Human
cagaauaaguaagagcacgcagu

SEQ ID NO: 140494 - RNA, 24 nt, Human
cagaccaugggaaugaaggguaaa

SEQ ID NO: 140495 - RNA, 18 nt, Human
cagcagcauggguuuuca

SEQ ID NO: 140496 - RNA, 21 nt, Human
cagcagcauggguuuucagcc

SEQ ID NO: 140497 - RNA, 25 nt, Human
cccucucgucucccggagccgaaag

SEQ ID NO: 140498 - RNA, 25 nt, Human
cccucucgucucccggagccgaaag

SEQ ID NO: 140499 - RNA, 18 nt, Human
ccgcaggucggcaggccc

SEQ ID NO: 140500 - RNA, 18 nt, Human
ccgcaggucggcaggccc

SEQ ID NO: 140501 - RNA, 20 nt, Human
ccuacaaaucugagaacaaa

SEQ ID NO: 140502 - RNA, 22 nt, Human
ccucuguguggccacagggcuc

SEQ ID NO: 140503 - RNA, 22 nt, Human
ccucuguguggccacagggcuc

SEQ ID NO: 140504 - RNA, 26 nt, Human
ccuuuaauucugccaccauccuugau

SEQ ID NO: 140505 - RNA, 27 nt, Human
ccuuuaauucugccaccauccuugaua

SEQ ID NO: 140506 - RNA, 24 nt, Human
cggugaggcugcugccaggcugcu

SEQ ID NO: 140507 - RNA, 24 nt, Human
cggugaggcugcugccaggcugcu

SEQ ID NO: 140508 - RNA, 23 nt, Human
cuaaggaaaaagcugagaguuac

SEQ ID NO: 140509 - RNA, 23 nt, Human
cuaaggaaaaagcugagaguuac

SEQ ID NO: 140510 - RNA, 20 nt, Human
cucagagcgggguucugaag

SEQ ID NO: 140511 - RNA, 19 nt, Human
cucccggagccgaaagcuc

SEQ ID NO: 140512 - RNA, 20 nt, Human
cucccggagccgaaaggcuc

SEQ ID NO: 140513 - RNA, 20 nt, Human
cucccggagccgaaaggcuc

SEQ ID NO: 140514 - RNA, 18 nt, Human
cuccucuguguggccaca

SEQ ID NO: 140515 - RNA, 18 nt, Human
cuccucuguguggccaca

SEQ ID NO: 140516 - RNA, 23 nt, Human
cucucgucucccggagccgaaag

SEQ ID NO: 140517 - RNA, 23 nt, Human
cucucgucucccggagccgaaag

SEQ ID NO: 140518 - RNA, 18 nt, Human
cugaauacucacagugug

SEQ ID NO: 140519 - RNA, 18 nt, Human
cugaauacucacagugug

SEQ ID NO: 140520 - RNA, 18 nt, Human
cugcucccccugcuggcu

SEQ ID NO: 140521 - RNA, 18 nt, Human
cugcucccccugcuggcu

SEQ ID NO: 140522 - RNA, 18 nt, Human
cugcucccccugcuggcu

SEQ ID NO: 140523 - RNA, 19 nt, Human
cugcucccccugcuggcuc

SEQ ID NO: 140524 - RNA, 19 nt, Human
cugcucccccugcuggcuc

SEQ ID NO: 140525 - RNA, 19 nt, Human
cugcucccccugcuggcuc

SEQ ID NO: 140526 - RNA, 19 nt, Human
cugcucccccugcuggcuc

SEQ ID NO: 140527 - RNA, 23 nt, Human
cugcuggguguggugguuccucu

SEQ ID NO: 140528 - RNA, 23 nt, Human
cugcuggguguggugguuccucu

SEQ ID NO: 140529 - RNA, 24 nt, Human
cugcuggguguggugguuccucuc

SEQ ID NO: 140530 - RNA, 24 nt, Human
cugcuggguguggugguuccucuc

SEQ ID NO: 140531 - RNA, 22 nt, Human
cuuuuuuuuuccuuccuugaaa

SEQ ID NO: 140532 - RNA, 21 nt, Human
gaaaagagcauacagaagaaa

SEQ ID NO: 140533 - RNA, 22 nt, Human
gaaaagggauuuaauugccuga

SEQ ID NO: 140534 - RNA, 22 nt, Human
gaaaagggauuuaauugccuga

SEQ ID NO: 140535 - RNA, 23 nt, Human
gaacauacauuagagcaaaagca

SEQ ID NO: 140536 - RNA, 23 nt, Human
gaacauacauuagagcaaaagca

SEQ ID NO: 140537 - RNA, 18 nt, Human
gaauaauagaaaagagca

SEQ ID NO: 140538 - RNA, 22 nt, Human
gauaguagugauaguuauaaaa

SEQ ID NO: 140539 - RNA, 22 nt, Human
gauaguagugauaguuauaaaa

SEQ ID NO: 140540 - RNA, 24 nt, Human
gcaccuacaaaucugagaacaaaa

SEQ ID NO: 140541 - RNA, 24 nt, Human
gcgggguucugaaggagagagcag

SEQ ID NO: 140542 - RNA, 20 nt, Human
ggagccgaaaggcucuggug

SEQ ID NO: 140543 - RNA, 20 nt, Human
ggagccgaaaggcucuggug

SEQ ID NO: 140544 - RNA, 22 nt, Human
ggcugcugccaggcugcugucu

SEQ ID NO: 140545 - RNA, 22 nt, Human
ggcugcugccaggcugcugucu

SEQ ID NO: 140546 - RNA, 19 nt, Human
gggaagagccaaaaagaug

SEQ ID NO: 140547 - RNA, 20 nt, Human
ggggaagagccaaaaagaug

SEQ ID NO: 140548 - RNA, 20 nt, Human
ggggaagagccaaaaagaug

SEQ ID NO: 140549 - RNA, 24 nt, Human
gguugugguucuaauugauccaug

SEQ ID NO: 140550 - RNA, 20 nt, Human
gucacacacucagacguccu

SEQ ID NO: 140551 - RNA, 22 nt, Human
gugggaggaagggggacugaaa

SEQ ID NO: 140552 - RNA, 20 nt, Human
gugugaguggguguagaggu

SEQ ID NO: 140553 - RNA, 20 nt, Human
gugugaguggguguagaggu

SEQ ID NO: 140554 - RNA, 20 nt, Human
guucuucuuuugauguggau

SEQ ID NO: 140555 - RNA, 23 nt, Human
uaacuuugaacagaaguccuagu

SEQ ID NO: 140556 - RNA, 19 nt, Human
uaaguaagagcacgcagua

SEQ ID NO: 140557 - RNA, 21 nt, Human
uacacacaaacacacauaaug

SEQ ID NO: 140558 - RNA, 19 nt, Human
uacagaccaugggaaugaa

SEQ ID NO: 140559 - RNA, 22 nt, Human
uacauugaaaaagaagcaaauu

SEQ ID NO: 140560 - RNA, 22 nt, Human
uagaaaagagcauacagaagaa

SEQ ID NO: 140561 - RNA, 18 nt, Human
uagaccugggauggaagg

SEQ ID NO: 140562 - RNA, 18 nt, Human
uaggguggagagugggag

SEQ ID NO: 140563 - RNA, 18 nt, Human
uauguuccagaagguccu

SEQ ID NO: 140564 - RNA, 22 nt, Human
uauuuccagaaaaaaaaaaaag

SEQ ID NO: 140565 - RNA, 22 nt, Human
uauuuccagaaaaaaaaaaaag

SEQ ID NO: 140566 - RNA, 22 nt, Human
uauuuccagaaaaaaaaaaaag

SEQ ID NO: 140567 - RNA, 21 nt, Human
ucauacauagcgugguacaug

SEQ ID NO: 140568 - RNA, 23 nt, Human
uccaacagaauaaguaagagcac

SEQ ID NO: 140569 - RNA, 19 nt, Human
uccaucaucaccaguuuuc

SEQ ID NO: 140570 - RNA, 19 nt, Human
uccaucaucaccaguuuuc

SEQ ID NO: 140571 - RNA, 19 nt, Human
ucucccggagccgaaaggc

SEQ ID NO: 140572 - RNA, 19 nt, Human
ucucccggagccgaaaggc

SEQ ID NO: 140573 - RNA, 23 nt, Human
ucuuuuuuuuuccuuccuugaaa

SEQ ID NO: 140574 - RNA, 19 nt, Human
ugaaaagggauuuaauugc

SEQ ID NO: 140575 - RNA, 19 nt, Human
ugaaaagggauuuaauugc

SEQ ID NO: 140576 - RNA, 23 nt, Human
ugaaaagggauuuaauugccuga

SEQ ID NO: 140577 - RNA, 23 nt, Human
ugaauagucaguuauggaguaca

SEQ ID NO: 140578 - RNA, 23 nt, Human
ugaauagucaguuauggaguaca

SEQ ID NO: 140579 - RNA, 23 nt, Human
ugacauuacagauugauuuuaca

SEQ ID NO: 140580 - RNA, 18 nt, Human
ugacuuuuuucucuuucc

SEQ ID NO: 140581 - RNA, 18 nt, Human
ugacuuuuuucucuuucc

SEQ ID NO: 140582 - RNA, 22 nt, Human
ugagaacaaaaaguuagcugca

SEQ ID NO: 140583 - RNA, 22 nt, Human
ugcaccuacaaaucugagaacc

SEQ ID NO: 140584 - RNA, 18 nt, Human
ugcuagugagugggauau

SEQ ID NO: 140585 - RNA, 23 nt, Human
ugcuuuuuaaccagggaugaacc

SEQ ID NO: 140586 - RNA, 25 nt, Human
uggacagguugugguucuaauugau

SEQ ID NO: 140587 - RNA, 20 nt, Human
uggagagugggaggaagggg

SEQ ID NO: 140588 - RNA, 20 nt, Human
ugggaggaagggggacugaa

SEQ ID NO: 140589 - RNA, 21 nt, Human
uggugcuaaggaaaaagcuga

SEQ ID NO: 140590 - RNA, 21 nt, Human
uggugcuaaggaaaaagcuga

SEQ ID NO: 140591 - RNA, 23 nt, Human
ugucauacauagcgugguacaug

SEQ ID NO: 140592 - RNA, 23 nt, Human
ugucuuccuccucuguguggcca

SEQ ID NO: 140593 - RNA, 23 nt, Human
ugucuuccuccucuguguggcca

SEQ ID NO: 140594 - RNA, 18 nt, Human
uguggugguuccucucuu

SEQ ID NO: 140595 - RNA, 18 nt, Human
uguggugguuccucucuu

SEQ ID NO: 140596 - RNA, 21 nt, Human
uguuacacacaaacacacaua

SEQ ID NO: 140597 - RNA, 19 nt, Human
uguuugcuuuuuaaccagg

SEQ ID NO: 140598 - RNA, 24 nt, Human
uucaagcacuacauugaaaaagaa

SEQ ID NO: 140599 - RNA, 24 nt, Human
uucaagcacuacauugaaaaagaa

SEQ ID NO: 140600 - RNA, 18 nt, Human
uuccaagaaguaacauag

SEQ ID NO: 140601 - RNA, 19 nt, Human
uuccucugaaguacuacau

SEQ ID NO: 140602 - RNA, 24 nt, Human
uucggugaggcugcugccaggcug

SEQ ID NO: 140603 - RNA, 24 nt, Human
uucggugaggcugcugccaggcug

SEQ ID NO: 140604 - RNA, 18 nt, Human
uucuucuuuugaugugga

SEQ ID NO: 140605 - RNA, 18 nt, Human
uucuucuuuugaugugga

SEQ ID NO: 140606 - RNA, 23 nt, Human
uugcugcucccccugcuggcucu

SEQ ID NO: 140607 - RNA, 23 nt, Human
uugcugcucccccugcuggcucu

SEQ ID NO: 140608 - RNA, 23 nt, Human
uugcugcucccccugcuggcucu

SEQ ID NO: 140609 - RNA, 24 nt, Human
uugcugcucccccugcuggcucuu

SEQ ID NO: 140610 - RNA, 24 nt, Human
uugcugcucccccugcuggcucuu

SEQ ID NO: 140611 - RNA, 23 nt, Human
uuguuugcuuuuuaaccagggau

SEQ ID NO: 140612 - RNA, 18 nt, Human
uuuguaguuaaaugcacc

SEQ ID NO: 140613 - RNA, 18 nt, Human
uuuuuuuuccuuccuuga

SEQ ID NO: 140614 - RNA, 26 nt, Human
aaaaaaaggcaaauuuuaaaaauuaa

SEQ ID NO: 140615 - RNA, 22 nt, Human
aaacaaacauaaaccucccccg

SEQ ID NO: 140616 - RNA, 24 nt, Human
aaacaaacauaaaccucccccgaa

SEQ ID NO: 140617 - RNA, 26 nt, Human
aaacaaacauaaaccucccccgaaca

SEQ ID NO: 140618 - RNA, 20 nt, Human
aaaccucccccgaacaccau

SEQ ID NO: 140619 - RNA, 21 nt, Human
aaacgaaaacucagcuucagc

SEQ ID NO: 140620 - RNA, 21 nt, Human
aacaaacauaaaccucccccg

SEQ ID NO: 140621 - RNA, 19 nt, Human
aacaacagagaaugaaaga

SEQ ID NO: 140622 - RNA, 19 nt, Human
aacagaaacaaacauaaac

SEQ ID NO: 140623 - RNA, 23 nt, Human
aacagagaaugaaagagcaggaa

SEQ ID NO: 140624 - RNA, 18 nt, Human
aaccuccaggugaauucc

SEQ ID NO: 140625 - RNA, 27 nt, Human
aagcaauuaaaaucacuccagacacac

SEQ ID NO: 140626 - RNA, 23 nt, Human
aagccugcaauugacuuucuuga

SEQ ID NO: 140627 - RNA, 23 nt, Human
aauugacuuucuugaguggguca

SEQ ID NO: 140628 - RNA, 21 nt, Human
accccagcacccugaaaguug

SEQ ID NO: 140629 - RNA, 20 nt, Human
acccugaaaguuguuucaag

SEQ ID NO: 140630 - RNA, 21 nt, Human
acccugaaaguuguuucaagc

SEQ ID NO: 140631 - RNA, 19 nt, Human
acgcuccggcccagccccc

SEQ ID NO: 140632 - RNA, 19 nt, Human
acgucuggcagccugcaag

SEQ ID NO: 140633 - RNA, 23 nt, Human
acguuuuguauuuaucucccaaa

SEQ ID NO: 140634 - RNA, 23 nt, Human
agccacacagcucagaaaaaccc

SEQ ID NO: 140635 - RNA, 18 nt, Human
agcuccgucuggaguagg

SEQ ID NO: 140636 - RNA, 18 nt, Human
agcugugccacgcagccc

SEQ ID NO: 140637 - RNA, 18 nt, Human
agcugugccacgcagccc

SEQ ID NO: 140638 - RNA, 19 nt, Human
agcuugcuccucguccucu

SEQ ID NO: 140639 - RNA, 24 nt, Human
aggcagcggcagcgccuacucagg

SEQ ID NO: 140640 - RNA, 24 nt, Human
aggccauuuuacaacaccaugggg

SEQ ID NO: 140641 - RNA, 20 nt, Human
caaccuccaggugaauuccu

SEQ ID NO: 140642 - RNA, 21 nt, Human
cacacagcucagaaaaacccg

SEQ ID NO: 140643 - RNA, 22 nt, Human
cagaaacaaacauaaaccuccc

SEQ ID NO: 140644 - RNA, 18 nt, Human
cagcccccucggcugagg

SEQ ID NO: 140645 - RNA, 21 nt, Human
cagcuuaaaaaaugugugcuu

SEQ ID NO: 140646 - RNA, 20 nt, Human
caggccccggagccaccccc

SEQ ID NO: 140647 - RNA, 23 nt, Human
caugcacauucauucaugacaug

SEQ ID NO: 140648 - RNA, 21 nt, Human
ccaccggcucuggcuccccuc

SEQ ID NO: 140649 - RNA, 24 nt, Human
ccacgcagccccuccccgcuuccc

SEQ ID NO: 140650 - RNA, 21 nt, Human
cccaaaggauaaaaaagcucc

SEQ ID NO: 140651 - RNA, 23 nt, Human
cccccgaacaccaugcaauagcc

SEQ ID NO: 140652 - RNA, 22 nt, Human
ccccggagccacccccgcggcg

SEQ ID NO: 140653 - RNA, 23 nt, Human
ccggagcaggggucgucgggaag

SEQ ID NO: 140654 - RNA, 24 nt, Human
ccuccgcacgcuccggcccagccc

SEQ ID NO: 140655 - RNA, 21 nt, Human
cggcccagcccccucggcuga

SEQ ID NO: 140656 - RNA, 19 nt, Human
cucagaaaaacccgagcuc

SEQ ID NO: 140657 - RNA, 21 nt, Human
cucagaaaaacccgagcuccg

SEQ ID NO: 140658 - RNA, 20 nt, Human
cucugugccugagcuuccuc

SEQ ID NO: 140659 - RNA, 18 nt, Human
cucuguguccggcuccuc

SEQ ID NO: 140660 - RNA, 22 nt, Human
cugaggcagcggcagcgccuac

SEQ ID NO: 140661 - RNA, 18 nt, Human
cuguagguugccuguuca

SEQ ID NO: 140662 - RNA, 22 nt, Human
gaaagagcaggaaaaugcaaug

SEQ ID NO: 140663 - RNA, 20 nt, Human
gaggggagugaugaaggugc

SEQ ID NO: 140664 - RNA, 21 nt, Human
gaguucuuuguagauucugga

SEQ ID NO: 140665 - RNA, 18 nt, Human
gcaagccugguccaggug

SEQ ID NO: 140666 - RNA, 19 nt, Human
gcccagcccccucggcuga

SEQ ID NO: 140667 - RNA, 18 nt, Human
gcgcacaacagaugggua

SEQ ID NO: 140668 - RNA, 22 nt, Human
ggagacggagucucggaaaaaa

SEQ ID NO: 140669 - RNA, 28 nt, Human
ggggagaaccgcugggggucaggagccu

SEQ ID NO: 140670 - RNA, 18 nt, Human
ggggagugaugaaggugc

SEQ ID NO: 140671 - RNA, 22 nt, Human
uaaaaucacuccagacacacaa

SEQ ID NO: 140672 - RNA, 21 nt, Human
uaaaccucccccgaacaccau

SEQ ID NO: 140673 - RNA, 23 nt, Human
uaaguaagaacaugcucuacugg

SEQ ID NO: 140674 - RNA, 21 nt, Human
uagauucuggauauuagcccu

SEQ ID NO: 140675 - RNA, 21 nt, Human
uaguacaugcagggcugugca

SEQ ID NO: 140676 - RNA, 23 nt, Human
uaucaggauaaacagaaacaaac

SEQ ID NO: 140677 - RNA, 19 nt, Human
ucagaaaaacccgagcucc

SEQ ID NO: 140678 - RNA, 18 nt, Human
ucauuuucaugcacauuc

SEQ ID NO: 140679 - RNA, 19 nt, Human
uccaagguaaacgaaaacu

SEQ ID NO: 140680 - RNA, 20 nt, Human
uccaagguaaacgaaaacuc

SEQ ID NO: 140681 - RNA, 22 nt, Human
uccagacacacaacaacagaga

SEQ ID NO: 140682 - RNA, 20 nt, Human
ucccaaaggauaaaaaagcu

SEQ ID NO: 140683 - RNA, 21 nt, Human
ucccaaaggauaaaaaagcuc

SEQ ID NO: 140684 - RNA, 23 nt, Human
ucccaccggcucuggcuccccuc

SEQ ID NO: 140685 - RNA, 18 nt, Human
uccccgccggagcagggg

SEQ ID NO: 140686 - RNA, 26 nt, Human
ucucggaaaaaaaaaaaaaggcaaau

SEQ ID NO: 140687 - RNA, 21 nt, Human
ucugugccugagcuuccucug

SEQ ID NO: 140688 - RNA, 25 nt, Human
ucuguguccggcuccucugacagug

SEQ ID NO: 140689 - RNA, 18 nt, Human
ugaaagagcaggaaaaug

SEQ ID NO: 140690 - RNA, 23 nt, Human
ugcaauagccacacagcucagaa

SEQ ID NO: 140691 - RNA, 23 nt, Human
ugcacauucauucaugacaugag

SEQ ID NO: 140692 - RNA, 19 nt, Human
ugcccugaggggagugaug

SEQ ID NO: 140693 - RNA, 21 nt, Human
ugccucugggggaagaccuug

SEQ ID NO: 140694 - RNA, 19 nt, Human
uggugcuuuuucuuuucuc

SEQ ID NO: 140695 - RNA, 26 nt, Human
uggugcuuuuucuuuucucuuuuuuc

SEQ ID NO: 140696 - RNA, 20 nt, Human
uuaaaggacaucuauaguua

SEQ ID NO: 140697 - RNA, 22 nt, Human
uuaggccauuuuacaacaccau

SEQ ID NO: 140698 - RNA, 19 nt, Human
uuccccgccggagcagggg

SEQ ID NO: 140699 - RNA, 19 nt, Human
uuccucuguguccggcucc

SEQ ID NO: 140700 - RNA, 24 nt, Human
uucuuuguagauucuggauauuag

SEQ ID NO: 140701 - RNA, 20 nt, Human
uugccuguucacucugaugg

SEQ ID NO: 140702 - RNA, 24 nt, Human
uuuuuuguuuguuuguuuuuggag

SEQ ID NO: 140703 - RNA, 18 nt, Human
uuuuuuuuuuuuuuuuug

SEQ ID NO: 140704 - RNA, 26 nt, Human
uuuuuuuuuuuuuuuuuggugcuuuu

SEQ ID NO: 140705 - RNA, 27 nt, Human
uuuuuuuuuuuuuuuuuggugcuuuuu

SEQ ID NO: 140706 - RNA, 22 nt, Human
uuuuuuuuuuuuuuuuuuguuu

SEQ ID NO: 140707 - RNA, 24 nt, Human
uuuuuuuuuuuuuuuuuuuuuggg

SEQ ID NO: 140708 - RNA, 19 nt, Human
aaccuggcuuuccaggugg

SEQ ID NO: 140709 - RNA, 22 nt, Human
acacuuuauuguuagcuguucu

SEQ ID NO: 140710 - RNA, 18 nt, Human
agacaacgcccauguccc

SEQ ID NO: 140711 - RNA, 23 nt, Human
ccaaccccgcgcugucaccgcgc

SEQ ID NO: 140712 - RNA, 20 nt, Human
ccccugggucccacgccgcc

SEQ ID NO: 140713 - RNA, 22 nt, Human
cccugggucccacgccgccaac

SEQ ID NO: 140714 - RNA, 19 nt, Human
ccgcgcugucaccgcgcgc

SEQ ID NO: 140715 - RNA, 20 nt, Human
cgcccccugggucccacgcc

SEQ ID NO: 140716 - RNA, 19 nt, Human
cuccucaggccucgggcug

SEQ ID NO: 140717 - RNA, 24 nt, Human
gccaaccccgcgcugucaccgcgc

SEQ ID NO: 140718 - RNA, 21 nt, Human
gccucgggcugcugcugccuc

SEQ ID NO: 140719 - RNA, 21 nt, Human
uggccagacaacgcccauguc

SEQ ID NO: 140720 - RNA, 25 nt, Human
uggccagacaacgcccaugucccaa

SEQ ID NO: 140721 - RNA, 19 nt, Human
aaaacacaaaugguagaca

SEQ ID NO: 140722 - RNA, 21 nt, Human
aaacaacaacaacaaaaauag

SEQ ID NO: 140723 - RNA, 21 nt, Human
aagguggguggcacuaagcca

SEQ ID NO: 140724 - RNA, 19 nt, Human
aauggcagaucccuuggug

SEQ ID NO: 140725 - RNA, 22 nt, Human
acagucagcuccaauguucccu

SEQ ID NO: 140726 - RNA, 25 nt, Human
accuucuccagacuguccucugcug

SEQ ID NO: 140727 - RNA, 21 nt, Human
agauuguggggaugaggagug

SEQ ID NO: 140728 - RNA, 20 nt, Human
agcuacaggcauggaagccc

SEQ ID NO: 140729 - RNA, 18 nt, Human
aggcauggaagcccaacc

SEQ ID NO: 140730 - RNA, 18 nt, Human
aggcccaauccuagacgg

SEQ ID NO: 140731 - RNA, 21 nt, Human
agguaaucaguuaccaagaac

SEQ ID NO: 140732 - RNA, 19 nt, Human
aggucaggccagccagcag

SEQ ID NO: 140733 - RNA, 21 nt, Human
aggugggugggauuauacaaa

SEQ ID NO: 140734 - RNA, 23 nt, Human
agucuaggcacuugaaauauuau

SEQ ID NO: 140735 - RNA, 18 nt, Human
aucaguuaccaagaacag

SEQ ID NO: 140736 - RNA, 18 nt, Human
augaggggaagugggguu

SEQ ID NO: 140737 - RNA, 21 nt, Human
caaaacacaaaugguagacaa

SEQ ID NO: 140738 - RNA, 23 nt, Human
caaaacacaaaugguagacaaaa

SEQ ID NO: 140739 - RNA, 19 nt, Human
caaagcaauuaugggaggc

SEQ ID NO: 140740 - RNA, 18 nt, Human
caaaguaacagucuaggc

SEQ ID NO: 140741 - RNA, 18 nt, Human
caccagagcugggcggcg

SEQ ID NO: 140742 - RNA, 20 nt, Human
cagaaaggaccaugacagca

SEQ ID NO: 140743 - RNA, 18 nt, Human
cagaucccuuggugguac

SEQ ID NO: 140744 - RNA, 23 nt, Human
cagcauaccuucaucguuuuggu

SEQ ID NO: 140745 - RNA, 20 nt, Human
cagucugaaaucaccuugug

SEQ ID NO: 140746 - RNA, 26 nt, Human
caguuaccaagaacagucagcuccaa

SEQ ID NO: 140747 - RNA, 21 nt, Human
caguucucaggcuugugguau

SEQ ID NO: 140748 - RNA, 24 nt, Human
caucagcaccuugggcuuucaaaa

SEQ ID NO: 140749 - RNA, 19 nt, Human
ccacgcuguggccuggggc

SEQ ID NO: 140750 - RNA, 18 nt, Human
ccagaaaggaccaugaca

SEQ ID NO: 140751 - RNA, 20 nt, Human
ccauccuagcuuuguggcaa

SEQ ID NO: 140752 - RNA, 22 nt, Human
ccccugcauggaguagcaccag

SEQ ID NO: 140753 - RNA, 21 nt, Human
cccgcgcgccuaggucaggcc

SEQ ID NO: 140754 - RNA, 19 nt, Human
cccgcgcggccgcccgacc

SEQ ID NO: 140755 - RNA, 22 nt, Human
cccgcgcggccgcccgaccccg

SEQ ID NO: 140756 - RNA, 19 nt, Human
ccgccgggcaccgucugcc

SEQ ID NO: 140757 - RNA, 18 nt, Human
ccugaccauacagagcuc

SEQ ID NO: 140758 - RNA, 18 nt, Human
ccuucuucuucuucuuuu

SEQ ID NO: 140759 - RNA, 24 nt, Human
cggcggccacugggcgcuggcacc

SEQ ID NO: 140760 - RNA, 19 nt, Human
cucuccuucuucuucuucu

SEQ ID NO: 140761 - RNA, 18 nt, Human
cugcacugaccccugcau

SEQ ID NO: 140762 - RNA, 18 nt, Human
cugcagucugaaaucacc

SEQ ID NO: 140763 - RNA, 19 nt, Human
cugcugcacugaccccugc

SEQ ID NO: 140764 - RNA, 22 nt, Human
cuguccucugcugcacugaccc

SEQ ID NO: 140765 - RNA, 23 nt, Human
cuguccucugcugcacugacccc

SEQ ID NO: 140766 - RNA, 22 nt, Human
cuguggccuggggccggggucc

SEQ ID NO: 140767 - RNA, 18 nt, Human
cuuccccaccuccaaccu

SEQ ID NO: 140768 - RNA, 20 nt, Human
cuuugugacuagauggaagu

SEQ ID NO: 140769 - RNA, 19 nt, Human
gaaaucaccuugugucuuc

SEQ ID NO: 140770 - RNA, 24 nt, Human
gaggcauuuacaaacaacaacaac

SEQ ID NO: 140771 - RNA, 24 nt, Human
gaguggcucugaccaaguuaaccc

SEQ ID NO: 140772 - RNA, 26 nt, Human
gcaccagaaacuuccagaaaggacca

SEQ ID NO: 140773 - RNA, 23 nt, Human
gccagccagcagcguggcccgcg

SEQ ID NO: 140774 - RNA, 18 nt, Human
gccgggacccaggcgcag

SEQ ID NO: 140775 - RNA, 22 nt, Human
gcggccacugggcgcuggcacc

SEQ ID NO: 140776 - RNA, 21 nt, Human
gcucuccuucuucuucuucuu

SEQ ID NO: 140777 - RNA, 24 nt, Human
ggcaccagaaacuuccagaaagga

SEQ ID NO: 140778 - RNA, 24 nt, Human
ggcacuaagccagauuguggggau

SEQ ID NO: 140779 - RNA, 22 nt, Human
gggaagugggguuugguggagg

SEQ ID NO: 140780 - RNA, 23 nt, Human
gggcgcuggcaccagagcugggc

SEQ ID NO: 140781 - RNA, 19 nt, Human
uaacauacauagaauaaaa

SEQ ID NO: 140782 - RNA, 19 nt, Human
uaaccccuacauccugacc

SEQ ID NO: 140783 - RNA, 19 nt, Human
uacauccugaccauacaga

SEQ ID NO: 140784 - RNA, 18 nt, Human
uacuacagaugggucaca

SEQ ID NO: 140785 - RNA, 19 nt, Human
uacuacagaugggucacag

SEQ ID NO: 140786 - RNA, 27 nt, Human
uagaagucccaaaauucaguucucagg

SEQ ID NO: 140787 - RNA, 20 nt, Human
ucagaagggcaugaaggucc

SEQ ID NO: 140788 - RNA, 24 nt, Human
ucagccuuuugcuuugcuaauacc

SEQ ID NO: 140789 - RNA, 18 nt, Human
uccagaaaggaccaugac

SEQ ID NO: 140790 - RNA, 21 nt, Human
ucccacgcuguggccuggggc

SEQ ID NO: 140791 - RNA, 20 nt, Human
uccccaccuccaaccuucuc

SEQ ID NO: 140792 - RNA, 21 nt, Human
ucugcagaaauguagacagac

SEQ ID NO: 140793 - RNA, 21 nt, Human
ucuuugugacuagauggaagu

SEQ ID NO: 140794 - RNA, 25 nt, Human
ugaccacggaagaucugcagaaaug

SEQ ID NO: 140795 - RNA, 22 nt, Human
ugaccauacagagcucccgcag

SEQ ID NO: 140796 - RNA, 23 nt, Human
ugagacuuggcagggagaggaca

SEQ ID NO: 140797 - RNA, 20 nt, Human
ugaggggaagugggguuugg

SEQ ID NO: 140798 - RNA, 20 nt, Human
ugaggugggugggauuauac

SEQ ID NO: 140799 - RNA, 26 nt, Human
ugaggugggugggauuauacaaagcc

SEQ ID NO: 140800 - RNA, 18 nt, Human
ugcacugaccccugcaug

SEQ ID NO: 140801 - RNA, 23 nt, Human
ugcauggaguagcaccagaagaa

SEQ ID NO: 140802 - RNA, 18 nt, Human
ugcugcacugaccccugc

SEQ ID NO: 140803 - RNA, 18 nt, Human
uggcaaagcaauuauggg

SEQ ID NO: 140804 - RNA, 24 nt, Human
uggggaugaggaguggagggcccc

SEQ ID NO: 140805 - RNA, 20 nt, Human
ugguggaggggaaucagaag

SEQ ID NO: 140806 - RNA, 18 nt, Human
uuauacaaagccuucccc

SEQ ID NO: 140807 - RNA, 22 nt, Human
uuauuuuuccaucuggguagaa

SEQ ID NO: 140808 - RNA, 19 nt, Human
uuccaguucacaaaucuuu

SEQ ID NO: 140809 - RNA, 18 nt, Human
uucuugagugucuugucu

SEQ ID NO: 140810 - RNA, 23 nt, Human
uuuacaaacaacaacaacaaaaa

SEQ ID NO: 140811 - RNA, 21 nt, Human
uuucacaguuaacucaucaaa

SEQ ID NO: 140812 - RNA, 20 nt, Human
uuugcuaauaccuucuccag

SEQ ID NO: 140813 - RNA, 23 nt, Human
uuuggcacuugaaggcucuggua

SEQ ID NO: 140814 - RNA, 21 nt, Human
uuuuucagucaaagauccugg

SEQ ID NO: 140815 - RNA, 18 nt, Human
aagcaagugucucucuua

SEQ ID NO: 140816 - RNA, 22 nt, Human
acugcgucccagacccugcgcc

SEQ ID NO: 140817 - RNA, 22 nt, Human
agaccccuucccuguagagccu

SEQ ID NO: 140818 - RNA, 23 nt, Human
aggaggccugggccacagccugc

SEQ ID NO: 140819 - RNA, 18 nt, Human
cacucccaacugcguccc

SEQ ID NO: 140820 - RNA, 18 nt, Human
cagcaggcggcaacuucc

SEQ ID NO: 140821 - RNA, 23 nt, Human
ccccagggggacagcaaggaccc

SEQ ID NO: 140822 - RNA, 18 nt, Human
ccugggccuggcagcagg

SEQ ID NO: 140823 - RNA, 23 nt, Human
cuccugggccuggcagcaggcgg

SEQ ID NO: 140824 - RNA, 19 nt, Human
cugcgucccagacccugcg

SEQ ID NO: 140825 - RNA, 22 nt, Human
cugcugcuccugcggcucucag

SEQ ID NO: 140826 - RNA, 25 nt, Human
cuggcagcaggcggcaacuuccucu

SEQ ID NO: 140827 - RNA, 21 nt, Human
gacagggccugucacccagga

SEQ ID NO: 140828 - RNA, 18 nt, Human
gcccagcuccuccugggc

SEQ ID NO: 140829 - RNA, 23 nt, Human
gcccagcuccuccugggccuggc

SEQ ID NO: 140830 - RNA, 20 nt, Human
ggcccagcuccuccugggcc

SEQ ID NO: 140831 - RNA, 21 nt, Human
ggcccccucggcuggcucagg

SEQ ID NO: 140832 - RNA, 22 nt, Human
gggacagcaaggaccgucuggc

SEQ ID NO: 140833 - RNA, 22 nt, Human
gguagggagugaggcagccgcc

SEQ ID NO: 140834 - RNA, 19 nt, Human
uagagaccuccguuaaagg

SEQ ID NO: 140835 - RNA, 22 nt, Human
ucccaacugcgucccagacccu

SEQ ID NO: 140836 - RNA, 22 nt, Human
ucccagacccugcgcccggcuu

SEQ ID NO: 140837 - RNA, 18 nt, Human
ucuccccagggggacagc

SEQ ID NO: 140838 - RNA, 21 nt, Human
ucucucugaggccuagagacc

SEQ ID NO: 140839 - RNA, 23 nt, Human
ugcgcccggcuucaguggggcuu

SEQ ID NO: 140840 - RNA, 24 nt, Human
uggcucagguagggagugaggcag

SEQ ID NO: 140841 - RNA, 20 nt, Human
uguagagccuucuccgauaa

SEQ ID NO: 140842 - RNA, 22 nt, Human
ugugggauggccauccaggcug

SEQ ID NO: 140843 - RNA, 20 nt, Human
uucccuguagagccuucucc

SEQ ID NO: 140844 - RNA, 21 nt, Human
uugcaggcccagcuccuccug

SEQ ID NO: 140845 - RNA, 22 nt, Human
aacgccccaacacacauacaga

SEQ ID NO: 140846 - RNA, 18 nt, Human
acacugcccccccaccau

SEQ ID NO: 140847 - RNA, 22 nt, Human
acagugggcagaacccccggga

SEQ ID NO: 140848 - RNA, 22 nt, Human
accuccugcaaggcauuugcca

SEQ ID NO: 140849 - RNA, 19 nt, Human
agcugcggccacggcguca

SEQ ID NO: 140850 - RNA, 20 nt, Human
aggcagccagaaauaggaag

SEQ ID NO: 140851 - RNA, 25 nt, Human
aggcagccagaaauaggaagaacag

SEQ ID NO: 140852 - RNA, 25 nt, Human
caaaagaggaggagguaugggagua

SEQ ID NO: 140853 - RNA, 30 nt, Human
caacacacauacagacaugcacacacauag

SEQ ID NO: 140854 - RNA, 24 nt, Human
caaucugauccuuguuuuccucuu

SEQ ID NO: 140855 - RNA, 22 nt, Human
cacacauacagacaugcacaca

SEQ ID NO: 140856 - RNA, 27 nt, Human
cagagcccgggacugcaacuccgaggg

SEQ ID NO: 140857 - RNA, 24 nt, Human
caggucagcuugucuucugagauu

SEQ ID NO: 140858 - RNA, 24 nt, Human
cauacagacaugcacacacauagu

SEQ ID NO: 140859 - RNA, 21 nt, Human
caugcacacacauaguacuug

SEQ ID NO: 140860 - RNA, 20 nt, Human
ccaacacacauacagacaug

SEQ ID NO: 140861 - RNA, 20 nt, Human
ccggccuggcugccagcugg

SEQ ID NO: 140862 - RNA, 18 nt, Human
ccuuacacucaacgcccc

SEQ ID NO: 140863 - RNA, 22 nt, Human
ccuuguuuuccucuuccagcug

SEQ ID NO: 140864 - RNA, 22 nt, Human
cuaagaugccagcauccaugcu

SEQ ID NO: 140865 - RNA, 21 nt, Human
cuccccuacuucucacucuag

SEQ ID NO: 140866 - RNA, 23 nt, Human
cugagcccacacauggugacuga

SEQ ID NO: 140867 - RNA, 21 nt, Human
gaagaacagaggugaggugug

SEQ ID NO: 140868 - RNA, 20 nt, Human
gagcccaaaagaggaggagg

SEQ ID NO: 140869 - RNA, 19 nt, Human
gccagaaauaggaagaaca

SEQ ID NO: 140870 - RNA, 18 nt, Human
ggaagaacagaggugagg

SEQ ID NO: 140871 - RNA, 20 nt, Human
ggagaagagggcugaggagc

SEQ ID NO: 140872 - RNA, 24 nt, Human
ggagacccuucauggacuuuaccu

SEQ ID NO: 140873 - RNA, 24 nt, Human
ggagcccucucucguccggugccu

SEQ ID NO: 140874 - RNA, 25 nt, Human
ggaggagguaugggaguagggaggg

SEQ ID NO: 140875 - RNA, 20 nt, Human
ggaguagggaggguucuaag

SEQ ID NO: 140876 - RNA, 21 nt, Human
ggggagcccaaaagaggagga

SEQ ID NO: 140877 - RNA, 22 nt, Human
guagcuccccuacuucucacuc

SEQ ID NO: 140878 - RNA, 23 nt, Human
uacagacaugcacacacauagua

SEQ ID NO: 140879 - RNA, 19 nt, Human
uagacacugcccccccacc

SEQ ID NO: 140880 - RNA, 21 nt, Human
uagacacugcccccccaccau

SEQ ID NO: 140881 - RNA, 21 nt, Human
uaggaagaacagaggugaggu

SEQ ID NO: 140882 - RNA, 19 nt, Human
uagucccuagacacugccc

SEQ ID NO: 140883 - RNA, 18 nt, Human
uaugggaguagggagggu

SEQ ID NO: 140884 - RNA, 19 nt, Human
uccccuacuucucacucua

SEQ ID NO: 140885 - RNA, 21 nt, Human
ucccuagacacugccccccca

SEQ ID NO: 140886 - RNA, 24 nt, Human
ucccugagcccacacauggugacu

SEQ ID NO: 140887 - RNA, 23 nt, Human
ucuccaaucugauccuuguuuuc

SEQ ID NO: 140888 - RNA, 19 nt, Human
ucucucguccggugccucu

SEQ ID NO: 140889 - RNA, 20 nt, Human
ucugacaguggggagcccaa

SEQ ID NO: 140890 - RNA, 19 nt, Human
ucugauccuuguuuuccuc

SEQ ID NO: 140891 - RNA, 27 nt, Human
ucuuccagcugcggccacggcgucacc

SEQ ID NO: 140892 - RNA, 21 nt, Human
ugacuauggccaccuggaaca

SEQ ID NO: 140893 - RNA, 22 nt, Human
ugagcccacacauggugacuga

SEQ ID NO: 140894 - RNA, 20 nt, Human
ugaugaaagaacgugcuuaa

SEQ ID NO: 140895 - RNA, 20 nt, Human
ugcucccacugcauccuuac

SEQ ID NO: 140896 - RNA, 19 nt, Human
uggagcagggagaagaggg

SEQ ID NO: 140897 - RNA, 24 nt, Human
uguuuuccucuuccagcugcggcc

SEQ ID NO: 140898 - RNA, 22 nt, Human
uuaaggcagaaaagugauuuau

SEQ ID NO: 140899 - RNA, 21 nt, Human
uuaggcagggcccugcuuggg

SEQ ID NO: 140900 - RNA, 25 nt, Human
uugcauacauagguauuggucagag

SEQ ID NO: 140901 - RNA, 22 nt, Human
uugugguguuagacuggggugc

SEQ ID NO: 140902 - RNA, 19 nt, Human
uuuggcccagcacucugca

SEQ ID NO: 140903 - RNA, 24 nt, Human
aaaaggaaaagaaaaguuaaagag

SEQ ID NO: 140904 - RNA, 25 nt, Human
aaacaacccaaacguccaucaacag

SEQ ID NO: 140905 - RNA, 21 nt, Human
aaacagguggacuuauaauca

SEQ ID NO: 140906 - RNA, 18 nt, Human
aaagaggccagucucaaa

SEQ ID NO: 140907 - RNA, 19 nt, Human
aagaauaaacaaacugugg

SEQ ID NO: 140908 - RNA, 21 nt, Human
aagagaaggcaggauacugga

SEQ ID NO: 140909 - RNA, 20 nt, Human
aagggcaggaagucuggagg

SEQ ID NO: 140910 - RNA, 20 nt, Human
aauuguagaacauagucucc

SEQ ID NO: 140911 - RNA, 22 nt, Human
acaacccaaacguccaucaaca

SEQ ID NO: 140912 - RNA, 22 nt, Human
accacuccaguagaugcagaga

SEQ ID NO: 140913 - RNA, 20 nt, Human
acgcaucgauuuuguggaag

SEQ ID NO: 140914 - RNA, 22 nt, Human
acucagcaaugaaaaggaacaa

SEQ ID NO: 140915 - RNA, 20 nt, Human
agagaggggccugcccaggg

SEQ ID NO: 140916 - RNA, 21 nt, Human
agcaaauaccaaagcaacgca

SEQ ID NO: 140917 - RNA, 22 nt, Human
aggaaagagcccgaugaaaaag

SEQ ID NO: 140918 - RNA, 23 nt, Human
aggaaagagcccgaugaaaaagg

SEQ ID NO: 140919 - RNA, 23 nt, Human
aggaucccagccuccuccucccu

SEQ ID NO: 140920 - RNA, 19 nt, Human
aggcaggauacuggaagca

SEQ ID NO: 140921 - RNA, 24 nt, Human
aggcaggauacuggaagcagcagc

SEQ ID NO: 140922 - RNA, 21 nt, Human
agguucuaagcaucacagcuu

SEQ ID NO: 140923 - RNA, 25 nt, Human
auagaauacuacucagcaaugaaaa

SEQ ID NO: 140924 - RNA, 22 nt, Human
aucccagccuccuccucccuca

SEQ ID NO: 140925 - RNA, 26 nt, Human
aucccagccuccuccucccucaaaug

SEQ ID NO: 140926 - RNA, 21 nt, Human
aucggagacaagcacuauugu

SEQ ID NO: 140927 - RNA, 22 nt, Human
caaaauuagaaacaacccaaac

SEQ ID NO: 140928 - RNA, 24 nt, Human
caaacguccaucaacagaagaaua

SEQ ID NO: 140929 - RNA, 18 nt, Human
caagcaaauaccaaagca

SEQ ID NO: 140930 - RNA, 22 nt, Human
caagcaaauaccaaagcaacgc

SEQ ID NO: 140931 - RNA, 23 nt, Human
caagcaaauaccaaagcaacgca

SEQ ID NO: 140932 - RNA, 22 nt, Human
caauagaauacuacucagcaau

SEQ ID NO: 140933 - RNA, 23 nt, Human
caccuuucucucuggguccuugg

SEQ ID NO: 140934 - RNA, 24 nt, Human
cagaagaauaaacaaacuguggua

SEQ ID NO: 140935 - RNA, 23 nt, Human
cagagcccagggaccacuccgag

SEQ ID NO: 140936 - RNA, 28 nt, Human
cagaggaucccagccuccuccucccuca

SEQ ID NO: 140937 - RNA, 28 nt, Human
cagaugucuucuuuccucuuaaaaucuu

SEQ ID NO: 140938 - RNA, 21 nt, Human
cagcagccagggaggacaggc

SEQ ID NO: 140939 - RNA, 18 nt, Human
cagcagggcugggcaacu

SEQ ID NO: 140940 - RNA, 20 nt, Human
cagccuccuccucccucaaa

SEQ ID NO: 140941 - RNA, 24 nt, Human
cagcuuuuuaggaaagagcccgau

SEQ ID NO: 140942 - RNA, 21 nt, Human
ccccagagcccagggaccacu

SEQ ID NO: 140943 - RNA, 22 nt, Human
ccccagagcccagggaccacuc

SEQ ID NO: 140944 - RNA, 19 nt, Human
cccuccagcugaggccuaa

SEQ ID NO: 140945 - RNA, 23 nt, Human
ccuccacacuugucacaagcagg

SEQ ID NO: 140946 - RNA, 18 nt, Human
ccuccuccucccucaaau

SEQ ID NO: 140947 - RNA, 24 nt, Human
ccugggcaaacuaggacagcuggu

SEQ ID NO: 140948 - RNA, 28 nt, Human
cgccgauccucagccuccccggcugcac

SEQ ID NO: 140949 - RNA, 23 nt, Human
cuaagcaucacagcuucugcacu

SEQ ID NO: 140950 - RNA, 24 nt, Human
cuaggacagcuggucacccaacuc

SEQ ID NO: 140951 - RNA, 18 nt, Human
cucacucuuccagcuccc

SEQ ID NO: 140952 - RNA, 20 nt, Human
cucacucuuccagcuccgcc

SEQ ID NO: 140953 - RNA, 18 nt, Human
cuccuccccacuuugcuu

SEQ ID NO: 140954 - RNA, 19 nt, Human
cugauacacacaacagcau

SEQ ID NO: 140955 - RNA, 20 nt, Human
cugcccaggggucagggcag

SEQ ID NO: 140956 - RNA, 19 nt, Human
cuggugcccuccucaaagu

SEQ ID NO: 140957 - RNA, 24 nt, Human
cuuccagcuccgccgauccuccuu

SEQ ID NO: 140958 - RNA, 20 nt, Human
cuuuggggacgggaaggggu

SEQ ID NO: 140959 - RNA, 19 nt, Human
gaaaagaaaaguuaaagag

SEQ ID NO: 140960 - RNA, 21 nt, Human
gaagcagcagccagggaggac

SEQ ID NO: 140961 - RNA, 22 nt, Human
gaagggguagaaguagggcugc

SEQ ID NO: 140962 - RNA, 22 nt, Human
gagcuaggggagacgaagugga

SEQ ID NO: 140963 - RNA, 22 nt, Human
gagcuggggugaggaguggucu

SEQ ID NO: 140964 - RNA, 24 nt, Human
gauacuggaagcagcagccaggga

SEQ ID NO: 140965 - RNA, 18 nt, Human
gcaguggguaucacuggu

SEQ ID NO: 140966 - RNA, 22 nt, Human
gccugggacugaugggguuucc

SEQ ID NO: 140967 - RNA, 25 nt, Human
ggaccaaaacuggauuugguagaaa

SEQ ID NO: 140968 - RNA, 23 nt, Human
ggagacagaguugaggcagucgg

SEQ ID NO: 140969 - RNA, 20 nt, Human
gggacugucuccuccccacu

SEQ ID NO: 140970 - RNA, 20 nt, Human
gggaggggcucugcagcccu

SEQ ID NO: 140971 - RNA, 24 nt, Human
gggcaggaagucuggagggcugca

SEQ ID NO: 140972 - RNA, 27 nt, Human
gggcaggaagucuggagggcugcagga

SEQ ID NO: 140973 - RNA, 18 nt, Human
gggcuggggaggcaucuu

SEQ ID NO: 140974 - RNA, 18 nt, Human
guggaaggggguacaagg

SEQ ID NO: 140975 - RNA, 21 nt, Human
uacaaggggaguuucuggggu

SEQ ID NO: 140976 - RNA, 19 nt, Human
uaccuuuucaccuccacac

SEQ ID NO: 140977 - RNA, 19 nt, Human
uagaaaucacaucaguggu

SEQ ID NO: 140978 - RNA, 18 nt, Human
uaucagggcuggggaggc

SEQ ID NO: 140979 - RNA, 19 nt, Human
uaucuggcagagaggcugg

SEQ ID NO: 140980 - RNA, 21 nt, Human
uauggugaguaaaagaggcca

SEQ ID NO: 140981 - RNA, 21 nt, Human
ucaacagaagaauaaacaaac

SEQ ID NO: 140982 - RNA, 21 nt, Human
ucaguccaagcaaauaccaaa

SEQ ID NO: 140983 - RNA, 20 nt, Human
uccaagcaaauaccaaaggg

SEQ ID NO: 140984 - RNA, 22 nt, Human
ucucuacaauagaauacuacuc

SEQ ID NO: 140985 - RNA, 21 nt, Human
ucugcacugggcucugaggag

SEQ ID NO: 140986 - RNA, 21 nt, Human
ucuugccuucacccucacucu

SEQ ID NO: 140987 - RNA, 24 nt, Human
ugaaaaaggaaaagaaaaguuaaa

SEQ ID NO: 140988 - RNA, 23 nt, Human
ugaaaaggaacaaacugcugaua

SEQ ID NO: 140989 - RNA, 18 nt, Human
ugagcuggggugaggagu

SEQ ID NO: 140990 - RNA, 19 nt, Human
ugauaaacagguggacuua

SEQ ID NO: 140991 - RNA, 23 nt, Human
ugauggagagauugccagcaggg

SEQ ID NO: 140992 - RNA, 25 nt, Human
ugcaauuguagaacauagucuccug

SEQ ID NO: 140993 - RNA, 18 nt, Human
ugccacgccugccauggc

SEQ ID NO: 140994 - RNA, 20 nt, Human
ugccacgccugccauggcuu

SEQ ID NO: 140995 - RNA, 24 nt, Human
ugccacgccugccauggcuugagc

SEQ ID NO: 140996 - RNA, 18 nt, Human
ugccauggcuugagcugg

SEQ ID NO: 140997 - RNA, 26 nt, Human
ugccuucacccucacucuuccagcuc

SEQ ID NO: 140998 - RNA, 21 nt, Human
ugcugauacacacaacagcau

SEQ ID NO: 140999 - RNA, 18 nt, Human
uggaagcagcagccaggg

SEQ ID NO: 141000 - RNA, 24 nt, Human
uggaauccuucagccccagagccc

SEQ ID NO: 141001 - RNA, 19 nt, Human
uggagacagaguugaggca

SEQ ID NO: 141002 - RNA, 18 nt, Human
uggggaggcaucuuuguu

SEQ ID NO: 141003 - RNA, 25 nt, Human
uggguccuuggucucgccacugugc

SEQ ID NO: 141004 - RNA, 23 nt, Human
ugguagaaaucacaucagugguu

SEQ ID NO: 141005 - RNA, 21 nt, Human
ugguugcuucuaggagcuagg

SEQ ID NO: 141006 - RNA, 18 nt, Human
uuaguaggaccaaaacug

SEQ ID NO: 141007 - RNA, 20 nt, Human
uuaucuucuuugggagaucc

SEQ ID NO: 141008 - RNA, 23 nt, Human
uucugugcucuacuucuugccuu

SEQ ID NO: 141009 - RNA, 25 nt, Human
uuuuuuuuuuuuacaagaacacuca

SEQ ID NO: 141010 - RNA, 23 nt, Human
uuuuuuuuuuuuuuuuuuacaag

SEQ ID NO: 141011 - RNA, 21 nt, Human
aaaaaacaggggcgagcaaaa

SEQ ID NO: 141012 - RNA, 24 nt, Human
aaaaacaggggcgagcaaaaagaa

SEQ ID NO: 141013 - RNA, 25 nt, Human
aaaaagaaaccggaucacacacuga

SEQ ID NO: 141014 - RNA, 21 nt, Human
aaacccagaggaacucgggug

SEQ ID NO: 141015 - RNA, 21 nt, Human
acgcggggcuccgggcuccuc

SEQ ID NO: 141016 - RNA, 22 nt, Human
acgcggggcuccgggcuccucg

SEQ ID NO: 141017 - RNA, 24 nt, Human
acugguauuuuccaucagugcuga

SEQ ID NO: 141018 - RNA, 23 nt, Human
agaaaugccauaauuuauuccau

SEQ ID NO: 141019 - RNA, 21 nt, Human
agcuagacccccgggucucuc

SEQ ID NO: 141020 - RNA, 23 nt, Human
agucaucaccauaacugcuuaga

SEQ ID NO: 141021 - RNA, 19 nt, Human
cacagcccaaauguccuuc

SEQ ID NO: 141022 - RNA, 23 nt, Human
caccauaacugcuuagaaaccca

SEQ ID NO: 141023 - RNA, 24 nt, Human
cacugaguccuuucucuucugccc

SEQ ID NO: 141024 - RNA, 24 nt, Human
cagcccaaauguccuucgcagcga

SEQ ID NO: 141025 - RNA, 22 nt, Human
cagcccucucgagccccuccca

SEQ ID NO: 141026 - RNA, 21 nt, Human
cagugcugaaaacaaaccugc

SEQ ID NO: 141027 - RNA, 20 nt, Human
cauaacugcuuagaaaccca

SEQ ID NO: 141028 - RNA, 19 nt, Human
caucagugcugaaaacaaa

SEQ ID NO: 141029 - RNA, 21 nt, Human
ccagcccucucgagccccucc

SEQ ID NO: 141030 - RNA, 24 nt, Human
ccgacugccccuccgacccgcguc

SEQ ID NO: 141031 - RNA, 21 nt, Human
cgacugccccuccgacccgcg

SEQ ID NO: 141032 - RNA, 21 nt, Human
cgaggaaaagcuagacccccg

SEQ ID NO: 141033 - RNA, 23 nt, Human
cgcacacacagcccaaauguccu

SEQ ID NO: 141034 - RNA, 26 nt, Human
cucucgagccccucccagaguuauug

SEQ ID NO: 141035 - RNA, 22 nt, Human
cucugcgccgaaccaaaagccc

SEQ ID NO: 141036 - RNA, 21 nt, Human
gccggccucagcgcccccagc

SEQ ID NO: 141037 - RNA, 22 nt, Human
gcgcuuuucgaggaaaagcuag

SEQ ID NO: 141038 - RNA, 23 nt, Human
gcggggcuccgggcuccucggcu

SEQ ID NO: 141039 - RNA, 21 nt, Human
gggccaagggcagggcggcgc

SEQ ID NO: 141040 - RNA, 26 nt, Human
gguagguaugucaagcaugaagagau

SEQ ID NO: 141041 - RNA, 21 nt, Human
gguucccccgacugccccucc

SEQ ID NO: 141042 - RNA, 25 nt, Human
guagguaugucaagcaugaagagau

SEQ ID NO: 141043 - RNA, 23 nt, Human
gucauccuuauguaacaaaaugu

SEQ ID NO: 141044 - RNA, 19 nt, Human
gucccaaugggaugugaag

SEQ ID NO: 141045 - RNA, 21 nt, Human
uaagauauauuuacaggauag

SEQ ID NO: 141046 - RNA, 22 nt, Human
uagacaaugacauuugugaagg

SEQ ID NO: 141047 - RNA, 21 nt, Human
uauuugguucuucuaggagua

SEQ ID NO: 141048 - RNA, 23 nt, Human
ugaaguuaaauaaauaaggacca

SEQ ID NO: 141049 - RNA, 21 nt, Human
ugaguccuuucucuucugccc

SEQ ID NO: 141050 - RNA, 19 nt, Human
ugccccuccgacccgcguc

SEQ ID NO: 141051 - RNA, 24 nt, Human
uggcaacuaaaaaaaaacccaaca

SEQ ID NO: 141052 - RNA, 23 nt, Human
ugucuguucucggggccaagggc

SEQ ID NO: 141053 - RNA, 19 nt, Human
ugugaagagccucaccucc

SEQ ID NO: 141054 - RNA, 19 nt, Human
ugugaagagccucaccucc

SEQ ID NO: 141055 - RNA, 20 nt, Human
ugugaagagccucaccuccc

SEQ ID NO: 141056 - RNA, 22 nt, Human
uucgaggaaaagcuagaccccc

SEQ ID NO: 141057 - RNA, 24 nt, Human
uucuucgcgguucccccgacugcc

SEQ ID NO: 141058 - RNA, 26 nt, Human
uugcauuucuccucucaaggagcaug

SEQ ID NO: 141059 - RNA, 23 nt, Human
aaagaaaccugauuagaccugaa

SEQ ID NO: 141060 - RNA, 21 nt, Human
aacagcaaugcaauuuuuccu

SEQ ID NO: 141061 - RNA, 20 nt, Human
aagaaaccugauuagaccug

SEQ ID NO: 141062 - RNA, 24 nt, Human
aagacccuaaacaggaaaagacuc

SEQ ID NO: 141063 - RNA, 22 nt, Human
acaauaaagaaaccugauuaga

SEQ ID NO: 141064 - RNA, 22 nt, Human
acagaacauaacaaaaacacua

SEQ ID NO: 141065 - RNA, 24 nt, Human
acccuaaacaggaaaagacucggc

SEQ ID NO: 141066 - RNA, 20 nt, Human
agaaagaaauacauagaaaa

SEQ ID NO: 141067 - RNA, 21 nt, Human
agaaagaaauacauagaaaaa

SEQ ID NO: 141068 - RNA, 18 nt, Human
agccggccaaaagcgcca

SEQ ID NO: 141069 - RNA, 27 nt, Human
agggaacaauaaagaaaccugauuaga

SEQ ID NO: 141070 - RNA, 23 nt, Human
agggaaguucucaaugcuucagu

SEQ ID NO: 141071 - RNA, 21 nt, Human
caagaagccgcccacccaaug

SEQ ID NO: 141072 - RNA, 23 nt, Human
caauaacagaacauaacaaaaac

SEQ ID NO: 141073 - RNA, 23 nt, Human
caaugccaggauaagacccuaaa

SEQ ID NO: 141074 - RNA, 21 nt, Human
cacccaaugccaagccggcca

SEQ ID NO: 141075 - RNA, 22 nt, Human
cacccaaugccaagccggccaa

SEQ ID NO: 141076 - RNA, 21 nt, Human
cagaaagaaauacauagaaaa

SEQ ID NO: 141077 - RNA, 19 nt, Human
ccaaugccaagccggccaa

SEQ ID NO: 141078 - RNA, 20 nt, Human
cccuaaacaggaaaagacuc

SEQ ID NO: 141079 - RNA, 30 nt, Human
ccuaaacaggaaaagacucggcagccaccu

SEQ ID NO: 141080 - RNA, 23 nt, Human
cgccaguccggcgcccucaaugc

SEQ ID NO: 141081 - RNA, 19 nt, Human
cucggcagccaccuacgcc

SEQ ID NO: 141082 - RNA, 24 nt, Human
cuggaauaacagauuguuuuuccu

SEQ ID NO: 141083 - RNA, 22 nt, Human
gaaaauaaagauggccuuuggg

SEQ ID NO: 141084 - RNA, 20 nt, Human
guuauagaaaauaaagaugg

SEQ ID NO: 141085 - RNA, 19 nt, Human
uaaaauauugucuucuuuu

SEQ ID NO: 141086 - RNA, 20 nt, Human
uaaacacacgcauaucacaa

SEQ ID NO: 141087 - RNA, 19 nt, Human
uaacagaacauaacaaaaa

SEQ ID NO: 141088 - RNA, 26 nt, Human
uaacagauuguuuuuccugcaaugcu

SEQ ID NO: 141089 - RNA, 23 nt, Human
uacauaaacacacgcauaucaca

SEQ ID NO: 141090 - RNA, 24 nt, Human
uacauagaaaaacaagauagaauu

SEQ ID NO: 141091 - RNA, 18 nt, Human
uagaaaaacaagauagaa

SEQ ID NO: 141092 - RNA, 25 nt, Human
uagauuuuaauauaaauuuugaaca

SEQ ID NO: 141093 - RNA, 22 nt, Human
ucagaaagaaauacauagaaaa

SEQ ID NO: 141094 - RNA, 22 nt, Human
ucuguacauaaacacacgcaua

SEQ ID NO: 141095 - RNA, 19 nt, Human
ugcuguaauuacugcaaau

SEQ ID NO: 141096 - RNA, 18 nt, Human
uuagaccugaacuaauua

SEQ ID NO: 141097 - RNA, 20 nt, Human
uuuuuuuuuucuaaagaaau

SEQ ID NO: 141098 - RNA, 19 nt, Human
uuuuuuuuuuuuuuucuaa

SEQ ID NO: 141099 - RNA, 21 nt, Human
aaagagcagacacacccuugg

SEQ ID NO: 141100 - RNA, 24 nt, Human
aaccccugcccacagggcuaggag

SEQ ID NO: 141101 - RNA, 18 nt, Human
aagggcuucaacauggug

SEQ ID NO: 141102 - RNA, 19 nt, Human
aaguguuaaaugucagcuu

SEQ ID NO: 141103 - RNA, 24 nt, Human
agagcagacacacccuugguuccc

SEQ ID NO: 141104 - RNA, 22 nt, Human
agcagaagagcaccaggucgga

SEQ ID NO: 141105 - RNA, 20 nt, Human
aggaggaagcgggggaggaa

SEQ ID NO: 141106 - RNA, 22 nt, Human
aggaggaagcgggggaggaagu

SEQ ID NO: 141107 - RNA, 22 nt, Human
aggcaggcagaggggcaccacc

SEQ ID NO: 141108 - RNA, 20 nt, Human
auaaauauaaagugcuaagu

SEQ ID NO: 141109 - RNA, 25 nt, Human
caacaugacacacccaucacuuccc

SEQ ID NO: 141110 - RNA, 23 nt, Human
caaguccccagcuuccccaggaa

SEQ ID NO: 141111 - RNA, 20 nt, Human
cacacgcaacaugacacacc

SEQ ID NO: 141112 - RNA, 23 nt, Human
cacccaucacuucccaagucccc

SEQ ID NO: 141113 - RNA, 23 nt, Human
caccggugccucuuccucuuccu

SEQ ID NO: 141114 - RNA, 22 nt, Human
cagaagagcaccaggucggaaa

SEQ ID NO: 141115 - RNA, 20 nt, Human
cagcacaguggggcaggcag

SEQ ID NO: 141116 - RNA, 23 nt, Human
cagccucagucccccagcagaag

SEQ ID NO: 141117 - RNA, 21 nt, Human
cagcgccagcacaggugugaa

SEQ ID NO: 141118 - RNA, 20 nt, Human
cagcugagcacaaauaauuu

SEQ ID NO: 141119 - RNA, 23 nt, Human
caggcaggcagaggggcaccacc

SEQ ID NO: 141120 - RNA, 22 nt, Human
cagggcuaggaggaagcggggg

SEQ ID NO: 141121 - RNA, 23 nt, Human
cagucccccagcagaagagcacc

SEQ ID NO: 141122 - RNA, 22 nt, Human
caugugggggcuucugaaacuc

SEQ ID NO: 141123 - RNA, 20 nt, Human
ccagaggauggggagggaaa

SEQ ID NO: 141124 - RNA, 23 nt, Human
ccaguccacagucagcuccugcc

SEQ ID NO: 141125 - RNA, 23 nt, Human
cccaaguccccagcuuccccagg

SEQ ID NO: 141126 - RNA, 18 nt, Human
cccacagacagggcuccu

SEQ ID NO: 141127 - RNA, 22 nt, Human
cccaucacuucccaagucccca

SEQ ID NO: 141128 - RNA, 20 nt, Human
ccccgaaugagggccagccu

SEQ ID NO: 141129 - RNA, 24 nt, Human
cuaaguuuccaaccccugcccaca

SEQ ID NO: 141130 - RNA, 23 nt, Human
cuucugaaacucugaggagguag

SEQ ID NO: 141131 - RNA, 21 nt, Human
cuuucggucuuucccgcgucc

SEQ ID NO: 141132 - RNA, 23 nt, Human
gaagagcaccaggucggaaagac

SEQ ID NO: 141133 - RNA, 24 nt, Human
gacgaacccacagacagggcuccu

SEQ ID NO: 141134 - RNA, 19 nt, Human
gauggggagggaaagagca

SEQ ID NO: 141135 - RNA, 21 nt, Human
gcccugccggaggugagggga

SEQ ID NO: 141136 - RNA, 23 nt, Human
gcuaaguuuccaaccccugccca

SEQ ID NO: 141137 - RNA, 21 nt, Human
ggaaagaccagcaugccggca

SEQ ID NO: 141138 - RNA, 21 nt, Human
ggaaagagcagacacacccuu

SEQ ID NO: 141139 - RNA, 21 nt, Human
gggcuaggaggaagcggggga

SEQ ID NO: 141140 - RNA, 22 nt, Human
gggcuccugguugucacagcuu

SEQ ID NO: 141141 - RNA, 24 nt, Human
uaaaugucagcugagcacaaauaa

SEQ ID NO: 141142 - RNA, 24 nt, Human
ucacagacagacacacgcaacaug

SEQ ID NO: 141143 - RNA, 22 nt, Human
uccccagcuuccccaggaacac

SEQ ID NO: 141144 - RNA, 21 nt, Human
uccccaggaacacagggcuug

SEQ ID NO: 141145 - RNA, 22 nt, Human
ucccccagcagaagagcaccag

SEQ ID NO: 141146 - RNA, 19 nt, Human
ucucaggcugccaagggcu

SEQ ID NO: 141147 - RNA, 20 nt, Human
ucucaggcugccaagggcuu

SEQ ID NO: 141148 - RNA, 19 nt, Human
ucucguggcggugcgcugc

SEQ ID NO: 141149 - RNA, 21 nt, Human
ucucguggcggugcgcugccc

SEQ ID NO: 141150 - RNA, 25 nt, Human
ugaaacucugaggagguagcagccc

SEQ ID NO: 141151 - RNA, 18 nt, Human
uggggagggaaagagcag

SEQ ID NO: 141152 - RNA, 21 nt, Human
ugucacagcuuguuccuugga

SEQ ID NO: 141153 - RNA, 23 nt, Human
uuccaaccccugcccacagggcu

SEQ ID NO: 141154 - RNA, 18 nt, Human
uuccuuggagcucucagg

SEQ ID NO: 141155 - RNA, 23 nt, Human
aaagacaucauaaguuacagaaa

SEQ ID NO: 141156 - RNA, 21 nt, Human
aacauggcagcucggacaccu

SEQ ID NO: 141157 - RNA, 23 nt, Human
aagugccuugugaugcugggagc

SEQ ID NO: 141158 - RNA, 19 nt, Human
acuuguagacaagugccuu

SEQ ID NO: 141159 - RNA, 23 nt, Human
cagaaacaggacaacuggggagc

SEQ ID NO: 141160 - RNA, 22 nt, Human
caucucagggaaaagacaucau

SEQ ID NO: 141161 - RNA, 18 nt, Human
ccccacggaccucucgag

SEQ ID NO: 141162 - RNA, 21 nt, Human
ccuugugaugcugggagcagg

SEQ ID NO: 141163 - RNA, 22 nt, Human
cggacaccuuucccacggccuc

SEQ ID NO: 141164 - RNA, 19 nt, Human
cucgagcagaggcgguggg

SEQ ID NO: 141165 - RNA, 28 nt, Human
gacaccuuucccacggccucccccacgg

SEQ ID NO: 141166 - RNA, 25 nt, Human
gacuguguugggacacacuuguaga

SEQ ID NO: 141167 - RNA, 18 nt, Human
gagcagaggcgguggggg

SEQ ID NO: 141168 - RNA, 23 nt, Human
gccuucccccucugagcccccau

SEQ ID NO: 141169 - RNA, 26 nt, Human
gggaaaguggcccaggacuguguugg

SEQ ID NO: 141170 - RNA, 21 nt, Human
uaaguuacagaaacaggacaa

SEQ ID NO: 141171 - RNA, 20 nt, Human
ucccacggccucccccacgg

SEQ ID NO: 141172 - RNA, 27 nt, Human
ucccccacggaccucucgagcagaggc

SEQ ID NO: 141173 - RNA, 21 nt, Human
uccuaaacauggcagcucgga

SEQ ID NO: 141174 - RNA, 20 nt, Human
ucgagcagaggcgguggggg

SEQ ID NO: 141175 - RNA, 25 nt, Human
ugcugggagcaggguacaguguguu

SEQ ID NO: 141176 - RNA, 21 nt, Human
uucccacggccucccccacgg

SEQ ID NO: 141177 - RNA, 23 nt, Human
aaaagaaagaaaaaucagcaaaa

SEQ ID NO: 141178 - RNA, 23 nt, Human
aaacugacacauaaaccaaacca

SEQ ID NO: 141179 - RNA, 23 nt, Human
aaacugacacauaaaccaaacca

SEQ ID NO: 141180 - RNA, 22 nt, Human
aaagggacaaguacacagaacc

SEQ ID NO: 141181 - RNA, 22 nt, Human
aacaaagccccccgcuguccgg

SEQ ID NO: 141182 - RNA, 19 nt, Human
aacaaagggacaaguaccc

SEQ ID NO: 141183 - RNA, 18 nt, Human
aacaacgacaacaaaggg

SEQ ID NO: 141184 - RNA, 19 nt, Human
aacaauggcgcggacgccc

SEQ ID NO: 141185 - RNA, 20 nt, Human
aacacaacaaaacaaaucca

SEQ ID NO: 141186 - RNA, 19 nt, Human
aaccaaaggucaacagcag

SEQ ID NO: 141187 - RNA, 18 nt, Human
aagagaagagaaccuggg

SEQ ID NO: 141188 - RNA, 21 nt, Human
aagcaaaacacaacaaaacaa

SEQ ID NO: 141189 - RNA, 23 nt, Human
aaggaaagcaaaacacaacaaaa

SEQ ID NO: 141190 - RNA, 21 nt, Human
aaggcgccugcgggggggagg

SEQ ID NO: 141191 - RNA, 19 nt, Human
aagggccgagguccuggag

SEQ ID NO: 141192 - RNA, 26 nt, Human
acaacaaagggacaaguacacagaag

SEQ ID NO: 141193 - RNA, 24 nt, Human
acaacaaagggacaaguacccaga

SEQ ID NO: 141194 - RNA, 22 nt, Human
acacaacaaaacaaauccagac

SEQ ID NO: 141195 - RNA, 22 nt, Human
acagcagcguuuccccagcagc

SEQ ID NO: 141196 - RNA, 21 nt, Human
acaucugucuuuaguuacuuu

SEQ ID NO: 141197 - RNA, 22 nt, Human
accuaauucuucccuuucuucc

SEQ ID NO: 141198 - RNA, 22 nt, Human
accuaauucuucccuuucuucc

SEQ ID NO: 141199 - RNA, 22 nt, Human
accuaauucuucccuuucuucc

SEQ ID NO: 141200 - RNA, 22 nt, Human
accuaauucuucccuuucuucc

SEQ ID NO: 141201 - RNA, 24 nt, Human
acgacaacaaagggacaaguaccc

SEQ ID NO: 141202 - RNA, 20 nt, Human
acgccugcagaaguggccgc

SEQ ID NO: 141203 - RNA, 19 nt, Human
agaaaugauggggaaggag

SEQ ID NO: 141204 - RNA, 19 nt, Human
agaaaugauggggaaggag

SEQ ID NO: 141205 - RNA, 20 nt, Human
agaagggagggggacugggc

SEQ ID NO: 141206 - RNA, 19 nt, Human
agagagagcaauggugggg

SEQ ID NO: 141207 - RNA, 20 nt, Human
agccaggaacugccucccgg

SEQ ID NO: 141208 - RNA, 21 nt, Human
agccuuggcaacauagugaga

SEQ ID NO: 141209 - RNA, 22 nt, Human
agccuuggcaacauagugagau

SEQ ID NO: 141210 - RNA, 18 nt, Human
agcggaaaggaaaggaag

SEQ ID NO: 141211 - RNA, 23 nt, Human
aggaaaggaagggagggaggcgg

SEQ ID NO: 141212 - RNA, 22 nt, Human
aggcgccgguggaggagagugu

SEQ ID NO: 141213 - RNA, 19 nt, Human
aggcugcagaaaggggcag

SEQ ID NO: 141214 - RNA, 19 nt, Human
agggagggaggcggcgaag

SEQ ID NO: 141215 - RNA, 26 nt, Human
agggagggggacugggcucauuugga

SEQ ID NO: 141216 - RNA, 24 nt, Human
auccaauguaaauggugucuaaca

SEQ ID NO: 141217 - RNA, 20 nt, Human
auucggaguccuuauugcca

SEQ ID NO: 141218 - RNA, 20 nt, Human
auucggaguccuuauugcca

SEQ ID NO: 141219 - RNA, 22 nt, Human
auuuguaagcagaaacuaccau

SEQ ID NO: 141220 - RNA, 19 nt, Human
caaaacacaacaaaacaaa

SEQ ID NO: 141221 - RNA, 22 nt, Human
caaagggacaaguacccagaac

SEQ ID NO: 141222 - RNA, 19 nt, Human
caacaaagggacaaguaca

SEQ ID NO: 141223 - RNA, 19 nt, Human
caacaacgacaacaaaggg

SEQ ID NO: 141224 - RNA, 21 nt, Human
caacagcagcguuuccccagc

SEQ ID NO: 141225 - RNA, 21 nt, Human
caacauagugagaugcugucu

SEQ ID NO: 141226 - RNA, 21 nt, Human
caacauagugagaugcugucu

SEQ ID NO: 141227 - RNA, 19 nt, Human
caacugcggggaacaaagc

SEQ ID NO: 141228 - RNA, 21 nt, Human
caagggccgagguccuggagc

SEQ ID NO: 141229 - RNA, 21 nt, Human
caaguacacagaaccaggcac

SEQ ID NO: 141230 - RNA, 19 nt, Human
caauuuacaccuacaucug

SEQ ID NO: 141231 - RNA, 19 nt, Human
cacauaucuacaagacacc

SEQ ID NO: 141232 - RNA, 19 nt, Human
cacauaucuacaagacacc

SEQ ID NO: 141233 - RNA, 19 nt, Human
cacccuuucucucucccuc

SEQ ID NO: 141234 - RNA, 23 nt, Human
caccuguaagaccuagcaacuua

SEQ ID NO: 141235 - RNA, 21 nt, Human
cagcugcucagucccaacuuu

SEQ ID NO: 141236 - RNA, 21 nt, Human
cagcugcucagucccaacuuu

SEQ ID NO: 141237 - RNA, 24 nt, Human
caggaaggaaagcaaaacacaaca

SEQ ID NO: 141238 - RNA, 21 nt, Human
caggauaagcccaaggaaguu

SEQ ID NO: 141239 - RNA, 25 nt, Human
caggcacuucugggaaacuugucuu

SEQ ID NO: 141240 - RNA, 21 nt, Human
cagggcucucgaaucggucug

SEQ ID NO: 141241 - RNA, 18 nt, Human
cagucggagcggccucgg

SEQ ID NO: 141242 - RNA, 22 nt, Human
ccaacccgccugcuucucaaga

SEQ ID NO: 141243 - RNA, 22 nt, Human
ccaacccgccugcuucucaaga

SEQ ID NO: 141244 - RNA, 19 nt, Human
ccagaaucuccagggcucu

SEQ ID NO: 141245 - RNA, 19 nt, Human
ccagcgccgacaagcucaa

SEQ ID NO: 141246 - RNA, 19 nt, Human
ccagcucccuuccucccgg

SEQ ID NO: 141247 - RNA, 21 nt, Human
ccagcucugguucuggggccc

SEQ ID NO: 141248 - RNA, 21 nt, Human
ccagcugcucagucccaacuu

SEQ ID NO: 141249 - RNA, 21 nt, Human
ccagcugcucagucccaacuu

SEQ ID NO: 141250 - RNA, 23 nt, Human
cccaccucuccuauaagcaccca

SEQ ID NO: 141251 - RNA, 23 nt, Human
ccccagcagcugacaggucaaau

SEQ ID NO: 141252 - RNA, 24 nt, Human
ccccccgcuguccggcaggggcug

SEQ ID NO: 141253 - RNA, 19 nt, Human
ccccgcucagccgccaggc

SEQ ID NO: 141254 - RNA, 20 nt, Human
ccccggccauucgaggggac

SEQ ID NO: 141255 - RNA, 18 nt, Human
ccccuuuccagcucccuu

SEQ ID NO: 141256 - RNA, 19 nt, Human
cccgcuguccggcaggggc

SEQ ID NO: 141257 - RNA, 22 nt, Human
cccggaagcccaagggccgagg

SEQ ID NO: 141258 - RNA, 22 nt, Human
cccguccuacccuugcugggag

SEQ ID NO: 141259 - RNA, 19 nt, Human
cccugguggccuaaccagg

SEQ ID NO: 141260 - RNA, 19 nt, Human
cccuuucuuccuccuccca

SEQ ID NO: 141261 - RNA, 19 nt, Human
cccuuucuuccuccuccca

SEQ ID NO: 141262 - RNA, 19 nt, Human
cccuuucuuccuccuccca

SEQ ID NO: 141263 - RNA, 19 nt, Human
cccuuucuuccuccuccca

SEQ ID NO: 141264 - RNA, 20 nt, Human
ccgccaggccuuccgggaca

SEQ ID NO: 141265 - RNA, 19 nt, Human
ccgcccccuuuccagcucc

SEQ ID NO: 141266 - RNA, 28 nt, Human
ccucaagggcucccgcgggagagccucu

SEQ ID NO: 141267 - RNA, 18 nt, Human
ccuccucccacccaaccc

SEQ ID NO: 141268 - RNA, 18 nt, Human
ccuccucccacccaaccc

SEQ ID NO: 141269 - RNA, 18 nt, Human
ccuccucccacccaaccc

SEQ ID NO: 141270 - RNA, 18 nt, Human
ccuccucccacccaaccc

SEQ ID NO: 141271 - RNA, 19 nt, Human
ccucgggcgcccagccggg

SEQ ID NO: 141272 - RNA, 19 nt, Human
ccugcuguguucuagcugg

SEQ ID NO: 141273 - RNA, 22 nt, Human
cgacaacaaagggacaaguacc

SEQ ID NO: 141274 - RNA, 22 nt, Human
cgacaacaaagggacaaguacc

SEQ ID NO: 141275 - RNA, 21 nt, Human
cgagggcagcgccgugcgggg

SEQ ID NO: 141276 - RNA, 18 nt, Human
cgcccacccugguggccu

SEQ ID NO: 141277 - RNA, 19 nt, Human
cgcccagaaucuccagggc

SEQ ID NO: 141278 - RNA, 21 nt, Human
cgcccagaaucuccagggcuc

SEQ ID NO: 141279 - RNA, 22 nt, Human
cgccuaggcugcagaaaggggc

SEQ ID NO: 141280 - RNA, 24 nt, Human
cgccugcuucucaagaugagccuu

SEQ ID NO: 141281 - RNA, 24 nt, Human
cgccugcuucucaagaugagccuu

SEQ ID NO: 141282 - RNA, 20 nt, Human
cgcgcggcuccugucgccgc

SEQ ID NO: 141283 - RNA, 23 nt, Human
cggccucgggcgcccagccgggc

SEQ ID NO: 141284 - RNA, 19 nt, Human
cgggacaagccccuuccug

SEQ ID NO: 141285 - RNA, 23 nt, Human
cgggcggcgcgcagagcggaggg

SEQ ID NO: 141286 - RNA, 22 nt, Human
cgggggggaggagcggcucuuu

SEQ ID NO: 141287 - RNA, 23 nt, Human
cguccuacccuugcugggagcca

SEQ ID NO: 141288 - RNA, 19 nt, Human
cucaucccuuugcccuccc

SEQ ID NO: 141289 - RNA, 19 nt, Human
cucaucccuuugcccuccc

SEQ ID NO: 141290 - RNA, 20 nt, Human
cuccuggggaacugaagaca

SEQ ID NO: 141291 - RNA, 24 nt, Human
cucgcggaaaaagaaagaaaaauc

SEQ ID NO: 141292 - RNA, 19 nt, Human
cuggggcccccagggcggc

SEQ ID NO: 141293 - RNA, 20 nt, Human
cuucauuguaaaaaaucacc

SEQ ID NO: 141294 - RNA, 21 nt, Human
cuucccuuucuuccuccuccc

SEQ ID NO: 141295 - RNA, 21 nt, Human
cuucccuuucuuccuccuccc

SEQ ID NO: 141296 - RNA, 21 nt, Human
cuucccuuucuuccuccuccc

SEQ ID NO: 141297 - RNA, 21 nt, Human
cuucccuuucuuccuccuccc

SEQ ID NO: 141298 - RNA, 22 nt, Human
cuucucaucccuuugcccuccc

SEQ ID NO: 141299 - RNA, 25 nt, Human
gaaaaagaaagaaaaaucagcaaaa

SEQ ID NO: 141300 - RNA, 20 nt, Human
gaacccagucccagcccugc

SEQ ID NO: 141301 - RNA, 21 nt, Human
gaauugcccucaucucuccca

SEQ ID NO: 141302 - RNA, 23 nt, Human
gaccuggccccgcucagccgcca

SEQ ID NO: 141303 - RNA, 19 nt, Human
gagccagcucugguucugg

SEQ ID NO: 141304 - RNA, 23 nt, Human
gcacugaacaguuuuguugugcu

SEQ ID NO: 141305 - RNA, 19 nt, Human
gcagagcggagggggaggc

SEQ ID NO: 141306 - RNA, 18 nt, Human
gccaaggagaaaugaugg

SEQ ID NO: 141307 - RNA, 18 nt, Human
gccaaggagaaaugaugg

SEQ ID NO: 141308 - RNA, 19 nt, Human
gcccaagggccgagguccu

SEQ ID NO: 141309 - RNA, 18 nt, Human
gcccagaaucuccagggc

SEQ ID NO: 141310 - RNA, 27 nt, Human
gcccucaucucucccaccagcgccgac

SEQ ID NO: 141311 - RNA, 22 nt, Human
gcccucgcggaaaaagaaagaa

SEQ ID NO: 141312 - RNA, 21 nt, Human
gccucgucguuggccaaggag

SEQ ID NO: 141313 - RNA, 21 nt, Human
gccucgucguuggccaaggag

SEQ ID NO: 141314 - RNA, 21 nt, Human
gcgaggaagagaagagaaccu

SEQ ID NO: 141315 - RNA, 18 nt, Human
gcgcgcagagcggagggg

SEQ ID NO: 141316 - RNA, 24 nt, Human
gcggacucuuuucggcgacggccu

SEQ ID NO: 141317 - RNA, 21 nt, Human
gcggcgaaggcgccugcgggg

SEQ ID NO: 141318 - RNA, 19 nt, Human
ggaaaggaaaggaagggag

SEQ ID NO: 141319 - RNA, 25 nt, Human
ggaaauggaggagguuggggaggga

SEQ ID NO: 141320 - RNA, 22 nt, Human
ggaauugcccucaucucuccca

SEQ ID NO: 141321 - RNA, 26 nt, Human
ggacaaguacacagaaccaggcacuu

SEQ ID NO: 141322 - RNA, 18 nt, Human
ggacaggucggaagagga

SEQ ID NO: 141323 - RNA, 18 nt, Human
ggaggacucucaacggga

SEQ ID NO: 141324 - RNA, 20 nt, Human
ggccgagguccuggagcugc

SEQ ID NO: 141325 - RNA, 21 nt, Human
ggcucucugguuucagauguu

SEQ ID NO: 141326 - RNA, 19 nt, Human
gggagggaggacucucaac

SEQ ID NO: 141327 - RNA, 20 nt, Human
gggcaggaaacaacugcggg

SEQ ID NO: 141328 - RNA, 21 nt, Human
gggccgagguccuggagcugc

SEQ ID NO: 141329 - RNA, 20 nt, Human
gggcggcgcgcagagcggag

SEQ ID NO: 141330 - RNA, 21 nt, Human
gggggacugggcucauuugga

SEQ ID NO: 141331 - RNA, 24 nt, Human
gguuucagauguucugauuuuuuu

SEQ ID NO: 141332 - RNA, 24 nt, Human
guauuacauuuguaagcagaaacu

SEQ ID NO: 141333 - RNA, 18 nt, Human
gucgccugcucccagcug

SEQ ID NO: 141334 - RNA, 18 nt, Human
guugugcuuuuuggaggg

SEQ ID NO: 141335 - RNA, 20 nt, Human
uaaaaaaaugagguaagaaa

SEQ ID NO: 141336 - RNA, 20 nt, Human
uaaaaaaaugagguaagaaa

SEQ ID NO: 141337 - RNA, 18 nt, Human
uaaaaaagcaauucaaac

SEQ ID NO: 141338 - RNA, 18 nt, Human
uaaaaaagcaauucaaac

SEQ ID NO: 141339 - RNA, 18 nt, Human
uaaaaaauaaucccucuc

SEQ ID NO: 141340 - RNA, 19 nt, Human
uaaauauauucuaaaucca

SEQ ID NO: 141341 - RNA, 19 nt, Human
uaaauauauucuaaaucca

SEQ ID NO: 141342 - RNA, 23 nt, Human
uaacuacaacaacgacaacaaag

SEQ ID NO: 141343 - RNA, 23 nt, Human
uaacuacaacaacgacaacaaag

SEQ ID NO: 141344 - RNA, 25 nt, Human
uaagcacccaggauaagcccaagga

SEQ ID NO: 141345 - RNA, 26 nt, Human
uaagcagaaacuaccauaaucaacgg

SEQ ID NO: 141346 - RNA, 19 nt, Human
uacacagaaccaggcacuu

SEQ ID NO: 141347 - RNA, 19 nt, Human
uacccagaaccaggcacuu

SEQ ID NO: 141348 - RNA, 18 nt, Human
uagaaaagguaugcaaua

SEQ ID NO: 141349 - RNA, 20 nt, Human
uaguuacuuuuguuaguugg

SEQ ID NO: 141350 - RNA, 22 nt, Human
uauaagcacccaggauaagccc

SEQ ID NO: 141351 - RNA, 20 nt, Human
uauugcucuaaguuggagug

SEQ ID NO: 141352 - RNA, 20 nt, Human
uauugcucuaaguuggagug

SEQ ID NO: 141353 - RNA, 22 nt, Human
ucagccgccaggccuuccggga

SEQ ID NO: 141354 - RNA, 20 nt, Human
ucagucccaacuuucugccc

SEQ ID NO: 141355 - RNA, 33 nt, Human
ucccagaggaauugcccucaucucucccacccc

SEQ ID NO: 141356 - RNA, 24 nt, Human
uccccgggagcggggccuaagugg

SEQ ID NO: 141357 - RNA, 18 nt, Human
ucccggccagccccggcc

SEQ ID NO: 141358 - RNA, 23 nt, Human
uccggcaggggcgaacccggcuc

SEQ ID NO: 141359 - RNA, 18 nt, Human
ucggucgccugcucccag

SEQ ID NO: 141360 - RNA, 22 nt, Human
ucggucgccugcucccagcugc

SEQ ID NO: 141361 - RNA, 22 nt, Human
ucggucgccugcucccagcugc

SEQ ID NO: 141362 - RNA, 21 nt, Human
ucucaguggcaacaaacucuu

SEQ ID NO: 141363 - RNA, 21 nt, Human
ucucaguggcaacaaacucuu

SEQ ID NO: 141364 - RNA, 24 nt, Human
ucuccuauaagcacccaggauaag

SEQ ID NO: 141365 - RNA, 23 nt, Human
ucuccuauaagcacccaggauug

SEQ ID NO: 141366 - RNA, 18 nt, Human
ucucuuggagcgcuuugg

SEQ ID NO: 141367 - RNA, 26 nt, Human
ucuucccuuucuuccuccucccaccc

SEQ ID NO: 141368 - RNA, 26 nt, Human
ucuucccuuucuuccuccucccaccc

SEQ ID NO: 141369 - RNA, 26 nt, Human
ucuucccuuucuuccuccucccaccc

SEQ ID NO: 141370 - RNA, 26 nt, Human
ucuucccuuucuuccuccucccaccc

SEQ ID NO: 141371 - RNA, 18 nt, Human
ugacggucuaaaggguca

SEQ ID NO: 141372 - RNA, 21 nt, Human
ugagaaaugaaaaccacaccu

SEQ ID NO: 141373 - RNA, 21 nt, Human
ugagaaaugaaaaccacaccu

SEQ ID NO: 141374 - RNA, 25 nt, Human
ugagaaaugaaaaccacaccuucga

SEQ ID NO: 141375 - RNA, 25 nt, Human
ugagaaaugaaaaccacaccuucga

SEQ ID NO: 141376 - RNA, 20 nt, Human
ugagaugcugucuuuuucuu

SEQ ID NO: 141377 - RNA, 20 nt, Human
ugagaugcugucuuuuucuu

SEQ ID NO: 141378 - RNA, 18 nt, Human
ugcacccccggaagccca

SEQ ID NO: 141379 - RNA, 19 nt, Human
ugcacccccggaagcccaa

SEQ ID NO: 141380 - RNA, 26 nt, Human
ugcacccccggaagcccaagggccga

SEQ ID NO: 141381 - RNA, 25 nt, Human
ugcccugccuacgcuccuccggcgc

SEQ ID NO: 141382 - RNA, 23 nt, Human
ugccuacgcuccuccggcgcuca

SEQ ID NO: 141383 - RNA, 18 nt, Human
ugcugggagccagcucug

SEQ ID NO: 141384 - RNA, 24 nt, Human
uggaacccagucccagcccugcug

SEQ ID NO: 141385 - RNA, 18 nt, Human
uggagcgcuuuggggaga

SEQ ID NO: 141386 - RNA, 24 nt, Human
uggaggagaguguguuuacgagag

SEQ ID NO: 141387 - RNA, 22 nt, Human
uggccaaggagaaaugaugggg

SEQ ID NO: 141388 - RNA, 22 nt, Human
uggccaaggagaaaugaugggg

SEQ ID NO: 141389 - RNA, 19 nt, Human
uggcugcacccccggaagc

SEQ ID NO: 141390 - RNA, 20 nt, Human
ugggagccagcucugguucu

SEQ ID NO: 141391 - RNA, 26 nt, Human
uggggaaauggaggagguuggggagg

SEQ ID NO: 141392 - RNA, 21 nt, Human
uggggcuggaacccaguccca

SEQ ID NO: 141393 - RNA, 21 nt, Human
uguggguggagcccaccucuc

SEQ ID NO: 141394 - RNA, 26 nt, Human
uguugugcuuuuuggaggggagaggu

SEQ ID NO: 141395 - RNA, 19 nt, Human
uucauuguaaaaaaucacc

SEQ ID NO: 141396 - RNA, 19 nt, Human
uuccccagcagcugacagg

SEQ ID NO: 141397 - RNA, 20 nt, Human
uuccccagcagcugacaggu

SEQ ID NO: 141398 - RNA, 20 nt, Human
uucccuggcugcugcggcac

SEQ ID NO: 141399 - RNA, 22 nt, Human
uucgaagauuucuuuuaaaaau

SEQ ID NO: 141400 - RNA, 20 nt, Human
uucgaggggacuugcguccc

SEQ ID NO: 141401 - RNA, 26 nt, Human
uucuuuuuuuuuuaaaaagcaauuca

SEQ ID NO: 141402 - RNA, 26 nt, Human
uucuuuuuuuuuuaaaaagcaauuca

SEQ ID NO: 141403 - RNA, 19 nt, Human
uuggacgccagcgaaggaa

SEQ ID NO: 141404 - RNA, 19 nt, Human
uuggaggagcaaaagacag

SEQ ID NO: 141405 - RNA, 20 nt, Human
uuggggagaagggaggggga

SEQ ID NO: 141406 - RNA, 21 nt, Human
uuuccagcucccuuccucccg

SEQ ID NO: 141407 - RNA, 23 nt, Human
uuuccagcucccuuccucccggg

SEQ ID NO: 141408 - RNA, 20 nt, Human
uuuggggagaagggaggggg

SEQ ID NO: 141409 - RNA, 18 nt, Human
uuuguaagcagaaacuac

SEQ ID NO: 141410 - RNA, 22 nt, Human
uuuguugugcuuuuuggagggg

SEQ ID NO: 141411 - RNA, 23 nt, Human
aaaaaaauccagaaaagccaaca

SEQ ID NO: 141412 - RNA, 20 nt, Human
aaaaaacaagaacaacaaca

SEQ ID NO: 141413 - RNA, 18 nt, Human
aaaauccagaaaagccaa

SEQ ID NO: 141414 - RNA, 21 nt, Human
aaacaagaacaacaacaacaa

SEQ ID NO: 141415 - RNA, 23 nt, Human
aacugccuuuucuccugguccag

SEQ ID NO: 141416 - RNA, 24 nt, Human
aagaacccauggcaaaaaaaaucc

SEQ ID NO: 141417 - RNA, 22 nt, Human
aauaacuaacagacaaaaagaa

SEQ ID NO: 141418 - RNA, 24 nt, Human
aaugaauuggcuucauaacugccu

SEQ ID NO: 141419 - RNA, 21 nt, Human
aauggcuuggccuuccuucag

SEQ ID NO: 141420 - RNA, 20 nt, Human
acaacaacaacaaccaguaa

SEQ ID NO: 141421 - RNA, 21 nt, Human
acaacaacaacaaccaguaac

SEQ ID NO: 141422 - RNA, 20 nt, Human
acaagaacaacaacaacaaa

SEQ ID NO: 141423 - RNA, 18 nt, Human
acaagagacauaagcaca

SEQ ID NO: 141424 - RNA, 19 nt, Human
acagguaugaaauguccau

SEQ ID NO: 141425 - RNA, 21 nt, Human
acccauggcaaaaaaaaucca

SEQ ID NO: 141426 - RNA, 21 nt, Human
acccgcggggcugcggccgcg

SEQ ID NO: 141427 - RNA, 19 nt, Human
agaaucaugccaaagucca

SEQ ID NO: 141428 - RNA, 26 nt, Human
agacaaaaagaaaaaaaaggggaccc

SEQ ID NO: 141429 - RNA, 19 nt, Human
agcgcccgcgccgcgcccc

SEQ ID NO: 141430 - RNA, 19 nt, Human
agucagcacaugcugugcu

SEQ ID NO: 141431 - RNA, 19 nt, Human
caaaucccagaaguccaca

SEQ ID NO: 141432 - RNA, 19 nt, Human
caacucccgguuccgcccc

SEQ ID NO: 141433 - RNA, 27 nt, Human
caagaacaacaacaacaacuggagacc

SEQ ID NO: 141434 - RNA, 22 nt, Human
caaggucagugaagaacccaug

SEQ ID NO: 141435 - RNA, 19 nt, Human
cacagguaugaaaugucca

SEQ ID NO: 141436 - RNA, 24 nt, Human
cacucacuaucucacuggggcagc

SEQ ID NO: 141437 - RNA, 19 nt, Human
cagacaaaaagaaaaaaaa

SEQ ID NO: 141438 - RNA, 21 nt, Human
cauauaaaaaacaagaacaac

SEQ ID NO: 141439 - RNA, 25 nt, Human
caucuugcuacuucaaccaacuacc

SEQ ID NO: 141440 - RNA, 18 nt, Human
caugacagaaugaggucu

SEQ ID NO: 141441 - RNA, 24 nt, Human
cauuugcaagccuggugaccacuc

SEQ ID NO: 141442 - RNA, 24 nt, Human
ccaaaggaagaguugcucugagaa

SEQ ID NO: 141443 - RNA, 22 nt, Human
ccauggcaaaaaaaauccagaa

SEQ ID NO: 141444 - RNA, 25 nt, Human
ccauggcaaaaaaaauccagaaaag

SEQ ID NO: 141445 - RNA, 21 nt, Human
ccccgcgggugcccacggcca

SEQ ID NO: 141446 - RNA, 21 nt, Human
cccgcgggugcccacggccag

SEQ ID NO: 141447 - RNA, 18 nt, Human
ccgccgccgccgccgcgc

SEQ ID NO: 141448 - RNA, 21 nt, Human
ccgccgccgccgccgcgcagc

SEQ ID NO: 141449 - RNA, 22 nt, Human
ccuuccuucagucccgagaacc

SEQ ID NO: 141450 - RNA, 24 nt, Human
cgaacucugaggugcaaggacugg

SEQ ID NO: 141451 - RNA, 22 nt, Human
cgccccgcucgcucgauagcca

SEQ ID NO: 141452 - RNA, 23 nt, Human
cgccccgcucgcucgauagccag

SEQ ID NO: 141453 - RNA, 24 nt, Human
cgccccgcucgcucgauagccagc

SEQ ID NO: 141454 - RNA, 21 nt, Human
cgccgcgccccgcgggugccc

SEQ ID NO: 141455 - RNA, 18 nt, Human
cgcggggcugcggccgcg

SEQ ID NO: 141456 - RNA, 19 nt, Human
cggccaggguguccacggc

SEQ ID NO: 141457 - RNA, 23 nt, Human
cuaacagacaaaaagaaaaaaaa

SEQ ID NO: 141458 - RNA, 24 nt, Human
cuccuggaaucuacugcuaccacc

SEQ ID NO: 141459 - RNA, 20 nt, Human
cugaggugcaaggacugggc

SEQ ID NO: 141460 - RNA, 20 nt, Human
gaagaacccauggcaaaaaa

SEQ ID NO: 141461 - RNA, 23 nt, Human
gagcccggcgcccgagcggcggc

SEQ ID NO: 141462 - RNA, 21 nt, Human
gcagcgcccgcgccgcgcccc

SEQ ID NO: 141463 - RNA, 20 nt, Human
gccaggguguccacggccag

SEQ ID NO: 141464 - RNA, 21 nt, Human
gcgcaacucccgguuccgccc

SEQ ID NO: 141465 - RNA, 21 nt, Human
gggcagucccaagagggcaac

SEQ ID NO: 141466 - RNA, 23 nt, Human
ggugaccacucacuaucucacug

SEQ ID NO: 141467 - RNA, 18 nt, Human
gugaucagcuuaugcccc

SEQ ID NO: 141468 - RNA, 21 nt, Human
uacuucaaccaacuaccucau

SEQ ID NO: 141469 - RNA, 30 nt, Human
uagcaaguacccuucuccuccuggaaucuu

SEQ ID NO: 141470 - RNA, 21 nt, Human
uaugccccgaagcaacagaga

SEQ ID NO: 141471 - RNA, 25 nt, Human
uaugccccgaagcaacagagacaga

SEQ ID NO: 141472 - RNA, 24 nt, Human
uauugcacagguaugaaaugucca

SEQ ID NO: 141473 - RNA, 19 nt, Human
uauuggcuuaugcuugaaa

SEQ ID NO: 141474 - RNA, 18 nt, Human
ucaguauugcacagguau

SEQ ID NO: 141475 - RNA, 21 nt, Human
ucauaacugccuuuucuccug

SEQ ID NO: 141476 - RNA, 19 nt, Human
uccaaggucagugaagaac

SEQ ID NO: 141477 - RNA, 21 nt, Human
uccaaggucagugaagaaccc

SEQ ID NO: 141478 - RNA, 28 nt, Human
uccacaguugaagacaaccuccaggggc

SEQ ID NO: 141479 - RNA, 19 nt, Human
uccaggggcagggaggaaa

SEQ ID NO: 141480 - RNA, 26 nt, Human
ucccuacaaacccuguagggugacuu

SEQ ID NO: 141481 - RNA, 24 nt, Human
uccgcgggcgaggcacgggagggc

SEQ ID NO: 141482 - RNA, 19 nt, Human
ucugaagaacucuuuuccc

SEQ ID NO: 141483 - RNA, 23 nt, Human
ugaaauguccaugagucuuaaaa

SEQ ID NO: 141484 - RNA, 23 nt, Human
ugaagaacccauggcaaaaaaaa

SEQ ID NO: 141485 - RNA, 20 nt, Human
ugaagacaaccuccaggggc

SEQ ID NO: 141486 - RNA, 18 nt, Human
ugacagaaugaggucuuc

SEQ ID NO: 141487 - RNA, 22 nt, Human
ugcaaaaucugcaaaucccaga

SEQ ID NO: 141488 - RNA, 20 nt, Human
ugccaaaguucaaaaaauaa

SEQ ID NO: 141489 - RNA, 22 nt, Human
ugccccgaagcaacagagacag

SEQ ID NO: 141490 - RNA, 19 nt, Human
ugccuuuucuccuggucca

SEQ ID NO: 141491 - RNA, 25 nt, Human
ugcggccgcgacggagcccggcgcc

SEQ ID NO: 141492 - RNA, 22 nt, Human
uggaaugagacaaguucaagua

SEQ ID NO: 141493 - RNA, 26 nt, Human
uggcaaaaaaaauccagaaaagccaa

SEQ ID NO: 141494 - RNA, 19 nt, Human
uggcuuggccuuccuucag

SEQ ID NO: 141495 - RNA, 25 nt, Human
uucaaaaugaauuggcuucauaacu

SEQ ID NO: 141496 - RNA, 20 nt, Human
uugcucugagaagaggugga

SEQ ID NO: 141497 - RNA, 20 nt, Human
uuugcaagccuggugaccac

SEQ ID NO: 141498 - RNA, 23 nt, Human
uuugcaccgccacugacccagga

SEQ ID NO: 141499 - RNA, 19 nt, Human
uuuuuggucuaugaucuga

SEQ ID NO: 141500 - RNA, 19 nt, Human
aaaaaacaaacacaauuca

SEQ ID NO: 141501 - RNA, 20 nt, Human
aaaaggaaacagccuuacaa

SEQ ID NO: 141502 - RNA, 21 nt, Human
aaaauacaugaaaaagacuaa

SEQ ID NO: 141503 - RNA, 24 nt, Human
aaacaaacacaauucaaacaaaca

SEQ ID NO: 141504 - RNA, 20 nt, Human
aaagaaagcagcccagcuga

SEQ ID NO: 141505 - RNA, 21 nt, Human
aagaacacaugcuccuacccu

SEQ ID NO: 141506 - RNA, 19 nt, Human
aagcugccgcucucggagc

SEQ ID NO: 141507 - RNA, 20 nt, Human
aagcugccgcucucggagcc

SEQ ID NO: 141508 - RNA, 19 nt, Human
aagugagcccaugauuugg

SEQ ID NO: 141509 - RNA, 20 nt, Human
agaaguaaagccggagguuc

SEQ ID NO: 141510 - RNA, 22 nt, Human
agcccaucaaaggaaaaaacaa

SEQ ID NO: 141511 - RNA, 18 nt, Human
agccgcuggcucuuagug

SEQ ID NO: 141512 - RNA, 24 nt, Human
aggaaaaaacaaacacaauucaaa

SEQ ID NO: 141513 - RNA, 19 nt, Human
aggaaaauacaugaaaaag

SEQ ID NO: 141514 - RNA, 19 nt, Human
aggcauagucaaacuacau

SEQ ID NO: 141515 - RNA, 21 nt, Human
auuauccccuuugcgacaaca

SEQ ID NO: 141516 - RNA, 21 nt, Human
caaggagggguguggggucuu

SEQ ID NO: 141517 - RNA, 22 nt, Human
caauucaaacaaacacugucaa

SEQ ID NO: 141518 - RNA, 26 nt, Human
cacaagcaaaaauauuuacaaaggua

SEQ ID NO: 141519 - RNA, 24 nt, Human
cacaauucaaacaaacacugucaa

SEQ ID NO: 141520 - RNA, 24 nt, Human
cagauaguuuuuguuccuccccag

SEQ ID NO: 141521 - RNA, 18 nt, Human
cagcaaggaggggugugg

SEQ ID NO: 141522 - RNA, 21 nt, Human
cagcccagcugaugcugccaa

SEQ ID NO: 141523 - RNA, 23 nt, Human
cagcugaugcugccaagagaaac

SEQ ID NO: 141524 - RNA, 24 nt, Human
cauacugcucuuucucccuuugga

SEQ ID NO: 141525 - RNA, 25 nt, Human
caucaaaggaaaaaacaaacacaau

SEQ ID NO: 141526 - RNA, 21 nt, Human
ccccucggggcaggcauaggc

SEQ ID NO: 141527 - RNA, 20 nt, Human
ccgcgcgcgaagcugccgcu

SEQ ID NO: 141528 - RNA, 22 nt, Human
ccgcgcgcgaagcugccgcucu

SEQ ID NO: 141529 - RNA, 18 nt, Human
ccucgaaucccagucccu

SEQ ID NO: 141530 - RNA, 22 nt, Human
cggagguucucucugcacccag

SEQ ID NO: 141531 - RNA, 21 nt, Human
cuaaucccucccuccaaggcu

SEQ ID NO: 141532 - RNA, 21 nt, Human
cuagcggcuucuaaucccucc

SEQ ID NO: 141533 - RNA, 20 nt, Human
cuggaaguccucgaauccca

SEQ ID NO: 141534 - RNA, 19 nt, Human
cuucuaaucccucccucca

SEQ ID NO: 141535 - RNA, 26 nt, Human
gaaaaaacaaacacaauucaaacaaa

SEQ ID NO: 141536 - RNA, 24 nt, Human
gaaucucucucaaugaagcugccc

SEQ ID NO: 141537 - RNA, 20 nt, Human
gagcugcgggagagggcggg

SEQ ID NO: 141538 - RNA, 28 nt, Human
gcagacgagacagaaguaaagccggagg

SEQ ID NO: 141539 - RNA, 20 nt, Human
gcagccgcuggcucuuagug

SEQ ID NO: 141540 - RNA, 26 nt, Human
gccucgccuuacccaagccgaggcua

SEQ ID NO: 141541 - RNA, 19 nt, Human
gcugaugcugccaagagaa

SEQ ID NO: 141542 - RNA, 23 nt, Human
gcuggugucauuuugacaccugg

SEQ ID NO: 141543 - RNA, 24 nt, Human
uaaagagaaaaaaucaugaggaaa

SEQ ID NO: 141544 - RNA, 21 nt, Human
uaaagucaagcaugcugcaaa

SEQ ID NO: 141545 - RNA, 19 nt, Human
uacaugaaaaagacuaaag

SEQ ID NO: 141546 - RNA, 23 nt, Human
uaccacaaauacagagcugaaau

SEQ ID NO: 141547 - RNA, 23 nt, Human
uagaaaagagcacaauuuucuuu

SEQ ID NO: 141548 - RNA, 21 nt, Human
uagcggcuucuaaucccuccc

SEQ ID NO: 141549 - RNA, 20 nt, Human
uagucuucauugaagacaau

SEQ ID NO: 141550 - RNA, 21 nt, Human
ucaaaggaaaaaacaaacaca

SEQ ID NO: 141551 - RNA, 21 nt, Human
uccaaagagaauggagcaaau

SEQ ID NO: 141552 - RNA, 19 nt, Human
uccccuuugcgacaacaca

SEQ ID NO: 141553 - RNA, 21 nt, Human
ucugcacccagcugcagccgc

SEQ ID NO: 141554 - RNA, 21 nt, Human
ugaaaaagacuaaagacuucg

SEQ ID NO: 141555 - RNA, 27 nt, Human
ugaaaaagacuaaagacuucgccauag

SEQ ID NO: 141556 - RNA, 21 nt, Human
ugagaggggaggaaaaaaagu

SEQ ID NO: 141557 - RNA, 22 nt, Human
ugauaccacaaauacagagcug

SEQ ID NO: 141558 - RNA, 24 nt, Human
ugauaccacaaauacagagcugaa

SEQ ID NO: 141559 - RNA, 18 nt, Human
ugcacccagcugcagccg

SEQ ID NO: 141560 - RNA, 21 nt, Human
ugcacccagcugcagccgcug

SEQ ID NO: 141561 - RNA, 19 nt, Human
ugccgcucucggagcgggg

SEQ ID NO: 141562 - RNA, 19 nt, Human
ugcgacaacacaagcaaaa

SEQ ID NO: 141563 - RNA, 20 nt, Human
uggagcaaaucucucuguua

SEQ ID NO: 141564 - RNA, 20 nt, Human
uggguacagagcaaaccuac

SEQ ID NO: 141565 - RNA, 20 nt, Human
ugucuaguacagacagcugg

SEQ ID NO: 141566 - RNA, 24 nt, Human
uuaaagugagcccaugauuuggug

SEQ ID NO: 141567 - RNA, 23 nt, Human
uuaguauuaaccaauuccgcacu

SEQ ID NO: 141568 - RNA, 22 nt, Human
uuagugucaaugaaucucucuc

SEQ ID NO: 141569 - RNA, 19 nt, Human
uuccagaugcaaaaggaaa

SEQ ID NO: 141570 - RNA, 18 nt, Human
uuuguuuuguucuguuuu

SEQ ID NO: 141571 - RNA, 19 nt, Human
aaaaaaaaaaaaaagaaaa

SEQ ID NO: 141572 - RNA, 21 nt, Human
aaaaaaaaaaaaagaaaaauc

SEQ ID NO: 141573 - RNA, 23 nt, Human
aaaaaaaaaagaaaaaucaagaa

SEQ ID NO: 141574 - RNA, 23 nt, Human
aaaaaaaagaaaaaucaagaaga

SEQ ID NO: 141575 - RNA, 18 nt, Human
aagaagagcucaaacacu

SEQ ID NO: 141576 - RNA, 21 nt, Human
aaguaaacucagguccgugga

SEQ ID NO: 141577 - RNA, 22 nt, Human
accccgcccgggugcccccagc

SEQ ID NO: 141578 - RNA, 23 nt, Human
agaaaaaucaagaagagcucaaa

SEQ ID NO: 141579 - RNA, 19 nt, Human
agagcucgugcggccggca

SEQ ID NO: 141580 - RNA, 20 nt, Human
agcagaaaggagcguccugg

SEQ ID NO: 141581 - RNA, 19 nt, Human
agcugcgcgcccgccgccc

SEQ ID NO: 141582 - RNA, 23 nt, Human
aggccagagguggcgggcuuggg

SEQ ID NO: 141583 - RNA, 21 nt, Human
caaagccacguguccaagagc

SEQ ID NO: 141584 - RNA, 30 nt, Human
caagaagagcucaaacacucuuuguggugg

SEQ ID NO: 141585 - RNA, 18 nt, Human
cagcagaaaggagcgucc

SEQ ID NO: 141586 - RNA, 19 nt, Human
cagccgccgccgcccccga

SEQ ID NO: 141587 - RNA, 18 nt, Human
caggaugaggcccuggug

SEQ ID NO: 141588 - RNA, 24 nt, Human
caggaugaggcccugguggacgcc

SEQ ID NO: 141589 - RNA, 22 nt, Human
cccaaagccacguguccaagag

SEQ ID NO: 141590 - RNA, 27 nt, Human
cccccagccgccgccgcccccgaaguc

SEQ ID NO: 141591 - RNA, 22 nt, Human
ccccgcaccgggcucggacccc

SEQ ID NO: 141592 - RNA, 18 nt, Human
ccccggccgcgcgggccc

SEQ ID NO: 141593 - RNA, 18 nt, Human
ccccggugccugcgccgg

SEQ ID NO: 141594 - RNA, 23 nt, Human
cccgcccgggugcccccagccgc

SEQ ID NO: 141595 - RNA, 21 nt, Human
cccggccgcgcgggccccagc

SEQ ID NO: 141596 - RNA, 18 nt, Human
cccggggccggggccggg

SEQ ID NO: 141597 - RNA, 25 nt, Human
cccugcccugggacggcgccccggc

SEQ ID NO: 141598 - RNA, 19 nt, Human
ccgcccgggugcccccagc

SEQ ID NO: 141599 - RNA, 19 nt, Human
ccgccgccgcccccgaagu

SEQ ID NO: 141600 - RNA, 18 nt, Human
ccgccgcgcgccuccagc

SEQ ID NO: 141601 - RNA, 19 nt, Human
ccgccgcgcgccuccagcu

SEQ ID NO: 141602 - RNA, 28 nt, Human
ccgccucccgccgagcugcgcgcccgcc

SEQ ID NO: 141603 - RNA, 19 nt, Human
ccgcgcgggccccagccgc

SEQ ID NO: 141604 - RNA, 21 nt, Human
ccgcggagcugguuuuucaug

SEQ ID NO: 141605 - RNA, 22 nt, Human
ccggaccccgaccccgcaccgg

SEQ ID NO: 141606 - RNA, 26 nt, Human
ccggaccccgaccccgcaccgguucc

SEQ ID NO: 141607 - RNA, 18 nt, Human
ccggcagucgagcagcag

SEQ ID NO: 141608 - RNA, 26 nt, Human
ccggccucccggccucccggccuccg

SEQ ID NO: 141609 - RNA, 23 nt, Human
ccggggccgggcagcccugcccu

SEQ ID NO: 141610 - RNA, 23 nt, Human
ccuccugcagccacucggcgcuc

SEQ ID NO: 141611 - RNA, 21 nt, Human
ccucuccagcaagcccugcag

SEQ ID NO: 141612 - RNA, 22 nt, Human
ccugccaaaaguaaaaaguaaa

SEQ ID NO: 141613 - RNA, 21 nt, Human
cgacucgaagagcucgugcgg

SEQ ID NO: 141614 - RNA, 25 nt, Human
cgcccaaagccacguguccaagagc

SEQ ID NO: 141615 - RNA, 18 nt, Human
cgccccggccucccggcc

SEQ ID NO: 141616 - RNA, 24 nt, Human
cgccccggccucccggccucccgg

SEQ ID NO: 141617 - RNA, 21 nt, Human
cgccgcgcccgccccggugcc

SEQ ID NO: 141618 - RNA, 21 nt, Human
cgccgcgcgccuccagcuccu

SEQ ID NO: 141619 - RNA, 24 nt, Human
cgccuccagcuccuccugcagcca

SEQ ID NO: 141620 - RNA, 22 nt, Human
cgcgcccgccgccccggccucc

SEQ ID NO: 141621 - RNA, 24 nt, Human
cggcccggggccggggccgggcag

SEQ ID NO: 141622 - RNA, 21 nt, Human
cggccucccggccuccguccc

SEQ ID NO: 141623 - RNA, 20 nt, Human
cgggcagcccugcccuggga

SEQ ID NO: 141624 - RNA, 23 nt, Human
cucccggccuccgucccgcccgc

SEQ ID NO: 141625 - RNA, 23 nt, Human
cugggacggcgccccggccgcgc

SEQ ID NO: 141626 - RNA, 18 nt, Human
gacaggaugaggcccugg

SEQ ID NO: 141627 - RNA, 22 nt, Human
gagcaggggccuggugccaugc

SEQ ID NO: 141628 - RNA, 19 nt, Human
gagcugguuuuucaugggg

SEQ ID NO: 141629 - RNA, 20 nt, Human
gcagaaaggagcguccugga

SEQ ID NO: 141630 - RNA, 21 nt, Human
gccagagguggcgggcuuggg

SEQ ID NO: 141631 - RNA, 23 nt, Human
gccccggccgcgcgggccccagc

SEQ ID NO: 141632 - RNA, 18 nt, Human
gccccggugccugcgccg

SEQ ID NO: 141633 - RNA, 19 nt, Human
gccgaggccucuccagcaa

SEQ ID NO: 141634 - RNA, 22 nt, Human
gccuccgucccgcccgcccgcc

SEQ ID NO: 141635 - RNA, 22 nt, Human
gccugcgccggaccccgacccc

SEQ ID NO: 141636 - RNA, 22 nt, Human
gcgccuccagcuccuccugcag

SEQ ID NO: 141637 - RNA, 21 nt, Human
gcggagcugguuuuucauggg

SEQ ID NO: 141638 - RNA, 23 nt, Human
gggagcuuggauuuaccugccaa

SEQ ID NO: 141639 - RNA, 18 nt, Human
gggcgcccgccucccgcc

SEQ ID NO: 141640 - RNA, 20 nt, Human
ggggccggggccgggcagcc

SEQ ID NO: 141641 - RNA, 24 nt, Human
ggugccaugccccccgugcaccag

SEQ ID NO: 141642 - RNA, 22 nt, Human
guuaaaaaaaaaaaaaaaaaaa

SEQ ID NO: 141643 - RNA, 18 nt, Human
uaaaaaacagccaaacug

SEQ ID NO: 141644 - RNA, 22 nt, Human
uaaaaaacagccaaacuggcug

SEQ ID NO: 141645 - RNA, 22 nt, Human
uacuggguuauacaauccacug

SEQ ID NO: 141646 - RNA, 23 nt, Human
ucaggccagagguggcgggcuug

SEQ ID NO: 141647 - RNA, 21 nt, Human
uccaagagccgaggccucucc

SEQ ID NO: 141648 - RNA, 23 nt, Human
ucgccgcgcccgccccggugccu

SEQ ID NO: 141649 - RNA, 21 nt, Human
ugaaauacuggguuauacaau

SEQ ID NO: 141650 - RNA, 19 nt, Human
uggcugggcugucagcaga

SEQ ID NO: 141651 - RNA, 26 nt, Human
ugggccucugggcacaggugacaucu

SEQ ID NO: 141652 - RNA, 21 nt, Human
ugggcucucccaccuagcccu

SEQ ID NO: 141653 - RNA, 22 nt, Human
uggggagcgcgggcggcccggg

SEQ ID NO: 141654 - RNA, 19 nt, Human
uggggggccgcggagcugg

SEQ ID NO: 141655 - RNA, 23 nt, Human
uuaaaaaaaaaaaaaaaaaagaa

SEQ ID NO: 141656 - RNA, 23 nt, Human
uucauggggagcgcgggcggccc

SEQ ID NO: 141657 - RNA, 23 nt, Human
aaaacaccaaaacacuugaagca

SEQ ID NO: 141658 - RNA, 23 nt, Human
aaacaccaaaacacuugaagcaa

SEQ ID NO: 141659 - RNA, 18 nt, Human
aaacacuugaagcaaaaa

SEQ ID NO: 141660 - RNA, 19 nt, Human
aaaccuaagugacacccaa

SEQ ID NO: 141661 - RNA, 22 nt, Human
aaacucguaacuacaacuagua

SEQ ID NO: 141662 - RNA, 19 nt, Human
aaagaaaggaaagcacacu

SEQ ID NO: 141663 - RNA, 18 nt, Human
aaagcaauuaaagcaaaa

SEQ ID NO: 141664 - RNA, 26 nt, Human
aacccacauccucaaaacgaugccug

SEQ ID NO: 141665 - RNA, 25 nt, Human
aagcaaaaacuuuuuuuuuuuuuuu

SEQ ID NO: 141666 - RNA, 19 nt, Human
aagugacacccaaaacccu

SEQ ID NO: 141667 - RNA, 23 nt, Human
aauagaggauuuaucaaaagaaa

SEQ ID NO: 141668 - RNA, 19 nt, Human
acaaaaccuaagugacacc

SEQ ID NO: 141669 - RNA, 25 nt, Human
acaaagcagauuuacauacaaccuu

SEQ ID NO: 141670 - RNA, 23 nt, Human
acagccuauugcuacuucacuga

SEQ ID NO: 141671 - RNA, 24 nt, Human
accacaaagcagauuuacauacaa

SEQ ID NO: 141672 - RNA, 18 nt, Human
accugguaugcaaaaaug

SEQ ID NO: 141673 - RNA, 23 nt, Human
agaagcacuccauguguauaacc

SEQ ID NO: 141674 - RNA, 24 nt, Human
agccacagaaucagucccauaucu

SEQ ID NO: 141675 - RNA, 21 nt, Human
aggaaucugagaaacauagua

SEQ ID NO: 141676 - RNA, 22 nt, Human
agggaacaaaccuaaaguaaca

SEQ ID NO: 141677 - RNA, 20 nt, Human
auguguauaacccacauccu

SEQ ID NO: 141678 - RNA, 25 nt, Human
caaaacaccaaaacacuugaagcaa

SEQ ID NO: 141679 - RNA, 20 nt, Human
caaaacacuugaagcaaaaa

SEQ ID NO: 141680 - RNA, 23 nt, Human
caaaacacuugaagcaaaaacuu

SEQ ID NO: 141681 - RNA, 22 nt, Human
caaaaccuaagugacacccaaa

SEQ ID NO: 141682 - RNA, 24 nt, Human
caauugcggaaaaacaaaguuucu

SEQ ID NO: 141683 - RNA, 22 nt, Human
cacaaagcagauuuacauacaa

SEQ ID NO: 141684 - RNA, 27 nt, Human
cacagaaucugauggacaaaggacauc

SEQ ID NO: 141685 - RNA, 25 nt, Human
ccacugaguugauuucauggcucac

SEQ ID NO: 141686 - RNA, 23 nt, Human
cuaagugacacccaaaacccuga

SEQ ID NO: 141687 - RNA, 22 nt, Human
cucacagaaucugauggacagc

SEQ ID NO: 141688 - RNA, 20 nt, Human
cucacccucaucacaaagaa

SEQ ID NO: 141689 - RNA, 19 nt, Human
cugguaugcaaaaaugcug

SEQ ID NO: 141690 - RNA, 21 nt, Human
cuucuuguuuucuguucuugg

SEQ ID NO: 141691 - RNA, 18 nt, Human
gaaucagucccauaucug

SEQ ID NO: 141692 - RNA, 26 nt, Human
gacacccaaaacccugauacaaagga

SEQ ID NO: 141693 - RNA, 23 nt, Human
gcaaaacaccaaaacacuugaag

SEQ ID NO: 141694 - RNA, 18 nt, Human
gugagacagaaaaaccug

SEQ ID NO: 141695 - RNA, 23 nt, Human
uaagaagacacuguuuacaucag

SEQ ID NO: 141696 - RNA, 23 nt, Human
uaagccacagaaucagucccaua

SEQ ID NO: 141697 - RNA, 21 nt, Human
uacaaaggaaucugagaaaca

SEQ ID NO: 141698 - RNA, 21 nt, Human
uacaugucuuucacaaacaua

SEQ ID NO: 141699 - RNA, 21 nt, Human
uaccuugugaaagaauuuguu

SEQ ID NO: 141700 - RNA, 21 nt, Human
uaguaaagaaaggaaagcaca

SEQ ID NO: 141701 - RNA, 19 nt, Human
uaguuccagaagcacucca

SEQ ID NO: 141702 - RNA, 21 nt, Human
uauuucauuuaucuuaucucu

SEQ ID NO: 141703 - RNA, 25 nt, Human
ucaaaacgaugccuggugucucaca

SEQ ID NO: 141704 - RNA, 27 nt, Human
uccccaaguuacaugucuuucacaaac

SEQ ID NO: 141705 - RNA, 19 nt, Human
ugaaaugugagccacagag

SEQ ID NO: 141706 - RNA, 23 nt, Human
ugaagcaaaaacuuuuuuuuuuu

SEQ ID NO: 141707 - RNA, 20 nt, Human
ugagaaacauaguaaagaaa

SEQ ID NO: 141708 - RNA, 25 nt, Human
ugagacagaaaaaccugguggcuga

SEQ ID NO: 141709 - RNA, 25 nt, Human
ugcaaaacaccaaaacacuugaagc

SEQ ID NO: 141710 - RNA, 19 nt, Human
ugcggaaaaacaaaguuuc

SEQ ID NO: 141711 - RNA, 23 nt, Human
ugcugaagggagaucauaugagu

SEQ ID NO: 141712 - RNA, 20 nt, Human
uggaaaaauaaacugaggau

SEQ ID NO: 141713 - RNA, 20 nt, Human
uggacaaaaccuaagugaca

SEQ ID NO: 141714 - RNA, 21 nt, Human
uugauccaaacacaaagaaaa

SEQ ID NO: 141715 - RNA, 24 nt, Human
uuguaccuugugaaagaauuuguu

SEQ ID NO: 141716 - RNA, 26 nt, Human
uuuguaccuugugaaagaauuuguuu

SEQ ID NO: 141717 - RNA, 20 nt, Human
uuuuuuuuuuuuagcaggaa

SEQ ID NO: 141718 - RNA, 25 nt, Human
aaaccgcccacucccugggccccgg

SEQ ID NO: 141719 - RNA, 21 nt, Human
aaagccacgcggaaaccaaaa

SEQ ID NO: 141720 - RNA, 20 nt, Human
caaagccacgcggaaaccaa

SEQ ID NO: 141721 - RNA, 23 nt, Human
caggccgccuugcggagggcaaa

SEQ ID NO: 141722 - RNA, 20 nt, Human
ccccguccguccccggcucc

SEQ ID NO: 141723 - RNA, 23 nt, Human
cccugccucccugccucccuccu

SEQ ID NO: 141724 - RNA, 25 nt, Human
cccugcgucgcucugucucucccuc

SEQ ID NO: 141725 - RNA, 18 nt, Human
ccucagcccgcgccggac

SEQ ID NO: 141726 - RNA, 24 nt, Human
ccuccccccguccguccccggcuc

SEQ ID NO: 141727 - RNA, 22 nt, Human
ccucccugccuuccuccccccg

SEQ ID NO: 141728 - RNA, 18 nt, Human
ccugggccccggaaccgg

SEQ ID NO: 141729 - RNA, 18 nt, Human
cguccccggcucccuccc

SEQ ID NO: 141730 - RNA, 24 nt, Human
cucccgcccgcccccagucccugc

SEQ ID NO: 141731 - RNA, 21 nt, Human
cucccuccuaacgucccuccg

SEQ ID NO: 141732 - RNA, 23 nt, Human
cugcguguggcuccuccguggcc

SEQ ID NO: 141733 - RNA, 21 nt, Human
gcagcgcgggggcggcccucg

SEQ ID NO: 141734 - RNA, 22 nt, Human
gcgggggcggcccucgcugccu

SEQ ID NO: 141735 - RNA, 22 nt, Human
gcuccuccguggccgggucugu

SEQ ID NO: 141736 - RNA, 19 nt, Human
ggccgggucugucggccuc

SEQ ID NO: 141737 - RNA, 20 nt, Human
ggccgggucugucggccucg

SEQ ID NO: 141738 - RNA, 24 nt, Human
ucccugccucccuccuaacguccc

SEQ ID NO: 141739 - RNA, 19 nt, Human
ucccugccucccugccucc

SEQ ID NO: 141740 - RNA, 19 nt, Human
ucccugccucccugccucc

SEQ ID NO: 141741 - RNA, 21 nt, Human
ucugucucucccuccguuccu

SEQ ID NO: 141742 - RNA, 25 nt, Human
ugaaaacccgacggcaacuggagac

SEQ ID NO: 141743 - RNA, 20 nt, Human
ugcagggcucagccugggga

SEQ ID NO: 141744 - RNA, 18 nt, Human
ugcggucugugaaccgcg

SEQ ID NO: 141745 - RNA, 24 nt, Human
ugggcccagcccucagcccgcgcc

SEQ ID NO: 141746 - RNA, 18 nt, Human
uuucccggagggcggggg

SEQ ID NO: 141747 - RNA, 22 nt, Human
acacgugggggccagagaagcc

SEQ ID NO: 141748 - RNA, 21 nt, Human
acccugccucccguccuggcc

SEQ ID NO: 141749 - RNA, 19 nt, Human
acccugggggccugggcac

SEQ ID NO: 141750 - RNA, 19 nt, Human
acgcgagcucugcaugcgg

SEQ ID NO: 141751 - RNA, 21 nt, Human
agagaagccaggaaggccgcg

SEQ ID NO: 141752 - RNA, 25 nt, Human
agccugccccccacccugccucccg

SEQ ID NO: 141753 - RNA, 18 nt, Human
aggaccgccagcucccca

SEQ ID NO: 141754 - RNA, 24 nt, Human
cacagcugugcaggaggugggggu

SEQ ID NO: 141755 - RNA, 21 nt, Human
cacgcgagcucugcaugcggc

SEQ ID NO: 141756 - RNA, 20 nt, Human
cagcagcaggugggacagau

SEQ ID NO: 141757 - RNA, 19 nt, Human
cagccugccccccacccug

SEQ ID NO: 141758 - RNA, 20 nt, Human
ccagagaagccaggaaggcc

SEQ ID NO: 141759 - RNA, 18 nt, Human
ccagcccucucucgucuu

SEQ ID NO: 141760 - RNA, 20 nt, Human
ccauggucccucccugcccu

SEQ ID NO: 141761 - RNA, 20 nt, Human
cccauaaaauuaaacgcuuu

SEQ ID NO: 141762 - RNA, 18 nt, Human
ccccaagaccucccuccc

SEQ ID NO: 141763 - RNA, 19 nt, Human
ccccaagaccucccucccu

SEQ ID NO: 141764 - RNA, 19 nt, Human
ccccaagaccucccucccu

SEQ ID NO: 141765 - RNA, 21 nt, Human
ccccacccugccucccguccu

SEQ ID NO: 141766 - RNA, 21 nt, Human
cccccacgaaggcaagcccac

SEQ ID NO: 141767 - RNA, 18 nt, Human
ccccccacccugccuccc

SEQ ID NO: 141768 - RNA, 26 nt, Human
ccccccacccugccucccguccuggc

SEQ ID NO: 141769 - RNA, 26 nt, Human
ccccuugacccugcgggccauggucc

SEQ ID NO: 141770 - RNA, 20 nt, Human
cccgcccgcccgccugcgcc

SEQ ID NO: 141771 - RNA, 22 nt, Human
cccgcccgccugcgccccgccc

SEQ ID NO: 141772 - RNA, 19 nt, Human
cccugccucccguccuggc

SEQ ID NO: 141773 - RNA, 22 nt, Human
cccuggcugggacacggugggc

SEQ ID NO: 141774 - RNA, 19 nt, Human
ccgcauggaccacccuggg

SEQ ID NO: 141775 - RNA, 24 nt, Human
ccgcccgcccgccugcgccccgcc

SEQ ID NO: 141776 - RNA, 24 nt, Human
ccucccguccuggcccccacgaag

SEQ ID NO: 141777 - RNA, 26 nt, Human
ccucccguccuggcccccacgaaggc

SEQ ID NO: 141778 - RNA, 20 nt, Human
ccuccucccccgagucaccg

SEQ ID NO: 141779 - RNA, 23 nt, Human
cgcccgcccgccugcgccccgcc

SEQ ID NO: 141780 - RNA, 19 nt, Human
cggcgcggagcccgcgcgc

SEQ ID NO: 141781 - RNA, 20 nt, Human
cggcgcggagcccgcgcgcu

SEQ ID NO: 141782 - RNA, 23 nt, Human
cuaaacgcugggacuuugauaca

SEQ ID NO: 141783 - RNA, 23 nt, Human
gacagaugacagggucgccuccu

SEQ ID NO: 141784 - RNA, 18 nt, Human
gagcuggagcagccaggc

SEQ ID NO: 141785 - RNA, 21 nt, Human
gcacagcugugcaggaggugg

SEQ ID NO: 141786 - RNA, 18 nt, Human
gcagcagcaggugggaca

SEQ ID NO: 141787 - RNA, 19 nt, Human
gcagcagcaggugggacag

SEQ ID NO: 141788 - RNA, 29 nt, Human
gcccgccugcgccccgcccggcccgcacc

SEQ ID NO: 141789 - RNA, 19 nt, Human
gcccggcccggggcucgga

SEQ ID NO: 141790 - RNA, 18 nt, Human
gccugccccccacccugc

SEQ ID NO: 141791 - RNA, 18 nt, Human
gccugccccccacccugc

SEQ ID NO: 141792 - RNA, 20 nt, Human
gccugggcacagcugugcag

SEQ ID NO: 141793 - RNA, 22 nt, Human
gcgcucagggcccggcccgggg

SEQ ID NO: 141794 - RNA, 20 nt, Human
gcggggcgcuacccgcccgc

SEQ ID NO: 141795 - RNA, 24 nt, Human
ggacagaugacagggucgccuccu

SEQ ID NO: 141796 - RNA, 20 nt, Human
ggcgcggcggcggcgcggag

SEQ ID NO: 141797 - RNA, 18 nt, Human
gggcagcagcagguggga

SEQ ID NO: 141798 - RNA, 21 nt, Human
gggcagcagcaggugggacag

SEQ ID NO: 141799 - RNA, 27 nt, Human
gggccauggucccucccugcccuggcu

SEQ ID NO: 141800 - RNA, 18 nt, Human
uacagcacagacacgugg

SEQ ID NO: 141801 - RNA, 20 nt, Human
uacaguaucuacagcacaga

SEQ ID NO: 141802 - RNA, 24 nt, Human
ucaccaaggacgggccaccugacu

SEQ ID NO: 141803 - RNA, 21 nt, Human
ucagccgagagcccgaggggg

SEQ ID NO: 141804 - RNA, 21 nt, Human
ucaggagcuggagcagccagg

SEQ ID NO: 141805 - RNA, 24 nt, Human
ucaggagcuggagcagccaggcug

SEQ ID NO: 141806 - RNA, 18 nt, Human
ucagggcccggcccgggg

SEQ ID NO: 141807 - RNA, 22 nt, Human
uccccaagaccucccucccugu

SEQ ID NO: 141808 - RNA, 26 nt, Human
ucccccgagucaccggccaggcaaua

SEQ ID NO: 141809 - RNA, 18 nt, Human
uccuccacguacuuucag

SEQ ID NO: 141810 - RNA, 24 nt, Human
ugaggggcagagagggagcgcccc

SEQ ID NO: 141811 - RNA, 18 nt, Human
ugcccuggcugggacacg

SEQ ID NO: 141812 - RNA, 21 nt, Human
ugcccuggcugggacacggug

SEQ ID NO: 141813 - RNA, 19 nt, Human
ugugcacucaccaaggacg

SEQ ID NO: 141814 - RNA, 18 nt, Human
ugugugcgcgcagugugu

SEQ ID NO: 141815 - RNA, 21 nt, Human
ugugugcgcgcagugugugca

SEQ ID NO: 141816 - RNA, 22 nt, Human
uguugccggaugggaggagaga

SEQ ID NO: 141817 - RNA, 18 nt, Human
uugccggaugggaggaga

SEQ ID NO: 141818 - RNA, 21 nt, Human
aaaaagacggacggauggaga

SEQ ID NO: 141819 - RNA, 19 nt, Human
aaagaggccccccuccccc

SEQ ID NO: 141820 - RNA, 19 nt, Human
aaagugcugggauuacaga

SEQ ID NO: 141821 - RNA, 24 nt, Human
aaagugcugggauuacagacguga

SEQ ID NO: 141822 - RNA, 23 nt, Human
aaauauggaagcccaggagagcc

SEQ ID NO: 141823 - RNA, 18 nt, Human
aaccuggagcuaagaacu

SEQ ID NO: 141824 - RNA, 23 nt, Human
aagaaagaaaagaaauguuucag

SEQ ID NO: 141825 - RNA, 18 nt, Human
aagcccaggagagccagg

SEQ ID NO: 141826 - RNA, 26 nt, Human
aagcgauucuugugccucagccuccu

SEQ ID NO: 141827 - RNA, 18 nt, Human
aaguccuggaagucuccu

SEQ ID NO: 141828 - RNA, 24 nt, Human
aagugauccaccugucucagccuc

SEQ ID NO: 141829 - RNA, 19 nt, Human
aagugcugggauuacagac

SEQ ID NO: 141830 - RNA, 26 nt, Human
aagugcugggauuacagacgugagcc

SEQ ID NO: 141831 - RNA, 23 nt, Human
acaaagcccucugcacaccaaaa

SEQ ID NO: 141832 - RNA, 23 nt, Human
acacauuccccggaucuggcugg

SEQ ID NO: 141833 - RNA, 18 nt, Human
acagacgugagccaccgc

SEQ ID NO: 141834 - RNA, 19 nt, Human
acaggcaggugccaaaacc

SEQ ID NO: 141835 - RNA, 18 nt, Human
acaggguuuugcuauguu

SEQ ID NO: 141836 - RNA, 23 nt, Human
acaggguuuugcuauguuggcca

SEQ ID NO: 141837 - RNA, 24 nt, Human
acaggguuuugcuauguuggccag

SEQ ID NO: 141838 - RNA, 18 nt, Human
accaccuaacuccaaauc

SEQ ID NO: 141839 - RNA, 21 nt, Human
accaggaaggggagaagggug

SEQ ID NO: 141840 - RNA, 22 nt, Human
accgcacccguccaaggaagua

SEQ ID NO: 141841 - RNA, 18 nt, Human
acgcagccggcuggggug

SEQ ID NO: 141842 - RNA, 19 nt, Human
acgugccccacccugcaag

SEQ ID NO: 141843 - RNA, 18 nt, Human
acucugucacccaggcug

SEQ ID NO: 141844 - RNA, 25 nt, Human
acucugucacccaggcuggagugcg

SEQ ID NO: 141845 - RNA, 22 nt, Human
agaaagaaaagaaauguuucag

SEQ ID NO: 141846 - RNA, 18 nt, Human
agacaggguuuugcuaug

SEQ ID NO: 141847 - RNA, 21 nt, Human
agagaacacauuccccggauc

SEQ ID NO: 141848 - RNA, 19 nt, Human
agaggaacgcagccggcug

SEQ ID NO: 141849 - RNA, 18 nt, Human
agaggggagagggagggc

SEQ ID NO: 141850 - RNA, 24 nt, Human
agcaccaacaagucuggucccuuc

SEQ ID NO: 141851 - RNA, 21 nt, Human
aggaaaaaagaaagaaaagaa

SEQ ID NO: 141852 - RNA, 21 nt, Human
aggaaacgaacuggggccaga

SEQ ID NO: 141853 - RNA, 22 nt, Human
aggaaagagaagugaaucaaag

SEQ ID NO: 141854 - RNA, 19 nt, Human
aggcacaggcagggauggc

SEQ ID NO: 141855 - RNA, 18 nt, Human
aggcagggauggcaugga

SEQ ID NO: 141856 - RNA, 29 nt, Human
aggcagggggaugguuaguagggaggacg

SEQ ID NO: 141857 - RNA, 25 nt, Human
aggcagguuagggggcugcagagcc

SEQ ID NO: 141858 - RNA, 22 nt, Human
aggccuggaggugagaugagcc

SEQ ID NO: 141859 - RNA, 18 nt, Human
aggggcugcugaagcagg

SEQ ID NO: 141860 - RNA, 22 nt, Human
agggggcugcagagccaaucgg

SEQ ID NO: 141861 - RNA, 21 nt, Human
aggggucugaaggaaccagca

SEQ ID NO: 141862 - RNA, 23 nt, Human
aguagagaggggagagggagggc

SEQ ID NO: 141863 - RNA, 23 nt, Human
aguagcugagauuacaggcaggu

SEQ ID NO: 141864 - RNA, 24 nt, Human
agucggacaagacagagucagaga

SEQ ID NO: 141865 - RNA, 24 nt, Human
agugauccaccugucucagccucc

SEQ ID NO: 141866 - RNA, 24 nt, Human
agugcugggauuacagacgugagc

SEQ ID NO: 141867 - RNA, 19 nt, Human
auccaggugagaaaaugcu

SEQ ID NO: 141868 - RNA, 18 nt, Human
aucucacucugucaccca

SEQ ID NO: 141869 - RNA, 22 nt, Human
auggagcugggggaggggcccu

SEQ ID NO: 141870 - RNA, 20 nt, Human
auguuggccaggcuggucuc

SEQ ID NO: 141871 - RNA, 21 nt, Human
auguuggccaggcuggucucg

SEQ ID NO: 141872 - RNA, 20 nt, Human
auugagcaccuacucuacug

SEQ ID NO: 141873 - RNA, 24 nt, Human
auugggggaggaaaaaagaaagaa

SEQ ID NO: 141874 - RNA, 24 nt, Human
auuuuuguauuuuuaguagagaca

SEQ ID NO: 141875 - RNA, 23 nt, Human
caaaaccaccuaacuccaaaucc

SEQ ID NO: 141876 - RNA, 22 nt, Human
caaacccaaaaccaccuaacuc

SEQ ID NO: 141877 - RNA, 22 nt, Human
caaagcccucugcacaccaaaa

SEQ ID NO: 141878 - RNA, 24 nt, Human
caaagugcugggauuacagacgug

SEQ ID NO: 141879 - RNA, 21 nt, Human
caacaaagcccucugcacacc

SEQ ID NO: 141880 - RNA, 27 nt, Human
caacucccaaaauggggguugcagagg

SEQ ID NO: 141881 - RNA, 22 nt, Human
caagugauccaccugucucagc

SEQ ID NO: 141882 - RNA, 22 nt, Human
cacaacaacccugugagguagg

SEQ ID NO: 141883 - RNA, 21 nt, Human
cacaaccaaaaauaguagagc

SEQ ID NO: 141884 - RNA, 23 nt, Human
cacaggcagggauggcauggaaa

SEQ ID NO: 141885 - RNA, 20 nt, Human
caccaaggucauugcugggg

SEQ ID NO: 141886 - RNA, 22 nt, Human
caccccagcccccaaaauaugg

SEQ ID NO: 141887 - RNA, 18 nt, Human
caccgcacccguccaagg

SEQ ID NO: 141888 - RNA, 23 nt, Human
caccugucucagccucccaaagu

SEQ ID NO: 141889 - RNA, 23 nt, Human
cacucugucacccaggcuggagu

SEQ ID NO: 141890 - RNA, 24 nt, Human
cacucugucacccaggcuggagug

SEQ ID NO: 141891 - RNA, 20 nt, Human
cacugugcuaggcacuuuuc

SEQ ID NO: 141892 - RNA, 22 nt, Human
cagcacgcagggcaggcauggg

SEQ ID NO: 141893 - RNA, 20 nt, Human
cagcccccaaaauauggaag

SEQ ID NO: 141894 - RNA, 21 nt, Human
cagcccccaaaauauggaagg

SEQ ID NO: 141895 - RNA, 20 nt, Human
cagccuccugaguagcugag

SEQ ID NO: 141896 - RNA, 21 nt, Human
cagcucggcggcugcuggcgg

SEQ ID NO: 141897 - RNA, 19 nt, Human
caggcagggauggcaugga

SEQ ID NO: 141898 - RNA, 22 nt, Human
caggggaccagccccacaaccu

SEQ ID NO: 141899 - RNA, 24 nt, Human
caggguuuugcuauguuggccagg

SEQ ID NO: 141900 - RNA, 18 nt, Human
cagguaccagacaaagua

SEQ ID NO: 141901 - RNA, 21 nt, Human
caggugagaaaaugcugggga

SEQ ID NO: 141902 - RNA, 20 nt, Human
cauuuuacauacgagggaac

SEQ ID NO: 141903 - RNA, 25 nt, Human
ccaaaaccaccuaacuccaaauccc

SEQ ID NO: 141904 - RNA, 22 nt, Human
ccaaagugcugggauuacagac

SEQ ID NO: 141905 - RNA, 24 nt, Human
ccaaagugcugggauuacagacgu

SEQ ID NO: 141906 - RNA, 19 nt, Human
ccaaccucaacuggccugu

SEQ ID NO: 141907 - RNA, 26 nt, Human
ccaccugucucagccucccaaagugc

SEQ ID NO: 141908 - RNA, 19 nt, Human
ccagccccacaaccuagga

SEQ ID NO: 141909 - RNA, 23 nt, Human
ccagcccugaggcuuaaaugaac

SEQ ID NO: 141910 - RNA, 22 nt, Human
ccagcucccuuguucuccgggg

SEQ ID NO: 141911 - RNA, 20 nt, Human
ccagcucggcggcugcuggc

SEQ ID NO: 141912 - RNA, 23 nt, Human
ccaggaaggggagaaggguguca

SEQ ID NO: 141913 - RNA, 19 nt, Human
ccauagagauguccaguag

SEQ ID NO: 141914 - RNA, 25 nt, Human
cccaaaaccaccuaacuccaaaucc

SEQ ID NO: 141915 - RNA, 25 nt, Human
cccagagacaaaagggguccuggga

SEQ ID NO: 141916 - RNA, 21 nt, Human
cccagcccccaaaauauggaa

SEQ ID NO: 141917 - RNA, 21 nt, Human
cccagcucggcggcugcuggc

SEQ ID NO: 141918 - RNA, 22 nt, Human
cccaugcuccaaugaauuaaag

SEQ ID NO: 141919 - RNA, 19 nt, Human
ccccaaaaccuggagcuaa

SEQ ID NO: 141920 - RNA, 19 nt, Human
ccccacccucgcagcaccc

SEQ ID NO: 141921 - RNA, 24 nt, Human
ccccacccucgcagcacccugcga

SEQ ID NO: 141922 - RNA, 18 nt, Human
ccccacccugcaagccca

SEQ ID NO: 141923 - RNA, 28 nt, Human
ccccagcccccaaaauauggaagccccu

SEQ ID NO: 141924 - RNA, 22 nt, Human
cccccaaaauauggaagcccag

SEQ ID NO: 141925 - RNA, 23 nt, Human
cccgaccucaagugauccaccug

SEQ ID NO: 141926 - RNA, 24 nt, Human
cccgaccucaagugauccaccugu

SEQ ID NO: 141927 - RNA, 22 nt, Human
ccgcccgccgccgccgcggccg

SEQ ID NO: 141928 - RNA, 24 nt, Human
ccgcccgccgccgccgcggccgcg

SEQ ID NO: 141929 - RNA, 22 nt, Human
ccgcggccgcgcuuccgcuccc

SEQ ID NO: 141930 - RNA, 21 nt, Human
ccucggaggcugggccucccc

SEQ ID NO: 141931 - RNA, 22 nt, Human
ccugagacccagcuuaugggcu

SEQ ID NO: 141932 - RNA, 19 nt, Human
ccugaguagcugagauuac

SEQ ID NO: 141933 - RNA, 23 nt, Human
ccugaguagcugagauuacaggc

SEQ ID NO: 141934 - RNA, 24 nt, Human
ccugaguagcugagauuacaggca

SEQ ID NO: 141935 - RNA, 18 nt, Human
ccuuugcugagcccagcc

SEQ ID NO: 141936 - RNA, 20 nt, Human
cgauucuugugccucagccu

SEQ ID NO: 141937 - RNA, 18 nt, Human
cgccgcccgccgccgccg

SEQ ID NO: 141938 - RNA, 26 nt, Human
cgccgcccgccgccgccgcggccgcg

SEQ ID NO: 141939 - RNA, 18 nt, Human
cggcgcggcccagcggcu

SEQ ID NO: 141940 - RNA, 20 nt, Human
cgguaggugcaccccacccu

SEQ ID NO: 141941 - RNA, 23 nt, Human
cucaagugauccaccugucucag

SEQ ID NO: 141942 - RNA, 21 nt, Human
cucacagaaagucaaacagcc

SEQ ID NO: 141943 - RNA, 24 nt, Human
cucacucugucacccaggcuggag

SEQ ID NO: 141944 - RNA, 28 nt, Human
cucacugcaaccuccgcuugcuuccugg

SEQ ID NO: 141945 - RNA, 20 nt, Human
cucacuuuugacaccccagc

SEQ ID NO: 141946 - RNA, 20 nt, Human
cucccagaaggcaggcaaga

SEQ ID NO: 141947 - RNA, 20 nt, Human
cuccgggggcuaccgggucc

SEQ ID NO: 141948 - RNA, 23 nt, Human
cucgcagcacccugcgagcaguu

SEQ ID NO: 141949 - RNA, 18 nt, Human
cugaguagcugagauuac

SEQ ID NO: 141950 - RNA, 23 nt, Human
cugaguagcugagauuacaggca

SEQ ID NO: 141951 - RNA, 23 nt, Human
cugauaagauaugggaagaagga

SEQ ID NO: 141952 - RNA, 22 nt, Human
cugcaaccuccgcuugcuuccu

SEQ ID NO: 141953 - RNA, 21 nt, Human
cugcaagcccacgccucuugc

SEQ ID NO: 141954 - RNA, 23 nt, Human
cugcaagcccacgccucuugcac

SEQ ID NO: 141955 - RNA, 23 nt, Human
cugcagagccaaucgguaggugc

SEQ ID NO: 141956 - RNA, 23 nt, Human
cugcuggcggcgccagcucccuu

SEQ ID NO: 141957 - RNA, 23 nt, Human
cuggaauucaaacccaaaaccac

SEQ ID NO: 141958 - RNA, 20 nt, Human
cuggcgaccgcgacucuucc

SEQ ID NO: 141959 - RNA, 18 nt, Human
cuggucccagagacaaaa

SEQ ID NO: 141960 - RNA, 23 nt, Human
cugucucagccucccaaagugcu

SEQ ID NO: 141961 - RNA, 24 nt, Human
cugucucagccucccaaagugcug

SEQ ID NO: 141962 - RNA, 22 nt, Human
cuugccgccgcgacuccucuug

SEQ ID NO: 141963 - RNA, 25 nt, Human
cuugugccucagccuccugaguagc

SEQ ID NO: 141964 - RNA, 20 nt, Human
gaaagucaaacagcccgaaa

SEQ ID NO: 141965 - RNA, 24 nt, Human
gaccucaagugauccaccugucuc

SEQ ID NO: 141966 - RNA, 20 nt, Human
gagagaacacauuccccgga

SEQ ID NO: 141967 - RNA, 24 nt, Human
gagaggaacgcagccggcuggggu

SEQ ID NO: 141968 - RNA, 18 nt, Human
gagcaguuagcgcaccug

SEQ ID NO: 141969 - RNA, 26 nt, Human
gaguagcugagauuacaggcaggugc

SEQ ID NO: 141970 - RNA, 22 nt, Human
gaugccauggugaaugugaaaa

SEQ ID NO: 141971 - RNA, 18 nt, Human
gauuacagacgugagcca

SEQ ID NO: 141972 - RNA, 23 nt, Human
gauuacagacgugagccaccgca

SEQ ID NO: 141973 - RNA, 21 nt, Human
gauucuugugccucagccucc

SEQ ID NO: 141974 - RNA, 29 nt, Human
gauuuaguuccuuuuauuucccuuucagg

SEQ ID NO: 141975 - RNA, 20 nt, Human
gcacaccaaaaccccaggaa

SEQ ID NO: 141976 - RNA, 23 nt, Human
gcagcacccugcgagcaguuagc

SEQ ID NO: 141977 - RNA, 20 nt, Human
gcagggcaggcauggggcag

SEQ ID NO: 141978 - RNA, 20 nt, Human
gcccugaggcuuaaaugaac

SEQ ID NO: 141979 - RNA, 24 nt, Human
gcgauucuugugccucagccuccu

SEQ ID NO: 141980 - RNA, 20 nt, Human
gcuauguuggccaggcuggu

SEQ ID NO: 141981 - RNA, 22 nt, Human
gcuauuggaggcgacuacagcu

SEQ ID NO: 141982 - RNA, 23 nt, Human
gcuggucucgaacucccgaccuc

SEQ ID NO: 141983 - RNA, 23 nt, Human
ggagacucacgggaaaguggacg

SEQ ID NO: 141984 - RNA, 18 nt, Human
ggagguuguguguggggg

SEQ ID NO: 141985 - RNA, 18 nt, Human
ggaugguuaguaggggca

SEQ ID NO: 141986 - RNA, 23 nt, Human
gggaagcccugaggggcugcuga

SEQ ID NO: 141987 - RNA, 22 nt, Human
gggaauggccugucgguugcaa

SEQ ID NO: 141988 - RNA, 21 nt, Human
gggcagggaccagcccugagg

SEQ ID NO: 141989 - RNA, 18 nt, Human
ggggaugguuaguagggg

SEQ ID NO: 141990 - RNA, 22 nt, Human
ggguuuugcuauguuggccagg

SEQ ID NO: 141991 - RNA, 19 nt, Human
gguagcaccaacaagucug

SEQ ID NO: 141992 - RNA, 19 nt, Human
gguugggcagaugaguuga

SEQ ID NO: 141993 - RNA, 23 nt, Human
guagagacaggguuuugcuaugu

SEQ ID NO: 141994 - RNA, 25 nt, Human
guagagcuggaauucaaacccaaaa

SEQ ID NO: 141995 - RNA, 18 nt, Human
gugauccaccugucucag

SEQ ID NO: 141996 - RNA, 24 nt, Human
gugauccaccugucucagccuccc

SEQ ID NO: 141997 - RNA, 22 nt, Human
gugccucagccuccugaguagc

SEQ ID NO: 141998 - RNA, 19 nt, Human
gugggcuccuguguccuug

SEQ ID NO: 141999 - RNA, 20 nt, Human
guugcagacugaggcagcag

SEQ ID NO: 142000 - RNA, 19 nt, Human
uaaauccucacaacaaccc

SEQ ID NO: 142001 - RNA, 22 nt, Human
uaaaugaacuugcauaggcacc

SEQ ID NO: 142002 - RNA, 24 nt, Human
uaauuuuuguauuuuuaguagaga

SEQ ID NO: 142003 - RNA, 23 nt, Human
uacagacgugagccaccgcaccc

SEQ ID NO: 142004 - RNA, 21 nt, Human
uacaggcaggugccaaaacac

SEQ ID NO: 142005 - RNA, 21 nt, Human
uaccgggucccagcgccgccc

SEQ ID NO: 142006 - RNA, 20 nt, Human
uacugugugccaggcacugu

SEQ ID NO: 142007 - RNA, 23 nt, Human
uacugugugccaggcacugugcu

SEQ ID NO: 142008 - RNA, 24 nt, Human
uacugugugccaggcacugugcua

SEQ ID NO: 142009 - RNA, 22 nt, Human
uagagacaggguuuugcuaugu

SEQ ID NO: 142010 - RNA, 24 nt, Human
uagagcuggaauucaaacccaaaa

SEQ ID NO: 142011 - RNA, 23 nt, Human
uagauugugaugaaguaaccagg

SEQ ID NO: 142012 - RNA, 24 nt, Human
uaguagagacaggguuuugcuaug

SEQ ID NO: 142013 - RNA, 24 nt, Human
uaguagagcuggaauucaaaccca

SEQ ID NO: 142014 - RNA, 21 nt, Human
uaguuugcuuuugagacagaa

SEQ ID NO: 142015 - RNA, 21 nt, Human
uauacggaacuguccauagag

SEQ ID NO: 142016 - RNA, 22 nt, Human
uauagcagaggcuuaaagagaa

SEQ ID NO: 142017 - RNA, 19 nt, Human
uaucagcagcaauugagga

SEQ ID NO: 142018 - RNA, 21 nt, Human
uauggaagcccaggagagcca

SEQ ID NO: 142019 - RNA, 21 nt, Human
uauguuggccaggcuggucuc

SEQ ID NO: 142020 - RNA, 24 nt, Human
uauguuggccaggcuggucucgaa

SEQ ID NO: 142021 - RNA, 23 nt, Human
ucaaacagcccgaaauucuuggc

SEQ ID NO: 142022 - RNA, 18 nt, Human
ucaagagagucggacaag

SEQ ID NO: 142023 - RNA, 22 nt, Human
ucaagugauccaccugucucag

SEQ ID NO: 142024 - RNA, 22 nt, Human
ucacccaggcuggagugcgauc

SEQ ID NO: 142025 - RNA, 24 nt, Human
ucacucugucacccaggcuggagu

SEQ ID NO: 142026 - RNA, 19 nt, Human
ucacugcaaccuccgcuug

SEQ ID NO: 142027 - RNA, 20 nt, Human
ucacugcaaccuccgcuugc

SEQ ID NO: 142028 - RNA, 26 nt, Human
ucacugcaaccuccgcuuggggcccu

SEQ ID NO: 142029 - RNA, 28 nt, Human
ucacugcaaccuccgcuuggggcccucc

SEQ ID NO: 142030 - RNA, 26 nt, Human
ucacugcaaccuccgcuugggguacu

SEQ ID NO: 142031 - RNA, 26 nt, Human
ucacugcaaccuccgcuugggguccu

SEQ ID NO: 142032 - RNA, 28 nt, Human
ucacugcaaccuccgcuugggguccucc

SEQ ID NO: 142033 - RNA, 25 nt, Human
ucacugcaaccuccgcuuggggucu

SEQ ID NO: 142034 - RNA, 20 nt, Human
ucccaaaauggggguugcag

SEQ ID NO: 142035 - RNA, 18 nt, Human
ucccaaagugcugggauu

SEQ ID NO: 142036 - RNA, 24 nt, Human
ucccaaagugcugggauuacagac

SEQ ID NO: 142037 - RNA, 21 nt, Human
ucccagagacaaaaggggucc

SEQ ID NO: 142038 - RNA, 23 nt, Human
uccccagaagccuagugacucau

SEQ ID NO: 142039 - RNA, 22 nt, Human
uccccagaagccuagugacucu

SEQ ID NO: 142040 - RNA, 23 nt, Human
ucccuggaagccaccagcugcuc

SEQ ID NO: 142041 - RNA, 24 nt, Human
uccugaguagcugagauuacaggc

SEQ ID NO: 142042 - RNA, 21 nt, Human
uccuggauucaagcgauucuu

SEQ ID NO: 142043 - RNA, 22 nt, Human
uccuggauucaagcgauucuug

SEQ ID NO: 142044 - RNA, 23 nt, Human
uccuugggaagcccugaggggcu

SEQ ID NO: 142045 - RNA, 20 nt, Human
ucgcugggggcucacagaaa

SEQ ID NO: 142046 - RNA, 19 nt, Human
ucggacaagacagagucag

SEQ ID NO: 142047 - RNA, 23 nt, Human
ucucacucugucacccaggcugg

SEQ ID NO: 142048 - RNA, 24 nt, Human
ucucacucugucacccaggcugga

SEQ ID NO: 142049 - RNA, 22 nt, Human
ucugcacaccaaaaccccagga

SEQ ID NO: 142050 - RNA, 24 nt, Human
ucugucacccaggcuggagugcga

SEQ ID NO: 142051 - RNA, 24 nt, Human
ugaaauaaaugccaaaauguuccu

SEQ ID NO: 142052 - RNA, 24 nt, Human
ugaaauggauaugauaugcugaua

SEQ ID NO: 142053 - RNA, 23 nt, Human
ugaauuaaaguagagaggggaga

SEQ ID NO: 142054 - RNA, 22 nt, Human
ugagacagaaucucacucuguc

SEQ ID NO: 142055 - RNA, 19 nt, Human
ugagagaacacauuccccg

SEQ ID NO: 142056 - RNA, 19 nt, Human
ugagauuacaggcaggugc

SEQ ID NO: 142057 - RNA, 21 nt, Human
ugagauuacaggcaggugcca

SEQ ID NO: 142058 - RNA, 19 nt, Human
ugagccugcugguuaguag

SEQ ID NO: 142059 - RNA, 19 nt, Human
ugagggagugagcgugcca

SEQ ID NO: 142060 - RNA, 22 nt, Human
ugagggagugagcgugccacca

SEQ ID NO: 142061 - RNA, 22 nt, Human
ugaguugagucuauacggaacu

SEQ ID NO: 142062 - RNA, 22 nt, Human
ugcaagcccacgccucuugcac

SEQ ID NO: 142063 - RNA, 21 nt, Human
ugcacacgugccugauggggu

SEQ ID NO: 142064 - RNA, 21 nt, Human
ugcacaucucaccuggguacu

SEQ ID NO: 142065 - RNA, 22 nt, Human
ugccucagccuccugaguagcu

SEQ ID NO: 142066 - RNA, 24 nt, Human
ugccucagccuccugaguagcuga

SEQ ID NO: 142067 - RNA, 22 nt, Human
ugcugagcccagccugagaccc

SEQ ID NO: 142068 - RNA, 24 nt, Human
ugcugggauuacagacgugagcca

SEQ ID NO: 142069 - RNA, 19 nt, Human
uggaagcacugauacugac

SEQ ID NO: 142070 - RNA, 20 nt, Human
uggaagcccaggagagccaa

SEQ ID NO: 142071 - RNA, 19 nt, Human
uggaauucaaacccaaaac

SEQ ID NO: 142072 - RNA, 21 nt, Human
uggaauucaaacccaaaacca

SEQ ID NO: 142073 - RNA, 22 nt, Human
uggagcuaagaacuucaucuca

SEQ ID NO: 142074 - RNA, 18 nt, Human
uggagcugggggaggggc

SEQ ID NO: 142075 - RNA, 23 nt, Human
uggccaggcuggucucgaacucc

SEQ ID NO: 142076 - RNA, 21 nt, Human
uggccugugggcuccuguguc

SEQ ID NO: 142077 - RNA, 23 nt, Human
uggccugugggcuccuguguccu

SEQ ID NO: 142078 - RNA, 20 nt, Human
uggcggcgccagcucccuug

SEQ ID NO: 142079 - RNA, 23 nt, Human
uggcuagaagccauggacugggu

SEQ ID NO: 142080 - RNA, 20 nt, Human
ugggagcggaauggagcugg

SEQ ID NO: 142081 - RNA, 21 nt, Human
ugggagcggaauggagcuggg

SEQ ID NO: 142082 - RNA, 19 nt, Human
ugggaugccauggugaaug

SEQ ID NO: 142083 - RNA, 22 nt, Human
ugggaugccauggugaauguga

SEQ ID NO: 142084 - RNA, 18 nt, Human
ugggauuacagacgugag

SEQ ID NO: 142085 - RNA, 19 nt, Human
ugggauuacagacgugagc

SEQ ID NO: 142086 - RNA, 21 nt, Human
ugggauuacagacgugagcca

SEQ ID NO: 142087 - RNA, 22 nt, Human
ugggauuacagacgugagccac

SEQ ID NO: 142088 - RNA, 23 nt, Human
ugggauuacagacgugagccacc

SEQ ID NO: 142089 - RNA, 24 nt, Human
ugggauuacagacgugagccaccg

SEQ ID NO: 142090 - RNA, 27 nt, Human
ugggcagaugaguugagucgaacguuu

SEQ ID NO: 142091 - RNA, 22 nt, Human
uggggccagaggcagguuaggg

SEQ ID NO: 142092 - RNA, 20 nt, Human
ugggggcucacagaaaguca

SEQ ID NO: 142093 - RNA, 19 nt, Human
ugggggugggaauggccug

SEQ ID NO: 142094 - RNA, 19 nt, Human
uggggguugcagaggggag

SEQ ID NO: 142095 - RNA, 20 nt, Human
ugggguaaagucaagagguu

SEQ ID NO: 142096 - RNA, 18 nt, Human
uggggugggagcggaaug

SEQ ID NO: 142097 - RNA, 23 nt, Human
uggggugggagcggaauggagcu

SEQ ID NO: 142098 - RNA, 19 nt, Human
uggucucgaacucccgacc

SEQ ID NO: 142099 - RNA, 19 nt, Human
ugguuucaguaaugugggg

SEQ ID NO: 142100 - RNA, 22 nt, Human
uguccaguagguaauaccaaua

SEQ ID NO: 142101 - RNA, 24 nt, Human
ugucucagccucccaaagugcugg

SEQ ID NO: 142102 - RNA, 21 nt, Human
ugucuggaaguccuggaaguc

SEQ ID NO: 142103 - RNA, 18 nt, Human
ugugcauguaugcauaca

SEQ ID NO: 142104 - RNA, 18 nt, Human
ugugggggcuggacaucc

SEQ ID NO: 142105 - RNA, 25 nt, Human
uuaaauaacucuaucacacaaccaa

SEQ ID NO: 142106 - RNA, 18 nt, Human
uuaguagagacaggguuu

SEQ ID NO: 142107 - RNA, 24 nt, Human
uuaguagagacaggguuuugcuau

SEQ ID NO: 142108 - RNA, 23 nt, Human
uucaagcgauucuugugccucag

SEQ ID NO: 142109 - RNA, 23 nt, Human
uuuugcuauguuggccaggcugg

SEQ ID NO: 142110 - RNA, 21 nt, Human
uuuuuaguagagacaggguuu

SEQ ID NO: 142111 - RNA, 21 nt, Human
uuuuuaguagagacaggguuu

SEQ ID NO: 142112 - RNA, 20 nt, Human
uuuuuguauuuuuaguagag

SEQ ID NO: 142113 - RNA, 18 nt, Human
aacaaggagugcucauca

SEQ ID NO: 142114 - RNA, 24 nt, Human
aacuccaaucucaggaggcuaaaa

SEQ ID NO: 142115 - RNA, 25 nt, Human
acauaucuacauacauaugcauaca

SEQ ID NO: 142116 - RNA, 23 nt, Human
acauguacauucacuuuaucaca

SEQ ID NO: 142117 - RNA, 22 nt, Human
agacugggacaaaccaacaugg

SEQ ID NO: 142118 - RNA, 21 nt, Human
agaugaggugggugacgggcu

SEQ ID NO: 142119 - RNA, 21 nt, Human
agcaguguggaccaugagagu

SEQ ID NO: 142120 - RNA, 20 nt, Human
agcauuaaaagugcagacau

SEQ ID NO: 142121 - RNA, 23 nt, Human
agggaaaugguaagauguuacaa

SEQ ID NO: 142122 - RNA, 22 nt, Human
aggugggugacgggcugcgggg

SEQ ID NO: 142123 - RNA, 23 nt, Human
aguauauauuuuacauauacaug

SEQ ID NO: 142124 - RNA, 23 nt, Human
auacaugcaugcauaugucuaca

SEQ ID NO: 142125 - RNA, 25 nt, Human
auauacaugcaugcauaugucuaca

SEQ ID NO: 142126 - RNA, 25 nt, Human
auauacaugcaugcauaugucuaca

SEQ ID NO: 142127 - RNA, 24 nt, Human
aucaaaaacaggacuuucccacuc

SEQ ID NO: 142128 - RNA, 18 nt, Human
augaggaaagauccagag

SEQ ID NO: 142129 - RNA, 24 nt, Human
caaauucuauuucuauccaaaaag

SEQ ID NO: 142130 - RNA, 19 nt, Human
caacaucaaucaauagcca

SEQ ID NO: 142131 - RNA, 22 nt, Human
caacaugggauggaaacuccaa

SEQ ID NO: 142132 - RNA, 23 nt, Human
caaggacaucaaagggcagaggc

SEQ ID NO: 142133 - RNA, 30 nt, Human
cauacauaugcauacauaaagcauauagug

SEQ ID NO: 142134 - RNA, 22 nt, Human
caucaaaaacaggacuuuccca

SEQ ID NO: 142135 - RNA, 23 nt, Human
ccaaaaguguuccugggcacuga

SEQ ID NO: 142136 - RNA, 24 nt, Human
ccccuaggaagggcugagccacaa

SEQ ID NO: 142137 - RNA, 21 nt, Human
cucaaggacaucaaagggcag

SEQ ID NO: 142138 - RNA, 20 nt, Human
cucaggaggcuaaaaucaca

SEQ ID NO: 142139 - RNA, 19 nt, Human
cuccaucagcuugacuucu

SEQ ID NO: 142140 - RNA, 20 nt, Human
gacugcaaaccaggcagaac

SEQ ID NO: 142141 - RNA, 21 nt, Human
gagcauuaaaagugcagacau

SEQ ID NO: 142142 - RNA, 21 nt, Human
gcaaaccaggcagaacuacca

SEQ ID NO: 142143 - RNA, 19 nt, Human
gcugggggcggaagacuga

SEQ ID NO: 142144 - RNA, 18 nt, Human
ggaaagauccagagacau

SEQ ID NO: 142145 - RNA, 23 nt, Human
ggcugggggcggaagacugaggc

SEQ ID NO: 142146 - RNA, 23 nt, Human
gggcggaagacugaggcccuccc

SEQ ID NO: 142147 - RNA, 28 nt, Human
gguguguguguauauacauguacauuuc

SEQ ID NO: 142148 - RNA, 21 nt, Human
guggaccaugagagugggcug

SEQ ID NO: 142149 - RNA, 20 nt, Human
uaagaggagcauuaaaagug

SEQ ID NO: 142150 - RNA, 22 nt, Human
uacauauacaugcaugcauaug

SEQ ID NO: 142151 - RNA, 20 nt, Human
uaccugcauauuaccaaacu

SEQ ID NO: 142152 - RNA, 22 nt, Human
uaggaagggcugagccacaaug

SEQ ID NO: 142153 - RNA, 28 nt, Human
uauaaacauaucuacauacauaugcaua

SEQ ID NO: 142154 - RNA, 24 nt, Human
uauauggagguguguguguauaua

SEQ ID NO: 142155 - RNA, 24 nt, Human
uaucuacauacauaugcauacaua

SEQ ID NO: 142156 - RNA, 27 nt, Human
ucaaaaacaggacuuucccacucagac

SEQ ID NO: 142157 - RNA, 23 nt, Human
ucaaugaggaaagauccagagac

SEQ ID NO: 142158 - RNA, 25 nt, Human
ucaaugucugauaaauuauuccaaa

SEQ ID NO: 142159 - RNA, 24 nt, Human
ucacuccaccacacgcacacauac

SEQ ID NO: 142160 - RNA, 21 nt, Human
uccaccacacgcacacauaca

SEQ ID NO: 142161 - RNA, 20 nt, Human
ucccacucagacugcaaacc

SEQ ID NO: 142162 - RNA, 22 nt, Human
ucccccagcaguguggaccaug

SEQ ID NO: 142163 - RNA, 19 nt, Human
ugagaugguaauucaaguu

SEQ ID NO: 142164 - RNA, 22 nt, Human
ugaggaaagauccagagacauu

SEQ ID NO: 142165 - RNA, 19 nt, Human
ugaguaaaucuauaaaagc

SEQ ID NO: 142166 - RNA, 24 nt, Human
ugauaaauuauuccaaaaguguuc

SEQ ID NO: 142167 - RNA, 19 nt, Human
ugauacacacauguauaua

SEQ ID NO: 142168 - RNA, 21 nt, Human
ugauacacacauguauauaug

SEQ ID NO: 142169 - RNA, 27 nt, Human
ugcauacauaaagcauauacuuauaug

SEQ ID NO: 142170 - RNA, 19 nt, Human
ugcauaugucuacauacau

SEQ ID NO: 142171 - RNA, 32 nt, Human
ugcaugcauaugucuacauacauaugcauggu

SEQ ID NO: 142172 - RNA, 23 nt, Human
uggcacagagucagucaaugagg

SEQ ID NO: 142173 - RNA, 19 nt, Human
ugggauugaagaguugcug

SEQ ID NO: 142174 - RNA, 19 nt, Human
ugggcugggggcggaagac

SEQ ID NO: 142175 - RNA, 20 nt, Human
ugggugacgggcugcggggg

SEQ ID NO: 142176 - RNA, 22 nt, Human
uguauauauggaggugugugug

SEQ ID NO: 142177 - RNA, 28 nt, Human
uguauauauggagguguguguguauaua

SEQ ID NO: 142178 - RNA, 22 nt, Human
ugucuacauacauaugcaugua

SEQ ID NO: 142179 - RNA, 19 nt, Human
uguguguauauacauguac

SEQ ID NO: 142180 - RNA, 20 nt, Human
uguguguauauacauguaca

SEQ ID NO: 142181 - RNA, 24 nt, Human
uuagggaaaugguaagauguuaca

SEQ ID NO: 142182 - RNA, 22 nt, Human
uuauaugcauacacaguuuaca

SEQ ID NO: 142183 - RNA, 23 nt, Human
uucacagacaaucacuccaccac

SEQ ID NO: 142184 - RNA, 19 nt, Human
uuccugggcacugagacuc

SEQ ID NO: 142185 - RNA, 20 nt, Human
aaaaguaccauccucccaca

SEQ ID NO: 142186 - RNA, 22 nt, Human
aaacagauuuaggauuuaagac

SEQ ID NO: 142187 - RNA, 18 nt, Human
aaagaguaaaagaagaaa

SEQ ID NO: 142188 - RNA, 20 nt, Human
aaauacauauguagucgaua

SEQ ID NO: 142189 - RNA, 23 nt, Human
aaauacauauguagucgauacaa

SEQ ID NO: 142190 - RNA, 20 nt, Human
aaauccuuccucuccuaccu

SEQ ID NO: 142191 - RNA, 19 nt, Human
aaccuauccuccuccauuu

SEQ ID NO: 142192 - RNA, 23 nt, Human
aaggacacaacaguucaccaaaa

SEQ ID NO: 142193 - RNA, 24 nt, Human
aauacaauugagucaugauagauu

SEQ ID NO: 142194 - RNA, 23 nt, Human
aauccuuccucuccuaccuaguu

SEQ ID NO: 142195 - RNA, 21 nt, Human
aaugauuccuuaucaccuaag

SEQ ID NO: 142196 - RNA, 23 nt, Human
acaacaguucaccaaaaaugauu

SEQ ID NO: 142197 - RNA, 20 nt, Human
acccaaaucucaucuugaag

SEQ ID NO: 142198 - RNA, 23 nt, Human
accuagugaauaaguggacauaa

SEQ ID NO: 142199 - RNA, 22 nt, Human
acucaacgccauuccgccacca

SEQ ID NO: 142200 - RNA, 21 nt, Human
agaaccuauccuccuccauuu

SEQ ID NO: 142201 - RNA, 21 nt, Human
agagauccgaugguuuuauaa

SEQ ID NO: 142202 - RNA, 23 nt, Human
agugugaaaauggacuaauacac

SEQ ID NO: 142203 - RNA, 18 nt, Human
auggaaccuaaguggugg

SEQ ID NO: 142204 - RNA, 23 nt, Human
auuaaauugguuugucucuaacu

SEQ ID NO: 142205 - RNA, 22 nt, Human
caaaaagaggccaucguuggug

SEQ ID NO: 142206 - RNA, 18 nt, Human
cacccaaaucucaucuug

SEQ ID NO: 142207 - RNA, 21 nt, Human
cacgucaagaucaugccacaa

SEQ ID NO: 142208 - RNA, 22 nt, Human
cagcagugugaaaauggacuaa

SEQ ID NO: 142209 - RNA, 19 nt, Human
ccagagcuacagggacaca

SEQ ID NO: 142210 - RNA, 21 nt, Human
cccaaagaaccuauccuccuc

SEQ ID NO: 142211 - RNA, 21 nt, Human
cccugcacaaguuuucuucuc

SEQ ID NO: 142212 - RNA, 24 nt, Human
cccugcacaaguuuucuucucuug

SEQ ID NO: 142213 - RNA, 18 nt, Human
ccgcgagccggcccagga

SEQ ID NO: 142214 - RNA, 24 nt, Human
cggcccaggaaaguccugcggcag

SEQ ID NO: 142215 - RNA, 23 nt, Human
cgucaagaucaugccacauauuc

SEQ ID NO: 142216 - RNA, 20 nt, Human
cuauccuccuccauuuuuuu

SEQ ID NO: 142217 - RNA, 22 nt, Human
cucaaauccuuccucuccuacc

SEQ ID NO: 142218 - RNA, 26 nt, Human
cucaagagauccgaugguuuuauaaa

SEQ ID NO: 142219 - RNA, 22 nt, Human
cucuccuaccuaguuccuucag

SEQ ID NO: 142220 - RNA, 21 nt, Human
gagaaccauaaaauugacuca

SEQ ID NO: 142221 - RNA, 23 nt, Human
gagaaucuauccacuucauguca

SEQ ID NO: 142222 - RNA, 20 nt, Human
gagccggcccaggaaagucc

SEQ ID NO: 142223 - RNA, 20 nt, Human
gagggacccagugggaggua

SEQ ID NO: 142224 - RNA, 24 nt, Human
gagguaacugaaucauggaggcag

SEQ ID NO: 142225 - RNA, 26 nt, Human
gcaaaaccucauaaaaaccgggacgu

SEQ ID NO: 142226 - RNA, 19 nt, Human
gcccauacacaaguccuca

SEQ ID NO: 142227 - RNA, 26 nt, Human
ggacuaauacacaaaccuuuguuccu

SEQ ID NO: 142228 - RNA, 18 nt, Human
ggcgagagagagagagag

SEQ ID NO: 142229 - RNA, 18 nt, Human
gucccuuuaaccagaugg

SEQ ID NO: 142230 - RNA, 27 nt, Human
uaaaaagaaaaguaccauccucccacu

SEQ ID NO: 142231 - RNA, 23 nt, Human
uaaaagaagaaaugcgugacaau

SEQ ID NO: 142232 - RNA, 25 nt, Human
uaaaggacacaacaguucaccaaaa

SEQ ID NO: 142233 - RNA, 22 nt, Human
uaaguaauaauucaaauauuaa

SEQ ID NO: 142234 - RNA, 23 nt, Human
uacaacgugauuuaaaaaugaga

SEQ ID NO: 142235 - RNA, 26 nt, Human
uaccuagugaauaaguggacauaaca

SEQ ID NO: 142236 - RNA, 18 nt, Human
uagaaacuuccaucaaaa

SEQ ID NO: 142237 - RNA, 19 nt, Human
uagcacaaugcagccccgg

SEQ ID NO: 142238 - RNA, 27 nt, Human
uagcacaaugcagccccgggacacuuc

SEQ ID NO: 142239 - RNA, 23 nt, Human
uaggcuucuggauaucugccccu

SEQ ID NO: 142240 - RNA, 19 nt, Human
ucaaaggaagggguaagga

SEQ ID NO: 142241 - RNA, 20 nt, Human
ucaauuuacccaaagaaccu

SEQ ID NO: 142242 - RNA, 22 nt, Human
ucacggaaacacccaugcuuca

SEQ ID NO: 142243 - RNA, 19 nt, Human
ucagaaaguaaaaaaccug

SEQ ID NO: 142244 - RNA, 19 nt, Human
ucagcagugugaaaaugga

SEQ ID NO: 142245 - RNA, 18 nt, Human
uccauggaaccuaagugg

SEQ ID NO: 142246 - RNA, 21 nt, Human
ucccacaauugccacacguug

SEQ ID NO: 142247 - RNA, 23 nt, Human
ucccugcacaaguuuucuucucu

SEQ ID NO: 142248 - RNA, 21 nt, Human
uccguguugaacgagucccuu

SEQ ID NO: 142249 - RNA, 24 nt, Human
ucgauacaagauacuucaaaaaag

SEQ ID NO: 142250 - RNA, 27 nt, Human
ucuccuaaacuggggugggguuuaggg

SEQ ID NO: 142251 - RNA, 26 nt, Human
ucuugucugcugccaugucgucgucg

SEQ ID NO: 142252 - RNA, 23 nt, Human
ugaaaugaucaaaggaaggggua

SEQ ID NO: 142253 - RNA, 22 nt, Human
ugaguugccuauuucucaaauc

SEQ ID NO: 142254 - RNA, 19 nt, Human
uggacuaauacacaaaccu

SEQ ID NO: 142255 - RNA, 18 nt, Human
ugggagggacccaguggg

SEQ ID NO: 142256 - RNA, 20 nt, Human
ugggagguaacugaaucaug

SEQ ID NO: 142257 - RNA, 20 nt, Human
uggggugggguuuaggggag

SEQ ID NO: 142258 - RNA, 23 nt, Human
uuaaaacugaaaauuuaccuagu

SEQ ID NO: 142259 - RNA, 24 nt, Human
uuaaaggacacaacaguucaccaa

SEQ ID NO: 142260 - RNA, 26 nt, Human
uuacuaggcuacuugguucuuugugu

SEQ ID NO: 142261 - RNA, 21 nt, Human
uucaaagaguaaaagaagaaa

SEQ ID NO: 142262 - RNA, 18 nt, Human
uucccaugcuauucucau

SEQ ID NO: 142263 - RNA, 25 nt, Human
uuccuucaguuccagagcuacaggg

SEQ ID NO: 142264 - RNA, 25 nt, Human
uuucucagcagugugaaaauggacu

SEQ ID NO: 142265 - RNA, 22 nt, Human
uuugcagcuuaaauuucuucaa

SEQ ID NO: 142266 - RNA, 20 nt, Human
uuugcauuauaaacuuuuau

SEQ ID NO: 142267 - RNA, 24 nt, Human
uuuggcuguguccccacccaaauc

SEQ ID NO: 142268 - RNA, 19 nt, Human
aaaacaaguuugcagccug

SEQ ID NO: 142269 - RNA, 18 nt, Human
aaacauuccaaguaaaaa

SEQ ID NO: 142270 - RNA, 21 nt, Human
aaagugaauguuuuugaagga

SEQ ID NO: 142271 - RNA, 21 nt, Human
aacagcuucuuaaaaaaacca

SEQ ID NO: 142272 - RNA, 20 nt, Human
aagcagacacagaaaucccc

SEQ ID NO: 142273 - RNA, 22 nt, Human
acacagccggacgacacggucu

SEQ ID NO: 142274 - RNA, 19 nt, Human
acagcuucuuaaaaaaacc

SEQ ID NO: 142275 - RNA, 23 nt, Human
accauaaaaaugcaaacuggaau

SEQ ID NO: 142276 - RNA, 23 nt, Human
agcgugguggcgcucacacagcc

SEQ ID NO: 142277 - RNA, 19 nt, Human
agcucggccuccugcagcc

SEQ ID NO: 142278 - RNA, 25 nt, Human
aggaaugcaggagaggaccgguacc

SEQ ID NO: 142279 - RNA, 19 nt, Human
aggcgugcuucuugugggg

SEQ ID NO: 142280 - RNA, 26 nt, Human
auccuuguaggcgugcuucuuguggg

SEQ ID NO: 142281 - RNA, 18 nt, Human
augcagcagcucugccau

SEQ ID NO: 142282 - RNA, 19 nt, Human
caagcucccgccgucccuc

SEQ ID NO: 142283 - RNA, 23 nt, Human
cacagccaugagguaaggacugg

SEQ ID NO: 142284 - RNA, 24 nt, Human
cacgcccagcucgucgugugugug

SEQ ID NO: 142285 - RNA, 19 nt, Human
cagacacagaaauccccgu

SEQ ID NO: 142286 - RNA, 23 nt, Human
cagcgcgcgcuccuucuccuccu

SEQ ID NO: 142287 - RNA, 20 nt, Human
cagcucgucguguguguggc

SEQ ID NO: 142288 - RNA, 22 nt, Human
cauuaaagcuaucggaucaagu

SEQ ID NO: 142289 - RNA, 25 nt, Human
ccaaguacgcugcggugguaaagac

SEQ ID NO: 142290 - RNA, 24 nt, Human
ccacacacacuaaccuuuacuaga

SEQ ID NO: 142291 - RNA, 22 nt, Human
ccagcgcgcgcuccuucuccuu

SEQ ID NO: 142292 - RNA, 18 nt, Human
ccagugugacuauggugg

SEQ ID NO: 142293 - RNA, 22 nt, Human
cccaaacugcacuuccugauca

SEQ ID NO: 142294 - RNA, 22 nt, Human
ccccuccgcucccggcuccgcu

SEQ ID NO: 142295 - RNA, 19 nt, Human
cccgccuggcccggcuccc

SEQ ID NO: 142296 - RNA, 18 nt, Human
cccggacaggccgugggg

SEQ ID NO: 142297 - RNA, 23 nt, Human
cccggccccggcccuugcugggc

SEQ ID NO: 142298 - RNA, 19 nt, Human
cccguagcuucacagccau

SEQ ID NO: 142299 - RNA, 20 nt, Human
cccgugcaccuccuaggccg

SEQ ID NO: 142300 - RNA, 22 nt, Human
cccgugcaccuccuaggccgug

SEQ ID NO: 142301 - RNA, 21 nt, Human
ccgccgccgccgcuggcccaa

SEQ ID NO: 142302 - RNA, 19 nt, Human
ccgccgccgcuccuccugc

SEQ ID NO: 142303 - RNA, 20 nt, Human
ccgccgccgcuggcccaagc

SEQ ID NO: 142304 - RNA, 18 nt, Human
ccgcuggcccaagcuccc

SEQ ID NO: 142305 - RNA, 24 nt, Human
ccuccacgcgccgcagcucggccu

SEQ ID NO: 142306 - RNA, 23 nt, Human
ccucccguccucccugcugcugg

SEQ ID NO: 142307 - RNA, 18 nt, Human
ccucccugcugcuggccc

SEQ ID NO: 142308 - RNA, 25 nt, Human
ccuccggugccugucuuugcugugg

SEQ ID NO: 142309 - RNA, 22 nt, Human
ccuccugcagccgccgccgcuc

SEQ ID NO: 142310 - RNA, 20 nt, Human
ccuccuucugcuccuguucc

SEQ ID NO: 142311 - RNA, 19 nt, Human
ccugaaaucuguuugaaac

SEQ ID NO: 142312 - RNA, 19 nt, Human
ccuugcauggggccuccuc

SEQ ID NO: 142313 - RNA, 21 nt, Human
cgcagcucggccuccugcagc

SEQ ID NO: 142314 - RNA, 18 nt, Human
cgccaagcagacacagaa

SEQ ID NO: 142315 - RNA, 18 nt, Human
cgccgcagcucggccucc

SEQ ID NO: 142316 - RNA, 19 nt, Human
cgcgcgcuccuucuccucc

SEQ ID NO: 142317 - RNA, 24 nt, Human
cgcucccguucacgcuuuugggag

SEQ ID NO: 142318 - RNA, 21 nt, Human
cgcugccccuccgcucccggc

SEQ ID NO: 142319 - RNA, 19 nt, Human
cgcuggcccaagcucccgc

SEQ ID NO: 142320 - RNA, 21 nt, Human
cgugugccacgcccagcucgu

SEQ ID NO: 142321 - RNA, 23 nt, Human
cuagaaaccaaagcuuuuaacca

SEQ ID NO: 142322 - RNA, 23 nt, Human
cuccccacauaccgacaccuuag

SEQ ID NO: 142323 - RNA, 18 nt, Human
cuccgguggcccggcccc

SEQ ID NO: 142324 - RNA, 24 nt, Human
cuccucggccacgcucccguucac

SEQ ID NO: 142325 - RNA, 19 nt, Human
cuccucucccgcuugugcc

SEQ ID NO: 142326 - RNA, 21 nt, Human
cucgcuucggcggcgguggcg

SEQ ID NO: 142327 - RNA, 19 nt, Human
cugcagccgccgccgcucc

SEQ ID NO: 142328 - RNA, 20 nt, Human
cugcgccggcgggggcuguc

SEQ ID NO: 142329 - RNA, 18 nt, Human
cuggagccucagcuucuc

SEQ ID NO: 142330 - RNA, 23 nt, Human
cugugggaccuccgggaccgggu

SEQ ID NO: 142331 - RNA, 28 nt, Human
cuucacagccaugagguaaggacugggc

SEQ ID NO: 142332 - RNA, 22 nt, Human
cuuccugcuggcgcugccccuc

SEQ ID NO: 142333 - RNA, 18 nt, Human
gaagugccaaguacgcug

SEQ ID NO: 142334 - RNA, 21 nt, Human
gaauaaacaccaucuuuccua

SEQ ID NO: 142335 - RNA, 19 nt, Human
gacaggccguggggaggcc

SEQ ID NO: 142336 - RNA, 21 nt, Human
gagagccauccucggggacca

SEQ ID NO: 142337 - RNA, 24 nt, Human
gagccucagcuucuccuccuucug

SEQ ID NO: 142338 - RNA, 21 nt, Human
gccccggcccuugcugggcuc

SEQ ID NO: 142339 - RNA, 21 nt, Human
gccgcgcucuccuugggggca

SEQ ID NO: 142340 - RNA, 21 nt, Human
gcgcggggcuccgccugcguc

SEQ ID NO: 142341 - RNA, 22 nt, Human
gcgucccaggccgccgccgccg

SEQ ID NO: 142342 - RNA, 18 nt, Human
gcucgagcagguccuggu

SEQ ID NO: 142343 - RNA, 23 nt, Human
ggaaagaaucaccagggcaacgc

SEQ ID NO: 142344 - RNA, 19 nt, Human
ggaccgggagcgcgaccgc

SEQ ID NO: 142345 - RNA, 21 nt, Human
ggcugucguccggcuucuugc

SEQ ID NO: 142346 - RNA, 20 nt, Human
ggggugcagcgugguggcgc

SEQ ID NO: 142347 - RNA, 25 nt, Human
gucagcacgacgauucggcauccca

SEQ ID NO: 142348 - RNA, 24 nt, Human
uaaagcauggugucuuccuuccug

SEQ ID NO: 142349 - RNA, 18 nt, Human
uaccacuccccacauacc

SEQ ID NO: 142350 - RNA, 19 nt, Human
uaccacuccccacauaccg

SEQ ID NO: 142351 - RNA, 20 nt, Human
uacugcggugccugcucggg

SEQ ID NO: 142352 - RNA, 24 nt, Human
uagcaaaacagcuucuuaaaaaaa

SEQ ID NO: 142353 - RNA, 30 nt, Human
uagcaaaacagcuucuuaaaaaaaccacaa

SEQ ID NO: 142354 - RNA, 25 nt, Human
ucaccagggcaacgcuuucuuuuca

SEQ ID NO: 142355 - RNA, 20 nt, Human
uccaggacgggcugcagcag

SEQ ID NO: 142356 - RNA, 19 nt, Human
uccccggacaggcgcggcc

SEQ ID NO: 142357 - RNA, 30 nt, Human
uccuaggccgugcacgcagggaggucgccu

SEQ ID NO: 142358 - RNA, 18 nt, Human
uccuccugcugcuggagc

SEQ ID NO: 142359 - RNA, 23 nt, Human
uccuccugcugcuggagccucag

SEQ ID NO: 142360 - RNA, 23 nt, Human
uccugcugcuggagccucagcuu

SEQ ID NO: 142361 - RNA, 21 nt, Human
uccuugcguggccucccgucc

SEQ ID NO: 142362 - RNA, 18 nt, Human
ucgcgcagcucccgcucu

SEQ ID NO: 142363 - RNA, 22 nt, Human
ucgcuucggcggcgguggcggc

SEQ ID NO: 142364 - RNA, 21 nt, Human
ucuccgguggcccggccccgg

SEQ ID NO: 142365 - RNA, 24 nt, Human
ucuccgguggcccggccccggccc

SEQ ID NO: 142366 - RNA, 18 nt, Human
ucucuggagagccauccu

SEQ ID NO: 142367 - RNA, 26 nt, Human
ucugugcaauuuuccugacugagaga

SEQ ID NO: 142368 - RNA, 18 nt, Human
ucuuguggggccgccgcu

SEQ ID NO: 142369 - RNA, 21 nt, Human
ucuuguggggccgccgcuccu

SEQ ID NO: 142370 - RNA, 22 nt, Human
ugacucaaugucagcacgacga

SEQ ID NO: 142371 - RNA, 19 nt, Human
ugagagaggaccggccgca

SEQ ID NO: 142372 - RNA, 23 nt, Human
ugcagccugaaaucuguuugaaa

SEQ ID NO: 142373 - RNA, 24 nt, Human
ugcaggauguccaggacgggcugc

SEQ ID NO: 142374 - RNA, 20 nt, Human
ugcccuugggcuguugguug

SEQ ID NO: 142375 - RNA, 21 nt, Human
ugcuggagccucagcuucucc

SEQ ID NO: 142376 - RNA, 23 nt, Human
uggaauaaacaccaucuuuccua

SEQ ID NO: 142377 - RNA, 19 nt, Human
uggaucucuaaagcauggu

SEQ ID NO: 142378 - RNA, 18 nt, Human
uggcccgccuggcccggc

SEQ ID NO: 142379 - RNA, 22 nt, Human
uggcccggcuccucucccgcuu

SEQ ID NO: 142380 - RNA, 20 nt, Human
ugggccugcgcggggcuccg

SEQ ID NO: 142381 - RNA, 21 nt, Human
uggggaggccgugcccgucau

SEQ ID NO: 142382 - RNA, 19 nt, Human
ugguggcccgugcaccucc

SEQ ID NO: 142383 - RNA, 22 nt, Human
ugucucagccucuugucaugcu

SEQ ID NO: 142384 - RNA, 24 nt, Human
uugcagccugaaaucuguuugaaa

SEQ ID NO: 142385 - RNA, 24 nt, Human
uuguaccacuccccacauaccgac

SEQ ID NO: 142386 - RNA, 18 nt, Human
uuuccgcugcaggcccag

SEQ ID NO: 142387 - RNA, 19 nt, Human
uuuccgcugcaggcccagc

SEQ ID NO: 142388 - RNA, 20 nt, Human
uuuugaucuuaaaggacuug

SEQ ID NO: 142389 - RNA, 23 nt, Human
aaaaaaaacaguuucaaaaugug

SEQ ID NO: 142390 - RNA, 22 nt, Human
aaaaaaacacccucauggggcc

SEQ ID NO: 142391 - RNA, 22 nt, Human
aaaaaaacacccucauggggcc

SEQ ID NO: 142392 - RNA, 26 nt, Human
aaaaaaacacccucauggggcccuuu

SEQ ID NO: 142393 - RNA, 26 nt, Human
aaaaaaacacccucauggggcccuuu

SEQ ID NO: 142394 - RNA, 18 nt, Human
aaaaacacacaagaaaca

SEQ ID NO: 142395 - RNA, 18 nt, Human
aaaaacacacaagaaaca

SEQ ID NO: 142396 - RNA, 24 nt, Human
aaaaacacccucauggggcccuuu

SEQ ID NO: 142397 - RNA, 18 nt, Human
aaaaacagcuuugguaca

SEQ ID NO: 142398 - RNA, 18 nt, Human
aaaaacagcuuugguaca

SEQ ID NO: 142399 - RNA, 22 nt, Human
aaaaacccaaauuucccacccu

SEQ ID NO: 142400 - RNA, 22 nt, Human
aaaaacccaaauuucccacccu

SEQ ID NO: 142401 - RNA, 21 nt, Human
aaaaagaaaaaaaaaaaacac

SEQ ID NO: 142402 - RNA, 21 nt, Human
aaaaagaaaaaaaaaaaacac

SEQ ID NO: 142403 - RNA, 21 nt, Human
aaaaagaaaauaaauuuuugu

SEQ ID NO: 142404 - RNA, 21 nt, Human
aaaaagaaaauaaauuuuugu

SEQ ID NO: 142405 - RNA, 24 nt, Human
aaaaagcaaaagaaaaaguaaaaa

SEQ ID NO: 142406 - RNA, 24 nt, Human
aaaacaaaacagaacaaaacaaaa

SEQ ID NO: 142407 - RNA, 22 nt, Human
aaaacaccacuucuauaaaaac

SEQ ID NO: 142408 - RNA, 22 nt, Human
aaaacaccacuucuauaaaaac

SEQ ID NO: 142409 - RNA, 23 nt, Human
aaaacagaacaaaacaaaaaaaa

SEQ ID NO: 142410 - RNA, 23 nt, Human
aaaacagaacaaaacaaaaaaaa

SEQ ID NO: 142411 - RNA, 25 nt, Human
aaaagaaaaaaaaaaaacacccuca

SEQ ID NO: 142412 - RNA, 25 nt, Human
aaaagaaaaaaaaaaaacacccuca

SEQ ID NO: 142413 - RNA, 24 nt, Human
aaaagcaaaagaaaaaguaaaaag

SEQ ID NO: 142414 - RNA, 24 nt, Human
aaaagcaaaagaaaaaguaaaaag

SEQ ID NO: 142415 - RNA, 25 nt, Human
aaacaaaacagaacaaaacaaagcc

SEQ ID NO: 142416 - RNA, 21 nt, Human
aaacacacaagaaacaaacuc

SEQ ID NO: 142417 - RNA, 21 nt, Human
aaacacacaagaaacaaacuc

SEQ ID NO: 142418 - RNA, 24 nt, Human
aaacacacaagaaacaaacucaag

SEQ ID NO: 142419 - RNA, 24 nt, Human
aaacacacaagaaacaaacucaag

SEQ ID NO: 142420 - RNA, 18 nt, Human
aaacagaacaaaacaaaa

SEQ ID NO: 142421 - RNA, 19 nt, Human
aaacagaacaaaacaaaaa

SEQ ID NO: 142422 - RNA, 19 nt, Human
aaacagaacaaaacaaaaa

SEQ ID NO: 142423 - RNA, 21 nt, Human
aaacagauuaugauaagagau

SEQ ID NO: 142424 - RNA, 19 nt, Human
aaacagcaguaacuacuga

SEQ ID NO: 142425 - RNA, 19 nt, Human
aaacagcaguaacuacuga

SEQ ID NO: 142426 - RNA, 21 nt, Human
aaacagcaguaacuacugaau

SEQ ID NO: 142427 - RNA, 21 nt, Human
aaacagcaguaacuacugaau

SEQ ID NO: 142428 - RNA, 21 nt, Human
aaagaaaccaacuggacuaaa

SEQ ID NO: 142429 - RNA, 22 nt, Human
aaagcaaaagaaaaaguaaaaa

SEQ ID NO: 142430 - RNA, 19 nt, Human
aaagugucacaccccaaaa

SEQ ID NO: 142431 - RNA, 19 nt, Human
aaagugucacaccccaaaa

SEQ ID NO: 142432 - RNA, 25 nt, Human
aaaguuacuuuauaggaaagacaac

SEQ ID NO: 142433 - RNA, 22 nt, Human
aacaaaacaaaaaaaaaggggg

SEQ ID NO: 142434 - RNA, 22 nt, Human
aacaaaacaaaaaaaaaggggg

SEQ ID NO: 142435 - RNA, 23 nt, Human
aacaaaacaaaaaaaaaggggga

SEQ ID NO: 142436 - RNA, 19 nt, Human
aacaaaacagaacaaaaca

SEQ ID NO: 142437 - RNA, 22 nt, Human
aacacacuuagaauguaacaga

SEQ ID NO: 142438 - RNA, 22 nt, Human
aacacacuuagaauguaacaga

SEQ ID NO: 142439 - RNA, 21 nt, Human
aacagaacaaaacaaaaaaaa

SEQ ID NO: 142440 - RNA, 21 nt, Human
aacagaacaaaacaaaaaaaa

SEQ ID NO: 142441 - RNA, 19 nt, Human
aaccgcucccccaagucca

SEQ ID NO: 142442 - RNA, 23 nt, Human
aagaaaaaaaaaaaacacccuca

SEQ ID NO: 142443 - RNA, 23 nt, Human
aagaaaaaaaaaaaacacccuca

SEQ ID NO: 142444 - RNA, 21 nt, Human
aagaaagaaaccaacuggacu

SEQ ID NO: 142445 - RNA, 24 nt, Human
aagaggaacacgaauucacuuuca

SEQ ID NO: 142446 - RNA, 21 nt, Human
aagcaggaagggacacagcug

SEQ ID NO: 142447 - RNA, 22 nt, Human
aagcaggaagggacacagcugu

SEQ ID NO: 142448 - RNA, 22 nt, Human
aauaaauuaucaaaaaagaaaa

SEQ ID NO: 142449 - RNA, 22 nt, Human
aauaaauuaucaaaaaagaaaa

SEQ ID NO: 142450 - RNA, 22 nt, Human
aaucaagaggaacacgaauuca

SEQ ID NO: 142451 - RNA, 18 nt, Human
aaugggggagcaaaaaga

SEQ ID NO: 142452 - RNA, 18 nt, Human
acaaaaagaaaaaaaaaa

SEQ ID NO: 142453 - RNA, 18 nt, Human
acaaaaagaaaaaaaaaa

SEQ ID NO: 142454 - RNA, 18 nt, Human
acaaaacagaacaaaaca

SEQ ID NO: 142455 - RNA, 20 nt, Human
acaaaauaaauauggauuuc

SEQ ID NO: 142456 - RNA, 20 nt, Human
acaaaauaaauauggauuuc

SEQ ID NO: 142457 - RNA, 26 nt, Human
acaaucccaaaacauaaagaauaaaa

SEQ ID NO: 142458 - RNA, 22 nt, Human
acagaaaaaaaaaaugaccuga

SEQ ID NO: 142459 - RNA, 19 nt, Human
acaggaacgucaugaaccu

SEQ ID NO: 142460 - RNA, 18 nt, Human
acaucuuugugcagaaga

SEQ ID NO: 142461 - RNA, 18 nt, Human
acaucuuugugcagaaga

SEQ ID NO: 142462 - RNA, 22 nt, Human
accaccacucagaccuccccag

SEQ ID NO: 142463 - RNA, 22 nt, Human
accaccacucagaccuccccag

SEQ ID NO: 142464 - RNA, 23 nt, Human
acccucccacccaaaacaaaaca

SEQ ID NO: 142465 - RNA, 24 nt, Human
acccucccacccaaaacaaaacag

SEQ ID NO: 142466 - RNA, 24 nt, Human
acccucccacccaaaacaaaacag

SEQ ID NO: 142467 - RNA, 22 nt, Human
accgcucaaaagugucacaccc

SEQ ID NO: 142468 - RNA, 22 nt, Human
accgcucaaaagugucacaccc

SEQ ID NO: 142469 - RNA, 18 nt, Human
accuguuaaauaccagcc

SEQ ID NO: 142470 - RNA, 18 nt, Human
accuguuaaauaccagcc

SEQ ID NO: 142471 - RNA, 22 nt, Human
acgaggcaccuguuaaauacca

SEQ ID NO: 142472 - RNA, 22 nt, Human
acgaggcaccuguuaaauacca

SEQ ID NO: 142473 - RNA, 19 nt, Human
acugcacuucagccgggac

SEQ ID NO: 142474 - RNA, 19 nt, Human
acugcacuucagccgggac

SEQ ID NO: 142475 - RNA, 20 nt, Human
acugcauuuccgugcccaag

SEQ ID NO: 142476 - RNA, 20 nt, Human
acugcauuuccgugcccaag

SEQ ID NO: 142477 - RNA, 23 nt, Human
agaaaaaaaaaaaacacccucau

SEQ ID NO: 142478 - RNA, 23 nt, Human
agaaaaaaaaaaaacacccucau

SEQ ID NO: 142479 - RNA, 20 nt, Human
agaaagacaaaaaaacccca

SEQ ID NO: 142480 - RNA, 20 nt, Human
agaaagacaaaaaaacccca

SEQ ID NO: 142481 - RNA, 23 nt, Human
agaaagacaaaaaaaccccacug

SEQ ID NO: 142482 - RNA, 23 nt, Human
agaagacaucuuugugcagaaga

SEQ ID NO: 142483 - RNA, 23 nt, Human
agaagacaucuuugugcagaaga

SEQ ID NO: 142484 - RNA, 22 nt, Human
agacaacaugucaaucuaccaa

SEQ ID NO: 142485 - RNA, 19 nt, Human
agacaggaacgucaugaac

SEQ ID NO: 142486 - RNA, 24 nt, Human
agaccaccacucagaccuccccag

SEQ ID NO: 142487 - RNA, 24 nt, Human
agaccaccacucagaccuccccag

SEQ ID NO: 142488 - RNA, 21 nt, Human
agagaaaaaaaaaacaguuuc

SEQ ID NO: 142489 - RNA, 23 nt, Human
agauaaugaugcaagacaauuac

SEQ ID NO: 142490 - RNA, 22 nt, Human
agcaaaaagaggauaccucuga

SEQ ID NO: 142491 - RNA, 18 nt, Human
agcagaaaauugguaugu

SEQ ID NO: 142492 - RNA, 24 nt, Human
agcuacuggggaggcugagguggg

SEQ ID NO: 142493 - RNA, 18 nt, Human
aggaaagacaacauguca

SEQ ID NO: 142494 - RNA, 18 nt, Human
aggcugaggugggaagac

SEQ ID NO: 142495 - RNA, 19 nt, Human
agggaagaguccagcggca

SEQ ID NO: 142496 - RNA, 19 nt, Human
agggaagaguccagcggca

SEQ ID NO: 142497 - RNA, 21 nt, Human
agggggaugggggggacaaaa

SEQ ID NO: 142498 - RNA, 21 nt, Human
agggggaugggggggacaaaa

SEQ ID NO: 142499 - RNA, 21 nt, Human
agggggaugggggggacaaaa

SEQ ID NO: 142500 - RNA, 21 nt, Human
agggggaugggggggacaaaa

SEQ ID NO: 142501 - RNA, 21 nt, Human
aguccaaauccauaaggccaa

SEQ ID NO: 142502 - RNA, 21 nt, Human
aguccaaauccauaaggccaa

SEQ ID NO: 142503 - RNA, 23 nt, Human
aguccuguaaccaaacuguguag

SEQ ID NO: 142504 - RNA, 23 nt, Human
aguccuguaaccaaacuguguag

SEQ ID NO: 142505 - RNA, 23 nt, Human
auaaggccaaagguuaucccaaa

SEQ ID NO: 142506 - RNA, 23 nt, Human
auaaggccaaagguuaucccaaa

SEQ ID NO: 142507 - RNA, 21 nt, Human
auccacaggcuugacaguuaa

SEQ ID NO: 142508 - RNA, 21 nt, Human
auccacaggcuugacaguuaa

SEQ ID NO: 142509 - RNA, 21 nt, Human
aucccaaagaccaccacucag

SEQ ID NO: 142510 - RNA, 21 nt, Human
aucccaaagaccaccacucag

SEQ ID NO: 142511 - RNA, 23 nt, Human
aucgugccacugcacuucagccg

SEQ ID NO: 142512 - RNA, 21 nt, Human
augaugcaagacaauuacccc

SEQ ID NO: 142513 - RNA, 19 nt, Human
auguuuacaaugcacagaa

SEQ ID NO: 142514 - RNA, 19 nt, Human
auguuuacaaugcacagaa

SEQ ID NO: 142515 - RNA, 18 nt, Human
auucaacaacaguuccag

SEQ ID NO: 142516 - RNA, 18 nt, Human
auucaacaacaguuccag

SEQ ID NO: 142517 - RNA, 21 nt, Human
caaaacaaaacagaacaaaac

SEQ ID NO: 142518 - RNA, 21 nt, Human
caaaacaaaacagaacaaaac

SEQ ID NO: 142519 - RNA, 26 nt, Human
caaaacaaaacagaacaaaacaaaaa

SEQ ID NO: 142520 - RNA, 23 nt, Human
caaaagaaaaaguaaaaagcagg

SEQ ID NO: 142521 - RNA, 20 nt, Human
caaagugcagaacugcuaca

SEQ ID NO: 142522 - RNA, 20 nt, Human
caaagugcagaacugcuaca

SEQ ID NO: 142523 - RNA, 19 nt, Human
caacugauaaucagcagaa

SEQ ID NO: 142524 - RNA, 21 nt, Human
caagacaauuaccccaacuga

SEQ ID NO: 142525 - RNA, 20 nt, Human
caagaggaacacgaauucac

SEQ ID NO: 142526 - RNA, 18 nt, Human
caagggcacuggggccgc

SEQ ID NO: 142527 - RNA, 19 nt, Human
caagggcacuggggccgcu

SEQ ID NO: 142528 - RNA, 24 nt, Human
caaguuccuaggucagccucauga

SEQ ID NO: 142529 - RNA, 20 nt, Human
caaucccaaaacauaaagag

SEQ ID NO: 142530 - RNA, 18 nt, Human
caaugcauucuguugagg

SEQ ID NO: 142531 - RNA, 23 nt, Human
caauucccaaugccuccaauucc

SEQ ID NO: 142532 - RNA, 20 nt, Human
cacaaccgcucccccaaguc

SEQ ID NO: 142533 - RNA, 24 nt, Human
cacaagaaacaaacucaaguuuca

SEQ ID NO: 142534 - RNA, 24 nt, Human
cacaagaaacaaacucaaguuuca

SEQ ID NO: 142535 - RNA, 23 nt, Human
cacaagcccucuugcucuccaag

SEQ ID NO: 142536 - RNA, 19 nt, Human
cacagaaaaaaaaaaugac

SEQ ID NO: 142537 - RNA, 19 nt, Human
cacagaaaaaaaaaaugac

SEQ ID NO: 142538 - RNA, 22 nt, Human
cacagcauaauugugaggcaaa

SEQ ID NO: 142539 - RNA, 22 nt, Human
cacagcauaauugugaggcaaa

SEQ ID NO: 142540 - RNA, 25 nt, Human
cacagcauaauugugaggcaaaaaa

SEQ ID NO: 142541 - RNA, 25 nt, Human
cacagcauaauugugaggcaaaaaa

SEQ ID NO: 142542 - RNA, 20 nt, Human
caccacaaccgucccuuuca

SEQ ID NO: 142543 - RNA, 20 nt, Human
caccacaaccgucccuuuca

SEQ ID NO: 142544 - RNA, 25 nt, Human
caccacaaccgucccuuucauacag

SEQ ID NO: 142545 - RNA, 25 nt, Human
caccacaaccgucccuuucauacag

SEQ ID NO: 142546 - RNA, 21 nt, Human
caccacucagaccuccccagg

SEQ ID NO: 142547 - RNA, 21 nt, Human
caccacucagaccuccccagg

SEQ ID NO: 142548 - RNA, 19 nt, Human
cacccucccacccaaaaca

SEQ ID NO: 142549 - RNA, 19 nt, Human
cacccucccacccaaaaca

SEQ ID NO: 142550 - RNA, 21 nt, Human
cacccucccacccaaaacaaa

SEQ ID NO: 142551 - RNA, 21 nt, Human
cacccucccacccaaaacaaa

SEQ ID NO: 142552 - RNA, 24 nt, Human
cacccucccacccaaaacaaaaca

SEQ ID NO: 142553 - RNA, 24 nt, Human
cacccucccacccaaaacaaaaca

SEQ ID NO: 142554 - RNA, 22 nt, Human
caccuaugaucgugccacugca

SEQ ID NO: 142555 - RNA, 19 nt, Human
caccuguuaaauaccagcc

SEQ ID NO: 142556 - RNA, 19 nt, Human
caccuguuaaauaccagcc

SEQ ID NO: 142557 - RNA, 18 nt, Human
cacugcacuucagccggg

SEQ ID NO: 142558 - RNA, 18 nt, Human
cacugcacuucagccggg

SEQ ID NO: 142559 - RNA, 20 nt, Human
cacugcacuucagccgggac

SEQ ID NO: 142560 - RNA, 21 nt, Human
cacuguaaucccagcuacugg

SEQ ID NO: 142561 - RNA, 19 nt, Human
cacuucacuggaaaagaac

SEQ ID NO: 142562 - RNA, 24 nt, Human
cacuucuauaaaaacacacaagaa

SEQ ID NO: 142563 - RNA, 24 nt, Human
cacuucuauaaaaacacacaagaa

SEQ ID NO: 142564 - RNA, 18 nt, Human
cagaaaaaaaauugaccu

SEQ ID NO: 142565 - RNA, 18 nt, Human
cagaaaaaaaauugaccu

SEQ ID NO: 142566 - RNA, 21 nt, Human
cagaaaaaaaauugaccuagu

SEQ ID NO: 142567 - RNA, 21 nt, Human
cagaaaaaaaauugaccuagu

SEQ ID NO: 142568 - RNA, 26 nt, Human
cagaagagguaaagacaaguacaagc

SEQ ID NO: 142569 - RNA, 23 nt, Human
cagcacagaaaaaaaaaaugacc

SEQ ID NO: 142570 - RNA, 21 nt, Human
cagcaguaacuacugaauucc

SEQ ID NO: 142571 - RNA, 21 nt, Human
cagcaguaacuacugaauucc

SEQ ID NO: 142572 - RNA, 18 nt, Human
cagcauuaaggacugucu

SEQ ID NO: 142573 - RNA, 22 nt, Human
cagcauuaaggacugucugcaa

SEQ ID NO: 142574 - RNA, 22 nt, Human
cagcauuaaggacugucugcaa

SEQ ID NO: 142575 - RNA, 18 nt, Human
cagccacugggcgauucu

SEQ ID NO: 142576 - RNA, 18 nt, Human
cagccgggacgauggcgg

SEQ ID NO: 142577 - RNA, 22 nt, Human
cagccucaugaaaacuacugac

SEQ ID NO: 142578 - RNA, 20 nt, Human
cagccucgggcucccgcgcc

SEQ ID NO: 142579 - RNA, 19 nt, Human
caggaucccauguaauugc

SEQ ID NO: 142580 - RNA, 19 nt, Human
caggaucccauguaauugc

SEQ ID NO: 142581 - RNA, 25 nt, Human
cauaaagaauaaaauuacuucaaau

SEQ ID NO: 142582 - RNA, 21 nt, Human
cauaacuacaaucccaaaaca

SEQ ID NO: 142583 - RNA, 21 nt, Human
cauuuuguaauuuucaucagu

SEQ ID NO: 142584 - RNA, 23 nt, Human
ccaaaacaaaacagaacaaaaca

SEQ ID NO: 142585 - RNA, 18 nt, Human
ccaaaagugauugcaucu

SEQ ID NO: 142586 - RNA, 18 nt, Human
ccaaaagugauugcaucu

SEQ ID NO: 142587 - RNA, 20 nt, Human
ccaacaucugaauauuaacu

SEQ ID NO: 142588 - RNA, 20 nt, Human
ccaacaucugaauauuaacu

SEQ ID NO: 142589 - RNA, 23 nt, Human
ccaaugccuccaauuccuaaauu

SEQ ID NO: 142590 - RNA, 18 nt, Human
ccacccaaaacaaaacag

SEQ ID NO: 142591 - RNA, 23 nt, Human
ccacccaaaacaaaacagaacaa

SEQ ID NO: 142592 - RNA, 23 nt, Human
ccacccaaaacaaaacagaacaa

SEQ ID NO: 142593 - RNA, 25 nt, Human
ccacccaaaacaaaacagaacaaaa

SEQ ID NO: 142594 - RNA, 25 nt, Human
ccacccaaaacaaaacagaacaaaa

SEQ ID NO: 142595 - RNA, 23 nt, Human
ccacgugccgagaaaaagcaaaa

SEQ ID NO: 142596 - RNA, 23 nt, Human
ccacgugccgagaaaaagcaaaa

SEQ ID NO: 142597 - RNA, 19 nt, Human
ccacugcacuucagccggg

SEQ ID NO: 142598 - RNA, 19 nt, Human
ccacugcacuucagccggg

SEQ ID NO: 142599 - RNA, 20 nt, Human
ccacugcacuucagccggga

SEQ ID NO: 142600 - RNA, 21 nt, Human
ccacugcacuucagccgggac

SEQ ID NO: 142601 - RNA, 22 nt, Human
ccagacaaauucuaaaauaagc

SEQ ID NO: 142602 - RNA, 19 nt, Human
ccauagcuucuggauccag

SEQ ID NO: 142603 - RNA, 19 nt, Human
ccauagcuucuggauccag

SEQ ID NO: 142604 - RNA, 27 nt, Human
cccaaagaccaccacucagaccucccc

SEQ ID NO: 142605 - RNA, 27 nt, Human
cccaaagaccaccacucagaccucccc

SEQ ID NO: 142606 - RNA, 23 nt, Human
cccaaauuucccacccucccacc

SEQ ID NO: 142607 - RNA, 24 nt, Human
cccacccucccacccaaaacaaaa

SEQ ID NO: 142608 - RNA, 24 nt, Human
cccacccucccacccaaaacaaaa

SEQ ID NO: 142609 - RNA, 19 nt, Human
cccagcuacuggggaggcu

SEQ ID NO: 142610 - RNA, 19 nt, Human
cccccaaguccacaagccc

SEQ ID NO: 142611 - RNA, 21 nt, Human
cccccaaguccacaagcccuc

SEQ ID NO: 142612 - RNA, 22 nt, Human
ccgcucaaaagugucacacccc

SEQ ID NO: 142613 - RNA, 22 nt, Human
ccgcucaaaagugucacacccc

SEQ ID NO: 142614 - RNA, 24 nt, Human
ccgggacgauggcggggcgcucuu

SEQ ID NO: 142615 - RNA, 19 nt, Human
ccuccggugagucucagcc

SEQ ID NO: 142616 - RNA, 20 nt, Human
ccugauaaacaacaaaaagu

SEQ ID NO: 142617 - RNA, 23 nt, Human
ccugauggggugggggaagggag

SEQ ID NO: 142618 - RNA, 18 nt, Human
ccuguauuagcagaaaau

SEQ ID NO: 142619 - RNA, 19 nt, Human
ccuuauauuccuaaacagc

SEQ ID NO: 142620 - RNA, 19 nt, Human
ccuuauauuccuaaacagc

SEQ ID NO: 142621 - RNA, 21 nt, Human
cgaggcaccuguuaaauacca

SEQ ID NO: 142622 - RNA, 21 nt, Human
cgcuuccuccggugagucuca

SEQ ID NO: 142623 - RNA, 23 nt, Human
cuacaaucccaaaacauaaagaa

SEQ ID NO: 142624 - RNA, 25 nt, Human
cuacaggacucuguugcacacaaag

SEQ ID NO: 142625 - RNA, 22 nt, Human
cucacaaccgcucccccaaguc

SEQ ID NO: 142626 - RNA, 18 nt, Human
cucauugucagauguccu

SEQ ID NO: 142627 - RNA, 22 nt, Human
cucugcaacgggagagccacag

SEQ ID NO: 142628 - RNA, 22 nt, Human
cucugcaacgggagagccacag

SEQ ID NO: 142629 - RNA, 18 nt, Human
cugaagaugguguuugug

SEQ ID NO: 142630 - RNA, 18 nt, Human
cugaagaugguguuugug

SEQ ID NO: 142631 - RNA, 19 nt, Human
cugaccaaccaagaggagc

SEQ ID NO: 142632 - RNA, 25 nt, Human
cugacccauaugauaucuuaaccuu

SEQ ID NO: 142633 - RNA, 25 nt, Human
cugacccauaugauaucuuaaccuu

SEQ ID NO: 142634 - RNA, 19 nt, Human
cugcugguuccauagcuuc

SEQ ID NO: 142635 - RNA, 19 nt, Human
cugcugguuccauagcuuc

SEQ ID NO: 142636 - RNA, 21 nt, Human
cuggaaaagaaccucagagac

SEQ ID NO: 142637 - RNA, 19 nt, Human
cuguguuuucagcauuaag

SEQ ID NO: 142638 - RNA, 19 nt, Human
cuguguuuucagcauuaag

SEQ ID NO: 142639 - RNA, 20 nt, Human
cuuaaaaacccaaauuuccc

SEQ ID NO: 142640 - RNA, 20 nt, Human
cuuaaaaacccaaauuuccc

SEQ ID NO: 142641 - RNA, 22 nt, Human
cuucacuggaaaagaaccucag

SEQ ID NO: 142642 - RNA, 22 nt, Human
cuucuauaaaaacacacaagaa

SEQ ID NO: 142643 - RNA, 24 nt, Human
cuuguagcgguucaguguguuaau

SEQ ID NO: 142644 - RNA, 24 nt, Human
cuuguagcgguucaguguguuaau

SEQ ID NO: 142645 - RNA, 19 nt, Human
cuuucaaguuuacaaguag

SEQ ID NO: 142646 - RNA, 19 nt, Human
cuuucaaguuuacaaguag

SEQ ID NO: 142647 - RNA, 25 nt, Human
gaaaaaaaaaacaguuucaaaaugu

SEQ ID NO: 142648 - RNA, 20 nt, Human
gaacuaccaaguucaaaaaa

SEQ ID NO: 142649 - RNA, 28 nt, Human
gaacuaccaaguucaaaaaaaucaucca

SEQ ID NO: 142650 - RNA, 28 nt, Human
gaacuaccaaguucaaaaaaaucaucca

SEQ ID NO: 142651 - RNA, 21 nt, Human
gaagaaaaacagauuaugaua

SEQ ID NO: 142652 - RNA, 18 nt, Human
gaaucugagacuguagug

SEQ ID NO: 142653 - RNA, 18 nt, Human
gagaaaaagcaaaagaaa

SEQ ID NO: 142654 - RNA, 18 nt, Human
gauugcuucucagugcac

SEQ ID NO: 142655 - RNA, 20 nt, Human
gcacagaaaaaaaaaaugac

SEQ ID NO: 142656 - RNA, 20 nt, Human
gcacagaaaaaaaaaaugac

SEQ ID NO: 142657 - RNA, 19 nt, Human
gcacagaaguccuguaacc

SEQ ID NO: 142658 - RNA, 19 nt, Human
gcacagaaguccuguaacc

SEQ ID NO: 142659 - RNA, 18 nt, Human
gcagaagaaaugguggag

SEQ ID NO: 142660 - RNA, 18 nt, Human
gcagaagaaaugguggag

SEQ ID NO: 142661 - RNA, 21 nt, Human
gcagaagagguaaagacaagu

SEQ ID NO: 142662 - RNA, 22 nt, Human
gccgagaaaaagcaaaagaaaa

SEQ ID NO: 142663 - RNA, 26 nt, Human
gcuacaagugggucauaauauagauu

SEQ ID NO: 142664 - RNA, 19 nt, Human
gcugaagaugguguuugug

SEQ ID NO: 142665 - RNA, 18 nt, Human
gcugaauagaaagacaaa

SEQ ID NO: 142666 - RNA, 26 nt, Human
ggaaaaaaaacaccacuucuauaaaa

SEQ ID NO: 142667 - RNA, 26 nt, Human
ggaaaaaaaacaccacuucuauaaaa

SEQ ID NO: 142668 - RNA, 25 nt, Human
ggcacuggggccgcugcagaagaaa

SEQ ID NO: 142669 - RNA, 18 nt, Human
gggaagaguccagcggca

SEQ ID NO: 142670 - RNA, 22 nt, Human
gggaugggggggacaaaaagaa

SEQ ID NO: 142671 - RNA, 20 nt, Human
ggggaugggggggacaaaaa

SEQ ID NO: 142672 - RNA, 20 nt, Human
ggggaugggggggacaaaaa

SEQ ID NO: 142673 - RNA, 19 nt, Human
gggggaagggagggaagag

SEQ ID NO: 142674 - RNA, 19 nt, Human
gggggaagggagggaagag

SEQ ID NO: 142675 - RNA, 19 nt, Human
gggggaagggagggaagag

SEQ ID NO: 142676 - RNA, 22 nt, Human
gggggaugggggggacaaaaag

SEQ ID NO: 142677 - RNA, 20 nt, Human
gggggggacaaaaagaaaaa

SEQ ID NO: 142678 - RNA, 20 nt, Human
gggggggacaaaaagaaaaa

SEQ ID NO: 142679 - RNA, 19 nt, Human
ggggugggggaagggaggg

SEQ ID NO: 142680 - RNA, 20 nt, Human
ggggugggggaagggaggga

SEQ ID NO: 142681 - RNA, 20 nt, Human
ggggugggggaagggaggga

SEQ ID NO: 142682 - RNA, 20 nt, Human
ggggugggggaagggaggga

SEQ ID NO: 142683 - RNA, 24 nt, Human
gggugggggaagggagggaagagu

SEQ ID NO: 142684 - RNA, 20 nt, Human
gguaagagaaagaaagaaac

SEQ ID NO: 142685 - RNA, 21 nt, Human
ggucaagggcacuggggccgc

SEQ ID NO: 142686 - RNA, 18 nt, Human
ggugguggugauggugau

SEQ ID NO: 142687 - RNA, 18 nt, Human
guaaagcacacaaaacug

SEQ ID NO: 142688 - RNA, 18 nt, Human
guaaagcacacaaaacug

SEQ ID NO: 142689 - RNA, 19 nt, Human
guaguaaagcacacaaaac

SEQ ID NO: 142690 - RNA, 19 nt, Human
guaguaaagcacacaaaac

SEQ ID NO: 142691 - RNA, 23 nt, Human
gucugcaaaagcauguccaaaag

SEQ ID NO: 142692 - RNA, 23 nt, Human
gucugcaaaagcauguccaaaag

SEQ ID NO: 142693 - RNA, 20 nt, Human
gugcccaaguguguuuagag

SEQ ID NO: 142694 - RNA, 20 nt, Human
gugcccaaguguguuuagag

SEQ ID NO: 142695 - RNA, 21 nt, Human
gugccgagaaaaagcaaaaga

SEQ ID NO: 142696 - RNA, 18 nt, Human
guggagauaccacgugcc

SEQ ID NO: 142697 - RNA, 18 nt, Human
guggagauaccacgugcc

SEQ ID NO: 142698 - RNA, 18 nt, Human
guuccauccuaucuuccu

SEQ ID NO: 142699 - RNA, 18 nt, Human
guuccauccuaucuuccu

SEQ ID NO: 142700 - RNA, 24 nt, Human
guuccuaggucagccucaugaaaa

SEQ ID NO: 142701 - RNA, 23 nt, Human
uaaaaacccaaauuucccacccu

SEQ ID NO: 142702 - RNA, 19 nt, Human
uaagagaaagaaagaaacc

SEQ ID NO: 142703 - RNA, 23 nt, Human
uaaguucugagacauuucucaca

SEQ ID NO: 142704 - RNA, 26 nt, Human
uaccagccugucugcucaggucacgc

SEQ ID NO: 142705 - RNA, 26 nt, Human
uaccagccugucugcucaggucacgc

SEQ ID NO: 142706 - RNA, 23 nt, Human
uacugcauuuccgugcccaagug

SEQ ID NO: 142707 - RNA, 22 nt, Human
uagaaagacaaaaaaaccccac

SEQ ID NO: 142708 - RNA, 22 nt, Human
uagaaagacaaaaaaaccccac

SEQ ID NO: 142709 - RNA, 24 nt, Human
uagaaagacaaaaaaaccccacug

SEQ ID NO: 142710 - RNA, 24 nt, Human
uagaaagacaaaaaaaccccacug

SEQ ID NO: 142711 - RNA, 25 nt, Human
uagaaagacaaaaaaaccccacugu

SEQ ID NO: 142712 - RNA, 25 nt, Human
uagaaagacaaaaaaaccccacugu

SEQ ID NO: 142713 - RNA, 24 nt, Human
uagaaugaaacgcgguguucugcu

SEQ ID NO: 142714 - RNA, 19 nt, Human
uagaauuccaaguggugcu

SEQ ID NO: 142715 - RNA, 22 nt, Human
uagcuucuggauccaguguccc

SEQ ID NO: 142716 - RNA, 22 nt, Human
uagcuucuggauccaguguccc

SEQ ID NO: 142717 - RNA, 20 nt, Human
uaggucagccucaugaaaac

SEQ ID NO: 142718 - RNA, 23 nt, Human
uaucccaaagaccaccacucaga

SEQ ID NO: 142719 - RNA, 23 nt, Human
uaucccaaagaccaccacucaga

SEQ ID NO: 142720 - RNA, 25 nt, Human
uaucccaaagaccaccacucagacc

SEQ ID NO: 142721 - RNA, 25 nt, Human
uaucccaaagaccaccacucagacc

SEQ ID NO: 142722 - RNA, 24 nt, Human
uaugaucgugccacugcacuucag

SEQ ID NO: 142723 - RNA, 21 nt, Human
ucaaaagugucacaccccaaa

SEQ ID NO: 142724 - RNA, 21 nt, Human
ucaaaagugucacaccccaaa

SEQ ID NO: 142725 - RNA, 23 nt, Human
ucaaauaaaccugaauauuccac

SEQ ID NO: 142726 - RNA, 18 nt, Human
ucagagaaaaaaaaaaca

SEQ ID NO: 142727 - RNA, 24 nt, Human
ucagauguccuucagucauguaau

SEQ ID NO: 142728 - RNA, 18 nt, Human
ucagccccuugccucauu

SEQ ID NO: 142729 - RNA, 21 nt, Human
ucagguaagagaaagaaagaa

SEQ ID NO: 142730 - RNA, 20 nt, Human
ucaguauaguucauuucagg

SEQ ID NO: 142731 - RNA, 20 nt, Human
ucagugccugaccaaccaag

SEQ ID NO: 142732 - RNA, 24 nt, Human
ucauaucauccugauggggugggg

SEQ ID NO: 142733 - RNA, 24 nt, Human
ucauaucauccugauggggugggg

SEQ ID NO: 142734 - RNA, 24 nt, Human
ucauaucauccugauggggugggg

SEQ ID NO: 142735 - RNA, 23 nt, Human
uccagcuaugccagucucuuggc

SEQ ID NO: 142736 - RNA, 19 nt, Human
uccauggugguggugaugg

SEQ ID NO: 142737 - RNA, 19 nt, Human
ucccaaaacauaaagaaua

SEQ ID NO: 142738 - RNA, 21 nt, Human
ucccaaagaccaccacucaga

SEQ ID NO: 142739 - RNA, 21 nt, Human
ucccaaagaccaccacucaga

SEQ ID NO: 142740 - RNA, 25 nt, Human
ucccacccaaaacaaaacagaacaa

SEQ ID NO: 142741 - RNA, 25 nt, Human
ucccacccaaaacaaaacagaacaa

SEQ ID NO: 142742 - RNA, 19 nt, Human
ucccacccucccacccaaa

SEQ ID NO: 142743 - RNA, 19 nt, Human
ucccacccucccacccaaa

SEQ ID NO: 142744 - RNA, 23 nt, Human
ucccacccucccacccaaaacaa

SEQ ID NO: 142745 - RNA, 23 nt, Human
ucccacccucccacccaaaacaa

SEQ ID NO: 142746 - RNA, 24 nt, Human
ucccacccucccacccaaaacaaa

SEQ ID NO: 142747 - RNA, 24 nt, Human
ucccacccucccacccaaaacaaa

SEQ ID NO: 142748 - RNA, 18 nt, Human
ucccccaaguccacaagc

SEQ ID NO: 142749 - RNA, 21 nt, Human
uccugauaaacaacaaaaagu

SEQ ID NO: 142750 - RNA, 21 nt, Human
uccugauaaacaacaaaaagu

SEQ ID NO: 142751 - RNA, 24 nt, Human
uccugauggggugggggaagggag

SEQ ID NO: 142752 - RNA, 24 nt, Human
uccugauggggugggggaagggag

SEQ ID NO: 142753 - RNA, 22 nt, Human
uccuggucaagggcacuggggc

SEQ ID NO: 142754 - RNA, 21 nt, Human
ugaacuaccaaguucaaaaaa

SEQ ID NO: 142755 - RNA, 21 nt, Human
ugaacuaccaaguucaaaaaa

SEQ ID NO: 142756 - RNA, 19 nt, Human
ugaccaagaccaacaucug

SEQ ID NO: 142757 - RNA, 19 nt, Human
ugaccaagaccaacaucug

SEQ ID NO: 142758 - RNA, 19 nt, Human
ugaccagaaaaauucauaa

SEQ ID NO: 142759 - RNA, 20 nt, Human
ugaccuagucagccacaugg

SEQ ID NO: 142760 - RNA, 20 nt, Human
ugaccuagucagccacaugg

SEQ ID NO: 142761 - RNA, 26 nt, Human
ugacuuacaggaaaaugaaaguaauc

SEQ ID NO: 142762 - RNA, 21 nt, Human
ugagcuauccaugaagauggg

SEQ ID NO: 142763 - RNA, 21 nt, Human
ugagcuauccaugaagauggg

SEQ ID NO: 142764 - RNA, 18 nt, Human
ugaggugggaagacugcu

SEQ ID NO: 142765 - RNA, 19 nt, Human
ugaugcaagacaauuaccc

SEQ ID NO: 142766 - RNA, 19 nt, Human
ugaugcaaugcauucuguu

SEQ ID NO: 142767 - RNA, 20 nt, Human
ugauggugaugggaacuguu

SEQ ID NO: 142768 - RNA, 22 nt, Human
ugauggugaugggaacuguuac

SEQ ID NO: 142769 - RNA, 20 nt, Human
ugcaaugcauucuguugagg

SEQ ID NO: 142770 - RNA, 23 nt, Human
ugcacagaaguccuguaaccaaa

SEQ ID NO: 142771 - RNA, 23 nt, Human
ugcacagaaguccuguaaccaaa

SEQ ID NO: 142772 - RNA, 20 nt, Human
ugcagaagaaaugguggaga

SEQ ID NO: 142773 - RNA, 20 nt, Human
ugcagaagaaaugguggaga

SEQ ID NO: 142774 - RNA, 18 nt, Human
ugccucaguauaguucau

SEQ ID NO: 142775 - RNA, 20 nt, Human
ugccucaguauaguucauuu

SEQ ID NO: 142776 - RNA, 23 nt, Human
ugccugacaaacuucaccacaac

SEQ ID NO: 142777 - RNA, 23 nt, Human
ugccugacaaacuucaccacaac

SEQ ID NO: 142778 - RNA, 20 nt, Human
ugcucaggucacgcaugaga

SEQ ID NO: 142779 - RNA, 20 nt, Human
ugcucaggucacgcaugaga

SEQ ID NO: 142780 - RNA, 23 nt, Human
uggaaaaaaaacaccacuucuau

SEQ ID NO: 142781 - RNA, 23 nt, Human
uggaaaaaaaacaccacuucuau

SEQ ID NO: 142782 - RNA, 19 nt, Human
uggaagcuggaggucccuc

SEQ ID NO: 142783 - RNA, 19 nt, Human
uggaagcuggaggucccuc

SEQ ID NO: 142784 - RNA, 22 nt, Human
uggccaaguuccuaggucagcc

SEQ ID NO: 142785 - RNA, 24 nt, Human
ugggauguggcaaguuaaaauggg

SEQ ID NO: 142786 - RNA, 24 nt, Human
ugggauguggcaaguuaaaauggg

SEQ ID NO: 142787 - RNA, 22 nt, Human
uggucaagggcacuggggccgc

SEQ ID NO: 142788 - RNA, 21 nt, Human
ugguuacagacaucuaugugc

SEQ ID NO: 142789 - RNA, 21 nt, Human
ugguuacagacaucuaugugc

SEQ ID NO: 142790 - RNA, 21 nt, Human
uguaacauaacacaguaugca

SEQ ID NO: 142791 - RNA, 21 nt, Human
uguaacauaacacaguaugca

SEQ ID NO: 142792 - RNA, 25 nt, Human
ugucagagaaaaaaaaaacaguuuc

SEQ ID NO: 142793 - RNA, 23 nt, Human
uguccauggugguggugauggug

SEQ ID NO: 142794 - RNA, 18 nt, Human
ugugcagaagaaaugguc

SEQ ID NO: 142795 - RNA, 18 nt, Human
ugugcagaagaaaugguc

SEQ ID NO: 142796 - RNA, 21 nt, Human
ugugcagaagaaaugguggag

SEQ ID NO: 142797 - RNA, 21 nt, Human
ugugcagaagaaaugguggag

SEQ ID NO: 142798 - RNA, 22 nt, Human
ugugccugacaaacuucaccac

SEQ ID NO: 142799 - RNA, 22 nt, Human
ugugccugacaaacuucaccac

SEQ ID NO: 142800 - RNA, 20 nt, Human
ugugugaagaaaaacagauu

SEQ ID NO: 142801 - RNA, 21 nt, Human
uuaaauaccagccugucugcu

SEQ ID NO: 142802 - RNA, 21 nt, Human
uuaaauaccagccugucugcu

SEQ ID NO: 142803 - RNA, 22 nt, Human
uuaagacagagguaaaguuacu

SEQ ID NO: 142804 - RNA, 22 nt, Human
uuacaauauacacagcaagucc

SEQ ID NO: 142805 - RNA, 22 nt, Human
uuacaauauacacagcaagucc

SEQ ID NO: 142806 - RNA, 21 nt, Human
uuacugcuucuuuucuaggcu

SEQ ID NO: 142807 - RNA, 21 nt, Human
uuacugcuucuuuucuaggcu

SEQ ID NO: 142808 - RNA, 20 nt, Human
uucaaguuaaaaaaaaaauc

SEQ ID NO: 142809 - RNA, 20 nt, Human
uucaaguuaaaaaaaaaauc

SEQ ID NO: 142810 - RNA, 19 nt, Human
uuccaaguggugcuacaag

SEQ ID NO: 142811 - RNA, 18 nt, Human
uuccgugcccaagugugu

SEQ ID NO: 142812 - RNA, 18 nt, Human
uuccgugcccaagugugu

SEQ ID NO: 142813 - RNA, 20 nt, Human
uucucuguguuuucagcauu

SEQ ID NO: 142814 - RNA, 20 nt, Human
uucucuguguuuucagcauu

SEQ ID NO: 142815 - RNA, 21 nt, Human
uugcaauaccuuacaauuagu

SEQ ID NO: 142816 - RNA, 21 nt, Human
uugcaauaccuuacaauuagu

SEQ ID NO: 142817 - RNA, 18 nt, Human
uugugcagaagaaauggu

SEQ ID NO: 142818 - RNA, 19 nt, Human
uugugcagaagaaaugguu

SEQ ID NO: 142819 - RNA, 19 nt, Human
uugugcagaagaaaugguu

SEQ ID NO: 142820 - RNA, 26 nt, Human
uuucccacccucccacccaaaacaaa

SEQ ID NO: 142821 - RNA, 26 nt, Human
uuucccacccucccacccaaaacaaa

SEQ ID NO: 142822 - RNA, 24 nt, Human
uuugcuccucaguagguucagaua

SEQ ID NO: 142823 - RNA, 24 nt, Human
uuugcuccucaguagguucagaua

SEQ ID NO: 142824 - RNA, 21 nt, Human
uuugcugaauagaaagacaaa

SEQ ID NO: 142825 - RNA, 23 nt, Human
uuuuuggaaaaaaaacaccacuu

SEQ ID NO: 142826 - RNA, 23 nt, Human
uuuuuggaaaaaaaacaccacuu

SEQ ID NO: 142827 - RNA, 27 nt, Human
aaaacccucuccuugaccccccugccc

SEQ ID NO: 142828 - RNA, 22 nt, Human
aacccucuccuugaccccccug

SEQ ID NO: 142829 - RNA, 21 nt, Human
aaccggcccccccacgcccug

SEQ ID NO: 142830 - RNA, 19 nt, Human
acaaaccggcccccccacg

SEQ ID NO: 142831 - RNA, 21 nt, Human
acaacaaaccggcccccccac

SEQ ID NO: 142832 - RNA, 20 nt, Human
accccccugccccaggcccc

SEQ ID NO: 142833 - RNA, 22 nt, Human
accccccugccccaggccccaa

SEQ ID NO: 142834 - RNA, 22 nt, Human
accugaaggagcgggcaagggg

SEQ ID NO: 142835 - RNA, 20 nt, Human
agaaaaaaagggggagaggg

SEQ ID NO: 142836 - RNA, 21 nt, Human
agaaaaaaagggggagagggg

SEQ ID NO: 142837 - RNA, 19 nt, Human
agaaagcucuuuacugggg

SEQ ID NO: 142838 - RNA, 19 nt, Human
aggagcgggcaaggggacu

SEQ ID NO: 142839 - RNA, 19 nt, Human
agggggagaggggcccaag

SEQ ID NO: 142840 - RNA, 22 nt, Human
agggggagaggggcccaagggu

SEQ ID NO: 142841 - RNA, 25 nt, Human
caacaaaccggcccccccacgcccu

SEQ ID NO: 142842 - RNA, 26 nt, Human
caacaaaccggcccccccacgcccug

SEQ ID NO: 142843 - RNA, 18 nt, Human
caggccucacccacccca

SEQ ID NO: 142844 - RNA, 23 nt, Human
ccacaacaaaccggcccccccac

SEQ ID NO: 142845 - RNA, 25 nt, Human
ccccaggccccaaucagugcaggcc

SEQ ID NO: 142846 - RNA, 27 nt, Human
ccccaggccccaaucagugcaggccuc

SEQ ID NO: 142847 - RNA, 22 nt, Human
cccccacccccuccuagggucc

SEQ ID NO: 142848 - RNA, 19 nt, Human
cccccacgcccuggacucc

SEQ ID NO: 142849 - RNA, 18 nt, Human
cccccugccccaggcccc

SEQ ID NO: 142850 - RNA, 22 nt, Human
cccccugccccaggccccaauc

SEQ ID NO: 142851 - RNA, 20 nt, Human
ccccuaccugcccccacccc

SEQ ID NO: 142852 - RNA, 24 nt, Human
cccuaccugcccccacccccuccu

SEQ ID NO: 142853 - RNA, 23 nt, Human
ccgcugagaccugaaggagcggg

SEQ ID NO: 142854 - RNA, 25 nt, Human
ccggcccccccacgcccuggacucc

SEQ ID NO: 142855 - RNA, 21 nt, Human
ccuaccugcccccacccccuc

SEQ ID NO: 142856 - RNA, 26 nt, Human
ccucacccaccccagcuggguagcag

SEQ ID NO: 142857 - RNA, 21 nt, Human
cucccccuaccugcccccacc

SEQ ID NO: 142858 - RNA, 22 nt, Human
cuucaggaggggccccagggag

SEQ ID NO: 142859 - RNA, 18 nt, Human
gaaaaaaagggggagagg

SEQ ID NO: 142860 - RNA, 18 nt, Human
gaggaugggagcccaggg

SEQ ID NO: 142861 - RNA, 21 nt, Human
gagggccgcaggggagcgagg

SEQ ID NO: 142862 - RNA, 23 nt, Human
gaggggccccagggagggggcag

SEQ ID NO: 142863 - RNA, 22 nt, Human
gagggggggucuucccuccacc

SEQ ID NO: 142864 - RNA, 24 nt, Human
gccaaaacccucuccuugacccuu

SEQ ID NO: 142865 - RNA, 21 nt, Human
gcccacuggcugaggguaucc

SEQ ID NO: 142866 - RNA, 19 nt, Human
gcucagagggccgcagggg

SEQ ID NO: 142867 - RNA, 19 nt, Human
ggcaaggggacucaaacug

SEQ ID NO: 142868 - RNA, 19 nt, Human
gggagcccggccggggggc

SEQ ID NO: 142869 - RNA, 23 nt, Human
gugggcucagagggccgcagggg

SEQ ID NO: 142870 - RNA, 22 nt, Human
uaccugcccccacccccuccua

SEQ ID NO: 142871 - RNA, 21 nt, Human
uagaaaaaaagggggagaggg

SEQ ID NO: 142872 - RNA, 21 nt, Human
ugaccccccugccccaggccc

SEQ ID NO: 142873 - RNA, 22 nt, Human
ugaccccccugccccaggcccc

SEQ ID NO: 142874 - RNA, 23 nt, Human
ugagggggggucuucccuccacc

SEQ ID NO: 142875 - RNA, 20 nt, Human
ugccccaggccccaaucagu

SEQ ID NO: 142876 - RNA, 21 nt, Human
ugcucggggagcccgagcuca

SEQ ID NO: 142877 - RNA, 22 nt, Human
uggggugagggggggucuuccc

SEQ ID NO: 142878 - RNA, 23 nt, Human
ugguacaauaaauagaaaaaaag

SEQ ID NO: 142879 - RNA, 24 nt, Human
ugugagaaagcucuuuacuggggg

SEQ ID NO: 142880 - RNA, 18 nt, Human
uuaguggggagggagcgg

SEQ ID NO: 142881 - RNA, 23 nt, Human
aaaauacugaaauuuucacugug

SEQ ID NO: 142882 - RNA, 18 nt, Human
aaacaggucugagcuacu

SEQ ID NO: 142883 - RNA, 28 nt, Human
aaagaacuuaaccggaaacuuucuuggc

SEQ ID NO: 142884 - RNA, 21 nt, Human
aaaguaaaauaaaauagagga

SEQ ID NO: 142885 - RNA, 24 nt, Human
aaccuuacaguggcaccugaaaag

SEQ ID NO: 142886 - RNA, 23 nt, Human
aacuaugaaauccccaccuuaag

SEQ ID NO: 142887 - RNA, 22 nt, Human
aagaagacaaacuaaaugcaag

SEQ ID NO: 142888 - RNA, 26 nt, Human
aagcagagaaaagggaggaacaguuc

SEQ ID NO: 142889 - RNA, 23 nt, Human
aaggaagaagacaaacuaaaugc

SEQ ID NO: 142890 - RNA, 23 nt, Human
aauccccaccuuaaguagcuagg

SEQ ID NO: 142891 - RNA, 20 nt, Human
acagccagacacacacaguc

SEQ ID NO: 142892 - RNA, 23 nt, Human
acaugcuacaccugugcauggac

SEQ ID NO: 142893 - RNA, 20 nt, Human
accauaaaaacauagugaau

SEQ ID NO: 142894 - RNA, 18 nt, Human
agaaccuuacaguggcac

SEQ ID NO: 142895 - RNA, 19 nt, Human
agacaaacuaaaugcaagc

SEQ ID NO: 142896 - RNA, 21 nt, Human
agacaaacuaaaugcaagccg

SEQ ID NO: 142897 - RNA, 21 nt, Human
agggaggaacaguucauggaa

SEQ ID NO: 142898 - RNA, 18 nt, Human
aggggcugucacccuggg

SEQ ID NO: 142899 - RNA, 19 nt, Human
aggggcugucacccugggg

SEQ ID NO: 142900 - RNA, 20 nt, Human
agucugggauacacagcuga

SEQ ID NO: 142901 - RNA, 23 nt, Human
auagaggaaugcuaucucugggg

SEQ ID NO: 142902 - RNA, 21 nt, Human
auagugaaugucuuugacacc

SEQ ID NO: 142903 - RNA, 23 nt, Human
caaacaggcagaaaucuuucuau

SEQ ID NO: 142904 - RNA, 21 nt, Human
caaacuaaaugcaagcaacag

SEQ ID NO: 142905 - RNA, 21 nt, Human
caacccaguaaggcucagcaa

SEQ ID NO: 142906 - RNA, 24 nt, Human
cacauacuaaaaaauuuuuuucac

SEQ ID NO: 142907 - RNA, 21 nt, Human
cagucugggauacacagcuga

SEQ ID NO: 142908 - RNA, 21 nt, Human
cauacuagaaaauuuggagga

SEQ ID NO: 142909 - RNA, 22 nt, Human
cauagugaaugucuuugacacc

SEQ ID NO: 142910 - RNA, 19 nt, Human
ccacuacccccaacaccca

SEQ ID NO: 142911 - RNA, 21 nt, Human
ccacuacccccaacacccaga

SEQ ID NO: 142912 - RNA, 23 nt, Human
cccacuacccccaacacccagau

SEQ ID NO: 142913 - RNA, 19 nt, Human
ccccucgcgcggguccccg

SEQ ID NO: 142914 - RNA, 19 nt, Human
ccgccgccgccgccucccg

SEQ ID NO: 142915 - RNA, 18 nt, Human
ccgccgccgccucccggc

SEQ ID NO: 142916 - RNA, 23 nt, Human
ccgccgccgccucccggccgccc

SEQ ID NO: 142917 - RNA, 22 nt, Human
ccgccgccucccggccgccccu

SEQ ID NO: 142918 - RNA, 21 nt, Human
ccggcuuuuagaaugucagaa

SEQ ID NO: 142919 - RNA, 24 nt, Human
ccucacuggggaccacgcuuuuaa

SEQ ID NO: 142920 - RNA, 21 nt, Human
ccuccucuaaacguguuguua

SEQ ID NO: 142921 - RNA, 20 nt, Human
cggcuuuuagaaugucagaa

SEQ ID NO: 142922 - RNA, 19 nt, Human
cgggagcggcggccgaagg

SEQ ID NO: 142923 - RNA, 18 nt, Human
cuacagccagacacacac

SEQ ID NO: 142924 - RNA, 19 nt, Human
cuacccccaacacccagau

SEQ ID NO: 142925 - RNA, 18 nt, Human
cucccggccgccccucgc

SEQ ID NO: 142926 - RNA, 18 nt, Human
cugaccguucuccuccca

SEQ ID NO: 142927 - RNA, 19 nt, Human
cugcugcuacuucuggcgg

SEQ ID NO: 142928 - RNA, 20 nt, Human
cugcugcuacuucuggcggc

SEQ ID NO: 142929 - RNA, 22 nt, Human
cuggcggccgccgccgccgccu

SEQ ID NO: 142930 - RNA, 20 nt, Human
gaaaaucucuaagguacagu

SEQ ID NO: 142931 - RNA, 23 nt, Human
gaggauuuucaacccucuuucuu

SEQ ID NO: 142932 - RNA, 18 nt, Human
gcggccgccgccgccgcc

SEQ ID NO: 142933 - RNA, 19 nt, Human
gcugccgucgccgccgccg

SEQ ID NO: 142934 - RNA, 18 nt, Human
ggaaaaggagggccuuaa

SEQ ID NO: 142935 - RNA, 18 nt, Human
ggagaaaagcagagaaaa

SEQ ID NO: 142936 - RNA, 18 nt, Human
guacaguuuuucuuagaa

SEQ ID NO: 142937 - RNA, 19 nt, Human
guuugagcacuagaggaaa

SEQ ID NO: 142938 - RNA, 24 nt, Human
uaaaauacugaaauuuucacugug

SEQ ID NO: 142939 - RNA, 25 nt, Human
uaacauuggccuuacugaacagcca

SEQ ID NO: 142940 - RNA, 22 nt, Human
uacagccagacacacacagucc

SEQ ID NO: 142941 - RNA, 23 nt, Human
uacauuagugauaaaauacugaa

SEQ ID NO: 142942 - RNA, 23 nt, Human
uacccaaaaccuauuguccaaac

SEQ ID NO: 142943 - RNA, 24 nt, Human
uacccccaacacccagauuaauuu

SEQ ID NO: 142944 - RNA, 19 nt, Human
uacuagaaaauuuggagga

SEQ ID NO: 142945 - RNA, 19 nt, Human
uagaaugucacuuugauuc

SEQ ID NO: 142946 - RNA, 22 nt, Human
uaggugcaaaagcaacucugua

SEQ ID NO: 142947 - RNA, 23 nt, Human
uauccuaaucuguacuacccaaa

SEQ ID NO: 142948 - RNA, 21 nt, Human
ucccacuacccccaacaccca

SEQ ID NO: 142949 - RNA, 23 nt, Human
uccucccacuacccccaacaccc

SEQ ID NO: 142950 - RNA, 22 nt, Human
uccuccucuaaacguguuguua

SEQ ID NO: 142951 - RNA, 19 nt, Human
uccugcugcuacuucuggc

SEQ ID NO: 142952 - RNA, 20 nt, Human
ucugcuaaaucuucuuugga

SEQ ID NO: 142953 - RNA, 20 nt, Human
ucuggcggccgccgccgccg

SEQ ID NO: 142954 - RNA, 18 nt, Human
ucuguaauaugaggcuuc

SEQ ID NO: 142955 - RNA, 19 nt, Human
ucuguauuaacagucuggg

SEQ ID NO: 142956 - RNA, 23 nt, Human
ugaaauuuucacugugaaaauaa

SEQ ID NO: 142957 - RNA, 19 nt, Human
ugaaccauaaaaacauagu

SEQ ID NO: 142958 - RNA, 23 nt, Human
ugagagaaccuuacaguggcacc

SEQ ID NO: 142959 - RNA, 24 nt, Human
ugauauagaucauugcucauacau

SEQ ID NO: 142960 - RNA, 20 nt, Human
ugauucugaccguucuccuc

SEQ ID NO: 142961 - RNA, 21 nt, Human
ugauucugaccguucuccucc

SEQ ID NO: 142962 - RNA, 19 nt, Human
uggagggaaaaggagggcc

SEQ ID NO: 142963 - RNA, 19 nt, Human
uggcagucaugaaguaauc

SEQ ID NO: 142964 - RNA, 26 nt, Human
uggggaccacgcuuuuaaguacuugu

SEQ ID NO: 142965 - RNA, 19 nt, Human
uguccaaacaggcagaaau

SEQ ID NO: 142966 - RNA, 22 nt, Human
ugugguauuaaaagaggaacag

SEQ ID NO: 142967 - RNA, 19 nt, Human
uguucuuuuuuuaauugga

SEQ ID NO: 142968 - RNA, 19 nt, Human
uuaagugcugaaaagauac

SEQ ID NO: 142969 - RNA, 19 nt, Human
uucaacccucuuucuuuuu

SEQ ID NO: 142970 - RNA, 23 nt, Human
uucccaggcugagagaaccuuac

SEQ ID NO: 142971 - RNA, 24 nt, Human
uucuguauuaacagucugggauac

SEQ ID NO: 142972 - RNA, 20 nt, Human
uuguauuuguuugagcacua

SEQ ID NO: 142973 - RNA, 22 nt, Human
uuucuuggccucacuggggacc

SEQ ID NO: 142974 - RNA, 22 nt, Human
uuuguuugagcacuagaggaaa

SEQ ID NO: 142975 - RNA, 21 nt, Human
aacaaaaacauccaccaaugg

SEQ ID NO: 142976 - RNA, 26 nt, Human
acauaugcaucucugggcauaucucu

SEQ ID NO: 142977 - RNA, 19 nt, Human
caacuccgcugcuggggcg

SEQ ID NO: 142978 - RNA, 26 nt, Human
caagcugguuagguaauuagcccuug

SEQ ID NO: 142979 - RNA, 21 nt, Human
cagacacugcagcucagcgca

SEQ ID NO: 142980 - RNA, 19 nt, Human
ccagauggccaauacaagc

SEQ ID NO: 142981 - RNA, 18 nt, Human
cccggccccaggcggccc

SEQ ID NO: 142982 - RNA, 21 nt, Human
ccgcauccuuccgcccaggcc

SEQ ID NO: 142983 - RNA, 18 nt, Human
ccgcugcuggggcgggag

SEQ ID NO: 142984 - RNA, 24 nt, Human
ccgcugcuggggcgggagcccggc

SEQ ID NO: 142985 - RNA, 18 nt, Human
ccuccgcggcgcgacgcu

SEQ ID NO: 142986 - RNA, 22 nt, Human
cuugaagaauucuuuuauaauc

SEQ ID NO: 142987 - RNA, 19 nt, Human
cuugcauuuuuuccauuug

SEQ ID NO: 142988 - RNA, 26 nt, Human
gccccaggcggccccgcauccuuccg

SEQ ID NO: 142989 - RNA, 20 nt, Human
uagcucgggaccccgcucgg

SEQ ID NO: 142990 - RNA, 19 nt, Human
uccgcugcuggggcgggag

SEQ ID NO: 142991 - RNA, 19 nt, Human
ucggccacgccaccuacgc

SEQ ID NO: 142992 - RNA, 21 nt, Human
ucggggagaggcgccaguugg

SEQ ID NO: 142993 - RNA, 23 nt, Human
uggccaauacaagcugguuaggu

SEQ ID NO: 142994 - RNA, 18 nt, Human
aggcaggccagucccaug

SEQ ID NO: 142995 - RNA, 21 nt, Human
auggaaguggggugaucucag

SEQ ID NO: 142996 - RNA, 23 nt, Human
cacccccgccgcccuucccgagc

SEQ ID NO: 142997 - RNA, 23 nt, Human
cacggcauuuugcaccuggcugg

SEQ ID NO: 142998 - RNA, 23 nt, Human
caggggcuucugcucaucuucca

SEQ ID NO: 142999 - RNA, 24 nt, Human
ccaaaaaagcguuggguuggggga

SEQ ID NO: 143000 - RNA, 21 nt, Human
ccccacggccccuucuacagg

SEQ ID NO: 143001 - RNA, 21 nt, Human
ccccgugcgcccagggcgcaa

SEQ ID NO: 143002 - RNA, 18 nt, Human
ccgccgcccuucccgagc

SEQ ID NO: 143003 - RNA, 20 nt, Human
ccgccgcccuucccgagcuc

SEQ ID NO: 143004 - RNA, 20 nt, Human
ccgugcgcccagggcgcaaa

SEQ ID NO: 143005 - RNA, 18 nt, Human
ccuggcuuagagcaguug

SEQ ID NO: 143006 - RNA, 25 nt, Human
cgagcugggcggaggaggcaggcca

SEQ ID NO: 143007 - RNA, 23 nt, Human
cgcccagggcgcaaagagggcuc

SEQ ID NO: 143008 - RNA, 21 nt, Human
cguguagggccccgugcgccc

SEQ ID NO: 143009 - RNA, 19 nt, Human
cucaucuuccacccccgcc

SEQ ID NO: 143010 - RNA, 21 nt, Human
cuuccacccccgccgcccuuc

SEQ ID NO: 143011 - RNA, 24 nt, Human
cuuguggguccccucgcuggagag

SEQ ID NO: 143012 - RNA, 20 nt, Human
gagcuccauguuagcaacuc

SEQ ID NO: 143013 - RNA, 18 nt, Human
gcucaucuuccacccccg

SEQ ID NO: 143014 - RNA, 21 nt, Human
gcuggcugggcgaggccggcu

SEQ ID NO: 143015 - RNA, 24 nt, Human
gcuggguccccgccccggcugcgc

SEQ ID NO: 143016 - RNA, 18 nt, Human
ggcaggacaaucaggccu

SEQ ID NO: 143017 - RNA, 22 nt, Human
ggcgaggccggcucgaaucucu

SEQ ID NO: 143018 - RNA, 20 nt, Human
ggcuggguccccgccccggc

SEQ ID NO: 143019 - RNA, 24 nt, Human
ggcuucugcucaucuuccaccccc

SEQ ID NO: 143020 - RNA, 18 nt, Human
gggcggaggaggcaggcc

SEQ ID NO: 143021 - RNA, 20 nt, Human
ggggaccccacggccccuuc

SEQ ID NO: 143022 - RNA, 19 nt, Human
gggggagaaggaaaugaug

SEQ ID NO: 143023 - RNA, 25 nt, Human
ggguugggggagaaggaaaugaugg

SEQ ID NO: 143024 - RNA, 24 nt, Human
guggguccccucgcuggagagggc

SEQ ID NO: 143025 - RNA, 19 nt, Human
ucagagcuccauguuagca

SEQ ID NO: 143026 - RNA, 22 nt, Human
uccacccccgccgcccuucccg

SEQ ID NO: 143027 - RNA, 18 nt, Human
uccagugggcuaggcugg

SEQ ID NO: 143028 - RNA, 19 nt, Human
uccauguuagcaacucugg

SEQ ID NO: 143029 - RNA, 25 nt, Human
ucggaaaggucgggagggccgaggc

SEQ ID NO: 143030 - RNA, 22 nt, Human
ucugcccacccuggcaggacaa

SEQ ID NO: 143031 - RNA, 22 nt, Human
ucuuccacccccgccgcccuuc

SEQ ID NO: 143032 - RNA, 22 nt, Human
ugacacggcauuuugcaccugg

SEQ ID NO: 143033 - RNA, 19 nt, Human
ugagcugauccaaaaaagc

SEQ ID NO: 143034 - RNA, 23 nt, Human
ugauggaaguggggugaucucag

SEQ ID NO: 143035 - RNA, 23 nt, Human
uggcaggacaaucaggccuagga

SEQ ID NO: 143036 - RNA, 22 nt, Human
ugggcggaggaggcaggccagu

SEQ ID NO: 143037 - RNA, 26 nt, Human
uggguugggggagaaggaaaugaugg

SEQ ID NO: 143038 - RNA, 21 nt, Human
uugugguuccaacuguuuuau

SEQ ID NO: 143039 - RNA, 22 nt, Human
uuugugguuccaacuguuuuau

SEQ ID NO: 143040 - RNA, 22 nt, Human
uuuuuugugguuccaacuguuu

SEQ ID NO: 143041 - RNA, 24 nt, Human
uuuuuuuuuuuuuuuuuugugguu

SEQ ID NO: 143042 - RNA, 23 nt, Human
uuuuuuuuuuuuuuuuuuugugg

SEQ ID NO: 143043 - RNA, 27 nt, Human
uuuuuuuuuuuuuuuuuuuuuuugggg

SEQ ID NO: 143044 - RNA, 22 nt, Human
aaaaaaacacacacacaaggcc

SEQ ID NO: 143045 - RNA, 24 nt, Human
aaaaaaacacacacacaaggccaa

SEQ ID NO: 143046 - RNA, 25 nt, Human
aaaaaaacacacacacaaggccaac

SEQ ID NO: 143047 - RNA, 20 nt, Human
aaaaaacacacacacaaggc

SEQ ID NO: 143048 - RNA, 22 nt, Human
aaacacacacacaaggccaaca

SEQ ID NO: 143049 - RNA, 22 nt, Human
aaaggagcuggggguggaagug

SEQ ID NO: 143050 - RNA, 18 nt, Human
accauccugggacagagc

SEQ ID NO: 143051 - RNA, 21 nt, Human
accuaaacacuucacugcccc

SEQ ID NO: 143052 - RNA, 22 nt, Human
aggaacauucacuggauuccuc

SEQ ID NO: 143053 - RNA, 21 nt, Human
aggcaccaggggguggaaaca

SEQ ID NO: 143054 - RNA, 20 nt, Human
auucacuggauuccucuucc

SEQ ID NO: 143055 - RNA, 21 nt, Human
auucacuggauuccucuucca

SEQ ID NO: 143056 - RNA, 24 nt, Human
auuuaauauggcaaaauucacaua

SEQ ID NO: 143057 - RNA, 21 nt, Human
caaaaucacucccacagcucc

SEQ ID NO: 143058 - RNA, 18 nt, Human
caaaugccaugcaugugu

SEQ ID NO: 143059 - RNA, 21 nt, Human
caacaacuuagaaucugagca

SEQ ID NO: 143060 - RNA, 19 nt, Human
cacuggauuccucuuccag

SEQ ID NO: 143061 - RNA, 22 nt, Human
cacuucacugccccuggcagca

SEQ ID NO: 143062 - RNA, 18 nt, Human
ccaggcagugacuccggc

SEQ ID NO: 143063 - RNA, 22 nt, Human
ccccuggcagcauccgcuggga

SEQ ID NO: 143064 - RNA, 18 nt, Human
cccguggucccugggugg

SEQ ID NO: 143065 - RNA, 19 nt, Human
cccugcgaugagugggcug

SEQ ID NO: 143066 - RNA, 19 nt, Human
ccuccuguucaggaacaaa

SEQ ID NO: 143067 - RNA, 23 nt, Human
cucaugcuccagccacaucccca

SEQ ID NO: 143068 - RNA, 19 nt, Human
cuggcagcauccgcuggga

SEQ ID NO: 143069 - RNA, 18 nt, Human
cuggcuccuuccuucugg

SEQ ID NO: 143070 - RNA, 21 nt, Human
cuuccuugaaacagaaacacu

SEQ ID NO: 143071 - RNA, 18 nt, Human
gagaacuuaaaaaaaaac

SEQ ID NO: 143072 - RNA, 20 nt, Human
gagaacuuaaaaaaaaacac

SEQ ID NO: 143073 - RNA, 22 nt, Human
gcagucucucauaauguuaaaa

SEQ ID NO: 143074 - RNA, 21 nt, Human
gcccugcgaugagugggcugg

SEQ ID NO: 143075 - RNA, 18 nt, Human
gggaaaggagcugggggu

SEQ ID NO: 143076 - RNA, 18 nt, Human
ggggguggaaguguggaa

SEQ ID NO: 143077 - RNA, 20 nt, Human
ggugaaaacccuuggagagg

SEQ ID NO: 143078 - RNA, 24 nt, Human
uaaaacgguagccauuugcauuua

SEQ ID NO: 143079 - RNA, 23 nt, Human
uaaggugaaaacccuuggagagg

SEQ ID NO: 143080 - RNA, 23 nt, Human
ucaccuaaacacuucacugcccc

SEQ ID NO: 143081 - RNA, 19 nt, Human
uccagccacauccccaggg

SEQ ID NO: 143082 - RNA, 22 nt, Human
ucccacagcucccauuguugcu

SEQ ID NO: 143083 - RNA, 23 nt, Human
ucccauuguugcuaaggugaaaa

SEQ ID NO: 143084 - RNA, 20 nt, Human
uccccagggaugcccuccug

SEQ ID NO: 143085 - RNA, 21 nt, Human
ucccuggguggccugcaggca

SEQ ID NO: 143086 - RNA, 19 nt, Human
ucuguggugccugaaggcg

SEQ ID NO: 143087 - RNA, 19 nt, Human
ugacuccggcugccaauca

SEQ ID NO: 143088 - RNA, 21 nt, Human
ugaggaagauuuaauauggca

SEQ ID NO: 143089 - RNA, 19 nt, Human
ugagugggcugggagcugg

SEQ ID NO: 143090 - RNA, 22 nt, Human
ugccaugcaugugugcuugggc

SEQ ID NO: 143091 - RNA, 18 nt, Human
ugcuaaggugaaaacccu

SEQ ID NO: 143092 - RNA, 23 nt, Human
ugcuuguucucgcgccgaccgcg

SEQ ID NO: 143093 - RNA, 19 nt, Human
uggcagcauccgcugggac

SEQ ID NO: 143094 - RNA, 20 nt, Human
uggcagcauccgcugggacu

SEQ ID NO: 143095 - RNA, 22 nt, Human
uggccugcaggcaccagggggu

SEQ ID NO: 143096 - RNA, 18 nt, Human
ugggacagagcuggcuca

SEQ ID NO: 143097 - RNA, 26 nt, Human
ugggacagagcuggcucaugcuccag

SEQ ID NO: 143098 - RNA, 18 nt, Human
uggugccugaaggcgucc

SEQ ID NO: 143099 - RNA, 22 nt, Human
ugguucuaacaaauguugacag

SEQ ID NO: 143100 - RNA, 21 nt, Human
uguaaaaaaucaugagcccug

SEQ ID NO: 143101 - RNA, 20 nt, Human
uguggaaggacugaguguug

SEQ ID NO: 143102 - RNA, 20 nt, Human
uucacuggauuccucuucca

SEQ ID NO: 143103 - RNA, 18 nt, Human
uuguaaaaaaucaugagc

SEQ ID NO: 143104 - RNA, 18 nt, Human
aaccccacaccccuccuc

SEQ ID NO: 143105 - RNA, 24 nt, Human
aacuggcccccuggagagggccca

SEQ ID NO: 143106 - RNA, 21 nt, Human
acacacacaugcucacacaca

SEQ ID NO: 143107 - RNA, 19 nt, Human
acacugcaggagggaccac

SEQ ID NO: 143108 - RNA, 26 nt, Human
acauggacucaugcacacacaugugg

SEQ ID NO: 143109 - RNA, 24 nt, Human
accccacaccccuccuccccuuug

SEQ ID NO: 143110 - RNA, 22 nt, Human
accccagagcuagaagcuucug

SEQ ID NO: 143111 - RNA, 22 nt, Human
agaaaaaaccuuuaagacagaa

SEQ ID NO: 143112 - RNA, 21 nt, Human
agagcccccccacgcgcacac

SEQ ID NO: 143113 - RNA, 19 nt, Human
aggagggaccacagggucu

SEQ ID NO: 143114 - RNA, 20 nt, Human
agggaccacagggucugggc

SEQ ID NO: 143115 - RNA, 25 nt, Human
aggucccccacucaccucucccauc

SEQ ID NO: 143116 - RNA, 19 nt, Human
aguauggggcagaagaaca

SEQ ID NO: 143117 - RNA, 18 nt, Human
auauccauccuggggggc

SEQ ID NO: 143118 - RNA, 23 nt, Human
augcacacacacaugcucacaca

SEQ ID NO: 143119 - RNA, 24 nt, Human
cacacacaugcucacacacauuca

SEQ ID NO: 143120 - RNA, 23 nt, Human
cacacauguggacacacuggggc

SEQ ID NO: 143121 - RNA, 23 nt, Human
cacacauucacccccgguacaca

SEQ ID NO: 143122 - RNA, 18 nt, Human
cacauacacaccacacag

SEQ ID NO: 143123 - RNA, 24 nt, Human
cacaugcucacacacauucacccc

SEQ ID NO: 143124 - RNA, 25 nt, Human
caccaaagaggccucgauaaauaaa

SEQ ID NO: 143125 - RNA, 18 nt, Human
caccccuccuccccuuug

SEQ ID NO: 143126 - RNA, 21 nt, Human
caccccuccugcccacaucag

SEQ ID NO: 143127 - RNA, 22 nt, Human
caccucucccaucucauaucca

SEQ ID NO: 143128 - RNA, 24 nt, Human
cacgcgcacacauggacucaugca

SEQ ID NO: 143129 - RNA, 23 nt, Human
cagaagaacagcucagggacccc

SEQ ID NO: 143130 - RNA, 24 nt, Human
cagaagaacagcucagggaccccu

SEQ ID NO: 143131 - RNA, 19 nt, Human
cagaccccagagcuagaag

SEQ ID NO: 143132 - RNA, 21 nt, Human
cagauucugggagcaggcacu

SEQ ID NO: 143133 - RNA, 24 nt, Human
caggcggcggcggcggcgcgggcc

SEQ ID NO: 143134 - RNA, 25 nt, Human
caggcggcggcggcggcgcgggccc

SEQ ID NO: 143135 - RNA, 24 nt, Human
caggcucaccaaagaggccucgau

SEQ ID NO: 143136 - RNA, 18 nt, Human
cagucagucugucucccu

SEQ ID NO: 143137 - RNA, 22 nt, Human
cagucugucucccucccucacu

SEQ ID NO: 143138 - RNA, 21 nt, Human
cauccuggggggcagcugggg

SEQ ID NO: 143139 - RNA, 22 nt, Human
caucucauauccauccuggggg

SEQ ID NO: 143140 - RNA, 19 nt, Human
ccaaagccuccccaccugg

SEQ ID NO: 143141 - RNA, 19 nt, Human
ccagagcaaaagggccgaa

SEQ ID NO: 143142 - RNA, 25 nt, Human
ccagccaaagccuccccaccuggcc

SEQ ID NO: 143143 - RNA, 25 nt, Human
ccagccagccaaagccuccccaccu

SEQ ID NO: 143144 - RNA, 19 nt, Human
cccacaccccuccuccccu

SEQ ID NO: 143145 - RNA, 23 nt, Human
ccccacucaccucucccaucuca

SEQ ID NO: 143146 - RNA, 24 nt, Human
ccccaggcucaccaaagaggccuc

SEQ ID NO: 143147 - RNA, 21 nt, Human
cccccggccgccgcugccugc

SEQ ID NO: 143148 - RNA, 24 nt, Human
ccccuccuccccuuugcugauucc

SEQ ID NO: 143149 - RNA, 23 nt, Human
cccuccuccccuuugcugauucc

SEQ ID NO: 143150 - RNA, 20 nt, Human
cccugggccuugugggaccc

SEQ ID NO: 143151 - RNA, 26 nt, Human
ccgcuccgcccccggccgccgcugcc

SEQ ID NO: 143152 - RNA, 21 nt, Human
ccugcccacaucagugaaggu

SEQ ID NO: 143153 - RNA, 20 nt, Human
ccugcccuugcucaagggua

SEQ ID NO: 143154 - RNA, 18 nt, Human
ccuggucccuccaagccc

SEQ ID NO: 143155 - RNA, 18 nt, Human
ccuucaguauggggcaga

SEQ ID NO: 143156 - RNA, 27 nt, Human
cgcgcacacauggacucaugcacacag

SEQ ID NO: 143157 - RNA, 22 nt, Human
cggcccgggugacaggcggcgg

SEQ ID NO: 143158 - RNA, 20 nt, Human
cgguacaugcacacacacag

SEQ ID NO: 143159 - RNA, 26 nt, Human
cgguacaugcacacacacaugcucac

SEQ ID NO: 143160 - RNA, 20 nt, Human
cucaccguccuacacgccca

SEQ ID NO: 143161 - RNA, 20 nt, Human
cucccucccucacuuuccca

SEQ ID NO: 143162 - RNA, 20 nt, Human
cugcagugcacacacagagg

SEQ ID NO: 143163 - RNA, 19 nt, Human
cuugugggacccccagagc

SEQ ID NO: 143164 - RNA, 19 nt, Human
gaccacagggucugggcug

SEQ ID NO: 143165 - RNA, 20 nt, Human
gauuccccaggcucaccaaa

SEQ ID NO: 143166 - RNA, 29 nt, Human
gcacacauggacucaugcacacacauggu

SEQ ID NO: 143167 - RNA, 23 nt, Human
gcccaccccaccaucugaccacc

SEQ ID NO: 143168 - RNA, 24 nt, Human
gcccugggccuugugggaccccca

SEQ ID NO: 143169 - RNA, 21 nt, Human
gcggcggcgcgggcccauggc

SEQ ID NO: 143170 - RNA, 21 nt, Human
gcggcggcggcggcgcgggcc

SEQ ID NO: 143171 - RNA, 24 nt, Human
ggacagggggcuccagggcugcaa

SEQ ID NO: 143172 - RNA, 18 nt, Human
ggagacagaggagagggg

SEQ ID NO: 143173 - RNA, 21 nt, Human
ggaggcaggcgcuucagacac

SEQ ID NO: 143174 - RNA, 22 nt, Human
ggccucgauaaauaaauaacgc

SEQ ID NO: 143175 - RNA, 24 nt, Human
ggcggcggcgcgggcccauggcgg

SEQ ID NO: 143176 - RNA, 22 nt, Human
gggacccccagagcaaaagggc

SEQ ID NO: 143177 - RNA, 18 nt, Human
gggcugggggaggccuuc

SEQ ID NO: 143178 - RNA, 18 nt, Human
ggggcagagcagugggga

SEQ ID NO: 143179 - RNA, 22 nt, Human
gggugacaggcggcggcggcgg

SEQ ID NO: 143180 - RNA, 18 nt, Human
gguagccagaccccagag

SEQ ID NO: 143181 - RNA, 21 nt, Human
ggucagagcaccagauucugg

SEQ ID NO: 143182 - RNA, 20 nt, Human
gguggggcagagcagugggg

SEQ ID NO: 143183 - RNA, 24 nt, Human
guacaugcacacacacaugcucac

SEQ ID NO: 143184 - RNA, 21 nt, Human
gugacaggcggcggcggcggc

SEQ ID NO: 143185 - RNA, 21 nt, Human
gugcacacacagagguguaug

SEQ ID NO: 143186 - RNA, 18 nt, Human
uaaauaaaucacccaggc

SEQ ID NO: 143187 - RNA, 19 nt, Human
uaaauaaaucacccaggcc

SEQ ID NO: 143188 - RNA, 22 nt, Human
uaaaucacccaggccucaguuc

SEQ ID NO: 143189 - RNA, 20 nt, Human
uacacaccacacagacuccu

SEQ ID NO: 143190 - RNA, 25 nt, Human
uagccagaccccagagcuagaagcu

SEQ ID NO: 143191 - RNA, 21 nt, Human
ucagaaaaaaccuuuaagaca

SEQ ID NO: 143192 - RNA, 19 nt, Human
ucucuggaaacccuggucc

SEQ ID NO: 143193 - RNA, 20 nt, Human
ucucuggaaacccugguccc

SEQ ID NO: 143194 - RNA, 19 nt, Human
ugcacacacagagguguau

SEQ ID NO: 143195 - RNA, 28 nt, Human
ugcagagacaaggugagcaucucuggaa

SEQ ID NO: 143196 - RNA, 21 nt, Human
ugcaugcacauacacaccaca

SEQ ID NO: 143197 - RNA, 25 nt, Human
ugcucagccuccuagcgguagccag

SEQ ID NO: 143198 - RNA, 20 nt, Human
uggagagggcccaccccacc

SEQ ID NO: 143199 - RNA, 23 nt, Human
ugggagcaggcacugcccugggc

SEQ ID NO: 143200 - RNA, 25 nt, Human
ugggagcaggcacugcccugggccc

SEQ ID NO: 143201 - RNA, 18 nt, Human
uggggaggcaggcgcuuc

SEQ ID NO: 143202 - RNA, 22 nt, Human
uggguguaggcugcaugcacau

SEQ ID NO: 143203 - RNA, 23 nt, Human
uguaggcugcaugcacauacaca

SEQ ID NO: 143204 - RNA, 24 nt, Human
uguggguguaggcugcaugcacau

SEQ ID NO: 143205 - RNA, 20 nt, Human
uuccccaggcucaccaaaga

SEQ ID NO: 143206 - RNA, 19 nt, Human
acugcaccgacuuccuugc

SEQ ID NO: 143207 - RNA, 19 nt, Human
agagagcagcgcuuagaga

SEQ ID NO: 143208 - RNA, 23 nt, Human
caccgcgacccgggacgccccgc

SEQ ID NO: 143209 - RNA, 21 nt, Human
caccugggguccggccggcuc

SEQ ID NO: 143210 - RNA, 25 nt, Human
cccgggacgccccgcgcuccccaag

SEQ ID NO: 143211 - RNA, 18 nt, Human
cccuccuggcccgcggcc

SEQ ID NO: 143212 - RNA, 18 nt, Human
ccgcggcauggcgcggag

SEQ ID NO: 143213 - RNA, 24 nt, Human
ccggcggcugcggugguggcacuu

SEQ ID NO: 143214 - RNA, 18 nt, Human
cgagcagagagcagcgcu

SEQ ID NO: 143215 - RNA, 23 nt, Human
cgagggcaccgcgacccgggacg

SEQ ID NO: 143216 - RNA, 19 nt, Human
cugccgccuuucacacggc

SEQ ID NO: 143217 - RNA, 18 nt, Human
cuggggagggguccccgg

SEQ ID NO: 143218 - RNA, 24 nt, Human
cugucucgucccgagggcaccgcg

SEQ ID NO: 143219 - RNA, 24 nt, Human
gacccgggacgccccgcgcucccc

SEQ ID NO: 143220 - RNA, 20 nt, Human
gcauggcgcggaggccgggg

SEQ ID NO: 143221 - RNA, 18 nt, Human
gccggcucuggggagggg

SEQ ID NO: 143222 - RNA, 22 nt, Human
ggcaccugggguccggccggcu

SEQ ID NO: 143223 - RNA, 18 nt, Human
ggcauggcgcggaggccg

SEQ ID NO: 143224 - RNA, 20 nt, Human
ggccgagcagagagcagcgc

SEQ ID NO: 143225 - RNA, 18 nt, Human
gggaggggggucucgacu

SEQ ID NO: 143226 - RNA, 21 nt, Human
gggauggggaggggggucucg

SEQ ID NO: 143227 - RNA, 26 nt, Human
ggguccggccggcucuggggaggggu

SEQ ID NO: 143228 - RNA, 18 nt, Human
gucccgagggcaccgcga

SEQ ID NO: 143229 - RNA, 21 nt, Human
uaaggcgcccccuacccaaaa

SEQ ID NO: 143230 - RNA, 22 nt, Human
uaaggcgcccccuacccaaaag

SEQ ID NO: 143231 - RNA, 22 nt, Human
ugcggugguggcacugccaggg

SEQ ID NO: 143232 - RNA, 24 nt, Human
ugcggugguggcacugccaggggc

SEQ ID NO: 143233 - RNA, 26 nt, Human
ugcggugguggcacugccaggggcug

SEQ ID NO: 143234 - RNA, 20 nt, Human
ugggguccggccggcucugg

SEQ ID NO: 143235 - RNA, 23 nt, Human
aaaacaagagccacaacaaagaa

SEQ ID NO: 143236 - RNA, 18 nt, Human
aaaagaaauucccacacc

SEQ ID NO: 143237 - RNA, 21 nt, Human
aaacaagagccacaacaaaga

SEQ ID NO: 143238 - RNA, 23 nt, Human
aaacauacacccacgcauaccca

SEQ ID NO: 143239 - RNA, 27 nt, Human
aaaccccacagugcauuuccaguaggc

SEQ ID NO: 143240 - RNA, 19 nt, Human
aaacugaauuaugacagua

SEQ ID NO: 143241 - RNA, 18 nt, Human
aaagaaauucccacaccc

SEQ ID NO: 143242 - RNA, 25 nt, Human
aaagacaugcauucugcggagaagg

SEQ ID NO: 143243 - RNA, 25 nt, Human
aaagcucccucucccucccccaccc

SEQ ID NO: 143244 - RNA, 25 nt, Human
aaagugcuggugucaucugucuuga

SEQ ID NO: 143245 - RNA, 18 nt, Human
aacuggaaacucacaaac

SEQ ID NO: 143246 - RNA, 20 nt, Human
aagagccacaacaaagaaca

SEQ ID NO: 143247 - RNA, 21 nt, Human
aagagccacaacaaagaacag

SEQ ID NO: 143248 - RNA, 24 nt, Human
aagcuaaacugauuaguaguuugc

SEQ ID NO: 143249 - RNA, 19 nt, Human
aaggauggagggacccaug

SEQ ID NO: 143250 - RNA, 20 nt, Human
aaguaggcauuugcuacaaa

SEQ ID NO: 143251 - RNA, 21 nt, Human
aaguggucucccugagugcgg

SEQ ID NO: 143252 - RNA, 18 nt, Human
acaaagcuggaagcagag

SEQ ID NO: 143253 - RNA, 20 nt, Human
acaaagcuggaagcagaggc

SEQ ID NO: 143254 - RNA, 28 nt, Human
acaacaaagaacagaaaaacaaaaacaa

SEQ ID NO: 143255 - RNA, 22 nt, Human
acaagagccacaacaaagaaca

SEQ ID NO: 143256 - RNA, 19 nt, Human
acacaaagcuggaagcaga

SEQ ID NO: 143257 - RNA, 21 nt, Human
acagcucauguguugcccuuu

SEQ ID NO: 143258 - RNA, 24 nt, Human
accacuuugcauauuguggaaauc

SEQ ID NO: 143259 - RNA, 19 nt, Human
acccacgcauacccacaca

SEQ ID NO: 143260 - RNA, 21 nt, Human
acccaugucagcaagccccag

SEQ ID NO: 143261 - RNA, 20 nt, Human
accccaaugcuucaucuagg

SEQ ID NO: 143262 - RNA, 19 nt, Human
accccacagugcauuucca

SEQ ID NO: 143263 - RNA, 18 nt, Human
acuaacccacuuugugug

SEQ ID NO: 143264 - RNA, 23 nt, Human
acucacacaauggggaugucuuu

SEQ ID NO: 143265 - RNA, 19 nt, Human
acugacucgcuccaagcuc

SEQ ID NO: 143266 - RNA, 18 nt, Human
acugggacacacaguuca

SEQ ID NO: 143267 - RNA, 21 nt, Human
agaaauccauuucauacuuuu

SEQ ID NO: 143268 - RNA, 23 nt, Human
agaaggcuguggagguuuucuug

SEQ ID NO: 143269 - RNA, 19 nt, Human
agaggaaggggaacggggu

SEQ ID NO: 143270 - RNA, 20 nt, Human
agaguuuaaagugcuggugu

SEQ ID NO: 143271 - RNA, 22 nt, Human
agcccauccgucaggcacagca

SEQ ID NO: 143272 - RNA, 18 nt, Human
agcugaagaaauccauuu

SEQ ID NO: 143273 - RNA, 18 nt, Human
agggagccugcaacugug

SEQ ID NO: 143274 - RNA, 23 nt, Human
agguaggaagggacaacacugca

SEQ ID NO: 143275 - RNA, 19 nt, Human
augaauuugcaaaaaccgc

SEQ ID NO: 143276 - RNA, 19 nt, Human
caaagcucccucucccucc

SEQ ID NO: 143277 - RNA, 25 nt, Human
caaugggccacccaugucagcaagc

SEQ ID NO: 143278 - RNA, 19 nt, Human
cacaaagcuggaagcagag

SEQ ID NO: 143279 - RNA, 23 nt, Human
cacaaagcuggaagcagaggcag

SEQ ID NO: 143280 - RNA, 25 nt, Human
cacaacaaagaacagaaaaacaaaa

SEQ ID NO: 143281 - RNA, 19 nt, Human
cacacagguuuagaugcuc

SEQ ID NO: 143282 - RNA, 21 nt, Human
cacagcaagccaauccgggga

SEQ ID NO: 143283 - RNA, 22 nt, Human
cacguacaacaaaaaugaaaac

SEQ ID NO: 143284 - RNA, 23 nt, Human
cacugcaugacagauguucuggu

SEQ ID NO: 143285 - RNA, 22 nt, Human
cagcaagccaauccggggagga

SEQ ID NO: 143286 - RNA, 19 nt, Human
cagggauggaggcugaaga

SEQ ID NO: 143287 - RNA, 23 nt, Human
caggggcccgggaagcccaagga

SEQ ID NO: 143288 - RNA, 23 nt, Human
caugccugcugcuccuuggggcu

SEQ ID NO: 143289 - RNA, 24 nt, Human
cauuucauacuuuugcaugacuuc

SEQ ID NO: 143290 - RNA, 21 nt, Human
ccacaaagaacuaaguaggca

SEQ ID NO: 143291 - RNA, 20 nt, Human
ccacacccugacaauugcca

SEQ ID NO: 143292 - RNA, 23 nt, Human
ccacaccgacauuuuguaccaag

SEQ ID NO: 143293 - RNA, 23 nt, Human
ccagcccccgacacagggcugcu

SEQ ID NO: 143294 - RNA, 18 nt, Human
cccaaggauggagggacc

SEQ ID NO: 143295 - RNA, 21 nt, Human
cccacacaaagaguuuaaagu

SEQ ID NO: 143296 - RNA, 22 nt, Human
cccacacccugacaauugccac

SEQ ID NO: 143297 - RNA, 18 nt, Human
cccagcaggccagguggc

SEQ ID NO: 143298 - RNA, 21 nt, Human
cccaugucagcaagccccagg

SEQ ID NO: 143299 - RNA, 19 nt, Human
ccccacagugcauuuccag

SEQ ID NO: 143300 - RNA, 22 nt, Human
ccccaggacugacucgcuccaa

SEQ ID NO: 143301 - RNA, 26 nt, Human
cccguaggaaaagaaauucccacacc

SEQ ID NO: 143302 - RNA, 25 nt, Human
cccugagugcgguguaagagagccc

SEQ ID NO: 143303 - RNA, 26 nt, Human
ccgacauuuuguaccaaguccagugu

SEQ ID NO: 143304 - RNA, 19 nt, Human
ccgcugccaccugcccgag

SEQ ID NO: 143305 - RNA, 19 nt, Human
ccuccaacuugggacacca

SEQ ID NO: 143306 - RNA, 21 nt, Human
ccugaagaguaaagcgggaga

SEQ ID NO: 143307 - RNA, 22 nt, Human
cgcauacccacacaaagaguuu

SEQ ID NO: 143308 - RNA, 26 nt, Human
cguacaacaaaaaugaaaacaagagc

SEQ ID NO: 143309 - RNA, 20 nt, Human
cuaacacuguuugacagcuc

SEQ ID NO: 143310 - RNA, 19 nt, Human
cuaccuggaguaaacuggc

SEQ ID NO: 143311 - RNA, 24 nt, Human
cuagaggucucuccaucugacccc

SEQ ID NO: 143312 - RNA, 19 nt, Human
cucccuagaggucucucca

SEQ ID NO: 143313 - RNA, 21 nt, Human
cucccucccccaccccaaugc

SEQ ID NO: 143314 - RNA, 22 nt, Human
cuccuaacacuguuugacagcu

SEQ ID NO: 143315 - RNA, 20 nt, Human
cucucccucccccaccccaa

SEQ ID NO: 143316 - RNA, 18 nt, Human
cugacucgcuccaagcuc

SEQ ID NO: 143317 - RNA, 20 nt, Human
gacaauugccacccgacuua

SEQ ID NO: 143318 - RNA, 18 nt, Human
gacauuuuguaccaaguc

SEQ ID NO: 143319 - RNA, 23 nt, Human
gaccugguucuccuuuccaaugg

SEQ ID NO: 143320 - RNA, 21 nt, Human
gacucgcuccaagcucccccu

SEQ ID NO: 143321 - RNA, 20 nt, Human
gagaaguggucucccugaga

SEQ ID NO: 143322 - RNA, 21 nt, Human
gagcccuuuccccugucacag

SEQ ID NO: 143323 - RNA, 18 nt, Human
gaggaagaagguaggaag

SEQ ID NO: 143324 - RNA, 19 nt, Human
gagugguucauggagacag

SEQ ID NO: 143325 - RNA, 20 nt, Human
gagugguucauggagacagg

SEQ ID NO: 143326 - RNA, 21 nt, Human
gauggaggcugaagaagaaaa

SEQ ID NO: 143327 - RNA, 20 nt, Human
gccacaggaaugcuuaaaug

SEQ ID NO: 143328 - RNA, 19 nt, Human
gccccaggacugacucgcu

SEQ ID NO: 143329 - RNA, 23 nt, Human
gcuggggcucuugugguuuuuug

SEQ ID NO: 143330 - RNA, 22 nt, Human
ggaaaauccacaacagcuuaga

SEQ ID NO: 143331 - RNA, 21 nt, Human
ggaaugggagugguucaugga

SEQ ID NO: 143332 - RNA, 18 nt, Human
ggacgggggaaugggagu

SEQ ID NO: 143333 - RNA, 18 nt, Human
ggagauggccgcugccac

SEQ ID NO: 143334 - RNA, 20 nt, Human
ggaugucuuucucccuagag

SEQ ID NO: 143335 - RNA, 18 nt, Human
ggcuggggcucuuguggu

SEQ ID NO: 143336 - RNA, 18 nt, Human
gggaauggaagcacgaug

SEQ ID NO: 143337 - RNA, 18 nt, Human
gggccacccaugucagca

SEQ ID NO: 143338 - RNA, 24 nt, Human
guacaacaaaaaugaaaacaagag

SEQ ID NO: 143339 - RNA, 20 nt, Human
gugcuggugucaucugucuu

SEQ ID NO: 143340 - RNA, 21 nt, Human
uaacacaaagcucccucuccc

SEQ ID NO: 143341 - RNA, 21 nt, Human
uacaacacaaagcuaaacuga

SEQ ID NO: 143342 - RNA, 23 nt, Human
uacacacgaguugucaugcacac

SEQ ID NO: 143343 - RNA, 22 nt, Human
uaccuggaguaaacuggcuggg

SEQ ID NO: 143344 - RNA, 23 nt, Human
uacucugcaagccaucuuccuuc

SEQ ID NO: 143345 - RNA, 23 nt, Human
uagaacaauccacaaagaacuaa

SEQ ID NO: 143346 - RNA, 22 nt, Human
uaggcacuuaacacaaagcucc

SEQ ID NO: 143347 - RNA, 23 nt, Human
ucauuuuauugauccuuuaccau

SEQ ID NO: 143348 - RNA, 22 nt, Human
uccaagcucccccuccugggaa

SEQ ID NO: 143349 - RNA, 22 nt, Human
uccacaacagcuuagaguggca

SEQ ID NO: 143350 - RNA, 19 nt, Human
ucccauacaggaaaaaacc

SEQ ID NO: 143351 - RNA, 22 nt, Human
ucccuugguccaacuuauuccu

SEQ ID NO: 143352 - RNA, 19 nt, Human
uccgucaggcacagcaagc

SEQ ID NO: 143353 - RNA, 19 nt, Human
ucugcaagccaucuuccuu

SEQ ID NO: 143354 - RNA, 19 nt, Human
ucuucccaaacauacaccc

SEQ ID NO: 143355 - RNA, 21 nt, Human
ugaccuccuacugggacacac

SEQ ID NO: 143356 - RNA, 22 nt, Human
ugacucgcuccaagcucccccu

SEQ ID NO: 143357 - RNA, 22 nt, Human
ugagaaguggucucccugagug

SEQ ID NO: 143358 - RNA, 24 nt, Human
ugagcucagucuuuagacuuugga

SEQ ID NO: 143359 - RNA, 19 nt, Human
ugagugccuacuaugugcc

SEQ ID NO: 143360 - RNA, 18 nt, Human
ugagugcgguguaagaga

SEQ ID NO: 143361 - RNA, 23 nt, Human
ugcaacaaguauauuugaaaaca

SEQ ID NO: 143362 - RNA, 23 nt, Human
ugcacauuuucucacuugcugac

SEQ ID NO: 143363 - RNA, 22 nt, Human
uggaaacucacaaacacauugg

SEQ ID NO: 143364 - RNA, 23 nt, Human
uggccagaccccauucuacagcc

SEQ ID NO: 143365 - RNA, 19 nt, Human
uggcuggggcucuuguggu

SEQ ID NO: 143366 - RNA, 19 nt, Human
ugggacaccauuccugaag

SEQ ID NO: 143367 - RNA, 19 nt, Human
ugguauauuaauguauugu

SEQ ID NO: 143368 - RNA, 23 nt, Human
uguauuguuuucaauuucuuuau

SEQ ID NO: 143369 - RNA, 19 nt, Human
ugucagcaagccccaggac

SEQ ID NO: 143370 - RNA, 21 nt, Human
ugugaggggaggaggccaggg

SEQ ID NO: 143371 - RNA, 22 nt, Human
ugugugaggggaggaggccagg

SEQ ID NO: 143372 - RNA, 21 nt, Human
ugugugugaggggaggaggcc

SEQ ID NO: 143373 - RNA, 26 nt, Human
uuaaaaaaaaucauuuuauugauccu

SEQ ID NO: 143374 - RNA, 22 nt, Human
uucuacagcccauccgucaggc

SEQ ID NO: 143375 - RNA, 23 nt, Human
uucucauacacacgaguugucau

SEQ ID NO: 143376 - RNA, 19 nt, Human
uucuuuaucugacucccuc

SEQ ID NO: 143377 - RNA, 19 nt, Human
uuuuuuuuuuuccuaaggg

SEQ ID NO: 143378 - RNA, 18 nt, Human
ccaggccaggcgcgccgc

SEQ ID NO: 143379 - RNA, 19 nt, Human
cccgcccgccgccuccccu

SEQ ID NO: 143380 - RNA, 20 nt, Human
cccgcccgccgccuccccuc

SEQ ID NO: 143381 - RNA, 21 nt, Human
ccgccuccccucagccaggcc

SEQ ID NO: 143382 - RNA, 19 nt, Human
ccucagccaggccaggcca

SEQ ID NO: 143383 - RNA, 26 nt, Human
gcgcccgcccgccgccuccccucagc

SEQ ID NO: 143384 - RNA, 24 nt, Human
aaacagaaggagugugaaauccgg

SEQ ID NO: 143385 - RNA, 19 nt, Human
aacaaaacagaaggagugu

SEQ ID NO: 143386 - RNA, 19 nt, Human
agaaggagugugaaauccg

SEQ ID NO: 143387 - RNA, 23 nt, Human
agcugggggcugcauccucugug

SEQ ID NO: 143388 - RNA, 22 nt, Human
cacccccguugccggcugggga

SEQ ID NO: 143389 - RNA, 21 nt, Human
caccuuccaugcagcuggggg

SEQ ID NO: 143390 - RNA, 19 nt, Human
cagacuuucggggaagccc

SEQ ID NO: 143391 - RNA, 21 nt, Human
ccaccuggaccuggucccaga

SEQ ID NO: 143392 - RNA, 21 nt, Human
ccggggauccacagggcuucu

SEQ ID NO: 143393 - RNA, 20 nt, Human
ccuuccaugcagcugggggc

SEQ ID NO: 143394 - RNA, 18 nt, Human
ggaaggaaaggcaugagg

SEQ ID NO: 143395 - RNA, 20 nt, Human
gggaagcccucagccugggg

SEQ ID NO: 143396 - RNA, 18 nt, Human
gggcuucuguccuccacc

SEQ ID NO: 143397 - RNA, 18 nt, Human
gugaaauccggggaucca

SEQ ID NO: 143398 - RNA, 19 nt, Human
uaaacggcaacaaaacaga

SEQ ID NO: 143399 - RNA, 23 nt, Human
ucauccucuguggggucuguggg

SEQ ID NO: 143400 - RNA, 23 nt, Human
uccuccaccuuccaugcagcugg

SEQ ID NO: 143401 - RNA, 21 nt, Human
uccucugugggguggcuucau

SEQ ID NO: 143402 - RNA, 19 nt, Human
ugggguggcuucauccucu

SEQ ID NO: 143403 - RNA, 25 nt, Human
agaguccucugcccugucccugccc

SEQ ID NO: 143404 - RNA, 18 nt, Human
aggcaggcaugggugggg

SEQ ID NO: 143405 - RNA, 23 nt, Human
auccugugccaucuucucuacca

SEQ ID NO: 143406 - RNA, 20 nt, Human
caacaagaaacucuuaugua

SEQ ID NO: 143407 - RNA, 20 nt, Human
ccauccugugccaucuucuc

SEQ ID NO: 143408 - RNA, 18 nt, Human
cccggccaggaccccgca

SEQ ID NO: 143409 - RNA, 23 nt, Human
cuuggggcgccuccauccugugc

SEQ ID NO: 143410 - RNA, 22 nt, Human
guaaagcaacaagaaacucuua

SEQ ID NO: 143411 - RNA, 19 nt, Human
uccucugcccugucccugc

SEQ ID NO: 143412 - RNA, 23 nt, Human
uuuuuuuuuuuugcagguucuca

SEQ ID NO: 143413 - RNA, 20 nt, Human
aaaaguccagaaugggucag

SEQ ID NO: 143414 - RNA, 26 nt, Human
aagacaggaaauggaaggacacaggg

SEQ ID NO: 143415 - RNA, 22 nt, Human
aagaggaaaugacgagccaaag

SEQ ID NO: 143416 - RNA, 21 nt, Human
aaguauaaaguuaagaccuac

SEQ ID NO: 143417 - RNA, 20 nt, Human
acaggggccuagguauguuu

SEQ ID NO: 143418 - RNA, 25 nt, Human
acaugcaaauacaugugguuucuuc

SEQ ID NO: 143419 - RNA, 20 nt, Human
agccugaagcccuucauccu

SEQ ID NO: 143420 - RNA, 20 nt, Human
agcuguaucuuguaaucagc

SEQ ID NO: 143421 - RNA, 19 nt, Human
aguuagagggcucaaugga

SEQ ID NO: 143422 - RNA, 26 nt, Human
caaugaaguucuuagagcugaagccc

SEQ ID NO: 143423 - RNA, 25 nt, Human
cacugcccccagccugaagcccuuc

SEQ ID NO: 143424 - RNA, 21 nt, Human
cagaaccagaauccagguauc

SEQ ID NO: 143425 - RNA, 21 nt, Human
cagugaagaauuugccagaga

SEQ ID NO: 143426 - RNA, 24 nt, Human
cauccuuccucuuagcacccucuc

SEQ ID NO: 143427 - RNA, 27 nt, Human
ccacugcccccagccugaagcccuuca

SEQ ID NO: 143428 - RNA, 21 nt, Human
cccucucaggggaacaggggc

SEQ ID NO: 143429 - RNA, 19 nt, Human
ccucuaugcacacguucag

SEQ ID NO: 143430 - RNA, 18 nt, Human
cgggaaagacaggaaaug

SEQ ID NO: 143431 - RNA, 23 nt, Human
cuagagcucagcaucugagcugc

SEQ ID NO: 143432 - RNA, 28 nt, Human
gagcaggaggcagagugggaggucgacc

SEQ ID NO: 143433 - RNA, 23 nt, Human
gagugggcagggguagguagggg

SEQ ID NO: 143434 - RNA, 20 nt, Human
gggcagggguagguaggggc

SEQ ID NO: 143435 - RNA, 18 nt, Human
ggggcuguccucuaggga

SEQ ID NO: 143436 - RNA, 23 nt, Human
gugcugcccugggggagcaggag

SEQ ID NO: 143437 - RNA, 25 nt, Human
uaggggcugucugauccccagggca

SEQ ID NO: 143438 - RNA, 21 nt, Human
uagguauguuuacaaaagucc

SEQ ID NO: 143439 - RNA, 22 nt, Human
uccacugcccccagccugaagc

SEQ ID NO: 143440 - RNA, 19 nt, Human
uccagaaugggucaguauu

SEQ ID NO: 143441 - RNA, 20 nt, Human
ucuccagaggagugggcagg

SEQ ID NO: 143442 - RNA, 19 nt, Human
ugaagcccuucauccuucc

SEQ ID NO: 143443 - RNA, 20 nt, Human
ugacaaguucucuaagacag

SEQ ID NO: 143444 - RNA, 18 nt, Human
ugcccugggggagcagga

SEQ ID NO: 143445 - RNA, 19 nt, Human
ugggggagcaggaggcaga

SEQ ID NO: 143446 - RNA, 20 nt, Human
ugggggagcaggaggcagag

SEQ ID NO: 143447 - RNA, 21 nt, Human
ugugugcauugcucagcugua

SEQ ID NO: 143448 - RNA, 24 nt, Human
uuccagacucagugaagaauuugc

SEQ ID NO: 143449 - RNA, 19 nt, Human
uuuacaaaaguccagaaug

SEQ ID NO: 143450 - RNA, 22 nt, Human
uuuacaaaaguccagaaugggu

SEQ ID NO: 143451 - RNA, 25 nt, Human
aaguugcuggagcuggauaccaggu

SEQ ID NO: 143452 - RNA, 18 nt, Human
aaucacuaagaguucaag

SEQ ID NO: 143453 - RNA, 21 nt, Human
acgcucuaaguugcuggagcu

SEQ ID NO: 143454 - RNA, 18 nt, Human
acuuugggagaaucgugg

SEQ ID NO: 143455 - RNA, 23 nt, Human
agaaaaacaggagcguuuucagg

SEQ ID NO: 143456 - RNA, 23 nt, Human
agcuggauaccaggugaacuggg

SEQ ID NO: 143457 - RNA, 23 nt, Human
aguugcuggagcuggauaccagg

SEQ ID NO: 143458 - RNA, 23 nt, Human
aucggccuggagagguacaaggc

SEQ ID NO: 143459 - RNA, 18 nt, Human
cacagcccagucucccac

SEQ ID NO: 143460 - RNA, 26 nt, Human
caccccagaggucacccugacccgga

SEQ ID NO: 143461 - RNA, 21 nt, Human
cacgccugggucccgcuccca

SEQ ID NO: 143462 - RNA, 20 nt, Human
cacugcacagaugagaaaaa

SEQ ID NO: 143463 - RNA, 19 nt, Human
cauggcgaaugcugcacgc

SEQ ID NO: 143464 - RNA, 21 nt, Human
ccagaggucacccugacccgg

SEQ ID NO: 143465 - RNA, 19 nt, Human
ccccagaggucacccugac

SEQ ID NO: 143466 - RNA, 24 nt, Human
ccucaccccagaggucacccugac

SEQ ID NO: 143467 - RNA, 23 nt, Human
cgguaccccacagcccagucucc

SEQ ID NO: 143468 - RNA, 18 nt, Human
cgugagcggagcauggcg

SEQ ID NO: 143469 - RNA, 18 nt, Human
gccuggagagguacaagg

SEQ ID NO: 143470 - RNA, 22 nt, Human
uaaauuguggaaaaaucggccu

SEQ ID NO: 143471 - RNA, 22 nt, Human
uaccccacagcccagucuccca

SEQ ID NO: 143472 - RNA, 19 nt, Human
ucccacgcgugagcggagc

SEQ ID NO: 143473 - RNA, 22 nt, Human
ucccagucgcaguuuccucacc

SEQ ID NO: 143474 - RNA, 26 nt, Human
ugagaaaaacaggagcguuuucaggu

SEQ ID NO: 143475 - RNA, 24 nt, Human
ugaucaauguauuaaaaucaagca

SEQ ID NO: 143476 - RNA, 24 nt, Human
ugcacagaugagaaaaacaggagc

SEQ ID NO: 143477 - RNA, 19 nt, Human
uggaggcugcgugcuuucc

SEQ ID NO: 143478 - RNA, 18 nt, Human
uugcuggagcuggauacc

SEQ ID NO: 143479 - RNA, 23 nt, Human
aaaaaaaaaagaaaaagaaaaag

SEQ ID NO: 143480 - RNA, 19 nt, Human
aaaaaaaagaaaaagaaaa

SEQ ID NO: 143481 - RNA, 19 nt, Human
aaaagaaaaagaaaaagug

SEQ ID NO: 143482 - RNA, 25 nt, Human
acagaauaaauauaucccccaaaua

SEQ ID NO: 143483 - RNA, 24 nt, Human
acugucugagcuaacuaccauuug

SEQ ID NO: 143484 - RNA, 20 nt, Human
acuugggagguacaacuuua

SEQ ID NO: 143485 - RNA, 18 nt, Human
agaaaaagaaaaagugga

SEQ ID NO: 143486 - RNA, 27 nt, Human
agauauugaaaaugcacugucugagcu

SEQ ID NO: 143487 - RNA, 25 nt, Human
auacaagcuuuuuuuuuuuuccuuu

SEQ ID NO: 143488 - RNA, 27 nt, Human
auuaagcuuaaaaaaaaaaaagaaaaa

SEQ ID NO: 143489 - RNA, 24 nt, Human
caacacccugcacuugcagauccc

SEQ ID NO: 143490 - RNA, 24 nt, Human
caauacagaauaaauauauccccc

SEQ ID NO: 143491 - RNA, 22 nt, Human
cacccugcacuugcagaucccu

SEQ ID NO: 143492 - RNA, 23 nt, Human
cacccugcacuugcagaucccuc

SEQ ID NO: 143493 - RNA, 22 nt, Human
caucauaaauuaaaacauggag

SEQ ID NO: 143494 - RNA, 24 nt, Human
cauguuaaguuagauauugaaaau

SEQ ID NO: 143495 - RNA, 19 nt, Human
cuaaaaaaucuaacuggca

SEQ ID NO: 143496 - RNA, 18 nt, Human
cucuguagcagaauccaa

SEQ ID NO: 143497 - RNA, 22 nt, Human
cuugcagaucccucuuccaauu

SEQ ID NO: 143498 - RNA, 26 nt, Human
gagguacaacuuuaaccaacacccug

SEQ ID NO: 143499 - RNA, 18 nt, Human
guaaauaucaccacuuca

SEQ ID NO: 143500 - RNA, 18 nt, Human
uacaacuuuaaccaacac

SEQ ID NO: 143501 - RNA, 21 nt, Human
uacaacuuuaaccaacacccu

SEQ ID NO: 143502 - RNA, 18 nt, Human
ugcacuugcagaucccuc

SEQ ID NO: 143503 - RNA, 23 nt, Human
uuaaaaaaaaaaaagaaaaagaa

SEQ ID NO: 143504 - RNA, 21 nt, Human
uuaaaaaggccugaguuaaaa

SEQ ID NO: 143505 - RNA, 19 nt, Human
uuccucuuaaaaaggccug

SEQ ID NO: 143506 - RNA, 22 nt, Human
uucuuccuuuacacagcuuuaa

SEQ ID NO: 143507 - RNA, 26 nt, Human
uuucuuuuuuuuuuuuuuuacuuuuu

SEQ ID NO: 143508 - RNA, 20 nt, Human
aaaacaaaacauugguguua

SEQ ID NO: 143509 - RNA, 22 nt, Human
aaagaauacuaauuggaagcug

SEQ ID NO: 143510 - RNA, 18 nt, Human
aagagcgccuccuuuugg

SEQ ID NO: 143511 - RNA, 22 nt, Human
acaaaacaaaacauugguguua

SEQ ID NO: 143512 - RNA, 19 nt, Human
acccagaacgaaacaaaac

SEQ ID NO: 143513 - RNA, 18 nt, Human
acgaaacaaaacaaaaca

SEQ ID NO: 143514 - RNA, 21 nt, Human
caguccuuucuagccauuugu

SEQ ID NO: 143515 - RNA, 26 nt, Human
cauacaguuuacgucacuauaaaccc

SEQ ID NO: 143516 - RNA, 23 nt, Human
ccagaacgaaacaaaacaaaaca

SEQ ID NO: 143517 - RNA, 33 nt, Human
cuggcaauauauaaucuauucaguccuuucuuu

SEQ ID NO: 143518 - RNA, 24 nt, Human
cuuaacaaaguuuuaugacccaga

SEQ ID NO: 143519 - RNA, 18 nt, Human
gaacgaaacaaaacaaaa

SEQ ID NO: 143520 - RNA, 18 nt, Human
guccugcaaaguuuguca

SEQ ID NO: 143521 - RNA, 22 nt, Human
guuuacaaauaaaaaugaaaau

SEQ ID NO: 143522 - RNA, 21 nt, Human
uaugacccagaacgaaacaaa

SEQ ID NO: 143523 - RNA, 21 nt, Human
uauguuguucucuugggcuua

SEQ ID NO: 143524 - RNA, 20 nt, Human
uauuccaaaagaguuccuua

SEQ ID NO: 143525 - RNA, 21 nt, Human
uauuuugcuuuauaagggaag

SEQ ID NO: 143526 - RNA, 21 nt, Human
ucucuugggcuuacuuccgag

SEQ ID NO: 143527 - RNA, 23 nt, Human
ugacccagaacgaaacaaaacaa

SEQ ID NO: 143528 - RNA, 21 nt, Human
ugcuuuauaagggaaguccug

SEQ ID NO: 143529 - RNA, 19 nt, Human
uguuggcaagaaauaauaa

SEQ ID NO: 143530 - RNA, 21 nt, Human
uguuguuugcuuuauguuguu

SEQ ID NO: 143531 - RNA, 18 nt, Human
aaagguaaaggagagagu

SEQ ID NO: 143532 - RNA, 21 nt, Human
acccaggugcugucuggaggc

SEQ ID NO: 143533 - RNA, 23 nt, Human
acugguuucgagcuccuggccuc

SEQ ID NO: 143534 - RNA, 23 nt, Human
agagauggggucuugcugugugg

SEQ ID NO: 143535 - RNA, 23 nt, Human
agcaaagcaaggacuccagccca

SEQ ID NO: 143536 - RNA, 22 nt, Human
auauuaauuuuuuagagauggg

SEQ ID NO: 143537 - RNA, 21 nt, Human
aucccauccgcccuccaacag

SEQ ID NO: 143538 - RNA, 23 nt, Human
auccgcccuccaacagguguccc

SEQ ID NO: 143539 - RNA, 22 nt, Human
caaagcaaggacuccagcccag

SEQ ID NO: 143540 - RNA, 19 nt, Human
caacaggugucccggggcu

SEQ ID NO: 143541 - RNA, 22 nt, Human
cagcagcagcaaagcaaggacu

SEQ ID NO: 143542 - RNA, 22 nt, Human
cagcucagcagcagcaaagcaa

SEQ ID NO: 143543 - RNA, 21 nt, Human
cagugacugggauuacaggug

SEQ ID NO: 143544 - RNA, 23 nt, Human
caucuccauuucucagcuagaga

SEQ ID NO: 143545 - RNA, 18 nt, Human
ccacugcgcccagcccaa

SEQ ID NO: 143546 - RNA, 18 nt, Human
ccacugcgcccagcccaa

SEQ ID NO: 143547 - RNA, 19 nt, Human
ccacugcgcccagcccaac

SEQ ID NO: 143548 - RNA, 18 nt, Human
cccagcccaacaacaauu

SEQ ID NO: 143549 - RNA, 24 nt, Human
ccugcacugugguaaagguaaagg

SEQ ID NO: 143550 - RNA, 20 nt, Human
ccuggccucaagcuacccuc

SEQ ID NO: 143551 - RNA, 22 nt, Human
ccuggccucaagcuacccuccc

SEQ ID NO: 143552 - RNA, 21 nt, Human
cgauccacugcgcccagccca

SEQ ID NO: 143553 - RNA, 20 nt, Human
cgcccuccaacagguguccc

SEQ ID NO: 143554 - RNA, 24 nt, Human
cucaagcuacccucccacgucggc

SEQ ID NO: 143555 - RNA, 22 nt, Human
cuggaggcagcgggaagcccuu

SEQ ID NO: 143556 - RNA, 19 nt, Human
cuguguggcccggacuggu

SEQ ID NO: 143557 - RNA, 22 nt, Human
gauuacaggugcgauccacugc

SEQ ID NO: 143558 - RNA, 24 nt, Human
gcccagcccaacaacaauucuuuu

SEQ ID NO: 143559 - RNA, 23 nt, Human
ggcccggacugguuuccccucug

SEQ ID NO: 143560 - RNA, 18 nt, Human
ggcgaggacccaggugcu

SEQ ID NO: 143561 - RNA, 18 nt, Human
guaaagguaaaggagaga

SEQ ID NO: 143562 - RNA, 23 nt, Human
uagagaaacugaggcucaaaggg

SEQ ID NO: 143563 - RNA, 22 nt, Human
ucccagugacugggauuacagg

SEQ ID NO: 143564 - RNA, 24 nt, Human
ucccagugacugggauuacaggug

SEQ ID NO: 143565 - RNA, 22 nt, Human
ucucagcuagagaaacugaggc

SEQ ID NO: 143566 - RNA, 18 nt, Human
ugagguugcccggcagcu

SEQ ID NO: 143567 - RNA, 19 nt, Human
ugcccggcagcucagcagc

SEQ ID NO: 143568 - RNA, 20 nt, Human
ugcgcccagcccaacaacaa

SEQ ID NO: 143569 - RNA, 23 nt, Human
ugcgcccagcccaacaacaauuc

SEQ ID NO: 143570 - RNA, 21 nt, Human
uggcccggacugguuucgagc

SEQ ID NO: 143571 - RNA, 20 nt, Human
uggccucaagcuacccuccc

SEQ ID NO: 143572 - RNA, 21 nt, Human
uggccucaagcuacccuccca

SEQ ID NO: 143573 - RNA, 18 nt, Human
ugggauuacaggugcgau

SEQ ID NO: 143574 - RNA, 21 nt, Human
ugggauuacaggugcgaucca

SEQ ID NO: 143575 - RNA, 22 nt, Human
ugggauuacaggugcgauccac

SEQ ID NO: 143576 - RNA, 22 nt, Human
ugggauuacaggugcgauccac

SEQ ID NO: 143577 - RNA, 24 nt, Human
ugggauuacaggugcgauccacug

SEQ ID NO: 143578 - RNA, 19 nt, Human
uuaauuuuuuagagauggg

SEQ ID NO: 143579 - RNA, 23 nt, Human
uuaggguggcgaggacccaggug

SEQ ID NO: 143580 - RNA, 24 nt, Human
aaaaaaaaaaaaaaaggaacagaa

SEQ ID NO: 143581 - RNA, 23 nt, Human
aaaaaaaaaaaaggaacagaaaa

SEQ ID NO: 143582 - RNA, 20 nt, Human
aaaaaccaaggcgcgcgacg

SEQ ID NO: 143583 - RNA, 19 nt, Human
agcggccucccacgcuggc

SEQ ID NO: 143584 - RNA, 29 nt, Human
aggcaggaaguuaaaaaaaaagggacccc

SEQ ID NO: 143585 - RNA, 23 nt, Human
auuagcuuugucccuccaaacug

SEQ ID NO: 143586 - RNA, 21 nt, Human
cagaaaaaccaaggcgcgcga

SEQ ID NO: 143587 - RNA, 19 nt, Human
cagugccuucacacagccc

SEQ ID NO: 143588 - RNA, 23 nt, Human
cccagcagugccuucacacagcc

SEQ ID NO: 143589 - RNA, 19 nt, Human
ccccuuuauuccccuucuu

SEQ ID NO: 143590 - RNA, 22 nt, Human
cccuccaaacugugggagcagg

SEQ ID NO: 143591 - RNA, 22 nt, Human
ccuggcuucucuuguaucugug

SEQ ID NO: 143592 - RNA, 20 nt, Human
cgcgacggcagcggccuccc

SEQ ID NO: 143593 - RNA, 23 nt, Human
cuggcaggcagagagcuccuccu

SEQ ID NO: 143594 - RNA, 21 nt, Human
cuuugugggcugauggcugcg

SEQ ID NO: 143595 - RNA, 28 nt, Human
gcaggaaguuaaaaaaaaaaaaaaaaaa

SEQ ID NO: 143596 - RNA, 25 nt, Human
uaggcaggaaguuaaaaaaaaaaaa

SEQ ID NO: 143597 - RNA, 21 nt, Human
ucccagcagugccuucacaca

SEQ ID NO: 143598 - RNA, 19 nt, Human
ucccuccaaacugugggag

SEQ ID NO: 143599 - RNA, 22 nt, Human
uccuccucggccaguguucgag

SEQ ID NO: 143600 - RNA, 21 nt, Human
ucuugugccugcccaugagcc

SEQ ID NO: 143601 - RNA, 20 nt, Human
ugccugcccaugagccugag

SEQ ID NO: 143602 - RNA, 19 nt, Human
uugugggcugauggcugcg

SEQ ID NO: 143603 - RNA, 18 nt, Human
uuuuuuuuuuuuagaguc

SEQ ID NO: 143604 - RNA, 18 nt, Human
cagccccuuccccuccuc

SEQ ID NO: 143605 - RNA, 19 nt, Human
cucagccccuuccccuccc

SEQ ID NO: 143606 - RNA, 20 nt, Human
gcccuggaggcuggaugggg

SEQ ID NO: 143607 - RNA, 23 nt, Human
ucucguccucagccccuuccccu

SEQ ID NO: 143608 - RNA, 25 nt, Human
uggaggcuggaugggggucucgucc

SEQ ID NO: 143609 - RNA, 23 nt, Human
uggccaagcgggcugagcaaugc

SEQ ID NO: 143610 - RNA, 20 nt, Human
acccugcuccaggccccucc

SEQ ID NO: 143611 - RNA, 25 nt, Human
agcagggggaccggguccuggaggg

SEQ ID NO: 143612 - RNA, 21 nt, Human
aggggcuggaaggcagguggu

SEQ ID NO: 143613 - RNA, 18 nt, Human
caauccagccuggcagag

SEQ ID NO: 143614 - RNA, 24 nt, Human
cacagccccccaaaguccagccuc

SEQ ID NO: 143615 - RNA, 18 nt, Human
cagcaagaacacagcgaa

SEQ ID NO: 143616 - RNA, 19 nt, Human
cagcaagaacacagcgaag

SEQ ID NO: 143617 - RNA, 21 nt, Human
ccagacuuugcagcaagaaca

SEQ ID NO: 143618 - RNA, 21 nt, Human
ccccuuagagcagaaucuggg

SEQ ID NO: 143619 - RNA, 24 nt, Human
ccccuuagagcagaaucuggggac

SEQ ID NO: 143620 - RNA, 19 nt, Human
cccugcuccaggccccucc

SEQ ID NO: 143621 - RNA, 21 nt, Human
cccugcuccaggccccuccug

SEQ ID NO: 143622 - RNA, 18 nt, Human
cccuggggccgcagccgg

SEQ ID NO: 143623 - RNA, 20 nt, Human
ccgggugcaugccugccccu

SEQ ID NO: 143624 - RNA, 22 nt, Human
ccugagccgcagcgcagccgag

SEQ ID NO: 143625 - RNA, 24 nt, Human
cucacagccccccaaaguccagcc

SEQ ID NO: 143626 - RNA, 21 nt, Human
gaccugggccaccugggcuac

SEQ ID NO: 143627 - RNA, 21 nt, Human
gagcagaaucuggggacccca

SEQ ID NO: 143628 - RNA, 20 nt, Human
gccccgguagccagcaggag

SEQ ID NO: 143629 - RNA, 22 nt, Human
gcccguacaauccagccuggca

SEQ ID NO: 143630 - RNA, 18 nt, Human
gcgcagccgagcgggcgu

SEQ ID NO: 143631 - RNA, 20 nt, Human
gcuggaaggcagguggugcc

SEQ ID NO: 143632 - RNA, 20 nt, Human
gcuggcaccgggugcaugcc

SEQ ID NO: 143633 - RNA, 21 nt, Human
ggaggggcuggaaggcaggug

SEQ ID NO: 143634 - RNA, 20 nt, Human
ggcccuggggccgcagccgg

SEQ ID NO: 143635 - RNA, 24 nt, Human
ggucuggcccccuuagagcagaau

SEQ ID NO: 143636 - RNA, 18 nt, Human
gugcgggggcaguggggg

SEQ ID NO: 143637 - RNA, 24 nt, Human
guggugcccagagcggggcuggca

SEQ ID NO: 143638 - RNA, 22 nt, Human
ucgggcccgagcgggggccuga

SEQ ID NO: 143639 - RNA, 19 nt, Human
ucgugcgggggcagugggg

SEQ ID NO: 143640 - RNA, 19 nt, Human
ugagccgcagcgcagccga

SEQ ID NO: 143641 - RNA, 22 nt, Human
uggaggggcuggaaggcaggug

SEQ ID NO: 143642 - RNA, 20 nt, Human
uggggccgcagccggcaggu

SEQ ID NO: 143643 - RNA, 25 nt, Human
uucccucacagccccccaaagucca

SEQ ID NO: 143644 - RNA, 23 nt, Human
acuuuaagcaaacacgugugggg

SEQ ID NO: 143645 - RNA, 19 nt, Human
agguggccuggcccggggc

SEQ ID NO: 143646 - RNA, 18 nt, Human
cacugccggcggcggggc

SEQ ID NO: 143647 - RNA, 21 nt, Human
ccagcccagguacccggccuc

SEQ ID NO: 143648 - RNA, 22 nt, Human
cgcuugcuccggaucccagccc

SEQ ID NO: 143649 - RNA, 23 nt, Human
gcccgcuugcuccggaucccagc

SEQ ID NO: 143650 - RNA, 19 nt, Human
gccugcuuagggcgcugcc

SEQ ID NO: 143651 - RNA, 20 nt, Human
guucgcgcacagcgguccac

SEQ ID NO: 143652 - RNA, 26 nt, Human
uuuaagcaaacacguguggggcccug

SEQ ID NO: 143653 - RNA, 24 nt, Human
aaaguuauaaacugggaaacuggg

SEQ ID NO: 143654 - RNA, 18 nt, Human
agcggagggggcgggcac

SEQ ID NO: 143655 - RNA, 21 nt, Human
cagaaauggacccuuugcccc

SEQ ID NO: 143656 - RNA, 18 nt, Human
ccccuggcuggggccugg

SEQ ID NO: 143657 - RNA, 22 nt, Human
ccgcaaccugacaggcaaugac

SEQ ID NO: 143658 - RNA, 22 nt, Human
cgagggcaccgaugccgcaacc

SEQ ID NO: 143659 - RNA, 20 nt, Human
cgagggcaccgaugccgcag

SEQ ID NO: 143660 - RNA, 25 nt, Human
cgcaaccugacaggcaaugacgccg

SEQ ID NO: 143661 - RNA, 27 nt, Human
cugacaggcaaugacgccguucuuucc

SEQ ID NO: 143662 - RNA, 20 nt, Human
ggccugggacgcgagggcuc

SEQ ID NO: 143663 - RNA, 18 nt, Human
uaacgugcccguuagcgg

SEQ ID NO: 143664 - RNA, 23 nt, Human
ugucauaaaguuauaaacuggga

SEQ ID NO: 143665 - RNA, 19 nt, Human
ugucaucgcccauccuccc

SEQ ID NO: 143666 - RNA, 21 nt, Human
acagcguuucccucagagcag

SEQ ID NO: 143667 - RNA, 26 nt, Human
acccucacaggcugggugacgaaggc

SEQ ID NO: 143668 - RNA, 19 nt, Human
agcggcagggacacaagga

SEQ ID NO: 143669 - RNA, 20 nt, Human
agggacacaaggacccgcag

SEQ ID NO: 143670 - RNA, 18 nt, Human
caagcagaggugugaagc

SEQ ID NO: 143671 - RNA, 20 nt, Human
cagcagacagcguuucccuc

SEQ ID NO: 143672 - RNA, 22 nt, Human
cagcagacagcguuucccucag

SEQ ID NO: 143673 - RNA, 21 nt, Human
cagcggcagggacacaaggac

SEQ ID NO: 143674 - RNA, 18 nt, Human
cagcguuucccucagagc

SEQ ID NO: 143675 - RNA, 18 nt, Human
cagcguuucccucagagc

SEQ ID NO: 143676 - RNA, 18 nt, Human
ccucgccuauagccuuuc

SEQ ID NO: 143677 - RNA, 24 nt, Human
ccucuccaagcagaggugugaagc

SEQ ID NO: 143678 - RNA, 21 nt, Human
cgggccacgaccacgcagcaa

SEQ ID NO: 143679 - RNA, 22 nt, Human
cguuucccucagagcagcccca

SEQ ID NO: 143680 - RNA, 18 nt, Human
cuaaaacugacaggcugc

SEQ ID NO: 143681 - RNA, 24 nt, Human
gcagcaauuggagaggaacugcac

SEQ ID NO: 143682 - RNA, 20 nt, Human
gcucuugaaaagaggaugau

SEQ ID NO: 143683 - RNA, 18 nt, Human
ggacccgcaggccccgcu

SEQ ID NO: 143684 - RNA, 24 nt, Human
guccgagcacagcaugcccagagg

SEQ ID NO: 143685 - RNA, 23 nt, Human
ucucuggacuccucgcccggccc

SEQ ID NO: 143686 - RNA, 18 nt, Human
ugcccagagggaccagcg

SEQ ID NO: 143687 - RNA, 19 nt, Human
ugcccagagggaccagcgg

SEQ ID NO: 143688 - RNA, 22 nt, Human
uucagcggcagggacacaagga

SEQ ID NO: 143689 - RNA, 18 nt, Human
caacugaccacuggacac

SEQ ID NO: 143690 - RNA, 23 nt, Human
caagucuggaugugaagggccgg

SEQ ID NO: 143691 - RNA, 21 nt, Human
cagggugggguuccccccauc

SEQ ID NO: 143692 - RNA, 18 nt, Human
gccacugaagcuugucug

SEQ ID NO: 143693 - RNA, 20 nt, Human
ggccacugaagcuugucugg

SEQ ID NO: 143694 - RNA, 23 nt, Human
ugacccucuagggcucuggggug

SEQ ID NO: 143695 - RNA, 22 nt, Human
ugaguguucagauggguggggc

SEQ ID NO: 143696 - RNA, 19 nt, Human
uggguggggcagggugggg

SEQ ID NO: 143697 - RNA, 24 nt, Human
aauauccuauucuagugagauggc

SEQ ID NO: 143698 - RNA, 20 nt, Human
aauggaagaaaugaaagcua

SEQ ID NO: 143699 - RNA, 21 nt, Human
agugaaucagguugacuagca

SEQ ID NO: 143700 - RNA, 27 nt, Human
auaaacagcaaaggaaaaccgguaccc

SEQ ID NO: 143701 - RNA, 20 nt, Human
augauuuucaaaaccaggaa

SEQ ID NO: 143702 - RNA, 26 nt, Human
ccccaauauucaguuauauuuauacc

SEQ ID NO: 143703 - RNA, 20 nt, Human
ccuucugccagcuuuccuua

SEQ ID NO: 143704 - RNA, 19 nt, Human
uaaaacuccuagagacuau

SEQ ID NO: 143705 - RNA, 24 nt, Human
uaaguaggcuuugcuuggugucau

SEQ ID NO: 143706 - RNA, 19 nt, Human
uaguaaagacauagcuuua

SEQ ID NO: 143707 - RNA, 23 nt, Human
ucaguaaauuaaggcaaaggaga

SEQ ID NO: 143708 - RNA, 26 nt, Human
uccaccagccaauuucuggagagggg

SEQ ID NO: 143709 - RNA, 22 nt, Human
ucucuuauuaaugacaaaugca

SEQ ID NO: 143710 - RNA, 22 nt, Human
ucuguguguuagugaaucaggu

SEQ ID NO: 143711 - RNA, 21 nt, Human
uggaagaaaugaaagcuaccc

SEQ ID NO: 143712 - RNA, 21 nt, Human
ugguagggccaauacauagua

SEQ ID NO: 143713 - RNA, 19 nt, Human
uuaugcacacccuucugcc

SEQ ID NO: 143714 - RNA, 24 nt, Human
uuuacuauuaauaaaacuccuaga

SEQ ID NO: 143715 - RNA, 28 nt, Human
uuuuuuguugucauuaugcuucuuaauu

SEQ ID NO: 143716 - RNA, 20 nt, Human
aaacagcuacaaacaucuug

SEQ ID NO: 143717 - RNA, 22 nt, Human
aagaaauaggaaauaaaaaugc

SEQ ID NO: 143718 - RNA, 19 nt, Human
aagauaucacacuuugaaa

SEQ ID NO: 143719 - RNA, 21 nt, Human
aagauuaguaaaacugauggc

SEQ ID NO: 143720 - RNA, 25 nt, Human
aagugcuaauuacaaguaccauuua

SEQ ID NO: 143721 - RNA, 18 nt, Human
agauuaguaaaacugaug

SEQ ID NO: 143722 - RNA, 22 nt, Human
agauucacagcaguauuuggca

SEQ ID NO: 143723 - RNA, 21 nt, Human
auagaaaacaaucuauaguca

SEQ ID NO: 143724 - RNA, 26 nt, Human
aucuccuuuaaauguuauucuuguua

SEQ ID NO: 143725 - RNA, 24 nt, Human
auuccacacacuaucaaacuaaau

SEQ ID NO: 143726 - RNA, 27 nt, Human
caaauagauucacagcaguauuuggca

SEQ ID NO: 143727 - RNA, 21 nt, Human
cacuuugaaacagcaaaugaa

SEQ ID NO: 143728 - RNA, 25 nt, Human
cuucaaacugcacaugugaaacaga

SEQ ID NO: 143729 - RNA, 20 nt, Human
gagaagaaaauaaacuguga

SEQ ID NO: 143730 - RNA, 20 nt, Human
uaaaacagaaacuugaaauu

SEQ ID NO: 143731 - RNA, 25 nt, Human
uaaaacagaaacuugaaauuuaagu

SEQ ID NO: 143732 - RNA, 23 nt, Human
uagauucacagcaguauuuggca

SEQ ID NO: 143733 - RNA, 25 nt, Human
uauuuauuuacaaaguucuuacuaa

SEQ ID NO: 143734 - RNA, 25 nt, Human
ucaaacugcacaugugaaacagacc

SEQ ID NO: 143735 - RNA, 19 nt, Human
ucauuuacuacucucagaa

SEQ ID NO: 143736 - RNA, 23 nt, Human
uccacaugcuagaucuugaaaac

SEQ ID NO: 143737 - RNA, 23 nt, Human
ucccauggucuuauccuucaaaa

SEQ ID NO: 143738 - RNA, 19 nt, Human
ucccuaaagaaauaggaaa

SEQ ID NO: 143739 - RNA, 25 nt, Human
ucccuaaagaaauaggaaauaaaaa

SEQ ID NO: 143740 - RNA, 20 nt, Human
uccuucaaaauaaaauucca

SEQ ID NO: 143741 - RNA, 22 nt, Human
ucuguccuuaucucaauuugca

SEQ ID NO: 143742 - RNA, 21 nt, Human
uggcauagaaaacaaucuaua

SEQ ID NO: 143743 - RNA, 22 nt, Human
uggcauagaaaacaaucuauag

SEQ ID NO: 143744 - RNA, 23 nt, Human
ugugaaacagacccacuauuuaa

SEQ ID NO: 143745 - RNA, 22 nt, Human
uuuaaaauccacaugcuagauc

SEQ ID NO: 143746 - RNA, 18 nt, Human
aaagggaggaggaggggc

SEQ ID NO: 143747 - RNA, 22 nt, Human
aaagggaggaggaggggcggga

SEQ ID NO: 143748 - RNA, 18 nt, Human
agggaggaggaggggcgg

SEQ ID NO: 143749 - RNA, 23 nt, Human
cucuacuccgaggggugggaaag

SEQ ID NO: 143750 - RNA, 21 nt, Human
gacccguuccugcgcgacagu

SEQ ID NO: 143751 - RNA, 21 nt, Human
gaggaggggcgggagagaggg

SEQ ID NO: 143752 - RNA, 22 nt, Human
ggaaagggaggaggaggggcgg

SEQ ID NO: 143753 - RNA, 25 nt, Human
ggaaagggaggaggaggggcgggag

SEQ ID NO: 143754 - RNA, 25 nt, Human
ggagacauccacucucuugaggccc

SEQ ID NO: 143755 - RNA, 22 nt, Human
ggaggaggggcgggagagaggg

SEQ ID NO: 143756 - RNA, 18 nt, Human
gugggaaagggaggagga

SEQ ID NO: 143757 - RNA, 22 nt, Human
uccugccaucggcugggggcug

SEQ ID NO: 143758 - RNA, 18 nt, Human
ucuugaggcccgggagcc

SEQ ID NO: 143759 - RNA, 20 nt, Human
ugaggcccgggagccgcugg

SEQ ID NO: 143760 - RNA, 19 nt, Human
uggcugggcgggacggagc

SEQ ID NO: 143761 - RNA, 22 nt, Human
ugggaaagggaggaggaggggc

SEQ ID NO: 143762 - RNA, 21 nt, Human
aaaaaguuauccuaaugaaac

SEQ ID NO: 143763 - RNA, 19 nt, Human
aaacagacacaguaaauga

SEQ ID NO: 143764 - RNA, 20 nt, Human
aaagcaccaggagcagagaa

SEQ ID NO: 143765 - RNA, 22 nt, Human
aagcaccaggagcagagaacag

SEQ ID NO: 143766 - RNA, 19 nt, Human
accccacucuuucgcugaa

SEQ ID NO: 143767 - RNA, 19 nt, Human
acuagccuggcuccugagc

SEQ ID NO: 143768 - RNA, 20 nt, Human
agaagaugggucuaugaaga

SEQ ID NO: 143769 - RNA, 27 nt, Human
agaagccagcucccucgacaccaagcc

SEQ ID NO: 143770 - RNA, 18 nt, Human
agaauucuaauaguguga

SEQ ID NO: 143771 - RNA, 22 nt, Human
agacaaggcccaagguggcaca

SEQ ID NO: 143772 - RNA, 18 nt, Human
agagccaauggaacauga

SEQ ID NO: 143773 - RNA, 22 nt, Human
agaggaaaagacaaggcccaag

SEQ ID NO: 143774 - RNA, 18 nt, Human
agaggcuggagcgggcac

SEQ ID NO: 143775 - RNA, 18 nt, Human
agcagagaacagccaccc

SEQ ID NO: 143776 - RNA, 20 nt, Human
agcagguacucuauguccuu

SEQ ID NO: 143777 - RNA, 18 nt, Human
agcuuguuugacgucuuc

SEQ ID NO: 143778 - RNA, 20 nt, Human
aggaaaagacaaggcccaaa

SEQ ID NO: 143779 - RNA, 21 nt, Human
aggaaaagacaaggcccaagg

SEQ ID NO: 143780 - RNA, 23 nt, Human
agugaguagauauuuacucugcc

SEQ ID NO: 143781 - RNA, 19 nt, Human
aguuauugugaaaaugcca

SEQ ID NO: 143782 - RNA, 18 nt, Human
auccuuggcuuguccugg

SEQ ID NO: 143783 - RNA, 23 nt, Human
augaggccaaagcaccaggagca

SEQ ID NO: 143784 - RNA, 20 nt, Human
caaagcaccaggagcagaga

SEQ ID NO: 143785 - RNA, 21 nt, Human
caaagcaccaggagcagagaa

SEQ ID NO: 143786 - RNA, 21 nt, Human
cacaccuggcucuucggccgu

SEQ ID NO: 143787 - RNA, 23 nt, Human
cacuguguugacuuccauagagc

SEQ ID NO: 143788 - RNA, 21 nt, Human
cagacacaguaaaugaugaua

SEQ ID NO: 143789 - RNA, 20 nt, Human
cagcagggcugccugggacc

SEQ ID NO: 143790 - RNA, 25 nt, Human
caggagcagagaacagccaccccac

SEQ ID NO: 143791 - RNA, 24 nt, Human
caggauggagucccagcuuugguc

SEQ ID NO: 143792 - RNA, 20 nt, Human
caguuuauuaacuuucugcc

SEQ ID NO: 143793 - RNA, 20 nt, Human
cccaagggcucaccuggcuu

SEQ ID NO: 143794 - RNA, 27 nt, Human
ccccacucuuucgcugaaaggucggac

SEQ ID NO: 143795 - RNA, 26 nt, Human
ccccacucuuucgcugaaaggucggc

SEQ ID NO: 143796 - RNA, 22 nt, Human
ccccuaaaaggucaaaucugcc

SEQ ID NO: 143797 - RNA, 24 nt, Human
ccccuaaagcauuuuuucagucau

SEQ ID NO: 143798 - RNA, 24 nt, Human
cccuaaaaauggcagguggagagc

SEQ ID NO: 143799 - RNA, 18 nt, Human
cccucgacaccaagccca

SEQ ID NO: 143800 - RNA, 20 nt, Human
ccgcucccugcccugucugc

SEQ ID NO: 143801 - RNA, 20 nt, Human
ccucauugcaaacucaccug

SEQ ID NO: 143802 - RNA, 25 nt, Human
ccugcccugucugcaaguuuggaaa

SEQ ID NO: 143803 - RNA, 21 nt, Human
ccuuaggggucagcagggcug

SEQ ID NO: 143804 - RNA, 20 nt, Human
ccuucugucuucuacuggag

SEQ ID NO: 143805 - RNA, 21 nt, Human
ccuugccgaggggcuuucccu

SEQ ID NO: 143806 - RNA, 18 nt, Human
cgagaaacugaggcagag

SEQ ID NO: 143807 - RNA, 19 nt, Human
cgagaaacugaggcagaga

SEQ ID NO: 143808 - RNA, 23 nt, Human
cgagaaacugaggcagagagagg

SEQ ID NO: 143809 - RNA, 23 nt, Human
cuagaggucucucccagcacugg

SEQ ID NO: 143810 - RNA, 19 nt, Human
cuccacacaaaaauggcag

SEQ ID NO: 143811 - RNA, 20 nt, Human
cuggccuuacagccccagaa

SEQ ID NO: 143812 - RNA, 24 nt, Human
cugucuaagggccacagaccuacc

SEQ ID NO: 143813 - RNA, 23 nt, Human
cugucuucuacuggagugcaaac

SEQ ID NO: 143814 - RNA, 22 nt, Human
cuucacugucuaagggccacag

SEQ ID NO: 143815 - RNA, 19 nt, Human
gaaaagacaaggcccaagg

SEQ ID NO: 143816 - RNA, 22 nt, Human
gaagcagguacucuauguccuu

SEQ ID NO: 143817 - RNA, 24 nt, Human
gacacuggcuggccuuacagcccc

SEQ ID NO: 143818 - RNA, 19 nt, Human
gagcgggcacguucagccc

SEQ ID NO: 143819 - RNA, 23 nt, Human
gaggggcuuucccucauugcaaa

SEQ ID NO: 143820 - RNA, 19 nt, Human
gaucacuagccuggcuccu

SEQ ID NO: 143821 - RNA, 19 nt, Human
gcagagaacagccacccca

SEQ ID NO: 143822 - RNA, 22 nt, Human
gcagucuaauuaaggggagacu

SEQ ID NO: 143823 - RNA, 22 nt, Human
gccaaagcaccaggagcagaga

SEQ ID NO: 143824 - RNA, 21 nt, Human
gccacagaccuacccuggggu

SEQ ID NO: 143825 - RNA, 22 nt, Human
gcccugcugccauaggucccug

SEQ ID NO: 143826 - RNA, 24 nt, Human
gcuccagagcccucguuggauccu

SEQ ID NO: 143827 - RNA, 28 nt, Human
ggaacucuuccuugaccgcucccugccc

SEQ ID NO: 143828 - RNA, 22 nt, Human
ggcuggugggcuggcuguauga

SEQ ID NO: 143829 - RNA, 26 nt, Human
guuggauccuuggcuuguccugggag

SEQ ID NO: 143830 - RNA, 19 nt, Human
uaaauuggaagacaggccu

SEQ ID NO: 143831 - RNA, 22 nt, Human
uaagcgccccuucauucagcuu

SEQ ID NO: 143832 - RNA, 21 nt, Human
uaauaugccaagaacaaugcc

SEQ ID NO: 143833 - RNA, 20 nt, Human
uacaauaauaugccaagaac

SEQ ID NO: 143834 - RNA, 22 nt, Human
uacaauaauaugccaagaacaa

SEQ ID NO: 143835 - RNA, 22 nt, Human
uaccuggagcagggugucugca

SEQ ID NO: 143836 - RNA, 23 nt, Human
uacugcacacauccaauugcuug

SEQ ID NO: 143837 - RNA, 22 nt, Human
uagagcaccucaaaggccuggc

SEQ ID NO: 143838 - RNA, 19 nt, Human
uagcuugcaggguaaacca

SEQ ID NO: 143839 - RNA, 23 nt, Human
uaggucccuggcacaccuggcuc

SEQ ID NO: 143840 - RNA, 18 nt, Human
uauaaaauauaauaaguu

SEQ ID NO: 143841 - RNA, 21 nt, Human
uaugaagaaagucagguacca

SEQ ID NO: 143842 - RNA, 23 nt, Human
ucagucccagcagaagauggguc

SEQ ID NO: 143843 - RNA, 19 nt, Human
ucaucucccgcuuagaacu

SEQ ID NO: 143844 - RNA, 24 nt, Human
uccaguucugggugacaggcuuca

SEQ ID NO: 143845 - RNA, 19 nt, Human
uccauagagcaccucaaag

SEQ ID NO: 143846 - RNA, 21 nt, Human
ucccugacuggcucagaaggc

SEQ ID NO: 143847 - RNA, 18 nt, Human
uccuuaggggucagcagg

SEQ ID NO: 143848 - RNA, 18 nt, Human
uccuuuccguuuaaaggg

SEQ ID NO: 143849 - RNA, 22 nt, Human
ucgaaaaacagcagcaaacaga

SEQ ID NO: 143850 - RNA, 19 nt, Human
ucgacaccaagcccaggcu

SEQ ID NO: 143851 - RNA, 18 nt, Human
ucugacacuagccccgcu

SEQ ID NO: 143852 - RNA, 19 nt, Human
ucugacacuagccccgcuu

SEQ ID NO: 143853 - RNA, 22 nt, Human
ucugucuucuacuggagugcaa

SEQ ID NO: 143854 - RNA, 21 nt, Human
ugaaaguaucccggcucuagu

SEQ ID NO: 143855 - RNA, 20 nt, Human
ugaaaugaggccaaagcacc

SEQ ID NO: 143856 - RNA, 18 nt, Human
ugaagugaaaacacagcc

SEQ ID NO: 143857 - RNA, 18 nt, Human
ugacacuagccccgcuuc

SEQ ID NO: 143858 - RNA, 26 nt, Human
ugacauaucacaaaagccuugauucu

SEQ ID NO: 143859 - RNA, 20 nt, Human
ugaccgcucccugcccuguc

SEQ ID NO: 143860 - RNA, 20 nt, Human
ugacuuccauagagcaccuc

SEQ ID NO: 143861 - RNA, 23 nt, Human
ugagugaguagauauuuacucug

SEQ ID NO: 143862 - RNA, 18 nt, Human
ugcaccaucuagaggucu

SEQ ID NO: 143863 - RNA, 24 nt, Human
ugcaccaucuagaggucucuccca

SEQ ID NO: 143864 - RNA, 22 nt, Human
ugccccuaaaaggucaaaucug

SEQ ID NO: 143865 - RNA, 23 nt, Human
ugccuaagacugaaguggaaggc

SEQ ID NO: 143866 - RNA, 18 nt, Human
ugccugggaccuggcaca

SEQ ID NO: 143867 - RNA, 20 nt, Human
ugccuggugagguacaggcg

SEQ ID NO: 143868 - RNA, 18 nt, Human
ugccuugcauauugguuu

SEQ ID NO: 143869 - RNA, 19 nt, Human
uggaacaugagcugacacu

SEQ ID NO: 143870 - RNA, 21 nt, Human
uggacaaacacaugccuugca

SEQ ID NO: 143871 - RNA, 19 nt, Human
uggauccuuggcuuguccu

SEQ ID NO: 143872 - RNA, 19 nt, Human
uggcagacgagaaacugag

SEQ ID NO: 143873 - RNA, 20 nt, Human
uggcagguggagagccaaug

SEQ ID NO: 143874 - RNA, 20 nt, Human
uggcauuuccuauagcucca

SEQ ID NO: 143875 - RNA, 21 nt, Human
uggcauuuccuauagcuccac

SEQ ID NO: 143876 - RNA, 24 nt, Human
uggcuccugagcucuuggcaguua

SEQ ID NO: 143877 - RNA, 20 nt, Human
ugggcuggugggcuggcugu

SEQ ID NO: 143878 - RNA, 23 nt, Human
ugguuuguaaacauacguuccuu

SEQ ID NO: 143879 - RNA, 20 nt, Human
ugugaaaugaggccaaagca

SEQ ID NO: 143880 - RNA, 23 nt, Human
uuaaauuggaagacaggccuuau

SEQ ID NO: 143881 - RNA, 23 nt, Human
uuauagaaucacuaacuaacauc

SEQ ID NO: 143882 - RNA, 18 nt, Human
uucacuucugucauuccc

SEQ ID NO: 143883 - RNA, 22 nt, Human
uugcagaauuaugaauaucucc

SEQ ID NO: 143884 - RNA, 22 nt, Human
uugcaggguaaaccaaauaggu

SEQ ID NO: 143885 - RNA, 23 nt, Human
uuggaagacaggccuuauuucgu

SEQ ID NO: 143886 - RNA, 23 nt, Human
uuuauucccauuuaaauggacaa

SEQ ID NO: 143887 - RNA, 20 nt, Human
acgcgccuggagcaaaccgu

SEQ ID NO: 143888 - RNA, 19 nt, Human
cccucccuucuucuucucc

SEQ ID NO: 143889 - RNA, 25 nt, Human
cccugcccuccuccgccuuccccuc

SEQ ID NO: 143890 - RNA, 18 nt, Human
cccuucuucuucuccucc

SEQ ID NO: 143891 - RNA, 21 nt, Human
cccuucuucuucuccuccuuc

SEQ ID NO: 143892 - RNA, 28 nt, Human
cggggcuggcaggccuccggggcgacga

SEQ ID NO: 143893 - RNA, 21 nt, Human
cucugcgcgccccugcccucc

SEQ ID NO: 143894 - RNA, 21 nt, Human
gaccacggggaugaaaagucc

SEQ ID NO: 143895 - RNA, 21 nt, Human
gccaaugaaggaagaagaaga

SEQ ID NO: 143896 - RNA, 20 nt, Human
gcccuccuccgccuuccccu

SEQ ID NO: 143897 - RNA, 18 nt, Human
gccuuccccucccuucuu

SEQ ID NO: 143898 - RNA, 22 nt, Human
gcuggcaggccuccggggcgcg

SEQ ID NO: 143899 - RNA, 20 nt, Human
ggaccacggggaugaaaagu

SEQ ID NO: 143900 - RNA, 19 nt, Human
ucccuucuucuucuccucc

SEQ ID NO: 143901 - RNA, 20 nt, Human
uccugcgguuccgacgcgcc

SEQ ID NO: 143902 - RNA, 23 nt, Human
ucuucuccuccuucgcuucuucc

SEQ ID NO: 143903 - RNA, 24 nt, Human
ucuucuucuccuccuucgcuucuc

SEQ ID NO: 143904 - RNA, 18 nt, Human
ugggaccacggggaugaa

SEQ ID NO: 143905 - RNA, 24 nt, Human
aggagcacccacaagucaucaggg

SEQ ID NO: 143906 - RNA, 22 nt, Human
gagccaggagcacccacaaguc

SEQ ID NO: 143907 - RNA, 20 nt, Human
uggguugagccaggagcacc

SEQ ID NO: 143908 - RNA, 19 nt, Human
agcccuacugaggcccaga

SEQ ID NO: 143909 - RNA, 18 nt, Human
aggagggccugccuggca

SEQ ID NO: 143910 - RNA, 21 nt, Human
aggcccagagaggggccggga

SEQ ID NO: 143911 - RNA, 20 nt, Human
caguccaccccuugcagccu

SEQ ID NO: 143912 - RNA, 23 nt, Human
caugaucgaacuucaauguugcc

SEQ ID NO: 143913 - RNA, 20 nt, Human
caugcaucccacaguccacc

SEQ ID NO: 143914 - RNA, 24 nt, Human
caugcaucccacaguccaccccuu

SEQ ID NO: 143915 - RNA, 19 nt, Human
cccagaaucacacagaagc

SEQ ID NO: 143916 - RNA, 23 nt, Human
ccccagaaucacacagaagcggg

SEQ ID NO: 143917 - RNA, 18 nt, Human
ccccuugcagccugggag

SEQ ID NO: 143918 - RNA, 18 nt, Human
cccuacugaggcccagag

SEQ ID NO: 143919 - RNA, 19 nt, Human
cgugcacacagcuuccugu

SEQ ID NO: 143920 - RNA, 18 nt, Human
cucucugcuccuacgggg

SEQ ID NO: 143921 - RNA, 19 nt, Human
cugucccguucccugcucc

SEQ ID NO: 143922 - RNA, 20 nt, Human
cugucccguucccugcuccc

SEQ ID NO: 143923 - RNA, 24 nt, Human
gaagccccgagaggccaccgggaa

SEQ ID NO: 143924 - RNA, 24 nt, Human
gcgggguuguggggaaccacucgc

SEQ ID NO: 143925 - RNA, 22 nt, Human
uccaccccuugcagccugggag

SEQ ID NO: 143926 - RNA, 23 nt, Human
uccuguaccccaggagggccugc

SEQ ID NO: 143927 - RNA, 21 nt, Human
ugaggcccagagaggggccgg

SEQ ID NO: 143928 - RNA, 22 nt, Human
ugaggcccagagaggggccggg

SEQ ID NO: 143929 - RNA, 23 nt, Human
ugcaccauccacacgcaagacug

SEQ ID NO: 143930 - RNA, 22 nt, Human
ugcgugcacacagcuuccugua

SEQ ID NO: 143931 - RNA, 20 nt, Human
ugucccguucccugcucccc

SEQ ID NO: 143932 - RNA, 22 nt, Human
uguggggaaccacucgccccca

SEQ ID NO: 143933 - RNA, 25 nt, Human
aaaaaaaaaagaaagaaagaaagaa

SEQ ID NO: 143934 - RNA, 25 nt, Human
aaagaaagaaaagaaaaauaaaaaa

SEQ ID NO: 143935 - RNA, 27 nt, Human
aaagaaagaaaagaaaaauaaaaaaga

SEQ ID NO: 143936 - RNA, 26 nt, Human
aagaaagaaaagaaaaauaaaaaaga

SEQ ID NO: 143937 - RNA, 22 nt, Human
aagaaagaaagaaagaaaagaa

SEQ ID NO: 143938 - RNA, 23 nt, Human
agaacaagucuguaaaacuuggg

SEQ ID NO: 143939 - RNA, 21 nt, Human
agaacacaugggcacauuuca

SEQ ID NO: 143940 - RNA, 18 nt, Human
agaacgucaauuccacga

SEQ ID NO: 143941 - RNA, 21 nt, Human
agaacgucaauuccacgaggg

SEQ ID NO: 143942 - RNA, 24 nt, Human
agagcacaagaucccaacucaaaa

SEQ ID NO: 143943 - RNA, 18 nt, Human
aggaguuccaggcugcag

SEQ ID NO: 143944 - RNA, 19 nt, Human
aggaguuccaggcugcagu

SEQ ID NO: 143945 - RNA, 19 nt, Human
auggaggccacaagacacc

SEQ ID NO: 143946 - RNA, 21 nt, Human
auugcacuccagccuggguga

SEQ ID NO: 143947 - RNA, 24 nt, Human
auugcacuccagccugggugacag

SEQ ID NO: 143948 - RNA, 19 nt, Human
caccaucaccaucucuguc

SEQ ID NO: 143949 - RNA, 27 nt, Human
cacccuuggcauuguccuugauaacuu

SEQ ID NO: 143950 - RNA, 22 nt, Human
caccgaguucuuuucuguguuc

SEQ ID NO: 143951 - RNA, 22 nt, Human
cacuccagccugggugacagag

SEQ ID NO: 143952 - RNA, 23 nt, Human
cacuccagccugggugacagagc

SEQ ID NO: 143953 - RNA, 22 nt, Human
cagagcaaaagcgaaguccucu

SEQ ID NO: 143954 - RNA, 24 nt, Human
cagagcaaaagcgaaguccucuau

SEQ ID NO: 143955 - RNA, 18 nt, Human
cagucgugggccgagggu

SEQ ID NO: 143956 - RNA, 19 nt, Human
cauugcacuccagccuggg

SEQ ID NO: 143957 - RNA, 21 nt, Human
cauugcacuccagccugggug

SEQ ID NO: 143958 - RNA, 22 nt, Human
cauugcacuccagccuggguga

SEQ ID NO: 143959 - RNA, 24 nt, Human
cauugcacuccagccugggugaca

SEQ ID NO: 143960 - RNA, 24 nt, Human
cauugcacuccagccugggugaca

SEQ ID NO: 143961 - RNA, 24 nt, Human
ccaacucaaaaaaaaaaaaaagaa

SEQ ID NO: 143962 - RNA, 26 nt, Human
ccaacucaaaaaaaaaaaaaagaaag

SEQ ID NO: 143963 - RNA, 24 nt, Human
ccaggacagaggucucagcucaca

SEQ ID NO: 143964 - RNA, 18 nt, Human
ccauugcacuccagccug

SEQ ID NO: 143965 - RNA, 20 nt, Human
ccauugcacuccagccuggg

SEQ ID NO: 143966 - RNA, 21 nt, Human
ccauugcacuccagccugggu

SEQ ID NO: 143967 - RNA, 22 nt, Human
ccauugcacuccagccugggug

SEQ ID NO: 143968 - RNA, 24 nt, Human
ccauugcacuccagccugggugac

SEQ ID NO: 143969 - RNA, 19 nt, Human
cccaacucaaaaaaaaaaa

SEQ ID NO: 143970 - RNA, 22 nt, Human
cccauugcacuccagccugggu

SEQ ID NO: 143971 - RNA, 24 nt, Human
cccauugcacuccagccuggguga

SEQ ID NO: 143972 - RNA, 19 nt, Human
ccgacugcaccuuuggcug

SEQ ID NO: 143973 - RNA, 21 nt, Human
ccgucccugcuccaggcacac

SEQ ID NO: 143974 - RNA, 21 nt, Human
ccucuaaaaucuaucuagagg

SEQ ID NO: 143975 - RNA, 18 nt, Human
ccuguagucccagcuacu

SEQ ID NO: 143976 - RNA, 22 nt, Human
ccuguagucccagcuacuaggg

SEQ ID NO: 143977 - RNA, 21 nt, Human
ccuucagcuccuugucuccgg

SEQ ID NO: 143978 - RNA, 18 nt, Human
cucaaaaaaaaaaaaaag

SEQ ID NO: 143979 - RNA, 22 nt, Human
cucacaucacaagucacuaccu

SEQ ID NO: 143980 - RNA, 18 nt, Human
cuccgucccugcuccagg

SEQ ID NO: 143981 - RNA, 23 nt, Human
cugaagcaggaacuccaggcuug

SEQ ID NO: 143982 - RNA, 22 nt, Human
cugcagugagcuauaauugugc

SEQ ID NO: 143983 - RNA, 21 nt, Human
cuugauaacuuuauuccacuc

SEQ ID NO: 143984 - RNA, 21 nt, Human
cuugucuccucccauucuccc

SEQ ID NO: 143985 - RNA, 19 nt, Human
gaaguccucuauaucaccc

SEQ ID NO: 143986 - RNA, 20 nt, Human
gaccaccaucaccaucucug

SEQ ID NO: 143987 - RNA, 24 nt, Human
gcacuccagccugggugacagagc

SEQ ID NO: 143988 - RNA, 22 nt, Human
gcagugagcuauaauugugccc

SEQ ID NO: 143989 - RNA, 26 nt, Human
gcccauugcacuccagccugggugac

SEQ ID NO: 143990 - RNA, 22 nt, Human
gccccaaggucugcgcccuggu

SEQ ID NO: 143991 - RNA, 18 nt, Human
gcucagugcagccccccu

SEQ ID NO: 143992 - RNA, 24 nt, Human
ggccgcgcgccccaaggucugcgc

SEQ ID NO: 143993 - RNA, 19 nt, Human
gggugccccacccuuggca

SEQ ID NO: 143994 - RNA, 19 nt, Human
gucacuggaaucaucucca

SEQ ID NO: 143995 - RNA, 21 nt, Human
guuccuguggcucagugcagc

SEQ ID NO: 143996 - RNA, 19 nt, Human
uaccucugcagagaggucu

SEQ ID NO: 143997 - RNA, 19 nt, Human
uacuagggaggcugaagca

SEQ ID NO: 143998 - RNA, 22 nt, Human
uagggcaagucccucuucugcu

SEQ ID NO: 143999 - RNA, 23 nt, Human
ucaccuucucugguuuucaaccu

SEQ ID NO: 144000 - RNA, 18 nt, Human
uccagccugggugacaga

SEQ ID NO: 144001 - RNA, 19 nt, Human
uccaggcacaccagcaucg

SEQ ID NO: 144002 - RNA, 24 nt, Human
ucccaacucaaaaaaaaaaaaaag

SEQ ID NO: 144003 - RNA, 19 nt, Human
ucccaggaguuccaggcug

SEQ ID NO: 144004 - RNA, 21 nt, Human
uccuucagcuccuugucuccu

SEQ ID NO: 144005 - RNA, 23 nt, Human
ucguuugucacuggaaucaucuc

SEQ ID NO: 144006 - RNA, 20 nt, Human
ucuauaucacccacaagguc

SEQ ID NO: 144007 - RNA, 19 nt, Human
ugaccaccaucaccaucuc

SEQ ID NO: 144008 - RNA, 22 nt, Human
ugcacuccagccugggugacag

SEQ ID NO: 144009 - RNA, 24 nt, Human
ugcacuccagccugggugacagag

SEQ ID NO: 144010 - RNA, 22 nt, Human
ugcagccccccuucaccuucuc

SEQ ID NO: 144011 - RNA, 23 nt, Human
ugccuguagucccagcuacuagg

SEQ ID NO: 144012 - RNA, 24 nt, Human
ugccuguagucccagcuacuaggg

SEQ ID NO: 144013 - RNA, 21 nt, Human
uggcugagucucccagaguca

SEQ ID NO: 144014 - RNA, 19 nt, Human
uggggugucgcugcauaaa

SEQ ID NO: 144015 - RNA, 18 nt, Human
uggugcaugccuguaguc

SEQ ID NO: 144016 - RNA, 24 nt, Human
ugguggugcaugccuguaguccca

SEQ ID NO: 144017 - RNA, 24 nt, Human
uuaacugggcaugguggugcaugc

SEQ ID NO: 144018 - RNA, 22 nt, Human
uucagccucagggccuuugcgc

SEQ ID NO: 144019 - RNA, 19 nt, Human
uucccaggacagaggucuc

SEQ ID NO: 144020 - RNA, 24 nt, Human
uuccuguggcucagugcagccccc

SEQ ID NO: 144021 - RNA, 24 nt, Human
uugcgcaugccauucccucauccu

SEQ ID NO: 144022 - RNA, 24 nt, Human
uugugcccauugcacuccagccug

SEQ ID NO: 144023 - RNA, 22 nt, Human
uuuccuacaaauuccuuuaugu

SEQ ID NO: 144024 - RNA, 27 nt, Human
uuuccuacaaauuccuuuauguaaaaa

SEQ ID NO: 144025 - RNA, 18 nt, Human
uuucuuuuggucuuccca

SEQ ID NO: 144026 - RNA, 19 nt, Human
aaaggaaaacgaagaaaaa

SEQ ID NO: 144027 - RNA, 19 nt, Human
aaccucccguucaaacuga

SEQ ID NO: 144028 - RNA, 22 nt, Human
aagagaccaaagcaguuaccac

SEQ ID NO: 144029 - RNA, 25 nt, Human
aagcgcugcggguuccucagaucuc

SEQ ID NO: 144030 - RNA, 18 nt, Human
accagcagaggaugcucc

SEQ ID NO: 144031 - RNA, 23 nt, Human
acccaaaggaaaacgaagaaaaa

SEQ ID NO: 144032 - RNA, 18 nt, Human
acuuuggaguuucucccc

SEQ ID NO: 144033 - RNA, 21 nt, Human
aggaaaacgaagaaaaacagc

SEQ ID NO: 144034 - RNA, 20 nt, Human
agucagacacaaacacuccc

SEQ ID NO: 144035 - RNA, 24 nt, Human
caaaggaaaacgaagaaaaacagc

SEQ ID NO: 144036 - RNA, 21 nt, Human
cacaaacacucccuuaggacc

SEQ ID NO: 144037 - RNA, 23 nt, Human
cagacacaaacacucccuuagga

SEQ ID NO: 144038 - RNA, 18 nt, Human
cagaggaugcuccugcuc

SEQ ID NO: 144039 - RNA, 18 nt, Human
cagagucggccacagggc

SEQ ID NO: 144040 - RNA, 22 nt, Human
cagcccaagugcccuuuaacgg

SEQ ID NO: 144041 - RNA, 24 nt, Human
cagcuucaggucccucaaagcgcu

SEQ ID NO: 144042 - RNA, 18 nt, Human
ccucccguucaaacugaa

SEQ ID NO: 144043 - RNA, 18 nt, Human
ccuuccucucucucucuc

SEQ ID NO: 144044 - RNA, 19 nt, Human
ccuuccucucucucucucc

SEQ ID NO: 144045 - RNA, 23 nt, Human
cgaagaaaaacagcuucaggucc

SEQ ID NO: 144046 - RNA, 20 nt, Human
cggccacagggcucuccgug

SEQ ID NO: 144047 - RNA, 19 nt, Human
cucccguucaaacugaacc

SEQ ID NO: 144048 - RNA, 20 nt, Human
cugagucagacacaaacacu

SEQ ID NO: 144049 - RNA, 20 nt, Human
cugccaggagagaaggcagc

SEQ ID NO: 144050 - RNA, 18 nt, Human
cugcggguuccucagauc

SEQ ID NO: 144051 - RNA, 22 nt, Human
gaacccaaaggaaaacgaagaa

SEQ ID NO: 144052 - RNA, 19 nt, Human
gaagaaaaacagcuucagg

SEQ ID NO: 144053 - RNA, 23 nt, Human
gagaccaaagcaguuaccacuga

SEQ ID NO: 144054 - RNA, 22 nt, Human
gagguccauugucauccccaga

SEQ ID NO: 144055 - RNA, 21 nt, Human
gccaggguggagagugcagag

SEQ ID NO: 144056 - RNA, 21 nt, Human
ggcagcgccugccaggagaga

SEQ ID NO: 144057 - RNA, 23 nt, Human
uauggcuucagacaggccccgaa

SEQ ID NO: 144058 - RNA, 24 nt, Human
ucaaaaaccucccguucaaacuga

SEQ ID NO: 144059 - RNA, 22 nt, Human
uccccagaugaaagaagagacc

SEQ ID NO: 144060 - RNA, 19 nt, Human
ucccugaaaugugccaggc

SEQ ID NO: 144061 - RNA, 23 nt, Human
ucccuuaggaccuucgucagaaa

SEQ ID NO: 144062 - RNA, 19 nt, Human
uccuuccucucucucucuc

SEQ ID NO: 144063 - RNA, 19 nt, Human
ucuccuuccucucucucuc

SEQ ID NO: 144064 - RNA, 26 nt, Human
ugaaaaaaagggaucaaaaaccuccc

SEQ ID NO: 144065 - RNA, 21 nt, Human
ugaaagaagagaccaaagcag

SEQ ID NO: 144066 - RNA, 30 nt, Human
ugcuccugcucugaucccagccaggguggg

SEQ ID NO: 144067 - RNA, 22 nt, Human
uggaagccagugaagaugguug

SEQ ID NO: 144068 - RNA, 19 nt, Human
uggaaucuccuuccucucu

SEQ ID NO: 144069 - RNA, 23 nt, Human
uucaaacugaacccaaaggaaaa

SEQ ID NO: 144070 - RNA, 19 nt, Human
uucagcccaagugcccuuu

SEQ ID NO: 144071 - RNA, 22 nt, Human
uuugaguguguuuucaauuugu

SEQ ID NO: 144072 - RNA, 18 nt, Human
aagcaggcagagagucca

SEQ ID NO: 144073 - RNA, 18 nt, Human
acagacaggaaaagcaga

SEQ ID NO: 144074 - RNA, 23 nt, Human
acaggacacuccucaggacgcag

SEQ ID NO: 144075 - RNA, 21 nt, Human
acucuggggagggaaagcugg

SEQ ID NO: 144076 - RNA, 24 nt, Human
agaacucuggggagggaaagcugg

SEQ ID NO: 144077 - RNA, 24 nt, Human
agagcugugggccagcagccagca

SEQ ID NO: 144078 - RNA, 18 nt, Human
agcacuggaggcugcucc

SEQ ID NO: 144079 - RNA, 25 nt, Human
agccagcacuggaggcugcuccgca

SEQ ID NO: 144080 - RNA, 19 nt, Human
agccagccaggaugccagc

SEQ ID NO: 144081 - RNA, 21 nt, Human
agcggcgguggagcgccaggc

SEQ ID NO: 144082 - RNA, 21 nt, Human
aggcugcuccgcagucuggag

SEQ ID NO: 144083 - RNA, 18 nt, Human
agggaaagcuggagagga

SEQ ID NO: 144084 - RNA, 24 nt, Human
cacuucucuccuccucucuccccg

SEQ ID NO: 144085 - RNA, 22 nt, Human
cagcagacaggacacuccucag

SEQ ID NO: 144086 - RNA, 18 nt, Human
cagcagccagcacuggag

SEQ ID NO: 144087 - RNA, 23 nt, Human
cagccuccagaugaauguacucc

SEQ ID NO: 144088 - RNA, 24 nt, Human
cagccuccagaugaauguacuccc

SEQ ID NO: 144089 - RNA, 23 nt, Human
cagggcuggcugaggcaugcgug

SEQ ID NO: 144090 - RNA, 18 nt, Human
ccagcacuggaggcugcu

SEQ ID NO: 144091 - RNA, 26 nt, Human
ccccaugcaguucuuccagcagagcu

SEQ ID NO: 144092 - RNA, 24 nt, Human
ccgcgggcuuccuucccaauguuc

SEQ ID NO: 144093 - RNA, 21 nt, Human
cgccaggcuggacuggagcag

SEQ ID NO: 144094 - RNA, 23 nt, Human
cuggaggcugcuccgcagucugg

SEQ ID NO: 144095 - RNA, 19 nt, Human
gaggcugcuccgcagucug

SEQ ID NO: 144096 - RNA, 23 nt, Human
gcagugcgaggacacagaacugc

SEQ ID NO: 144097 - RNA, 22 nt, Human
gcguguucguggcugcacgguu

SEQ ID NO: 144098 - RNA, 19 nt, Human
ggaagcaggcagagagucc

SEQ ID NO: 144099 - RNA, 20 nt, Human
gggagccauccagucuccag

SEQ ID NO: 144100 - RNA, 21 nt, Human
gggagggucccgagggaauga

SEQ ID NO: 144101 - RNA, 23 nt, Human
ggugcaagaacucuggggaggga

SEQ ID NO: 144102 - RNA, 24 nt, Human
guagcccagcagacaggacacucc

SEQ ID NO: 144103 - RNA, 24 nt, Human
uauaaacacaaguucgcagguaaa

SEQ ID NO: 144104 - RNA, 22 nt, Human
uccacaagcccuggccacuucu

SEQ ID NO: 144105 - RNA, 23 nt, Human
uccgcagucuggaggccgagggc

SEQ ID NO: 144106 - RNA, 18 nt, Human
uggccacuucucuccucc

SEQ ID NO: 144107 - RNA, 21 nt, Human
uggcugcacgguugcuccugg

SEQ ID NO: 144108 - RNA, 24 nt, Human
uguuuccucauuuauuauaaacac

SEQ ID NO: 144109 - RNA, 19 nt, Human
uuaaaauaaauaauuggga

SEQ ID NO: 144110 - RNA, 19 nt, Human
uucgcagguaaauagaggg

SEQ ID NO: 144111 - RNA, 24 nt, Human
uucucaaaguucuuagggcaaaua

SEQ ID NO: 144112 - RNA, 19 nt, Human
aaaaccaauuuccugcaug

SEQ ID NO: 144113 - RNA, 25 nt, Human
aaagauccacauuuacucaugaaag

SEQ ID NO: 144114 - RNA, 21 nt, Human
aaaucuaccuaccuaucuacc

SEQ ID NO: 144115 - RNA, 20 nt, Human
aaaugucucucuacggggcc

SEQ ID NO: 144116 - RNA, 18 nt, Human
aacaagauggacaugugu

SEQ ID NO: 144117 - RNA, 18 nt, Human
aacauuuggucaaggcca

SEQ ID NO: 144118 - RNA, 21 nt, Human
aagccgacgccucguggcccu

SEQ ID NO: 144119 - RNA, 19 nt, Human
agauccacauaaaggaguu

SEQ ID NO: 144120 - RNA, 19 nt, Human
agcaaaucagccacuuuca

SEQ ID NO: 144121 - RNA, 19 nt, Human
aggcgccggagcaccggac

SEQ ID NO: 144122 - RNA, 24 nt, Human
aggcgccggagcaccggaccagga

SEQ ID NO: 144123 - RNA, 24 nt, Human
auacacacagaggauuuaacauuu

SEQ ID NO: 144124 - RNA, 24 nt, Human
aucaggcgccggagcaccggacca

SEQ ID NO: 144125 - RNA, 22 nt, Human
caaaacucuccaaaaccaauuu

SEQ ID NO: 144126 - RNA, 24 nt, Human
caaacagcacauaugcauuuuaaa

SEQ ID NO: 144127 - RNA, 25 nt, Human
caagagaagucaugucaaaagccag

SEQ ID NO: 144128 - RNA, 23 nt, Human
caccaugcagccuauucuaggca

SEQ ID NO: 144129 - RNA, 23 nt, Human
caccggaccaggaggacggccgc

SEQ ID NO: 144130 - RNA, 19 nt, Human
cacugaacaggaacaagcu

SEQ ID NO: 144131 - RNA, 21 nt, Human
cagcugaaaauuucucugcca

SEQ ID NO: 144132 - RNA, 19 nt, Human
caggcgacuuuacauggug

SEQ ID NO: 144133 - RNA, 22 nt, Human
cagucggcuuccugcaaacaag

SEQ ID NO: 144134 - RNA, 22 nt, Human
caucuccacacucacaguaagc

SEQ ID NO: 144135 - RNA, 18 nt, Human
ccaaaacucuccaaaacc

SEQ ID NO: 144136 - RNA, 20 nt, Human
cccauaagcuucaaauucau

SEQ ID NO: 144137 - RNA, 18 nt, Human
ccugcaaacaaggccugg

SEQ ID NO: 144138 - RNA, 20 nt, Human
ccugcaaacaaggccuggga

SEQ ID NO: 144139 - RNA, 18 nt, Human
ccuugagcuggggcuguc

SEQ ID NO: 144140 - RNA, 21 nt, Human
cgcagcugaaagagauuuuga

SEQ ID NO: 144141 - RNA, 20 nt, Human
cguauauacagugacuacuu

SEQ ID NO: 144142 - RNA, 25 nt, Human
cuuccugcaaacaaggccugggaac

SEQ ID NO: 144143 - RNA, 18 nt, Human
cuugccaaaacucuccaa

SEQ ID NO: 144144 - RNA, 20 nt, Human
gaaagcaaauauucaaccua

SEQ ID NO: 144145 - RNA, 21 nt, Human
gagaacaguuucacaauaaau

SEQ ID NO: 144146 - RNA, 22 nt, Human
gagcaauugauggguuucucuc

SEQ ID NO: 144147 - RNA, 21 nt, Human
gaguuuguauucagaaugcaa

SEQ ID NO: 144148 - RNA, 18 nt, Human
gccaaaacucuccaaaac

SEQ ID NO: 144149 - RNA, 19 nt, Human
gcuuggaguccacuuauuc

SEQ ID NO: 144150 - RNA, 21 nt, Human
gcuuuugacaguacuuucuga

SEQ ID NO: 144151 - RNA, 20 nt, Human
ggccaggaguuggcugcggc

SEQ ID NO: 144152 - RNA, 27 nt, Human
ggccaggaguuggcugcggcggucaua

SEQ ID NO: 144153 - RNA, 20 nt, Human
ggccugggaacuccacugug

SEQ ID NO: 144154 - RNA, 20 nt, Human
gggcauuuugcauuuauuaa

SEQ ID NO: 144155 - RNA, 20 nt, Human
ggggcugucuuuacagucgg

SEQ ID NO: 144156 - RNA, 22 nt, Human
guucgaggccggccgaucgcuc

SEQ ID NO: 144157 - RNA, 18 nt, Human
uaacaagauggacaugug

SEQ ID NO: 144158 - RNA, 19 nt, Human
uacacacagaggauuuaac

SEQ ID NO: 144159 - RNA, 18 nt, Human
uagaucaggcgccggagc

SEQ ID NO: 144160 - RNA, 20 nt, Human
ucacaguaagcucggcucgg

SEQ ID NO: 144161 - RNA, 21 nt, Human
uccacauaaaggaguuggagu

SEQ ID NO: 144162 - RNA, 20 nt, Human
uccggccaggaguuggcugc

SEQ ID NO: 144163 - RNA, 19 nt, Human
uccugcaugaaauuggagc

SEQ ID NO: 144164 - RNA, 23 nt, Human
uccuuuuuucuucuuccuucauu

SEQ ID NO: 144165 - RNA, 22 nt, Human
ucggcucggugggaagagcgca

SEQ ID NO: 144166 - RNA, 18 nt, Human
ucuccacacucacaguaa

SEQ ID NO: 144167 - RNA, 25 nt, Human
ucucuauacguauauacagugacua

SEQ ID NO: 144168 - RNA, 24 nt, Human
ugaaagcaaauauucaaccuaaua

SEQ ID NO: 144169 - RNA, 18 nt, Human
ugaaauuggagcugcagg

SEQ ID NO: 144170 - RNA, 19 nt, Human
ugauaccaucuugccacgg

SEQ ID NO: 144171 - RNA, 19 nt, Human
ugccaaaacucuccaaaac

SEQ ID NO: 144172 - RNA, 18 nt, Human
ugccaaaaucccauaagc

SEQ ID NO: 144173 - RNA, 23 nt, Human
uggagaacaguuucacaauaaau

SEQ ID NO: 144174 - RNA, 21 nt, Human
ugggaagagcgcagcugaaag

SEQ ID NO: 144175 - RNA, 20 nt, Human
uggguaucaagcacagcuga

SEQ ID NO: 144176 - RNA, 22 nt, Human
ugguggguaucaagcacagcug

SEQ ID NO: 144177 - RNA, 20 nt, Human
ugucuauacagaauacagag

SEQ ID NO: 144178 - RNA, 18 nt, Human
uguggccgcgaaagggca

SEQ ID NO: 144179 - RNA, 18 nt, Human
uuaugaaauacacacaga

SEQ ID NO: 144180 - RNA, 20 nt, Human
uucauaaacuccuguagagc

SEQ ID NO: 144181 - RNA, 18 nt, Human
uugaacagauccacauaa

SEQ ID NO: 144182 - RNA, 25 nt, Human
uugaagccauuccccaaagauccac

SEQ ID NO: 144183 - RNA, 25 nt, Human
uuggcugcggcggucauaaacuuuc

SEQ ID NO: 144184 - RNA, 19 nt, Human
uuuaaaaucuaccuaccua

SEQ ID NO: 144185 - RNA, 27 nt, Human
uuuaaaaucuaccuaccuaucuaccuc

SEQ ID NO: 144186 - RNA, 20 nt, Human
uuuguauucagaaugcaauu

SEQ ID NO: 144187 - RNA, 23 nt, Human
uuuuucuucuuccuucauucuuu

SEQ ID NO: 144188 - RNA, 26 nt, Human
aaaaaaagacaauugucuaaacaaaa

SEQ ID NO: 144189 - RNA, 22 nt, Human
aaaaaauucuuugaguaacauc

SEQ ID NO: 144190 - RNA, 18 nt, Human
aaaaaugggcuaaaagaa

SEQ ID NO: 144191 - RNA, 18 nt, Human
aaaagugacuugagccca

SEQ ID NO: 144192 - RNA, 19 nt, Human
aaagaaacaaagcaucuug

SEQ ID NO: 144193 - RNA, 18 nt, Human
aaagaaguacgauucgua

SEQ ID NO: 144194 - RNA, 23 nt, Human
aaagggaaugaucaaaaaagacu

SEQ ID NO: 144195 - RNA, 18 nt, Human
aaaugcccagcaaaaguc

SEQ ID NO: 144196 - RNA, 22 nt, Human
aaauuaagagaauaggagguga

SEQ ID NO: 144197 - RNA, 25 nt, Human
aacaauaugaccccaaauacugcuu

SEQ ID NO: 144198 - RNA, 25 nt, Human
aagaaacaaagcaucuugaaaaaaa

SEQ ID NO: 144199 - RNA, 19 nt, Human
aagcaacuggaaccugaug

SEQ ID NO: 144200 - RNA, 23 nt, Human
aagcaucuugaaaaaaagacaau

SEQ ID NO: 144201 - RNA, 23 nt, Human
aaggaagaaggaucagagaagag

SEQ ID NO: 144202 - RNA, 18 nt, Human
aaucucuaaaguuucaug

SEQ ID NO: 144203 - RNA, 22 nt, Human
acacacaugcauauaucacaca

SEQ ID NO: 144204 - RNA, 26 nt, Human
acacacaugcauauaucacacacaca

SEQ ID NO: 144205 - RNA, 21 nt, Human
acaggaaacaauaugacccca

SEQ ID NO: 144206 - RNA, 22 nt, Human
acaguucuuaaaaaauucuuug

SEQ ID NO: 144207 - RNA, 23 nt, Human
accagcgggaugacuguacgcgc

SEQ ID NO: 144208 - RNA, 21 nt, Human
agauguaguaaagguagaaau

SEQ ID NO: 144209 - RNA, 20 nt, Human
auauguauauacauauauau

SEQ ID NO: 144210 - RNA, 24 nt, Human
auuaucuuaccuaauuuauuauca

SEQ ID NO: 144211 - RNA, 24 nt, Human
caaaaaagacuuacugccaguuaa

SEQ ID NO: 144212 - RNA, 20 nt, Human
caaaccaaccaaccaaacaa

SEQ ID NO: 144213 - RNA, 21 nt, Human
caccagaacugccauaaaagc

SEQ ID NO: 144214 - RNA, 18 nt, Human
cagaaaaccuccugggca

SEQ ID NO: 144215 - RNA, 23 nt, Human
cauauaucacacacacaaauaua

SEQ ID NO: 144216 - RNA, 25 nt, Human
caucacacacaugcauauaucacac

SEQ ID NO: 144217 - RNA, 21 nt, Human
ccaaacaaaacccuauauugc

SEQ ID NO: 144218 - RNA, 22 nt, Human
ccaauccccggcgacgaccggg

SEQ ID NO: 144219 - RNA, 19 nt, Human
ccagaacugccauaaaagc

SEQ ID NO: 144220 - RNA, 20 nt, Human
ccaguccauaaauaaaaugc

SEQ ID NO: 144221 - RNA, 22 nt, Human
ccaguuaacauuuuaagaaaaa

SEQ ID NO: 144222 - RNA, 24 nt, Human
cccaaagcuccagaccuuccacuc

SEQ ID NO: 144223 - RNA, 25 nt, Human
cccaaagcuccagaccuuccacucc

SEQ ID NO: 144224 - RNA, 29 nt, Human
cccaaauacugcuuuaucaaaccaaccaa

SEQ ID NO: 144225 - RNA, 22 nt, Human
ccccaaauacugcuuuaucaaa

SEQ ID NO: 144226 - RNA, 20 nt, Human
ccggcgcggcggcggcuucg

SEQ ID NO: 144227 - RNA, 23 nt, Human
ccggcgcggcggcggcuucggcu

SEQ ID NO: 144228 - RNA, 21 nt, Human
ccuccagucuguccuccccgu

SEQ ID NO: 144229 - RNA, 23 nt, Human
ccuccugggcacugcuucucccg

SEQ ID NO: 144230 - RNA, 19 nt, Human
ccuggcaauuucaucacca

SEQ ID NO: 144231 - RNA, 23 nt, Human
ccugggccagaggaagccggagc

SEQ ID NO: 144232 - RNA, 21 nt, Human
ccuguaguauuuguuguagcu

SEQ ID NO: 144233 - RNA, 22 nt, Human
ccuuccacuccacucugggacc

SEQ ID NO: 144234 - RNA, 21 nt, Human
cgaaaaagaaaacuccggagg

SEQ ID NO: 144235 - RNA, 18 nt, Human
cggaggguggccgguguc

SEQ ID NO: 144236 - RNA, 18 nt, Human
cggcgacgaccggguggg

SEQ ID NO: 144237 - RNA, 19 nt, Human
cggcgcggcggcggcuucg

SEQ ID NO: 144238 - RNA, 22 nt, Human
cggcgcggcggcggcuucggcu

SEQ ID NO: 144239 - RNA, 21 nt, Human
cuaauugcucaccugaauacu

SEQ ID NO: 144240 - RNA, 27 nt, Human
cuacagguuaaaauggacugaggcagg

SEQ ID NO: 144241 - RNA, 19 nt, Human
cuccugggcacugcuucuc

SEQ ID NO: 144242 - RNA, 22 nt, Human
cugccauaaaagcuagccaugu

SEQ ID NO: 144243 - RNA, 18 nt, Human
cugcuuuuacaccuucac

SEQ ID NO: 144244 - RNA, 21 nt, Human
gaaaaagaaaacuccggagga

SEQ ID NO: 144245 - RNA, 21 nt, Human
gaaaaccccaagaagugaaga

SEQ ID NO: 144246 - RNA, 18 nt, Human
gaaagucucaggcagagu

SEQ ID NO: 144247 - RNA, 22 nt, Human
gcacgaaaaagaaaacuccgga

SEQ ID NO: 144248 - RNA, 22 nt, Human
gccggugucccgggcuccggcg

SEQ ID NO: 144249 - RNA, 19 nt, Human
gccuugugauuuuuuucuc

SEQ ID NO: 144250 - RNA, 20 nt, Human
gcggcgccugggccagagga

SEQ ID NO: 144251 - RNA, 21 nt, Human
ggcacugcuucucccggggag

SEQ ID NO: 144252 - RNA, 21 nt, Human
ggcagaguuaaaugacacaua

SEQ ID NO: 144253 - RNA, 21 nt, Human
ggcccaacaaauuaucuuacc

SEQ ID NO: 144254 - RNA, 18 nt, Human
ggcuucagaaaaccuccu

SEQ ID NO: 144255 - RNA, 21 nt, Human
ggcuucagaaaaccuccuggg

SEQ ID NO: 144256 - RNA, 18 nt, Human
gggaccccaauccccggc

SEQ ID NO: 144257 - RNA, 23 nt, Human
gugaagaaucguaaguucuggug

SEQ ID NO: 144258 - RNA, 20 nt, Human
gugauauguauauacauaua

SEQ ID NO: 144259 - RNA, 19 nt, Human
uaaaaaauacuggcaccaa

SEQ ID NO: 144260 - RNA, 23 nt, Human
uaagaacaauauaauacuucaaa

SEQ ID NO: 144261 - RNA, 22 nt, Human
uaagggccuguaguauuuguug

SEQ ID NO: 144262 - RNA, 18 nt, Human
uaaguucaaauaaucaug

SEQ ID NO: 144263 - RNA, 27 nt, Human
uacauaccaucacacacaugcauauag

SEQ ID NO: 144264 - RNA, 20 nt, Human
uaccugaaugaaaauuucug

SEQ ID NO: 144265 - RNA, 25 nt, Human
uagaaaaaugggcuaaaagaaauuu

SEQ ID NO: 144266 - RNA, 22 nt, Human
uauauacacacacacacuagua

SEQ ID NO: 144267 - RNA, 18 nt, Human
uaucagcaaucugucugg

SEQ ID NO: 144268 - RNA, 22 nt, Human
uauggaaaagggaaugaucaaa

SEQ ID NO: 144269 - RNA, 20 nt, Human
uauguauauacauauauaug

SEQ ID NO: 144270 - RNA, 23 nt, Human
ucacacacaugcauauaucacac

SEQ ID NO: 144271 - RNA, 22 nt, Human
ucagggccuuggcuucuggcuc

SEQ ID NO: 144272 - RNA, 18 nt, Human
ucaucugaaaaauucgau

SEQ ID NO: 144273 - RNA, 24 nt, Human
ucaucuggccacuucaaaauuaug

SEQ ID NO: 144274 - RNA, 25 nt, Human
uccacagcucaucugcuuucacgcu

SEQ ID NO: 144275 - RNA, 18 nt, Human
uccaccgccucuccacaa

SEQ ID NO: 144276 - RNA, 21 nt, Human
uccacuccacucugggaccgc

SEQ ID NO: 144277 - RNA, 18 nt, Human
uccuccccgucuccuccc

SEQ ID NO: 144278 - RNA, 23 nt, Human
uccuucugguuucauuuaacagu

SEQ ID NO: 144279 - RNA, 18 nt, Human
ucgcacgaaaaagaaaac

SEQ ID NO: 144280 - RNA, 19 nt, Human
ucgcugggaccccaauccc

SEQ ID NO: 144281 - RNA, 20 nt, Human
ucugcuguacucacagucug

SEQ ID NO: 144282 - RNA, 18 nt, Human
ucuguccuccccgucucc

SEQ ID NO: 144283 - RNA, 26 nt, Human
ucuugggugugggaguggcgcccgcg

SEQ ID NO: 144284 - RNA, 19 nt, Human
ugaaaaacagauugaacuu

SEQ ID NO: 144285 - RNA, 18 nt, Human
ugaaaaagaacuaucuga

SEQ ID NO: 144286 - RNA, 23 nt, Human
ugaaaaccccaagaagugaagaa

SEQ ID NO: 144287 - RNA, 18 nt, Human
ugacaaugugggagggag

SEQ ID NO: 144288 - RNA, 25 nt, Human
ugacacauacauuaacauuuuggua

SEQ ID NO: 144289 - RNA, 23 nt, Human
ugacaugauaaacucaucuggcc

SEQ ID NO: 144290 - RNA, 21 nt, Human
ugauauguauauacauauaua

SEQ ID NO: 144291 - RNA, 19 nt, Human
ugcccagcaaaagucacug

SEQ ID NO: 144292 - RNA, 28 nt, Human
ugccggguccgcgcggcgccugggccag

SEQ ID NO: 144293 - RNA, 18 nt, Human
uggaaagcauuucuucuu

SEQ ID NO: 144294 - RNA, 20 nt, Human
uggaauaauagauuugacug

SEQ ID NO: 144295 - RNA, 23 nt, Human
uggcaauuucaucaccacauuga

SEQ ID NO: 144296 - RNA, 20 nt, Human
uggccacuucaaaauuaugu

SEQ ID NO: 144297 - RNA, 20 nt, Human
uggguaauuauuuuucacug

SEQ ID NO: 144298 - RNA, 24 nt, Human
ugguacuugacauugauuuuucau

SEQ ID NO: 144299 - RNA, 20 nt, Human
ugugaaaaagaacuaucuga

SEQ ID NO: 144300 - RNA, 25 nt, Human
ugugggagggagauguugggguggg

SEQ ID NO: 144301 - RNA, 19 nt, Human
ugugggagugaauuaagga

SEQ ID NO: 144302 - RNA, 19 nt, Human
uuacugccaguuaacauuu

SEQ ID NO: 144303 - RNA, 23 nt, Human
uucauacugaaaaccccaagaag

SEQ ID NO: 144304 - RNA, 24 nt, Human
uuugaaauggugacaaugugggag

SEQ ID NO: 144305 - RNA, 23 nt, Human
uuuuaagaaaaauuaagagaaua

SEQ ID NO: 144306 - RNA, 22 nt, Human
uuuuucauacaaaauuuacaug

SEQ ID NO: 144307 - RNA, 19 nt, Human
uuuuuuuucaaacuaugug

SEQ ID NO: 144308 - RNA, 22 nt, Human
aguauccacgcucaaaaguaac

SEQ ID NO: 144309 - RNA, 22 nt, Human
gagccuagagacaagcagagga

SEQ ID NO: 144310 - RNA, 22 nt, Human
gcagaggaaggaagacagacac

SEQ ID NO: 144311 - RNA, 25 nt, Human
guccgguggccgccgcaguuucaga

SEQ ID NO: 144312 - RNA, 26 nt, Human
uaaauagaauccauauggugugugaa

SEQ ID NO: 144313 - RNA, 25 nt, Human
uaacucaaguuugcgcgccaguggg

SEQ ID NO: 144314 - RNA, 24 nt, Human
ugcccgagccaagucgcugcaaac

SEQ ID NO: 144315 - RNA, 21 nt, Human
uuggggucagcugcccgagcc

SEQ ID NO: 144316 - RNA, 21 nt, Human
aaaagcaguagagucugagca

SEQ ID NO: 144317 - RNA, 21 nt, Human
acaaagaauguaaacaaugua

SEQ ID NO: 144318 - RNA, 21 nt, Human
agagucugagcaggaagacag

SEQ ID NO: 144319 - RNA, 20 nt, Human
caggaagacaguacaaagaa

SEQ ID NO: 144320 - RNA, 23 nt, Human
ccggcgcagucgacacuucccuc

SEQ ID NO: 144321 - RNA, 24 nt, Human
gacaguacaaagaauguaaacaau

SEQ ID NO: 144322 - RNA, 18 nt, Human
gauugaaugcugaaagac

SEQ ID NO: 144323 - RNA, 20 nt, Human
ggaagacaguacaaagaaug

SEQ ID NO: 144324 - RNA, 20 nt, Human
uaaaagcaguagagucugaa

SEQ ID NO: 144325 - RNA, 23 nt, Human
uaaacaauguaaacaucacuaca

SEQ ID NO: 144326 - RNA, 21 nt, Human
ucccgccggcgcagucgacac

SEQ ID NO: 144327 - RNA, 18 nt, Human
uugaaugcugaaagacaa

SEQ ID NO: 144328 - RNA, 24 nt, Human
aaaaaagaaaaccaaaguggucca

SEQ ID NO: 144329 - RNA, 24 nt, Human
aaaaaguacugauuuuaaaaacua

SEQ ID NO: 144330 - RNA, 18 nt, Human
aaacaaacaguucugaga

SEQ ID NO: 144331 - RNA, 20 nt, Human
aaagaaaaccaaaguggucc

SEQ ID NO: 144332 - RNA, 24 nt, Human
aacaguucugagaccguucuucca

SEQ ID NO: 144333 - RNA, 24 nt, Human
aagaaaaccaaagugguccacaaa

SEQ ID NO: 144334 - RNA, 26 nt, Human
agaaaaccaaagugguccacaaaaca

SEQ ID NO: 144335 - RNA, 25 nt, Human
cacgcaaaaaagaaaaccaaagugg

SEQ ID NO: 144336 - RNA, 21 nt, Human
ccaccacugauuaagaguggg

SEQ ID NO: 144337 - RNA, 23 nt, Human
gcaaaaaagaaaaccaaaguggu

SEQ ID NO: 144338 - RNA, 25 nt, Human
gucaaguuguuuccauuaaaaagua

SEQ ID NO: 144339 - RNA, 24 nt, Human
uaaugggucucaaaauucugugac

SEQ ID NO: 144340 - RNA, 25 nt, Human
uaaugggucucaaaauucugugaca

SEQ ID NO: 144341 - RNA, 23 nt, Human
uccacaaaacauucuccuuuccu

SEQ ID NO: 144342 - RNA, 23 nt, Human
ugcauuguuaucauuaaccaguc

SEQ ID NO: 144343 - RNA, 24 nt, Human
ugcauuguuaucauuaaccagucu

SEQ ID NO: 144344 - RNA, 23 nt, Human
ugccacacgcaaaaaagaaaacc

SEQ ID NO: 144345 - RNA, 22 nt, Human
uggcagguauuagggauaauau

SEQ ID NO: 144346 - RNA, 22 nt, Human
ugguccacaaaacauucuccuu

SEQ ID NO: 144347 - RNA, 24 nt, Human
uuaaauggccaauugaaacaaaca

SEQ ID NO: 144348 - RNA, 18 nt, Human
uuccaccacugauuaaga

SEQ ID NO: 144349 - RNA, 23 nt, Human
uucuccuuuccuucugaagguuu

SEQ ID NO: 144350 - RNA, 24 nt, Human
uuuaacuuuuuuaaugggucucaa

SEQ ID NO: 144351 - RNA, 26 nt, Human
uuuacuacuaaacuuaaaagguuuuc

SEQ ID NO: 144352 - RNA, 22 nt, Human
uuuuuuuuuuuuuuucucauuu

SEQ ID NO: 144353 - RNA, 18 nt, Human
aagccuggggcgggggcg

SEQ ID NO: 144354 - RNA, 21 nt, Human
aggggcuggcgggacccgggg

SEQ ID NO: 144355 - RNA, 22 nt, Human
ccggcgcgcggggcgggggcgg

SEQ ID NO: 144356 - RNA, 20 nt, Human
cgcggggcgggggcggggcg

SEQ ID NO: 144357 - RNA, 21 nt, Human
cggggcgggggcccgggcccg

SEQ ID NO: 144358 - RNA, 21 nt, Human
cugagcguggcgagcgcuggg

SEQ ID NO: 144359 - RNA, 22 nt, Human
cuggggcgggggcgccuuuccu

SEQ ID NO: 144360 - RNA, 22 nt, Human
cuugaagaacuuccacuggacc

SEQ ID NO: 144361 - RNA, 24 nt, Human
gagggucgcgccgcgggcgcccgc

SEQ ID NO: 144362 - RNA, 19 nt, Human
gccuggcgggggugcgggg

SEQ ID NO: 144363 - RNA, 20 nt, Human
gcgcggggcgggggcggggc

SEQ ID NO: 144364 - RNA, 21 nt, Human
gggcgcggaagccuggggcgg

SEQ ID NO: 144365 - RNA, 19 nt, Human
gggcgggggcccgggcccg

SEQ ID NO: 144366 - RNA, 21 nt, Human
gggcgggggcggggcgggggc

SEQ ID NO: 144367 - RNA, 19 nt, Human
ggggcggggcgggggcccg

SEQ ID NO: 144368 - RNA, 21 nt, Human
ggggcggggcgggggcccggg

SEQ ID NO: 144369 - RNA, 23 nt, Human
ucagggcgaggggggcugcagug

SEQ ID NO: 144370 - RNA, 23 nt, Human
ucgcucaguuuauugguaaaacg

SEQ ID NO: 144371 - RNA, 18 nt, Human
uggcgagcauccagucgc

SEQ ID NO: 144372 - RNA, 19 nt, Human
uggcgggacccggggugcu

SEQ ID NO: 144373 - RNA, 21 nt, Human
uggcucagggcgaggggggcu

SEQ ID NO: 144374 - RNA, 20 nt, Human
uugauggcgagcauccaguu

SEQ ID NO: 144375 - RNA, 21 nt, Human
uuugcugggagugugaggggc

SEQ ID NO: 144376 - RNA, 22 nt, Human
aaccagcccuagaagcgccgga

SEQ ID NO: 144377 - RNA, 18 nt, Human
aagcgccggagaugaccu

SEQ ID NO: 144378 - RNA, 19 nt, Human
acccgaagagaccggaaaa

SEQ ID NO: 144379 - RNA, 22 nt, Human
agaggaaaaaggacccgaagag

SEQ ID NO: 144380 - RNA, 20 nt, Human
caccgcgccggaccgaaggu

SEQ ID NO: 144381 - RNA, 25 nt, Human
cacuucuccacguacgaauuggggg

SEQ ID NO: 144382 - RNA, 23 nt, Human
cagcagaaagagagcgcgcaaau

SEQ ID NO: 144383 - RNA, 21 nt, Human
gaaaauuccuuauauagagac

SEQ ID NO: 144384 - RNA, 22 nt, Human
gaaccagcccuagaagcgccgg

SEQ ID NO: 144385 - RNA, 23 nt, Human
gaugacgggaaccagcccuagaa

SEQ ID NO: 144386 - RNA, 22 nt, Human
ggcgccccacgcugaagagagg

SEQ ID NO: 144387 - RNA, 28 nt, Human
gggagcagcagaaagagagccgguaccc

SEQ ID NO: 144388 - RNA, 21 nt, Human
gggggcccugaauuaaauggc

SEQ ID NO: 144389 - RNA, 22 nt, Human
ugacgggaaccagcccuagaag

SEQ ID NO: 144390 - RNA, 18 nt, Human
uggggagcagcagaaaga

SEQ ID NO: 144391 - RNA, 22 nt, Human
uguauccgagagcuggggagca

SEQ ID NO: 144392 - RNA, 22 nt, Human
uuccuuauauagagacggaggc

SEQ ID NO: 144393 - RNA, 21 nt, Human
aaaccucuuaaugcguuuguu

SEQ ID NO: 144394 - RNA, 19 nt, Human
agcuggaggugcucauggu

SEQ ID NO: 144395 - RNA, 19 nt, Human
aucccgccucccccucccc

SEQ ID NO: 144396 - RNA, 20 nt, Human
caccgcacaggacuuccugc

SEQ ID NO: 144397 - RNA, 24 nt, Human
ccaauggcacuaguacagcuggag

SEQ ID NO: 144398 - RNA, 21 nt, Human
ccuccggacucuggaaauaaa

SEQ ID NO: 144399 - RNA, 23 nt, Human
ccuccggacucuggaaauaaaua

SEQ ID NO: 144400 - RNA, 22 nt, Human
cgggccccagaaaccucucagg

SEQ ID NO: 144401 - RNA, 21 nt, Human
cuacccgcguguuccuuuccc

SEQ ID NO: 144402 - RNA, 19 nt, Human
cugcugccuccggacucug

SEQ ID NO: 144403 - RNA, 18 nt, Human
cuggggcaaaagccacug

SEQ ID NO: 144404 - RNA, 19 nt, Human
ggggagcgucgcugugucg

SEQ ID NO: 144405 - RNA, 19 nt, Human
ggugcugcgaguccccggg

SEQ ID NO: 144406 - RNA, 23 nt, Human
guugagugauggcacgcagcggg

SEQ ID NO: 144407 - RNA, 21 nt, Human
ucccaucccgccucccccucc

SEQ ID NO: 144408 - RNA, 26 nt, Human
ucccaucccgccucccccuccccgac

SEQ ID NO: 144409 - RNA, 19 nt, Human
uccccggggcggcaggcgc

SEQ ID NO: 144410 - RNA, 21 nt, Human
uccccuuucuggggcaaaagc

SEQ ID NO: 144411 - RNA, 18 nt, Human
ucccgccucccccucccc

SEQ ID NO: 144412 - RNA, 19 nt, Human
ugaagaaauggaaaaagug

SEQ ID NO: 144413 - RNA, 19 nt, Human
ugagugauggcacgcagcg

SEQ ID NO: 144414 - RNA, 27 nt, Human
ugccuccggacucuggaaauaaauauu

SEQ ID NO: 144415 - RNA, 18 nt, Human
uggaaaaaguguugggug

SEQ ID NO: 144416 - RNA, 19 nt, Human
ugucugcugccuccggacu

SEQ ID NO: 144417 - RNA, 24 nt, Human
ugucugcugccuccggacucugga

SEQ ID NO: 144418 - RNA, 24 nt, Human
uuccugccugcuagaaaucaucua

SEQ ID NO: 144419 - RNA, 23 nt, Human
aaaauacccuacagaaaccagca

SEQ ID NO: 144420 - RNA, 22 nt, Human
aaacaaccaccuuuaggcugga

SEQ ID NO: 144421 - RNA, 18 nt, Human
aagaauccaaguuucacc

SEQ ID NO: 144422 - RNA, 24 nt, Human
aauuuuaguuauaaauuagugaag

SEQ ID NO: 144423 - RNA, 21 nt, Human
acauauaguaauaaagacaaa

SEQ ID NO: 144424 - RNA, 19 nt, Human
aggaaagaauccaaguuuc

SEQ ID NO: 144425 - RNA, 25 nt, Human
auaguaauaaagacaaacuuugaau

SEQ ID NO: 144426 - RNA, 22 nt, Human
caaaaaaaaaacucggagagca

SEQ ID NO: 144427 - RNA, 19 nt, Human
cacagcacagcaaaaauac

SEQ ID NO: 144428 - RNA, 22 nt, Human
cacucuggaugccaggaauaaa

SEQ ID NO: 144429 - RNA, 19 nt, Human
cagaaaccagcauguugua

SEQ ID NO: 144430 - RNA, 19 nt, Human
caucaaaguaaagcaguca

SEQ ID NO: 144431 - RNA, 22 nt, Human
caucaaaguaaagcagucagau

SEQ ID NO: 144432 - RNA, 24 nt, Human
cauguacacaaagaaggccaugug

SEQ ID NO: 144433 - RNA, 22 nt, Human
ccaucaucauuuucuuccucug

SEQ ID NO: 144434 - RNA, 20 nt, Human
ccucugugagcaucaaguac

SEQ ID NO: 144435 - RNA, 25 nt, Human
ccucugugagcaucaaguacgaaga

SEQ ID NO: 144436 - RNA, 20 nt, Human
cucuggaugccaggaauaaa

SEQ ID NO: 144437 - RNA, 22 nt, Human
cuuuaugguguuuaacguuacu

SEQ ID NO: 144438 - RNA, 23 nt, Human
uaaaaaccaacacaaauauggca

SEQ ID NO: 144439 - RNA, 23 nt, Human
uaaaaauacccuacagaaaccag

SEQ ID NO: 144440 - RNA, 24 nt, Human
uaaaaauacccuacagaaaccagc

SEQ ID NO: 144441 - RNA, 31 nt, Human
uaaacaaccaccuuuaggcuggauaugaaaa

SEQ ID NO: 144442 - RNA, 20 nt, Human
uaacaaaauaacaaaaaaaa

SEQ ID NO: 144443 - RNA, 31 nt, Human
uaacaaaauaacaaaaaaaaaacucggagaa

SEQ ID NO: 144444 - RNA, 19 nt, Human
uagcucucuugaagaagac

SEQ ID NO: 144445 - RNA, 23 nt, Human
uaggaaagaauccaaguuucacc

SEQ ID NO: 144446 - RNA, 23 nt, Human
uaggaaagaauccaaguuucacc

SEQ ID NO: 144447 - RNA, 24 nt, Human
uaguaauaaagacaaacuuugaau

SEQ ID NO: 144448 - RNA, 25 nt, Human
uaguaauaaagacaaacuuugaauc

SEQ ID NO: 144449 - RNA, 22 nt, Human
uauaggaaagaauccaaguuuc

SEQ ID NO: 144450 - RNA, 23 nt, Human
uauucugcacucuauugguuuua

SEQ ID NO: 144451 - RNA, 23 nt, Human
ucaccagauaguguauacuuagc

SEQ ID NO: 144452 - RNA, 25 nt, Human
ucaccagauaguguauacuuagcuc

SEQ ID NO: 144453 - RNA, 18 nt, Human
uccaaguuucaccagaua

SEQ ID NO: 144454 - RNA, 20 nt, Human
ucggagagcaaucuuccagu

SEQ ID NO: 144455 - RNA, 22 nt, Human
ucuauugguuuuaucugcaugu

SEQ ID NO: 144456 - RNA, 22 nt, Human
ugaaauaccuuuuauccauuuu

SEQ ID NO: 144457 - RNA, 21 nt, Human
ugcuucuucaggucaguucca

SEQ ID NO: 144458 - RNA, 20 nt, Human
uggauaugaaaauaaaaacc

SEQ ID NO: 144459 - RNA, 20 nt, Human
uggcugacuuaaaugccugu

SEQ ID NO: 144460 - RNA, 23 nt, Human
uguuaguggagcucuaguaaguu

SEQ ID NO: 144461 - RNA, 19 nt, Human
uguuaugggugaguguaca

SEQ ID NO: 144462 - RNA, 28 nt, Human
uuaacaaaauaacaaaaaaaaaacucgg

SEQ ID NO: 144463 - RNA, 25 nt, Human
uuaacguuacuuacuugacuugagu

SEQ ID NO: 144464 - RNA, 22 nt, Human
uuauugaccuuuuccauuuucu

SEQ ID NO: 144465 - RNA, 22 nt, Human
uuuccaguuccuuacacccauu

SEQ ID NO: 144466 - RNA, 21 nt, Human
aaaaacaggcccagggaacua

SEQ ID NO: 144467 - RNA, 18 nt, Human
agaaaaacaggcccaggg

SEQ ID NO: 144468 - RNA, 28 nt, Human
cauucugccccucacaacaggcuccuca

SEQ ID NO: 144469 - RNA, 23 nt, Human
cccuccucguuaccuccucuccu

SEQ ID NO: 144470 - RNA, 18 nt, Human
cucguuaccuccucuccu

SEQ ID NO: 144471 - RNA, 23 nt, Human
cugcagggaggguggcucccucc

SEQ ID NO: 144472 - RNA, 19 nt, Human
cuuauccaaauguacaguu

SEQ ID NO: 144473 - RNA, 22 nt, Human
gcucgggcaaugccugcccucg

SEQ ID NO: 144474 - RNA, 26 nt, Human
gucaaugggggccccugggccuuucu

SEQ ID NO: 144475 - RNA, 18 nt, Human
uagcugcagggagggugg

SEQ ID NO: 144476 - RNA, 23 nt, Human
uccuggcgcuguccagaguggag

SEQ ID NO: 144477 - RNA, 18 nt, Human
ucucugggccggggccug

SEQ ID NO: 144478 - RNA, 18 nt, Human
uguccagaguggaguuuc

SEQ ID NO: 144479 - RNA, 20 nt, Human
uucucauucugccccucaca

SEQ ID NO: 144480 - RNA, 22 nt, Human
uugaggcagaguuaggaaugga

SEQ ID NO: 144481 - RNA, 21 nt, Human
aaaaccacgcagauucaauua

SEQ ID NO: 144482 - RNA, 18 nt, Human
aaagcaaauaugacaaaa

SEQ ID NO: 144483 - RNA, 20 nt, Human
aaagcaaauaugacaaaacu

SEQ ID NO: 144484 - RNA, 26 nt, Human
aaauaaacagacauauauaaaacaga

SEQ ID NO: 144485 - RNA, 24 nt, Human
aacaaauuauuauaugauaaacaa

SEQ ID NO: 144486 - RNA, 20 nt, Human
aagagcccgcuuccugggcu

SEQ ID NO: 144487 - RNA, 21 nt, Human
aagagcccgcuuccugggcuc

SEQ ID NO: 144488 - RNA, 22 nt, Human
aagcaaauaugacaaaacaaau

SEQ ID NO: 144489 - RNA, 23 nt, Human
aagcuccugaauaugaacaagaa

SEQ ID NO: 144490 - RNA, 22 nt, Human
acaaacaagaauaguauaugca

SEQ ID NO: 144491 - RNA, 24 nt, Human
acauuugucccuucauaaucucag

SEQ ID NO: 144492 - RNA, 22 nt, Human
acuccuaaaacagaggcaguua

SEQ ID NO: 144493 - RNA, 21 nt, Human
acuggaauccaucaaaguauc

SEQ ID NO: 144494 - RNA, 22 nt, Human
aggcaguuacaaauuugcagaa

SEQ ID NO: 144495 - RNA, 21 nt, Human
augauaaacaacccguuaaca

SEQ ID NO: 144496 - RNA, 19 nt, Human
augcgauucacuuucaagu

SEQ ID NO: 144497 - RNA, 23 nt, Human
auuuuuucagcuuuucucuaugu

SEQ ID NO: 144498 - RNA, 25 nt, Human
caaauuugcagaaaccacaaacuga

SEQ ID NO: 144499 - RNA, 18 nt, Human
caacagaaaagccugccc

SEQ ID NO: 144500 - RNA, 21 nt, Human
caacccguuaacaaaggaagg

SEQ ID NO: 144501 - RNA, 23 nt, Human
caaggaaguaauacuuauacucc

SEQ ID NO: 144502 - RNA, 22 nt, Human
caauagaguugagauagacaua

SEQ ID NO: 144503 - RNA, 22 nt, Human
cagaaaagccugcccauuaaug

SEQ ID NO: 144504 - RNA, 24 nt, Human
cagacauauauaaaacagagagaa

SEQ ID NO: 144505 - RNA, 20 nt, Human
cagccugaauuuauuccacu

SEQ ID NO: 144506 - RNA, 23 nt, Human
cagccugaauuuauuccacugga

SEQ ID NO: 144507 - RNA, 20 nt, Human
caucaaaguaucaaaaccac

SEQ ID NO: 144508 - RNA, 21 nt, Human
cucucuaugaagaacauacgg

SEQ ID NO: 144509 - RNA, 19 nt, Human
gaaaaacacucucuaugaa

SEQ ID NO: 144510 - RNA, 19 nt, Human
gaacugcuugggaaagccc

SEQ ID NO: 144511 - RNA, 23 nt, Human
gacauauauaaaacagagagaaa

SEQ ID NO: 144512 - RNA, 21 nt, Human
gauuuuuggaugaagcaauuc

SEQ ID NO: 144513 - RNA, 24 nt, Human
gcagaaaccacaaacugaaauaaa

SEQ ID NO: 144514 - RNA, 22 nt, Human
gucaguggccgccgcccuuaau

SEQ ID NO: 144515 - RNA, 21 nt, Human
uaaucucagugaauacaauau

SEQ ID NO: 144516 - RNA, 24 nt, Human
uaauucagcuggaaucucaccaua

SEQ ID NO: 144517 - RNA, 23 nt, Human
uauaaaacagagagaaauuuggc

SEQ ID NO: 144518 - RNA, 19 nt, Human
ucaccaagcuguucaucug

SEQ ID NO: 144519 - RNA, 22 nt, Human
uccaucaaaguaucaaaaccac

SEQ ID NO: 144520 - RNA, 26 nt, Human
ucccuucauaaucucagugaauacaa

SEQ ID NO: 144521 - RNA, 18 nt, Human
ucucuuuuccccuuaaau

SEQ ID NO: 144522 - RNA, 26 nt, Human
ucugaaaaacacucucuaugaagaac

SEQ ID NO: 144523 - RNA, 24 nt, Human
ucuucaacagaaaagccugcccau

SEQ ID NO: 144524 - RNA, 25 nt, Human
ugaaaaacacucucuaugaagaaca

SEQ ID NO: 144525 - RNA, 22 nt, Human
ugaaagcaaauaugacaaaaca

SEQ ID NO: 144526 - RNA, 20 nt, Human
ugaacacaaacaagaauagu

SEQ ID NO: 144527 - RNA, 21 nt, Human
ugaagaacauacggaauccag

SEQ ID NO: 144528 - RNA, 18 nt, Human
ugaauuggcaacacauuc

SEQ ID NO: 144529 - RNA, 27 nt, Human
ugcagaaaccacaaacugaaauaaaca

SEQ ID NO: 144530 - RNA, 19 nt, Human
uggaauccaucaaaguauc

SEQ ID NO: 144531 - RNA, 20 nt, Human
ugggcucagaauuucuuguu

SEQ ID NO: 144532 - RNA, 24 nt, Human
uuaacauuugucccuucauaaucu

SEQ ID NO: 144533 - RNA, 21 nt, Human
aaacaucaaagcacauuucuc

SEQ ID NO: 144534 - RNA, 27 nt, Human
aaacgaaaagaaaauaggcuuucuccg

SEQ ID NO: 144535 - RNA, 24 nt, Human
aaagugcugggauuacaggcguga

SEQ ID NO: 144536 - RNA, 27 nt, Human
aagcaggaggcgcgagccgcgccaaag

SEQ ID NO: 144537 - RNA, 18 nt, Human
aaggacacaaaagaaaca

SEQ ID NO: 144538 - RNA, 28 nt, Human
aaggacacaaaagaaacacaacuuugug

SEQ ID NO: 144539 - RNA, 19 nt, Human
aagugcugggauuacaggc

SEQ ID NO: 144540 - RNA, 19 nt, Human
aagugcugggauuacaggc

SEQ ID NO: 144541 - RNA, 26 nt, Human
aagugcugggauuacaggcgugagcc

SEQ ID NO: 144542 - RNA, 24 nt, Human
acugucucggccucccaaagugcu

SEQ ID NO: 144543 - RNA, 19 nt, Human
agaggccuggcaucuuucu

SEQ ID NO: 144544 - RNA, 22 nt, Human
agaggccuggcaucuuucuugu

SEQ ID NO: 144545 - RNA, 22 nt, Human
agcaugauucagguacaguggc

SEQ ID NO: 144546 - RNA, 24 nt, Human
caaagugcugggauuacaggcgug

SEQ ID NO: 144547 - RNA, 19 nt, Human
cagccuaggcaaaaggcaa

SEQ ID NO: 144548 - RNA, 18 nt, Human
cagggccucauagucucu

SEQ ID NO: 144549 - RNA, 22 nt, Human
ccaaagugcugggauuacaggc

SEQ ID NO: 144550 - RNA, 22 nt, Human
ccaaagugcugggauuacaggc

SEQ ID NO: 144551 - RNA, 24 nt, Human
ccaaagugcugggauuacaggcgu

SEQ ID NO: 144552 - RNA, 25 nt, Human
cccucuaucuuauuacauuuagagg

SEQ ID NO: 144553 - RNA, 21 nt, Human
ccgcugggcucuugaagcagg

SEQ ID NO: 144554 - RNA, 22 nt, Human
ccucauagucucuccacaguug

SEQ ID NO: 144555 - RNA, 18 nt, Human
cgccaaagucugcaacgg

SEQ ID NO: 144556 - RNA, 20 nt, Human
cuggcauuaggccgcgugcc

SEQ ID NO: 144557 - RNA, 19 nt, Human
cuuugugauaccacucuuc

SEQ ID NO: 144558 - RNA, 18 nt, Human
gauuacaggcgugagcca

SEQ ID NO: 144559 - RNA, 21 nt, Human
gauuacaggcgugagccacca

SEQ ID NO: 144560 - RNA, 24 nt, Human
gauuacaggcgugagccaccaugc

SEQ ID NO: 144561 - RNA, 24 nt, Human
ggauuacaggcgugagccaccaug

SEQ ID NO: 144562 - RNA, 23 nt, Human
uaaaauggguggcuccagugcca

SEQ ID NO: 144563 - RNA, 21 nt, Human
uaaggacacaaaagaaacaca

SEQ ID NO: 144564 - RNA, 26 nt, Human
uaaggacacaaaagaaacuggagacc

SEQ ID NO: 144565 - RNA, 22 nt, Human
uacaggcgugagccaccaugcc

SEQ ID NO: 144566 - RNA, 22 nt, Human
uacaggcgugagccaccaugcc

SEQ ID NO: 144567 - RNA, 23 nt, Human
uacaggcgugagccaccaugccu

SEQ ID NO: 144568 - RNA, 20 nt, Human
uagaggccuggcaucuuucu

SEQ ID NO: 144569 - RNA, 23 nt, Human
uagaggccuggcaucuuucuugu

SEQ ID NO: 144570 - RNA, 24 nt, Human
uagaugaacagcaugauucaggua

SEQ ID NO: 144571 - RNA, 25 nt, Human
uauuuuuauugauugaaccuuugac

SEQ ID NO: 144572 - RNA, 24 nt, Human
uccaaacuguuacugucucggccu

SEQ ID NO: 144573 - RNA, 24 nt, Human
ucccaaagugcugggauuacaggc

SEQ ID NO: 144574 - RNA, 21 nt, Human
ucucaccgcugggcucuugaa

SEQ ID NO: 144575 - RNA, 20 nt, Human
ucucggccucccaaagugcu

SEQ ID NO: 144576 - RNA, 19 nt, Human
ugaagcaggaggcgcgagc

SEQ ID NO: 144577 - RNA, 21 nt, Human
ugccacuaucaaagcuuaagu

SEQ ID NO: 144578 - RNA, 24 nt, Human
ugcugggauuacaggcgugagcca

SEQ ID NO: 144579 - RNA, 18 nt, Human
ugggauuacaggcgugag

SEQ ID NO: 144580 - RNA, 22 nt, Human
ugggauuacaggcgugagccac

SEQ ID NO: 144581 - RNA, 23 nt, Human
ugggauuacaggcgugagccacc

SEQ ID NO: 144582 - RNA, 24 nt, Human
ugggauuacaggcgugagccacca

SEQ ID NO: 144583 - RNA, 25 nt, Human
ugggauuacaggcgugagccaccau

SEQ ID NO: 144584 - RNA, 20 nt, Human
uuagaggccuggcaucuuuc

SEQ ID NO: 144585 - RNA, 18 nt, Human
uucucugaauguacugaa

SEQ ID NO: 144586 - RNA, 18 nt, Human
uuuuuuuuuuuuuuuuug

SEQ ID NO: 144587 - RNA, 20 nt, Human
aaaaaaacuccaguuguaga

SEQ ID NO: 144588 - RNA, 24 nt, Human
aacagguuggcacagccccccugc

SEQ ID NO: 144589 - RNA, 18 nt, Human
aaguggccccaagacagg

SEQ ID NO: 144590 - RNA, 21 nt, Human
agcucagcucccacugugccu

SEQ ID NO: 144591 - RNA, 19 nt, Human
agcuuaugccugugguggg

SEQ ID NO: 144592 - RNA, 21 nt, Human
aggaauggugggaaaggaccg

SEQ ID NO: 144593 - RNA, 18 nt, Human
aggcagaauguacacaug

SEQ ID NO: 144594 - RNA, 21 nt, Human
agggggcaucuuugacaagcu

SEQ ID NO: 144595 - RNA, 18 nt, Human
aggucuugcugggagaug

SEQ ID NO: 144596 - RNA, 21 nt, Human
auccacguggccccuuccagc

SEQ ID NO: 144597 - RNA, 18 nt, Human
augggagagaaugcagua

SEQ ID NO: 144598 - RNA, 22 nt, Human
cacagcaacuuauauacagaua

SEQ ID NO: 144599 - RNA, 23 nt, Human
cacagcucuggggagugcugccc

SEQ ID NO: 144600 - RNA, 19 nt, Human
cacaugggcacugcccuua

SEQ ID NO: 144601 - RNA, 18 nt, Human
cacugcccuuacagcuac

SEQ ID NO: 144602 - RNA, 22 nt, Human
cagcccaagcaugcugccucuc

SEQ ID NO: 144603 - RNA, 21 nt, Human
cagccccccugcuggcacagc

SEQ ID NO: 144604 - RNA, 19 nt, Human
ccacuucuuucuccguccc

SEQ ID NO: 144605 - RNA, 20 nt, Human
ccaggaugggagagaaugca

SEQ ID NO: 144606 - RNA, 22 nt, Human
ccaggaugggagagaaugcagu

SEQ ID NO: 144607 - RNA, 21 nt, Human
cccuuccagcucagcucccac

SEQ ID NO: 144608 - RNA, 19 nt, Human
ccuccgaggugaagguggg

SEQ ID NO: 144609 - RNA, 24 nt, Human
ccugcuggcacagcucuggggagu

SEQ ID NO: 144610 - RNA, 21 nt, Human
ccuggcucucuccuggagggg

SEQ ID NO: 144611 - RNA, 26 nt, Human
ccuguggugggagugguucccagggc

SEQ ID NO: 144612 - RNA, 22 nt, Human
cuccuguaccuggcuuccaagc

SEQ ID NO: 144613 - RNA, 21 nt, Human
cugcuaggugauagcuuaugc

SEQ ID NO: 144614 - RNA, 20 nt, Human
cuuaaaggcaggaauggugg

SEQ ID NO: 144615 - RNA, 18 nt, Human
gaacagguuggcacagcc

SEQ ID NO: 144616 - RNA, 22 nt, Human
gagggggcaucuuugacaagcu

SEQ ID NO: 144617 - RNA, 19 nt, Human
gcacagcucuggggagugc

SEQ ID NO: 144618 - RNA, 18 nt, Human
gcgggucuccuauggguc

SEQ ID NO: 144619 - RNA, 19 nt, Human
gcuacacucuaagaacagg

SEQ ID NO: 144620 - RNA, 29 nt, Human
gcuuugcccauccacguggccccuuccaa

SEQ ID NO: 144621 - RNA, 20 nt, Human
ggaccaugccugcacagcuu

SEQ ID NO: 144622 - RNA, 21 nt, Human
ggggcaucuuugacaagcuuu

SEQ ID NO: 144623 - RNA, 21 nt, Human
uaaggccagguguggcauaca

SEQ ID NO: 144624 - RNA, 23 nt, Human
uaaggccagguguggcauacacc

SEQ ID NO: 144625 - RNA, 21 nt, Human
uacacgugggcccugcccuuu

SEQ ID NO: 144626 - RNA, 21 nt, Human
uagaaaucaggacagacacac

SEQ ID NO: 144627 - RNA, 24 nt, Human
uauauacagauacuauacacgugg

SEQ ID NO: 144628 - RNA, 19 nt, Human
ucagcccaagcaugcugcc

SEQ ID NO: 144629 - RNA, 18 nt, Human
ucccagggcugggggcuc

SEQ ID NO: 144630 - RNA, 24 nt, Human
ucccuccgaggugaagguggggau

SEQ ID NO: 144631 - RNA, 18 nt, Human
uccgaggugaaggugggg

SEQ ID NO: 144632 - RNA, 22 nt, Human
uccuguaccuggcuuccaagca

SEQ ID NO: 144633 - RNA, 19 nt, Human
uccuuccgguugaaaaccu

SEQ ID NO: 144634 - RNA, 24 nt, Human
ucuccgucccuccgaggugaaggu

SEQ ID NO: 144635 - RNA, 19 nt, Human
ucuggggagugcugcccca

SEQ ID NO: 144636 - RNA, 23 nt, Human
ucuugcuuuuccuucagucaguu

SEQ ID NO: 144637 - RNA, 20 nt, Human
ucuuuaaggccagguguggc

SEQ ID NO: 144638 - RNA, 25 nt, Human
ugaaaguggccccaagacagguuug

SEQ ID NO: 144639 - RNA, 26 nt, Human
ugaaaguggccccaagacagguuugg

SEQ ID NO: 144640 - RNA, 23 nt, Human
ugagacaaagaacauuguauaaa

SEQ ID NO: 144641 - RNA, 21 nt, Human
ugccugcacagcuuguuucuu

SEQ ID NO: 144642 - RNA, 23 nt, Human
ugccugucccucucuucagccug

SEQ ID NO: 144643 - RNA, 23 nt, Human
ugccuuaagggaccaugccugca

SEQ ID NO: 144644 - RNA, 21 nt, Human
ugcugggagaugcugggucag

SEQ ID NO: 144645 - RNA, 21 nt, Human
uggcacagcucuggggagugc

SEQ ID NO: 144646 - RNA, 22 nt, Human
uggccccaagacagguuuggag

SEQ ID NO: 144647 - RNA, 21 nt, Human
ugggagaugcugggucagccc

SEQ ID NO: 144648 - RNA, 23 nt, Human
ugggagugguucccagggcuggg

SEQ ID NO: 144649 - RNA, 18 nt, Human
ugggggcucugaaagugg

SEQ ID NO: 144650 - RNA, 21 nt, Human
uggguucccacuggcuuucuc

SEQ ID NO: 144651 - RNA, 19 nt, Human
uguggugggagugguuccc

SEQ ID NO: 144652 - RNA, 23 nt, Human
uguggugggagugguucccaggg

SEQ ID NO: 144653 - RNA, 20 nt, Human
aaacauuaccagagccacaa

SEQ ID NO: 144654 - RNA, 24 nt, Human
aaagggagagggcaccaggaguca

SEQ ID NO: 144655 - RNA, 19 nt, Human
aaggggucugaagcugaag

SEQ ID NO: 144656 - RNA, 20 nt, Human
accacaauccuggaaguggg

SEQ ID NO: 144657 - RNA, 23 nt, Human
accagagccacaaggccgcccgg

SEQ ID NO: 144658 - RNA, 22 nt, Human
agucacagccaaagcacuugaa

SEQ ID NO: 144659 - RNA, 22 nt, Human
caaaagaggggccagggggucc

SEQ ID NO: 144660 - RNA, 18 nt, Human
caaacauuaccagagcca

SEQ ID NO: 144661 - RNA, 21 nt, Human
caaagcacuugaaaaaggccc

SEQ ID NO: 144662 - RNA, 21 nt, Human
caagaaaggucaggggguuaa

SEQ ID NO: 144663 - RNA, 23 nt, Human
cacagccaaagcacuugaaaaag

SEQ ID NO: 144664 - RNA, 19 nt, Human
caccccaaugcccaccccu

SEQ ID NO: 144665 - RNA, 22 nt, Human
cacuacagugcccuacgugggg

SEQ ID NO: 144666 - RNA, 18 nt, Human
cacuugaaaaaggcccag

SEQ ID NO: 144667 - RNA, 18 nt, Human
cagagccacaaggccgcc

SEQ ID NO: 144668 - RNA, 19 nt, Human
cagcaggcagugcugcccc

SEQ ID NO: 144669 - RNA, 20 nt, Human
ccacauagggugagcagggc

SEQ ID NO: 144670 - RNA, 24 nt, Human
cccaggggugucuacuugggcgca

SEQ ID NO: 144671 - RNA, 20 nt, Human
cccaucuaguccccucccca

SEQ ID NO: 144672 - RNA, 18 nt, Human
ccccaaugcccaccccuu

SEQ ID NO: 144673 - RNA, 20 nt, Human
ccccaucucuccccccccag

SEQ ID NO: 144674 - RNA, 21 nt, Human
cccccaaguuugguaccaaac

SEQ ID NO: 144675 - RNA, 25 nt, Human
cccccagguguggggggccuagccu

SEQ ID NO: 144676 - RNA, 22 nt, Human
ccccgacugagccccgcgcucc

SEQ ID NO: 144677 - RNA, 23 nt, Human
ccccgccccaucucucccccccc

SEQ ID NO: 144678 - RNA, 24 nt, Human
ccccgccccaucucucccccccca

SEQ ID NO: 144679 - RNA, 23 nt, Human
ccccgcgcucccggcuucuccgc

SEQ ID NO: 144680 - RNA, 19 nt, Human
ccccggagccgccgccgcc

SEQ ID NO: 144681 - RNA, 21 nt, Human
ccccuugccauccuuguccac

SEQ ID NO: 144682 - RNA, 18 nt, Human
cccuuuuuggcccccaag

SEQ ID NO: 144683 - RNA, 21 nt, Human
ccgcccgggacccauggcugu

SEQ ID NO: 144684 - RNA, 22 nt, Human
ccgccgccccccgacugagccc

SEQ ID NO: 144685 - RNA, 20 nt, Human
ccgccgccgccgccgccccc

SEQ ID NO: 144686 - RNA, 23 nt, Human
ccgccgccgccgccgccccccga

SEQ ID NO: 144687 - RNA, 21 nt, Human
ccggagccgccgccgccgccg

SEQ ID NO: 144688 - RNA, 22 nt, Human
ccuuguccacugcccgcccccc

SEQ ID NO: 144689 - RNA, 22 nt, Human
cgcccgggacccauggcugucc

SEQ ID NO: 144690 - RNA, 19 nt, Human
cuaggcccacuaggcuucc

SEQ ID NO: 144691 - RNA, 21 nt, Human
cuggggggacaaagggagagg

SEQ ID NO: 144692 - RNA, 25 nt, Human
cuggggggacaaagggagagggcac

SEQ ID NO: 144693 - RNA, 22 nt, Human
gaccacauagggugagcagggc

SEQ ID NO: 144694 - RNA, 22 nt, Human
gagcaaugggggugccucccac

SEQ ID NO: 144695 - RNA, 19 nt, Human
gagcagggcaagguccugg

SEQ ID NO: 144696 - RNA, 19 nt, Human
gagggcaccaggagucagg

SEQ ID NO: 144697 - RNA, 24 nt, Human
gccccgccccaucucucccccccc

SEQ ID NO: 144698 - RNA, 22 nt, Human
gccuagccugguggggaagggg

SEQ ID NO: 144699 - RNA, 20 nt, Human
ggcucagggcuggaagggag

SEQ ID NO: 144700 - RNA, 18 nt, Human
gggagugggggaggagga

SEQ ID NO: 144701 - RNA, 20 nt, Human
ggggaagggguagagggggc

SEQ ID NO: 144702 - RNA, 22 nt, Human
gggggacaaagggagagggcac

SEQ ID NO: 144703 - RNA, 18 nt, Human
gggggaggaggacgugcu

SEQ ID NO: 144704 - RNA, 18 nt, Human
ggggugccucccacgcuu

SEQ ID NO: 144705 - RNA, 21 nt, Human
gucaagaaaggucaggggguu

SEQ ID NO: 144706 - RNA, 18 nt, Human
guccacugcccgcccccc

SEQ ID NO: 144707 - RNA, 20 nt, Human
guccacugcccgccccccca

SEQ ID NO: 144708 - RNA, 18 nt, Human
gugcugccccuugcccau

SEQ ID NO: 144709 - RNA, 27 nt, Human
uaagagcagaguaugaaagucacagcc

SEQ ID NO: 144710 - RNA, 21 nt, Human
uagacuaagagcagaguauga

SEQ ID NO: 144711 - RNA, 22 nt, Human
uagggugagcagggcaaggucc

SEQ ID NO: 144712 - RNA, 21 nt, Human
uaggugggaccacauagggug

SEQ ID NO: 144713 - RNA, 24 nt, Human
uaguccccuccccauguucugccc

SEQ ID NO: 144714 - RNA, 19 nt, Human
ucugccccuggaggagagc

SEQ ID NO: 144715 - RNA, 20 nt, Human
ugcccuuuuuggcccccaag

SEQ ID NO: 144716 - RNA, 22 nt, Human
ugccuggcaccccaaugcccac

SEQ ID NO: 144717 - RNA, 19 nt, Human
ugcguugcauagguccugu

SEQ ID NO: 144718 - RNA, 24 nt, Human
ugggagaugguucccggcucaggg

SEQ ID NO: 144719 - RNA, 20 nt, Human
ugguggggaaggggucugaa

SEQ ID NO: 144720 - RNA, 22 nt, Human
uucacagaagacaaaagagggg

SEQ ID NO: 144721 - RNA, 21 nt, Human
uuccaagccccgccccaucuc

SEQ ID NO: 144722 - RNA, 24 nt, Human
agaguguccagggcugucuacugc

SEQ ID NO: 144723 - RNA, 21 nt, Human
aggcagggcuucuucuuugcc

SEQ ID NO: 144724 - RNA, 19 nt, Human
auaccaaauccaguccucc

SEQ ID NO: 144725 - RNA, 19 nt, Human
cagaguguccagggcuguc

SEQ ID NO: 144726 - RNA, 26 nt, Human
cagggauccuccuccuccaggggauc

SEQ ID NO: 144727 - RNA, 20 nt, Human
cucugcuucagaguguccag

SEQ ID NO: 144728 - RNA, 21 nt, Human
gagucaccucagacccucuga

SEQ ID NO: 144729 - RNA, 20 nt, Human
gcagggauccuccuccucca

SEQ ID NO: 144730 - RNA, 20 nt, Human
ggaucuugggaggacucugg

SEQ ID NO: 144731 - RNA, 24 nt, Human
ggcagggcuucuucuuugcccugg

SEQ ID NO: 144732 - RNA, 22 nt, Human
ucccaggucuucagccuggggc

SEQ ID NO: 144733 - RNA, 21 nt, Human
uccccuggggagggcaaggug

SEQ ID NO: 144734 - RNA, 19 nt, Human
ugagacccucagagcagcc

SEQ ID NO: 144735 - RNA, 19 nt, Human
ugagacccucagagcagcc

SEQ ID NO: 144736 - RNA, 24 nt, Human
ugaggauuugaucauaccaaaucc

SEQ ID NO: 144737 - RNA, 24 nt, Human
ugagugguuuauugaagguuuggu

SEQ ID NO: 144738 - RNA, 23 nt, Human
ugaucauaccaaauccaguccuc

SEQ ID NO: 144739 - RNA, 21 nt, Human
ugccucugcuucagagugucc

SEQ ID NO: 144740 - RNA, 24 nt, Human
uggcacccccagugcaggcagcag

SEQ ID NO: 144741 - RNA, 25 nt, Human
uggcaugaaauucaaccucaugaag

SEQ ID NO: 144742 - RNA, 19 nt, Human
ugugaugaggggacaggcu

SEQ ID NO: 144743 - RNA, 19 nt, Human
uuugcccugguccagcaau

SEQ ID NO: 144744 - RNA, 24 nt, Human
aaaaaacagaugaaaaugaguugg

SEQ ID NO: 144745 - RNA, 19 nt, Human
aaaaacagugaugauagcc

SEQ ID NO: 144746 - RNA, 21 nt, Human
aaaaagcaacaagaaaauaau

SEQ ID NO: 144747 - RNA, 20 nt, Human
aaaacccuuccgacugccac

SEQ ID NO: 144748 - RNA, 23 nt, Human
aaacaaaaacaaaaacccuuccg

SEQ ID NO: 144749 - RNA, 23 nt, Human
aaacaaaaacaaaaacccuuccg

SEQ ID NO: 144750 - RNA, 24 nt, Human
aaacaaaaacaaaaacccuuccga

SEQ ID NO: 144751 - RNA, 19 nt, Human
aacacaaaagcauuaaaaa

SEQ ID NO: 144752 - RNA, 21 nt, Human
aacacaaaagcauuaaaaaca

SEQ ID NO: 144753 - RNA, 21 nt, Human
aacagcccuggccugccccuu

SEQ ID NO: 144754 - RNA, 19 nt, Human
aacaggguggggggugggg

SEQ ID NO: 144755 - RNA, 20 nt, Human
aagaaguggggguuucccca

SEQ ID NO: 144756 - RNA, 23 nt, Human
aagagcauggggguuaggggcac

SEQ ID NO: 144757 - RNA, 24 nt, Human
aagcaacaagaaaauaauucagag

SEQ ID NO: 144758 - RNA, 25 nt, Human
aagcaccccccuccgaagcccaggg

SEQ ID NO: 144759 - RNA, 18 nt, Human
aagcccagggggcaggga

SEQ ID NO: 144760 - RNA, 23 nt, Human
acaaagccuggggaggggcugcc

SEQ ID NO: 144761 - RNA, 28 nt, Human
acacaaauggcaacagaaacaaaaacaa

SEQ ID NO: 144762 - RNA, 22 nt, Human
acagaaacaaaaacaaaaaccc

SEQ ID NO: 144763 - RNA, 18 nt, Human
acagcagcaggagcuggg

SEQ ID NO: 144764 - RNA, 21 nt, Human
acagcagcaggagcuggguug

SEQ ID NO: 144765 - RNA, 23 nt, Human
accacaucgugccccaggcccuc

SEQ ID NO: 144766 - RNA, 18 nt, Human
accccauugccaggauaa

SEQ ID NO: 144767 - RNA, 23 nt, Human
acccugggccucuguuuccccac

SEQ ID NO: 144768 - RNA, 23 nt, Human
accucaccucccuccacccccca

SEQ ID NO: 144769 - RNA, 26 nt, Human
accucaccucccuccaccccccauga

SEQ ID NO: 144770 - RNA, 19 nt, Human
agcccaagacugggacagc

SEQ ID NO: 144771 - RNA, 23 nt, Human
agcgggcuggcccagccccaggc

SEQ ID NO: 144772 - RNA, 20 nt, Human
agcucgccucgccuuccucu

SEQ ID NO: 144773 - RNA, 21 nt, Human
aggagcuggguuggguggggg

SEQ ID NO: 144774 - RNA, 19 nt, Human
aggagggucaggaggggag

SEQ ID NO: 144775 - RNA, 24 nt, Human
aggcagccucuuccucuuuccagg

SEQ ID NO: 144776 - RNA, 19 nt, Human
agggaggggcagggccagg

SEQ ID NO: 144777 - RNA, 20 nt, Human
agggaggggcagggccaggg

SEQ ID NO: 144778 - RNA, 30 nt, Human
agggauuuuugugugugugugugugugugg

SEQ ID NO: 144779 - RNA, 20 nt, Human
aggggagggggugugggggc

SEQ ID NO: 144780 - RNA, 23 nt, Human
aggggcagggccaggggacuguc

SEQ ID NO: 144781 - RNA, 21 nt, Human
agggggugugggggcgaaagg

SEQ ID NO: 144782 - RNA, 20 nt, Human
agggucaggaggggagggug

SEQ ID NO: 144783 - RNA, 27 nt, Human
agguaaggagagaacaggguggggggu

SEQ ID NO: 144784 - RNA, 20 nt, Human
agguggauggugugagggcc

SEQ ID NO: 144785 - RNA, 20 nt, Human
agugacuaccccauugccag

SEQ ID NO: 144786 - RNA, 25 nt, Human
auggcaacagaaacaaaaacaaaaa

SEQ ID NO: 144787 - RNA, 20 nt, Human
caaagcucgccucgccuucc

SEQ ID NO: 144788 - RNA, 25 nt, Human
caaagcucgccucgccuuccucugc

SEQ ID NO: 144789 - RNA, 18 nt, Human
caaauagccaccugggca

SEQ ID NO: 144790 - RNA, 23 nt, Human
caacagaaacaaaaacaaaaacc

SEQ ID NO: 144791 - RNA, 23 nt, Human
caacagaaacaaaaacaaaaacc

SEQ ID NO: 144792 - RNA, 20 nt, Human
caagaaacuacaaaacuaaa

SEQ ID NO: 144793 - RNA, 22 nt, Human
caaggggagggggugugggggc

SEQ ID NO: 144794 - RNA, 23 nt, Human
cacaaaagcauuaaaaacaguga

SEQ ID NO: 144795 - RNA, 20 nt, Human
cacaaaccucccacugcugu

SEQ ID NO: 144796 - RNA, 23 nt, Human
cacaagcaccccccuccgaagcc

SEQ ID NO: 144797 - RNA, 22 nt, Human
caccagaaauaccaaggaaucu

SEQ ID NO: 144798 - RNA, 19 nt, Human
caccuggaaggggcuggcu

SEQ ID NO: 144799 - RNA, 18 nt, Human
cagaaacaaaaacaaaaa

SEQ ID NO: 144800 - RNA, 20 nt, Human
cagaaacaaaaacaaaaacc

SEQ ID NO: 144801 - RNA, 22 nt, Human
cagcagcaggagcuggguuggg

SEQ ID NO: 144802 - RNA, 21 nt, Human
cagcaggagcuggguugggug

SEQ ID NO: 144803 - RNA, 24 nt, Human
cagccucuuccucuuuccaggccc

SEQ ID NO: 144804 - RNA, 18 nt, Human
cagcgggcuggcccagcc

SEQ ID NO: 144805 - RNA, 23 nt, Human
caggagaugcccaagaaucccac

SEQ ID NO: 144806 - RNA, 22 nt, Human
caggccaccuggucuuauaccc

SEQ ID NO: 144807 - RNA, 18 nt, Human
caggcccucuuguacugg

SEQ ID NO: 144808 - RNA, 21 nt, Human
cagggggcagggaaaaagggg

SEQ ID NO: 144809 - RNA, 18 nt, Human
cagggugggggguggggg

SEQ ID NO: 144810 - RNA, 20 nt, Human
cagugaugauagcggacaag

SEQ ID NO: 144811 - RNA, 21 nt, Human
caguguccagcccugccuucc

SEQ ID NO: 144812 - RNA, 20 nt, Human
cauccuaugcuuccuggcug

SEQ ID NO: 144813 - RNA, 21 nt, Human
ccaaaaagacuaguauuuaca

SEQ ID NO: 144814 - RNA, 22 nt, Human
ccacacugggacuccgggcuac

SEQ ID NO: 144815 - RNA, 22 nt, Human
ccaccuggaaggggcuggcugu

SEQ ID NO: 144816 - RNA, 22 nt, Human
ccaccuggucuuauacccgcuu

SEQ ID NO: 144817 - RNA, 18 nt, Human
ccacugcuguccagcucg

SEQ ID NO: 144818 - RNA, 19 nt, Human
ccagcccugccuuccaaga

SEQ ID NO: 144819 - RNA, 26 nt, Human
cccaagacugggacagcagcaggagc

SEQ ID NO: 144820 - RNA, 26 nt, Human
cccaccaggccaaaggaugccaaagg

SEQ ID NO: 144821 - RNA, 27 nt, Human
cccacugcuguccagcucgcauagacu

SEQ ID NO: 144822 - RNA, 20 nt, Human
cccagaggccuggccagagg

SEQ ID NO: 144823 - RNA, 25 nt, Human
cccagccccaggcagccucuuccuc

SEQ ID NO: 144824 - RNA, 18 nt, Human
cccauccuccgcagccgc

SEQ ID NO: 144825 - RNA, 23 nt, Human
ccccaggcccucuuguacuggcu

SEQ ID NO: 144826 - RNA, 27 nt, Human
ccccaggcccucuuguacuggcuuggg

SEQ ID NO: 144827 - RNA, 20 nt, Human
cccccacggagcccagaggc

SEQ ID NO: 144828 - RNA, 18 nt, Human
cccccgggugaucccgcc

SEQ ID NO: 144829 - RNA, 24 nt, Human
cccccgggugaucccgcccgauuc

SEQ ID NO: 144830 - RNA, 19 nt, Human
ccccgggcucccgacuggg

SEQ ID NO: 144831 - RNA, 21 nt, Human
cccggccggccaggaggacuc

SEQ ID NO: 144832 - RNA, 18 nt, Human
cccuccgcugccgcugug

SEQ ID NO: 144833 - RNA, 24 nt, Human
ccgaagccucggccggguagcccg

SEQ ID NO: 144834 - RNA, 21 nt, Human
ccgccccgacgccucgaccgu

SEQ ID NO: 144835 - RNA, 19 nt, Human
ccgcugccgcacgaggcgc

SEQ ID NO: 144836 - RNA, 19 nt, Human
ccugcagcagcucuccugu

SEQ ID NO: 144837 - RNA, 22 nt, Human
ccugcagcagcucuccuguucc

SEQ ID NO: 144838 - RNA, 20 nt, Human
ccuggggaggggcugccuuu

SEQ ID NO: 144839 - RNA, 19 nt, Human
ccugugcuagggcccagaa

SEQ ID NO: 144840 - RNA, 21 nt, Human
cgagggcucguucuccugggc

SEQ ID NO: 144841 - RNA, 24 nt, Human
cgcccccaacccgggcaugggcuu

SEQ ID NO: 144842 - RNA, 25 nt, Human
cgccuccucaccaaagcucgccucg

SEQ ID NO: 144843 - RNA, 23 nt, Human
cggcagccucgcgucgccgaguc

SEQ ID NO: 144844 - RNA, 20 nt, Human
cggugaccgccccgacgccu

SEQ ID NO: 144845 - RNA, 23 nt, Human
cgugccccaggcccucuuguacu

SEQ ID NO: 144846 - RNA, 22 nt, Human
cuaccccauugccaggauaagc

SEQ ID NO: 144847 - RNA, 19 nt, Human
cucacaaaccucccacugc

SEQ ID NO: 144848 - RNA, 24 nt, Human
cucacaaaccucccacugcugucc

SEQ ID NO: 144849 - RNA, 21 nt, Human
cucaccucccuccacccccca

SEQ ID NO: 144850 - RNA, 21 nt, Human
cucacugggcagccgccccca

SEQ ID NO: 144851 - RNA, 24 nt, Human
cucacugggcagccgcccccaacc

SEQ ID NO: 144852 - RNA, 20 nt, Human
cucauuuuuuucuaagaaaa

SEQ ID NO: 144853 - RNA, 25 nt, Human
cuccacccugggccucuguuucccc

SEQ ID NO: 144854 - RNA, 21 nt, Human
cugcgcgcccucuccccgacg

SEQ ID NO: 144855 - RNA, 23 nt, Human
cuggcccagccccaggcagccuc

SEQ ID NO: 144856 - RNA, 18 nt, Human
cugggccucuguuucccc

SEQ ID NO: 144857 - RNA, 23 nt, Human
cuucggggcugcgcgcccucucc

SEQ ID NO: 144858 - RNA, 24 nt, Human
cuucuccgcccggccggccaggag

SEQ ID NO: 144859 - RNA, 21 nt, Human
gaaauaccaaggaaucuauaa

SEQ ID NO: 144860 - RNA, 18 nt, Human
gacagcagcaggagcugg

SEQ ID NO: 144861 - RNA, 18 nt, Human
gagcaggccaccuggucu

SEQ ID NO: 144862 - RNA, 24 nt, Human
gagccagucccauuaguuugcgcc

SEQ ID NO: 144863 - RNA, 24 nt, Human
gagcuggguuggguggggguuacc

SEQ ID NO: 144864 - RNA, 22 nt, Human
gagggucaggaggggagggugg

SEQ ID NO: 144865 - RNA, 21 nt, Human
gaugccaaagguaaggagaga

SEQ ID NO: 144866 - RNA, 19 nt, Human
gauuauaaaagccaagaaa

SEQ ID NO: 144867 - RNA, 26 nt, Human
gcaccucaccucccuccaccccccau

SEQ ID NO: 144868 - RNA, 24 nt, Human
gcacuggggugggcagcuggccag

SEQ ID NO: 144869 - RNA, 21 nt, Human
gcagggaaaaagggggauuau

SEQ ID NO: 144870 - RNA, 19 nt, Human
gccuggggaggggcugccu

SEQ ID NO: 144871 - RNA, 19 nt, Human
gcgcccccgggugaucccg

SEQ ID NO: 144872 - RNA, 20 nt, Human
gcuagggcccagaaaaggag

SEQ ID NO: 144873 - RNA, 21 nt, Human
gcucccucucccaccuggcac

SEQ ID NO: 144874 - RNA, 21 nt, Human
ggaaaaagggggauuauaaaa

SEQ ID NO: 144875 - RNA, 20 nt, Human
ggagagaacagggugggggg

SEQ ID NO: 144876 - RNA, 19 nt, Human
ggagcccagaggccuggcc

SEQ ID NO: 144877 - RNA, 24 nt, Human
ggcacuggggugggcagcuggcca

SEQ ID NO: 144878 - RNA, 19 nt, Human
ggccaaaggaugccaaagg

SEQ ID NO: 144879 - RNA, 20 nt, Human
ggcuccguuccuccgggcca

SEQ ID NO: 144880 - RNA, 23 nt, Human
ggcugccuuuuacauuuuuccau

SEQ ID NO: 144881 - RNA, 23 nt, Human
gggauuuuugugugugugugugu

SEQ ID NO: 144882 - RNA, 19 nt, Human
gggcccagaaaaggagcag

SEQ ID NO: 144883 - RNA, 20 nt, Human
gggcgagggaggggcagggc

SEQ ID NO: 144884 - RNA, 21 nt, Human
gggcucccgacugggccgccc

SEQ ID NO: 144885 - RNA, 21 nt, Human
ggggcgagggaggggcagggc

SEQ ID NO: 144886 - RNA, 19 nt, Human
gggggcagggaaaaagggg

SEQ ID NO: 144887 - RNA, 20 nt, Human
gggggugaaacucccagcuc

SEQ ID NO: 144888 - RNA, 24 nt, Human
gggugugggggcgaaaggagaggu

SEQ ID NO: 144889 - RNA, 18 nt, Human
gguaaggagagaacaggg

SEQ ID NO: 144890 - RNA, 21 nt, Human
gguuaggggcacaagcacccc

SEQ ID NO: 144891 - RNA, 26 nt, Human
guccaucaguguccagcccugccuuc

SEQ ID NO: 144892 - RNA, 21 nt, Human
gugugugugugugugugugug

SEQ ID NO: 144893 - RNA, 20 nt, Human
uaaaagccaagaaacuacaa

SEQ ID NO: 144894 - RNA, 20 nt, Human
uagaagagcggggagaugcu

SEQ ID NO: 144895 - RNA, 19 nt, Human
uagccaccugggcaccuca

SEQ ID NO: 144896 - RNA, 20 nt, Human
uauaaaagccaagaaacuac

SEQ ID NO: 144897 - RNA, 24 nt, Human
ucacugggcagccgcccccaaccc

SEQ ID NO: 144898 - RNA, 21 nt, Human
ucaggcgcccauccuccgcag

SEQ ID NO: 144899 - RNA, 22 nt, Human
ucaucugccugcagcagcucuc

SEQ ID NO: 144900 - RNA, 19 nt, Human
uccaggccccagcccaaga

SEQ ID NO: 144901 - RNA, 24 nt, Human
uccaucaguguccagcccugccuu

SEQ ID NO: 144902 - RNA, 23 nt, Human
uccccacagcacaagcucggucc

SEQ ID NO: 144903 - RNA, 24 nt, Human
ucccgggggcagacugcacuucgg

SEQ ID NO: 144904 - RNA, 20 nt, Human
ucccuccgcugccgcugugc

SEQ ID NO: 144905 - RNA, 21 nt, Human
ucccuuggcgccuccucacca

SEQ ID NO: 144906 - RNA, 19 nt, Human
uccuccgggccacacuggg

SEQ ID NO: 144907 - RNA, 18 nt, Human
uccucugccgcgcugcgc

SEQ ID NO: 144908 - RNA, 25 nt, Human
uccuggcucccgggcgaucgagccc

SEQ ID NO: 144909 - RNA, 21 nt, Human
ucgggggccugaggccgugcc

SEQ ID NO: 144910 - RNA, 24 nt, Human
ucuaagaaaaaagcaacaagaaaa

SEQ ID NO: 144911 - RNA, 18 nt, Human
ucucccugccugcugucc

SEQ ID NO: 144912 - RNA, 24 nt, Human
ucuccugggcucuccgcugccgca

SEQ ID NO: 144913 - RNA, 23 nt, Human
ugaccacaucgugccccaggccc

SEQ ID NO: 144914 - RNA, 20 nt, Human
ugcccaguggcacuuuccuc

SEQ ID NO: 144915 - RNA, 19 nt, Human
ugccccaggcccucuugua

SEQ ID NO: 144916 - RNA, 22 nt, Human
ugcuguccaucaguguccagcc

SEQ ID NO: 144917 - RNA, 23 nt, Human
uggcaacagaaacaaaaacaaaa

SEQ ID NO: 144918 - RNA, 23 nt, Human
uggcacuggggugggcagcuggc

SEQ ID NO: 144919 - RNA, 21 nt, Human
ugggacagcagcaggagcugg

SEQ ID NO: 144920 - RNA, 23 nt, Human
ugggcagcuggccaggaggcagu

SEQ ID NO: 144921 - RNA, 21 nt, Human
ugggcgugaacagcccuggcc

SEQ ID NO: 144922 - RNA, 21 nt, Human
uggggugggcagcuggccagg

SEQ ID NO: 144923 - RNA, 22 nt, Human
ugugcuagggcccagaaaagga

SEQ ID NO: 144924 - RNA, 18 nt, Human
ugugugugugugugugug

SEQ ID NO: 144925 - RNA, 18 nt, Human
ugugugugugugugugug

SEQ ID NO: 144926 - RNA, 18 nt, Human
ugugugugugugugugug

SEQ ID NO: 144927 - RNA, 18 nt, Human
ugugugugugugugugug

SEQ ID NO: 144928 - RNA, 18 nt, Human
ugugugugugugugugug

SEQ ID NO: 144929 - RNA, 18 nt, Human
ugugugugugugugugug

SEQ ID NO: 144930 - RNA, 23 nt, Human
uguguguguguguguguggaagg

SEQ ID NO: 144931 - RNA, 21 nt, Human
ugugugugugugugugugugu

SEQ ID NO: 144932 - RNA, 21 nt, Human
ugugugugugugugugugugu

SEQ ID NO: 144933 - RNA, 21 nt, Human
ugugugugugugugugugugu

SEQ ID NO: 144934 - RNA, 21 nt, Human
ugugugugugugugugugugu

SEQ ID NO: 144935 - RNA, 21 nt, Human
ugugugugugugugugugugu

SEQ ID NO: 144936 - RNA, 21 nt, Human
ugugugugugugugugugugu

SEQ ID NO: 144937 - RNA, 21 nt, Human
ugugugugugugugugugugu

SEQ ID NO: 144938 - RNA, 21 nt, Human
ugugugugugugugugugugu

SEQ ID NO: 144939 - RNA, 21 nt, Human
ugugugugugugugugugugu

SEQ ID NO: 144940 - RNA, 21 nt, Human
ugugugugugugugugugugu

SEQ ID NO: 144941 - RNA, 22 nt, Human
ugugugugugugugugugugug

SEQ ID NO: 144942 - RNA, 22 nt, Human
ugugugugugugugugugugug

SEQ ID NO: 144943 - RNA, 22 nt, Human
ugugugugugugugugugugug

SEQ ID NO: 144944 - RNA, 18 nt, Human
uguucugcucccucuccc

SEQ ID NO: 144945 - RNA, 25 nt, Human
uguucugcucccucucccaccuggc

SEQ ID NO: 144946 - RNA, 19 nt, Human
uuagcagccgugcuggcaa

SEQ ID NO: 144947 - RNA, 19 nt, Human
uuccgcucgacuucccgag

SEQ ID NO: 144948 - RNA, 24 nt, Human
uuuccaaaaagacuaguauuuaca

SEQ ID NO: 144949 - RNA, 24 nt, Human
uuugugugugugugugugugugug

SEQ ID NO: 144950 - RNA, 22 nt, Human
aaauacguccuaucuuccuucu

SEQ ID NO: 144951 - RNA, 24 nt, Human
aacgaugaugauggaauuacagcc

SEQ ID NO: 144952 - RNA, 19 nt, Human
aagcuguccagcgcgacgg

SEQ ID NO: 144953 - RNA, 26 nt, Human
aaggaggaaccuggggggagggggau

SEQ ID NO: 144954 - RNA, 23 nt, Human
acccugcagcccuggcacccgga

SEQ ID NO: 144955 - RNA, 25 nt, Human
acuuccgucuuaaggacucuaagag

SEQ ID NO: 144956 - RNA, 22 nt, Human
agccagcccuuuccccagcccc

SEQ ID NO: 144957 - RNA, 23 nt, Human
auccaaagcagaccgacucuccu

SEQ ID NO: 144958 - RNA, 21 nt, Human
caaaugaauuucacaucuucu

SEQ ID NO: 144959 - RNA, 19 nt, Human
caccgggcgcugcaggcuc

SEQ ID NO: 144960 - RNA, 20 nt, Human
cacugugugugcugucgugu

SEQ ID NO: 144961 - RNA, 20 nt, Human
cagcagcagugagcugcaag

SEQ ID NO: 144962 - RNA, 19 nt, Human
cagccagcccuuuccccag

SEQ ID NO: 144963 - RNA, 23 nt, Human
caguaccgacccugcagcccugg

SEQ ID NO: 144964 - RNA, 23 nt, Human
cccaacgcagaaauaaacgccgg

SEQ ID NO: 144965 - RNA, 26 nt, Human
ccccuggacaucauaauuuacuuccg

SEQ ID NO: 144966 - RNA, 22 nt, Human
cccuucccuccaagccuguucc

SEQ ID NO: 144967 - RNA, 18 nt, Human
ccgacccugcagcccugg

SEQ ID NO: 144968 - RNA, 18 nt, Human
ccuacagcucggagcugu

SEQ ID NO: 144969 - RNA, 18 nt, Human
ccucugggaaagcacagg

SEQ ID NO: 144970 - RNA, 18 nt, Human
ccuggggcaccugccagg

SEQ ID NO: 144971 - RNA, 18 nt, Human
ccuguguuuaauaaaaug

SEQ ID NO: 144972 - RNA, 19 nt, Human
cgggacauuagguguccuc

SEQ ID NO: 144973 - RNA, 27 nt, Human
cguccuaucuuccuucucccccuggac

SEQ ID NO: 144974 - RNA, 21 nt, Human
cuacuuucucccuucccucca

SEQ ID NO: 144975 - RNA, 25 nt, Human
cucagcaaaaccaaagugcugugcu

SEQ ID NO: 144976 - RNA, 18 nt, Human
cucccccuggacaucaua

SEQ ID NO: 144977 - RNA, 22 nt, Human
cugaagcuguuguugccagcgg

SEQ ID NO: 144978 - RNA, 22 nt, Human
gacagcaccgcauaaaccaaag

SEQ ID NO: 144979 - RNA, 27 nt, Human
gaggggaaggaggaaccuggggggagg

SEQ ID NO: 144980 - RNA, 26 nt, Human
gauuuggcucucugcuauucuccuaa

SEQ ID NO: 144981 - RNA, 24 nt, Human
gcauaaaccaaagugucguaaggc

SEQ ID NO: 144982 - RNA, 20 nt, Human
gccagcccuuuccccagccc

SEQ ID NO: 144983 - RNA, 18 nt, Human
gcggcuggaggaggggac

SEQ ID NO: 144984 - RNA, 21 nt, Human
ggaaggaggaaccugggggga

SEQ ID NO: 144985 - RNA, 19 nt, Human
ggacauuagguguccucug

SEQ ID NO: 144986 - RNA, 18 nt, Human
ggaggaaccuggggggag

SEQ ID NO: 144987 - RNA, 21 nt, Human
ggaggaaccuggggggagggg

SEQ ID NO: 144988 - RNA, 21 nt, Human
ggcaccugccaggaugcucac

SEQ ID NO: 144989 - RNA, 20 nt, Human
ggcgcugcaggcuccaucag

SEQ ID NO: 144990 - RNA, 21 nt, Human
ggcuucgaggaggagacgugg

SEQ ID NO: 144991 - RNA, 22 nt, Human
gggaaggaggaaccugggggga

SEQ ID NO: 144992 - RNA, 25 nt, Human
gggaggggaaggaggaaccuggggg

SEQ ID NO: 144993 - RNA, 18 nt, Human
gguguccucugggaaagc

SEQ ID NO: 144994 - RNA, 23 nt, Human
guccuaucuuccuucucccccug

SEQ ID NO: 144995 - RNA, 21 nt, Human
uaaaaaaucauccaaagcaga

SEQ ID NO: 144996 - RNA, 21 nt, Human
uaaaaaaucauccaaagcaga

SEQ ID NO: 144997 - RNA, 21 nt, Human
uaauugccacaaaugaauuuc

SEQ ID NO: 144998 - RNA, 19 nt, Human
uaccacaacaguccugccc

SEQ ID NO: 144999 - RNA, 22 nt, Human
uagcccgagguccgugugacaa

SEQ ID NO: 145000 - RNA, 19 nt, Human
ucagcggccuacuuucucc

SEQ ID NO: 145001 - RNA, 19 nt, Human
ucccaacaauacccgucuu

SEQ ID NO: 145002 - RNA, 21 nt, Human
uccccaugcacuggaauccac

SEQ ID NO: 145003 - RNA, 25 nt, Human
uccccaugcacuggaauccacugug

SEQ ID NO: 145004 - RNA, 19 nt, Human
uccugcacaucgcuauuug

SEQ ID NO: 145005 - RNA, 22 nt, Human
uccugcacaucgcuauuugaua

SEQ ID NO: 145006 - RNA, 18 nt, Human
uccugcucuguggggcuc

SEQ ID NO: 145007 - RNA, 20 nt, Human
ucgaucucagcaaaaccaaa

SEQ ID NO: 145008 - RNA, 20 nt, Human
ucgggaggggaaggaggaac

SEQ ID NO: 145009 - RNA, 20 nt, Human
ucuagagaacacuucagccc

SEQ ID NO: 145010 - RNA, 23 nt, Human
ucuaugaacggauuacccaugga

SEQ ID NO: 145011 - RNA, 19 nt, Human
ugaacggauuacccaugga

SEQ ID NO: 145012 - RNA, 22 nt, Human
ugaccuaccuuuuauagauaag

SEQ ID NO: 145013 - RNA, 19 nt, Human
ugcugcagagcccugggua

SEQ ID NO: 145014 - RNA, 22 nt, Human
uggaguggaggucucaggugag

SEQ ID NO: 145015 - RNA, 18 nt, Human
uggcacccggacagcacc

SEQ ID NO: 145016 - RNA, 20 nt, Human
uggcucucugcuauucuccu

SEQ ID NO: 145017 - RNA, 23 nt, Human
uggcuucgaggaggagacguggg

SEQ ID NO: 145018 - RNA, 18 nt, Human
ugggacgcggcacagcag

SEQ ID NO: 145019 - RNA, 19 nt, Human
uggggggagggggaucuga

SEQ ID NO: 145020 - RNA, 22 nt, Human
uguguaucuuauugccaguacc

SEQ ID NO: 145021 - RNA, 18 nt, Human
uuccccagccccacuccc

SEQ ID NO: 145022 - RNA, 22 nt, Human
uuccgaggaggagugucccucu

SEQ ID NO: 145023 - RNA, 21 nt, Human
uuggcuucugcagaggccuga

SEQ ID NO: 145024 - RNA, 20 nt, Human
uuuccccagccccacucccu

SEQ ID NO: 145025 - RNA, 22 nt, Human
uuuuaagcgcugagcauuggga

SEQ ID NO: 145026 - RNA, 23 nt, Human
aaaauaaggccaucuaauucuga

SEQ ID NO: 145027 - RNA, 22 nt, Human
aaagaaaacagcuugauuuugc

SEQ ID NO: 145028 - RNA, 19 nt, Human
aaagagcaaacaaaagcac

SEQ ID NO: 145029 - RNA, 20 nt, Human
aaagcacuguugucccaauu

SEQ ID NO: 145030 - RNA, 18 nt, Human
aaaucaguuucuaaauua

SEQ ID NO: 145031 - RNA, 19 nt, Human
aacacaauuuacaaagcac

SEQ ID NO: 145032 - RNA, 20 nt, Human
aaccagugugacugucugcu

SEQ ID NO: 145033 - RNA, 22 nt, Human
aagauuucuuuaucuauguuuc

SEQ ID NO: 145034 - RNA, 18 nt, Human
acgauuccucucccaaca

SEQ ID NO: 145035 - RNA, 23 nt, Human
acuuuguaacugaccaaaccagu

SEQ ID NO: 145036 - RNA, 21 nt, Human
agaaaacagcuugauuuugau

SEQ ID NO: 145037 - RNA, 19 nt, Human
agaggaaaaagaaaggaag

SEQ ID NO: 145038 - RNA, 21 nt, Human
agaggaaaaagaaaggaagaa

SEQ ID NO: 145039 - RNA, 23 nt, Human
auugauucaucacaacucauuuu

SEQ ID NO: 145040 - RNA, 19 nt, Human
caaaagcacaacuacguau

SEQ ID NO: 145041 - RNA, 21 nt, Human
caaaaucaucagcauggacca

SEQ ID NO: 145042 - RNA, 21 nt, Human
caaacaaaagcacaacuacgu

SEQ ID NO: 145043 - RNA, 22 nt, Human
caaacaaaagcacaacuacgua

SEQ ID NO: 145044 - RNA, 24 nt, Human
caaauucugugcaaucacaccaag

SEQ ID NO: 145045 - RNA, 21 nt, Human
caguaagaaauaccugacacc

SEQ ID NO: 145046 - RNA, 23 nt, Human
caguaaugacuaagaaacuccga

SEQ ID NO: 145047 - RNA, 21 nt, Human
caucacaacucauuuuggcaa

SEQ ID NO: 145048 - RNA, 18 nt, Human
ccaaaccagugugacugg

SEQ ID NO: 145049 - RNA, 19 nt, Human
ccucagcccuggggcaucu

SEQ ID NO: 145050 - RNA, 23 nt, Human
cuccaagcucuuucuucaacuga

SEQ ID NO: 145051 - RNA, 22 nt, Human
cuuagagaggaaaaagaaagga

SEQ ID NO: 145052 - RNA, 25 nt, Human
gacaguaaugacuaagaaacuccga

SEQ ID NO: 145053 - RNA, 18 nt, Human
gagaggaaaaagaaagga

SEQ ID NO: 145054 - RNA, 23 nt, Human
gagaggaaaaagaaaggaagaac

SEQ ID NO: 145055 - RNA, 19 nt, Human
ggagauacgauuccucucc

SEQ ID NO: 145056 - RNA, 20 nt, Human
ggaggccucagcccuggggc

SEQ ID NO: 145057 - RNA, 18 nt, Human
guccuccaagcucuuucu

SEQ ID NO: 145058 - RNA, 19 nt, Human
guugugcuguuguccucca

SEQ ID NO: 145059 - RNA, 19 nt, Human
uaaaagagcaaacaaaagc

SEQ ID NO: 145060 - RNA, 20 nt, Human
uaaaagagcaaacaaaagca

SEQ ID NO: 145061 - RNA, 22 nt, Human
uaaaagagcaaacaaaagcaca

SEQ ID NO: 145062 - RNA, 25 nt, Human
uaaaugccuacacuguaucuuaacg

SEQ ID NO: 145063 - RNA, 18 nt, Human
uacauacaaauucugugc

SEQ ID NO: 145064 - RNA, 21 nt, Human
uagagaggaaaaagaaaggaa

SEQ ID NO: 145065 - RNA, 21 nt, Human
ucacaccaagagggaaaauuc

SEQ ID NO: 145066 - RNA, 20 nt, Human
ucacugugacagagcaaggc

SEQ ID NO: 145067 - RNA, 23 nt, Human
ucuauaaugaaaacaaaucaggc

SEQ ID NO: 145068 - RNA, 18 nt, Human
ucuauuuguauugacugc

SEQ ID NO: 145069 - RNA, 19 nt, Human
ucuccuguugugcuguugu

SEQ ID NO: 145070 - RNA, 22 nt, Human
ugaaagaagaaauauggagaua

SEQ ID NO: 145071 - RNA, 18 nt, Human
ugaacuuucaaaagaaaa

SEQ ID NO: 145072 - RNA, 24 nt, Human
ugaacuuucaaaagaaaacagcuu

SEQ ID NO: 145073 - RNA, 23 nt, Human
ugaagaaaucaguuucuaaauua

SEQ ID NO: 145074 - RNA, 18 nt, Human
ugacuaagaaacuccgaa

SEQ ID NO: 145075 - RNA, 21 nt, Human
ugagacugcuuaaaagagcaa

SEQ ID NO: 145076 - RNA, 30 nt, Human
ugccugagcggaggccucagcccuggggcc

SEQ ID NO: 145077 - RNA, 18 nt, Human
uggggcugcaggaacaac

SEQ ID NO: 145078 - RNA, 24 nt, Human
uguauugacugcugaagacaacac

SEQ ID NO: 145079 - RNA, 18 nt, Human
uguccagaucaaagaaau

SEQ ID NO: 145080 - RNA, 18 nt, Human
ugugacugucugcuuuaa

SEQ ID NO: 145081 - RNA, 19 nt, Human
uucaucguugucuauaaug

SEQ ID NO: 145082 - RNA, 20 nt, Human
uucuugacuuuccuuuuaau

SEQ ID NO: 145083 - RNA, 23 nt, Human
aaguguccuucucaguggucacc

SEQ ID NO: 145084 - RNA, 18 nt, Human
aaucccagccccgggauc

SEQ ID NO: 145085 - RNA, 18 nt, Human
agagccgcggggagagcg

SEQ ID NO: 145086 - RNA, 19 nt, Human
agcccgcaggagccugcag

SEQ ID NO: 145087 - RNA, 19 nt, Human
agcgggacuuccucagccc

SEQ ID NO: 145088 - RNA, 21 nt, Human
aggagaugacaggcagcuucc

SEQ ID NO: 145089 - RNA, 22 nt, Human
augugcaguggcccauaaauac

SEQ ID NO: 145090 - RNA, 20 nt, Human
cacagcccuccacggcccuc

SEQ ID NO: 145091 - RNA, 19 nt, Human
caccaaaggccaggguccc

SEQ ID NO: 145092 - RNA, 22 nt, Human
caccagccuccaagagcgacag

SEQ ID NO: 145093 - RNA, 26 nt, Human
caccuguccucaguccaacucagagc

SEQ ID NO: 145094 - RNA, 23 nt, Human
cagcccaggcccagagcgugccc

SEQ ID NO: 145095 - RNA, 19 nt, Human
cagccuccaagagcgacag

SEQ ID NO: 145096 - RNA, 22 nt, Human
cagggccuagcaccaaaaagcc

SEQ ID NO: 145097 - RNA, 19 nt, Human
caggguccccucuggcugg

SEQ ID NO: 145098 - RNA, 21 nt, Human
ccaaaggccaggguccccucu

SEQ ID NO: 145099 - RNA, 25 nt, Human
ccagcggccaugcgaggcuucccuc

SEQ ID NO: 145100 - RNA, 19 nt, Human
ccagcugaucccagggcug

SEQ ID NO: 145101 - RNA, 21 nt, Human
ccagcugaucccagggcugca

SEQ ID NO: 145102 - RNA, 25 nt, Human
ccagucccagggccuagcaccaaaa

SEQ ID NO: 145103 - RNA, 26 nt, Human
cccacaccuguccucaguccaacuca

SEQ ID NO: 145104 - RNA, 22 nt, Human
ccccucuggcugggacuggaga

SEQ ID NO: 145105 - RNA, 24 nt, Human
ccccucuggcugggacuggagagg

SEQ ID NO: 145106 - RNA, 19 nt, Human
cccgggauccgcuccgcuc

SEQ ID NO: 145107 - RNA, 21 nt, Human
ccgcuccgcucggcgccgccc

SEQ ID NO: 145108 - RNA, 21 nt, Human
ccggcggccgggcgacggggc

SEQ ID NO: 145109 - RNA, 22 nt, Human
ccucaaggccacaccagccucc

SEQ ID NO: 145110 - RNA, 23 nt, Human
ccucuggcugggacuggagaggc

SEQ ID NO: 145111 - RNA, 24 nt, Human
ccuuuaccuuccuagguuuacaug

SEQ ID NO: 145112 - RNA, 21 nt, Human
cgacuuccagucccagggccu

SEQ ID NO: 145113 - RNA, 19 nt, Human
cucaaggccacaccagccu

SEQ ID NO: 145114 - RNA, 21 nt, Human
cuggggauugggcaggagaug

SEQ ID NO: 145115 - RNA, 20 nt, Human
cuuccuagguuuacauggua

SEQ ID NO: 145116 - RNA, 21 nt, Human
gcaccaaaaagccugccugga

SEQ ID NO: 145117 - RNA, 19 nt, Human
gcccagagcgugccccugg

SEQ ID NO: 145118 - RNA, 18 nt, Human
gcccugugccugcaccug

SEQ ID NO: 145119 - RNA, 20 nt, Human
gccugcacccacacuggcgc

SEQ ID NO: 145120 - RNA, 22 nt, Human
gccugcacccacacuggcgccc

SEQ ID NO: 145121 - RNA, 20 nt, Human
gcgccgcccgggagccgcuc

SEQ ID NO: 145122 - RNA, 20 nt, Human
gcgggacuuccucagcccag

SEQ ID NO: 145123 - RNA, 19 nt, Human
gcucugggccgggcgcgcc

SEQ ID NO: 145124 - RNA, 20 nt, Human
gcugggacuggagaggcggg

SEQ ID NO: 145125 - RNA, 20 nt, Human
ggggagagcgggacuuccuc

SEQ ID NO: 145126 - RNA, 24 nt, Human
guggucaccaaaggccaggguccc

SEQ ID NO: 145127 - RNA, 23 nt, Human
uaccggagccagcagccugguga

SEQ ID NO: 145128 - RNA, 21 nt, Human
ucaggguuucuggggauuggg

SEQ ID NO: 145129 - RNA, 21 nt, Human
ucccagccccgggauccgcuc

SEQ ID NO: 145130 - RNA, 18 nt, Human
ucccagggccuagcacca

SEQ ID NO: 145131 - RNA, 21 nt, Human
uccucagcccaggcccagagc

SEQ ID NO: 145132 - RNA, 22 nt, Human
ucugggcccgugaaguguccuu

SEQ ID NO: 145133 - RNA, 24 nt, Human
ugcacccacacuggcgcccacacc

SEQ ID NO: 145134 - RNA, 25 nt, Human
ugcagaccugaaucaggguuucugg

SEQ ID NO: 145135 - RNA, 21 nt, Human
ugccuggaggacaguggcccu

SEQ ID NO: 145136 - RNA, 23 nt, Human
ugccuggaggacaguggcccugu

SEQ ID NO: 145137 - RNA, 25 nt, Human
uggcccauaaauaccuuuacauaaa

SEQ ID NO: 145138 - RNA, 18 nt, Human
ugggcaggagaugacagg

SEQ ID NO: 145139 - RNA, 25 nt, Human
uggguuccgggcgggcgcgcaaucc

SEQ ID NO: 145140 - RNA, 19 nt, Human
uucuggguuccgggcgggc

SEQ ID NO: 145141 - RNA, 23 nt, Human
aaacgccaggacguagcucagcg

SEQ ID NO: 145142 - RNA, 19 nt, Human
aaagugcuaggauuauagg

SEQ ID NO: 145143 - RNA, 24 nt, Human
aaagugcuaggauuauaggcauga

SEQ ID NO: 145144 - RNA, 19 nt, Human
aacaaaggaggccccaucu

SEQ ID NO: 145145 - RNA, 19 nt, Human
aacccacacacaguaggac

SEQ ID NO: 145146 - RNA, 19 nt, Human
aagaagacaaacaggucaa

SEQ ID NO: 145147 - RNA, 19 nt, Human
aagaagacaaacaggucaa

SEQ ID NO: 145148 - RNA, 24 nt, Human
aagaagcaggagaagaagacggag

SEQ ID NO: 145149 - RNA, 25 nt, Human
aagaagcaggagaagaagacggaga

SEQ ID NO: 145150 - RNA, 19 nt, Human
aagcaggaaccaccggccc

SEQ ID NO: 145151 - RNA, 22 nt, Human
aagcaggagaagaagacggaga

SEQ ID NO: 145152 - RNA, 23 nt, Human
aagccugcucccaccccagggcc

SEQ ID NO: 145153 - RNA, 19 nt, Human
aagcugccgggccggcauc

SEQ ID NO: 145154 - RNA, 25 nt, Human
acacaccauggccacaguccuccaa

SEQ ID NO: 145155 - RNA, 25 nt, Human
acaugugcauguguucaugugugua

SEQ ID NO: 145156 - RNA, 22 nt, Human
accccagggccucugccuuugc

SEQ ID NO: 145157 - RNA, 18 nt, Human
acccggggcggguguggg

SEQ ID NO: 145158 - RNA, 24 nt, Human
accuugugaucagcccaccuuggc

SEQ ID NO: 145159 - RNA, 19 nt, Human
acggcuccgucaccgucac

SEQ ID NO: 145160 - RNA, 19 nt, Human
acuacaagugugugccacc

SEQ ID NO: 145161 - RNA, 18 nt, Human
acugcacacaccauggcc

SEQ ID NO: 145162 - RNA, 20 nt, Human
acuugagggcauggugcucg

SEQ ID NO: 145163 - RNA, 18 nt, Human
agaacccugggcauguca

SEQ ID NO: 145164 - RNA, 19 nt, Human
agacagggccugaacagug

SEQ ID NO: 145165 - RNA, 23 nt, Human
agaggaagaggaagaagcaggag

SEQ ID NO: 145166 - RNA, 19 nt, Human
agcagacggugaccuuggc

SEQ ID NO: 145167 - RNA, 18 nt, Human
agcagcaguguggccacg

SEQ ID NO: 145168 - RNA, 23 nt, Human
agcagcccagacagggccugaac

SEQ ID NO: 145169 - RNA, 21 nt, Human
agccaccgcacccgacccucu

SEQ ID NO: 145170 - RNA, 23 nt, Human
agccauuggccucccagugcagc

SEQ ID NO: 145171 - RNA, 21 nt, Human
agcccugaggacaucggcaga

SEQ ID NO: 145172 - RNA, 24 nt, Human
agcgauucuucugccucagccucc

SEQ ID NO: 145173 - RNA, 22 nt, Human
aggaagaagcaggagaagaaga

SEQ ID NO: 145174 - RNA, 23 nt, Human
aggaggccccaucugggcaaccc

SEQ ID NO: 145175 - RNA, 20 nt, Human
aggcaugagccaccgcaccc

SEQ ID NO: 145176 - RNA, 21 nt, Human
aggcgggaggugggagcccag

SEQ ID NO: 145177 - RNA, 25 nt, Human
aggcguucucagucuagcuucuuug

SEQ ID NO: 145178 - RNA, 27 nt, Human
aggcugcgguccgacuggacaacacca

SEQ ID NO: 145179 - RNA, 20 nt, Human
agggggugguggagguggug

SEQ ID NO: 145180 - RNA, 23 nt, Human
agggggugguggagguggugggg

SEQ ID NO: 145181 - RNA, 20 nt, Human
agggucccgggagcacaggg

SEQ ID NO: 145182 - RNA, 24 nt, Human
aggugggagcccagccggcuucca

SEQ ID NO: 145183 - RNA, 25 nt, Human
agguuggagugcagugacgcaaucu

SEQ ID NO: 145184 - RNA, 19 nt, Human
aguaggacaggccaggccc

SEQ ID NO: 145185 - RNA, 19 nt, Human
agugcagugacgcaaucug

SEQ ID NO: 145186 - RNA, 22 nt, Human
agugugugccaccaugcccagc

SEQ ID NO: 145187 - RNA, 18 nt, Human
auccugucacuccccuuc

SEQ ID NO: 145188 - RNA, 18 nt, Human
augcccacugcccccagc

SEQ ID NO: 145189 - RNA, 18 nt, Human
augggguuucaccauauu

SEQ ID NO: 145190 - RNA, 24 nt, Human
augggguuucaccauauuggccag

SEQ ID NO: 145191 - RNA, 22 nt, Human
auugaagccccaggaugaggag

SEQ ID NO: 145192 - RNA, 19 nt, Human
caaacaggucaaugugggc

SEQ ID NO: 145193 - RNA, 26 nt, Human
caaacgccaggacguagcucagcgug

SEQ ID NO: 145194 - RNA, 20 nt, Human
caaagaggacagugcggccc

SEQ ID NO: 145195 - RNA, 23 nt, Human
caaagugcuaggauuauaggcau

SEQ ID NO: 145196 - RNA, 24 nt, Human
caaagugcuaggauuauaggcaug

SEQ ID NO: 145197 - RNA, 24 nt, Human
caacagucccuuccggcccgcacc

SEQ ID NO: 145198 - RNA, 21 nt, Human
caagccugcucccaccccagg

SEQ ID NO: 145199 - RNA, 22 nt, Human
caagcgauucuucugccucagc

SEQ ID NO: 145200 - RNA, 22 nt, Human
cacagugcuucucccucucuga

SEQ ID NO: 145201 - RNA, 22 nt, Human
cacauccucuggaggccucaca

SEQ ID NO: 145202 - RNA, 21 nt, Human
caccauauuggccaggcuggu

SEQ ID NO: 145203 - RNA, 22 nt, Human
caccauauuggccaggcugguc

SEQ ID NO: 145204 - RNA, 31 nt, Human
caccauauuggccaggcuggucacgaacucc

SEQ ID NO: 145205 - RNA, 24 nt, Human
caccaugcccagcuaauuuuugua

SEQ ID NO: 145206 - RNA, 23 nt, Human
caccauggccacaguccuccaag

SEQ ID NO: 145207 - RNA, 24 nt, Human
cacccagguuggagugcagugacg

SEQ ID NO: 145208 - RNA, 23 nt, Human
caccccaucgucccucacugcca

SEQ ID NO: 145209 - RNA, 24 nt, Human
cacccccaccacccccacaguacu

SEQ ID NO: 145210 - RNA, 18 nt, Human
caccggcccggggauccc

SEQ ID NO: 145211 - RNA, 21 nt, Human
cacugcaaccuccgccuccug

SEQ ID NO: 145212 - RNA, 23 nt, Human
cacugcaaccuccgccuccuggg

SEQ ID NO: 145213 - RNA, 22 nt, Human
cacugcacacaccauggccaca

SEQ ID NO: 145214 - RNA, 21 nt, Human
cacugcccccagcacccccac

SEQ ID NO: 145215 - RNA, 19 nt, Human
cagaacaaaggaggcccca

SEQ ID NO: 145216 - RNA, 19 nt, Human
cagaacaaaggaggcccca

SEQ ID NO: 145217 - RNA, 26 nt, Human
cagagcccaccgaagcauugaagccc

SEQ ID NO: 145218 - RNA, 23 nt, Human
cagagccugcuuggccuuccaga

SEQ ID NO: 145219 - RNA, 19 nt, Human
cagcacccccaccaccccc

SEQ ID NO: 145220 - RNA, 22 nt, Human
cagcagcagcagguagaagcgg

SEQ ID NO: 145221 - RNA, 24 nt, Human
cagcagcagcagguagaagcggcu

SEQ ID NO: 145222 - RNA, 24 nt, Human
cagcaggggugccaggaagggcuc

SEQ ID NO: 145223 - RNA, 18 nt, Human
cagccacagucccgggag

SEQ ID NO: 145224 - RNA, 21 nt, Human
cagcccugaggacaucggcag

SEQ ID NO: 145225 - RNA, 23 nt, Human
cagcucccggggcccccugaccc

SEQ ID NO: 145226 - RNA, 18 nt, Human
cagggcccaccggccccu

SEQ ID NO: 145227 - RNA, 19 nt, Human
cagggccucugccuuugcc

SEQ ID NO: 145228 - RNA, 20 nt, Human
cagggccugaacagugaggg

SEQ ID NO: 145229 - RNA, 18 nt, Human
cagggggugguggaggug

SEQ ID NO: 145230 - RNA, 20 nt, Human
caggucaaugugggccuggu

SEQ ID NO: 145231 - RNA, 24 nt, Human
cagugccugacagaguagguacuc

SEQ ID NO: 145232 - RNA, 24 nt, Human
caguggccgagacaacccacacac

SEQ ID NO: 145233 - RNA, 24 nt, Human
cagugggcacccucgguguggucc

SEQ ID NO: 145234 - RNA, 22 nt, Human
caguguccaggaagcgugggaa

SEQ ID NO: 145235 - RNA, 24 nt, Human
cauauuggccaggcuggucacgaa

SEQ ID NO: 145236 - RNA, 19 nt, Human
caugcccacugcccccagc

SEQ ID NO: 145237 - RNA, 22 nt, Human
cauugaagccccaggaugagga

SEQ ID NO: 145238 - RNA, 22 nt, Human
ccaaaacccuauguggggccca

SEQ ID NO: 145239 - RNA, 25 nt, Human
ccaaguagacaguguccaggggccc

SEQ ID NO: 145240 - RNA, 21 nt, Human
ccaccuggaggcagcagcccc

SEQ ID NO: 145241 - RNA, 22 nt, Human
ccacgcccagcagcagcaggua

SEQ ID NO: 145242 - RNA, 23 nt, Human
ccacugcccccagcacccccacc

SEQ ID NO: 145243 - RNA, 24 nt, Human
ccacugcccccagcacccccacca

SEQ ID NO: 145244 - RNA, 28 nt, Human
ccacugcccccagcacccccaccacccc

SEQ ID NO: 145245 - RNA, 25 nt, Human
ccacugcuggccccugcuccuccug

SEQ ID NO: 145246 - RNA, 24 nt, Human
ccagggccucugccuuugcuuccc

SEQ ID NO: 145247 - RNA, 22 nt, Human
ccagugccacugaggacacggu

SEQ ID NO: 145248 - RNA, 19 nt, Human
ccauggguccccagggccc

SEQ ID NO: 145249 - RNA, 23 nt, Human
cccacacacaguaggacaggcca

SEQ ID NO: 145250 - RNA, 26 nt, Human
cccacaguacucgugcagccugugcc

SEQ ID NO: 145251 - RNA, 22 nt, Human
cccacugcccccagcaccccca

SEQ ID NO: 145252 - RNA, 28 nt, Human
cccacugcuggccccugcuccuccugga

SEQ ID NO: 145253 - RNA, 22 nt, Human
cccagcacccccaccaccccca

SEQ ID NO: 145254 - RNA, 25 nt, Human
cccagcacccccaccacccccacag

SEQ ID NO: 145255 - RNA, 20 nt, Human
ccccaaguccagggcggccc

SEQ ID NO: 145256 - RNA, 22 nt, Human
ccccacacucccgaaagcagga

SEQ ID NO: 145257 - RNA, 19 nt, Human
ccccacaguacucgugcag

SEQ ID NO: 145258 - RNA, 21 nt, Human
ccccacaguacucgugcagcc

SEQ ID NO: 145259 - RNA, 20 nt, Human
ccccaccacccccacaguac

SEQ ID NO: 145260 - RNA, 21 nt, Human
ccccaccacccccacaguacu

SEQ ID NO: 145261 - RNA, 19 nt, Human
ccccagcacccccaccacc

SEQ ID NO: 145262 - RNA, 21 nt, Human
ccccagggcccaccggccccu

SEQ ID NO: 145263 - RNA, 18 nt, Human
ccccagggccucugccuu

SEQ ID NO: 145264 - RNA, 22 nt, Human
ccccauaauagccuggggagca

SEQ ID NO: 145265 - RNA, 21 nt, Human
ccccaucgucccucacugcca

SEQ ID NO: 145266 - RNA, 22 nt, Human
cccccacacucccgaaagcagg

SEQ ID NO: 145267 - RNA, 20 nt, Human
cccccagcacccccaccacc

SEQ ID NO: 145268 - RNA, 20 nt, Human
cccccucccaugggucccca

SEQ ID NO: 145269 - RNA, 21 nt, Human
ccccgcaccugcagcaccguc

SEQ ID NO: 145270 - RNA, 20 nt, Human
ccccugacuauccccagccu

SEQ ID NO: 145271 - RNA, 18 nt, Human
ccccugcuccuccuggau

SEQ ID NO: 145272 - RNA, 22 nt, Human
ccccugcuccuccuggaucccc

SEQ ID NO: 145273 - RNA, 22 nt, Human
cccggcccacugcuggccccug

SEQ ID NO: 145274 - RNA, 19 nt, Human
cccgggagcagcggggggc

SEQ ID NO: 145275 - RNA, 18 nt, Human
cccggggcggguguggga

SEQ ID NO: 145276 - RNA, 22 nt, Human
cccuagagccuguggcguugcc

SEQ ID NO: 145277 - RNA, 22 nt, Human
cccuauguggggcccacaaggc

SEQ ID NO: 145278 - RNA, 18 nt, Human
cccugggugauccagccc

SEQ ID NO: 145279 - RNA, 20 nt, Human
ccgaaagcaggaaccaccgg

SEQ ID NO: 145280 - RNA, 18 nt, Human
ccgaaggucacguccagc

SEQ ID NO: 145281 - RNA, 22 nt, Human
ccgccaggcagcuggagcagca

SEQ ID NO: 145282 - RNA, 24 nt, Human
ccgccuccuggguucaagcgauuc

SEQ ID NO: 145283 - RNA, 24 nt, Human
ccggggcccccugacccacagcgg

SEQ ID NO: 145284 - RNA, 21 nt, Human
ccuauguggggcccacaaggc

SEQ ID NO: 145285 - RNA, 19 nt, Human
ccucacugccacauccucu

SEQ ID NO: 145286 - RNA, 20 nt, Human
ccuccaagcacgugcgguuu

SEQ ID NO: 145287 - RNA, 19 nt, Human
ccuccgccuccuggguuca

SEQ ID NO: 145288 - RNA, 24 nt, Human
ccuccuggguucaagcgauucuuc

SEQ ID NO: 145289 - RNA, 21 nt, Human
ccugcagcaccguccuggggc

SEQ ID NO: 145290 - RNA, 19 nt, Human
ccugccgcugguccagagc

SEQ ID NO: 145291 - RNA, 20 nt, Human
ccugccgcugguccagagcc

SEQ ID NO: 145292 - RNA, 22 nt, Human
ccuggauccccagccccccggg

SEQ ID NO: 145293 - RNA, 23 nt, Human
ccuggguucaagcgauucuucug

SEQ ID NO: 145294 - RNA, 22 nt, Human
ccugugccgcagugugacgagg

SEQ ID NO: 145295 - RNA, 20 nt, Human
cgagcagcccagacagggcc

SEQ ID NO: 145296 - RNA, 21 nt, Human
cgccaggcagcuggagcagcg

SEQ ID NO: 145297 - RNA, 19 nt, Human
cgcgacccccacacucccg

SEQ ID NO: 145298 - RNA, 24 nt, Human
cgcucugucacccagguuggagug

SEQ ID NO: 145299 - RNA, 23 nt, Human
cggaagaagagcaggcccugcga

SEQ ID NO: 145300 - RNA, 20 nt, Human
cgggagcagcggggggcugg

SEQ ID NO: 145301 - RNA, 20 nt, Human
cggggcgggugugggagggg

SEQ ID NO: 145302 - RNA, 24 nt, Human
cucacugcaaccuccgccuccugg

SEQ ID NO: 145303 - RNA, 23 nt, Human
cucccagugcagcacgagcagcc

SEQ ID NO: 145304 - RNA, 21 nt, Human
cuccuggguucaagcgauucu

SEQ ID NO: 145305 - RNA, 24 nt, Human
cucgcucugucacccagguuggag

SEQ ID NO: 145306 - RNA, 23 nt, Human
cugcaaccuccgccuccuggguu

SEQ ID NO: 145307 - RNA, 20 nt, Human
cugcagggggugguggaggu

SEQ ID NO: 145308 - RNA, 23 nt, Human
cugccucagccucccgaguagcu

SEQ ID NO: 145309 - RNA, 18 nt, Human
cugcuccuccuggauccc

SEQ ID NO: 145310 - RNA, 27 nt, Human
cugcuccuccuggauccccagcccccc

SEQ ID NO: 145311 - RNA, 22 nt, Human
cuggauccccagccccccgggg

SEQ ID NO: 145312 - RNA, 21 nt, Human
cuggccccugcuccuccugga

SEQ ID NO: 145313 - RNA, 24 nt, Human
cuucccaaagcucuucccguagcu

SEQ ID NO: 145314 - RNA, 22 nt, Human
gaaagcaggaaccaccggcccg

SEQ ID NO: 145315 - RNA, 22 nt, Human
gaagcugcagccacagucccgg

SEQ ID NO: 145316 - RNA, 21 nt, Human
gaaugcagaacaaaggaggcc

SEQ ID NO: 145317 - RNA, 18 nt, Human
gacccccacacucccgaa

SEQ ID NO: 145318 - RNA, 21 nt, Human
gaccuugugaucagcccaccu

SEQ ID NO: 145319 - RNA, 24 nt, Human
gaccuugugaucagcccaccuugg

SEQ ID NO: 145320 - RNA, 18 nt, Human
gagaagaagacggagaag

SEQ ID NO: 145321 - RNA, 22 nt, Human
gagaagaagacggagaagaaga

SEQ ID NO: 145322 - RNA, 23 nt, Human
gagcccagugccacugaggacac

SEQ ID NO: 145323 - RNA, 19 nt, Human
gagcggcggaaggcgggag

SEQ ID NO: 145324 - RNA, 19 nt, Human
gagggucccgggagcacag

SEQ ID NO: 145325 - RNA, 21 nt, Human
gagguggagucucgcucuguc

SEQ ID NO: 145326 - RNA, 19 nt, Human
gaggugguggggcuggggg

SEQ ID NO: 145327 - RNA, 20 nt, Human
gauuauaggcaugagccacc

SEQ ID NO: 145328 - RNA, 23 nt, Human
gauuauaggcaugagccaccgca

SEQ ID NO: 145329 - RNA, 22 nt, Human
gcaaccuccgccuccuggguuc

SEQ ID NO: 145330 - RNA, 19 nt, Human
gcacgcauuccugggggac

SEQ ID NO: 145331 - RNA, 18 nt, Human
gcacugccgacggcuccg

SEQ ID NO: 145332 - RNA, 24 nt, Human
gccaccgcacccgacccucuuaaa

SEQ ID NO: 145333 - RNA, 22 nt, Human
gccagggccccgcuugcggcag

SEQ ID NO: 145334 - RNA, 23 nt, Human
gccagggccccgcuugcggcagu

SEQ ID NO: 145335 - RNA, 22 nt, Human
gcccagcuaauuuuuguauuuu

SEQ ID NO: 145336 - RNA, 22 nt, Human
gccccugacuauccccagccuc

SEQ ID NO: 145337 - RNA, 19 nt, Human
gcccugggugauccagccc

SEQ ID NO: 145338 - RNA, 21 nt, Human
gccguugggugcauggggccc

SEQ ID NO: 145339 - RNA, 24 nt, Human
gcgauucuucugccucagccuccc

SEQ ID NO: 145340 - RNA, 18 nt, Human
gcggacccggggcgggug

SEQ ID NO: 145341 - RNA, 20 nt, Human
gcggcuggccaucuugguca

SEQ ID NO: 145342 - RNA, 19 nt, Human
gcucugucacccagguugg

SEQ ID NO: 145343 - RNA, 23 nt, Human
ggacagcucccggggcccccuga

SEQ ID NO: 145344 - RNA, 25 nt, Human
ggacagugcggccggggccgggccc

SEQ ID NO: 145345 - RNA, 18 nt, Human
ggacccggggcgggugug

SEQ ID NO: 145346 - RNA, 18 nt, Human
ggacuacaagugugugcc

SEQ ID NO: 145347 - RNA, 22 nt, Human
ggacuacaagugugugccacca

SEQ ID NO: 145348 - RNA, 21 nt, Human
ggagggaccccaaguccaggg

SEQ ID NO: 145349 - RNA, 24 nt, Human
ggaggugggagcccagccggcuuc

SEQ ID NO: 145350 - RNA, 18 nt, Human
ggaggugguggggcuggg

SEQ ID NO: 145351 - RNA, 22 nt, Human
ggauuauaggcaugagccaccg

SEQ ID NO: 145352 - RNA, 25 nt, Human
ggcaguggcuguggaagcugcagcc

SEQ ID NO: 145353 - RNA, 20 nt, Human
ggcgaaggggcggcuggcca

SEQ ID NO: 145354 - RNA, 22 nt, Human
ggcucagagcggcggaaggcgg

SEQ ID NO: 145355 - RNA, 20 nt, Human
gggcaugucagagggacaug

SEQ ID NO: 145356 - RNA, 19 nt, Human
ggggagaaggugaggguga

SEQ ID NO: 145357 - RNA, 24 nt, Human
ggggcaguagggucaggugggaaa

SEQ ID NO: 145358 - RNA, 22 nt, Human
gggggacagagggucccgggag

SEQ ID NO: 145359 - RNA, 20 nt, Human
gggggcuggcggacccgggg

SEQ ID NO: 145360 - RNA, 25 nt, Human
gggggugguggaggugguggggcug

SEQ ID NO: 145361 - RNA, 19 nt, Human
ggggugguggagguggugg

SEQ ID NO: 145362 - RNA, 18 nt, Human
gggguuucaccauauugg

SEQ ID NO: 145363 - RNA, 22 nt, Human
gggguuucaccauauuggccag

SEQ ID NO: 145364 - RNA, 19 nt, Human
gggugguggaggugguggg

SEQ ID NO: 145365 - RNA, 22 nt, Human
ggguuucaccauauuggccagg

SEQ ID NO: 145366 - RNA, 26 nt, Human
ggugguggggcuggggguggcuggau

SEQ ID NO: 145367 - RNA, 18 nt, Human
ggugugguccuggcagaa

SEQ ID NO: 145368 - RNA, 20 nt, Human
guagcugguucuucucaggc

SEQ ID NO: 145369 - RNA, 20 nt, Human
guagguaaucaggccccgcg

SEQ ID NO: 145370 - RNA, 21 nt, Human
guccagagccugcuuggccuu

SEQ ID NO: 145371 - RNA, 18 nt, Human
gucccgggagcagcgggg

SEQ ID NO: 145372 - RNA, 21 nt, Human
guggcggggauggcugguggg

SEQ ID NO: 145373 - RNA, 21 nt, Human
gugugugcacaugugcaugug

SEQ ID NO: 145374 - RNA, 21 nt, Human
uaagucccaugagaucaggga

SEQ ID NO: 145375 - RNA, 22 nt, Human
uaauuuuuguauuuuuaguaga

SEQ ID NO: 145376 - RNA, 24 nt, Human
uagcuccucaguggccgagacaac

SEQ ID NO: 145377 - RNA, 18 nt, Human
uaggauuauaggcaugag

SEQ ID NO: 145378 - RNA, 22 nt, Human
uaggauuauaggcaugagccac

SEQ ID NO: 145379 - RNA, 23 nt, Human
uaggauuauaggcaugagccacc

SEQ ID NO: 145380 - RNA, 24 nt, Human
uaggauuauaggcaugagccaccg

SEQ ID NO: 145381 - RNA, 23 nt, Human
uaguagacaugggguuucaccau

SEQ ID NO: 145382 - RNA, 24 nt, Human
uaguagacaugggguuucaccaua

SEQ ID NO: 145383 - RNA, 23 nt, Human
ucaaaccauccaacagcuuccca

SEQ ID NO: 145384 - RNA, 24 nt, Human
ucaaagugcuaggauuauaggcau

SEQ ID NO: 145385 - RNA, 19 nt, Human
ucaagcgauucuucugccu

SEQ ID NO: 145386 - RNA, 24 nt, Human
ucacccagguuggagugcagugac

SEQ ID NO: 145387 - RNA, 23 nt, Human
ucacugcaaccuccgccuccugg

SEQ ID NO: 145388 - RNA, 24 nt, Human
ucacugcaaccuccgccuccuggg

SEQ ID NO: 145389 - RNA, 25 nt, Human
ucacugcaaccuccgccuccugggu

SEQ ID NO: 145390 - RNA, 27 nt, Human
ucacugcaaccuccgccuccuggguuc

SEQ ID NO: 145391 - RNA, 19 nt, Human
ucacugccacauccucugg

SEQ ID NO: 145392 - RNA, 20 nt, Human
ucagcccaccuuggccucuc

SEQ ID NO: 145393 - RNA, 23 nt, Human
ucaguggccgagacaacccacac

SEQ ID NO: 145394 - RNA, 20 nt, Human
ucauguguguaugcgugugg

SEQ ID NO: 145395 - RNA, 22 nt, Human
ucccaugcccacugcccccagc

SEQ ID NO: 145396 - RNA, 20 nt, Human
ucccauggguccccagggcc

SEQ ID NO: 145397 - RNA, 20 nt, Human
uccccagccccccggggccc

SEQ ID NO: 145398 - RNA, 30 nt, Human
uccccagccccccggggcccaccaucugcu

SEQ ID NO: 145399 - RNA, 23 nt, Human
uccccagggcccaccggccccug

SEQ ID NO: 145400 - RNA, 19 nt, Human
ucccgcacgccgcggacca

SEQ ID NO: 145401 - RNA, 23 nt, Human
ucccgcacgccgcggaccaccag

SEQ ID NO: 145402 - RNA, 20 nt, Human
ucccgggagcacagggcugu

SEQ ID NO: 145403 - RNA, 19 nt, Human
ucccucucugaagccaucu

SEQ ID NO: 145404 - RNA, 23 nt, Human
uccggcccgcaccagucccaugc

SEQ ID NO: 145405 - RNA, 21 nt, Human
uccuggguucaagcgauucuu

SEQ ID NO: 145406 - RNA, 24 nt, Human
uccuggguucaagcgauucuucug

SEQ ID NO: 145407 - RNA, 24 nt, Human
ucgcucugucacccagguuggagu

SEQ ID NO: 145408 - RNA, 24 nt, Human
ucucaaagugcuaggauuauaggc

SEQ ID NO: 145409 - RNA, 19 nt, Human
ucucgcucugucacccagg

SEQ ID NO: 145410 - RNA, 23 nt, Human
ucucgcucugucacccagguugg

SEQ ID NO: 145411 - RNA, 24 nt, Human
ucucgcucugucacccagguugga

SEQ ID NO: 145412 - RNA, 18 nt, Human
ucugaagccaucuuacuu

SEQ ID NO: 145413 - RNA, 24 nt, Human
ucugucacccagguuggagugcag

SEQ ID NO: 145414 - RNA, 23 nt, Human
ucuugcagccccgccaccuggaa

SEQ ID NO: 145415 - RNA, 24 nt, Human
ugacgcaaucugagcucacugcaa

SEQ ID NO: 145416 - RNA, 18 nt, Human
ugagaacccugggcaugu

SEQ ID NO: 145417 - RNA, 21 nt, Human
ugagaauaaaacccaaaaccc

SEQ ID NO: 145418 - RNA, 18 nt, Human
ugagaggaagaggaagaa

SEQ ID NO: 145419 - RNA, 23 nt, Human
ugagaggaagaggaagaagcagg

SEQ ID NO: 145420 - RNA, 25 nt, Human
ugagaggaagaggaagaagcaggag

SEQ ID NO: 145421 - RNA, 21 nt, Human
ugagccaccgcacccgacccu

SEQ ID NO: 145422 - RNA, 19 nt, Human
ugagccguuggcgccgggc

SEQ ID NO: 145423 - RNA, 19 nt, Human
ugaggacaucggcagagcc

SEQ ID NO: 145424 - RNA, 19 nt, Human
ugaggagggcgcgaccccc

SEQ ID NO: 145425 - RNA, 22 nt, Human
ugagguugucgcaguggccacg

SEQ ID NO: 145426 - RNA, 21 nt, Human
ugcauguguucauguguguau

SEQ ID NO: 145427 - RNA, 25 nt, Human
ugccucagccucccgaguagcucgg

SEQ ID NO: 145428 - RNA, 18 nt, Human
ugcuggccccugcuccuc

SEQ ID NO: 145429 - RNA, 22 nt, Human
uggaagcugcagccacaguccc

SEQ ID NO: 145430 - RNA, 22 nt, Human
uggaggugguggggcugggggu

SEQ ID NO: 145431 - RNA, 19 nt, Human
uggagugcagugacgcaau

SEQ ID NO: 145432 - RNA, 18 nt, Human
uggauccccagccccccg

SEQ ID NO: 145433 - RNA, 22 nt, Human
uggcagugggcacccucggugu

SEQ ID NO: 145434 - RNA, 21 nt, Human
uggccacaguccuccaagcac

SEQ ID NO: 145435 - RNA, 24 nt, Human
uggccaggcuggucacgaacucuu

SEQ ID NO: 145436 - RNA, 19 nt, Human
uggcggacccggggcgggu

SEQ ID NO: 145437 - RNA, 23 nt, Human
uggcuggugggcagcagcccccu

SEQ ID NO: 145438 - RNA, 19 nt, Human
ugggagggggcaggucuga

SEQ ID NO: 145439 - RNA, 21 nt, Human
ugggagggggcaggucugaug

SEQ ID NO: 145440 - RNA, 19 nt, Human
uggggcccacaaggcccug

SEQ ID NO: 145441 - RNA, 19 nt, Human
uggggcuggggguggcugg

SEQ ID NO: 145442 - RNA, 20 nt, Human
ugggggaagggggccagugg

SEQ ID NO: 145443 - RNA, 24 nt, Human
ugggguuucaccauauuggccagg

SEQ ID NO: 145444 - RNA, 21 nt, Human
uggguaggugaugaccagccg

SEQ ID NO: 145445 - RNA, 18 nt, Human
uggguccccgugcccguu

SEQ ID NO: 145446 - RNA, 23 nt, Human
ugggugcauggggcccgccaggc

SEQ ID NO: 145447 - RNA, 20 nt, Human
uggguucaagcgauucuucu

SEQ ID NO: 145448 - RNA, 23 nt, Human
uggguucaagcgauucuucugcc

SEQ ID NO: 145449 - RNA, 18 nt, Human
ugguggaggugguggggc

SEQ ID NO: 145450 - RNA, 21 nt, Human
ugguggcggggauggcuggug

SEQ ID NO: 145451 - RNA, 18 nt, Human
uguaugcguguggggugu

SEQ ID NO: 145452 - RNA, 23 nt, Human
uguaugcguguggggugugugca

SEQ ID NO: 145453 - RNA, 20 nt, Human
ugucagcagcaggggugcca

SEQ ID NO: 145454 - RNA, 18 nt, Human
uguccaggaagcguggga

SEQ ID NO: 145455 - RNA, 22 nt, Human
uguccuggcucaacagucccuu

SEQ ID NO: 145456 - RNA, 26 nt, Human
ugugcacaugugcauguguucaugug

SEQ ID NO: 145457 - RNA, 23 nt, Human
ugugcauguguucauguguguau

SEQ ID NO: 145458 - RNA, 26 nt, Human
ugugcauguguucauguguguaugcg

SEQ ID NO: 145459 - RNA, 18 nt, Human
uguggggcccacaaggcc

SEQ ID NO: 145460 - RNA, 19 nt, Human
ugugugcacaugugcaugu

SEQ ID NO: 145461 - RNA, 19 nt, Human
uguguucauguguguaugc

SEQ ID NO: 145462 - RNA, 18 nt, Human
uuaguagacaugggguuu

SEQ ID NO: 145463 - RNA, 22 nt, Human
uuaguagacaugggguuucacc

SEQ ID NO: 145464 - RNA, 24 nt, Human
uuaguagacaugggguuucaccau

SEQ ID NO: 145465 - RNA, 23 nt, Human
uucaagcgauucuucugccucag

SEQ ID NO: 145466 - RNA, 24 nt, Human
uucaagcgauucuucugccucagc

SEQ ID NO: 145467 - RNA, 20 nt, Human
uucaccccaucgucccucac

SEQ ID NO: 145468 - RNA, 20 nt, Human
uuccugggggacgggacagc

SEQ ID NO: 145469 - RNA, 18 nt, Human
uucgcagugcucccccca

SEQ ID NO: 145470 - RNA, 23 nt, Human
uugaaugcccagcugacuucacc

SEQ ID NO: 145471 - RNA, 23 nt, Human
uuguauuuuuaguagacaugggg

SEQ ID NO: 145472 - RNA, 24 nt, Human
uuucaccauauuggccaggcuggu

SEQ ID NO: 145473 - RNA, 24 nt, Human
uuuuuaguagacaugggguuucac

SEQ ID NO: 145474 - RNA, 18 nt, Human
uuuuuguauuuuuaguag

SEQ ID NO: 145475 - RNA, 21 nt, Human
uuuuuguauuuuuaguagaca

SEQ ID NO: 145476 - RNA, 26 nt, Human
aaaauauuucuauccuuuggaagacu

SEQ ID NO: 145477 - RNA, 27 nt, Human
aaacaacaaaucuacaauagguacaac

SEQ ID NO: 145478 - RNA, 18 nt, Human
aaacaucugcauugggaa

SEQ ID NO: 145479 - RNA, 19 nt, Human
aaagaggcauuggaaacca

SEQ ID NO: 145480 - RNA, 24 nt, Human
aaagugcugggauuacaggcguga

SEQ ID NO: 145481 - RNA, 19 nt, Human
aaauuucagcaauguccuc

SEQ ID NO: 145482 - RNA, 24 nt, Human
aaccuggccgacacucacacugcc

SEQ ID NO: 145483 - RNA, 21 nt, Human
aagaggcauuggaaaccaaaa

SEQ ID NO: 145484 - RNA, 19 nt, Human
aaggguggucggcgcgggu

SEQ ID NO: 145485 - RNA, 26 nt, Human
aaguagcugagacuacaggcacguac

SEQ ID NO: 145486 - RNA, 25 nt, Human
aagugauucuccugccucagccucc

SEQ ID NO: 145487 - RNA, 19 nt, Human
aagugcugggauuacaggc

SEQ ID NO: 145488 - RNA, 19 nt, Human
aagugcugggauuacaggc

SEQ ID NO: 145489 - RNA, 26 nt, Human
aagugcugggauuacaggcgugagcc

SEQ ID NO: 145490 - RNA, 21 nt, Human
aauauacuuuacuucaagucc

SEQ ID NO: 145491 - RNA, 19 nt, Human
aaugacacccacuuugcac

SEQ ID NO: 145492 - RNA, 23 nt, Human
aauggccaaauacgcaaagcacc

SEQ ID NO: 145493 - RNA, 22 nt, Human
aauguuucaggaauggagauga

SEQ ID NO: 145494 - RNA, 19 nt, Human
acauauagagccaaugaca

SEQ ID NO: 145495 - RNA, 24 nt, Human
accuugugauccacccgccucggc

SEQ ID NO: 145496 - RNA, 22 nt, Human
acgcugcuguugcugcugcugg

SEQ ID NO: 145497 - RNA, 18 nt, Human
acgggauuucgccauguu

SEQ ID NO: 145498 - RNA, 19 nt, Human
acgggauuucgccauguug

SEQ ID NO: 145499 - RNA, 24 nt, Human
acgggauuucgccauguugaccag

SEQ ID NO: 145500 - RNA, 23 nt, Human
acucgauuuuauagagcagcugc

SEQ ID NO: 145501 - RNA, 21 nt, Human
agaacccuaggggauagaggg

SEQ ID NO: 145502 - RNA, 18 nt, Human
agagaggacacacauaug

SEQ ID NO: 145503 - RNA, 26 nt, Human
agaguuagaggcccugauuccaagcc

SEQ ID NO: 145504 - RNA, 18 nt, Human
agaugccacaguuuaugg

SEQ ID NO: 145505 - RNA, 19 nt, Human
agccaccgcacccggccca

SEQ ID NO: 145506 - RNA, 18 nt, Human
agccuagaaacaagcuuu

SEQ ID NO: 145507 - RNA, 24 nt, Human
aggaaaaaaccaagcccuucugaa

SEQ ID NO: 145508 - RNA, 18 nt, Human
aggcaauuucugcauaua

SEQ ID NO: 145509 - RNA, 24 nt, Human
aggcaguucucacaccaaaaccca

SEQ ID NO: 145510 - RNA, 26 nt, Human
aggcauuggaaaccaaaaugguaaua

SEQ ID NO: 145511 - RNA, 28 nt, Human
aggcauuggaaaccaaaaugguagaacc

SEQ ID NO: 145512 - RNA, 22 nt, Human
agggguggucggcgaggggccg

SEQ ID NO: 145513 - RNA, 18 nt, Human
agguaaacuuucuuugug

SEQ ID NO: 145514 - RNA, 21 nt, Human
aggugguggaagaggguccag

SEQ ID NO: 145515 - RNA, 21 nt, Human
agguucaagugauucuccugc

SEQ ID NO: 145516 - RNA, 22 nt, Human
agguucaagugauucuccugcc

SEQ ID NO: 145517 - RNA, 23 nt, Human
aguaaacaacaaaucuacaauag

SEQ ID NO: 145518 - RNA, 18 nt, Human
agugcugggauuacaggc

SEQ ID NO: 145519 - RNA, 24 nt, Human
aguuauguaugggcgucgucaggg

SEQ ID NO: 145520 - RNA, 19 nt, Human
aucccauuagcagcaccac

SEQ ID NO: 145521 - RNA, 21 nt, Human
auccugaccuuuuuugggggg

SEQ ID NO: 145522 - RNA, 22 nt, Human
auggccaaauacgcaaagcacc

SEQ ID NO: 145523 - RNA, 19 nt, Human
auguucaccaagcauccua

SEQ ID NO: 145524 - RNA, 18 nt, Human
auucuccugccucagccu

SEQ ID NO: 145525 - RNA, 22 nt, Human
auuuagcuccucugugccucag

SEQ ID NO: 145526 - RNA, 24 nt, Human
auuuuuguguuuuuaguagagacg

SEQ ID NO: 145527 - RNA, 27 nt, Human
caaaauaaacuaguaggucagugagua

SEQ ID NO: 145528 - RNA, 23 nt, Human
caaaaugguagaaccuucaggug

SEQ ID NO: 145529 - RNA, 21 nt, Human
caaagaggcauuggaaaccaa

SEQ ID NO: 145530 - RNA, 24 nt, Human
caaagugcugggauuacaggcgug

SEQ ID NO: 145531 - RNA, 24 nt, Human
caacaaaucuacaauagguacaaa

SEQ ID NO: 145532 - RNA, 21 nt, Human
caaguaacaauuccuacccac

SEQ ID NO: 145533 - RNA, 22 nt, Human
caagugauucuccugccucagc

SEQ ID NO: 145534 - RNA, 22 nt, Human
caaugaugaugacugucaaaga

SEQ ID NO: 145535 - RNA, 23 nt, Human
cacaaacuggcaguuuuguuuuc

SEQ ID NO: 145536 - RNA, 24 nt, Human
cacaaaucccauuagcagcaccac

SEQ ID NO: 145537 - RNA, 23 nt, Human
cacccgccucggccucccaaagu

SEQ ID NO: 145538 - RNA, 18 nt, Human
caccuuuaauccugaccu

SEQ ID NO: 145539 - RNA, 20 nt, Human
cacuaagugcuucauagcug

SEQ ID NO: 145540 - RNA, 18 nt, Human
cacuguaaccucugccuc

SEQ ID NO: 145541 - RNA, 21 nt, Human
cacuguaaccucugccuccca

SEQ ID NO: 145542 - RNA, 19 nt, Human
cacuuugcacuggcauuuc

SEQ ID NO: 145543 - RNA, 23 nt, Human
cagaaucaaaaagcucgagacau

SEQ ID NO: 145544 - RNA, 24 nt, Human
cagagucuugcucugucgcccagg

SEQ ID NO: 145545 - RNA, 25 nt, Human
cagcaauguccucaagaaggacuaa

SEQ ID NO: 145546 - RNA, 22 nt, Human
cagcugcccauugggagccacu

SEQ ID NO: 145547 - RNA, 23 nt, Human
cagcugcccauugggagccacuu

SEQ ID NO: 145548 - RNA, 24 nt, Human
caggaauauuccuuauuuuuagac

SEQ ID NO: 145549 - RNA, 19 nt, Human
caggggugggcacugaugu

SEQ ID NO: 145550 - RNA, 27 nt, Human
caggguuguagggguaaaaguacuauu

SEQ ID NO: 145551 - RNA, 23 nt, Human
cagguuccaauucacucgauuuu

SEQ ID NO: 145552 - RNA, 20 nt, Human
cagucgcccaaagaggggug

SEQ ID NO: 145553 - RNA, 18 nt, Human
cauagcccaaaauauagg

SEQ ID NO: 145554 - RNA, 19 nt, Human
caucagcuaaagcugaagu

SEQ ID NO: 145555 - RNA, 23 nt, Human
caucagugcuaucuuauuuaaaa

SEQ ID NO: 145556 - RNA, 24 nt, Human
cauguugaccaggcuggucucgaa

SEQ ID NO: 145557 - RNA, 25 nt, Human
cauugccaucaucuuccaacaaucc

SEQ ID NO: 145558 - RNA, 23 nt, Human
cauuguauagccuugaacaagau

SEQ ID NO: 145559 - RNA, 21 nt, Human
ccaaaauaaacuaguaggucc

SEQ ID NO: 145560 - RNA, 22 nt, Human
ccaaagugcugggauuacaggc

SEQ ID NO: 145561 - RNA, 22 nt, Human
ccaaagugcugggauuacaggc

SEQ ID NO: 145562 - RNA, 24 nt, Human
ccaaagugcugggauuacaggcgu

SEQ ID NO: 145563 - RNA, 23 nt, Human
ccacacaaaaaaguaaacaacaa

SEQ ID NO: 145564 - RNA, 18 nt, Human
ccaccuuuaauccugacc

SEQ ID NO: 145565 - RNA, 21 nt, Human
ccagcagucuuuucccccucc

SEQ ID NO: 145566 - RNA, 24 nt, Human
ccaggagucuaucuggaggucaaa

SEQ ID NO: 145567 - RNA, 21 nt, Human
ccaggcuuugucuggcccagg

SEQ ID NO: 145568 - RNA, 19 nt, Human
ccaucagaaaugcauaggc

SEQ ID NO: 145569 - RNA, 22 nt, Human
ccauguugaccaggcuggucuc

SEQ ID NO: 145570 - RNA, 23 nt, Human
ccauguugaccaggcuggucucg

SEQ ID NO: 145571 - RNA, 20 nt, Human
cccaaagagggguggucucc

SEQ ID NO: 145572 - RNA, 24 nt, Human
cccaaguagcugagacuacaggca

SEQ ID NO: 145573 - RNA, 23 nt, Human
cccagguucaagugauucuccuc

SEQ ID NO: 145574 - RNA, 23 nt, Human
cccagguucaagugauucuccug

SEQ ID NO: 145575 - RNA, 25 nt, Human
cccauuagcagcaccacaacaauga

SEQ ID NO: 145576 - RNA, 19 nt, Human
ccccacaaaucccauuagc

SEQ ID NO: 145577 - RNA, 22 nt, Human
cccuccagaacaucaucuccaa

SEQ ID NO: 145578 - RNA, 20 nt, Human
ccgcacccggcccaaaauua

SEQ ID NO: 145579 - RNA, 19 nt, Human
ccuacccacauagcccaaa

SEQ ID NO: 145580 - RNA, 21 nt, Human
ccuacccacauagcccaaaau

SEQ ID NO: 145581 - RNA, 19 nt, Human
ccuauaaagggaugaccaa

SEQ ID NO: 145582 - RNA, 24 nt, Human
ccucccagguucaagugauucucc

SEQ ID NO: 145583 - RNA, 18 nt, Human
ccucucuccucucauccc

SEQ ID NO: 145584 - RNA, 20 nt, Human
ccugaccuugugauccaccc

SEQ ID NO: 145585 - RNA, 23 nt, Human
ccugccucagccucccaaguagc

SEQ ID NO: 145586 - RNA, 20 nt, Human
ccuuacacaaacauucuccc

SEQ ID NO: 145587 - RNA, 21 nt, Human
ccuugaacaagauauuuagcu

SEQ ID NO: 145588 - RNA, 19 nt, Human
ccuuuuuuuugagacagag

SEQ ID NO: 145589 - RNA, 21 nt, Human
cgaagagggggccucgguggc

SEQ ID NO: 145590 - RNA, 22 nt, Human
cgcaaagcacccucagauuacc

SEQ ID NO: 145591 - RNA, 24 nt, Human
cgccauguugaccaggcuggucuc

SEQ ID NO: 145592 - RNA, 27 nt, Human
cgccauguugaccaggcuggucucgaa

SEQ ID NO: 145593 - RNA, 18 nt, Human
cgccggagggguggucgg

SEQ ID NO: 145594 - RNA, 24 nt, Human
cgccucggccucccaaagugcugg

SEQ ID NO: 145595 - RNA, 21 nt, Human
cggacauacuuaacacuaccu

SEQ ID NO: 145596 - RNA, 24 nt, Human
cgggauuucgccauguugaccagg

SEQ ID NO: 145597 - RNA, 19 nt, Human
cuaaccaucagaaaugcau

SEQ ID NO: 145598 - RNA, 25 nt, Human
cuacaauagguacaaauuauauaca

SEQ ID NO: 145599 - RNA, 27 nt, Human
cuacagggguggucggcgccgggccag

SEQ ID NO: 145600 - RNA, 18 nt, Human
cuaggcaauuucugcaua

SEQ ID NO: 145601 - RNA, 19 nt, Human
cucacuguaaccucugccu

SEQ ID NO: 145602 - RNA, 24 nt, Human
cucacuguaaccucugccucccag

SEQ ID NO: 145603 - RNA, 24 nt, Human
cucacuguaaccucugccucccag

SEQ ID NO: 145604 - RNA, 21 nt, Human
cucccaaguagcugagacuac

SEQ ID NO: 145605 - RNA, 19 nt, Human
cucccagguucaagugauu

SEQ ID NO: 145606 - RNA, 21 nt, Human
cucccaugugguuugguacaa

SEQ ID NO: 145607 - RNA, 27 nt, Human
cucccuuagaagcuuauccugugcuuc

SEQ ID NO: 145608 - RNA, 24 nt, Human
cuccugaccuugugauccacccgc

SEQ ID NO: 145609 - RNA, 21 nt, Human
cucgguggcaggugggguggg

SEQ ID NO: 145610 - RNA, 20 nt, Human
cucugucgcccaggcuggag

SEQ ID NO: 145611 - RNA, 21 nt, Human
cugaccacacaaaaaaguaaa

SEQ ID NO: 145612 - RNA, 31 nt, Human
cugaccacacaaaaaaguaaacaacaaaucc

SEQ ID NO: 145613 - RNA, 23 nt, Human
cugccucagccucccaaguagcu

SEQ ID NO: 145614 - RNA, 20 nt, Human
cuggagaagucgcagccagg

SEQ ID NO: 145615 - RNA, 21 nt, Human
cuggcccaggggcugacucug

SEQ ID NO: 145616 - RNA, 24 nt, Human
cuguaaccucugccucccagguuc

SEQ ID NO: 145617 - RNA, 18 nt, Human
cuucacagugauuuccuu

SEQ ID NO: 145618 - RNA, 23 nt, Human
cuuucuacagaugcugucaaaau

SEQ ID NO: 145619 - RNA, 22 nt, Human
gaaaaaaccaagcccuucugaa

SEQ ID NO: 145620 - RNA, 24 nt, Human
gaccacacaaaaaaguaaacaaca

SEQ ID NO: 145621 - RNA, 22 nt, Human
gaccuugugauccacccgccuc

SEQ ID NO: 145622 - RNA, 22 nt, Human
gaccuugugauccacccgccuc

SEQ ID NO: 145623 - RNA, 24 nt, Human
gaccuugugauccacccgccucgg

SEQ ID NO: 145624 - RNA, 19 nt, Human
gagaaagacagguaugcca

SEQ ID NO: 145625 - RNA, 20 nt, Human
gagaaaggaaagaaagaaac

SEQ ID NO: 145626 - RNA, 20 nt, Human
gagaggggaguaagggagga

SEQ ID NO: 145627 - RNA, 19 nt, Human
gagcaagaauccugggagg

SEQ ID NO: 145628 - RNA, 19 nt, Human
gagcagcugccuguagaug

SEQ ID NO: 145629 - RNA, 24 nt, Human
gagcauauaacucuacuuuuagac

SEQ ID NO: 145630 - RNA, 20 nt, Human
gagcgagaggggaguaaggg

SEQ ID NO: 145631 - RNA, 21 nt, Human
gaggcauuggaaaccaaaaug

SEQ ID NO: 145632 - RNA, 24 nt, Human
gagggagcgagaggggaguaaggg

SEQ ID NO: 145633 - RNA, 23 nt, Human
gaucugaagcccugggcuuacuu

SEQ ID NO: 145634 - RNA, 18 nt, Human
gauuacaggcgugagcca

SEQ ID NO: 145635 - RNA, 20 nt, Human
gauuacaggcgugagccacc

SEQ ID NO: 145636 - RNA, 23 nt, Human
gauuacaggcgugagccaccgca

SEQ ID NO: 145637 - RNA, 21 nt, Human
gauucuccugccucagccucc

SEQ ID NO: 145638 - RNA, 23 nt, Human
gcaaagcacccucagauuaccag

SEQ ID NO: 145639 - RNA, 26 nt, Human
gcaaauuauuuccagaaucaaaaagc

SEQ ID NO: 145640 - RNA, 18 nt, Human
gcaugaaaacuacagauc

SEQ ID NO: 145641 - RNA, 18 nt, Human
gcccaaaauauaggaacc

SEQ ID NO: 145642 - RNA, 20 nt, Human
gcccaggcuggagugaaaug

SEQ ID NO: 145643 - RNA, 18 nt, Human
gccugaaaggugguggaa

SEQ ID NO: 145644 - RNA, 27 nt, Human
gcucugucgcccaggcuggagugaaau

SEQ ID NO: 145645 - RNA, 18 nt, Human
ggaaagcaaauuuucccu

SEQ ID NO: 145646 - RNA, 21 nt, Human
ggacugggcuggagaagucgc

SEQ ID NO: 145647 - RNA, 20 nt, Human
ggagaaugcauccuaugucc

SEQ ID NO: 145648 - RNA, 18 nt, Human
ggagaucgggggucgggg

SEQ ID NO: 145649 - RNA, 23 nt, Human
ggcuggucucgaacuccugaccu

SEQ ID NO: 145650 - RNA, 23 nt, Human
ggcuuugucuggcccaggggcug

SEQ ID NO: 145651 - RNA, 19 nt, Human
gggacugggcuggagaagu

SEQ ID NO: 145652 - RNA, 23 nt, Human
gggauuucgccauguugaccagg

SEQ ID NO: 145653 - RNA, 19 nt, Human
ggggaggacgcugcuguug

SEQ ID NO: 145654 - RNA, 19 nt, Human
ggggaggacgcugcuguug

SEQ ID NO: 145655 - RNA, 18 nt, Human
gggggggcagggggcggu

SEQ ID NO: 145656 - RNA, 20 nt, Human
gggggucgggguccggggag

SEQ ID NO: 145657 - RNA, 19 nt, Human
gggguggucggcgccgggc

SEQ ID NO: 145658 - RNA, 20 nt, Human
ggucucgaacuccugaccuu

SEQ ID NO: 145659 - RNA, 21 nt, Human
gguggucggcgaggggccgag

SEQ ID NO: 145660 - RNA, 22 nt, Human
gguggucggcgaggggccgagc

SEQ ID NO: 145661 - RNA, 24 nt, Human
gucaucuucuccucguugcaaucc

SEQ ID NO: 145662 - RNA, 24 nt, Human
gugauccacccgccucggccuccc

SEQ ID NO: 145663 - RNA, 24 nt, Human
gugauucuccugccucagccuccc

SEQ ID NO: 145664 - RNA, 19 nt, Human
guggacuacagucacaugg

SEQ ID NO: 145665 - RNA, 19 nt, Human
uaaaagaacccuaggggau

SEQ ID NO: 145666 - RNA, 21 nt, Human
uaaaauauuucuauccuuugg

SEQ ID NO: 145667 - RNA, 22 nt, Human
uaaaauccuucuuuacauucuu

SEQ ID NO: 145668 - RNA, 22 nt, Human
uaaacaagcaccugugagggca

SEQ ID NO: 145669 - RNA, 25 nt, Human
uaacaauuccuacccacauagccca

SEQ ID NO: 145670 - RNA, 19 nt, Human
uaagauucacaucagugcu

SEQ ID NO: 145671 - RNA, 24 nt, Human
uaauuuuuguguuuuuaguagaga

SEQ ID NO: 145672 - RNA, 27 nt, Human
uacaacaccauuaacugcuguacaaau

SEQ ID NO: 145673 - RNA, 24 nt, Human
uacacaaauuuagaaaugcaugau

SEQ ID NO: 145674 - RNA, 23 nt, Human
uacaggcgugagccaccgcaccc

SEQ ID NO: 145675 - RNA, 19 nt, Human
uaccccuguucuagaaaca

SEQ ID NO: 145676 - RNA, 18 nt, Human
uaccugaaaauuucagau

SEQ ID NO: 145677 - RNA, 23 nt, Human
uacucccuccagaacaucaucuc

SEQ ID NO: 145678 - RNA, 22 nt, Human
uacuuaacacuaccuagggcac

SEQ ID NO: 145679 - RNA, 19 nt, Human
uagaauugugcagucugua

SEQ ID NO: 145680 - RNA, 22 nt, Human
uagagacgggauuucgccaugu

SEQ ID NO: 145681 - RNA, 25 nt, Human
uaggcaguucucacaccaaaaccca

SEQ ID NO: 145682 - RNA, 24 nt, Human
uaguagagacgggauuucgccaug

SEQ ID NO: 145683 - RNA, 24 nt, Human
uauagaaaaacuaaauaauuuuca

SEQ ID NO: 145684 - RNA, 18 nt, Human
uaugauggcuuuucucuu

SEQ ID NO: 145685 - RNA, 22 nt, Human
ucaaaauccucuuagacuccaa

SEQ ID NO: 145686 - RNA, 19 nt, Human
ucaagugauucuccugccu

SEQ ID NO: 145687 - RNA, 19 nt, Human
ucacagugauuuccuuugc

SEQ ID NO: 145688 - RNA, 24 nt, Human
ucacuaagugcuucauagcuguau

SEQ ID NO: 145689 - RNA, 19 nt, Human
ucacugagcaagaauccug

SEQ ID NO: 145690 - RNA, 19 nt, Human
ucacuguaaccucugccuc

SEQ ID NO: 145691 - RNA, 24 nt, Human
ucacuguaaccucugccucccagg

SEQ ID NO: 145692 - RNA, 25 nt, Human
ucacuguaaccucugccucccaggu

SEQ ID NO: 145693 - RNA, 18 nt, Human
ucagccucccaaguagcu

SEQ ID NO: 145694 - RNA, 21 nt, Human
ucagccucccaaguagcugag

SEQ ID NO: 145695 - RNA, 25 nt, Human
ucaucuccaaacccugagaacaacu

SEQ ID NO: 145696 - RNA, 19 nt, Human
ucaucuuguuaccacuggc

SEQ ID NO: 145697 - RNA, 23 nt, Human
uccagaacaucaucuccaaaccc

SEQ ID NO: 145698 - RNA, 23 nt, Human
uccagaaucaaaaagcucgagac

SEQ ID NO: 145699 - RNA, 22 nt, Human
uccagcagucuuuucccccucc

SEQ ID NO: 145700 - RNA, 24 nt, Human
ucccaaagugcugggauuacaggc

SEQ ID NO: 145701 - RNA, 24 nt, Human
ucccaaguagcugagacuacaggc

SEQ ID NO: 145702 - RNA, 21 nt, Human
ucccagguucaagugauucuc

SEQ ID NO: 145703 - RNA, 24 nt, Human
ucccagguucaagugauucuccug

SEQ ID NO: 145704 - RNA, 26 nt, Human
ucccauuagcagcaccacaacaauga

SEQ ID NO: 145705 - RNA, 24 nt, Human
ucccuccagaacaucaucuccaaa

SEQ ID NO: 145706 - RNA, 20 nt, Human
uccgccgccggagggguggu

SEQ ID NO: 145707 - RNA, 19 nt, Human
uccuaaaaaguguaggacc

SEQ ID NO: 145708 - RNA, 22 nt, Human
ucgccauguugaccaggcuggu

SEQ ID NO: 145709 - RNA, 19 nt, Human
ucgcccaaagagggguggu

SEQ ID NO: 145710 - RNA, 21 nt, Human
ucgcccaggcuggagugaaau

SEQ ID NO: 145711 - RNA, 18 nt, Human
ucggccucccaaagugcu

SEQ ID NO: 145712 - RNA, 20 nt, Human
ucggcgaggggccgagcggc

SEQ ID NO: 145713 - RNA, 24 nt, Human
ucuaaaaaaccucucuccucucau

SEQ ID NO: 145714 - RNA, 19 nt, Human
ucuagggcugcugcugcag

SEQ ID NO: 145715 - RNA, 21 nt, Human
ucuauccuuuggaagacuauc

SEQ ID NO: 145716 - RNA, 26 nt, Human
ucuccugccucagccucccaaguagc

SEQ ID NO: 145717 - RNA, 21 nt, Human
ucuggaggaggcgaagagggg

SEQ ID NO: 145718 - RNA, 21 nt, Human
ucuuagacuccaacaaaccuc

SEQ ID NO: 145719 - RNA, 23 nt, Human
ucuuccaacaaucccgaaacauc

SEQ ID NO: 145720 - RNA, 22 nt, Human
ucuugcucugucgcccaggcug

SEQ ID NO: 145721 - RNA, 23 nt, Human
ucuugcucugucgcccaggcugg

SEQ ID NO: 145722 - RNA, 24 nt, Human
ucuugcucugucgcccaggcugga

SEQ ID NO: 145723 - RNA, 18 nt, Human
ugaaaaaacaugugcuuu

SEQ ID NO: 145724 - RNA, 19 nt, Human
ugaaaaaacaugugcuuua

SEQ ID NO: 145725 - RNA, 23 nt, Human
ugaaaguaaaugauccuuggcau

SEQ ID NO: 145726 - RNA, 20 nt, Human
ugaaauggcgccaucucggc

SEQ ID NO: 145727 - RNA, 25 nt, Human
ugaagcccugggcuuacuuucuagg

SEQ ID NO: 145728 - RNA, 19 nt, Human
ugaagucuuccagcagucu

SEQ ID NO: 145729 - RNA, 20 nt, Human
ugaagugggcugaaaguaaa

SEQ ID NO: 145730 - RNA, 19 nt, Human
ugacagugaacgcuucaga

SEQ ID NO: 145731 - RNA, 21 nt, Human
ugacauuggcacuuucuacag

SEQ ID NO: 145732 - RNA, 20 nt, Human
ugaccacacaaaaaaguaaa

SEQ ID NO: 145733 - RNA, 24 nt, Human
ugaccaggcuggucucgaacuccu

SEQ ID NO: 145734 - RNA, 18 nt, Human
ugagaaaggaaagaaaga

SEQ ID NO: 145735 - RNA, 22 nt, Human
ugagacagagucuugcucuguc

SEQ ID NO: 145736 - RNA, 19 nt, Human
ugagacuacaggcacguac

SEQ ID NO: 145737 - RNA, 20 nt, Human
ugagacuacaggcacguaca

SEQ ID NO: 145738 - RNA, 22 nt, Human
ugagacuacaggcacguacacc

SEQ ID NO: 145739 - RNA, 23 nt, Human
ugagacuacaggcacguacaccc

SEQ ID NO: 145740 - RNA, 22 nt, Human
ugaucuaauaaccccauuccaa

SEQ ID NO: 145741 - RNA, 22 nt, Human
ugcagcgauucacauucaggcu

SEQ ID NO: 145742 - RNA, 24 nt, Human
ugccucagccucccaaguagcuga

SEQ ID NO: 145743 - RNA, 18 nt, Human
ugcugcugcuggggagau

SEQ ID NO: 145744 - RNA, 21 nt, Human
ugcugcugcuggggagaucgg

SEQ ID NO: 145745 - RNA, 24 nt, Human
ugcugggauuacaggcgugagcca

SEQ ID NO: 145746 - RNA, 24 nt, Human
uggaaaagugcuuugcaaacuaca

SEQ ID NO: 145747 - RNA, 19 nt, Human
uggaggucaaagugguuuu

SEQ ID NO: 145748 - RNA, 26 nt, Human
uggcaguuuaaacaagcaccugugag

SEQ ID NO: 145749 - RNA, 18 nt, Human
uggcccuggauugcuccu

SEQ ID NO: 145750 - RNA, 24 nt, Human
ugggaaugcugucaugguagcugc

SEQ ID NO: 145751 - RNA, 19 nt, Human
ugggauuacaggcgugagc

SEQ ID NO: 145752 - RNA, 21 nt, Human
ugggauuacaggcgugagcca

SEQ ID NO: 145753 - RNA, 22 nt, Human
ugggauuacaggcgugagccac

SEQ ID NO: 145754 - RNA, 23 nt, Human
ugggauuacaggcgugagccacc

SEQ ID NO: 145755 - RNA, 24 nt, Human
ugggauuacaggcgugagccaccg

SEQ ID NO: 145756 - RNA, 18 nt, Human
ugggguggggaggacgcu

SEQ ID NO: 145757 - RNA, 24 nt, Human
ugguacucgcgguacauauauaca

SEQ ID NO: 145758 - RNA, 22 nt, Human
ugguugcagcgauucacauuca

SEQ ID NO: 145759 - RNA, 25 nt, Human
ugguuuugggcugcacuaugggguu

SEQ ID NO: 145760 - RNA, 23 nt, Human
uguaaccucugccucccagguuc

SEQ ID NO: 145761 - RNA, 19 nt, Human
ugucaugguagcugcugaa

SEQ ID NO: 145762 - RNA, 19 nt, Human
ugucaugguagcugcugaa

SEQ ID NO: 145763 - RNA, 19 nt, Human
ugucgcccaggcuggagug

SEQ ID NO: 145764 - RNA, 21 nt, Human
ugucgcccaggcuggagugaa

SEQ ID NO: 145765 - RNA, 19 nt, Human
ugucuggcccaggggcuga

SEQ ID NO: 145766 - RNA, 24 nt, Human
uuaaagguaaacuuucuuugugau

SEQ ID NO: 145767 - RNA, 19 nt, Human
uuaacuggguccacauggc

SEQ ID NO: 145768 - RNA, 18 nt, Human
uuaccagaaguagauuau

SEQ ID NO: 145769 - RNA, 18 nt, Human
uuaguagagacgggauuu

SEQ ID NO: 145770 - RNA, 24 nt, Human
uuaguagagacgggauuucgccau

SEQ ID NO: 145771 - RNA, 22 nt, Human
uuagugacauaaauacaaguuu

SEQ ID NO: 145772 - RNA, 22 nt, Human
uucaaaugucauuuuuuucucu

SEQ ID NO: 145773 - RNA, 19 nt, Human
uucaaggaauuucuacaug

SEQ ID NO: 145774 - RNA, 21 nt, Human
uucaagugauucuccugccuc

SEQ ID NO: 145775 - RNA, 23 nt, Human
uucaagugauucuccugccucag

SEQ ID NO: 145776 - RNA, 24 nt, Human
uucaagugauucuccugccucagc

SEQ ID NO: 145777 - RNA, 27 nt, Human
uucauugccaucaucuuccaacaaucc

SEQ ID NO: 145778 - RNA, 19 nt, Human
uucuuuacauucuucacag

SEQ ID NO: 145779 - RNA, 18 nt, Human
uugaacaagauauuuagc

SEQ ID NO: 145780 - RNA, 23 nt, Human
uugcaaacuacaaagggcuauag

SEQ ID NO: 145781 - RNA, 24 nt, Human
uugcucugucgcccaggcuggagu

SEQ ID NO: 145782 - RNA, 18 nt, Human
uuggggggggcagggggc

SEQ ID NO: 145783 - RNA, 20 nt, Human
uuggugaaugcuuccccagg

SEQ ID NO: 145784 - RNA, 19 nt, Human
uuuaaacaagcaccuguga

SEQ ID NO: 145785 - RNA, 18 nt, Human
uuucaggaauggagauga

SEQ ID NO: 145786 - RNA, 18 nt, Human
uuuccagaaucaaaaagc

SEQ ID NO: 145787 - RNA, 24 nt, Human
uuucgccauguugaccaggcuggu

SEQ ID NO: 145788 - RNA, 22 nt, Human
uuucuacagaugcugucaaaau

SEQ ID NO: 145789 - RNA, 21 nt, Human
uuucuagggcugcugcugcag

SEQ ID NO: 145790 - RNA, 22 nt, Human
uuugcaaacuacaaagggcuau

SEQ ID NO: 145791 - RNA, 19 nt, Human
uuugcuuguacucccucca

SEQ ID NO: 145792 - RNA, 21 nt, Human
uuuggaguuuuaacugggucc

SEQ ID NO: 145793 - RNA, 22 nt, Human
uuuuuaguagagacgggauuuc

SEQ ID NO: 145794 - RNA, 21 nt, Human
uuuuuggggggggcagggggc

SEQ ID NO: 145795 - RNA, 20 nt, Human
uuuuuguguuuuuaguagag

SEQ ID NO: 145796 - RNA, 26 nt, Human
aaaaaaccagggaacugacaguggga

SEQ ID NO: 145797 - RNA, 26 nt, Human
accgggugcugucccugcagucuggg

SEQ ID NO: 145798 - RNA, 26 nt, Human
agcaaauauuggcauaucuuauacaa

SEQ ID NO: 145799 - RNA, 24 nt, Human
agcuaagccacuuaggcaaaaguc

SEQ ID NO: 145800 - RNA, 20 nt, Human
aguaauucuaaaaugccaga

SEQ ID NO: 145801 - RNA, 24 nt, Human
aguuaaacauuucucugugcuuuu

SEQ ID NO: 145802 - RNA, 19 nt, Human
caaaaaaaccagggaacug

SEQ ID NO: 145803 - RNA, 25 nt, Human
cagaaaugacugagaagauacagug

SEQ ID NO: 145804 - RNA, 19 nt, Human
cagcuaagccgccgccucc

SEQ ID NO: 145805 - RNA, 21 nt, Human
caggggcgcucgcggccuggg

SEQ ID NO: 145806 - RNA, 25 nt, Human
ccccguagcagcuaagccgccgccu

SEQ ID NO: 145807 - RNA, 22 nt, Human
cccuggcuagccuggccgaggc

SEQ ID NO: 145808 - RNA, 22 nt, Human
ccugcagucugggaggggaggc

SEQ ID NO: 145809 - RNA, 23 nt, Human
cucgcacggguccuccuuccucc

SEQ ID NO: 145810 - RNA, 23 nt, Human
gccacuuaggcaaaagucuaucu

SEQ ID NO: 145811 - RNA, 21 nt, Human
gccgcucggguccuccgcucc

SEQ ID NO: 145812 - RNA, 20 nt, Human
gcggccuggggaggggcugg

SEQ ID NO: 145813 - RNA, 22 nt, Human
ggccuggggaggggcugggggc

SEQ ID NO: 145814 - RNA, 23 nt, Human
gggaggccaggcaccgcggcagg

SEQ ID NO: 145815 - RNA, 18 nt, Human
ggggaggggcugggggcg

SEQ ID NO: 145816 - RNA, 22 nt, Human
gggugcugucccugcagucugg

SEQ ID NO: 145817 - RNA, 18 nt, Human
gguccuccuuccuccucc

SEQ ID NO: 145818 - RNA, 22 nt, Human
uaaaaugccagagguccuauga

SEQ ID NO: 145819 - RNA, 22 nt, Human
uacaagaaaggcaucuuacaau

SEQ ID NO: 145820 - RNA, 23 nt, Human
uagcagcuaagccgccgccuccu

SEQ ID NO: 145821 - RNA, 22 nt, Human
uaucauaagagucaaacaguua

SEQ ID NO: 145822 - RNA, 19 nt, Human
uaugaaagacccagcuaag

SEQ ID NO: 145823 - RNA, 22 nt, Human
uaugaaagacccagcuaagcca

SEQ ID NO: 145824 - RNA, 22 nt, Human
ucgcggccuggggaggggcugg

SEQ ID NO: 145825 - RNA, 19 nt, Human
ucggguccuccgcuccacu

SEQ ID NO: 145826 - RNA, 20 nt, Human
ucuaaaaugccagagguccu

SEQ ID NO: 145827 - RNA, 18 nt, Human
ucucgcacggguccuccu

SEQ ID NO: 145828 - RNA, 23 nt, Human
ugagaagauacagugauaugaua

SEQ ID NO: 145829 - RNA, 23 nt, Human
uggcuagccuggccgaggcuccu

SEQ ID NO: 145830 - RNA, 22 nt, Human
ugggaggggaggccaggcaccc

SEQ ID NO: 145831 - RNA, 19 nt, Human
uuaaacauuucucugugcu

SEQ ID NO: 145832 - RNA, 25 nt, Human
uuaaagcaaauauuggcauaucuua

SEQ ID NO: 145833 - RNA, 21 nt, Human
uuuuucagcuaguaauucuaa

SEQ ID NO: 145834 - RNA, 18 nt, Human
uuuuuuuuuuuuuuuuug

SEQ ID NO: 145835 - RNA, 22 nt, Human
aaaugcugaugaauccaaugug

SEQ ID NO: 145836 - RNA, 24 nt, Human
aagacaaacaagucagucuaacgc

SEQ ID NO: 145837 - RNA, 22 nt, Human
aagcauuaucaauuucaaaccc

SEQ ID NO: 145838 - RNA, 19 nt, Human
aaggaacauuuuguaugug

SEQ ID NO: 145839 - RNA, 24 nt, Human
aaugcaacuucccaaaaugugccc

SEQ ID NO: 145840 - RNA, 24 nt, Human
agacaaaggaaugcaacuucccaa

SEQ ID NO: 145841 - RNA, 23 nt, Human
agcaaaaggaacauuuuguaugu

SEQ ID NO: 145842 - RNA, 19 nt, Human
agcucgcuccggcucuccc

SEQ ID NO: 145843 - RNA, 20 nt, Human
aggaaaaaaugggcuccuaa

SEQ ID NO: 145844 - RNA, 18 nt, Human
aggaagggacagaguggc

SEQ ID NO: 145845 - RNA, 22 nt, Human
agguggccugucguccggucug

SEQ ID NO: 145846 - RNA, 23 nt, Human
aguaaaaagcuuuugaagugaag

SEQ ID NO: 145847 - RNA, 23 nt, Human
aucaauuucaaacccuaguuuca

SEQ ID NO: 145848 - RNA, 23 nt, Human
augaacucaggguagcaagugcu

SEQ ID NO: 145849 - RNA, 20 nt, Human
augaauccaaugugggcugg

SEQ ID NO: 145850 - RNA, 21 nt, Human
augaauccaaugugggcugga

SEQ ID NO: 145851 - RNA, 21 nt, Human
cacaguuugaagacaaaggaa

SEQ ID NO: 145852 - RNA, 19 nt, Human
cacauauacuuuuuuuuuu

SEQ ID NO: 145853 - RNA, 23 nt, Human
cauucucagcugugggcuauugg

SEQ ID NO: 145854 - RNA, 20 nt, Human
ccaggaagggacagaguggc

SEQ ID NO: 145855 - RNA, 22 nt, Human
cccaggaagggacagaguggcu

SEQ ID NO: 145856 - RNA, 18 nt, Human
ccccgaagagcucgcucc

SEQ ID NO: 145857 - RNA, 21 nt, Human
cccuccguuucuucuuugccc

SEQ ID NO: 145858 - RNA, 21 nt, Human
ccucuggaagacuuguggcuu

SEQ ID NO: 145859 - RNA, 24 nt, Human
ccugccaugacuugauacaguacc

SEQ ID NO: 145860 - RNA, 23 nt, Human
cuguaggcugaaaauauuuucug

SEQ ID NO: 145861 - RNA, 21 nt, Human
gacuuguggcuugugcuccuu

SEQ ID NO: 145862 - RNA, 21 nt, Human
gaggaccugcuguggcuuggu

SEQ ID NO: 145863 - RNA, 23 nt, Human
gaguuucaaaacaauggaaugga

SEQ ID NO: 145864 - RNA, 20 nt, Human
gcaacuucccaaaaugugcc

SEQ ID NO: 145865 - RNA, 21 nt, Human
gccgugcgcggugguuguggc

SEQ ID NO: 145866 - RNA, 22 nt, Human
gcguaaggaggggguuuggggg

SEQ ID NO: 145867 - RNA, 21 nt, Human
gcuccuugcucacaguugggc

SEQ ID NO: 145868 - RNA, 22 nt, Human
gcugaaaauauuuucugaacca

SEQ ID NO: 145869 - RNA, 18 nt, Human
ggaagagcccauugaagu

SEQ ID NO: 145870 - RNA, 19 nt, Human
ggacauuuuuacaaaagua

SEQ ID NO: 145871 - RNA, 21 nt, Human
ggagauacguuuuugcgagaa

SEQ ID NO: 145872 - RNA, 18 nt, Human
ggcggcggcggcgccggg

SEQ ID NO: 145873 - RNA, 20 nt, Human
gggaacauauacucuuugag

SEQ ID NO: 145874 - RNA, 25 nt, Human
gggcggacgccgacgagguggccug

SEQ ID NO: 145875 - RNA, 20 nt, Human
gggcggcggcggcgccgggg

SEQ ID NO: 145876 - RNA, 18 nt, Human
gggugauggcuaaaggag

SEQ ID NO: 145877 - RNA, 20 nt, Human
gguguaaacguugcaaaacc

SEQ ID NO: 145878 - RNA, 24 nt, Human
guggccugucguccggucugggcg

SEQ ID NO: 145879 - RNA, 19 nt, Human
guggcguuggcggcgaggc

SEQ ID NO: 145880 - RNA, 24 nt, Human
uaacgcucaugacuggaaaccacu

SEQ ID NO: 145881 - RNA, 19 nt, Human
uaacuagcugaaucuucca

SEQ ID NO: 145882 - RNA, 23 nt, Human
uaccgauccggccugcuggggcc

SEQ ID NO: 145883 - RNA, 21 nt, Human
uacuuuuuuuuuuuuuuucaa

SEQ ID NO: 145884 - RNA, 22 nt, Human
uagcgacaaugaaaaacuccaa

SEQ ID NO: 145885 - RNA, 23 nt, Human
uagcgacaaugaaaaacuccaag

SEQ ID NO: 145886 - RNA, 20 nt, Human
uagcucgggacuccggcgca

SEQ ID NO: 145887 - RNA, 21 nt, Human
uagcugaaucuuccaaucuuc

SEQ ID NO: 145888 - RNA, 19 nt, Human
uagucgguguaaacguugc

SEQ ID NO: 145889 - RNA, 19 nt, Human
uauuccacauucucagcug

SEQ ID NO: 145890 - RNA, 21 nt, Human
ucaaggcagagacacuuuuug

SEQ ID NO: 145891 - RNA, 27 nt, Human
ucaauagcgacaaugaaaaacuccaag

SEQ ID NO: 145892 - RNA, 18 nt, Human
uccacauucucagcugug

SEQ ID NO: 145893 - RNA, 24 nt, Human
uccauaaguaacacaaacuaauuu

SEQ ID NO: 145894 - RNA, 18 nt, Human
ucccaaaaugugcccgag

SEQ ID NO: 145895 - RNA, 24 nt, Human
uccccgaagagcucgcuccggcuc

SEQ ID NO: 145896 - RNA, 18 nt, Human
uccguuucuucuuugccc

SEQ ID NO: 145897 - RNA, 19 nt, Human
uccucuggaagacuugugg

SEQ ID NO: 145898 - RNA, 24 nt, Human
uccuucuaaaacaucugcaaaugu

SEQ ID NO: 145899 - RNA, 18 nt, Human
uccuuguuggaagagccc

SEQ ID NO: 145900 - RNA, 19 nt, Human
ucugcaaauguugugaaag

SEQ ID NO: 145901 - RNA, 20 nt, Human
ucugcaaauguugugaaagc

SEQ ID NO: 145902 - RNA, 21 nt, Human
ucuuccuugauaaauuggaug

SEQ ID NO: 145903 - RNA, 18 nt, Human
ucuucuuugcccaggaag

SEQ ID NO: 145904 - RNA, 19 nt, Human
ucuuugcccaggaagggac

SEQ ID NO: 145905 - RNA, 18 nt, Human
ugaaaaacuccaagaucc

SEQ ID NO: 145906 - RNA, 22 nt, Human
ugaauagaugacucaaggcaga

SEQ ID NO: 145907 - RNA, 19 nt, Human
ugacucaaggcagagacac

SEQ ID NO: 145908 - RNA, 19 nt, Human
ugacuugauacaguaccga

SEQ ID NO: 145909 - RNA, 20 nt, Human
ugaguaaaaagcuuuugaag

SEQ ID NO: 145910 - RNA, 18 nt, Human
ugcaguggaagccuugaa

SEQ ID NO: 145911 - RNA, 20 nt, Human
ugcugaugaauccaaugugg

SEQ ID NO: 145912 - RNA, 20 nt, Human
uggaagagcccauugaagua

SEQ ID NO: 145913 - RNA, 21 nt, Human
ugggcggcggcggcgccgggg

SEQ ID NO: 145914 - RNA, 20 nt, Human
ugggcuccuaacuagcugaa

SEQ ID NO: 145915 - RNA, 24 nt, Human
uguaaaaugcccuguuguggccag

SEQ ID NO: 145916 - RNA, 19 nt, Human
ugugugacaaagcguaagg

SEQ ID NO: 145917 - RNA, 20 nt, Human
uguugggauggaggaccugc

SEQ ID NO: 145918 - RNA, 23 nt, Human
uucugaucuaugccccaaaggac

SEQ ID NO: 145919 - RNA, 18 nt, Human
uugcccaggaagggacag

SEQ ID NO: 145920 - RNA, 21 nt, Human
uuggcggcgaggcggggacuc

SEQ ID NO: 145921 - RNA, 25 nt, Human
uugguccuggguaucgaaagagucu

SEQ ID NO: 145922 - RNA, 21 nt, Human
uuugaugugucauccucucuu

SEQ ID NO: 145923 - RNA, 23 nt, Human
aaaaauccaaguuucuguaaaga

SEQ ID NO: 145924 - RNA, 22 nt, Human
aaauacaguaaaaugucauugu

SEQ ID NO: 145925 - RNA, 20 nt, Human
aaccuuugaaaucccgccga

SEQ ID NO: 145926 - RNA, 21 nt, Human
aagaagcccugaaaugguuaa

SEQ ID NO: 145927 - RNA, 24 nt, Human
aaggucacgcaaaacugggacuga

SEQ ID NO: 145928 - RNA, 23 nt, Human
aauuugcuauuucagucuguggu

SEQ ID NO: 145929 - RNA, 21 nt, Human
acaaguuaacaaauaguuaac

SEQ ID NO: 145930 - RNA, 25 nt, Human
acaaugcuaugaaguggguacuauu

SEQ ID NO: 145931 - RNA, 24 nt, Human
acaaugucaaaaaaaaagcagcaa

SEQ ID NO: 145932 - RNA, 20 nt, Human
acagaaaaaggaauugcuag

SEQ ID NO: 145933 - RNA, 23 nt, Human
agaauagauguccauaucaaaac

SEQ ID NO: 145934 - RNA, 18 nt, Human
agcggccuccucggggac

SEQ ID NO: 145935 - RNA, 22 nt, Human
aggaggaaacggaaauucagag

SEQ ID NO: 145936 - RNA, 19 nt, Human
aggccggcaccccacgccc

SEQ ID NO: 145937 - RNA, 23 nt, Human
auagauguccauaucaaaaccuu

SEQ ID NO: 145938 - RNA, 22 nt, Human
auauagccuuccaaacuuaaaa

SEQ ID NO: 145939 - RNA, 20 nt, Human
auccuacuuucccagagcuu

SEQ ID NO: 145940 - RNA, 20 nt, Human
auccucauuuugcagaggag

SEQ ID NO: 145941 - RNA, 18 nt, Human
aucuggcaaaauauaaga

SEQ ID NO: 145942 - RNA, 18 nt, Human
augaaugucccucccaau

SEQ ID NO: 145943 - RNA, 26 nt, Human
auuaucccaaauucaaacuugauaua

SEQ ID NO: 145944 - RNA, 21 nt, Human
auuuaaacuuuaacggaaggc

SEQ ID NO: 145945 - RNA, 23 nt, Human
cacagcagucaaaaucuucuguu

SEQ ID NO: 145946 - RNA, 22 nt, Human
caccacaccauaugcuggugaa

SEQ ID NO: 145947 - RNA, 22 nt, Human
cacggccccgcggcgacccggg

SEQ ID NO: 145948 - RNA, 21 nt, Human
cacguacaccacggccccgcg

SEQ ID NO: 145949 - RNA, 20 nt, Human
cacuauguggaaaguggggu

SEQ ID NO: 145950 - RNA, 24 nt, Human
cacuauguggaaaguggggugcua

SEQ ID NO: 145951 - RNA, 19 nt, Human
cacucggcggggccgggcc

SEQ ID NO: 145952 - RNA, 21 nt, Human
cagcaaucuuuaagaguucaa

SEQ ID NO: 145953 - RNA, 18 nt, Human
cagcgccuacaccugcug

SEQ ID NO: 145954 - RNA, 19 nt, Human
cagucaagguugcaaggug

SEQ ID NO: 145955 - RNA, 21 nt, Human
cauuaacgacucucacauuua

SEQ ID NO: 145956 - RNA, 22 nt, Human
ccacgcccucggcccggccgcu

SEQ ID NO: 145957 - RNA, 22 nt, Human
ccaugcacccgcuacccucgcc

SEQ ID NO: 145958 - RNA, 18 nt, Human
ccccacgcccucggcccg

SEQ ID NO: 145959 - RNA, 22 nt, Human
cccucggccgccgccgccgccu

SEQ ID NO: 145960 - RNA, 20 nt, Human
ccgccgaguucaaaacccca

SEQ ID NO: 145961 - RNA, 18 nt, Human
ccgccgccgccucagcgu

SEQ ID NO: 145962 - RNA, 20 nt, Human
ccggcagccgccucagcgcc

SEQ ID NO: 145963 - RNA, 22 nt, Human
ccuccuguaagcaaucacagau

SEQ ID NO: 145964 - RNA, 20 nt, Human
ccucggccgccgccgccgcc

SEQ ID NO: 145965 - RNA, 22 nt, Human
ccuuugaaaucccgccgaguuc

SEQ ID NO: 145966 - RNA, 21 nt, Human
cgagggcggagggggcggagg

SEQ ID NO: 145967 - RNA, 22 nt, Human
cgcaggcccgcgagcggcggaa

SEQ ID NO: 145968 - RNA, 21 nt, Human
cgccacuuacucagauguuau

SEQ ID NO: 145969 - RNA, 20 nt, Human
cggaaggcaacacaaaggaa

SEQ ID NO: 145970 - RNA, 23 nt, Human
cggaggugggucgcccgcuuucc

SEQ ID NO: 145971 - RNA, 20 nt, Human
cggcccggcccaggcugugg

SEQ ID NO: 145972 - RNA, 25 nt, Human
cggcgcgcgagggcggagggggcgg

SEQ ID NO: 145973 - RNA, 20 nt, Human
cggcggggccgggccucggc

SEQ ID NO: 145974 - RNA, 21 nt, Human
cggcggggccgggccucggcu

SEQ ID NO: 145975 - RNA, 22 nt, Human
cgggaccggacugggacgccga

SEQ ID NO: 145976 - RNA, 24 nt, Human
cgggcggcgcgcgagggcggaggg

SEQ ID NO: 145977 - RNA, 22 nt, Human
cuccaguagcauugucgcagcc

SEQ ID NO: 145978 - RNA, 20 nt, Human
cugccucggaggugggucgc

SEQ ID NO: 145979 - RNA, 21 nt, Human
cugcggcggccgagcaggagg

SEQ ID NO: 145980 - RNA, 19 nt, Human
cuguuauaaaauccugcug

SEQ ID NO: 145981 - RNA, 18 nt, Human
cuugaauccaaaaauaua

SEQ ID NO: 145982 - RNA, 20 nt, Human
gaggaaacggaaauucagag

SEQ ID NO: 145983 - RNA, 21 nt, Human
gcaaaacugggacugaaucca

SEQ ID NO: 145984 - RNA, 20 nt, Human
gccgccgccgccgccucagc

SEQ ID NO: 145985 - RNA, 24 nt, Human
gccucagcgucccgggcggcccgg

SEQ ID NO: 145986 - RNA, 22 nt, Human
gcggcgacggcgacugcggcgg

SEQ ID NO: 145987 - RNA, 21 nt, Human
gcggcggcggcggcgacggcg

SEQ ID NO: 145988 - RNA, 20 nt, Human
gcucugcacguacaccacgg

SEQ ID NO: 145989 - RNA, 18 nt, Human
gcuguggaggagcgcagg

SEQ ID NO: 145990 - RNA, 23 nt, Human
ggaaugggaacacagaaaaagga

SEQ ID NO: 145991 - RNA, 20 nt, Human
ggacucauuccacaaacacu

SEQ ID NO: 145992 - RNA, 19 nt, Human
ggagcgcaagaccggcccc

SEQ ID NO: 145993 - RNA, 24 nt, Human
ggaggcagguauguaaacaaggac

SEQ ID NO: 145994 - RNA, 21 nt, Human
ggccgaggggcgggggcugcc

SEQ ID NO: 145995 - RNA, 20 nt, Human
ggccggggggagggccgagg

SEQ ID NO: 145996 - RNA, 18 nt, Human
ggccucggcuucugccuc

SEQ ID NO: 145997 - RNA, 23 nt, Human
ggcggcggcggcgacggcgacug

SEQ ID NO: 145998 - RNA, 19 nt, Human
ggcggcggcggcggcggcg

SEQ ID NO: 145999 - RNA, 21 nt, Human
ggggagcgcaagaccggcccc

SEQ ID NO: 146000 - RNA, 20 nt, Human
ggggcugccugcgcuccucc

SEQ ID NO: 146001 - RNA, 24 nt, Human
guaaugaaauuugaggguuuuaaa

SEQ ID NO: 146002 - RNA, 27 nt, Human
uaaaaagaggcuugaauccaaaaauau

SEQ ID NO: 146003 - RNA, 19 nt, Human
uaaaaugucauuguugcag

SEQ ID NO: 146004 - RNA, 21 nt, Human
uaacagaucuggcaaaauaua

SEQ ID NO: 146005 - RNA, 24 nt, Human
uaauauagaaaaauuaucccaaau

SEQ ID NO: 146006 - RNA, 30 nt, Human
uaccaaguuaaauguaaucaaugcucauua

SEQ ID NO: 146007 - RNA, 25 nt, Human
uaguaugaacagguuuacaaaaaua

SEQ ID NO: 146008 - RNA, 22 nt, Human
uauaaaaaagggagagaugaaa

SEQ ID NO: 146009 - RNA, 24 nt, Human
uauuuauuuauuuauuuacuuauu

SEQ ID NO: 146010 - RNA, 19 nt, Human
ucaaugcucauuccaauau

SEQ ID NO: 146011 - RNA, 19 nt, Human
ucagagaaguaaaguaacu

SEQ ID NO: 146012 - RNA, 22 nt, Human
ucagcgccucaucgccgccgag

SEQ ID NO: 146013 - RNA, 20 nt, Human
ucaguuguaauuaaagugcu

SEQ ID NO: 146014 - RNA, 22 nt, Human
ucgcccgaggcuggggagcggg

SEQ ID NO: 146015 - RNA, 23 nt, Human
ucugcugcuauuugucuuaagaa

SEQ ID NO: 146016 - RNA, 26 nt, Human
ucuggcaaaauauaagaaugaaaaaa

SEQ ID NO: 146017 - RNA, 25 nt, Human
ucugugguguguccacaaauuauuu

SEQ ID NO: 146018 - RNA, 19 nt, Human
ucuuaggcuuccuuuugcu

SEQ ID NO: 146019 - RNA, 20 nt, Human
ugaaaaaaauucuacacagg

SEQ ID NO: 146020 - RNA, 21 nt, Human
ugaaaagugaauuuugauggu

SEQ ID NO: 146021 - RNA, 18 nt, Human
ugaaacaaauagagagug

SEQ ID NO: 146022 - RNA, 19 nt, Human
ugaaugucccucccaaucc

SEQ ID NO: 146023 - RNA, 27 nt, Human
ugacaaugucaaaaaaaaagcagcaau

SEQ ID NO: 146024 - RNA, 22 nt, Human
ugagagaauagggccugugcgg

SEQ ID NO: 146025 - RNA, 18 nt, Human
ugcacccgcuacccucgc

SEQ ID NO: 146026 - RNA, 23 nt, Human
ugcuauaguaauuauacaugagg

SEQ ID NO: 146027 - RNA, 22 nt, Human
ugcuggaggagggcgccagccg

SEQ ID NO: 146028 - RNA, 23 nt, Human
uggaaaguggggugcuaggcuug

SEQ ID NO: 146029 - RNA, 18 nt, Human
uggaggagggcgccagcc

SEQ ID NO: 146030 - RNA, 21 nt, Human
uggcaaaauauaagaaugaaa

SEQ ID NO: 146031 - RNA, 18 nt, Human
uggcaaccugggcucagg

SEQ ID NO: 146032 - RNA, 20 nt, Human
uggcaaccugggcucaggcg

SEQ ID NO: 146033 - RNA, 23 nt, Human
uggcuuacgaaaauaagcauuua

SEQ ID NO: 146034 - RNA, 25 nt, Human
ugggacugaauccaggaaucaggcu

SEQ ID NO: 146035 - RNA, 18 nt, Human
uggggagcgcaagaccgg

SEQ ID NO: 146036 - RNA, 22 nt, Human
uggggagcggggagagagauag

SEQ ID NO: 146037 - RNA, 19 nt, Human
uggggugcuaggcuugugu

SEQ ID NO: 146038 - RNA, 20 nt, Human
ugguaaaugagcaguacuac

SEQ ID NO: 146039 - RNA, 21 nt, Human
ugguaguaaauggugacuguu

SEQ ID NO: 146040 - RNA, 24 nt, Human
uguaaggaaggacugcaaaacaau

SEQ ID NO: 146041 - RNA, 18 nt, Human
uguaaucaaugcucauuc

SEQ ID NO: 146042 - RNA, 20 nt, Human
ugucuuauguguauccuacu

SEQ ID NO: 146043 - RNA, 22 nt, Human
uuaacuaauacucuggggcaaa

SEQ ID NO: 146044 - RNA, 24 nt, Human
uuacuaggaggacucauuccacag

SEQ ID NO: 146045 - RNA, 25 nt, Human
uucauauccagauguaaaaaccauu

SEQ ID NO: 146046 - RNA, 20 nt, Human
uuccuccaggccggcgcggg

SEQ ID NO: 146047 - RNA, 22 nt, Human
uuccuccuguaagcaaucacag

SEQ ID NO: 146048 - RNA, 22 nt, Human
uucuacacagggcacuuauuuc

SEQ ID NO: 146049 - RNA, 20 nt, Human
uuuugcagaggaggaaacgg

SEQ ID NO: 146050 - RNA, 22 nt, Human
aaaaaggggaggacuggcacaa

SEQ ID NO: 146051 - RNA, 21 nt, Human
aaaauacaaauucccaaccac

SEQ ID NO: 146052 - RNA, 19 nt, Human
aacagacagagcccuccac

SEQ ID NO: 146053 - RNA, 18 nt, Human
aaccggucaaagaguggc

SEQ ID NO: 146054 - RNA, 18 nt, Human
aagagcccacucccuccc

SEQ ID NO: 146055 - RNA, 24 nt, Human
aagauaaacauucacgaucaaaca

SEQ ID NO: 146056 - RNA, 20 nt, Human
aagauaccccaaaccccacc

SEQ ID NO: 146057 - RNA, 18 nt, Human
aagcagcagcgguggcag

SEQ ID NO: 146058 - RNA, 18 nt, Human
aagcagcagcgguggcag

SEQ ID NO: 146059 - RNA, 30 nt, Human
aagcagccaugaauuaccuauuuucccacu

SEQ ID NO: 146060 - RNA, 24 nt, Human
aaggagcagccagcacaggcccag

SEQ ID NO: 146061 - RNA, 24 nt, Human
aaggagcagccagcacaggcccag

SEQ ID NO: 146062 - RNA, 19 nt, Human
acaaaaaggggaggacugg

SEQ ID NO: 146063 - RNA, 21 nt, Human
acaacaggaugcuugccaagc

SEQ ID NO: 146064 - RNA, 24 nt, Human
acacccaugcuccuccuggcaccu

SEQ ID NO: 146065 - RNA, 18 nt, Human
acagugguaggaggggag

SEQ ID NO: 146066 - RNA, 18 nt, Human
accacaaggccucagcac

SEQ ID NO: 146067 - RNA, 18 nt, Human
accccaaaccccaccuca

SEQ ID NO: 146068 - RNA, 20 nt, Human
accccaaaccccaccucagc

SEQ ID NO: 146069 - RNA, 20 nt, Human
acucugcuccaugccucaac

SEQ ID NO: 146070 - RNA, 20 nt, Human
acugacuagagaugggcaag

SEQ ID NO: 146071 - RNA, 21 nt, Human
acuggccucaccacugccacu

SEQ ID NO: 146072 - RNA, 19 nt, Human
agaacauaacuugggaggu

SEQ ID NO: 146073 - RNA, 20 nt, Human
agacagucccaagauaaaca

SEQ ID NO: 146074 - RNA, 24 nt, Human
agagaaaggaaaaaaaaaaaggga

SEQ ID NO: 146075 - RNA, 18 nt, Human
agagaagcagccaugaau

SEQ ID NO: 146076 - RNA, 22 nt, Human
agagguaaaggaaauggcccag

SEQ ID NO: 146077 - RNA, 23 nt, Human
agcaacagacagagcccuccaca

SEQ ID NO: 146078 - RNA, 23 nt, Human
agcaacagacagagcccuccaca

SEQ ID NO: 146079 - RNA, 21 nt, Human
agcaaccaccucacugggaga

SEQ ID NO: 146080 - RNA, 22 nt, Human
agcacaggcugaaaugccauuu

SEQ ID NO: 146081 - RNA, 21 nt, Human
agcacagugccugccacaugg

SEQ ID NO: 146082 - RNA, 21 nt, Human
aggacagaggcaaagucagaa

SEQ ID NO: 146083 - RNA, 21 nt, Human
aggacagaggcaaagucagaa

SEQ ID NO: 146084 - RNA, 22 nt, Human
aggcaaagucagaagcagcagc

SEQ ID NO: 146085 - RNA, 22 nt, Human
aggcaaagucagaagcagcagc

SEQ ID NO: 146086 - RNA, 23 nt, Human
aggcaggacagaggcaaagucag

SEQ ID NO: 146087 - RNA, 23 nt, Human
aggcaggacagaggcaaagucag

SEQ ID NO: 146088 - RNA, 24 nt, Human
aggcaggacagaggcaaagucaga

SEQ ID NO: 146089 - RNA, 24 nt, Human
aggcaggacagaggcaaagucaga

SEQ ID NO: 146090 - RNA, 20 nt, Human
aggccccccagggaaaaccc

SEQ ID NO: 146091 - RNA, 18 nt, Human
aggccgugcgcccugggc

SEQ ID NO: 146092 - RNA, 21 nt, Human
agggacccuucaggguggcua

SEQ ID NO: 146093 - RNA, 26 nt, Human
agggagagccugacuuaggggcugcg

SEQ ID NO: 146094 - RNA, 22 nt, Human
agggcugccaccaucuacugcc

SEQ ID NO: 146095 - RNA, 20 nt, Human
aggggcauccccaccauccu

SEQ ID NO: 146096 - RNA, 20 nt, Human
agggguccagugcugcaccc

SEQ ID NO: 146097 - RNA, 18 nt, Human
agggguuggggagucacu

SEQ ID NO: 146098 - RNA, 18 nt, Human
agggguuggggagucacu

SEQ ID NO: 146099 - RNA, 24 nt, Human
aggucccugucccacccucugccc

SEQ ID NO: 146100 - RNA, 23 nt, Human
aggucucuucuccuccuuggucc

SEQ ID NO: 146101 - RNA, 20 nt, Human
aggugacaaccccagccccc

SEQ ID NO: 146102 - RNA, 19 nt, Human
agugcccagugcaguaccu

SEQ ID NO: 146103 - RNA, 22 nt, Human
aguugccacuccccugacccag

SEQ ID NO: 146104 - RNA, 18 nt, Human
auacaaauucccaaccac

SEQ ID NO: 146105 - RNA, 20 nt, Human
augaccagacaggguaggac

SEQ ID NO: 146106 - RNA, 20 nt, Human
augaccagacaggguaggac

SEQ ID NO: 146107 - RNA, 25 nt, Human
auuaccuauuuucccaccccuccuu

SEQ ID NO: 146108 - RNA, 21 nt, Human
auugcagggcuugguuucucu

SEQ ID NO: 146109 - RNA, 24 nt, Human
auuuucaggugugcaaggaggugg

SEQ ID NO: 146110 - RNA, 25 nt, Human
caaaauaccagacagugauggcgua

SEQ ID NO: 146111 - RNA, 26 nt, Human
caaaggucucuucuccuccuuggucc

SEQ ID NO: 146112 - RNA, 24 nt, Human
caaagugaaugacaacccagagac

SEQ ID NO: 146113 - RNA, 25 nt, Human
caacagacagagcccuccacaccag

SEQ ID NO: 146114 - RNA, 25 nt, Human
caacagacagagcccuccacaccag

SEQ ID NO: 146115 - RNA, 21 nt, Human
caaccccaaguccugcauccu

SEQ ID NO: 146116 - RNA, 21 nt, Human
caaccccaaguccugcauccu

SEQ ID NO: 146117 - RNA, 22 nt, Human
caacuucuccccagcccggacc

SEQ ID NO: 146118 - RNA, 19 nt, Human
caagacagucccaagauaa

SEQ ID NO: 146119 - RNA, 22 nt, Human
cacaacaggaugcuugccaagc

SEQ ID NO: 146120 - RNA, 24 nt, Human
cacacagcgccucccaccaagcac

SEQ ID NO: 146121 - RNA, 21 nt, Human
caccaagcacaugggacucac

SEQ ID NO: 146122 - RNA, 18 nt, Human
caccacaaggccucagca

SEQ ID NO: 146123 - RNA, 21 nt, Human
caccaggcaggacagaggcaa

SEQ ID NO: 146124 - RNA, 21 nt, Human
caccaggcaggacagaggcaa

SEQ ID NO: 146125 - RNA, 24 nt, Human
caccccucgggcucucaaagugaa

SEQ ID NO: 146126 - RNA, 25 nt, Human
cacccucccgcucugccaccacugg

SEQ ID NO: 146127 - RNA, 21 nt, Human
cacccucugcccaaagucacu

SEQ ID NO: 146128 - RNA, 20 nt, Human
cacccucuucccacaauuca

SEQ ID NO: 146129 - RNA, 18 nt, Human
cacgauauaguccagggc

SEQ ID NO: 146130 - RNA, 19 nt, Human
cacucccucccaacacaca

SEQ ID NO: 146131 - RNA, 18 nt, Human
cacucccucccaccccuc

SEQ ID NO: 146132 - RNA, 24 nt, Human
cacugggagaagaauugggccaug

SEQ ID NO: 146133 - RNA, 23 nt, Human
cacuucacauuccaggcuggagg

SEQ ID NO: 146134 - RNA, 23 nt, Human
cacuucacauuccaggcuggagg

SEQ ID NO: 146135 - RNA, 23 nt, Human
cagacagagcccuccacaccagg

SEQ ID NO: 146136 - RNA, 23 nt, Human
cagacagagcccuccacaccagg

SEQ ID NO: 146137 - RNA, 27 nt, Human
cagaggcaaagucagaagcagcagcgg

SEQ ID NO: 146138 - RNA, 27 nt, Human
cagaggcaaagucagaagcagcagcgg

SEQ ID NO: 146139 - RNA, 23 nt, Human
cagcaacagacagagcccuccac

SEQ ID NO: 146140 - RNA, 23 nt, Human
cagcaacagacagagcccuccac

SEQ ID NO: 146141 - RNA, 21 nt, Human
cagcaccagaguacaauuagu

SEQ ID NO: 146142 - RNA, 23 nt, Human
cagccaaaaucccauccccaagu

SEQ ID NO: 146143 - RNA, 23 nt, Human
cagccaaaaucccauccccaagu

SEQ ID NO: 146144 - RNA, 24 nt, Human
cagccaaaaucccauccccaaguc

SEQ ID NO: 146145 - RNA, 23 nt, Human
cagccucaaaggcccccaaccuc

SEQ ID NO: 146146 - RNA, 23 nt, Human
cagcuccugggccucaagagccc

SEQ ID NO: 146147 - RNA, 23 nt, Human
caggacagaggcaaagucagaag

SEQ ID NO: 146148 - RNA, 23 nt, Human
caggauucagagaccaaggguca

SEQ ID NO: 146149 - RNA, 21 nt, Human
cagggccaggcgcucgggcgc

SEQ ID NO: 146150 - RNA, 18 nt, Human
caggugacaaccccagcc

SEQ ID NO: 146151 - RNA, 18 nt, Human
caggugacaaccccagcc

SEQ ID NO: 146152 - RNA, 20 nt, Human
caucacucccucccaccccu

SEQ ID NO: 146153 - RNA, 23 nt, Human
cauccccacacagcagccagagc

SEQ ID NO: 146154 - RNA, 19 nt, Human
caucgccaccacaaggccu

SEQ ID NO: 146155 - RNA, 18 nt, Human
caugacucaccucaaccc

SEQ ID NO: 146156 - RNA, 18 nt, Human
caugacucaccucaaccc

SEQ ID NO: 146157 - RNA, 19 nt, Human
caugcagggcacgauauag

SEQ ID NO: 146158 - RNA, 24 nt, Human
cauuuccguuugggggccucaggc

SEQ ID NO: 146159 - RNA, 24 nt, Human
ccaacaccugaaugggccucaacu

SEQ ID NO: 146160 - RNA, 26 nt, Human
ccacacccaugcuccuccuggcaccu

SEQ ID NO: 146161 - RNA, 26 nt, Human
ccacacccaugcuccuccuggcaccu

SEQ ID NO: 146162 - RNA, 22 nt, Human
ccacagccucaaaggcccccaa

SEQ ID NO: 146163 - RNA, 23 nt, Human
ccacccaggcaaucuggucccca

SEQ ID NO: 146164 - RNA, 18 nt, Human
ccacugccacaacaggau

SEQ ID NO: 146165 - RNA, 20 nt, Human
ccaggcaaucugguccccac

SEQ ID NO: 146166 - RNA, 23 nt, Human
ccaggcucaggcuccaagggcuc

SEQ ID NO: 146167 - RNA, 22 nt, Human
ccaggugacaaccccagccccc

SEQ ID NO: 146168 - RNA, 21 nt, Human
ccaguccaaaaggugccugcc

SEQ ID NO: 146169 - RNA, 21 nt, Human
ccaguccaaaaggugccugcc

SEQ ID NO: 146170 - RNA, 19 nt, Human
ccagugcaguaccugcaga

SEQ ID NO: 146171 - RNA, 18 nt, Human
ccagugcugcccccagga

SEQ ID NO: 146172 - RNA, 19 nt, Human
ccauccugcccgccaaaac

SEQ ID NO: 146173 - RNA, 20 nt, Human
cccaaaccccaccucagcca

SEQ ID NO: 146174 - RNA, 20 nt, Human
cccaaccacagccucaaagg

SEQ ID NO: 146175 - RNA, 28 nt, Human
cccaaccacagccucaaaggcccccaac

SEQ ID NO: 146176 - RNA, 22 nt, Human
cccacacagcagccagagcccc

SEQ ID NO: 146177 - RNA, 24 nt, Human
cccaccccauugccagcaagaggc

SEQ ID NO: 146178 - RNA, 24 nt, Human
cccaccccauugccagcaagaggc

SEQ ID NO: 146179 - RNA, 18 nt, Human
cccacccucugcccaaag

SEQ ID NO: 146180 - RNA, 20 nt, Human
cccacggugccccgggagcc

SEQ ID NO: 146181 - RNA, 18 nt, Human
cccacucccugccgaggc

SEQ ID NO: 146182 - RNA, 20 nt, Human
cccagcacuggccucaccac

SEQ ID NO: 146183 - RNA, 21 nt, Human
cccaugcuccuccuggcaccu

SEQ ID NO: 146184 - RNA, 21 nt, Human
cccaugcuccuccuggcaccu

SEQ ID NO: 146185 - RNA, 22 nt, Human
cccaugcuccuccuggcaccuu

SEQ ID NO: 146186 - RNA, 22 nt, Human
cccaugcuccuccuggcaccuu

SEQ ID NO: 146187 - RNA, 20 nt, Human
cccauggugccacccuccuc

SEQ ID NO: 146188 - RNA, 18 nt, Human
ccccaaaagacuuucuuu

SEQ ID NO: 146189 - RNA, 21 nt, Human
ccccacacagcagccagagcc

SEQ ID NO: 146190 - RNA, 25 nt, Human
ccccaccauccucggcccauuuccg

SEQ ID NO: 146191 - RNA, 18 nt, Human
ccccgggagcccacuagg

SEQ ID NO: 146192 - RNA, 21 nt, Human
cccgggagcccacuaggaggc

SEQ ID NO: 146193 - RNA, 24 nt, Human
cccuaagggcuugggaagggaccc

SEQ ID NO: 146194 - RNA, 24 nt, Human
cccuaagggcuugggaagggaccc

SEQ ID NO: 146195 - RNA, 22 nt, Human
cccuccacaccaggcaggacag

SEQ ID NO: 146196 - RNA, 22 nt, Human
cccuccacaccaggcaggacag

SEQ ID NO: 146197 - RNA, 26 nt, Human
cccuccacaccaggcaggacagaggc

SEQ ID NO: 146198 - RNA, 22 nt, Human
cccuggacuacaaagaaucccc

SEQ ID NO: 146199 - RNA, 19 nt, Human
ccgcugccucccacggugc

SEQ ID NO: 146200 - RNA, 19 nt, Human
ccucaaaggcccccaaccu

SEQ ID NO: 146201 - RNA, 21 nt, Human
ccucaagagcccacucccucc

SEQ ID NO: 146202 - RNA, 25 nt, Human
ccuccacaccaggcaggacagaggc

SEQ ID NO: 146203 - RNA, 25 nt, Human
ccuccacaccaggcaggacagaggc

SEQ ID NO: 146204 - RNA, 23 nt, Human
ccuccacuugaugcagcuggggg

SEQ ID NO: 146205 - RNA, 23 nt, Human
ccuccacuugaugcagcuggggg

SEQ ID NO: 146206 - RNA, 22 nt, Human
ccucccacggugccccgggagc

SEQ ID NO: 146207 - RNA, 22 nt, Human
ccucccagcucuccauaccuaa

SEQ ID NO: 146208 - RNA, 22 nt, Human
ccucccagcucuccauaccuaa

SEQ ID NO: 146209 - RNA, 19 nt, Human
ccuccgccuccuccuccgc

SEQ ID NO: 146210 - RNA, 19 nt, Human
ccuccgccuccuccuccgc

SEQ ID NO: 146211 - RNA, 24 nt, Human
ccuccugguucucuugccuggccc

SEQ ID NO: 146212 - RNA, 18 nt, Human
ccucucugcccugguaca

SEQ ID NO: 146213 - RNA, 22 nt, Human
ccugauguguacagcaggggua

SEQ ID NO: 146214 - RNA, 21 nt, Human
ccugcccgccaaaaccguccc

SEQ ID NO: 146215 - RNA, 20 nt, Human
ccuggcacccagcuagggcc

SEQ ID NO: 146216 - RNA, 26 nt, Human
ccuggcaccuuuuacucugcccaagc

SEQ ID NO: 146217 - RNA, 26 nt, Human
ccuggcaccuuuuacucugcccaagc

SEQ ID NO: 146218 - RNA, 19 nt, Human
cgaccgcccagugcugccc

SEQ ID NO: 146219 - RNA, 19 nt, Human
cgcccgggcccauggugcc

SEQ ID NO: 146220 - RNA, 19 nt, Human
cgcccgggcccauggugcc

SEQ ID NO: 146221 - RNA, 21 nt, Human
cgcggcgggaucgcccucugg

SEQ ID NO: 146222 - RNA, 23 nt, Human
cggucaaagaguggcucgauguu

SEQ ID NO: 146223 - RNA, 20 nt, Human
cucaaccccaaguccugcau

SEQ ID NO: 146224 - RNA, 20 nt, Human
cucaaccccaaguccugcau

SEQ ID NO: 146225 - RNA, 23 nt, Human
cucauccaccagaccuugcccug

SEQ ID NO: 146226 - RNA, 21 nt, Human
cucaucgccaccacaaggccu

SEQ ID NO: 146227 - RNA, 18 nt, Human
cucccgcucugccuccug

SEQ ID NO: 146228 - RNA, 22 nt, Human
cuccuuggcaucaaaauaccag

SEQ ID NO: 146229 - RNA, 24 nt, Human
cucucuggcagcaccagaguacaa

SEQ ID NO: 146230 - RNA, 18 nt, Human
cucugcuggcguccauuc

SEQ ID NO: 146231 - RNA, 20 nt, Human
cucugggggucccacucccu

SEQ ID NO: 146232 - RNA, 20 nt, Human
cugaaugggccucaacugcc

SEQ ID NO: 146233 - RNA, 23 nt, Human
cugcaucacucccucccaccccu

SEQ ID NO: 146234 - RNA, 22 nt, Human
cugccaugcggcucugggacug

SEQ ID NO: 146235 - RNA, 22 nt, Human
cugccaugcggcucugggacug

SEQ ID NO: 146236 - RNA, 24 nt, Human
cugccauggccaaagggguugggg

SEQ ID NO: 146237 - RNA, 24 nt, Human
cugccauggccaaagggguugggg

SEQ ID NO: 146238 - RNA, 20 nt, Human
cugcggcuggcacgggcugu

SEQ ID NO: 146239 - RNA, 21 nt, Human
cugcucugcauuaaccaugug

SEQ ID NO: 146240 - RNA, 19 nt, Human
cugcugcccgcuccuuggc

SEQ ID NO: 146241 - RNA, 18 nt, Human
cugcugcccuggacuaca

SEQ ID NO: 146242 - RNA, 22 nt, Human
cugcuucaauccucacccuccc

SEQ ID NO: 146243 - RNA, 20 nt, Human
cuggacuacaaagaaucccc

SEQ ID NO: 146244 - RNA, 24 nt, Human
cuggcaccccuuggugaccagcgc

SEQ ID NO: 146245 - RNA, 20 nt, Human
cuggcaccuuuuacucugcc

SEQ ID NO: 146246 - RNA, 20 nt, Human
cuggcaccuuuuacucugcc

SEQ ID NO: 146247 - RNA, 20 nt, Human
cuggccucaccacugccacu

SEQ ID NO: 146248 - RNA, 24 nt, Human
cuggccucaccacugccacugcug

SEQ ID NO: 146249 - RNA, 18 nt, Human
cugggugaaggggcaucc

SEQ ID NO: 146250 - RNA, 21 nt, Human
cugucccauagaccuccgaac

SEQ ID NO: 146251 - RNA, 22 nt, Human
cuuucuuuuucagccaaaaucc

SEQ ID NO: 146252 - RNA, 22 nt, Human
gaacaagauaacaagugucugg

SEQ ID NO: 146253 - RNA, 18 nt, Human
gaagcagcagcgguggca

SEQ ID NO: 146254 - RNA, 23 nt, Human
gacagugguaggaggggagcagg

SEQ ID NO: 146255 - RNA, 26 nt, Human
gacccagcccuacaaugcuguggcca

SEQ ID NO: 146256 - RNA, 18 nt, Human
gagguucuggagccccaa

SEQ ID NO: 146257 - RNA, 20 nt, Human
gagguucuggagccccaacu

SEQ ID NO: 146258 - RNA, 23 nt, Human
gaugugagagaaacuagagacag

SEQ ID NO: 146259 - RNA, 21 nt, Human
gcaaaggucucuucuccuccu

SEQ ID NO: 146260 - RNA, 21 nt, Human
gcaaaggucucuucuccuccu

SEQ ID NO: 146261 - RNA, 21 nt, Human
gcaacagacagagcccuccac

SEQ ID NO: 146262 - RNA, 21 nt, Human
gcaacagacagagcccuccac

SEQ ID NO: 146263 - RNA, 19 nt, Human
gcagacacaauucccuggu

SEQ ID NO: 146264 - RNA, 22 nt, Human
gcagagggcagcgccuccucca

SEQ ID NO: 146265 - RNA, 19 nt, Human
gcagccacagggaagcccc

SEQ ID NO: 146266 - RNA, 23 nt, Human
gcagcgguggcagggaaggagca

SEQ ID NO: 146267 - RNA, 23 nt, Human
gcagcgguggcagggaaggagca

SEQ ID NO: 146268 - RNA, 21 nt, Human
gcagcugggggccaccgggcc

SEQ ID NO: 146269 - RNA, 21 nt, Human
gcagcugggggccaccgggcc

SEQ ID NO: 146270 - RNA, 24 nt, Human
gcaggacagaggcaaagucagaag

SEQ ID NO: 146271 - RNA, 24 nt, Human
gcaggacagaggcaaagucagaag

SEQ ID NO: 146272 - RNA, 23 nt, Human
gccauggccaaagggguugggga

SEQ ID NO: 146273 - RNA, 22 nt, Human
gcccacucccucccaacacaca

SEQ ID NO: 146274 - RNA, 19 nt, Human
gcccugcuauguuuccucc

SEQ ID NO: 146275 - RNA, 20 nt, Human
gcccugcuauguuuccuccu

SEQ ID NO: 146276 - RNA, 20 nt, Human
gcccuggacuacaaagaauc

SEQ ID NO: 146277 - RNA, 24 nt, Human
gcccuggggguugcuugcuggucc

SEQ ID NO: 146278 - RNA, 24 nt, Human
gcccuggggguugcuugcuggucc

SEQ ID NO: 146279 - RNA, 19 nt, Human
gccgcagcucaccaccauc

SEQ ID NO: 146280 - RNA, 22 nt, Human
gccgcagcucaccaccauccug

SEQ ID NO: 146281 - RNA, 18 nt, Human
gccuccuccuccgccucc

SEQ ID NO: 146282 - RNA, 20 nt, Human
gccuccuccuccgccuccac

SEQ ID NO: 146283 - RNA, 19 nt, Human
gcggaugacggcguccaca

SEQ ID NO: 146284 - RNA, 19 nt, Human
gcuccugggccucaagagc

SEQ ID NO: 146285 - RNA, 21 nt, Human
gcucugggggucccacucccu

SEQ ID NO: 146286 - RNA, 21 nt, Human
gcugcagcucaugccacccuu

SEQ ID NO: 146287 - RNA, 18 nt, Human
ggaaaacccuaauggcua

SEQ ID NO: 146288 - RNA, 21 nt, Human
ggaagugacaaugccuccucc

SEQ ID NO: 146289 - RNA, 21 nt, Human
ggaagugacaaugccuccucc

SEQ ID NO: 146290 - RNA, 22 nt, Human
ggacuggcacaaggacccuuca

SEQ ID NO: 146291 - RNA, 23 nt, Human
ggagcagccagcacaggcccagg

SEQ ID NO: 146292 - RNA, 23 nt, Human
ggagcagccagcacaggcccagg

SEQ ID NO: 146293 - RNA, 22 nt, Human
ggagggggcaccuucuuugcac

SEQ ID NO: 146294 - RNA, 20 nt, Human
ggagugcacugcucugggcc

SEQ ID NO: 146295 - RNA, 18 nt, Human
ggcagggaagggguccag

SEQ ID NO: 146296 - RNA, 23 nt, Human
ggccagggccccgggauguuugu

SEQ ID NO: 146297 - RNA, 19 nt, Human
ggccagguuggucucccca

SEQ ID NO: 146298 - RNA, 21 nt, Human
ggcucugggggucccacuccc

SEQ ID NO: 146299 - RNA, 19 nt, Human
ggcuguggcucuggggguc

SEQ ID NO: 146300 - RNA, 19 nt, Human
gggccaugguccaggaggc

SEQ ID NO: 146301 - RNA, 22 nt, Human
ggggagcucugagguucugaag

SEQ ID NO: 146302 - RNA, 19 nt, Human
gggguuggggagucacuuc

SEQ ID NO: 146303 - RNA, 22 nt, Human
ggguggcagggaagggguccag

SEQ ID NO: 146304 - RNA, 18 nt, Human
ggguuggggagucacuuc

SEQ ID NO: 146305 - RNA, 18 nt, Human
ggguuggggagucacuuc

SEQ ID NO: 146306 - RNA, 18 nt, Human
ggugccccgggagcccac

SEQ ID NO: 146307 - RNA, 19 nt, Human
guccacaugggccaugagg

SEQ ID NO: 146308 - RNA, 19 nt, Human
gucccuaagggcuugggaa

SEQ ID NO: 146309 - RNA, 19 nt, Human
gucccuaagggcuugggaa

SEQ ID NO: 146310 - RNA, 20 nt, Human
guggaguggagcccccuggg

SEQ ID NO: 146311 - RNA, 24 nt, Human
gugggaagugacaaugccuccucc

SEQ ID NO: 146312 - RNA, 24 nt, Human
gugggaagugacaaugccuccucc

SEQ ID NO: 146313 - RNA, 18 nt, Human
uaaaaggucccuguccca

SEQ ID NO: 146314 - RNA, 24 nt, Human
uaaaaggucccugucccacccucu

SEQ ID NO: 146315 - RNA, 19 nt, Human
uaacucuccacucccaucc

SEQ ID NO: 146316 - RNA, 20 nt, Human
uaaggaagggccugaaauug

SEQ ID NO: 146317 - RNA, 18 nt, Human
uacaaauucccaaccacg

SEQ ID NO: 146318 - RNA, 21 nt, Human
uacaaugcuguggccagggcc

SEQ ID NO: 146319 - RNA, 23 nt, Human
uacacugaugaugcacguggaug

SEQ ID NO: 146320 - RNA, 21 nt, Human
uaccccaaaccccaccucagc

SEQ ID NO: 146321 - RNA, 18 nt, Human
uaccuauuuucccacccc

SEQ ID NO: 146322 - RNA, 19 nt, Human
uacggccaggagccgcugc

SEQ ID NO: 146323 - RNA, 22 nt, Human
uagaccuccgaacaggagccaa

SEQ ID NO: 146324 - RNA, 22 nt, Human
uagagaugggcaagaccucccu

SEQ ID NO: 146325 - RNA, 25 nt, Human
uagcacacaaaaaggggaggacugg

SEQ ID NO: 146326 - RNA, 21 nt, Human
ucaaccccaaguccugcaucc

SEQ ID NO: 146327 - RNA, 21 nt, Human
ucaaccccaaguccugcaucc

SEQ ID NO: 146328 - RNA, 24 nt, Human
ucaagauaccccaaaccccaccuc

SEQ ID NO: 146329 - RNA, 19 nt, Human
ucacagcccuagaccagga

SEQ ID NO: 146330 - RNA, 20 nt, Human
ucacauuccaggcuggagga

SEQ ID NO: 146331 - RNA, 20 nt, Human
ucacauuccaggcuggagga

SEQ ID NO: 146332 - RNA, 21 nt, Human
ucacauuccaggcuggaggag

SEQ ID NO: 146333 - RNA, 21 nt, Human
ucacauuccaggcuggaggag

SEQ ID NO: 146334 - RNA, 18 nt, Human
ucaccucaaccccaaguc

SEQ ID NO: 146335 - RNA, 18 nt, Human
ucaccucaaccccaaguc

SEQ ID NO: 146336 - RNA, 25 nt, Human
ucacgaucaaacaucaguggccacu

SEQ ID NO: 146337 - RNA, 18 nt, Human
ucacugcaguggcaagau

SEQ ID NO: 146338 - RNA, 23 nt, Human
ucacugcaguggcaagaugaggu

SEQ ID NO: 146339 - RNA, 20 nt, Human
ucaggagggggcaccuucuu

SEQ ID NO: 146340 - RNA, 19 nt, Human
ucaggccgugcgcccuggg

SEQ ID NO: 146341 - RNA, 23 nt, Human
uccaacaccugaaugggccucaa

SEQ ID NO: 146342 - RNA, 21 nt, Human
uccaagcuccugccccaaaag

SEQ ID NO: 146343 - RNA, 22 nt, Human
uccacaccaggcaggacagagg

SEQ ID NO: 146344 - RNA, 22 nt, Human
uccacaccaggcaggacagagg

SEQ ID NO: 146345 - RNA, 22 nt, Human
uccacacccaugcuccuccugg

SEQ ID NO: 146346 - RNA, 22 nt, Human
uccacacccaugcuccuccugg

SEQ ID NO: 146347 - RNA, 20 nt, Human
uccacaugggccaugagggc

SEQ ID NO: 146348 - RNA, 24 nt, Human
uccacucccauccuggcccggcca

SEQ ID NO: 146349 - RNA, 23 nt, Human
uccaggcuggaggagugagagga

SEQ ID NO: 146350 - RNA, 23 nt, Human
uccaggcuggaggagugagagga

SEQ ID NO: 146351 - RNA, 21 nt, Human
uccaggugacaaccccagccc

SEQ ID NO: 146352 - RNA, 21 nt, Human
uccaggugacaaccccagccc

SEQ ID NO: 146353 - RNA, 27 nt, Human
uccauaccuaauggggucaugaccaga

SEQ ID NO: 146354 - RNA, 27 nt, Human
uccauaccuaauggggucaugaccaga

SEQ ID NO: 146355 - RNA, 23 nt, Human
ucccaaccacagccucaaaggcc

SEQ ID NO: 146356 - RNA, 21 nt, Human
ucccaagauaaacauucacga

SEQ ID NO: 146357 - RNA, 24 nt, Human
ucccaagauaaacauucacgaucc

SEQ ID NO: 146358 - RNA, 22 nt, Human
ucccaccccauugccagcaaga

SEQ ID NO: 146359 - RNA, 22 nt, Human
ucccaccccauugccagcaaga

SEQ ID NO: 146360 - RNA, 18 nt, Human
ucccaccccuccuugccc

SEQ ID NO: 146361 - RNA, 18 nt, Human
ucccacccucugcccaaa

SEQ ID NO: 146362 - RNA, 21 nt, Human
ucccacggugccccgggagcc

SEQ ID NO: 146363 - RNA, 24 nt, Human
ucccacggugccccgggagcccac

SEQ ID NO: 146364 - RNA, 20 nt, Human
ucccagggcucacccucugu

SEQ ID NO: 146365 - RNA, 19 nt, Human
uccccaagucuaucagaaa

SEQ ID NO: 146366 - RNA, 20 nt, Human
uccccacgaaugcucagcua

SEQ ID NO: 146367 - RNA, 21 nt, Human
uccccaggacgccucccaaca

SEQ ID NO: 146368 - RNA, 20 nt, Human
ucccgaagagggcuggcagu

SEQ ID NO: 146369 - RNA, 22 nt, Human
ucccgcucugccuccugguucu

SEQ ID NO: 146370 - RNA, 20 nt, Human
uccgccuccuccuccgccuc

SEQ ID NO: 146371 - RNA, 20 nt, Human
uccgccuccuccuccgccuc

SEQ ID NO: 146372 - RNA, 22 nt, Human
uccguuccacuccuagcaacau

SEQ ID NO: 146373 - RNA, 21 nt, Human
uccucccagcucuccauaccu

SEQ ID NO: 146374 - RNA, 21 nt, Human
uccucccagcucuccauaccu

SEQ ID NO: 146375 - RNA, 23 nt, Human
uccugccccaaaagacuuucuuu

SEQ ID NO: 146376 - RNA, 23 nt, Human
uccuggagaucuaacaggacuca

SEQ ID NO: 146377 - RNA, 19 nt, Human
uccugggccucaagagccc

SEQ ID NO: 146378 - RNA, 23 nt, Human
uccugggccucaagagcccacuc

SEQ ID NO: 146379 - RNA, 21 nt, Human
ucucacacagcgccucccacc

SEQ ID NO: 146380 - RNA, 19 nt, Human
ucucagguuccucauccau

SEQ ID NO: 146381 - RNA, 21 nt, Human
ucuccacucccauccuggccc

SEQ ID NO: 146382 - RNA, 22 nt, Human
ucuccaggucuucacuccaucc

SEQ ID NO: 146383 - RNA, 19 nt, Human
ucucugagaacauaacuug

SEQ ID NO: 146384 - RNA, 20 nt, Human
ucucuucuccuccuuggucc

SEQ ID NO: 146385 - RNA, 20 nt, Human
ucucuucuccuccuuggucc

SEQ ID NO: 146386 - RNA, 23 nt, Human
ucugagguucugaaguaccuggc

SEQ ID NO: 146387 - RNA, 20 nt, Human
ucugcuggcguccauucccc

SEQ ID NO: 146388 - RNA, 21 nt, Human
ucuggcagcaccagaguacaa

SEQ ID NO: 146389 - RNA, 24 nt, Human
ucugugguggauguuaagcugcuc

SEQ ID NO: 146390 - RNA, 21 nt, Human
ucuuccccaugacuccuuggg

SEQ ID NO: 146391 - RNA, 22 nt, Human
ucuuuguuauucaggauucaga

SEQ ID NO: 146392 - RNA, 23 nt, Human
ugaaauugguaaagcuucccagg

SEQ ID NO: 146393 - RNA, 19 nt, Human
ugaaguaccuggccuaagg

SEQ ID NO: 146394 - RNA, 23 nt, Human
ugacaaugccuccucccagcucu

SEQ ID NO: 146395 - RNA, 23 nt, Human
ugacaaugccuccucccagcucu

SEQ ID NO: 146396 - RNA, 23 nt, Human
ugaccagacaggguaggacccag

SEQ ID NO: 146397 - RNA, 23 nt, Human
ugaccagacaggguaggacccag

SEQ ID NO: 146398 - RNA, 23 nt, Human
ugacuuccuggucucagguuccu

SEQ ID NO: 146399 - RNA, 19 nt, Human
ugagaaaauacaaauuccc

SEQ ID NO: 146400 - RNA, 21 nt, Human
ugagagaaacuagagacaggc

SEQ ID NO: 146401 - RNA, 19 nt, Human
ugagagguaaaggaaaugg

SEQ ID NO: 146402 - RNA, 23 nt, Human
ugauacagguacuuggacaccuu

SEQ ID NO: 146403 - RNA, 24 nt, Human
ugaugcacguggauggguggcagg

SEQ ID NO: 146404 - RNA, 18 nt, Human
ugcaccucauccaccaga

SEQ ID NO: 146405 - RNA, 23 nt, Human
ugcacugcucugggccuccucug

SEQ ID NO: 146406 - RNA, 20 nt, Human
ugcagcucaugccacccucc

SEQ ID NO: 146407 - RNA, 23 nt, Human
ugccaugcggcucugggacuggc

SEQ ID NO: 146408 - RNA, 23 nt, Human
ugccaugcggcucugggacuggc

SEQ ID NO: 146409 - RNA, 24 nt, Human
ugccauggccaaagggguugggga

SEQ ID NO: 146410 - RNA, 24 nt, Human
ugccauggccaaagggguugggga

SEQ ID NO: 146411 - RNA, 21 nt, Human
ugcccagugcaguaccugcag

SEQ ID NO: 146412 - RNA, 22 nt, Human
ugcccuggggguugcuugcugg

SEQ ID NO: 146413 - RNA, 22 nt, Human
ugcccuggggguugcuugcugg

SEQ ID NO: 146414 - RNA, 21 nt, Human
ugccugcaucacucccuccca

SEQ ID NO: 146415 - RNA, 20 nt, Human
ugcugggugaaggggcaucc

SEQ ID NO: 146416 - RNA, 18 nt, Human
uggaaagagagggcugcc

SEQ ID NO: 146417 - RNA, 20 nt, Human
uggaaagagagggcugccac

SEQ ID NO: 146418 - RNA, 19 nt, Human
uggaguggagcccccuggg

SEQ ID NO: 146419 - RNA, 21 nt, Human
uggauggguggcagggaaggg

SEQ ID NO: 146420 - RNA, 22 nt, Human
uggcagcccaguccaaaaggug

SEQ ID NO: 146421 - RNA, 22 nt, Human
uggcagcccaguccaaaaggug

SEQ ID NO: 146422 - RNA, 21 nt, Human
uggcagugguagagguggcug

SEQ ID NO: 146423 - RNA, 19 nt, Human
uggcauaggcuggcuucac

SEQ ID NO: 146424 - RNA, 18 nt, Human
uggcccagccacuucugc

SEQ ID NO: 146425 - RNA, 19 nt, Human
uggcccggccaggcucagg

SEQ ID NO: 146426 - RNA, 20 nt, Human
uggccuccacggcugccccc

SEQ ID NO: 146427 - RNA, 20 nt, Human
uggccuccacggcugccccc

SEQ ID NO: 146428 - RNA, 23 nt, Human
uggcgagcuuuuuccuccggccc

SEQ ID NO: 146429 - RNA, 25 nt, Human
uggcuagagaaaggaaaaaaaaaaa

SEQ ID NO: 146430 - RNA, 18 nt, Human
uggcugacaggacuuccc

SEQ ID NO: 146431 - RNA, 18 nt, Human
uggcugacaggacuuccc

SEQ ID NO: 146432 - RNA, 26 nt, Human
ugggaagacagccagcacagugccug

SEQ ID NO: 146433 - RNA, 21 nt, Human
ugggaagggacccuucagggu

SEQ ID NO: 146434 - RNA, 21 nt, Human
ugggaagggacccuucagggu

SEQ ID NO: 146435 - RNA, 24 nt, Human
ugggaagggacccuucaggguggc

SEQ ID NO: 146436 - RNA, 24 nt, Human
ugggaagggacccuucaggguggc

SEQ ID NO: 146437 - RNA, 23 nt, Human
ugggagaagaauugggccauggu

SEQ ID NO: 146438 - RNA, 22 nt, Human
ugggagguucuggagccccaac

SEQ ID NO: 146439 - RNA, 20 nt, Human
ugggcaagaccuccccaauu

SEQ ID NO: 146440 - RNA, 19 nt, Human
uggggagucacuucacauu

SEQ ID NO: 146441 - RNA, 19 nt, Human
uggggagucacuucacauu

SEQ ID NO: 146442 - RNA, 18 nt, Human
uggggcagggugaggcag

SEQ ID NO: 146443 - RNA, 18 nt, Human
uggggcagggugaggcag

SEQ ID NO: 146444 - RNA, 23 nt, Human
uggggccagguuggucuccccag

SEQ ID NO: 146445 - RNA, 28 nt, Human
uggggguugcuugcuggucccgaccacg

SEQ ID NO: 146446 - RNA, 28 nt, Human
uggggguugcuugcuggucccgaccacg

SEQ ID NO: 146447 - RNA, 27 nt, Human
ugguagagguggcuguggcucuggggg

SEQ ID NO: 146448 - RNA, 18 nt, Human
ugguaggaggggagcagg

SEQ ID NO: 146449 - RNA, 20 nt, Human
ugguaggaggggagcagggg

SEQ ID NO: 146450 - RNA, 18 nt, Human
ugguggauguuaagcugc

SEQ ID NO: 146451 - RNA, 22 nt, Human
uguacauucucacacagcgccu

SEQ ID NO: 146452 - RNA, 24 nt, Human
ugucccacccucugcccaaaguca

SEQ ID NO: 146453 - RNA, 19 nt, Human
ugucugggaagacagccag

SEQ ID NO: 146454 - RNA, 26 nt, Human
ugugauacagguacuuggacaccuuu

SEQ ID NO: 146455 - RNA, 26 nt, Human
ugugauacagguacuuggacaccuuu

SEQ ID NO: 146456 - RNA, 24 nt, Human
ugugcaccucauccaccagaccuu

SEQ ID NO: 146457 - RNA, 19 nt, Human
uguggcucuggggguccca

SEQ ID NO: 146458 - RNA, 19 nt, Human
uucaagauaccccaaaccc

SEQ ID NO: 146459 - RNA, 21 nt, Human
uucacauuccaggcuggagga

SEQ ID NO: 146460 - RNA, 23 nt, Human
uucccaaccacagccucaaaggc

SEQ ID NO: 146461 - RNA, 19 nt, Human
uucccaccccuccuugccc

SEQ ID NO: 146462 - RNA, 21 nt, Human
uucccagguaauucuaccaug

SEQ ID NO: 146463 - RNA, 24 nt, Human
uuccucauccauggauccaaugga

SEQ ID NO: 146464 - RNA, 18 nt, Human
uucuuggcugacaggacu

SEQ ID NO: 146465 - RNA, 18 nt, Human
uucuuggcugacaggacu

SEQ ID NO: 146466 - RNA, 26 nt, Human
uugcuggguaacccuagccaguucca

SEQ ID NO: 146467 - RNA, 18 nt, Human
uugguccucagcaacaga

SEQ ID NO: 146468 - RNA, 18 nt, Human
uugguccucagcaacaga

SEQ ID NO: 146469 - RNA, 18 nt, Human
uuuuuuuuuuuuuuuuug

SEQ ID NO: 146470 - RNA, 19 nt, Human
uuuuuuuuuuuuuuuuugc

SEQ ID NO: 146471 - RNA, 21 nt, Human
uuuuuuuuuuuuuuuuugcag

SEQ ID NO: 146472 - RNA, 21 nt, Human
uuuuuuuuuuuuuuuuugcag

SEQ ID NO: 146473 - RNA, 23 nt, Human
uuuuuuuuuuuuuuuuugcagcu

SEQ ID NO: 146474 - RNA, 27 nt, Human
uuuuuuuuuuuuuuuuuuuuuuugggg

SEQ ID NO: 146475 - RNA, 23 nt, Human
aaaaaaaaaaaacaggaacaccc

SEQ ID NO: 146476 - RNA, 18 nt, Human
aaaaaaaacaggaacacc

SEQ ID NO: 146477 - RNA, 20 nt, Human
aaaaaacaggaacacccaca

SEQ ID NO: 146478 - RNA, 24 nt, Human
aaacaggaacacccacauuuccaa

SEQ ID NO: 146479 - RNA, 26 nt, Human
aaaccugcggcugccacgguacccga

SEQ ID NO: 146480 - RNA, 26 nt, Human
aaaccugcggcugccacgguacccga

SEQ ID NO: 146481 - RNA, 19 nt, Human
aacagcccuggauuaagac

SEQ ID NO: 146482 - RNA, 18 nt, Human
aagcaaccaaaacaacua

SEQ ID NO: 146483 - RNA, 29 nt, Human
aagcaaccaaaacaacuaauggugggcac

SEQ ID NO: 146484 - RNA, 21 nt, Human
aaggaaaauauuucuggcucu

SEQ ID NO: 146485 - RNA, 18 nt, Human
aaguaccacacacaagac

SEQ ID NO: 146486 - RNA, 24 nt, Human
aaguauuuacugagcccuuacuau

SEQ ID NO: 146487 - RNA, 23 nt, Human
aauauuucuggcucuuuaauguu

SEQ ID NO: 146488 - RNA, 22 nt, Human
acaagacaauaaacauaauaag

SEQ ID NO: 146489 - RNA, 20 nt, Human
acaugucuuaucuggaaauu

SEQ ID NO: 146490 - RNA, 20 nt, Human
acccacauuuccaacuccac

SEQ ID NO: 146491 - RNA, 19 nt, Human
acuccagagaaaggauaca

SEQ ID NO: 146492 - RNA, 21 nt, Human
acugccgcgacugcggccaga

SEQ ID NO: 146493 - RNA, 19 nt, Human
agacgagaacucaaauagc

SEQ ID NO: 146494 - RNA, 23 nt, Human
agagagggaacgaucuacacgag

SEQ ID NO: 146495 - RNA, 23 nt, Human
agagagggaacgaucuacacgag

SEQ ID NO: 146496 - RNA, 20 nt, Human
agcaaccaaaacaacuaaug

SEQ ID NO: 146497 - RNA, 19 nt, Human
agccgcugcagcgucgggg

SEQ ID NO: 146498 - RNA, 21 nt, Human
aggcagaaaauccagguugca

SEQ ID NO: 146499 - RNA, 21 nt, Human
agguugugauaauucuccaga

SEQ ID NO: 146500 - RNA, 18 nt, Human
aucuacacgagcgcgaag

SEQ ID NO: 146501 - RNA, 18 nt, Human
aucuacacgagcgcgaag

SEQ ID NO: 146502 - RNA, 24 nt, Human
auuagguugugauaauucuccaga

SEQ ID NO: 146503 - RNA, 22 nt, Human
auuuuuuucuuuucaaaccucc

SEQ ID NO: 146504 - RNA, 22 nt, Human
caaaaccagaagaggaaaaagu

SEQ ID NO: 146505 - RNA, 18 nt, Human
caaagcaaccaaaacaac

SEQ ID NO: 146506 - RNA, 19 nt, Human
caacaaagcaaccaaaaca

SEQ ID NO: 146507 - RNA, 23 nt, Human
caacaaagcaaccaaaacaacua

SEQ ID NO: 146508 - RNA, 25 nt, Human
caacaaagcaaccaaaacaacuaau

SEQ ID NO: 146509 - RNA, 20 nt, Human
caacaaguauuuacugagcc

SEQ ID NO: 146510 - RNA, 19 nt, Human
caacacagucuuggcaaga

SEQ ID NO: 146511 - RNA, 22 nt, Human
caacuccaccuccccucucaaa

SEQ ID NO: 146512 - RNA, 23 nt, Human
caagggaaaguuucucgcaacuc

SEQ ID NO: 146513 - RNA, 23 nt, Human
caagggaaaguuucucgcaacuc

SEQ ID NO: 146514 - RNA, 23 nt, Human
cacacauguuuauuguauaucag

SEQ ID NO: 146515 - RNA, 24 nt, Human
cagaaaccccaacagcccuggauu

SEQ ID NO: 146516 - RNA, 20 nt, Human
cagaaaccugcggcugccac

SEQ ID NO: 146517 - RNA, 20 nt, Human
cagaaaccugcggcugccac

SEQ ID NO: 146518 - RNA, 19 nt, Human
cagcaaaauggagcugagg

SEQ ID NO: 146519 - RNA, 21 nt, Human
cagcaaaauggagcugaggca

SEQ ID NO: 146520 - RNA, 22 nt, Human
cagcaaaauggagcugaggcag

SEQ ID NO: 146521 - RNA, 23 nt, Human
cagcaaaauggagcugaggcaga

SEQ ID NO: 146522 - RNA, 26 nt, Human
cagcgugcaaccagagagggaacgau

SEQ ID NO: 146523 - RNA, 26 nt, Human
cagcgugcaaccagagagggaacgau

SEQ ID NO: 146524 - RNA, 22 nt, Human
cauugugcuuacacuccagaga

SEQ ID NO: 146525 - RNA, 23 nt, Human
ccacauuuccaacuccaccuccc

SEQ ID NO: 146526 - RNA, 24 nt, Human
ccaccuccccucucaaauuguuca

SEQ ID NO: 146527 - RNA, 19 nt, Human
ccagguaagaacugaaaau

SEQ ID NO: 146528 - RNA, 19 nt, Human
ccgagccgcugcagcgucg

SEQ ID NO: 146529 - RNA, 19 nt, Human
ccgagccgcugcagcgucg

SEQ ID NO: 146530 - RNA, 20 nt, Human
cgaagccgaggcgcggggag

SEQ ID NO: 146531 - RNA, 23 nt, Human
cggcgagcagugcggcgcaagga

SEQ ID NO: 146532 - RNA, 24 nt, Human
cggcgagcagugcggcgcaaggag

SEQ ID NO: 146533 - RNA, 24 nt, Human
cggcgagcagugcggcgcaaggag

SEQ ID NO: 146534 - RNA, 20 nt, Human
cuaaaaaaaaaaaaaaaaaa

SEQ ID NO: 146535 - RNA, 21 nt, Human
cuaaaaugaacaaggccagca

SEQ ID NO: 146536 - RNA, 21 nt, Human
cuccagaaaccccaacagccc

SEQ ID NO: 146537 - RNA, 18 nt, Human
cugcaggaauuucuggag

SEQ ID NO: 146538 - RNA, 20 nt, Human
cuggaaauuuuccaaaaccg

SEQ ID NO: 146539 - RNA, 23 nt, Human
cuucuggggaauuagguucccag

SEQ ID NO: 146540 - RNA, 21 nt, Human
gaagaggccaucuuuggaucu

SEQ ID NO: 146541 - RNA, 20 nt, Human
gaaguaccacacacaagaca

SEQ ID NO: 146542 - RNA, 21 nt, Human
gauuaagaacaucuggaaauu

SEQ ID NO: 146543 - RNA, 20 nt, Human
gcaggacugggaaaaaagga

SEQ ID NO: 146544 - RNA, 18 nt, Human
gccgcugcagcgucgggg

SEQ ID NO: 146545 - RNA, 18 nt, Human
ggaugggaagccaccacu

SEQ ID NO: 146546 - RNA, 18 nt, Human
ggcccgggguucagaaac

SEQ ID NO: 146547 - RNA, 18 nt, Human
ggcccgggguucagaaac

SEQ ID NO: 146548 - RNA, 22 nt, Human
ggcgagcagugcggcgcaagga

SEQ ID NO: 146549 - RNA, 24 nt, Human
gggaucugccuucgggaaccagcg

SEQ ID NO: 146550 - RNA, 24 nt, Human
gggaucugccuucgggaaccagcg

SEQ ID NO: 146551 - RNA, 18 nt, Human
ggggaugggaagccacca

SEQ ID NO: 146552 - RNA, 19 nt, Human
ggugcggagcuccacgacc

SEQ ID NO: 146553 - RNA, 19 nt, Human
ggugcggagcuccacgacc

SEQ ID NO: 146554 - RNA, 23 nt, Human
gugacaugucuuaucuggaaauu

SEQ ID NO: 146555 - RNA, 18 nt, Human
uaaauuuaaauuccauuc

SEQ ID NO: 146556 - RNA, 23 nt, Human
uaacacaaaacuaccagggauau

SEQ ID NO: 146557 - RNA, 18 nt, Human
uagagagccaagugagcu

SEQ ID NO: 146558 - RNA, 27 nt, Human
uauaucaguagaccuagcucuuuccac

SEQ ID NO: 146559 - RNA, 20 nt, Human
ucaacacagucuuggcaaga

SEQ ID NO: 146560 - RNA, 19 nt, Human
ucacuaugacagcagcccu

SEQ ID NO: 146561 - RNA, 18 nt, Human
uccagaaaccccaacagc

SEQ ID NO: 146562 - RNA, 26 nt, Human
uccagagaaaggauacaagacaauaa

SEQ ID NO: 146563 - RNA, 18 nt, Human
uccguacauaacaaagga

SEQ ID NO: 146564 - RNA, 19 nt, Human
ucuuggcaagaaaacauga

SEQ ID NO: 146565 - RNA, 24 nt, Human
ugagcugaagaaagacugcuaggg

SEQ ID NO: 146566 - RNA, 21 nt, Human
ugaggcagugcgaucugugcu

SEQ ID NO: 146567 - RNA, 21 nt, Human
ugcacacauguuuauuguaua

SEQ ID NO: 146568 - RNA, 19 nt, Human
ugccaucuuuauucagaaa

SEQ ID NO: 146569 - RNA, 24 nt, Human
ugcuuuuuuuguguuaaaggguga

SEQ ID NO: 146570 - RNA, 18 nt, Human
uggagaaaaaauuguguu

SEQ ID NO: 146571 - RNA, 25 nt, Human
uggauuaagaacaucuggaaauugu

SEQ ID NO: 146572 - RNA, 19 nt, Human
uggucauacugccaaccac

SEQ ID NO: 146573 - RNA, 20 nt, Human
ugugaaggaugcaagaagua

SEQ ID NO: 146574 - RNA, 21 nt, Human
uuaacacaaaacuaccaggga

SEQ ID NO: 146575 - RNA, 25 nt, Human
uucagcaaaauggagcugaggcaga

SEQ ID NO: 146576 - RNA, 24 nt, Human
uuccaugauucuggucauacugcc

SEQ ID NO: 146577 - RNA, 24 nt, Human
uuccauuccaacaaagcaaccaaa

SEQ ID NO: 146578 - RNA, 20 nt, Human
uucuuuucaaaccuccuccu

SEQ ID NO: 146579 - RNA, 22 nt, Human
uugcaggacugggaaaaaagga

SEQ ID NO: 146580 - RNA, 24 nt, Human
uuucaaaccuccuccuuucaaauc

SEQ ID NO: 146581 - RNA, 22 nt, Human
uuuccacaguuaucagugguua

SEQ ID NO: 146582 - RNA, 19 nt, Human
uuuuggggaugggaagcca

SEQ ID NO: 146583 - RNA, 21 nt, Human
uuuuggggaugggaagccacc

SEQ ID NO: 146584 - RNA, 22 nt, Human
uuuuuuguguugccaucuuuau

SEQ ID NO: 146585 - RNA, 20 nt, Human
uuuuuuuuuuuuuuuuuugu

SEQ ID NO: 146586 - RNA, 24 nt, Human
uuuuuuuuuuuuuuuuuuuuuggg

SEQ ID NO: 146587 - RNA, 23 nt, Human
aaaaaaaaaaaagaaaaaccaaa

SEQ ID NO: 146588 - RNA, 27 nt, Human
aaaaaagaaaaaccaaaccauauuuug

SEQ ID NO: 146589 - RNA, 20 nt, Human
aaaaagaaaaaccaaaccau

SEQ ID NO: 146590 - RNA, 18 nt, Human
aaaccaaaaggacgaaga

SEQ ID NO: 146591 - RNA, 20 nt, Human
aaaccccauuuugccaacuc

SEQ ID NO: 146592 - RNA, 21 nt, Human
aaagggaauaguaauugggga

SEQ ID NO: 146593 - RNA, 21 nt, Human
aagaaaaacgaaauccauggc

SEQ ID NO: 146594 - RNA, 20 nt, Human
aagggugcagggcagggcuc

SEQ ID NO: 146595 - RNA, 24 nt, Human
acaaaauaaugaacugcauguucc

SEQ ID NO: 146596 - RNA, 23 nt, Human
acaccacauaucccaugggcaau

SEQ ID NO: 146597 - RNA, 26 nt, Human
acacuuucaaaaaaaaaaaagaaaaa

SEQ ID NO: 146598 - RNA, 19 nt, Human
accaaaccauauuuugcca

SEQ ID NO: 146599 - RNA, 21 nt, Human
acuacaacauuccaacuccug

SEQ ID NO: 146600 - RNA, 23 nt, Human
agaaaggauuguuggccaauaga

SEQ ID NO: 146601 - RNA, 18 nt, Human
agcaaggggcaucacaca

SEQ ID NO: 146602 - RNA, 23 nt, Human
agcaguauuuacaaaaagguuaa

SEQ ID NO: 146603 - RNA, 23 nt, Human
aggaacccuccucuccuauggcc

SEQ ID NO: 146604 - RNA, 18 nt, Human
agggcagggcucugaggg

SEQ ID NO: 146605 - RNA, 23 nt, Human
aggggccgguccugcggcggcgg

SEQ ID NO: 146606 - RNA, 21 nt, Human
aguaccccaagaaaaacgaaa

SEQ ID NO: 146607 - RNA, 22 nt, Human
auagaggugaagaacuuggaca

SEQ ID NO: 146608 - RNA, 19 nt, Human
aucacucccugccccccuu

SEQ ID NO: 146609 - RNA, 18 nt, Human
auuccaacuccugaauau

SEQ ID NO: 146610 - RNA, 23 nt, Human
caagaaaaacgaaauccauggca

SEQ ID NO: 146611 - RNA, 23 nt, Human
caagaguaccccaagaaaaacga

SEQ ID NO: 146612 - RNA, 21 nt, Human
caccacauaucccaugggcaa

SEQ ID NO: 146613 - RNA, 21 nt, Human
cacuguacaagggugcagggc

SEQ ID NO: 146614 - RNA, 22 nt, Human
cagcccggggcuggagcugcag

SEQ ID NO: 146615 - RNA, 19 nt, Human
caggcagcugaagucaaag

SEQ ID NO: 146616 - RNA, 20 nt, Human
caucacucccugccccccuu

SEQ ID NO: 146617 - RNA, 18 nt, Human
caucagcaaggggcauca

SEQ ID NO: 146618 - RNA, 22 nt, Human
ccaaaauccaugcaaaucaagu

SEQ ID NO: 146619 - RNA, 20 nt, Human
ccaaagccucccccaaauca

SEQ ID NO: 146620 - RNA, 19 nt, Human
cccaagaaaaacgaaaucc

SEQ ID NO: 146621 - RNA, 18 nt, Human
ccccaaaucaucacuccc

SEQ ID NO: 146622 - RNA, 19 nt, Human
ccccaaaucaucacucccu

SEQ ID NO: 146623 - RNA, 22 nt, Human
ccccaagaaaaacgaaauccau

SEQ ID NO: 146624 - RNA, 23 nt, Human
ccccaagugaggaccuaacucca

SEQ ID NO: 146625 - RNA, 24 nt, Human
cccccaaaucaucacucccugccc

SEQ ID NO: 146626 - RNA, 18 nt, Human
ccccuuaaggcuagaggu

SEQ ID NO: 146627 - RNA, 24 nt, Human
cccggggcuggagcugcaggggac

SEQ ID NO: 146628 - RNA, 18 nt, Human
cccugccccccuuaaggc

SEQ ID NO: 146629 - RNA, 20 nt, Human
cccuuaaggcuagaggugag

SEQ ID NO: 146630 - RNA, 20 nt, Human
cccuuucuuuccccuuuccc

SEQ ID NO: 146631 - RNA, 25 nt, Human
ccuauggccaucuccuccuccuguc

SEQ ID NO: 146632 - RNA, 24 nt, Human
ccucacaauugcacaugucaagcc

SEQ ID NO: 146633 - RNA, 23 nt, Human
ccuuuucccuuucuuuccccuuu

SEQ ID NO: 146634 - RNA, 24 nt, Human
cgaaauccauggcacagacacugu

SEQ ID NO: 146635 - RNA, 21 nt, Human
cgaccccgacucgcccugggc

SEQ ID NO: 146636 - RNA, 27 nt, Human
cggauggcggcggcggcuccccaaguu

SEQ ID NO: 146637 - RNA, 20 nt, Human
cgggggggugcagcccgggg

SEQ ID NO: 146638 - RNA, 18 nt, Human
cucccaaagccuccccca

SEQ ID NO: 146639 - RNA, 20 nt, Human
cucccaaagccucccccaaa

SEQ ID NO: 146640 - RNA, 20 nt, Human
cucccccaaaucaucacucc

SEQ ID NO: 146641 - RNA, 24 nt, Human
cuucacaucaagaguaccccaaga

SEQ ID NO: 146642 - RNA, 27 nt, Human
cuuucaaaaaaaaaaaagaaaaaccaa

SEQ ID NO: 146643 - RNA, 19 nt, Human
cuuuuucucccuuuucccu

SEQ ID NO: 146644 - RNA, 23 nt, Human
gaccccgacucgcccugggcgcg

SEQ ID NO: 146645 - RNA, 20 nt, Human
gagaguucagauuuuguuuu

SEQ ID NO: 146646 - RNA, 25 nt, Human
gcgaccccgacucgcccugggcgcg

SEQ ID NO: 146647 - RNA, 22 nt, Human
gcggaggcuggggcaggggccg

SEQ ID NO: 146648 - RNA, 22 nt, Human
gcggcggcggauggcggcggcg

SEQ ID NO: 146649 - RNA, 20 nt, Human
gcggcggcggcuccccaagu

SEQ ID NO: 146650 - RNA, 22 nt, Human
gcggggcgcggggaacacugag

SEQ ID NO: 146651 - RNA, 23 nt, Human
gcucagcucagcccucuuccuua

SEQ ID NO: 146652 - RNA, 19 nt, Human
gcucccaaagccuccccca

SEQ ID NO: 146653 - RNA, 23 nt, Human
gcucccaaagccucccccaaauc

SEQ ID NO: 146654 - RNA, 22 nt, Human
gcuggagcugcaggggacaccg

SEQ ID NO: 146655 - RNA, 23 nt, Human
gcuuggcuuuuuuuuuuuuuuuu

SEQ ID NO: 146656 - RNA, 22 nt, Human
ggacauggcuguuucaggcagc

SEQ ID NO: 146657 - RNA, 23 nt, Human
ggcgggggggugcagcccggggc

SEQ ID NO: 146658 - RNA, 24 nt, Human
gggaacacugagaagcgugcaggc

SEQ ID NO: 146659 - RNA, 24 nt, Human
gggaagugggcagaaaggauuguu

SEQ ID NO: 146660 - RNA, 19 nt, Human
gggaauaguaauuggggaa

SEQ ID NO: 146661 - RNA, 24 nt, Human
gggaauaguaauuggggaagggga

SEQ ID NO: 146662 - RNA, 23 nt, Human
gggcgggggggugcagcccgggg

SEQ ID NO: 146663 - RNA, 18 nt, Human
gggcuggagcugcagggg

SEQ ID NO: 146664 - RNA, 23 nt, Human
ggggaaggggaagugggcagaaa

SEQ ID NO: 146665 - RNA, 25 nt, Human
ggggcgggggggugcagcccggggc

SEQ ID NO: 146666 - RNA, 22 nt, Human
uaacauacaaaaaucgccgccu

SEQ ID NO: 146667 - RNA, 22 nt, Human
uacaacauuccaacuccugaau

SEQ ID NO: 146668 - RNA, 21 nt, Human
uacauuuucaguuaaaaaaau

SEQ ID NO: 146669 - RNA, 23 nt, Human
uagaaccacaaaauaaugaacug

SEQ ID NO: 146670 - RNA, 20 nt, Human
uagcauugaagggagcaagg

SEQ ID NO: 146671 - RNA, 19 nt, Human
uaucccaugggcaauaaag

SEQ ID NO: 146672 - RNA, 25 nt, Human
uauuuucguuuuaauuuuuuggaag

SEQ ID NO: 146673 - RNA, 25 nt, Human
uauuuugcucccaaagccuccccca

SEQ ID NO: 146674 - RNA, 27 nt, Human
uauuuugcucccaaagccucccccaaa

SEQ ID NO: 146675 - RNA, 23 nt, Human
ucacagcaucaucacaaaauaga

SEQ ID NO: 146676 - RNA, 20 nt, Human
ucaguagguaacuacaacau

SEQ ID NO: 146677 - RNA, 24 nt, Human
ucaguuaaaaaaauagacuuuuga

SEQ ID NO: 146678 - RNA, 18 nt, Human
ucccaugggcaauaaagc

SEQ ID NO: 146679 - RNA, 18 nt, Human
ucccccaaaucaucacuc

SEQ ID NO: 146680 - RNA, 19 nt, Human
ucuggagaaccgaagcuca

SEQ ID NO: 146681 - RNA, 19 nt, Human
ucuuguguuucuuuuucuc

SEQ ID NO: 146682 - RNA, 24 nt, Human
ucuuuuucucccuuuucccuuucu

SEQ ID NO: 146683 - RNA, 19 nt, Human
ugagaaccuccaucugacc

SEQ ID NO: 146684 - RNA, 19 nt, Human
ugagaagcgugcaggcggc

SEQ ID NO: 146685 - RNA, 19 nt, Human
ugagaauacugggacugcu

SEQ ID NO: 146686 - RNA, 19 nt, Human
ugcggcggcggaagcuggc

SEQ ID NO: 146687 - RNA, 20 nt, Human
ugcggcggcggaagcuggcu

SEQ ID NO: 146688 - RNA, 20 nt, Human
ugcucccaaagccuccccca

SEQ ID NO: 146689 - RNA, 19 nt, Human
uggagcugcaggggacacc

SEQ ID NO: 146690 - RNA, 23 nt, Human
uggccaucuccuccuccuguccu

SEQ ID NO: 146691 - RNA, 18 nt, Human
ugggcgcgggcgggcgug

SEQ ID NO: 146692 - RNA, 18 nt, Human
uggugucggggcgggggg

SEQ ID NO: 146693 - RNA, 30 nt, Human
ugguuugcuuggcuuuuuuuuuuuuuuuuc

SEQ ID NO: 146694 - RNA, 22 nt, Human
uuauugucacagcaucaucaca

SEQ ID NO: 146695 - RNA, 23 nt, Human
uucaaaaaaaaaaaagaaaaacc

SEQ ID NO: 146696 - RNA, 21 nt, Human
aaaagccguuuuggagagggg

SEQ ID NO: 146697 - RNA, 22 nt, Human
aaacaacccuuuaaagcagggu

SEQ ID NO: 146698 - RNA, 19 nt, Human
aaugucuauuugccacuga

SEQ ID NO: 146699 - RNA, 22 nt, Human
acaaagcauacaaaaauauacu

SEQ ID NO: 146700 - RNA, 24 nt, Human
acaauugcaugcauccuaguuuca

SEQ ID NO: 146701 - RNA, 22 nt, Human
acacaaaaucugaguggauaua

SEQ ID NO: 146702 - RNA, 19 nt, Human
acauccagggucaaaaacc

SEQ ID NO: 146703 - RNA, 22 nt, Human
accaagaaaaaaaaaucaacag

SEQ ID NO: 146704 - RNA, 23 nt, Human
accacacacaccaagaaaaaaaa

SEQ ID NO: 146705 - RNA, 21 nt, Human
accuaagagagacuagaaugg

SEQ ID NO: 146706 - RNA, 23 nt, Human
acuauagucacaaaccauccauu

SEQ ID NO: 146707 - RNA, 20 nt, Human
agaaaaaaaaaucaacagaa

SEQ ID NO: 146708 - RNA, 22 nt, Human
agaccucagcccucuuggccag

SEQ ID NO: 146709 - RNA, 23 nt, Human
agccaggaguugcugguguagug

SEQ ID NO: 146710 - RNA, 20 nt, Human
agccugggaugguaucuccu

SEQ ID NO: 146711 - RNA, 19 nt, Human
aggcauaaauauacagcca

SEQ ID NO: 146712 - RNA, 19 nt, Human
agggguuggacugagccug

SEQ ID NO: 146713 - RNA, 21 nt, Human
agggguuggacugagccuggg

SEQ ID NO: 146714 - RNA, 21 nt, Human
aucaacucugacauccagggu

SEQ ID NO: 146715 - RNA, 19 nt, Human
aucaauugcuccucgcuca

SEQ ID NO: 146716 - RNA, 24 nt, Human
caaacaacccuuuaaagcaggguc

SEQ ID NO: 146717 - RNA, 20 nt, Human
caacacaauugcaugcaucc

SEQ ID NO: 146718 - RNA, 22 nt, Human
caacagaaauaaaaguagcaaa

SEQ ID NO: 146719 - RNA, 21 nt, Human
caacccauuuacaugcagccu

SEQ ID NO: 146720 - RNA, 22 nt, Human
caaugucccccaaaucaguccc

SEQ ID NO: 146721 - RNA, 21 nt, Human
cacaaaacaaagcauacaaaa

SEQ ID NO: 146722 - RNA, 19 nt, Human
cacacacaccaagaaaaaa

SEQ ID NO: 146723 - RNA, 27 nt, Human
caccacacacaccaagaaaaaaaaauc

SEQ ID NO: 146724 - RNA, 21 nt, Human
cagcuccaguggacaaagggc

SEQ ID NO: 146725 - RNA, 25 nt, Human
cagugaguccccucgccgagcuauu

SEQ ID NO: 146726 - RNA, 22 nt, Human
cauugcacuucuguucucugag

SEQ ID NO: 146727 - RNA, 24 nt, Human
cauugcacuucuguucucugagua

SEQ ID NO: 146728 - RNA, 24 nt, Human
ccaagaaaaaaaaaucaacagaaa

SEQ ID NO: 146729 - RNA, 25 nt, Human
ccacacacaccaagaaaaaaaaauc

SEQ ID NO: 146730 - RNA, 18 nt, Human
cccaaaucagucccaagc

SEQ ID NO: 146731 - RNA, 18 nt, Human
ccggcugcugggaagcca

SEQ ID NO: 146732 - RNA, 21 nt, Human
ccucagcccucuuggccaggg

SEQ ID NO: 146733 - RNA, 24 nt, Human
ccugucuguguuccggcugcuggg

SEQ ID NO: 146734 - RNA, 23 nt, Human
cucagcccucuuggccaggggau

SEQ ID NO: 146735 - RNA, 21 nt, Human
cuccaccaaagcccuuugccc

SEQ ID NO: 146736 - RNA, 23 nt, Human
cuccugucuguguuccggcugcu

SEQ ID NO: 146737 - RNA, 23 nt, Human
cuccuuuugcccuccacacuuaa

SEQ ID NO: 146738 - RNA, 19 nt, Human
cucgcacaaccuggagacc

SEQ ID NO: 146739 - RNA, 19 nt, Human
cuuugcccaacaaagggag

SEQ ID NO: 146740 - RNA, 18 nt, Human
gaaaaaaaaaucaacaga

SEQ ID NO: 146741 - RNA, 21 nt, Human
gagcugguguaucagccugag

SEQ ID NO: 146742 - RNA, 18 nt, Human
gcacaaccuggagaccca

SEQ ID NO: 146743 - RNA, 21 nt, Human
gccacagaguguggcauaaag

SEQ ID NO: 146744 - RNA, 22 nt, Human
gcuugucuuuuugcugucccca

SEQ ID NO: 146745 - RNA, 21 nt, Human
ggacaggaaagggugguagug

SEQ ID NO: 146746 - RNA, 23 nt, Human
ggagcagauauugcuacguuccu

SEQ ID NO: 146747 - RNA, 18 nt, Human
gggaagccaggaguugcu

SEQ ID NO: 146748 - RNA, 22 nt, Human
gugcagcuccaguggacaaagg

SEQ ID NO: 146749 - RNA, 23 nt, Human
uaaagcagggucagaccucagcc

SEQ ID NO: 146750 - RNA, 21 nt, Human
uaagagagacuagaaugggcu

SEQ ID NO: 146751 - RNA, 20 nt, Human
uaaggcaacccauuuacaug

SEQ ID NO: 146752 - RNA, 20 nt, Human
uaagucacaaaacaaagcau

SEQ ID NO: 146753 - RNA, 26 nt, Human
uaagucacaaaacaaagcauacaaaa

SEQ ID NO: 146754 - RNA, 23 nt, Human
uagcaaaaccuagucaaacaacc

SEQ ID NO: 146755 - RNA, 22 nt, Human
uagucaaacaacccuuuaaagc

SEQ ID NO: 146756 - RNA, 21 nt, Human
uauuaagagcuaaugaccaaa

SEQ ID NO: 146757 - RNA, 25 nt, Human
ucaaaaaccugugaugggucaaaau

SEQ ID NO: 146758 - RNA, 19 nt, Human
ucaacagaaauaaaaguag

SEQ ID NO: 146759 - RNA, 24 nt, Human
ucaacagaaauaaaaguagcaaaa

SEQ ID NO: 146760 - RNA, 24 nt, Human
uccauaauaaggcaacccauuuac

SEQ ID NO: 146761 - RNA, 20 nt, Human
uccccacaccaccuccuucu

SEQ ID NO: 146762 - RNA, 18 nt, Human
ucuguguuccggcugcug

SEQ ID NO: 146763 - RNA, 18 nt, Human
ugaaaaaauagccuacau

SEQ ID NO: 146764 - RNA, 22 nt, Human
ugaaauuugacuacaaagguaa

SEQ ID NO: 146765 - RNA, 22 nt, Human
ugacauccagggucaaaaaccu

SEQ ID NO: 146766 - RNA, 22 nt, Human
ugagacaacuagauaugcucug

SEQ ID NO: 146767 - RNA, 19 nt, Human
ugaguauauaauacauauu

SEQ ID NO: 146768 - RNA, 22 nt, Human
uggcauaaaggcuauacuucac

SEQ ID NO: 146769 - RNA, 19 nt, Human
uggccaggggauccccaca

SEQ ID NO: 146770 - RNA, 21 nt, Human
ugggaagccaggaguugcugg

SEQ ID NO: 146771 - RNA, 22 nt, Human
uggguacaucaaaaauacacaa

SEQ ID NO: 146772 - RNA, 23 nt, Human
ugguuuugcguuagaauagauuu

SEQ ID NO: 146773 - RNA, 21 nt, Human
uguuuuuuaagaaauaagaaa

SEQ ID NO: 146774 - RNA, 26 nt, Human
uucugagccuccccuuugccuugggu

SEQ ID NO: 146775 - RNA, 21 nt, Human
aaaaaagaaaaaaguggaaaa

SEQ ID NO: 146776 - RNA, 26 nt, Human
aaaacaaaacaaaacaaaaaugguac

SEQ ID NO: 146777 - RNA, 19 nt, Human
aaacaaaacaaaacaaaaa

SEQ ID NO: 146778 - RNA, 22 nt, Human
aaaggagggguucugaggggcc

SEQ ID NO: 146779 - RNA, 21 nt, Human
aacaugcagacauauaaaaaa

SEQ ID NO: 146780 - RNA, 19 nt, Human
aagaaauaaaaacauccac

SEQ ID NO: 146781 - RNA, 22 nt, Human
aaggagugggagggcagggggc

SEQ ID NO: 146782 - RNA, 25 nt, Human
aaggcgccuccagcccuggccccug

SEQ ID NO: 146783 - RNA, 20 nt, Human
aaugguacuucuuuuucuua

SEQ ID NO: 146784 - RNA, 22 nt, Human
acaaaacaaaacaaaaauggua

SEQ ID NO: 146785 - RNA, 18 nt, Human
acaaagggcaaaagcaga

SEQ ID NO: 146786 - RNA, 23 nt, Human
acacacacacacucacacacaca

SEQ ID NO: 146787 - RNA, 21 nt, Human
accaaaaaucaaaacaaaaca

SEQ ID NO: 146788 - RNA, 24 nt, Human
accaccaaaaaucaaaacaaaaca

SEQ ID NO: 146789 - RNA, 18 nt, Human
acgcaggcgcgcgugcgu

SEQ ID NO: 146790 - RNA, 25 nt, Human
acucacacacacacauacacacaca

SEQ ID NO: 146791 - RNA, 24 nt, Human
acugcccugaggccuaagagggaa

SEQ ID NO: 146792 - RNA, 26 nt, Human
acugcccugaggccuaagagggaagc

SEQ ID NO: 146793 - RNA, 23 nt, Human
agaacaguuuuauuaaaacaaag

SEQ ID NO: 146794 - RNA, 22 nt, Human
agcuguggcagagagcaaccuu

SEQ ID NO: 146795 - RNA, 20 nt, Human
aggagaggggaucuucucuu

SEQ ID NO: 146796 - RNA, 25 nt, Human
aggagaggggaucuucucuuuuuug

SEQ ID NO: 146797 - RNA, 23 nt, Human
aggcacuggaggggaaaaguggg

SEQ ID NO: 146798 - RNA, 20 nt, Human
aggcaggcucagcgauggcu

SEQ ID NO: 146799 - RNA, 24 nt, Human
aggcugggucgugggggggguggg

SEQ ID NO: 146800 - RNA, 25 nt, Human
agggaagggaugggccaggagaggg

SEQ ID NO: 146801 - RNA, 21 nt, Human
aggggggagggaagaagggaa

SEQ ID NO: 146802 - RNA, 21 nt, Human
aggguuggaugggcuccgccu

SEQ ID NO: 146803 - RNA, 19 nt, Human
aggugagguagggugggga

SEQ ID NO: 146804 - RNA, 21 nt, Human
aguacauucagucaagaccau

SEQ ID NO: 146805 - RNA, 20 nt, Human
aguggcugguugaagccugc

SEQ ID NO: 146806 - RNA, 25 nt, Human
auacaaaagucuuucaaaaaauauc

SEQ ID NO: 146807 - RNA, 23 nt, Human
auauguguauauauguacacuca

SEQ ID NO: 146808 - RNA, 21 nt, Human
aucauuccccauagguuuucc

SEQ ID NO: 146809 - RNA, 24 nt, Human
auccacacacauaacacacguaug

SEQ ID NO: 146810 - RNA, 20 nt, Human
auggaagaccaccuccucca

SEQ ID NO: 146811 - RNA, 21 nt, Human
caaaacaaaacaaaacaaaaa

SEQ ID NO: 146812 - RNA, 24 nt, Human
caaaacaaaacaaaacaaaaaugg

SEQ ID NO: 146813 - RNA, 19 nt, Human
caaaagcagagccagcuuc

SEQ ID NO: 146814 - RNA, 24 nt, Human
caaaagucuuucaaaaaauaucau

SEQ ID NO: 146815 - RNA, 18 nt, Human
caaacccgaagcggcggc

SEQ ID NO: 146816 - RNA, 20 nt, Human
caaagcgggcuagacgccaa

SEQ ID NO: 146817 - RNA, 19 nt, Human
caagaaauaaaaacaucca

SEQ ID NO: 146818 - RNA, 20 nt, Human
caaguaccuggaaauucaca

SEQ ID NO: 146819 - RNA, 24 nt, Human
cacacacacacucacacacacaca

SEQ ID NO: 146820 - RNA, 25 nt, Human
cacacacacucacacacacacauac

SEQ ID NO: 146821 - RNA, 21 nt, Human
cacacacauaacacacguaug

SEQ ID NO: 146822 - RNA, 25 nt, Human
caccaaaaaucaaaacaaaacaaaa

SEQ ID NO: 146823 - RNA, 28 nt, Human
caccaaaaaucaaaacaaaacaaaacaa

SEQ ID NO: 146824 - RNA, 26 nt, Human
caccaccaaaaaucaaaacaaaacaa

SEQ ID NO: 146825 - RNA, 24 nt, Human
cacgcaggcgcgcgugcgugcggc

SEQ ID NO: 146826 - RNA, 19 nt, Human
cagagccagcuuccccaug

SEQ ID NO: 146827 - RNA, 22 nt, Human
cagcaaacacaauauauuuacu

SEQ ID NO: 146828 - RNA, 21 nt, Human
cagccacgugcggacccccag

SEQ ID NO: 146829 - RNA, 18 nt, Human
cagccgggaggcacugga

SEQ ID NO: 146830 - RNA, 21 nt, Human
cagcucaagagucuuaaacac

SEQ ID NO: 146831 - RNA, 22 nt, Human
cagucaagaccaugcugcaagc

SEQ ID NO: 146832 - RNA, 21 nt, Human
cauaaagugacuuuaaaaaca

SEQ ID NO: 146833 - RNA, 20 nt, Human
cauucuguaaacuccagacc

SEQ ID NO: 146834 - RNA, 20 nt, Human
cauuucaauauuucgguuuu

SEQ ID NO: 146835 - RNA, 18 nt, Human
cauuuucuuuuguugcuu

SEQ ID NO: 146836 - RNA, 24 nt, Human
ccaccaaaaaucaaaacaaaacaa

SEQ ID NO: 146837 - RNA, 22 nt, Human
ccaccgccgccaccgccgccgc

SEQ ID NO: 146838 - RNA, 24 nt, Human
ccaccgccgccaccgccgccgcuc

SEQ ID NO: 146839 - RNA, 26 nt, Human
cccacagaucaaacugcccugaggcc

SEQ ID NO: 146840 - RNA, 21 nt, Human
ccccccuuuccacuagagucc

SEQ ID NO: 146841 - RNA, 21 nt, Human
ccccccuuuccacuagagucc

SEQ ID NO: 146842 - RNA, 20 nt, Human
ccgccgccaccgccgccacc

SEQ ID NO: 146843 - RNA, 24 nt, Human
ccgccgccaccgccgccaccgccg

SEQ ID NO: 146844 - RNA, 20 nt, Human
ccgccgccaccgccgccgcu

SEQ ID NO: 146845 - RNA, 22 nt, Human
ccgccgccaccgccgccgcucg

SEQ ID NO: 146846 - RNA, 26 nt, Human
ccgccgccaccgccgccgcucgcucc

SEQ ID NO: 146847 - RNA, 23 nt, Human
ccgccgccgccaccgccgccacc

SEQ ID NO: 146848 - RNA, 18 nt, Human
ccgccgccgccgccaccg

SEQ ID NO: 146849 - RNA, 18 nt, Human
ccgcgaggggaaggcgcc

SEQ ID NO: 146850 - RNA, 22 nt, Human
ccgcgucggcggcauccgaggc

SEQ ID NO: 146851 - RNA, 22 nt, Human
ccuccagccacgugcggacccc

SEQ ID NO: 146852 - RNA, 27 nt, Human
ccuccguggcuggcuuucccgcugcuu

SEQ ID NO: 146853 - RNA, 21 nt, Human
ccuggaucaaggcgauccgaa

SEQ ID NO: 146854 - RNA, 21 nt, Human
ccuggccccugaccgcuggcc

SEQ ID NO: 146855 - RNA, 21 nt, Human
ccuuacccccucccccucucg

SEQ ID NO: 146856 - RNA, 22 nt, Human
cgaacugaacaaagcgggcuag

SEQ ID NO: 146857 - RNA, 22 nt, Human
cgaggcauuucucuaagaaaca

SEQ ID NO: 146858 - RNA, 23 nt, Human
cgagguggggaagaguuuggggu

SEQ ID NO: 146859 - RNA, 21 nt, Human
cgcucagaaaaggagggguuc

SEQ ID NO: 146860 - RNA, 23 nt, Human
cgugaaagguugggaaccggggg

SEQ ID NO: 146861 - RNA, 21 nt, Human
cucacacacacacauacacac

SEQ ID NO: 146862 - RNA, 21 nt, Human
cuccagcccuggccccugacc

SEQ ID NO: 146863 - RNA, 21 nt, Human
cucugcaaagaaagauuuuac

SEQ ID NO: 146864 - RNA, 18 nt, Human
cuggaucaaggcgauccg

SEQ ID NO: 146865 - RNA, 18 nt, Human
gaaaaguggggaucuggg

SEQ ID NO: 146866 - RNA, 18 nt, Human
gaaaaguggggaucuggg

SEQ ID NO: 146867 - RNA, 22 nt, Human
gaaccgggggcaucgaagggga

SEQ ID NO: 146868 - RNA, 18 nt, Human
gaagaagggaagggaugg

SEQ ID NO: 146869 - RNA, 20 nt, Human
gagggaagaagggaagggau

SEQ ID NO: 146870 - RNA, 21 nt, Human
gagggccccaggggguaaucc

SEQ ID NO: 146871 - RNA, 22 nt, Human
gagguggggaagaguuuggggu

SEQ ID NO: 146872 - RNA, 19 nt, Human
gcaaacucaggaacauaga

SEQ ID NO: 146873 - RNA, 25 nt, Human
gcagagagcaaccuucccuauuacu

SEQ ID NO: 146874 - RNA, 18 nt, Human
gcagcagcaccgcgucgg

SEQ ID NO: 146875 - RNA, 22 nt, Human
gcaugugcaucuuuauacacau

SEQ ID NO: 146876 - RNA, 22 nt, Human
gccgccgccgccgccaccgccg

SEQ ID NO: 146877 - RNA, 18 nt, Human
gcgcggccccuacgccuc

SEQ ID NO: 146878 - RNA, 18 nt, Human
ggaaaggagacaccucau

SEQ ID NO: 146879 - RNA, 22 nt, Human
ggaaauucacaacccccugcuc

SEQ ID NO: 146880 - RNA, 22 nt, Human
ggaagggaugggccaggagagg

SEQ ID NO: 146881 - RNA, 19 nt, Human
ggaggggggagggaagaag

SEQ ID NO: 146882 - RNA, 22 nt, Human
ggagggguucugaggggccaaa

SEQ ID NO: 146883 - RNA, 20 nt, Human
ggcgggagagggccccaggg

SEQ ID NO: 146884 - RNA, 18 nt, Human
gggaccgcgaggggaagg

SEQ ID NO: 146885 - RNA, 20 nt, Human
gggcagggggcaaacucagg

SEQ ID NO: 146886 - RNA, 24 nt, Human
gggcgggagagggccccagggggu

SEQ ID NO: 146887 - RNA, 21 nt, Human
ggggaccgcgaggggaaggcg

SEQ ID NO: 146888 - RNA, 18 nt, Human
ggggagaaggggaaggag

SEQ ID NO: 146889 - RNA, 22 nt, Human
ggggaggggggagggaagaagg

SEQ ID NO: 146890 - RNA, 22 nt, Human
gggggaccgcgaggggaaggcg

SEQ ID NO: 146891 - RNA, 18 nt, Human
gggggcgggagagggccc

SEQ ID NO: 146892 - RNA, 20 nt, Human
ggggggagggaagaagggaa

SEQ ID NO: 146893 - RNA, 23 nt, Human
ggggguauagagggagacguggg

SEQ ID NO: 146894 - RNA, 20 nt, Human
ggguauggaaaggagacacc

SEQ ID NO: 146895 - RNA, 21 nt, Human
gguaggguggggagaagguga

SEQ ID NO: 146896 - RNA, 20 nt, Human
ggugcgcuccuuacccccuc

SEQ ID NO: 146897 - RNA, 19 nt, Human
guggugcaggggaaaagca

SEQ ID NO: 146898 - RNA, 21 nt, Human
guguauauguguauauaugaa

SEQ ID NO: 146899 - RNA, 24 nt, Human
guucggggggaggggggagggaag

SEQ ID NO: 146900 - RNA, 19 nt, Human
uaaacacacacgcuugcgc

SEQ ID NO: 146901 - RNA, 22 nt, Human
uacacacacacgcgagcacgca

SEQ ID NO: 146902 - RNA, 25 nt, Human
uacacacgcacaccauauacuuaua

SEQ ID NO: 146903 - RNA, 27 nt, Human
uacacauacauacacacgcacaccaua

SEQ ID NO: 146904 - RNA, 22 nt, Human
uagcacaaccuuuuggcaacaa

SEQ ID NO: 146905 - RNA, 22 nt, Human
uauauguacacucacauguaua

SEQ ID NO: 146906 - RNA, 19 nt, Human
uauauguguauauauguac

SEQ ID NO: 146907 - RNA, 20 nt, Human
uauauguguauauauguaca

SEQ ID NO: 146908 - RNA, 19 nt, Human
uauguacacucacauguau

SEQ ID NO: 146909 - RNA, 21 nt, Human
uauguacacucacauguauau

SEQ ID NO: 146910 - RNA, 19 nt, Human
uauguauauguacgcaugu

SEQ ID NO: 146911 - RNA, 21 nt, Human
uauguuauguauauguacgca

SEQ ID NO: 146912 - RNA, 21 nt, Human
ucagucccuugcagguccuug

SEQ ID NO: 146913 - RNA, 22 nt, Human
uccaagaaauaaaaacauccac

SEQ ID NO: 146914 - RNA, 25 nt, Human
uccaagaaauaaaaacauccacaaa

SEQ ID NO: 146915 - RNA, 20 nt, Human
uccacacacauaacacacgg

SEQ ID NO: 146916 - RNA, 22 nt, Human
uccacacacauaacacacguau

SEQ ID NO: 146917 - RNA, 22 nt, Human
uccaccaccaaaaaucaaaaca

SEQ ID NO: 146918 - RNA, 22 nt, Human
uccaggcaagcggcauccgaga

SEQ ID NO: 146919 - RNA, 22 nt, Human
ucccgagcugccgccgccgccg

SEQ ID NO: 146920 - RNA, 18 nt, Human
uccgcccccacgccuugg

SEQ ID NO: 146921 - RNA, 21 nt, Human
uccguggugcaggggaaaagc

SEQ ID NO: 146922 - RNA, 19 nt, Human
ucuccuucuacaaaaaguc

SEQ ID NO: 146923 - RNA, 18 nt, Human
ucucuaagaaacaugauu

SEQ ID NO: 146924 - RNA, 18 nt, Human
ucucucuccuucuacaaa

SEQ ID NO: 146925 - RNA, 18 nt, Human
ucucugggcaacuuacug

SEQ ID NO: 146926 - RNA, 19 nt, Human
ucucugggcaacuuacuga

SEQ ID NO: 146927 - RNA, 18 nt, Human
ucuucuucucucuccuuc

SEQ ID NO: 146928 - RNA, 18 nt, Human
ucuugggugccucagcug

SEQ ID NO: 146929 - RNA, 22 nt, Human
ucuugggugccucagcuggugc

SEQ ID NO: 146930 - RNA, 21 nt, Human
ucuuugaggaaauuuuggaca

SEQ ID NO: 146931 - RNA, 18 nt, Human
ugaaagagaugggagaag

SEQ ID NO: 146932 - RNA, 18 nt, Human
ugacaaagggcaaaagca

SEQ ID NO: 146933 - RNA, 18 nt, Human
ugacaugcauauaccaga

SEQ ID NO: 146934 - RNA, 19 nt, Human
ugagacuggguauggaaag

SEQ ID NO: 146935 - RNA, 20 nt, Human
ugaggaaauuuuggacagag

SEQ ID NO: 146936 - RNA, 22 nt, Human
ugagguguuugggucgggcgag

SEQ ID NO: 146937 - RNA, 23 nt, Human
ugcaaagaaagauuuuacccuuc

SEQ ID NO: 146938 - RNA, 24 nt, Human
ugcagugacaugcauauaccagaa

SEQ ID NO: 146939 - RNA, 24 nt, Human
ugccucagcuggugcgguaugagg

SEQ ID NO: 146940 - RNA, 24 nt, Human
ugcugcaagcuguggcagagagca

SEQ ID NO: 146941 - RNA, 19 nt, Human
uggaaaggagacaccucau

SEQ ID NO: 146942 - RNA, 18 nt, Human
uggaaauucacaaccccc

SEQ ID NO: 146943 - RNA, 18 nt, Human
uggaggggaaaagugggg

SEQ ID NO: 146944 - RNA, 18 nt, Human
ugggaaaagauuuugaaa

SEQ ID NO: 146945 - RNA, 26 nt, Human
ugggagaagguuuagaggggagaagg

SEQ ID NO: 146946 - RNA, 26 nt, Human
ugggggaaacaaugagguguuugggu

SEQ ID NO: 146947 - RNA, 18 nt, Human
ugguacaacauuacacca

SEQ ID NO: 146948 - RNA, 20 nt, Human
uggugcgguaugaggcuggg

SEQ ID NO: 146949 - RNA, 25 nt, Human
uguaauugagagaagaccggggucc

SEQ ID NO: 146950 - RNA, 21 nt, Human
uguauacacacauauccauac

SEQ ID NO: 146951 - RNA, 21 nt, Human
uguauauguguauacacacau

SEQ ID NO: 146952 - RNA, 19 nt, Human
uguauauguguauauaugu

SEQ ID NO: 146953 - RNA, 22 nt, Human
ugugcaucuauauccacacaca

SEQ ID NO: 146954 - RNA, 29 nt, Human
ugugcaucuauauccacacacauaacaca

SEQ ID NO: 146955 - RNA, 23 nt, Human
uguguauauauguacacucacau

SEQ ID NO: 146956 - RNA, 26 nt, Human
uguguauauauguacacucacaugua

SEQ ID NO: 146957 - RNA, 24 nt, Human
uguguauauguguauacacacaua

SEQ ID NO: 146958 - RNA, 18 nt, Human
uguguauauguguauaua

SEQ ID NO: 146959 - RNA, 18 nt, Human
uguguauauguguauaua

SEQ ID NO: 146960 - RNA, 22 nt, Human
uguguauauguguauauaugua

SEQ ID NO: 146961 - RNA, 18 nt, Human
uguguauguuauguauau

SEQ ID NO: 146962 - RNA, 20 nt, Human
uguguguauguuauguauau

SEQ ID NO: 146963 - RNA, 24 nt, Human
uuaaaaacagacauucuguaaacu

SEQ ID NO: 146964 - RNA, 25 nt, Human
uuaaaaacagacauucuguaaacuc

SEQ ID NO: 146965 - RNA, 18 nt, Human
uuagaggggagaagggga

SEQ ID NO: 146966 - RNA, 23 nt, Human
uuagaggggagaaggggaaggag

SEQ ID NO: 146967 - RNA, 22 nt, Human
uuaguauuauuuauccaccacc

SEQ ID NO: 146968 - RNA, 20 nt, Human
uucacaacccccugcucuuc

SEQ ID NO: 146969 - RNA, 20 nt, Human
uucacauaaguuagagugca

SEQ ID NO: 146970 - RNA, 20 nt, Human
uucagagcggauggaagacc

SEQ ID NO: 146971 - RNA, 23 nt, Human
uucucuuuuuuggggggcgggag

SEQ ID NO: 146972 - RNA, 21 nt, Human
uugcuaggaauacauauugug

SEQ ID NO: 146973 - RNA, 21 nt, Human
uuggugaugacaaagggcaaa

SEQ ID NO: 146974 - RNA, 21 nt, Human
uuuagaggggagaaggggaag

SEQ ID NO: 146975 - RNA, 22 nt, Human
uuuauacaaaagucuuucaaaa

SEQ ID NO: 146976 - RNA, 18 nt, Human
uuucagagcggauggaag

SEQ ID NO: 146977 - RNA, 19 nt, Human
aaaaaacccaaagcaaaac

SEQ ID NO: 146978 - RNA, 20 nt, Human
aaaaaacccaaagcaaaacg

SEQ ID NO: 146979 - RNA, 20 nt, Human
aacaacaaaaggaaaaaaaa

SEQ ID NO: 146980 - RNA, 24 nt, Human
aagaagagcggggaggggaacggc

SEQ ID NO: 146981 - RNA, 25 nt, Human
acaacaaaaggaaaaaaaacccaaa

SEQ ID NO: 146982 - RNA, 25 nt, Human
acaacaacaaaaggaaaaaaaaccc

SEQ ID NO: 146983 - RNA, 21 nt, Human
agagcggggaggggaacggcc

SEQ ID NO: 146984 - RNA, 26 nt, Human
aggaaaaaaaacccaaagcaaaacgu

SEQ ID NO: 146985 - RNA, 23 nt, Human
caaaaggaaaaaaaacccaaagc

SEQ ID NO: 146986 - RNA, 21 nt, Human
caacccauaaacccaucucuu

SEQ ID NO: 146987 - RNA, 24 nt, Human
caccucugggaaaggagucgggga

SEQ ID NO: 146988 - RNA, 21 nt, Human
cacuggguggucucagaagac

SEQ ID NO: 146989 - RNA, 21 nt, Human
ccaaagcaaaacguuacaucc

SEQ ID NO: 146990 - RNA, 19 nt, Human
cccgcagcgcacagaccua

SEQ ID NO: 146991 - RNA, 22 nt, Human
cgaacggcggcgccccaaccca

SEQ ID NO: 146992 - RNA, 19 nt, Human
cgccccaacccauaaaccc

SEQ ID NO: 146993 - RNA, 21 nt, Human
cgccccaacccauaaacccau

SEQ ID NO: 146994 - RNA, 25 nt, Human
cgccgaacggcggcgccccaacccu

SEQ ID NO: 146995 - RNA, 23 nt, Human
cgccuggaccgcgggaacugucc

SEQ ID NO: 146996 - RNA, 21 nt, Human
cgccuuggccugccccagccu

SEQ ID NO: 146997 - RNA, 22 nt, Human
cgugugcggcgggcgcuucaag

SEQ ID NO: 146998 - RNA, 19 nt, Human
cucgugcgcgccgaacggc

SEQ ID NO: 146999 - RNA, 18 nt, Human
cuggaagcgggacggagg

SEQ ID NO: 147000 - RNA, 19 nt, Human
cuggcgguagggguucccc

SEQ ID NO: 147001 - RNA, 18 nt, Human
gaagcgggacggaggccg

SEQ ID NO: 147002 - RNA, 24 nt, Human
gcaaaaauaaacaguuuugucaac

SEQ ID NO: 147003 - RNA, 21 nt, Human
gccccgggcuccuggcuucgg

SEQ ID NO: 147004 - RNA, 20 nt, Human
gcccggggccucgcccgcug

SEQ ID NO: 147005 - RNA, 18 nt, Human
gccuuggccugccccagc

SEQ ID NO: 147006 - RNA, 25 nt, Human
gcgugcgaggaggaggaggacgacc

SEQ ID NO: 147007 - RNA, 23 nt, Human
gcuccuggcuucgggcacucacc

SEQ ID NO: 147008 - RNA, 18 nt, Human
ggaguuggaagaagagcg

SEQ ID NO: 147009 - RNA, 22 nt, Human
gggcuccuggcuucgggcacuc

SEQ ID NO: 147010 - RNA, 20 nt, Human
ggggaggcuggcgguagggg

SEQ ID NO: 147011 - RNA, 27 nt, Human
uacaaaaauuaacaacaacaaaaggaa

SEQ ID NO: 147012 - RNA, 24 nt, Human
uacaaaagacugucuugaauccca

SEQ ID NO: 147013 - RNA, 20 nt, Human
uaggcgccccgggcuccugg

SEQ ID NO: 147014 - RNA, 20 nt, Human
ucacuggguggucucagaag

SEQ ID NO: 147015 - RNA, 22 nt, Human
ucccccaaagcgcggcugacaa

SEQ ID NO: 147016 - RNA, 20 nt, Human
ugaauagggcgugugcggcg

SEQ ID NO: 147017 - RNA, 19 nt, Human
ugggaaaggagucggggag

SEQ ID NO: 147018 - RNA, 21 nt, Human
ugggaaaggagucggggagcc

SEQ ID NO: 147019 - RNA, 21 nt, Human
uggggguuauagaggaaggcg

SEQ ID NO: 147020 - RNA, 18 nt, Human
acagcccggacaguggcc

SEQ ID NO: 147021 - RNA, 20 nt, Human
accuggugcuccaccugccu

SEQ ID NO: 147022 - RNA, 24 nt, Human
acuccgagcagcgcuggggagaag

SEQ ID NO: 147023 - RNA, 25 nt, Human
aggcggggccggccggggcagggaa

SEQ ID NO: 147024 - RNA, 19 nt, Human
caccuaauacuguauggag

SEQ ID NO: 147025 - RNA, 18 nt, Human
cagacuccgagcagcgcu

SEQ ID NO: 147026 - RNA, 19 nt, Human
cagcccgucgaagcgcccu

SEQ ID NO: 147027 - RNA, 22 nt, Human
ccacugcaacuucaacagugac

SEQ ID NO: 147028 - RNA, 18 nt, Human
ccagcccgucgaagcgcc

SEQ ID NO: 147029 - RNA, 24 nt, Human
ccugcaaacgcgcccgggcccugg

SEQ ID NO: 147030 - RNA, 23 nt, Human
cgcgcccgggcccuggaggcugg

SEQ ID NO: 147031 - RNA, 18 nt, Human
cggcugagagcggggcga

SEQ ID NO: 147032 - RNA, 23 nt, Human
cggggcuggcugcugcggggcaa

SEQ ID NO: 147033 - RNA, 20 nt, Human
cucccugagacccccgcggg

SEQ ID NO: 147034 - RNA, 18 nt, Human
cugcgcaggcgcacagcc

SEQ ID NO: 147035 - RNA, 22 nt, Human
cuggugggaagcccagcugugu

SEQ ID NO: 147036 - RNA, 23 nt, Human
gaacaagccacugcaacuucaac

SEQ ID NO: 147037 - RNA, 19 nt, Human
gagaaagucuucacuucuc

SEQ ID NO: 147038 - RNA, 19 nt, Human
gagcggggcgagggugcgg

SEQ ID NO: 147039 - RNA, 19 nt, Human
gccgcggcgggggcagggc

SEQ ID NO: 147040 - RNA, 24 nt, Human
ggacagcgcccgcauccauccuca

SEQ ID NO: 147041 - RNA, 20 nt, Human
ggcgagggugcggagccgag

SEQ ID NO: 147042 - RNA, 21 nt, Human
gggaaagccuggugggaagcc

SEQ ID NO: 147043 - RNA, 19 nt, Human
uaccuggugcuccaccugc

SEQ ID NO: 147044 - RNA, 21 nt, Human
uaccuggugcuccaccugccu

SEQ ID NO: 147045 - RNA, 24 nt, Human
uaccuggugcuccaccugccuugg

SEQ ID NO: 147046 - RNA, 24 nt, Human
ucccacaggugugaacaagccacu

SEQ ID NO: 147047 - RNA, 19 nt, Human
ugcaaggagaaagucuuca

SEQ ID NO: 147048 - RNA, 20 nt, Human
ugcaaggagaaagucuucac

SEQ ID NO: 147049 - RNA, 20 nt, Human
ugccuuggugccaucacagc

SEQ ID NO: 147050 - RNA, 22 nt, Human
uuuaaugcaaggagaaagucuu

SEQ ID NO: 147051 - RNA, 18 nt, Human
aaaauuagcugggcgugg

SEQ ID NO: 147052 - RNA, 19 nt, Human
aacauggugaaaccccguc

SEQ ID NO: 147053 - RNA, 20 nt, Human
aacauggugaaaccccgucu

SEQ ID NO: 147054 - RNA, 21 nt, Human
aacauggugaaaccccgucuc

SEQ ID NO: 147055 - RNA, 19 nt, Human
aagaacccccucccccgcc

SEQ ID NO: 147056 - RNA, 19 nt, Human
aagaaggaaggaaggaaag

SEQ ID NO: 147057 - RNA, 19 nt, Human
aagaaggaaggaaggaaag

SEQ ID NO: 147058 - RNA, 22 nt, Human
aagccgggcacgguggcucaug

SEQ ID NO: 147059 - RNA, 23 nt, Human
aaggaaggaaagaaagaaaugga

SEQ ID NO: 147060 - RNA, 24 nt, Human
aaucacuucaacccaggaggugga

SEQ ID NO: 147061 - RNA, 20 nt, Human
aaugaaugacggauggaugg

SEQ ID NO: 147062 - RNA, 18 nt, Human
acagagcaagauucuauc

SEQ ID NO: 147063 - RNA, 22 nt, Human
accacugcacuccagccugggc

SEQ ID NO: 147064 - RNA, 24 nt, Human
acccaggagguggagguugcagug

SEQ ID NO: 147065 - RNA, 23 nt, Human
accccgucucuacucaaauacaa

SEQ ID NO: 147066 - RNA, 24 nt, Human
acugcacuccagccugggcgacag

SEQ ID NO: 147067 - RNA, 26 nt, Human
acugcacuccagccugggcgacagag

SEQ ID NO: 147068 - RNA, 19 nt, Human
agaaaagaaggaaggaagg

SEQ ID NO: 147069 - RNA, 19 nt, Human
agacccccgguccuuacag

SEQ ID NO: 147070 - RNA, 22 nt, Human
agccaggggaggggcugggggc

SEQ ID NO: 147071 - RNA, 23 nt, Human
agccaggggaggggcugggggcc

SEQ ID NO: 147072 - RNA, 23 nt, Human
agccgggcacgguggcucaugcc

SEQ ID NO: 147073 - RNA, 22 nt, Human
agccuggccaacauggugaaac

SEQ ID NO: 147074 - RNA, 24 nt, Human
agccuggccaacauggugaaaccc

SEQ ID NO: 147075 - RNA, 24 nt, Human
agccugggcgacagagcaagauuc

SEQ ID NO: 147076 - RNA, 23 nt, Human
agcugggcgugguggcgcgugcc

SEQ ID NO: 147077 - RNA, 21 nt, Human
aggaaagaaaagaaggaagga

SEQ ID NO: 147078 - RNA, 20 nt, Human
aggaaagaaagaaaugggua

SEQ ID NO: 147079 - RNA, 18 nt, Human
aggaaggaaggaaagaaa

SEQ ID NO: 147080 - RNA, 21 nt, Human
aggaaggaaggaaauaaaugg

SEQ ID NO: 147081 - RNA, 26 nt, Human
aggaggaagcggagcagaagggaccc

SEQ ID NO: 147082 - RNA, 22 nt, Human
aggcgagcagaucaccugagag

SEQ ID NO: 147083 - RNA, 19 nt, Human
agggaagggguguggacag

SEQ ID NO: 147084 - RNA, 20 nt, Human
agggguguggacagaacugg

SEQ ID NO: 147085 - RNA, 20 nt, Human
agguggagguugcagugagc

SEQ ID NO: 147086 - RNA, 24 nt, Human
agguggagguugcagugagcugag

SEQ ID NO: 147087 - RNA, 19 nt, Human
aucccagcgagcauccugg

SEQ ID NO: 147088 - RNA, 20 nt, Human
auccuuuuuaaagaaaugga

SEQ ID NO: 147089 - RNA, 24 nt, Human
aucucaccacugcacuccagccug

SEQ ID NO: 147090 - RNA, 19 nt, Human
augccuguaaucccaucac

SEQ ID NO: 147091 - RNA, 19 nt, Human
caaaaaagaaagaaagaaa

SEQ ID NO: 147092 - RNA, 19 nt, Human
caaaaaagaaggaaggaag

SEQ ID NO: 147093 - RNA, 20 nt, Human
caaaaacaaaaaagaaggaa

SEQ ID NO: 147094 - RNA, 20 nt, Human
caaaaacaaaaaagaaggaa

SEQ ID NO: 147095 - RNA, 24 nt, Human
caacauggugaaaccccgucucua

SEQ ID NO: 147096 - RNA, 23 nt, Human
caagaacccccucccccgcccac

SEQ ID NO: 147097 - RNA, 19 nt, Human
cacaguaucagaggagcag

SEQ ID NO: 147098 - RNA, 26 nt, Human
caccacugcacuccagccugggcgac

SEQ ID NO: 147099 - RNA, 19 nt, Human
cacugcacuccagccuggg

SEQ ID NO: 147100 - RNA, 21 nt, Human
cacugcacuccagccugggcg

SEQ ID NO: 147101 - RNA, 22 nt, Human
cacugcacuccagccugggcga

SEQ ID NO: 147102 - RNA, 23 nt, Human
cacugcacuccagccugggcgac

SEQ ID NO: 147103 - RNA, 24 nt, Human
cacugcacuccagccugggcgaca

SEQ ID NO: 147104 - RNA, 27 nt, Human
cacugcacuccagccugggcgacagag

SEQ ID NO: 147105 - RNA, 24 nt, Human
cagaagggggucuguuuaucugcu

SEQ ID NO: 147106 - RNA, 20 nt, Human
cagaauugggggcuuucccc

SEQ ID NO: 147107 - RNA, 24 nt, Human
cagaucaccugagaugcggaguuc

SEQ ID NO: 147108 - RNA, 21 nt, Human
cagcagggccaugggaggggg

SEQ ID NO: 147109 - RNA, 23 nt, Human
cagccaggggaggggcugggggc

SEQ ID NO: 147110 - RNA, 18 nt, Human
cagccgacuggagcuggg

SEQ ID NO: 147111 - RNA, 18 nt, Human
caggacaggaaagggaag

SEQ ID NO: 147112 - RNA, 24 nt, Human
caggaggcugaggcacgagaauca

SEQ ID NO: 147113 - RNA, 29 nt, Human
caggagguggagguugcagugacaacggu

SEQ ID NO: 147114 - RNA, 24 nt, Human
caggagguggagguugcagugagc

SEQ ID NO: 147115 - RNA, 20 nt, Human
caggcugggagagggugggg

SEQ ID NO: 147116 - RNA, 20 nt, Human
cagugccuagaacagggcug

SEQ ID NO: 147117 - RNA, 23 nt, Human
caucacuuugggaggccgaggcg

SEQ ID NO: 147118 - RNA, 20 nt, Human
caugccuguaaucccaucac

SEQ ID NO: 147119 - RNA, 24 nt, Human
caugccuguaaucccaucacuuug

SEQ ID NO: 147120 - RNA, 19 nt, Human
cauuucagccacagggcug

SEQ ID NO: 147121 - RNA, 19 nt, Human
ccacagacacgugggugga

SEQ ID NO: 147122 - RNA, 20 nt, Human
ccacugcacuccagccuggg

SEQ ID NO: 147123 - RNA, 20 nt, Human
ccacugcacuccagccuggg

SEQ ID NO: 147124 - RNA, 21 nt, Human
ccacugcacuccagccugggc

SEQ ID NO: 147125 - RNA, 21 nt, Human
ccacugcacuccagccugggc

SEQ ID NO: 147126 - RNA, 23 nt, Human
ccacugcacuccagccugggcga

SEQ ID NO: 147127 - RNA, 24 nt, Human
ccacugcacuccagccugggcgac

SEQ ID NO: 147128 - RNA, 19 nt, Human
ccaggggaggggcuggggg

SEQ ID NO: 147129 - RNA, 21 nt, Human
cccaggagguggagguugcag

SEQ ID NO: 147130 - RNA, 18 nt, Human
ccccauggucccgagacc

SEQ ID NO: 147131 - RNA, 19 nt, Human
cccgcccacgacaucccug

SEQ ID NO: 147132 - RNA, 22 nt, Human
cccgcccacgacaucccugaaa

SEQ ID NO: 147133 - RNA, 22 nt, Human
cccugaaaaggagacuaaaaua

SEQ ID NO: 147134 - RNA, 20 nt, Human
ccucugagccccccaugguc

SEQ ID NO: 147135 - RNA, 21 nt, Human
ccugcagucccagcuacucag

SEQ ID NO: 147136 - RNA, 22 nt, Human
ccugcagucccagcuacuccuc

SEQ ID NO: 147137 - RNA, 23 nt, Human
ccuggccaacauggugaaacccc

SEQ ID NO: 147138 - RNA, 24 nt, Human
ccuggccaacauggugaaaccccg

SEQ ID NO: 147139 - RNA, 22 nt, Human
ccugggcgacagagcaagauuc

SEQ ID NO: 147140 - RNA, 24 nt, Human
cgagaccagccuggccaacauggu

SEQ ID NO: 147141 - RNA, 24 nt, Human
cgagcagaucaccugagaugcgga

SEQ ID NO: 147142 - RNA, 20 nt, Human
cgaggcgagcagaucaccug

SEQ ID NO: 147143 - RNA, 21 nt, Human
cggccugugcucgcggucccg

SEQ ID NO: 147144 - RNA, 25 nt, Human
cuaaaauaaagccccggggccuuuc

SEQ ID NO: 147145 - RNA, 24 nt, Human
cucaugccuguaaucccaucacuu

SEQ ID NO: 147146 - RNA, 20 nt, Human
cuccauguauuuugcucuuc

SEQ ID NO: 147147 - RNA, 20 nt, Human
cucccccgcccacgacaucc

SEQ ID NO: 147148 - RNA, 22 nt, Human
cuccccucugagccccccaugg

SEQ ID NO: 147149 - RNA, 22 nt, Human
cucuaugguaaugcccagugcc

SEQ ID NO: 147150 - RNA, 19 nt, Human
cucuuccccaucuuuucca

SEQ ID NO: 147151 - RNA, 23 nt, Human
cuggcugggcaggaggaagcgga

SEQ ID NO: 147152 - RNA, 19 nt, Human
cugggcacauaguaggugc

SEQ ID NO: 147153 - RNA, 20 nt, Human
cuguguaggugcccucuccu

SEQ ID NO: 147154 - RNA, 22 nt, Human
gaaauaucuccaagggggcacu

SEQ ID NO: 147155 - RNA, 25 nt, Human
gaacagggcugggcacauaguaggu

SEQ ID NO: 147156 - RNA, 22 nt, Human
gaacccccucccccgcccacga

SEQ ID NO: 147157 - RNA, 23 nt, Human
gaaggaaagaaaagaaggaaggg

SEQ ID NO: 147158 - RNA, 19 nt, Human
gaaggaaagaaagaaaugg

SEQ ID NO: 147159 - RNA, 22 nt, Human
gagcagaucaccugagaugcgg

SEQ ID NO: 147160 - RNA, 20 nt, Human
gagcaggcugggcaguucca

SEQ ID NO: 147161 - RNA, 18 nt, Human
gaggggcccaucugagga

SEQ ID NO: 147162 - RNA, 19 nt, Human
gaggggcugggggcccugc

SEQ ID NO: 147163 - RNA, 20 nt, Human
gaggggcugggggcccugcc

SEQ ID NO: 147164 - RNA, 22 nt, Human
gagguugcagugagcugagauc

SEQ ID NO: 147165 - RNA, 24 nt, Human
gaucaccugagaugcggaguucga

SEQ ID NO: 147166 - RNA, 26 nt, Human
gcaaaaacaaaaaagaaggaaggaag

SEQ ID NO: 147167 - RNA, 24 nt, Human
gcacuccagccugggcgacagagc

SEQ ID NO: 147168 - RNA, 24 nt, Human
gccaacauggugaaaccccgucuc

SEQ ID NO: 147169 - RNA, 20 nt, Human
gcggagcagaagggggucug

SEQ ID NO: 147170 - RNA, 20 nt, Human
gcuuuccccgagcaagggaa

SEQ ID NO: 147171 - RNA, 22 nt, Human
ggaaagaaaagaaggaaggaag

SEQ ID NO: 147172 - RNA, 18 nt, Human
ggaaagggaaggggugug

SEQ ID NO: 147173 - RNA, 19 nt, Human
ggaaagggaaggggugugg

SEQ ID NO: 147174 - RNA, 24 nt, Human
ggaagcggagcagaagggggucug

SEQ ID NO: 147175 - RNA, 23 nt, Human
ggaaggggcugcggaggggccca

SEQ ID NO: 147176 - RNA, 22 nt, Human
ggagguugcagugagcugagau

SEQ ID NO: 147177 - RNA, 23 nt, Human
ggagguugcagugagcugagauc

SEQ ID NO: 147178 - RNA, 25 nt, Human
ggagguugcagugagcugagaucuc

SEQ ID NO: 147179 - RNA, 21 nt, Human
ggcaaaaacaaaaaagaagga

SEQ ID NO: 147180 - RNA, 18 nt, Human
ggccgaggcgagcagauc

SEQ ID NO: 147181 - RNA, 20 nt, Human
ggcucaugccuguaauccca

SEQ ID NO: 147182 - RNA, 24 nt, Human
gggcacgguggcucaugccuguaa

SEQ ID NO: 147183 - RNA, 18 nt, Human
gggcaggcugggagaggg

SEQ ID NO: 147184 - RNA, 20 nt, Human
gggcagggagggcaggcagg

SEQ ID NO: 147185 - RNA, 19 nt, Human
ggggccaggagcaggcugg

SEQ ID NO: 147186 - RNA, 21 nt, Human
gggggccaggagcaggcuggg

SEQ ID NO: 147187 - RNA, 21 nt, Human
gggguguggacagaacugggg

SEQ ID NO: 147188 - RNA, 21 nt, Human
ggucccgcgaggauccgaagc

SEQ ID NO: 147189 - RNA, 19 nt, Human
gguggagguugcagugagc

SEQ ID NO: 147190 - RNA, 23 nt, Human
gguggcucaugccuguaauccca

SEQ ID NO: 147191 - RNA, 20 nt, Human
gugaagggcggacagagaag

SEQ ID NO: 147192 - RNA, 19 nt, Human
gugcucaauaaauauuuga

SEQ ID NO: 147193 - RNA, 19 nt, Human
guugcagugagcugagauc

SEQ ID NO: 147194 - RNA, 19 nt, Human
uaaagccccggggccuuuc

SEQ ID NO: 147195 - RNA, 27 nt, Human
uaaguccagauuaccagcuguggggag

SEQ ID NO: 147196 - RNA, 23 nt, Human
uaauauguggugaaggcagcaaa

SEQ ID NO: 147197 - RNA, 20 nt, Human
uagggguggggagagggcug

SEQ ID NO: 147198 - RNA, 22 nt, Human
uaucaaaaaagaaagaaagaaa

SEQ ID NO: 147199 - RNA, 24 nt, Human
uauuuugcucuuccccaucuuuuc

SEQ ID NO: 147200 - RNA, 19 nt, Human
ucacgggguucacggagag

SEQ ID NO: 147201 - RNA, 20 nt, Human
ucagaggagcaggauggaag

SEQ ID NO: 147202 - RNA, 22 nt, Human
ucaugccuguaaucccaucacu

SEQ ID NO: 147203 - RNA, 24 nt, Human
ucaugccuguaaucccaucacuuu

SEQ ID NO: 147204 - RNA, 24 nt, Human
uccagccugggcgacagagcaaga

SEQ ID NO: 147205 - RNA, 19 nt, Human
uccccucugagccccccau

SEQ ID NO: 147206 - RNA, 23 nt, Human
ucccucccgugguccccucuaaa

SEQ ID NO: 147207 - RNA, 21 nt, Human
uccuuacagcugggcagggag

SEQ ID NO: 147208 - RNA, 23 nt, Human
ucuaucaaaaaagaaagaaagaa

SEQ ID NO: 147209 - RNA, 24 nt, Human
ucucuaugguaaugcccagugccu

SEQ ID NO: 147210 - RNA, 22 nt, Human
ugacggauggauggaugccugc

SEQ ID NO: 147211 - RNA, 24 nt, Human
ugagaucucaccacugcacuccag

SEQ ID NO: 147212 - RNA, 21 nt, Human
ugagccggagcaggggugugc

SEQ ID NO: 147213 - RNA, 23 nt, Human
ugaggagggagacccccgguccu

SEQ ID NO: 147214 - RNA, 19 nt, Human
ugaggcacgagaaucacuu

SEQ ID NO: 147215 - RNA, 24 nt, Human
ugaggcacgagaaucacuucaacc

SEQ ID NO: 147216 - RNA, 19 nt, Human
ugaggguguugccuggcug

SEQ ID NO: 147217 - RNA, 23 nt, Human
ugauggagccgguugaggguguu

SEQ ID NO: 147218 - RNA, 19 nt, Human
ugccuaagugaacgugagg

SEQ ID NO: 147219 - RNA, 19 nt, Human
ugccuaagugaacgugagg

SEQ ID NO: 147220 - RNA, 20 nt, Human
ugccuagaacagggcugggc

SEQ ID NO: 147221 - RNA, 24 nt, Human
ugccugcagucccagcuacucagg

SEQ ID NO: 147222 - RNA, 23 nt, Human
ugccuguaaucccaucacuuugg

SEQ ID NO: 147223 - RNA, 23 nt, Human
ugccuguaaucccaucacuuugg

SEQ ID NO: 147224 - RNA, 24 nt, Human
ugccuguaaucccaucacuuuggg

SEQ ID NO: 147225 - RNA, 22 nt, Human
ugcgugugccagugugugugug

SEQ ID NO: 147226 - RNA, 20 nt, Human
ugcucuuccccaucuuuucc

SEQ ID NO: 147227 - RNA, 23 nt, Human
uggaauggugguaggcagagagg

SEQ ID NO: 147228 - RNA, 18 nt, Human
uggagguugcagugagcu

SEQ ID NO: 147229 - RNA, 24 nt, Human
uggccaacauggugaaaccccguc

SEQ ID NO: 147230 - RNA, 24 nt, Human
uggcgcgugccugcagucccagcu

SEQ ID NO: 147231 - RNA, 21 nt, Human
uggcggcugcagcgggcuggg

SEQ ID NO: 147232 - RNA, 24 nt, Human
uggcucaugccuguaaucccauca

SEQ ID NO: 147233 - RNA, 21 nt, Human
uggcugggcaggaggaagcgg

SEQ ID NO: 147234 - RNA, 19 nt, Human
ugggaagaagccuuggcuu

SEQ ID NO: 147235 - RNA, 19 nt, Human
ugggagagggugggguccc

SEQ ID NO: 147236 - RNA, 25 nt, Human
ugggagaggguggggucccgcgagg

SEQ ID NO: 147237 - RNA, 24 nt, Human
ugggaggccgaggcgagcagauca

SEQ ID NO: 147238 - RNA, 25 nt, Human
ugggggcaaaaacaaaaaagaagga

SEQ ID NO: 147239 - RNA, 19 nt, Human
uggggugggggacaguggu

SEQ ID NO: 147240 - RNA, 25 nt, Human
uggguaugggcagaauugggggcaa

SEQ ID NO: 147241 - RNA, 24 nt, Human
ugguggcgcgugccugcaguccca

SEQ ID NO: 147242 - RNA, 26 nt, Human
ugugccagugugugugugaugugccu

SEQ ID NO: 147243 - RNA, 24 nt, Human
uguuccguucagaggccccuccca

SEQ ID NO: 147244 - RNA, 20 nt, Human
uuagcugggcgugguggcgc

SEQ ID NO: 147245 - RNA, 20 nt, Human
uuagcugggcgugguggcgc

SEQ ID NO: 147246 - RNA, 24 nt, Human
uuagcugggcgugguggcgcgugc

SEQ ID NO: 147247 - RNA, 24 nt, Human
uucaacccaggagguggagguugc

SEQ ID NO: 147248 - RNA, 21 nt, Human
uuccaugggguccccugccag

SEQ ID NO: 147249 - RNA, 18 nt, Human
uucuacguaggggcucca

SEQ ID NO: 147250 - RNA, 20 nt, Human
uucuaucaaaaaagaaagaa

SEQ ID NO: 147251 - RNA, 19 nt, Human
uugcagugagcugagaucu

SEQ ID NO: 147252 - RNA, 22 nt, Human
uugcagugagcugagaucucac

SEQ ID NO: 147253 - RNA, 21 nt, Human
uugcagugagcugagaucucc

SEQ ID NO: 147254 - RNA, 25 nt, Human
uugggaggccgaggcgagcagauca

SEQ ID NO: 147255 - RNA, 20 nt, Human
uuugggaagaagccuuggcu

SEQ ID NO: 147256 - RNA, 21 nt, Human
uuuuuuuuuuuuuuuuuuggg

SEQ ID NO: 147257 - RNA, 23 nt, Human
aaacaaguaucagcugcaaacau

SEQ ID NO: 147258 - RNA, 23 nt, Human
aagaagacagaggcuuagauuag

SEQ ID NO: 147259 - RNA, 19 nt, Human
aagccaaagcagauagggg

SEQ ID NO: 147260 - RNA, 24 nt, Human
aaggacacugcagagucccugggg

SEQ ID NO: 147261 - RNA, 19 nt, Human
aaguaugaacaucuaaaca

SEQ ID NO: 147262 - RNA, 28 nt, Human
acgcagccccaggggaagagggaacgcc

SEQ ID NO: 147263 - RNA, 23 nt, Human
acgcggcuaggagggccgggagc

SEQ ID NO: 147264 - RNA, 21 nt, Human
agacuaaugacaaaugcacug

SEQ ID NO: 147265 - RNA, 22 nt, Human
agaguucaaagcaagguuugcc

SEQ ID NO: 147266 - RNA, 18 nt, Human
agcccacucuccugcugg

SEQ ID NO: 147267 - RNA, 18 nt, Human
agcugggaugauucaggc

SEQ ID NO: 147268 - RNA, 18 nt, Human
aggcugcagggggccugc

SEQ ID NO: 147269 - RNA, 20 nt, Human
augugugugugcauguuugu

SEQ ID NO: 147270 - RNA, 19 nt, Human
caaagcaagguuugccgaa

SEQ ID NO: 147271 - RNA, 23 nt, Human
caaagcaagguuugccgaagaag

SEQ ID NO: 147272 - RNA, 22 nt, Human
cacccaagcgcggggcucagcc

SEQ ID NO: 147273 - RNA, 20 nt, Human
caccucuccucccugcagcu

SEQ ID NO: 147274 - RNA, 20 nt, Human
cacgucauagaugcauagaa

SEQ ID NO: 147275 - RNA, 23 nt, Human
cagcagcccaggccggagggagg

SEQ ID NO: 147276 - RNA, 21 nt, Human
cagccccaggggaagacuccu

SEQ ID NO: 147277 - RNA, 22 nt, Human
caguaguaagcacgucauagau

SEQ ID NO: 147278 - RNA, 24 nt, Human
cauguuugugugugugugugugag

SEQ ID NO: 147279 - RNA, 23 nt, Human
cauguuugugugugugugugugu

SEQ ID NO: 147280 - RNA, 21 nt, Human
ccaaagcagauaggggaagca

SEQ ID NO: 147281 - RNA, 25 nt, Human
ccaaugucucuagaagacgcuuccu

SEQ ID NO: 147282 - RNA, 19 nt, Human
ccagacugaugggccacca

SEQ ID NO: 147283 - RNA, 19 nt, Human
ccagcaggcuagcccacuc

SEQ ID NO: 147284 - RNA, 21 nt, Human
ccaggggaagacuccuccuca

SEQ ID NO: 147285 - RNA, 18 nt, Human
cccccggcacgcagcccc

SEQ ID NO: 147286 - RNA, 20 nt, Human
ccgaggagaggggaagagcg

SEQ ID NO: 147287 - RNA, 21 nt, Human
ccgccgggcuccgagccgcgc

SEQ ID NO: 147288 - RNA, 19 nt, Human
ccgcgccgccgccucaccc

SEQ ID NO: 147289 - RNA, 19 nt, Human
ccgucugaaugucccccca

SEQ ID NO: 147290 - RNA, 18 nt, Human
ccugggaggcugcagggg

SEQ ID NO: 147291 - RNA, 20 nt, Human
ccuuucucaccucuccuccc

SEQ ID NO: 147292 - RNA, 25 nt, Human
cgcucgcccccggcacgcagcccca

SEQ ID NO: 147293 - RNA, 21 nt, Human
cucccaucuccuccucuaaca

SEQ ID NO: 147294 - RNA, 21 nt, Human
cuccucccuugccagccuucc

SEQ ID NO: 147295 - RNA, 24 nt, Human
cuccugggaccaagcccagccgcu

SEQ ID NO: 147296 - RNA, 19 nt, Human
cucucaaguuagccuucug

SEQ ID NO: 147297 - RNA, 21 nt, Human
cugggauccugcauacaucau

SEQ ID NO: 147298 - RNA, 20 nt, Human
cugggcuugaggaggagggg

SEQ ID NO: 147299 - RNA, 24 nt, Human
cuguuggaugucuaugaugcuggg

SEQ ID NO: 147300 - RNA, 22 nt, Human
cuucugaggcuacucagccucc

SEQ ID NO: 147301 - RNA, 21 nt, Human
cuugccagccuguccugggag

SEQ ID NO: 147302 - RNA, 20 nt, Human
cuuucucaccucuccucccu

SEQ ID NO: 147303 - RNA, 23 nt, Human
gaacaucuaaacaucauaggcca

SEQ ID NO: 147304 - RNA, 19 nt, Human
gaagaagacagaggcuuag

SEQ ID NO: 147305 - RNA, 21 nt, Human
gacugguuuucaauagacuac

SEQ ID NO: 147306 - RNA, 19 nt, Human
gagaauguagggcauugag

SEQ ID NO: 147307 - RNA, 22 nt, Human
gagacaguggcugcaucugagc

SEQ ID NO: 147308 - RNA, 24 nt, Human
gcauguuuguguguguguguguug

SEQ ID NO: 147309 - RNA, 25 nt, Human
gccccaaaccucucaaguuagccuu

SEQ ID NO: 147310 - RNA, 21 nt, Human
gcccccggcacgcagccccag

SEQ ID NO: 147311 - RNA, 19 nt, Human
gccucacccaagcgcgggg

SEQ ID NO: 147312 - RNA, 19 nt, Human
gcucuuguccuucuaaucc

SEQ ID NO: 147313 - RNA, 23 nt, Human
gcugcaucugagcugggaugauu

SEQ ID NO: 147314 - RNA, 19 nt, Human
gcuuugaauccucucucca

SEQ ID NO: 147315 - RNA, 22 nt, Human
ggaagagcgauagagacuuagg

SEQ ID NO: 147316 - RNA, 19 nt, Human
ggacaggcacgaacagcau

SEQ ID NO: 147317 - RNA, 19 nt, Human
ggagaggggaagagcgaua

SEQ ID NO: 147318 - RNA, 20 nt, Human
gggaagacuccuccucaggg

SEQ ID NO: 147319 - RNA, 18 nt, Human
gggacaggcacgaacagc

SEQ ID NO: 147320 - RNA, 20 nt, Human
gucugaauauggauauaaaa

SEQ ID NO: 147321 - RNA, 18 nt, Human
gugugagggucugaggcc

SEQ ID NO: 147322 - RNA, 23 nt, Human
gugugugcauguuugugugugug

SEQ ID NO: 147323 - RNA, 21 nt, Human
gugugugugugugugugugug

SEQ ID NO: 147324 - RNA, 21 nt, Human
gugugugugugugugugugug

SEQ ID NO: 147325 - RNA, 19 nt, Human
uacaggacaauuuccucac

SEQ ID NO: 147326 - RNA, 23 nt, Human
uaccaaagaauaaauguacugua

SEQ ID NO: 147327 - RNA, 23 nt, Human
uagcccacucuccugcuggugcu

SEQ ID NO: 147328 - RNA, 21 nt, Human
uaggaaagaacagagcuccug

SEQ ID NO: 147329 - RNA, 24 nt, Human
uaggagggccgggagcgcacucuc

SEQ ID NO: 147330 - RNA, 18 nt, Human
uaguaagcacgucauaga

SEQ ID NO: 147331 - RNA, 20 nt, Human
uaugaacaucuaaacaucaa

SEQ ID NO: 147332 - RNA, 31 nt, Human
uaugugugugugcauguuugugugugugugu

SEQ ID NO: 147333 - RNA, 18 nt, Human
uccagcagcccaggccgg

SEQ ID NO: 147334 - RNA, 18 nt, Human
ucccugcagcugcccgcc

SEQ ID NO: 147335 - RNA, 19 nt, Human
ucccugcagcugcccgccu

SEQ ID NO: 147336 - RNA, 20 nt, Human
ucgcccccggcacgcagccc

SEQ ID NO: 147337 - RNA, 23 nt, Human
ucgcccccggcacgcagccccag

SEQ ID NO: 147338 - RNA, 18 nt, Human
ucugagaauaguaugagg

SEQ ID NO: 147339 - RNA, 18 nt, Human
ucugaggcuacucagccu

SEQ ID NO: 147340 - RNA, 18 nt, Human
ucugaggcuacucagccu

SEQ ID NO: 147341 - RNA, 24 nt, Human
ucuggggccugggagugcucuugu

SEQ ID NO: 147342 - RNA, 19 nt, Human
ucuuaucaauuuuuuucuc

SEQ ID NO: 147343 - RNA, 24 nt, Human
ugaagcaagccaggggagagacca

SEQ ID NO: 147344 - RNA, 18 nt, Human
ugaauugccucaggucug

SEQ ID NO: 147345 - RNA, 22 nt, Human
ugaggaggaggggugaaaucuu

SEQ ID NO: 147346 - RNA, 18 nt, Human
ugaggcccuggcuuugaa

SEQ ID NO: 147347 - RNA, 22 nt, Human
ugagggucugaggcccuggcuu

SEQ ID NO: 147348 - RNA, 18 nt, Human
ugaugggccaccaaaugc

SEQ ID NO: 147349 - RNA, 23 nt, Human
ugcauacaucauagcacagacaa

SEQ ID NO: 147350 - RNA, 21 nt, Human
ugcccucagaucuccuagcuc

SEQ ID NO: 147351 - RNA, 21 nt, Human
ugccuaacacagcuccuggua

SEQ ID NO: 147352 - RNA, 22 nt, Human
ugcuuguucuccauaguuuguc

SEQ ID NO: 147353 - RNA, 23 nt, Human
ugcuuguucuccauaguuuguca

SEQ ID NO: 147354 - RNA, 25 nt, Human
uggaagcacuggggaaucuggaggu

SEQ ID NO: 147355 - RNA, 26 nt, Human
uggaagcacuggggaaucuggaggug

SEQ ID NO: 147356 - RNA, 22 nt, Human
uggcaagugaauugccucaggu

SEQ ID NO: 147357 - RNA, 18 nt, Human
uggcagaguucaaagcaa

SEQ ID NO: 147358 - RNA, 23 nt, Human
uggcagaguucaaagcaagguuu

SEQ ID NO: 147359 - RNA, 20 nt, Human
ugggaccaagcccagccgcu

SEQ ID NO: 147360 - RNA, 27 nt, Human
uggggaacaaggccccaaaccucucaa

SEQ ID NO: 147361 - RNA, 22 nt, Human
uggggaguggccgaggagaggg

SEQ ID NO: 147362 - RNA, 19 nt, Human
uggggcgcagagccagaag

SEQ ID NO: 147363 - RNA, 21 nt, Human
ugguacgcaggaggggcuggg

SEQ ID NO: 147364 - RNA, 19 nt, Human
ugucaagauaugcauaugu

SEQ ID NO: 147365 - RNA, 22 nt, Human
ugucaagauaugcauaugugug

SEQ ID NO: 147366 - RNA, 19 nt, Human
ugugacgugacagauggcc

SEQ ID NO: 147367 - RNA, 21 nt, Human
ugugugagggucugaggcccu

SEQ ID NO: 147368 - RNA, 19 nt, Human
ugugugcauguuugugugu

SEQ ID NO: 147369 - RNA, 19 nt, Human
ugugugcauguuugugugu

SEQ ID NO: 147370 - RNA, 19 nt, Human
ugugugcauguuugugugu

SEQ ID NO: 147371 - RNA, 32 nt, Human
ugugugcauguuuguguguguguguguguggu

SEQ ID NO: 147372 - RNA, 21 nt, Human
ugugugugcauguuugugugu

SEQ ID NO: 147373 - RNA, 21 nt, Human
ugugugugcauguuugugugu

SEQ ID NO: 147374 - RNA, 27 nt, Human
ugugugugcauguuugugugugugugu

SEQ ID NO: 147375 - RNA, 22 nt, Human
ugugugugugcauguuugugug

SEQ ID NO: 147376 - RNA, 30 nt, Human
ugugugugugcauguuugugugugugugug

SEQ ID NO: 147377 - RNA, 18 nt, Human
uguguguguguguguagu

SEQ ID NO: 147378 - RNA, 19 nt, Human
uguguguguguguguguag

SEQ ID NO: 147379 - RNA, 18 nt, Human
ugugugugugugugugug

SEQ ID NO: 147380 - RNA, 18 nt, Human
ugugugugugugugugug

SEQ ID NO: 147381 - RNA, 18 nt, Human
ugugugugugugugugug

SEQ ID NO: 147382 - RNA, 18 nt, Human
ugugugugugugugugug

SEQ ID NO: 147383 - RNA, 18 nt, Human
ugugugugugugugugug

SEQ ID NO: 147384 - RNA, 18 nt, Human
ugugugugugugugugug

SEQ ID NO: 147385 - RNA, 18 nt, Human
ugugugugugugugugug

SEQ ID NO: 147386 - RNA, 18 nt, Human
ugugugugugugugugug

SEQ ID NO: 147387 - RNA, 22 nt, Human
ugugugugugugugugugugag

SEQ ID NO: 147388 - RNA, 21 nt, Human
ugugugugugugugugugugu

SEQ ID NO: 147389 - RNA, 21 nt, Human
ugugugugugugugugugugu

SEQ ID NO: 147390 - RNA, 21 nt, Human
ugugugugugugugugugugu

SEQ ID NO: 147391 - RNA, 21 nt, Human
ugugugugugugugugugugu

SEQ ID NO: 147392 - RNA, 21 nt, Human
ugugugugugugugugugugu

SEQ ID NO: 147393 - RNA, 21 nt, Human
ugugugugugugugugugugu

SEQ ID NO: 147394 - RNA, 21 nt, Human
ugugugugugugugugugugu

SEQ ID NO: 147395 - RNA, 21 nt, Human
ugugugugugugugugugugu

SEQ ID NO: 147396 - RNA, 21 nt, Human
ugugugugugugugugugugu

SEQ ID NO: 147397 - RNA, 21 nt, Human
ugugugugugugugugugugu

SEQ ID NO: 147398 - RNA, 21 nt, Human
ugugugugugugugugugugu

SEQ ID NO: 147399 - RNA, 21 nt, Human
ugugugugugugugugugugu

SEQ ID NO: 147400 - RNA, 22 nt, Human
ugugugugugugugugugugua

SEQ ID NO: 147401 - RNA, 22 nt, Human
ugugugugugugugugugugug

SEQ ID NO: 147402 - RNA, 22 nt, Human
ugugugugugugugugugugug

SEQ ID NO: 147403 - RNA, 22 nt, Human
ugugugugugugugugugugug

SEQ ID NO: 147404 - RNA, 22 nt, Human
ugugugugugugugugugugug

SEQ ID NO: 147405 - RNA, 22 nt, Human
uguguguguguguguguguguu

SEQ ID NO: 147406 - RNA, 25 nt, Human
uguuugugugugugugugugugugg

SEQ ID NO: 147407 - RNA, 23 nt, Human
uuggaugucuaugaugcugggaa

SEQ ID NO: 147408 - RNA, 22 nt, Human
uuucucuucucucucccgcucu

SEQ ID NO: 147409 - RNA, 24 nt, Human
aaaaaaaaaaacacaaaacccuag

SEQ ID NO: 147410 - RNA, 24 nt, Human
aaaaaaaaaacacaaaacccuaga

SEQ ID NO: 147411 - RNA, 24 nt, Human
aaaaaaaacacaaaacccuagaca

SEQ ID NO: 147412 - RNA, 25 nt, Human
aaacgggaaguuuugccaggggucg

SEQ ID NO: 147413 - RNA, 18 nt, Human
aaaggcuuuuauccugua

SEQ ID NO: 147414 - RNA, 23 nt, Human
acagggccgaagacacugcacac

SEQ ID NO: 147415 - RNA, 22 nt, Human
acagucuggagacagcagaaac

SEQ ID NO: 147416 - RNA, 19 nt, Human
agaaaagcuaaucuucagg

SEQ ID NO: 147417 - RNA, 20 nt, Human
agacagcagaaacccucugc

SEQ ID NO: 147418 - RNA, 20 nt, Human
agcucacuuccugugguucc

SEQ ID NO: 147419 - RNA, 19 nt, Human
aggcagccuggagacccag

SEQ ID NO: 147420 - RNA, 19 nt, Human
aggucccccaguucccacc

SEQ ID NO: 147421 - RNA, 22 nt, Human
aggugcccucugagggacagac

SEQ ID NO: 147422 - RNA, 22 nt, Human
agugguggagcaggccugaggc

SEQ ID NO: 147423 - RNA, 29 nt, Human
auagcagaaaacaaaauaaaagggacccc

SEQ ID NO: 147424 - RNA, 19 nt, Human
auccaccccccuaccccca

SEQ ID NO: 147425 - RNA, 19 nt, Human
auggauggcagauccacag

SEQ ID NO: 147426 - RNA, 23 nt, Human
caccccguucugcagcccacccc

SEQ ID NO: 147427 - RNA, 23 nt, Human
cacugcacacacuaggacaggau

SEQ ID NO: 147428 - RNA, 18 nt, Human
cagcccagggcagggcug

SEQ ID NO: 147429 - RNA, 20 nt, Human
cagcccagggcagggcuggg

SEQ ID NO: 147430 - RNA, 19 nt, Human
cagccuggagacccagcug

SEQ ID NO: 147431 - RNA, 22 nt, Human
caggaggcaucugucgccuucu

SEQ ID NO: 147432 - RNA, 20 nt, Human
caguaagaaaagcuaaucuu

SEQ ID NO: 147433 - RNA, 19 nt, Human
cagugccuugcccaagguc

SEQ ID NO: 147434 - RNA, 21 nt, Human
cagugccuugcccaaggucau

SEQ ID NO: 147435 - RNA, 23 nt, Human
cauucaccuguguccacagggcc

SEQ ID NO: 147436 - RNA, 18 nt, Human
ccaguguccacccucccc

SEQ ID NO: 147437 - RNA, 23 nt, Human
cccaggcagccuggagacccagc

SEQ ID NO: 147438 - RNA, 24 nt, Human
cccaggucccccaguucccacccc

SEQ ID NO: 147439 - RNA, 18 nt, Human
cccaugcgcauuucucca

SEQ ID NO: 147440 - RNA, 21 nt, Human
cccaugcgcauuucuccaggc

SEQ ID NO: 147441 - RNA, 22 nt, Human
cccaugcgcauuucuccaggca

SEQ ID NO: 147442 - RNA, 18 nt, Human
ccccaguucccaccccgu

SEQ ID NO: 147443 - RNA, 22 nt, Human
ccccaugcgcauuucuccaggc

SEQ ID NO: 147444 - RNA, 18 nt, Human
cccccaguucccaccccg

SEQ ID NO: 147445 - RNA, 22 nt, Human
cccucugcucuauuuuuuugcc

SEQ ID NO: 147446 - RNA, 23 nt, Human
cccugcuccggguucgacucucc

SEQ ID NO: 147447 - RNA, 25 nt, Human
ccuaauccaccccccuacccccaau

SEQ ID NO: 147448 - RNA, 23 nt, Human
ccuccccauucuacagaugggga

SEQ ID NO: 147449 - RNA, 24 nt, Human
ccuucaaucuccuaauccaccccc

SEQ ID NO: 147450 - RNA, 21 nt, Human
cgcuggggccugacugccugc

SEQ ID NO: 147451 - RNA, 21 nt, Human
cuccuaauccaccccccuacc

SEQ ID NO: 147452 - RNA, 18 nt, Human
cucuauuuuuuugccacu

SEQ ID NO: 147453 - RNA, 20 nt, Human
cucugggugagccuuagcuc

SEQ ID NO: 147454 - RNA, 21 nt, Human
cuggguggacugaucucuucu

SEQ ID NO: 147455 - RNA, 19 nt, Human
cuuaccaggcccaccccca

SEQ ID NO: 147456 - RNA, 21 nt, Human
gauccacagugcaucccccuu

SEQ ID NO: 147457 - RNA, 23 nt, Human
gcagugccuugcccaaggucauu

SEQ ID NO: 147458 - RNA, 19 nt, Human
gcucuauuuuuuugccacu

SEQ ID NO: 147459 - RNA, 21 nt, Human
ggagacagcagaaacccucug

SEQ ID NO: 147460 - RNA, 21 nt, Human
ggagcaggccugaggcccagg

SEQ ID NO: 147461 - RNA, 23 nt, Human
ggcagauccacagugcauccccc

SEQ ID NO: 147462 - RNA, 24 nt, Human
gggaaaccaaggcacagagagggc

SEQ ID NO: 147463 - RNA, 20 nt, Human
guggagcaggccugaggccc

SEQ ID NO: 147464 - RNA, 23 nt, Human
gugguuccugggacuuaccaggc

SEQ ID NO: 147465 - RNA, 22 nt, Human
guguccacagggccgaagacac

SEQ ID NO: 147466 - RNA, 21 nt, Human
uaaauccugccacccaccaag

SEQ ID NO: 147467 - RNA, 23 nt, Human
uaaauccugccacccaccaagga

SEQ ID NO: 147468 - RNA, 20 nt, Human
uagcagaaaacaaaauaaaa

SEQ ID NO: 147469 - RNA, 22 nt, Human
uauagcagaaaacaaaauaaaa

SEQ ID NO: 147470 - RNA, 21 nt, Human
uauaugaaagguuccauuuug

SEQ ID NO: 147471 - RNA, 18 nt, Human
ucauagaaacuaagggaa

SEQ ID NO: 147472 - RNA, 19 nt, Human
uccacgcucggaugggacc

SEQ ID NO: 147473 - RNA, 22 nt, Human
uccaguguccacccuucccaag

SEQ ID NO: 147474 - RNA, 22 nt, Human
ucucuucucaacagcccagggc

SEQ ID NO: 147475 - RNA, 19 nt, Human
ucuucaggcuucaauguga

SEQ ID NO: 147476 - RNA, 21 nt, Human
ugaggcccaggucccccagaa

SEQ ID NO: 147477 - RNA, 21 nt, Human
ugccacccaccaaggagaccu

SEQ ID NO: 147478 - RNA, 23 nt, Human
ugcucuauuuuuuugccacucua

SEQ ID NO: 147479 - RNA, 20 nt, Human
uggaagggagguugggaggg

SEQ ID NO: 147480 - RNA, 19 nt, Human
uggagacccagcugcucuc

SEQ ID NO: 147481 - RNA, 19 nt, Human
ugggagggcugaccagaug

SEQ ID NO: 147482 - RNA, 21 nt, Human
uuaccaggcccacccccaugc

SEQ ID NO: 147483 - RNA, 23 nt, Human
uuagcucacuuccugugguuccu

SEQ ID NO: 147484 - RNA, 19 nt, Human
uucaaugugauuugacaug

SEQ ID NO: 147485 - RNA, 21 nt, Human
uucccaccccguucugcagcc

SEQ ID NO: 147486 - RNA, 19 nt, Human
uuccugggacuuaccaggc

SEQ ID NO: 147487 - RNA, 19 nt, Human
uucuguauaaaggcuuuua

SEQ ID NO: 147488 - RNA, 20 nt, Human
uuuccaguguccacccuccc

SEQ ID NO: 147489 - RNA, 21 nt, Human
uuuggacaauuucucuuucuu

SEQ ID NO: 147490 - RNA, 21 nt, Human
uuuuggaggugaaagaaguca

SEQ ID NO: 147491 - RNA, 23 nt, Human
uuuuuuuuuuuuaaagaaaaggu

SEQ ID NO: 147492 - RNA, 19 nt, Human
uuuuuuuuuuuuuuuuuaa

SEQ ID NO: 147493 - RNA, 22 nt, Human
aaaucaugucacauacaaaaca

SEQ ID NO: 147494 - RNA, 23 nt, Human
aacaaaacaaaaaaaauuccucu

SEQ ID NO: 147495 - RNA, 21 nt, Human
aacaucuuacaaugcacagga

SEQ ID NO: 147496 - RNA, 25 nt, Human
aaccaucugagacccuggaauuuaa

SEQ ID NO: 147497 - RNA, 21 nt, Human
aacucuucagccauuuccaca

SEQ ID NO: 147498 - RNA, 23 nt, Human
aagaagcacaaggcuacaaaucc

SEQ ID NO: 147499 - RNA, 26 nt, Human
aagacaaaacaaaacaaaaaaaauuc

SEQ ID NO: 147500 - RNA, 24 nt, Human
aagcacuuggagcaaaaaagaacc

SEQ ID NO: 147501 - RNA, 18 nt, Human
aagcccucaccacaaaga

SEQ ID NO: 147502 - RNA, 19 nt, Human
acaaaacaaaaaaaauucc

SEQ ID NO: 147503 - RNA, 18 nt, Human
acaaaacaaaacaaaaaa

SEQ ID NO: 147504 - RNA, 19 nt, Human
acaaagaacacuccggcca

SEQ ID NO: 147505 - RNA, 19 nt, Human
acaaccacauacagcauca

SEQ ID NO: 147506 - RNA, 26 nt, Human
acaaugcacaggaaagcccucaccac

SEQ ID NO: 147507 - RNA, 18 nt, Human
acagcccuggcaucagau

SEQ ID NO: 147508 - RNA, 21 nt, Human
acaguaaacagauaauccaaa

SEQ ID NO: 147509 - RNA, 22 nt, Human
accugcaaagaggauuuucccu

SEQ ID NO: 147510 - RNA, 18 nt, Human
agaaaccuuggacuauag

SEQ ID NO: 147511 - RNA, 23 nt, Human
agaagacaaaacaaaacaaaaaa

SEQ ID NO: 147512 - RNA, 18 nt, Human
agacaaaacaaaacaaaa

SEQ ID NO: 147513 - RNA, 22 nt, Human
agacaaaacaaaacaaaaaaaa

SEQ ID NO: 147514 - RNA, 21 nt, Human
agacaguaaacagauaaucca

SEQ ID NO: 147515 - RNA, 21 nt, Human
agagaaaaguagucuuugaaa

SEQ ID NO: 147516 - RNA, 23 nt, Human
aggaagacagcccuggcaucaga

SEQ ID NO: 147517 - RNA, 19 nt, Human
aucacagcugggggguuuc

SEQ ID NO: 147518 - RNA, 22 nt, Human
aucaugucacauacaaaacauu

SEQ ID NO: 147519 - RNA, 20 nt, Human
caaaaaagaaccaagcuggg

SEQ ID NO: 147520 - RNA, 21 nt, Human
caaaacaaaaaaaauuccucu

SEQ ID NO: 147521 - RNA, 24 nt, Human
cacaaagaacacuccggccaaaaa

SEQ ID NO: 147522 - RNA, 19 nt, Human
cacaaccacauacagcauc

SEQ ID NO: 147523 - RNA, 18 nt, Human
caccacaaagaacacucc

SEQ ID NO: 147524 - RNA, 20 nt, Human
caccucccuugacgaagcca

SEQ ID NO: 147525 - RNA, 19 nt, Human
cagcaggcugcaaucucac

SEQ ID NO: 147526 - RNA, 24 nt, Human
caggaaagcccucaccacaaagaa

SEQ ID NO: 147527 - RNA, 23 nt, Human
ccaccgucuccuuuuuccaacuu

SEQ ID NO: 147528 - RNA, 23 nt, Human
cggccaaaaaugucaauugugca

SEQ ID NO: 147529 - RNA, 18 nt, Human
cuguguacguuuuuuccc

SEQ ID NO: 147530 - RNA, 27 nt, Human
cuuagaagacaaaacaaaacaaaaaaa

SEQ ID NO: 147531 - RNA, 27 nt, Human
gaaaagaagcuccucuaacuauuucaa

SEQ ID NO: 147532 - RNA, 20 nt, Human
gaacacuccggccaaaaaug

SEQ ID NO: 147533 - RNA, 20 nt, Human
gaaguccccauucuccacuc

SEQ ID NO: 147534 - RNA, 24 nt, Human
gacccuggaauuuaacucagcaac

SEQ ID NO: 147535 - RNA, 20 nt, Human
gauuuuguuuuucuuucucu

SEQ ID NO: 147536 - RNA, 21 nt, Human
gcaaagaggauuuucccugga

SEQ ID NO: 147537 - RNA, 19 nt, Human
gcacuuggagcaaaaaaga

SEQ ID NO: 147538 - RNA, 22 nt, Human
gcuaaacuggugguucucaauc

SEQ ID NO: 147539 - RNA, 21 nt, Human
ggaaagcccucaccacaaaga

SEQ ID NO: 147540 - RNA, 23 nt, Human
ggaagacagcccuggcaucagau

SEQ ID NO: 147541 - RNA, 19 nt, Human
gggugggaaauccaauagc

SEQ ID NO: 147542 - RNA, 19 nt, Human
guggauacugcugaacauc

SEQ ID NO: 147543 - RNA, 25 nt, Human
uaaacagauaauccaaaagacaaaa

SEQ ID NO: 147544 - RNA, 22 nt, Human
uagcuaaacuggugguucucaa

SEQ ID NO: 147545 - RNA, 22 nt, Human
uauuuuuuucauccuuucuuuc

SEQ ID NO: 147546 - RNA, 21 nt, Human
ucagagaaaaguagucuuuga

SEQ ID NO: 147547 - RNA, 20 nt, Human
uccaaaagacaaaaaauuau

SEQ ID NO: 147548 - RNA, 22 nt, Human
ucccuaacauuuaaaacauuaa

SEQ ID NO: 147549 - RNA, 22 nt, Human
uccugaaugaguauaaagaccc

SEQ ID NO: 147550 - RNA, 18 nt, Human
ucgacuguaguguuucuu

SEQ ID NO: 147551 - RNA, 20 nt, Human
ucucaaucaagggcaaauuu

SEQ ID NO: 147552 - RNA, 22 nt, Human
ugaaaaaaaaucacaaccacau

SEQ ID NO: 147553 - RNA, 21 nt, Human
ugaaaaagaauucacaauaga

SEQ ID NO: 147554 - RNA, 18 nt, Human
ugagcugaguuuucuguu

SEQ ID NO: 147555 - RNA, 18 nt, Human
ugaguacaaaucuaggca

SEQ ID NO: 147556 - RNA, 18 nt, Human
ugaguauaaagaccccac

SEQ ID NO: 147557 - RNA, 23 nt, Human
ugcaaagaggauuuucccuggaa

SEQ ID NO: 147558 - RNA, 24 nt, Human
ugcaaagaggauuuucccuggaaa

SEQ ID NO: 147559 - RNA, 19 nt, Human
ugggggguuucugguguca

SEQ ID NO: 147560 - RNA, 23 nt, Human
ugucuagagacauuuugcguuau

SEQ ID NO: 147561 - RNA, 18 nt, Human
ugugcagauugagaaacc

SEQ ID NO: 147562 - RNA, 21 nt, Human
ugugguugauggaggggaggc

SEQ ID NO: 147563 - RNA, 25 nt, Human
uguuuccuucuacaauauaauuuua

SEQ ID NO: 147564 - RNA, 20 nt, Human
uuaaauagcuagaagugagc

SEQ ID NO: 147565 - RNA, 18 nt, Human
uuaauaccugcaaagagg

SEQ ID NO: 147566 - RNA, 27 nt, Human
uuagaagacaaaacaaaacaaaaaaaa

SEQ ID NO: 147567 - RNA, 19 nt, Human
uuagaaguaguuucuuguu

SEQ ID NO: 147568 - RNA, 21 nt, Human
uucacaauagaggugaaaaaa

SEQ ID NO: 147569 - RNA, 22 nt, Human
uucaccucccuugacgaagcca

SEQ ID NO: 147570 - RNA, 21 nt, Human
uuccucugaguacaaaucuag

SEQ ID NO: 147571 - RNA, 20 nt, Human
uuucuuagaagacaaaacaa

SEQ ID NO: 147572 - RNA, 20 nt, Human
uuugaaauauuuacguccag

SEQ ID NO: 147573 - RNA, 21 nt, Human
uuuucauccuuucuuuccuuu

SEQ ID NO: 147574 - RNA, 25 nt, Human
aaaaagagaagaacucuuacaacaa

SEQ ID NO: 147575 - RNA, 25 nt, Human
aaacaauccuccugccucagccucc

SEQ ID NO: 147576 - RNA, 19 nt, Human
aaacagaagaggaaagacc

SEQ ID NO: 147577 - RNA, 19 nt, Human
aaacagaagaggaaagacc

SEQ ID NO: 147578 - RNA, 22 nt, Human
aaacagaagaggaaagaccaga

SEQ ID NO: 147579 - RNA, 23 nt, Human
aaacagaagaggaaagaccagaa

SEQ ID NO: 147580 - RNA, 24 nt, Human
aaagugcugggauuacagguguga

SEQ ID NO: 147581 - RNA, 19 nt, Human
aacaauccuccugccucag

SEQ ID NO: 147582 - RNA, 18 nt, Human
aagugcugggauuacagg

SEQ ID NO: 147583 - RNA, 19 nt, Human
aagugcugggauuacaggu

SEQ ID NO: 147584 - RNA, 26 nt, Human
aagugcugggauuacaggugugagcc

SEQ ID NO: 147585 - RNA, 21 nt, Human
aauccuguacuccccauucau

SEQ ID NO: 147586 - RNA, 20 nt, Human
aaugauaaaagcauuugaga

SEQ ID NO: 147587 - RNA, 24 nt, Human
acaaggcaaaaaguaaaaagagaa

SEQ ID NO: 147588 - RNA, 22 nt, Human
acaggaaaacuggugucauuac

SEQ ID NO: 147589 - RNA, 19 nt, Human
acaggguuuugcuauguug

SEQ ID NO: 147590 - RNA, 24 nt, Human
acaggguuuugcuauguugcccag

SEQ ID NO: 147591 - RNA, 21 nt, Human
accacaaugaaggauaacauc

SEQ ID NO: 147592 - RNA, 19 nt, Human
acucaguucccuuaccaau

SEQ ID NO: 147593 - RNA, 24 nt, Human
agaagaggaaagaccagaagagga

SEQ ID NO: 147594 - RNA, 18 nt, Human
agacaggguuuugcuaug

SEQ ID NO: 147595 - RNA, 23 nt, Human
agacaggguuuugcuauguugcc

SEQ ID NO: 147596 - RNA, 20 nt, Human
agaccagaagaggaaaggcu

SEQ ID NO: 147597 - RNA, 21 nt, Human
agcaugugaggcauaaucugg

SEQ ID NO: 147598 - RNA, 22 nt, Human
agcccauuuauuuacuaacacc

SEQ ID NO: 147599 - RNA, 24 nt, Human
aggaaagaccagaagaggaaagga

SEQ ID NO: 147600 - RNA, 22 nt, Human
aggcauaaucuggaagacugaa

SEQ ID NO: 147601 - RNA, 19 nt, Human
aucaauacuauguguguga

SEQ ID NO: 147602 - RNA, 25 nt, Human
aucacagaggcuugucaugacagga

SEQ ID NO: 147603 - RNA, 21 nt, Human
auccuccugccucagccuccc

SEQ ID NO: 147604 - RNA, 26 nt, Human
auggcugaauaauauaguccauugua

SEQ ID NO: 147605 - RNA, 26 nt, Human
auuauauucacacaaguucaugcauu

SEQ ID NO: 147606 - RNA, 20 nt, Human
caaaaugaauguaugacuua

SEQ ID NO: 147607 - RNA, 24 nt, Human
caaagugcugggauuacaggugug

SEQ ID NO: 147608 - RNA, 24 nt, Human
caaauuucuggccucaaacaaucc

SEQ ID NO: 147609 - RNA, 19 nt, Human
caacggaaaacuuauacuc

SEQ ID NO: 147610 - RNA, 26 nt, Human
caccacaaugaaggauaacaucuuca

SEQ ID NO: 147611 - RNA, 22 nt, Human
cacuaaccuaaguucccugugc

SEQ ID NO: 147612 - RNA, 24 nt, Human
caggguuuugcuauguugcccagg

SEQ ID NO: 147613 - RNA, 24 nt, Human
caggugugagccacugugccuggc

SEQ ID NO: 147614 - RNA, 22 nt, Human
cauucaucacccccaauucuag

SEQ ID NO: 147615 - RNA, 21 nt, Human
ccaaagugcugggauuacagg

SEQ ID NO: 147616 - RNA, 21 nt, Human
ccaaagugcugggauuacagg

SEQ ID NO: 147617 - RNA, 24 nt, Human
ccaaagugcugggauuacaggugu

SEQ ID NO: 147618 - RNA, 21 nt, Human
ccaaugauaaaagcauuugag

SEQ ID NO: 147619 - RNA, 24 nt, Human
ccagaagaggaaaggcuugccaca

SEQ ID NO: 147620 - RNA, 22 nt, Human
cccaauucuagccuuagguaac

SEQ ID NO: 147621 - RNA, 24 nt, Human
cucaaacaauccuccugccucagc

SEQ ID NO: 147622 - RNA, 23 nt, Human
cugccucagccucccaaagugcu

SEQ ID NO: 147623 - RNA, 24 nt, Human
cugccucagccucccaaagugcug

SEQ ID NO: 147624 - RNA, 18 nt, Human
cuggccucaaacaauccu

SEQ ID NO: 147625 - RNA, 19 nt, Human
gacaggguuuugcuauguu

SEQ ID NO: 147626 - RNA, 24 nt, Human
gaccauuaccacaauaaguuuaga

SEQ ID NO: 147627 - RNA, 18 nt, Human
gauuacaggugugagcca

SEQ ID NO: 147628 - RNA, 21 nt, Human
gauuacaggugugagccacug

SEQ ID NO: 147629 - RNA, 24 nt, Human
gauuacaggugugagccacugugc

SEQ ID NO: 147630 - RNA, 21 nt, Human
gauucagaggcauaggaagca

SEQ ID NO: 147631 - RNA, 19 nt, Human
gcuauguugcccaggcugg

SEQ ID NO: 147632 - RNA, 20 nt, Human
gcuauguugcccaggcuggu

SEQ ID NO: 147633 - RNA, 18 nt, Human
guagagacaggguuuugc

SEQ ID NO: 147634 - RNA, 24 nt, Human
guuugcuuuuuaacaacggaaaac

SEQ ID NO: 147635 - RNA, 24 nt, Human
guuuugcuauguugcccaggcugg

SEQ ID NO: 147636 - RNA, 24 nt, Human
uaaaauuaaguaguacacauuuca

SEQ ID NO: 147637 - RNA, 23 nt, Human
uaaacagaagaggaaagaccaga

SEQ ID NO: 147638 - RNA, 22 nt, Human
uacaggugugagccacugugcc

SEQ ID NO: 147639 - RNA, 22 nt, Human
uacaggugugagccacugugcc

SEQ ID NO: 147640 - RNA, 23 nt, Human
uacaggugugagccacugugccu

SEQ ID NO: 147641 - RNA, 24 nt, Human
uaccauauaauucacccacuuaaa

SEQ ID NO: 147642 - RNA, 24 nt, Human
uacuacuuucuauuauuucuccau

SEQ ID NO: 147643 - RNA, 22 nt, Human
uagagacaggguuuugcuaugu

SEQ ID NO: 147644 - RNA, 22 nt, Human
uagguaaccacuaauguacgga

SEQ ID NO: 147645 - RNA, 21 nt, Human
uaguucauagacauuuggguu

SEQ ID NO: 147646 - RNA, 22 nt, Human
uauauucacacaaguucaugca

SEQ ID NO: 147647 - RNA, 23 nt, Human
uauguugcccaggcuggucucaa

SEQ ID NO: 147648 - RNA, 24 nt, Human
uauguugcccaggcuggucucaaa

SEQ ID NO: 147649 - RNA, 21 nt, Human
uauugugaaaguucauuuaca

SEQ ID NO: 147650 - RNA, 20 nt, Human
ucaaugguuuucuaauauau

SEQ ID NO: 147651 - RNA, 19 nt, Human
ucagaacaaucuuacuuug

SEQ ID NO: 147652 - RNA, 24 nt, Human
ucagcccauuuauuuacuaacacc

SEQ ID NO: 147653 - RNA, 23 nt, Human
ucauuuuauuuggguucacagaa

SEQ ID NO: 147654 - RNA, 22 nt, Human
uccaacugucuuuuuccuacaa

SEQ ID NO: 147655 - RNA, 23 nt, Human
ucccaaagugcugggauuacagg

SEQ ID NO: 147656 - RNA, 23 nt, Human
ucccuuaccaauuuccaacuguc

SEQ ID NO: 147657 - RNA, 27 nt, Human
uccuccugccucagccucccaaagugc

SEQ ID NO: 147658 - RNA, 21 nt, Human
ucuaauauauuguuaugugac

SEQ ID NO: 147659 - RNA, 23 nt, Human
ucuccauaaacagaagaggaaag

SEQ ID NO: 147660 - RNA, 21 nt, Human
ucugauaaggacagauucaga

SEQ ID NO: 147661 - RNA, 21 nt, Human
ugaaaggagucaaaaugaaug

SEQ ID NO: 147662 - RNA, 26 nt, Human
ugaaccauaaagaaauccuguacccu

SEQ ID NO: 147663 - RNA, 23 nt, Human
ugaauguaugacuuagcugcauu

SEQ ID NO: 147664 - RNA, 21 nt, Human
ugacaggaaaacuggugucau

SEQ ID NO: 147665 - RNA, 22 nt, Human
ugacauugaaaggagucaaaau

SEQ ID NO: 147666 - RNA, 25 nt, Human
ugagauauaauucacauaccauaua

SEQ ID NO: 147667 - RNA, 26 nt, Human
ugagauauaauucacauaccauauaa

SEQ ID NO: 147668 - RNA, 24 nt, Human
ugcccaggcuggucucaaauuucu

SEQ ID NO: 147669 - RNA, 24 nt, Human
ugccucagccucccaaagugcugg

SEQ ID NO: 147670 - RNA, 24 nt, Human
ugcuauguugcccaggcuggucuc

SEQ ID NO: 147671 - RNA, 24 nt, Human
ugcugggauuacaggugugagcca

SEQ ID NO: 147672 - RNA, 24 nt, Human
uggccucaaacaauccuccugccu

SEQ ID NO: 147673 - RNA, 18 nt, Human
ugggauuacaggugugag

SEQ ID NO: 147674 - RNA, 21 nt, Human
ugggauuacaggugugagcca

SEQ ID NO: 147675 - RNA, 22 nt, Human
ugggauuacaggugugagccac

SEQ ID NO: 147676 - RNA, 22 nt, Human
ugggauuacaggugugagccac

SEQ ID NO: 147677 - RNA, 22 nt, Human
ugggauuacaggugugagccac

SEQ ID NO: 147678 - RNA, 24 nt, Human
ugggauuacaggugugagccacug

SEQ ID NO: 147679 - RNA, 20 nt, Human
uguacaaguuuuuguauuga

SEQ ID NO: 147680 - RNA, 24 nt, Human
uguagagacaggguuuugcuaugu

SEQ ID NO: 147681 - RNA, 21 nt, Human
ugugugugacauugaaaggag

SEQ ID NO: 147682 - RNA, 23 nt, Human
uguugguuuuuuguuugcuuuuu

SEQ ID NO: 147683 - RNA, 25 nt, Human
uuaacuacacaaggcaaaaaguaaa

SEQ ID NO: 147684 - RNA, 23 nt, Human
uugaaaggagucaaaaugaaugu

SEQ ID NO: 147685 - RNA, 22 nt, Human
uuggauuuuugauuuaauuuca

SEQ ID NO: 147686 - RNA, 24 nt, Human
uuguagagacaggguuuugcuaug

SEQ ID NO: 147687 - RNA, 21 nt, Human
uuucugaucaauacuaugugu

SEQ ID NO: 147688 - RNA, 25 nt, Human
uuucuggccucaaacaauccuccug

SEQ ID NO: 147689 - RNA, 21 nt, Human
uuucuggccucaaacaaucuu

SEQ ID NO: 147690 - RNA, 23 nt, Human
uuuggauuuuugauuuaauuuca

SEQ ID NO: 147691 - RNA, 21 nt, Human
uuuguagagacaggguuuugc

SEQ ID NO: 147692 - RNA, 24 nt, Human
uuuguagagacaggguuuugcuau

SEQ ID NO: 147693 - RNA, 22 nt, Human
uuuugcuauguugcccaggcug

SEQ ID NO: 147694 - RNA, 23 nt, Human
uuuugcuauguugcccaggcugg

SEQ ID NO: 147695 - RNA, 21 nt, Human
uuuuuuguagagacaggguuu

SEQ ID NO: 147696 - RNA, 24 nt, Human
uuuuuuguagagacaggguuuugc

SEQ ID NO: 147697 - RNA, 25 nt, Human
aaaaacaaaaacaaaaaacaaaaac

SEQ ID NO: 147698 - RNA, 19 nt, Human
aaaaacacaaagcagugug

SEQ ID NO: 147699 - RNA, 20 nt, Human
aaaaacacaaagcagugugc

SEQ ID NO: 147700 - RNA, 29 nt, Human
aaaacaaaaaacaaaaacaaaagggaccc

SEQ ID NO: 147701 - RNA, 26 nt, Human
aaaacaaaaacaaaaaacaaaaacaa

SEQ ID NO: 147702 - RNA, 21 nt, Human
aaaacacaaagcagugugcaa

SEQ ID NO: 147703 - RNA, 22 nt, Human
aaaagaaaugggaaauacagaa

SEQ ID NO: 147704 - RNA, 21 nt, Human
aaaagaacaaagugggcuuaa

SEQ ID NO: 147705 - RNA, 24 nt, Human
aaaauaaggguauaacauauucug

SEQ ID NO: 147706 - RNA, 24 nt, Human
aaacaaaaaacaaaaacaaaacca

SEQ ID NO: 147707 - RNA, 20 nt, Human
aaaccaacagccauuccuaa

SEQ ID NO: 147708 - RNA, 25 nt, Human
aacaaaaacaaaaaacaaaaacaaa

SEQ ID NO: 147709 - RNA, 18 nt, Human
aacaaaaaugcaacccaa

SEQ ID NO: 147710 - RNA, 18 nt, Human
aaccaaaaacacaaagca

SEQ ID NO: 147711 - RNA, 24 nt, Human
aaccaaaaauaucuuagaaacaaa

SEQ ID NO: 147712 - RNA, 24 nt, Human
aacccaaucaaaaucauuaguaag

SEQ ID NO: 147713 - RNA, 23 nt, Human
aagaaccugaagcugagacaagc

SEQ ID NO: 147714 - RNA, 26 nt, Human
aagcaaaaaacaaaaacaaaaaacaa

SEQ ID NO: 147715 - RNA, 23 nt, Human
aagcaaagauaaaaaggagggac

SEQ ID NO: 147716 - RNA, 27 nt, Human
aagcagcaaugcaugguuucccaguag

SEQ ID NO: 147717 - RNA, 26 nt, Human
aagcagcaaugcaugguuucccagug

SEQ ID NO: 147718 - RNA, 18 nt, Human
aagcuacaacuuuacccc

SEQ ID NO: 147719 - RNA, 21 nt, Human
aaguaggugcuggaggccagg

SEQ ID NO: 147720 - RNA, 21 nt, Human
aagugaaaagagcagacacug

SEQ ID NO: 147721 - RNA, 24 nt, Human
aauacaagcaaaaaacaaaaacaa

SEQ ID NO: 147722 - RNA, 21 nt, Human
aauguacaaauauacauucua

SEQ ID NO: 147723 - RNA, 20 nt, Human
aauuagcugucaugaaucua

SEQ ID NO: 147724 - RNA, 21 nt, Human
acaaaaacaaaaaacaaaaac

SEQ ID NO: 147725 - RNA, 26 nt, Human
acaaaaaugcaacccaaucaaaauca

SEQ ID NO: 147726 - RNA, 20 nt, Human
acaagcaaaaaacaaaaaca

SEQ ID NO: 147727 - RNA, 22 nt, Human
acccagcucuucagagauccgc

SEQ ID NO: 147728 - RNA, 20 nt, Human
agaaacuggagaccaucuuu

SEQ ID NO: 147729 - RNA, 18 nt, Human
agaaaugggaaauacaga

SEQ ID NO: 147730 - RNA, 19 nt, Human
agaagaauuccuccaagua

SEQ ID NO: 147731 - RNA, 20 nt, Human
agauuugcuuguuuuccuuu

SEQ ID NO: 147732 - RNA, 23 nt, Human
agcaaaaaacaaaaacaaaaaac

SEQ ID NO: 147733 - RNA, 21 nt, Human
agccacacuagugauaaaaca

SEQ ID NO: 147734 - RNA, 19 nt, Human
agcugugcuauuccuacca

SEQ ID NO: 147735 - RNA, 20 nt, Human
aggaaauuauaguaagagua

SEQ ID NO: 147736 - RNA, 22 nt, Human
agggauauguugaaaaaggcuu

SEQ ID NO: 147737 - RNA, 24 nt, Human
auaaggguauaacauauucugcag

SEQ ID NO: 147738 - RNA, 22 nt, Human
auacaaauuaguagaagaauuc

SEQ ID NO: 147739 - RNA, 21 nt, Human
auccaugcucuccccucucca

SEQ ID NO: 147740 - RNA, 18 nt, Human
aucucuucuuuuaauguu

SEQ ID NO: 147741 - RNA, 20 nt, Human
auggaucucuucuuuuaaug

SEQ ID NO: 147742 - RNA, 19 nt, Human
auuuuaaucuucuuuguca

SEQ ID NO: 147743 - RNA, 22 nt, Human
caaagacugcacgcaaaagaaa

SEQ ID NO: 147744 - RNA, 22 nt, Human
caaaugauuucuucaaaacacc

SEQ ID NO: 147745 - RNA, 22 nt, Human
caacugcagacuucugccuccc

SEQ ID NO: 147746 - RNA, 21 nt, Human
caagaggccagggcuuaauca

SEQ ID NO: 147747 - RNA, 18 nt, Human
caagugaaaagagcagac

SEQ ID NO: 147748 - RNA, 23 nt, Human
cacaaagcagugugcaaaaguuc

SEQ ID NO: 147749 - RNA, 18 nt, Human
cagaauacagaagacaug

SEQ ID NO: 147750 - RNA, 23 nt, Human
caggcaacgugcgcgggagaggc

SEQ ID NO: 147751 - RNA, 19 nt, Human
cagggcuaggaggggggaa

SEQ ID NO: 147752 - RNA, 18 nt, Human
caguucauucuauaccug

SEQ ID NO: 147753 - RNA, 18 nt, Human
ccaaagaguauaaauaaa

SEQ ID NO: 147754 - RNA, 22 nt, Human
ccacgcucggcggcagcaaaug

SEQ ID NO: 147755 - RNA, 18 nt, Human
ccaguggucaccugcagg

SEQ ID NO: 147756 - RNA, 25 nt, Human
ccaucuuuucacugaguuguuauuc

SEQ ID NO: 147757 - RNA, 25 nt, Human
ccccaggauccaugcucuccccucu

SEQ ID NO: 147758 - RNA, 22 nt, Human
cccuuagucucagaugcauucc

SEQ ID NO: 147759 - RNA, 25 nt, Human
ccugaagcugagacaagccgggguc

SEQ ID NO: 147760 - RNA, 19 nt, Human
cgcgggaccaaguaggugc

SEQ ID NO: 147761 - RNA, 23 nt, Human
cggcauuuuggaaaucuuuuuuu

SEQ ID NO: 147762 - RNA, 19 nt, Human
cgggaccaaguaggugcug

SEQ ID NO: 147763 - RNA, 21 nt, Human
cuaacuagcucagcccuaguu

SEQ ID NO: 147764 - RNA, 22 nt, Human
cuccgaggggcgacacgaggga

SEQ ID NO: 147765 - RNA, 24 nt, Human
cucgcggcgucucugacuucuuuc

SEQ ID NO: 147766 - RNA, 22 nt, Human
cugcaacuacuaagcuuacaaa

SEQ ID NO: 147767 - RNA, 21 nt, Human
cugcagacuucugccucccuc

SEQ ID NO: 147768 - RNA, 21 nt, Human
cugcuuuaacaaauugcauuc

SEQ ID NO: 147769 - RNA, 19 nt, Human
cugugcuauuccuaccagg

SEQ ID NO: 147770 - RNA, 23 nt, Human
cuuuucaacaaguauuuuauuuu

SEQ ID NO: 147771 - RNA, 25 nt, Human
gaagaaccugaagcugagacaagca

SEQ ID NO: 147772 - RNA, 20 nt, Human
gaagacaugcaccuucuauc

SEQ ID NO: 147773 - RNA, 19 nt, Human
gaagcugagacaagcagga

SEQ ID NO: 147774 - RNA, 18 nt, Human
gauuugcuuguuuuccuu

SEQ ID NO: 147775 - RNA, 19 nt, Human
gcagacuucugccucccuc

SEQ ID NO: 147776 - RNA, 22 nt, Human
gcagugugcaaaaguucauggg

SEQ ID NO: 147777 - RNA, 21 nt, Human
ggaggccaggcaacgugcgcg

SEQ ID NO: 147778 - RNA, 26 nt, Human
ggcauuuuggaaaucuuuuuuuuuuu

SEQ ID NO: 147779 - RNA, 18 nt, Human
ggcugcugcuccgagggg

SEQ ID NO: 147780 - RNA, 21 nt, Human
gguggcaaaauacgacuauga

SEQ ID NO: 147781 - RNA, 20 nt, Human
guaaaauaucuucaagcaaa

SEQ ID NO: 147782 - RNA, 18 nt, Human
gugcgcgggagaggcugg

SEQ ID NO: 147783 - RNA, 26 nt, Human
uaaaaaaaccaaaaauaucuuagaaa

SEQ ID NO: 147784 - RNA, 18 nt, Human
uaaaaacuaaauaaggaa

SEQ ID NO: 147785 - RNA, 23 nt, Human
uaaaagaaaagucaacaauugua

SEQ ID NO: 147786 - RNA, 19 nt, Human
uaaaauaauaugaaaggau

SEQ ID NO: 147787 - RNA, 24 nt, Human
uaagaaauauucaacaaacaauga

SEQ ID NO: 147788 - RNA, 20 nt, Human
uacaagcaaaaaacaaaaac

SEQ ID NO: 147789 - RNA, 21 nt, Human
uacaagcaaaaaacaaaaaca

SEQ ID NO: 147790 - RNA, 20 nt, Human
uacaaucaagaggccagggc

SEQ ID NO: 147791 - RNA, 20 nt, Human
uacacugccucacaaguacc

SEQ ID NO: 147792 - RNA, 21 nt, Human
uacacugccucacaaguaccu

SEQ ID NO: 147793 - RNA, 22 nt, Human
uaccuauuugauuacucagagu

SEQ ID NO: 147794 - RNA, 19 nt, Human
uacuaagcuuacaaauuca

SEQ ID NO: 147795 - RNA, 25 nt, Human
uacuuaaauaugacaaacagacuua

SEQ ID NO: 147796 - RNA, 19 nt, Human
uagaaacaaaucagucugc

SEQ ID NO: 147797 - RNA, 22 nt, Human
uagaauaaagauaagcauuuca

SEQ ID NO: 147798 - RNA, 24 nt, Human
uagaauaagaaauauaaaccauga

SEQ ID NO: 147799 - RNA, 18 nt, Human
uagaggagguaaguagaa

SEQ ID NO: 147800 - RNA, 24 nt, Human
uagcaaaaacacuuuuauguacag

SEQ ID NO: 147801 - RNA, 22 nt, Human
uagccacaggcuacuuaaauau

SEQ ID NO: 147802 - RNA, 19 nt, Human
uagccaugauuccacagau

SEQ ID NO: 147803 - RNA, 22 nt, Human
uagcuuacauguauaugacuuc

SEQ ID NO: 147804 - RNA, 22 nt, Human
uauaacauauucugcagcauga

SEQ ID NO: 147805 - RNA, 21 nt, Human
uaucuuagaaacaaaucaguc

SEQ ID NO: 147806 - RNA, 19 nt, Human
uaucuucaagcaaaugaga

SEQ ID NO: 147807 - RNA, 20 nt, Human
ucacauuuugcucuuuucug

SEQ ID NO: 147808 - RNA, 19 nt, Human
ucaucuguuagucuuaugc

SEQ ID NO: 147809 - RNA, 19 nt, Human
uccacagauguggugagua

SEQ ID NO: 147810 - RNA, 23 nt, Human
uccacagauguggugaguaaacc

SEQ ID NO: 147811 - RNA, 24 nt, Human
uccagacaaaccacguguuagagg

SEQ ID NO: 147812 - RNA, 19 nt, Human
uccagaguuugguguacac

SEQ ID NO: 147813 - RNA, 22 nt, Human
uccauaugaugggaaaggaaac

SEQ ID NO: 147814 - RNA, 21 nt, Human
uccuucuauuguacgaaucaa

SEQ ID NO: 147815 - RNA, 18 nt, Human
ucuuggagaccauuucca

SEQ ID NO: 147816 - RNA, 23 nt, Human
ugaaaaauaaaacuucuuggaga

SEQ ID NO: 147817 - RNA, 18 nt, Human
ugaaaagagcagacacug

SEQ ID NO: 147818 - RNA, 23 nt, Human
ugaagagaauuguuaauucuuca

SEQ ID NO: 147819 - RNA, 22 nt, Human
ugagagacuucaucuguuaguc

SEQ ID NO: 147820 - RNA, 21 nt, Human
ugaguaaaccaacagccauuc

SEQ ID NO: 147821 - RNA, 27 nt, Human
ugaguaaaccaacagccauuccuaaau

SEQ ID NO: 147822 - RNA, 20 nt, Human
uggaauauacacaaugacuc

SEQ ID NO: 147823 - RNA, 25 nt, Human
uggcgacccagcucuucagagaucc

SEQ ID NO: 147824 - RNA, 21 nt, Human
ugguaagaagcggucucuuua

SEQ ID NO: 147825 - RNA, 21 nt, Human
ugguaggaaaagcagcaaugc

SEQ ID NO: 147826 - RNA, 23 nt, Human
uguggugaguaaaccaacagcca

SEQ ID NO: 147827 - RNA, 28 nt, Human
uuagcaaaaacacuuuuauguacagaag

SEQ ID NO: 147828 - RNA, 18 nt, Human
uucaacuuaauguucuau

SEQ ID NO: 147829 - RNA, 22 nt, Human
uucacauaauaaaauauauccu

SEQ ID NO: 147830 - RNA, 24 nt, Human
uucccaauacaagcaaaaaacaaa

SEQ ID NO: 147831 - RNA, 22 nt, Human
uuccucuucccuuagcuuaggg

SEQ ID NO: 147832 - RNA, 20 nt, Human
uuccuuuugaagccauguga

SEQ ID NO: 147833 - RNA, 19 nt, Human
uucuucaaggcugguuucu

SEQ ID NO: 147834 - RNA, 23 nt, Human
uugcauauaagcuacaacuuuac

SEQ ID NO: 147835 - RNA, 21 nt, Human
uuugguguacacuuaggaaau

SEQ ID NO: 147836 - RNA, 24 nt, Human
uuuguaauuaguagacauggucuu

SEQ ID NO: 147837 - RNA, 20 nt, Human
uuuuuuuuuguaauuaguag

SEQ ID NO: 147838 - RNA, 18 nt, Human
aaaacaaaauggcacccc

SEQ ID NO: 147839 - RNA, 22 nt, Human
aauaacuuuugaaaacaaaaug

SEQ ID NO: 147840 - RNA, 18 nt, Human
aaugaauuucucuucuug

SEQ ID NO: 147841 - RNA, 21 nt, Human
aaugaauuucucuucuugguu

SEQ ID NO: 147842 - RNA, 24 nt, Human
acuuguucaugaaagccaaaacag

SEQ ID NO: 147843 - RNA, 18 nt, Human
aggugggugcgcagaaga

SEQ ID NO: 147844 - RNA, 18 nt, Human
cacacuuuaaaaacugua

SEQ ID NO: 147845 - RNA, 19 nt, Human
cagagcucucucauaaacu

SEQ ID NO: 147846 - RNA, 21 nt, Human
ccaaaaucccaacuguagaac

SEQ ID NO: 147847 - RNA, 19 nt, Human
cgacugaacuaagaugcag

SEQ ID NO: 147848 - RNA, 29 nt, Human
cgaggcacaaaggaugaaaaggauuuauu

SEQ ID NO: 147849 - RNA, 22 nt, Human
cuuauacauucuaaguuacuac

SEQ ID NO: 147850 - RNA, 25 nt, Human
gagaccucuuccgacuccuuucugg

SEQ ID NO: 147851 - RNA, 18 nt, Human
gaggcacaaaggaugaaa

SEQ ID NO: 147852 - RNA, 22 nt, Human
gauaaauaugaaaaauaugucc

SEQ ID NO: 147853 - RNA, 19 nt, Human
gcagaagaggcuggcuaca

SEQ ID NO: 147854 - RNA, 22 nt, Human
ggcuacagagcucucucauaaa

SEQ ID NO: 147855 - RNA, 20 nt, Human
guagaaccauccucagagaa

SEQ ID NO: 147856 - RNA, 18 nt, Human
guuacuacucuaagagcc

SEQ ID NO: 147857 - RNA, 21 nt, Human
uaagaugcagcaggugggugc

SEQ ID NO: 147858 - RNA, 20 nt, Human
uaucacaguaggaaaggcac

SEQ ID NO: 147859 - RNA, 20 nt, Human
uaugagaccaucuaaguaac

SEQ ID NO: 147860 - RNA, 25 nt, Human
uauucaaaauauccaauuacuugac

SEQ ID NO: 147861 - RNA, 18 nt, Human
ucauguaaaaacacuugg

SEQ ID NO: 147862 - RNA, 26 nt, Human
ugcagauuucugucuucaaauuguau

SEQ ID NO: 147863 - RNA, 21 nt, Human
uggaaguagggcuuauuagaa

SEQ ID NO: 147864 - RNA, 21 nt, Human
ugggugcgcagaagaggcugg

SEQ ID NO: 147865 - RNA, 18 nt, Human
uucuugguugaugauggc

SEQ ID NO: 147866 - RNA, 21 nt, Human
aaaaagcuguaaacccacccu

SEQ ID NO: 147867 - RNA, 24 nt, Human
aaacccacccuagaaccaucuaag

SEQ ID NO: 147868 - RNA, 22 nt, Human
aaagaacaaagauagcccuuuc

SEQ ID NO: 147869 - RNA, 22 nt, Human
aaauggugagggcuauaaagcu

SEQ ID NO: 147870 - RNA, 24 nt, Human
aaguaguccacaaaaaaauugagc

SEQ ID NO: 147871 - RNA, 22 nt, Human
acccuagaaccaucuaaggaau

SEQ ID NO: 147872 - RNA, 20 nt, Human
accuacaggauuacauauaa

SEQ ID NO: 147873 - RNA, 19 nt, Human
agaacaaagauagcccuuu

SEQ ID NO: 147874 - RNA, 20 nt, Human
agccaguuucaagagacuaa

SEQ ID NO: 147875 - RNA, 19 nt, Human
agggacccuacugccgccc

SEQ ID NO: 147876 - RNA, 24 nt, Human
caaaacucaggaguuggcucaaau

SEQ ID NO: 147877 - RNA, 27 nt, Human
caaacuuuccgcgcguuggcucucuca

SEQ ID NO: 147878 - RNA, 22 nt, Human
caaccaauuuacauaaaaagcu

SEQ ID NO: 147879 - RNA, 18 nt, Human
cagauuccuaauuuaccc

SEQ ID NO: 147880 - RNA, 19 nt, Human
cauaaacauauuuacagug

SEQ ID NO: 147881 - RNA, 22 nt, Human
cauguucccaggcuggccuuga

SEQ ID NO: 147882 - RNA, 19 nt, Human
cauuuucccuuuauuggag

SEQ ID NO: 147883 - RNA, 20 nt, Human
ccaaaacuagaccuuucaac

SEQ ID NO: 147884 - RNA, 21 nt, Human
ccccuggccacgucucagccc

SEQ ID NO: 147885 - RNA, 18 nt, Human
cccgccccgcgcgcaggc

SEQ ID NO: 147886 - RNA, 20 nt, Human
ccgccccgacggccuggaca

SEQ ID NO: 147887 - RNA, 24 nt, Human
ccuccuuaggcaaauggugagggc

SEQ ID NO: 147888 - RNA, 19 nt, Human
ccuugauggggaaggugga

SEQ ID NO: 147889 - RNA, 22 nt, Human
cgcgcgcaggcauggaggcgca

SEQ ID NO: 147890 - RNA, 19 nt, Human
cuacaaauaggacuauaaa

SEQ ID NO: 147891 - RNA, 19 nt, Human
cuacugccgccccgacggc

SEQ ID NO: 147892 - RNA, 18 nt, Human
cucacuauauauauauau

SEQ ID NO: 147893 - RNA, 26 nt, Human
cucccaaaacuagaccuuucaaccaa

SEQ ID NO: 147894 - RNA, 24 nt, Human
cugcauuauaaaaauauauccauu

SEQ ID NO: 147895 - RNA, 26 nt, Human
cuuacuacggcuuuuuuccucccaaa

SEQ ID NO: 147896 - RNA, 20 nt, Human
gacagccagccguguucccc

SEQ ID NO: 147897 - RNA, 24 nt, Human
gccccgacggccuggacagccagc

SEQ ID NO: 147898 - RNA, 26 nt, Human
gccucugccgcugccaccugagugac

SEQ ID NO: 147899 - RNA, 21 nt, Human
gcgcagccacugacgccugcc

SEQ ID NO: 147900 - RNA, 21 nt, Human
gcuuggagcucccaagaaggc

SEQ ID NO: 147901 - RNA, 18 nt, Human
ggaaguaccaaccuacag

SEQ ID NO: 147902 - RNA, 18 nt, Human
guuaccacacagggggac

SEQ ID NO: 147903 - RNA, 21 nt, Human
uaaaaaguccauaguugaaga

SEQ ID NO: 147904 - RNA, 22 nt, Human
uaaaacauaaacauauuuacag

SEQ ID NO: 147905 - RNA, 23 nt, Human
uaaaacuacggacauaaaccguu

SEQ ID NO: 147906 - RNA, 25 nt, Human
uaaaacuacggacauaaaccguuau

SEQ ID NO: 147907 - RNA, 21 nt, Human
uaaaugauuuagacuugaaag

SEQ ID NO: 147908 - RNA, 24 nt, Human
uaacaaagaacaaagauagcccuu

SEQ ID NO: 147909 - RNA, 22 nt, Human
uaagauuucauuaggcuuaaaa

SEQ ID NO: 147910 - RNA, 19 nt, Human
uacccgccagggacaaaaa

SEQ ID NO: 147911 - RNA, 18 nt, Human
uaccuauaaucaguuugg

SEQ ID NO: 147912 - RNA, 22 nt, Human
uacuacggcuuuuuuccuccca

SEQ ID NO: 147913 - RNA, 21 nt, Human
uaggcuuaaaaaguccauagu

SEQ ID NO: 147914 - RNA, 24 nt, Human
ucagcuuuuucuagaaaucaguuu

SEQ ID NO: 147915 - RNA, 24 nt, Human
uccccuggccacgucucagcccgg

SEQ ID NO: 147916 - RNA, 24 nt, Human
ucccgccccgcgcgcaggcaugga

SEQ ID NO: 147917 - RNA, 22 nt, Human
ucccuuuauuggagguaaaagu

SEQ ID NO: 147918 - RNA, 20 nt, Human
ucuguacaccaccaacccaa

SEQ ID NO: 147919 - RNA, 24 nt, Human
ugagcgaagaacaaacuuuucaag

SEQ ID NO: 147920 - RNA, 23 nt, Human
ugagggcuauaaagcuuggccag

SEQ ID NO: 147921 - RNA, 22 nt, Human
ugccacuccauguucccaggcc

SEQ ID NO: 147922 - RNA, 24 nt, Human
ugcccccaaauccagcuuaaauuu

SEQ ID NO: 147923 - RNA, 23 nt, Human
uggagcucccaagaaggcaagga

SEQ ID NO: 147924 - RNA, 24 nt, Human
uguacaccaccaacccaaauggau

SEQ ID NO: 147925 - RNA, 24 nt, Human
uucaagagacuaacaaagaacaaa

SEQ ID NO: 147926 - RNA, 18 nt, Human
uuucuagaacaauacagu

SEQ ID NO: 147927 - RNA, 23 nt, Human
aaacaucguuucugccuuccucg

SEQ ID NO: 147928 - RNA, 23 nt, Human
aaacugaaaaggaaaguuucuag

SEQ ID NO: 147929 - RNA, 18 nt, Human
aagcagugaaccaugcag

SEQ ID NO: 147930 - RNA, 26 nt, Human
acuuguauuucuggaaacugaaacaa

SEQ ID NO: 147931 - RNA, 25 nt, Human
agccagucugacagcgcgcugcaca

SEQ ID NO: 147932 - RNA, 19 nt, Human
agucuggagugcaggggag

SEQ ID NO: 147933 - RNA, 19 nt, Human
caccgcguguaacguccug

SEQ ID NO: 147934 - RNA, 22 nt, Human
cagaauacuguugcuaaacauc

SEQ ID NO: 147935 - RNA, 24 nt, Human
cagucugacagcgcgcugcacacc

SEQ ID NO: 147936 - RNA, 21 nt, Human
cccugccucaacuacguaagc

SEQ ID NO: 147937 - RNA, 21 nt, Human
ccugcgagccagucugacagc

SEQ ID NO: 147938 - RNA, 19 nt, Human
cuccccgcacuccacuucc

SEQ ID NO: 147939 - RNA, 19 nt, Human
cuuguauuucuggaaacug

SEQ ID NO: 147940 - RNA, 18 nt, Human
gaaaugaguaagaaaggu

SEQ ID NO: 147941 - RNA, 20 nt, Human
gccaauuaucuaacuuguau

SEQ ID NO: 147942 - RNA, 20 nt, Human
gcgcugcacaccuccgcacc

SEQ ID NO: 147943 - RNA, 22 nt, Human
gcgcugcacaccuccgcacccc

SEQ ID NO: 147944 - RNA, 24 nt, Human
ggaagccagaugcagauucagcaa

SEQ ID NO: 147945 - RNA, 24 nt, Human
guagccaauuaucuaacuuguauu

SEQ ID NO: 147946 - RNA, 23 nt, Human
uaaaaagcuguuuaggacccaaa

SEQ ID NO: 147947 - RNA, 22 nt, Human
uaagaacaauuuaaguugggau

SEQ ID NO: 147948 - RNA, 21 nt, Human
uacagaauuucaguuuacaaa

SEQ ID NO: 147949 - RNA, 21 nt, Human
uagaugggacugaaaugagua

SEQ ID NO: 147950 - RNA, 19 nt, Human
uauuugaaaagaugcugaa

SEQ ID NO: 147951 - RNA, 21 nt, Human
ucacuggggugucaagcagcu

SEQ ID NO: 147952 - RNA, 22 nt, Human
uccugcugcggagccccagggg

SEQ ID NO: 147953 - RNA, 20 nt, Human
ucugccuuccucguguucuc

SEQ ID NO: 147954 - RNA, 20 nt, Human
ucuuccggcgcacuccccgc

SEQ ID NO: 147955 - RNA, 22 nt, Human
ugaaaugaguaagaaagguucu

SEQ ID NO: 147956 - RNA, 24 nt, Human
ugaaaugaguaagaaagguucucc

SEQ ID NO: 147957 - RNA, 19 nt, Human
ugaagacagguggacuugg

SEQ ID NO: 147958 - RNA, 21 nt, Human
ugccucaacuacguaagcugc

SEQ ID NO: 147959 - RNA, 18 nt, Human
ugccucuuacaaggcacc

SEQ ID NO: 147960 - RNA, 24 nt, Human
uggcagagggguguggcugcuuuu

SEQ ID NO: 147961 - RNA, 21 nt, Human
uuggccugacucacuggggug

SEQ ID NO: 147962 - RNA, 26 nt, Human
uuuaaguccuuacuccauaaaucuuc

SEQ ID NO: 147963 - RNA, 21 nt, Human
uuuguggcagagggguguggc

SEQ ID NO: 147964 - RNA, 18 nt, Human
agacgcaaccaggucacu

SEQ ID NO: 147965 - RNA, 23 nt, Human
aguggcuuuuauugguagagccu

SEQ ID NO: 147966 - RNA, 24 nt, Human
caacaaguuaagcccugcugcucu

SEQ ID NO: 147967 - RNA, 25 nt, Human
caaccaggucacuaagaggcuccaa

SEQ ID NO: 147968 - RNA, 18 nt, Human
cacucccacauugcaagg

SEQ ID NO: 147969 - RNA, 27 nt, Human
caggcaacaguaucaaggauuuuuuuu

SEQ ID NO: 147970 - RNA, 19 nt, Human
uaagcaaucugcuuaggac

SEQ ID NO: 147971 - RNA, 19 nt, Human
uaagguagcugccuucagc

SEQ ID NO: 147972 - RNA, 21 nt, Human
uaaguuccugacacagacgca

SEQ ID NO: 147973 - RNA, 24 nt, Human
uaaguuccugacacagacgcaacc

SEQ ID NO: 147974 - RNA, 19 nt, Human
uaucccaguaagguauuca

SEQ ID NO: 147975 - RNA, 26 nt, Human
ucagcagcaacacucaagucuccucu

SEQ ID NO: 147976 - RNA, 25 nt, Human
ugacuaaaaaggcaggcaacaguau

SEQ ID NO: 147977 - RNA, 23 nt, Human
ugcuggaugugugcccuuguuac

SEQ ID NO: 147978 - RNA, 19 nt, Human
uggacuccugugcacuccc

SEQ ID NO: 147979 - RNA, 18 nt, Human
uguuauguuuaacacacu

SEQ ID NO: 147980 - RNA, 24 nt, Human
uuaacacacuacugaaccagaaag

SEQ ID NO: 147981 - RNA, 24 nt, Human
uuuaacacacuacugaaccagaaa

SEQ ID NO: 147982 - RNA, 22 nt, Human
uuuuuuuuuuuuuugaaccuuc

SEQ ID NO: 147983 - RNA, 18 nt, Human
uuuuuuuuuuuuuuuuug

SEQ ID NO: 147984 - RNA, 20 nt, Human
aacauauacaagcagcagaa

SEQ ID NO: 147985 - RNA, 23 nt, Human
aagcuguuccucuggccuuccuc

SEQ ID NO: 147986 - RNA, 23 nt, Human
acaaagcuguuccucuggccuuc

SEQ ID NO: 147987 - RNA, 21 nt, Human
acaagcagcagaaagagccaa

SEQ ID NO: 147988 - RNA, 20 nt, Human
acugcucucugcuguucccu

SEQ ID NO: 147989 - RNA, 21 nt, Human
acuuccacaucccaacuccac

SEQ ID NO: 147990 - RNA, 20 nt, Human
agaaagagccaacugcucuc

SEQ ID NO: 147991 - RNA, 18 nt, Human
agccuggaugguggucac

SEQ ID NO: 147992 - RNA, 22 nt, Human
aucacacccaaaggagcaggca

SEQ ID NO: 147993 - RNA, 20 nt, Human
cacucaucccucugcagcua

SEQ ID NO: 147994 - RNA, 21 nt, Human
cacuugucccagcccaggagc

SEQ ID NO: 147995 - RNA, 21 nt, Human
ccacuuccacaucccaacucc

SEQ ID NO: 147996 - RNA, 19 nt, Human
ccuccaacugccgggccug

SEQ ID NO: 147997 - RNA, 22 nt, Human
ccucccuaggcagaagcuuugu

SEQ ID NO: 147998 - RNA, 23 nt, Human
ccucugcagcuaguuccucacuu

SEQ ID NO: 147999 - RNA, 19 nt, Human
cucagccuggauggugguc
